(19) United States
(12) Patent Application Publication
(10) Pub. No.: US 2017/0073685 A1
(43) Pub. Date: Mar. 16, 2017

(54) CRISPR/CAS-RELATED METHODS AND COMPOSITIONS FOR TREATING HERPES SIMPLEX VIRUS TYPE 1 (HSV-1)

(71) Applicant: EDITAS MEDICINE, INC., Cambridge, MA (US)

(72) Inventors: Morgan L. Maeder, Jamaica Plain, MA (US); Ari E. Friedland, Boston, MA (US); Grant G. Welstead, Cambridge, MA (US); David A. Bumcrot, Belmont, MA (US)

(21) Appl. No.: 15/281,579

(22) Filed: Sep. 30, 2016

Related U.S. Application Data
(63) Continuation of application No. PCT/US2015/023916, filed on Apr. 1, 2015.
(60) Provisional application No. 61/973,793, filed on Apr. 1, 2014.

(51) Int. Cl. C12N 15/113; C12N 15/85

(52) U.S. Cl. CPC C12N 15/1133; C12N 15/85; C12N 2310/3513; C12N 2800/80

(57) ABSTRACT

CRISPR/CAS-related compositions and methods for treatment of HSV-1 are disclosed.

### REFERENCE TO RELATED APPLICATIONS

[0001] This application is a continuation of PCT International Patent Application No. PCT/US2015/023916, filed on Apr. 1, 2015, which claims the benefit of U.S. Provisional Application No. 61/973,793, filed Apr. 1, 2014, the contents of each of which are hereby incorporated by reference in their entirety herein, and to each of which priority is claimed.

### SEQUENCE LISTING

[0002] The specification further incorporates by reference the Sequence Listing submitted herewith via EFS on Sep. 30, 2016. Pursuant to 37 C.F.R. §1.52(e)(5), the Sequence Listing text file, identified as 084177.0105USSEQ.txt, is 4,747,781 bytes and was created on Sep. 30, 2016. The Sequence Listing, electronically filed herewith, does not extend beyond the scope of the specification and thus does not contain new matter.

### FIELD OF THE INVENTION

[0003] The invention relates to CRISPR/CAS-related methods and components for editing of a target nucleic acid sequence, or modulating expression of a target nucleic acid sequence, and applications thereof in connection with herpes simplex virus type 1 (HSV-1).

### BACKGROUND

[0004] Herpes simplex virus type 1 (HSV-1) causes intermittent sores of the mouth and mucous membranes. It is a ubiquitous and highly contagious pathogen. The majority of the population develops the infection during childhood. By adulthood, up to 80% of the population in the United States is infected with HSV-1. New HSV-1 infections occur at a rate of 1.6 cases per 100 person years (Langenberg et al., 1999; New England Journal of Medicine 341:1432-1438). The most severe manifestations of HSV-1 infection include, e.g., keratitis, encephalitis, and meningitis.

[0005] Infection of HSV-1 is permanent. After initial infection with HSV-1, the virus establishes latent infection that lasts for the lifetime of the host. Initial infection with HSV-1 generally causes painful blistering of the mucous membranes of the lips and mouth or genital region. After initial infection, HSV-1 establishes latent infection in all subjects. Following establishment of latent infection, reactivation of HSV-1 can occur at any point during the lifetime of the subject. Reactivation of HSV-1 is more likely to occur in the elderly and in immunocompromised individuals, including in those who have cancer, those who have HIV/AIDs and in those who have undergone solid organ or hematopoietic stem cell transplant.

[0006] HSV-1 encephalitis and HSV-1 meningitis are among the most severe and debilitating types of HSV infections. HSV encephalitis is the most common form of non-epidemic encephalitis. The annual incidence of HSV encephalitis is 0.2-0.4 in 100,000 individuals (Saba et al., 2012; British Medical Journal 344: e3166). Subjects who develop HSV-1 encephalitis and/or meningitis commonly have permanent neurologic sequelae.

[0007] Ocular herpes can affect the epithelium of the eye, causing keratitis, or the retina, where it may lead to acute retinal necrosis. Keratitis is the most common form of ocular herpes. HSV-1 keratitis is the most common cause of infectious blindness in the developed world (Dawson et. al., Suvey of Ophthalmology 1976; 21(2): 121-135). Worldwide, there are approximately 1.5 million cases of HSV-related ophthalmologic disease and 40,000 cases of HSV-related blindness or severe monocular visual impairment annually (Krawczyk et. al., Public Library of Science One 2015; 10(1): e0116800. Farooq and Shukla 2012; Survey of Ophthalmology 57(5): 448-462.). HSV-1 retinitis most often affects adults and can cause acute retinal necrosis (ARN). ARN causes permanent visual damage in more than 50% of subjects (Roy et al., Ocular Immunology and Inflammation 2014; 22(3):170-174).

[0008] Newborns are a population at particular risk for developing severe HSV-1 infections. The disease is transmitted from the mother to the fetus during childbirth. The chance of maternal-fetal transmission is highest in cases where the mother developed primary HSV infection during pregnancy. The incidence of neonatal herpes is approximately 4-30 per 100,000 births (Brown Z A, et al., 2003; Journal of the American Medical Association; 289(2): 203-209. Dinh T-H, et al., 2008; Sexually Transmitted Disease; 35(1): 19-21). Neonates can develop severe HSV-1 keratitis, retinitis, encephalitis and/or meningitis. Neonatal ocular herpes can result in immediate, permanent vision loss. Ocular HSV-1 puts neonates at risk for later developing ARN. Untreated HSV-1 encephalitis leads to death in 50% of neonates. Even with prompt treatment with antiviral therapy, the majority of neonates who contract HSV-1 encephalitis or meningitis will suffer from permanent neurologic sequelae.

[0009] There are no curative or preventative treatments for HSV-1. Therapy is primarily given during acute infection. Primary HSV-1 infections can be treated with antiviral therapy, including acyclovir, valacyclovir and famciclovir. These therapies may reduce viral shedding, decrease pain and improve healing time of lesions. Re-activated, latent infections may resolve without treatment (may be self-limiting) or may be treated with anti-viral therapy. Antiviral therapy may be given prophylactically in certain situations, including during childbirth in a mother with a recent HSV-1 infection or reactivation.

[0010] Vaccines are in development for the prevention of HSV-1 infection. However, in controlled clinical trials, vaccination efficacy has been limited. A recent vaccine for both HSV-1 and HSV-2 infections was only 35% effective in preventing HSV-1 infection (Belshe et al., 2012; New England Journal of Medicine 366(1): 34-43).

[0011] Despite advances in antiretroviral therapies, there remains a need for the treatment and prevention of HSV-1 infection, particularly the treatment and prevention of HSV-1 associated keratitis, retinitis, encephalitis and meningitis. A therapy that can cure, prevent, or treat HSV-1 infections would be superior to the current standard of care.

### SUMMARY OF THE INVENTION

[0012] Methods and compositions discussed herein, provide for the treatment or prevention of herpes simplex virus type 1 (HSV-1), which causes intermittent sores of the mouth and mucous membranes. HSV-1 is contained within an icosahedral particle. The virus enters the host via infection of epithelial cells within the skin and mucous membranes. The virus produces immediate early genes within the epithelial cells, which encode enzymes and binding proteins necessary for viral synthesis. After primary infection, the virus travels up sensory nerve axons via retrograde transport to the sensory dorsal root ganglion (DRG). Within the DRG, it establishes a latent infection. The latent infection persists for the lifetime of the host. Within the DRG cell, the virus uncoats, viral DNA is transported into the nucleus, and key viral RNAs associated with latency are transcribed (including the LAT RNAs).

[0013] Methods and compositions discussed herein provide for treatment or prevention of herpes simplex virus type 1 (HSV-1), or its symptoms, e.g., by knocking out one or more of the HSV-1 viral genes, e.g., by knocking out one or more of UL19, UL30, UL48 and/or UL54 gene(s). In one aspect, methods and compositions discussed herein may be used to alter one or more of UL19, UL30, UL48 and/or UL54 gene(s) to treat or prevent HSV-1 by targeting the gene, e.g., the non-coding or coding regions, e.g., the promoter region, or a transcribed sequence, e.g., intronic or exonic sequence. In an embodiment, coding sequence, e.g., a coding region, e.g., an early coding region, of one or more of UL19, UL30, UL48 and/or UL54 gene(s), is targeted for alteration and knockout of expression.

[0014] In another aspect, the methods and compositions discussed herein may be used to alter one or or more of UL19, UL30, UL48 and/or UL54 gene(s) to treat or prevent herpes simplex virus type 1 (HSV-1) by targeting the coding sequence of one or more of UL19, UL30, UL48 and/or UL54 gene(s). In one embodiment, the gene, e.g., the coding sequence of one or more of the UL19, UL30, UL48 and/or UL54 gene(s), are targeted to knockout one or more of UL19, UL30, UL48 and/or UL54 gene(s), e.g., to eliminate expression of one or more of UL19, UL30, UL48 and/or UL54 gene(s), e.g., to knockout one or more copies of one or more of UL19, UL30, UL48 and/or UL54 gene(s), e.g., by induction of an alteration comprising a deletion or mutation in one or more of UL19, UL30, UL48 and/or UL54 gene(s). In an embodiment, the method provides an alteration that comprises an insertion or deletion. As described herein, a targeted knockout approach is mediated by non-homologous end joining (NHEJ) using a CRISPR/Cas system comprising an enzymatically active Cas9 (eaCas9) molecule.

[0015] In one embodiment, an early coding sequence of one or more of UL19, UL30, UL48 and/or UL54 gene(s) are targeted to knockout one or more of UL19, UL30, UL48 and/or UL54 gene(s). In an embodiment, targeting affects one or more copies of the UL19, UL30, UL48 and/or UL54 gene(s). In an embodiment, a targeted knockout approach reduces or eliminates expression of one or more functional UL19, UL30, UL48 and/or UL54 gene product(s). In an embodiment, the method provides an alteration that comprises an insertion or deletion.

[0016] In another aspect, the methods and compositions discussed herein may be used to alter one or more of UL19, UL30, UL48 and/or UL54 gene(s) to treat or prevent HSV-1 by targeting non-coding sequence of the UL19, UL30, UL48 and/or UL54 gene(s), e.g., promoter, an enhancer, an intron, 3′UTR, and/or polyadenylation signal. In one embodiment, the gene(s), e.g., the non-coding sequence of one or more UL19, UL30, UL48 and/or UL54 gene(s), is targeted to knockout the gene(s), e.g., to eliminate expression of the gene(s), e.g., to knockout one or more copies of the UL19, UL30, UL48 and/or UL54 gene(s), e.g., by induction of an alteration comprising a deletion or mutation in the UL19, UL30, UL48 and/or UL54 gene(s). In an embodiment, the method provides an alteration that comprises an insertion or deletion.

[0017] “HSV-1 target UL19 position”, as used herein, refers to a position in the UL19 gene, which if altered by NHEJ-mediated alteration, results in reduction or elimination of expression of functional UL19 gene product. In an embodiment, the position is in the UL19 gene coding region, e.g., an early coding region.

[0018] “HSV-1 target UL30 position”, as used herein, refers to a position in the UL30 gene, which if altered by NHEJ-mediated alteration, results in reduction or elimination of expression of functional UL30 gene product. In an embodiment, the position is in the UL30 gene coding region, e.g., an early coding region.

[0019] “HSV-1 target UL48 position”, as used herein, refers to a position in the UL48 gene, which if altered by NHEJ-mediated alteration, results in reduction or elimination of expression of functional UL48 gene product. In an embodiment, the position is in the UL48 gene coding region, e.g., an early coding region.

[0020] “HSV-1 target UL54 position”, as used herein, refers to a position in the UL54 gene, which if altered by NHEJ-mediated alteration, results in reduction or elimination of expression of functional UL54 gene product. In an embodiment, the position is in the UL54 gene coding region, e.g., an early coding region.

[0021] “HSV-1 target position”, as used herein, refers to any of a HSV-1 target UL19 target position, a HSV-1 target UL30 target position, a HSV-1 target UL48 target position and/or a HSV-1 target UL54 target position.

[0022] In one aspect, disclosed herein is a gRNA molecule, e.g., an isolated or non-naturally occurring gRNA molecule, comprising a targeting domain which is complementary with a target domain from the UL19, UL30, UL48 or UL54 gene.

[0023] In an embodiment, the targeting domain of the gRNA molecule is configured to provide a cleavage event, e.g., a double strand break or a single strand break, sufficiently close to a HSV-1 target position in the UL19, UL30, UL48 or UL54 gene to allow alteration, e.g., alteration associated with NHEJ, of a HSV-1 target position in the UL19, UL30, UL48 or UL54 gene. In an embodiment, the targeting domain is configured such that a cleavage event, e.g., a double strand or single strand break, is positioned within 1, 2, 3, 4, 5, 10, 15, 20, 25, 30, 35, 40, 45, 50, 60, 70, 80, 90, 100, 150 or 200 nucleotides of a HSV-1 target position.

[0024] The break, e.g., a double strand or single strand break, can be positioned upstream or downstream of a HSV-1 target position in the UL19, UL30, UL48 or UL54 gene. In an embodiment, the targeting domain of the gRNA molecule is configured to provide a cleavage event selected from a double strand break and a single strand break, within 500 (e.g., within 500, 400, 300, 250, 200, 150, 100, 80, 60, 40, 20, or 10) nucleotides of a HSV-1 target position.

[0025] In an embodiment, a second gRNA molecule comprising a second targeting domain is configured to provide a cleavage event, e.g., a double strand break or a single strand break, sufficiently close to the HSV-1 target position in the UL19, UL30, UL48 or UL54 gene, to allow alteration, e.g., alteration associated with NHEJ, of the HSV-1 target position in the UL19, UL30, UL48 or UL54 gene, either alone or in combination with the break positioned by said first gRNA molecule. In an embodiment, the targeting domains of the first and second gRNA molecules are configured such that a cleavage event, e.g., a double strand or single strand break, is positioned, independently for each of the gRNA molecules, within 1, 2, 3, 4, 5, 10, 15, 20, 25, 30, 35, 40, 45, 50, 60, 70, 80, 90, 100, 150 or 200 nucleotides of the target position. In an embodiment, the breaks, e.g., double strand or single strand breaks, are positioned on both sides of a nucleotide of a HSV-1 target position in the UL19, UL30, UL48 or UL54 gene. In an embodiment, the breaks, e.g., double strand or single strand breaks, are positioned on one side, e.g., upstream or downstream, of a nucleotide of a HSV-1 target position in the UL19, UL30, UL48 or UL54 gene. In an embodiment, the targeting domain of the first and/or second gRNA molecule is configured to provide a cleavage event selected from a double strand break and a single strand break, within 500 (e.g., within 500, 400, 300, 250, 200, 150, 100, 80, 60, 40, 20, or 10) nucleotides of a HSV-1 target position.

[0026] In an embodiment, a single strand break is accompanied by an additional single strand break, positioned by a second gRNA molecule, as discussed below. For example, the targeting domains are configured such that a cleavage event, e.g., the two single strand breaks, are positioned within 1, 2, 3, 4, 5, 10, 15, 20, 25, 30, 35, 40, 45, 50, 60, 70, 80, 90, 100, 150 or 200 nucleotides of a HSV-1 target position. In an embodiment, the first and second gRNA molecules are configured such, that when guiding a Cas9 molecule, e.g., a Cas9 nickase, a single strand break will be accompanied by an additional single strand break, positioned by a second gRNA, sufficiently close to one another to result in alteration of a HSV-1 target position in the UL19, UL30, UL48 or UL54 gene. In an embodiment, the first and second gRNA molecules are configured such that a single strand break positioned by said second gRNA is within 10, 20, 30, 40, or 50 nucleotides of the break positioned by said first gRNA molecule, e.g., when the Cas9 molecule is a nickase. In an embodiment, the two gRNA molecules are configured to position cuts at the same position, or within a few nucleotides of one another, on different strands, e.g., essentially mimicking a double strand break.

[0027] In an embodiment, a double strand break can be accompanied by an additional double strand break, positioned by a second gRNA molecule, as is discussed below. For example, the targeting domain of a first gRNA molecule is configured such that a double strand break is positioned upstream of a HSV-1 target position in the UL19, UL30, UL48 or UL54 gene, e.g., within 1, 2, 3, 4, 5, 10, 15, 20, 25, 30, 35, 40, 45, 50, 60, 70, 80, 90, 100, 150 or 200 nucleotides of the target position; and the targeting domain of a second gRNA molecule is configured such that a double strand break is positioned downstream of a HSV-1 target position in the UL19, UL30, UL48 or UL54 gene, e.g., within 1, 2, 3, 4, 5, 10, 15, 20, 25, 30, 35, 40, 45, 50, 60, 70, 80, 90, 100, 150 or 200 nucleotides of the target position.

[0028] In an embodiment, a double strand break can be accompanied by two additional single strand breaks, positioned by a second gRNA molecule and a third gRNA molecule. For example, the targeting domain of a first gRNA molecule is configured such that a double strand break is positioned upstream of a HSV-1 target position in the UL19, UL30, UL48 or UL54 gene, e.g., within 1, 2, 3, 4, 5, 10, 15, 20, 25, 30, 35, 40, 45, 50, 60, 70, 80, 90, 100, 150 or 200 nucleotides of the target position; and the targeting domains of a second and third gRNA molecule are configured such that two single strand breaks are positioned downstream of a HSV-1 target position in the UL19, UL30, UL48 or UL54 gene, e.g., within 1, 2, 3, 4, 5, 10, 15, 20, 25, 30, 35, 40, 45, 50, 60, 70, 80, 90, 100, 150 or 200 nucleotides of the target position. In an embodiment, the targeting domain of the first, second and third gRNA molecules are configured such that a cleavage event, e.g., a double strand or single strand break, is positioned, independently for each of the gRNA molecules.

[0029] In an embodiment, a first and second single strand breaks can be accompanied by two additional single strand breaks positioned by a third gRNA molecule and a fourth gRNA molecule. For example, the targeting domain of a first and second gRNA molecule are configured such that two single strand breaks are positioned upstream of a HSV-1 target position in the UL19, UL30, UL48 or UL54 gene, e.g., within 1, 2, 3, 4, 5, 10, 15, 20, 25, 30, 35, 40, 45, 50, 60, 70, 80, 90, 100, 150 or 200 nucleotides of the target position; and the targeting domains of a third and fourth gRNA molecule are configured such that two single strand breaks are positioned downstream of a HSV-1 target position in the UL19, UL30, UL48 or UL54 gene, e.g., within 1, 2, 3, 4, 5, 10, 15, 20, 25, 30, 35, 40, 45, 50, 60, 70, 80, 90, 100, 150 or 200 nucleotides of the target position. In an embodiment, the targeting domain of the first, second, third, and/or fourth gRNA molecule is configured to provide a cleavage event selected from a double strand break and a single strand break, within 500 (e.g., within 500, 400, 300, 250, 200, 150, 100, 80, 60, 40, 20, or 10) nucleotides of a HSV-1 target position.

[0030] It is contemplated herein that, in an embodiment, when multiple gRNAs are used to generate (1) two single stranded breaks in close proximity, (2) two double stranded breaks, e.g., flanking a HSV-1 target position (e.g., to remove a piece of DNA, e.g., to create a deletion mutation) or to create more than one indel in the gene, e.g., in a coding region, e.g., an early coding region, (3) one double stranded break and two paired nicks flanking a HSV-1 target position (e.g., to remove a piece of DNA, e.g., to insert a deletion) or (4) four single stranded breaks, two on each side of a position, that they are targeting the same HSV-1 target position. It is further contemplated herein that multiple gRNAs may be used to target more than one HSV-1 target position in the same gene, e.g., one or more of UL19, UL30, UL48 and/or UL54 gene(s).

[0031] In an embodiment, the targeting domain of the first gRNA molecule and the targeting domain of the second gRNA molecules are complementary to opposite strands of the target nucleic acid molecule. In an embodiment, the gRNA molecule and the second gRNA molecule are configured such that the PAMs are oriented outward.

[0032] In an embodiment, the targeting domain of a gRNA molecule is configured to avoid unwanted target chromosome elements, such as repeat elements, e.g., Alu repeats, in the target domain. The gRNA molecule may be a first, second, third and/or fourth gRNA molecule, as described herein.

[0033] In an embodiment, the targeting domain of a gRNA molecule is configured to position a cleavage event sufficiently far from a preselected nucleotide, e.g., the nucleotide of a coding region, such that the nucleotide is not altered. In an embodiment, the targeting domain of a gRNA molecule is configured to position an intronic cleavage event sufficiently far from an intron/exon border, or naturally occurring splice signal, to avoid alteration of the exonic sequence or unwanted splicing events. The gRNA molecule may be a first, second, third and/or fourth gRNA molecule, as described herein.

[0034] In an embodiment, the targeting domain comprises a sequence that is the same as, or differs by no more than 1, 2, 3, 4, or 5 nucleotides from, a targeting domain sequence described herein, e.g., from any one of Tables 1A-1G, Tables 2A-2G, Tables 3A-3G, Tables 4A-4F, Tables 5A-5E, Tables 6A-6G, Tables 7A-7D, Tables 8A-8E, Tables 9A-9G, Tables 10A-10C, Tables 11A-11E, Tables 12A-12G, Tables 13A-13C, Tables 14A-14E, Tables 15A-15G, Tables 16A-16C, or Table 27. In an embodiment, the targeting domain comprises a sequence that is the same as a targeting domain sequence described herein, e.g., from any one of Tables 1A-1G, Tables 2A-2G, Tables 3A-3G, Tables 4A-4F, Tables 5A-5E, Tables 6A-6G, Tables 7A-7D, Tables 8A-8E, Tables 9A-9G, Tables 10A-10C, Tables 11A-11E, Tables 12A-12G, Tables 13A-13C, Tables 14A-14E, Tables 15A-15G, Tables 16A-16C, or Table 27.

[0035] In other embodiments, a HSV-1 target position in the coding region, e.g., the early coding region, of the UL19, UL30, UL48 or UL54 gene is targeted, e.g., for knockout. In an embodiment, the targeting domain comprises a sequence that is the same as, or differs by no more than 1, 2, 3, 4, or 5 nucleotides from, a targeting domain sequence from any one of Tables 1A-1G, Tables 2A-2G, Tables 3A-3G, or Tables 4A-4F.

[0036] In an embodiment, the targeting domain is independently selected from those in Tables 1A-1G. In an embodiment, the targeting domain is independently selected from Table 1A.

[0037] In an embodiment, the targeting domain is independently selected from those in Tables 2A-2G. In an embodiment, the targeting domain is independently selected from Table 2A.

[0038] In an embodiment, the targeting domain is independently selected from those in Tables 3A-3G. In an embodiment, the targeting domain is independently selected from Table 3A.

[0039] In an embodiment, the targeting domain is independently selected from those in Tables 4A-4F. In an embodiment, the targeting domain is independently selected from Table 4A.

[0040] In an embodiment, the targeting domain is independently selected from those in Tables 5A-5E. In an embodiment, the targeting domain is independently selected from Table 5A.

[0041] In an embodiment, the targeting domain is independently selected from those in Tables 6A-6G. In an embodiment, the targeting domain is independently selected from Table 6A.

[0042] In an embodiment, the targeting domain is independently selected from those in Tables 7A-7D. In an embodiment, the targeting domain is independently selected from Table 7A.

[0043] In an embodiment, the targeting domain is independently selected from those in Tables 8A-8E. In an embodiment, the targeting domain is independently selected from Table 8A.

[0044] In an embodiment, the targeting domain is independently selected from those in Tables 9A-9G. In an embodiment, the targeting domain is independently selected from Table 9A.

[0045] In an embodiment, the targeting domain is independently selected from those in Tables 10A-10C. In an embodiment, the targeting domain is independently selected from Table 10A.

[0046] In an embodiment, the targeting domain is independently selected from those in Tables 11A-11E. In an embodiment, the targeting domain is independently selected from Table 11A.

[0047] In an embodiment, the targeting domain is independently selected from those in Tables 12A-12G. In an embodiment, the targeting domain is independently selected from Table 12A.

[0048] In an embodiment, the targeting domain is independently selected from those in Tables 13A-13C. In an embodiment, the targeting domain is independently selected from Table 13A.

[0049] In an embodiment, the targeting domain is independently selected from those in Tables 14A-14E. In an embodiment, the targeting domain is independently selected from Table 14A.

[0050] In an embodiment, the targeting domain is independently selected from those in Tables 15A-15G. In an embodiment, the targeting domain is independently selected from Table 15A.

[0051] In an embodiment, the targeting domain is independently selected from those in Tables 16A-16C. In an embodiment, the targeting domain is independently selected from Table 16A.

[0052] In an embodiment, the targeting domain is independently selected from those in Table 27.

[0053] In an embodiment, when the HSV-1 target position is the UL19 gene coding region, e.g., an early coding region, and more than one gRNA is used to position breaks, e.g., two single stranded breaks or two double stranded breaks, or a combination of single strand and double strand breaks, e.g., to create one or more indels, in the target nucleic acid sequence, the targetuing domain of each guide RNA is independently selected from any of Tables 1A-1G, Tables 5A-5E, Tables 6A-6G, or Tables 7A-7D.

[0054] In an embodiment, when the HSV-1 target position is the UL30 gene coding region, e.g., an early coding region, and more than one gRNA is used to position breaks, e.g., two single stranded breaks or two double stranded breaks, or a combination of single strand and double strand breaks, e.g., to create one or more indels, in the target nucleic acid sequence, the targetuing domain of each guide RNA is independently selected from any of Tables 2A-2G, Tables 8A-E, Tables 9A-9G, or Tables 10A-10C.

[0055] In an embodiment, when the HSV-1 target position is the UL48 gene coding region, e.g., an early coding region, and more than one gRNA is used to position breaks, e.g., two single stranded breaks or two double stranded breaks, or a combination of single strand and double strand breaks, e.g., to create one or more indels, in the target nucleic acid sequence, the targetuing domain of each guide RNA is independently selected from any of Tables 3A-3G, Tables 11A-11E, Tables 12A-12G, or Tables 13A-13C.

[0056] In an embodiment, when the HSV-1 target position is the UL54 gene coding region, e.g., an early coding region, and more than one gRNA is used to position breaks, e.g., two single stranded breaks or two double stranded breaks, or a combination of single strand and double strand breaks, e.g., to create one or more indels, in the target nucleic acid sequence, the targetuing domain of each guide RNA is independently selected from any of Tables 4A-4F, Tables 14A-14E, Tables 15A-15G, or Tables 16A-16C.

[0057] In an embodiment, the gRNA, e.g., a gRNA comprising a targeting domain, which is complementary with the UL19, UL30, UL48 or UL54 gene, is a modular gRNA. In other embodiments, the gRNA is a unimolecular or chimeric gRNA.

[0058] In an embodiment, the targeting domain which is complementary with a target domain from the HSV-1 target position in the UL19, UL30, UL48 or UL54 gene is 16 nucleotides or more in length. In an embodiment, the targeting domain is 16 nucleotides in length. In an embodiment, the targeting domain is 17 nucleotides in length. In another embodiment, the targeting domain is 18 nucleotides in length. In still another embodiment, the targeting domain is 19 nucleotides in length. In still another embodiment, the targeting domain is 20 nucleotides in length. In still another embodiment, the targeting domain is 21 nucleotides in length. In still another embodiment, the targeting domain is 22 nucleotides in length. In still another embodiment, the targeting domain is 23 nucleotides in length. In still another embodiment, the targeting domain is 24 nucleotides in length. In still another embodiment, the targeting domain is 25 nucleotides in length. In still another embodiment, the targeting domain is 26 nucleotides in length.

[0059] In an embodiment, the targeting domain comprises 16 nucleotides.

[0060] In an embodiment, the targeting domain comprises 17 nucleotides.

[0061] In an embodiment, the targeting domain comprises 18 nucleotides.

[0062] In an embodiment, the targeting domain comprises 19 nucleotides.

[0063] In an embodiment, the targeting domain comprises 20 nucleotides.

[0064] In an embodiment, the targeting domain comprises 21 nucleotides.

[0065] In an embodiment, the targeting domain comprises 22 nucleotides.

[0066] In an embodiment, the targeting domain comprises 23 nucleotides.

[0067] In an embodiment, the targeting domain comprises 24 nucleotides.

[0068] In an embodiment, the targeting domain comprises 25 nucleotides.

[0069] In an embodiment, the targeting domain comprises 26 nucleotides.

[0070] A gRNA as described herein may comprise from 5′ to 3′: a targeting domain (comprising a “core domain”, and optionally a “secondary domain”); a first complementarity domain; a linking domain; a second complementarity domain; a proximal domain; and a tail domain. In some embodiments, the proximal domain and tail domain are taken together as a single domain.

[0071] In an embodiment, a gRNA comprises a linking domain of no more than 25 nucleotides in length; a proximal and tail domain, that taken together, are at least 20 nucleotides in length; and a targeting domain equal to or greater than 16, 17, 18, 19, 20, 21, 22, 23, 24, 25 or 26 nucleotides in length.

[0072] In another embodiment, a gRNA comprises a linking domain of no more than 25 nucleotides in length; a proximal and tail domain, that taken together, are at least 25 nucleotides in length; and a targeting domain equal to or greater than 16, 17, 18, 19, 20, 21, 22, 23, 24, 25 or 26 nucleotides in length.

[0073] In another embodiment, a gRNA comprises a linking domain of no more than 25 nucleotides in length; a proximal and tail domain, that taken together, are at least 30 nucleotides in length; and a targeting domain equal to or greater than 16, 17, 18, 19, 20, 21, 22, 23, 24, 25 or 26 nucleotides in length.

[0074] In another embodiment, a gRNA comprises a linking domain of no more than 25 nucleotides in length; a proximal and tail domain, that taken together, are at least 40 nucleotides in length; and a targeting domain equal to or greater than 16, 17, 18, 19, 20, 21, 22, 23, 24, 25 or 26 nucleotides in length.

[0075] A cleavage event, e.g., a double strand or single strand break, is generated by a Cas9 molecule. The Cas9 molecule may be an enzymatically active Cas9 (eaCas9) molecule, e.g., an eaCas9 molecule that forms a double strand break in a target nucleic acid or an eaCas9 molecule forms a single strand break in a target nucleic acid (e.g., a nickase molecule).

[0076] In an embodiment, the eaCas9 molecule catalyzes a double strand break.

[0077] In some embodiments, the eaCas9 molecule comprises HNH-like domain cleavage activity but has no, or no significant, N-terminal RuvC-like domain cleavage activity. In this case, the eaCas9 molecule is an HNH-like domain nickase, e.g., the eaCas9 molecule comprises a mutation at D10, e.g., D10A. In other embodiments, the eaCas9 molecule comprises N-terminal RuvC-like domain cleavage activity but has no, or no significant, HNH-like domain cleavage activity. In an embodiment, the eaCas9 molecule is an N-terminal RuvC-like domain nickase, e.g., the eaCas9 molecule comprises a mutation at H840, e.g., H840A. In an embodiment, the eaCas9 molecule is an N-terminal RuvC-like domain nickase, e.g., the eaCas9 molecule comprises a mutation at N863, e.g., N863A.

[0078] In an embodiment, a single strand break is formed in the strand of the target nucleic acid to which the targeting domain of said gRNA is complementary. In another embodiment, a single strand break is formed in the strand of the target nucleic acid other than the strand to which the targeting domain of said gRNA is complementary.

[0079] In another aspect, disclosed herein is a nucleic acid, e.g., an isolated or non-naturally occurring nucleic acid, e.g., DNA, that comprises (a) a sequence that encodes a gRNA molecule comprising a targeting domain that is complementary with a target domain, e.g., with a HSV-1 target position in UL19, UL30, UL48 or UL54 gene as disclosed herein.

[0080] In an embodiment, the nucleic acid encodes a gRNA molecule, e.g., a first gRNA molecule, comprising a targeting domain configured to provide a cleavage event, e.g., a double strand break or a single strand break, sufficiently close to a HSV-1 target position in the UL19, UL30, UL48 or UL54 gene to allow alteration, e.g., alteration associated with NHEJ, of a HSV-1 target position in the UL19, UL30, UL48 or UL54 gene.

[0081] In an embodiment, the nucleic acid encodes a gRNA molecule, e.g., the first gRNA molecule, comprising a targeting domain comprising a sequence that is the same as, or differs by no more than 1, 2, 3, 4, or 5 nucleotides from, a targeting domain sequence from any one of Tables 1A-1G, Tables 2A-2G, Tables 3A-3G, Tables 4A-4F, Tables 5A-5E, Tables 6A-6G, Tables 7A-7D, Tables 8A-8E, Tables 9A-9G, Tables 10A-10C, Tables 11A-11E, Tables 12A-12G, Tables 13A-13C, Tables 14A-14E, Tables 15A-15G, Tables 16A-16C, or Table 27. In an embodiment, the nucleic acid encodes a gRNA molecule comprising a targeting domain is selected from those in Tables 1A-1G, Tables 2A-2G, Tables 3A-3G, Tables 4A-4F, Tables 5A-5E, Tables 6A-6G, Tables 7A-7D, Tables 8A-8E, Tables 9A-9G, Tables 10A-10C, Tables 11A-11E, Tables 12A-12G, Tables 13A-13C, Tables 14A-14E, Tables 15A-15G, Tables 16A-16C, or Table 27.

[0082] In an embodiment, the nucleic acid encodes a modular gRNA, e.g., one or more nucleic acids encode a modular gRNA. In another embodiment, the nucleic acid encodes a chimeric gRNA. The nucleic acid may encode a gRNA, e.g., the first gRNA molecule, comprising a targeting domain comprising 16 nucleotides or more in length. In an embodiment, the nucleic acid encodes a gRNA, e.g., the first gRNA molecule, comprising a targeting domain that is 16 nucleotides in length. In another embodiment, the nucleic acid encodes a gRNA, e.g., the first gRNA molecule, comprising a targeting domain that is 17 nucleotides in length. In yet another embodiment, the nucleic acid encodes a gRNA, e.g., the first gRNA molecule, comprising a targeting domain that is 18 nucleotides in length. In still another embodiment, the nucleic acid encodes a gRNA, e.g., the first gRNA molecule, comprising a targeting domain that is 19 nucleotides in length. In still another embodiment, the nucleic acid encodes a gRNA, e.g., the first gRNA molecule, comprising a targeting domain that is 20 nucleotides in length. In still another embodiment, the nucleic acid encodes a gRNA, e.g., the first gRNA molecule, comprising a targeting domain that is 21 nucleotides in length. In still another embodiment, the nucleic acid encodes a gRNA, e.g., the first gRNA molecule, comprising a targeting domain that is 22 nucleotides in length. In still another embodiment, the nucleic acid encodes a gRNA, e.g., the first gRNA molecule, comprising a targeting domain that is 23 nucleotides in length. In still another embodiment, the nucleic acid encodes a gRNA, e.g., the first gRNA molecule, comprising a targeting domain that is 24 nucleotides in length. In still another embodiment, the nucleic acid encodes a gRNA, e.g., the first gRNA molecule, comprising a targeting domain that is 25 nucleotides in length. In still another embodiment, the nucleic acid encodes a gRNA, e.g., the first gRNA molecule, comprising a targeting domain that is 26 nucleotides in length.

[0083] In an embodiment, the targeting domain comprises 16 nucleotides.

[0084] In an embodiment, the targeting domain comprises 17 nucleotides.

[0085] In an embodiment, the targeting domain comprises 18 nucleotides.

[0086] In an embodiment, the targeting domain comprises 19 nucleotides.

[0087] In an embodiment, the targeting domain comprises 20 nucleotides.

[0088] In an embodiment, the targeting domain comprises 21 nucleotides.

[0089] In an embodiment, the targeting domain comprises 22 nucleotides.

[0090] In an embodiment, the targeting domain comprises 23 nucleotides.

[0091] In an embodiment, the targeting domain comprises 24 nucleotides.

[0092] In an embodiment, the targeting domain comprises 25 nucleotides.

[0093] In an embodiment, the targeting domain comprises 26 nucleotides.

[0094] In an embodiment, a nucleic acid encodes a gRNA comprising from 5′ to 3′: a targeting domain (comprising a “core domain”, and optionally a “secondary domain”); a first complementarity domain; a linking domain; a second complementarity domain; a proximal domain; and a tail domain. In some embodiments, the proximal domain and tail domain are taken together as a single domain.

[0095] In an embodiment, a nucleic acid encodes a gRNA e.g., the first gRNA molecule, comprising a linking domain of no more than 25 nucleotides in length; a proximal and tail domain, that taken together, are at least 20 nucleotides in length; and a targeting domain equal to or greater than 16, 17, 18, 19, 20, 21, 22, 23, 24, 25 or 26 nucleotides in length.

[0096] In an embodiment, a nucleic acid encodes a gRNA e.g., the first gRNA molecule, comprising a linking domain of no more than 25 nucleotides in length; a proximal and tail domain, that taken together, are at least 25 nucleotides in length; and a targeting domain equal to or greater than 16, 17, 18, 19, 20, 21, 22, 23, 24, 25 or 26 nucleotides in length.

[0097] In an embodiment, a nucleic acid encodes a gRNA e.g., the first gRNA molecule, comprising a linking domain of no more than 25 nucleotides in length; a proximal and tail domain, that taken together, are at least 30 nucleotides in length; and a targeting domain equal to or greater than 16, 17, 18, 19, 20, 21, 22, 23, 24, 25 or 26 nucleotides in length.

[0098] In an embodiment, a nucleic acid encodes a gRNA comprising e.g., the first gRNA molecule, a linking domain of no more than 25 nucleotides in length; a proximal and tail domain, that taken together, are at least 40 nucleotides in length; and a targeting domain equal to or greater than 16, 17, 18, 19, 20, 21, 22, 23, 24, 25 or 26 nucleotides in length.

[0099] In an embodiment, a nucleic acid comprises (a) a sequence that encodes a gRNA molecule, e.g., the first gRNA molecule, comprising a targeting domain that is complementary with a target domain in the UL19, UL30, UL48 or UL54 gene as disclosed herein, and further comprising (b) a sequence that encodes a Cas9 molecule.

[0100] The Cas9 molecule may be a nickase molecule, an enzymatically activating Cas9 (eaCas9) molecule, e.g., an eaCas9 molecule that forms a double strand break in a target nucleic acid and/or an eaCas9 molecule that forms a single strand break in a target nucleic acid. In an embodiment, a single strand break is formed in the strand of the target nucleic acid to which the targeting domain of said gRNA is complementary. In another embodiment, a single strand break is formed in the strand of the target nucleic acid other than the strand to which to which the targeting domain of said gRNA is complementary.

[0101] In an embodiment, the eaCas9 molecule catalyzes a double strand break.

[0102] In an embodiment, the eaCas9 molecule comprises HNH-like domain cleavage activity but has no, or no significant, N-terminal RuvC-like domain cleavage activity. In another embodiment, the said eaCas9 molecule is an HNH-like domain nickase, e.g., the eaCas9 molecule comprises a mutation at D10, e.g., D10A. In another embodiment, the eaCas9 molecule comprises N-terminal RuvC-like domain cleavage activity but has no, or no significant, HNH-like domain cleavage activity. In another embodiment, the eaCas9 molecule is an N-terminal RuvC-like domain nickase, e.g., the eaCas9 molecule comprises a mutation at H840, e.g., H840A. In another embodiment, the eaCas9 molecule is an N-terminal RuvC-like domain nickase, e.g., the eaCas9 molecule comprises a mutation at N863, e.g., N863A.

[0103] A nucleic acid disclosed herein may comprise (a) a sequence that encodes a gRNA molecule comprising a targeting domain that is complementary with a target domain in the CCR5 gene as disclosed herein; (b) a sequence that encodes a Cas9 molecule.

[0104] A nucleic acid disclosed herein may comprise (a) a sequence that encodes a gRNA molecule comprising a targeting domain that is complementary with a target domain in the UL19, UL30, UL48 or UL54 gene as disclosed herein; (b) a sequence that encodes a Cas9 molecule; and further may comprise (c)(i) a sequence that encodes a second gRNA molecule described herein having a targeting domain that is complementary to a second target domain of the UL19, UL30, UL48 or UL54 gene, and optionally, (c)(ii) a sequence that encodes a third gRNA molecule described herein having a targeting domain that is complementary to a third target domain of the UL19, UL30, UL48 or UL54 gene; and optionally, (c)(iii) a sequence that encodes a fourth gRNA molecule described herein having a targeting domain that is complementary to a fourth target domain of the UL19, UL30, UL48 or UL54 gene.

[0105] In an embodiment, a nucleic acid encodes a second gRNA molecule comprising a targeting domain configured to provide a cleavage event, e.g., a double strand break or a single strand break, sufficiently close to a HSV-1 target position in the UL19, UL30, UL48 or UL54 gene, to allow alteration, e.g., alteration associated with NHEJ, of a HSV-1 target position in the UL19, UL30, UL48 or UL54 gene, either alone or in combination with the break positioned by said first gRNA molecule.

[0106] In an embodiment, a nucleic acid encodes a third gRNA molecule comprising a targeting domain configured to provide a cleavage event, e.g., a double strand break or a single strand break, sufficiently close to a HSV-1 target position in the UL19, UL30, UL48 or UL54 gene to allow alteration, e.g., alteration associated with NHEJ, of a HSV-1 target position in the UL19, UL30, UL48 or UL54 gene, either alone or in combination with the break positioned by the first and/or second gRNA molecule.

[0107] In an embodiment, a nucleic acid encodes a fourth gRNA molecule comprising a targeting domain configured to provide a cleavage event, e.g., a double strand break or a single strand break, sufficiently close to a HSV-1 target position in the UL19, UL30, UL48 or UL54 gene to allow alteration, e.g., alteration associated with NHEJ, of a HSV-1 target position in the UL19, UL30, UL48 or UL54 gene, either alone or in combination with the break positioned by the first gRNA molecule, the second gRNA molecule and/or the third gRNA molecule.

[0108] In an embodiment, the nucleic acid encodes a second gRNA molecule. The second gRNA is selected to target the same HSV-1 target position as the first gRNA molecule. Optionally, the nucleic acid may encode a third gRNA, and further optionally, the nucleic acid may encode a fourth gRNA molecule. The third gRNA molecule and the fourth gRNA molecule are selected to target the same HSV-1 target position as the first and second gRNA molecules.

[0109] In an embodiment, the nucleic acid encodes a second gRNA molecule comprising a targeting domain comprising a sequence that is the same as, or differs by no more than 1, 2, 3, 4, or 5 nucleotides from, a targeting domain sequence from one of Tables 1A-1G, Tables 2A-2G, Tables 3A-3G, Tables 4A-4F, Tables 5A-5E, Tables 6A-6G, Tables 7A-7D, Tables 8A-8E, Tables 9A-9G, Tables 10A-10C, Tables 11A-11E, Tables 12A-12G, Tables 13A-13C, Tables 14A-14E, Tables 15A-15G, Tables 16A-16C, or Table 27. In an embodiment, the nucleic acid encodes a second gRNA molecule comprising a targeting domain selected from those in Tables 1A-1G, Tables 2A-2G, Tables 3A-3G, Tables 4A-4F, Tables 5A-5E, Tables 6A-6G, Tables 7A-7D, Tables 8A-8E, Tables 9A-9G, Tables 10A-10C, Tables 11A-11E, Tables 12A-12G, Tables 13A-13C, Tables 14A-14E, Tables 15A-15G, Tables 16A-16C, or Table 27. In an embodiment, when a third or fourth gRNA molecule are present, the third and fourth gRNA molecules may independently comprise a targeting domain comprising a sequence that is the same as, or differs by no more than 1, 2, 3, 4, or 5 nucleotides from, a targeting domain sequence from one of Tables 1A-1G, Tables 2A-2G, Tables 3A-3G, Tables 4A-4F, Tables 5A-5E, Tables 6A-6G, Tables 7A-7D, Tables 8A-8E, Tables 9A-9G, Tables 10A-10C, Tables 11A-11E, Tables 12A-12G, Tables 13A-13C, Tables 14A-14E, Tables 15A-15G, Tables 16A-16C, or Table 27. In a further embodiment, when a third or fourth gRNA molecule are present, the third and fourth gRNA molecules may independently comprise a targeting domain selected from those in Tables 1A-1G, Tables 2A-2G, Tables 3A-3G, Tables 4A-4F, Tables 5A-5E, Tables 6A-6G, Tables 7A-7D, Tables 8A-8E, Tables 9A-9G, Tables 10A-10C, Tables 11A-11E, Tables 12A-12G, Tables 13A-13C, Tables 14A-14E, Tables 15A-15G, Tables 16A-16C, Table 27.

[0110] In an embodiment, the nucleic acid encodes a second gRNA which is a modular gRNA, e.g., wherein one or more nucleic acid molecules encode a modular gRNA. In another embodiment, the nucleic acid encoding a second gRNA is a chimeric gRNA. In another embodiment, when a nucleic acid encodes a third or fourth gRNA, the third and fourth gRNA may be a modular gRNA or a chimeric gRNA. When multiple gRNAs are used, any combination of modular or chimeric gRNAs may be used.

[0111] A nucleic acid may encode a second, a third, and/or a fourth gRNA, each independently, comprising a targeting domain comprising 16 nucleotides or more in length. In an embodiment, the nucleic acid encodes a second gRNA comprising a targeting domain that is 16 nucleotides in length. In another embodiment, the nucleic acid encodes a second gRNA comprising a targeting domain that is 17 nucleotides in length. In another embodiment, the nucleic acid encodes a second gRNA comprising a targeting domain that is 18 nucleotides in length. In still another embodiment, the nucleic acid encodes a second gRNA comprising a targeting domain that is 19 nucleotides in length. In still another embodiment, the nucleic acid encodes a second gRNA comprising a targeting domain that is 20 nucleotides in length. In still another embodiment, the nucleic acid encodes a second gRNA comprising a targeting domain that is 21 nucleotides in length. In still another embodiment, the nucleic acid encodes a second gRNA comprising a targeting domain that is 22 nucleotides in length. In still another embodiment, the nucleic acid encodes a second gRNA comprising a targeting domain that is 23 nucleotides in length. In still another embodiment, the nucleic acid encodes a second gRNA comprising a targeting domain that is 24 nucleotides in length. In still another embodiment, the nucleic acid encodes a second gRNA comprising a targeting domain that is 25 nucleotides in length. In still another embodiment, the nucleic acid encodes a second gRNA comprising a targeting domain that is 26 nucleotides in length.

[0112] In an embodiment, the targeting domain comprises 16 nucleotides.

[0113] In an embodiment, the targeting domain comprises 17 nucleotides.

[0114] In an embodiment, the targeting domain comprises 18 nucleotides.

[0115] In an embodiment, the targeting domain comprises 19 nucleotides.

[0116] In an embodiment, the targeting domain comprises 20 nucleotides.

[0117] In an embodiment, the targeting domain comprises 21 nucleotides.

[0118] In an embodiment, the targeting domain comprises 22 nucleotides.

[0119] In an embodiment, the targeting domain comprises 23 nucleotides.

[0120] In an embodiment, the targeting domain comprises 24 nucleotides.

[0121] In an embodiment, the targeting domain comprises 25 nucleotides.

[0122] In an embodiment, the targeting domain comprises 26 nucleotides.

[0123] In an embodiment, a nucleic acid encodes a second, a third, and/or a fourth gRNA, each independently, comprising from 5′ to 3′: a targeting domain (comprising a “core domain”, and optionally a “secondary domain”); a first complementarity domain; a linking domain; a second complementarity domain; a proximal domain; and a tail domain. In some embodiments, the proximal domain and tail domain are taken together as a single domain.

[0124] In an embodiment, a nucleic acid encodes a second, a third, and/or a fourth gRNA comprising a linking domain of no more than 25 nucleotides in length; a proximal and tail domain, that taken together, are at least 20 nucleotides in length; and a targeting domain equal to or greater than 16, 17, 18, 19, 20, 21, 22, 23, 24, 25 or 26 nucleotides in length.

[0125] In an embodiment, a nucleic acid encodes a second, a third, and/or a fourth gRNA comprising a linking domain of no more than 25 nucleotides in length; a proximal and tail domain, that taken together, are at least 25 nucleotides in length; and a targeting domain equal to or greater than 16, 17, 18, 19, 20, 21, 22, 23, 24, 25 or 26 nucleotides in length.

[0126] In an embodiment, a nucleic acid encodes a second, a third, and/or a fourth gRNA comprising a linking domain of no more than 25 nucleotides in length; a proximal and tail domain, that taken together, are at least 30 nucleotides in length; and a targeting domain equal to or greater than 16, 17, 18, 19, 20, 21, 22, 23, 24, 25 or 26 nucleotides in length.

[0127] In an embodiment, a nucleic acid encodes a second, a third, and/or a fourth gRNA comprising a linking domain of no more than 25 nucleotides in length; a proximal and tail domain, that taken together, are at least 40 nucleotides in length; and a targeting domain equal to or greater than 16, 17, 18, 19, 20, 21, 22, 23, 24, 25 or 26 nucleotides in length.

[0128] In an embodiment, a nucleic acid encodes (a) a sequence that encodes a gRNA molecule comprising a targeting domain that is complementary with a target domain in the UL19, UL30, UL48 or UL54 gene, as disclosed herein, and (b) a sequence that encodes a Cas9 molecule, e.g., a Cas9 molecule described herein. In an embodiment, (a) and (b) are present on the same nucleic acid molecule, e.g., the same vector, e.g., the same viral vector, e.g., the same adeno-associated virus (AAV) vector. In an embodiment, the nucleic acid molecule is an AAV vector. Exemplary AAV vectors that may be used in any of the described compositions and methods include an AAV2 vector, a modified AAV2 vector, an AAV3 vector, a modified AAV3 vector, an AAV6 vector, a modified AAV6 vector, an AAV8 vector and an AAV9 vector.

[0129] In another embodiment, (a) is present on a first nucleic acid molecule, e.g. a first vector, e.g., a first viral vector, e.g., a first AAV vector; and (b) is present on a second nucleic acid molecule, e.g., a second vector, e.g., a second vector, e.g., a second AAV vector. The first and second nucleic acid molecules may be AAV vectors.

[0130] In another embodiment, a nucleic acid encodes (a) a sequence that encodes a gRNA molecule comprising a targeting domain that is complementary with a target domain in the UL19, UL30, UL48 or UL54 gene as disclosed herein, and (b) a sequence that encodes a Cas9 molecule, e.g., a Cas9 molecule described herein; and further comprises (c)(i) a sequence that encodes a second gRNA molecule as described herein, and optionally (c)(ii) a sequence that encodes a third gRNA molecule described herein having a targeting domain that is complementary to a third target domain of the UL19, UL30, UL48 or UL54 gene; and optionally, (c)(iii) a sequence that encodes a fourth gRNA molecule described herein having a targeting domain that is complementary to a fourth target domain of the UL19, UL30, UL48 or UL54 gene. In an embodiment, the nucleic acid comprises (a), (b) and (c)(i). In an embodiment, the nucleic acid comprises (a), (b), (c)(i) and (c)(ii). In an embodiment, the nucleic acid comprises (a), (b), (c)(i), (c)(ii) and (c)(iii). Each of (a) and (c)(i) may be present on the same nucleic acid molecule, e.g., the same vector, e.g., the same viral vector, e.g., the same adeno-associated virus (AAV) vector. In an embodiment, the nucleic acid molecule is an AAV vector.

[0131] In another embodiment, (a) and (c)(i) are on different vectors. For example, (a) may be present on a first nucleic acid molecule, e.g. a first vector, e.g., a first viral vector, e.g., a first AAV vector; and (c)(i) may be present on a second nucleic acid molecule, e.g., a second vector, e.g., a second vector, e.g., a second AAV vector. In an embodiment, the first and second nucleic acid molecules are AAV vectors.

[0132] In another embodiment, each of (a), (b), and (c)(i) are present on the same nucleic acid molecule, e.g., the same vector, e.g., the same viral vector, e.g., an AAV vector. In an embodiment, the nucleic acid molecule is an AAV vector. In an alternate embodiment, one of (a), (b), and (c)(i) is encoded on a first nucleic acid molecule, e.g., a first vector, e.g., a first viral vector, e.g., a first AAV vector; and a second and third of (a), (b), and (c)(i) is encoded on a second nucleic acid molecule, e.g., a second vector, e.g., a second vector, e.g., a second AAV vector. The first and second nucleic acid molecule may be AAV vectors.

[0133] In an embodiment, (a) is present on a first nucleic acid molecule, e.g., a first vector, e.g., a first viral vector, a first AAV vector; and (b) and (c)(i) are present on a second nucleic acid molecule, e.g., a second vector, e.g., a second vector, e.g., a second AAV vector. The first and second nucleic acid molecule may be AAV vectors.

[0134] In another embodiment, (b) is present on a first nucleic acid molecule, e.g., a first vector, e.g., a first viral vector, e.g., a first AAV vector; and (a) and (c)(i) are present on a second nucleic acid molecule, e.g., a second vector, e.g., a second vector, e.g., a second AAV vector. The first and second nucleic acid molecule may be AAV vectors.

[0135] In another embodiment, (c)(i) is present on a first nucleic acid molecule, e.g., a first vector, e.g., a first viral vector, e.g., a first AAV vector; and (b) and (a) are present on a second nucleic acid molecule, e.g., a second vector, e.g., a second vector, e.g., a second AAV vector. The first and second nucleic acid molecule may be AAV vectors.

[0136] In another embodiment, each of (a), (b) and (c)(i) are present on different nucleic acid molecules, e.g., different vectors, e.g., different viral vectors, e.g., different AAV vector. For example, (a) may be on a first nucleic acid molecule, (b) on a second nucleic acid molecule, and (c)(i) on a third nucleic acid molecule. The first, second and third nucleic acid molecule may be AAV vectors.

[0137] In another embodiment, when a third and/or fourth gRNA molecule are present, each of (a), (b), (c)(i), (c)(ii) and (c)(iii) may be present on the same nucleic acid molecule, e.g., the same vector, e.g., the same viral vector, e.g., an AAV vector. In an embodiment, the nucleic acid molecule is an AAV vector. In an alternate embodiment, each of (a), (b), (c)(i), (c)(ii) and (c)(iii) may be present on the different nucleic acid molecules, e.g., different vectors, e.g., the different viral vectors, e.g., different AAV vectors. In a further embodiment, each of (a), (b), (c)(i), (c) (ii) and (c)(iii) may be present on more than one nucleic acid molecule, but fewer than five nucleic acid molecules, e.g., AAV vectors.

[0138] The nucleic acids described herein may comprise a promoter operably linked to the sequence that encodes the gRNA molecule of (a), e.g., a promoter described herein. The nucleic acid may further comprise a second promoter operably linked to the sequence that encodes the second, third and/or fourth gRNA molecule of (c), e.g., a promoter described herein. The promoter and second promoter differ from one another. In some embodiments, the promoter and second promoter are the same.

[0139] The nucleic acids described herein may further comprise a promoter operably linked to the sequence that encodes the Cas9 molecule of (b), e.g., a promoter described herein.

[0140] In another aspect, disclosed herein is a composition comprising (a) a gRNA molecule comprising a targeting domain that is complementary with a target domain in the UL19, UL30, UL48 or UL54 gene, as described herein. The composition of (a) may further comprise (b) a Cas9 molecule, e.g., a Cas9 molecule as described herein. A composition of (a) and (b) may further comprise (c) a second, third and/or fourth gRNA molecule, e.g., a second, third and/or fourth gRNA molecule described herein. In an embodiment, the composition is a pharmaceutical composition. The compositions described herein, e.g., pharmaceutical compositions described herein, can be used in the treatment or prevention of HSV-1 in a subject, e.g., in accordance with a method disclosed herein.

[0141] In another aspect, disclosed herein is a method of altering a cell, e.g., altering the structure, e.g., altering the sequence, of a target nucleic acid of a cell, comprising contacting said cell with: (a) a gRNA that targets the UL19, UL30, UL48 or UL54 gene, e.g., a gRNA as described herein; (b) a Cas9 molecule, e.g., a Cas9 molecule as described herein; and optionally, (c) a second, third and/or fourth gRNA that targets UL19, UL30, UL48 or UL54 gene, e.g., a second, third and/or fourth gRNA, as described herein.

[0142] In an embodiment, the method comprises contacting said cell with (a) and (b).

[0143] In an embodiment, the method comprises contacting said cell with (a), (b), and (c).

[0144] The targeting domain of the gRNA of (a) and optionally (c) may be selected from any of Tables 1A-1G, Tables 2A-2G, Tables 3A-3G, Tables 4A-4F, Tables 5A-5E, Tables 6A-6G, Tables 7A-7D, Tables 8A-8E, Tables 9A-9G, Tables 10A-10C, Tables 11A-11E, Tables 12A-12G, Tables 13A-13C, Tables 14A-14E, Tables 15A-15G, Tables 16A-16C, or Table 27, or a targeting domain of a gRNA that differs by no more than 1, 2, 3, 4, or 5 nucleotides from, a targeting domain sequence from any of Tables 1A-1G, Tables 2A-2G, Tables 3A-3G, Tables 4A-4F, Tables 5A-5E, Tables 6A-6G, Tables 7A-7D, Tables 8A-8E, Tables 9A-9G, Tables 10A-10C, Tables 11A-11E, Tables 12A-12G, Tables 13A-13C, Tables 14A-14E, Tables 15A-15G, Tables 16A-16C, or Table 27.

[0145] In an embodiment, the method comprises contacting a cell from a subject suffering from or likely to develop HSV-1. The cell may be from a subject that would benefit from having a mutation at a HSV-1 target position.

[0146] In an embodiment, the contacting step may be performed in vivo.

[0147] In an embodiment, the method of altering a cell as described herein comprises acquiring knowledge of the sequence of a HSV-1 target position in said cell, prior to the contacting step. Acquiring knowledge of the sequence of a HSV-1 target position in the cell may be by sequencing one or more of the UL19, UL30, UL48 and/or UL54 gene, or a portion of the UL19, UL30, UL48 and/or UL54 gene.

[0148] In an embodiment, the contacting step of the method comprises contacting the cell with a nucleic acid, e.g., a vector, e.g., an AAV vector, that expresses at least one of (a), (b), and (c). In an embodiment, the contacting step of the method comprises contacting the cell with a nucleic acid, e.g., a vector, e.g., an AAV vector, that expresses each of (a), (b), and (c). In another embodiment, the contacting step of the method comprises delivering to the cell a Cas9 molecule of (b) and a nucleic acid which encodes a gRNA of (a) and optionally, a second gRNA (c)(i) and further optionally, a third gRNA (c)(ii) and/or fourth gRNA (c)(iii).

[0149] In an embodiment, the contacting step of the method comprises contacting the cell with a nucleic acid, e.g., a vector, e.g., an AAV vector, that expresses at least one of (a), (b), (c) and (d). In some embodiments, the contacting step of the method comprises contacting the cell with a nucleic acid, e.g., a vector, e.g., an AAV vector, that expresses each of (a), (b), and (c). In another embodiment, the contacting step of the method comprises delivering to the cell a Cas9 molecule of (b), a nucleic acid which encodes a gRNA of (a) and a template nucleic acid of (d), and optionally, a second gRNA (c)(i) and further optionally, a third gRNA (c)(ii) and/or fourth gRNA (c)(iii).

[0150] In an embodiment, contacting comprises contacting the cell with a nucleic acid, e.g., a vector, e.g., an AAV vector, e.g., an AAV2 vector, a modified AAV2 vector, an AAV3 vector, a modified AAV3 vector, an AAV6 vector, a modified AAV6 vector, an AAV8 vector or an AAV9 vector, as described herein.

[0151] In an embodiment, contacting comprises delivering to the cell a Cas9 molecule of (b), as a protein or an mRNA, and a nucleic acid which encodes a gRNA of (a) and optionally a second, third and/or fourth gRNA of (c).

[0152] In an embodiment, contacting comprises delivering to the cell a Cas9 molecule of (b), as a protein or an mRNA, said gRNA of (a), as an RNA, and optionally said second, third and/or fourth gRNA of (c), as an RNA.

[0153] In an embodiment, contacting comprises delivering to the cell a gRNA of (a) as an RNA, optionally the second, third and/or fourth gRNA of (c) as an RNA, and a nucleic acid that encodes the Cas9 molecule of (b).

[0154] In another aspect, disclosed herein is a method of treating a subject suffering from or likely to develop HSV-1, e.g., altering the structure, e.g., sequence, of a target nucleic acid of the subject, comprising contacting the subject (or a cell from the subject) with:

[0155] (a) a gRNA that targets the UL19, UL30, UL48 or UL54 gene, e.g., a gRNA disclosed herein;

[0156] (b) a Cas9 molecule, e.g., a Cas9 molecule disclosed herein; and

[0157] optionally, (c)(i) a second gRNA that targets the UL19, UL30, UL48 or UL54 gene, e.g., a second gRNA disclosed herein, and

[0158] further optionally, (c)(ii) a third gRNA, and still further optionally, (c)(iii) a fourth gRNA that target the UL19, UL30, UL48 or UL54 gene, e.g., a third and fourth gRNA disclosed herein.

[0159] In some embodiments, contacting comprises contacting with (a) and (b).

[0160] In some embodiments, contacting comprises contacting with (a), (b), and (c)(i).

[0161] In some embodiments, contacting comprises contacting with (a), (b), (c)(i) and (c)(ii).

[0162] In some embodiments, contacting comprises contacting with (a), (b), (c)(i), (c)(ii) and (c)(iii).

[0163] The targeting domain of the gRNA of (a) or (c) (e.g., (c)(i), (c)(ii), or (c)(iii)) may be selected from any of Tables 1A-1G, Tables 2A-2G, Tables 3A-3G, Tables 4A-4F, Tables 5A-5E, Tables 6A-6G, Tables 7A-7D, Tables 8A-8E, Tables 9A-9G, Tables 10A-10C, Tables 11A-11E, Tables 12A-12G, Tables 13A-13C, Tables 14A-14E, Tables 15A-15G, Tables 16A-16C, or Table 27, or a targeting domain of a gRNA that differs by no more than 1, 2, 3, 4, or 5 nucleotides from, a targeting domain sequence from any of Tables 1A-1G, Tables 2A-2G, Tables 3A-3G, Tables 4A-4F, Tables 5A-5E, Tables 6A-6G, Tables 7A-7D, Tables 8A-8E, Tables 9A-9G, Tables 10A-10C, Tables 11A-11E, Tables 12A-12G, Tables 13A-13C, Tables 14A-14E, Tables 15A-15G, Tables 16A-16C, or Table 27.

[0164] In an embodiment, the method comprises acquiring knowledge of the sequence at a HSV-1 target position in said subject.

[0165] In an embodiment, the method comprises acquiring knowledge of the sequence at a HSV-1 target position in said subject by sequencing one or more of the UL19, UL30, UL48 and/or UL54 gene(s) or a portion of the UL19, UL30, UL48 and/or UL54 gene.

[0166] In an embodiment, the method comprises introducing a mutation at a HSV-1 target position.

[0167] In an embodiment, the method comprises introducing a mutation at a HSV-1 target position by NHEJ.

[0168] In an embodiment, a cell of the subject is contacted is in vivo with (a), (b) and optionally (c)(i), further optionally (c)(ii), and still further optionally (c)(iii).

[0169] In an embodiment, the cell of the subject is contacted in vivo by intravenous delivery of (a), (b), and optionally (c)(i), further optionally (c)(ii), and still further optionally (c)(iii).

[0170] In an embodiment, the contacting step comprises contacting the subject with a nucleic acid, e.g., a vector, e.g., an AAV vector, described herein, e.g., a nucleic acid that encodes at least one of (a), (b), and optionally (c)(i), further optionally (c)(ii), and still further optionally (c)(iii).

[0171] In an embodiment, the contacting step comprises delivering to said subject said Cas9 molecule of (b), as a protein or mRNA, and a nucleic acid which encodes (a), and optionally (c)(i), further optionally (c)(ii), and still further optionally (c)(iii).

[0172] In an embodiment, the contacting step comprises delivering to the subject the Cas9 molecule of (b), as a protein or mRNA, the gRNA of (a), as an RNA, and optionally the second gRNA of (c)(i), further optionally said third gRNA of (c)(ii), and still further optionally said fourth gRNA of (c)(iii), as an RNA.

[0173] In an embodiment, the contacting step comprises delivering to the subject the gRNA of (a), as an RNA, optionally said second gRNA of (c)(i), further optionally said third gRNA of (c)(ii), and still further optionally said fourth gRNA of (c)(iii), as an RNA, a nucleic acid that encodes the Cas9 molecule of (b).

[0174] When the method comprises (1) introducing a mutation at a HSV-1 target position by NHEJ or (2) knocking down expression of one or more of the UL19, UL30, UL48 and/or UL54 gene(s), e.g., by targeting the promoter region, a Cas9 molecule of (b) and at least one guide RNA, e.g., a guide RNA of (a) are included in the contacting step.

[0175] In an embodiment, a cell of the subject is contacted is in vivo with (a), (b) and optionally (c)(i), further optionally (c)(ii), and still further optionally (c)(iii). In an embodiment, the cell of the subject is contacted in vivo by intravenous delivery of (a), (b) and optionally (c)(i), further optionally (c)(ii), and still further optionally (c)(iii).

[0176] In an embodiment, the contacting step comprises contacting the subject with a nucleic acid, e.g., a vector, e.g., an AAV vector, described herein, e.g., a nucleic acid that encodes at least one of (a), (b), and optionally (c)(i), further optionally (c)(ii), and still further optionally (c)(iii).

[0177] In an embodiment, the contacting step comprises delivering to said subject said Cas9 molecule of (b), as a protein or mRNA, and a nucleic acid which encodes (a) and optionally (c)(i), further optionally (c)(ii), and still further optionally (c)(iii).

[0178] In an embodiment, the contacting step comprises delivering to the subject the Cas9 molecule of (b), as a protein or mRNA, the gRNA of (a), as an RNA, and optionally the second gRNA of (c)(i), further optionally said third gRNA of (c)(ii), and still further optionally said fourth gRNA of (c)(iii), as an RNA.

[0179] In an embodiment, the contacting step comprises delivering to the subject the gRNA of (a), as an RNA, optionally said second gRNA of (c)(i), further optionally said third gRNA of (c)(ii), and still further optionally said fourth gRNA of (c)(iii), as an RNA, and a nucleic acid that encodes the Cas9 molecule of (b).

[0180] In another aspect, disclosed herein is a reaction mixture comprising a gRNA molecule, a nucleic acid, or a composition described herein, and a cell, e.g., a cell from a subject having, or likely to develop HSV-1, or a subject which would benefit from a mutation at a HSV-1 target position.

[0181] In another aspect, disclosed herein is a kit comprising, (a) a gRNA molecule described herein, or nucleic acid that encodes the gRNA, and one or more of the following:

[0182] (b) a Cas9 molecule, e.g., a Cas9 molecule described herein, or a nucleic acid or mRNA that encodes the Cas9;

[0183] (c)(i) a second gRNA molecule, e.g., a second gRNA molecule described herein or a nucleic acid that encodes (c)(i);

[0184] (c)(ii) a third gRNA molecule, e.g., a second gRNA molecule described herein or a nucleic acid that encodes (c)(ii);

[0185] (c)(iii) a fourth gRNA molecule, e.g., a second gRNA molecule described herein or a nucleic acid that encodes (c)(iii).

[0186] In an embodiment, the kit comprises nucleic acid, e.g., an AAV vector, that encodes one or more of (a), (b), (c)(i), (c)(ii), and (c)(iii).

[0187] In yet another aspect, disclosed herein is a gRNA molecule, e.g., a gRNA molecule described herein, for use in treating, or delaying the onset or progression of HSV-1 infection in a subject, e.g., in accordance with a method of treating, or delaying the onset or progression of HSV-1 infection as described herein.

[0188] In an embodiment, the gRNA molecule is used in combination with a Cas9 molecule, e.g., a Cas9 molecule described herein. Additionally or alternatively, in an embodiment, the gRNA molecule is used in combination with a second, third and/or fourth gRNA molecule, e.g., a second, third and/or fourth gRNA molecule described herein.

[0189] In still another aspect, disclosed herein is use of a gRNA molecule, e.g., a gRNA molecule described herein, in the manufacture of a medicament for treating, or delaying the onset or progression of HSV-1 in a subject, e.g., in accordance with a method of treating, or delaying the onset or progression of HSV-1 as described herein.

[0190] In an embodiment, the medicament comprises a Cas9 molecule, e.g., a Cas9 molecule described herein. Additionally or alternatively, in an embodiment, the medicament comprises a second, third and/or fourth gRNA molecule, e.g., a second, third and/or fourth gRNA molecule described herein.

[0191] The gRNA molecules and methods, as disclosed herein, can be used in combination with a governing gRNA molecule. As used herein, a governing gRNA molecule refers to a gRNA molecule comprising a targeting domain which is complementary to a target domain on a nucleic acid that encodes a component of the CRISPR/Cas system introduced into a cell or subject. For example, the methods described herein can further include contacting a cell or subject with a governing gRNA molecule or a nucleic acid encoding a governing molecule. In an embodiment, the governing gRNA molecule targets a nucleic acid that encodes a Cas9 molecule or a nucleic acid that encodes a target gene gRNA molecule. In an embodiment, the governing gRNA comprises a targeting domain that is complementary to a target domain in a sequence that encodes a Cas9 component, e.g., a Cas9 molecule or target gene gRNA molecule. In an embodiment, the target domain is designed with, or has, minimal homology to other nucleic acid sequences in the cell, e.g., to minimize off-target cleavage. For example, the targeting domain on the governing gRNA can be selected to reduce or minimize off-target effects. In an embodiment, a target domain for a governing gRNA can be disposed in the control or coding region of a Cas9 molecule or disposed between a control region and a transcribed region. In an embodiment, a target domain for a governing gRNA can be disposed in the control or coding region of a target gene gRNA molecule or disposed between a control region and a transcribed region for a target gene gRNA. While not wishing to be bound by theory, in an embodiment, it is believed that altering, e.g., inactivating, a nucleic acid that encodes a Cas9 molecule or a nucleic acid that encodes a target gene gRNA molecule can be effected by cleavage of the targeted nucleic acid sequence or by binding of a Cas9 molecule/governing gRNA molecule complex to the targeted nucleic acid sequence.

[0192] The compositions, reaction mixtures and kits, as disclosed herein, can also include a governing gRNA molecule, e.g., a governing gRNA molecule disclosed herein.

[0193] Unless otherwise defined, all technical and scientific terms used herein have the same meaning as commonly understood by one of ordinary skill in the art to which this invention belongs. Although methods and materials similar or equivalent to those described herein can be used in the practice or testing of the present invention, suitable methods and materials are described below. All publications, patent applications, patents, and other references mentioned herein are incorporated by reference in their entirety. In addition, the materials, methods, and examples are illustrative only and not intended to be limiting.

[0194] Headings, including numeric and alphabetical headings and subheadings, are for organization and presentation and are not intended to be limiting.

[0195] Other features and advantages of the invention will be apparent from the detailed description, drawings, and from the claims.

### BRIEF DESCRIPTION OF THE DRAWINGS

[0196] FIGS. 1A-1I are representations of several exemplary gRNAs.

[0197] FIG. 1A depicts a modular gRNA molecule derived in part (or modeled on a sequence in part) from Streptococcus pyogenes (S. pyogenes) as a duplexed structure (SEQ ID NOS: 42 and 43, respectively, in order of appearance);

[0198] FIG. 1B depicts a unimolecular (or chimeric) gRNA molecule derived in part from S. pyogenes as a duplexed structure (SEQ ID NO: 44);

[0199] FIG. 1C depicts a unimolecular gRNA molecule derived in part from S. pyogenes as a duplexed structure (SEQ ID NO: 45);

[0200] FIG. 1D depicts a unimolecular gRNA molecule derived in part from S. pyogenes as a duplexed structure (SEQ ID NO: 46);

[0201] FIG. 1E depicts a unimolecular gRNA molecule derived in part from S. pyogenes as a duplexed structure (SEQ ID NO: 47);

[0202] FIG. 1F depicts a modular gRNA molecule derived in part from Streptococcus thermophilus (S. thermophilus) as a duplexed structure (SEQ ID NOS: 48 and 49, respectively, in order of appearance);

[0203] FIG. 1G depicts an alignment of modular gRNA molecules of S. pyogenes and S. thermophilus (SEQ ID NOS: 50-53, respectively, in order of appearance).

[0204] FIGS. 1H-1I depicts additional exemplary structures of unimolecular gRNA molecules. FIG. 1H shows an exemplary structure of a unimolecular gRNA molecule derived in part from S. pyogenes as a duplexed structure (SEQ ID NO: 45). FIG. 1I shows an exemplary structure of a unimolecular gRNA molecule derived in part from S. aureus as a duplexed structure (SEQ ID NO: 40).

[0205] FIGS. 2A-2G depict an alignment of Cas9 sequences from Chylinski et al. (RNA Biol. 2013; 10(5): 726-737). The N-terminal RuvC-like domain is boxed and indicated with a “Y”. The other two RuvC-like domains are boxed and indicated with a “B”. The HNH-like domain is boxed and indicated by a “G”. Sm: S. mutans (SEQ ID NO: 1); Sp: S. pyogenes (SEQ ID NO: 2); St: S. thermophilus (SEQ ID NO: 3); Li: L. innocua (SEQ ID NO: 4). Motif: this is a motif based on the four sequences: residues conserved in all four sequences are indicated by single letter amino acid abbreviation; “*” indicates any amino acid found in the corresponding position of any of the four sequences; and “-” indicates any amino acid, e.g., any of the 20 naturally occurring amino acids, or absent.

[0206] FIGS. 3A-3B show an alignment of the N-terminal RuvC-like domain from the Cas9 molecules disclosed in Chylinski et at (SEQ ID NOS: 54-103, respectively, in order of appearance). The last line of FIG. 3B identifies 4 highly conserved residues.

[0207] FIGS. 4A-4B show an alignment of the N-terminal RuvC-like domain from the Cas9 molecules disclosed in Chylinski et al. with sequence outliers removed (SEQ ID NOS: 104-177, respectively, in order of appearance). The last line of FIG. 4B identifies 3 highly conserved residues.

[0208] FIGS. 5A-5C show an alignment of the HNH-like domain from the Cas9 molecules disclosed in Chylinski et at (SEQ ID NOS: 178-252, respectively, in order of appearance). The last line of FIG. 5C identifies conserved residues.

[0209] FIGS. 6A-6B show an alignment of the HNH-like domain from the Cas9 molecules disclosed in Chylinski et al. with sequence outliers removed (SEQ ID NOS: 253-302, respectively, in order of appearance). The last line of FIG. 6B identifies 3 highly conserved residues.

[0210] FIGS. 7A-7B depict an alignment of Cas9 sequences from S. pyogenes and Neisseria meningitidis (N. meningitidis). The N-terminal RuvC-like domain is boxed and indicated with a “Y”. The other two RuvC-like domains are boxed and indicated with a “B”. The HNH-like domain is boxed and indicated with a “G”. Sp: S. pyogenes; Nm: N. meningitidis. Motif: this is a motif based on the two sequences: residues conserved in both sequences are indicated by a single amino acid designation; “*” indicates any amino acid found in the corresponding position of any of the two sequences; “-” indicates any amino acid, e.g., any of the 20 naturally occurring amino acids, and “-” indicates any amino acid, e.g., any of the 20 naturally occurring amino acids, or absent.

[0211] FIG. 8 shows a nucleic acid sequence encoding Cas9 of N. meningitidis (SEQ ID NO: 303). Sequence indicated by an “R” is an SV40 NLS; sequence indicated as “G” is an HA tag; and sequence indicated by an “O” is a synthetic NLS sequence; the remaining (unmarked) sequence is the open reading frame (ORF).

[0212] FIGS. 9A and 9B are schematic representations of the domain organization of S. pyogenes Cas 9. FIG. 9A shows the organization of the Cas9 domains, including amino acid positions, in reference to the two lobes of Cas9 (recognition (REC) and nuclease (NUC) lobes). FIG. 9B shows the percent homology of each domain across 83 Cas9 orthologs.

[0213] FIG. 10A is a schematic showing the plasmid map for the reporter plasmid, pAF025.

[0214] FIG. 10B is a graph showing the decrease in fluorescence from green fluorescent protein (GFP) in cells transfected with various gRNAs that target HSV-1 target sequences.

### DETAILED DESCRIPTION

### Definitions

[0215] “Domain”, as used herein, is used to describe segments of a protein or nucleic acid. Unless otherwise indicated, a domain is not required to have any specific functional property.

[0216] Calculations of homology or sequence identity between two sequences (the terms are used interchangeably herein) are performed as follows. The sequences are aligned for optimal comparison purposes (e.g., gaps can be introduced in one or both of a first and a second amino acid or nucleic acid sequence for optimal alignment and non-homologous sequences can be disregarded for comparison purposes). The optimal alignment is determined as the best score using the GAP program in the GCG software package with a Blossum 62 scoring matrix with a gap penalty of 12, a gap extend penalty of 4, and a frame shift gap penalty of 5. The amino acid residues or nucleotides at corresponding amino acid positions or nucleotide positions are then compared. When a position in the first sequence is occupied by the same amino acid residue or nucleotide as the corresponding position in the second sequence, then the molecules are identical at that position. The percent identity between the two sequences is a function of the number of identical positions shared by the sequences.

[0217] “Governing gRNA molecule”, as used herein, refers to a gRNA molecule that comprises a targeting domain that is complementary to a target domain on a nucleic acid that comprises a sequence that encodes a component of the CRISPR/Cas system that is introduced into a cell or subject. A governing gRNA does not target an endogenous cell or subject sequence. In an embodiment, a governing gRNA molecule comprises a targeting domain that is complementary with a target sequence on: (a) a nucleic acid that encodes a Cas9 molecule; (b) a nucleic acid that encodes a gRNA which comprises a targeting domain that targets the UL19, UL30, UL48 or UL54 gene (a target gene gRNA); or on more than one nucleic acid that encodes a CRISPR/Cas component, e.g., both (a) and (b). In an embodiment, a nucleic acid molecule that encodes a CRISPR/Cas component, e.g., that encodes a Cas9 molecule or a target gene gRNA, comprises more than one target domain that is complementary with a governing gRNA targeting domain. While not wishing to be bound by theory, in an embodiment, it is believed that a governing gRNA molecule complexes with a Cas9 molecule and results in Cas9 mediated inactivation of the targeted nucleic acid, e.g., by cleavage or by binding to the nucleic acid, and results in cessation or reduction of the production of a CRISPR/Cas system component. In an embodiment, the Cas9 molecule forms two complexes: a complex comprising a Cas9 molecule with a target gene gRNA, which complex will alter the UL19, UL30, UL48 or UL54 gene; and a complex comprising a Cas9 molecule with a governing gRNA molecule, which complex will act to prevent further production of a CRISPR/Cas system component, e.g., a Cas9 molecule or a target gene gRNA molecule. In an embodiment, a governing gRNA molecule/Cas9 molecule complex binds to or promotes cleavage of a control region sequence, e.g., a promoter, operably linked to a sequence that encodes a Cas9 molecule, a sequence that encodes a transcribed region, an exon, or an intron, for the Cas9 molecule. In an embodiment, a governing gRNA molecule/Cas9 molecule complex binds to or promotes cleavage of a control region sequence, e.g., a promoter, operably linked to a gRNA molecule, or a sequence that encodes the gRNA molecule. In an embodiment, the governing gRNA, e.g., a Cas9-targeting governing gRNA molecule, or a target gene gRNA-targeting governing gRNA molecule, limits the effect of the Cas9 molecule/target gene gRNA molecule complex-mediated gene targeting. In an embodiment, a governing gRNA places temporal, level of expression, or other limits, on activity of the Cas9 molecule/target gene gRNA molecule complex. In an embodiment, a governing gRNA reduces off-target or other unwanted activity. In an embodiment, a governing gRNA molecule inhibits, e.g., entirely or substantially entirely inhibits, the production of a component of the Cas9 system and thereby limits, or governs, its activity.

[0218] “Modulator”, as used herein, refers to an entity, e.g., a drug, that can alter the activity (e.g., enzymatic activity, transcriptional activity, or translational activity), amount, distribution, or structure of a subject molecule or genetic sequence. In an embodiment, modulation comprises cleavage, e.g., breaking of a covalent or non-covalent bond, or the forming of a covalent or non-covalent bond, e.g., the attachment of a moiety, to the subject molecule. In an embodiment, a modulator alters the, three dimensional, secondary, tertiary, or quaternary structure, of a subject molecule. A modulator can increase, decrease, initiate, or eliminate a subject activity.

[0219] “Large molecule”, as used herein, refers to a molecule having a molecular weight of at least 2, 3, 5, 10, 20, 30, 40, 50, 60, 70, 80, 90, or 100 kD. Large molecules include proteins, polypeptides, nucleic acids, biologics, and carbohydrates.

[0220] “Polypeptide”, as used herein, refers to a polymer of amino acids having less than 100 amino acid residues. In an embodiment, it has less than 50, 20, or 10 amino acid residues.

[0221] “Reference molecule”, e.g., a reference Cas9 molecule or reference gRNA, as used herein, refers to a molecule to which a subject molecule, e.g., a subject Cas9 molecule of subject gRNA molecule, e.g., a modified or candidate Cas9 molecule is compared. For example, a Cas9 molecule can be characterized as having no more than 10% of the nuclease activity of a reference Cas9 molecule. Examples of reference Cas9 molecules include naturally occurring unmodified Cas9 molecules, e.g., a naturally occurring Cas9 molecule such as a Cas9 molecule of S. pyogenes, S. aureus or S. thermophilus. In an embodiment, the reference Cas9 molecule is the naturally occurring Cas9 molecule having the closest sequence identity or homology with the Cas9 molecule to which it is being compared. In an embodiment, the reference Cas9 molecule is a sequence, e.g., a naturally occurring or known sequence, which is the parental form on which a change, e.g., a mutation has been made.

[0222] “Replacement”, or “replaced”, as used herein with reference to a modification of a molecule does not require a process limitation but merely indicates that the replacement entity is present.

[0223] “Small molecule”, as used herein, refers to a compound having a molecular weight less than about 2 kD, e.g., less than about 2 kD, less than about 1.5 kD, less than about 1 kD, or less than about 0.75 kD.

[0224] “Subject”, as used herein, may mean either a human or non-human animal. The term includes, but is not limited to, mammals (e.g., humans, other primates, pigs, rodents (e.g., mice and rats or hamsters), rabbits, guinea pigs, cows, horses, cats, dogs, sheep, and goats). In an embodiment, the subject is a human. In other embodiments, the subject is poultry.

[0225] “Treat”, “treating” and “treatment”, as used herein, mean the treatment of a disease in a mammal, e.g., in a human, including (a) inhibiting the disease, i.e., arresting or preventing its development; (b) relieving the disease, i.e., causing regression of the disease state; and (c) curing the disease.

[0226] “Prevent”, “preventing” and “prevention”, as used herein, means the prevention of a disease in a mammal, e.g., in a human, including (a) avoiding or precluding the disease; (2) affecting the predisposition toward the disease, e.g., preventing at least one symptom of the disease or to delay onset of at least one symptom of the disease.

[0227] “X” as used herein in the context of an amino acid sequence, refers to any amino acid (e.g., any of the twenty natural amino acids) unless otherwise specified.

[0228] Herpes Simplex Virus Type 1

[0229] Herpes simplex virus type 1 (HSV-1) causes intermittent sores of the mouth and mucous membranes. It is a ubiquitous and highly contagious pathogen. Most subjects develop the infection during childhood. By adulthood, up to 80% of the population in the United States is infected with HSV-1. Initial infection with HSV-1 generally causes painful blistering of the mucous membranes of the lips and mouth.

[0230] HSV-1 infection persists for the lifetime of the host. Primary and re-activation infections can cause permanent neurologic sequelae and blindness. There is a considerable need for methods to treat and prevent HSV1 infections.

[0231] During primary infection, the virus most often infects cells of the oropharynx and ano-genital region, causing painful vesicles in the affected region. Re-activation of HSV-1 infections most often occurs in the oropharynx and ano-genital region. However, re-activation infections of the eye and central nervous system are the most severe and damaging HSV manifestations, as they can lead to blindness and permanent neurologic disability, respectively.

[0232] HSV-1 is contained within an icosahedral particle. The virus enters the host via infection of epithelial cells within the skin and mucous membranes. The virus produces immediate early genes within the epithelial cells, which encode enzymes and binding proteins necessary for viral synthesis. After primary infection, the virus travels up sensory nerve axons via retrograde transport to the sensory dorsal root ganglion (DRG). Within the DRG, it establishes a latent infection. The latent infection persists for the lifetime of the host. Within the DRG cell, the virus uncoats, viral DNA is transported into the nucleus, and key viral RNAs associated with latency are transcribed (including the LAT RNAs).

[0233] Host immune defense is very important to combating HSV infection. CD4+ T-cells and CD8+ cells are responsible for recognizing and clearing the pathogen. Subjects with impaired T-cell responses, including those with HIV, those receiving immunosuppressants following organ transplants, and neonates with developing immune systems, are subject to the most severe manifestations of HSV-1 infections.

[0234] During the primary infection, subjects generally experience painful blistering in the oral or ano-genital region that lasts 4-15 days. The sores most commonly involve the lips, gums and nasal mucous membranes. HSV-1 primary infections may also involve the ano-genital region, including the vagina, labia, cervix, penis, scrotum, anus and skin around the thighs. Less commonly, HSV-1 primary infection may involve the eyes, central nervous system, the fingers and fingernail beds (herpetic whitlow). The infection is transmitted primarily through saliva and/or sexual activity. The blisters may break, releasing clear fluid that is highly infectious. Primary infection is often accompanied by a flu-like illness, including fever, chills and muscle aches.

[0235] Reactivations of latent infections are generally less severe and may be of shorter duration. Reactivation can affect the oral region, the ano-genital region, the eye, the central nervous system (CNS), the fingernails, and the pharynx. Reactivation generally affects the oral region but can also affect other mucous membranes, including those of the ano-genital area, fingernails, and the pharynx. Ophthalmologic disease may also occur, including epithelial keratitis, stromal keratitis and disciform keratitis. Generally, ophthalmologic manifestations of HSV-1 are self-limiting. However, HSV-1 keratitis may, in rare instances, cause scarring, secondary infection with bacterial pathogens and rarely, blindness.

[0236] In some cases, reactivation can occur in the central nervous system (CNS) via retrograde transport of the virus into the CNS. Generally, patients who are immune compromised develop HSV-1 induced encephalitis and/or meningitis. HSV-1 encephalitis or meningitis are both extremely severe. Subjects generally experience permanent neurologic damage in spite of treatment with antiviral therapy.

[0237] Primary infections and reactivation infections in the CNS, called encephalitis and meningitis, are particularly damaging. In a study of infants with HSV-encephalitis or meningitis treated with high dose antiviral therapy, there was found to be a 4% mortality rate and 69% of survivors had permanent neurologic sequelae (Kimberlin et al., Pediatrics. 2001; 108: 230-238). The majority of infants and adults who develop HSV-1 encephalitis or meningitis will experience permanent neurologic damage in spite of treatment with antiviral therapy. Reactivation infections in the CNS occur via anterograde transport of the virus into the CNS. Most commonly, patients who are immune compromised or infants develop HSV-1 induced encephalitis and/or meningitis. Healthy adults may more rarely develop HSV-1 disease of the CNS.

[0238] Reactivation infections occur in the eye via anterograde transport of the virus into the eye from the trigeminal ganglion, along the ophthalmic branch of the trigeminal nerve (the fifth cranial nerve) and into the eye. Re-activation of the virus may also occur from within the cornea. Latency within the trigeminal ganglion is established via one of two mechanisms. First, HSV-1 can travel via retrograde transport along the trigeminal nerve from the eye (after an eye infection) into the trigeminal ganglion. Alternatively, it can spread to the trigeminal ganglion via hematogenous spread following infection of the oral mucosa, genital region, or other extraocular site. After establishing latent infection of the trigeminal ganglion, at any time, particularly in the event of an immunocompromised host, the virus can re-establish infection by traveling anterograde along the trigeminal nerve and into the eye.

[0239] Ocular herpes can affect the anterior chamber of the eye, where it causes keratitis, or the posterior chamber, where it causes retinitis. In adults, HSV-1 is responsible for the majority of cases of HSV-retinitis (Pepose et al., Ocular Infection and Immunity 1996; Mosby 1155-1168). HSV-1 retinitis can lead to acute retinal necrosis (ARN), which will destroy the retina within 2 weeks without treatment (Banerjee and Rouse, Human Herpesviruses 2007; Cambridge University Press, Chapter 35). Even with treatment, the risk of permanent visual damage following ARN is higher than 50% (Roy et al., Ocular Immunology and Inflammation 2014; 22(3):170-174).

[0240] Keratitis is the most common form of ocular herpes. HSV keratitis can manifest as dentritic keratitis, stromal keratitis, blepharatis and conjunctivitis. HSV-1 is responsible for the majority of HSV-associated keratitis, accounting for 58% of cases (Dawson et. al., Suvey of Ophthalmology 1976; 21(2): 121-135). In the United States, there are approximately 48,000 cases of recurrent or primary HSV-related keratitis infections annually (Liesegang et. al., 1989; 107(8): 1155-1159). Of all cases of HSV-related keratitis, approximately 1.5-3% of subjects experience severe, permanent visual impairment (Wilhelmus et. al., Archives of Ophthalmology 1981; 99(9): 1578-82).

[0241] Overall, stromal keratitis represents approximately 15% of keratitis cases and is associated with the highest risk of permanent visual damage. Stromal keratitis results in scarring and irregular astimagtism. Previous ocular HSV infection increases the risk for developing stromal infection, which means that subjects who have had a prior ocular HSV infection have an increased risk for permanent visual damage on reactivation. In children, stromal keratitis represents up to 60% of all keratitis cases so children are particularly at risk for permanent visual damage from HSV-associated keratitis. A retrospective study in the United States from 1950-1982 found that there are approximately 2.6 new or recurrent stromal keratitis cases per 100,000 person years, or approximately 8,000 cases of stromal keratitis annually (Liesegang et. al., 1989; 107(8): 1155-1159). A more recent study in France in 2002 estimated the incidence of new or recurrent stromal keratitis cases to be 9.6 per 100,000 (Labetoulle et al., Ophthalmology 2005; 112(5):888-895). The incidence of HSV-associated keratitis may be increasing in the developed world (Farooq and Shukla 2012; Survey of Ophthalmology 57(5): 448-462).

[0242] The compositions and methods described herein can be used for the treatment and prevention of HSV-1 ocular infections, including but not limited to HSV-1 stromal keratitis, HSV-1 retinitis, HSV-1 encephalitis and HSV-1 meningitis.

[0243] Newborns are a population at particular risk for developing severe HSV-1 infections. The disease is transmitted from the mother to the fetus during childbirth. The chance of maternal-fetal transmission is highest in cases where the mother developed primary HSV infection during pregnancy. The incidence of neonatal herpes is approximately 4-30 per 100,000 births. Neonates may develop severe HSV-1 encephalitis and/or meningitis. In spite of prompt treatment with antiviral therapy, the rate of permanent neurologic sequelae in newborns infected with HSV-1 is significant.

[0244] Primary HSV-1 infections may be treated with antiviral therapy, including acyclovir, valacyclovir and famciclovir. These therapies have been demonstrated to reduce viral shedding, decrease pain and improve healing time of lesions. Re-activation of latent infections may resolve without treatment (it may be self-limiting) or may be treated with anti-viral therapy. Therapy is primarily given during acute infection. There are no curative or preventative treatments. Therapy may be given prophylactically in certain situations, including during childbirth in a mother with a recent HSV-1 infection or reactivation.

[0245] Methods to Treat, Prevent or Reduce HSV-1 Infection

[0246] Disclosed herein are the approaches to treat, prevent, or reduce HSV-1 infection, using the compositions and methods described herein.

[0247] HSV-1 relies on the genes UL19, UL30, UL48 and/or UL54 for infection, proliferation and assembly. Knockout of any of these genes individually or in combination can prevent or treat HSV-1 infections. As the HSV-1 virus establishes latency in discrete, localized regions within the body, local delivery that delivers a treatment in the region of latency can be used. Targeting knockout to a discrete region or regions (e.g., the trigeminal dorsal root ganglion, e.g., the cervical dorsal root gangliq, e.g., the sacral dorsal root ganglia) can reduce or eliminate latent infection by disabling the HSV-1 virus.

[0248] Described herein are the approaches to treat or prevent HSV-1 by knocking out viral genes. Methods described herein include the knockout of any of the following HSV-1 encoded genes: UL19, UL30, UL48 or UL54, or any combination thereof (e.g., any two, three or all of the UL19, UL30, UL48 or UL54 gene).

[0249] UL19 (also known as VP5) encodes the HSV-1 major capsid protein, VP5. Proper assembly of the viral capsid is known to be an essential part of viral replication, assembly, maturation and infection (Homa et al., Reviews of Medical Virology 1997; 7(2):107-122) RNAi-mediated knockdown of VP5 along with another capsid capsid protein, VP23, in vitro, greatly diminished HSV-1 proliferation (Jin et al., PLoS One 2014; 9(5): e96623). Knockout of UL19 can disable HSV-1 proliferation and therefore prevent, treat or cure HSV-1 infection.

[0250] UL30 encodes the DNA polymerase catalytic subunit (HSV-1 pol). The 5′ domain of HSV-1 pol is required for viral replication. Knock out of UL30 can disable HSV-1 replication and therefore prevent and/or cure HSV-1 infection.

[0251] UL48 encodes the viral protein known as VP16 in HSV-1. VP-16 has been shown to be important in viral egress, the process by which the assembled viral capsid leaves the host nucleus and enters the cytoplasm (Mossman et al., Journal of Virology 2000; 74(14): 6287-6289). Mutation of UL48 in cell culture decreased the ability of HSV-1 to assemble efficiently (Svobodova et al., Journal of Virology 2012; 86(1): 473-483). Knockout of UL48 can disable HSV-1 assembly and egress and therefore prevent and/or cure HSV-1 infection.

[0252] UL54 encodes ICP27, a highly conserved, multi-functional protein. ICP27 is involved in transcription, RNA processing, RNA export and translation (Sandri-Goldin, Frontiers in Bioscience 2008; 13:5241-5256). ICP27 also shuts off host gene expression during HSV-1 infection. Knockout of UL54 can disable HSV-1 transcription, translation and RNA processing and therefore prevent and/or cure HSV-1 infection.

[0253] Knockout of the genes UL19, UL30, UL48 or UL54, individually or in combination, can reduce HSV-1 infectivity, replication, packaging and can therefore prevent or treat HSV-1 infection.

[0254] In addition, knock out of vital HSV-1 genes, e.g., UL19, UL30, UL48 and UL54, individually or in combination, can make HSV-1 more susceptible to antiviral therapy. Mutations in important genes can render HSV-1 and other viruses more susceptible to treatment with antivirals (Zhou et al., Journal of Virology 2014; 88(19): 11121-11129). Knocking out of UL19, UL30, UL48 and UL54, individually or in combination, may be combined with antiviral therapy to prevent or treat HSV-1 infection. The compositions and methods described herein can be used in combination with another antiviral therapy, e.g., another anti-HSV-1 therapy described herein, to treat or prevent HSV-1 infection.

[0255] In one approach, one or more of the UL19, UL30, UL48 and/or UL54 gene(s) is targeted as a targeted knockout, e.g., to inhibit essential viral functions, including, e.g. viral gene transcription, viral genome replication and viral capsid formation. In an embodiment, said approach comprises knocking out one HSV-1 gene (e.g., UL19, UL30, UL48 or UL54 gene). In another embodiment, said approach comprises knocking out two HSV-1 genes, e.g., two of UL19, UL30, UL48 or UL54 gene(s). In another embodiment, said approach comprises knocking out three HSV-1 genes, e.g., three or more of UL19, UL30, UL48 or UL54 gene(s). In another embodiment, said approach comprises knocking out four HSV-1 genes, e.g., each of UL19, UL30, UL48 and UL54 genes.

[0256] While not wishing to be bound by theory, it is considered that inhibiting essential viral functions, e.g., viral gene transcription, viral genome replication and viral capsid formation, decreases the duration of primary or recurrent infection and/or decrease shedding of viral particles. Subjects also experience shorter duration(s) of illness, decreased risk of transmission to sexual partners, decreased risk of transmission to the fetus in the case of pregnancy and/or the potential for full clearance of HSV-1 (cure).

[0257] Knockout of one or more copies (e.g., 1, 2, 3, 4, 5, 6, 7, 8, 9 or 10 copies) of one or more target genes (e.g., UL19, UL30, UL48 or UL54 gene) may be performed prior to disease onset or after disease onset, but preferably early in the disease course.

[0258] In an embodiment, the method comprises initiating treatment of a subject prior to disease onset.

[0259] In an embodiment, the method comprises initiating treatment of a subject after disease onset.

[0260] In an embodiment, the method comprises initiating treatment of a subject well after disease onset, e.g., 1, 2, 3, 4, 5, 6, 7, 8, 9, 10, 12, 16, 24, 36, 48 or more months after onset of HSV-1 infection. In an embodiment, the method comprises initiating treatment of a subject well after disease onset, e.g., 1, 2, 3, 4, 5, 10, 15, 20, 25, 40, 50 or 60 years after onset of HSV-1 infection. While not wishing to be bound by theory it is believed that this may be effective as disease progression is slow in some cases and a subject may present well into the course of illness.

[0261] In an embodiment, the method comprises initiating treatment of a subject in an advanced stage of disease, e.g., during acute or latent periods. In an embodiment, the method comprises initiating treatment of a subject in the case of severe, acute disease affecting the central nervous system, eyes, oropharynx, genital region, and/or other region.

[0262] Overall, initiation of treatment for subjects at all stages of disease is expected to improve healing, decrease duration of disease and be of benefit to subjects.

[0263] In an embodiment, the method comprises initiating treatment of a subject prior to disease expression. In an embodiment, the method comprises initiating treatment of a subject in an early stage of disease, e.g., when a subject has been exposed to HSV-1 or is thought to have been exposed to HSV-1.

[0264] In an embodiment, the method comprises initiating treatment of a subject prior to disease expression. In an embodiment, the method comprises initiating treatment of a subject in an early stage of disease, e.g., when a subject has tested positive for HSV-1 infections but has no signs or symptoms.

[0265] In an embodiment, the method comprises initiating treatment of a subject at the appearance of painful blistering in or around the mouth, e.g., oral or oropharynx, e.g., in an infant, child, adult or young adult.

[0266] In an embodiment, the method comprises initiating treatment of a subject at the appearance of painful blistering in the genital region, e.g., in an infant, child, adult or young adult.

[0267] In an embodiment, the method comprises initiating treatment of a subject suspected of having HSV-1 meningitis and/or HSV-1 encephalitis.

[0268] In an embodiment, the method comprises initiating treatment at the appearance of any of the following symptoms consistent or associated with HSV-1 meningitis and/or encephalitis: fever, headache, vomiting, photophobia, seizure, decline in level of consciousness, lethargy, or drowsiness.

[0269] In an embodiment, the method comprises initiating treatment at the appearance of any of the following signs consistent or associated with HSV meningitis and/or encephalitis: positive CSF culture for HSV-1, elevated WBC in CSF, neck stiffness/positive Brudzinski's sign. In an embodiment, the method comprises initiating treatment in a patient with signs consistent with HSV-1 encephalitis and/or meningitis on EEG, CSF exam, MM, PCR of CSF specimen, and/or PCR of brain biopsy specimen.

[0270] In an embodiment, the method comprises initiating treatment at the appearance of any of the following symptoms consistent or associated with optic HSV-1: pain, photophobia, blurred vision, tearing, redness/injection, loss of vision, floaters, or flashes.

[0271] In an embodiment, the method comprises initiating treatment at the appearance of any of the following findings on ophthalmologic exam consistent or associated with optic HSV-1, also known as HSV-1 keratitis: small, raised clear vesicles on corneal epithelium; irregular corneal surface, punctate epithelial erosions; dense stromal infiltrate; ulceration; necrosis; focal, multifocal, or diffuse cellular infiltrates; immune rings; neovascularization; or ghost vessels at any level of the cornea.

[0272] In an embodiment, the method comprises initiating treatment at the appearance of any of the following findings on ophthalmologic exam consistent or associated with HSV-1 retinitis or acute retinal necrosis: reduced visual acuity; uveitis; vitritis; scleral injection; inflammation of the anterior and/or vitreous chamber/s; vitreous haze; optic nerve edema; peripheral retinal whitening; retinal tear; retinal detachment; retinal necrosis; evidence of occlusive vasculopathy with arterial involvement, including arterioloar sheathing and arteriolar attenuation.

[0273] In an embodiment, the method comprises initiating treatment at the appearance of symptoms and/or signs consistent or associated with either an HSV-1 or an HSV-2 infection of the eye, oropharynx, ano-genital region or central nervous system. While not wishing to be bound by theory, initiating treatment for HSV-1 infection in a case of suspected HSV-1 or HSV-2 infection early in the disease course is beneficial.

[0274] In an embodiment, the method comprises initiating treatment in utero in case of high risk of maternal-to-fetal transmission.

[0275] In an embodiment, the method comprises initiating treatment during pregnancy in case of mother who has active HSV-1 infection or has recent primary HSV-1 infection.

[0276] In an embodiment, the method comprises initiating treatment prior to organ transplantation or immediately following organ transplantation.

[0277] In an embodiment, the method comprises initiating treatment in case of suspected exposure to HSV-1.

[0278] In an embodiment, the method comprises initiating treatment prophylactically, especially in case of suspected HSV-encephalitis or meningitis.

[0279] In an embodiment, the method comprises initiating treatment of a subject who suffers from or is at risk of developing severe manifestations of HSV-1 infections, e.g., neonates, subjects with HIV, subjects who are on immunosuppressant therapy following organ transplantation, subjects who have cancer, subjects who are undergoing chemotherapy, subjects who will undergo chemotherapy, subjects who are undergoing radiation therapy, subjects who will undergo radiation therapy.

[0280] While not wishing to be bound by theory, it is considered that both HIV positive subjects and post-transplant subjects may experience severe HSV-1 activation or reactivation, including HSV-encephalitis and meningitis, due to immunodeficiency. Neonates are also at risk for severe HSV-encephalitis due to maternal-fetal transmission during childbirth. Inhibiting essential viral functions, e.g., viral gene transcription, viral genome replication and viral capsid formation, may provide superior protection to said populations at risk for severe HSV-1 infections. Subjects may experience lower rates of HSV-1 encephalitis and/or lower rates of severe neurologic sequelae following HSV-1 encephalitis, which will profoundly improve quality of life.

[0281] In an embodiment, the method comprises initiating treatment of a subject who has tested positive for HSV-1.

[0282] In an embodiment, the method comprises initiating treatment at the appearance of any one or more of the following findings consistent or associated with HSV-1: appearance of blistering in the oropharynx, ano-genital area, oral or ano-genital ulcers and/or flu-like illness.

[0283] In an embodiment, the method comprises initiating treatment at the appearance of any of the following findings consistent or associated with HSV-1 infection: fever, headache, body aches, oral or ano-genital blistering, oral ulceration, encephalitis, meningitis or keratitis.

[0284] In an embodiment, the method comprises initiating treatment in a subject who has tested positive for HSV-1 infection via viral culture, direct fluorescent antibody study, skin biopsy, PCR, blood serologic test, CSF serologic test, CSF PCR, or brain biopsy. In an embodiment, the method comprises initiating treatment in a subject who has tested positive for HSV-2 infection via diagnostic vitrectomy, endoretinal biopsy, PCR of aqueous fluid, PCR of vitreous sample.

[0285] In an embodiment, the method comprises initiating treatment in any subject exposed to HSV-1 and at high risk for severe sequelae from HSV infection.

[0286] In some embodiments, a cell is manipulated by editing (e.g., introducing a mutation in) one or more target genes, e.g., UL19, UL30, UL48 or UL54 gene. In some embodiments, the expression of one or more target genes (e.g., one or more UL19, UL30, UL48 or UL54 gene described herein) is modulated, e.g., in vivo.

[0287] In an embodiment, the method comprises delivery of gRNA by an AAV. In an embodiment, the method comprises delivery of gRNA by a lentivirus. In an embodiment, the method comprises delivery of gRNA by a nanoparticle. In an embodiment, the method comprises delivery of gRNA by a gel-based AAV for topical therapy.

[0288] In an embodiment, the method further comprising treating the subject a second antiviral therapy, e.g., an anti-HSV-1 therapy described herein. The compositions described herein can be administered concurrently with, prior to, or subsequent to, one or more additional therapies or therapeutic agents. The composition and the other therapy or therapeutic agent can be administered in any order. In an embodiment, the effect of the two treatments is synergistic. Exemplary anti-HSV-1 therapies include, but are not limited to, acyclovir, valacyclovir, famciclovir, penciclovir, or a vaccine.

Methods of Altering UL19, UL30, UL48 and/or UL54 Gene(s)

[0289] As disclosed herein, a HSV-1 target position, e.g., one or more of UL19, UL30, UL48 or UL54 gene(s), can be altered by gene editing, e.g., using CRISPR-Cas9 mediated methods as described herein.

[0290] Methods and compositions discussed herein, provide for altering a HSV-1 target position in one or more of the UL19, UL30, UL48 and/or UL54 gene(s). A HSV-1 target position can be altered by gene editing, e.g., using CRISPR-Cas9 mediated methods to alter one or more of the UL19, UL30, UL48 and/or UL54 gene(s).

[0291] An alteration of one or more of the UL19, UL30, UL48 and/or UL54 gene(s) can be mediated by any mechanism. Exemplary mechanisms that can be associated with an alteration of one or more of the UL19, UL30, UL48 and/or UL54 gene(s) include, but are not limited to, non-homologous end joining (e.g., classical or alternative), microhomology-mediated end joining (MMEJ), homology-directed repair (e.g., endogenous donor template mediated), SDSA (synthesis dependent strand annealing), single strand annealing or single strand invasion.

[0292] In an embodiment, a single strand break is introduced (e.g., positioned by one gRNA molecule) at or in close proximity to a HSV-1 target position in the UL19, UL30, UL48 and/or UL54 gene. In an embodiment, a single gRNA molecule (e.g., with a Cas9 nickase) is used to create a single strand break at or in close proximity to the HSV-1 target position, e.g., the gRNA is configured such that the single strand break is positioned either upstream (e.g., within 200 bp upstream) or downstream (e.g., within 200 bp downstream) of the HSV-1 target position. In an embodiment, the break is positioned to avoid unwanted target chromosome elements, such as repeat elements, e.g., an Alu repeat.

[0293] In an embodiment, a double strand break is introduced (e.g., positioned by one gRNA molecule) at or in close proximity to a HSV-1 target position in the UL19, UL30, UL48 and/or UL54 gene. In an embodiment, a single gRNA molecule (e.g., with a Cas9 nuclease other than a Cas9 nickase) is used to create a double strand break at or in close proximity to the HSV-1 target position, e.g., the gRNA molecule is configured such that the double strand break is positioned either upstream (e.g., within 200 bp upstream) or downstream of (e.g., within 200 bp downstream) of a HSV-1 target position. In an embodiment, the break is positioned to avoid unwanted target chromosome elements, such as repeat elements, e.g., an Alu repeat.

[0294] In an embodiment, two single strand breaks are introduced (e.g., positioned by two gRNA molecules) at or in close proximity to a HSV-1 target position in the UL19, UL30, UL48 and/or UL54 gene. In an embodiment, two gRNA molecules (e.g., with one or two Cas9 nickcases) are used to create two single strand breaks at or in close proximity to the HSV-1 target position, e.g., the gRNAs molecules are configured such that both of the single strand breaks are positioned upstream (e.g., within 200 bp upstream) or downstream (e.g., within 200 bp downstream) of the HSV-1 target position. In another embodiment, two gRNA molecules (e.g., with two Cas9 nickcases) are used to create two single strand breaks at or in close proximity to the HSV-1 target position, e.g., the gRNAs molecules are configured such that one single strand break is positioned upstream (e.g., within 200 bp upstream) and a second single strand break is positioned downstream (e.g., within 200 bp downstream) of the HSV-1 target position. In an embodiment, the breaks are positioned to avoid unwanted target chromosome elements, such as repeat elements, e.g., an Alu repeat.

[0295] In an embodiment, two double strand breaks are introduced (e.g., positioned by two gRNA molecules) at or in close proximity to a HSV-1 target position in the UL19, UL30, UL48 and/or UL54 gene. In an embodiment, two gRNA molecules (e.g., with one or two Cas9 nucleases that are not Cas9 nickases) are used to create two double strand breaks to flank a HSV-1 target position, e.g., the gRNA molecules are configured such that one double strand break is positioned upstream (e.g., within 200 bp upstream) and a second double strand break is positioned downstream (e.g., within 200 bp downstream) of the HSV-1 target position. In an embodiment, the breaks are positioned to avoid unwanted target chromosome elements, such as repeat elements, e.g., an Alu repeat.

[0296] In an embodiment, one double strand break and two single strand breaks are introduced (e.g., positioned by three gRNA molecules) at or in close proximity to a HSV-1 target position in the UL19, UL30, UL48 and/or UL54 gene. In an embodiment, three gRNA molecules (e.g., with a Cas9 nuclease other than a Cas9 nickase and one or two Cas9 nickases) to create one double strand break and two single strand breaks to flank a HSV-1 target position, e.g., the gRNA molecules are configured such that the double strand break is positioned upstream or downstream of (e.g., within 200 bp upstream or downstream) of the HSV-1 target position, and the two single strand breaks are positioned at the opposite site, e.g., downstream or upstream (within 200 bp downstream or upstream), of the HSV-1 target position. In an embodiment, the breaks are positioned to avoid unwanted target chromosome elements, such as repeat elements, e.g., an Alu repeat.

[0297] In an embodiment, four single strand breaks are introduced (e.g., positioned by four gRNA molecules) at or in close proximity to a HSV-1 target position in the UL19, UL30, UL48 and/or UL54 gene. In an embodiment, four gRNA molecule (e.g., with one or more Cas9 nickases are used to create four single strand breaks to flank a HSV-1 target position in the UL19, UL30, UL48 and/or UL54 gene, e.g., the gRNA molecules are configured such that a first and second single strand breaks are positioned upstream (e.g., within 200 bp upstream) of the HSV-1 target position, and a third and a fourth single stranded breaks are positioned downstream (e.g., within 200 bp downstream) of the HSV-1 target position. In an embodiment, the breaks are positioned to avoid unwanted target chromosome elements, such as repeat elements, e.g., an Alu repeat.

[0298] In an embodiment, two or more (e.g., three or four) gRNA molecules are used with one Cas9 molecule. In another embodiment, when two or more (e.g., three or four) gRNAs are used with two or more Cas9 molecules, at least one Cas9 molecule is from a different species than the other Cas9 molecule(s). For example, when two gRNA molecules are used with two Cas9 molecules, one Cas9 molecule can be from one species and the other Cas9 molecule can be from a different species. Both Cas9 species are used to generate a single or double-strand break, as desired.

I. gRNA Molecules

[0299] A gRNA molecule, as that term is used herein, refers to a nucleic acid that promotes the specific targeting or homing of a gRNA molecule/Cas9 molecule complex to a target nucleic acid. gRNA molecules can be unimolecular (having a single RNA molecule), sometimes referred to herein as “chimeric” gRNAs, or modular (comprising more than one, and typically two, separate RNA molecules). A gRNA molecule comprises a number of domains. The gRNA molecule domains are described in more detail below.

[0300] Several exemplary gRNA structures, with domains indicated thereon, are provided in FIG. 1. While not wishing to be bound by theory, in an embodiment, with regard to the three dimensional form, or intra- or inter-strand interactions of an active form of a gRNA, regions of high complementarity are sometimes shown as duplexes in FIGS. 1A-1G and other depictions provided herein.

[0301] In an embodiment, a unimolecular, or chimeric, gRNA comprises, preferably from 5′ to 3′:
[0302] a targeting domain (which is complementary to a target nucleic acid in the UL19, UL30, UL48 or UL54 gene, e.g., a targeting domain from any of Tables 1A-1G, Tables 2A-2G, Tables 3A-3G, Tables 4A-4F, Tables 5A-5E, Tables 6A-6G, Tables 7A-7D, Tables 8A-8E, Tables 9A-9G, Tables 10A-10C, Tables 11A-11E, Tables 12A-12G, Tables 13A-13C, Tables 14A-14E, Tables 15A-15G, Tables 16A-16C, or Table 27;
[0303] a first complementarity domain;
[0304] a linking domain;
[0305] a second complementarity domain (which is complementary to the first complementarity domain);
[0306] a proximal domain; and
[0307] optionally, a tail domain.

[0308] In an embodiment, a modular gRNA comprises:
[0309] a first strand comprising, preferably from 5′ to 3′;
   [0310] a targeting domain (which is complementary to a target nucleic acid in the UL19, UL30, UL48 or UL54 gene, e.g., a targeting domain from Tables 1A-1G, Tables 2A-2G, Tables 3A-3G, Tables 4A-4F, Tables 5A-5E, Tables 6A-6G, Tables 7A-7D, Tables 8A-8E, Tables 9A-9G, Tables 10A-10C, Tables 11A-11E, Tables 12A-12G, Tables 13A-13C, Tables 14A-14E, Tables 15A-15G, Tables 16A-16C, or Table 27); and
   [0311] a first complementarity domain; and
[0312] a second strand, comprising, preferably from 5′ to 3′:
   [0313] optionally, a 5′ extension domain;
   [0314] a second complementarity domain;
   [0315] a proximal domain; and
   [0316] optionally, a tail domain.

[0317] The domains are discussed briefly below.

[0318] The Targeting Domain

[0319] FIGS. 1A-1G provide examples of the placement of targeting domains.

[0320] The targeting domain comprises a nucleotide sequence that is complementary, e.g., at least 80, 85, 90, or 95% complementary, e.g., fully complementary, to the target sequence on the target nucleic acid. The targeting domain is part of an RNA molecule and will therefore comprise the base uracil (U), while any DNA encoding the gRNA molecule will comprise the base thymine (T). While not wishing to be bound by theory, in an embodiment, it is believed that the complementarity of the targeting domain with the target sequence contributes to specificity of the interaction of the gRNA molecule/Cas9 molecule complex with a target nucleic acid. It is understood that in a targeting domain and target sequence pair, the uracil bases in the targeting domain will pair with the adenine bases in the target sequence. In an embodiment, the target domain itself comprises in the 5′ to 3′ direction, an optional secondary domain, and a core domain. In an embodiment, the core domain is fully complementary with the target sequence. In an embodiment, the targeting domain is 5 to 50 nucleotides in length. The strand of the target nucleic acid with which the targeting domain is complementary is referred to herein as the complementary strand. Some or all of the nucleotides of the domain can have a modification, e.g., a modification found in Section VIII herein.

[0321] In an embodiment, the targeting domain is 16 nucleotides in length.

[0322] In an embodiment, the targeting domain is 17 nucleotides in length.

[0323] In an embodiment, the targeting domain is 18 nucleotides in length.

[0324] In an embodiment, the targeting domain is 19 nucleotides in length.

[0325] In an embodiment, the targeting domain is 20 nucleotides in length.

[0326] In an embodiment, the targeting domain is 21 nucleotides in length.

[0327] In an embodiment, the targeting domain is 22 nucleotides in length.

[0328] In an embodiment, the targeting domain is 23 nucleotides in length.

[0329] In an embodiment, the targeting domain is 24 nucleotides in length.

[0330] In an embodiment, the targeting domain is 25 nucleotides in length.

[0331] In an embodiment, the targeting domain is 26 nucleotides in length.

[0332] In an embodiment, the targeting domain comprises 16 nucleotides.

[0333] In an embodiment, the targeting domain comprises 17 nucleotides.

[0334] In an embodiment, the targeting domain comprises 18 nucleotides.

[0335] In an embodiment, the targeting domain comprises 19 nucleotides.

[0336] In an embodiment, the targeting domain comprises 20 nucleotides.

[0337] In an embodiment, the targeting domain comprises 21 nucleotides.

[0338] In an embodiment, the targeting domain comprises 22 nucleotides.

[0339] In an embodiment, the targeting domain comprises 23 nucleotides.

[0340] In an embodiment, the targeting domain comprises 24 nucleotides.

[0341] In an embodiment, the targeting domain comprises 25 nucleotides.

[0342] In an embodiment, the targeting domain comprises 26 nucleotides.

[0343] Targeting domains are discussed in more detail below.

[0344] The First Complementarity Domain

[0345] FIGS. 1A-1G provide examples of first complementarity domains.

[0346] The first complementarity domain is complementary with the second complementarity domain, and in an embodiment, has sufficient complementarity to the second complementarity domain to form a duplexed region under at least some physiological conditions. In an embodiment, the first complementarity domain is 5 to 30 nucleotides in length. In an embodiment, the first complementarity domain is 5 to 25 nucleotides in length. In an embodiment, the first complementary domain is 7 to 25 nucleotides in length. In an embodiment, the first complementary domain is 7 to 22 nucleotides in length. In an embodiment, the first complementary domain is 7 to 18 nucleotides in length. In an embodiment, the first complementary domain is 7 to 15 nucleotides in length. In an embodiment, the first complementary domain is 5, 6, 7, 8, 9, 10, 11, 12, 13, 14, 15, 16, 17, 18, 19, 20, 21, 22, 23, 24, or 25 nucleotides in length.

[0347] In an embodiment, the first complementarity domain comprises 3 subdomains, which, in the 5′ to 3′ direction are: a 5′ subdomain, a central subdomain, and a 3′ subdomain. In an embodiment, the 5′ subdomain is 4 to 9, e.g., 4, 5, 6, 7, 8 or 9 nucleotides in length. In an embodiment, the central subdomain is 1, 2, or 3, e.g., 1, nucleotide in length. In an embodiment, the 3′ subdomain is 3 to 25, e.g., 4 to 22, 4 to 18, or 4 to 10, or 3, 4, 5, 6, 7, 8, 9, 10, 11, 12, 13, 14, 15, 16, 17, 18, 19, 20, 21, 22, 23, 24, or 25 nucleotides in length.

[0348] The first complementarity domain can share homology with, or be derived from, a naturally occurring first complementarity domain. In an embodiment, it has at least 50% homology with a first complementarity domain disclosed herein, e.g., an S. pyogenes, S. aureus or S. thermophilus, first complementarity domain.

[0349] Some or all of the nucleotides of the domain can have a modification, e.g., a modification found in Section VIII herein.

[0350] First complementarity domains are discussed in more detail below.

[0351] The Linking Domain

[0352] FIGS. 1A-1G provide examples of linking domains.

[0353] A linking domain serves to link the first complementarity domain with the second complementarity domain of a unimolecular gRNA. The linking domain can link the first and second complementarity domains covalently or non-covalently. In an embodiment, the linkage is covalent. In an embodiment, the linking domain covalently couples the first and second complementarity domains, see, e.g., FIGS. 1B-1E. In an embodiment, the linking domain is, or comprises, a covalent bond interposed between the first complementarity domain and the second complementarity domain. Typically the linking domain comprises one or more, e.g., 2, 3, 4, 5, 6, 7, 8, 9, or 10 nucleotides.

[0354] In modular gRNA molecules the two molecules are associated by virtue of the hybridization of the complementarity domains see e.g., FIG. 1A.

[0355] A wide variety of linking domains are suitable for use in unimolecular gRNA molecules. Linking domains can consist of a covalent bond, or be as short as one or a few nucleotides, e.g., 1, 2, 3, 4, or 5 nucleotides in length. In an embodiment, a linking domain is 2, 3, 4, 5, 6, 7, 8, 9, 10, 15, 20, or 25 or more nucleotides in length. In an embodiment, a linking domain is 2 to 50, 2 to 40, 2 to 30, 2 to 20, 2 to 10, or 2 to 5 nucleotides in length. In an embodiment, a linking domain shares homology with, or is derived from, a naturally occurring sequence, e.g., the sequence of a tracrRNA that is 5′ to the second complementarity domain. In an embodiment, the linking domain has at least 50% homology with a linking domain disclosed herein.

[0356] Some or all of the nucleotides of the domain can have a modification, e.g., a modification found in Section VIII herein.

[0357] Linking domains are discussed in more detail below.

[0358] The 5′ Extension Domain

[0359] In an embodiment, a modular gRNA can comprise additional sequence, 5′ to the second complementarity domain, referred to herein as the 5′ extension domain, see, e.g., FIG. 1A. In an embodiment, the 5′ extension domain is, 2 to 10, 2 to 9, 2 to 8, 2 to 7, 2 to 6, 2 to 5, or 2 to 4 nucleotides in length. In an embodiment, the 5′ extension domain is 2, 3, 4, 5, 6, 7, 8, 9, or 10 or more nucleotides in length.

[0360] The Second Complementarity Domain

[0361] FIGS. 1A-1G provide examples of second complementarity domains.

[0362] The second complementarity domain is complementary with the first complementarity domain, and in an embodiment, has sufficient complementarity to the second complementarity domain to form a duplexed region under at least some physiological conditions. In an embodiment, e.g., as shown in FIGS. 1A-1B, the second complementarity domain can include sequence that lacks complementarity with the first complementarity domain, e.g., sequence that loops out from the duplexed region.

[0363] In an embodiment, the second complementarity domain is 5 to 27 nucleotides in length. In an embodiment, it is longer than the first complementarity region. In an embodiment the second complementary domain is 7 to 27 nucleotides in length. In an embodiment, the second complementary domain is 7 to 25 nucleotides in length. In an embodiment, the second complementary domain is 7 to 20 nucleotides in length. In an embodiment, the second complementary domain is 7 to 17 nucleotides in length. In an embodiment, the complementary domain is 5, 6, 7, 8, 9, 10, 11, 12, 13, 14, 15, 16, 17, 18, 19, 20, 21, 22, 23, 24 or 25 nucleotides in length.

[0364] In an embodiment, the second complementarity domain comprises 3 subdomains, which, in the 5′ to 3′ direction are: a 5′ subdomain, a central subdomain, and a 3′ subdomain. In an embodiment, the 5′ subdomain is 3 to 25, e.g., 4 to 22, 4 to 18, or 4 to 10, or 3, 4, 5, 6, 7, 8, 9, 10, 11, 12, 13, 14, 15, 16, 17, 18, 19, 20, 21, 22, 23, 24, or 25 nucleotides in length. In an embodiment, the central subdomain is 1, 2, 3, 4 or 5, e.g., 3, nucleotides in length. In an embodiment, the 3′ subdomain is 4 to 9, e.g., 4, 5, 6, 7, 8 or 9 nucleotides in length.

[0365] In an embodiment, the 5′ subdomain and the 3′ subdomain of the first complementarity domain, are respectively, complementary, e.g., fully complementary, with the 3′ subdomain and the 5′ subdomain of the second complementarity domain.

[0366] The second complementarity domain can share homology with or be derived from a naturally occurring second complementarity domain. In an embodiment, it has at least 50% homology with a second complementarity domain disclosed herein, e.g., an S. pyogenes, S. aureus or S. thermophilus, first complementarity domain.

[0367] Some or all of the nucleotides of the domain can have a modification, e.g., a modification found in Section VIII herein.

[0368] A Proximal Domain

[0369] FIGS. 1A-1G provide examples of proximal domains.

[0370] In an embodiment, the proximal domain is 5 to 20 nucleotides in length. In an embodiment, the proximal domain can share homology with or be derived from a naturally occurring proximal domain. In an embodiment, it has at least 50% homology with a proximal domain disclosed herein, e.g., an S. pyogenes, S. aureus or S. thermophilus, proximal domain.

[0371] Some or all of the nucleotides of the domain can have a modification, e.g., a modification found in Section VIII herein.

[0372] A Tail Domain

[0373] FIGS. 1A-1G provide examples of tail domains.

[0374] As can be seen by inspection of the tail domains in FIGS. 1A-1E, a broad spectrum of tail domains are suitable for use in gRNA molecules. In an embodiment, the tail domain is 0 (absent), 1, 2, 3, 4, 5, 6, 7, 8, 9, or 10 nucleotides in length. In embodiment, the tail domain nucleotides are from or share homology with sequence from the 5′ end of a naturally occurring tail domain, see e.g., FIG. 1D or FIG. 1E. In an embodiment, the tail domain includes sequences that are complementary to each other and which, under at least some physiological conditions, form a duplexed region.

[0375] In an embodiment, the tail domain is absent or is 1 to 50 nucleotides in length. In an embodiment, the tail domain can share homology with or be derived from a naturally occurring proximal tail domain. In an embodiment, it has at least 50% homology with a tail domain disclosed herein, e.g., an S. pyogenes, S. aureus or S. thermophilus, tail domain.

[0376] In an embodiment, the tail domain includes nucleotides at the 3′ end that are related to the method of in vitro or in vivo transcription. When a T7 promoter is used for in vitro transcription of the gRNA, these nucleotides may be any nucleotides present before the 3′ end of the DNA template. When a U6 promoter is used for in vivo transcription, these nucleotides may be the sequence UUUUUU. When alternate pol-III promoters are used, these nucleotides may be various numbers or uracil bases or may include alternate bases.

[0377] The domains of gRNA molecules are described in more detail below.

[0378] The Targeting Domain

[0379] The “targeting domain” of the gRNA is complementary to the “target domain” on the target nucleic acid. The strand of the target nucleic acid comprising the nucleotide sequence complementary to the core domain of the gRNA is referred to herein as the “complementary strand” of the target nucleic acid. Guidance on the selection of targeting domains can be found, e.g., in Fu Y et al., Nat Biotechnol 2014 (doi: 10.1038/nbt.2808) and Sternberg S H et al., Nature 2014 (doi: 10.1038/nature13011).

[0380] In an embodiment, the targeting domain is 16, 17, 18, 19, 20, 21, 22, 23, 24, 25 or 26 nucleotides in length.

[0381] In an embodiment, the targeting domain is 16 nucleotides in length.

[0382] In an embodiment, the targeting domain is 17 nucleotides in length.

[0383] In an embodiment, the targeting domain is 18 nucleotides in length.

[0384] In an embodiment, the targeting domain is 19 nucleotides in length.

[0385] In an embodiment, the targeting domain is 20 nucleotides in length.

[0386] In an embodiment, the targeting domain is 21 nucleotides in length.

[0387] In an embodiment, the targeting domain is 22 nucleotides in length.

[0388] In an embodiment, the targeting domain is 23 nucleotides in length.

[0389] In an embodiment, the targeting domain is 24 nucleotides in length.

[0390] In an embodiment, the targeting domain is 25 nucleotides in length.

[0391] In an embodiment, the targeting domain is 26 nucleotides in length.

[0392] In an embodiment, the targeting domain comprises 16 nucleotides.

[0393] In an embodiment, the targeting domain comprises 17 nucleotides.

[0394] In an embodiment, the targeting domain comprises 18 nucleotides.

[0395] In an embodiment, the targeting domain comprises 19 nucleotides.

[0396] In an embodiment, the targeting domain comprises 20 nucleotides.

[0397] In an embodiment, the targeting domain comprises 21 nucleotides.

[0398] In an embodiment, the targeting domain comprises 22 nucleotides.

[0399] In an embodiment, the targeting domain comprises 23 nucleotides.

[0400] In an embodiment, the targeting domain comprises 24 nucleotides.

[0401] In an embodiment, the targeting domain comprises 25 nucleotides.

[0402] In an embodiment, the targeting domain comprises 26 nucleotides.

[0403] In an embodiment, the targeting domain is 10+/−5, 20+/−5, 30+/−5, 40+/−5, 50+/−5, 60+/−5, 70+/−5, 80+/−5, 90+/−5, or 100+/−5 nucleotides, in length.

[0404] In an embodiment, the targeting domain is 20+/−5 nucleotides in length.

[0405] In an embodiment, the targeting domain is 20+/−10, 30+/−10, 40+/−10, 50+/−10, 60+/−10, 70+/−10, 80+/−10, 90+/−10, or 100+/−10 nucleotides, in length.

[0406] In an embodiment, the targeting domain is 30+/−10 nucleotides in length.

[0407] In an embodiment, the targeting domain is 10 to 100, 10 to 90, 10 to 80, 10 to 70, 10 to 60, 10 to 50, 10 to 40, 10 to 30, 10 to 20 or 10 to 15 nucleotides in length. In another embodiment, the targeting domain is 20 to 100, 20 to 90, 20 to 80, 20 to 70, 20 to 60, 20 to 50, 20 to 40, 20 to 30, or 20 to 25 nucleotides in length.

[0408] Typically the targeting domain has full complementarity with the target sequence. In an embodiment the targeting domain has or includes 1, 2, 3, 4, 5, 6, 7 or 8 nucleotides that are not complementary with the corresponding nucleotide of the targeting domain.

[0409] In an embodiment, the target domain includes 1, 2, 3, 4 or 5 nucleotides that are complementary with the corresponding nucleotide of the targeting domain within 5 nucleotides of its 5′ end. In an embodiment, the target domain includes 1, 2, 3, 4 or 5 nucleotides that are complementary with the corresponding nucleotide of the targeting domain within 5 nucleotides of its 3′ end.

[0410] In an embodiment, the target domain includes 1, 2, 3, or 4 nucleotides that are not complementary with the corresponding nucleotide of the targeting domain within 5 nucleotides of its 5′ end. In an embodiment, the target domain includes 1, 2, 3, or 4 nucleotides that are not complementary with the corresponding nucleotide of the targeting domain within 5 nucleotides of its 3′ end.

[0411] In an embodiment, the degree of complementarity, together with other properties of the gRNA, is sufficient to allow targeting of a Cas9 molecule to the target nucleic acid.

[0412] In some embodiments, the targeting domain comprises two consecutive nucleotides that are not complementary to the target domain (“non-complementary nucleotides”), e.g., two consecutive noncomplementary nucleotides that are within 5 nucleotides of the 5′ end of the targeting domain, within 5 nucleotides of the 3′ end of the targeting domain, or more than 5 nucleotides away from one or both ends of the targeting domain.

[0413] In an embodiment, no two consecutive nucleotides within 5 nucleotides of the 5′ end of the targeting domain, within 5 nucleotides of the 3′ end of the targeting domain, or within a region that is more than 5 nucleotides away from one or both ends of the targeting domain, are not complementary to the targeting domain.

[0414] In an embodiment, there are no noncomplementary nucleotides within 5 nucleotides of the 5′ end of the targeting domain, within 5 nucleotides of the 3′ end of the targeting domain, or within a region that is more than 5 nucleotides away from one or both ends of the targeting domain.

[0415] In an embodiment, the targeting domain nucleotides do not comprise modifications, e.g., modifications of the type provided in Section VIII. However, in an embodiment, the targeting domain comprises one or more modifications, e.g., modifications that it render it less susceptible to degradation or more bio-compatible, e.g., less immunogenic. By way of example, the backbone of the targeting domain can be modified with a phosphorothioate, or other modification(s) from Section VIII. In an embodiment, a nucleotide of the targeting domain can comprise a 2′ modification, e.g., a 2-acetylation, e.g., a 2′ methylation, or other modification(s) from Section VIII.

[0416] In some embodiments, the targeting domain includes 1, 2, 3, 4, 5, 6, 7 or 8 or more modifications. In an embodiment, the targeting domain includes 1, 2, 3, or 4 modifications within 5 nucleotides of its 5′ end. In an embodiment, the targeting domain comprises as many as 1, 2, 3, or 4 modifications within 5 nucleotides of its 3′ end.

[0417] In some embodiments, the targeting domain comprises modifications at two consecutive nucleotides, e.g., two consecutive nucleotides that are within 5 nucleotides of the 5′ end of the targeting domain, within 5 nucleotides of the 3′ end of the targeting domain, or more than 5 nucleotides away from one or both ends of the targeting domain.

[0418] In an embodiment, no two consecutive nucleotides are modified within 5 nucleotides of the 5′ end of the targeting domain, within 5 nucleotides of the 3′ end of the targeting domain, or within a region that is more than 5 nucleotides away from one or both ends of the targeting domain. In an embodiment, no nucleotide is modified within 5 nucleotides of the 5′ end of the targeting domain, within 5 nucleotides of the 3′ end of the targeting domain, or within a region that is more than 5 nucleotides away from one or both ends of the targeting domain.

[0419] Modifications in the targeting domain can be selected so as to not interfere with targeting efficacy, which can be evaluated by testing a candidate modification in the system described in Section IV. gRNAs having a candidate targeting domain having a selected length, sequence, degree of complementarity, or degree of modification, can be evaluated in a system in Section IV. The candidate targeting domain can be placed, either alone, or with one or more other candidate changes in a gRNA molecule/Cas9 molecule system known to be functional with a selected target and evaluated.

[0420] In an embodiment, all of the modified nucleotides are complementary to and capable of hybridizing to corresponding nucleotides present in the target domain. In another embodiment, 1, 2, 3, 4, 5, 6, 7 or 8 or more modified nucleotides are not complementary to or capable of hybridizing to corresponding nucleotides present in the target domain.

[0421] In an embodiment, the targeting domain comprises, preferably in the 5′→3′ direction: a secondary domain and a core domain. These domains are discussed in more detail below.

[0422] The Core Domain and Secondary Domain of the Targeting Domain

[0423] The “core domain” of the targeting domain is complementary to the “core domain target” on the target nucleic acid. In an embodiment, the core domain comprises about 8 to about 13 nucleotides from the 3′ end of the targeting domain (e.g., the most 3′ 8 to 13 nucleotides of the targeting domain).

[0424] In an embodiment, the core domain and targeting domain, are independently, 6+/−2, 7+/−2, 8+/−2, 9+/−2, 10+/−2, 11+/−2, 12+/−2, 13+/−2, 14+/−2, 15+/−2, or 16+−2, nucleotides in length.

[0425] In an embodiment, the core domain and targeting domain, are independently, 10+/−2 nucleotides in length.

[0426] In an embodiment, the core domain and targeting domain, are independently, 10+/−4 nucleotides in length.

[0427] In an embodiment, the core domain and targeting domain are independently 6, 7, 8, 9, 10, 11, 12, 13, 14, 15, 16, 17, or 18 nucleotides in length.

[0428] In an embodiment, the core domain and targeting domain are independently 3 to 20, 4 to 20, 5 to 20, 6 to 20, 7 to 20, 8 to 20, 9 to 20 10 to 20 or 15 to 20 nucleotides in length.

[0429] In an embodiment, the core domain and targeting domain are independently 3 to 15, e.g., 6 to 15, 7 to 14, 7 to 13, 6 to 12, 7 to 12, 7 to 11, 7 to 10, 8 to 14, 8 to 13, 8 to 12, 8 to 11, 8 to 10 or 8 to 9 nucleotides in length.

[0430] The core domain is complementary with the core domain target. Typically the core domain has exact complementarity with the core domain target. In some embodiments, the core domain can have 1, 2, 3, 4 or 5 nucleotides that are not complementary with the corresponding nucleotide of the core domain. In an embodiment, the degree of complementarity, together with other properties of the gRNA, is sufficient to allow targeting of a Cas9 molecule to the target nucleic acid.

[0431] The “secondary domain” of the targeting domain of the gRNA is complementary to the “secondary domain target” of the target nucleic acid.

[0432] In an embodiment, the secondary domain is positioned 5′ to the core domain.

[0433] In an embodiment, the secondary domain is absent or optional.

[0434] In an embodiment, if the targeting domain is 26 nucleotides in length and the core domain (counted from the 3′ end of the targeting domain) is 8 to 13 nucleotides in length, the secondary domain is 12 to 17 nucleotides in length.

[0435] In an embodiment, if the targeting domain is 25 nucleotides in length and the core domain (counted from the 3′ end of the targeting domain) is 8 to 13 nucleotides in length, the secondary domain is 12 to 17 nucleotides in length.

[0436] In an embodiment, if the targeting domain is 24 nucleotides in length and the core domain (counted from the 3′ end of the targeting domain) is 8 to 13 nucleotides in length, the secondary domain is 11 to 16 nucleotides in length.

[0437] In an embodiment, if the targeting domain is 23 nucleotides in length and the core domain (counted from the 3′ end of the targeting domain) is 8 to 13 nucleotides in length, the secondary domain is 10 to 15 nucleotides in length.

[0438] In an embodiment, if the targeting domain is 22 nucleotides in length and the core domain (counted from the 3′ end of the targeting domain) is 8 to 13 nucleotides in length, the secondary domain is 9 to 14 nucleotides in length.

[0439] In an embodiment, if the targeting domain is 21 nucleotides in length and the core domain (counted from the 3′ end of the targeting domain) is 8 to 13 nucleotides in length, the secondary domain is 8 to 13 nucleotides in length.

[0440] In an embodiment, if the targeting domain is 20 nucleotides in length and the core domain (counted from the 3′ end of the targeting domain) is 8 to 13 nucleotides in length, the secondary domain is 7 to 12 nucleotides in length.

[0441] In an embodiment, if the targeting domain is 19 nucleotides in length and the core domain (counted from the 3′ end of the targeting domain) is 8 to 13 nucleotides in length, the secondary domain is 6 to 11 nucleotides in length.

[0442] In an embodiment, if the targeting domain is 18 nucleotides in length and the core domain (counted from the 3′ end of the targeting domain) is 8 to 13 nucleotides in length, the secondary domain is 5 to 10 nucleotides in length.

[0443] In an embodiment, if the targeting domain is 17 nucleotides in length and the core domain (counted from the 3′ end of the targeting domain) is 8 to 13 nucleotides in length, the secondary domain is 4 to 9 nucleotides in length.

[0444] In an embodiment, if the targeting domain is 16 nucleotides in length and the core domain (counted from the 3′ end of the targeting domain) is 8 to 13 nucleotides in length, the secondary domain is 3 to 8 nucleotides in length.

[0445] In an embodiment, the secondary domain is 0, 1, 2, 3, 4, 5, 6, 7, 8, 9, 10, 11, 12, 13, 14 or 15 nucleotides in length.

[0446] The secondary domain is complementary with the secondary domain target. Typically the secondary domain has exact complementarity with the secondary domain target. In some embodiments the secondary domain can have 1, 2, 3, 4 or 5 nucleotides that are not complementary with the corresponding nucleotide of the secondary domain. In an embodiment, the degree of complementarity, together with other properties of the gRNA, is sufficient to allow targeting of a Cas9 molecule to the target nucleic acid.

[0447] In an embodiment, the core domain nucleotides do not comprise modifications, e.g., modifications of the type provided in Section VIII. However, in an embodiment, the core domain comprises one or more modifications, e.g., modifications that it render it less susceptible to degradation or more bio-compatible, e.g., less immunogenic. By way of example, the backbone of the core domain can be modified with a phosphorothioate, or other modification(s) from Section VIII. In an embodiment a nucleotide of the core domain can comprise a 2′ modification, e.g., a 2-acetylation, e.g., a 2′ methylation, or other modification(s) from Section VIII. Typically, a core domain will contain no more than 1, 2, or 3 modifications.

[0448] Modifications in the core domain can be selected so as to not interfere with targeting efficacy, which can be evaluated by testing a candidate modification in the system described in Section IV. gRNAs having a candidate core domain having a selected length, sequence, degree of complementarity, or degree of modification, can be evaluated in the system described at Section IV. The candidate core domain can be placed, either alone, or with one or more other candidate changes in a gRNA molecule/Cas9 molecule system known to be functional with a selected target and evaluated.

[0449] In an embodiment, the secondary domain nucleotides do not comprise modifications, e.g., modifications of the type provided in Section VIII. However, in an embodiment, the secondary domain comprises one or more modifications, e.g., modifications that render it less susceptible to degradation or more bio-compatible, e.g., less immunogenic. By way of example, the backbone of the secondary domain can be modified with a phosphorothioate, or other modification(s) from Section VIII. In an embodiment a nucleotide of the secondary domain can comprise a 2′ modification, e.g., a 2-acetylation, e.g., a 2′ methylation, or other modification(s) from Section VIII. Typically, a secondary domain will contain no more than 1, 2, or 3 modifications.

[0450] Modifications in the secondary domain can be selected to not interfere with targeting efficacy, which can be evaluated by testing a candidate modification in the system described in Section IV. gRNAs having a candidate secondary domain having a selected length, sequence, degree of complementarity, or degree of modification, can be evaluated in the system described at Section IV. The candidate secondary domain can be placed, either alone, or with one or more other candidate changes in a gRNA molecule/Cas9 molecule system known to be functional with a selected target and evaluated.

[0451] In an embodiment, (1) the degree of complementarity between the core domain and its target, and (2) the degree of complementarity between the secondary domain and its target, may differ. In an embodiment, (1) may be greater than (2). In an embodiment, (1) may be less than (2). In an embodiment, (1) and (2) are the same, e.g., each may be completely complementary with its target.

[0452] In an embodiment, (1) the number of modifications (e.g., modifications from Section VIII) of the nucleotides of the core domain and (2) the number of modifications (e.g., modifications from Section VIII) of the nucleotides of the secondary domain may differ. In an embodiment, (1) may be less than (2). In an embodiment, (1) may be greater than (2). In an embodiment, (1) and (2) may be the same, e.g., each may be free of modifications.

[0453] The First and Second Complementarity Domains

[0454] The first complementarity domain is complementary with the second complementarity domain.

[0455] Typically the first domain does not have exact complementarity with the second complementarity domain target. In some embodiments, the first complementarity domain can have 1, 2, 3, 4 or 5 nucleotides that are not complementary with the corresponding nucleotide of the second complementarity domain. In an embodiment, 1, 2, 3, 4, 5 or 6, e.g., 3 nucleotides, will not pair in the duplex, and, e.g., form a non-duplexed or looped-out region. In an embodiment, an unpaired, or loop-out, region, e.g., a loop-out of 3 nucleotides, is present on the second complementarity domain. In an embodiment, the unpaired region begins 1, 2, 3, 4, 5, or 6, e.g., 4, nucleotides from the 5′ end of the second complementarity domain.

[0456] In an embodiment, the degree of complementarity, together with other properties of the gRNA, is sufficient to allow targeting of a Cas9 molecule to the target nucleic acid.

[0457] In an embodiment, the first and second complementarity domains are:

[0458] independently, 6+/−2, 7+/−2, 8+/−2, 9+/−2, 10+/−2, 11+/−2, 12+/−2, 13+/−2, 14+/−2, 15+/−2, 16+/−2, 17+/−2, 18+/−2, 19+/−2, or 20+/−2, 21+/−2, 22+/−2, 23+/−2, or 24+/−2 nucleotides in length;

[0459] independently, 6, 7, 8, 9, 10, 11, 12, 13, 14, 14, 16, 17, 18, 19, 20, 21, 22, 23, 24, 25, or 26 nucleotides in length; or

[0460] independently, 5 to 24, 5 to 23, 5 to 22, 5 to 21, 5 to 20, 7 to 18, 9 to 16, or 10 to 14 nucleotides in length.

[0461] In an embodiment, the second complementarity domain is longer than the first complementarity domain, e.g., 2, 3, 4, 5, or 6, e.g., 6, nucleotides longer.

[0462] In an embodiment, the first and second complementary domains, independently, do not comprise modifications, e.g., modifications of the type provided in Section VIII.

[0463] In an embodiment, the first and second complementary domains, independently, comprise one or more modifications, e.g., modifications that the render the domain less susceptible to degradation or more bio-compatible, e.g., less immunogenic. By way of example, the backbone of the domain can be modified with a phosphorothioate, or other modification(s) from Section VIII. In an embodiment a nucleotide of the domain can comprise a 2′ modification, e.g., a 2-acetylation, e.g., a 2′ methylation, or other modification(s) from Section VIII.

[0464] In an embodiment, the first and second complementary domains, independently, include 1, 2, 3, 4, 5, 6, 7 or 8 or more modifications. In an embodiment, the first and second complementary domains, independently, include 1, 2, 3, or 4 modifications within 5 nucleotides of its 5′ end. In an embodiment, the first and second complementary domains, independently, include as many as 1, 2, 3, or 4 modifications within 5 nucleotides of its 3′ end.

[0465] In an embodiment, the first and second complementary domains, independently, include modifications at two consecutive nucleotides, e.g., two consecutive nucleotides that are within 5 nucleotides of the 5′ end of the domain, within 5 nucleotides of the 3′ end of the domain, or more than 5 nucleotides away from one or both ends of the domain. In an embodiment, the first and second complementary domains, independently, include no two consecutive nucleotides that are modified, within 5 nucleotides of the 5′ end of the domain, within 5 nucleotides of the 3′ end of the domain, or within a region that is more than 5 nucleotides away from one or both ends of the domain. In an embodiment, the first and second complementary domains, independently, include no nucleotide that is modified within 5 nucleotides of the 5′ end of the domain, within 5 nucleotides of the 3′ end of the domain, or within a region that is more than 5 nucleotides away from one or both ends of the domain.

[0466] Modifications in a complementarity domain can be selected so as to not interfere with targeting efficacy, which can be evaluated by testing a candidate modification in the system described in Section IV. gRNAs having a candidate complementarity domain having a selected length, sequence, degree of complementarity, or degree of modification, can be evaluated in the system described in Section IV. The candidate complementarity domain can be placed, either alone, or with one or more other candidate changes in a gRNA molecule/Cas9 molecule system known to be functional with a selected target and evaluated.

[0467] In an embodiment, the first complementarity domain has at least 60, 70, 80, 85%, 90% or 95% homology with, or differs by no more than 1, 2, 3, 4, 5, or 6 nucleotides from, a reference first complementarity domain, e.g., a naturally occurring, e.g., an S. pyogenes, S. aureus or S. thermophilus, first complementarity domain, or a first complementarity domain described herein, e.g., from FIGS. 1A-1G.

[0468] In an embodiment, the second complementarity domain has at least 60, 70, 80, 85%, 90%, or 95% homology with, or differs by no more than 1, 2, 3, 4, 5, or 6 nucleotides from, a reference second complementarity domain, e.g., a naturally occurring, e.g., an S. pyogenes, S. aureus or S. thermophilus, second complementarity domain, or a second complementarity domain described herein, e.g., from FIGS. 1A-1G.

[0469] The duplexed region formed by first and second complementarity domains is typically 6, 7, 8, 9, 10, 11, 12, 13, 14, 15, 16, 17, 18, 19, 20, 21 or 22 base pairs in length (excluding any looped out or unpaired nucleotides).

[0470] In some embodiments, the first and second complementarity domains, when duplexed, comprise 11 paired nucleotides, for example, in the gRNA sequence (one paired strand underlined, one bolded):

(SEQ ID NO: 5)
NNNNNNNNNNNNNNNNNNNNGUUUUAGAGCUAGAAAUAGCAAGUUAAAAU
AAGGCUAGUCCGUUAUCAACUUGAAAAAGUGGCACCGAGUCGGUGC.

[0471] In some embodiments, the first and second complementarity domains, when duplexed, comprise 15 paired nucleotides, for example in the gRNA sequence (one paired strand underlined, one bolded):

(SEQ ID NO: 27)
NNNNNNNNNNNNNNNNNNNNGUUUUAGAGCUAUGCUGAAAAGCAUAGCAA
GUUAAAAUAAGGCUAGUCCGUUAUCAACUUGAAAAAGUGGCACCGAGUCG
GUGC.

[0472] In some embodiments the first and second complementarity domains, when duplexed, comprise 16 paired nucleotides, for example in the gRNA sequence (one paired strand underlined, one bolded):

(SEQ ID NO: 28)
NNNNNNNNNNNNNNNNNNNNGUUUUAGAGCUAUGCUGGAAACAGCAUAGC
AAGUUAAAAUAAGGCUAGUCCGUUAUCAACUUGAAAAAGUGGCACCGAGU
CGGUGC.

[0473] In some embodiments the first and second complementarity domains, when duplexed, comprise 21 paired nucleotides, for example in the gRNA sequence (one paired strand underlined, one bolded):

(SEQ ID NO: 29)
NNNNNNNNNNNNNNNNNNNNGUUUUAGAGCUAUGCUGUUUUGGAAACAAA
ACAGCAUAGCAAGUUAAAAUAAGGCUAGUCCGUUAUCAACUUGAAAAAGU
GGCACCGAGUCGGUGC.

[0474] In some embodiments, nucleotides are exchanged to remove poly-U tracts, for example in the gRNA sequences (exchanged nucleotides underlined):

(SEQ ID NO: 30)
NNNNNNNNNNNNNNNNNNNNGUAUUAGAGCUAGAAAUAGCAAGUUAAUAU
AAGGCUAGUCCGUUAUCAACUUGAAAAAGUGGCACCGAGUCGGUGC;
(SEQ ID NO: 31)
NNNNNNNNNNNNNNNNNNNNGUUUAAGAGCUAGAAAUAGCAAGUUUAAAU
AAGGCUAGUCCGUUAUCAACUUGAAAAAGUGGCACCGAGUCGGUGC;
or
(SEQ ID NO: 32)
NNNNNNNNNNNNNNNNNNNNGUAUUAGAGCUAUGCUGUAUUGGAAACAAU
ACAGCAUAGCAAGUUAAUAUAAGGCUAGUCCGUUAUCAACUUGAAAAAGU
GGCACCGAGUCGGUGC.

[0475] The 5′ Extension Domain

[0476] In an embodiment, a modular gRNA can comprise additional sequence, 5′ to the second complementarity domain. In an embodiment, the 5′ extension domain is 2 to 10, 2 to 9, 2 to 8, 2 to 7, 2 to 6, 2 to 5, or 2 to 4 nucleotides in length. In an embodiment, the 5′ extension domain is 2, 3, 4, 5, 6, 7, 8, 9, or 10 or more nucleotides in length.

[0477] In an embodiment, the 5′ extension domain nucleotides do not comprise modifications, e.g., modifications of the type provided in Section VIII. However, in an embodiment, the 5′ extension domain comprises one or more modifications, e.g., modifications that it render it less susceptible to degradation or more bio-compatible, e.g., less immunogenic. By way of example, the backbone of the 5′ extension domain can be modified with a phosphorothioate, or other modification(s) from Section VIII. In an embodiment, a nucleotide of the 5′ extension domain can comprise a 2′ modification, e.g., a 2-acetylation, e.g., a 2′ methylation, or other modification(s) from Section VIII.

[0478] In an embodiment, the 5′ extension domain can comprise as many as 1, 2, 3, 4, 5, 6, 7 or 8 modifications. In an embodiment, the 5′ extension domain comprises as many as 1, 2, 3, or 4 modifications within 5 nucleotides of its 5′ end, e.g., in a modular gRNA molecule. In an embodiment, the 5′ extension domain comprises as many as 1, 2, 3, or 4 modifications within 5 nucleotides of its 3′ end, e.g., in a modular gRNA molecule.

[0479] In an embodiment, the 5′ extension domain comprises modifications at two consecutive nucleotides, e.g., two consecutive nucleotides that are within 5 nucleotides of the 5′ end of the 5′ extension domain, within 5 nucleotides of the 3′ end of the 5′ extension domain, or more than 5 nucleotides away from one or both ends of the 5′ extension domain. In an embodiment, no two consecutive nucleotides are modified within 5 nucleotides of the 5′ end of the 5′ extension domain, within 5 nucleotides of the 3′ end of the 5′ extension domain, or within a region that is more than 5 nucleotides away from one or both ends of the 5′ extension domain. In an embodiment, no nucleotide is modified within 5 nucleotides of the 5′ end of the 5′ extension domain, within 5 nucleotides of the 3′ end of the 5′ extension domain, or within a region that is more than 5 nucleotides away from one or both ends of the 5′ extension domain.

[0480] Modifications in the 5′ extension domain can be selected so as to not interfere with gRNA molecule efficacy, which can be evaluated by testing a candidate modification in the system described in Section IV. gRNAs having a candidate 5′ extension domain having a selected length, sequence, degree of complementarity, or degree of modification, can be evaluated in the system described at Section IV. The candidate 5′ extension domain can be placed, either alone, or with one or more other candidate changes in a gRNA molecule/Cas9 molecule system known to be functional with a selected target and evaluated.

[0481] In an embodiment, the 5′ extension domain has at least 60, 70, 80, 85, 90 or 95% homology with, or differs by no more than 1, 2, 3, 4, 5, or 6 nucleotides from, a reference 5′ extension domain, e.g., a naturally occurring, e.g., an S. pyogenes, S. aureus or S. thermophilus, 5′ extension domain, or a 5′ extension domain described herein, e.g., from FIGS. 1A-1G.

[0482] The Linking Domain

[0483] In a unimolecular gRNA molecule the linking domain is disposed between the first and second complementarity domains. In a modular gRNA molecule, the two molecules are associated with one another by the complementarity domains.

[0484] In an embodiment, the linking domain is 10+/−5, 20+/−5, 30+/−5, 40+/−5, 50+/−5, 60+/−5, 70+/−5, 80+/−5, 90+/−5, or 100+/−5 nucleotides, in length.

[0485] In an embodiment, the linking domain is 20+/−10, 30+/−10, 40+/−10, 50+/−10, 60+/−10, 70+/−10, 80+/−10, 90+/−10, or 100+/−10 nucleotides, in length.

[0486] In an embodiment, the linking domain is 10 to 100, 10 to 90, 10 to 80, 10 to 70, 10 to 60, 10 to 50, 10 to 40, 10 to 30, 10 to 20 or 10 to 15 nucleotides in length. In other embodiments, the linking domain is 20 to 100, 20 to 90, 20 to 80, 20 to 70, 20 to 60, 20 to 50, 20 to 40, 20 to 30, or 20 to 25 nucleotides in length.

[0487] In an embodiment, the linking domain is 1, 2, 3, 4, 5, 6, 7, 8, 9, 10, 11, 12, 13, 14, 15, 16 17, 18, 19, or 20 nucleotides in length.

[0488] In an embodiment, the linking domain is a covalent bond.

[0489] In an embodiment, the linking domain comprises a duplexed region, typically adjacent to or within 1, 2, or 3 nucleotides of the 3′ end of the first complementarity domain and/or the 5-end of the second complementarity domain. In an embodiment, the duplexed region can be 20+/−10 base pairs in length. In an embodiment, the duplexed region can be 10+/−5, 15+/−5, 20+/−5, or 30+/−5 base pairs in length. In an embodiment, the duplexed region can be 1, 2, 3, 4, 5, 6, 7, 8, 9, 10, 11, 12, 13, 14, or 15 base pairs in length.

[0490] Typically the sequences forming the duplexed region have exact complementarity with one another, though in some embodiments as many as 1, 2, 3, 4, 5, 6, 7 or 8 nucleotides are not complementary with the corresponding nucleotides.

[0491] In an embodiment, the linking domain nucleotides do not comprise modifications, e.g., modifications of the type provided in Section VIII. However, in an embodiment, the linking domain comprises one or more modifications, e.g., modifications that it render it less susceptible to degradation or more bio-compatible, e.g., less immunogenic. By way of example, the backbone of the linking domain can be modified with a phosphorothioate, or other modification(s) from Section VIII. In an embodiment a nucleotide of the linking domain can comprise a 2′ modification, e.g., a 2-acetylation, e.g., a 2′ methylation, or other modification(s) from Section VIII. In an embodiment, the linking domain can comprise as many as 1, 2, 3, 4, 5, 6, 7 or 8 modifications.

[0492] Modifications in a linking domain can be selected so as to not interfere with targeting efficacy, which can be evaluated by testing a candidate modification in the system described in Section IV. gRNAs having a candidate linking domain having a selected length, sequence, degree of complementarity, or degree of modification, can be evaluated a system described in Section IV. A candidate linking domain can be placed, either alone, or with one or more other candidate changes in a gRNA molecule/Cas9 molecule system known to be functional with a selected target and evaluated.

[0493] In an embodiment, the linking domain has at least 60, 70, 80, 85, 90 or 95% homology with, or differs by no more than 1, 2, 3, 4, 5, or 6 nucleotides from, a reference linking domain, e.g., a linking domain described herein, e.g., from FIGS. 1A-1G.

[0494] The Proximal Domain

[0495] In an embodiment, the proximal domain is 6+/−2, 7+/−2, 8+/−2, 9+/−2, 10+/−2, 11+/−2, 12+/−2, 13+/−2, 14+/−2, 14+/−2, 16+/−2, 17+/−2, 18+/−2, 19+/−2, or 20+/−2 nucleotides in length.

[0496] In an embodiment, the proximal domain is 6, 7, 8, 9, 10, 11, 12, 13, 14, 15, 16, 17, 18, 19, 20, 21, 22, 23, 24, 25 or 26 nucleotides in length.

[0497] In an embodiment, the proximal domain is 5 to 20, 7, to 18, 9 to 16, or 10 to 14 nucleotides in length.

[0498] In an embodiment, the proximal domain nucleotides do not comprise modifications, e.g., modifications of the type provided in Section VIII. However, in an embodiment, the proximal domain comprises one or more modifications, e.g., modifications that it render it less susceptible to degradation or more bio-compatible, e.g., less immunogenic. By way of example, the backbone of the proximal domain can be modified with a phosphorothioate, or other modification(s) from Section VIII. In an embodiment a nucleotide of the proximal domain can comprise a 2′ modification, e.g., a 2-acetylation, e.g., a 2′ methylation, or other modification(s) from Section VIII.

[0499] In an embodiment, the proximal domain can comprise as many as 1, 2, 3, 4, 5, 6, 7 or 8 modifications. In an embodiment, the proximal domain comprises as many as 1, 2, 3, or 4 modifications within 5 nucleotides of its 5′ end, e.g., in a modular gRNA molecule. In an embodiment, the target domain comprises as many as 1, 2, 3, or 4 modifications within 5 nucleotides of its 3′ end, e.g., in a modular gRNA molecule.

[0500] In an embodiment, the proximal domain comprises modifications at two consecutive nucleotides, e.g., two consecutive nucleotides that are within 5 nucleotides of the 5′ end of the proximal domain, within 5 nucleotides of the 3′ end of the proximal domain, or more than 5 nucleotides away from one or both ends of the proximal domain. In an embodiment, no two consecutive nucleotides are modified within 5 nucleotides of the 5′ end of the proximal domain, within 5 nucleotides of the 3′ end of the proximal domain, or within a region that is more than 5 nucleotides away from one or both ends of the proximal domain. In an embodiment, no nucleotide is modified within 5 nucleotides of the 5′ end of the proximal domain, within 5 nucleotides of the 3′ end of the proximal domain, or within a region that is more than 5 nucleotides away from one or both ends of the proximal domain.

[0501] Modifications in the proximal domain can be selected so as to not interfere with gRNA molecule efficacy, which can be evaluated by testing a candidate modification in the system described in Section IV. gRNAs having a candidate proximal domain having a selected length, sequence, degree of complementarity, or degree of modification, can be evaluated in the system described at Section IV. The candidate proximal domain can be placed, either alone, or with one or more other candidate changes in a gRNA molecule/Cas9 molecule system known to be functional with a selected target and evaluated.

[0502] In an embodiment, the proximal domain has at least 60, 70, 80, 85 90 or 95% homology with, or differs by no more than 1, 2, 3, 4, 5, or 6 nucleotides from, a reference proximal domain, e.g., a naturally occurring, e.g., an S. pyogenes, S. aureus or S. thermophilus, proximal domain, or a proximal domain described herein, e.g., from FIGS. 1A-1G.

[0503] The Tail Domain

[0504] In an embodiment, the tail domain is 10+/−5, 20+/−5, 30+/−5, 40+/−5, 50+/−5, 60+/−5, 70+/−5, 80+/−5, 90+/−5, or 100+/−5 nucleotides, in length.

[0505] In an embodiment, the tail domain is 20+/−5 nucleotides in length.

[0506] In an embodiment, the tail domain is 20+/−10, 30+/−10, 40+/−10, 50+/−10, 60+/−10, 70+/−10, 80+/−10, 90+/−10, or 100+/−10 nucleotides, in length.

[0507] In an embodiment, the tail domain is 25+/−10 nucleotides in length.

[0508] In an embodiment, the tail domain is 10 to 100, 10 to 90, 10 to 80, 10 to 70, 10 to 60, 10 to 50, 10 to 40, 10 to 30, 10 to 20 or 10 to 15 nucleotides in length.

[0509] In other embodiments, the tail domain is 20 to 100, 20 to 90, 20 to 80, 20 to 70, 20 to 60, 20 to 50, 20 to 40, 20 to 30, or 20 to 25 nucleotides in length.

[0510] In an embodiment, the tail domain is 1 to 20, 1 to 15, 1 to 10, or 1 to 5 nucleotides in length.

[0511] In an embodiment, the tail domain nucleotides do not comprise modifications, e.g., modifications of the type provided in Section VIII. However, in an embodiment, the tail domain comprises one or more modifications, e.g., modifications that it render it less susceptible to degradation or more bio-compatible, e.g., less immunogenic. By way of example, the backbone of the tail domain can be modified with a phosphorothioate, or other modification(s) from Section VIII. In an embodiment a nucleotide of the tail domain can comprise a 2′ modification, e.g., a 2-acetylation, e.g., a 2′ methylation, or other modification(s) from Section VIII.

[0512] In some embodiments, the tail domain can have as many as 1, 2, 3, 4, 5, 6, 7 or 8 modifications. In an embodiment, the target domain comprises as many as 1, 2, 3, or 4 modifications within 5 nucleotides of its 5′ end. In an embodiment, the target domain comprises as many as 1, 2, 3, or 4 modifications within 5 nucleotides of its 3′ end.

[0513] In an embodiment, the tail domain comprises a tail duplex domain, which can form a tail duplexed region. In an embodiment, the tail duplexed region can be 3, 4, 5, 6, 7, 8, 9, 10, 11, or 12 base pairs in length. In an embodiment, a further single stranded domain, exists 3′ to the tail duplexed domain. In an embodiment, this domain is 3, 4, 5, 6, 7, 8, 9, or 10 nucleotides in length. In an embodiment it is 4 to 6 nucleotides in length.

[0514] In an embodiment, the tail domain has at least 60, 70, 80, or 90% homology with, or differs by no more than 1, 2, 3, 4, 5, or 6 nucleotides from, a reference tail domain, e.g., a naturally occurring, e.g., an S. pyogenes, S. aureus or S. thermophilus, tail domain, or a tail domain described herein, e.g., from FIGS. 1A-1G.

[0515] In an embodiment, the proximal and tail domain, taken together, comprise the following sequences:

(SEQ ID NO: 33)
AAGGCUAGUCCGUUAUCAACUUGAAAAAGUGGCACCGAGUCGGUGCU,
or
(SEQ ID NO: 34)
AAGGCUAGUCCGUUAUCAACUUGAAAAAGUGGCACCGAGUCGGUGGUGC,
or
(SEQ ID NO: 35)
AAGGCUAGUCCGUUAUCAACUUGAAAAAGUGGCACCGAGUCGGUGCGGAU
C,
or
(SEQ ID NO: 36)
AAGGCUAGUCCGUUAUCAACUUGAAAAAGUG,
or
(SEQ ID NO: 37)
AAGGCUAGUCCGUUAUCA,
or
(SEQ ID NO: 38)
AAGGCUAGUCCG.

[0516] In an embodiment, the tail domain comprises the 3′ sequence UUUUUU, e.g., if a U6 promoter is used for transcription.

[0517] In an embodiment, the tail domain comprises the 3′ sequence UUUU, e.g., if an H1 promoter is used for transcription.

[0518] In an embodiment, tail domain comprises variable numbers of 3′ Us depending, e.g., on the termination signal of the pol-III promoter used.

[0519] In an embodiment, the tail domain comprises variable 3′ sequence derived from the DNA template if a T7 promoter is used.

[0520] In an embodiment, the tail domain comprises variable 3′ sequence derived from the DNA template, e.g., if in vitro transcription is used to generate the RNA molecule.

[0521] In an embodiment, the tail domain comprises variable 3′ sequence derived from the DNA template, e., if a pol-II promoter is used to drive transcription.

[0522] Modifications in the tail domain can be selected so as to not interfere with targeting efficacy, which can be evaluated by testing a candidate modification in the system described in Section IV. gRNAs having a candidate tail domain having a selected length, sequence, degree of complementarity, or degree of modification, can be evaluated in the system described in Section IV. The candidate tail domain can be placed, either alone, or with one or more other candidate changes in a gRNA molecule/Cas9 molecule system known to be functional with a selected target and evaluated.

[0523] In an embodiment, the tail domain comprises modifications at two consecutive nucleotides, e.g., two consecutive nucleotides that are within 5 nucleotides of the 5′ end of the tail domain, within 5 nucleotides of the 3′ end of the tail domain, or more than 5 nucleotides away from one or both ends of the tail domain. In an embodiment, no two consecutive nucleotides are modified within 5 nucleotides of the 5′ end of the tail domain, within 5 nucleotides of the 3′ end of the tail domain, or within a region that is more than 5 nucleotides away from one or both ends of the tail domain. In an embodiment, no nucleotide is modified within 5 nucleotides of the 5′ end of the tail domain, within 5 nucleotides of the 3′ end of the tail domain, or within a region that is more than 5 nucleotides away from one or both ends of the tail domain.

[0524] In an embodiment a gRNA has the following structure:

[0525] 5′ [targeting domain]-[first complementarity domain]-[linking domain]-[second complementarity domain]-[proximal domain]-[tail domain]-3′

[0526] wherein, the targeting domain comprises a core domain and optionally a secondary domain, and is 10 to 50 nucleotides in length;

[0527] the first complementarity domain is 5 to 25 nucleotides in length and, In an embodiment has at least 50, 60, 70, 80, 85, 90 or 95% homology with a reference first complementarity domain disclosed herein;

[0528] the linking domain is 1 to 5 nucleotides in length;

[0529] the second complementarity domain is 5 to 27 nucleotides in length and, in an embodiment has at least 50, 60, 70, 80, 85, 90 or 95% homology with a reference second complementarity domain disclosed herein;

[0530] the proximal domain is 5 to 20 nucleotides in length and, in an embodiment has at least 50, 60, 70, 80, 85, 90 or 95% homology with a reference proximal domain disclosed herein; and

[0531] the tail domain is absent or a nucleotide sequence is 1 to 50 nucleotides in length and, in an embodiment has at least 50, 60, 70, 80, 85, 90 or 95% homology with a reference tail domain disclosed herein.

[0532] Exemplary Chimeric gRNAs

[0533] In an embodiment, a unimolecular, or chimeric, gRNA comprises, preferably from 5′ to 3′:
[0534] a targeting domain (which is complementary to a target nucleic acid);
[0535] a first complementarity domain, e.g., comprising 15, 16, 17, 18, 19, 20, 21, 22, 23, 24, 25, or 26 nucleotides;
[0536] a linking domain;
[0537] a second complementarity domain (which is complementary to the first complementarity domain);
[0538] a proximal domain; and
[0539] a tail domain,
[0540] wherein,
[0541] (a) the proximal and tail domain, when taken together, comprise at least 15, 18, 20, 25, 30, 31, 35, 40, 45, 49, 50, or 53 nucleotides;
[0542] (b) there are at least 15, 18, 20, 25, 30, 31, 35, 40, 45, 49, 50, or 53 nucleotides 3′ to the last nucleotide of the second complementarity domain; or
[0543] (c) there are at least 16, 19, 21, 26, 31, 32, 36, 41, 46, 50, 51, or 54 nucleotides 3′ to the last nucleotide of the second complementarity domain that is complementary to its corresponding nucleotide of the first complementarity domain.

[0544] In an embodiment, the sequence from (a), (b), or (c), has at least 60, 75, 80, 85, 90, 95, or 99% homology with the corresponding sequence of a naturally occurring gRNA, or with a gRNA described herein.

[0545] In an embodiment, the proximal and tail domain, when taken together, comprise at least 15, 18, 20, 25, 30, 31, 35, 40, 45, 49, 50, or 53 nucleotides.

[0546] In an embodiment, there are at least 15, 18, 20, 25, 30, 31, 35, 40, 45, 49, 50, or 53 nucleotides 3′ to the last nucleotide of the second complementarity domain.

[0547] In an embodiment, there are at least 16, 19, 21, 26, 31, 32, 36, 41, 46, 50, 51, or 54 nucleotides 3′ to the last nucleotide of the second complementarity domain that is complementary to its corresponding nucleotide of the first complementarity domain.

[0548] In an embodiment, the targeting domain comprises, has, or consists of, 16, 17, 18, 19, 20, 21, 22, 23, 24, 25 or 26 nucleotides (e.g., 16, 17, 18, 19, 20, 21, 22, 23, 24, 25 or 26 consecutive nucleotides) having complementarity with the target domain, e.g., the targeting domain is 16, 17, 18, 19, 20, 21, 22, 23, 24, 25 or 26 nucleotides in length.

[0549] In an embodiment, the targeting domain comprises, has, or consists of, 16 nucleotides (e.g., 16 consecutive nucleotides) having complementarity with the target domain, e.g., the targeting domain is 16 nucleotides in length.

[0550] In an embodiment, the targeting domain comprises, has, or consists of, 17 nucleotides (e.g., 17 consecutive nucleotides) having complementarity with the target domain, e.g., the targeting domain is 17 nucleotides in length.

[0551] In an embodiment, the targeting domain comprises, has, or consists of, 18 nucleotides (e.g., 18 consecutive nucleotides) having complementarity with the target domain, e.g., the targeting domain is 18 nucleotides in length.

[0552] In an embodiment, the targeting domain comprises, has, or consists of, 19 nucleotides (e.g., 19 consecutive nucleotides) having complementarity with the target domain, e.g., the targeting domain is 19 nucleotides in length.

[0553] In an embodiment, the targeting domain comprises, has, or consists of, 20 nucleotides (e.g., 20 consecutive nucleotides) having complementarity with the target domain, e.g., the targeting domain is 20 nucleotides in length.

[0554] In an embodiment, the targeting domain comprises, has, or consists of, 21 nucleotides (e.g., 21 consecutive nucleotides) having complementarity with the target domain, e.g., the targeting domain is 21 nucleotides in length.

[0555] In an embodiment, the targeting domain comprises, has, or consists of, 22 nucleotides (e.g., 22 consecutive nucleotides) having complementarity with the target domain, e.g., the targeting domain is 22 nucleotides in length.

[0556] In an embodiment, the targeting domain comprises, has, or consists of, 23 nucleotides (e.g., 23 consecutive nucleotides) having complementarity with the target domain, e.g., the targeting domain is 23 nucleotides in length.

[0557] In an embodiment, the targeting domain comprises, has, or consists of, 24 nucleotides (e.g., 24 consecutive nucleotides) having complementarity with the target domain, e.g., the targeting domain is 24 nucleotides in length.

[0558] In an embodiment, the targeting domain comprises, has, or consists of, 25 nucleotides (e.g., 25 consecutive nucleotides) having complementarity with the target domain, e.g., the targeting domain is 25 nucleotides in length.

[0559] In an embodiment, the targeting domain comprises, has, or consists of, 26 nucleotides (e.g., 26 consecutive nucleotides) having complementarity with the target domain, e.g., the targeting domain is 26 nucleotides in length.

[0560] In an embodiment, the targeting domain comprises, has, or consists of, 16 nucleotides (e.g., 16 consecutive nucleotides) having complementarity with the target domain, e.g., the targeting domain is 16 nucleotides in length; and the proximal and tail domain, when taken together, comprise at least 15, 18, 20, 25, 30, 31, 35, 40, 45, 49, 50, or 53 nucleotides.

[0561] In an embodiment, the targeting domain comprises, has, or consists of, 16 nucleotides (e.g., 16 consecutive nucleotides) having complementarity with the target domain, e.g., the targeting domain is 16 nucleotides in length; and there are at least 15, 18, 20, 25, 30, 31, 35, 40, 45, 49, 50, or 53 nucleotides 3′ to the last nucleotide of the second complementarity domain.

[0562] In an embodiment, the targeting domain comprises, has, or consists of, 16 nucleotides (e.g., 16 consecutive nucleotides) having complementarity with the target domain, e.g., the targeting domain is 16 nucleotides in length; and there are at least 16, 19, 21, 26, 31, 32, 36, 41, 46, 50, 51, or 54 nucleotides 3′ to the last nucleotide of the second complementarity domain that is complementary to its corresponding nucleotide of the first complementarity domain.

[0563] In an embodiment, the targeting domain comprises, has, or consists of, 17 nucleotides (e.g., 17 consecutive nucleotides) having complementarity with the target domain, e.g., the targeting domain is 17 nucleotides in length; and the proximal and tail domain, when taken together, comprise at least 15, 18, 20, 25, 30, 31, 35, 40, 45, 49, 50, or 53 nucleotides.

[0564] In an embodiment, the targeting domain comprises, has, or consists of, 17 nucleotides (e.g., 17 consecutive nucleotides) having complementarity with the target domain, e.g., the targeting domain is 17 nucleotides in length; and there are at least 15, 18, 20, 25, 30, 31, 35, 40, 45, 49, 50, or 53 nucleotides 3′ to the last nucleotide of the second complementarity domain.

[0565] In an embodiment, the targeting domain comprises, has, or consists of, 17 nucleotides (e.g., 17 consecutive nucleotides) having complementarity with the target domain, e.g., the targeting domain is 17 nucleotides in length; and there are at least 16, 19, 21, 26, 31, 32, 36, 41, 46, 50, 51, or 54 nucleotides 3′ to the last nucleotide of the second complementarity domain that is complementary to its corresponding nucleotide of the first complementarity domain.

[0566] In an embodiment, the targeting domain comprises, has, or consists of, 18 nucleotides (e.g., 18 consecutive nucleotides) having complementarity with the target domain, e.g., the targeting domain is 18 nucleotides in length; and the proximal and tail domain, when taken together, comprise at least 15, 18, 20, 25, 30, 31, 35, 40, 45, 49, 50, or 53 nucleotides.

[0567] In an embodiment, the targeting domain comprises, has, or consists of, 18 nucleotides (e.g., 18 consecutive nucleotides) having complementarity with the target domain, e.g., the targeting domain is 18 nucleotides in length; and there are at least 15, 18, 20, 25, 30, 31, 35, 40, 45, 49, 50, or 53 nucleotides 3′ to the last nucleotide of the second complementarity domain.

[0568] In an embodiment, the targeting domain comprises, has, or consists of, 18 nucleotides (e.g., 18 consecutive nucleotides) having complementarity with the target domain, e.g., the targeting domain is 18 nucleotides in length; and there are at least 16, 19, 21, 26, 31, 32, 36, 41, 46, 50, 51, or 54 nucleotides 3′ to the last nucleotide of the second complementarity domain that is complementary to its corresponding nucleotide of the first complementarity domain.

[0569] In an embodiment, the targeting domain comprises, has, or consists of, 19 nucleotides (e.g., 19 consecutive nucleotides) having complementarity with the target domain, e.g., the targeting domain is 19 nucleotides in length; and the proximal and tail domain, when taken together, comprise at least 15, 18, 20, 25, 30, 31, 35, 40, 45, 49, 50, or 53 nucleotides.

[0570] In an embodiment, the targeting domain comprises, has, or consists of, 19 nucleotides (e.g., 19 consecutive nucleotides) having complementarity with the target domain, e.g., the targeting domain is 19 nucleotides in length; and there are at least 15, 18, 20, 25, 30, 31, 35, 40, 45, 49, 50, or 53 nucleotides 3′ to the last nucleotide of the second complementarity domain.

[0571] In an embodiment, the targeting domain comprises, has, or consists of, 19 nucleotides (e.g., 19 consecutive nucleotides) having complementarity with the target domain, e.g., the targeting domain is 19 nucleotides in length; and there are at least 16, 19, 21, 26, 31, 32, 36, 41, 46, 50, 51, or 54 nucleotides 3′ to the last nucleotide of the second complementarity domain that is complementary to its corresponding nucleotide of the first complementarity domain.

[0572] In an embodiment, the targeting domain comprises, has, or consists of, 20 nucleotides (e.g., 20 consecutive nucleotides) having complementarity with the target domain, e.g., the targeting domain is 20 nucleotides in length; and the proximal and tail domain, when taken together, comprise at least 15, 18, 20, 25, 30, 31, 35, 40, 45, 49, 50, or 53 nucleotides.

[0573] In an embodiment, the targeting domain comprises, has, or consists of, 20 nucleotides (e.g., 20 consecutive nucleotides) having complementarity with the target domain, e.g., the targeting domain is 20 nucleotides in length; and there are at least 15, 18, 20, 25, 30, 31, 35, 40, 45, 49, 50, or 53 nucleotides 3′ to the last nucleotide of the second complementarity domain.

[0574] In an embodiment, the targeting domain comprises, has, or consists of, 20 nucleotides (e.g., 20 consecutive nucleotides) having complementarity with the target domain, e.g., the targeting domain is 20 nucleotides in length; and there are at least 16, 19, 21, 26, 31, 32, 36, 41, 46, 50, 51, or 54 nucleotides 3′ to the last nucleotide of the second complementarity domain that is complementary to its corresponding nucleotide of the first complementarity domain.

[0575] In an embodiment, the targeting domain comprises, has, or consists of, 21 nucleotides (e.g., 21 consecutive nucleotides) having complementarity with the target domain, e.g., the targeting domain is 21 nucleotides in length; and the proximal and tail domain, when taken together, comprise at least 15, 18, 20, 25, 30, 31, 35, 40, 45, 49, 50, or 53 nucleotides.

[0576] In an embodiment, the targeting domain comprises, has, or consists of, 21 nucleotides (e.g., 21 consecutive nucleotides) having complementarity with the target domain, e.g., the targeting domain is 21 nucleotides in length; and there are at least 15, 18, 20, 25, 30, 31, 35, 40, 45, 49, 50, or 53 nucleotides 3′ to the last nucleotide of the second complementarity domain.

[0577] In an embodiment, the targeting domain comprises, has, or consists of, 21 nucleotides (e.g., 21 consecutive nucleotides) having complementarity with the target domain, e.g., the targeting domain is 21 nucleotides in length; and there are at least 16, 19, 21, 26, 31, 32, 36, 41, 46, 50, 51, or 54 nucleotides 3′ to the last nucleotide of the second complementarity domain that is complementary to its corresponding nucleotide of the first complementarity domain.

[0578] In an embodiment, the targeting domain comprises, has, or consists of, 22 nucleotides (e.g., 22 consecutive nucleotides) having complementarity with the target domain, e.g., the targeting domain is 22 nucleotides in length; and the proximal and tail domain, when taken together, comprise at least 15, 18, 20, 25, 30, 31, 35, 40, 45, 49, 50, or 53 nucleotides.

[0579] In an embodiment, the targeting domain comprises, has, or consists of, 22 nucleotides (e.g., 22 consecutive nucleotides) having complementarity with the target domain, e.g., the targeting domain is 22 nucleotides in length; and there are at least 15, 18, 20, 25, 30, 31, 35, 40, 45, 49, 50, or 53 nucleotides 3′ to the last nucleotide of the second complementarity domain.

[0580] In an embodiment, the targeting domain comprises, has, or consists of, 22 nucleotides (e.g., 22 consecutive nucleotides) having complementarity with the target domain, e.g., the targeting domain is 22 nucleotides in length; and there are at least 16, 19, 21, 26, 31, 32, 36, 41, 46, 50, 51, or 54 nucleotides 3′ to the last nucleotide of the second complementarity domain that is complementary to its corresponding nucleotide of the first complementarity domain.

[0581] In an embodiment, the targeting domain comprises, has, or consists of, 23 nucleotides (e.g., 23 consecutive nucleotides) having complementarity with the target domain, e.g., the targeting domain is 23 nucleotides in length; and the proximal and tail domain, when taken together, comprise at least 15, 18, 20, 25, 30, 31, 35, 40, 45, 49, 50, or 53 nucleotides.

[0582] In an embodiment, the targeting domain comprises, has, or consists of, 23 nucleotides (e.g., 23 consecutive nucleotides) having complementarity with the target domain, e.g., the targeting domain is 23 nucleotides in length; and there are at least 15, 18, 20, 25, 30, 31, 35, 40, 45, 49, 50, or 53 nucleotides 3′ to the last nucleotide of the second complementarity domain.

[0583] In an embodiment, the targeting domain comprises, has, or consists of, 23 nucleotides (e.g., 23 consecutive nucleotides) having complementarity with the target domain, e.g., the targeting domain is 23 nucleotides in length; and there are at least 16, 19, 21, 26, 31, 32, 36, 41, 46, 50, 51, or 54 nucleotides 3′ to the last nucleotide of the second complementarity domain that is complementary to its corresponding nucleotide of the first complementarity domain.

[0584] In an embodiment, the targeting domain comprises, has, or consists of, 24 nucleotides (e.g., 24 consecutive nucleotides) having complementarity with the target domain, e.g., the targeting domain is 24 nucleotides in length; and the proximal and tail domain, when taken together, comprise at least 15, 18, 20, 25, 30, 31, 35, 40, 45, 49, 50, or 53 nucleotides.

[0585] In an embodiment, the targeting domain comprises, has, or consists of, 24 nucleotides (e.g., 24 consecutive nucleotides) having complementarity with the target domain, e.g., the targeting domain is 24 nucleotides in length; and there are at least 15, 18, 20, 25, 30, 31, 35, 40, 45, 49, 50, or 53 nucleotides 3′ to the last nucleotide of the second complementarity domain.

[0586] In an embodiment, the targeting domain comprises, has, or consists of, 24 nucleotides (e.g., 24 consecutive nucleotides) having complementarity with the target domain, e.g., the targeting domain is 24 nucleotides in length; and there are at least 16, 19, 21, 26, 31, 32, 36, 41, 46, 50, 51, or 54 nucleotides 3′ to the last nucleotide of the second complementarity domain that is complementary to its corresponding nucleotide of the first complementarity domain.

[0587] In an embodiment, the targeting domain comprises, has, or consists of, 25 nucleotides (e.g., 25 consecutive nucleotides) having complementarity with the target domain, e.g., the targeting domain is 25 nucleotides in length; and the proximal and tail domain, when taken together, comprise at least 15, 18, 20, 25, 30, 31, 35, 40, 45, 49, 50, or 53 nucleotides.

[0588] In an embodiment, the targeting domain comprises, has, or consists of, 25 nucleotides (e.g., 25 consecutive nucleotides) having complementarity with the target domain, e.g., the targeting domain is 25 nucleotides in length; and there are at least 15, 18, 20, 25, 30, 31, 35, 40, 45, 49, 50, or 53 nucleotides 3′ to the last nucleotide of the second complementarity domain.

[0589] In an embodiment, the targeting domain comprises, has, or consists of, 25 nucleotides (e.g., 25 consecutive nucleotides) having complementarity with the target domain, e.g., the targeting domain is 25 nucleotides in length; and there are at least 16, 19, 21, 26, 31, 32, 36, 41, 46, 50, 51, or 54 nucleotides 3′ to the last nucleotide of the second complementarity domain that is complementary to its corresponding nucleotide of the first complementarity domain.

[0590] In an embodiment, the targeting domain comprises, has, or consists of, 26 nucleotides (e.g., 26 consecutive nucleotides) having complementarity with the target domain, e.g., the targeting domain is 26 nucleotides in length; and the proximal and tail domain, when taken together, comprise at least 15, 18, 20, 25, 30, 31, 35, 40, 45, 49, 50, or 53 nucleotides.

[0591] In an embodiment, the targeting domain comprises, has, or consists of, 26 nucleotides (e.g., 26 consecutive nucleotides) having complementarity with the target domain, e.g., the targeting domain is 26 nucleotides in length; and there are at least 15, 18, 20, 25, 30, 31, 35, 40, 45, 49, 50, or 53 nucleotides 3′ to the last nucleotide of the second complementarity domain.

[0592] In an embodiment, the targeting domain comprises, has, or consists of, 26 nucleotides (e.g., 26 consecutive nucleotides) having complementarity with the target domain, e.g., the targeting domain is 26 nucleotides in length; and there are at least 16, 19, 21, 26, 31, 32, 36, 41, 46, 50, 51, or 54 nucleotides 3′ to the last nucleotide of the second complementarity domain that is complementary to its corresponding nucleotide of the first complementarity domain.

[0593] In an embodiment, the unimolecular, or chimeric, gRNA molecule (comprising a targeting domain, a first complementary domain, a linking domain, a second complementary domain, a proximal domain and, optionally, a tail domain) comprises the following sequence in which the targeting domain is depicted as 20 Ns but could be any sequence and range in length from 16 to 26 nucleotides and in which the gRNA sequence is followed by 6 Us, which serve as a termination signal for the U6 promoter, but which could be either absent or fewer in number: NNNNNNNNNNNNNNNNNNNNGUUUUAGAGCUAGAAAUAGCAAGUUAAAAUAA GGCUAGUCCGUUAUCAACUUGAAAAAGUGGCACCGAGUCGGUGCUUUUUU (SEQ ID NO: 45). In an embodiment, the unimolecular, or chimeric, gRNA molecule is a S. pyogenes gRNA molecule.

[0594] In some embodiments, the unimolecular, or chimeric, gRNA molecule (comprising a targeting domain, a first complementary domain, a linking domain, a second complementary domain, a proximal domain and, optionally, a tail domain) comprises the following sequence in which the targeting domain is depicted as 20 Ns but could be any sequence and range in length from 16 to 26 nucleotides and in which the gRNA sequence is followed by 6 Us, which serve as a termination signal for the U6 promoter, but which could be either absent or fewer in number: NNNNNNNNNNNNNNNNNNNNGUUUUAGUACUCUGGAAACAGAAUCUACUAAA ACAAGGCAAAAUGCCGUGUUUAUCUCGUCAACUUGUUGGCGAGA (SEQ ID NO: 40). In an embodiment, the unimolecular, or chimeric, gRNA molecule is a S. aureus gRNA molecule.

[0595] Exemplary Modular gRNAs

[0596] In an embodiment, a modular gRNA comprises:
[0597] a first strand comprising, preferably from 5′ to 3′;
   [0598] a targeting domain, e.g., comprising 15, 16, 17, 18, 19, 20, 21, 22, 23, 24, 25, or 26 nucleotides;
   [0599] a first complementarity domain; and
   [0600] a second strand, comprising, preferably from 5′ to 3′:
   [0601] optionally a 5′ extension domain;
   [0602] a second complementarity domain;
   [0603] a proximal domain; and
   [0604] a tail domain,
[0605] wherein:
[0606] (a) the proximal and tail domain, when taken together, comprise at least 15, 18, 20, 25, 30, 31, 35, 40, 45, 49, 50, or 53 nucleotides;
[0607] (b) there are at least 15, 18, 20, 25, 30, 31, 35, 40, 45, 49, 50, or 53 nucleotides 3′ to the last nucleotide of the second complementarity domain; or
[0608] (c) there are at least 16, 19, 21, 26, 31, 32, 36, 41, 46, 50, 51, or 54 nucleotides 3′ to the last nucleotide of the second complementarity domain that is complementary to its corresponding nucleotide of the first complementarity domain.

[0609] In an embodiment, the sequence from (a), (b), or (c), has at least 60, 75, 80, 85, 90, 95, or 99% homology with the corresponding sequence of a naturally occurring gRNA, or with a gRNA described herein.

[0610] In an embodiment, the proximal and tail domain, when taken together, comprise at least 15, 18, 20, 25, 30, 31, 35, 40, 45, 49, 50, or 53 nucleotides.

[0611] In an embodiment there are at least 15, 18, 20, 25, 30, 31, 35, 40, 45, 49, 50, or 53 nucleotides 3′ to the last nucleotide of the second complementarity domain.

[0612] In an embodiment, there are at least 16, 19, 21, 26, 31, 32, 36, 41, 46, 50, 51, or 54 nucleotides 3′ to the last nucleotide of the second complementarity domain that is complementary to its corresponding nucleotide of the first complementarity domain.

[0613] In an embodiment, the targeting domain comprises, has, or consists of, 16, 17, 18, 19, 20, 21, 22, 23, 24, 25 or 26 nucleotides (e.g., 16, 17, 18, 19, 20, 21, 22, 23, 24, 25 or 26 consecutive nucleotides) having complementarity with the target domain, e.g., the targeting domain is 16, 17, 18, 19, 20, 21, 22, 23, 24, 25 or 26 nucleotides in length.

[0614] In an embodiment, the targeting domain comprises, has, or consists of, 16 nucleotides (e.g., 16 consecutive nucleotides) having complementarity with the target domain, e.g., the targeting domain is 16 nucleotides in length.

[0615] In an embodiment, the targeting domain comprises, has, or consists of, 17 nucleotides (e.g., 17 consecutive nucleotides) having complementarity with the target domain, e.g., the targeting domain is 17 nucleotides in length.

[0616] In an embodiment, the targeting domain comprises, has, or consists of, 18 nucleotides (e.g., 18 consecutive nucleotides) having complementarity with the target domain, e.g., the targeting domain is 18 nucleotides in length.

[0617] In an embodiment, the targeting domain comprises, has, or consists of, 19 nucleotides (e.g., 19 consecutive nucleotides) having complementarity with the target domain, e.g., the targeting domain is 19 nucleotides in length.

[0618] In an embodiment, the targeting domain comprises, has, or consists of, 20 nucleotides (e.g., 20 consecutive nucleotides) having complementarity with the target domain, e.g., the targeting domain is 20 nucleotides in length.

[0619] In an embodiment, the targeting domain comprises, has, or consists of, 21 nucleotides (e.g., 21 consecutive nucleotides) having complementarity with the target domain, e.g., the targeting domain is 21 nucleotides in length.

[0620] In an embodiment, the targeting domain comprises, has, or consists of, 22 nucleotides (e.g., 22 consecutive nucleotides) having complementarity with the target domain, e.g., the targeting domain is 22 nucleotides in length.

[0621] In an embodiment, the targeting domain comprises, has, or consists of, 23 nucleotides (e.g., 23 consecutive nucleotides) having complementarity with the target domain, e.g., the targeting domain is 23 nucleotides in length.

[0622] In an embodiment, the targeting domain comprises, has, or consists of, 24 nucleotides (e.g., 24 consecutive nucleotides) having complementarity with the target domain, e.g., the targeting domain is 24 nucleotides in length.

[0623] In an embodiment, the targeting domain comprises, has, or consists of, 25 nucleotides (e.g., 25 consecutive nucleotides) having complementarity with the target domain, e.g., the targeting domain is 25 nucleotides in length.

[0624] In an embodiment, the targeting domain comprises, has, or consists of, 26 nucleotides (e.g., 26 consecutive nucleotides) having complementarity with the target domain, e.g., the targeting domain is 26 nucleotides in length.

[0625] In an embodiment, the targeting domain comprises, has, or consists of, 16 nucleotides (e.g., 16 consecutive nucleotides) having complementarity with the target domain, e.g., the targeting domain is 16 nucleotides in length; and the proximal and tail domain, when taken together, comprise at least 15, 18, 20, 25, 30, 31, 35, 40, 45, 49, 50, or 53 nucleotides.

[0626] In an embodiment, the targeting domain comprises, has, or consists of, 16 nucleotides (e.g., 16 consecutive nucleotides) having complementarity with the target domain, e.g., the targeting domain is 16 nucleotides in length; and there are at least 15, 18, 20, 25, 30, 31, 35, 40, 45, 49, 50, or 53 nucleotides 3′ to the last nucleotide of the second complementarity domain.

[0627] In an embodiment, the targeting domain comprises, has, or consists of, 16 nucleotides (e.g., 16 consecutive nucleotides) having complementarity with the target domain, e.g., the targeting domain is 16 nucleotides in length; and there are at least 16, 19, 21, 26, 31, 32, 36, 41, 46, 50, 51, or 54 nucleotides 3′ to the last nucleotide of the second complementarity domain that is complementary to its corresponding nucleotide of the first complementarity domain.

[0628] In an embodiment, the targeting domain comprises, has, or consists of, 17 nucleotides (e.g., 17 consecutive nucleotides) having complementarity with the target domain, e.g., the targeting domain is 17 nucleotides in length; and the proximal and tail domain, when taken together, comprise at least 15, 18, 20, 25, 30, 31, 35, 40, 45, 49, 50, or 53 nucleotides.

[0629] In an embodiment, the targeting domain comprises, has, or consists of, 17 nucleotides (e.g., 17 consecutive nucleotides) having complementarity with the target domain, e.g., the targeting domain is 17 nucleotides in length; and there are at least 15, 18, 20, 25, 30, 31, 35, 40, 45, 49, 50, or 53 nucleotides 3′ to the last nucleotide of the second complementarity domain.

[0630] In an embodiment, the targeting domain comprises, has, or consists of, 17 nucleotides (e.g., 17 consecutive nucleotides) having complementarity with the target domain, e.g., the targeting domain is 17 nucleotides in length; and there are at least 16, 19, 21, 26, 31, 32, 36, 41, 46, 50, 51, or 54 nucleotides 3′ to the last nucleotide of the second complementarity domain that is complementary to its corresponding nucleotide of the first complementarity domain.

[0631] In an embodiment, the targeting domain comprises, has, or consists of, 18 nucleotides (e.g., 18 consecutive nucleotides) having complementarity with the target domain, e.g., the targeting domain is 18 nucleotides in length; and the proximal and tail domain, when taken together, comprise at least 15, 18, 20, 25, 30, 31, 35, 40, 45, 49, 50, or 53 nucleotides.

[0632] In an embodiment, the targeting domain comprises, has, or consists of, 18 nucleotides (e.g., 18 consecutive nucleotides) having complementarity with the target domain, e.g., the targeting domain is 18 nucleotides in length; and there are at least 15, 18, 20, 25, 30, 31, 35, 40, 45, 49, 50, or 53 nucleotides 3′ to the last nucleotide of the second complementarity domain.

[0633] In an embodiment, the targeting domain comprises, has, or consists of, 18 nucleotides (e.g., 18 consecutive nucleotides) having complementarity with the target domain, e.g., the targeting domain is 18 nucleotides in length; and there are at least 16, 19, 21, 26, 31, 32, 36, 41, 46, 50, 51, or 54 nucleotides 3′ to the last nucleotide of the second complementarity domain that is complementary to its corresponding nucleotide of the first complementarity domain.

[0634] In an embodiment, the targeting domain comprises, has, or consists of, 19 nucleotides (e.g., 19 consecutive nucleotides) having complementarity with the target domain, e.g., the targeting domain is 19 nucleotides in length; and the proximal and tail domain, when taken together, comprise at least 15, 18, 20, 25, 30, 31, 35, 40, 45, 49, 50, or 53 nucleotides.

[0635] In an embodiment, the targeting domain comprises, has, or consists of, 19 nucleotides (e.g., 19 consecutive nucleotides) having complementarity with the target domain, e.g., the targeting domain is 19 nucleotides in length; and there are at least 15, 18, 20, 25, 30, 31, 35, 40, 45, 49, 50, or 53 nucleotides 3′ to the last nucleotide of the second complementarity domain.

[0636] In an embodiment, the targeting domain comprises, has, or consists of, 19 nucleotides (e.g., 19 consecutive nucleotides) having complementarity with the target domain, e.g., the targeting domain is 19 nucleotides in length; and there are at least 16, 19, 21, 26, 31, 32, 36, 41, 46, 50, 51, or 54 nucleotides 3′ to the last nucleotide of the second complementarity domain that is complementary to its corresponding nucleotide of the first complementarity domain.

[0637] In an embodiment, the targeting domain comprises, has, or consists of, 20 nucleotides (e.g., 20 consecutive nucleotides) having complementarity with the target domain, e.g., the targeting domain is 20 nucleotides in length; and the proximal and tail domain, when taken together, comprise at least 15, 18, 20, 25, 30, 31, 35, 40, 45, 49, 50, or 53 nucleotides.

[0638] In an embodiment, the targeting domain comprises, has, or consists of, 20 nucleotides (e.g., 20 consecutive nucleotides) having complementarity with the target domain, e.g., the targeting domain is 20 nucleotides in length; and there are at least 15, 18, 20, 25, 30, 31, 35, 40, 45, 49, 50, or 53 nucleotides 3′ to the last nucleotide of the second complementarity domain.

[0639] In an embodiment, the targeting domain comprises, has, or consists of, 20 nucleotides (e.g., 20 consecutive nucleotides) having complementarity with the target domain, e.g., the targeting domain is 20 nucleotides in length; and there are at least 16, 19, 21, 26, 31, 32, 36, 41, 46, 50, 51, or 54 nucleotides 3′ to the last nucleotide of the second complementarity domain that is complementary to its corresponding nucleotide of the first complementarity domain.

[0640] In an embodiment, the targeting domain comprises, has, or consists of, 21 nucleotides (e.g., 21 consecutive nucleotides) having complementarity with the target domain, e.g., the targeting domain is 21 nucleotides in length; and the proximal and tail domain, when taken together, comprise at least 15, 18, 20, 25, 30, 31, 35, 40, 45, 49, 50, or 53 nucleotides.

[0641] In an embodiment, the targeting domain comprises, has, or consists of, 21 nucleotides (e.g., 21 consecutive nucleotides) having complementarity with the target domain, e.g., the targeting domain is 21 nucleotides in length; and there are at least 15, 18, 20, 25, 30, 31, 35, 40, 45, 49, 50, or 53 nucleotides 3′ to the last nucleotide of the second complementarity domain.

[0642] In an embodiment, the targeting domain comprises, has, or consists of, 21 nucleotides (e.g., 21 consecutive nucleotides) having complementarity with the target domain, e.g., the targeting domain is 21 nucleotides in length; and there are at least 16, 19, 21, 26, 31, 32, 36, 41, 46, 50, 51, or 54 nucleotides 3′ to the last nucleotide of the second complementarity domain that is complementary to its corresponding nucleotide of the first complementarity domain.

[0643] In an embodiment, the targeting domain comprises, has, or consists of, 22 nucleotides (e.g., 22 consecutive nucleotides) having complementarity with the target domain, e.g., the targeting domain is 22 nucleotides in length; and the proximal and tail domain, when taken together, comprise at least 15, 18, 20, 25, 30, 31, 35, 40, 45, 49, 50, or 53 nucleotides.

[0644] In an embodiment, the targeting domain comprises, has, or consists of, 22 nucleotides (e.g., 22 consecutive nucleotides) having complementarity with the target domain, e.g., the targeting domain is 22 nucleotides in length; and there are at least 15, 18, 20, 25, 30, 31, 35, 40, 45, 49, 50, or 53 nucleotides 3′ to the last nucleotide of the second complementarity domain.

[0645] In an embodiment, the targeting domain comprises, has, or consists of, 22 nucleotides (e.g., 22 consecutive nucleotides) having complementarity with the target domain, e.g., the targeting domain is 22 nucleotides in length; and there are at least 16, 19, 21, 26, 31, 32, 36, 41, 46, 50, 51, or 54 nucleotides 3′ to the last nucleotide of the second complementarity domain that is complementary to its corresponding nucleotide of the first complementarity domain.

[0646] In an embodiment, the targeting domain comprises, has, or consists of, 23 nucleotides (e.g., 23 consecutive nucleotides) having complementarity with the target domain, e.g., the targeting domain is 23 nucleotides in length; and the proximal and tail domain, when taken together, comprise at least 15, 18, 20, 25, 30, 31, 35, 40, 45, 49, 50, or 53 nucleotides.

[0647] In an embodiment, the targeting domain comprises, has, or consists of, 23 nucleotides (e.g., 23 consecutive nucleotides) having complementarity with the target domain, e.g., the targeting domain is 23 nucleotides in length; and there are at least 15, 18, 20, 25, 30, 31, 35, 40, 45, 49, 50, or 53 nucleotides 3′ to the last nucleotide of the second complementarity domain.

[0648] In an embodiment, the targeting domain comprises, has, or consists of, 23 nucleotides (e.g., 23 consecutive nucleotides) having complementarity with the target domain, e.g., the targeting domain is 23 nucleotides in length; and there are at least 16, 19, 21, 26, 31, 32, 36, 41, 46, 50, 51, or 54 nucleotides 3′ to the last nucleotide of the second complementarity domain that is complementary to its corresponding nucleotide of the first complementarity domain.

[0649] In an embodiment, the targeting domain comprises, has, or consists of, 24 nucleotides (e.g., 24 consecutive nucleotides) having complementarity with the target domain, e.g., the targeting domain is 24 nucleotides in length; and the proximal and tail domain, when taken together, comprise at least 15, 18, 20, 25, 30, 31, 35, 40, 45, 49, 50, or 53 nucleotides.

[0650] In an embodiment, the targeting domain comprises, has, or consists of, 24 nucleotides (e.g., 24 consecutive nucleotides) having complementarity with the target domain, e.g., the targeting domain is 24 nucleotides in length; and there are at least 15, 18, 20, 25, 30, 31, 35, 40, 45, 49, 50, or 53 nucleotides 3′ to the last nucleotide of the second complementarity domain.

[0651] In an embodiment, the targeting domain comprises, has, or consists of, 24 nucleotides (e.g., 24 consecutive nucleotides) having complementarity with the target domain, e.g., the targeting domain is 24 nucleotides in length; and there are at least 16, 19, 21, 26, 31, 32, 36, 41, 46, 50, 51, or 54 nucleotides 3′ to the last nucleotide of the second complementarity domain that is complementary to its corresponding nucleotide of the first complementarity domain.

[0652] In an embodiment, the targeting domain comprises, has, or consists of, 25 nucleotides (e.g., 25 consecutive nucleotides) having complementarity with the target domain, e.g., the targeting domain is 25 nucleotides in length; and the proximal and tail domain, when taken together, comprise at least 15, 18, 20, 25, 30, 31, 35, 40, 45, 49, 50, or 53 nucleotides.

[0653] In an embodiment, the targeting domain comprises, has, or consists of, 25 nucleotides (e.g., 25 consecutive nucleotides) having complementarity with the target domain, e.g., the targeting domain is 25 nucleotides in length; and there are at least 15, 18, 20, 25, 30, 31, 35, 40, 45, 49, 50, or 53 nucleotides 3′ to the last nucleotide of the second complementarity domain.

[0654] In an embodiment, the targeting domain comprises, has, or consists of, 25 nucleotides (e.g., 25 consecutive nucleotides) having complementarity with the target domain, e.g., the targeting domain is 25 nucleotides in length; and there are at least 16, 19, 21, 26, 31, 32, 36, 41, 46, 50, 51, or 54 nucleotides 3′ to the last nucleotide of the second complementarity domain that is complementary to its corresponding nucleotide of the first complementarity domain.

[0655] In an embodiment, the targeting domain comprises, has, or consists of, 26 nucleotides (e.g., 26 consecutive nucleotides) having complementarity with the target domain, e.g., the targeting domain is 26 nucleotides in length; and the proximal and tail domain, when taken together, comprise at least 15, 18, 20, 25, 30, 31, 35, 40, 45, 49, 50, or 53 nucleotides.

[0656] In an embodiment, the targeting domain comprises, has, or consists of, 26 nucleotides (e.g., 26 consecutive nucleotides) having complementarity with the target domain, e.g., the targeting domain is 26 nucleotides in length; and there are at least 15, 18, 20, 25, 30, 31, 35, 40, 45, 49, 50, or 53 nucleotides 3′ to the last nucleotide of the second complementarity domain.

[0657] In an embodiment, the targeting domain comprises, has, or consists of, 26 nucleotides (e.g., 26 consecutive nucleotides) having complementarity with the target domain, e.g., the targeting domain is 26 nucleotides in length; and there are at least 16, 19, 21, 26, 31, 32, 36, 41, 46, 50, 51, or 54 nucleotides 3′ to the last nucleotide of the second complementarity domain that is complementary to its corresponding nucleotide of the first complementarity domain.

II. Methods for Designing gRNAs

[0658] Methods for designing gRNAs are described herein, including methods for selecting, designing and validating target domains. Exemplary targeting domains are also provided herein. Targeting domains discussed herein can be incorporated into the gRNAs described herein.

[0659] Methods for selection and validation of target sequences as well as off-target analyses are described, e.g., in Mali et al., 2013 SCIENCE 339(6121): 823-826; Hsu et al. NAT BIOTECHNOL, 31(9): 827-32; Fu et al., 2014 NAT BIOTECHNOL, doi: 10.1038/nbt.2808. PubMed PMID: 24463574; Heigwer et al., 2014 NAT METHODS 11(2):122-3. doi: 10.1038/nmeth.2812. PubMed PMID: 24481216; Bae et al., 2014 BIOINFORMATICS PubMed PMID: 24463181; Xiao A et al., 2014 BIOINFORMATICS PubMed PMID: 24389662.

[0660] For example, a software tool can be used to optimize the choice of gRNA within a user's target sequence, e.g., to minimize total off-target activity across the genome. Off target activity may be other than cleavage. For each possible gRNA choice using S. pyogenes Cas9, the tool can identify all off-target sequences (preceding either NAG or NGG PAMs) across the genome that contain up to a certain number (e.g., 1, 2, 3, 4, 5, 6, 7, 8, 9, or 10) of mismatched base-pairs. The cleavage efficiency at each off-target sequence can be predicted, e.g., using an experimentally-derived weighting scheme. Each possible gRNA is then ranked according to its total predicted off-target cleavage; the top-ranked gRNAs represent those that are likely to have the greatest on-target and the least off-target cleavage. Other functions, e.g., automated reagent design for CRISPR construction, primer design for the on-target Surveyor assay, and primer design for high-throughput detection and quantification of off-target cleavage via next-gen sequencing, can also be included in the tool. Candidate gRNA molecules can be evaluated by art-known methods or as described in Section IV herein.

[0661] The Targeting domains discussed herein can be incorporated into the gRNAs described herein.

Strategies to Identify gRNAs for S. pyogenes, S. Aureus, and N. meningitidis to Knock Out the UL19 Gene

[0662] As an example, three strategies were utilized to identify gRNAs for use with S. pyogenes, S. aureus and N. meningitidis Cas9 enzymes.

[0663] In the first strategy, guide RNAs (gRNAs) for use with the S. pyogenes (Tables 1A-1C) Cas9 were identified using the publically available web-based ZiFiT server (Fu et al., Improving CRISPR-Cas nuclease specificity using truncated guide RNAs. Nat Biotechnol. 2014 Jan. 26. doi: 10.1038/nbt.2808. PubMed PMID: 24463574, for the original references see Sander et al., 2007, NAR 35:W599-605; Sander et al., 2010, NAR 38: W462-8). In addition to identifying potential gRNA sites adjacent to PAM sequences, the software also identifies all PAM adjacent sequences that differ by 1, 2, 3 or more nucleotides from the selected gRNA sites. Genomic DNA sequence for each gene was obtained from the UCSC Genome browser and sequences were screened for repeat elements using the publically available Repeat-Masker program. RepeatMmasker searches input DNA sequences for repeated elements and regions of low complexity. The output is a detailed annotation of the repeats present in a given query sequence. Following identification, gRNAs for use with a S. pyogenes Cas9 were ranked into 3 tiers.

[0664] The gRNAs in tier 1 were selected based on their distance to the target site and their orthogonality in the genome (based on the ZiFiT identification of close matches in the human genome containing an NGG PAM). As an example, for all targets, both 17-mer and 20-mer gRNAs were designed. gRNAs were also selected both for single-gRNA nuclease cutting and for the dual gRNA nickase strategy. Criteria for selecting gRNAs and the determination for which gRNAs can be used for which strategy is based on several considerations:
[0665] 1. For the dual nickase strategy, gRNA pairs should be oriented on the DNA such that PAMs are facing out and cutting with the D10A Cas9 nickase will result in 5′ overhangs.
[0666] 2. An assumption that cleaving with dual nickase pairs will result in deletion of the entire intervening sequence at a reasonable frequency. However, it will also often result in indel mutations at the site of only one of the gRNAs. Candidate pair members can be tested for how efficiently they remove the entire sequence versus just causing indel mutations at the site of one gRNA.

[0667] While it can be desirable to have gRNAs start with a 5′ G, this requirement was relaxed for some gRNAs in tier 1 in order to identify guides in the correct orientation, within a reasonable distance to the target position (i.e., within the first 500 bp of the coding sequence) and with a high level of orthogonality against the human genome. In order to find a pair for the dual-nickase strategy it was necessary to either extend the distance from the target position or remove the requirement for the 5′G. Tier 2 gRNAs were selected based on location within the first 500 bp of the coding sequence in the HSV gene. Tier 3 gRNAs were selected based on their location in the coding sequence, but downstream of the first 500 bp of the HSV gene. Note that tiers are non-inclusive (each gRNA is listed only once). In certain instances, no gRNA was identified based on the criteria of the particular tier.

[0668] As discussed above, gRNAs were identified for single-gRNA nuclease cleavage as well as for a dual-gRNA paired “nickase” strategy, as indicated.

[0669] gRNAs for use with the N. meningitidis (Tables 1F-1G) and S. aureus (Tables 1D-1E) Cas9s were identified manually by scanning genomic DNA sequence for the presence of PAM sequences. These gRNAs were separated into two tiers for each species. The first tier includes gRNAs selected based on location in the first 500 bp of the coding sequence of the HSV gene. The second tier includes gRNAs selected based on location in the coding sequence, but downstream of the first 500 bp of the HSV gene.

[0670] In a second strategy, Guide RNAs (gRNAs) for use with S. pyogenes, S. aureus and N. meningitidis Cas9s were identified using a DNA sequence searching algorithm. Guide RNA design was carried out using a custom guide RNA design software based on the public tool cas-offinder (reference:Cas-OFFinder: a fast and versatile algorithm that searches for potential off-target sites of Cas9 RNA-guided endonucleases, Bioinformatics. 2014 Feb. 17. Bae S, Park J, Kim J S. PMID: 24463181). Said custom guide RNA design software scores guides after calculating their genomewide off-target propensity. Typically matches ranging from perfect matches to 7 mismatches are considered for guides ranging in length from 17 to 24. Once the off-target sites are computationally determined, an aggregate score is calculated for each guide and summarized in a tabular output using a web-interface. In addition to identifying potential gRNA sites adjacent to PAM sequences, the software also identifies all PAM adjacent sequences that differ by 1, 2, 3 or more nucleotides from the selected gRNA sites. Genomic DNA sequence for each gene was obtained from the UCSC Genome browser and sequences were screened for repeat elements using the publically available RepeatMasker program. RepeatMasker searches input DNA sequences for repeated elements and regions of low complexity. The output is a detailed annotation of the repeats present in a given query sequence.

[0671] Following identification, gRNAs were ranked into tiers based on their distance to the target site, their orthogonality and presence of a 5′ G (based on identification of close matches in the human genome containing a relavant PAM (e.g., in the case of S. pyogenes, a NGG PAM, in the case of S. aureus, a NNGRRT or NNGRRV PAM, and in the case of N. meningitidis, a NNNNGATT or NNNNGCTT PAM). Orthogonality refers to the number of sequences in the human genome that contain a minimum number of mismatches to the target sequence. A “high level of orthogonality” or “good orthogonality” may, for example, refer to 20-mer gRNAs that have no identical sequences in the human genome besides the intended target, nor any sequences that contain one or two mismatches in the target sequence. Targeting domains with good orthogonality are selected to minimize off-target DNA cleavage.

[0672] As an example, for S. pyogenes and N. meningitidis targets, 17-mer, or 20-mer gRNAs were designed. As another example, for S. aureus targets, 18-mer, 19-mer, 20-mer, 21-mer, 22-mer, 23-mer and 24-mer gRNAs were designed. Targeting domains, disclosed herein, may comprise the 17-mer described in Tables 5A-5E, 6A-6G or 7A-7D, e.g., the targeting domains of 18 or more nucleotides may comprise the 17-mer gRNAs described in Tables 5A-5E, 6A-6G or 7A-7D. Targeting domains, disclosed herein, may comprises the 18-mer described in Tables 5A-5E, 6A-6G or 7A-7D, e.g., the targeting domains of 19 or more nucleotides may comprise the 18-mer gRNAs described in Tables 5A-5E, 6A-6G or 7A-7D. Targeting domains, disclosed herein, may comprises the 19-mer described in Tables 5A-5E, 6A-6G or 7A-7D, e.g., the targeting domains of 20 or more nucleotides may comprise the 19-mer gRNAs described in Tables 5A-5E, 6A-6G or 7A-7D. Targeting domains, disclosed herein, may comprises the 20-mer gRNAs described in Tables 5A-5E, 6A-6G or 7A-7D, e.g., the targeting domains of 21 or more nucleotides may comprise the 20-mer gRNAs described in Tables 5A-5E, 6A-6G or 7A-7D. Targeting domains, disclosed herein, may comprises the 21-mer described in Tables 5A-5E, 6A-6G or 7A-7D, e.g., the targeting domains of 22 or more nucleotides may comprise the 21-mer gRNAs described in Tables 5A-5E, 6A-6G or 7A-7D. Targeting domains, disclosed herein, may comprises the 22-mer described in Tables 5A-5E, 6A-6G or 7A-7D, e.g., the targeting domains of 23 or more nucleotides may comprise the 22-mer gRNAs described in Tables 5A-5E, 6A-6G or 7A-7D. Targeting domains, disclosed herein, may comprises the 23-mer described in Tables 5A-5E, 6A-6G or 7A-7D, e.g., the targeting domains of 24 or more nucleotides may comprise the 23-mer gRNAs described in Tables 5A-5E, 6A-6G or 7A-7D. Targeting domains, disclosed herein, may comprises the 24-mer described in Tables 5A-5E, 6A-6G or 7A-7D, e.g., the targeting domains of 25 or more nucleotides may comprise the 24-mer gRNAs described in Tables 5A-5E, 6A-6G or 7A-7D. gRNAs were identified for both single-gRNA nuclease cleavage and for a dual-gRNA paired “nickase” strategy. Criteria for selecting gRNAs and the determination for which gRNAs can be used for the dual-gRNA paired “nickase” strategy is based on two considerations:
[0673] 1. gRNA pairs should be oriented on the DNA such that PAMs are facing out and cutting with the D10A Cas9 nickase will result in 5′ overhangs.
[0674] 2. An assumption that cleaving with dual nickase pairs will result in deletion of the entire intervening sequence at a reasonable frequency. However, cleaving with dual nickase pairs can also result in indel mutations at the site of only one of the gRNAs. Candidate pair members can be tested for how efficiently they remove the entire sequence versus causing indel mutations at the site of one gRNA.

[0675] The targeting domains discussed herein can be incorporated into the gRNAs described herein.

[0676] gRNAs were identified and ranked into 5 tiers for S. pyogenes (Tables 5A-5E), and N. meningitidis (Tables 7A-7D); and 7 tiers for S. aureus (Tables 6A-6G). For S. pyogenes, and N. meningitidis, the targeting domain for tier 1 gRNA molecules were selected based on (1) distance to a target site (e.g., start codon), e.g., within 500 bp (e.g., downstream) of the target site (e.g., start codon), (2) a high level of orthogonality and (3) the presence of 5′G. The targeting domain for tier 2 gRNA molecules were selected based on (1) distance to a target site (e.g., start codon), e.g., within 500 bp (e.g., downstream) of the target site (e.g., start codon) and (2) a high level of orthogonality. The targeting domain for tier 3 gRNA molecules were selected based on (1) distance to a target site (e.g., start codon), e.g., within 500 bp (e.g., downstream) of the target site (e.g., start codon) and (2) the presence of 5′G. The targeting domain for tier 4 gRNA molecules were selected based on distance to a target site (e.g., start codon), e.g., within 500 bp (e.g., downstream) of the target site (e.g., start codon). The targeting domain for tier 5 gRNA molecules were selected based on distance to the target site (e.g., start codon), e.g., within reminder of the coding sequence, e.g., downstream of the first 500 bp of coding sequence (e.g., anywhere from +500 (relative to the start codon) to the stop codon). For S. aureus, the targeting domain for tier 1 gRNA molecules were selected based on (1) distance to a target site (e.g., start codon), e.g., within 500 bp (e.g., downstream) of the target site (e.g., start codon), (2) a high level of orthogonality, (3) the presence of 5′G and (4) PAM is NNGRRT. The targeting domain for tier 2 gRNA molecules were selected based on (1) distance to a target site (e.g., start codon), e.g., within 500 bp (e.g., downstream) of the target site (e.g., start codon), (2) a high level of orthogonality, and (3) PAM is NNGRRT. The targeting domain for tier 3 gRNA molecules were selected based on (1) distance to a target site (e.g., start codon), e.g., within 500 bp (e.g., downstream) of the target site (e.g., start codon) and (2) PAM is NNGRRT. The targeting domain for tier 4 gRNA molecules were selected based on (1) distance to a target site (e.g., start codon), e.g., within 500 bp (e.g., downstream) of the target site (e.g., start codon) and (2) PAM is NNGRRV. The targeting domain for tier 5 gRNA molecules were selected based on (1) distance to the target site (e.g., start codon), e.g., within reminder of the coding sequence, e.g., downstream of the first 500 bp of coding sequence (e.g., anywhere from +500 (relative to the start codon) to the stop codon), (2) the presence of 5′G and (3) PAM is NNGRRT. The targeting domain for tier 6 gRNA molecules were selected based on (1) distance to the target site (e.g., start codon), e.g., within reminder of the coding sequence, e.g., downstream of the first 500 bp of coding sequence (e.g., anywhere from +500 (relative to the start codon) to the stop codon) and (2) PAM is NNGRRT. The targeting domain for tier 7 gRNA molecules were selected based on (1) distance to the target site (e.g., start codon), e.g., within reminder of the coding sequence, e.g., downstream of the first 500 bp of coding sequence (e.g., anywhere from +500 (relative to the start codon) to the stop codon) and (2) PAM is NNGRRV. Note that tiers are non-inclusive (each gRNA is listed only once for the strategy). In certain instances, no gRNA was identified based on the criteria of the particular tier.

Strategies to Identify gRNAs for S. pyogenes, S. Aureus, and N. meningitidis to Knock Out the UL30 Gene

[0677] As an example, three strategies were utilized to identify gRNAs for use with S. pyogenes, S. aureus and N. meningitidis Cas9 enzymes.

[0678] In the first strategy, guide RNAs (gRNAs) for use with the S. pyogenes (Tables 2A-2C) Cas9 were identified using the publically available web-based ZiFiT server (Fu et al., Improving CRISPR-Cas nuclease specificity using truncated guide RNAs. Nat Biotechnol. 2014 Jan. 26. doi: 10.1038/nbt.2808. PubMed PMID: 24463574, for the original references see Sander et al., 2007, NAR 35:W599-605; Sander et al., 2010, NAR 38: W462-8). In addition to identifying potential gRNA sites adjacent to PAM sequences, the software also identifies all PAM adjacent sequences that differ by 1, 2, 3 or more nucleotides from the selected gRNA sites. Genomic DNA sequence for each gene was obtained from the UCSC Genome browser and sequences were screened for repeat elements using the publically available Repeat-Masker program. RepeatMmasker searches input DNA sequences for repeated elements and regions of low complexity. The output is a detailed annotation of the repeats present in a given query sequence. Following identification, gRNAs for use with a S. pyogenes Cas9 were ranked into 3 tiers.

[0679] The gRNAs in tier 1 were selected based on their distance to the target site and their orthogonality in the genome (based on the ZiFiT identification of close matches in the human genome containing an NGG PAM). As an example, for all targets, both 17-mer and 20-mer gRNAs were designed. gRNAs were also selected both for single-gRNA nuclease cutting and for the dual gRNA nickase strategy. Criteria for selecting gRNAs and the determination for which gRNAs can be used for which strategy is based on several considerations:
[0680] 1. For the dual nickase strategy, gRNA pairs should be oriented on the DNA such that PAMs are facing out and cutting with the D10A Cas9 nickase will result in 5′ overhangs.
[0681] 2. An assumption that cleaving with dual nickase pairs will result in deletion of the entire intervening sequence at a reasonable frequency. However, it will also often result in indel mutations at the site of only one of the gRNAs. Candidate pair members can be tested for how efficiently they remove the entire sequence versus just causing indel mutations at the site of one gRNA.

[0682] While it can be desirable to have gRNAs start with a 5′ G, this requirement was relaxed for some gRNAs in tier 1 in order to identify guides in the correct orientation, within a reasonable distance to the target position (i.e., within the first 500 bp of the coding sequence) and with a high level of orthogonality against the human genome. In order to find a pair for the dual-nickase strategy it was necessary to either extend the distance from the target position or remove the requirement for the 5′G. Tier 2 gRNAs were selected based on location within the first 500 bp of the coding sequence in the HSV gene. Tier 3 gRNAs were selected based on their location in the coding sequence, but downstream of the first 500 bp of the HSV gene. Note that tiers are non-inclusive (each gRNA is listed only once). In certain instances, no gRNA was identified based on the criteria of the particular tier.

[0683] As discussed above, gRNAs were identified for single-gRNA nuclease cleavage as well as for a dual-gRNA paired “nickase” strategy, as indicated.

[0684] gRNAs for use with the N. meningitidis (Tables 2F-2G) and S. aureus (Tables 2D-2E) Cas9s were identified manually by scanning genomic DNA sequence for the presence of PAM sequences. These gRNAs were separated into two tiers for each species. The first tier includes gRNAs selected based on location in the first 500 bp of the coding sequence of the HSV gene. The second tier includes gRNAs selected based on location in the coding sequence, but downstream of the first 500 bp of the HSV gene.

[0685] In a second strategy, Guide RNAs (gRNAs) for use with S. pyogenes, S. aureus and N. meningitidis Cas9s were identified using a DNA sequence searching algorithm. Guide RNA design was carried out using a custom guide RNA design software based on the public tool cas-offinder (reference:Cas-OFFinder: a fast and versatile algorithm that searches for potential off-target sites of Cas9 RNA-guided endonucleases, Bioinformatics. 2014 Feb. 17. Bae S, Park J, Kim J S. PMID: 24463181). Said custom guide RNA design software scores guides after calculating their genomewide off-target propensity. Typically matches ranging from perfect matches to 7 mismatches are considered for guides ranging in length from 17 to 24. Once the off-target sites are computationally determined, an aggregate score is calculated for each guide and summarized in a tabular output using a web-interface. In addition to identifying potential gRNA sites adjacent to PAM sequences, the software also identifies all PAM adjacent sequences that differ by 1, 2, 3 or more nucleotides from the selected gRNA sites. Genomic DNA sequence for each gene was obtained from the UCSC Genome browser and sequences were screened for repeat elements using the publically available RepeatMasker program. RepeatMasker searches input DNA sequences for repeated elements and regions of low complexity. The output is a detailed annotation of the repeats present in a given query sequence.

[0686] Following identification, gRNAs were ranked into tiers based on their distance to the target site, their orthogonality and presence of a 5′ G (based on identification of close matches in the human genome containing a relavant PAM (e.g., in the case of S. pyogenes, a NGG PAM, in the case of S. aureus, a NNGRRT or NNGRRV PAM, and in the case of N. meningitidis, a NNNNGATT or NNNNGCTT PAM). Orthogonality refers to the number of sequences in the human genome that contain a minimum number of mismatches to the target sequence. A “high level of orthogonality” or “good orthogonality” may, for example, refer to 20-mer gRNAs that have no identical sequences in the human genome besides the intended target, nor any sequences that contain one or two mismatches in the target sequence. Targeting domains with good orthogonality are selected to minimize off-target DNA cleavage.

[0687] As an example, for S. pyogenes and N. meningitidis targets, 17-mer, or 20-mer gRNAs were designed. As another example, for S. aureus targets, 18-mer, 19-mer, 20-mer, 21-mer, 22-mer, 23-mer and 24-mer gRNAs were designed. Targeting domains, disclosed herein, may comprise the 17-mer described in Tables 8A-8E, 9A-9G or 10A-10C, e.g., the targeting domains of 18 or more nucleotides may comprise the 17-mer gRNAs described in Tables 8A-8E, 9A-9G or 10A-10C. Targeting domains, disclosed herein, may comprises the 18-mer described in Tables 8A-8E, 9A-9G or 10A-10C, e.g., the targeting domains of 19 or more nucleotides may comprise the 18-mer gRNAs described in Tables 8A-8E, 9A-9G or 10A-10C. Targeting domains, disclosed herein, may comprises the 19-mer described in Tables 8A-8E, 9A-9G or 10A-10C, e.g., the targeting domains of 20 or more nucleotides may comprise the 19-mer gRNAs described in Tables 8A-8E, 9A-9G or 10A-10C. Targeting domains, disclosed herein, may comprises the 20-mer gRNAs described in Tables 8A-8E, 9A-9G or 10A-10C, e.g., the targeting domains of 21 or more nucleotides may comprise the 20-mer gRNAs described in Tables 8A-8E, 9A-9G or 10A-10C. Targeting domains, disclosed herein, may comprises the 21-mer described in Tables 8A-8E, 9A-9G or 10A-10C, e.g., the targeting domains of 22 or more nucleotides may comprise the 21-mer gRNAs described in Tables 8A-8E, 9A-9G or 10A-10C. Targeting domains, disclosed herein, may comprises the 22-mer described in Tables 8A-8E, 9A-9G or 10A-10C, e.g., the targeting domains of 23 or more nucleotides may comprise the 22-mer gRNAs described in Tables 8A-8E, 9A-9G or 10A-10C. Targeting domains, disclosed herein, may comprises the 23-mer described in Tables 8A-8E, 9A-9G or 10A-10C, e.g., the targeting domains of 24 or more nucleotides may comprise the 23-mer gRNAs described in Tables 8A-8E, 9A-9G or 10A-10C. Targeting domains, disclosed herein, may comprises the 24-mer described in Tables 8A-8E, 9A-9G or 10A-10C, e.g., the targeting domains of 25 or more nucleotides may comprise the 24-mer gRNAs described in Tables 8A-8E, 9A-9G or 10A-10C. gRNAs were identified for both single-gRNA nuclease cleavage and for a dual-gRNA paired “nickase” strategy. Criteria for selecting gRNAs and the determination for which gRNAs can be used for the dual-gRNA paired “nickase” strategy is based on two considerations:
[0688] 1. gRNA pairs should be oriented on the DNA such that PAMs are facing out and cutting with the D10A Cas9 nickase will result in 5′ overhangs.
[0689] 2. An assumption that cleaving with dual nickase pairs will result in deletion of the entire intervening sequence at a reasonable frequency. However, cleaving with dual nickase pairs can also result in indel mutations at the site of only one of the gRNAs. Candidate pair members can be tested for how efficiently they remove the entire sequence versus causing indel mutations at the site of one gRNA.

[0690] The targeting domains discussed herein can be incorporated into the gRNAs described herein.

[0691] gRNAs were identified and ranked into 5 tiers for S. pyogenes (Tables 8A-8E), and N. meningitidis (Tables 10A-10C); and 7 tiers for S. aureus (Tables 9A-9G). For S. pyogenes, and N. meningitidis, the targeting domain for tier 1 gRNA molecules were selected based on (1) distance to a target site (e.g., start codon), e.g., within 500 bp (e.g., downstream) of the target site (e.g., start codon), (2) a high level of orthogonality and (3) the presence of 5′G. The targeting domain for tier 2 gRNA molecules were selected based on (1) distance to a target site (e.g., start codon), e.g., within 500 bp (e.g., downstream) of the target site (e.g., start codon) and (2) a high level of orthogonality. The targeting domain for tier 3 gRNA molecules were selected based on (1) distance to a target site (e.g., start codon), e.g., within 500 bp (e.g., downstream) of the target site (e.g., start codon) and (2) the presence of 5′G. The targeting domain for tier 4 gRNA molecules were selected based on distance to a target site (e.g., start codon), e.g., within 500 bp (e.g., downstream) of the target site (e.g., start codon). The targeting domain for tier 5 gRNA molecules were selected based on distance to the target site (e.g., start codon), e.g., within reminder of the coding sequence, e.g., downstream of the first 500 bp of coding sequence (e.g., anywhere from +500 (relative to the start codon) to the stop codon). For S. aureus, the targeting domain for tier 1 gRNA molecules were selected based on (1) distance to a target site (e.g., start codon), e.g., within 500 bp (e.g., downstream) of the target site (e.g., start codon), (2) a high level of orthogonality, (3) the presence of 5′G and (4) PAM is NNGRRT. The targeting domain for tier 2 gRNA molecules were selected based on (1) distance to a target site (e.g., start codon), e.g., within 500 bp (e.g., downstream) of the target site (e.g., start codon), (2) a high level of orthogonality, and (3) PAM is NNGRRT. The targeting domain for tier 3 gRNA molecules were selected based on (1) distance to a target site (e.g., start codon), e.g., within 500 bp (e.g., downstream) of the target site (e.g., start codon) and (2) PAM is NNGRRT. The targeting domain for tier 4 gRNA molecules were selected based on (1) distance to a target site (e.g., start codon), e.g., within 500 bp (e.g., downstream) of the target site (e.g., start codon) and (2) PAM is NNGRRV. The targeting domain for tier 5 gRNA molecules were selected based on (1) distance to the target site (e.g., start codon), e.g., within reminder of the coding sequence, e.g., downstream of the first 500 bp of coding sequence (e.g., anywhere from +500 (relative to the start codon) to the stop codon), (2) the presence of 5′G and (3) PAM is NNGRRT. The targeting domain for tier 6 gRNA molecules were selected based on (1) distance to the target site (e.g., start codon), e.g., within reminder of the coding sequence, e.g., downstream of the first 500 bp of coding sequence (e.g., anywhere from +500 (relative to the start codon) to the stop codon) and (2) PAM is NNGRRT. The targeting domain for tier 7 gRNA molecules were selected based on (1) distance to the target site (e.g., start codon), e.g., within reminder of the coding sequence, e.g., downstream of the first 500 bp of coding sequence (e.g., anywhere from +500 (relative to the start codon) to the stop codon) and (2) PAM is NNGRRV. Note that tiers are non-inclusive (each gRNA is listed only once for the strategy). In certain instances, no gRNA was identified based on the criteria of the particular tier.

Strategies to Identify gRNAs for S. pyogenes, S. Aureus, and N. meningitidis to Knock Out the UL48 Gene

[0692] As an example, three strategies were utilized to identify gRNAs for use with S. pyogenes, S. aureus and N. meningitidis Cas9 enzymes.

[0693] In the first strategy, guide RNAs (gRNAs) for use with the S. pyogenes (Tables 3A-3C) Cas9 were identified using the publically available web-based ZiFiT server (Fu et al., Improving CRISPR-Cas nuclease specificity using truncated guide RNAs. Nat Biotechnol. 2014 Jan. 26. doi: 10.1038/nbt.2808. PubMed PMID: 24463574, for the original references see Sander et al., 2007, NAR 35:W599-605; Sander et al., 2010, NAR 38: W462-8). In addition to identifying potential gRNA sites adjacent to PAM sequences, the software also identifies all PAM adjacent sequences that differ by 1, 2, 3 or more nucleotides from the selected gRNA sites. Genomic DNA sequence for each gene was obtained from the UCSC Genome browser and sequences were screened for repeat elements using the publically available Repeat-Masker program. RepeatMmasker searches input DNA sequences for repeated elements and regions of low complexity. The output is a detailed annotation of the repeats present in a given query sequence. Following identification, gRNAs for use with a S. pyogenes Cas9 were ranked into 3 tiers.

[0694] The gRNAs in tier 1 were selected based on their distance to the target site and their orthogonality in the genome (based on the ZiFiT identification of close matches in the human genome containing an NGG PAM). As an example, for all targets, both 17-mer and 20-mer gRNAs were designed. gRNAs were also selected both for single-gRNA nuclease cutting and for the dual gRNA nickase strategy. Criteria for selecting gRNAs and the determination for which gRNAs can be used for which strategy is based on several considerations:
[0695] 1. For the dual nickase strategy, gRNA pairs should be oriented on the DNA such that PAMs are facing out and cutting with the D10A Cas9 nickase will result in 5′ overhangs.
[0696] 2. An assumption that cleaving with dual nickase pairs will result in deletion of the entire intervening sequence at a reasonable frequency. However, it will also often result in indel mutations at the site of only one of the gRNAs. Candidate pair members can be tested for how efficiently they remove the entire sequence versus just causing indel mutations at the site of one gRNA.

[0697] While it can be desirable to have gRNAs start with a 5′ G, this requirement was relaxed for some gRNAs in tier 1 in order to identify guides in the correct orientation, within a reasonable distance to the target position (i.e., within the first 500 bp of the coding sequence) and with a high level of orthogonality against the human genome. In order to find a pair for the dual-nickase strategy it was necessary to either extend the distance from the target position or remove the requirement for the 5′G. Tier 2 gRNAs were selected based on location within the first 500 bp of the coding sequence in the HSV gene. Tier 3 gRNAs were selected based on their location in the coding sequence, but downstream of the first 500 bp of the HSV gene. Note that tiers are non-inclusive (each gRNA is listed only once). In certain instances, no gRNA was identified based on the criteria of the particular tier.

[0698] As discussed above, gRNAs were identified for single-gRNA nuclease cleavage as well as for a dual-gRNA paired “nickase” strategy, as indicated.

[0699] gRNAs for use with the N. meningitidis (Tables 3F-3G) and S. aureus (Tables 3D-3E) Cas9s were identified manually by scanning genomic DNA sequence for the presence of PAM sequences. These gRNAs were separated into two tiers for each species. The first tier includes gRNAs selected based on location in the first 500 bp of the coding sequence of the HSV gene. The second tier includes gRNAs selected based on location in the coding sequence, but downstream of the first 500 bp of the HSV gene.

[0700] In a second strategy, Guide RNAs (gRNAs) for use with S. pyogenes, S. aureus and N. meningitidis Cas9s were identified using a DNA sequence searching algorithm. Guide RNA design was carried out using a custom guide RNA design software based on the public tool cas-offinder (reference:Cas-OFFinder: a fast and versatile algorithm that searches for potential off-target sites of Cas9 RNA-guided endonucleases, Bioinformatics. 2014 Feb. 17. Bae S, Park J, Kim J S. PMID: 24463181). Said custom guide RNA design software scores guides after calculating their genomewide off-target propensity. Typically matches ranging from perfect matches to 7 mismatches are considered for guides ranging in length from 17 to 24. Once the off-target sites are computationally determined, an aggregate score is calculated for each guide and summarized in a tabular output using a web-interface. In addition to identifying potential gRNA sites adjacent to PAM sequences, the software also identifies all PAM adjacent sequences that differ by 1, 2, 3 or more nucleotides from the selected gRNA sites. Genomic DNA sequence for each gene was obtained from the UCSC Genome browser and sequences were screened for repeat elements using the publically available RepeatMasker program. RepeatMasker searches input DNA sequences for repeated elements and regions of low complexity. The output is a detailed annotation of the repeats present in a given query sequence.

[0701] Following identification, gRNAs were ranked into tiers based on their distance to the target site, their orthogonality and presence of a 5′ G (based on identification of close matches in the human genome containing a relavant PAM (e.g., in the case of S. pyogenes, a NGG PAM, in the case of S. aureus, a NNGRRT or NNGRRV PAM, and in the case of N. meningitidis, a NNNNGATT or NNNNGCTT PAM). Orthogonality refers to the number of sequences in the human genome that contain a minimum number of mismatches to the target sequence. A “high level of orthogonality” or “good orthogonality” may, for example, refer to 20-mer gRNAs that have no identical sequences in the human genome besides the intended target, nor any sequences that contain one or two mismatches in the target sequence. Targeting domains with good orthogonality are selected to minimize off-target DNA cleavage.

[0702] As an example, for S. pyogenes and N. meningitidis targets, 17-mer, or 20-mer gRNAs were designed. As another example, for S. aureus targets, 18-mer, 19-mer, 20-mer, 21-mer, 22-mer, 23-mer and 24-mer gRNAs were designed. Targeting domains, disclosed herein, may comprise the 17-mer described in Tables 11A-11E, 12A-12G or 13A-13C, e.g., the targeting domains of 18 or more nucleotides may comprise the 17-mer gRNAs described in Tables 11A-11E, 12A-12G or 13A-13C. Targeting domains, disclosed herein, may comprises the 18-mer described in Tables 11A-11E, 12A-12G or 13A-13C, e.g., the targeting domains of 19 or more nucleotides may comprise the 18-mer gRNAs described in Tables 11A-11E, 12A-12G or 13A-13C. Targeting domains, disclosed herein, may comprises the 19-mer described in Tables 11A-11E, 12A-12G or 13A-13C, e.g., the targeting domains of 20 or more nucleotides may comprise the 19-mer gRNAs described in Tables 11A-11E, 12A-12G or 13A-13C. Targeting domains, disclosed herein, may comprises the 20-mer gRNAs described in Tables 11A-11E, 12A-12G or 13A-13C, e.g., the targeting domains of 21 or more nucleotides may comprise the 20-mer gRNAs described in Tables 11A-11E, 12A-12G or 13A-13C. Targeting domains, disclosed herein, may comprises the 21-mer described in Tables 11A-11E, 12A-12G or 13A-13C, e.g., the targeting domains of 22 or more nucleotides may comprise the 21-mer gRNAs described in Tables 11A-11E, 12A-12G or 13A-13C. Targeting domains, disclosed herein, may comprises the 22-mer described in Tables 11A-11E, 12A-12G or 13A-13C, e.g., the targeting domains of 23 or more nucleotides may comprise the 22-mer gRNAs described in Tables 11A-11E, 12A-12G or 13A-13C. Targeting domains, disclosed herein, may comprises the 23-mer described in Tables 11A-11E, 12A-12G or 13A-13C, e.g., the targeting domains of 24 or more nucleotides may comprise the 23-mer gRNAs described in Tables 11A-11E, 12A-12G or 13A-13C. Targeting domains, disclosed herein, may comprises the 24-mer described in Tables 11A-11E, 12A-12G or 13A-13C, e.g., the targeting domains of 25 or more nucleotides may comprise the 24-mer gRNAs described in Tables 11A-11E, 12A-12G or 13A-13C. gRNAs were identified for both single-gRNA nuclease cleavage and for a dual-gRNA paired “nickase” strategy. Criteria for selecting gRNAs and the determination for which gRNAs can be used for the dual-gRNA paired “nickase” strategy is based on two considerations:
[0703] 1. gRNA pairs should be oriented on the DNA such that PAMs are facing out and cutting with the D10A Cas9 nickase will result in 5′ overhangs.
[0704] 2. An assumption that cleaving with dual nickase pairs will result in deletion of the entire intervening sequence at a reasonable frequency. However, cleaving with dual nickase pairs can also result in indel mutations at the site of only one of the gRNAs. Candidate pair members can be tested for how efficiently they remove the entire sequence versus causing indel mutations at the site of one gRNA.

[0705] The targeting domains discussed herein can be incorporated into the gRNAs described herein.

[0706] gRNAs were identified and ranked into 5 tiers for S. pyogenes (Tables 11A-11E), and N. meningitidis (Tables 13A-13C); and 7 tiers for S. aureus (Tables 12A-12G). For S. pyogenes, and N. meningitidis, the targeting domain for tier 1 gRNA molecules were selected based on (1) distance to a target site (e.g., start codon), e.g., within 500 bp (e.g., downstream) of the target site (e.g., start codon), (2) a high level of orthogonality and (3) the presence of 5′G. The targeting domain for tier 2 gRNA molecules were selected based on (1) distance to a target site (e.g., start codon), e.g., within 500 bp (e.g., downstream) of the target site (e.g., start codon) and (2) a high level of orthogonality. The targeting domain for tier 3 gRNA molecules were selected based on (1) distance to a target site (e.g., start codon), e.g., within 500 bp (e.g., downstream) of the target site (e.g., start codon) and (2) the presence of 5′G. The targeting domain for tier 4 gRNA molecules were selected based on distance to a target site (e.g., start codon), e.g., within 500 bp (e.g., downstream) of the target site (e.g., start codon). The targeting domain for tier 5 gRNA molecules were selected based on distance to the target site (e.g., start codon), e.g., within reminder of the coding sequence, e.g., downstream of the first 500 bp of coding sequence (e.g., anywhere from +500 (relative to the start codon) to the stop codon). For S. aureus, the targeting domain for tier 1 gRNA molecules were selected based on (1) distance to a target site (e.g., start codon), e.g., within 500 bp (e.g., downstream) of the target site (e.g., start codon), (2) a high level of orthogonality, (3) the presence of 5′G and (4) PAM is NNGRRT. The targeting domain for tier 2 gRNA molecules were selected based on (1) distance to a target site (e.g., start codon), e.g., within 500 bp (e.g., downstream) of the target site (e.g., start codon), (2) a high level of orthogonality, and (3) PAM is NNGRRT. The targeting domain for tier 3 gRNA molecules were selected based on (1) distance to a target site (e.g., start codon), e.g., within 500 bp (e.g., downstream) of the target site (e.g., start codon) and (2) PAM is NNGRRT. The targeting domain for tier 4 gRNA molecules were selected based on (1) distance to a target site (e.g., start codon), e.g., within 500 bp (e.g., downstream) of the target site (e.g., start codon) and (2) PAM is NNGRRV. The targeting domain for tier 5 gRNA molecules were selected based on (1) distance to the target site (e.g., start codon), e.g., within reminder of the coding sequence, e.g., downstream of the first 500 bp of coding sequence (e.g., anywhere from +500 (relative to the start codon) to the stop codon), (2) the presence of 5′G and (3) PAM is NNGRRT. The targeting domain for tier 6 gRNA molecules were selected based on (1) distance to the target site (e.g., start codon), e.g., within reminder of the coding sequence, e.g., downstream of the first 500 bp of coding sequence (e.g., anywhere from +500 (relative to the start codon) to the stop codon) and (2) PAM is NNGRRT. The targeting domain for tier 7 gRNA molecules were selected based on (1) distance to the target site (e.g., start codon), e.g., within reminder of the coding sequence, e.g., downstream of the first 500 bp of coding sequence (e.g., anywhere from +500 (relative to the start codon) to the stop codon) and (2) PAM is NNGRRV. Note that tiers are non-inclusive (each gRNA is listed only once for the strategy). In certain instances, no gRNA was identified based on the criteria of the particular tier.

Strategies to Identify gRNAs for S. pyogenes, S. Aureus, and N. meningitidis to Knock Out the UL54 Gene

[0707] As an example, three strategies were utilized to identify gRNAs for use with S. pyogenes, S. aureus and N. meningitidis Cas9 enzymes.

[0708] In the first strategy, guide RNAs (gRNAs) for use with the S. pyogenes (Tables 4A-4C) Cas9 were identified using the publically available web-based ZiFiT server (Fu et al., Improving CRISPR-Cas nuclease specificity using truncated guide RNAs. Nat Biotechnol. 2014 Jan. 26. doi: 10.1038/nbt.2808. PubMed PMID: 24463574, for the original references see Sander et al., 2007, NAR 35:W599-605; Sander et al., 2010, NAR 38: W462-8). In addition to identifying potential gRNA sites adjacent to PAM sequences, the software also identifies all PAM adjacent sequences that differ by 1, 2, 3 or more nucleotides from the selected gRNA sites. Genomic DNA sequence for each gene was obtained from the UCSC Genome browser and sequences were screened for repeat elements using the publically available Repeat-Masker program. RepeatMmasker searches input DNA sequences for repeated elements and regions of low complexity. The output is a detailed annotation of the repeats present in a given query sequence. Following identification, gRNAs for use with a S. pyogenes Cas9 were ranked into 3 tiers.

[0709] The gRNAs in tier 1 were selected based on their distance to the target site and their orthogonality in the genome (based on the ZiFiT identification of close matches in the human genome containing an NGG PAM). As an example, for all targets, both 17-mer and 20-mer gRNAs were designed. gRNAs were also selected both for single-gRNA nuclease cutting and for the dual gRNA nickase strategy. Criteria for selecting gRNAs and the determination for which gRNAs can be used for which strategy is based on several considerations:
[0710] 1. For the dual nickase strategy, gRNA pairs should be oriented on the DNA such that PAMs are facing out and cutting with the D10A Cas9 nickase will result in 5′ overhangs.
[0711] 2. An assumption that cleaving with dual nickase pairs will result in deletion of the entire intervening sequence at a reasonable frequency. However, it will also often result in indel mutations at the site of only one of the gRNAs. Candidate pair members can be tested for how efficiently they remove the entire sequence versus just causing indel mutations at the site of one gRNA.

[0712] While it can be desirable to have gRNAs start with a 5′ G, this requirement was relaxed for some gRNAs in tier 1 in order to identify guides in the correct orientation, within a reasonable distance to the target position (i.e., within the first 500 bp of the coding sequence) and with a high level of orthogonality against the human genome. In order to find a pair for the dual-nickase strategy it was necessary to either extend the distance from the target position or remove the requirement for the 5′G. Tier 2 gRNAs were selected based on location within the first 500 bp of the coding sequence in the HSV gene. Tier 3 gRNAs were selected based on their location in the coding sequence, but downstream of the first 500 bp of the HSV gene. Note that tiers are non-inclusive (each gRNA is listed only once). In certain instances, no gRNA was identified based on the criteria of the particular tier.

[0713] As discussed above, gRNAs were identified for single-gRNA nuclease cleavage as well as for a dual-gRNA paired “nickase” strategy, as indicated.

[0714] gRNAs for use with the N. meningitidis (Tables 4F) and S. aureus (Tables 4D-4E) Cas9s were identified manually by scanning genomic DNA sequence for the presence of PAM sequences. These gRNAs were separated into two tiers for each species. The first tier includes gRNAs selected based on location in the first 500 bp of the coding sequence of the HSV gene. The second tier includes gRNAs selected based on location in the coding sequence, but downstream of the first 500 bp of the HSV gene.

[0715] In a second strategy, Guide RNAs (gRNAs) for use with S. pyogenes, S. aureus and N. meningitidis Cas9s were identified using a DNA sequence searching algorithm. Guide RNA design was carried out using a custom guide RNA design software based on the public tool cas-offinder (reference:Cas-OFFinder: a fast and versatile algorithm that searches for potential off-target sites of Cas9 RNA-guided endonucleases, Bioinformatics. 2014 Feb. 17. Bae S, Park J, Kim J S. PMID: 24463181). Said custom guide RNA design software scores guides after calculating their genomewide off-target propensity. Typically matches ranging from perfect matches to 7 mismatches are considered for guides ranging in length from 17 to 24. Once the off-target sites are computationally determined, an aggregate score is calculated for each guide and summarized in a tabular output using a web-interface. In addition to identifying potential gRNA sites adjacent to PAM sequences, the software also identifies all PAM adjacent sequences that differ by 1, 2, 3 or more nucleotides from the selected gRNA sites. Genomic DNA sequence for each gene was obtained from the UCSC Genome browser and sequences were screened for repeat elements using the publically available RepeatMasker program. RepeatMasker searches input DNA sequences for repeated elements and regions of low complexity. The output is a detailed annotation of the repeats present in a given query sequence.

[0716] Following identification, gRNAs were ranked into tiers based on their distance to the target site, their orthogonality and presence of a 5′ G (based on identification of close matches in the human genome containing a relavant PAM (e.g., in the case of S. pyogenes, a NGG PAM, in the case of S. aureus, a NNGRRT or NNGRRV PAM, and in the case of N. meningitidis, a NNNNGATT or NNNNGCTT PAM). Orthogonality refers to the number of sequences in the human genome that contain a minimum number of mismatches to the target sequence. A “high level of orthogonality” or “good orthogonality” may, for example, refer to 20-mer gRNAs that have no identical sequences in the human genome besides the intended target, nor any sequences that contain one or two mismatches in the target sequence. Targeting domains with good orthogonality are selected to minimize off-target DNA cleavage.

[0717] As an example, for S. pyogenes and N. meningitidis targets, 17-mer, or 20-mer gRNAs were designed. As another example, for S. aureus targets, 18-mer, 19-mer, 20-mer, 21-mer, 22-mer, 23-mer and 24-mer gRNAs were designed. Targeting domains, disclosed herein, may comprise the 17-mer described in Tables 14A-14E, 15A-15G or 16A-16C, e.g., the targeting domains of 18 or more nucleotides may comprise the 17-mer gRNAs described in Tables 14A-14E, 15A-15G or 16A-16C. Targeting domains, disclosed herein, may comprises the 18-mer described in Tables 14A-14E, 15A-15G or 16A-16C, e.g., the targeting domains of 19 or more nucleotides may comprise the 18-mer gRNAs described in Tables 14A-14E, 15A-15G or 16A-16C. Targeting domains, disclosed herein, may comprises the 19-mer described in Tables 14A-14E, 15A-15G or 16A-16C, e.g., the targeting domains of 20 or more nucleotides may comprise the 19-mer gRNAs described in Tables 14A-14E, 15A-15G or 16A-16C. Targeting domains, disclosed herein, may comprises the 20-mer gRNAs described in Tables 14A-14E, 15A-15G or 16A-16C, e.g., the targeting domains of 21 or more nucleotides may comprise the 20-mer gRNAs described in Tables 14A-14E, 15A-15G or 16A-16C. Targeting domains, disclosed herein, may comprises the 21-mer described in Tables 14A-14E, 15A-15G or 16A-16C, e.g., the targeting domains of 22 or more nucleotides may comprise the 21-mer gRNAs described in Tables 14A-14E, 15A-15G or 16A-16C. Targeting domains, disclosed herein, may comprises the 22-mer described in Tables 14A-14E, 15A-15G or 16A-16C, e.g., the targeting domains of 23 or more nucleotides may comprise the 22-mer gRNAs described in Tables 14A-14E, 15A-15G or 16A-16C. Targeting domains, disclosed herein, may comprises the 23-mer described in Tables 14A-14E, 15A-15G or 16A-16C, e.g., the targeting domains of 24 or more nucleotides may comprise the 23-mer gRNAs described in Tables 14A-14E, 15A-15G or 16A-16C. Targeting domains, disclosed herein, may comprises the 24-mer described in Tables 14A-14E, 15A-15G or 16A-16C, e.g., the targeting domains of 25 or more nucleotides may comprise the 24-mer gRNAs described in Tables 14A-14E, 15A-15G or 16A-16C. gRNAs were identified for both single-gRNA nuclease cleavage and for a dual-gRNA paired “nickase” strategy. Criteria for selecting gRNAs and the determination for which gRNAs can be used for the dual-gRNA paired “nickase” strategy is based on two considerations:
[0718] 1. gRNA pairs should be oriented on the DNA such that PAMs are facing out and cutting with the D10A Cas9 nickase will result in 5′ overhangs.
[0719] 2. An assumption that cleaving with dual nickase pairs will result in deletion of the entire intervening sequence at a reasonable frequency. However, cleaving with dual nickase pairs can also result in indel mutations at the site of only one of the gRNAs. Candidate pair members can be tested for how efficiently they remove the entire sequence versus causing indel mutations at the site of one gRNA.

[0720] The targeting domains discussed herein can be incorporated into the gRNAs described herein.

[0721] gRNAs were identified and ranked into 5 tiers for S. pyogenes (Tables 14A-14E), and N. meningitidis (Tables 16A-16C); and 7 tiers for S. aureus (Tables 15A-15G). For S. pyogenes, and N. meningitidis, the targeting domain for tier 1 gRNA molecules were selected based on (1) distance to a target site (e.g., start codon), e.g., within 500 bp (e.g., downstream) of the target site (e.g., start codon), (2) a high level of orthogonality and (3) the presence of 5′G. The targeting domain for tier 2 gRNA molecules were selected based on (1) distance to a target site (e.g., start codon), e.g., within 500 bp (e.g., downstream) of the target site (e.g., start codon) and (2) a high level of orthogonality. The targeting domain for tier 3 gRNA molecules were selected based on (1) distance to a target site (e.g., start codon), e.g., within 500 bp (e.g., downstream) of the target site (e.g., start codon) and (2) the presence of 5′G. The targeting domain for tier 4 gRNA molecules were selected based on distance to a target site (e.g., start codon), e.g., within 500 bp (e.g., downstream) of the target site (e.g., start codon). The targeting domain for tier 5 gRNA molecules were selected based on distance to the target site (e.g., start codon), e.g., within reminder of the coding sequence, e.g., downstream of the first 500 bp of coding sequence (e.g., anywhere from +500 (relative to the start codon) to the stop codon). For S. aureus, the targeting domain for tier 1 gRNA molecules were selected based on (1) distance to a target site (e.g., start codon), e.g., within 500 bp (e.g., downstream) of the target site (e.g., start codon), (2) a high level of orthogonality, (3) the presence of 5′G and (4) PAM is NNGRRT. The targeting domain for tier 2 gRNA molecules were selected based on (1) distance to a target site (e.g., start codon), e.g., within 500 bp (e.g., downstream) of the target site (e.g., start codon), (2) a high level of orthogonality, and (3) PAM is NNGRRT. The targeting domain for tier 3 gRNA molecules were selected based on (1) distance to a target site (e.g., start codon), e.g., within 500 bp (e.g., downstream) of the target site (e.g., start codon) and (2) PAM is NNGRRT. The targeting domain for tier 4 gRNA molecules were selected based on (1) distance to a target site (e.g., start codon), e.g., within 500 bp (e.g., downstream) of the target site (e.g., start codon) and (2) PAM is NNGRRV. The targeting domain for tier 5 gRNA molecules were selected based on (1) distance to the target site (e.g., start codon), e.g., within reminder of the coding sequence, e.g., downstream of the first 500 bp of coding sequence (e.g., anywhere from +500 (relative to the start codon) to the stop codon), (2) the presence of 5′G and (3) PAM is NNGRRT. The targeting domain for tier 6 gRNA molecules were selected based on (1) distance to the target site (e.g., start codon), e.g., within reminder of the coding sequence, e.g., downstream of the first 500 bp of coding sequence (e.g., anywhere from +500 (relative to the start codon) to the stop codon) and (2) PAM is NNGRRT. The targeting domain for tier 7 gRNA molecules were selected based on (1) distance to the target site (e.g., start codon), e.g., within reminder of the coding sequence, e.g., downstream of the first 500 bp of coding sequence (e.g., anywhere from +500 (relative to the start codon) to the stop codon) and (2) PAM is NNGRRV. Note that tiers are non-inclusive (each gRNA is listed only once for the strategy). In certain instances, no gRNA was identified based on the criteria of the particular tier.

[0722] In an embodiment, two or more (e.g., three or four) gRNA molecules are used with one Cas9 molecule. In another embodiment, when two or more (e.g., three or four) gRNAs are used with two or more Cas9 molecules, at least one Cas9 molecule is from a different species than the other Cas9 molecule(s). For example, when two gRNA molecules are used with two Cas9 molecules, one Cas9 molecule can be from one species and the other Cas9 molecule can be from a different species. Both Cas9 species are used to generate a single or double-strand break, as desired.

[0723] Any of the targeting domains in the tables described herein can be used with a Cas9 nickase molecule to generate a single strand break.

[0724] Any of the targeting domains in the tables described herein can be used with a Cas9 nuclease molecule to generate a double strand break.

[0725] When two gRNAs designed for use to target two Cas9 molecules, one Cas9 can be one species, the second Cas9 can be from a different species. Both Cas9 species are used to generate a single or double-strand break, as desired.

[0726] It is contemplated herein that any upstream gRNA described herein may be paired with any downstream gRNA described herein. When an upstream gRNA designed for use with one species of Cas9 is paired with a downstream gRNA designed for use from a different species of Cas9, both Cas9 species are used to generate a single or double-strand break, as desired.

### Exemplary Targeting Domains

[0727] Table 1A provides exemplary targeting domains for knocking out the UL19 gene selected according to first tier parameters. The targeting domains are selected based on location within the first 500 bp of the coding sequence of the UL19 gene and orthogonality against the human genome. It is contemplated herein that the targeting domain hybridizes to the target domain through complementary base pairing. Any of the targeting domains in the table can be used with a S. pyogenes Cas9 molecule that gives double stranded cleavage. Any of the targeting domains in the table can be used with a S. pyogenes Cas9 single-stranded break nucleases (nickases). In an embodiment, dual targeting is used to create two nicks on opposite DNA strands by using S. pyogenes Cas9 nickases with two targeting domains that are complementary to opposite DNA strands, e.g., a gRNA comprising any minus strand targeting domain may be paired any gRNA comprising a plus strand targeting domain provided that the two gRNAs are oriented on the DNA such that PAMs face outward and the distance between the 5′ ends of the gRNAs is 0-50 bp.

TABLE 2A

| 1st Tier | DNA | | Target Site | |
|---|---|---|---|---|
| gRNA Name | Strand | Targeting Domain | Length | Seq ID |
| HSV1-UL19-3 | − | ACCGCGACCCUCCGGGAUAC | 20 | 387 |
| HSV1-UL19-4 | − | UCCGGGAUACCGGUAUGCCG | 20 | 388 |
| HSV1-UL19-5 | − | AUACCGGUAUGCCGCGGCCA | 20 | 389 |
| HSV1-UL19-97 | − | GCGACCCUCCGGGAUAC | 17 | 390 |
| HSV1-UL19-98 | − | GGGAUACCGGUAUGCCG | 17 | 391 |
| HSV1-UL19-99 | − | CCGGUAUGCCGCGGCCA | 17 | 392 |
| HSV1-UL19-11 | − | GUCGAGUUCGACGCCCUGCU | 20 | 393 |
| HSV1-UL19-12 | − | UCGAGUUCGACGCCCUGCUG | 20 | 394 |
| HSV1-UL19-13 | − | CCUGUCGCUCGUGCGCUUUC | 20 | 395 |
| HSV1-UL19-14 | − | CUCGUGCGCUUUCUGGAGCU | 20 | 396 |
| HSV1-UL19-15 | − | UCGUGCGCUUUCUGGAGCUC | 20 | 397 |
| HSV1-UL19-105 | − | GAGUUCGACGCCCUGCU | 17 | 398 |
| HSV1-UL19-106 | − | AGUUCGACGCCCUGCUG | 17 | 399 |
| HSV1-UL19-107 | − | GUCGCUCGUGCGCUUUC | 17 | 400 |
| HSV1-UL19-108 | − | GUGCGCUUUCUGGAGCU | 17 | 401 |
| HSV1-UL19-109 | − | UGCGCUUUCUGGAGCUC | 17 | 402 |
| HSV1-UL19-17 | − | UCUGGAGCUCGGGUUGUCGG | 20 | 403 |
| HSV1-UL19-18 | − | GUGCGUGUGUACCAAGUUUC | 20 | 404 |
| HSV1-UL19-19 | − | GUGUACCAAGUUUCCGGAGC | 20 | 405 |
| HSV1-UL19-111 | − | GGAGCUCGGGUUGUCGG | 17 | 406 |
| HSV1-UL19-112 | − | CGUGUGUACCAAGUUUC | 17 | 407 |
| HSV1-UL19-113 | − | UACCAAGUUUCCGGAGC | 17 | 408 |
| HSV1-UL19-23 | − | CGAGGGGCGCGUACAGUUCG | 20 | 409 |
| HSV1-UL19-24 | − | CAGCCGCUGAUUGCCCGCGA | 20 | 410 |
| HSV1-UL19-25 | − | UGACCAAGAUUAUCGACCGC | 20 | 411 |
| HSV1-UL19-26 | − | GACCAAGAUUAUCGACCGCC | 20 | 412 |
| HSV1-UL19-117 | − | GGGGCGCGUACAGUUCG | 17 | 413 |
| HSV1-UL19-118 | − | CCGCUGAUUGCCCGCGA | 17 | 414 |
| HSV1-UL19-119 | − | CCAAGAUUAUCGACCGC | 17 | 415 |
| HSV1-UL19-120 | − | CAAGAUUAUCGACCGCC | 17 | 416 |
| HSV1-UL19-31 | − | AGGCCAUCGCCCUGCUCACG | 20 | 417 |
| HSV1-UL19-125 | − | CCAUCGCCCUGCUCACG | 17 | 418 |
| HSV1-UL19-33 | − | CAUCGCCCUGCUCACGGGGG | 20 | 419 |
| HSV1-UL19-127 | − | CGCCCUGCUCACGGGGG | 17 | 420 |
| HSV1-UL19-40 | + | GCUGUUGGAUGGCGCGCAAC | 20 | 421 |
| HSV1-UL19-134 | + | GUUGGAUGGCGCGCAAC | 17 | 422 |
| HSV1-UL19-41 | + | CGCCGAUACCCGUCCCGUCC | 20 | 423 |
| HSV1-UL19-135 | + | CGAUACCCGUCCCGUCC | 17 | 424 |
| HSV1-UL19-58 | + | AUUGUGUGUGGGUUGCUCGA | 20 | 425 |
| HSV1-UL19-59 | + | UUGUGUGUGGGUUGCUCGAU | 20 | 426 |
| HSV1-UL19-152 | + | GUGUGUGGGUUGCUCGA | 17 | 427 |
| HSV1-UL19-153 | + | UGUGUGGGUUGCUCGAU | 17 | 428 |
| HSV1-UL19-64 | + | GAUGGGGUGCGGGCCGUCGC | 20 | 429 |
| HSV1-UL19-65 | + | GGGCCGUCGCGGGCAAUCAG | 20 | 430 |
| HSV1-UL19-158 | + | GGGGUGCGGGCCGUCGC | 17 | 431 |
| HSV1-UL19-159 | + | CCGUCGCGGGCAAUCAG | 17 | 432 |
| HSV1-UL19-67 | + | CGCGGGCAAUCAGCGGCUGG | 20 | 433 |
| HSV1-UL19-161 | + | GGGCAAUCAGCGGCUGG | 17 | 434 |
| HSV1-UL19-69 | + | UCGUUCAUGUAGGCCAGCUC | 20 | 435 |
| HSV1-UL19-70 | + | GUAGGCCAGCUCCGGAAACU | 20 | 436 |
| HSV1-UL19-71 | + | CCAGAAAGCGCACGAGCGAC | 20 | 437 |
| HSV1-UL19-72 | + | CAGAAAGCGCACGAGCGACA | 20 | 438 |
| HSV1-UL19-73 | + | UGUUGCAAUACGACCCCAGC | 20 | 439 |
| HSV1-UL19-74 | + | GUUGCAAUACGACCCCAGCA | 20 | 440 |
| HSV1-UL19-75 | + | CGUCGAACUCGACGUCGUAC | 20 | 441 |
| HSV1-UL19-76 | + | GUCGUACAGGCUGUUUGCAU | 20 | 442 |
| HSV1-UL19-163 | + | UUCAUGUAGGCCAGCUC | 17 | 443 |
| HSV1-UL19-164 | + | GGCCAGCUCCGGAAACU | 17 | 444 |
| HSV1-UL19-165 | + | GAAAGCGCACGAGCGAC | 17 | 445 |
| HSV1-UL19-166 | + | AAAGCGCACGAGCGACA | 17 | 446 |
| HSV1-UL19-167 | + | UGCAAUACGACCCCAGC | 17 | 447 |
| HSV1-UL19-168 | + | GCAAUACGACCCCAGCA | 17 | 448 |
| HSV1-UL19-169 | + | CGAACUCGACGUCGUAC | 17 | 449 |
| HSV1-UL19-170 | + | GUACAGGCUGUUUGCAU | 17 | 450 |
| HSV1-UL19-82 | + | CACCUCGAUCGUGCUAAGGA | 20 | 451 |
| HSV1-UL19-176 | + | CUCGAUCGUGCUAAGGA | 17 | 452 |
| HSV1-UL19-87 | + | GCACCAUGGCCGCGGCAUAC | 20 | 453 |
| HSV1-UL19-181 | + | CCAUGGCCGCGGCAUAC | 17 | 454 |
| HSV1-UL19-91 | + | ACCGGUAUCCCGGAGGGUCG | 20 | 455 |
| HSV1-UL19-92 | + | GUAUCCCGGAGGGUCGCGGU | 20 | 456 |
| HSV1-UL19-93 | + | UAUCCCGGAGGGUCGCGGUU | 20 | 457 |
| HSV1-UL19-185 | + | GGUAUCCCGGAGGGUCG | 17 | 458 |
| HSV1-UL19-186 | + | UCCCGGAGGGUCGCGGU | 17 | 459 |
| HSV1-UL19-187 | + | CCCGGAGGGUCGCGGUU | 17 | 460 |

[0728] Table 1B provides exemplary targeting domains for knocking out the UL19 gene selected according to the second tier parameters. The targeting domains are selected based on location within the first 500 bp of the coding sequence of the UL19 gene. It is contemplated herein that the targeting domain hybridizes to the target domain through complementary base pairing. Any of the targeting domains in the table can be used with a S. pyogenes Cas9 molecule that gives double stranded cleavage. Any of the targeting domains in the table can be used with a S. pyogenes Cas9 single-stranded break nucleases (nickases). In an embodiment, dual targeting is used to create two nicks on opposite DNA strands by using S. pyogenes Cas9 nickases with two targeting domains that are complementary to opposite DNA strands, e.g., a gRNA comprising any minus strand targeting domain may be paired any gRNA comprising a plus strand targeting domain provided that the two gRNAs are oriented on the DNA such that PAMs face outward and the distance between the 5′ ends of the gRNAs is 0-50 bp.

TABLE 1B

| 2nd Tier | DNA | | Target Site | |
|---|---|---|---|---|
| gRNA Name | Strand | Targeting Domain | Length | Seq ID |
| HSV1-UL19-1 | − | CGCUCCCAACCGCGACCCUC | 20 | 461 |
| HSV1-UL19-2 | − | GCUCCCAACCGCGACCCUCC | 20 | 462 |
| HSV1-UL19-6 | − | GCCGCGGCCAUGGUGCCGAC | 20 | 463 |
| HSV1-UL19-7 | − | CCGCGGCCAUGGUGCCGACC | 20 | 464 |
| HSV1-UL19-8 | − | GUCCCUCCUUAGCACGAUCG | 20 | 465 |
| HSV1-UL19-9 | − | CCUCCUUAGCACGAUCGAGG | 20 | 466 |
| HSV1-UL19-10 | − | CGUCGAGUUCGACGCCCUGC | 20 | 467 |
| HSV1-UL19-16 | − | CUUUCUGGAGCUCGGGUUGU | 20 | 468 |
| HSV1-UL19-20 | − | GGAGCUGGCCUACAUGAACG | 20 | 469 |
| HSV1-UL19-21 | − | GAGCUGGCCUACAUGAACGA | 20 | 470 |
| HSV1-UL19-22 | − | AGCUGGCCUACAUGAACGAG | 20 | 471 |
| HSV1-UL19-27 | − | CCUGAACGCCGCCUUCAGCC | 20 | 472 |
| HSV1-UL19-28 | − | CGCCUUCAGCCUGGCCACCG | 20 | 473 |
| HSV1-UL19-29 | − | CGAGGCCAUCGCCCUGCUCA | 20 | 474 |
| HSV1-UL19-30 | − | GAGGCCAUCGCCCUGCUCAC | 20 | 475 |
| HSV1-UL19-32 | − | GGCCAUCGCCCUGCUCACGG | 20 | 476 |
| HSV1-UL19-34 | − | CCUGCUCACGGGGGAGGCCC | 20 | 477 |
| HSV1-UL19-35 | − | CUCACGGGGGAGGCCCUGGA | 20 | 478 |
| HSV1-UL19-36 | − | UCACGGGGGAGGCCCUGGAC | 20 | 479 |
| HSV1-UL19-37 | − | GGGGGAGGCCCUGGACGGGA | 20 | 480 |
| HSV1-UL19-38 | − | GGGGAGGCCCUGGACGGGAC | 20 | 481 |
| HSV1-UL19-39 | − | GCCCUGGACGGGACGGGUAU | 20 | 482 |
| HSV1-UL19-42 | + | GCCGAUACCCGUCCCGUCCA | 20 | 483 |
| HSV1-UL19-43 | + | CCAGGGCCUCCCCCGUGAGC | 20 | 484 |
| HSV1-UL19-44 | + | CAGGGCCUCCCCCGUGAGCA | 20 | 485 |
| HSV1-UL19-45 | + | CUCCCCCGUGAGCAGGGCGA | 20 | 486 |
| HSV1-UL19-46 | + | CGUGAGCAGGGCGAUGGCCU | 20 | 487 |
| HSV1-UL19-47 | + | GAGCAGGGCGAUGGCCUCGG | 20 | 488 |
| HSV1-UL19-48 | + | GGGCGAUGGCCUCGGUGGCC | 20 | 489 |
| HSV1-UL19-49 | + | GGCCUCGGUGGCCAGGCUGA | 20 | 490 |
| HSV1-UL19-50 | + | CUCGGUGGCCAGGCUGAAGG | 20 | 491 |
| HSV1-UL19-51 | + | CCAGGCUGAAGGCGGCGUUC | 20 | 492 |
| HSV1-UL19-52 | + | CAGGCUGAAGGCGGCGUUCA | 20 | 493 |
| HSV1-UL19-53 | + | UGAAGGCGGCGUUCAGGGCC | 20 | 494 |
| HSV1-UL19-54 | + | AGGCGGCGUUCAGGGCCCGG | 20 | 495 |
| HSV1-UL19-55 | + | GGCCCGGCGGUCGAUAAUCU | 20 | 496 |
| HSV1-UL19-56 | + | CUUGGUCAUGUAAUUGUGUG | 20 | 497 |
| HSV1-UL19-57 | + | UUGGUCAUGUAAUUGUGUGU | 20 | 498 |
| HSV1-UL19-60 | + | UGUGUGUGGGUUGCUCGAUG | 20 | 499 |
| HSV1-UL19-61 | + | GUGGGUUGCUCGAUGGGGUG | 20 | 500 |
| HSV1-UL19-62 | + | UGGGUUGCUCGAUGGGGUGC | 20 | 501 |
| HSV1-UL19-63 | + | CGAUGGGGUGCGGGCCGUCG | 20 | 502 |
| HSV1-UL19-66 | + | CGUCGCGGGCAAUCAGCGGC | 20 | 503 |
| HSV1-UL19-68 | + | UACGCGCCCCUCGUUCAUGU | 20 | 504 |
| HSV1-UL19-77 | + | UGUUUGCAUCGGAGCGCACG | 20 | 505 |
| HSV1-UL19-78 | + | GUUUGCAUCGGAGCGCACGC | 20 | 506 |
| HSV1-UL19-79 | + | CGCGGGAAAAAAAAUCAAAC | 20 | 507 |
| HSV1-UL19-80 | + | ACGCCACCUCGAUCGUGCUA | 20 | 508 |
| HSV1-UL19-81 | + | CCACCUCGAUCGUGCUAAGG | 20 | 509 |
| HSV1-UL19-83 | + | GAUCGUGCUAAGGAGGGACC | 20 | 510 |
| HSV1-UL19-84 | + | GUGCUAAGGAGGGACCCGGU | 20 | 511 |
| HSV1-UL19-85 | + | GAGGGACCCGGUCGGCACCA | 20 | 512 |
| HSV1-UL19-86 | + | CCCGGUCGGCACCAUGGCCG | 20 | 513 |
| HSV1-UL19-88 | + | GCCGCGGCAUACCGGUAUCC | 20 | 514 |
| HSV1-UL19-89 | + | GCGGCAUACCGGUAUCCCGG | 20 | 515 |
| HSV1-UL19-90 | + | CGGCAUACCGGUAUCCCGGA | 20 | 516 |
| HSV1-UL19-94 | + | CGGAGGGUCGCGGUUGGGAG | 20 | 517 |
| HSV1-UL19-95 | − | UCCCAACCGCGACCCUC | 17 | 518 |
| HSV1-UL19-96 | − | CCCAACCGCGACCCUCC | 17 | 519 |
| HSV1-UL19-100 | − | GCGGCCAUGGUGCCGAC | 17 | 520 |
| HSV1-UL19-101 | − | CGGCCAUGGUGCCGACC | 17 | 521 |
| HSV1-UL19-102 | − | CCUCCUUAGCACGAUCG | 17 | 522 |
| HSV1-UL19-103 | − | CCUUAGCACGAUCGAGG | 17 | 523 |
| HSV1-UL19-104 | − | CGAGUUCGACGCCCUGC | 17 | 524 |
| HSV1-UL19-110 | − | UCUGGAGCUCGGGUUGU | 17 | 525 |
| HSV1-UL19-114 | − | GCUGGCCUACAUGAACG | 17 | 526 |
| HSV1-UL19-115 | − | CUGGCCUACAUGAACGA | 17 | 527 |
| HSV1-UL19-116 | − | UGGCCUACAUGAACGAG | 17 | 528 |
| HSV1-UL19-121 | − | GAACGCCGCCUUCAGCC | 17 | 529 |
| HSV1-UL19-122 | − | CUUCAGCCUGGCCACCG | 17 | 530 |
| HSV1-UL19-123 | − | GGCCAUCGCCCUGCUCA | 17 | 531 |
| HSV1-UL19-124 | − | GCCAUCGCCCUGCUCAC | 17 | 532 |
| HSV1-UL19-126 | − | CAUCGCCCUGCUCACGG | 17 | 533 |
| HSV1-UL19-128 | − | GCUCACGGGGGAGGCCC | 17 | 534 |
| HSV1-UL19-129 | − | ACGGGGGAGGCCCUGGA | 17 | 535 |
| HSV1-UL19-130 | − | CGGGGGAGGCCCUGGAC | 17 | 536 |
| HSV1-UL19-131 | − | GGAGGCCCUGGACGGGA | 17 | 537 |
| HSV1-UL19-132 | − | GAGGCCCUGGACGGGAC | 17 | 538 |
| HSV1-UL19-133 | − | CUGGACGGGACGGGUAU | 17 | 539 |
| HSV1-UL19-136 | + | GAUACCCGUCCCGUCCA | 17 | 540 |
| HSV1-UL19-137 | + | GGGCCUCCCCCGUGAGC | 17 | 541 |
| HSV1-UL19-138 | + | GGCCUCCCCCGUGAGCA | 17 | 542 |
| HSV1-UL19-139 | + | CCCCGUGAGCAGGGCGA | 17 | 543 |
| HSV1-UL19-140 | + | GAGCAGGGCGAUGGCCU | 17 | 544 |
| HSV1-UL19-141 | + | CAGGGCGAUGGCCUCGG | 17 | 545 |
| HSV1-UL19-142 | + | CGAUGGCCUCGGUGGCC | 17 | 546 |
| HSV1-UL19-143 | + | CUCGGUGGCCAGGCUGA | 17 | 547 |
| HSV1-UL19-144 | + | GGUGGCCAGGCUGAAGG | 17 | 548 |
| HSV1-UL19-145 | + | GGCUGAAGGCGGCGUUC | 17 | 549 |
| HSV1-UL19-146 | + | GCUGAAGGCGGCGUUCA | 17 | 550 |
| HSV1-UL19-147 | + | AGGCGGCGUUCAGGGCC | 17 | 551 |
| HSV1-UL19-148 | + | CGGCGUUCAGGGCCCGG | 17 | 552 |
| HSV1-UL19-149 | + | CCGGCGGUCGAUAAUCU | 17 | 553 |
| HSV1-UL19-150 | + | GGUCAUGUAAUUGUGUG | 17 | 554 |
| HSV1-UL19-151 | + | GUCAUGUAAUUGUGUGU | 17 | 555 |
| HSV1-UL19-154 | + | GUGUGGGUUGCUCGAUG | 17 | 556 |
| HSV1-UL19-155 | + | GGUUGCUCGAUGGGGUG | 17 | 557 |
| HSV1-UL19-156 | + | GUUGCUCGAUGGGGUGC | 17 | 558 |
| HSV1-UL19-157 | + | UGGGGUGCGGGCCGUCG | 17 | 559 |
| HSV1-UL19-160 | + | CGCGGGCAAUCAGCGGC | 17 | 560 |
| HSV1-UL19-162 | + | GCGCCCCUCGUUCAUGU | 17 | 561 |
| HSV1-UL19-171 | + | UUGCAUCGGAGCGCACG | 17 | 562 |
| HSV1-UL19-172 | + | UGCAUCGGAGCGCACGC | 17 | 563 |
| HSV1-UL19-173 | + | GGGAAAAAAAAUCAAAC | 17 | 564 |
| HSV1-UL19-174 | + | CCACCUCGAUCGUGCUA | 17 | 565 |
| HSV1-UL19-175 | + | CCUCGAUCGUGCUAAGG | 17 | 566 |
| HSV1-UL19-177 | + | CGUGCUAAGGAGGGACC | 17 | 567 |
| HSV1-UL19-178 | + | CUAAGGAGGGACCCGGU | 17 | 568 |
| HSV1-UL19-179 | + | GGACCCGGUCGGCACCA | 17 | 569 |
| HSV1-UL19-180 | + | GGUCGGCACCAUGGCCG | 17 | 570 |
| HSV1-UL19-182 | + | GCGGCAUACCGGUAUCC | 17 | 571 |
| HSV1-UL19-183 | + | GCAUACCGGUAUCCCGG | 17 | 572 |
| HSV1-UL19-184 | + | CAUACCGGUAUCCCGGA | 17 | 573 |
| HSV1-UL19-188 | + | AGGGUCGCGGUUGGGAG | 17 | 574 |

[0729] Table 1C provides exemplary targeting domains for knocking out the UL19 gene selected according to the third tier parameters. The targeting domains are selected based on location within the coding sequence, but downstream of the first 500 bp of the UL19 gene. It is contemplated herein that the targeting domain hybridizes to the target domain through complementary base pairing. Any of the targeting domains in the table can be used with a S. pyogenes Cas9 molecule that gives double stranded cleavage. Any of the targeting domains in the table can be used with a S. pyogenes Cas9 single-stranded break nucleases (nickases). In an embodiment, dual targeting is used to create two nicks on opposite DNA strands by using S. pyogenes Cas9 nickases with two targeting domains that are complementary to opposite DNA strands, e.g., a gRNA comprising any minus strand targeting domain may be paired any gRNA comprising a plus strand targeting domain provided that the two gRNAs are oriented on the DNA such that PAMs face outward and the distance between the 5′ ends of the gRNAs is 0-50 bp.

TABLE 1C

| 3rd Tier | DNA | | Target Site | |
|---|---|---|---|---|
| gRNA Name | Strand | Targeting Domain | Length | Seq ID |
| HSV1-UL19-189 | − | CGCAACGUCCAGGCCGUCCU | 20 | 575 |
| HSV1-UL19-190 | − | GCAACGUCCAGGCCGUCCUC | 20 | 576 |
| HSV1-UL19-191 | − | CAACGUCCAGGCCGUCCUCG | 20 | 577 |
| HSV1-UL19-192 | − | GUCCUCGGGGCGUUUGAGCG | 20 | 578 |
| HSV1-UL19-193 | − | CGGGGCGUUUGAGCGCGGCA | 20 | 579 |
| HSV1-UL19-194 | − | CCAGAUGCUGCACGUGCUGC | 20 | 580 |
| HSV1-UL19-195 | − | GCUGCACGUGCUGCUGGAAA | 20 | 581 |
| HSV1-UL19-196 | − | GCUGGAAAAGGCGCCGCCCC | 20 | 582 |
| HSV1-UL19-197 | − | GUUGCCGAUGCAACGAUACC | 20 | 583 |
| HSV1-UL19-198 | − | AUGCAACGAUACCUGGACAA | 20 | 584 |
| HSV1-UL19-199 | − | AUACCUGGACAACGGCCGCC | 20 | 585 |
| HSV1-UL19-200 | − | ACAACGGCCGCCUGGCCACC | 20 | 586 |
| HSV1-UL19-201 | − | CAACGGCCGCCUGGCCACCA | 20 | 587 |
| HSV1-UL19-202 | − | CGGCCGCCUGGCCACCAGGG | 20 | 588 |
| HSV1-UL19-203 | − | GCCUGGCCACCAGGGUGGCC | 20 | 589 |
| HSV1-UL19-204 | − | CCUGGCCACCAGGGUGGCCC | 20 | 590 |
| HSV1-UL19-205 | − | CAGGGUGGCCCGGGCGACCC | 20 | 591 |
| HSV1-UL19-206 | − | CUGCGAGACGAGCUUUUUCC | 20 | 592 |
| HSV1-UL19-207 | − | UGCGAGACGAGCUUUUUCCU | 20 | 593 |
| HSV1-UL19-208 | − | GACGAGCUUUUUCCUGGGCA | 20 | 594 |
| HSV1-UL19-209 | − | GAGCUUUUUCCUGGGCAAGG | 20 | 595 |
| HSV1-UL19-210 | − | AGCUUUUUCCUGGGCAAGGC | 20 | 596 |
| HSV1-UL19-211 | − | UGGGCAAGGCGGGCCACCGC | 20 | 597 |
| HSV1-UL19-212 | − | GGGCAAGGCGGGCCACCGCC | 20 | 598 |
| HSV1-UL19-213 | − | CAAGGCGGGCCACCGCCGGG | 20 | 599 |
| HSV1-UL19-214 | − | CCACCGCCGGGAGGCCGUCG | 20 | 600 |
| HSV1-UL19-215 | − | GCCGGGAGGCCGUCGAGGCC | 20 | 601 |
| HSV1-UL19-216 | − | GGCCGUCGAGGCCUGGCUCG | 20 | 602 |
| HSV1-UL19-217 | − | CUGGCUCGUGGACCUCACCA | 20 | 603 |
| HSV1-UL19-218 | − | CACGGCCACGCAGCCCUCCG | 20 | 604 |
| HSV1-UL19-219 | − | CUGACGCAUGCCGACACGCG | 20 | 605 |
| HSV1-UL19-220 | − | UGACGCAUGCCGACACGCGC | 20 | 606 |
| HSV1-UL19-221 | − | CGCAUGCCGACACGCGCGGG | 20 | 607 |
| HSV1-UL19-222 | − | UGCCGACACGCGCGGGCGGC | 20 | 608 |
| HSV1-UL19-223 | − | ACGCGCGGGCGGCCGGUCGA | 20 | 609 |
| HSV1-UL19-224 | − | CGCGCGGGCGGCCGGUCGAC | 20 | 610 |
| HSV1-UL19-225 | − | GCGCGGGCGGCCGGUCGACG | 20 | 611 |
| HSV1-UL19-226 | − | CCUGCAGUCCUUCCUGAAAG | 20 | 612 |
| HSV1-UL19-227 | − | GCAGUCCUUCCUGAAAGUGG | 20 | 613 |
| HSV1-UL19-228 | − | GGACACCGAAGCCGACGUGC | 20 | 614 |
| HSV1-UL19-229 | − | GCCGACGUGCCGGUGACGUA | 20 | 615 |
| HSV1-UL19-230 | − | GCCGGUGACGUACGGCGAGA | 20 | 616 |
| HSV1-UL19-231 | − | UACGGCGAGAUGGUCCUGAA | 20 | 617 |
| HSV1-UL19-232 | − | ACGGCGAGAUGGUCCUGAAC | 20 | 618 |
| HSV1-UL19-233 | − | CGGCGAGAUGGUCCUGAACG | 20 | 619 |
| HSV1-UL19-234 | − | GGUCCUGAACGGGGCCAACC | 20 | 620 |
| HSV1-UL19-235 | − | GAACGGGGCCAACCUGGUCA | 20 | 621 |
| HSV1-UL19-236 | − | CCUGGUCACGGCGCUCGUGA | 20 | 622 |
| HSV1-UL19-237 | − | CUGGUCACGGCGCUCGUGAU | 20 | 623 |
| HSV1-UL19-238 | − | CACGGCGCUCGUGAUGGGCA | 20 | 624 |
| HSV1-UL19-239 | − | GGGCAAGGCCGUGCGAAGUC | 20 | 625 |
| HSV1-UL19-240 | − | CGUGCGAAGUCUGGACGACG | 20 | 626 |
| HSV1-UL19-241 | − | GUGCGAAGUCUGGACGACGU | 20 | 627 |
| HSV1-UL19-242 | − | CGACGUGGGCCGCCACCUGC | 20 | 628 |
| HSV1-UL19-243 | − | CCGCCACCUGCUGGAGAUGC | 20 | 629 |
| HSV1-UL19-244 | − | CCACCUGCUGGAGAUGCAGG | 20 | 630 |
| HSV1-UL19-245 | − | AGGAGCAGCUCGACCUGAAC | 20 | 631 |
| HSV1-UL19-246 | − | CGACCUGAACCGGCAGACGC | 20 | 632 |
| HSV1-UL19-247 | − | CCAGACGACGCGCGUGCGCG | 20 | 633 |
| HSV1-UL19-248 | − | GACGCGCGUGCGCGCGGAUC | 20 | 634 |
| HSV1-UL19-249 | − | CGCGCGGAUCUGGUGUCCAU | 20 | 635 |
| HSV1-UL19-250 | − | GGUGUCCAUCGGCGAGAAGC | 20 | 636 |
| HSV1-UL19-251 | − | CGGCGAGAAGCUGGUCUUUC | 20 | 637 |
| HSV1-UL19-252 | − | CGAGAAGCUGGUCUUUCUGG | 20 | 638 |
| HSV1-UL19-253 | − | GCUGGUCUUUCUGGAGGCCC | 20 | 639 |
| HSV1-UL19-254 | − | CACCAACGUUCCCUACCCCC | 20 | 640 |
| HSV1-UL19-255 | − | CAACGUUCCCUACCCCCUGG | 20 | 641 |
| HSV1-UL19-256 | − | AACGUUCCCUACCCCCUGGU | 20 | 642 |
| HSV1-UL19-257 | − | CUACCCCCUGGUGGGCGCCA | 20 | 643 |
| HSV1-UL19-258 | − | CCUGACGUUCGUCCUGCCCC | 20 | 644 |
| HSV1-UL19-259 | − | CUGACGUUCGUCCUGCCCCU | 20 | 645 |
| HSV1-UL19-260 | − | GCCCCUGGGCCUGUUCAAUC | 20 | 646 |
| HSV1-UL19-261 | − | GGGCCUGUUCAAUCCGGUCA | 20 | 647 |
| HSV1-UL19-262 | − | UGUUCAAUCCGGUCAUGGAA | 20 | 648 |
| HSV1-UL19-263 | − | GAACGGUUUGCCGCGCACGC | 20 | 649 |
| HSV1-UL19-264 | − | AACGGUUUGCCGCGCACGCC | 20 | 650 |
| HSV1-UL19-265 | − | ACGGUUUGCCGCGCACGCCG | 20 | 651 |
| HSV1-UL19-266 | − | GGGGACCUAGUCCCCGCCCC | 20 | 652 |
| HSV1-UL19-267 | − | AGUCCCCGCCCCCGGCCACC | 20 | 653 |
| HSV1-UL19-268 | − | CGCCCCGCCAGCUGUUUUUU | 20 | 654 |
| HSV1-UL19-269 | − | GCCCCGCCAGCUGUUUUUUU | 20 | 655 |
| HSV1-UL19-270 | − | CCCCGCCAGCUGUUUUUUUG | 20 | 656 |
| HSV1-UL19-271 | − | CCCGCCAGCUGUUUUUUUGG | 20 | 657 |
| HSV1-UL19-272 | − | CCAGCUGUUUUUUUGGGGGA | 20 | 658 |
| HSV1-UL19-273 | − | UUUUUGGGGGAAGGACCGCC | 20 | 659 |
| HSV1-UL19-274 | − | CCAGGUGCUGCGCCUGUCUC | 20 | 660 |
| HSV1-UL19-275 | − | CUGUCUCUGGAACACGCGAU | 20 | 661 |
| HSV1-UL19-276 | − | UGUCUCUGGAACACGCGAUC | 20 | 662 |
| HSV1-UL19-277 | − | UUCGCUGAUGAACGUUGACG | 20 | 663 |
| HSV1-UL19-278 | − | GCUGAUGAACGUUGACGCGG | 20 | 664 |
| HSV1-UL19-279 | − | AUGAACGUUGACGCGGCGGU | 20 | 665 |
| HSV1-UL19-280 | − | UGAACGUUGACGCGGCGGUC | 20 | 666 |
| HSV1-UL19-281 | − | GAACGUUGACGCGGCGGUCG | 20 | 667 |
| HSV1-UL19-282 | − | AACGUUGACGCGGCGGUCGG | 20 | 668 |
| HSV1-UL19-283 | − | GUCGAAGCCGCCAAUCCGUA | 20 | 669 |
| HSV1-UL19-284 | − | UCGAAGCCGCCAAUCCGUAC | 20 | 670 |
| HSV1-UL19-285 | − | CGAAGCCGCCAAUCCGUACG | 20 | 671 |
| HSV1-UL19-286 | − | CAAUCCGUACGGGGCGUACG | 20 | 672 |
| HSV1-UL19-287 | − | UCCGUACGGGGCGUACGUGG | 20 | 673 |
| HSV1-UL19-288 | − | CGGGGCGUACGUGGCGGCCC | 20 | 674 |
| HSV1-UL19-289 | − | GCGUACGUGGCGGCCCCGGC | 20 | 675 |
| HSV1-UL19-290 | − | AGCAGCUGUUUUUGAACGCC | 20 | 676 |
| HSV1-UL19-291 | − | GCAGCUGUUUUUGAACGCCU | 20 | 677 |
| HSV1-UL19-292 | − | CAGCUGUUUUUGAACGCCUG | 20 | 678 |
| HSV1-UL19-293 | − | AGCUGUUUUUGAACGCCUGG | 20 | 679 |
| HSV1-UL19-294 | − | GAACGCCUGGGGGCAGCGCC | 20 | 680 |
| HSV1-UL19-295 | − | UGGGGGCAGCGCCUGGCCCA | 20 | 681 |
| HSV1-UL19-296 | − | GGGGGCAGCGCCUGGCCCAC | 20 | 682 |
| HSV1-UL19-297 | − | GGCAGCGCCUGGCCCACGGG | 20 | 683 |
| HSV1-UL19-298 | − | GCAGCGCCUGGCCCACGGGC | 20 | 684 |
| HSV1-UL19-299 | − | UGGCCCACGGGCGGGUCCGA | 20 | 685 |
| HSV1-UL19-300 | − | GGCCCACGGGCGGGUCCGAU | 20 | 686 |
| HSV1-UL19-301 | − | CGGGCGGGUCCGAUGGGUCG | 20 | 687 |
| HSV1-UL19-302 | − | CGGGUCCGAUGGGUCGCGGA | 20 | 688 |
| HSV1-UL19-303 | − | CGCGGAAGGCCAGAUGACCC | 20 | 689 |
| HSV1-UL19-304 | − | GCAGCCCGACAACGCCAACC | 20 | 690 |
| HSV1-UL19-305 | − | CCCCGCGUUCGACUUCUUUG | 20 | 691 |
| HSV1-UL19-306 | − | CCCGCGUUCGACUUCUUUGU | 20 | 692 |
| HSV1-UL19-307 | − | CCGCGUUCGACUUCUUUGUG | 20 | 693 |
| HSV1-UL19-308 | − | CGCGUUCGACUUCUUUGUGG | 20 | 694 |
| HSV1-UL19-309 | − | GUUCGACUUCUUUGUGGGGG | 20 | 695 |
| HSV1-UL19-310 | − | CUUUGUGGGGGUGGCCGACG | 20 | 696 |
| HSV1-UL19-311 | − | GGUGGCCGACGUGGAGCUGC | 20 | 697 |
| HSV1-UL19-312 | − | GUGGCCGACGUGGAGCUGCC | 20 | 698 |
| HSV1-UL19-313 | − | UGGCCGACGUGGAGCUGCCG | 20 | 699 |
| HSV1-UL19-314 | − | GGCCGACGUGGAGCUGCCGG | 20 | 700 |
| HSV1-UL19-315 | − | GCCGACGUGGAGCUGCCGGG | 20 | 701 |
| HSV1-UL19-316 | − | CCGACGUGGAGCUGCCGGGG | 20 | 702 |
| HSV1-UL19-317 | − | CGACGUGGAGCUGCCGGGGG | 20 | 703 |
| HSV1-UL19-318 | − | GCCGGGGGGGGACGUUCCCC | 20 | 704 |
| HSV1-UL19-319 | − | GGGGGGGACGUUCCCCCGGC | 20 | 705 |
| HSV1-UL19-320 | − | GGACGUUCCCCCGGCCGGCC | 20 | 706 |
| HSV1-UL19-321 | − | GACGUUCCCCCGGCCGGCCC | 20 | 707 |
| HSV1-UL19-322 | − | ACGUUCCCCCGGCCGGCCCG | 20 | 708 |
| HSV1-UL19-323 | − | CGUUCCCCCGGCCGGCCCGG | 20 | 709 |
| HSV1-UL19-324 | − | GGCCGGCCCGGGGGAGAUCC | 20 | 710 |
| HSV1-UL19-325 | − | CGGGGGAGAUCCAGGCCACC | 20 | 711 |
| HSV1-UL19-326 | − | GAUCCAGGCCACCUGGCGCG | 20 | 712 |
| HSV1-UL19-327 | − | GCCACCUGGCGCGUGGUGAA | 20 | 713 |
| HSV1-UL19-328 | − | GGUGAACGGCAACUUGCCCC | 20 | 714 |
| HSV1-UL19-329 | − | CUUGCCCCUGGCGCUAUGUC | 20 | 715 |
| HSV1-UL19-330 | − | GCCCCUGGCGCUAUGUCCGG | 20 | 716 |
| HSV1-UL19-331 | − | CGCUAUGUCCGGCGGCGUUC | 20 | 717 |
| HSV1-UL19-332 | − | GCUAUGUCCGGCGGCGUUCC | 20 | 718 |
| HSV1-UL19-333 | − | CGGCGGCGUUCCGGGACGCC | 20 | 719 |
| HSV1-UL19-334 | − | GGCGGCGUUCCGGGACGCCC | 20 | 720 |
| HSV1-UL19-335 | − | GCGGCGUUCCGGGACGCCCG | 20 | 721 |
| HSV1-UL19-336 | − | GUUCCGGGACGCCCGGGGCC | 20 | 722 |
| HSV1-UL19-337 | − | GGACGCCCGGGGCCUGGAGC | 20 | 723 |
| HSV1-UL19-338 | − | GACGCCCGGGGCCUGGAGCU | 20 | 724 |
| HSV1-UL19-339 | − | ACGCCCGGGGCCUGGAGCUG | 20 | 725 |
| HSV1-UL19-340 | − | CGCCCGGGGCCUGGAGCUGG | 20 | 726 |
| HSV1-UL19-341 | − | CCGGGGCCUGGAGCUGGGGG | 20 | 727 |
| HSV1-UL19-342 | − | CGGGGCCUGGAGCUGGGGGU | 20 | 728 |
| HSV1-UL19-343 | − | GGGGGUGGGACGCCACGCCA | 20 | 729 |
| HSV1-UL19-344 | − | GCCACCAUCGCCGCCGUUCG | 20 | 730 |
| HSV1-UL19-345 | − | CCACCAUCGCCGCCGUUCGC | 20 | 731 |
| HSV1-UL19-346 | − | CACCAUCGCCGCCGUUCGCG | 20 | 732 |
| HSV1-UL19-347 | − | GUUCGACGACCGCAACUACC | 20 | 733 |
| HSV1-UL19-348 | − | CGACGACCGCAACUACCCGG | 20 | 734 |
| HSV1-UL19-349 | − | GGCGGUGUUUUACCUGCUGC | 20 | 735 |
| HSV1-UL19-350 | − | CUGCUGCAGGCCGCCAUACA | 20 | 736 |
| HSV1-UL19-351 | − | CGAGCACGUCUUCUGCGCCC | 20 | 737 |
| HSV1-UL19-352 | − | ACGUCUUCUGCGCCCUGGCC | 20 | 738 |
| HSV1-UL19-353 | − | CUGCGCCCUGGCCCGGCUCG | 20 | 739 |
| HSV1-UL19-354 | − | UCCAGUGCAUCACCAGCUAC | 20 | 740 |
| HSV1-UL19-355 | − | CCAGCUACUGGAACAACACG | 20 | 741 |
| HSV1-UL19-356 | − | CUGGAACAACACGCGGUGCG | 20 | 742 |
| HSV1-UL19-357 | − | GUUCGUGAACGACUACUCGC | 20 | 743 |
| HSV1-UL19-358 | − | UCGUACGUCGUGACCUACCU | 20 | 744 |
| HSV1-UL19-359 | − | CGUACGUCGUGACCUACCUC | 20 | 745 |
| HSV1-UL19-360 | − | GUACGUCGUGACCUACCUCG | 20 | 746 |
| HSV1-UL19-361 | − | UACGUCGUGACCUACCUCGG | 20 | 747 |
| HSV1-UL19-362 | − | CCUCGGGGGAGACCUUCCCG | 20 | 748 |
| HSV1-UL19-363 | − | AGACCUUCCCGAGGAGUGCA | 20 | 749 |
| HSV1-UL19-364 | − | AGGAGUGCAUGGCCGUGUAC | 20 | 750 |
| HSV1-UL19-365 | − | GGAGUGCAUGGCCGUGUACC | 20 | 751 |
| HSV1-UL19-366 | − | CAUGGCCGUGUACCGGGACC | 20 | 752 |
| HSV1-UL19-367 | − | GGCCGUGUACCGGGACCUGG | 20 | 753 |
| HSV1-UL19-368 | − | GGACCUGGUGGCGCACGUCG | 20 | 754 |
| HSV1-UL19-369 | − | GGUGGCGCACGUCGAGGCCC | 20 | 755 |
| HSV1-UL19-370 | − | CGUCGAGGCCCUGGCCCAGC | 20 | 756 |
| HSV1-UL19-371 | − | GUUGAUGACUUUACCCUGAC | 20 | 757 |
| HSV1-UL19-372 | − | UGACUUUACCCUGACCGGCC | 20 | 758 |
| HSV1-UL19-373 | − | UACCCUGACCGGCCCGGAGC | 20 | 759 |
| HSV1-UL19-374 | − | ACCCUGACCGGCCCGGAGCU | 20 | 760 |
| HSV1-UL19-375 | − | CUGACCGGCCCGGAGCUGGG | 20 | 761 |
| HSV1-UL19-376 | − | UGACCGGCCCGGAGCUGGGC | 20 | 762 |
| HSV1-UL19-377 | − | CGGCCCGGAGCUGGGCGGGC | 20 | 763 |
| HSV1-UL19-378 | − | GAAUCACCUAAUGCGAGACC | 20 | 764 |
| HSV1-UL19-379 | − | CGCUGCUGCCACCCCUCGUG | 20 | 765 |
| HSV1-UL19-380 | − | GCUGCUGCCACCCCUCGUGU | 20 | 766 |
| HSV1-UL19-381 | − | GGGACUGUGACGCCCUGAUG | 20 | 767 |
| HSV1-UL19-382 | − | UGACGCCCUGAUGCGGCGCG | 20 | 768 |
| HSV1-UL19-383 | − | CCUGAUGCGGCGCGCGGCCC | 20 | 769 |
| HSV1-UL19-384 | − | UGGACCGCCAUCGCGACUGC | 20 | 770 |
| HSV1-UL19-385 | − | GGACCGCCAUCGCGACUGCC | 20 | 771 |
| HSV1-UL19-386 | − | UCGCGACUGCCGGGUUAGCG | 20 | 772 |
| HSV1-UL19-387 | − | CGCGACUGCCGGGUUAGCGC | 20 | 773 |
| HSV1-UL19-388 | − | GCGACUGCCGGGUUAGCGCG | 20 | 774 |
| HSV1-UL19-389 | − | CGACUGCCGGGUUAGCGCGG | 20 | 775 |
| HSV1-UL19-390 | − | GACUGCCGGGUUAGCGCGGG | 20 | 776 |
| HSV1-UL19-391 | − | GGGCCACGACCCCGUGUACG | 20 | 777 |
| HSV1-UL19-392 | − | CCACGACCCCGUGUACGCGG | 20 | 778 |
| HSV1-UL19-393 | − | GUACGCGGCGGCAUGUAACG | 20 | 779 |
| HSV1-UL19-394 | − | GGCAUGUAACGUGGCGACCG | 20 | 780 |
| HSV1-UL19-395 | − | GCGGACUUCAACCGCAACGA | 20 | 781 |
| HSV1-UL19-396 | − | CCAGCUGCUGCACAACACCC | 20 | 782 |
| HSV1-UL19-397 | − | CAACACCCAGGCCCGAGCCG | 20 | 783 |
| HSV1-UL19-398 | − | GGCCCGAGCCGCGGACGCCG | 20 | 784 |
| HSV1-UL19-399 | − | CCGCGGACGCCGCGGAUGAC | 20 | 785 |
| HSV1-UL19-400 | − | CCGCGGAUGACCGGCCGCAC | 20 | 786 |
| HSV1-UL19-401 | − | CGCGGAUGACCGGCCGCACC | 20 | 787 |
| HSV1-UL19-402 | − | GCGGAUGACCGGCCGCACCG | 20 | 788 |
| HSV1-UL19-403 | − | CGGAUGACCGGCCGCACCGG | 20 | 789 |
| HSV1-UL19-404 | − | GGAUGACCGGCCGCACCGGG | 20 | 790 |
| HSV1-UL19-405 | − | UGACCGGCCGCACCGGGGGG | 20 | 791 |
| HSV1-UL19-406 | − | GGCCGCACCGGGGGGCGGAC | 20 | 792 |
| HSV1-UL19-407 | − | CAAGAUUUACUACUACGUGA | 20 | 793 |
| HSV1-UL19-408 | − | UGAUGGUGCCCGCCUUCUCG | 20 | 794 |
| HSV1-UL19-409 | − | GAUGGUGCCCGCCUUCUCGC | 20 | 795 |
| HSV1-UL19-410 | − | AUGGUGCCCGCCUUCUCGCG | 20 | 796 |
| HSV1-UL19-411 | − | GCGGGGCCGCUGCUGCACCG | 20 | 797 |
| HSV1-UL19-412 | − | CGGGGCCGCUGCUGCACCGC | 20 | 798 |
| HSV1-UL19-413 | − | GGGGCCGCUGCUGCACCGCG | 20 | 799 |
| HSV1-UL19-414 | − | GGGCCGCUGCUGCACCGCGG | 20 | 800 |
| HSV1-UL19-415 | − | AUACGCCACCCUGCAGAACA | 20 | 801 |
| HSV1-UL19-416 | − | CGCCACCCUGCAGAACAUGG | 20 | 802 |
| HSV1-UL19-417 | − | CCUGCAGAACAUGGUGGUCC | 20 | 803 |
| HSV1-UL19-418 | − | GUGGUCCCGGAGAUCGCCCC | 20 | 804 |
| HSV1-UL19-419 | − | CCCGGAGAUCGCCCCCGGCG | 20 | 805 |
| HSV1-UL19-420 | − | GUGCCCCAGCGACCCCGUGA | 20 | 806 |
| HSV1-UL19-421 | − | CCCCGCGCACCCCCUGCACC | 20 | 807 |
| HSV1-UL19-422 | − | CCCCCUGCACCCGGCCAAUC | 20 | 808 |
| HSV1-UL19-423 | − | CCUGCACCCGGCCAAUCUGG | 20 | 809 |
| HSV1-UL19-424 | − | GGCCAAUCUGGUGGCCAACA | 20 | 810 |
| HSV1-UL19-425 | − | GUCAACGCCAUGUUUCACAA | 20 | 811 |
| HSV1-UL19-426 | − | UCAACGCCAUGUUUCACAAC | 20 | 812 |
| HSV1-UL19-427 | − | CAUGUUUCACAACGGGCGCG | 20 | 813 |
| HSV1-UL19-428 | − | UCACAACGGGCGCGUGGUAG | 20 | 814 |
| HSV1-UL19-429 | − | AACGGGCGCGUGGUAGUGGA | 20 | 815 |
| HSV1-UL19-430 | − | ACGGGCGCGUGGUAGUGGAC | 20 | 816 |
| HSV1-UL19-431 | − | GCCCGCCAUGCUCACGCUGC | 20 | 817 |
| HSV1-UL19-432 | − | CAUGCUCACGCUGCAGGUGC | 20 | 818 |
| HSV1-UL19-433 | − | GCAGGUGCUGGCCCACAACA | 20 | 819 |
| HSV1-UL19-434 | − | CAACAUGGCCGAACGCACAA | 20 | 820 |
| HSV1-UL19-435 | − | CACAACGGCGCUGCUCUGCU | 20 | 821 |
| HSV1-UL19-436 | − | AACGGCGCUGCUCUGCUCGG | 20 | 822 |
| HSV1-UL19-437 | − | CUGCUCGGCGGCGCCCGACG | 20 | 823 |
| HSV1-UL19-438 | − | UGCUCGGCGGCGCCCGACGC | 20 | 824 |
| HSV1-UL19-439 | − | ACCAACAUGCGCAUAUUCGA | 20 | 825 |
| HSV1-UL19-440 | − | CCAACAUGCGCAUAUUCGAC | 20 | 826 |
| HSV1-UL19-441 | − | CAACAUGCGCAUAUUCGACG | 20 | 827 |
| HSV1-UL19-442 | − | UUCGACGGGGCGUUGCACGC | 20 | 828 |
| HSV1-UL19-443 | − | GCACGCCGGAAUCCUGCUGA | 20 | 829 |
| HSV1-UL19-444 | − | GCUGAUGGCCCCCCAGCAUC | 20 | 830 |
| HSV1-UL19-445 | − | CUGGACCAUACCAUCCAAAA | 20 | 831 |
| HSV1-UL19-446 | − | CCCGUCCACGCGCUGUUCGC | 20 | 832 |
| HSV1-UL19-447 | − | CCGUCCACGCGCUGUUCGCC | 20 | 833 |
| HSV1-UL19-448 | − | CGUCCACGCGCUGUUCGCCG | 20 | 834 |
| HSV1-UL19-449 | − | GUUCGCCGGGGCCGACCACG | 20 | 835 |
| HSV1-UL19-450 | − | GAACGCGCCCAAUUUCCCCC | 20 | 836 |
| HSV1-UL19-451 | − | CGGCCCUGCGCGACCUGUCG | 20 | 837 |
| HSV1-UL19-452 | − | CCUGCGCGACCUGUCGCGGC | 20 | 838 |
| HSV1-UL19-453 | − | CCUGUCGCGGCAGGUCCCCC | 20 | 839 |
| HSV1-UL19-454 | − | GCAGGUCCCCCUGGUCCCCC | 20 | 840 |
| HSV1-UL19-455 | − | CCCCCUGGUCCCCCCGGCUC | 20 | 841 |
| HSV1-UL19-456 | − | CCCCUGGUCCCCCCGGCUCU | 20 | 842 |
| HSV1-UL19-457 | − | CCCUGGUCCCCCCGGCUCUG | 20 | 843 |
| HSV1-UL19-458 | − | CCUGGUCCCCCCGGCUCUGG | 20 | 844 |
| HSV1-UL19-459 | − | GCAGCACGUCCGCGAGAGCG | 20 | 845 |
| HSV1-UL19-460 | − | CACGUCCGCGAGAGCGCGGC | 20 | 846 |
| HSV1-UL19-461 | − | ACGUCCGCGAGAGCGCGGCC | 20 | 847 |
| HSV1-UL19-462 | − | CGUCCGCGAGAGCGCGGCCG | 20 | 848 |
| HSV1-UL19-463 | − | CGCGCUGACCUACGCGCUCA | 20 | 849 |
| HSV1-UL19-464 | − | GCUGACCUACGCGCUCAUGG | 20 | 850 |
| HSV1-UL19-465 | − | CUGACCUACGCGCUCAUGGC | 20 | 851 |
| HSV1-UL19-466 | − | UGACCUACGCGCUCAUGGCG | 20 | 852 |
| HSV1-UL19-467 | − | GUACUUCAAGAUCAGUCCCG | 20 | 853 |
| HSV1-UL19-468 | − | CUUGCAUCAUCAGCUCAAGA | 20 | 854 |
| HSV1-UL19-469 | − | UUGCAUCAUCAGCUCAAGAC | 20 | 855 |
| HSV1-UL19-470 | − | CUCAAGACGGGCCUCCAUCC | 20 | 856 |
| HSV1-UL19-471 | − | UCAAGACGGGCCUCCAUCCC | 20 | 857 |
| HSV1-UL19-472 | − | ACGGGCCUCCAUCCCGGGUU | 20 | 858 |
| HSV1-UL19-473 | − | CGGGCCUCCAUCCCGGGUUU | 20 | 859 |
| HSV1-UL19-474 | − | UGGGUUCACCGUCGUCCGAC | 20 | 860 |
| HSV1-UL19-475 | − | GACUGAGAACGUGCUGUUCU | 20 | 861 |
| HSV1-UL19-476 | − | GCUGUUCUCGGAGCGCGCGU | 20 | 862 |
| HSV1-UL19-477 | − | GUUCUCGGAGCGCGCGUCGG | 20 | 863 |
| HSV1-UL19-478 | − | CGCGUCGGAGGCGUACUUCC | 20 | 864 |
| HSV1-UL19-479 | − | GCGUCGGAGGCGUACUUCCU | 20 | 865 |
| HSV1-UL19-480 | − | GUACUUCCUGGGCCAGCUCC | 20 | 866 |
| HSV1-UL19-481 | − | CUUCCUGGGCCAGCUCCAGG | 20 | 867 |
| HSV1-UL19-482 | − | UGGGCCAGCUCCAGGUGGCC | 20 | 868 |
| HSV1-UL19-483 | − | CAGGUGGCCCGGCACGAAAC | 20 | 869 |
| HSV1-UL19-484 | − | GUGGCCCGGCACGAAACUGG | 20 | 870 |
| HSV1-UL19-485 | − | UGGCCCGGCACGAAACUGGC | 20 | 871 |
| HSV1-UL19-486 | − | GGCCCGGCACGAAACUGGCG | 20 | 872 |
| HSV1-UL19-487 | − | GCCCGGCACGAAACUGGCGG | 20 | 873 |
| HSV1-UL19-488 | − | CCCGGCACGAAACUGGCGGG | 20 | 874 |
| HSV1-UL19-489 | − | CCGGCACGAAACUGGCGGGG | 20 | 875 |
| HSV1-UL19-490 | − | CACCCAGCCGCGCGCGAACG | 20 | 876 |
| HSV1-UL19-491 | − | GCCGCGCGCGAACGUGGACC | 20 | 877 |
| HSV1-UL19-492 | − | CCGCGCGCGAACGUGGACCU | 20 | 878 |
| HSV1-UL19-493 | − | CGCGAACGUGGACCUGGGCG | 20 | 879 |
| HSV1-UL19-494 | − | GCGAACGUGGACCUGGGCGU | 20 | 880 |
| HSV1-UL19-495 | − | CGUGGGCUACACCGCCGUCG | 20 | 881 |
| HSV1-UL19-496 | − | CUACACCGCCGUCGUGGCCA | 20 | 882 |
| HSV1-UL19-497 | − | CCGCAACCCCGUCACCGACA | 20 | 883 |
| HSV1-UL19-498 | − | CGCAACCCCGUCACCGACAU | 20 | 884 |
| HSV1-UL19-499 | − | CCUUCCCCAAAACUUUUACC | 20 | 885 |
| HSV1-UL19-500 | − | CUUCCCCAAAACUUUUACCU | 20 | 886 |
| HSV1-UL19-501 | − | CAAAACUUUUACCUGGGCCG | 20 | 887 |
| HSV1-UL19-502 | − | AAAACUUUUACCUGGGCCGC | 20 | 888 |
| HSV1-UL19-503 | − | AAACUUUUACCUGGGCCGCG | 20 | 889 |
| HSV1-UL19-504 | − | CCGCGGGGCUCCCCCUCUCC | 20 | 890 |
| HSV1-UL19-505 | − | UCCCCCUCUCCUGGACAACG | 20 | 891 |
| HSV1-UL19-506 | − | ACGCGGCAGCCGUGUACCUG | 20 | 892 |
| HSV1-UL19-507 | − | AGCCGUGUACCUGCGGAACG | 20 | 893 |
| HSV1-UL19-508 | − | GUACCUGCGGAACGCGGUCG | 20 | 894 |
| HSV1-UL19-509 | − | CCUGCGGAACGCGGUCGUGG | 20 | 895 |
| HSV1-UL19-510 | − | CUGCGGAACGCGGUCGUGGC | 20 | 896 |
| HSV1-UL19-511 | − | GGUCGUGGCGGGAAACCGCC | 20 | 897 |
| HSV1-UL19-512 | − | GUCGUGGCGGGAAACCGCCU | 20 | 898 |
| HSV1-UL19-513 | − | UCGUGGCGGGAAACCGCCUG | 20 | 899 |
| HSV1-UL19-514 | − | GGCGGGAAACCGCCUGGGGC | 20 | 900 |
| HSV1-UL19-515 | − | GCCCAGCCCGUCCCCGUGUU | 20 | 901 |
| HSV1-UL19-516 | − | CCCAGCCCGUCCCCGUGUUC | 20 | 902 |
| HSV1-UL19-517 | − | CCCCGUGUUCGGGUGCGCCC | 20 | 903 |
| HSV1-UL19-518 | − | UCGGGUGCGCCCAGGUGCCG | 20 | 904 |
| HSV1-UL19-519 | − | GCCCAGGUGCCGCGGCGCGC | 20 | 905 |
| HSV1-UL19-520 | − | CCCAGGUGCCGCGGCGCGCA | 20 | 906 |
| HSV1-UL19-521 | − | GGUGCCGCGGCGCGCAGGGA | 20 | 907 |
| HSV1-UL19-522 | − | CGGCGCGCAGGGAUGGACCA | 20 | 908 |
| HSV1-UL19-523 | − | CGCAGGGAUGGACCACGGCC | 20 | 909 |
| HSV1-UL19-524 | − | CCGACGUCAACUACUUCCGC | 20 | 910 |
| HSV1-UL19-525 | − | UCCGCCGGCCCUGCAACCCC | 20 | 911 |
| HSV1-UL19-526 | − | CCGCCGGCCCUGCAACCCCC | 20 | 912 |
| HSV1-UL19-527 | − | CGCCGGCCCUGCAACCCCCG | 20 | 913 |
| HSV1-UL19-528 | − | AACCCCCGGGGACGCGCCGC | 20 | 914 |
| HSV1-UL19-529 | − | ACCCCCGGGGACGCGCCGCC | 20 | 915 |
| HSV1-UL19-530 | − | CCCCCGGGGACGCGCCGCCG | 20 | 916 |
| HSV1-UL19-531 | − | CCCCGGGGACGCGCCGCCGG | 20 | 917 |
| HSV1-UL19-532 | − | CGCCGCCGGGGGCGUUUACG | 20 | 918 |
| HSV1-UL19-533 | − | GCCGCCGGGGGCGUUUACGC | 20 | 919 |
| HSV1-UL19-534 | − | CCGCCGGGGGCGUUUACGCG | 20 | 920 |
| HSV1-UL19-535 | − | CGCCGGGGGCGUUUACGCGG | 20 | 921 |
| HSV1-UL19-536 | − | GGGCGUUUACGCGGGGGACA | 20 | 922 |
| HSV1-UL19-537 | − | CGUUUACGCGGGGGACAAGG | 20 | 923 |
| HSV1-UL19-538 | − | GUUUACGCGGGGGACAAGGA | 20 | 924 |
| HSV1-UL19-539 | − | UUUACGCGGGGGACAAGGAG | 20 | 925 |
| HSV1-UL19-540 | − | UUACGCGGGGGACAAGGAGG | 20 | 926 |
| HSV1-UL19-541 | − | ACCGCCCUCAUGUACGACCA | 20 | 927 |
| HSV1-UL19-542 | − | ACGGCCAGAGCGACCCGUCC | 20 | 928 |
| HSV1-UL19-543 | − | CGGCCAGAGCGACCCGUCCC | 20 | 929 |
| HSV1-UL19-544 | − | CGACCCGUCCCGGGCCUUCG | 20 | 930 |
| HSV1-UL19-545 | − | GUCCCGGGCCUUCGCGGCCA | 20 | 931 |
| HSV1-UL19-546 | − | UCGCGGCCACGGCCAACCCG | 20 | 932 |
| HSV1-UL19-547 | − | CGCGGCCACGGCCAACCCGU | 20 | 933 |
| HSV1-UL19-548 | − | GCGUCGCAGCGAUUUUCGUA | 20 | 934 |
| HSV1-UL19-549 | − | CGUCGCAGCGAUUUUCGUAC | 20 | 935 |
| HSV1-UL19-550 | − | GUCGCAGCGAUUUUCGUACG | 20 | 936 |
| HSV1-UL19-551 | − | UACGGGGACCUGCUCUAUAA | 20 | 937 |
| HSV1-UL19-552 | − | ACGGGGACCUGCUCUAUAAC | 20 | 938 |
| HSV1-UL19-553 | − | CGGGGACCUGCUCUAUAACG | 20 | 939 |
| HSV1-UL19-554 | − | AACGGGGCCUACCACCUCAA | 20 | 940 |
| HSV1-UL19-555 | − | ACGGGGCCUACCACCUCAAC | 20 | 941 |
| HSV1-UL19-556 | − | CGGGGCCUACCACCUCAACG | 20 | 942 |
| HSV1-UL19-557 | − | CCACCUCAACGGGGCCUCGC | 20 | 943 |
| HSV1-UL19-558 | − | CUGCUUUAAGUUCUUUACGU | 20 | 944 |
| HSV1-UL19-559 | − | CGCCGCCAAACAUCGCUGCC | 20 | 945 |
| HSV1-UL19-560 | − | CUGCCUGGAGCGCCUGAUCG | 20 | 946 |
| HSV1-UL19-561 | − | GGAGCGCCUGAUCGUGGAGA | 20 | 947 |
| HSV1-UL19-562 | − | GAGCGCCUGAUCGUGGAGAC | 20 | 948 |
| HSV1-UL19-563 | − | CCUGAUCGUGGAGACGGGUU | 20 | 949 |
| HSV1-UL19-564 | − | GAUCGUGGAGACGGGUUCGG | 20 | 950 |
| HSV1-UL19-565 | − | GACGGGUUCGGCGGUGUCCA | 20 | 951 |
| HSV1-UL19-566 | − | CGUACAGUUUAAGCGCCCCC | 20 | 952 |
| HSV1-UL19-567 | − | GUACAGUUUAAGCGCCCCCC | 20 | 953 |
| HSV1-UL19-568 | − | UACAGUUUAAGCGCCCCCCG | 20 | 954 |
| HSV1-UL19-569 | − | CCCGGGGUGCCGCGAACUCG | 20 | 955 |
| HSV1-UL19-570 | − | GGGGUGCCGCGAACUCGUGG | 20 | 956 |
| HSV1-UL19-571 | − | GAACUCGUGGAGGACCCGUG | 20 | 957 |
| HSV1-UL19-572 | − | GGACCCGUGUGGCCUGUUUC | 20 | 958 |
| HSV1-UL19-573 | − | CCCGUGUGGCCUGUUUCAGG | 20 | 959 |
| HSV1-UL19-574 | − | CUCCUCCGCAGUGCCCGCAA | 20 | 960 |
| HSV1-UL19-575 | − | UCCUCCGCAGUGCCCGCAAC | 20 | 961 |
| HSV1-UL19-576 | − | CCUCCGCAGUGCCCGCAACG | 20 | 962 |
| HSV1-UL19-577 | − | GCAACGGGGAAGCCCACGCG | 20 | 963 |
| HSV1-UL19-578 | − | CAACGGGGAAGCCCACGCGC | 20 | 964 |
| HSV1-UL19-579 | − | CUAUGACGCAUCCCCGCUCA | 20 | 965 |
| HSV1-UL19-580 | − | UAUGACGCAUCCCCGCUCAA | 20 | 966 |
| HSV1-UL19-581 | − | CGCAUCCCCGCUCAAGGGAC | 20 | 967 |
| HSV1-UL19-582 | − | AACGUCCAGGCCGUCCU | 17 | 968 |
| HSV1-UL19-583 | − | ACGUCCAGGCCGUCCUC | 17 | 969 |
| HSV1-UL19-584 | − | CGUCCAGGCCGUCCUCG | 17 | 970 |
| HSV1-UL19-585 | − | CUCGGGGCGUUUGAGCG | 17 | 971 |
| HSV1-UL19-586 | − | GGCGUUUGAGCGCGGCA | 17 | 972 |
| HSV1-UL19-587 | − | GAUGCUGCACGUGCUGC | 17 | 973 |
| HSV1-UL19-588 | − | GCACGUGCUGCUGGAAA | 17 | 974 |
| HSV1-UL19-589 | − | GGAAAAGGCGCCGCCCC | 17 | 975 |
| HSV1-UL19-590 | − | GCCGAUGCAACGAUACC | 17 | 976 |
| HSV1-UL19-591 | − | CAACGAUACCUGGACAA | 17 | 977 |
| HSV1-UL19-592 | − | CCUGGACAACGGCCGCC | 17 | 978 |
| HSV1-UL19-593 | − | ACGGCCGCCUGGCCACC | 17 | 979 |
| HSV1-UL19-594 | − | CGGCCGCCUGGCCACCA | 17 | 980 |
| HSV1-UL19-595 | − | CCGCCUGGCCACCAGGG | 17 | 981 |
| HSV1-UL19-596 | − | UGGCCACCAGGGUGGCC | 17 | 982 |
| HSV1-UL19-597 | − | GGCCACCAGGGUGGCCC | 17 | 983 |
| HSV1-UL19-598 | − | GGUGGCCCGGGCGACCC | 17 | 984 |
| HSV1-UL19-599 | − | CGAGACGAGCUUUUUCC | 17 | 985 |
| HSV1-UL19-600 | − | GAGACGAGCUUUUUCCU | 17 | 986 |
| HSV1-UL19-601 | − | GAGCUUUUUCCUGGGCA | 17 | 987 |
| HSV1-UL19-602 | − | CUUUUUCCUGGGCAAGG | 17 | 988 |
| HSV1-UL19-603 | − | UUUUUCCUGGGCAAGGC | 17 | 989 |
| HSV1-UL19-604 | − | GCAAGGCGGGCCACCGC | 17 | 990 |
| HSV1-UL19-605 | − | CAAGGCGGGCCACCGCC | 17 | 991 |
| HSV1-UL19-606 | − | GGCGGGCCACCGCCGGG | 17 | 992 |
| HSV1-UL19-607 | − | CCGCCGGGAGGCCGUCG | 17 | 993 |
| HSV1-UL19-608 | − | GGGAGGCCGUCGAGGCC | 17 | 994 |
| HSV1-UL19-609 | − | CGUCGAGGCCUGGCUCG | 17 | 995 |
| HSV1-UL19-610 | − | GCUCGUGGACCUCACCA | 17 | 996 |
| HSV1-UL19-611 | − | GGCCACGCAGCCCUCCG | 17 | 997 |
| HSV1-UL19-612 | − | ACGCAUGCCGACACGCG | 17 | 998 |
| HSV1-UL19-613 | − | CGCAUGCCGACACGCGC | 17 | 999 |
| HSV1-UL19-614 | − | AUGCCGACACGCGCGGG | 17 | 1000 |
| HSV1-UL19-615 | − | CGACACGCGCGGGCGGC | 17 | 1001 |
| HSV1-UL19-616 | − | CGCGGGCGGCCGGUCGA | 17 | 1002 |
| HSV1-UL19-617 | − | GCGGGCGGCCGGUCGAC | 17 | 1003 |
| HSV1-UL19-618 | − | CGGGCGGCCGGUCGACG | 17 | 1004 |
| HSV1-UL19-619 | − | GCAGUCCUUCCUGAAAG | 17 | 1005 |
| HSV1-UL19-620 | − | GUCCUUCCUGAAAGUGG | 17 | 1006 |
| HSV1-UL19-621 | − | CACCGAAGCCGACGUGC | 17 | 1007 |
| HSV1-UL19-622 | − | GACGUGCCGGUGACGUA | 17 | 1008 |
| HSV1-UL19-623 | − | GGUGACGUACGGCGAGA | 17 | 1009 |
| HSV1-UL19-624 | − | GGCGAGAUGGUCCUGAA | 17 | 1010 |
| HSV1-UL19-625 | − | GCGAGAUGGUCCUGAAC | 17 | 1011 |
| HSV1-UL19-626 | − | CGAGAUGGUCCUGAACG | 17 | 1012 |
| HSV1-UL19-627 | − | CCUGAACGGGGCCAACC | 17 | 1013 |
| HSV1-UL19-628 | − | CGGGGCCAACCUGGUCA | 17 | 1014 |
| HSV1-UL19-629 | − | GGUCACGGCGCUCGUGA | 17 | 1015 |
| HSV1-UL19-630 | − | GUCACGGCGCUCGUGAU | 17 | 1016 |
| HSV1-UL19-631 | − | GGCGCUCGUGAUGGGCA | 17 | 1017 |
| HSV1-UL19-632 | − | CAAGGCCGUGCGAAGUC | 17 | 1018 |
| HSV1-UL19-633 | − | GCGAAGUCUGGACGACG | 17 | 1019 |
| HSV1-UL19-634 | − | CGAAGUCUGGACGACGU | 17 | 1020 |
| HSV1-UL19-635 | − | CGUGGGCCGCCACCUGC | 17 | 1021 |
| HSV1-UL19-636 | − | CCACCUGCUGGAGAUGC | 17 | 1022 |
| HSV1-UL19-637 | − | CCUGCUGGAGAUGCAGG | 17 | 1023 |
| HSV1-UL19-638 | − | AGCAGCUCGACCUGAAC | 17 | 1024 |
| HSV1-UL19-639 | − | CCUGAACCGGCAGACGC | 17 | 1025 |
| HSV1-UL19-640 | − | GACGACGCGCGUGCGCG | 17 | 1026 |
| HSV1-UL19-641 | − | GCGCGUGCGCGCGGAUC | 17 | 1027 |
| HSV1-UL19-642 | − | GCGGAUCUGGUGUCCAU | 17 | 1028 |
| HSV1-UL19-643 | − | GUCCAUCGGCGAGAAGC | 17 | 1029 |
| HSV1-UL19-644 | − | CGAGAAGCUGGUCUUUC | 17 | 1030 |
| HSV1-UL19-645 | − | GAAGCUGGUCUUUCUGG | 17 | 1031 |
| HSV1-UL19-646 | − | GGUCUUUCUGGAGGCCC | 17 | 1032 |
| HSV1-UL19-647 | − | CAACGUUCCCUACCCCC | 17 | 1033 |
| HSV1-UL19-648 | − | CGUUCCCUACCCCCUGG | 17 | 1034 |
| HSV1-UL19-649 | − | GUUCCCUACCCCCUGGU | 17 | 1035 |
| HSV1-UL19-650 | − | CCCCCUGGUGGGCGCCA | 17 | 1036 |
| HSV1-UL19-651 | − | GACGUUCGUCCUGCCCC | 17 | 1037 |
| HSV1-UL19-652 | − | ACGUUCGUCCUGCCCCU | 17 | 1038 |
| HSV1-UL19-653 | − | CCUGGGCCUGUUCAAUC | 17 | 1039 |
| HSV1-UL19-654 | − | CCUGUUCAAUCCGGUCA | 17 | 1040 |
| HSV1-UL19-655 | − | UCAAUCCGGUCAUGGAA | 17 | 1041 |
| HSV1-UL19-656 | − | CGGUUUGCCGCGCACGC | 17 | 1042 |
| HSV1-UL19-657 | − | GGUUUGCCGCGCACGCC | 17 | 1043 |
| HSV1-UL19-658 | − | GUUUGCCGCGCACGCCG | 17 | 1044 |
| HSV1-UL19-659 | − | GACCUAGUCCCCGCCCC | 17 | 1045 |
| HSV1-UL19-660 | − | CCCCGCCCCCGGCCACC | 17 | 1046 |
| HSV1-UL19-661 | − | CCCGCCAGCUGUUUUUU | 17 | 1047 |
| HSV1-UL19-662 | − | CCGCCAGCUGUUUUUUU | 17 | 1048 |
| HSV1-UL19-663 | − | CGCCAGCUGUUUUUUUG | 17 | 1049 |
| HSV1-UL19-664 | − | GCCAGCUGUUUUUUUGG | 17 | 1050 |
| HSV1-UL19-665 | − | GCUGUUUUUUUGGGGGA | 17 | 1051 |
| HSV1-UL19-666 | − | UUGGGGGAAGGACCGCC | 17 | 1052 |
| HSV1-UL19-667 | − | GGUGCUGCGCCUGUCUC | 17 | 1053 |
| HSV1-UL19-668 | − | UCUCUGGAACACGCGAU | 17 | 1054 |
| HSV1-UL19-669 | − | CUCUGGAACACGCGAUC | 17 | 1055 |
| HSV1-UL19-670 | − | GCUGAUGAACGUUGACG | 17 | 1056 |
| HSV1-UL19-671 | − | GAUGAACGUUGACGCGG | 17 | 1057 |
| HSV1-UL19-672 | − | AACGUUGACGCGGCGGU | 17 | 1058 |
| HSV1-UL19-673 | − | ACGUUGACGCGGCGGUC | 17 | 1059 |
| HSV1-UL19-674 | − | CGUUGACGCGGCGGUCG | 17 | 1060 |
| HSV1-UL19-675 | − | GUUGACGCGGCGGUCGG | 17 | 1061 |
| HSV1-UL19-676 | − | GAAGCCGCCAAUCCGUA | 17 | 1062 |
| HSV1-UL19-677 | − | AAGCCGCCAAUCCGUAC | 17 | 1063 |
| HSV1-UL19-678 | − | AGCCGCCAAUCCGUACG | 17 | 1064 |
| HSV1-UL19-679 | − | UCCGUACGGGGCGUACG | 17 | 1065 |
| HSV1-UL19-680 | − | GUACGGGGCGUACGUGG | 17 | 1066 |
| HSV1-UL19-681 | − | GGCGUACGUGGCGGCCC | 17 | 1067 |
| HSV1-UL19-682 | − | UACGUGGCGGCCCCGGC | 17 | 1068 |
| HSV1-UL19-683 | − | AGCUGUUUUUGAACGCC | 17 | 1069 |
| HSV1-UL19-684 | − | GCUGUUUUUGAACGCCU | 17 | 1070 |
| HSV1-UL19-685 | − | CUGUUUUUGAACGCCUG | 17 | 1071 |
| HSV1-UL19-686 | − | UGUUUUUGAACGCCUGG | 17 | 1072 |
| HSV1-UL19-687 | − | CGCCUGGGGGCAGCGCC | 17 | 1073 |
| HSV1-UL19-688 | − | GGGCAGCGCCUGGCCCA | 17 | 1074 |
| HSV1-UL19-689 | − | GGCAGCGCCUGGCCCAC | 17 | 1075 |
| HSV1-UL19-690 | − | AGCGCCUGGCCCACGGG | 17 | 1076 |
| HSV1-UL19-691 | − | GCGCCUGGCCCACGGGC | 17 | 1077 |
| HSV1-UL19-692 | − | CCCACGGGCGGGUCCGA | 17 | 1078 |
| HSV1-UL19-693 | − | CCACGGGCGGGUCCGAU | 17 | 1079 |
| HSV1-UL19-694 | − | GCGGGUCCGAUGGGUCG | 17 | 1080 |
| HSV1-UL19-695 | − | GUCCGAUGGGUCGCGGA | 17 | 1081 |
| HSV1-UL19-696 | − | GGAAGGCCAGAUGACCC | 17 | 1082 |
| HSV1-UL19-697 | − | GCCCGACAACGCCAACC | 17 | 1083 |
| HSV1-UL19-698 | − | CGCGUUCGACUUCUUUG | 17 | 1084 |
| HSV1-UL19-699 | − | GCGUUCGACUUCUUUGU | 17 | 1085 |
| HSV1-UL19-700 | − | CGUUCGACUUCUUUGUG | 17 | 1086 |
| HSV1-UL19-701 | − | GUUCGACUUCUUUGUGG | 17 | 1087 |
| HSV1-UL19-702 | − | CGACUUCUUUGUGGGGG | 17 | 1088 |
| HSV1-UL19-703 | − | UGUGGGGGUGGCCGACG | 17 | 1089 |
| HSV1-UL19-704 | − | GGCCGACGUGGAGCUGC | 17 | 1090 |
| HSV1-UL19-705 | − | GCCGACGUGGAGCUGCC | 17 | 1091 |
| HSV1-UL19-706 | − | CCGACGUGGAGCUGCCG | 17 | 1092 |
| HSV1-UL19-707 | − | CGACGUGGAGCUGCCGG | 17 | 1093 |
| HSV1-UL19-708 | − | GACGUGGAGCUGCCGGG | 17 | 1094 |
| HSV1-UL19-709 | − | ACGUGGAGCUGCCGGGG | 17 | 1095 |
| HSV1-UL19-710 | − | CGUGGAGCUGCCGGGGG | 17 | 1096 |
| HSV1-UL19-711 | − | GGGGGGGGACGUUCCCC | 17 | 1097 |
| HSV1-UL19-712 | − | GGGGACGUUCCCCCGGC | 17 | 1098 |
| HSV1-UL19-713 | − | CGUUCCCCCGGCCGGCC | 17 | 1099 |
| HSV1-UL19-714 | − | GUUCCCCCGGCCGGCCC | 17 | 1100 |
| HSV1-UL19-715 | − | UUCCCCCGGCCGGCCCG | 17 | 1101 |
| HSV1-UL19-716 | − | UCCCCCGGCCGGCCCGG | 17 | 1102 |
| HSV1-UL19-717 | − | CGGCCCGGGGGAGAUCC | 17 | 1103 |
| HSV1-UL19-718 | − | GGGAGAUCCAGGCCACC | 17 | 1104 |
| HSV1-UL19-719 | − | CCAGGCCACCUGGCGCG | 17 | 1105 |
| HSV1-UL19-720 | − | ACCUGGCGCGUGGUGAA | 17 | 1106 |
| HSV1-UL19-721 | − | GAACGGCAACUUGCCCC | 17 | 1107 |
| HSV1-UL19-722 | − | GCCCCUGGCGCUAUGUC | 17 | 1108 |
| HSV1-UL19-723 | − | CCUGGCGCUAUGUCCGG | 17 | 1109 |
| HSV1-UL19-724 | − | UAUGUCCGGCGGCGUUC | 17 | 1110 |
| HSV1-UL19-725 | − | AUGUCCGGCGGCGUUCC | 17 | 1111 |
| HSV1-UL19-726 | − | CGGCGUUCCGGGACGCC | 17 | 1112 |
| HSV1-UL19-727 | − | GGCGUUCCGGGACGCCC | 17 | 1113 |
| HSV1-UL19-728 | − | GCGUUCCGGGACGCCCG | 17 | 1114 |
| HSV1-UL19-729 | − | CCGGGACGCCCGGGGCC | 17 | 1115 |
| HSV1-UL19-730 | − | CGCCCGGGGCCUGGAGC | 17 | 1116 |
| HSV1-UL19-731 | − | GCCCGGGGCCUGGAGCU | 17 | 1117 |
| HSV1-UL19-732 | − | CCCGGGGCCUGGAGCUG | 17 | 1118 |
| HSV1-UL19-733 | − | CCGGGGCCUGGAGCUGG | 17 | 1119 |
| HSV1-UL19-734 | − | GGGCCUGGAGCUGGGGG | 17 | 1120 |
| HSV1-UL19-735 | − | GGCCUGGAGCUGGGGGU | 17 | 1121 |
| HSV1-UL19-736 | − | GGUGGGACGCCACGCCA | 17 | 1122 |
| HSV1-UL19-737 | − | ACCAUCGCCGCCGUUCG | 17 | 1123 |
| HSV1-UL19-738 | − | CCAUCGCCGCCGUUCGC | 17 | 1124 |
| HSV1-UL19-739 | − | CAUCGCCGCCGUUCGCG | 17 | 1125 |
| HSV1-UL19-740 | − | CGACGACCGCAACUACC | 17 | 1126 |
| HSV1-UL19-741 | − | CGACCGCAACUACCCGG | 17 | 1127 |
| HSV1-UL19-742 | − | GGUGUUUUACCUGCUGC | 17 | 1128 |
| HSV1-UL19-743 | − | CUGCAGGCCGCCAUACA | 17 | 1129 |
| HSV1-UL19-744 | − | GCACGUCUUCUGCGCCC | 17 | 1130 |
| HSV1-UL19-745 | − | UCUUCUGCGCCCUGGCC | 17 | 1131 |
| HSV1-UL19-746 | − | CGCCCUGGCCCGGCUCG | 17 | 1132 |
| HSV1-UL19-747 | − | AGUGCAUCACCAGCUAC | 17 | 1133 |
| HSV1-UL19-748 | − | GCUACUGGAACAACACG | 17 | 1134 |
| HSV1-UL19-749 | − | GAACAACACGCGGUGCG | 17 | 1135 |
| HSV1-UL19-750 | − | CGUGAACGACUACUCGC | 17 | 1136 |
| HSV1-UL19-751 | − | UACGUCGUGACCUACCU | 17 | 1137 |
| HSV1-UL19-752 | − | ACGUCGUGACCUACCUC | 17 | 1138 |
| HSV1-UL19-753 | − | CGUCGUGACCUACCUCG | 17 | 1139 |
| HSV1-UL19-754 | − | GUCGUGACCUACCUCGG | 17 | 1140 |
| HSV1-UL19-755 | − | CGGGGGAGACCUUCCCG | 17 | 1141 |
| HSV1-UL19-756 | − | CCUUCCCGAGGAGUGCA | 17 | 1142 |
| HSV1-UL19-757 | − | AGUGCAUGGCCGUGUAC | 17 | 1143 |
| HSV1-UL19-758 | − | GUGCAUGGCCGUGUACC | 17 | 1144 |
| HSV1-UL19-759 | − | GGCCGUGUACCGGGACC | 17 | 1145 |
| HSV1-UL19-760 | − | CGUGUACCGGGACCUGG | 17 | 1146 |
| HSV1-UL19-761 | − | CCUGGUGGCGCACGUCG | 17 | 1147 |
| HSV1-UL19-762 | − | GGCGCACGUCGAGGCCC | 17 | 1148 |
| HSV1-UL19-763 | − | CGAGGCCCUGGCCCAGC | 17 | 1149 |
| HSV1-UL19-764 | − | GAUGACUUUACCCUGAC | 17 | 1150 |
| HSV1-UL19-765 | − | CUUUACCCUGACCGGCC | 17 | 1151 |
| HSV1-UL19-766 | − | CCUGACCGGCCCGGAGC | 17 | 1152 |
| HSV1-UL19-767 | − | CUGACCGGCCCGGAGCU | 17 | 1153 |
| HSV1-UL19-768 | − | ACCGGCCCGGAGCUGGG | 17 | 1154 |
| HSV1-UL19-769 | − | CCGGCCCGGAGCUGGGC | 17 | 1155 |
| HSV1-UL19-770 | − | CCCGGAGCUGGGCGGGC | 17 | 1156 |
| HSV1-UL19-771 | − | UCACCUAAUGCGAGACC | 17 | 1157 |
| HSV1-UL19-772 | − | UGCUGCCACCCCUCGUG | 17 | 1158 |
| HSV1-UL19-773 | − | GCUGCCACCCCUCGUGU | 17 | 1159 |
| HSV1-UL19-774 | − | ACUGUGACGCCCUGAUG | 17 | 1160 |
| HSV1-UL19-775 | − | CGCCCUGAUGCGGCGCG | 17 | 1161 |
| HSV1-UL19-776 | − | GAUGCGGCGCGCGGCCC | 17 | 1162 |
| HSV1-UL19-777 | − | ACCGCCAUCGCGACUGC | 17 | 1163 |
| HSV1-UL19-778 | − | CCGCCAUCGCGACUGCC | 17 | 1164 |
| HSV1-UL19-779 | − | CGACUGCCGGGUUAGCG | 17 | 1165 |
| HSV1-UL19-780 | − | GACUGCCGGGUUAGCGC | 17 | 1166 |
| HSV1-UL19-781 | − | ACUGCCGGGUUAGCGCG | 17 | 1167 |
| HSV1-UL19-782 | − | CUGCCGGGUUAGCGCGG | 17 | 1168 |
| HSV1-UL19-783 | − | UGCCGGGUUAGCGCGGG | 17 | 1169 |
| HSV1-UL19-784 | − | CCACGACCCCGUGUACG | 17 | 1170 |
| HSV1-UL19-785 | − | CGACCCCGUGUACGCGG | 17 | 1171 |
| HSV1-UL19-786 | − | CGCGGCGGCAUGUAACG | 17 | 1172 |
| HSV1-UL19-787 | − | AUGUAACGUGGCGACCG | 17 | 1173 |
| HSV1-UL19-788 | − | GACUUCAACCGCAACGA | 17 | 1174 |
| HSV1-UL19-789 | − | GCUGCUGCACAACACCC | 17 | 1175 |
| HSV1-UL19-790 | − | CACCCAGGCCCGAGCCG | 17 | 1176 |
| HSV1-UL19-791 | − | CCGAGCCGCGGACGCCG | 17 | 1177 |
| HSV1-UL19-792 | − | CGGACGCCGCGGAUGAC | 17 | 1178 |
| HSV1-UL19-793 | − | CGGAUGACCGGCCGCAC | 17 | 1179 |
| HSV1-UL19-794 | − | GGAUGACCGGCCGCACC | 17 | 1180 |
| HSV1-UL19-795 | − | GAUGACCGGCCGCACCG | 17 | 1181 |
| HSV1-UL19-796 | − | AUGACCGGCCGCACCGG | 17 | 1182 |
| HSV1-UL19-797 | − | UGACCGGCCGCACCGGG | 17 | 1183 |
| HSV1-UL19-798 | − | CCGGCCGCACCGGGGGG | 17 | 1184 |
| HSV1-UL19-799 | − | CGCACCGGGGGGCGGAC | 17 | 1185 |
| HSV1-UL19-800 | − | GAUUUACUACUACGUGA | 17 | 1186 |
| HSV1-UL19-801 | − | UGGUGCCCGCCUUCUCG | 17 | 1187 |
| HSV1-UL19-802 | − | GGUGCCCGCCUUCUCGC | 17 | 1188 |
| HSV1-UL19-803 | − | GUGCCCGCCUUCUCGCG | 17 | 1189 |
| HSV1-UL19-804 | − | GGGCCGCUGCUGCACCG | 17 | 1190 |
| HSV1-UL19-805 | − | GGCCGCUGCUGCACCGC | 17 | 1191 |
| HSV1-UL19-806 | − | GCCGCUGCUGCACCGCG | 17 | 1192 |
| HSV1-UL19-807 | − | CCGCUGCUGCACCGCGG | 17 | 1193 |
| HSV1-UL19-808 | − | CGCCACCCUGCAGAACA | 17 | 1194 |
| HSV1-UL19-809 | − | CACCCUGCAGAACAUGG | 17 | 1195 |
| HSV1-UL19-810 | − | GCAGAACAUGGUGGUCC | 17 | 1196 |
| HSV1-UL19-811 | − | GUCCCGGAGAUCGCCCC | 17 | 1197 |
| HSV1-UL19-812 | − | GGAGAUCGCCCCCGGCG | 17 | 1198 |
| HSV1-UL19-813 | − | CCCCAGCGACCCCGUGA | 17 | 1199 |
| HSV1-UL19-814 | − | CGCGCACCCCCUGCACC | 17 | 1200 |
| HSV1-UL19-815 | − | CCUGCACCCGGCCAAUC | 17 | 1201 |
| HSV1-UL19-816 | − | GCACCCGGCCAAUCUGG | 17 | 1202 |
| HSV1-UL19-817 | − | CAAUCUGGUGGCCAACA | 17 | 1203 |
| HSV1-UL19-818 | − | AACGCCAUGUUUCACAA | 17 | 1204 |
| HSV1-UL19-819 | − | ACGCCAUGUUUCACAAC | 17 | 1205 |
| HSV1-UL19-820 | − | GUUUCACAACGGGCGCG | 17 | 1206 |
| HSV1-UL19-821 | − | CAACGGGCGCGUGGUAG | 17 | 1207 |
| HSV1-UL19-822 | − | GGGCGCGUGGUAGUGGA | 17 | 1208 |
| HSV1-UL19-823 | − | GGCGCGUGGUAGUGGAC | 17 | 1209 |
| HSV1-UL19-824 | − | CGCCAUGCUCACGCUGC | 17 | 1210 |
| HSV1-UL19-825 | − | GCUCACGCUGCAGGUGC | 17 | 1211 |
| HSV1-UL19-826 | − | GGUGCUGGCCCACAACA | 17 | 1212 |
| HSV1-UL19-827 | − | CAUGGCCGAACGCACAA | 17 | 1213 |
| HSV1-UL19-828 | − | AACGGCGCUGCUCUGCU | 17 | 1214 |
| HSV1-UL19-829 | − | GGCGCUGCUCUGCUCGG | 17 | 1215 |
| HSV1-UL19-830 | − | CUCGGCGGCGCCCGACG | 17 | 1216 |
| HSV1-UL19-831 | − | UCGGCGGCGCCCGACGC | 17 | 1217 |
| HSV1-UL19-832 | − | AACAUGCGCAUAUUCGA | 17 | 1218 |
| HSV1-UL19-833 | − | ACAUGCGCAUAUUCGAC | 17 | 1219 |
| HSV1-UL19-834 | − | CAUGCGCAUAUUCGACG | 17 | 1220 |
| HSV1-UL19-835 | − | GACGGGGCGUUGCACGC | 17 | 1221 |
| HSV1-UL19-836 | − | CGCCGGAAUCCUGCUGA | 17 | 1222 |
| HSV1-UL19-837 | − | GAUGGCCCCCCAGCAUC | 17 | 1223 |
| HSV1-UL19-838 | − | GACCAUACCAUCCAAAA | 17 | 1224 |
| HSV1-UL19-839 | − | GUCCACGCGCUGUUCGC | 17 | 1225 |
| HSV1-UL19-840 | − | UCCACGCGCUGUUCGCC | 17 | 1226 |
| HSV1-UL19-841 | − | CCACGCGCUGUUCGCCG | 17 | 1227 |
| HSV1-UL19-842 | − | CGCCGGGGCCGACCACG | 17 | 1228 |
| HSV1-UL19-843 | − | CGCGCCCAAUUUCCCCC | 17 | 1229 |
| HSV1-UL19-844 | − | CCCUGCGCGACCUGUCG | 17 | 1230 |
| HSV1-UL19-845 | − | GCGCGACCUGUCGCGGC | 17 | 1231 |
| HSV1-UL19-846 | − | GUCGCGGCAGGUCCCCC | 17 | 1232 |
| HSV1-UL19-847 | − | GGUCCCCCUGGUCCCCC | 17 | 1233 |
| HSV1-UL19-848 | − | CCUGGUCCCCCCGGCUC | 17 | 1234 |
| HSV1-UL19-849 | − | CUGGUCCCCCCGGCUCU | 17 | 1235 |
| HSV1-UL19-850 | − | UGGUCCCCCCGGCUCUG | 17 | 1236 |
| HSV1-UL19-851 | − | GGUCCCCCCGGCUCUGG | 17 | 1237 |
| HSV1-UL19-852 | − | GCACGUCCGCGAGAGCG | 17 | 1238 |
| HSV1-UL19-853 | − | GUCCGCGAGAGCGCGGC | 17 | 1239 |
| HSV1-UL19-854 | − | UCCGCGAGAGCGCGGCC | 17 | 1240 |
| HSV1-UL19-855 | − | CCGCGAGAGCGCGGCCG | 17 | 1241 |
| HSV1-UL19-856 | − | GCUGACCUACGCGCUCA | 17 | 1242 |
| HSV1-UL19-857 | − | GACCUACGCGCUCAUGG | 17 | 1243 |
| HSV1-UL19-858 | − | ACCUACGCGCUCAUGGC | 17 | 1244 |
| HSV1-UL19-859 | − | CCUACGCGCUCAUGGCG | 17 | 1245 |
| HSV1-UL19-860 | − | CUUCAAGAUCAGUCCCG | 17 | 1246 |
| HSV1-UL19-861 | − | GCAUCAUCAGCUCAAGA | 17 | 1247 |
| HSV1-UL19-862 | − | CAUCAUCAGCUCAAGAC | 17 | 1248 |
| HSV1-UL19-863 | − | AAGACGGGCCUCCAUCC | 17 | 1249 |
| HSV1-UL19-864 | − | AGACGGGCCUCCAUCCC | 17 | 1250 |
| HSV1-UL19-865 | − | GGCCUCCAUCCCGGGUU | 17 | 1251 |
| HSV1-UL19-866 | − | GCCUCCAUCCCGGGUUU | 17 | 1252 |
| HSV1-UL19-867 | − | GUUCACCGUCGUCCGAC | 17 | 1253 |
| HSV1-UL19-868 | − | UGAGAACGUGCUGUUCU | 17 | 1254 |
| HSV1-UL19-869 | − | GUUCUCGGAGCGCGCGU | 17 | 1255 |
| HSV1-UL19-870 | − | CUCGGAGCGCGCGUCGG | 17 | 1256 |
| HSV1-UL19-871 | − | GUCGGAGGCGUACUUCC | 17 | 1257 |
| HSV1-UL19-872 | − | UCGGAGGCGUACUUCCU | 17 | 1258 |
| HSV1-UL19-873 | − | CUUCCUGGGCCAGCUCC | 17 | 1259 |
| HSV1-UL19-874 | − | CCUGGGCCAGCUCCAGG | 17 | 1260 |
| HSV1-UL19-875 | − | GCCAGCUCCAGGUGGCC | 17 | 1261 |
| HSV1-UL19-876 | − | GUGGCCCGGCACGAAAC | 17 | 1262 |
| HSV1-UL19-877 | − | GCCCGGCACGAAACUGG | 17 | 1263 |
| HSV1-UL19-878 | − | CCCGGCACGAAACUGGC | 17 | 1264 |
| HSV1-UL19-879 | − | CCGGCACGAAACUGGCG | 17 | 1265 |
| HSV1-UL19-880 | − | CGGCACGAAACUGGCGG | 17 | 1266 |
| HSV1-UL19-881 | − | GGCACGAAACUGGCGGG | 17 | 1267 |
| HSV1-UL19-882 | − | GCACGAAACUGGCGGGG | 17 | 1268 |
| HSV1-UL19-883 | − | CCAGCCGCGCGCGAACG | 17 | 1269 |
| HSV1-UL19-884 | − | GCGCGCGAACGUGGACC | 17 | 1270 |
| HSV1-UL19-885 | − | CGCGCGAACGUGGACCU | 17 | 1271 |
| HSV1-UL19-886 | − | GAACGUGGACCUGGGCG | 17 | 1272 |
| HSV1-UL19-887 | − | AACGUGGACCUGGGCGU | 17 | 1273 |
| HSV1-UL19-888 | − | GGGCUACACCGCCGUCG | 17 | 1274 |
| HSV1-UL19-889 | − | CACCGCCGUCGUGGCCA | 17 | 1275 |
| HSV1-UL19-890 | − | CAACCCCGUCACCGACA | 17 | 1276 |
| HSV1-UL19-891 | − | AACCCCGUCACCGACAU | 17 | 1277 |
| HSV1-UL19-892 | − | UCCCCAAAACUUUUACC | 17 | 1278 |
| HSV1-UL19-893 | − | CCCCAAAACUUUUACCU | 17 | 1279 |
| HSV1-UL19-894 | − | AACUUUUACCUGGGCCG | 17 | 1280 |
| HSV1-UL19-895 | − | ACUUUUACCUGGGCCGC | 17 | 1281 |
| HSV1-UL19-896 | − | CUUUUACCUGGGCCGCG | 17 | 1282 |
| HSV1-UL19-897 | − | CGGGGCUCCCCCUCUCC | 17 | 1283 |
| HSV1-UL19-898 | − | CCCUCUCCUGGACAACG | 17 | 1284 |
| HSV1-UL19-899 | − | CGGCAGCCGUGUACCUG | 17 | 1285 |
| HSV1-UL19-900 | − | CGUGUACCUGCGGAACG | 17 | 1286 |
| HSV1-UL19-901 | − | CCUGCGGAACGCGGUCG | 17 | 1287 |
| HSV1-UL19-902 | − | GCGGAACGCGGUCGUGG | 17 | 1288 |
| HSV1-UL19-903 | − | CGGAACGCGGUCGUGGC | 17 | 1289 |
| HSV1-UL19-904 | − | CGUGGCGGGAAACCGCC | 17 | 1290 |
| HSV1-UL19-905 | − | GUGGCGGGAAACCGCCU | 17 | 1291 |
| HSV1-UL19-906 | − | UGGCGGGAAACCGCCUG | 17 | 1292 |
| HSV1-UL19-907 | − | GGGAAACCGCCUGGGGC | 17 | 1293 |
| HSV1-UL19-908 | − | CAGCCCGUCCCCGUGUU | 17 | 1294 |
| HSV1-UL19-909 | − | AGCCCGUCCCCGUGUUC | 17 | 1295 |
| HSV1-UL19-910 | − | CGUGUUCGGGUGCGCCC | 17 | 1296 |
| HSV1-UL19-911 | − | GGUGCGCCCAGGUGCCG | 17 | 1297 |
| HSV1-UL19-912 | − | CAGGUGCCGCGGCGCGC | 17 | 1298 |
| HSV1-UL19-913 | − | AGGUGCCGCGGCGCGCA | 17 | 1299 |
| HSV1-UL19-914 | − | GCCGCGGCGCGCAGGGA | 17 | 1300 |
| HSV1-UL19-915 | − | CGCGCAGGGAUGGACCA | 17 | 1301 |
| HSV1-UL19-916 | − | AGGGAUGGACCACGGCC | 17 | 1302 |
| HSV1-UL19-917 | − | ACGUCAACUACUUCCGC | 17 | 1303 |
| HSV1-UL19-918 | − | GCCGGCCCUGCAACCCC | 17 | 1304 |
| HSV1-UL19-919 | − | CCGGCCCUGCAACCCCC | 17 | 1305 |
| HSV1-UL19-920 | − | CGGCCCUGCAACCCCCG | 17 | 1306 |
| HSV1-UL19-921 | − | CCCCGGGGACGCGCCGC | 17 | 1307 |
| HSV1-UL19-922 | − | CCCGGGGACGCGCCGCC | 17 | 1308 |
| HSV1-UL19-923 | − | CCGGGGACGCGCCGCCG | 17 | 1309 |
| HSV1-UL19-924 | − | CGGGGACGCGCCGCCGG | 17 | 1310 |
| HSV1-UL19-925 | − | CGCCGGGGGCGUUUACG | 17 | 1311 |
| HSV1-UL19-926 | − | GCCGGGGGCGUUUACGC | 17 | 1312 |
| HSV1-UL19-927 | − | CCGGGGGCGUUUACGCG | 17 | 1313 |
| HSV1-UL19-928 | − | CGGGGGCGUUUACGCGG | 17 | 1314 |
| HSV1-UL19-929 | − | CGUUUACGCGGGGGACA | 17 | 1315 |
| HSV1-UL19-930 | − | UUACGCGGGGGACAAGG | 17 | 1316 |
| HSV1-UL19-931 | − | UACGCGGGGGACAAGGA | 17 | 1317 |
| HSV1-UL19-932 | − | ACGCGGGGGACAAGGAG | 17 | 1318 |
| HSV1-UL19-933 | − | CGCGGGGGACAAGGAGG | 17 | 1319 |
| HSV1-UL19-934 | − | GCCCUCAUGUACGACCA | 17 | 1320 |
| HSV1-UL19-935 | − | GCCAGAGCGACCCGUCC | 17 | 1321 |
| HSV1-UL19-936 | − | CCAGAGCGACCCGUCCC | 17 | 1322 |
| HSV1-UL19-937 | − | CCCGUCCCGGGCCUUCG | 17 | 1323 |
| HSV1-UL19-938 | − | CCGGGCCUUCGCGGCCA | 17 | 1324 |
| HSV1-UL19-939 | − | CGGCCACGGCCAACCCG | 17 | 1325 |
| HSV1-UL19-940 | − | GGCCACGGCCAACCCGU | 17 | 1326 |
| HSV1-UL19-941 | − | UCGCAGCGAUUUUCGUA | 17 | 1327 |
| HSV1-UL19-942 | − | CGCAGCGAUUUUCGUAC | 17 | 1328 |
| HSV1-UL19-943 | − | GCAGCGAUUUUCGUACG | 17 | 1329 |
| HSV1-UL19-944 | − | GGGGACCUGCUCUAUAA | 17 | 1330 |
| HSV1-UL19-945 | − | GGGACCUGCUCUAUAAC | 17 | 1331 |
| HSV1-UL19-946 | − | GGACCUGCUCUAUAACG | 17 | 1332 |
| HSV1-UL19-947 | − | GGGGCCUACCACCUCAA | 17 | 1333 |
| HSV1-UL19-948 | − | GGGCCUACCACCUCAAC | 17 | 1334 |
| HSV1-UL19-949 | − | GGCCUACCACCUCAACG | 17 | 1335 |
| HSV1-UL19-950 | − | CCUCAACGGGGCCUCGC | 17 | 1336 |
| HSV1-UL19-951 | − | CUUUAAGUUCUUUACGU | 17 | 1337 |
| HSV1-UL19-952 | − | CGCCAAACAUCGCUGCC | 17 | 1338 |
| HSV1-UL19-953 | − | CCUGGAGCGCCUGAUCG | 17 | 1339 |
| HSV1-UL19-954 | − | GCGCCUGAUCGUGGAGA | 17 | 1340 |
| HSV1-UL19-955 | − | CGCCUGAUCGUGGAGAC | 17 | 1341 |
| HSV1-UL19-956 | − | GAUCGUGGAGACGGGUU | 17 | 1342 |
| HSV1-UL19-957 | − | CGUGGAGACGGGUUCGG | 17 | 1343 |
| HSV1-UL19-958 | − | GGGUUCGGCGGUGUCCA | 17 | 1344 |
| HSV1-UL19-959 | − | ACAGUUUAAGCGCCCCC | 17 | 1345 |
| HSV1-UL19-960 | − | CAGUUUAAGCGCCCCCC | 17 | 1346 |
| HSV1-UL19-961 | − | AGUUUAAGCGCCCCCCG | 17 | 1347 |
| HSV1-UL19-962 | − | GGGGUGCCGCGAACUCG | 17 | 1348 |
| HSV1-UL19-963 | − | GUGCCGCGAACUCGUGG | 17 | 1349 |
| HSV1-UL19-964 | − | CUCGUGGAGGACCCGUG | 17 | 1350 |
| HSV1-UL19-965 | − | CCCGUGUGGCCUGUUUC | 17 | 1351 |
| HSV1-UL19-966 | − | GUGUGGCCUGUUUCAGG | 17 | 1352 |
| HSV1-UL19-967 | − | CUCCGCAGUGCCCGCAA | 17 | 1353 |
| HSV1-UL19-968 | − | UCCGCAGUGCCCGCAAC | 17 | 1354 |
| HSV1-UL19-969 | − | CCGCAGUGCCCGCAACG | 17 | 1355 |
| HSV1-UL19-970 | − | ACGGGGAAGCCCACGCG | 17 | 1356 |
| HSV1-UL19-971 | − | CGGGGAAGCCCACGCGC | 17 | 1357 |
| HSV1-UL19-972 | − | UGACGCAUCCCCGCUCA | 17 | 1358 |
| HSV1-UL19-973 | − | GACGCAUCCCCGCUCAA | 17 | 1359 |
| HSV1-UL19-974 | − | AUCCCCGCUCAAGGGAC | 17 | 1360 |
| HSV1-UL19-975 | + | CAAACGCCCCGAGGACGGCC | 20 | 1361 |
| HSV1-UL19-976 | + | GCGCUCAAACGCCCCGAGGA | 20 | 1362 |
| HSV1-UL19-977 | + | UGCCGCGCUCAAACGCCCCG | 20 | 1363 |
| HSV1-UL19-978 | + | CAGCACGUGCAGCAUCUGGU | 20 | 1364 |
| HSV1-UL19-979 | + | CCAGCAGCACGUGCAGCAUC | 20 | 1365 |
| HSV1-UL19-980 | + | GGCAACAACAAAGCCAGGGG | 20 | 1366 |
| HSV1-UL19-981 | + | AUCGGCAACAACAAAGCCAG | 20 | 1367 |
| HSV1-UL19-982 | + | CAUCGGCAACAACAAAGCCA | 20 | 1368 |
| HSV1-UL19-983 | + | GCAUCGGCAACAACAAAGCC | 20 | 1369 |
| HSV1-UL19-984 | + | UUGUCCAGGUAUCGUUGCAU | 20 | 1370 |
| HSV1-UL19-985 | + | UGGCCAGGCGGCCGUUGUCC | 20 | 1371 |
| HSV1-UL19-986 | + | GGGCCACCCUGGUGGCCAGG | 20 | 1372 |
| HSV1-UL19-987 | + | CCCGGGCCACCCUGGUGGCC | 20 | 1373 |
| HSV1-UL19-988 | + | GGUCGCCCGGGCCACCCUGG | 20 | 1374 |
| HSV1-UL19-989 | + | CAGGGUCGCCCGGGCCACCC | 20 | 1375 |
| HSV1-UL19-990 | + | CUCGGCGACCAGGGUCGCCC | 20 | 1376 |
| HSV1-UL19-991 | + | GCUCGGCGACCAGGGUCGCC | 20 | 1377 |
| HSV1-UL19-992 | + | UCGCUUUAGCUCGGCGACCA | 20 | 1378 |
| HSV1-UL19-993 | + | UUCGCUUUAGCUCGGCGACC | 20 | 1379 |
| HSV1-UL19-994 | + | GCAGAAGCUUCGCUUUAGCU | 20 | 1380 |
| HSV1-UL19-995 | + | GGCGGUGGCCCGCCUUGCCC | 20 | 1381 |
| HSV1-UL19-996 | + | CCUCGACGGCCUCCCGGCGG | 20 | 1382 |
| HSV1-UL19-997 | + | AGGCCUCGACGGCCUCCCGG | 20 | 1383 |
| HSV1-UL19-998 | + | GCCAGGCCUCGACGGCCUCC | 20 | 1384 |
| HSV1-UL19-999 | + | GUCCACGAGCCAGGCCUCGA | 20 | 1385 |
| HSV1-UL19-1000 | + | CGUGGUGAGGUCCACGAGCC | 20 | 1386 |
| HSV1-UL19-1001 | + | AGGGCUGCGUGGCCGUGGUG | 20 | 1387 |
| HSV1-UL19-1002 | + | CACGGAGGGCUGCGUGGCCG | 20 | 1388 |
| HSV1-UL19-1003 | + | CACGGCCACGGAGGGCUGCG | 20 | 1389 |
| HSV1-UL19-1004 | + | AGACGGGGCACGGCCACGGA | 20 | 1390 |
| HSV1-UL19-1005 | + | CAGACGGGGCACGGCCACGG | 20 | 1391 |
| HSV1-UL19-1006 | + | CGUCAGACGGGGCACGGCCA | 20 | 1392 |
| HSV1-UL19-1007 | + | GGCAUGCGUCAGACGGGGCA | 20 | 1393 |
| HSV1-UL19-1008 | + | GUGUCGGCAUGCGUCAGACG | 20 | 1394 |
| HSV1-UL19-1009 | + | CGUGUCGGCAUGCGUCAGAC | 20 | 1395 |
| HSV1-UL19-1010 | + | GCGUGUCGGCAUGCGUCAGA | 20 | 1396 |
| HSV1-UL19-1011 | + | GACCGGCCGCCCGCGCGUGU | 20 | 1397 |
| HSV1-UL19-1012 | + | GUGACGAGCACCCCGUCGAC | 20 | 1398 |
| HSV1-UL19-1013 | + | GCGCUGUUUGAUCGGGGCGG | 20 | 1399 |
| HSV1-UL19-1014 | + | GAGGCGCUGUUUGAUCGGGG | 20 | 1400 |
| HSV1-UL19-1015 | + | CAGGAGGCGCUGUUUGAUCG | 20 | 1401 |
| HSV1-UL19-1016 | + | GCAGGAGGCGCUGUUUGAUC | 20 | 1402 |
| HSV1-UL19-1017 | + | UGCAGGAGGCGCUGUUUGAU | 20 | 1403 |
| HSV1-UL19-1018 | + | CUUUCAGGAAGGACUGCAGG | 20 | 1404 |
| HSV1-UL19-1019 | + | CCACUUUCAGGAAGGACUGC | 20 | 1405 |
| HSV1-UL19-1020 | + | GGUGUCCUCCACUUUCAGGA | 20 | 1406 |
| HSV1-UL19-1021 | + | CUUCGGUGUCCUCCACUUUC | 20 | 1407 |
| HSV1-UL19-1022 | + | CGUCACCGGCACGUCGGCUU | 20 | 1408 |
| HSV1-UL19-1023 | + | GCCGUACGUCACCGGCACGU | 20 | 1409 |
| HSV1-UL19-1024 | + | ACCAUCUCGCCGUACGUCAC | 20 | 1410 |
| HSV1-UL19-1025 | + | UGACCAGGUUGGCCCCGUUC | 20 | 1411 |
| HSV1-UL19-1026 | + | CACGAGCGCCGUGACCAGGU | 20 | 1412 |
| HSV1-UL19-1027 | + | CCAUCACGAGCGCCGUGACC | 20 | 1413 |
| HSV1-UL19-1028 | + | CACGUCGUCCAGACUUCGCA | 20 | 1414 |
| HSV1-UL19-1029 | + | CCUGCAUCUCCAGCAGGUGG | 20 | 1415 |
| HSV1-UL19-1030 | + | CCUCCUGCAUCUCCAGCAGG | 20 | 1416 |
| HSV1-UL19-1031 | + | GCUCCUCCUGCAUCUCCAGC | 20 | 1417 |
| HSV1-UL19-1032 | + | CGUCCAGCGUCUGCCGGUUC | 20 | 1418 |
| HSV1-UL19-1033 | + | CGAGCUCGUCCAGCGUCUGC | 20 | 1419 |
| HSV1-UL19-1034 | + | GCGCACGCGCGUCGUCUGGG | 20 | 1420 |
| HSV1-UL19-1035 | + | CGCGCACGCGCGUCGUCUGG | 20 | 1421 |
| HSV1-UL19-1036 | + | GCGCGCACGCGCGUCGUCUG | 20 | 1422 |
| HSV1-UL19-1037 | + | CGCGCGCACGCGCGUCGUCU | 20 | 1423 |
| HSV1-UL19-1038 | + | CCGCGCGCACGCGCGUCGUC | 20 | 1424 |
| HSV1-UL19-1039 | + | AAAGACCAGCUUCUCGCCGA | 20 | 1425 |
| HSV1-UL19-1040 | + | GGCGUAGAUGCGCUUCUCCA | 20 | 1426 |
| HSV1-UL19-1041 | + | CGGCGUAGAUGCGCUUCUCC | 20 | 1427 |
| HSV1-UL19-1042 | + | GGGGUAGGGAACGUUGGUGG | 20 | 1428 |
| HSV1-UL19-1043 | + | CAGGGGGUAGGGAACGUUGG | 20 | 1429 |
| HSV1-UL19-1044 | + | CACCAGGGGGUAGGGAACGU | 20 | 1430 |
| HSV1-UL19-1045 | + | AUGGCGCCCACCAGGGGGUA | 20 | 1431 |
| HSV1-UL19-1046 | + | CAUGGCGCCCACCAGGGGGU | 20 | 1432 |
| HSV1-UL19-1047 | + | GGUCCAUGGCGCCCACCAGG | 20 | 1433 |
| HSV1-UL19-1048 | + | AGGUCCAUGGCGCCCACCAG | 20 | 1434 |
| HSV1-UL19-1049 | + | CAGGUCCAUGGCGCCCACCA | 20 | 1435 |
| HSV1-UL19-1050 | + | UCAGGUCCAUGGCGCCCACC | 20 | 1436 |
| HSV1-UL19-1051 | + | CAGGACGAACGUCAGGUCCA | 20 | 1437 |
| HSV1-UL19-1052 | + | CCAGGGGCAGGACGAACGUC | 20 | 1438 |
| HSV1-UL19-1053 | + | GAUUGAACAGGCCCAGGGGC | 20 | 1439 |
| HSV1-UL19-1054 | + | ACCGGAUUGAACAGGCCCAG | 20 | 1440 |
| HSV1-UL19-1055 | + | GACCGGAUUGAACAGGCCCA | 20 | 1441 |
| HSV1-UL19-1056 | + | UGACCGGAUUGAACAGGCCC | 20 | 1442 |
| HSV1-UL19-1057 | + | GUUCCAUGACCGGAUUGAAC | 20 | 1443 |
| HSV1-UL19-1058 | + | GCGGCAAACCGUUCCAUGAC | 20 | 1444 |
| HSV1-UL19-1059 | + | GACUAGGUCCCCGGCGUGCG | 20 | 1445 |
| HSV1-UL19-1060 | + | GGGGGCGGGGACUAGGUCCC | 20 | 1446 |
| HSV1-UL19-1061 | + | GGUGGCCGGGGGCGGGGACU | 20 | 1447 |
| HSV1-UL19-1062 | + | GAUCCGGGUGGCCGGGGGCG | 20 | 1448 |
| HSV1-UL19-1063 | + | GGAUCCGGGUGGCCGGGGGC | 20 | 1449 |
| HSV1-UL19-1064 | + | GGGAUCCGGGUGGCCGGGGG | 20 | 1450 |
| HSV1-UL19-1065 | + | GCGGGGAUCCGGGUGGCCGG | 20 | 1451 |
| HSV1-UL19-1066 | + | CGCGGGGAUCCGGGUGGCCG | 20 | 1452 |
| HSV1-UL19-1067 | + | GCGCGGGGAUCCGGGUGGCC | 20 | 1453 |
| HSV1-UL19-1068 | + | GGCGCGGGGAUCCGGGUGGC | 20 | 1454 |
| HSV1-UL19-1069 | + | GGAAGGCGCGGGGAUCCGGG | 20 | 1455 |
| HSV1-UL19-1070 | + | GCGGGAAGGCGCGGGGAUCC | 20 | 1456 |
| HSV1-UL19-1071 | + | GGCGGGAAGGCGCGGGGAUC | 20 | 1457 |
| HSV1-UL19-1072 | + | UGGCGGGGCGGGAAGGCGCG | 20 | 1458 |
| HSV1-UL19-1073 | + | CUGGCGGGGCGGGAAGGCGC | 20 | 1459 |
| HSV1-UL19-1074 | + | GCUGGCGGGGCGGGAAGGCG | 20 | 1460 |
| HSV1-UL19-1075 | + | AAACAGCUGGCGGGGCGGGA | 20 | 1461 |
| HSV1-UL19-1076 | + | AAAAAAACAGCUGGCGGGGC | 20 | 1462 |
| HSV1-UL19-1077 | + | CAAAAAAACAGCUGGCGGGG | 20 | 1463 |
| HSV1-UL19-1078 | + | CCCCAAAAAAACAGCUGGCG | 20 | 1464 |
| HSV1-UL19-1079 | + | CCCCCAAAAAAACAGCUGGC | 20 | 1465 |
| HSV1-UL19-1080 | + | UCCCCCAAAAAAACAGCUGG | 20 | 1466 |
| HSV1-UL19-1081 | + | CCUUCCCCCAAAAAAACAGC | 20 | 1467 |
| HSV1-UL19-1082 | + | GAGACAGGCGCAGCACCUGG | 20 | 1468 |
| HSV1-UL19-1083 | + | CCAGAGACAGGCGCAGCACC | 20 | 1469 |
| HSV1-UL19-1084 | + | CGAUCGCGUGUUCCAGAGAC | 20 | 1470 |
| HSV1-UL19-1085 | + | CAUCAGCGAAGGGUGGCACA | 20 | 1471 |
| HSV1-UL19-1086 | + | CAACGUUCAUCAGCGAAGGG | 20 | 1472 |
| HSV1-UL19-1087 | + | CGUCAACGUUCAUCAGCGAA | 20 | 1473 |
| HSV1-UL19-1088 | + | GCGUCAACGUUCAUCAGCGA | 20 | 1474 |
| HSV1-UL19-1089 | + | CUUCGACGGGGUCGCGGUUA | 20 | 1475 |
| HSV1-UL19-1090 | + | UGGCGGCUUCGACGGGGUCG | 20 | 1476 |
| HSV1-UL19-1091 | + | ACGGAUUGGCGGCUUCGACG | 20 | 1477 |
| HSV1-UL19-1092 | + | UACGGAUUGGCGGCUUCGAC | 20 | 1478 |
| HSV1-UL19-1093 | + | GUACGGAUUGGCGGCUUCGA | 20 | 1479 |
| HSV1-UL19-1094 | + | GUACGCCCCGUACGGAUUGG | 20 | 1480 |
| HSV1-UL19-1095 | + | CACGUACGCCCCGUACGGAU | 20 | 1481 |
| HSV1-UL19-1096 | + | GCCGCCACGUACGCCCCGUA | 20 | 1482 |
| HSV1-UL19-1097 | + | GUCUGCGGCGGGGCCGGCCG | 20 | 1483 |
| HSV1-UL19-1098 | + | UGUCUGCGGCGGGGCCGGCC | 20 | 1484 |
| HSV1-UL19-1099 | + | AUGUCUGCGGCGGGGCCGGC | 20 | 1485 |
| HSV1-UL19-1100 | + | CUGCAUGUCUGCGGCGGGGC | 20 | 1486 |
| HSV1-UL19-1101 | + | GCUGCUGCAUGUCUGCGGCG | 20 | 1487 |
| HSV1-UL19-1102 | + | AGCUGCUGCAUGUCUGCGGC | 20 | 1488 |
| HSV1-UL19-1103 | + | CAGCUGCUGCAUGUCUGCGG | 20 | 1489 |
| HSV1-UL19-1104 | + | AAACAGCUGCUGCAUGUCUG | 20 | 1490 |
| HSV1-UL19-1105 | + | GUGGGCCAGGCGCUGCCCCC | 20 | 1491 |
| HSV1-UL19-1106 | + | AUCGGACCCGCCCGUGGGCC | 20 | 1492 |
| HSV1-UL19-1107 | + | GACCCAUCGGACCCGCCCGU | 20 | 1493 |
| HSV1-UL19-1108 | + | CGACCCAUCGGACCCGCCCG | 20 | 1494 |
| HSV1-UL19-1109 | + | UCUGGCCUUCCGCGACCCAU | 20 | 1495 |
| HSV1-UL19-1110 | + | UAAACUGCUCCGGGGUCAUC | 20 | 1496 |
| HSV1-UL19-1111 | + | GGGCUGCAUAAACUGCUCCG | 20 | 1497 |
| HSV1-UL19-1112 | + | CGGGCUGCAUAAACUGCUCC | 20 | 1498 |
| HSV1-UL19-1113 | + | UCGGGCUGCAUAAACUGCUC | 20 | 1499 |
| HSV1-UL19-1114 | + | AGAGCCAGGUUGGCGUUGUC | 20 | 1500 |
| HSV1-UL19-1115 | + | AAGAGCCAGGUUGGCGUUGU | 20 | 1501 |
| HSV1-UL19-1116 | + | GUGCAGCUCAAGAGCCAGGU | 20 | 1502 |
| HSV1-UL19-1117 | + | CGGGGUGCAGCUCAAGAGCC | 20 | 1503 |
| HSV1-UL19-1118 | + | CCACAAAGAAGUCGAACGCG | 20 | 1504 |
| HSV1-UL19-1119 | + | CCCACAAAGAAGUCGAACGC | 20 | 1505 |
| HSV1-UL19-1120 | + | CCCCACAAAGAAGUCGAACG | 20 | 1506 |
| HSV1-UL19-1121 | + | CCCCCCCGGCAGCUCCACGU | 20 | 1507 |
| HSV1-UL19-1122 | + | GCCGGGGGAACGUCCCCCCC | 20 | 1508 |
| HSV1-UL19-1123 | + | AUCUCCCCCGGGCCGGCCGG | 20 | 1509 |
| HSV1-UL19-1124 | + | GAUCUCCCCCGGGCCGGCCG | 20 | 1510 |
| HSV1-UL19-1125 | + | GGAUCUCCCCCGGGCCGGCC | 20 | 1511 |
| HSV1-UL19-1126 | + | UGGAUCUCCCCCGGGCCGGC | 20 | 1512 |
| HSV1-UL19-1127 | + | GGCCUGGAUCUCCCCCGGGC | 20 | 1513 |
| HSV1-UL19-1128 | + | AGGUGGCCUGGAUCUCCCCC | 20 | 1514 |
| HSV1-UL19-1129 | + | CAGGUGGCCUGGAUCUCCCC | 20 | 1515 |
| HSV1-UL19-1130 | + | UCACCACGCGCCAGGUGGCC | 20 | 1516 |
| HSV1-UL19-1131 | + | GCCGUUCACCACGCGCCAGG | 20 | 1517 |
| HSV1-UL19-1132 | + | GUUGCCGUUCACCACGCGCC | 20 | 1518 |
| HSV1-UL19-1133 | + | GCCGCCGGACAUAGCGCCAG | 20 | 1519 |
| HSV1-UL19-1134 | + | CGCCGCCGGACAUAGCGCCA | 20 | 1520 |
| HSV1-UL19-1135 | + | ACGCCGCCGGACAUAGCGCC | 20 | 1521 |
| HSV1-UL19-1136 | + | CGGGCGUCCCGGAACGCCGC | 20 | 1522 |
| HSV1-UL19-1137 | + | GCUCCAGGCCCCGGGCGUCC | 20 | 1523 |
| HSV1-UL19-1138 | + | CACCCCCAGCUCCAGGCCCC | 20 | 1524 |
| HSV1-UL19-1139 | + | CCACCCCCAGCUCCAGGCCC | 20 | 1525 |
| HSV1-UL19-1140 | + | GGCGUCCCACCCCCAGCUCC | 20 | 1526 |
| HSV1-UL19-1141 | + | UGGUGGCGGGGGCCAUGGCG | 20 | 1527 |
| HSV1-UL19-1142 | + | GGCGAUGGUGGCGGGGGCCA | 20 | 1528 |
| HSV1-UL19-1143 | + | AACGGCGGCGAUGGUGGCGG | 20 | 1529 |
| HSV1-UL19-1144 | + | GAACGGCGGCGAUGGUGGCG | 20 | 1530 |
| HSV1-UL19-1145 | + | CGAACGGCGGCGAUGGUGGC | 20 | 1531 |
| HSV1-UL19-1146 | + | GCGAACGGCGGCGAUGGUGG | 20 | 1532 |
| HSV1-UL19-1147 | + | CCCGCGAACGGCGGCGAUGG | 20 | 1533 |
| HSV1-UL19-1148 | + | CGCCCCGCGAACGGCGGCGA | 20 | 1534 |
| HSV1-UL19-1149 | + | GUCGAACGCCCCGCGAACGG | 20 | 1535 |
| HSV1-UL19-1150 | + | GUCGUCGAACGCCCCGCGAA | 20 | 1536 |
| HSV1-UL19-1151 | + | AAAACACCGCCGGGUAGUUG | 20 | 1537 |
| HSV1-UL19-1152 | + | GCAGCAGGUAAAACACCGCC | 20 | 1538 |
| HSV1-UL19-1153 | + | UGCAGCAGGUAAAACACCGC | 20 | 1539 |
| HSV1-UL19-1154 | + | CGUGUAUGGCGGCCUGCAGC | 20 | 1540 |
| HSV1-UL19-1155 | + | GUGCUCGCUGCCGUGUAUGG | 20 | 1541 |
| HSV1-UL19-1156 | + | GACGUGCUCGCUGCCGUGUA | 20 | 1542 |
| HSV1-UL19-1157 | + | CUGGACCACGAGCCGGGCCA | 20 | 1543 |
| HSV1-UL19-1158 | + | ACUGGACCACGAGCCGGGCC | 20 | 1544 |
| HSV1-UL19-1159 | + | GAUGCACUGGACCACGAGCC | 20 | 1545 |
| HSV1-UL19-1160 | + | UGAUGCACUGGACCACGAGC | 20 | 1546 |
| HSV1-UL19-1161 | + | UCCAGUAGCUGGUGAUGCAC | 20 | 1547 |
| HSV1-UL19-1162 | + | CCGCGUGUUGUUCCAGUAGC | 20 | 1548 |
| HSV1-UL19-1163 | + | GGGAAGGUCUCCCCCGAGGU | 20 | 1549 |
| HSV1-UL19-1164 | + | CCUCGGGAAGGUCUCCCCCG | 20 | 1550 |
| HSV1-UL19-1165 | + | CGGCCAUGCACUCCUCGGGA | 20 | 1551 |
| HSV1-UL19-1166 | + | UACACGGCCAUGCACUCCUC | 20 | 1552 |
| HSV1-UL19-1167 | + | GUACACGGCCAUGCACUCCU | 20 | 1553 |
| HSV1-UL19-1168 | + | CGCCACCAGGUCCCGGUACA | 20 | 1554 |
| HSV1-UL19-1169 | + | CGACGUGCGCCACCAGGUCC | 20 | 1555 |
| HSV1-UL19-1170 | + | GGGCCUCGACGUGCGCCACC | 20 | 1556 |
| HSV1-UL19-1171 | + | GUCAUCAACCAGCUGGGCCA | 20 | 1557 |
| HSV1-UL19-1172 | + | AGUCAUCAACCAGCUGGGCC | 20 | 1558 |
| HSV1-UL19-1173 | + | GGUAAAGUCAUCAACCAGCU | 20 | 1559 |
| HSV1-UL19-1174 | + | GGGUAAAGUCAUCAACCAGC | 20 | 1560 |
| HSV1-UL19-1175 | + | GCCCAGCUCCGGGCCGGUCA | 20 | 1561 |
| HSV1-UL19-1176 | + | CGCCCAGCUCCGGGCCGGUC | 20 | 1562 |
| HSV1-UL19-1177 | + | CUGCCCGCCCAGCUCCGGGC | 20 | 1563 |
| HSV1-UL19-1178 | + | GCGCCUGCCCGCCCAGCUCC | 20 | 1564 |
| HSV1-UL19-1179 | + | UGCGCCUGCCCGCCCAGCUC | 20 | 1565 |
| HSV1-UL19-1180 | + | UCGCAUUAGGUGAUUCAGCU | 20 | 1566 |
| HSV1-UL19-1181 | + | GCAGCGCCGGGUCUCGCAUU | 20 | 1567 |
| HSV1-UL19-1182 | + | CGAGGGGUGGCAGCAGCGCC | 20 | 1568 |
| HSV1-UL19-1183 | + | ACGAGGGGUGGCAGCAGCGC | 20 | 1569 |
| HSV1-UL19-1184 | + | UCACAGUCCCACACGAGGGG | 20 | 1570 |
| HSV1-UL19-1185 | + | GCGUCACAGUCCCACACGAG | 20 | 1571 |
| HSV1-UL19-1186 | + | GGCGUCACAGUCCCACACGA | 20 | 1572 |
| HSV1-UL19-1187 | + | GGGCGUCACAGUCCCACACG | 20 | 1573 |
| HSV1-UL19-1188 | + | CAGGGCCGCGCGCCGCAUCA | 20 | 1574 |
| HSV1-UL19-1189 | + | CCAGGGCCGCGCGCCGCAUC | 20 | 1575 |
| HSV1-UL19-1190 | + | GCAGUCGCGAUGGCGGUCCA | 20 | 1576 |
| HSV1-UL19-1191 | + | GGCAGUCGCGAUGGCGGUCC | 20 | 1577 |
| HSV1-UL19-1192 | + | UAACCCGGCAGUCGCGAUGG | 20 | 1578 |
| HSV1-UL19-1193 | + | CGCUAACCCGGCAGUCGCGA | 20 | 1579 |
| HSV1-UL19-1194 | + | CGUGGCCCCCCGCGCUAACC | 20 | 1580 |
| HSV1-UL19-1195 | + | CCGCCGCGUACACGGGGUCG | 20 | 1581 |
| HSV1-UL19-1196 | + | UACAUGCCGCCGCGUACACG | 20 | 1582 |
| HSV1-UL19-1197 | + | UUACAUGCCGCCGCGUACAC | 20 | 1583 |
| HSV1-UL19-1198 | + | GUUACAUGCCGCCGCGUACA | 20 | 1584 |
| HSV1-UL19-1199 | + | GUCGUUGCGGUUGAAGUCCG | 20 | 1585 |
| HSV1-UL19-1200 | + | GCAGCAGCUGGCCGUCGUUG | 20 | 1586 |
| HSV1-UL19-1201 | + | CCUGGGUGUUGUGCAGCAGC | 20 | 1587 |
| HSV1-UL19-1202 | + | GGCGUCCGCGGCUCGGGCCU | 20 | 1588 |
| HSV1-UL19-1203 | + | CGGCGUCCGCGGCUCGGGCC | 20 | 1589 |
| HSV1-UL19-1204 | + | AUCCGCGGCGUCCGCGGCUC | 20 | 1590 |
| HSV1-UL19-1205 | + | CAUCCGCGGCGUCCGCGGCU | 20 | 1591 |
| HSV1-UL19-1206 | + | CCGGUCAUCCGCGGCGUCCG | 20 | 1592 |
| HSV1-UL19-1207 | + | CCGGUGCGGCCGGUCAUCCG | 20 | 1593 |
| HSV1-UL19-1208 | + | AGUCCGCCCCCCGGUGCGGC | 20 | 1594 |
| HSV1-UL19-1209 | + | GUCCAGUCCGCCCCCCGGUG | 20 | 1595 |
| HSV1-UL19-1210 | + | GCACGGUCCAGUCCGCCCCC | 20 | 1596 |
| HSV1-UL19-1211 | + | GUAGUAAAUCUUGUGGUGCA | 20 | 1597 |
| HSV1-UL19-1212 | + | UCACGUAGUAGUAAAUCUUG | 20 | 1598 |
| HSV1-UL19-1213 | + | CAGCGGCCCCGCGAGAAGGC | 20 | 1599 |
| HSV1-UL19-1214 | + | GCAGCGGCCCCGCGAGAAGG | 20 | 1600 |
| HSV1-UL19-1215 | + | GCAGCAGCGGCCCCGCGAGA | 20 | 1601 |
| HSV1-UL19-1216 | + | GAACCCCCGCGGUGCAGCAG | 20 | 1602 |
| HSV1-UL19-1217 | + | GCGGUCGAAGCGAACCCCCG | 20 | 1603 |
| HSV1-UL19-1218 | + | UCUGCAGGGUGGCGUAUACG | 20 | 1604 |
| HSV1-UL19-1219 | + | GACCACCAUGUUCUGCAGGG | 20 | 1605 |
| HSV1-UL19-1220 | + | CGGGACCACCAUGUUCUGCA | 20 | 1606 |
| HSV1-UL19-1221 | + | CCGGGACCACCAUGUUCUGC | 20 | 1607 |
| HSV1-UL19-1222 | + | CCUCGCCGGGGGCGAUCUCC | 20 | 1608 |
| HSV1-UL19-1223 | + | UCCUCGCCGGGGGCGAUCUC | 20 | 1609 |
| HSV1-UL19-1224 | + | GCUGGGGCACUCCUCGCCGG | 20 | 1610 |
| HSV1-UL19-1225 | + | CGCUGGGGCACUCCUCGCCG | 20 | 1611 |
| HSV1-UL19-1226 | + | UCGCUGGGGCACUCCUCGCC | 20 | 1612 |
| HSV1-UL19-1227 | + | GUCGCUGGGGCACUCCUCGC | 20 | 1613 |
| HSV1-UL19-1228 | + | GGUCCGUCACGGGGUCGCUG | 20 | 1614 |
| HSV1-UL19-1229 | + | GGGUCCGUCACGGGGUCGCU | 20 | 1615 |
| HSV1-UL19-1230 | + | GGGGUCCGUCACGGGGUCGC | 20 | 1616 |
| HSV1-UL19-1231 | + | GGUGCGCGGGGUCCGUCACG | 20 | 1617 |
| HSV1-UL19-1232 | + | GGGUGCGCGGGGUCCGUCAC | 20 | 1618 |
| HSV1-UL19-1233 | + | GGGGUGCGCGGGGUCCGUCA | 20 | 1619 |
| HSV1-UL19-1234 | + | CCGGGUGCAGGGGGUGCGCG | 20 | 1620 |
| HSV1-UL19-1235 | + | GCCGGGUGCAGGGGGUGCGC | 20 | 1621 |
| HSV1-UL19-1236 | + | GGCCGGGUGCAGGGGGUGCG | 20 | 1622 |
| HSV1-UL19-1237 | + | CCAGAUUGGCCGGGUGCAGG | 20 | 1623 |
| HSV1-UL19-1238 | + | ACCAGAUUGGCCGGGUGCAG | 20 | 1624 |
| HSV1-UL19-1239 | + | CACCAGAUUGGCCGGGUGCA | 20 | 1625 |
| HSV1-UL19-1240 | + | CCACCAGAUUGGCCGGGUGC | 20 | 1626 |
| HSV1-UL19-1241 | + | UGUUGGCCACCAGAUUGGCC | 20 | 1627 |
| HSV1-UL19-1242 | + | GUGUUGGCCACCAGAUUGGC | 20 | 1628 |
| HSV1-UL19-1243 | + | GACCGUGUUGGCCACCAGAU | 20 | 1629 |
| HSV1-UL19-1244 | + | AAACAUGGCGUUGACCGUGU | 20 | 1630 |
| HSV1-UL19-1245 | + | CACGCGCCCGUUGUGAAACA | 20 | 1631 |
| HSV1-UL19-1246 | + | ACCUGCAGCGUGAGCAUGGC | 20 | 1632 |
| HSV1-UL19-1247 | + | CACCUGCAGCGUGAGCAUGG | 20 | 1633 |
| HSV1-UL19-1248 | + | CAGCACCUGCAGCGUGAGCA | 20 | 1634 |
| HSV1-UL19-1249 | + | UGUGCGUUCGGCCAUGUUGU | 20 | 1635 |
| HSV1-UL19-1250 | + | UUGUGCGUUCGGCCAUGUUG | 20 | 1636 |
| HSV1-UL19-1251 | + | GAGCAGCGCCGUUGUGCGUU | 20 | 1637 |
| HSV1-UL19-1252 | + | GCGGUGUUGGCGCCCGCGUC | 20 | 1638 |
| HSV1-UL19-1253 | + | CGCGGUGUUGGCGCCCGCGU | 20 | 1639 |
| HSV1-UL19-1254 | + | GUUGGUGGUGGACGCGGUGU | 20 | 1640 |
| HSV1-UL19-1255 | + | GCGCAUGUUGGUGGUGGACG | 20 | 1641 |
| HSV1-UL19-1256 | + | GAAUAUGCGCAUGUUGGUGG | 20 | 1642 |
| HSV1-UL19-1257 | + | GUCGAAUAUGCGCAUGUUGG | 20 | 1643 |
| HSV1-UL19-1258 | + | CCCGUCGAAUAUGCGCAUGU | 20 | 1644 |
| HSV1-UL19-1259 | + | GGGGGCCAUCAGCAGGAUUC | 20 | 1645 |
| HSV1-UL19-1260 | + | GAUGCUGGGGGGCCAUCAGC | 20 | 1646 |
| HSV1-UL19-1261 | + | GGUAUGGUCCAGAUGCUGGG | 20 | 1647 |
| HSV1-UL19-1262 | + | UGGUAUGGUCCAGAUGCUGG | 20 | 1648 |
| HSV1-UL19-1263 | + | AUGGUAUGGUCCAGAUGCUG | 20 | 1649 |
| HSV1-UL19-1264 | + | GAUGGUAUGGUCCAGAUGCU | 20 | 1650 |
| HSV1-UL19-1265 | + | GGAUGGUAUGGUCCAGAUGC | 20 | 1651 |
| HSV1-UL19-1266 | + | AGUCGCCAUUUUGGAUGGUA | 20 | 1652 |
| HSV1-UL19-1267 | + | AAAAUAGUCGCCAUUUUGGA | 20 | 1653 |
| HSV1-UL19-1268 | + | GGUAAAAAUAGUCGCCAUUU | 20 | 1654 |
| HSV1-UL19-1269 | + | ACAGCGCGUGGACGGGGAGG | 20 | 1655 |
| HSV1-UL19-1270 | + | AACAGCGCGUGGACGGGGAG | 20 | 1656 |
| HSV1-UL19-1271 | + | GAACAGCGCGUGGACGGGGA | 20 | 1657 |
| HSV1-UL19-1272 | + | CGAACAGCGCGUGGACGGGG | 20 | 1658 |
| HSV1-UL19-1273 | + | CGGCGAACAGCGCGUGGACG | 20 | 1659 |
| HSV1-UL19-1274 | + | CCGGCGAACAGCGCGUGGAC | 20 | 1660 |
| HSV1-UL19-1275 | + | CCCGGCGAACAGCGCGUGGA | 20 | 1661 |
| HSV1-UL19-1276 | + | CGGCCCCGGCGAACAGCGCG | 20 | 1662 |
| HSV1-UL19-1277 | + | GUUCGCCACGUGGUCGGCCC | 20 | 1663 |
| HSV1-UL19-1278 | + | GGGCGCGUUCGCCACGUGGU | 20 | 1664 |
| HSV1-UL19-1279 | + | AAUUGGGCGCGUUCGCCACG | 20 | 1665 |
| HSV1-UL19-1280 | + | CGCAGGGCCGGGGGGAAAUU | 20 | 1666 |
| HSV1-UL19-1281 | + | GCGCAGGGCCGGGGGGAAAU | 20 | 1667 |
| HSV1-UL19-1282 | + | ACAGGUCGCGCAGGGCCGGG | 20 | 1668 |
| HSV1-UL19-1283 | + | GACAGGUCGCGCAGGGCCGG | 20 | 1669 |
| HSV1-UL19-1284 | + | CGACAGGUCGCGCAGGGCCG | 20 | 1670 |
| HSV1-UL19-1285 | + | GCGACAGGUCGCGCAGGGCC | 20 | 1671 |
| HSV1-UL19-1286 | + | CGCGACAGGUCGCGCAGGGC | 20 | 1672 |
| HSV1-UL19-1287 | + | CUGCCGCGACAGGUCGCGCA | 20 | 1673 |
| HSV1-UL19-1288 | + | CCUGCCGCGACAGGUCGCGC | 20 | 1674 |
| HSV1-UL19-1289 | + | CCAGGGGGACCUGCCGCGAC | 20 | 1675 |
| HSV1-UL19-1290 | + | CCAGAGCCGGGGGGACCAGG | 20 | 1676 |
| HSV1-UL19-1291 | + | CCCAGAGCCGGGGGGACCAG | 20 | 1677 |
| HSV1-UL19-1292 | + | CCCCAGAGCCGGGGGGACCA | 20 | 1678 |
| HSV1-UL19-1293 | + | CCCCCAGAGCCGGGGGGACC | 20 | 1679 |
| HSV1-UL19-1294 | + | AGUUGGCCCCCAGAGCCGGG | 20 | 1680 |
| HSV1-UL19-1295 | + | UAGUUGGCCCCCAGAGCCGG | 20 | 1681 |
| HSV1-UL19-1296 | + | GUAGUUGGCCCCCAGAGCCG | 20 | 1682 |
| HSV1-UL19-1297 | + | AGUAGUUGGCCCCCAGAGCC | 20 | 1683 |
| HSV1-UL19-1298 | + | AAGUAGUUGGCCCCCAGAGC | 20 | 1684 |
| HSV1-UL19-1299 | + | UCGGAUCGACGAAAAGUAGU | 20 | 1685 |
| HSV1-UL19-1300 | + | CGUGCUGCACGACGGGCUGU | 20 | 1686 |
| HSV1-UL19-1301 | + | UCGCGGACGUGCUGCACGAC | 20 | 1687 |
| HSV1-UL19-1302 | + | CUCGCGGACGUGCUGCACGA | 20 | 1688 |
| HSV1-UL19-1303 | + | UCUCCCCGGCCGCGCUCUCG | 20 | 1689 |
| HSV1-UL19-1304 | + | GUAGGUCAGCGCGUUCUCCC | 20 | 1690 |
| HSV1-UL19-1305 | + | GUACCCCGCCAUGAGCGCGU | 20 | 1691 |
| HSV1-UL19-1306 | + | AGCUGAUGAUGCAAGGCCAC | 20 | 1692 |
| HSV1-UL19-1307 | + | GAGCUGAUGAUGCAAGGCCA | 20 | 1693 |
| HSV1-UL19-1308 | + | CGUCUUGAGCUGAUGAUGCA | 20 | 1694 |
| HSV1-UL19-1309 | + | UGAACCCAAACCCGGGAUGG | 20 | 1695 |
| HSV1-UL19-1310 | + | CGGUGAACCCAAACCCGGGA | 20 | 1696 |
| HSV1-UL19-1311 | + | ACGACGGUGAACCCAAACCC | 20 | 1697 |
| HSV1-UL19-1312 | + | GACGACGGUGAACCCAAACC | 20 | 1698 |
| HSV1-UL19-1313 | + | AAAGCGGUCCUGUCGGACGA | 20 | 1699 |
| HSV1-UL19-1314 | + | CAGUCACAAAGCGGUCCUGU | 20 | 1700 |
| HSV1-UL19-1315 | + | GCACGUUCUCAGUCACAAAG | 20 | 1701 |
| HSV1-UL19-1316 | + | GGGCCACCUGGAGCUGGCCC | 20 | 1702 |
| HSV1-UL19-1317 | + | CGUGCCGGGCCACCUGGAGC | 20 | 1703 |
| HSV1-UL19-1318 | + | CAGUUUCGUGCCGGGCCACC | 20 | 1704 |
| HSV1-UL19-1319 | + | CCCCCCGCCAGUUUCGUGCC | 20 | 1705 |
| HSV1-UL19-1320 | + | CCCCCCCGCCAGUUUCGUGC | 20 | 1706 |
| HSV1-UL19-1321 | + | GUCCACGUUCGCGCGCGGCU | 20 | 1707 |
| HSV1-UL19-1322 | + | GGUCCACGUUCGCGCGCGGC | 20 | 1708 |
| HSV1-UL19-1323 | + | CCCAGGUCCACGUUCGCGCG | 20 | 1709 |
| HSV1-UL19-1324 | + | CGGCGGUGUAGCCCACGCCC | 20 | 1710 |
| HSV1-UL19-1325 | + | GGUUGCCGUGGCCACGACGG | 20 | 1711 |
| HSV1-UL19-1326 | + | GACGGUUGCCGUGGCCACGA | 20 | 1712 |
| HSV1-UL19-1327 | + | GGGGUUGCGGACGGUUGCCG | 20 | 1713 |
| HSV1-UL19-1328 | + | GUCGGUGACGGGGUUGCGGA | 20 | 1714 |
| HSV1-UL19-1329 | + | CCAUGUCGGUGACGGGGUUG | 20 | 1715 |
| HSV1-UL19-1330 | + | GGUUGCCCAUGUCGGUGACG | 20 | 1716 |
| HSV1-UL19-1331 | + | AGGUUGCCCAUGUCGGUGAC | 20 | 1717 |
| HSV1-UL19-1332 | + | AAGGUUGCCCAUGUCGGUGA | 20 | 1718 |
| HSV1-UL19-1333 | + | UUGGGGAAGGUUGCCCAUGU | 20 | 1719 |
| HSV1-UL19-1334 | + | CCAGGUAAAAGUUUUGGGGA | 20 | 1720 |
| HSV1-UL19-1335 | + | CGGCCCAGGUAAAAGUUUUG | 20 | 1721 |
| HSV1-UL19-1336 | + | GCGGCCCAGGUAAAAGUUUU | 20 | 1722 |
| HSV1-UL19-1337 | + | CGCGGCCCAGGUAAAAGUUU | 20 | 1723 |
| HSV1-UL19-1338 | + | GAGGGGGAGCCCCGCGGCCC | 20 | 1724 |
| HSV1-UL19-1339 | + | CCAGGAGAGGGGGAGCCCCG | 20 | 1725 |
| HSV1-UL19-1340 | + | GCCGCGUUGUCCAGGAGAGG | 20 | 1726 |
| HSV1-UL19-1341 | + | UGCCGCGUUGUCCAGGAGAG | 20 | 1727 |
| HSV1-UL19-1342 | + | CUGCCGCGUUGUCCAGGAGA | 20 | 1728 |
| HSV1-UL19-1343 | + | GCUGCCGCGUUGUCCAGGAG | 20 | 1729 |
| HSV1-UL19-1344 | + | ACACGGCUGCCGCGUUGUCC | 20 | 1730 |
| HSV1-UL19-1345 | + | GACCGCGUUCCGCAGGUACA | 20 | 1731 |
| HSV1-UL19-1346 | + | CCGCCACGACCGCGUUCCGC | 20 | 1732 |
| HSV1-UL19-1347 | + | CGGGCUGGGCCGGCCCCAGG | 20 | 1733 |
| HSV1-UL19-1348 | + | GGACGGGCUGGGCCGGCCCC | 20 | 1734 |
| HSV1-UL19-1349 | + | AACACGGGGACGGGCUGGGC | 20 | 1735 |
| HSV1-UL19-1350 | + | CCCGAACACGGGGACGGGCU | 20 | 1736 |
| HSV1-UL19-1351 | + | ACCCGAACACGGGGACGGGC | 20 | 1737 |
| HSV1-UL19-1352 | + | GCGCACCCGAACACGGGGAC | 20 | 1738 |
| HSV1-UL19-1353 | + | GGCGCACCCGAACACGGGGA | 20 | 1739 |
| HSV1-UL19-1354 | + | CCUGGGCGCACCCGAACACG | 20 | 1740 |
| HSV1-UL19-1355 | + | ACCUGGGCGCACCCGAACAC | 20 | 1741 |
| HSV1-UL19-1356 | + | CACCUGGGCGCACCCGAACA | 20 | 1742 |
| HSV1-UL19-1357 | + | CCCUGCGCGCCGCGGCACCU | 20 | 1743 |
| HSV1-UL19-1358 | + | UCCCUGCGCGCCGCGGCACC | 20 | 1744 |
| HSV1-UL19-1359 | + | UGGUCCAUCCCUGCGCGCCG | 20 | 1745 |
| HSV1-UL19-1360 | + | CACACACGGCGUCCUGGCCG | 20 | 1746 |
| HSV1-UL19-1361 | + | UAAACUCACACACGGCGUCC | 20 | 1747 |
| HSV1-UL19-1362 | + | GGUGGCGAUAAACUCACACA | 20 | 1748 |
| HSV1-UL19-1363 | + | GACGUCGGUCGACACGGGGG | 20 | 1749 |
| HSV1-UL19-1364 | + | GUUGACGUCGGUCGACACGG | 20 | 1750 |
| HSV1-UL19-1365 | + | AGUUGACGUCGGUCGACACG | 20 | 1751 |
| HSV1-UL19-1366 | + | UAGUUGACGUCGGUCGACAC | 20 | 1752 |
| HSV1-UL19-1367 | + | GUAGUUGACGUCGGUCGACA | 20 | 1753 |
| HSV1-UL19-1368 | + | CCGGCGGAAGUAGUUGACGU | 20 | 1754 |
| HSV1-UL19-1369 | + | CCCGGGGGUUGCAGGGCCGG | 20 | 1755 |
| HSV1-UL19-1370 | + | GUCCCCGGGGGUUGCAGGGC | 20 | 1756 |
| HSV1-UL19-1371 | + | GCGCGUCCCCGGGGGUUGCA | 20 | 1757 |
| HSV1-UL19-1372 | + | GGCGCGUCCCCGGGGGUUGC | 20 | 1758 |
| HSV1-UL19-1373 | + | CCCCGGCGGCGCGUCCCCGG | 20 | 1759 |
| HSV1-UL19-1374 | + | CCCCCGGCGGCGCGUCCCCG | 20 | 1760 |
| HSV1-UL19-1375 | + | GCCCCCGGCGGCGCGUCCCC | 20 | 1761 |
| HSV1-UL19-1376 | + | CGCCCCCGGCGGCGCGUCCC | 20 | 1762 |
| HSV1-UL19-1377 | + | CCCCGCGUAAACGCCCCCGG | 20 | 1763 |
| HSV1-UL19-1378 | + | GUCCCCCGCGUAAACGCCCC | 20 | 1764 |
| HSV1-UL19-1379 | + | GCCGUGGUCGUACAUGAGGG | 20 | 1765 |
| HSV1-UL19-1380 | + | CUGGCCGUGGUCGUACAUGA | 20 | 1766 |
| HSV1-UL19-1381 | + | UCUGGCCGUGGUCGUACAUG | 20 | 1767 |
| HSV1-UL19-1382 | + | GGGACGGGUCGCUCUGGCCG | 20 | 1768 |
| HSV1-UL19-1383 | + | AGGCCCGGGACGGGUCGCUC | 20 | 1769 |
| HSV1-UL19-1384 | + | UGGCCGCGAAGGCCCGGGAC | 20 | 1770 |
| HSV1-UL19-1385 | + | GUGGCCGCGAAGGCCCGGGA | 20 | 1771 |
| HSV1-UL19-1386 | + | GGCCGUGGCCGCGAAGGCCC | 20 | 1772 |
| HSV1-UL19-1387 | + | UGGCCGUGGCCGCGAAGGCC | 20 | 1773 |
| HSV1-UL19-1388 | + | CGGGUUGGCCGUGGCCGCGA | 20 | 1774 |
| HSV1-UL19-1389 | + | CGACGCCCACGGGUUGGCCG | 20 | 1775 |
| HSV1-UL19-1390 | + | UCGCUGCGACGCCCACGGGU | 20 | 1776 |
| HSV1-UL19-1391 | + | AAAAUCGCUGCGACGCCCAC | 20 | 1777 |
| HSV1-UL19-1392 | + | GAAAAUCGCUGCGACGCCCA | 20 | 1778 |
| HSV1-UL19-1393 | + | GGUAGGCCCCGUUAUAGAGC | 20 | 1779 |
| HSV1-UL19-1394 | + | CGAGGCCCCGUUGAGGUGGU | 20 | 1780 |
| HSV1-UL19-1395 | + | CCGGCGAGGCCCCGUUGAGG | 20 | 1781 |
| HSV1-UL19-1396 | + | GCACCGGCGAGGCCCCGUUG | 20 | 1782 |
| HSV1-UL19-1397 | + | GCAGGGGCUGAGCACCGGCG | 20 | 1783 |
| HSV1-UL19-1398 | + | UUAAAGCAGGGGCUGAGCAC | 20 | 1784 |
| HSV1-UL19-1399 | + | ACGUAAAGAACUUAAAGCAG | 20 | 1785 |
| HSV1-UL19-1400 | + | GACGUAAAGAACUUAAAGCA | 20 | 1786 |
| HSV1-UL19-1401 | + | CGACGUAAAGAACUUAAAGC | 20 | 1787 |
| HSV1-UL19-1402 | + | GCGAUGUUUGGCGGCGAUGU | 20 | 1788 |
| HSV1-UL19-1403 | + | CUCCAGGCAGCGAUGUUUGG | 20 | 1789 |
| HSV1-UL19-1404 | + | GCGCUCCAGGCAGCGAUGUU | 20 | 1790 |
| HSV1-UL19-1405 | + | UCUCCACGAUCAGGCGCUCC | 20 | 1791 |
| HSV1-UL19-1406 | + | CCGAACCCGUCUCCACGAUC | 20 | 1792 |
| HSV1-UL19-1407 | + | GUCGCUGGCGGCGGUGGCCG | 20 | 1793 |
| HSV1-UL19-1408 | + | CUGUACGUCGCUGGCGGCGG | 20 | 1794 |
| HSV1-UL19-1409 | + | AAACUGUACGUCGCUGGCGG | 20 | 1795 |
| HSV1-UL19-1410 | + | CUUAAACUGUACGUCGCUGG | 20 | 1796 |
| HSV1-UL19-1411 | + | GCGCUUAAACUGUACGUCGC | 20 | 1797 |
| HSV1-UL19-1412 | + | CGAGUUCGCGGCACCCCGGG | 20 | 1798 |
| HSV1-UL19-1413 | + | ACGAGUUCGCGGCACCCCGG | 20 | 1799 |
| HSV1-UL19-1414 | + | CACGAGUUCGCGGCACCCCG | 20 | 1800 |
| HSV1-UL19-1415 | + | CCACGAGUUCGCGGCACCCC | 20 | 1801 |
| HSV1-UL19-1416 | + | UCCACGAGUUCGCGGCACCC | 20 | 1802 |
| HSV1-UL19-1417 | + | ACGGGUCCUCCACGAGUUCG | 20 | 1803 |
| HSV1-UL19-1418 | + | CCUCCUGAAACAGGCCACAC | 20 | 1804 |
| HSV1-UL19-1419 | + | GCCUCCUGAAACAGGCCACA | 20 | 1805 |
| HSV1-UL19-1420 | + | GCGGGUAGGCCUCCUGAAAC | 20 | 1806 |
| HSV1-UL19-1421 | + | GCUGGCGCAGGUGAGCGGGU | 20 | 1807 |
| HSV1-UL19-1422 | + | GGUCGCUGGCGCAGGUGAGC | 20 | 1808 |
| HSV1-UL19-1423 | + | GGGUCGCUGGCGCAGGUGAG | 20 | 1809 |
| HSV1-UL19-1424 | + | GAGGGCGGGGUCGCUGGCGC | 20 | 1810 |
| HSV1-UL19-1425 | + | GCGGAGGAGGGCGGGGUCGC | 20 | 1811 |
| HSV1-UL19-1426 | + | GGGCACUGCGGAGGAGGGCG | 20 | 1812 |
| HSV1-UL19-1427 | + | CGGGCACUGCGGAGGAGGGC | 20 | 1813 |
| HSV1-UL19-1428 | + | GCGGGCACUGCGGAGGAGGG | 20 | 1814 |
| HSV1-UL19-1429 | + | GUUGCGGGCACUGCGGAGGA | 20 | 1815 |
| HSV1-UL19-1430 | + | CGUUGCGGGCACUGCGGAGG | 20 | 1816 |
| HSV1-UL19-1431 | + | CCCCGUUGCGGGCACUGCGG | 20 | 1817 |
| HSV1-UL19-1432 | + | CUUCCCCGUUGCGGGCACUG | 20 | 1818 |
| HSV1-UL19-1433 | + | CGCGUGGGCUUCCCCGUUGC | 20 | 1819 |
| HSV1-UL19-1434 | + | GCGCGUGGGCUUCCCCGUUG | 20 | 1820 |
| HSV1-UL19-1435 | + | GAAGUGGGUCUCCCGCGCGU | 20 | 1821 |
| HSV1-UL19-1436 | + | CGAAGUGGGUCUCCCGCGCG | 20 | 1822 |
| HSV1-UL19-1437 | + | GACGAGAUACUGCGCGAAGU | 20 | 1823 |
| HSV1-UL19-1438 | + | AGACGAGAUACUGCGCGAAG | 20 | 1824 |
| HSV1-UL19-1439 | + | CAGAGCCAGUCCCUUGAGCG | 20 | 1825 |
| HSV1-UL19-1440 | + | ACAGAGCCAGUCCCUUGAGC | 20 | 1826 |
| HSV1-UL19-1441 | + | UACAGAGCCAGUCCCUUGAG | 20 | 1827 |
| HSV1-UL19-1442 | + | ACGCCCCGAGGACGGCC | 17 | 1828 |
| HSV1-UL19-1443 | + | CUCAAACGCCCCGAGGA | 17 | 1829 |
| HSV1-UL19-1444 | + | CGCGCUCAAACGCCCCG | 17 | 1830 |
| HSV1-UL19-1445 | + | CACGUGCAGCAUCUGGU | 17 | 1831 |
| HSV1-UL19-1446 | + | GCAGCACGUGCAGCAUC | 17 | 1832 |
| HSV1-UL19-1447 | + | AACAACAAAGCCAGGGG | 17 | 1833 |
| HSV1-UL19-1448 | + | GGCAACAACAAAGCCAG | 17 | 1834 |
| HSV1-UL19-1449 | + | CGGCAACAACAAAGCCA | 17 | 1835 |
| HSV1-UL19-1450 | + | UCGGCAACAACAAAGCC | 17 | 1836 |
| HSV1-UL19-1451 | + | UCCAGGUAUCGUUGCAU | 17 | 1837 |
| HSV1-UL19-1452 | + | CCAGGCGGCCGUUGUCC | 17 | 1838 |
| HSV1-UL19-1453 | + | CCACCCUGGUGGCCAGG | 17 | 1839 |
| HSV1-UL19-1454 | + | GGGCCACCCUGGUGGCC | 17 | 1840 |
| HSV1-UL19-1455 | + | CGCCCGGGCCACCCUGG | 17 | 1841 |
| HSV1-UL19-1456 | + | GGUCGCCCGGGCCACCC | 17 | 1842 |
| HSV1-UL19-1457 | + | GGCGACCAGGGUCGCCC | 17 | 1843 |
| HSV1-UL19-1458 | + | CGGCGACCAGGGUCGCC | 17 | 1844 |
| HSV1-UL19-1459 | + | CUUUAGCUCGGCGACCA | 17 | 1845 |
| HSV1-UL19-1460 | + | GCUUUAGCUCGGCGACC | 17 | 1846 |
| HSV1-UL19-1461 | + | GAAGCUUCGCUUUAGCU | 17 | 1847 |
| HSV1-UL19-1462 | + | GGUGGCCCGCCUUGCCC | 17 | 1848 |
| HSV1-UL19-1463 | + | CGACGGCCUCCCGGCGG | 17 | 1849 |
| HSV1-UL19-1464 | + | CCUCGACGGCCUCCCGG | 17 | 1850 |
| HSV1-UL19-1465 | + | AGGCCUCGACGGCCUCC | 17 | 1851 |
| HSV1-UL19-1466 | + | CACGAGCCAGGCCUCGA | 17 | 1852 |
| HSV1-UL19-1467 | + | GGUGAGGUCCACGAGCC | 17 | 1853 |
| HSV1-UL19-1468 | + | GCUGCGUGGCCGUGGUG | 17 | 1854 |
| HSV1-UL19-1469 | + | GGAGGGCUGCGUGGCCG | 17 | 1855 |
| HSV1-UL19-1470 | + | GGCCACGGAGGGCUGCG | 17 | 1856 |
| HSV1-UL19-1471 | + | CGGGGCACGGCCACGGA | 17 | 1857 |
| HSV1-UL19-1472 | + | ACGGGGCACGGCCACGG | 17 | 1858 |
| HSV1-UL19-1473 | + | CAGACGGGGCACGGCCA | 17 | 1859 |
| HSV1-UL19-1474 | + | AUGCGUCAGACGGGGCA | 17 | 1860 |
| HSV1-UL19-1475 | + | UCGGCAUGCGUCAGACG | 17 | 1861 |
| HSV1-UL19-1476 | + | GUCGGCAUGCGUCAGAC | 17 | 1862 |
| HSV1-UL19-1477 | + | UGUCGGCAUGCGUCAGA | 17 | 1863 |
| HSV1-UL19-1478 | + | CGGCCGCCCGCGCGUGU | 17 | 1864 |
| HSV1-UL19-1479 | + | ACGAGCACCCCGUCGAC | 17 | 1865 |
| HSV1-UL19-1480 | + | CUGUUUGAUCGGGGCGG | 17 | 1866 |
| HSV1-UL19-1481 | + | GCGCUGUUUGAUCGGGG | 17 | 1867 |
| HSV1-UL19-1482 | + | GAGGCGCUGUUUGAUCG | 17 | 1868 |
| HSV1-UL19-1483 | + | GGAGGCGCUGUUUGAUC | 17 | 1869 |
| HSV1-UL19-1484 | + | AGGAGGCGCUGUUUGAU | 17 | 1870 |
| HSV1-UL19-1485 | + | UCAGGAAGGACUGCAGG | 17 | 1871 |
| HSV1-UL19-1486 | + | CUUUCAGGAAGGACUGC | 17 | 1872 |
| HSV1-UL19-1487 | + | GUCCUCCACUUUCAGGA | 17 | 1873 |
| HSV1-UL19-1488 | + | CGGUGUCCUCCACUUUC | 17 | 1874 |
| HSV1-UL19-1489 | + | CACCGGCACGUCGGCUU | 17 | 1875 |
| HSV1-UL19-1490 | + | GUACGUCACCGGCACGU | 17 | 1876 |
| HSV1-UL19-1491 | + | AUCUCGCCGUACGUCAC | 17 | 1877 |
| HSV1-UL19-1492 | + | CCAGGUUGGCCCCGUUC | 17 | 1878 |
| HSV1-UL19-1493 | + | GAGCGCCGUGACCAGGU | 17 | 1879 |
| HSV1-UL19-1494 | + | UCACGAGCGCCGUGACC | 17 | 1880 |
| HSV1-UL19-1495 | + | GUCGUCCAGACUUCGCA | 17 | 1881 |
| HSV1-UL19-1496 | + | GCAUCUCCAGCAGGUGG | 17 | 1882 |
| HSV1-UL19-1497 | + | CCUGCAUCUCCAGCAGG | 17 | 1883 |
| HSV1-UL19-1498 | + | CCUCCUGCAUCUCCAGC | 17 | 1884 |
| HSV1-UL19-1499 | + | CCAGCGUCUGCCGGUUC | 17 | 1885 |
| HSV1-UL19-1500 | + | GCUCGUCCAGCGUCUGC | 17 | 1886 |
| HSV1-UL19-1501 | + | CACGCGCGUCGUCUGGG | 17 | 1887 |
| HSV1-UL19-1502 | + | GCACGCGCGUCGUCUGG | 17 | 1888 |
| HSV1-UL19-1503 | + | CGCACGCGCGUCGUCUG | 17 | 1889 |
| HSV1-UL19-1504 | + | GCGCACGCGCGUCGUCU | 17 | 1890 |
| HSV1-UL19-1505 | + | CGCGCACGCGCGUCGUC | 17 | 1891 |
| HSV1-UL19-1506 | + | GACCAGCUUCUCGCCGA | 17 | 1892 |
| HSV1-UL19-1507 | + | GUAGAUGCGCUUCUCCA | 17 | 1893 |
| HSV1-UL19-1508 | + | CGUAGAUGCGCUUCUCC | 17 | 1894 |
| HSV1-UL19-1509 | + | GUAGGGAACGUUGGUGG | 17 | 1895 |
| HSV1-UL19-1510 | + | GGGGUAGGGAACGUUGG | 17 | 1896 |
| HSV1-UL19-1511 | + | CAGGGGGUAGGGAACGU | 17 | 1897 |
| HSV1-UL19-1512 | + | GCGCCCACCAGGGGGUA | 17 | 1898 |
| HSV1-UL19-1513 | + | GGCGCCCACCAGGGGGU | 17 | 1899 |
| HSV1-UL19-1514 | + | CCAUGGCGCCCACCAGG | 17 | 1900 |
| HSV1-UL19-1515 | + | UCCAUGGCGCCCACCAG | 17 | 1901 |
| HSV1-UL19-1516 | + | GUCCAUGGCGCCCACCA | 17 | 1902 |
| HSV1-UL19-1517 | + | GGUCCAUGGCGCCCACC | 17 | 1903 |
| HSV1-UL19-1518 | + | GACGAACGUCAGGUCCA | 17 | 1904 |
| HSV1-UL19-1519 | + | GGGGCAGGACGAACGUC | 17 | 1905 |
| HSV1-UL19-1520 | + | UGAACAGGCCCAGGGGC | 17 | 1906 |
| HSV1-UL19-1521 | + | GGAUUGAACAGGCCCAG | 17 | 1907 |
| HSV1-UL19-1522 | + | CGGAUUGAACAGGCCCA | 17 | 1908 |
| HSV1-UL19-1523 | + | CCGGAUUGAACAGGCCC | 17 | 1909 |
| HSV1-UL19-1524 | + | CCAUGACCGGAUUGAAC | 17 | 1910 |
| HSV1-UL19-1525 | + | GCAAACCGUUCCAUGAC | 17 | 1911 |
| HSV1-UL19-1526 | + | UAGGUCCCCGGCGUGCG | 17 | 1912 |
| HSV1-UL19-1527 | + | GGCGGGGACUAGGUCCC | 17 | 1913 |
| HSV1-UL19-1528 | + | GGCCGGGGGCGGGGACU | 17 | 1914 |
| HSV1-UL19-1529 | + | CCGGGUGGCCGGGGGCG | 17 | 1915 |
| HSV1-UL19-1530 | + | UCCGGGUGGCCGGGGGC | 17 | 1916 |
| HSV1-UL19-1531 | + | AUCCGGGUGGCCGGGGG | 17 | 1917 |
| HSV1-UL19-1532 | + | GGGAUCCGGGUGGCCGG | 17 | 1918 |
| HSV1-UL19-1533 | + | GGGGAUCCGGGUGGCCG | 17 | 1919 |
| HSV1-UL19-1534 | + | CGGGGAUCCGGGUGGCC | 17 | 1920 |
| HSV1-UL19-1535 | + | GCGGGGAUCCGGGUGGC | 17 | 1921 |
| HSV1-UL19-1536 | + | AGGCGCGGGGAUCCGGG | 17 | 1922 |
| HSV1-UL19-1537 | + | GGAAGGCGCGGGGAUCC | 17 | 1923 |
| HSV1-UL19-1538 | + | GGGAAGGCGCGGGGAUC | 17 | 1924 |
| HSV1-UL19-1539 | + | CGGGGCGGGAAGGCGCG | 17 | 1925 |
| HSV1-UL19-1540 | + | GCGGGGCGGGAAGGCGC | 17 | 1926 |
| HSV1-UL19-1541 | + | GGCGGGGCGGGAAGGCG | 17 | 1927 |
| HSV1-UL19-1542 | + | CAGCUGGCGGGGCGGGA | 17 | 1928 |
| HSV1-UL19-1543 | + | AAAACAGCUGGCGGGGC | 17 | 1929 |
| HSV1-UL19-1544 | + | AAAAACAGCUGGCGGGG | 17 | 1930 |
| HSV1-UL19-1545 | + | CAAAAAAACAGCUGGCG | 17 | 1931 |
| HSV1-UL19-1546 | + | CCAAAAAAACAGCUGGC | 17 | 1932 |
| HSV1-UL19-1547 | + | CCCAAAAAAACAGCUGG | 17 | 1933 |
| HSV1-UL19-1548 | + | UCCCCCAAAAAAACAGC | 17 | 1934 |
| HSV1-UL19-1549 | + | ACAGGCGCAGCACCUGG | 17 | 1935 |
| HSV1-UL19-1550 | + | GAGACAGGCGCAGCACC | 17 | 1936 |
| HSV1-UL19-1551 | + | UCGCGUGUUCCAGAGAC | 17 | 1937 |
| HSV1-UL19-1552 | + | CAGCGAAGGGUGGCACA | 17 | 1938 |
| HSV1-UL19-1553 | + | CGUUCAUCAGCGAAGGG | 17 | 1939 |
| HSV1-UL19-1554 | + | CAACGUUCAUCAGCGAA | 17 | 1940 |
| HSV1-UL19-1555 | + | UCAACGUUCAUCAGCGA | 17 | 1941 |
| HSV1-UL19-1556 | + | CGACGGGGUCGCGGUUA | 17 | 1942 |
| HSV1-UL19-1557 | + | CGGCUUCGACGGGGUCG | 17 | 1943 |
| HSV1-UL19-1558 | + | GAUUGGCGGCUUCGACG | 17 | 1944 |
| HSV1-UL19-1559 | + | GGAUUGGCGGCUUCGAC | 17 | 1945 |
| HSV1-UL19-1560 | + | CGGAUUGGCGGCUUCGA | 17 | 1946 |
| HSV1-UL19-1561 | + | CGCCCCGUACGGAUUGG | 17 | 1947 |
| HSV1-UL19-1562 | + | GUACGCCCCGUACGGAU | 17 | 1948 |
| HSV1-UL19-1563 | + | GCCACGUACGCCCCGUA | 17 | 1949 |
| HSV1-UL19-1564 | + | UGCGGCGGGGCCGGCCG | 17 | 1950 |
| HSV1-UL19-1565 | + | CUGCGGCGGGGCCGGCC | 17 | 1951 |
| HSV1-UL19-1566 | + | UCUGCGGCGGGGCCGGC | 17 | 1952 |
| HSV1-UL19-1567 | + | CAUGUCUGCGGCGGGGC | 17 | 1953 |
| HSV1-UL19-1568 | + | GCUGCAUGUCUGCGGCG | 17 | 1954 |
| HSV1-UL19-1569 | + | UGCUGCAUGUCUGCGGC | 17 | 1955 |
| HSV1-UL19-1570 | + | CUGCUGCAUGUCUGCGG | 17 | 1956 |
| HSV1-UL19-1571 | + | CAGCUGCUGCAUGUCUG | 17 | 1957 |
| HSV1-UL19-1572 | + | GGCCAGGCGCUGCCCCC | 17 | 1958 |
| HSV1-UL19-1573 | + | GGACCCGCCCGUGGGCC | 17 | 1959 |
| HSV1-UL19-1574 | + | CCAUCGGACCCGCCCGU | 17 | 1960 |
| HSV1-UL19-1575 | + | CCCAUCGGACCCGCCCG | 17 | 1961 |
| HSV1-UL19-1576 | + | GGCCUUCCGCGACCCAU | 17 | 1962 |
| HSV1-UL19-1577 | + | ACUGCUCCGGGGUCAUC | 17 | 1963 |
| HSV1-UL19-1578 | + | CUGCAUAAACUGCUCCG | 17 | 1964 |
| HSV1-UL19-1579 | + | GCUGCAUAAACUGCUCC | 17 | 1965 |
| HSV1-UL19-1580 | + | GGCUGCAUAAACUGCUC | 17 | 1966 |
| HSV1-UL19-1581 | + | GCCAGGUUGGCGUUGUC | 17 | 1967 |
| HSV1-UL19-1582 | + | AGCCAGGUUGGCGUUGU | 17 | 1968 |
| HSV1-UL19-1583 | + | CAGCUCAAGAGCCAGGU | 17 | 1969 |
| HSV1-UL19-1584 | + | GGUGCAGCUCAAGAGCC | 17 | 1970 |
| HSV1-UL19-1585 | + | CAAAGAAGUCGAACGCG | 17 | 1971 |
| HSV1-UL19-1586 | + | ACAAAGAAGUCGAACGC | 17 | 1972 |
| HSV1-UL19-1587 | + | CACAAAGAAGUCGAACG | 17 | 1973 |
| HSV1-UL19-1588 | + | CCCCGGCAGCUCCACGU | 17 | 1974 |
| HSV1-UL19-1589 | + | GGGGGAACGUCCCCCCC | 17 | 1975 |
| HSV1-UL19-1590 | + | UCCCCCGGGCCGGCCGG | 17 | 1976 |
| HSV1-UL19-1591 | + | CUCCCCCGGGCCGGCCG | 17 | 1977 |
| HSV1-UL19-1592 | + | UCUCCCCCGGGCCGGCC | 17 | 1978 |
| HSV1-UL19-1593 | + | AUCUCCCCCGGGCCGGC | 17 | 1979 |
| HSV1-UL19-1594 | + | CUGGAUCUCCCCCGGGC | 17 | 1980 |
| HSV1-UL19-1595 | + | UGGCCUGGAUCUCCCCC | 17 | 1981 |
| HSV1-UL19-1596 | + | GUGGCCUGGAUCUCCCC | 17 | 1982 |
| HSV1-UL19-1597 | + | CCACGCGCCAGGUGGCC | 17 | 1983 |
| HSV1-UL19-1598 | + | GUUCACCACGCGCCAGG | 17 | 1984 |
| HSV1-UL19-1599 | + | GCCGUUCACCACGCGCC | 17 | 1985 |
| HSV1-UL19-1600 | + | GCCGGACAUAGCGCCAG | 17 | 1986 |
| HSV1-UL19-1601 | + | CGCCGGACAUAGCGCCA | 17 | 1987 |
| HSV1-UL19-1602 | + | CCGCCGGACAUAGCGCC | 17 | 1988 |
| HSV1-UL19-1603 | + | GCGUCCCGGAACGCCGC | 17 | 1989 |
| HSV1-UL19-1604 | + | CCAGGCCCCGGGCGUCC | 17 | 1990 |
| HSV1-UL19-1605 | + | CCCCAGCUCCAGGCCCC | 17 | 1991 |
| HSV1-UL19-1606 | + | CCCCCAGCUCCAGGCCC | 17 | 1992 |
| HSV1-UL19-1607 | + | GUCCCACCCCCAGCUCC | 17 | 1993 |
| HSV1-UL19-1608 | + | UGGCGGGGGCCAUGGCG | 17 | 1994 |
| HSV1-UL19-1609 | + | GAUGGUGGCGGGGGCCA | 17 | 1995 |
| HSV1-UL19-1610 | + | GGCGGCGAUGGUGGCGG | 17 | 1996 |
| HSV1-UL19-1611 | + | CGGCGGCGAUGGUGGCG | 17 | 1997 |
| HSV1-UL19-1612 | + | ACGGCGGCGAUGGUGGC | 17 | 1998 |
| HSV1-UL19-1613 | + | AACGGCGGCGAUGGUGG | 17 | 1999 |
| HSV1-UL19-1614 | + | GCGAACGGCGGCGAUGG | 17 | 2000 |
| HSV1-UL19-1615 | + | CCCGCGAACGGCGGCGA | 17 | 2001 |
| HSV1-UL19-1616 | + | GAACGCCCCGCGAACGG | 17 | 2002 |
| HSV1-UL19-1617 | + | GUCGAACGCCCCGCGAA | 17 | 2003 |
| HSV1-UL19-1618 | + | ACACCGCCGGGUAGUUG | 17 | 2004 |
| HSV1-UL19-1619 | + | GCAGGUAAAACACCGCC | 17 | 2005 |
| HSV1-UL19-1620 | + | AGCAGGUAAAACACCGC | 17 | 2006 |
| HSV1-UL19-1621 | + | GUAUGGCGGCCUGCAGC | 17 | 2007 |
| HSV1-UL19-1622 | + | CUCGCUGCCGUGUAUGG | 17 | 2008 |
| HSV1-UL19-1623 | + | GUGCUCGCUGCCGUGUA | 17 | 2009 |
| HSV1-UL19-1624 | + | GACCACGAGCCGGGCCA | 17 | 2010 |
| HSV1-UL19-1625 | + | GGACCACGAGCCGGGCC | 17 | 2011 |
| HSV1-UL19-1626 | + | GCACUGGACCACGAGCC | 17 | 2012 |
| HSV1-UL19-1627 | + | UGCACUGGACCACGAGC | 17 | 2013 |
| HSV1-UL19-1628 | + | AGUAGCUGGUGAUGCAC | 17 | 2014 |
| HSV1-UL19-1629 | + | CGUGUUGUUCCAGUAGC | 17 | 2015 |
| HSV1-UL19-1630 | + | AAGGUCUCCCCCGAGGU | 17 | 2016 |
| HSV1-UL19-1631 | + | CGGGAAGGUCUCCCCCG | 17 | 2017 |
| HSV1-UL19-1632 | + | CCAUGCACUCCUCGGGA | 17 | 2018 |
| HSV1-UL19-1633 | + | ACGGCCAUGCACUCCUC | 17 | 2019 |
| HSV1-UL19-1634 | + | CACGGCCAUGCACUCCU | 17 | 2020 |
| HSV1-UL19-1635 | + | CACCAGGUCCCGGUACA | 17 | 2021 |
| HSV1-UL19-1636 | + | CGUGCGCCACCAGGUCC | 17 | 2022 |
| HSV1-UL19-1637 | + | CCUCGACGUGCGCCACC | 17 | 2023 |
| HSV1-UL19-1638 | + | AUCAACCAGCUGGGCCA | 17 | 2024 |
| HSV1-UL19-1639 | + | CAUCAACCAGCUGGGCC | 17 | 2025 |
| HSV1-UL19-1640 | + | AAAGUCAUCAACCAGCU | 17 | 2026 |
| HSV1-UL19-1641 | + | UAAAGUCAUCAACCAGC | 17 | 2027 |
| HSV1-UL19-1642 | + | CAGCUCCGGGCCGGUCA | 17 | 2028 |
| HSV1-UL19-1643 | + | CCAGCUCCGGGCCGGUC | 17 | 2029 |
| HSV1-UL19-1644 | + | CCCGCCCAGCUCCGGGC | 17 | 2030 |
| HSV1-UL19-1645 | + | CCUGCCCGCCCAGCUCC | 17 | 2031 |
| HSV1-UL19-1646 | + | GCCUGCCCGCCCAGCUC | 17 | 2032 |
| HSV1-UL19-1647 | + | CAUUAGGUGAUUCAGCU | 17 | 2033 |
| HSV1-UL19-1648 | + | GCGCCGGGUCUCGCAUU | 17 | 2034 |
| HSV1-UL19-1649 | + | GGGGUGGCAGCAGCGCC | 17 | 2035 |
| HSV1-UL19-1650 | + | AGGGGUGGCAGCAGCGC | 17 | 2036 |
| HSV1-UL19-1651 | + | CAGUCCCACACGAGGGG | 17 | 2037 |
| HSV1-UL19-1652 | + | UCACAGUCCCACACGAG | 17 | 2038 |
| HSV1-UL19-1653 | + | GUCACAGUCCCACACGA | 17 | 2039 |
| HSV1-UL19-1654 | + | CGUCACAGUCCCACACG | 17 | 2040 |
| HSV1-UL19-1655 | + | GGCCGCGCGCCGCAUCA | 17 | 2041 |
| HSV1-UL19-1656 | + | GGGCCGCGCGCCGCAUC | 17 | 2042 |
| HSV1-UL19-1657 | + | GUCGCGAUGGCGGUCCA | 17 | 2043 |
| HSV1-UL19-1658 | + | AGUCGCGAUGGCGGUCC | 17 | 2044 |
| HSV1-UL19-1659 | + | CCCGGCAGUCGCGAUGG | 17 | 2045 |
| HSV1-UL19-1660 | + | UAACCCGGCAGUCGCGA | 17 | 2046 |
| HSV1-UL19-1661 | + | GGCCCCCCGCGCUAACC | 17 | 2047 |
| HSV1-UL19-1662 | + | CCGCGUACACGGGGUCG | 17 | 2048 |
| HSV1-UL19-1663 | + | AUGCCGCCGCGUACACG | 17 | 2049 |
| HSV1-UL19-1664 | + | CAUGCCGCCGCGUACAC | 17 | 2050 |
| HSV1-UL19-1665 | + | ACAUGCCGCCGCGUACA | 17 | 2051 |
| HSV1-UL19-1666 | + | GUUGCGGUUGAAGUCCG | 17 | 2052 |
| HSV1-UL19-1667 | + | GCAGCUGGCCGUCGUUG | 17 | 2053 |
| HSV1-UL19-1668 | + | GGGUGUUGUGCAGCAGC | 17 | 2054 |
| HSV1-UL19-1669 | + | GUCCGCGGCUCGGGCCU | 17 | 2055 |
| HSV1-UL19-1670 | + | CGUCCGCGGCUCGGGCC | 17 | 2056 |
| HSV1-UL19-1671 | + | CGCGGCGUCCGCGGCUC | 17 | 2057 |
| HSV1-UL19-1672 | + | CCGCGGCGUCCGCGGCU | 17 | 2058 |
| HSV1-UL19-1673 | + | GUCAUCCGCGGCGUCCG | 17 | 2059 |
| HSV1-UL19-1674 | + | GUGCGGCCGGUCAUCCG | 17 | 2060 |
| HSV1-UL19-1675 | + | CCGCCCCCCGGUGCGGC | 17 | 2061 |
| HSV1-UL19-1676 | + | CAGUCCGCCCCCCGGUG | 17 | 2062 |
| HSV1-UL19-1677 | + | CGGUCCAGUCCGCCCCC | 17 | 2063 |
| HSV1-UL19-1678 | + | GUAAAUCUUGUGGUGCA | 17 | 2064 |
| HSV1-UL19-1679 | + | CGUAGUAGUAAAUCUUG | 17 | 2065 |
| HSV1-UL19-1680 | + | CGGCCCCGCGAGAAGGC | 17 | 2066 |
| HSV1-UL19-1681 | + | GCGGCCCCGCGAGAAGG | 17 | 2067 |
| HSV1-UL19-1682 | + | GCAGCGGCCCCGCGAGA | 17 | 2068 |
| HSV1-UL19-1683 | + | CCCCCGCGGUGCAGCAG | 17 | 2069 |
| HSV1-UL19-1684 | + | GUCGAAGCGAACCCCCG | 17 | 2070 |
| HSV1-UL19-1685 | + | GCAGGGUGGCGUAUACG | 17 | 2071 |
| HSV1-UL19-1686 | + | CACCAUGUUCUGCAGGG | 17 | 2072 |
| HSV1-UL19-1687 | + | GACCACCAUGUUCUGCA | 17 | 2073 |
| HSV1-UL19-1688 | + | GGACCACCAUGUUCUGC | 17 | 2074 |
| HSV1-UL19-1689 | + | CGCCGGGGGCGAUCUCC | 17 | 2075 |
| HSV1-UL19-1690 | + | UCGCCGGGGGCGAUCUC | 17 | 2076 |
| HSV1-UL19-1691 | + | GGGGCACUCCUCGCCGG | 17 | 2077 |
| HSV1-UL19-1692 | + | UGGGGCACUCCUCGCCG | 17 | 2078 |
| HSV1-UL19-1693 | + | CUGGGGCACUCCUCGCC | 17 | 2079 |
| HSV1-UL19-1694 | + | GCUGGGGCACUCCUCGC | 17 | 2080 |
| HSV1-UL19-1695 | + | CCGUCACGGGGUCGCUG | 17 | 2081 |
| HSV1-UL19-1696 | + | UCCGUCACGGGGUCGCU | 17 | 2082 |
| HSV1-UL19-1697 | + | GUCCGUCACGGGGUCGC | 17 | 2083 |
| HSV1-UL19-1698 | + | GCGCGGGGUCCGUCACG | 17 | 2084 |
| HSV1-UL19-1699 | + | UGCGCGGGGUCCGUCAC | 17 | 2085 |
| HSV1-UL19-1700 | + | GUGCGCGGGGUCCGUCA | 17 | 2086 |
| HSV1-UL19-1701 | + | GGUGCAGGGGGUGCGCG | 17 | 2087 |
| HSV1-UL19-1702 | + | GGGUGCAGGGGGUGCGC | 17 | 2088 |
| HSV1-UL19-1703 | + | CGGGUGCAGGGGGUGCG | 17 | 2089 |
| HSV1-UL19-1704 | + | GAUUGGCCGGGUGCAGG | 17 | 2090 |
| HSV1-UL19-1705 | + | AGAUUGGCCGGGUGCAG | 17 | 2091 |
| HSV1-UL19-1706 | + | CAGAUUGGCCGGGUGCA | 17 | 2092 |
| HSV1-UL19-1707 | + | CCAGAUUGGCCGGGUGC | 17 | 2093 |
| HSV1-UL19-1708 | + | UGGCCACCAGAUUGGCC | 17 | 2094 |
| HSV1-UL19-1709 | + | UUGGCCACCAGAUUGGC | 17 | 2095 |
| HSV1-UL19-1710 | + | CGUGUUGGCCACCAGAU | 17 | 2096 |
| HSV1-UL19-1711 | + | CAUGGCGUUGACCGUGU | 17 | 2097 |
| HSV1-UL19-1712 | + | GCGCCCGUUGUGAAACA | 17 | 2098 |
| HSV1-UL19-1713 | + | UGCAGCGUGAGCAUGGC | 17 | 2099 |
| HSV1-UL19-1714 | + | CUGCAGCGUGAGCAUGG | 17 | 2100 |
| HSV1-UL19-1715 | + | CACCUGCAGCGUGAGCA | 17 | 2101 |
| HSV1-UL19-1716 | + | GCGUUCGGCCAUGUUGU | 17 | 2102 |
| HSV1-UL19-1717 | + | UGCGUUCGGCCAUGUUG | 17 | 2103 |
| HSV1-UL19-1718 | + | CAGCGCCGUUGUGCGUU | 17 | 2104 |
| HSV1-UL19-1719 | + | GUGUUGGCGCCCGCGUC | 17 | 2105 |
| HSV1-UL19-1720 | + | GGUGUUGGCGCCCGCGU | 17 | 2106 |
| HSV1-UL19-1721 | + | GGUGGUGGACGCGGUGU | 17 | 2107 |
| HSV1-UL19-1722 | + | CAUGUUGGUGGUGGACG | 17 | 2108 |
| HSV1-UL19-1723 | + | UAUGCGCAUGUUGGUGG | 17 | 2109 |
| HSV1-UL19-1724 | + | GAAUAUGCGCAUGUUGG | 17 | 2110 |
| HSV1-UL19-1725 | + | GUCGAAUAUGCGCAUGU | 17 | 2111 |
| HSV1-UL19-1726 | + | GGCCAUCAGCAGGAUUC | 17 | 2112 |
| HSV1-UL19-1727 | + | GCUGGGGGGCCAUCAGC | 17 | 2113 |
| HSV1-UL19-1728 | + | AUGGUCCAGAUGCUGGG | 17 | 2114 |
| HSV1-UL19-1729 | + | UAUGGUCCAGAUGCUGG | 17 | 2115 |
| HSV1-UL19-1730 | + | GUAUGGUCCAGAUGCUG | 17 | 2116 |
| HSV1-UL19-1731 | + | GGUAUGGUCCAGAUGCU | 17 | 2117 |
| HSV1-UL19-1732 | + | UGGUAUGGUCCAGAUGC | 17 | 2118 |
| HSV1-UL19-1733 | + | CGCCAUUUUGGAUGGUA | 17 | 2119 |
| HSV1-UL19-1734 | + | AUAGUCGCCAUUUUGGA | 17 | 2120 |
| HSV1-UL19-1735 | + | AAAAAUAGUCGCCAUUU | 17 | 2121 |
| HSV1-UL19-1736 | + | GCGCGUGGACGGGGAGG | 17 | 2122 |
| HSV1-UL19-1737 | + | AGCGCGUGGACGGGGAG | 17 | 2123 |
| HSV1-UL19-1738 | + | CAGCGCGUGGACGGGGA | 17 | 2124 |
| HSV1-UL19-1739 | + | ACAGCGCGUGGACGGGG | 17 | 2125 |
| HSV1-UL19-1740 | + | CGAACAGCGCGUGGACG | 17 | 2126 |
| HSV1-UL19-1741 | + | GCGAACAGCGCGUGGAC | 17 | 2127 |
| HSV1-UL19-1742 | + | GGCGAACAGCGCGUGGA | 17 | 2128 |
| HSV1-UL19-1743 | + | CCCCGGCGAACAGCGCG | 17 | 2129 |
| HSV1-UL19-1744 | + | CGCCACGUGGUCGGCCC | 17 | 2130 |
| HSV1-UL19-1745 | + | CGCGUUCGCCACGUGGU | 17 | 2131 |
| HSV1-UL19-1746 | + | UGGGCGCGUUCGCCACG | 17 | 2132 |
| HSV1-UL19-1747 | + | AGGGCCGGGGGGAAAUU | 17 | 2133 |
| HSV1-UL19-1748 | + | CAGGGCCGGGGGGAAAU | 17 | 2134 |
| HSV1-UL19-1749 | + | GGUCGCGCAGGGCCGGG | 17 | 2135 |
| HSV1-UL19-1750 | + | AGGUCGCGCAGGGCCGG | 17 | 2136 |
| HSV1-UL19-1751 | + | CAGGUCGCGCAGGGCCG | 17 | 2137 |
| HSV1-UL19-1752 | + | ACAGGUCGCGCAGGGCC | 17 | 2138 |
| HSV1-UL19-1753 | + | GACAGGUCGCGCAGGGC | 17 | 2139 |
| HSV1-UL19-1754 | + | CCGCGACAGGUCGCGCA | 17 | 2140 |
| HSV1-UL19-1755 | + | GCCGCGACAGGUCGCGC | 17 | 2141 |
| HSV1-UL19-1756 | + | GGGGGACCUGCCGCGAC | 17 | 2142 |
| HSV1-UL19-1757 | + | GAGCCGGGGGGACCAGG | 17 | 2143 |
| HSV1-UL19-1758 | + | AGAGCCGGGGGGACCAG | 17 | 2144 |
| HSV1-UL19-1759 | + | CAGAGCCGGGGGGACCA | 17 | 2145 |
| HSV1-UL19-1760 | + | CCAGAGCCGGGGGGACC | 17 | 2146 |
| HSV1-UL19-1761 | + | UGGCCCCCAGAGCCGGG | 17 | 2147 |
| HSV1-UL19-1762 | + | UUGGCCCCCAGAGCCGG | 17 | 2148 |
| HSV1-UL19-1763 | + | GUUGGCCCCCAGAGCCG | 17 | 2149 |
| HSV1-UL19-1764 | + | AGUUGGCCCCCAGAGCC | 17 | 2150 |
| HSV1-UL19-1765 | + | UAGUUGGCCCCCAGAGC | 17 | 2151 |
| HSV1-UL19-1766 | + | GAUCGACGAAAAGUAGU | 17 | 2152 |
| HSV1-UL19-1767 | + | GCUGCACGACGGGCUGU | 17 | 2153 |
| HSV1-UL19-1768 | + | CGGACGUGCUGCACGAC | 17 | 2154 |
| HSV1-UL19-1769 | + | GCGGACGUGCUGCACGA | 17 | 2155 |
| HSV1-UL19-1770 | + | CCCCGGCCGCGCUCUCG | 17 | 2156 |
| HSV1-UL19-1771 | + | GGUCAGCGCGUUCUCCC | 17 | 2157 |
| HSV1-UL19-1772 | + | CCCCGCCAUGAGCGCGU | 17 | 2158 |
| HSV1-UL19-1773 | + | UGAUGAUGCAAGGCCAC | 17 | 2159 |
| HSV1-UL19-1774 | + | CUGAUGAUGCAAGGCCA | 17 | 2160 |
| HSV1-UL19-1775 | + | CUUGAGCUGAUGAUGCA | 17 | 2161 |
| HSV1-UL19-1776 | + | ACCCAAACCCGGGAUGG | 17 | 2162 |
| HSV1-UL19-1777 | + | UGAACCCAAACCCGGGA | 17 | 2163 |
| HSV1-UL19-1778 | + | ACGGUGAACCCAAACCC | 17 | 2164 |
| HSV1-UL19-1779 | + | GACGGUGAACCCAAACC | 17 | 2165 |
| HSV1-UL19-1780 | + | GCGGUCCUGUCGGACGA | 17 | 2166 |
| HSV1-UL19-1781 | + | UCACAAAGCGGUCCUGU | 17 | 2167 |
| HSV1-UL19-1782 | + | CGUUCUCAGUCACAAAG | 17 | 2168 |
| HSV1-UL19-1783 | + | CCACCUGGAGCUGGCCC | 17 | 2169 |
| HSV1-UL19-1784 | + | GCCGGGCCACCUGGAGC | 17 | 2170 |
| HSV1-UL19-1785 | + | UUUCGUGCCGGGCCACC | 17 | 2171 |
| HSV1-UL19-1786 | + | CCCGCCAGUUUCGUGCC | 17 | 2172 |
| HSV1-UL19-1787 | + | CCCCGCCAGUUUCGUGC | 17 | 2173 |
| HSV1-UL19-1788 | + | CACGUUCGCGCGCGGCU | 17 | 2174 |
| HSV1-UL19-1789 | + | CCACGUUCGCGCGCGGC | 17 | 2175 |
| HSV1-UL19-1790 | + | AGGUCCACGUUCGCGCG | 17 | 2176 |
| HSV1-UL19-1791 | + | CGGUGUAGCCCACGCCC | 17 | 2177 |
| HSV1-UL19-1792 | + | UGCCGUGGCCACGACGG | 17 | 2178 |
| HSV1-UL19-1793 | + | GGUUGCCGUGGCCACGA | 17 | 2179 |
| HSV1-UL19-1794 | + | GUUGCGGACGGUUGCCG | 17 | 2180 |
| HSV1-UL19-1795 | + | GGUGACGGGGUUGCGGA | 17 | 2181 |
| HSV1-UL19-1796 | + | UGUCGGUGACGGGGUUG | 17 | 2182 |
| HSV1-UL19-1797 | + | UGCCCAUGUCGGUGACG | 17 | 2183 |
| HSV1-UL19-1798 | + | UUGCCCAUGUCGGUGAC | 17 | 2184 |
| HSV1-UL19-1799 | + | GUUGCCCAUGUCGGUGA | 17 | 2185 |
| HSV1-UL19-1800 | + | GGGAAGGUUGCCCAUGU | 17 | 2186 |
| HSV1-UL19-1801 | + | GGUAAAAGUUUUGGGGA | 17 | 2187 |
| HSV1-UL19-1802 | + | CCCAGGUAAAAGUUUUG | 17 | 2188 |
| HSV1-UL19-1803 | + | GCCCAGGUAAAAGUUUU | 17 | 2189 |
| HSV1-UL19-1804 | + | GGCCCAGGUAAAAGUUU | 17 | 2190 |
| HSV1-UL19-1805 | + | GGGGAGCCCCGCGGCCC | 17 | 2191 |
| HSV1-UL19-1806 | + | GGAGAGGGGGAGCCCCG | 17 | 2192 |
| HSV1-UL19-1807 | + | GCGUUGUCCAGGAGAGG | 17 | 2193 |
| HSV1-UL19-1808 | + | CGCGUUGUCCAGGAGAG | 17 | 2194 |
| HSV1-UL19-1809 | + | CCGCGUUGUCCAGGAGA | 17 | 2195 |
| HSV1-UL19-1810 | + | GCCGCGUUGUCCAGGAG | 17 | 2196 |
| HSV1-UL19-1811 | + | CGGCUGCCGCGUUGUCC | 17 | 2197 |
| HSV1-UL19-1812 | + | CGCGUUCCGCAGGUACA | 17 | 2198 |
| HSV1-UL19-1813 | + | CCACGACCGCGUUCCGC | 17 | 2199 |
| HSV1-UL19-1814 | + | GCUGGGCCGGCCCCAGG | 17 | 2200 |
| HSV1-UL19-1815 | + | CGGGCUGGGCCGGCCCC | 17 | 2201 |
| HSV1-UL19-1816 | + | ACGGGGACGGGCUGGGC | 17 | 2202 |
| HSV1-UL19-1817 | + | GAACACGGGGACGGGCU | 17 | 2203 |
| HSV1-UL19-1818 | + | CGAACACGGGGACGGGC | 17 | 2204 |
| HSV1-UL19-1819 | + | CACCCGAACACGGGGAC | 17 | 2205 |
| HSV1-UL19-1820 | + | GCACCCGAACACGGGGA | 17 | 2206 |
| HSV1-UL19-1821 | + | GGGCGCACCCGAACACG | 17 | 2207 |
| HSV1-UL19-1822 | + | UGGGCGCACCCGAACAC | 17 | 2208 |
| HSV1-UL19-1823 | + | CUGGGCGCACCCGAACA | 17 | 2209 |
| HSV1-UL19-1824 | + | UGCGCGCCGCGGCACCU | 17 | 2210 |
| HSV1-UL19-1825 | + | CUGCGCGCCGCGGCACC | 17 | 2211 |
| HSV1-UL19-1826 | + | UCCAUCCCUGCGCGCCG | 17 | 2212 |
| HSV1-UL19-1827 | + | ACACGGCGUCCUGGCCG | 17 | 2213 |
| HSV1-UL19-1828 | + | ACUCACACACGGCGUCC | 17 | 2214 |
| HSV1-UL19-1829 | + | GGCGAUAAACUCACACA | 17 | 2215 |
| HSV1-UL19-1830 | + | GUCGGUCGACACGGGGG | 17 | 2216 |
| HSV1-UL19-1831 | + | GACGUCGGUCGACACGG | 17 | 2217 |
| HSV1-UL19-1832 | + | UGACGUCGGUCGACACG | 17 | 2218 |
| HSV1-UL19-1833 | + | UUGACGUCGGUCGACAC | 17 | 2219 |
| HSV1-UL19-1834 | + | GUUGACGUCGGUCGACA | 17 | 2220 |
| HSV1-UL19-1835 | + | GCGGAAGUAGUUGACGU | 17 | 2221 |
| HSV1-UL19-1836 | + | GGGGGUUGCAGGGCCGG | 17 | 2222 |
| HSV1-UL19-1837 | + | CCCGGGGGUUGCAGGGC | 17 | 2223 |
| HSV1-UL19-1838 | + | CGUCCCCGGGGGUUGCA | 17 | 2224 |
| HSV1-UL19-1839 | + | GCGUCCCCGGGGGUUGC | 17 | 2225 |
| HSV1-UL19-1840 | + | CGGCGGCGCGUCCCCGG | 17 | 2226 |
| HSV1-UL19-1841 | + | CCGGCGGCGCGUCCCCG | 17 | 2227 |
| HSV1-UL19-1842 | + | CCCGGCGGCGCGUCCCC | 17 | 2228 |
| HSV1-UL19-1843 | + | CCCCGGCGGCGCGUCCC | 17 | 2229 |
| HSV1-UL19-1844 | + | CGCGUAAACGCCCCCGG | 17 | 2230 |
| HSV1-UL19-1845 | + | CCCCGCGUAAACGCCCC | 17 | 2231 |
| HSV1-UL19-1846 | + | GUGGUCGUACAUGAGGG | 17 | 2232 |
| HSV1-UL19-1847 | + | GCCGUGGUCGUACAUGA | 17 | 2233 |
| HSV1-UL19-1848 | + | GGCCGUGGUCGUACAUG | 17 | 2234 |
| HSV1-UL19-1849 | + | ACGGGUCGCUCUGGCCG | 17 | 2235 |
| HSV1-UL19-1850 | + | CCCGGGACGGGUCGCUC | 17 | 2236 |
| HSV1-UL19-1851 | + | CCGCGAAGGCCCGGGAC | 17 | 2237 |
| HSV1-UL19-1852 | + | GCCGCGAAGGCCCGGGA | 17 | 2238 |
| HSV1-UL19-1853 | + | CGUGGCCGCGAAGGCCC | 17 | 2239 |
| HSV1-UL19-1854 | + | CCGUGGCCGCGAAGGCC | 17 | 2240 |
| HSV1-UL19-1855 | + | GUUGGCCGUGGCCGCGA | 17 | 2241 |
| HSV1-UL19-1856 | + | CGCCCACGGGUUGGCCG | 17 | 2242 |
| HSV1-UL19-1857 | + | CUGCGACGCCCACGGGU | 17 | 2243 |
| HSV1-UL19-1858 | + | AUCGCUGCGACGCCCAC | 17 | 2244 |
| HSV1-UL19-1859 | + | AAUCGCUGCGACGCCCA | 17 | 2245 |
| HSV1-UL19-1860 | + | AGGCCCCGUUAUAGAGC | 17 | 2246 |
| HSV1-UL19-1861 | + | GGCCCCGUUGAGGUGGU | 17 | 2247 |
| HSV1-UL19-1862 | + | GCGAGGCCCCGUUGAGG | 17 | 2248 |
| HSV1-UL19-1863 | + | CCGGCGAGGCCCCGUUG | 17 | 2249 |
| HSV1-UL19-1864 | + | GGGGCUGAGCACCGGCG | 17 | 2250 |
| HSV1-UL19-1865 | + | AAGCAGGGGCUGAGCAC | 17 | 2251 |
| HSV1-UL19-1866 | + | UAAAGAACUUAAAGCAG | 17 | 2252 |
| HSV1-UL19-1867 | + | GUAAAGAACUUAAAGCA | 17 | 2253 |
| HSV1-UL19-1868 | + | CGUAAAGAACUUAAAGC | 17 | 2254 |
| HSV1-UL19-1869 | + | AUGUUUGGCGGCGAUGU | 17 | 2255 |
| HSV1-UL19-1870 | + | CAGGCAGCGAUGUUUGG | 17 | 2256 |
| HSV1-UL19-1871 | + | CUCCAGGCAGCGAUGUU | 17 | 2257 |
| HSV1-UL19-1872 | + | CCACGAUCAGGCGCUCC | 17 | 2258 |
| HSV1-UL19-1873 | + | AACCCGUCUCCACGAUC | 17 | 2259 |
| HSV1-UL19-1874 | + | GCUGGCGGCGGUGGCCG | 17 | 2260 |
| HSV1-UL19-1875 | + | UACGUCGCUGGCGGCGG | 17 | 2261 |
| HSV1-UL19-1876 | + | CUGUACGUCGCUGGCGG | 17 | 2262 |
| HSV1-UL19-1877 | + | AAACUGUACGUCGCUGG | 17 | 2263 |
| HSV1-UL19-1878 | + | CUUAAACUGUACGUCGC | 17 | 2264 |
| HSV1-UL19-1879 | + | GUUCGCGGCACCCCGGG | 17 | 2265 |
| HSV1-UL19-1880 | + | AGUUCGCGGCACCCCGG | 17 | 2266 |
| HSV1-UL19-1881 | + | GAGUUCGCGGCACCCCG | 17 | 2267 |
| HSV1-UL19-1882 | + | CGAGUUCGCGGCACCCC | 17 | 2268 |
| HSV1-UL19-1883 | + | ACGAGUUCGCGGCACCC | 17 | 2269 |
| HSV1-UL19-1884 | + | GGUCCUCCACGAGUUCG | 17 | 2270 |
| HSV1-UL19-1885 | + | CCUGAAACAGGCCACAC | 17 | 2271 |
| HSV1-UL19-1886 | + | UCCUGAAACAGGCCACA | 17 | 2272 |
| HSV1-UL19-1887 | + | GGUAGGCCUCCUGAAAC | 17 | 2273 |
| HSV1-UL19-1888 | + | GGCGCAGGUGAGCGGGU | 17 | 2274 |
| HSV1-UL19-1889 | + | CGCUGGCGCAGGUGAGC | 17 | 2275 |
| HSV1-UL19-1890 | + | UCGCUGGCGCAGGUGAG | 17 | 2276 |
| HSV1-UL19-1891 | + | GGCGGGGUCGCUGGCGC | 17 | 2277 |
| HSV1-UL19-1892 | + | GAGGAGGGCGGGGUCGC | 17 | 2278 |
| HSV1-UL19-1893 | + | CACUGCGGAGGAGGGCG | 17 | 2279 |
| HSV1-UL19-1894 | + | GCACUGCGGAGGAGGGC | 17 | 2280 |
| HSV1-UL19-1895 | + | GGCACUGCGGAGGAGGG | 17 | 2281 |
| HSV1-UL19-1896 | + | GCGGGCACUGCGGAGGA | 17 | 2282 |
| HSV1-UL19-1897 | + | UGCGGGCACUGCGGAGG | 17 | 2283 |
| HSV1-UL19-1898 | + | CGUUGCGGGCACUGCGG | 17 | 2284 |
| HSV1-UL19-1899 | + | CCCCGUUGCGGGCACUG | 17 | 2285 |
| HSV1-UL19-1900 | + | GUGGGCUUCCCCGUUGC | 17 | 2286 |
| HSV1-UL19-1901 | + | CGUGGGCUUCCCCGUUG | 17 | 2287 |
| HSV1-UL19-1902 | + | GUGGGUCUCCCGCGCGU | 17 | 2288 |
| HSV1-UL19-1903 | + | AGUGGGUCUCCCGCGCG | 17 | 2289 |
| HSV1-UL19-1904 | + | GAGAUACUGCGCGAAGU | 17 | 2290 |
| HSV1-UL19-1905 | + | CGAGAUACUGCGCGAAG | 17 | 2291 |
| HSV1-UL19-1906 | + | AGCCAGUCCCUUGAGCG | 17 | 2292 |
| HSV1-UL19-1907 | + | GAGCCAGUCCCUUGAGC | 17 | 2293 |
| HSV1-UL19-1908 | + | AGAGCCAGUCCCUUGAG | 17 | 2294 |

[0730] Table 1D provides exemplary targeting domains for knocking out the UL19 gene selected according to the first tier parameters. The targeting domains are selected based on location within first 500 bp of the coding sequence of the UL19 gene. It is contemplated herein that the targeting domain hybridizes to the target domain through complementary base pairing. Any of the targeting domains in the table can be used with a S. aureus Cas9 molecule that gives double stranded cleavage. Any of the targeting domains in the table can be used with a S. aureus Cas9 single-stranded break nucleases (nickases). In an embodiment, dual targeting is used to create two nicks on opposite DNA strands by using S. aureus Cas9 nickases with two targeting domains that are complementary to opposite DNA strands, e.g., a gRNA comprising any minus strand targeting domain may be paired any gRNA comprising a plus strand targeting domain provided that the two gRNAs are oriented on the DNA such that PAMs face outward and the distance between the 5′ ends of the gRNAs is 0-50 bp.

TABLE 1D

| | | | Target | |
|---|---|---|---|---|
| 1st Tier | DNA | | Site | Seq |
| gRNA Name | Strand | Targeting Domain | Length | ID |
| HSV1-UL19-1909 | − | CCGCUCCCAACCGCGAC | 20 | 2295 |
| | | CCU | | |
| HSV1-UL19-1 | − | CGCUCCCAACCGCGACC | 20 | 461 |
| | | CUC | | |
| HSV1-UL19-1911 | − | UGCCGCGGCCAUGGUGC | 20 | 2296 |
| | | CGA | | |
| HSV1-UL19-1912 | − | CGGGUCCCUCCUUAGCA | 20 | 2297 |
| | | CGA | | |
| HSV1-UL19-1913 | − | UGCAAACAGCCUGUACG | 20 | 2298 |
| | | ACG | | |
| HSV1-UL19-1914 | − | ACGUCGAGUUCGACGCC | 20 | 2299 |
| | | CUG | | |
| HSV1-UL19-10 | − | CGUCGAGUUCGACGCCC | 20 | 467 |
| | | UGC | | |
| HSV1-UL19-1916 | − | CCCUGUCGCUCGUGCGC | 20 | 2300 |
| | | UUU | | |
| HSV1-UL19-13 | − | CCUGUCGCUCGUGCGCU | 20 | 395 |
| | | UUC | | |
| HSV1-UL19-1918 | − | GCUCGUGCGCUUUCUGG | 20 | 2301 |
| | | AGC | | |
| HSV1-UL19-1919 | − | CGUGCGUGUGUACCAAG | 20 | 2302 |
| | | UUU | | |
| HSV1-UL19-18 | − | GUGCGUGUGUACCAAGU | 20 | 404 |
| | | UUC | | |
| HSV1-UL19-1921 | − | AGUUUCCGGAGCUGGCC | 20 | 2303 |
| | | UAC | | |
| HSV1-UL19-1922 | − | UCCGGAGCUGGCCUACA | 20 | 2304 |
| | | UGA | | |
| HSV1-UL19-1923 | − | CGGAGCUGGCCUACAUG | 20 | 2305 |
| | | AAC | | |
| HSV1-UL19-20 | − | GGAGCUGGCCUACAUGA | 20 | 469 |
| | | ACG | | |
| HSV1-UL19-1925 | − | GAACGAGGGGCGCGUAC | 20 | 2306 |
| | | AGU | | |
| HSV1-UL19-1926 | − | CCGCGACGGCCCGCACC | 20 | 2307 |
| | | CCA | | |
| HSV1-UL19-1927 | − | AUGACCAAGAUUAUCGA | 20 | 2308 |
| | | CCG | | |
| HSV1-UL19-1928 | − | AGAUUAUCGACCGCCGG | 20 | 2309 |
| | | GCC | | |
| HSV1-UL19-1929 | − | CGCCGCCUUCAGCCUGG | 20 | 2310 |
| | | CCA | | |
| HSV1-UL19-1930 | − | CCGAGGCCAUCGCCCUG | 20 | 2311 |
| | | CUC | | |
| HSV1-UL19-29 | − | CGAGGCCAUCGCCCUGC | 20 | 474 |
| | | UCA | | |
| HSV1-UL19-30 | − | GAGGCCAUCGCCCUGCU | 20 | 475 |
| | | CAC | | |
| HSV1-UL19-31 | − | AGGCCAUCGCCCUGCUC | 20 | 417 |
| | | ACG | | |
| HSV1-UL19-32 | − | GGCCAUCGCCCUGCUCA | 20 | 476 |
| | | CGG | | |
| HSV1-UL19-1935 | − | CCCUGCUCACGGGGGAG | 20 | 2312 |
| | | GCC | | |
| HSV1-UL19-1936 | − | GCUCACGGGGGAGGCCC | 20 | 2313 |
| | | UGG | | |
| HSV1-UL19-35 | − | CUCACGGGGGAGGCCCU | 20 | 478 |
| | | GGA | | |
| HSV1-UL19-1938 | − | CGGGGGAGGCCCUGGAC | 20 | 2314 |
| | | GGG | | |
| HSV1-UL19-1939 | − | CUCCCAACCGCGACCCU | 17 | 2315 |
| HSV1-UL19-95 | − | UCCCAACCGCGACCCUC | 17 | 518 |
| HSV1-UL19-1941 | − | CGCGGCCAUGGUGCCGA | 17 | 2316 |
| HSV1-UL19-1942 | − | GUCCCUCCUUAGCACGA | 17 | 2317 |
| HSV1-UL19-1943 | − | AAACAGCCUGUACGACG | 17 | 2318 |
| HSV1-UL19-1944 | − | UCGAGUUCGACGCCCUG | 17 | 2319 |
| HSV1-UL19-104 | − | CGAGUUCGACGCCCUGC | 17 | 524 |
| HSV1-UL19-1946 | − | UGUCGCUCGUGCGCUUU | 17 | 2320 |
| HSV1-UL19-107 | − | GUCGCUCGUGCGCUUUC | 17 | 400 |
| HSV1-UL19-1948 | − | CGUGCGCUUUCUGGAGC | 17 | 2321 |
| HSV1-UL19-1949 | − | GCGUGUGUACCAAGUUU | 17 | 2322 |
| HSV1-UL19-112 | − | CGUGUGUACCAAGUUUC | 17 | 407 |
| HSV1-UL19-1951 | − | UUCCGGAGCUGGCCUAC | 17 | 2323 |
| HSV1-UL19-1952 | − | GGAGCUGGCCUACAUGA | 17 | 2324 |
| HSV1-UL19-1953 | − | AGCUGGCCUACAUGAAC | 17 | 2325 |
| HSV1-UL19-114 | − | GCUGGCCUACAUGAACG | 17 | 526 |
| HSV1-UL19-1955 | − | CGAGGGGCGCGUACAGU | 17 | 2326 |
| HSV1-UL19-1956 | − | CGACGGCCCGCACCCCA | 17 | 2327 |
| HSV1-UL19-1957 | − | ACCAAGAUUAUCGACCG | 17 | 2328 |
| HSV1-UL19-1958 | − | UUAUCGACCGCCGGGCC | 17 | 2329 |
| HSV1-UL19-1959 | − | CGCCUUCAGCCUGGCCA | 17 | 2330 |
| HSV1-UL19-1960 | − | AGGCCAUCGCCCUGCUC | 17 | 2331 |
| HSV1-UL19-123 | − | GGCCAUCGCCCUGCUCA | 17 | 531 |
| HSV1-UL19-124 | − | GCCAUCGCCCUGCUCAC | 17 | 532 |
| HSV1-UL19-125 | − | CCAUCGCCCUGCUCACG | 17 | 418 |
| HSV1-UL19-126 | − | CAUCGCCCUGCUCACGG | 17 | 533 |
| HSV1-UL19-1965 | − | UGCUCACGGGGGAGGCC | 17 | 2332 |
| HSV1-UL19-1966 | − | CACGGGGGAGGCCCUGG | 17 | 2333 |
| HSV1-UL19-129 | − | ACGGGGGAGGCCCUGGA | 17 | 535 |
| HSV1-UL19-1968 | − | GGGAGGCCCUGGACGGG | 17 | 2334 |
| HSV1-UL19-93 | + | UAUCCCGGAGGGUCGCG | 20 | 457 |
| | | GUU | | |
| HSV1-UL19-92 | + | GUAUCCCGGAGGGUCGC | 20 | 456 |
| | | GGU | | |
| HSV1-UL19-1971 | + | GGUAUCCCGGAGGGUCG | 20 | 2335 |
| | | CGG | | |
| HSV1-UL19-1972 | + | CGCGGCAUACCGGUAUC | 20 | 2336 |
| | | CCG | | |
| HSV1-UL19-88 | + | GCCGCGGCAUACCGGUA | 20 | 514 |
| | | UCC | | |
| HSV1-UL19-1974 | + | GGCCGCGGCAUACCGGU | 20 | 2337 |
| | | AUC | | |
| HSV1-UL19-81 | + | CCACCUCGAUCGUGCUA | 20 | 509 |
| | | AGG | | |
| HSV1-UL19-1976 | + | GCCACCUCGAUCGUGCU | 20 | 2338 |
| | | AAG | | |
| HSV1-UL19-80 | + | ACGCCACCUCGAUCGUG | 20 | 508 |
| | | CUA | | |
| HSV1-UL19-1978 | + | GACGCCACCUCGAUCGU | 20 | 2339 |
| | | GCU | | |
| HSV1-UL19-78 | + | GUUUGCAUCGGAGCGCA | 20 | 506 |
| | | CGC | | |
| HSV1-UL19-77 | + | UGUUUGCAUCGGAGCGC | 20 | 505 |
| | | ACG | | |
| HSV1-UL19-1981 | + | CUGUUUGCAUCGGAGCG | 20 | 2340 |
| | | CAC | | |
| HSV1-UL19-76 | + | GUCGUACAGGCUGUUUG | 20 | 442 |
| | | CAU | | |
| HSV1-UL19-1983 | + | CGUCGUACAGGCUGUUU | 20 | 2341 |
| | | GCA | | |
| HSV1-UL19-1984 | + | AAUACGACCCCAGCAGG | 20 | 2342 |
| | | GCG | | |
| HSV1-UL19-1985 | + | GUGUUGCAAUACGACCC | 20 | 2343 |
| | | CAG | | |
| HSV1-UL19-1986 | + | UCCAGAAAGCGCACGAG | 20 | 2344 |
| | | CGA | | |
| HSV1-UL19-1987 | + | ACCCGAGCUCCAGAAAG | 20 | 2345 |
| | | CGC | | |
| HSV1-UL19-1988 | + | GCCACCGACAACCCGAG | 20 | 2346 |
| | | CUC | | |
| HSV1-UL19-1989 | + | ACACGCACGCCACCGAC | 20 | 2347 |
| | | AAC | | |
| HSV1-UL19-69 | + | UCGUUCAUGUAGGCCAG | 20 | 435 |
| | | CUC | | |
| HSV1-UL19-1991 | + | CUCGUUCAUGUAGGCCA | 20 | 2348 |
| | | GCU | | |
| HSV1-UL19-1992 | + | CAAUCAGCGGCUGGUGG | 20 | 2349 |
| | | ACC | | |
| HSV1-UL19-1993 | + | UCGCGGGCAAUCAGCGG | 20 | 2350 |
| | | CUG | | |
| HSV1-UL19-1994 | + | UCGAUGGGGUGCGGGCC | 20 | 2351 |
| | | GUC | | |
| HSV1-UL19-1995 | + | UGUGGGUUGCUCGAUGG | 20 | 2352 |
| | | GGU | | |
| HSV1-UL19-58 | + | AUUGUGUGUGGGUUGCU | 20 | 425 |
| | | CGA | | |
| HSV1-UL19-1997 | + | AAUUGUGUGUGGGUUGC | 20 | 2353 |
| | | UCG | | |
| HSV1-UL19-1998 | + | UCUUGGUCAUGUAAUUG | 20 | 2354 |
| | | UGU | | |
| HSV1-UL19-1999 | + | GCCAGGCUGAAGGCGGC | 20 | 2355 |
| | | GUU | | |
| HSV1-UL19-2000 | + | CGAUGGCCUCGGUGGCC | 20 | 2356 |
| | | AGG | | |
| HSV1-UL19-2001 | + | UCCAGGGCCUCCCCCGU | 20 | 2357 |
| | | GAG | | |
| HSV1-UL19-2002 | + | UCCCGUCCAGGGCCUCC | 20 | 2358 |
| | | CCC | | |
| HSV1-UL19-2003 | + | GCGCCGAUACCCGUCCC | 20 | 2359 |
| | | GUC | | |
| HSV1-UL19-187 | + | CCCGGAGGGUCGCGGUU | 17 | 460 |
| HSV1-UL19-186 | + | UCCCGGAGGGUCGCGGU | 17 | 459 |
| HSV1-UL19-2006 | + | AUCCCGGAGGGUCGCGG | 17 | 2360 |
| HSV1-UL19-2007 | + | GGCAUACCGGUAUCCCG | 17 | 2361 |
| HSV1-UL19-182 | + | GCGGCAUACCGGUAUCC | 17 | 571 |
| HSV1-UL19-2009 | + | CGCGGCAUACCGGUAUC | 17 | 2362 |
| HSV1-UL19-175 | + | CCUCGAUCGUGCUAAGG | 17 | 566 |
| HSV1-UL19-2011 | + | ACCUCGAUCGUGCUAAG | 17 | 2363 |
| HSV1-UL19-174 | + | CCACCUCGAUCGUGCUA | 17 | 565 |
| HSV1-UL19-2013 | + | GCCACCUCGAUCGUGCU | 17 | 2364 |
| HSV1-UL19-172 | + | UGCAUCGGAGCGCACGC | 17 | 563 |
| HSV1-UL19-171 | + | UUGCAUCGGAGCGCACG | 17 | 562 |
| HSV1-UL19-2016 | + | UUUGCAUCGGAGCGCAC | 17 | 2365 |
| HSV1-UL19-170 | + | GUACAGGCUGUUUGCAU | 17 | 450 |
| HSV1-UL19-2018 | + | CGUACAGGCUGUUUGCA | 17 | 2366 |
| HSV1-UL19-2019 | + | ACGACCCCAGCAGGGCG | 17 | 2367 |
| HSV1-UL19-2020 | + | UUGCAAUACGACCCCAG | 17 | 2368 |
| HSV1-UL19-2021 | + | AGAAAGCGCACGAGCGA | 17 | 2369 |
| HSV1-UL19-2022 | + | CGAGCUCCAGAAAGCGC | 17 | 2370 |
| HSV1-UL19-2023 | + | ACCGACAACCCGAGCUC | 17 | 2371 |
| HSV1-UL19-2024 | + | CGCACGCCACCGACAAC | 17 | 2372 |
| HSV1-UL19-163 | + | UUCAUGUAGGCCAGCUC | 17 | 443 |
| HSV1-UL19-2026 | + | GUUCAUGUAGGCCAGCU | 17 | 2373 |
| HSV1-UL19-2027 | + | UCAGCGGCUGGUGGACC | 17 | 2374 |
| HSV1-UL19-2028 | + | CGGGCAAUCAGCGGCUG | 17 | 2375 |
| HSV1-UL19-2029 | + | AUGGGGUGCGGGCCGUC | 17 | 2376 |
| HSV1-UL19-2030 | + | GGGUUGCUCGAUGGGGU | 17 | 2377 |
| HSV1-UL19-152 | + | GUGUGUGGGUUGCUCGA | 17 | 427 |
| HSV1-UL19-2032 | + | UGUGUGUGGGUUGCUCG | 17 | 2378 |
| HSV1-UL19-2033 | + | UGGUCAUGUAAUUGUGU | 17 | 2379 |
| HSV1-UL19-2034 | + | AGGCUGAAGGCGGCGUU | 17 | 2380 |
| HSV1-UL19-2035 | + | UGGCCUCGGUGGCCAGG | 17 | 2381 |
| HSV1-UL19-2036 | + | AGGGCCUCCCCCGUGAG | 17 | 2382 |
| HSV1-UL19-2037 | + | CGUCCAGGGCCUCCCCC | 17 | 2383 |
| HSV1-UL19-2038 | + | CCGAUACCCGUCCCGUC | 17 | 2384 |

[0731] Table 1E provides exemplary targeting domains for knocking out the UL19 gene selected according to the second tier parameters. The targeting domains are selected based on location within the coding sequence, but downstream of the first 500 bp of the UL19 gene. It is contemplated herein that the targeting domain hybridizes to the target domain through complementary base pairing. Any of the targeting domains in the table can be used with a S. aureus Cas9 molecule that gives double stranded cleavage. Any of the targeting domains in the table can be used with a S. aureus Cas9 single-stranded break nucleases (nickases). In an embodiment, dual targeting is used to create two nicks on opposite DNA strands by using S. aureus Cas9 nickases with two targeting domains that are complementary to opposite DNA strands, e.g., a gRNA comprising any minus strand targeting domain may be paired any gRNA comprising a plus strand targeting domain provided that the two gRNAs are oriented on the DNA such that PAMs face outward and the distance between the 5′ ends of the gRNAs is 0-50 bp.

TABLE 1E

| | | | Target | |
|---|---|---|---|---|
| 2nd Tier | DNA | | Site | Seq |
| gRNA Name | Strand | Targeting Domain | Length | ID |
| HSV1-UL19-189 | − | CGCAACGUCCAGGCCGUCCU | 20 | 575 |
| HSV1-UL19-2040 | − | CCAGGCCGUCCUCGGGGCGU | 20 | 2385 |
| HSV1-UL19-2041 | − | ACCAGAUGCUGCACGUGCUG | 20 | 2386 |
| HSV1-UL19-194 | − | CCAGAUGCUGCACGUGCUGC | 20 | 580 |
| HSV1-UL19-2043 | − | UGUUGCCGAUGCAACGAUAC | 20 | 2387 |
| HSV1-UL19-2044 | − | GACAACGGCCGCCUGGCCAC | 20 | 2388 |
| HSV1-UL19-2045 | − | CGCCUGGCCACCAGGGUGGC | 20 | 2389 |
| HSV1-UL19-2046 | − | GGCCCGGGCGACCCUGGUCG | 20 | 2390 |
| HSV1-UL19-2047 | − | ACCCUGGUCGCCGAGCUAAA | 20 | 2391 |
| HSV1-UL19-2048 | − | CGAGCUAAAGCGAAGCUUCU | 20 | 2392 |
| HSV1-UL19-2049 | − | UAAAGCGAAGCUUCUGCGAG | 20 | 2393 |
| HSV1-UL19-2050 | − | UCUGCGAGACGAGCUUUUUC | 20 | 2394 |
| HSV1-UL19-2051 | − | CGAGCUUUUUCCUGGGCAAG | 20 | 2395 |
| HSV1-UL19-2052 | − | CUGGGCAAGGCGGGCCACCG | 20 | 2396 |
| HSV1-UL19-211 | − | UGGGCAAGGCGGGCCACCGC | 20 | 597 |
| HSV1-UL19-212 | − | GGGCAAGGCGGGCCACCGCC | 20 | 598 |
| HSV1-UL19-2055 | − | GGGCCACCGCCGGGAGGCCG | 20 | 2397 |
| HSV1-UL19-2056 | − | AGGCCGUCGAGGCCUGGCUC | 20 | 2398 |
| HSV1-UL19-2057 | − | UCUGACGCAUGCCGACACGC | 20 | 2399 |
| HSV1-UL19-2058 | − | CACGCGCGGGCGGCCGGUCG | 20 | 2400 |
| HSV1-UL19-223 | − | ACGCGCGGGCGGCCGGUCGA | 20 | 609 |
| HSV1-UL19-2060 | − | AGCGCCUCCUGCAGUCCUUC | 20 | 2401 |
| HSV1-UL19-2061 | − | UCCUGCAGUCCUUCCUGAAA | 20 | 2402 |
| HSV1-UL19-226 | − | CCUGCAGUCCUUCCUGAAAG | 20 | 612 |
| HSV1-UL19-2063 | − | UGCAGUCCUUCCUGAAAGUG | 20 | 2403 |
| HSV1-UL19-2064 | − | CUUCCUGAAAGUGGAGGACA | 20 | 2404 |
| HSV1-UL19-2065 | − | CGACGUGCCGGUGACGUACG | 20 | 2405 |
| HSV1-UL19-2066 | − | UGACGUACGGCGAGAUGGUC | 20 | 2406 |
| HSV1-UL19-2067 | − | GUACGGCGAGAUGGUCCUGA | 20 | 2407 |
| HSV1-UL19-231 | − | UACGGCGAGAUGGUCCUGAA | 20 | 617 |
| HSV1-UL19-2069 | − | ACCUGGUCACGGCGCUCGUG | 20 | 2408 |
| HSV1-UL19-2070 | − | CUCGUGAUGGGCAAGGCCGU | 20 | 2409 |
| HSV1-UL19-2071 | − | UGGGCAAGGCCGUGCGAAGU | 20 | 2410 |
| HSV1-UL19-2072 | − | CCGUGCGAAGUCUGGACGAC | 20 | 2411 |
| HSV1-UL19-2073 | − | ACGACGUGGGCCGCCACCUG | 20 | 2412 |
| HSV1-UL19-242 | − | CGACGUGGGCCGCCACCUGC | 20 | 628 |
| HSV1-UL19-2075 | − | GCCGCCACCUGCUGGAGAUG | 20 | 2413 |
| HSV1-UL19-243 | − | CCGCCACCUGCUGGAGAUGC | 20 | 629 |
| HSV1-UL19-2077 | − | GCCACCUGCUGGAGAUGCAG | 20 | 2414 |
| HSV1-UL19-244 | − | CCACCUGCUGGAGAUGCAGG | 20 | 630 |
| HSV1-UL19-2079 | − | UGCAGGAGGAGCAGCUCGAC | 20 | 2415 |
| HSV1-UL19-2080 | − | UCGACCUGAACCGGCAGACG | 20 | 2416 |
| HSV1-UL19-2081 | − | CCUGAACCGGCAGACGCUGG | 20 | 2417 |
| HSV1-UL19-2082 | − | CCGGCAGACGCUGGACGAGC | 20 | 2418 |
| HSV1-UL19-2083 | − | GGCAGACGCUGGACGAGCUC | 20 | 2419 |
| HSV1-UL19-2084 | − | CCCAGACGACGCGCGUGCGC | 20 | 2420 |
| HSV1-UL19-2085 | − | CGCGGAUCUGGUGUCCAUCG | 20 | 2421 |
| HSV1-UL19-2086 | − | CGGAUCUGGUGUCCAUCGGC | 20 | 2422 |
| HSV1-UL19-2087 | − | UCGGCGAGAAGCUGGUCUUU | 20 | 2423 |
| HSV1-UL19-251 | − | CGGCGAGAAGCUGGUCUUUC | 20 | 637 |
| HSV1-UL19-2089 | − | AGCUGGUCUUUCUGGAGGCC | 20 | 2424 |
| HSV1-UL19-253 | − | GCUGGUCUUUCUGGAGGCCC | 20 | 639 |
| HSV1-UL19-2091 | − | UGGUCUUUCUGGAGGCCCUG | 20 | 2425 |
| HSV1-UL19-2092 | − | CCAACGUUCCCUACCCCCUG | 20 | 2426 |
| HSV1-UL19-2093 | − | CCUACCCCCUGGUGGGCGCC | 20 | 2427 |
| HSV1-UL19-2094 | − | ACCUGACGUUCGUCCUGCCC | 20 | 2428 |
| HSV1-UL19-2095 | − | UGGGCCUGUUCAAUCCGGUC | 20 | 2429 |
| HSV1-UL19-261 | − | GGGCCUGUUCAAUCCGGUCA | 20 | 647 |
| HSV1-UL19-2097 | − | GGAACGGUUUGCCGCGCACG | 20 | 2430 |
| HSV1-UL19-263 | − | GAACGGUUUGCCGCGCACGC | 20 | 649 |
| HSV1-UL19-264 | − | AACGGUUUGCCGCGCACGCC | 20 | 650 |
| HSV1-UL19-2100 | − | UAGUCCCCGCCCCCGGCCAC | 20 | 2431 |
| HSV1-UL19-2101 | − | CCGCCCCGCCAGCUGUUUUU | 20 | 2432 |
| HSV1-UL19-268 | − | CGCCCCGCCAGCUGUUUUUU | 20 | 654 |
| HSV1-UL19-269 | − | GCCCCGCCAGCUGUUUUUUU | 20 | 655 |
| HSV1-UL19-270 | − | CCCCGCCAGCUGUUUUUUUG | 20 | 656 |
| HSV1-UL19-271 | − | CCCGCCAGCUGUUUUUUUGG | 20 | 657 |
| HSV1-UL19-2106 | − | GCCAGCUGUUUUUUUGGGGG | 20 | 2433 |
| HSV1-UL19-2107 | − | GCCAGGUGCUGCGCCUGUCU | 20 | 2434 |
| HSV1-UL19-274 | − | CCAGGUGCUGCGCCUGUCUC | 20 | 660 |
| HSV1-UL19-2109 | − | CCUGUCUCUGGAACACGCGA | 20 | 2435 |
| HSV1-UL19-275 | − | CUGUCUCUGGAACACGCGAU | 20 | 661 |
| HSV1-UL19-2111 | − | CCGUGUGCCACCCUUCGCUG | 20 | 2436 |
| HSV1-UL19-2112 | − | GAUGAACGUUGACGCGGCGG | 20 | 2437 |
| HSV1-UL19-279 | − | AUGAACGUUGACGCGGCGGU | 20 | 665 |
| HSV1-UL19-280 | − | UGAACGUUGACGCGGCGGUC | 20 | 666 |
| HSV1-UL19-2115 | − | GGGCCUUAACCGCGACCCCG | 20 | 2438 |
| HSV1-UL19-2116 | − | CGUCGAAGCCGCCAAUCCGU | 20 | 2439 |
| HSV1-UL19-283 | − | GUCGAAGCCGCCAAUCCGUA | 20 | 669 |
| HSV1-UL19-2118 | − | CAGACAUGCAGCAGCUGUUU | 20 | 2440 |
| HSV1-UL19-2119 | − | CAGCAGCUGUUUUUGAACGC | 20 | 2441 |
| HSV1-UL19-290 | − | AGCAGCUGUUUUUGAACGCC | 20 | 676 |
| HSV1-UL19-291 | − | GCAGCUGUUUUUGAACGCCU | 20 | 677 |
| HSV1-UL19-2122 | − | CUGGGGGCAGCGCCUGGCCC | 20 | 2442 |
| HSV1-UL19-2123 | − | GGGCAGCGCCUGGCCCACGG | 20 | 2443 |
| HSV1-UL19-2124 | − | CUGGCCCACGGGCGGGUCCG | 20 | 2444 |
| HSV1-UL19-2125 | − | ACGGGCGGGUCCGAUGGGUC | 20 | 2445 |
| HSV1-UL19-301 | − | CGGGCGGGUCCGAUGGGUCG | 20 | 687 |
| HSV1-UL19-2127 | − | UCGCGGAAGGCCAGAUGACC | 20 | 2446 |
| HSV1-UL19-303 | − | CGCGGAAGGCCAGAUGACCC | 20 | 689 |
| HSV1-UL19-2129 | − | CGACAACGCCAACCUGGCUC | 20 | 2447 |
| HSV1-UL19-2130 | − | ACCCCGCGUUCGACUUCUUU | 20 | 2448 |
| HSV1-UL19-305 | − | CCCCGCGUUCGACUUCUUUG | 20 | 691 |
| HSV1-UL19-306 | − | CCCGCGUUCGACUUCUUUGU | 20 | 692 |
| HSV1-UL19-2133 | − | UCUUUGUGGGGGUGGCCGAC | 20 | 2449 |
| HSV1-UL19-310 | − | CUUUGUGGGGGUGGCCGACG | 20 | 696 |
| HSV1-UL19-2135 | − | GGGUGGCCGACGUGGAGCUG | 20 | 2450 |
| HSV1-UL19-311 | − | GGUGGCCGACGUGGAGCUGC | 20 | 697 |
| HSV1-UL19-312 | − | GUGGCCGACGUGGAGCUGCC | 20 | 698 |
| HSV1-UL19-313 | − | UGGCCGACGUGGAGCUGCCG | 20 | 699 |
| HSV1-UL19-314 | − | GGCCGACGUGGAGCUGCCGG | 20 | 700 |
| HSV1-UL19-315 | − | GCCGACGUGGAGCUGCCGGG | 20 | 701 |
| HSV1-UL19-316 | − | CCGACGUGGAGCUGCCGGGG | 20 | 702 |
| HSV1-UL19-2142 | − | GGGACGUUCCCCCGGCCGGC | 20 | 2451 |
| HSV1-UL19-320 | − | GGACGUUCCCCCGGCCGGCC | 20 | 706 |
| HSV1-UL19-321 | − | GACGUUCCCCCGGCCGGCCC | 20 | 707 |
| HSV1-UL19-322 | − | ACGUUCCCCCGGCCGGCCCG | 20 | 708 |
| HSV1-UL19-323 | − | CGUUCCCCCGGCCGGCCCGG | 20 | 709 |
| HSV1-UL19-2147 | − | UCCAGGCCACCUGGCGCGUG | 20 | 2452 |
| HSV1-UL19-2148 | − | GCGCUAUGUCCGGCGGCGUU | 20 | 2453 |
| HSV1-UL19-331 | − | CGCUAUGUCCGGCGGCGUUC | 20 | 717 |
| HSV1-UL19-2150 | − | CCGGCGGCGUUCCGGGACGC | 20 | 2454 |
| HSV1-UL19-333 | − | CGGCGGCGUUCCGGGACGCC | 20 | 719 |
| HSV1-UL19-2152 | − | CGUUCCGGGACGCCCGGGGC | 20 | 2455 |
| HSV1-UL19-336 | − | GUUCCGGGACGCCCGGGGCC | 20 | 722 |
| HSV1-UL19-2154 | − | GGGACGCCCGGGGCCUGGAG | 20 | 2456 |
| HSV1-UL19-337 | − | GGACGCCCGGGGCCUGGAGC | 20 | 723 |
| HSV1-UL19-338 | − | GACGCCCGGGGCCUGGAGCU | 20 | 724 |
| HSV1-UL19-2157 | − | CCCGGGGCCUGGAGCUGGGG | 20 | 2457 |
| HSV1-UL19-341 | − | CCGGGGCCUGGAGCUGGGGG | 20 | 727 |
| HSV1-UL19-2159 | − | CGCCACCAUCGCCGCCGUUC | 20 | 2458 |
| HSV1-UL19-344 | − | GCCACCAUCGCCGCCGUUCG | 20 | 730 |
| HSV1-UL19-2161 | − | GCAGGCCGCCAUACACGGCA | 20 | 2459 |
| HSV1-UL19-2162 | − | GUCCAGUGCAUCACCAGCUA | 20 | 2460 |
| HSV1-UL19-354 | − | UCCAGUGCAUCACCAGCUAC | 20 | 740 |
| HSV1-UL19-2164 | − | ACACGCGGUGCGCGGCGUUC | 20 | 2461 |
| HSV1-UL19-2165 | − | CUCGUACGUCGUGACCUACC | 20 | 2462 |
| HSV1-UL19-358 | − | UCGUACGUCGUGACCUACCU | 20 | 744 |
| HSV1-UL19-359 | − | CGUACGUCGUGACCUACCUC | 20 | 745 |
| HSV1-UL19-360 | − | GUACGUCGUGACCUACCUCG | 20 | 746 |
| HSV1-UL19-361 | − | UACGUCGUGACCUACCUCGG | 20 | 747 |
| HSV1-UL19-2170 | − | CUACCUCGGGGGAGACCUUC | 20 | 2463 |
| HSV1-UL19-2171 | − | ACCUCGGGGGAGACCUUCCC | 20 | 2464 |
| HSV1-UL19-362 | − | CCUCGGGGGAGACCUUCCCG | 20 | 748 |
| HSV1-UL19-2173 | − | GAGGAGUGCAUGGCCGUGUA | 20 | 2465 |
| HSV1-UL19-364 | − | AGGAGUGCAUGGCCGUGUAC | 20 | 750 |
| HSV1-UL19-2175 | − | CCGGGACCUGGUGGCGCACG | 20 | 2466 |
| HSV1-UL19-2176 | − | AUGACUUUACCCUGACCGGC | 20 | 2467 |
| HSV1-UL19-372 | − | UGACUUUACCCUGACCGGCC | 20 | 758 |
| HSV1-UL19-2178 | − | UUACCCUGACCGGCCCGGAG | 20 | 2468 |
| HSV1-UL19-2179 | − | CCUGACCGGCCCGGAGCUGG | 20 | 2469 |
| HSV1-UL19-2180 | − | GCUGGGCGGGCAGGCGCAAG | 20 | 2470 |
| HSV1-UL19-2181 | − | GCGGGCAGGCGCAAGCCGAG | 20 | 2471 |
| HSV1-UL19-2182 | − | GCCGAGCUGAAUCACCUAAU | 20 | 2472 |
| HSV1-UL19-2183 | − | GCGCUGCUGCCACCCCUCGU | 20 | 2473 |
| HSV1-UL19-379 | − | CGCUGCUGCCACCCCUCGUG | 20 | 765 |
| HSV1-UL19-2185 | − | CCCUGAUGCGGCGCGCGGCC | 20 | 2474 |
| HSV1-UL19-2186 | − | CUGGACCGCCAUCGCGACUG | 20 | 2475 |
| HSV1-UL19-2187 | − | AUCGCGACUGCCGGGUUAGC | 20 | 2476 |
| HSV1-UL19-386 | − | UCGCGACUGCCGGGUUAGCG | 20 | 772 |
| HSV1-UL19-387 | − | CGCGACUGCCGGGUUAGCGC | 20 | 773 |
| HSV1-UL19-388 | − | GCGACUGCCGGGUUAGCGCG | 20 | 774 |
| HSV1-UL19-2191 | − | CGGCAUGUAACGUGGCGACC | 20 | 2477 |
| HSV1-UL19-2192 | − | CUGCUGCACAACACCCAGGC | 20 | 2478 |
| HSV1-UL19-2193 | − | ACAACACCCAGGCCCGAGCC | 20 | 2479 |
| HSV1-UL19-2194 | − | AGGCCCGAGCCGCGGACGCC | 20 | 2480 |
| HSV1-UL19-2195 | − | GCCGCGGAUGACCGGCCGCA | 20 | 2481 |
| HSV1-UL19-400 | − | CCGCGGAUGACCGGCCGCAC | 20 | 786 |
| HSV1-UL19-401 | − | CGCGGAUGACCGGCCGCACC | 20 | 787 |
| HSV1-UL19-402 | − | GCGGAUGACCGGCCGCACCG | 20 | 788 |
| HSV1-UL19-2199 | − | AUGACCGGCCGCACCGGGGG | 20 | 2482 |
| HSV1-UL19-2200 | − | CGGCCGCACCGGGGGGCGGA | 20 | 2483 |
| HSV1-UL19-2201 | − | GUGAUGGUGCCCGCCUUCUC | 20 | 2484 |
| HSV1-UL19-408 | − | UGAUGGUGCCCGCCUUCUCG | 20 | 794 |
| HSV1-UL19-2203 | − | CGCGGGGCCGCUGCUGCACC | 20 | 2485 |
| HSV1-UL19-411 | − | GCGGGGCCGCUGCUGCACCG | 20 | 797 |
| HSV1-UL19-412 | − | CGGGGCCGCUGCUGCACCGC | 20 | 798 |
| HSV1-UL19-2206 | − | ACCGCGUAUACGCCACCCUG | 20 | 2486 |
| HSV1-UL19-2207 | − | CCCUGCAGAACAUGGUGGUC | 20 | 2487 |
| HSV1-UL19-417 | − | CCUGCAGAACAUGGUGGUCC | 20 | 803 |
| HSV1-UL19-2209 | − | GGUCCCGGAGAUCGCCCCCG | 20 | 2488 |
| HSV1-UL19-2210 | − | UCCCGGAGAUCGCCCCCGGC | 20 | 2489 |
| HSV1-UL19-419 | − | CCCGGAGAUCGCCCCCGGCG | 20 | 805 |
| HSV1-UL19-2212 | − | AGUGCCCCAGCGACCCCGUG | 20 | 2490 |
| HSV1-UL19-2213 | − | GGUCAACGCCAUGUUUCACA | 20 | 2491 |
| HSV1-UL19-2214 | − | UUCACAACGGGCGCGUGGUA | 20 | 2492 |
| HSV1-UL19-2215 | − | CAACGGGCGCGUGGUAGUGG | 20 | 2493 |
| HSV1-UL19-2216 | − | GGUGCUGGCCCACAACAUGG | 20 | 2494 |
| HSV1-UL19-2217 | − | UCUGCUCGGCGGCGCCCGAC | 20 | 2495 |
| HSV1-UL19-2218 | − | CACCAACAUGCGCAUAUUCG | 20 | 2496 |
| HSV1-UL19-439 | − | ACCAACAUGCGCAUAUUCGA | 20 | 825 |
| HSV1-UL19-2220 | − | AUUCGACGGGGCGUUGCACG | 20 | 2497 |
| HSV1-UL19-442 | − | UUCGACGGGGCGUUGCACGC | 20 | 828 |
| HSV1-UL19-2222 | − | UGCUGAUGGCCCCCCAGCAU | 20 | 2498 |
| HSV1-UL19-2223 | − | CCCCGUCCACGCGCUGUUCG | 20 | 2499 |
| HSV1-UL19-446 | − | CCCGUCCACGCGCUGUUCGC | 20 | 832 |
| HSV1-UL19-2225 | − | UCGCCGGGGCCGACCACGUG | 20 | 2500 |
| HSV1-UL19-2226 | − | UCCCCCUGGUCCCCCCGGCU | 20 | 2501 |
| HSV1-UL19-455 | − | CCCCCUGGUCCCCCCGGCUC | 20 | 841 |
| HSV1-UL19-456 | − | CCCCUGGUCCCCCCGGCUCU | 20 | 842 |
| HSV1-UL19-2229 | − | GCCCGUCGUGCAGCACGUCC | 20 | 2502 |
| HSV1-UL19-2230 | − | CCGUCGUGCAGCACGUCCGC | 20 | 2503 |
| HSV1-UL19-2231 | − | GCACGUCCGCGAGAGCGCGG | 20 | 2504 |
| HSV1-UL19-460 | − | CACGUCCGCGAGAGCGCGGC | 20 | 846 |
| HSV1-UL19-461 | − | ACGUCCGCGAGAGCGCGGCC | 20 | 847 |
| HSV1-UL19-462 | − | CGUCCGCGAGAGCGCGGCCG | 20 | 848 |
| HSV1-UL19-2235 | − | UCCGCGAGAGCGCGGCCGGG | 20 | 2505 |
| HSV1-UL19-2236 | − | CGCUGACCUACGCGCUCAUG | 20 | 2506 |
| HSV1-UL19-464 | − | GCUGACCUACGCGCUCAUGG | 20 | 850 |
| HSV1-UL19-2238 | − | CCUUGCAUCAUCAGCUCAAG | 20 | 2507 |
| HSV1-UL19-2239 | − | GCUCAAGACGGGCCUCCAUC | 20 | 2508 |
| HSV1-UL19-2240 | − | GACGGGCCUCCAUCCCGGGU | 20 | 2509 |
| HSV1-UL19-2241 | − | UUGGGUUCACCGUCGUCCGA | 20 | 2510 |
| HSV1-UL19-2242 | − | CCGACAGGACCGCUUUGUGA | 20 | 2511 |
| HSV1-UL19-2243 | − | GACAGGACCGCUUUGUGACU | 20 | 2512 |
| HSV1-UL19-2244 | − | UGACUGAGAACGUGCUGUUC | 20 | 2513 |
| HSV1-UL19-475 | − | GACUGAGAACGUGCUGUUCU | 20 | 861 |
| HSV1-UL19-2246 | − | UGCUGUUCUCGGAGCGCGCG | 20 | 2514 |
| HSV1-UL19-476 | − | GCUGUUCUCGGAGCGCGCGU | 20 | 862 |
| HSV1-UL19-2248 | − | GCGCGUCGGAGGCGUACUUC | 20 | 2515 |
| HSV1-UL19-2249 | − | CCAGCUCCAGGUGGCCCGGC | 20 | 2516 |
| HSV1-UL19-2250 | − | GGUGGCCCGGCACGAAACUG | 20 | 2517 |
| HSV1-UL19-484 | − | GUGGCCCGGCACGAAACUGG | 20 | 870 |
| HSV1-UL19-485 | − | UGGCCCGGCACGAAACUGGC | 20 | 871 |
| HSV1-UL19-486 | − | GGCCCGGCACGAAACUGGCG | 20 | 872 |
| HSV1-UL19-487 | − | GCCCGGCACGAAACUGGCGG | 20 | 873 |
| HSV1-UL19-2255 | − | UCACGCUCACCCAGCCGCGC | 20 | 2518 |
| HSV1-UL19-2256 | − | UCACCCAGCCGCGCGCGAAC | 20 | 2519 |
| HSV1-UL19-2257 | − | AGCCGCGCGCGAACGUGGAC | 20 | 2520 |
| HSV1-UL19-2258 | − | GCGCGAACGUGGACCUGGGC | 20 | 2521 |
| HSV1-UL19-2259 | − | UCCGCAACCCCGUCACCGAC | 20 | 2522 |
| HSV1-UL19-2260 | − | ACCUUCCCCAAAACUUUUAC | 20 | 2523 |
| HSV1-UL19-2261 | − | CCAAAACUUUUACCUGGGCC | 20 | 2524 |
| HSV1-UL19-501 | − | CAAAACUUUUACCUGGGCCG | 20 | 887 |
| HSV1-UL19-2263 | − | GCCGCGGGGCUCCCCCUCUC | 20 | 2525 |
| HSV1-UL19-2264 | − | AACGCGGCAGCCGUGUACCU | 20 | 2526 |
| HSV1-UL19-506 | − | ACGCGGCAGCCGUGUACCUG | 20 | 892 |
| HSV1-UL19-2266 | − | ACCUGCGGAACGCGGUCGUG | 20 | 2527 |
| HSV1-UL19-509 | − | CCUGCGGAACGCGGUCGUGG | 20 | 895 |
| HSV1-UL19-510 | − | CUGCGGAACGCGGUCGUGGC | 20 | 896 |
| HSV1-UL19-2269 | − | CGGUCGUGGCGGGAAACCGC | 20 | 2528 |
| HSV1-UL19-511 | − | GGUCGUGGCGGGAAACCGCC | 20 | 897 |
| HSV1-UL19-2271 | − | GGCCCAGCCCGUCCCCGUGU | 20 | 2529 |
| HSV1-UL19-2272 | − | CGCCCAGGUGCCGCGGCGCG | 20 | 2530 |
| HSV1-UL19-519 | − | GCCCAGGUGCCGCGGCGCGC | 20 | 905 |
| HSV1-UL19-2274 | − | AGGUGCCGCGGCGCGCAGGG | 20 | 2531 |
| HSV1-UL19-2275 | − | GCGCAGGGAUGGACCACGGC | 20 | 2532 |
| HSV1-UL19-2276 | − | CCACGGCCAGGACGCCGUGU | 20 | 2533 |
| HSV1-UL19-2277 | − | UUCCGCCGGCCCUGCAACCC | 20 | 2534 |
| HSV1-UL19-525 | − | UCCGCCGGCCCUGCAACCCC | 20 | 911 |
| HSV1-UL19-526 | − | CCGCCGGCCCUGCAACCCCC | 20 | 912 |
| HSV1-UL19-2280 | − | CAACCCCCGGGGACGCGCCG | 20 | 2535 |
| HSV1-UL19-528 | − | AACCCCCGGGGACGCGCCGC | 20 | 914 |
| HSV1-UL19-529 | − | ACCCCCGGGGACGCGCCGCC | 20 | 915 |
| HSV1-UL19-2283 | − | GCGCCGCCGGGGGCGUUUAC | 20 | 2536 |
| HSV1-UL19-532 | − | CGCCGCCGGGGGCGUUUACG | 20 | 918 |
| HSV1-UL19-533 | − | GCCGCCGGGGGCGUUUACGC | 20 | 919 |
| HSV1-UL19-534 | − | CCGCCGGGGGCGUUUACGCG | 20 | 920 |
| HSV1-UL19-2287 | − | GGGGCGUUUACGCGGGGGAC | 20 | 2537 |
| HSV1-UL19-536 | − | GGGCGUUUACGCGGGGGACA | 20 | 922 |
| HSV1-UL19-2289 | − | GCGUUUACGCGGGGGACAAG | 20 | 2538 |
| HSV1-UL19-537 | − | CGUUUACGCGGGGGACAAGG | 20 | 923 |
| HSV1-UL19-538 | − | GUUUACGCGGGGGACAAGGA | 20 | 924 |
| HSV1-UL19-539 | − | UUUACGCGGGGGACAAGGAG | 20 | 925 |
| HSV1-UL19-2293 | − | CCCUCAUGUACGACCACGGC | 20 | 2539 |
| HSV1-UL19-2294 | − | CACGGCCAGAGCGACCCGUC | 20 | 2540 |
| HSV1-UL19-2295 | − | UUCGCGGCCACGGCCAACCC | 20 | 2541 |
| HSV1-UL19-2296 | − | GGCGUCGCAGCGAUUUUCGU | 20 | 2542 |
| HSV1-UL19-548 | − | GCGUCGCAGCGAUUUUCGUA | 20 | 934 |
| HSV1-UL19-549 | − | CGUCGCAGCGAUUUUCGUAC | 20 | 935 |
| HSV1-UL19-2299 | − | GUACGGGGACCUGCUCUAUA | 20 | 2543 |
| HSV1-UL19-551 | − | UACGGGGACCUGCUCUAUAA | 20 | 937 |
| HSV1-UL19-2301 | − | UAACGGGGCCUACCACCUCA | 20 | 2544 |
| HSV1-UL19-554 | − | AACGGGGCCUACCACCUCAA | 20 | 940 |
| HSV1-UL19-2303 | − | UCGCCGCCAAACAUCGCUGC | 20 | 2545 |
| HSV1-UL19-559 | − | CGCCGCCAAACAUCGCUGCC | 20 | 945 |
| HSV1-UL19-2305 | − | GCUGCCUGGAGCGCCUGAUC | 20 | 2546 |
| HSV1-UL19-560 | − | CUGCCUGGAGCGCCUGAUCG | 20 | 946 |
| HSV1-UL19-2307 | − | UGGAGCGCCUGAUCGUGGAG | 20 | 2547 |
| HSV1-UL19-2308 | − | ACGUACAGUUUAAGCGCCCC | 20 | 2548 |
| HSV1-UL19-566 | − | CGUACAGUUUAAGCGCCCCC | 20 | 952 |
| HSV1-UL19-2310 | − | UAAGCGCCCCCCGGGGUGCC | 20 | 2549 |
| HSV1-UL19-2311 | − | CCCCGGGGUGCCGCGAACUC | 20 | 2550 |
| HSV1-UL19-569 | − | CCCGGGGUGCCGCGAACUCG | 20 | 955 |
| HSV1-UL19-2313 | − | CGGGGUGCCGCGAACUCGUG | 20 | 2551 |
| HSV1-UL19-2314 | − | AGGACCCGUGUGGCCUGUUU | 20 | 2552 |
| HSV1-UL19-572 | − | GGACCCGUGUGGCCUGUUUC | 20 | 958 |
| HSV1-UL19-2316 | − | CCUCCUCCGCAGUGCCCGCA | 20 | 2553 |
| HSV1-UL19-574 | − | CUCCUCCGCAGUGCCCGCAA | 20 | 960 |
| HSV1-UL19-575 | − | UCCUCCGCAGUGCCCGCAAC | 20 | 961 |
| HSV1-UL19-576 | − | CCUCCGCAGUGCCCGCAACG | 20 | 962 |
| HSV1-UL19-2320 | − | CGCAACGGGGAAGCCCACGC | 20 | 2554 |
| HSV1-UL19-577 | − | GCAACGGGGAAGCCCACGCG | 20 | 963 |
| HSV1-UL19-578 | − | CAACGGGGAAGCCCACGCGC | 20 | 964 |
| HSV1-UL19-2323 | − | UCUAUGACGCAUCCCCGCUC | 20 | 2555 |
| HSV1-UL19-579 | − | CUAUGACGCAUCCCCGCUCA | 20 | 965 |
| HSV1-UL19-582 | − | AACGUCCAGGCCGUCCU | 17 | 968 |
| HSV1-UL19-2326 | − | GGCCGUCCUCGGGGCGU | 17 | 2556 |
| HSV1-UL19-2327 | − | AGAUGCUGCACGUGCUG | 17 | 2557 |
| HSV1-UL19-587 | − | GAUGCUGCACGUGCUGC | 17 | 973 |
| HSV1-UL19-2329 | − | UGCCGAUGCAACGAUAC | 17 | 2558 |
| HSV1-UL19-2330 | − | AACGGCCGCCUGGCCAC | 17 | 2559 |
| HSV1-UL19-2331 | − | CUGGCCACCAGGGUGGC | 17 | 2560 |
| HSV1-UL19-2332 | − | CCGGGCGACCCUGGUCG | 17 | 2561 |
| HSV1-UL19-2333 | − | CUGGUCGCCGAGCUAAA | 17 | 2562 |
| HSV1-UL19-2334 | − | GCUAAAGCGAAGCUUCU | 17 | 2563 |
| HSV1-UL19-2335 | − | AGCGAAGCUUCUGCGAG | 17 | 2564 |
| HSV1-UL19-2336 | − | GCGAGACGAGCUUUUUC | 17 | 2565 |
| HSV1-UL19-2337 | − | GCUUUUUCCUGGGCAAG | 17 | 2566 |
| HSV1-UL19-2338 | − | GGCAAGGCGGGCCACCG | 17 | 2567 |
| HSV1-UL19-604 | − | GCAAGGCGGGCCACCGC | 17 | 990 |
| HSV1-UL19-605 | − | CAAGGCGGGCCACCGCC | 17 | 991 |
| HSV1-UL19-2341 | − | CCACCGCCGGGAGGCCG | 17 | 2568 |
| HSV1-UL19-2342 | − | CCGUCGAGGCCUGGCUC | 17 | 2569 |
| HSV1-UL19-2343 | − | GACGCAUGCCGACACGC | 17 | 2570 |
| HSV1-UL19-2344 | − | GCGCGGGCGGCCGGUCG | 17 | 2571 |
| HSV1-UL19-616 | − | CGCGGGCGGCCGGUCGA | 17 | 1002 |
| HSV1-UL19-2346 | − | GCCUCCUGCAGUCCUUC | 17 | 2572 |
| HSV1-UL19-2347 | − | UGCAGUCCUUCCUGAAA | 17 | 2573 |
| HSV1-UL19-619 | − | GCAGUCCUUCCUGAAAG | 17 | 1005 |
| HSV1-UL19-2349 | − | AGUCCUUCCUGAAAGUG | 17 | 2574 |
| HSV1-UL19-2350 | − | CCUGAAAGUGGAGGACA | 17 | 2575 |
| HSV1-UL19-2351 | − | CGUGCCGGUGACGUACG | 17 | 2576 |
| HSV1-UL19-2352 | − | CGUACGGCGAGAUGGUC | 17 | 2577 |
| HSV1-UL19-2353 | − | CGGCGAGAUGGUCCUGA | 17 | 2578 |
| HSV1-UL19-624 | − | GGCGAGAUGGUCCUGAA | 17 | 1010 |
| HSV1-UL19-2355 | − | UGGUCACGGCGCUCGUG | 17 | 2579 |
| HSV1-UL19-2356 | − | GUGAUGGGCAAGGCCGU | 17 | 2580 |
| HSV1-UL19-2357 | − | GCAAGGCCGUGCGAAGU | 17 | 2581 |
| HSV1-UL19-2358 | − | UGCGAAGUCUGGACGAC | 17 | 2582 |
| HSV1-UL19-2359 | − | ACGUGGGCCGCCACCUG | 17 | 2583 |
| HSV1-UL19-635 | − | CGUGGGCCGCCACCUGC | 17 | 1021 |
| HSV1-UL19-2361 | − | GCCACCUGCUGGAGAUG | 17 | 2584 |
| HSV1-UL19-636 | − | CCACCUGCUGGAGAUGC | 17 | 1022 |
| HSV1-UL19-2363 | − | ACCUGCUGGAGAUGCAG | 17 | 2585 |
| HSV1-UL19-637 | − | CCUGCUGGAGAUGCAGG | 17 | 1023 |
| HSV1-UL19-2365 | − | AGGAGGAGCAGCUCGAC | 17 | 2586 |
| HSV1-UL19-2366 | − | ACCUGAACCGGCAGACG | 17 | 2587 |
| HSV1-UL19-2367 | − | GAACCGGCAGACGCUGG | 17 | 2588 |
| HSV1-UL19-2368 | − | GCAGACGCUGGACGAGC | 17 | 2589 |
| HSV1-UL19-2369 | − | AGACGCUGGACGAGCUC | 17 | 2590 |
| HSV1-UL19-2370 | − | AGACGACGCGCGUGCGC | 17 | 2591 |
| HSV1-UL19-2371 | − | GGAUCUGGUGUCCAUCG | 17 | 2592 |
| HSV1-UL19-2372 | − | AUCUGGUGUCCAUCGGC | 17 | 2593 |
| HSV1-UL19-2373 | − | GCGAGAAGCUGGUCUUU | 17 | 2594 |
| HSV1-UL19-644 | − | CGAGAAGCUGGUCUUUC | 17 | 1030 |
| HSV1-UL19-2375 | − | UGGUCUUUCUGGAGGCC | 17 | 2595 |
| HSV1-UL19-646 | − | GGUCUUUCUGGAGGCCC | 17 | 1032 |
| HSV1-UL19-2377 | − | UCUUUCUGGAGGCCCUG | 17 | 2596 |
| HSV1-UL19-2378 | − | ACGUUCCCUACCCCCUG | 17 | 2597 |
| HSV1-UL19-2379 | − | ACCCCCUGGUGGGCGCC | 17 | 2598 |
| HSV1-UL19-2380 | − | UGACGUUCGUCCUGCCC | 17 | 2599 |
| HSV1-UL19-2381 | − | GCCUGUUCAAUCCGGUC | 17 | 2600 |
| HSV1-UL19-654 | − | CCUGUUCAAUCCGGUCA | 17 | 1040 |
| HSV1-UL19-2383 | − | ACGGUUUGCCGCGCACG | 17 | 2601 |
| HSV1-UL19-656 | − | CGGUUUGCCGCGCACGC | 17 | 1042 |
| HSV1-UL19-657 | − | GGUUUGCCGCGCACGCC | 17 | 1043 |
| HSV1-UL19-2386 | − | UCCCCGCCCCCGGCCAC | 17 | 2602 |
| HSV1-UL19-2387 | − | CCCCGCCAGCUGUUUUU | 17 | 2603 |
| HSV1-UL19-661 | − | CCCGCCAGCUGUUUUUU | 17 | 1047 |
| HSV1-UL19-662 | − | CCGCCAGCUGUUUUUUU | 17 | 1048 |
| HSV1-UL19-663 | − | CGCCAGCUGUUUUUUUG | 17 | 1049 |
| HSV1-UL19-664 | − | GCCAGCUGUUUUUUUGG | 17 | 1050 |
| HSV1-UL19-2392 | − | AGCUGUUUUUUUGGGGG | 17 | 2604 |
| HSV1-UL19-2393 | − | AGGUGCUGCGCCUGUCU | 17 | 2605 |
| HSV1-UL19-667 | − | GGUGCUGCGCCUGUCUC | 17 | 1053 |
| HSV1-UL19-2395 | − | GUCUCUGGAACACGCGA | 17 | 2606 |
| HSV1-UL19-668 | − | UCUCUGGAACACGCGAU | 17 | 1054 |
| HSV1-UL19-2397 | − | UGUGCCACCCUUCGCUG | 17 | 2607 |
| HSV1-UL19-2398 | − | GAACGUUGACGCGGCGG | 17 | 2608 |
| HSV1-UL19-672 | − | AACGUUGACGCGGCGGU | 17 | 1058 |
| HSV1-UL19-673 | − | ACGUUGACGCGGCGGUC | 17 | 1059 |
| HSV1-UL19-2401 | − | CCUUAACCGCGACCCCG | 17 | 2609 |
| HSV1-UL19-2402 | − | CGAAGCCGCCAAUCCGU | 17 | 2610 |
| HSV1-UL19-676 | − | GAAGCCGCCAAUCCGUA | 17 | 1062 |
| HSV1-UL19-2404 | − | ACAUGCAGCAGCUGUUU | 17 | 2611 |
| HSV1-UL19-2405 | − | CAGCUGUUUUUGAACGC | 17 | 2612 |
| HSV1-UL19-683 | − | AGCUGUUUUUGAACGCC | 17 | 1069 |
| HSV1-UL19-684 | − | GCUGUUUUUGAACGCCU | 17 | 1070 |
| HSV1-UL19-2408 | − | GGGGCAGCGCCUGGCCC | 17 | 2613 |
| HSV1-UL19-2409 | − | CAGCGCCUGGCCCACGG | 17 | 2614 |
| HSV1-UL19-2410 | − | GCCCACGGGCGGGUCCG | 17 | 2615 |
| HSV1-UL19-2411 | − | GGCGGGUCCGAUGGGUC | 17 | 2616 |
| HSV1-UL19-694 | − | GCGGGUCCGAUGGGUCG | 17 | 1080 |
| HSV1-UL19-2413 | − | CGGAAGGCCAGAUGACC | 17 | 2617 |
| HSV1-UL19-696 | − | GGAAGGCCAGAUGACCC | 17 | 1082 |
| HSV1-UL19-2415 | − | CAACGCCAACCUGGCUC | 17 | 2618 |
| HSV1-UL19-2416 | − | CCGCGUUCGACUUCUUU | 17 | 2619 |
| HSV1-UL19-698 | − | CGCGUUCGACUUCUUUG | 17 | 1084 |
| HSV1-UL19-699 | − | GCGUUCGACUUCUUUGU | 17 | 1085 |
| HSV1-UL19-2419 | − | UUGUGGGGGUGGCCGAC | 17 | 2620 |
| HSV1-UL19-703 | − | UGUGGGGGUGGCCGACG | 17 | 1089 |
| HSV1-UL19-2421 | − | UGGCCGACGUGGAGCUG | 17 | 2621 |
| HSV1-UL19-704 | − | GGCCGACGUGGAGCUGC | 17 | 1090 |
| HSV1-UL19-705 | − | GCCGACGUGGAGCUGCC | 17 | 1091 |
| HSV1-UL19-706 | − | CCGACGUGGAGCUGCCG | 17 | 1092 |
| HSV1-UL19-707 | − | CGACGUGGAGCUGCCGG | 17 | 1093 |
| HSV1-UL19-708 | − | GACGUGGAGCUGCCGGG | 17 | 1094 |
| HSV1-UL19-709 | − | ACGUGGAGCUGCCGGGG | 17 | 1095 |
| HSV1-UL19-2428 | − | ACGUUCCCCCGGCCGGC | 17 | 2622 |
| HSV1-UL19-713 | − | CGUUCCCCCGGCCGGCC | 17 | 1099 |
| HSV1-UL19-714 | − | GUUCCCCCGGCCGGCCC | 17 | 1100 |
| HSV1-UL19-715 | − | UUCCCCCGGCCGGCCCG | 17 | 1101 |
| HSV1-UL19-716 | − | UCCCCCGGCCGGCCCGG | 17 | 1102 |
| HSV1-UL19-2433 | − | AGGCCACCUGGCGCGUG | 17 | 2623 |
| HSV1-UL19-2434 | − | CUAUGUCCGGCGGCGUU | 17 | 2624 |
| HSV1-UL19-724 | − | UAUGUCCGGCGGCGUUC | 17 | 1110 |
| HSV1-UL19-2436 | − | GCGGCGUUCCGGGACGC | 17 | 2625 |
| HSV1-UL19-726 | − | CGGCGUUCCGGGACGCC | 17 | 1112 |
| HSV1-UL19-2438 | − | UCCGGGACGCCCGGGGC | 17 | 2626 |
| HSV1-UL19-729 | − | CCGGGACGCCCGGGGCC | 17 | 1115 |
| HSV1-UL19-2440 | − | ACGCCCGGGGCCUGGAG | 17 | 2627 |
| HSV1-UL19-730 | − | CGCCCGGGGCCUGGAGC | 17 | 1116 |
| HSV1-UL19-731 | − | GCCCGGGGCCUGGAGCU | 17 | 1117 |
| HSV1-UL19-2443 | − | GGGGCCUGGAGCUGGGG | 17 | 2628 |
| HSV1-UL19-734 | − | GGGCCUGGAGCUGGGGG | 17 | 1120 |
| HSV1-UL19-2445 | − | CACCAUCGCCGCCGUUC | 17 | 2629 |
| HSV1-UL19-737 | − | ACCAUCGCCGCCGUUCG | 17 | 1123 |
| HSV1-UL19-2447 | − | GGCCGCCAUACACGGCA | 17 | 2630 |
| HSV1-UL19-2448 | − | CAGUGCAUCACCAGCUA | 17 | 2631 |
| HSV1-UL19-747 | − | AGUGCAUCACCAGCUAC | 17 | 1133 |
| HSV1-UL19-2450 | − | CGCGGUGCGCGGCGUUC | 17 | 2632 |
| HSV1-UL19-2451 | − | GUACGUCGUGACCUACC | 17 | 2633 |
| HSV1-UL19-751 | − | UACGUCGUGACCUACCU | 17 | 1137 |
| HSV1-UL19-752 | − | ACGUCGUGACCUACCUC | 17 | 1138 |
| HSV1-UL19-753 | − | CGUCGUGACCUACCUCG | 17 | 1139 |
| HSV1-UL19-754 | − | GUCGUGACCUACCUCGG | 17 | 1140 |
| HSV1-UL19-2456 | − | CCUCGGGGGAGACCUUC | 17 | 2634 |
| HSV1-UL19-2457 | − | UCGGGGGAGACCUUCCC | 17 | 2635 |
| HSV1-UL19-755 | − | CGGGGGAGACCUUCCCG | 17 | 1141 |
| HSV1-UL19-2459 | − | GAGUGCAUGGCCGUGUA | 17 | 2636 |
| HSV1-UL19-757 | − | AGUGCAUGGCCGUGUAC | 17 | 1143 |
| HSV1-UL19-2461 | − | GGACCUGGUGGCGCACG | 17 | 2637 |
| HSV1-UL19-2462 | − | ACUUUACCCUGACCGGC | 17 | 2638 |
| HSV1-UL19-765 | − | CUUUACCCUGACCGGCC | 17 | 1151 |
| HSV1-UL19-2464 | − | CCCUGACCGGCCCGGAG | 17 | 2639 |
| HSV1-UL19-2465 | − | GACCGGCCCGGAGCUGG | 17 | 2640 |
| HSV1-UL19-2466 | − | GGGCGGGCAGGCGCAAG | 17 | 2641 |
| HSV1-UL19-2467 | − | GGCAGGCGCAAGCCGAG | 17 | 2642 |
| HSV1-UL19-2468 | − | GAGCUGAAUCACCUAAU | 17 | 2643 |
| HSV1-UL19-2469 | − | CUGCUGCCACCCCUCGU | 17 | 2644 |
| HSV1-UL19-772 | − | UGCUGCCACCCCUCGUG | 17 | 1158 |
| HSV1-UL19-2471 | − | UGAUGCGGCGCGCGGCC | 17 | 2645 |
| HSV1-UL19-2472 | − | GACCGCCAUCGCGACUG | 17 | 2646 |
| HSV1-UL19-2473 | − | GCGACUGCCGGGUUAGC | 17 | 2647 |
| HSV1-UL19-779 | − | CGACUGCCGGGUUAGCG | 17 | 1165 |
| HSV1-UL19-780 | − | GACUGCCGGGUUAGCGC | 17 | 1166 |
| HSV1-UL19-781 | − | ACUGCCGGGUUAGCGCG | 17 | 1167 |
| HSV1-UL19-2477 | − | CAUGUAACGUGGCGACC | 17 | 2648 |
| HSV1-UL19-2478 | − | CUGCACAACACCCAGGC | 17 | 2649 |
| HSV1-UL19-2479 | − | ACACCCAGGCCCGAGCC | 17 | 2650 |
| HSV1-UL19-2480 | − | CCCGAGCCGCGGACGCC | 17 | 2651 |
| HSV1-UL19-2481 | − | GCGGAUGACCGGCCGCA | 17 | 2652 |
| HSV1-UL19-793 | − | CGGAUGACCGGCCGCAC | 17 | 1179 |
| HSV1-UL19-794 | − | GGAUGACCGGCCGCACC | 17 | 1180 |
| HSV1-UL19-795 | − | GAUGACCGGCCGCACCG | 17 | 1181 |
| HSV1-UL19-2485 | − | ACCGGCCGCACCGGGGG | 17 | 2653 |
| HSV1-UL19-2486 | − | CCGCACCGGGGGGCGGA | 17 | 2654 |
| HSV1-UL19-2487 | − | AUGGUGCCCGCCUUCUC | 17 | 2655 |
| HSV1-UL19-801 | − | UGGUGCCCGCCUUCUCG | 17 | 1187 |
| HSV1-UL19-2489 | − | GGGGCCGCUGCUGCACC | 17 | 2656 |
| HSV1-UL19-804 | − | GGGCCGCUGCUGCACCG | 17 | 1190 |
| HSV1-UL19-805 | − | GGCCGCUGCUGCACCGC | 17 | 1191 |
| HSV1-UL19-2492 | − | GCGUAUACGCCACCCUG | 17 | 2657 |
| HSV1-UL19-2493 | − | UGCAGAACAUGGUGGUC | 17 | 2658 |
| HSV1-UL19-810 | − | GCAGAACAUGGUGGUCC | 17 | 1196 |
| HSV1-UL19-2495 | − | CCCGGAGAUCGCCCCCG | 17 | 2659 |
| HSV1-UL19-2496 | − | CGGAGAUCGCCCCCGGC | 17 | 2660 |
| HSV1-UL19-812 | − | GGAGAUCGCCCCCGGCG | 17 | 1198 |
| HSV1-UL19-2498 | − | GCCCCAGCGACCCCGUG | 17 | 2661 |
| HSV1-UL19-2499 | − | CAACGCCAUGUUUCACA | 17 | 2662 |
| HSV1-UL19-2500 | − | ACAACGGGCGCGUGGUA | 17 | 2663 |
| HSV1-UL19-2501 | − | CGGGCGCGUGGUAGUGG | 17 | 2664 |
| HSV1-UL19-2502 | − | GCUGGCCCACAACAUGG | 17 | 2665 |
| HSV1-UL19-2503 | − | GCUCGGCGGCGCCCGAC | 17 | 2666 |
| HSV1-UL19-2504 | − | CAACAUGCGCAUAUUCG | 17 | 2667 |
| HSV1-UL19-832 | − | AACAUGCGCAUAUUCGA | 17 | 1218 |
| HSV1-UL19-2506 | − | CGACGGGGCGUUGCACG | 17 | 2668 |
| HSV1-UL19-835 | − | GACGGGGCGUUGCACGC | 17 | 1221 |
| HSV1-UL19-2508 | − | UGAUGGCCCCCCAGCAU | 17 | 2669 |
| HSV1-UL19-2509 | − | CGUCCACGCGCUGUUCG | 17 | 2670 |
| HSV1-UL19-839 | − | GUCCACGCGCUGUUCGC | 17 | 1225 |
| HSV1-UL19-2511 | − | CCGGGGCCGACCACGUG | 17 | 2671 |
| HSV1-UL19-2512 | − | CCCUGGUCCCCCCGGCU | 17 | 2672 |
| HSV1-UL19-848 | − | CCUGGUCCCCCCGGCUC | 17 | 1234 |
| HSV1-UL19-849 | − | CUGGUCCCCCCGGCUCU | 17 | 1235 |
| HSV1-UL19-2515 | − | CGUCGUGCAGCACGUCC | 17 | 2673 |
| HSV1-UL19-2516 | − | UCGUGCAGCACGUCCGC | 17 | 2674 |
| HSV1-UL19-2517 | − | CGUCCGCGAGAGCGCGG | 17 | 2675 |
| HSV1-UL19-853 | − | GUCCGCGAGAGCGCGGC | 17 | 1239 |
| HSV1-UL19-854 | − | UCCGCGAGAGCGCGGCC | 17 | 1240 |
| HSV1-UL19-855 | − | CCGCGAGAGCGCGGCCG | 17 | 1241 |
| HSV1-UL19-2521 | − | GCGAGAGCGCGGCCGGG | 17 | 2676 |
| HSV1-UL19-2522 | − | UGACCUACGCGCUCAUG | 17 | 2677 |
| HSV1-UL19-857 | − | GACCUACGCGCUCAUGG | 17 | 1243 |
| HSV1-UL19-2524 | − | UGCAUCAUCAGCUCAAG | 17 | 2678 |
| HSV1-UL19-2525 | − | CAAGACGGGCCUCCAUC | 17 | 2679 |
| HSV1-UL19-2526 | − | GGGCCUCCAUCCCGGGU | 17 | 2680 |
| HSV1-UL19-2527 | − | GGUUCACCGUCGUCCGA | 17 | 2681 |
| HSV1-UL19-2528 | − | ACAGGACCGCUUUGUGA | 17 | 2682 |
| HSV1-UL19-2529 | − | AGGACCGCUUUGUGACU | 17 | 2683 |
| HSV1-UL19-2530 | − | CUGAGAACGUGCUGUUC | 17 | 2684 |
| HSV1-UL19-868 | − | UGAGAACGUGCUGUUCU | 17 | 1254 |
| HSV1-UL19-2532 | − | UGUUCUCGGAGCGCGCG | 17 | 2685 |
| HSV1-UL19-869 | − | GUUCUCGGAGCGCGCGU | 17 | 1255 |
| HSV1-UL19-2534 | − | CGUCGGAGGCGUACUUC | 17 | 2686 |
| HSV1-UL19-2535 | − | GCUCCAGGUGGCCCGGC | 17 | 2687 |
| HSV1-UL19-2536 | − | GGCCCGGCACGAAACUG | 17 | 2688 |
| HSV1-UL19-877 | − | GCCCGGCACGAAACUGG | 17 | 1263 |
| HSV1-UL19-878 | − | CCCGGCACGAAACUGGC | 17 | 1264 |
| HSV1-UL19-879 | − | CCGGCACGAAACUGGCG | 17 | 1265 |
| HSV1-UL19-880 | − | CGGCACGAAACUGGCGG | 17 | 1266 |
| HSV1-UL19-2541 | − | CGCUCACCCAGCCGCGC | 17 | 2689 |
| HSV1-UL19-2542 | − | CCCAGCCGCGCGCGAAC | 17 | 2690 |
| HSV1-UL19-2543 | − | CGCGCGCGAACGUGGAC | 17 | 2691 |
| HSV1-UL19-2544 | − | CGAACGUGGACCUGGGC | 17 | 2692 |
| HSV1-UL19-2545 | − | GCAACCCCGUCACCGAC | 17 | 2693 |
| HSV1-UL19-2546 | − | UUCCCCAAAACUUUUAC | 17 | 2694 |
| HSV1-UL19-2547 | − | AAACUUUUACCUGGGCC | 17 | 2695 |
| HSV1-UL19-894 | − | AACUUUUACCUGGGCCG | 17 | 1280 |
| HSV1-UL19-2549 | − | GCGGGGCUCCCCCUCUC | 17 | 2696 |
| HSV1-UL19-2550 | − | GCGGCAGCCGUGUACCU | 17 | 2697 |
| HSV1-UL19-899 | − | CGGCAGCCGUGUACCUG | 17 | 1285 |
| HSV1-UL19-2552 | − | UGCGGAACGCGGUCGUG | 17 | 2698 |
| HSV1-UL19-902 | − | GCGGAACGCGGUCGUGG | 17 | 1288 |
| HSV1-UL19-903 | − | CGGAACGCGGUCGUGGC | 17 | 1289 |
| HSV1-UL19-2555 | − | UCGUGGCGGGAAACCGC | 17 | 2699 |
| HSV1-UL19-904 | − | CGUGGCGGGAAACCGCC | 17 | 1290 |
| HSV1-UL19-2557 | − | CCAGCCCGUCCCCGUGU | 17 | 2700 |
| HSV1-UL19-2558 | − | CCAGGUGCCGCGGCGCG | 17 | 2701 |
| HSV1-UL19-912 | − | CAGGUGCCGCGGCGCGC | 17 | 1298 |
| HSV1-UL19-2560 | − | UGCCGCGGCGCGCAGGG | 17 | 2702 |
| HSV1-UL19-2561 | − | CAGGGAUGGACCACGGC | 17 | 2703 |
| HSV1-UL19-2562 | − | CGGCCAGGACGCCGUGU | 17 | 2704 |
| HSV1-UL19-2563 | − | CGCCGGCCCUGCAACCC | 17 | 2705 |
| HSV1-UL19-918 | − | GCCGGCCCUGCAACCCC | 17 | 1304 |
| HSV1-UL19-919 | − | CCGGCCCUGCAACCCCC | 17 | 1305 |
| HSV1-UL19-2566 | − | CCCCCGGGGACGCGCCG | 17 | 2706 |
| HSV1-UL19-921 | − | CCCCGGGGACGCGCCGC | 17 | 1307 |
| HSV1-UL19-922 | − | CCCGGGGACGCGCCGCC | 17 | 1308 |
| HSV1-UL19-2569 | − | CCGCCGGGGGCGUUUAC | 17 | 2707 |
| HSV1-UL19-925 | − | CGCCGGGGGCGUUUACG | 17 | 1311 |
| HSV1-UL19-926 | − | GCCGGGGGCGUUUACGC | 17 | 1312 |
| HSV1-UL19-927 | − | CCGGGGGCGUUUACGCG | 17 | 1313 |
| HSV1-UL19-2573 | − | GCGUUUACGCGGGGGAC | 17 | 2708 |
| HSV1-UL19-929 | − | CGUUUACGCGGGGGACA | 17 | 1315 |
| HSV1-UL19-2575 | − | UUUACGCGGGGGACAAG | 17 | 2709 |
| HSV1-UL19-930 | − | UUACGCGGGGGACAAGG | 17 | 1316 |
| HSV1-UL19-931 | − | UACGCGGGGGACAAGGA | 17 | 1317 |
| HSV1-UL19-932 | − | ACGCGGGGGACAAGGAG | 17 | 1318 |
| HSV1-UL19-2579 | − | UCAUGUACGACCACGGC | 17 | 2710 |
| HSV1-UL19-2580 | − | GGCCAGAGCGACCCGUC | 17 | 2711 |
| HSV1-UL19-2581 | − | GCGGCCACGGCCAACCC | 17 | 2712 |
| HSV1-UL19-2582 | − | GUCGCAGCGAUUUUCGU | 17 | 2713 |
| HSV1-UL19-941 | − | UCGCAGCGAUUUUCGUA | 17 | 1327 |
| HSV1-UL19-942 | − | CGCAGCGAUUUUCGUAC | 17 | 1328 |
| HSV1-UL19-2585 | − | CGGGGACCUGCUCUAUA | 17 | 2714 |
| HSV1-UL19-944 | − | GGGGACCUGCUCUAUAA | 17 | 1330 |
| HSV1-UL19-2587 | − | CGGGGCCUACCACCUCA | 17 | 2715 |
| HSV1-UL19-947 | − | GGGGCCUACCACCUCAA | 17 | 1333 |
| HSV1-UL19-2589 | − | CCGCCAAACAUCGCUGC | 17 | 2716 |
| HSV1-UL19-952 | − | CGCCAAACAUCGCUGCC | 17 | 1338 |
| HSV1-UL19-2591 | − | GCCUGGAGCGCCUGAUC | 17 | 2717 |
| HSV1-UL19-953 | − | CCUGGAGCGCCUGAUCG | 17 | 1339 |
| HSV1-UL19-2593 | − | AGCGCCUGAUCGUGGAG | 17 | 2718 |
| HSV1-UL19-2594 | − | UACAGUUUAAGCGCCCC | 17 | 2719 |
| HSV1-UL19-959 | − | ACAGUUUAAGCGCCCCC | 17 | 1345 |
| HSV1-UL19-2596 | − | GCGCCCCCCGGGGUGCC | 17 | 2720 |
| HSV1-UL19-2597 | − | CGGGGUGCCGCGAACUC | 17 | 2721 |
| HSV1-UL19-962 | − | GGGGUGCCGCGAACUCG | 17 | 1348 |
| HSV1-UL19-2599 | − | GGUGCCGCGAACUCGUG | 17 | 2722 |
| HSV1-UL19-2600 | − | ACCCGUGUGGCCUGUUU | 17 | 2723 |
| HSV1-UL19-965 | − | CCCGUGUGGCCUGUUUC | 17 | 1351 |
| HSV1-UL19-2602 | − | CCUCCGCAGUGCCCGCA | 17 | 2724 |
| HSV1-UL19-967 | − | CUCCGCAGUGCCCGCAA | 17 | 1353 |
| HSV1-UL19-968 | − | UCCGCAGUGCCCGCAAC | 17 | 1354 |
| HSV1-UL19-969 | − | CCGCAGUGCCCGCAACG | 17 | 1355 |
| HSV1-UL19-2606 | − | AACGGGGAAGCCCACGC | 17 | 2725 |
| HSV1-UL19-970 | − | ACGGGGAAGCCCACGCG | 17 | 1356 |
| HSV1-UL19-971 | − | CGGGGAAGCCCACGCGC | 17 | 1357 |
| HSV1-UL19-2609 | − | AUGACGCAUCCCCGCUC | 17 | 2726 |
| HSV1-UL19-972 | − | UGACGCAUCCCCGCUCA | 17 | 1358 |
| HSV1-UL19-2611 | + | UCAAACGCCCCGAGGACGGC | 20 | 2727 |
| HSV1-UL19-2612 | + | GUGCCGCGCUCAAACGCCCC | 20 | 2728 |
| HSV1-UL19-2613 | + | CCGUGCCGCGCUCAAACGCC | 20 | 2729 |
| HSV1-UL19-983 | + | GCAUCGGCAACAACAAAGCC | 20 | 1369 |
| HSV1-UL19-2615 | + | UGCAUCGGCAACAACAAAGC | 20 | 2730 |
| HSV1-UL19-2616 | + | AGCUCGGCGACCAGGGUCGC | 20 | 2731 |
| HSV1-UL19-2617 | + | CUUCGCUUUAGCUCGGCGAC | 20 | 2732 |
| HSV1-UL19-2618 | + | CCAGGAAAAAGCUCGUCUCG | 20 | 2733 |
| HSV1-UL19-995 | + | GGCGGUGGCCCGCCUUGCCC | 20 | 1381 |
| HSV1-UL19-2620 | + | CGGCGGUGGCCCGCCUUGCC | 20 | 2734 |
| HSV1-UL19-2621 | + | GCGUGGCCGUGGUGAGGUCC | 20 | 2735 |
| HSV1-UL19-2622 | + | CGGAGGGCUGCGUGGCCGUG | 20 | 2736 |
| HSV1-UL19-2623 | + | UCAGACGGGGCACGGCCACG | 20 | 2737 |
| HSV1-UL19-1006 | + | CGUCAGACGGGGCACGGCCA | 20 | 1392 |
| HSV1-UL19-2625 | + | GCGUCAGACGGGGCACGGCC | 20 | 2738 |
| HSV1-UL19-1010 | + | GCGUGUCGGCAUGCGUCAGA | 20 | 1396 |
| HSV1-UL19-2627 | + | CGCGUGUCGGCAUGCGUCAG | 20 | 2739 |
| HSV1-UL19-2628 | + | GUUUGAUCGGGGCGGUGGUG | 20 | 2740 |
| HSV1-UL19-1017 | + | UGCAGGAGGCGCUGUUUGAU | 20 | 1403 |
| HSV1-UL19-2630 | + | CUGCAGGAGGCGCUGUUUGA | 20 | 2741 |
| HSV1-UL19-1019 | + | CCACUUUCAGGAAGGACUGC | 20 | 1405 |
| HSV1-UL19-2632 | + | UCCACUUUCAGGAAGGACUG | 20 | 2742 |
| HSV1-UL19-2633 | + | CGGUGUCCUCCACUUUCAGG | 20 | 2743 |
| HSV1-UL19-1021 | + | CUUCGGUGUCCUCCACUUUC | 20 | 1407 |
| HSV1-UL19-2635 | + | GCUUCGGUGUCCUCCACUUU | 20 | 2744 |
| HSV1-UL19-2636 | + | GUGACCAGGUUGGCCCCGUU | 20 | 2745 |
| HSV1-UL19-2637 | + | UUCGCACGGCCUUGCCCAUC | 20 | 2746 |
| HSV1-UL19-2638 | + | CCAGCGUCUGCCGGUUCAGG | 20 | 2747 |
| HSV1-UL19-2639 | + | GCGUCGUCUGGGGGGCGCUC | 20 | 2748 |
| HSV1-UL19-1036 | + | GCGCGCACGCGCGUCGUCUG | 20 | 1422 |
| HSV1-UL19-1037 | + | CGCGCGCACGCGCGUCGUCU | 20 | 1423 |
| HSV1-UL19-1038 | + | CCGCGCGCACGCGCGUCGUC | 20 | 1424 |
| HSV1-UL19-2643 | + | UCCGCGCGCACGCGCGUCGU | 20 | 2749 |
| HSV1-UL19-2644 | + | GAAAGACCAGCUUCUCGCCG | 20 | 2750 |
| HSV1-UL19-2645 | + | AUGCGCUUCUCCAGGGCCUC | 20 | 2751 |
| HSV1-UL19-2646 | + | GCGGCGUAGAUGCGCUUCUC | 20 | 2752 |
| HSV1-UL19-1045 | + | AUGGCGCCCACCAGGGGGUA | 20 | 1431 |
| HSV1-UL19-1046 | + | CAUGGCGCCCACCAGGGGGU | 20 | 1432 |
| HSV1-UL19-2649 | + | CCAUGGCGCCCACCAGGGGG | 20 | 2753 |
| HSV1-UL19-1049 | + | CAGGUCCAUGGCGCCCACCA | 20 | 1435 |
| HSV1-UL19-1050 | + | UCAGGUCCAUGGCGCCCACC | 20 | 1436 |
| HSV1-UL19-2652 | + | GUCAGGUCCAUGGCGCCCAC | 20 | 2754 |
| HSV1-UL19-2653 | + | UGAACAGGCCCAGGGGCAGG | 20 | 2755 |
| HSV1-UL19-2654 | + | GGAUUGAACAGGCCCAGGGG | 20 | 2756 |
| HSV1-UL19-1056 | + | UGACCGGAUUGAACAGGCCC | 20 | 1442 |
| HSV1-UL19-2656 | + | AUGACCGGAUUGAACAGGCC | 20 | 2757 |
| HSV1-UL19-2657 | + | CAAACCGUUCCAUGACCGGA | 20 | 2758 |
| HSV1-UL19-2658 | + | CGCGGCAAACCGUUCCAUGA | 20 | 2759 |
| HSV1-UL19-1063 | + | GGAUCCGGGUGGCCGGGGGC | 20 | 1449 |
| HSV1-UL19-1064 | + | GGGAUCCGGGUGGCCGGGGG | 20 | 1450 |
| HSV1-UL19-2661 | + | GGGGAUCCGGGUGGCCGGGG | 20 | 2760 |
| HSV1-UL19-1067 | + | GCGCGGGGAUCCGGGUGGCC | 20 | 1453 |
| HSV1-UL19-1068 | + | GGCGCGGGGAUCCGGGUGGC | 20 | 1454 |
| HSV1-UL19-2664 | + | AGGCGCGGGGAUCCGGGUGG | 20 | 2761 |
| HSV1-UL19-2665 | + | GGGCGGGAAGGCGCGGGGAU | 20 | 2762 |
| HSV1-UL19-1073 | + | CUGGCGGGGCGGGAAGGCGC | 20 | 1459 |
| HSV1-UL19-1074 | + | GCUGGCGGGGCGGGAAGGCG | 20 | 1460 |
| HSV1-UL19-2668 | + | AGCUGGCGGGGCGGGAAGGC | 20 | 2763 |
| HSV1-UL19-1076 | + | AAAAAAACAGCUGGCGGGGC | 20 | 1462 |
| HSV1-UL19-1077 | + | CAAAAAAACAGCUGGCGGGG | 20 | 1463 |
| HSV1-UL19-2671 | + | CCAAAAAAACAGCUGGCGGG | 20 | 2764 |
| HSV1-UL19-1080 | + | UCCCCCAAAAAAACAGCUGG | 20 | 1466 |
| HSV1-UL19-2673 | + | UUCCCCCAAAAAAACAGCUG | 20 | 2765 |
| HSV1-UL19-2674 | + | ACGGUCCCGAUCGCGUGUUC | 20 | 2766 |
| HSV1-UL19-2675 | + | CGCGUCAACGUUCAUCAGCG | 20 | 2767 |
| HSV1-UL19-2676 | + | CGCCGCGUCAACGUUCAUCA | 20 | 2768 |
| HSV1-UL19-1093 | + | GUACGGAUUGGCGGCUUCGA | 20 | 1479 |
| HSV1-UL19-2678 | + | CGUACGGAUUGGCGGCUUCG | 20 | 2769 |
| HSV1-UL19-2679 | + | GGCCGCCACGUACGCCCCGU | 20 | 2770 |
| HSV1-UL19-1099 | + | AUGUCUGCGGCGGGGCCGGC | 20 | 1485 |
| HSV1-UL19-2681 | + | CAUGUCUGCGGCGGGGCCGG | 20 | 2771 |
| HSV1-UL19-1103 | + | CAGCUGCUGCAUGUCUGCGG | 20 | 1489 |
| HSV1-UL19-2683 | + | ACAGCUGCUGCAUGUCUGCG | 20 | 2772 |
| HSV1-UL19-2684 | + | GCGACCCAUCGGACCCGCCC | 20 | 2773 |
| HSV1-UL19-2685 | + | AUCUGGCCUUCCGCGACCCA | 20 | 2774 |
| HSV1-UL19-1113 | + | UCGGGCUGCAUAAACUGCUC | 20 | 1499 |
| HSV1-UL19-2687 | + | GUCGGGCUGCAUAAACUGCU | 20 | 2775 |
| HSV1-UL19-2688 | + | CAAGAGCCAGGUUGGCGUUG | 20 | 2776 |
| HSV1-UL19-2689 | + | UCGAACGCGGGGUGCAGCUC | 20 | 2777 |
| HSV1-UL19-1120 | + | CCCCACAAAGAAGUCGAACG | 20 | 1506 |
| HSV1-UL19-2691 | + | CCCCCACAAAGAAGUCGAAC | 20 | 2778 |
| HSV1-UL19-2692 | + | CGGCCACCCCCACAAAGAAG | 20 | 2779 |
| HSV1-UL19-2693 | + | CCACGUCGGCCACCCCCACA | 20 | 2780 |
| HSV1-UL19-1123 | + | AUCUCCCCCGGGCCGGCCGG | 20 | 1509 |
| HSV1-UL19-1124 | + | GAUCUCCCCCGGGCCGGCCG | 20 | 1510 |
| HSV1-UL19-1125 | + | GGAUCUCCCCCGGGCCGGCC | 20 | 1511 |
| HSV1-UL19-1126 | + | UGGAUCUCCCCCGGGCCGGC | 20 | 1512 |
| HSV1-UL19-2698 | + | CUGGAUCUCCCCCGGGCCGG | 20 | 2781 |
| HSV1-UL19-2699 | + | CCAGGUGGCCUGGAUCUCCC | 20 | 2782 |
| HSV1-UL19-2700 | + | UUCACCACGCGCCAGGUGGC | 20 | 2783 |
| HSV1-UL19-1135 | + | ACGCCGCCGGACAUAGCGCC | 20 | 1521 |
| HSV1-UL19-2702 | + | AACGCCGCCGGACAUAGCGC | 20 | 2784 |
| HSV1-UL19-2703 | + | CCGGGCGUCCCGGAACGCCG | 20 | 2785 |
| HSV1-UL19-1137 | + | GCUCCAGGCCCCGGGCGUCC | 20 | 1523 |
| HSV1-UL19-2705 | + | AGCUCCAGGCCCCGGGCGUC | 20 | 2786 |
| HSV1-UL19-2706 | + | CCCACCCCCAGCUCCAGGCC | 20 | 2787 |
| HSV1-UL19-1145 | + | CGAACGGCGGCGAUGGUGGC | 20 | 1531 |
| HSV1-UL19-1146 | + | GCGAACGGCGGCGAUGGUGG | 20 | 1532 |
| HSV1-UL19-2709 | + | CGCGAACGGCGGCGAUGGUG | 20 | 2788 |
| HSV1-UL19-2710 | + | UUGCGGUCGUCGAACGCCCC | 20 | 2789 |
| HSV1-UL19-2711 | + | CCGCCGGGUAGUUGCGGUCG | 20 | 2790 |
| HSV1-UL19-2712 | + | CUGCAGCAGGUAAAACACCG | 20 | 2791 |
| HSV1-UL19-2713 | + | CCACGAGCCGGGCCAGGGCG | 20 | 2792 |
| HSV1-UL19-2714 | + | CACUGGACCACGAGCCGGGC | 20 | 2793 |
| HSV1-UL19-2715 | + | GUGAUGCACUGGACCACGAG | 20 | 2794 |
| HSV1-UL19-2716 | + | AGCUGGUGAUGCACUGGACC | 20 | 2795 |
| HSV1-UL19-2717 | + | UUCCAGUAGCUGGUGAUGCA | 20 | 2796 |
| HSV1-UL19-2718 | + | AGACCAGCGAGUAGUCGUUC | 20 | 2797 |
| HSV1-UL19-2719 | + | GGUCACGACGUACGAGACCA | 20 | 2798 |
| HSV1-UL19-2720 | + | CCCGAGGUAGGUCACGACGU | 20 | 2799 |
| HSV1-UL19-2721 | + | ACUCCUCGGGAAGGUCUCCC | 20 | 2800 |
| HSV1-UL19-1166 | + | UACACGGCCAUGCACUCCUC | 20 | 1552 |
| HSV1-UL19-1167 | + | GUACACGGCCAUGCACUCCU | 20 | 1553 |
| HSV1-UL19-2724 | + | GGUACACGGCCAUGCACUCC | 20 | 2801 |
| HSV1-UL19-2725 | + | AAGUCAUCAACCAGCUGGGC | 20 | 2802 |
| HSV1-UL19-2726 | + | AGGGUAAAGUCAUCAACCAG | 20 | 2803 |
| HSV1-UL19-2727 | + | CCGCCCAGCUCCGGGCCGGU | 20 | 2804 |
| HSV1-UL19-2728 | + | UUGCGCCUGCCCGCCCAGCU | 20 | 2805 |
| HSV1-UL19-2729 | + | CACGAGGGGUGGCAGCAGCG | 20 | 2806 |
| HSV1-UL19-1187 | + | GGGCGUCACAGUCCCACACG | 20 | 1573 |
| HSV1-UL19-2731 | + | AGGGCGUCACAGUCCCACAC | 20 | 2807 |
| HSV1-UL19-2732 | + | UCAGGGCGUCACAGUCCCAC | 20 | 2808 |
| HSV1-UL19-2733 | + | UCCAGGGCCGCGCGCCGCAU | 20 | 2809 |
| HSV1-UL19-2734 | + | CGGCAGUCGCGAUGGCGGUC | 20 | 2810 |
| HSV1-UL19-1198 | + | GUUACAUGCCGCCGCGUACA | 20 | 1584 |
| HSV1-UL19-2736 | + | CGUUACAUGCCGCCGCGUAC | 20 | 2811 |
| HSV1-UL19-2737 | + | GCAGCUGGCCGUCGUUGCGG | 20 | 2812 |
| HSV1-UL19-2738 | + | GCGGCGUCCGCGGCUCGGGC | 20 | 2813 |
| HSV1-UL19-2739 | + | UCAUCCGCGGCGUCCGCGGC | 20 | 2814 |
| HSV1-UL19-2740 | + | AGCAGCGGCCCCGCGAGAAG | 20 | 2815 |
| HSV1-UL19-2741 | + | CGGUGCAGCAGCGGCCCCGC | 20 | 2816 |
| HSV1-UL19-2742 | + | CGCGGUGCAGCAGCGGCCCC | 20 | 2817 |
| HSV1-UL19-2743 | + | GUGGCGUAUACGCGGUCGAA | 20 | 2818 |
| HSV1-UL19-2744 | + | GCAGGGUGGCGUAUACGCGG | 20 | 2819 |
| HSV1-UL19-2745 | + | UCCGGGACCACCAUGUUCUG | 20 | 2820 |
| HSV1-UL19-1223 | + | UCCUCGCCGGGGGCGAUCUC | 20 | 1609 |
| HSV1-UL19-2747 | + | CUCCUCGCCGGGGGCGAUCU | 20 | 2821 |
| HSV1-UL19-1226 | + | UCGCUGGGGCACUCCUCGCC | 20 | 1612 |
| HSV1-UL19-1227 | + | GUCGCUGGGGCACUCCUCGC | 20 | 1613 |
| HSV1-UL19-2750 | + | GGUCGCUGGGGCACUCCUCG | 20 | 2822 |
| HSV1-UL19-1230 | + | GGGGUCCGUCACGGGGUCGC | 20 | 1616 |
| HSV1-UL19-2752 | + | CGGGGUCCGUCACGGGGUCG | 20 | 2823 |
| HSV1-UL19-1233 | + | GGGGUGCGCGGGGUCCGUCA | 20 | 1619 |
| HSV1-UL19-2754 | + | GGGGGUGCGCGGGGUCCGUC | 20 | 2824 |
| HSV1-UL19-1236 | + | GGCCGGGUGCAGGGGGUGCG | 20 | 1622 |
| HSV1-UL19-2756 | + | UGGCCGGGUGCAGGGGGUGC | 20 | 2825 |
| HSV1-UL19-1239 | + | CACCAGAUUGGCCGGGUGCA | 20 | 1625 |
| HSV1-UL19-1240 | + | CCACCAGAUUGGCCGGGUGC | 20 | 1626 |
| HSV1-UL19-2759 | + | GCCACCAGAUUGGCCGGGUG | 20 | 2826 |
| HSV1-UL19-2760 | + | CGUGUUGGCCACCAGAUUGG | 20 | 2827 |
| HSV1-UL19-2761 | + | UCCACUACCACGCGCCCGUU | 20 | 2828 |
| HSV1-UL19-2762 | + | GCACCUGCAGCGUGAGCAUG | 20 | 2829 |
| HSV1-UL19-2763 | + | UGUGGGCCAGCACCUGCAGC | 20 | 2830 |
| HSV1-UL19-2764 | + | GUUGUGCGUUCGGCCAUGUU | 20 | 2831 |
| HSV1-UL19-2765 | + | CCGCGUCGGGCGCCGCCGAG | 20 | 2832 |
| HSV1-UL19-2766 | + | GGCGCCCGCGUCGGGCGCCG | 20 | 2833 |
| HSV1-UL19-2767 | + | ACGCGGUGUUGGCGCCCGCG | 20 | 2834 |
| HSV1-UL19-2768 | + | CGAAUAUGCGCAUGUUGGUG | 20 | 2835 |
| HSV1-UL19-2769 | + | UUCCGGCGUGCAACGCCCCG | 20 | 2836 |
| HSV1-UL19-2770 | + | AGAUGCUGGGGGGCCAUCAG | 20 | 2837 |
| HSV1-UL19-1263 | + | AUGGUAUGGUCCAGAUGCUG | 20 | 1649 |
| HSV1-UL19-1264 | + | GAUGGUAUGGUCCAGAUGCU | 20 | 1650 |
| HSV1-UL19-1265 | + | GGAUGGUAUGGUCCAGAUGC | 20 | 1651 |
| HSV1-UL19-2774 | + | UGGAUGGUAUGGUCCAGAUG | 20 | 2838 |
| HSV1-UL19-2775 | + | GGGUAAAAAUAGUCGCCAUU | 20 | 2839 |
| HSV1-UL19-1271 | + | GAACAGCGCGUGGACGGGGA | 20 | 1657 |
| HSV1-UL19-1272 | + | CGAACAGCGCGUGGACGGGG | 20 | 1658 |
| HSV1-UL19-2778 | + | GCGAACAGCGCGUGGACGGG | 20 | 2840 |
| HSV1-UL19-1273 | + | CGGCGAACAGCGCGUGGACG | 20 | 1659 |
| HSV1-UL19-1274 | + | CCGGCGAACAGCGCGUGGAC | 20 | 1660 |
| HSV1-UL19-1275 | + | CCCGGCGAACAGCGCGUGGA | 20 | 1661 |
| HSV1-UL19-2782 | + | CCCCGGCGAACAGCGCGUGG | 20 | 2841 |
| HSV1-UL19-2783 | + | UCGGCCCCGGCGAACAGCGC | 20 | 2842 |
| HSV1-UL19-2784 | + | UCGCCACGUGGUCGGCCCCG | 20 | 2843 |
| HSV1-UL19-2785 | + | CGCGCAGGGCCGGGGGGAAA | 20 | 2844 |
| HSV1-UL19-1282 | + | ACAGGUCGCGCAGGGCCGGG | 20 | 1668 |
| HSV1-UL19-1283 | + | GACAGGUCGCGCAGGGCCGG | 20 | 1669 |
| HSV1-UL19-1284 | + | CGACAGGUCGCGCAGGGCCG | 20 | 1670 |
| HSV1-UL19-1285 | + | GCGACAGGUCGCGCAGGGCC | 20 | 1671 |
| HSV1-UL19-1286 | + | CGCGACAGGUCGCGCAGGGC | 20 | 1672 |
| HSV1-UL19-2791 | + | CCGCGACAGGUCGCGCAGGG | 20 | 2845 |
| HSV1-UL19-2792 | + | ACCUGCCGCGACAGGUCGCG | 20 | 2846 |
| HSV1-UL19-1291 | + | CCCAGAGCCGGGGGGACCAG | 20 | 1677 |
| HSV1-UL19-1292 | + | CCCCAGAGCCGGGGGGACCA | 20 | 1678 |
| HSV1-UL19-1293 | + | CCCCCAGAGCCGGGGGGACC | 20 | 1679 |
| HSV1-UL19-2796 | + | GCCCCCAGAGCCGGGGGGAC | 20 | 2847 |
| HSV1-UL19-1295 | + | UAGUUGGCCCCCAGAGCCGG | 20 | 1681 |
| HSV1-UL19-1296 | + | GUAGUUGGCCCCCAGAGCCG | 20 | 1682 |
| HSV1-UL19-1297 | + | AGUAGUUGGCCCCCAGAGCC | 20 | 1683 |
| HSV1-UL19-1298 | + | AAGUAGUUGGCCCCCAGAGC | 20 | 1684 |
| HSV1-UL19-2801 | + | AAAGUAGUUGGCCCCCAGAG | 20 | 2848 |
| HSV1-UL19-2802 | + | GACGAAAAGUAGUUGGCCCC | 20 | 2849 |
| HSV1-UL19-2803 | + | CACGACGGGCUGUCGGAUCG | 20 | 2850 |
| HSV1-UL19-2804 | + | ACGUGCUGCACGACGGGCUG | 20 | 2851 |
| HSV1-UL19-2805 | + | UCUCGCGGACGUGCUGCACG | 20 | 2852 |
| HSV1-UL19-2806 | + | UUCUCCCCGGCCGCGCUCUC | 20 | 2853 |
| HSV1-UL19-2807 | + | UGAUCUUGAAGUACCCCGCC | 20 | 2854 |
| HSV1-UL19-2808 | + | GCAAGGCCACGGGACUGAUC | 20 | 2855 |
| HSV1-UL19-1307 | + | GAGCUGAUGAUGCAAGGCCA | 20 | 1693 |
| HSV1-UL19-2810 | + | UGAGCUGAUGAUGCAAGGCC | 20 | 2856 |
| HSV1-UL19-2811 | + | ACCCGGGAUGGAGGCCCGUC | 20 | 2857 |
| HSV1-UL19-1310 | + | CGGUGAACCCAAACCCGGGA | 20 | 1696 |
| HSV1-UL19-2813 | + | ACGGUGAACCCAAACCCGGG | 20 | 2858 |
| HSV1-UL19-1312 | + | GACGACGGUGAACCCAAACC | 20 | 1698 |
| HSV1-UL19-2815 | + | GGACGACGGUGAACCCAAAC | 20 | 2859 |
| HSV1-UL19-2816 | + | AGCGGUCCUGUCGGACGACG | 20 | 2860 |
| HSV1-UL19-2817 | + | UCAGUCACAAAGCGGUCCUG | 20 | 2861 |
| HSV1-UL19-2818 | + | ACGCCUCCGACGCGCGCUCC | 20 | 2862 |
| HSV1-UL19-2819 | + | GUACGCCUCCGACGCGCGCU | 20 | 2863 |
| HSV1-UL19-1316 | + | GGGCCACCUGGAGCUGGCCC | 20 | 1702 |
| HSV1-UL19-2821 | + | CGGGCCACCUGGAGCUGGCC | 20 | 2864 |
| HSV1-UL19-1318 | + | CAGUUUCGUGCCGGGCCACC | 20 | 1704 |
| HSV1-UL19-2823 | + | CCAGUUUCGUGCCGGGCCAC | 20 | 2865 |
| HSV1-UL19-2824 | + | ACCCCCCCGCCAGUUUCGUG | 20 | 2866 |
| HSV1-UL19-2825 | + | UCGCGCGCGGCUGGGUGAGC | 20 | 2867 |
| HSV1-UL19-2826 | + | CCACGUUCGCGCGCGGCUGG | 20 | 2868 |
| HSV1-UL19-2827 | + | AGGUCCACGUUCGCGCGCGG | 20 | 2869 |
| HSV1-UL19-2828 | + | CCCAUGUCGGUGACGGGGUU | 20 | 2870 |
| HSV1-UL19-1332 | + | AAGGUUGCCCAUGUCGGUGA | 20 | 1718 |
| HSV1-UL19-2830 | + | GAAGGUUGCCCAUGUCGGUG | 20 | 2871 |
| HSV1-UL19-1335 | + | CGGCCCAGGUAAAAGUUUUG | 20 | 1721 |
| HSV1-UL19-1336 | + | GCGGCCCAGGUAAAAGUUUU | 20 | 1722 |
| HSV1-UL19-1337 | + | CGCGGCCCAGGUAAAAGUUU | 20 | 1723 |
| HSV1-UL19-2834 | + | CCGCGGCCCAGGUAAAAGUU | 20 | 2872 |
| HSV1-UL19-1340 | + | GCCGCGUUGUCCAGGAGAGG | 20 | 1726 |
| HSV1-UL19-1341 | + | UGCCGCGUUGUCCAGGAGAG | 20 | 1727 |
| HSV1-UL19-1342 | + | CUGCCGCGUUGUCCAGGAGA | 20 | 1728 |
| HSV1-UL19-1343 | + | GCUGCCGCGUUGUCCAGGAG | 20 | 1729 |
| HSV1-UL19-2839 | + | GGCUGCCGCGUUGUCCAGGA | 20 | 2873 |
| HSV1-UL19-2840 | + | ACGGCUGCCGCGUUGUCCAG | 20 | 2874 |
| HSV1-UL19-1344 | + | ACACGGCUGCCGCGUUGUCC | 20 | 1730 |
| HSV1-UL19-2842 | + | UACACGGCUGCCGCGUUGUC | 20 | 2875 |
| HSV1-UL19-2843 | + | CACCCGAACACGGGGACGGG | 20 | 2876 |
| HSV1-UL19-2844 | + | GGGCGCACCCGAACACGGGG | 20 | 2877 |
| HSV1-UL19-1355 | + | ACCUGGGCGCACCCGAACAC | 20 | 1741 |
| HSV1-UL19-1356 | + | CACCUGGGCGCACCCGAACA | 20 | 1742 |
| HSV1-UL19-2847 | + | GCACCUGGGCGCACCCGAAC | 20 | 2878 |
| HSV1-UL19-2848 | + | GCCGCGGCACCUGGGCGCAC | 20 | 2879 |
| HSV1-UL19-2849 | + | AUCCCUGCGCGCCGCGGCAC | 20 | 2880 |
| HSV1-UL19-1366 | + | UAGUUGACGUCGGUCGACAC | 20 | 1752 |
| HSV1-UL19-1367 | + | GUAGUUGACGUCGGUCGACA | 20 | 1753 |
| HSV1-UL19-2852 | + | AGUAGUUGACGUCGGUCGAC | 20 | 2881 |
| HSV1-UL19-1369 | + | CCCGGGGGUUGCAGGGCCGG | 20 | 1755 |
| HSV1-UL19-2854 | + | CCCCGGGGGUUGCAGGGCCG | 20 | 2882 |
| HSV1-UL19-2855 | + | CGGCGCGUCCCCGGGGGUUG | 20 | 2883 |
| HSV1-UL19-1375 | + | GCCCCCGGCGGCGCGUCCCC | 20 | 1761 |
| HSV1-UL19-1376 | + | CGCCCCCGGCGGCGCGUCCC | 20 | 1762 |
| HSV1-UL19-2858 | + | ACGCCCCCGGCGGCGCGUCC | 20 | 2884 |
| HSV1-UL19-2859 | + | CUCUGGCCGUGGUCGUACAU | 20 | 2885 |
| HSV1-UL19-2860 | + | CGCUCUGGCCGUGGUCGUAC | 20 | 2886 |
| HSV1-UL19-2861 | + | CGUGGCCGCGAAGGCCCGGG | 20 | 2887 |
| HSV1-UL19-1387 | + | UGGCCGUGGCCGCGAAGGCC | 20 | 1773 |
| HSV1-UL19-2863 | + | UUGGCCGUGGCCGCGAAGGC | 20 | 2888 |
| HSV1-UL19-2864 | + | CCCACGGGUUGGCCGUGGCC | 20 | 2889 |
| HSV1-UL19-2865 | + | CGAAAAUCGCUGCGACGCCC | 20 | 2890 |
| HSV1-UL19-2866 | + | GUUAUAGAGCAGGUCCCCGU | 20 | 2891 |
| HSV1-UL19-2867 | + | UGAGGUGGUAGGCCCCGUUA | 20 | 2892 |
| HSV1-UL19-2868 | + | UGAGCACCGGCGAGGCCCCG | 20 | 2893 |
| HSV1-UL19-2869 | + | AAAGCAGGGGCUGAGCACCG | 20 | 2894 |
| HSV1-UL19-2870 | + | UAAAGAACUUAAAGCAGGGG | 20 | 2895 |
| HSV1-UL19-1401 | + | CGACGUAAAGAACUUAAAGC | 20 | 1787 |
| HSV1-UL19-2872 | + | CCGACGUAAAGAACUUAAAG | 20 | 2896 |
| HSV1-UL19-2873 | + | CGGCGAUGUCGGCCGACGUA | 20 | 2897 |
| HSV1-UL19-2874 | + | GGCGGUGGCCGUGGACACCG | 20 | 2898 |
| HSV1-UL19-2875 | + | CGUCGCUGGCGGCGGUGGCC | 20 | 2899 |
| HSV1-UL19-1414 | + | CACGAGUUCGCGGCACCCCG | 20 | 1800 |
| HSV1-UL19-1415 | + | CCACGAGUUCGCGGCACCCC | 20 | 1801 |
| HSV1-UL19-1416 | + | UCCACGAGUUCGCGGCACCC | 20 | 1802 |
| HSV1-UL19-2879 | + | CUCCACGAGUUCGCGGCACC | 20 | 2900 |
| HSV1-UL19-2880 | + | ACAGGCCACACGGGUCCUCC | 20 | 2901 |
| HSV1-UL19-2881 | + | GGCCUCCUGAAACAGGCCAC | 20 | 2902 |
| HSV1-UL19-2882 | + | CAGGUGAGCGGGUAGGCCUC | 20 | 2903 |
| HSV1-UL19-2883 | + | GGGGUCGCUGGCGCAGGUGA | 20 | 2904 |
| HSV1-UL19-2884 | + | GGGCGGGGUCGCUGGCGCAG | 20 | 2905 |
| HSV1-UL19-1428 | + | GCGGGCACUGCGGAGGAGGG | 20 | 1814 |
| HSV1-UL19-2886 | + | UGCGGGCACUGCGGAGGAGG | 20 | 2906 |
| HSV1-UL19-2887 | + | CCGUUGCGGGCACUGCGGAG | 20 | 2907 |
| HSV1-UL19-1431 | + | CCCCGUUGCGGGCACUGCGG | 20 | 1817 |
| HSV1-UL19-2889 | + | UCCCCGUUGCGGGCACUGCG | 20 | 2908 |
| HSV1-UL19-1432 | + | CUUCCCCGUUGCGGGCACUG | 20 | 1818 |
| HSV1-UL19-2891 | + | GCUUCCCCGUUGCGGGCACU | 20 | 2909 |
| HSV1-UL19-2892 | + | CGCGCGUGGGCUUCCCCGUU | 20 | 2910 |
| HSV1-UL19-2893 | + | GCGAAGUGGGUCUCCCGCGC | 20 | 2911 |
| HSV1-UL19-2894 | + | UAGACGAGAUACUGCGCGAA | 20 | 2912 |
| HSV1-UL19-2895 | + | CGUCAUAGACGAGAUACUGC | 20 | 2913 |
| HSV1-UL19-2896 | + | UGAGCGGGGAUGCGUCAUAG | 20 | 2914 |
| HSV1-UL19-1440 | + | ACAGAGCCAGUCCCUUGAGC | 20 | 1826 |
| HSV1-UL19-1441 | + | UACAGAGCCAGUCCCUUGAG | 20 | 1827 |
| HSV1-UL19-2899 | + | UUACAGAGCCAGUCCCUUGA | 20 | 2915 |
| HSV1-UL19-2900 | + | AACGCCCCGAGGACGGC | 17 | 2916 |
| HSV1-UL19-2901 | + | CCGCGCUCAAACGCCCC | 17 | 2917 |
| HSV1-UL19-2902 | + | UGCCGCGCUCAAACGCC | 17 | 2918 |
| HSV1-UL19-1450 | + | UCGGCAACAACAAAGCC | 17 | 1836 |
| HSV1-UL19-2904 | + | AUCGGCAACAACAAAGC | 17 | 2919 |
| HSV1-UL19-2905 | + | UCGGCGACCAGGGUCGC | 17 | 2920 |
| HSV1-UL19-2906 | + | CGCUUUAGCUCGGCGAC | 17 | 2921 |
| HSV1-UL19-2907 | + | GGAAAAAGCUCGUCUCG | 17 | 2922 |
| HSV1-UL19-1462 | + | GGUGGCCCGCCUUGCCC | 17 | 1848 |
| HSV1-UL19-2909 | + | CGGUGGCCCGCCUUGCC | 17 | 2923 |
| HSV1-UL19-2910 | + | UGGCCGUGGUGAGGUCC | 17 | 2924 |
| HSV1-UL19-2911 | + | AGGGCUGCGUGGCCGUG | 17 | 2925 |
| HSV1-UL19-2912 | + | GACGGGGCACGGCCACG | 17 | 2926 |
| HSV1-UL19-1473 | + | CAGACGGGGCACGGCCA | 17 | 1859 |
| HSV1-UL19-2914 | + | UCAGACGGGGCACGGCC | 17 | 2927 |
| HSV1-UL19-1477 | + | UGUCGGCAUGCGUCAGA | 17 | 1863 |
| HSV1-UL19-2916 | + | GUGUCGGCAUGCGUCAG | 17 | 2928 |
| HSV1-UL19-2917 | + | UGAUCGGGGCGGUGGUG | 17 | 2929 |
| HSV1-UL19-1484 | + | AGGAGGCGCUGUUUGAU | 17 | 1870 |
| HSV1-UL19-2919 | + | CAGGAGGCGCUGUUUGA | 17 | 2930 |
| HSV1-UL19-1486 | + | CUUUCAGGAAGGACUGC | 17 | 1872 |
| HSV1-UL19-2921 | + | ACUUUCAGGAAGGACUG | 17 | 2931 |
| HSV1-UL19-2922 | + | UGUCCUCCACUUUCAGG | 17 | 2932 |
| HSV1-UL19-1488 | + | CGGUGUCCUCCACUUUC | 17 | 1874 |
| HSV1-UL19-2924 | + | UCGGUGUCCUCCACUUU | 17 | 2933 |
| HSV1-UL19-2925 | + | ACCAGGUUGGCCCCGUU | 17 | 2934 |
| HSV1-UL19-2926 | + | GCACGGCCUUGCCCAUC | 17 | 2935 |
| HSV1-UL19-2927 | + | GCGUCUGCCGGUUCAGG | 17 | 2936 |
| HSV1-UL19-2928 | + | UCGUCUGGGGGGCGCUC | 17 | 2937 |
| HSV1-UL19-1503 | + | CGCACGCGCGUCGUCUG | 17 | 1889 |
| HSV1-UL19-1504 | + | GCGCACGCGCGUCGUCU | 17 | 1890 |
| HSV1-UL19-1505 | + | CGCGCACGCGCGUCGUC | 17 | 1891 |
| HSV1-UL19-2932 | + | GCGCGCACGCGCGUCGU | 17 | 2938 |
| HSV1-UL19-2933 | + | AGACCAGCUUCUCGCCG | 17 | 2939 |
| HSV1-UL19-2934 | + | CGCUUCUCCAGGGCCUC | 17 | 2940 |
| HSV1-UL19-2935 | + | GCGUAGAUGCGCUUCUC | 17 | 2941 |
| HSV1-UL19-1512 | + | GCGCCCACCAGGGGGUA | 17 | 1898 |
| HSV1-UL19-1513 | + | GGCGCCCACCAGGGGGU | 17 | 1899 |
| HSV1-UL19-2938 | + | UGGCGCCCACCAGGGGG | 17 | 2942 |
| HSV1-UL19-1516 | + | GUCCAUGGCGCCCACCA | 17 | 1902 |
| HSV1-UL19-1517 | + | GGUCCAUGGCGCCCACC | 17 | 1903 |
| HSV1-UL19-2941 | + | AGGUCCAUGGCGCCCAC | 17 | 2943 |
| HSV1-UL19-2942 | + | ACAGGCCCAGGGGCAGG | 17 | 2944 |
| HSV1-UL19-2943 | + | UUGAACAGGCCCAGGGG | 17 | 2945 |
| HSV1-UL19-1523 | + | CCGGAUUGAACAGGCCC | 17 | 1909 |
| HSV1-UL19-2945 | + | ACCGGAUUGAACAGGCC | 17 | 2946 |
| HSV1-UL19-2946 | + | ACCGUUCCAUGACCGGA | 17 | 2947 |
| HSV1-UL19-2947 | + | GGCAAACCGUUCCAUGA | 17 | 2948 |
| HSV1-UL19-1530 | + | UCCGGGUGGCCGGGGGC | 17 | 1916 |
| HSV1-UL19-1531 | + | AUCCGGGUGGCCGGGGG | 17 | 1917 |
| HSV1-UL19-2950 | + | GAUCCGGGUGGCCGGGG | 17 | 2949 |
| HSV1-UL19-1534 | + | CGGGGAUCCGGGUGGCC | 17 | 1920 |
| HSV1-UL19-1535 | + | GCGGGGAUCCGGGUGGC | 17 | 1921 |
| HSV1-UL19-2953 | + | CGCGGGGAUCCGGGUGG | 17 | 2950 |
| HSV1-UL19-2954 | + | CGGGAAGGCGCGGGGAU | 17 | 2951 |
| HSV1-UL19-1540 | + | GCGGGGCGGGAAGGCGC | 17 | 1926 |
| HSV1-UL19-1541 | + | GGCGGGGCGGGAAGGCG | 17 | 1927 |
| HSV1-UL19-2957 | + | UGGCGGGGCGGGAAGGC | 17 | 2952 |
| HSV1-UL19-1543 | + | AAAACAGCUGGCGGGGC | 17 | 1929 |
| HSV1-UL19-1544 | + | AAAAACAGCUGGCGGGG | 17 | 1930 |
| HSV1-UL19-2960 | + | AAAAAACAGCUGGCGGG | 17 | 2953 |
| HSV1-UL19-1547 | + | CCCAAAAAAACAGCUGG | 17 | 1933 |
| HSV1-UL19-2962 | + | CCCCAAAAAAACAGCUG | 17 | 2954 |
| HSV1-UL19-2963 | + | GUCCCGAUCGCGUGUUC | 17 | 2955 |
| HSV1-UL19-2964 | + | GUCAACGUUCAUCAGCG | 17 | 2956 |
| HSV1-UL19-2965 | + | CGCGUCAACGUUCAUCA | 17 | 2957 |
| HSV1-UL19-1560 | + | CGGAUUGGCGGCUUCGA | 17 | 1946 |
| HSV1-UL19-2967 | + | ACGGAUUGGCGGCUUCG | 17 | 2958 |
| HSV1-UL19-2968 | + | CGCCACGUACGCCCCGU | 17 | 2959 |
| HSV1-UL19-1566 | + | UCUGCGGCGGGGCCGGC | 17 | 1952 |
| HSV1-UL19-2970 | + | GUCUGCGGCGGGGCCGG | 17 | 2960 |
| HSV1-UL19-1570 | + | CUGCUGCAUGUCUGCGG | 17 | 1956 |
| HSV1-UL19-2972 | + | GCUGCUGCAUGUCUGCG | 17 | 2961 |
| HSV1-UL19-2973 | + | ACCCAUCGGACCCGCCC | 17 | 2962 |
| HSV1-UL19-2974 | + | UGGCCUUCCGCGACCCA | 17 | 2963 |
| HSV1-UL19-1580 | + | GGCUGCAUAAACUGCUC | 17 | 1966 |
| HSV1-UL19-2976 | + | GGGCUGCAUAAACUGCU | 17 | 2964 |
| HSV1-UL19-2977 | + | GAGCCAGGUUGGCGUUG | 17 | 2965 |
| HSV1-UL19-2978 | + | AACGCGGGGUGCAGCUC | 17 | 2966 |
| HSV1-UL19-1587 | + | CACAAAGAAGUCGAACG | 17 | 1973 |
| HSV1-UL19-2980 | + | CCACAAAGAAGUCGAAC | 17 | 2967 |
| HSV1-UL19-2981 | + | CCACCCCCACAAAGAAG | 17 | 2968 |
| HSV1-UL19-2982 | + | CGUCGGCCACCCCCACA | 17 | 2969 |
| HSV1-UL19-1590 | + | UCCCCCGGGCCGGCCGG | 17 | 1976 |
| HSV1-UL19-1591 | + | CUCCCCCGGGCCGGCCG | 17 | 1977 |
| HSV1-UL19-1592 | + | UCUCCCCCGGGCCGGCC | 17 | 1978 |
| HSV1-UL19-1593 | + | AUCUCCCCCGGGCCGGC | 17 | 1979 |
| HSV1-UL19-2987 | + | GAUCUCCCCCGGGCCGG | 17 | 2970 |
| HSV1-UL19-2988 | + | GGUGGCCUGGAUCUCCC | 17 | 2971 |
| HSV1-UL19-2989 | + | ACCACGCGCCAGGUGGC | 17 | 2972 |
| HSV1-UL19-1602 | + | CCGCCGGACAUAGCGCC | 17 | 1988 |
| HSV1-UL19-2991 | + | GCCGCCGGACAUAGCGC | 17 | 2973 |
| HSV1-UL19-2992 | + | GGCGUCCCGGAACGCCG | 17 | 2974 |
| HSV1-UL19-1604 | + | CCAGGCCCCGGGCGUCC | 17 | 1990 |
| HSV1-UL19-2994 | + | UCCAGGCCCCGGGCGUC | 17 | 2975 |
| HSV1-UL19-2995 | + | ACCCCCAGCUCCAGGCC | 17 | 2976 |
| HSV1-UL19-1612 | + | ACGGCGGCGAUGGUGGC | 17 | 1998 |
| HSV1-UL19-1613 | + | AACGGCGGCGAUGGUGG | 17 | 1999 |
| HSV1-UL19-2998 | + | GAACGGCGGCGAUGGUG | 17 | 2977 |
| HSV1-UL19-2999 | + | CGGUCGUCGAACGCCCC | 17 | 2978 |
| HSV1-UL19-3000 | + | CCGGGUAGUUGCGGUCG | 17 | 2979 |
| HSV1-UL19-3001 | + | CAGCAGGUAAAACACCG | 17 | 2980 |
| HSV1-UL19-3002 | + | CGAGCCGGGCCAGGGCG | 17 | 2981 |
| HSV1-UL19-3003 | + | UGGACCACGAGCCGGGC | 17 | 2982 |
| HSV1-UL19-3004 | + | AUGCACUGGACCACGAG | 17 | 2983 |
| HSV1-UL19-3005 | + | UGGUGAUGCACUGGACC | 17 | 2984 |
| HSV1-UL19-3006 | + | CAGUAGCUGGUGAUGCA | 17 | 2985 |
| HSV1-UL19-3007 | + | CCAGCGAGUAGUCGUUC | 17 | 2986 |
| HSV1-UL19-3008 | + | CACGACGUACGAGACCA | 17 | 2987 |
| HSV1-UL19-3009 | + | GAGGUAGGUCACGACGU | 17 | 2988 |
| HSV1-UL19-3010 | + | CCUCGGGAAGGUCUCCC | 17 | 2989 |
| HSV1-UL19-1633 | + | ACGGCCAUGCACUCCUC | 17 | 2019 |
| HSV1-UL19-1634 | + | CACGGCCAUGCACUCCU | 17 | 2020 |
| HSV1-UL19-3013 | + | ACACGGCCAUGCACUCC | 17 | 2990 |
| HSV1-UL19-3014 | + | UCAUCAACCAGCUGGGC | 17 | 2991 |
| HSV1-UL19-3015 | + | GUAAAGUCAUCAACCAG | 17 | 2992 |
| HSV1-UL19-3016 | + | CCCAGCUCCGGGCCGGU | 17 | 2993 |
| HSV1-UL19-3017 | + | CGCCUGCCCGCCCAGCU | 17 | 2994 |
| HSV1-UL19-3018 | + | GAGGGGUGGCAGCAGCG | 17 | 2995 |
| HSV1-UL19-1654 | + | CGUCACAGUCCCACACG | 17 | 2040 |
| HSV1-UL19-3020 | + | GCGUCACAGUCCCACAC | 17 | 2996 |
| HSV1-UL19-3021 | + | GGGCGUCACAGUCCCAC | 17 | 2997 |
| HSV1-UL19-3022 | + | AGGGCCGCGCGCCGCAU | 17 | 2998 |
| HSV1-UL19-3023 | + | CAGUCGCGAUGGCGGUC | 17 | 2999 |
| HSV1-UL19-1665 | + | ACAUGCCGCCGCGUACA | 17 | 2051 |
| HSV1-UL19-3025 | + | UACAUGCCGCCGCGUAC | 17 | 3000 |
| HSV1-UL19-3026 | + | GCUGGCCGUCGUUGCGG | 17 | 3001 |
| HSV1-UL19-3027 | + | GCGUCCGCGGCUCGGGC | 17 | 3002 |
| HSV1-UL19-3028 | + | UCCGCGGCGUCCGCGGC | 17 | 3003 |
| HSV1-UL19-3029 | + | AGCGGCCCCGCGAGAAG | 17 | 3004 |
| HSV1-UL19-3030 | + | UGCAGCAGCGGCCCCGC | 17 | 3005 |
| HSV1-UL19-3031 | + | GGUGCAGCAGCGGCCCC | 17 | 3006 |
| HSV1-UL19-3032 | + | GCGUAUACGCGGUCGAA | 17 | 3007 |
| HSV1-UL19-3033 | + | GGGUGGCGUAUACGCGG | 17 | 3008 |
| HSV1-UL19-3034 | + | GGGACCACCAUGUUCUG | 17 | 3009 |
| HSV1-UL19-1690 | + | UCGCCGGGGGCGAUCUC | 17 | 2076 |
| HSV1-UL19-3036 | + | CUCGCCGGGGGCGAUCU | 17 | 3010 |
| HSV1-UL19-1693 | + | CUGGGGCACUCCUCGCC | 17 | 2079 |
| HSV1-UL19-1694 | + | GCUGGGGCACUCCUCGC | 17 | 2080 |
| HSV1-UL19-3039 | + | CGCUGGGGCACUCCUCG | 17 | 3011 |
| HSV1-UL19-1697 | + | GUCCGUCACGGGGUCGC | 17 | 2083 |
| HSV1-UL19-3041 | + | GGUCCGUCACGGGGUCG | 17 | 3012 |
| HSV1-UL19-1700 | + | GUGCGCGGGGUCCGUCA | 17 | 2086 |
| HSV1-UL19-3043 | + | GGUGCGCGGGGUCCGUC | 17 | 3013 |
| HSV1-UL19-1703 | + | CGGGUGCAGGGGGUGCG | 17 | 2089 |
| HSV1-UL19-3045 | + | CCGGGUGCAGGGGGUGC | 17 | 3014 |
| HSV1-UL19-1706 | + | CAGAUUGGCCGGGUGCA | 17 | 2092 |
| HSV1-UL19-1707 | + | CCAGAUUGGCCGGGUGC | 17 | 2093 |
| HSV1-UL19-3048 | + | ACCAGAUUGGCCGGGUG | 17 | 3015 |
| HSV1-UL19-3049 | + | GUUGGCCACCAGAUUGG | 17 | 3016 |
| HSV1-UL19-3050 | + | ACUACCACGCGCCCGUU | 17 | 3017 |
| HSV1-UL19-3051 | + | CCUGCAGCGUGAGCAUG | 17 | 3018 |
| HSV1-UL19-3052 | + | GGGCCAGCACCUGCAGC | 17 | 3019 |
| HSV1-UL19-3053 | + | GUGCGUUCGGCCAUGUU | 17 | 3020 |
| HSV1-UL19-3054 | + | CGUCGGGCGCCGCCGAG | 17 | 3021 |
| HSV1-UL19-3055 | + | GCCCGCGUCGGGCGCCG | 17 | 3022 |
| HSV1-UL19-3056 | + | CGGUGUUGGCGCCCGCG | 17 | 3023 |
| HSV1-UL19-3057 | + | AUAUGCGCAUGUUGGUG | 17 | 3024 |
| HSV1-UL19-3058 | + | CGGCGUGCAACGCCCCG | 17 | 3025 |
| HSV1-UL19-3059 | + | UGCUGGGGGGCCAUCAG | 17 | 3026 |
| HSV1-UL19-1730 | + | GUAUGGUCCAGAUGCUG | 17 | 2116 |
| HSV1-UL19-1731 | + | GGUAUGGUCCAGAUGCU | 17 | 2117 |
| HSV1-UL19-1732 | + | UGGUAUGGUCCAGAUGC | 17 | 2118 |
| HSV1-UL19-3063 | + | AUGGUAUGGUCCAGAUG | 17 | 3027 |
| HSV1-UL19-3064 | + | UAAAAAUAGUCGCCAUU | 17 | 3028 |
| HSV1-UL19-1738 | + | CAGCGCGUGGACGGGGA | 17 | 2124 |
| HSV1-UL19-1739 | + | ACAGCGCGUGGACGGGG | 17 | 2125 |
| HSV1-UL19-3067 | + | AACAGCGCGUGGACGGG | 17 | 3029 |
| HSV1-UL19-1740 | + | CGAACAGCGCGUGGACG | 17 | 2126 |
| HSV1-UL19-1741 | + | GCGAACAGCGCGUGGAC | 17 | 2127 |
| HSV1-UL19-1742 | + | GGCGAACAGCGCGUGGA | 17 | 2128 |
| HSV1-UL19-3071 | + | CGGCGAACAGCGCGUGG | 17 | 3030 |
| HSV1-UL19-3072 | + | GCCCCGGCGAACAGCGC | 17 | 3031 |
| HSV1-UL19-3073 | + | CCACGUGGUCGGCCCCG | 17 | 3032 |
| HSV1-UL19-3074 | + | GCAGGGCCGGGGGGAAA | 17 | 3033 |
| HSV1-UL19-1749 | + | GGUCGCGCAGGGCCGGG | 17 | 2135 |
| HSV1-UL19-1750 | + | AGGUCGCGCAGGGCCGG | 17 | 2136 |
| HSV1-UL19-1751 | + | CAGGUCGCGCAGGGCCG | 17 | 2137 |
| HSV1-UL19-1752 | + | ACAGGUCGCGCAGGGCC | 17 | 2138 |
| HSV1-UL19-1753 | + | GACAGGUCGCGCAGGGC | 17 | 2139 |
| HSV1-UL19-3080 | + | CGACAGGUCGCGCAGGG | 17 | 3034 |
| HSV1-UL19-3081 | + | UGCCGCGACAGGUCGCG | 17 | 3035 |
| HSV1-UL19-1758 | + | AGAGCCGGGGGGACCAG | 17 | 2144 |
| HSV1-UL19-1759 | + | CAGAGCCGGGGGGACCA | 17 | 2145 |
| HSV1-UL19-1760 | + | CCAGAGCCGGGGGGACC | 17 | 2146 |
| HSV1-UL19-3085 | + | CCCAGAGCCGGGGGGAC | 17 | 3036 |
| HSV1-UL19-1762 | + | UUGGCCCCCAGAGCCGG | 17 | 2148 |
| HSV1-UL19-1763 | + | GUUGGCCCCCAGAGCCG | 17 | 2149 |
| HSV1-UL19-1764 | + | AGUUGGCCCCCAGAGCC | 17 | 2150 |
| HSV1-UL19-1765 | + | UAGUUGGCCCCCAGAGC | 17 | 2151 |
| HSV1-UL19-3090 | + | GUAGUUGGCCCCCAGAG | 17 | 3037 |
| HSV1-UL19-3091 | + | GAAAAGUAGUUGGCCCC | 17 | 3038 |
| HSV1-UL19-3092 | + | GACGGGCUGUCGGAUCG | 17 | 3039 |
| HSV1-UL19-3093 | + | UGCUGCACGACGGGCUG | 17 | 3040 |
| HSV1-UL19-3094 | + | CGCGGACGUGCUGCACG | 17 | 3041 |
| HSV1-UL19-3095 | + | UCCCCGGCCGCGCUCUC | 17 | 3042 |
| HSV1-UL19-3096 | + | UCUUGAAGUACCCCGCC | 17 | 3043 |
| HSV1-UL19-3097 | + | AGGCCACGGGACUGAUC | 17 | 3044 |
| HSV1-UL19-1774 | + | CUGAUGAUGCAAGGCCA | 17 | 2160 |
| HSV1-UL19-3099 | + | GCUGAUGAUGCAAGGCC | 17 | 3045 |
| HSV1-UL19-3100 | + | CGGGAUGGAGGCCCGUC | 17 | 3046 |
| HSV1-UL19-1777 | + | UGAACCCAAACCCGGGA | 17 | 2163 |
| HSV1-UL19-3102 | + | GUGAACCCAAACCCGGG | 17 | 3047 |
| HSV1-UL19-1779 | + | GACGGUGAACCCAAACC | 17 | 2165 |
| HSV1-UL19-3104 | + | CGACGGUGAACCCAAAC | 17 | 3048 |
| HSV1-UL19-3105 | + | GGUCCUGUCGGACGACG | 17 | 3049 |
| HSV1-UL19-3106 | + | GUCACAAAGCGGUCCUG | 17 | 3050 |
| HSV1-UL19-3107 | + | CCUCCGACGCGCGCUCC | 17 | 3051 |
| HSV1-UL19-3108 | + | CGCCUCCGACGCGCGCU | 17 | 3052 |
| HSV1-UL19-1783 | + | CCACCUGGAGCUGGCCC | 17 | 2169 |
| HSV1-UL19-3110 | + | GCCACCUGGAGCUGGCC | 17 | 3053 |
| HSV1-UL19-1785 | + | UUUCGUGCCGGGCCACC | 17 | 2171 |
| HSV1-UL19-3112 | + | GUUUCGUGCCGGGCCAC | 17 | 3054 |
| HSV1-UL19-3113 | + | CCCCCGCCAGUUUCGUG | 17 | 3055 |
| HSV1-UL19-3114 | + | CGCGCGGCUGGGUGAGC | 17 | 3056 |
| HSV1-UL19-3115 | + | CGUUCGCGCGCGGCUGG | 17 | 3057 |
| HSV1-UL19-3116 | + | UCCACGUUCGCGCGCGG | 17 | 3058 |
| HSV1-UL19-3117 | + | AUGUCGGUGACGGGGUU | 17 | 3059 |
| HSV1-UL19-1799 | + | GUUGCCCAUGUCGGUGA | 17 | 2185 |
| HSV1-UL19-3119 | + | GGUUGCCCAUGUCGGUG | 17 | 3060 |
| HSV1-UL19-1802 | + | CCCAGGUAAAAGUUUUG | 17 | 2188 |
| HSV1-UL19-1803 | + | GCCCAGGUAAAAGUUUU | 17 | 2189 |
| HSV1-UL19-1804 | + | GGCCCAGGUAAAAGUUU | 17 | 2190 |
| HSV1-UL19-3123 | + | CGGCCCAGGUAAAAGUU | 17 | 3061 |
| HSV1-UL19-1807 | + | GCGUUGUCCAGGAGAGG | 17 | 2193 |
| HSV1-UL19-1808 | + | CGCGUUGUCCAGGAGAG | 17 | 2194 |
| HSV1-UL19-1809 | + | CCGCGUUGUCCAGGAGA | 17 | 2195 |
| HSV1-UL19-1810 | + | GCCGCGUUGUCCAGGAG | 17 | 2196 |
| HSV1-UL19-3128 | + | UGCCGCGUUGUCCAGGA | 17 | 3062 |
| HSV1-UL19-3129 | + | GCUGCCGCGUUGUCCAG | 17 | 3063 |
| HSV1-UL19-1811 | + | CGGCUGCCGCGUUGUCC | 17 | 2197 |
| HSV1-UL19-3131 | + | ACGGCUGCCGCGUUGUC | 17 | 3064 |
| HSV1-UL19-3132 | + | CCGAACACGGGGACGGG | 17 | 3065 |
| HSV1-UL19-3133 | + | CGCACCCGAACACGGGG | 17 | 3066 |
| HSV1-UL19-1822 | + | UGGGCGCACCCGAACAC | 17 | 2208 |
| HSV1-UL19-1823 | + | CUGGGCGCACCCGAACA | 17 | 2209 |
| HSV1-UL19-3136 | + | CCUGGGCGCACCCGAAC | 17 | 3067 |
| HSV1-UL19-3137 | + | GCGGCACCUGGGCGCAC | 17 | 3068 |
| HSV1-UL19-3138 | + | CCUGCGCGCCGCGGCAC | 17 | 3069 |
| HSV1-UL19-1833 | + | UUGACGUCGGUCGACAC | 17 | 2219 |
| HSV1-UL19-1834 | + | GUUGACGUCGGUCGACA | 17 | 2220 |
| HSV1-UL19-3141 | + | AGUUGACGUCGGUCGAC | 17 | 3070 |
| HSV1-UL19-1836 | + | GGGGGUUGCAGGGCCGG | 17 | 2222 |
| HSV1-UL19-3143 | + | CGGGGGUUGCAGGGCCG | 17 | 3071 |
| HSV1-UL19-3144 | + | CGCGUCCCCGGGGGUUG | 17 | 3072 |
| HSV1-UL19-1842 | + | CCCGGCGGCGCGUCCCC | 17 | 2228 |
| HSV1-UL19-1843 | + | CCCCGGCGGCGCGUCCC | 17 | 2229 |
| HSV1-UL19-3147 | + | CCCCCGGCGGCGCGUCC | 17 | 3073 |
| HSV1-UL19-3148 | + | UGGCCGUGGUCGUACAU | 17 | 3074 |
| HSV1-UL19-3149 | + | UCUGGCCGUGGUCGUAC | 17 | 3075 |
| HSV1-UL19-3150 | + | GGCCGCGAAGGCCCGGG | 17 | 3076 |
| HSV1-UL19-1854 | + | CCGUGGCCGCGAAGGCC | 17 | 2240 |
| HSV1-UL19-3152 | + | GCCGUGGCCGCGAAGGC | 17 | 3077 |
| HSV1-UL19-3153 | + | ACGGGUUGGCCGUGGCC | 17 | 3078 |
| HSV1-UL19-3154 | + | AAAUCGCUGCGACGCCC | 17 | 3079 |
| HSV1-UL19-3155 | + | AUAGAGCAGGUCCCCGU | 17 | 3080 |
| HSV1-UL19-3156 | + | GGUGGUAGGCCCCGUUA | 17 | 3081 |
| HSV1-UL19-3157 | + | GCACCGGCGAGGCCCCG | 17 | 3082 |
| HSV1-UL19-3158 | + | GCAGGGGCUGAGCACCG | 17 | 3083 |
| HSV1-UL19-3159 | + | AGAACUUAAAGCAGGGG | 17 | 3084 |
| HSV1-UL19-1868 | + | CGUAAAGAACUUAAAGC | 17 | 2254 |
| HSV1-UL19-3161 | + | ACGUAAAGAACUUAAAG | 17 | 3085 |
| HSV1-UL19-3162 | + | CGAUGUCGGCCGACGUA | 17 | 3086 |
| HSV1-UL19-3163 | + | GGUGGCCGUGGACACCG | 17 | 3087 |
| HSV1-UL19-3164 | + | CGCUGGCGGCGGUGGCC | 17 | 3088 |
| HSV1-UL19-1881 | + | GAGUUCGCGGCACCCCG | 17 | 2267 |
| HSV1-UL19-1882 | + | CGAGUUCGCGGCACCCC | 17 | 2268 |
| HSV1-UL19-1883 | + | ACGAGUUCGCGGCACCC | 17 | 2269 |
| HSV1-UL19-3168 | + | CACGAGUUCGCGGCACC | 17 | 3089 |
| HSV1-UL19-3169 | + | GGCCACACGGGUCCUCC | 17 | 3090 |
| HSV1-UL19-3170 | + | CUCCUGAAACAGGCCAC | 17 | 3091 |
| HSV1-UL19-3171 | + | GUGAGCGGGUAGGCCUC | 17 | 3092 |
| HSV1-UL19-3172 | + | GUCGCUGGCGCAGGUGA | 17 | 3093 |
| HSV1-UL19-3173 | + | CGGGGUCGCUGGCGCAG | 17 | 3094 |
| HSV1-UL19-1895 | + | GGCACUGCGGAGGAGGG | 17 | 2281 |
| HSV1-UL19-3175 | + | GGGCACUGCGGAGGAGG | 17 | 3095 |
| HSV1-UL19-3176 | + | UUGCGGGCACUGCGGAG | 17 | 3096 |
| HSV1-UL19-1898 | + | CGUUGCGGGCACUGCGG | 17 | 2284 |
| HSV1-UL19-3178 | + | CCGUUGCGGGCACUGCG | 17 | 3097 |
| HSV1-UL19-1899 | + | CCCCGUUGCGGGCACUG | 17 | 2285 |
| HSV1-UL19-3180 | + | UCCCCGUUGCGGGCACU | 17 | 3098 |
| HSV1-UL19-3181 | + | GCGUGGGCUUCCCCGUU | 17 | 3099 |
| HSV1-UL19-3182 | + | AAGUGGGUCUCCCGCGC | 17 | 3100 |
| HSV1-UL19-3183 | + | ACGAGAUACUGCGCGAA | 17 | 3101 |
| HSV1-UL19-3184 | + | CAUAGACGAGAUACUGC | 17 | 3102 |
| HSV1-UL19-3185 | + | GCGGGGAUGCGUCAUAG | 17 | 3103 |
| HSV1-UL19-1907 | + | GAGCCAGUCCCUUGAGC | 17 | 2293 |
| HSV1-UL19-1908 | + | AGAGCCAGUCCCUUGAG | 17 | 2294 |
| HSV1-UL19-3188 | + | CAGAGCCAGUCCCUUGA | 17 | 3104 |

[0732] Table 1F provides exemplary targeting domains for knocking out the UL19 gene selected according to the first tier parameters. The targeting domains are selected based on location within first 500 bp of the coding sequence of the UL19 gene. It is contemplated herein that the targeting domain hybridizes to the target domain through complementary base pairing. Any of the targeting domains in the table can be used with a N. meningitidis Cas9 molecule that gives double stranded cleavage. Any of the targeting domains in the table can be used with a N. meningitidis Cas9 single-stranded break nucleases (nickases). In an embodiment, dual targeting is used to create two nicks on opposite DNA strands by using N. meningitidis Cas9 nickases with two targeting domains that are complementary to opposite DNA strands, e.g., a gRNA comprising any minus strand targeting domain may be paired any gRNA comprising a plus strand targeting domain provided that the two gRNAs are oriented on the DNA such that PAMs face outward and the distance between the 5′ ends of the gRNAs is 0-50 bp.

TABLE 1F

| | | | Target | |
|---|---|---|---|---|
| 1st Tier | DNA | | Site | Seq |
| gRNA Name | Strand | Targeting Domain | Length | ID |
| HSV1-UL19-3189 | − | GUGGCGUCGCAUCGACG | 20 | 3105 |
| | | CCU | | |
| HSV1-UL19-3190 | − | ACAGUUCGAGGUCCACC | 20 | 3106 |
| | | AGC | | |
| HSV1-UL19-3191 | − | ACCCACACACAAUUACA | 20 | 3107 |
| | | UGA | | |
| HSV1-UL19-3192 | − | GCGUCGCAUCGACGCCU | 17 | 3108 |
| HSV1-UL19-3193 | − | GUUCGAGGUCCACCAGC | 17 | 3109 |
| HSV1-UL19-3194 | − | CACACACAAUUACAUGA | 17 | 3110 |

[0733] Table 1G provides exemplary targeting domains for knocking out the UL19 gene selected according to the second tier parameters. The targeting domains are selected based on location within the coding sequence, but downstream of the first 500 bp of the UL19 gene. It is contemplated herein that the targeting domain hybridizes to the target domain through complementary base pairing. Any of the targeting domains in the table can be used with a N. meningitidis Cas9 molecule that gives double stranded cleavage. Any of the targeting domains in the table can be used with a N. meningitidis Cas9 single-stranded break nucleases (nickases). In an embodiment, dual targeting is used to create two nicks on opposite DNA strands by using N. meningitidis Cas9 nickases with two targeting domains that are complementary to opposite DNA strands, e.g., a gRNA comprising any minus strand targeting domain may be paired any gRNA comprising a plus strand targeting domain provided that the two gRNAs are oriented on the DNA such that PAMs face outward and the distance between the 5′ ends of the gRNAs is 0-50 bp.

TABLE 1G

| | | | Target | |
|---|---|---|---|---|
| 2nd Tier | DNA | | Site | Seq |
| gRNA Name | Strand | Targeting Domain | Length | ID |
| HSV1-UL19-3195 | − | CGGCCAACCCGUGGGCG | 20 | 3111 |
| | | UCG | | |
| HSV1-UL19-3196 | − | GGCGGACUGGACCGUGC | 20 | 3112 |
| | | ACC | | |
| HSV1-UL19-3197 | − | CCAACCCGUGGGCGUCG | 17 | 3113 |
| HSV1-UL19-3198 | − | GGACUGGACCGUGCACC | 17 | 3114 |
| HSV1-UL19-3199 | + | GCGCGGCAAACCGUUCC | 20 | 3115 |
| | | AUG | | |
| HSV1-UL19-3200 | + | GGGCCGCCACGUACGCC | 20 | 3116 |
| | | CCG | | |
| HSV1-UL19-1181 | + | GCAGCGCCGGGUCUCGC | 20 | 1567 |
| | | AUU | | |
| HSV1-UL19-3202 | + | UGGCGUUGACCGUGUUG | 20 | 3117 |
| | | GCC | | |
| HSV1-UL19-3203 | + | CAGAUGCUGGGGGGCCA | 20 | 3118 |
| | | UCA | | |
| HSV1-UL19-3204 | + | CGGCAAACCGUUCCAUG | 17 | 3119 |
| HSV1-UL19-3205 | + | CCGCCACGUACGCCCCG | 17 | 3120 |
| HSV1-UL19-1648 | + | GCGCCGGGUCUCGCAUU | 17 | 2034 |
| HSV1-UL19-3207 | + | CGUUGACCGUGUUGGCC | 17 | 3121 |
| HSV1-UL19-3208 | + | AUGCUGGGGGGCCAUCA | 17 | 3122 |

[0734] Table 2A provides exemplary targeting domains for knocking out the UL30 gene selected according to first tier parameters. The targeting domains are selected based on location within the first 500 bp of the coding sequence of the UL30 gene and orthogonality against the human genome. It is contemplated herein that the targeting domain hybridizes to the target domain through complementary base pairing. Any of the targeting domains in the table can be used with a S. pyogenes Cas9 molecule that gives double stranded cleavage. Any of the targeting domains in the table can be used with a S. pyogenes Cas9 single-stranded break nucleases (nickases). In an embodiment, dual targeting is used to create two nicks on opposite DNA strands by using S. pyogenes Cas9 nickases with two targeting domains that are complementary to opposite DNA strands, e.g., a gRNA comprising any minus strand targeting domain may be paired any gRNA comprising a plus strand targeting domain provided that the two gRNAs are oriented on the DNA such that PAMs face outward and the distance between the 5′ ends of the gRNAs is 0-50 bp.

TABLE 2A

| | | | Target | |
|---|---|---|---|---|
| 1st Tier | DNA | | Site | Seq |
| gRNA Name | Strand | Targeting Domain | Length | ID |
| HSV1-UL30-4 | − | GUCCCCCGGAGGAAAGUCGG | 20 | 3123 |
| HSV1-UL30-5 | − | CCGGAGGAAAGUCGGCGGCC | 20 | 3124 |
| HSV1-UL30-11 | − | UUUGCGCCCGCCGGCCCUCG | 20 | 3125 |
| HSV1-UL30-18 | − | GGGACGCAACAGAAGCCGAC | 20 | 3126 |
| HSV1-UL30-19 | − | GGACGCAACAGAAGCCGACC | 20 | 3127 |
| HSV1-UL30-20 | − | AAUUUCGAUUCAUCGCCCCG | 20 | 3128 |
| HSV1-UL30-21 | − | AUUUCGAUUCAUCGCCCCGC | 20 | 3129 |
| HSV1-UL30-22 | − | AUUCAUCGCCCCGCGGGUGC | 20 | 3130 |
| HSV1-UL30-25 | − | GCCCCCCCGGAGAAGCGCGC | 20 | 3131 |
| HSV1-UL30-27 | − | CCCCCCGGAGAAGCGCGCCG | 20 | 3132 |
| HSV1-UL30-28 | − | AAGCGCGCCGGGGUGCACGA | 20 | 3133 |
| HSV1-UL30-29 | − | UCACCUCAAGCGCGCCCCCA | 20 | 3134 |
| HSV1-UL30-30 | − | CGCGCCCCCAAGGUGUACUG | 20 | 3135 |
| HSV1-UL30-31 | − | GCGCCCCCAAGGUGUACUGC | 20 | 3136 |
| HSV1-UL30-32 | − | CGCCCCCAAGGUGUACUGCG | 20 | 3137 |
| HSV1-UL30-33 | − | GCCCCCAAGGUGUACUGCGG | 20 | 3138 |
| HSV1-UL30-36 | − | GAGCGCGACGUCCUCCGCGU | 20 | 3139 |
| HSV1-UL30-37 | − | AGCGCGACGUCCUCCGCGUC | 20 | 3140 |
| HSV1-UL30-38 | − | CGACGUCCUCCGCGUCGGGU | 20 | 3141 |
| HSV1-UL30-39 | − | GACGUCCUCCGCGUCGGGUC | 20 | 3142 |
| HSV1-UL30-40 | − | GUCCUCCGCGUCGGGUCGGG | 20 | 3143 |
| HSV1-UL30-50 | − | GGCGUGGACCACGCCCCGGC | 20 | 3144 |
| HSV1-UL30-51 | − | GCGUGGACCACGCCCCGGCG | 20 | 3145 |
| HSV1-UL30-52 | − | CUUUCACGUGUACGACAUCC | 20 | 3146 |
| HSV1-UL30-53 | − | GUACGACAUCCUGGAGAACG | 20 | 3147 |
| HSV1-UL30-54 | − | GAGAACGUGGAGCACGCGUA | 20 | 3148 |
| HSV1-UL30-56 | + | ACGCGUGCUCCACGUUCUCC | 20 | 3149 |
| HSV1-UL30-57 | + | GAUGUCGUACACGUGAAAGA | 20 | 3150 |
| HSV1-UL30-61 | + | CGUGAAAGACGGUGACGGUG | 20 | 3151 |
| HSV1-UL30-62 | + | ACGGUGGGGUUGAACCCCGC | 20 | 3152 |
| HSV1-UL30-64 | + | GGUGGGGUUGAACCCCGCCG | 20 | 3153 |
| HSV1-UL30-65 | + | GGUUGAACCCCGCCGGGGCG | 20 | 3154 |
| HSV1-UL30-68 | + | AGAAGCCGCCCGACCCGACG | 20 | 3155 |
| HSV1-UL30-69 | + | AGCCGCCCGACCCGACGCGG | 20 | 3156 |
| HSV1-UL30-70 | + | GUCCCCCCCGCAGUACACCU | 20 | 3157 |
| HSV1-UL30-74 | + | ACACCUUGGGGGCGCGCUUG | 20 | 3158 |
| HSV1-UL30-75 | + | GAGGUGACCGUCGUGCACCC | 20 | 3159 |
| HSV1-UL30-80 | + | CCCCGGCGCGCUUCUCCGGG | 20 | 3160 |
| HSV1-UL30-82 | + | GCAUCCUCGUCCAGCACCCG | 20 | 3161 |
| HSV1-UL30-84 | + | AUCCUCGUCCAGCACCCGCG | 20 | 3162 |
| HSV1-UL30-87 | + | GCUAUAGUACGUAUGGCGCU | 20 | 3163 |
| HSV1-UL30-88 | + | UAGUACGUAUGGCGCUGGGU | 20 | 3164 |
| HSV1-UL30-89 | + | CGUAUGGCGCUGGGUUGGCC | 20 | 3165 |
| HSV1-UL30-91 | + | GGCUUCUGUUGCGUCCCGAC | 20 | 3166 |
| HSV1-UL30-92 | + | GCUUCUGUUGCGUCCCGACU | 20 | 3167 |
| HSV1-UL30-93 | + | CUUCUGUUGCGUCCCGACUG | 20 | 3168 |
| HSV1-UL30-94 | + | GUUGCGUCCCGACUGGGGCG | 20 | 3169 |
| HSV1-UL30-95 | + | CGUCCCGACUGGGGCGAGGU | 20 | 3170 |
| HSV1-UL30-101 | + | GUUUUGCCUCAAACAAGGCG | 20 | 3171 |
| HSV1-UL30-102 | + | UUUUGCCUCAAACAAGGCGG | 20 | 3172 |
| HSV1-UL30-103 | + | UCAAACAAGGCGGGGGUCCC | 20 | 3173 |
| HSV1-UL30-110 | + | GCCGGCGGGCGCAAAAAACC | 20 | 3174 |
| HSV1-UL30-111 | + | AAAAAACCCGGACGCCGCCC | 20 | 3175 |
| HSV1-UL30-114 | + | UGGCCGCCGACUUUCCUCCG | 20 | 3176 |
| HSV1-UL30-115 | + | GGCCGCCGACUUUCCUCCGG | 20 | 3177 |
| HSV1-UL30-121 | − | GUCCCCCGGAGGAAAGU | 17 | 3178 |
| HSV1-UL30-125 | − | AAAGUCGGCGGCCAGGG | 17 | 3179 |
| HSV1-UL30-128 | − | GGGUUUUUUGCGCCCGC | 17 | 3180 |
| HSV1-UL30-136 | − | ACGCAACAGAAGCCGAC | 17 | 3181 |
| HSV1-UL30-137 | − | CGCAACAGAAGCCGACC | 17 | 3182 |
| HSV1-UL30-138 | − | UUCGAUUCAUCGCCCCG | 17 | 3183 |
| HSV1-UL30-139 | − | UCGAUUCAUCGCCCCGC | 17 | 3184 |
| HSV1-UL30-140 | − | CAUCGCCCCGCGGGUGC | 17 | 3185 |
| HSV1-UL30-144 | − | CCCCGGAGAAGCGCGCC | 17 | 3186 |
| HSV1-UL30-146 | − | CGCGCCGGGGUGCACGA | 17 | 3187 |
| HSV1-UL30-147 | − | CCUCAAGCGCGCCCCCA | 17 | 3188 |
| HSV1-UL30-148 | − | GCCCCCAAGGUGUACUG | 17 | 3189 |
| HSV1-UL30-150 | − | CCCCAAGGUGUACUGCG | 17 | 3190 |
| HSV1-UL30-155 | − | GCGACGUCCUCCGCGUC | 17 | 3191 |
| HSV1-UL30-156 | − | CGUCCUCCGCGUCGGGU | 17 | 3192 |
| HSV1-UL30-157 | − | GUCCUCCGCGUCGGGUC | 17 | 3193 |
| HSV1-UL30-158 | − | CUCCGCGUCGGGUCGGG | 17 | 3194 |
| HSV1-UL30-163 | − | CGGCGCUCGCGCCUGUG | 17 | 3195 |
| HSV1-UL30-164 | − | CGCUCGCGCCUGUGGGG | 17 | 3196 |
| HSV1-UL30-167 | − | CGUGGACCACGCCCCGG | 17 | 3197 |
| HSV1-UL30-168 | − | GUGGACCACGCCCCGGC | 17 | 3198 |
| HSV1-UL30-169 | − | UGGACCACGCCCCGGCG | 17 | 3199 |
| HSV1-UL30-170 | − | UCACGUGUACGACAUCC | 17 | 3200 |
| HSV1-UL30-171 | − | CGACAUCCUGGAGAACG | 17 | 3201 |
| HSV1-UL30-172 | − | AACGUGGAGCACGCGUA | 17 | 3202 |
| HSV1-UL30-175 | + | GUCGUACACGUGAAAGA | 17 | 3203 |
| HSV1-UL30-178 | + | UGAAAGACGGUGACGGU | 17 | 3204 |
| HSV1-UL30-182 | + | GGGGUUGAACCCCGCCG | 17 | 3205 |
| HSV1-UL30-185 | + | CACAGGCGCGAGCGCCG | 17 | 3206 |
| HSV1-UL30-186 | + | AGCCGCCCGACCCGACG | 17 | 3207 |
| HSV1-UL30-187 | + | CGCCCGACCCGACGCGG | 17 | 3208 |
| HSV1-UL30-188 | + | CCCCCCGCAGUACACCU | 17 | 3209 |
| HSV1-UL30-189 | + | CCCCCGCAGUACACCUU | 17 | 3210 |
| HSV1-UL30-190 | + | CCCCGCAGUACACCUUG | 17 | 3211 |
| HSV1-UL30-193 | + | GUGACCGUCGUGCACCC | 17 | 3212 |
| HSV1-UL30-196 | + | CCCGGCGCGCUUCUCCG | 17 | 3213 |
| HSV1-UL30-197 | + | CCGGCGCGCUUCUCCGG | 17 | 3214 |
| HSV1-UL30-198 | + | CGGCGCGCUUCUCCGGG | 17 | 3215 |
| HSV1-UL30-199 | + | GGCGCGCUUCUCCGGGG | 17 | 3216 |
| HSV1-UL30-202 | + | CUCGUCCAGCACCCGCG | 17 | 3217 |
| HSV1-UL30-203 | + | AUUCGCUAUAGUACGUA | 17 | 3218 |
| HSV1-UL30-204 | + | UAUAGUACGUAUGGCGC | 17 | 3219 |
| HSV1-UL30-205 | + | AUAGUACGUAUGGCGCU | 17 | 3220 |
| HSV1-UL30-206 | + | UACGUAUGGCGCUGGGU | 17 | 3221 |
| HSV1-UL30-209 | + | UUCUGUUGCGUCCCGAC | 17 | 3222 |
| HSV1-UL30-210 | + | UCUGUUGCGUCCCGACU | 17 | 3223 |
| HSV1-UL30-211 | + | CUGUUGCGUCCCGACUG | 17 | 3224 |
| HSV1-UL30-212 | + | GCGUCCCGACUGGGGCG | 17 | 3225 |
| HSV1-UL30-215 | + | CGACUGGGGCGAGGUAG | 17 | 3226 |
| HSV1-UL30-228 | + | GGCGGGCGCAAAAAACC | 17 | 3227 |
| HSV1-UL30-230 | + | GGCCGCCGACUUUCCUC | 17 | 3228 |
| HSV1-UL30-231 | + | GCCGCCGACUUUCCUCC | 17 | 3229 |
| HSV1-UL30-232 | + | CCGCCGACUUUCCUCCG | 17 | 3230 |
| HSV1-UL30-233 | + | CGCCGACUUUCCUCCGG | 17 | 3231 |

[0735] Table 2B provides exemplary targeting domains for knocking out the UL30 gene selected according to the second tier parameters. The targeting domains are selected based on location within the first 500 bp of the coding sequence of the UL30 gene. It is contemplated herein that the targeting domain hybridizes to the target domain through complementary base pairing. Any of the targeting domains in the table can be used with a S. pyogenes Cas9 molecule that gives double stranded cleavage. Any of the targeting domains in the table can be used with a S. pyogenes Cas9 single-stranded break nucleases (nickases). In an embodiment, dual targeting is used to create two nicks on opposite DNA strands by using S. pyogenes Cas9 nickases with two targeting domains that are complementary to opposite DNA strands, e.g., a gRNA comprising any minus strand targeting domain may be paired any gRNA comprising a plus strand targeting domain provided that the two gRNAs are oriented on the DNA such that PAMs face outward and the distance between the 5′ ends of the gRNAs is 0-50 bp.

TABLE 2B

| | | | Target | |
|---|---|---|---|---|
| 2nd Tier | DNA | | Site | |
| gRNA Name | Strand | Targeting Domain | Length | Seq ID |
| HSV1-UL30-1 | − | GGCGGCGGCCCGCUGUCCCC | 20 | 3232 |
| HSV1-UL30-2 | − | GGCGGCCCGCUGUCCCCCGG | 20 | 3233 |
| HSV1-UL30-3 | − | GCUGUCCCCCGGAGGAAAGU | 20 | 3234 |
| HSV1-UL30-6 | − | CGGAGGAAAGUCGGCGGCCA | 20 | 3235 |
| HSV1-UL30-7 | − | AGGAAAGUCGGCGGCCAGGG | 20 | 3236 |
| HSV1-UL30-8 | − | UCGGCGGCCAGGGCGGCGUC | 20 | 3237 |
| HSV1-UL30-9 | − | CGGCGGCCAGGGCGGCGUCC | 20 | 3238 |
| HSV1-UL30-10 | − | UCCGGGUUUUUUGCGCCCGC | 20 | 3239 |
| HSV1-UL30-12 | − | CCGGCCCUCGCGGAGCCAGC | 20 | 3240 |
| HSV1-UL30-13 | − | CGGCCCUCGCGGAGCCAGCC | 20 | 3241 |
| HSV1-UL30-14 | − | GGCCCUCGCGGAGCCAGCCG | 20 | 3242 |
| HSV1-UL30-15 | − | GGGGACCCCCGCCUUGUUUG | 20 | 3243 |
| HSV1-UL30-16 | − | AACCCCUACCUCGCCCCAGU | 20 | 3244 |
| HSV1-UL30-17 | − | ACCCCUACCUCGCCCCAGUC | 20 | 3245 |
| HSV1-UL30-23 | − | CGCCCCGCGGGUGCUGGACG | 20 | 3246 |
| HSV1-UL30-24 | − | GCUGGACGAGGAUGCCCCCC | 20 | 3247 |
| HSV1-UL30-26 | − | CCCCCCCGGAGAAGCGCGCC | 20 | 3248 |
| HSV1-UL30-34 | − | CCCCCAAGGUGUACUGCGGG | 20 | 3249 |
| HSV1-UL30-35 | − | CCCCAAGGUGUACUGCGGGG | 20 | 3250 |
| HSV1-UL30-41 | − | GCGUCGGGUCGGGCGGCUUC | 20 | 3251 |
| HSV1-UL30-42 | − | GGUCGGGCGGCUUCUGGCCG | 20 | 3252 |
| HSV1-UL30-43 | − | GGCCGCGGCGCUCGCGCCUG | 20 | 3253 |
| HSV1-UL30-44 | − | GCCGCGGCGCUCGCGCCUGU | 20 | 3254 |
| HSV1-UL30-45 | − | CCGCGGCGCUCGCGCCUGUG | 20 | 3255 |
| HSV1-UL30-46 | − | CGGCGCUCGCGCCUGUGGGG | 20 | 3256 |
| HSV1-UL30-47 | − | CUCGCGCCUGUGGGGCGGCG | 20 | 3257 |
| HSV1-UL30-48 | − | GGGCGGCGUGGACCACGCCC | 20 | 3258 |
| HSV1-UL30-49 | − | CGGCGUGGACCACGCCCCGG | 20 | 3259 |
| HSV1-UL30-55 | − | GCACGCGUACGGCAUGCGCG | 20 | 3260 |
| HSV1-UL30-58 | + | GUACACGUGAAAGACGGUGA | 20 | 3261 |
| HSV1-UL30-59 | + | CACGUGAAAGACGGUGACGG | 20 | 3262 |
| HSV1-UL30-60 | + | ACGUGAAAGACGGUGACGGU | 20 | 3263 |
| HSV1-UL30-63 | + | CGGUGGGGUUGAACCCCGCC | 20 | 3264 |
| HSV1-UL30-66 | + | CGUGGUCCACGCCGCCCCAC | 20 | 3265 |
| HSV1-UL30-67 | + | CCCCACAGGCGCGAGCGCCG | 20 | 3266 |
| HSV1-UL30-71 | + | UCCCCCCCGCAGUACACCUU | 20 | 3267 |
| HSV1-UL30-72 | + | CCCCCCCGCAGUACACCUUG | 20 | 3268 |
| HSV1-UL30-73 | + | CCCCCCGCAGUACACCUUGG | 20 | 3269 |
| HSV1-UL30-76 | + | UGCACCCCGGCGCGCUUCUC | 20 | 3270 |
| HSV1-UL30-77 | + | GCACCCCGGCGCGCUUCUCC | 20 | 3271 |
| HSV1-UL30-78 | + | CACCCCGGCGCGCUUCUCCG | 20 | 3272 |
| HSV1-UL30-79 | + | ACCCCGGCGCGCUUCUCCGG | 20 | 3273 |
| HSV1-UL30-81 | + | CCCGGCGCGCUUCUCCGGGG | 20 | 3274 |
| HSV1-UL30-83 | + | CAUCCUCGUCCAGCACCCGC | 20 | 3275 |
| HSV1-UL30-85 | + | CGCAUUCGCUAUAGUACGUA | 20 | 3276 |
| HSV1-UL30-86 | + | CGCUAUAGUACGUAUGGCGC | 20 | 3277 |
| HSV1-UL30-90 | + | UGGCGCUGGGUUGGCCCGGU | 20 | 3278 |
| HSV1-UL30-96 | + | GUCCCGACUGGGGCGAGGUA | 20 | 3279 |
| HSV1-UL30-97 | + | UCCCGACUGGGGCGAGGUAG | 20 | 3280 |
| HSV1-UL30-98 | + | UAAAAGUUUUGCCUCAAACA | 20 | 3281 |
| HSV1-UL30-99 | + | AAGUUUUGCCUCAAACAAGG | 20 | 3282 |
| HSV1-UL30-100 | + | AGUUUUGCCUCAAACAAGGC | 20 | 3283 |
| HSV1-UL30-104 | + | ACAAGGCGGGGGUCCCCGGC | 20 | 3284 |
| HSV1-UL30-105 | + | GGUCCCCGGCUGGCUCCGCG | 20 | 3285 |
| HSV1-UL30-106 | + | GUCCCCGGCUGGCUCCGCGA | 20 | 3286 |
| HSV1-UL30-107 | + | CCGGCUGGCUCCGCGAGGGC | 20 | 3287 |
| HSV1-UL30-108 | + | GCUGGCUCCGCGAGGGCCGG | 20 | 3288 |
| HSV1-UL30-109 | + | CUGGCUCCGCGAGGGCCGGC | 20 | 3289 |
| HSV1-UL30-112 | + | CCUGGCCGCCGACUUUCCUC | 20 | 3290 |
| HSV1-UL30-113 | + | CUGGCCGCCGACUUUCCUCC | 20 | 3291 |
| HSV1-UL30-116 | + | GACUUUCCUCCGGGGGACAG | 20 | 3292 |
| HSV1-UL30-117 | + | ACUUUCCUCCGGGGGACAGC | 20 | 3293 |
| HSV1-UL30-118 | + | GGACAGCGGGCCGCCGCCAC | 20 | 3294 |
| HSV1-UL30-119 | − | GGCGGCCCGCUGUCCCC | 17 | 3295 |
| HSV1-UL30-120 | − | GGCCCGCUGUCCCCCGG | 17 | 3296 |
| HSV1-UL30-122 | − | CCCCGGAGGAAAGUCGG | 17 | 3297 |
| HSV1-UL30-123 | − | GAGGAAAGUCGGCGGCC | 17 | 3298 |
| HSV1-UL30-124 | − | AGGAAAGUCGGCGGCCA | 17 | 3299 |
| HSV1-UL30-126 | − | GCGGCCAGGGCGGCGUC | 17 | 3300 |
| HSV1-UL30-127 | − | CGGCCAGGGCGGCGUCC | 17 | 3301 |
| HSV1-UL30-129 | − | GCGCCCGCCGGCCCUCG | 17 | 3302 |
| HSV1-UL30-130 | − | GCCCUCGCGGAGCCAGC | 17 | 3303 |
| HSV1-UL30-131 | − | CCCUCGCGGAGCCAGCC | 17 | 3304 |
| HSV1-UL30-132 | − | CCUCGCGGAGCCAGCCG | 17 | 3305 |
| HSV1-UL30-133 | − | GACCCCCGCCUUGUUUG | 17 | 3306 |
| HSV1-UL30-134 | − | CCCUACCUCGCCCCAGU | 17 | 3307 |
| HSV1-UL30-135 | − | CCUACCUCGCCCCAGUC | 17 | 3308 |
| HSV1-UL30-141 | − | CCCGCGGGUGCUGGACG | 17 | 3309 |
| HSV1-UL30-142 | − | GGACGAGGAUGCCCCCC | 17 | 3310 |
| HSV1-UL30-143 | − | CCCCCGGAGAAGCGCGC | 17 | 3311 |
| HSV1-UL30-145 | − | CCCGGAGAAGCGCGCCG | 17 | 3312 |
| HSV1-UL30-149 | − | CCCCCAAGGUGUACUGC | 17 | 3313 |
| HSV1-UL30-151 | − | CCCAAGGUGUACUGCGG | 17 | 3314 |
| HSV1-UL30-152 | − | CCAAGGUGUACUGCGGG | 17 | 3315 |
| HSV1-UL30-153 | − | CAAGGUGUACUGCGGGG | 17 | 3316 |
| HSV1-UL30-154 | − | CGCGACGUCCUCCGCGU | 17 | 3317 |
| HSV1-UL30-159 | − | UCGGGUCGGGCGGCUUC | 17 | 3318 |
| HSV1-UL30-160 | − | CGGGCGGCUUCUGGCCG | 17 | 3319 |
| HSV1-UL30-161 | − | CGCGGCGCUCGCGCCUG | 17 | 3320 |
| HSV1-UL30-162 | − | GCGGCGCUCGCGCCUGU | 17 | 3321 |
| HSV1-UL30-165 | − | GCGCCUGUGGGGCGGCG | 17 | 3322 |
| HSV1-UL30-166 | − | CGGCGUGGACCACGCCC | 17 | 3323 |
| HSV1-UL30-173 | − | CGCGUACGGCAUGCGCG | 17 | 3324 |
| HSV1-UL30-174 | + | CGUGCUCCACGUUCUCC | 17 | 3325 |
| HSV1-UL30-176 | + | CACGUGAAAGACGGUGA | 17 | 3326 |
| HSV1-UL30-177 | + | GUGAAAGACGGUGACGG | 17 | 3327 |
| HSV1-UL30-179 | + | GAAAGACGGUGACGGUG | 17 | 3328 |
| HSV1-UL30-180 | + | GUGGGGUUGAACCCCGC | 17 | 3329 |
| HSV1-UL30-181 | + | UGGGGUUGAACCCCGCC | 17 | 3330 |
| HSV1-UL30-183 | + | UGAACCCCGCCGGGGCG | 17 | 3331 |
| HSV1-UL30-184 | + | GGUCCACGCCGCCCCAC | 17 | 3332 |
| HSV1-UL30-191 | + | CCCGCAGUACACCUUGG | 17 | 3333 |
| HSV1-UL30-192 | + | CCUUGGGGGCGCGCUUG | 17 | 3334 |
| HSV1-UL30-194 | + | ACCCCGGCGCGCUUCUC | 17 | 3335 |
| HSV1-UL30-195 | + | CCCCGGCGCGCUUCUCC | 17 | 3336 |
| HSV1-UL30-200 | + | UCCUCGUCCAGCACCCG | 17 | 3337 |
| HSV1-UL30-201 | + | CCUCGUCCAGCACCCGC | 17 | 3338 |
| HSV1-UL30-207 | + | AUGGCGCUGGGUUGGCC | 17 | 3339 |
| HSV1-UL30-208 | + | CGCUGGGUUGGCCCGGU | 17 | 3340 |
| HSV1-UL30-213 | + | CCCGACUGGGGCGAGGU | 17 | 3341 |
| HSV1-UL30-214 | + | CCGACUGGGGCGAGGUA | 17 | 3342 |
| HSV1-UL30-216 | + | AAGUUUUGCCUCAAACA | 17 | 3343 |
| HSV1-UL30-217 | + | UUUUGCCUCAAACAAGG | 17 | 3344 |
| HSV1-UL30-218 | + | UUUGCCUCAAACAAGGC | 17 | 3345 |
| HSV1-UL30-219 | + | UUGCCUCAAACAAGGCG | 17 | 3346 |
| HSV1-UL30-220 | + | UGCCUCAAACAAGGCGG | 17 | 3347 |
| HSV1-UL30-221 | + | AACAAGGCGGGGGUCCC | 17 | 3348 |
| HSV1-UL30-222 | + | AGGCGGGGGUCCCCGGC | 17 | 3349 |
| HSV1-UL30-223 | + | CCCCGGCUGGCUCCGCG | 17 | 3350 |
| HSV1-UL30-224 | + | CCCGGCUGGCUCCGCGA | 17 | 3351 |
| HSV1-UL30-225 | + | GCUGGCUCCGCGAGGGC | 17 | 3352 |
| HSV1-UL30-226 | + | GGCUCCGCGAGGGCCGG | 17 | 3353 |
| HSV1-UL30-227 | + | GCUCCGCGAGGGCCGGC | 17 | 3354 |
| HSV1-UL30-229 | + | AAACCCGGACGCCGCCC | 17 | 3355 |
| HSV1-UL30-234 | + | UUUCCUCCGGGGGACAG | 17 | 3356 |
| HSV1-UL30-235 | + | UUCCUCCGGGGGACAGC | 17 | 3357 |
| HSV1-UL30-236 | + | CAGCGGGCCGCCGCCAC | 17 | 3358 |

[0736] Table 2C provides exemplary targeting domains for knocking out the UL30 gene selected according to the third tier parameters. The targeting domains are selected based on location within the coding sequence, but downstream of the first 500 bp of the UL30 gene. It is contemplated herein that the targeting domain hybridizes to the target domain through complementary base pairing. Any of the targeting domains in the table can be used with a S. pyogenes Cas9 molecule that gives double stranded cleavage. Any of the targeting domains in the table can be used with a S. pyogenes Cas9 single-stranded break nucleases (nickases). In an embodiment, dual targeting is used to create two nicks on opposite DNA strands by using S. pyogenes Cas9 nickases with two targeting domains that are complementary to opposite DNA strands, e.g., a gRNA comprising any minus strand targeting domain may be paired any gRNA comprising a plus strand targeting domain provided that the two gRNAs are oriented on the DNA such that PAMs face outward and the distance between the 5′ ends of the gRNAs is 0-50 bp.

TABLE 2C

| | | | Target | |
|---|---|---|---|---|
| 3rd Tier | DNA | | Site | |
| gRNA Name | Strand | Targeting Domain | Length | Seq ID |
| HSV1-UL30-421 | − | TATGGACGCCATCACACCGA | 20 | 3359 |
| HSV1-UL30-422 | − | ATGGACGCCATCACACCGAC | 20 | 3360 |
| HSV1-UL30-423 | − | TGGACGCCATCACACCGACG | 20 | 3361 |
| HSV1-UL30-424 | − | GGGGACCGTCATCACGCTCC | 20 | 3362 |
| HSV1-UL30-425 | − | GGGACCGTCATCACGCTCCT | 20 | 3363 |
| HSV1-UL30-426 | − | CACGCTCCTGGGCCTGACTC | 20 | 3364 |
| HSV1-UL30-427 | − | CTCCTGGGCCTGACTCCGGA | 20 | 3365 |
| HSV1-UL30-428 | − | GCCTGACTCCGGAAGGCCAC | 20 | 3366 |
| HSV1-UL30-429 | − | CCTGACTCCGGAAGGCCACC | 20 | 3367 |
| HSV1-UL30-430 | − | GACTCCGGAAGGCCACCGGG | 20 | 3368 |
| HSV1-UL30-431 | − | CGGGTGGCCGTTCACGTTTA | 20 | 3369 |
| HSV1-UL30-432 | − | CCGTTCACGTTTACGGCACG | 20 | 3370 |
| HSV1-UL30-433 | − | GCAGTACTTTTACATGAACA | 20 | 3371 |
| HSV1-UL30-434 | − | GTACTTTTACATGAACAAGG | 20 | 3372 |
| HSV1-UL30-435 | − | CTTTTACATGAACAAGGAGG | 20 | 3373 |
| HSV1-UL30-436 | − | TGAACAAGGAGGAGGTCGAC | 20 | 3374 |
| HSV1-UL30-437 | − | ACGAGATCTCTGCGAGCGCA | 20 | 3375 |
| HSV1-UL30-438 | − | TCTCTGCGAGCGCATGGCCG | 20 | 3376 |
| HSV1-UL30-439 | − | CGCGGCCCTGCGCGAGTCCC | 20 | 3377 |
| HSV1-UL30-440 | − | GCGGCCCTGCGCGAGTCCCC | 20 | 3378 |
| HSV1-UL30-441 | − | TCCCCGGGCGCGTCGTTCCG | 20 | 3379 |
| HSV1-UL30-442 | − | GTCGTTCCGCGGCATCTCCG | 20 | 3380 |
| HSV1-UL30-443 | − | CATCTCCGCGGACCACTTCG | 20 | 3381 |
| HSV1-UL30-444 | − | CTCCGCGGACCACTTCGAGG | 20 | 3382 |
| HSV1-UL30-445 | − | CGCGGACCACTTCGAGGCGG | 20 | 3383 |
| HSV1-UL30-446 | − | GGACCACTTCGAGGCGGAGG | 20 | 3384 |
| HSV1-UL30-447 | − | CCACTTCGAGGCGGAGGTGG | 20 | 3385 |
| HSV1-UL30-448 | − | TACCGCGTCTACGTCCGAAG | 20 | 3386 |
| HSV1-UL30-449 | − | ACCGCGTCTACGTCCGAAGC | 20 | 3387 |
| HSV1-UL30-450 | − | CCTGTGCGACAACTTCTGCC | 20 | 3388 |
| HSV1-UL30-451 | − | CCCGGCCATCAAGAAGTACG | 20 | 3389 |
| HSV1-UL30-452 | − | CCGGCCATCAAGAAGTACGA | 20 | 3390 |
| HSV1-UL30-453 | − | GCCATCAAGAAGTACGAGGG | 20 | 3391 |
| HSV1-UL30-454 | − | CCATCAAGAAGTACGAGGGT | 20 | 3392 |
| HSV1-UL30-455 | − | CATCAAGAAGTACGAGGGTG | 20 | 3393 |
| HSV1-UL30-456 | − | GTGGGGTCGACGCCACCACC | 20 | 3394 |
| HSV1-UL30-457 | − | CGCCACCACCCGGTTCATCC | 20 | 3395 |
| HSV1-UL30-458 | − | CGGTTCATCCTGGACAACCC | 20 | 3396 |
| HSV1-UL30-459 | − | GGTTCATCCTGGACAACCCC | 20 | 3397 |
| HSV1-UL30-460 | − | AACCCCGGGTTCGTCACCTT | 20 | 3398 |
| HSV1-UL30-461 | − | CCGGGTTCGTCACCTTCGGC | 20 | 3399 |
| HSV1-UL30-462 | − | CGGCTGGTACCGTCTCAAAC | 20 | 3400 |
| HSV1-UL30-463 | − | GGCTGGTACCGTCTCAAACC | 20 | 3401 |
| HSV1-UL30-464 | − | GGTACCGTCTCAAACCGGGC | 20 | 3402 |
| HSV1-UL30-465 | − | GAACAACACGCTAGCCCAGC | 20 | 3403 |
| HSV1-UL30-466 | − | CAACACGCTAGCCCAGCCGG | 20 | 3404 |
| HSV1-UL30-467 | − | AGCCCAGCCGGCGGCCCCGA | 20 | 3405 |
| HSV1-UL30-468 | − | CCGGCGGCCCCGATGGCCTT | 20 | 3406 |
| HSV1-UL30-469 | − | CGGCGGCCCCGATGGCCTTC | 20 | 3407 |
| HSV1-UL30-470 | − | CGACGTCGAGTTTAACTGTA | 20 | 3408 |
| HSV1-UL30-471 | − | CGTCGAGTTTAACTGTACGG | 20 | 3409 |
| HSV1-UL30-472 | − | TAACTGTACGGCGGACAACC | 20 | 3410 |
| HSV1-UL30-473 | − | GGCGGACAACCTGGCCATCG | 20 | 3411 |
| HSV1-UL30-474 | − | GCGGACAACCTGGCCATCGA | 20 | 3412 |
| HSV1-UL30-475 | − | CGGACAACCTGGCCATCGAG | 20 | 3413 |
| HSV1-UL30-476 | − | GGACAACCTGGCCATCGAGG | 20 | 3414 |
| HSV1-UL30-477 | − | GACAACCTGGCCATCGAGGG | 20 | 3415 |
| HSV1-UL30-478 | − | GGGGGGCATGAGCGACCTAC | 20 | 3416 |
| HSV1-UL30-479 | − | GTGCTTCGATATCGAATGCA | 20 | 3417 |
| HSV1-UL30-480 | − | CTTCGATATCGAATGCAAGG | 20 | 3418 |
| HSV1-UL30-481 | − | TTCGATATCGAATGCAAGGC | 20 | 3419 |
| HSV1-UL30-482 | − | TCGATATCGAATGCAAGGCG | 20 | 3420 |
| HSV1-UL30-483 | − | CGATATCGAATGCAAGGCGG | 20 | 3421 |
| HSV1-UL30-484 | − | GATATCGAATGCAAGGCGGG | 20 | 3422 |
| HSV1-UL30-485 | − | ATATCGAATGCAAGGCGGGG | 20 | 3423 |
| HSV1-UL30-486 | − | TATCGAATGCAAGGCGGGGG | 20 | 3424 |
| HSV1-UL30-487 | − | CGAATGCAAGGCGGGGGGGG | 20 | 3425 |
| HSV1-UL30-488 | − | GGCGGGGGGGGAGGACGAGC | 20 | 3426 |
| HSV1-UL30-489 | − | GGAGGACGAGCTGGCCTTTC | 20 | 3427 |
| HSV1-UL30-490 | − | GGACGAGCTGGCCTTTCCGG | 20 | 3428 |
| HSV1-UL30-491 | − | GAGCTGGCCTTTCCGGTGGC | 20 | 3429 |
| HSV1-UL30-492 | − | AGCTGGCCTTTCCGGTGGCC | 20 | 3430 |
| HSV1-UL30-493 | − | CTTTCCGGTGGCCGGGCACC | 20 | 3431 |
| HSV1-UL30-494 | − | TCCGGTGGCCGGGCACCCGG | 20 | 3432 |
| HSV1-UL30-495 | − | GGCCGGGCACCCGGAGGACC | 20 | 3433 |
| HSV1-UL30-496 | − | CGACCTGTCCACCACCGCCC | 20 | 3434 |
| HSV1-UL30-497 | − | CACGTCCTCCTGTTTTCGCT | 20 | 3435 |
| HSV1-UL30-498 | − | CGAATCCCACCTGAACGAGC | 20 | 3436 |
| HSV1-UL30-499 | − | ATCCCACCTGAACGAGCTGG | 20 | 3437 |
| HSV1-UL30-500 | − | ACCTGAACGAGCTGGCGGCC | 20 | 3438 |
| HSV1-UL30-501 | − | CCTGAACGAGCTGGCGGCCA | 20 | 3439 |
| HSV1-UL30-502 | − | CTGAACGAGCTGGCGGCCAG | 20 | 3440 |
| HSV1-UL30-503 | − | CAGGGGCCTGCCCACGCCCG | 20 | 3441 |
| HSV1-UL30-504 | − | CCTGCCCACGCCCGTGGTTC | 20 | 3442 |
| HSV1-UL30-505 | − | CAGCGAATTCGAGATGCTGT | 20 | 3443 |
| HSV1-UL30-506 | − | ATGACCCTTGTGAAACAGTA | 20 | 3444 |
| HSV1-UL30-507 | − | TACGGCCCCGAGTTCGTGAC | 20 | 3445 |
| HSV1-UL30-508 | − | ACGGCCCCGAGTTCGTGACC | 20 | 3446 |
| HSV1-UL30-509 | − | ACAACATCATCAACTTCGAC | 20 | 3447 |
| HSV1-UL30-510 | − | CTTCGACTGGCCCTTCTTGC | 20 | 3448 |
| HSV1-UL30-511 | − | CTTCTTGCTGGCCAAGCTGA | 20 | 3449 |
| HSV1-UL30-512 | − | CAAGCTGACGGACATTTACA | 20 | 3450 |
| HSV1-UL30-513 | − | GGACATTTACAAGGTCCCCC | 20 | 3451 |
| HSV1-UL30-514 | − | ATTTACAAGGTCCCCCTGGA | 20 | 3452 |
| HSV1-UL30-515 | − | TTTACAAGGTCCCCCTGGAC | 20 | 3453 |
| HSV1-UL30-516 | − | AAGGTCCCCCTGGACGGGTA | 20 | 3454 |
| HSV1-UL30-517 | − | GACGGGTACGGCCGCATGAA | 20 | 3455 |
| HSV1-UL30-518 | − | GGTACGGCCGCATGAACGGC | 20 | 3456 |
| HSV1-UL30-519 | − | GTACGGCCGCATGAACGGCC | 20 | 3457 |
| HSV1-UL30-520 | − | TACGGCCGCATGAACGGCCG | 20 | 3458 |
| HSV1-UL30-521 | − | GCCGGGGCGTGTTTCGCGTG | 20 | 3459 |
| HSV1-UL30-522 | − | CCGGGGCGTGTTTCGCGTGT | 20 | 3460 |
| HSV1-UL30-523 | − | GTGTTTCGCGTGTGGGACAT | 20 | 3461 |
| HSV1-UL30-524 | − | CCAGAAGCGCAGCAAGATAA | 20 | 3462 |
| HSV1-UL30-525 | − | CGCAGCAAGATAAAGGTGAA | 20 | 3463 |
| HSV1-UL30-526 | − | CAAGATAAAGGTGAACGGCA | 20 | 3464 |
| HSV1-UL30-527 | − | ATGGTGAACATCGACATGTA | 20 | 3465 |
| HSV1-UL30-528 | − | TGGTGAACATCGACATGTAC | 20 | 3466 |
| HSV1-UL30-529 | − | GAGCTACAAGCTCAACGCCG | 20 | 3467 |
| HSV1-UL30-530 | − | CGTGGCCGAAGCCGTCCTGA | 20 | 3468 |
| HSV1-UL30-531 | − | CGTCCTGAAGGACAAGAAGA | 20 | 3469 |
| HSV1-UL30-532 | − | ATCCCCGCCTACTACGCCGC | 20 | 3470 |
| HSV1-UL30-533 | − | TCCCCGCCTACTACGCCGCC | 20 | 3471 |
| HSV1-UL30-534 | − | GCCGCCGGGCCCGCGCAACG | 20 | 3472 |
| HSV1-UL30-535 | − | CCGCCGGGCCCGCGCAACGC | 20 | 3473 |
| HSV1-UL30-536 | − | CGCCGGGCCCGCGCAACGCG | 20 | 3474 |
| HSV1-UL30-537 | − | CCCGCGCAACGCGGGGTGAT | 20 | 3475 |
| HSV1-UL30-538 | − | GATCGGCGAGTACTGCATAC | 20 | 3476 |
| HSV1-UL30-539 | − | CTGCATACAGGATTCCCTGC | 20 | 3477 |
| HSV1-UL30-540 | − | CATACAGGATTCCCTGCTGG | 20 | 3478 |
| HSV1-UL30-541 | − | ATACAGGATTCCCTGCTGGT | 20 | 3479 |
| HSV1-UL30-542 | − | TTTTAAGTTTTTGCCCCATC | 20 | 3480 |
| HSV1-UL30-543 | − | TTTGCCCCATCTGGAGCTCT | 20 | 3481 |
| HSV1-UL30-544 | − | GCTCTCGGCCGTCGCGCGCT | 20 | 3482 |
| HSV1-UL30-545 | − | CTCGGCCGTCGCGCGCTTGG | 20 | 3483 |
| HSV1-UL30-546 | − | TCGGCCGTCGCGCGCTTGGC | 20 | 3484 |
| HSV1-UL30-547 | − | ATCACCCGCACCATCTACGA | 20 | 3485 |
| HSV1-UL30-548 | − | CTTTACGTGCCTGCTGCGCC | 20 | 3486 |
| HSV1-UL30-549 | − | GCTGCGCCTGGCCGACCAGA | 20 | 3487 |
| HSV1-UL30-550 | − | CTGCGCCTGGCCGACCAGAA | 20 | 3488 |
| HSV1-UL30-551 | − | CCAGAAGGGCTTTATTCTGC | 20 | 3489 |
| HSV1-UL30-552 | − | CTTTATTCTGCCGGACACCC | 20 | 3490 |
| HSV1-UL30-553 | − | TTTATTCTGCCGGACACCCA | 20 | 3491 |
| HSV1-UL30-554 | − | TTATTCTGCCGGACACCCAG | 20 | 3492 |
| HSV1-UL30-555 | − | CGGACACCCAGGGGCGATTT | 20 | 3493 |
| HSV1-UL30-556 | − | GGACACCCAGGGGCGATTTA | 20 | 3494 |
| HSV1-UL30-557 | − | GACACCCAGGGGCGATTTAG | 20 | 3495 |
| HSV1-UL30-558 | − | CAGGGGCGATTTAGGGGCGC | 20 | 3496 |
| HSV1-UL30-559 | − | AGGGGCGATTTAGGGGCGCC | 20 | 3497 |
| HSV1-UL30-560 | − | GGGGCGATTTAGGGGCGCCG | 20 | 3498 |
| HSV1-UL30-561 | − | GGGCGATTTAGGGGCGCCGG | 20 | 3499 |
| HSV1-UL30-562 | − | GGCGATTTAGGGGCGCCGGG | 20 | 3500 |
| HSV1-UL30-563 | − | GCGATTTAGGGGCGCCGGGG | 20 | 3501 |
| HSV1-UL30-564 | − | ATTTAGGGGCGCCGGGGGGG | 20 | 3502 |
| HSV1-UL30-565 | − | GGGGGAGGCGCCCAAGCGTC | 20 | 3503 |
| HSV1-UL30-566 | − | CCAAGCGTCCGGCCGCAGCC | 20 | 3504 |
| HSV1-UL30-567 | − | CAAGCGTCCGGCCGCAGCCC | 20 | 3505 |
| HSV1-UL30-568 | − | GCGTCCGGCCGCAGCCCGGG | 20 | 3506 |
| HSV1-UL30-569 | − | GGCCGCAGCCCGGGAGGACG | 20 | 3507 |
| HSV1-UL30-570 | − | CAGCCCGGGAGGACGAGGAG | 20 | 3508 |
| HSV1-UL30-571 | − | GGAGGACGAGGAGCGGCCAG | 20 | 3509 |
| HSV1-UL30-572 | − | GGACGAGGAGCGGCCAGAGG | 20 | 3510 |
| HSV1-UL30-573 | − | CGAGGAGCGGCCAGAGGAGG | 20 | 3511 |
| HSV1-UL30-574 | − | GAGGAGCGGCCAGAGGAGGA | 20 | 3512 |
| HSV1-UL30-575 | − | AGGAGCGGCCAGAGGAGGAG | 20 | 3513 |
| HSV1-UL30-576 | − | GGAGCGGCCAGAGGAGGAGG | 20 | 3514 |
| HSV1-UL30-577 | − | GCGGCCAGAGGAGGAGGGGG | 20 | 3515 |
| HSV1-UL30-578 | − | AGAGGAGGAGGGGGAGGACG | 20 | 3516 |
| HSV1-UL30-579 | − | GGAGGACGAGGACGAACGCG | 20 | 3517 |
| HSV1-UL30-580 | − | GGACGAGGACGAACGCGAGG | 20 | 3518 |
| HSV1-UL30-581 | − | GACGAGGACGAACGCGAGGA | 20 | 3519 |
| HSV1-UL30-582 | − | GAGGACGAACGCGAGGAGGG | 20 | 3520 |
| HSV1-UL30-583 | − | AGGACGAACGCGAGGAGGGC | 20 | 3521 |
| HSV1-UL30-584 | − | GGACGAACGCGAGGAGGGCG | 20 | 3522 |
| HSV1-UL30-585 | − | GACGAACGCGAGGAGGGCGG | 20 | 3523 |
| HSV1-UL30-586 | − | GCGAGGAGGGCGGGGGCGAG | 20 | 3524 |
| HSV1-UL30-587 | − | CGAGGAGGGCGGGGGCGAGC | 20 | 3525 |
| HSV1-UL30-588 | − | GGGCGGGGGCGAGCGGGAGC | 20 | 3526 |
| HSV1-UL30-589 | − | CGGGGGCGAGCGGGAGCCGG | 20 | 3527 |
| HSV1-UL30-590 | − | GGGGGCGAGCGGGAGCCGGA | 20 | 3528 |
| HSV1-UL30-591 | − | AGCGGGAGCCGGAGGGCGCG | 20 | 3529 |
| HSV1-UL30-592 | − | GCGGGAGCCGGAGGGCGCGC | 20 | 3530 |
| HSV1-UL30-593 | − | GAGGGCGCGCGGGAGACCGC | 20 | 3531 |
| HSV1-UL30-594 | − | GCGCGCGGGAGACCGCCGGC | 20 | 3532 |
| HSV1-UL30-595 | − | GGAGACCGCCGGCAGGCACG | 20 | 3533 |
| HSV1-UL30-596 | − | GAGACCGCCGGCAGGCACGT | 20 | 3534 |
| HSV1-UL30-597 | − | AGACCGCCGGCAGGCACGTG | 20 | 3535 |
| HSV1-UL30-598 | − | CGGCAGGCACGTGGGGTACC | 20 | 3536 |
| HSV1-UL30-599 | − | GGCAGGCACGTGGGGTACCA | 20 | 3537 |
| HSV1-UL30-600 | − | GCAGGCACGTGGGGTACCAG | 20 | 3538 |
| HSV1-UL30-601 | − | CAGGCACGTGGGGTACCAGG | 20 | 3539 |
| HSV1-UL30-602 | − | ACGTGGGGTACCAGGGGGCC | 20 | 3540 |
| HSV1-UL30-603 | − | CGTGGGGTACCAGGGGGCCA | 20 | 3541 |
| HSV1-UL30-604 | − | AGGGTCCTTGACCCCACTTC | 20 | 3542 |
| HSV1-UL30-605 | − | GGGTCCTTGACCCCACTTCC | 20 | 3543 |
| HSV1-UL30-606 | − | CGGGTTTCACGTGAACCCCG | 20 | 3544 |
| HSV1-UL30-607 | − | GTTTCACGTGAACCCCGTGG | 20 | 3545 |
| HSV1-UL30-608 | − | CCTGTACCCCAGCATCATCC | 20 | 3546 |
| HSV1-UL30-609 | − | GCTTCAGCACGCTCTCCCTG | 20 | 3547 |
| HSV1-UL30-610 | − | CTTCAGCACGCTCTCCCTGA | 20 | 3548 |
| HSV1-UL30-611 | − | CTCCCTGAGGGCCGACGCAG | 20 | 3549 |
| HSV1-UL30-612 | − | GGCCGACGCAGTGGCGCACC | 20 | 3550 |
| HSV1-UL30-613 | − | CGACGCAGTGGCGCACCTGG | 20 | 3551 |
| HSV1-UL30-614 | − | CGCAGTGGCGCACCTGGAGG | 20 | 3552 |
| HSV1-UL30-615 | − | GCAGTGGCGCACCTGGAGGC | 20 | 3553 |
| HSV1-UL30-616 | − | GGCGCACCTGGAGGCGGGCA | 20 | 3554 |
| HSV1-UL30-617 | − | GGAGGCGGGCAAGGACTACC | 20 | 3555 |
| HSV1-UL30-618 | − | CAAGGACTACCTGGAGATCG | 20 | 3556 |
| HSV1-UL30-619 | − | GGACTACCTGGAGATCGAGG | 20 | 3557 |
| HSV1-UL30-620 | − | GACTACCTGGAGATCGAGGT | 20 | 3558 |
| HSV1-UL30-621 | − | ACTACCTGGAGATCGAGGTG | 20 | 3559 |
| HSV1-UL30-622 | − | CTACCTGGAGATCGAGGTGG | 20 | 3560 |
| HSV1-UL30-623 | − | TACCTGGAGATCGAGGTGGG | 20 | 3561 |
| HSV1-UL30-624 | − | ACCTGGAGATCGAGGTGGGG | 20 | 3562 |
| HSV1-UL30-625 | − | AGATCGAGGTGGGGGGGCGA | 20 | 3563 |
| HSV1-UL30-626 | − | GCGACGGCTGTTCTTCGTCA | 20 | 3564 |
| HSV1-UL30-627 | − | GCCTCCTCAGCATCCTCCTG | 20 | 3565 |
| HSV1-UL30-628 | − | CCTCCTCAGCATCCTCCTGC | 20 | 3566 |
| HSV1-UL30-629 | − | TCAGCATCCTCCTGCGGGAC | 20 | 3567 |
| HSV1-UL30-630 | − | TGCGAAAGCAGATCCGCTCG | 20 | 3568 |
| HSV1-UL30-631 | − | GATTCCCCAGAGCAGCCCCG | 20 | 3569 |
| HSV1-UL30-632 | − | TCCCCAGAGCAGCCCCGAGG | 20 | 3570 |
| HSV1-UL30-633 | − | CCCCGAGGAGGCCGTGCTCC | 20 | 3571 |
| HSV1-UL30-634 | − | CGTGCTCCTGGACAAGCAGC | 20 | 3572 |
| HSV1-UL30-635 | − | CAAGCAGCAGGCCGCCATCA | 20 | 3573 |
| HSV1-UL30-636 | − | CATCAAGGTCGTGTGTAACT | 20 | 3574 |
| HSV1-UL30-637 | − | GTCGTGTGTAACTCGGTGTA | 20 | 3575 |
| HSV1-UL30-638 | − | TCGTGTGTAACTCGGTGTAC | 20 | 3576 |
| HSV1-UL30-639 | − | TAACTCGGTGTACGGGTTCA | 20 | 3577 |
| HSV1-UL30-640 | − | AACTCGGTGTACGGGTTCAC | 20 | 3578 |
| HSV1-UL30-641 | − | GGGTTCACGGGAGTGCAGCA | 20 | 3579 |
| HSV1-UL30-642 | − | GTGCCTGCACGTTGCCGCGA | 20 | 3580 |
| HSV1-UL30-643 | − | GCCGCGACGGTGACGACCAT | 20 | 3581 |
| HSV1-UL30-644 | − | GCGAGTACGTCCACGCGCGC | 20 | 3582 |
| HSV1-UL30-645 | − | CGAGTACGTCCACGCGCGCT | 20 | 3583 |
| HSV1-UL30-646 | − | GTACGTCCACGCGCGCTGGG | 20 | 3584 |
| HSV1-UL30-647 | − | GGCGGCCTTCGAACAGCTCC | 20 | 3585 |
| HSV1-UL30-648 | − | ACAGCTCCTGGCCGATTTCC | 20 | 3586 |
| HSV1-UL30-649 | − | GCTCCTGGCCGATTTCCCGG | 20 | 3587 |
| HSV1-UL30-650 | − | CCTGGCCGATTTCCCGGAGG | 20 | 3588 |
| HSV1-UL30-651 | − | GCGGCCGACATGCGCGCCCC | 20 | 3589 |
| HSV1-UL30-652 | − | CGGCCGACATGCGCGCCCCC | 20 | 3590 |
| HSV1-UL30-653 | − | TATTCCATGCGCATCATCTA | 20 | 3591 |
| HSV1-UL30-654 | − | ATTCCATGCGCATCATCTAC | 20 | 3592 |
| HSV1-UL30-655 | − | TTCCATGCGCATCATCTACG | 20 | 3593 |
| HSV1-UL30-656 | − | GCGCATCATCTACGGGGACA | 20 | 3594 |
| HSV1-UL30-657 | − | TCCATCTTTGTGCTGTGCCG | 20 | 3595 |
| HSV1-UL30-658 | − | TGTGCTGTGCCGCGGCCTCA | 20 | 3596 |
| HSV1-UL30-659 | − | TGCCGCGGCCTCACGGCCGC | 20 | 3597 |
| HSV1-UL30-660 | − | GCCGCGGCCTCACGGCCGCC | 20 | 3598 |
| HSV1-UL30-661 | − | CCTCACGGCCGCCGGGCTGA | 20 | 3599 |
| HSV1-UL30-662 | − | GGCCGCCGGGCTGACGGCCG | 20 | 3600 |
| HSV1-UL30-663 | − | GCCGCCGGGCTGACGGCCGT | 20 | 3601 |
| HSV1-UL30-664 | − | GACGGCCGTGGGCGACAAGA | 20 | 3602 |
| HSV1-UL30-665 | − | ATCGCCAAGAAAAAGTACAT | 20 | 3603 |
| HSV1-UL30-666 | − | AAGTACATCGGCGTCATCTA | 20 | 3604 |
| HSV1-UL30-667 | − | AGTACATCGGCGTCATCTAC | 20 | 3605 |
| HSV1-UL30-668 | − | GTACATCGGCGTCATCTACG | 20 | 3606 |
| HSV1-UL30-669 | − | TACATCGGCGTCATCTACGG | 20 | 3607 |
| HSV1-UL30-670 | − | CGGGGGTAAGATGCTCATCA | 20 | 3608 |
| HSV1-UL30-671 | − | GGGGGTAAGATGCTCATCAA | 20 | 3609 |
| HSV1-UL30-672 | − | TAAGATGCTCATCAAGGGCG | 20 | 3610 |
| HSV1-UL30-673 | − | GCTCATCAAGGGCGTGGATC | 20 | 3611 |
| HSV1-UL30-674 | − | CGTTTATCAACCGCACCTCC | 20 | 3612 |
| HSV1-UL30-675 | − | GTTTATCAACCGCACCTCCA | 20 | 3613 |
| HSV1-UL30-676 | − | CAACCGCACCTCCAGGGCCC | 20 | 3614 |
| HSV1-UL30-677 | − | TTTTACGACGATACCGTCTC | 20 | 3615 |
| HSV1-UL30-678 | − | CGACGATACCGTCTCCGGAG | 20 | 3616 |
| HSV1-UL30-679 | − | CGCGTTAGCCGAGCGCCCCG | 20 | 3617 |
| HSV1-UL30-680 | − | GTTAGCCGAGCGCCCCGCGG | 20 | 3618 |
| HSV1-UL30-681 | − | CCGAGCGCCCCGCGGAGGAG | 20 | 3619 |
| HSV1-UL30-682 | − | GCGCCCCGCGGAGGAGTGGC | 20 | 3620 |
| HSV1-UL30-683 | − | GCTGGCGCGACCCCTGCCCG | 20 | 3621 |
| HSV1-UL30-684 | − | CTGGCGCGACCCCTGCCCGA | 20 | 3622 |
| HSV1-UL30-685 | − | ACCCCTGCCCGAGGGACTGC | 20 | 3623 |
| HSV1-UL30-686 | − | CCCGAGGGACTGCAGGCGTT | 20 | 3624 |
| HSV1-UL30-687 | − | CCGAGGGACTGCAGGCGTTC | 20 | 3625 |
| HSV1-UL30-688 | − | CGAGGGACTGCAGGCGTTCG | 20 | 3626 |
| HSV1-UL30-689 | − | CCGTCCTCGTAGACGCCCAT | 20 | 3627 |
| HSV1-UL30-690 | − | CCATCGGCGCATCACCGACC | 20 | 3628 |
| HSV1-UL30-691 | − | GGCGCATCACCGACCCGGAG | 20 | 3629 |
| HSV1-UL30-692 | − | GCGCATCACCGACCCGGAGA | 20 | 3630 |
| HSV1-UL30-693 | − | CGACCCGGAGAGGGACATCC | 20 | 3631 |
| HSV1-UL30-694 | − | CGCGTACACCAACAAGCGCC | 20 | 3632 |
| HSV1-UL30-695 | − | CAAGCGCCTGGCCCACCTGA | 20 | 3633 |
| HSV1-UL30-696 | − | GACGGTGTATTACAAGCTCA | 20 | 3634 |
| HSV1-UL30-697 | − | GCTCATGGCCCGCCGCGCGC | 20 | 3635 |
| HSV1-UL30-698 | − | CGCGCAGGTCCCGTCCATCA | 20 | 3636 |
| HSV1-UL30-699 | − | AGGTCCCGTCCATCAAGGAC | 20 | 3637 |
| HSV1-UL30-700 | − | CCGGATCCCGTACGTGATCG | 20 | 3638 |
| HSV1-UL30-701 | − | GATCGTGGCCCAGACCCGCG | 20 | 3639 |
| HSV1-UL30-702 | − | GGCCCAGACCCGCGAGGTAG | 20 | 3640 |
| HSV1-UL30-703 | − | GACCCGCGAGGTAGAGGAGA | 20 | 3641 |
| HSV1-UL30-704 | − | AGGTAGAGGAGACGGTCGCG | 20 | 3642 |
| HSV1-UL30-705 | − | AGAGGAGACGGTCGCGCGGC | 20 | 3643 |
| HSV1-UL30-706 | − | GAGCTAGACGCCGCCGCCCC | 20 | 3644 |
| HSV1-UL30-707 | − | AGCTAGACGCCGCCGCCCCA | 20 | 3645 |
| HSV1-UL30-708 | − | GCTAGACGCCGCCGCCCCAG | 20 | 3646 |
| HSV1-UL30-709 | − | GGACGAGCCCGCCCCCCCCG | 20 | 3647 |
| HSV1-UL30-710 | − | CCCCGCGGCCCTGCCCTCCC | 20 | 3648 |
| HSV1-UL30-711 | − | CCTCCCCGGCCAAGCGCCCC | 20 | 3649 |
| HSV1-UL30-712 | − | CTCCCCGGCCAAGCGCCCCC | 20 | 3650 |
| HSV1-UL30-713 | − | GCCGTCGCCTGCCGACCCCC | 20 | 3651 |
| HSV1-UL30-714 | − | CCGTCGCCTGCCGACCCCCC | 20 | 3652 |
| HSV1-UL30-715 | − | TCGCCTGCCGACCCCCCGGG | 20 | 3653 |
| HSV1-UL30-716 | − | GTCCAAGCCCCGCAAGCTGC | 20 | 3654 |
| HSV1-UL30-717 | − | CAAGCTGCTGGTGTCCGAGC | 20 | 3655 |
| HSV1-UL30-718 | − | GCTGGTGTCCGAGCTGGCCG | 20 | 3656 |
| HSV1-UL30-719 | − | CCCGCATACGCCATTGCCCA | 20 | 3657 |
| HSV1-UL30-720 | − | CCACGGCGTCGCCCTGAACA | 20 | 3658 |
| HSV1-UL30-721 | − | CTATTACTTCTCCCACCTGT | 20 | 3659 |
| HSV1-UL30-722 | − | TATTACTTCTCCCACCTGTT | 20 | 3660 |
| HSV1-UL30-723 | − | ATTACTTCTCCCACCTGTTG | 20 | 3661 |
| HSV1-UL30-724 | − | TTACTTCTCCCACCTGTTGG | 20 | 3662 |
| HSV1-UL30-725 | − | CTTCTCCCACCTGTTGGGGG | 20 | 3663 |
| HSV1-UL30-726 | − | GGCGGCGTGCGTGACATTCA | 20 | 3664 |
| HSV1-UL30-727 | − | GTGACATTCAAGGCCCTGTT | 20 | 3665 |
| HSV1-UL30-728 | − | TGACATTCAAGGCCCTGTTT | 20 | 3666 |
| HSV1-UL30-729 | − | TCACCGAGAGTCTGTTAAAA | 20 | 3667 |
| HSV1-UL30-730 | − | AAAGGTTTATTCCCGAAGTG | 20 | 3668 |
| HSV1-UL30-731 | − | TCCCGAAGTGTGGCACCCCC | 20 | 3669 |
| HSV1-UL30-732 | − | GTGGCACCCCCCGGACGACG | 20 | 3670 |
| HSV1-UL30-733 | − | CCCCGGACGACGTGGCCGCG | 20 | 3671 |
| HSV1-UL30-734 | − | ACGACGTGGCCGCGCGGCTC | 20 | 3672 |
| HSV1-UL30-735 | − | GCCGCGCGGCTCCGGACCGC | 20 | 3673 |
| HSV1-UL30-736 | − | CCGCGCGGCTCCGGACCGCA | 20 | 3674 |
| HSV1-UL30-737 | − | CGGCTCCGGACCGCAGGGTT | 20 | 3675 |
| HSV1-UL30-738 | − | GGCTCCGGACCGCAGGGTTC | 20 | 3676 |
| HSV1-UL30-739 | − | GCTCCGGACCGCAGGGTTCG | 20 | 3677 |
| HSV1-UL30-740 | − | CCGGACCGCAGGGTTCGGGG | 20 | 3678 |
| HSV1-UL30-741 | − | GACCGCAGGGTTCGGGGCGG | 20 | 3679 |
| HSV1-UL30-742 | − | ACCGCAGGGTTCGGGGCGGT | 20 | 3680 |
| HSV1-UL30-743 | − | GGGTTCGGGGCGGTGGGTGC | 20 | 3681 |
| HSV1-UL30-744 | − | GGCGGTGGGTGCCGGCGCTA | 20 | 3682 |
| HSV1-UL30-745 | − | GGTGGGTGCCGGCGCTACGG | 20 | 3683 |
| HSV1-UL30-746 | − | GGGTGCCGGCGCTACGGCGG | 20 | 3684 |
| HSV1-UL30-747 | − | GGACGCCATCACACCGA | 17 | 3685 |
| HSV1-UL30-748 | − | GACGCCATCACACCGAC | 17 | 3686 |
| HSV1-UL30-749 | − | ACGCCATCACACCGACG | 17 | 3687 |
| HSV1-UL30-750 | − | GACCGTCATCACGCTCC | 17 | 3688 |
| HSV1-UL30-751 | − | ACCGTCATCACGCTCCT | 17 | 3689 |
| HSV1-UL30-752 | − | GCTCCTGGGCCTGACTC | 17 | 3690 |
| HSV1-UL30-753 | − | CTGGGCCTGACTCCGGA | 17 | 3691 |
| HSV1-UL30-754 | − | TGACTCCGGAAGGCCAC | 17 | 3692 |
| HSV1-UL30-755 | − | GACTCCGGAAGGCCACC | 17 | 3693 |
| HSV1-UL30-756 | − | TCCGGAAGGCCACCGGG | 17 | 3694 |
| HSV1-UL30-757 | − | GTGGCCGTTCACGTTTA | 17 | 3695 |
| HSV1-UL30-758 | − | TTCACGTTTACGGCACG | 17 | 3696 |
| HSV1-UL30-759 | − | GTACTTTTACATGAACA | 17 | 3697 |
| HSV1-UL30-760 | − | CTTTTACATGAACAAGG | 17 | 3698 |
| HSV1-UL30-761 | − | TTACATGAACAAGGAGG | 17 | 3699 |
| HSV1-UL30-762 | − | ACAAGGAGGAGGTCGAC | 17 | 3700 |
| HSV1-UL30-763 | − | AGATCTCTGCGAGCGCA | 17 | 3701 |
| HSV1-UL30-764 | − | CTGCGAGCGCATGGCCG | 17 | 3702 |
| HSV1-UL30-765 | − | GGCCCTGCGCGAGTCCC | 17 | 3703 |
| HSV1-UL30-766 | − | GCCCTGCGCGAGTCCCC | 17 | 3704 |
| HSV1-UL30-767 | − | CCGGGCGCGTCGTTCCG | 17 | 3705 |
| HSV1-UL30-768 | − | GTTCCGCGGCATCTCCG | 17 | 3706 |
| HSV1-UL30-769 | − | CTCCGCGGACCACTTCG | 17 | 3707 |
| HSV1-UL30-770 | − | CGCGGACCACTTCGAGG | 17 | 3708 |
| HSV1-UL30-771 | − | GGACCACTTCGAGGCGG | 17 | 3709 |
| HSV1-UL30-772 | − | CCACTTCGAGGCGGAGG | 17 | 3710 |
| HSV1-UL30-773 | − | CTTCGAGGCGGAGGTGG | 17 | 3711 |
| HSV1-UL30-774 | − | CGCGTCTACGTCCGAAG | 17 | 3712 |
| HSV1-UL30-775 | − | GCGTCTACGTCCGAAGC | 17 | 3713 |
| HSV1-UL30-776 | − | GTGCGACAACTTCTGCC | 17 | 3714 |
| HSV1-UL30-777 | − | GGCCATCAAGAAGTACG | 17 | 3715 |
| HSV1-UL30-778 | − | GCCATCAAGAAGTACGA | 17 | 3716 |
| HSV1-UL30-779 | − | ATCAAGAAGTACGAGGG | 17 | 3717 |
| HSV1-UL30-780 | − | TCAAGAAGTACGAGGGT | 17 | 3718 |
| HSV1-UL30-781 | − | CAAGAAGTACGAGGGTG | 17 | 3719 |
| HSV1-UL30-782 | − | GGGTCGACGCCACCACC | 17 | 3720 |
| HSV1-UL30-783 | − | CACCACCCGGTTCATCC | 17 | 3721 |
| HSV1-UL30-784 | − | TTCATCCTGGACAACCC | 17 | 3722 |
| HSV1-UL30-785 | − | TCATCCTGGACAACCCC | 17 | 3723 |
| HSV1-UL30-786 | − | CCCGGGTTCGTCACCTT | 17 | 3724 |
| HSV1-UL30-787 | − | GGTTCGTCACCTTCGGC | 17 | 3725 |
| HSV1-UL30-788 | − | CTGGTACCGTCTCAAAC | 17 | 3726 |
| HSV1-UL30-789 | − | TGGTACCGTCTCAAACC | 17 | 3727 |
| HSV1-UL30-790 | − | ACCGTCTCAAACCGGGC | 17 | 3728 |
| HSV1-UL30-791 | − | CAACACGCTAGCCCAGC | 17 | 3729 |
| HSV1-UL30-792 | − | CACGCTAGCCCAGCCGG | 17 | 3730 |
| HSV1-UL30-793 | − | CCAGCCGGCGGCCCCGA | 17 | 3731 |
| HSV1-UL30-794 | − | GCGGCCCCGATGGCCTT | 17 | 3732 |
| HSV1-UL30-795 | − | CGGCCCCGATGGCCTTC | 17 | 3733 |
| HSV1-UL30-796 | − | CGTCGAGTTTAACTGTA | 17 | 3734 |
| HSV1-UL30-797 | − | CGAGTTTAACTGTACGG | 17 | 3735 |
| HSV1-UL30-798 | − | CTGTACGGCGGACAACC | 17 | 3736 |
| HSV1-UL30-799 | − | GGACAACCTGGCCATCG | 17 | 3737 |
| HSV1-UL30-800 | − | GACAACCTGGCCATCGA | 17 | 3738 |
| HSV1-UL30-801 | − | ACAACCTGGCCATCGAG | 17 | 3739 |
| HSV1-UL30-802 | − | CAACCTGGCCATCGAGG | 17 | 3740 |
| HSV1-UL30-803 | − | AACCTGGCCATCGAGGG | 17 | 3741 |
| HSV1-UL30-804 | − | GGGCATGAGCGACCTAC | 17 | 3742 |
| HSV1-UL30-805 | − | CTTCGATATCGAATGCA | 17 | 3743 |
| HSV1-UL30-806 | − | CGATATCGAATGCAAGG | 17 | 3744 |
| HSV1-UL30-807 | − | GATATCGAATGCAAGGC | 17 | 3745 |
| HSV1-UL30-808 | − | ATATCGAATGCAAGGCG | 17 | 3746 |
| HSV1-UL30-809 | − | TATCGAATGCAAGGCGG | 17 | 3747 |
| HSV1-UL30-810 | − | ATCGAATGCAAGGCGGG | 17 | 3748 |
| HSV1-UL30-811 | − | TCGAATGCAAGGCGGGG | 17 | 3749 |
| HSV1-UL30-812 | − | CGAATGCAAGGCGGGGG | 17 | 3750 |
| HSV1-UL30-813 | − | ATGCAAGGCGGGGGGGG | 17 | 3751 |
| HSV1-UL30-814 | − | GGGGGGGGAGGACGAGC | 17 | 3752 |
| HSV1-UL30-815 | − | GGACGAGCTGGCCTTTC | 17 | 3753 |
| HSV1-UL30-816 | − | CGAGCTGGCCTTTCCGG | 17 | 3754 |
| HSV1-UL30-817 | − | CTGGCCTTTCCGGTGGC | 17 | 3755 |
| HSV1-UL30-818 | − | TGGCCTTTCCGGTGGCC | 17 | 3756 |
| HSV1-UL30-819 | − | TCCGGTGGCCGGGCACC | 17 | 3757 |
| HSV1-UL30-820 | − | GGTGGCCGGGCACCCGG | 17 | 3758 |
| HSV1-UL30-821 | − | CGGGCACCCGGAGGACC | 17 | 3759 |
| HSV1-UL30-822 | − | CCTGTCCACCACCGCCC | 17 | 3760 |
| HSV1-UL30-823 | − | GTCCTCCTGTTTTCGCT | 17 | 3761 |
| HSV1-UL30-824 | − | ATCCCACCTGAACGAGC | 17 | 3762 |
| HSV1-UL30-825 | − | CCACCTGAACGAGCTGG | 17 | 3763 |
| HSV1-UL30-826 | − | TGAACGAGCTGGCGGCC | 17 | 3764 |
| HSV1-UL30-827 | − | GAACGAGCTGGCGGCCA | 17 | 3765 |
| HSV1-UL30-828 | − | AACGAGCTGGCGGCCAG | 17 | 3766 |
| HSV1-UL30-829 | − | GGGCCTGCCCACGCCCG | 17 | 3767 |
| HSV1-UL30-830 | − | GCCCACGCCCGTGGTTC | 17 | 3768 |
| HSV1-UL30-831 | − | CGAATTCGAGATGCTGT | 17 | 3769 |
| HSV1-UL30-832 | − | ACCCTTGTGAAACAGTA | 17 | 3770 |
| HSV1-UL30-833 | − | GGCCCCGAGTTCGTGAC | 17 | 3771 |
| HSV1-UL30-834 | − | GCCCCGAGTTCGTGACC | 17 | 3772 |
| HSV1-UL30-835 | − | ACATCATCAACTTCGAC | 17 | 3773 |
| HSV1-UL30-836 | − | CGACTGGCCCTTCTTGC | 17 | 3774 |
| HSV1-UL30-837 | − | CTTGCTGGCCAAGCTGA | 17 | 3775 |
| HSV1-UL30-838 | − | GCTGACGGACATTTACA | 17 | 3776 |
| HSV1-UL30-839 | − | CATTTACAAGGTCCCCC | 17 | 3777 |
| HSV1-UL30-840 | − | TACAAGGTCCCCCTGGA | 17 | 3778 |
| HSV1-UL30-841 | − | ACAAGGTCCCCCTGGAC | 17 | 3779 |
| HSV1-UL30-842 | − | GTCCCCCTGGACGGGTA | 17 | 3780 |
| HSV1-UL30-843 | − | GGGTACGGCCGCATGAA | 17 | 3781 |
| HSV1-UL30-844 | − | ACGGCCGCATGAACGGC | 17 | 3782 |
| HSV1-UL30-845 | − | CGGCCGCATGAACGGCC | 17 | 3783 |
| HSV1-UL30-846 | − | GGCCGCATGAACGGCCG | 17 | 3784 |
| HSV1-UL30-847 | − | GGGGCGTGTTTCGCGTG | 17 | 3785 |
| HSV1-UL30-848 | − | GGGCGTGTTTCGCGTGT | 17 | 3786 |
| HSV1-UL30-849 | − | TTTCGCGTGTGGGACAT | 17 | 3787 |
| HSV1-UL30-850 | − | GAAGCGCAGCAAGATAA | 17 | 3788 |
| HSV1-UL30-851 | − | AGCAAGATAAAGGTGAA | 17 | 3789 |
| HSV1-UL30-852 | − | GATAAAGGTGAACGGCA | 17 | 3790 |
| HSV1-UL30-853 | − | GTGAACATCGACATGTA | 17 | 3791 |
| HSV1-UL30-854 | − | TGAACATCGACATGTAC | 17 | 3792 |
| HSV1-UL30-855 | − | CTACAAGCTCAACGCCG | 17 | 3793 |
| HSV1-UL30-856 | − | GGCCGAAGCCGTCCTGA | 17 | 3794 |
| HSV1-UL30-857 | − | CCTGAAGGACAAGAAGA | 17 | 3795 |
| HSV1-UL30-858 | − | CCCGCCTACTACGCCGC | 17 | 3796 |
| HSV1-UL30-859 | − | CCGCCTACTACGCCGCC | 17 | 3797 |
| HSV1-UL30-860 | − | GCCGGGCCCGCGCAACG | 17 | 3798 |
| HSV1-UL30-861 | − | CCGGGCCCGCGCAACGC | 17 | 3799 |
| HSV1-UL30-862 | − | CGGGCCCGCGCAACGCG | 17 | 3800 |
| HSV1-UL30-863 | − | GCGCAACGCGGGGTGAT | 17 | 3801 |
| HSV1-UL30-864 | − | CGGCGAGTACTGCATAC | 17 | 3802 |
| HSV1-UL30-865 | − | CATACAGGATTCCCTGC | 17 | 3803 |
| HSV1-UL30-866 | − | ACAGGATTCCCTGCTGG | 17 | 3804 |
| HSV1-UL30-867 | − | CAGGATTCCCTGCTGGT | 17 | 3805 |
| HSV1-UL30-868 | − | TAAGTTTTTGCCCCATC | 17 | 3806 |
| HSV1-UL30-869 | − | GCCCCATCTGGAGCTCT | 17 | 3807 |
| HSV1-UL30-870 | − | CTCGGCCGTCGCGCGCT | 17 | 3808 |
| HSV1-UL30-871 | − | GGCCGTCGCGCGCTTGG | 17 | 3809 |
| HSV1-UL30-872 | − | GCCGTCGCGCGCTTGGC | 17 | 3810 |
| HSV1-UL30-873 | − | ACCCGCACCATCTACGA | 17 | 3811 |
| HSV1-UL30-874 | − | TACGTGCCTGCTGCGCC | 17 | 3812 |
| HSV1-UL30-875 | − | GCGCCTGGCCGACCAGA | 17 | 3813 |
| HSV1-UL30-876 | − | CGCCTGGCCGACCAGAA | 17 | 3814 |
| HSV1-UL30-877 | − | GAAGGGCTTTATTCTGC | 17 | 3815 |
| HSV1-UL30-878 | − | TATTCTGCCGGACACCC | 17 | 3816 |
| HSV1-UL30-879 | − | ATTCTGCCGGACACCCA | 17 | 3817 |
| HSV1-UL30-880 | − | TTCTGCCGGACACCCAG | 17 | 3818 |
| HSV1-UL30-881 | − | ACACCCAGGGGCGATTT | 17 | 3819 |
| HSV1-UL30-882 | − | CACCCAGGGGCGATTTA | 17 | 3820 |
| HSV1-UL30-883 | − | ACCCAGGGGCGATTTAG | 17 | 3821 |
| HSV1-UL30-884 | − | GGGCGATTTAGGGGCGC | 17 | 3822 |
| HSV1-UL30-885 | − | GGCGATTTAGGGGCGCC | 17 | 3823 |
| HSV1-UL30-886 | − | GCGATTTAGGGGCGCCG | 17 | 3824 |
| HSV1-UL30-887 | − | CGATTTAGGGGCGCCGG | 17 | 3825 |
| HSV1-UL30-888 | − | GATTTAGGGGCGCCGGG | 17 | 3826 |
| HSV1-UL30-889 | − | ATTTAGGGGCGCCGGGG | 17 | 3827 |
| HSV1-UL30-890 | − | TAGGGGCGCCGGGGGGG | 17 | 3828 |
| HSV1-UL30-891 | − | GGAGGCGCCCAAGCGTC | 17 | 3829 |
| HSV1-UL30-892 | − | AGCGTCCGGCCGCAGCC | 17 | 3830 |
| HSV1-UL30-893 | − | GCGTCCGGCCGCAGCCC | 17 | 3831 |
| HSV1-UL30-894 | − | TCCGGCCGCAGCCCGGG | 17 | 3832 |
| HSV1-UL30-895 | − | CGCAGCCCGGGAGGACG | 17 | 3833 |
| HSV1-UL30-896 | − | CCCGGGAGGACGAGGAG | 17 | 3834 |
| HSV1-UL30-897 | − | GGACGAGGAGCGGCCAG | 17 | 3835 |
| HSV1-UL30-898 | − | CGAGGAGCGGCCAGAGG | 17 | 3836 |
| HSV1-UL30-899 | − | GGAGCGGCCAGAGGAGG | 17 | 3837 |
| HSV1-UL30-900 | − | GAGCGGCCAGAGGAGGA | 17 | 3838 |
| HSV1-UL30-901 | − | AGCGGCCAGAGGAGGAG | 17 | 3839 |
| HSV1-UL30-902 | − | GCGGCCAGAGGAGGAGG | 17 | 3840 |
| HSV1-UL30-903 | − | GCCAGAGGAGGAGGGGG | 17 | 3841 |
| HSV1-UL30-904 | − | GGAGGAGGGGGAGGACG | 17 | 3842 |
| HSV1-UL30-905 | − | GGACGAGGACGAACGCG | 17 | 3843 |
| HSV1-UL30-906 | − | CGAGGACGAACGCGAGG | 17 | 3844 |
| HSV1-UL30-907 | − | GAGGACGAACGCGAGGA | 17 | 3845 |
| HSV1-UL30-908 | − | GACGAACGCGAGGAGGG | 17 | 3846 |
| HSV1-UL30-909 | − | ACGAACGCGAGGAGGGC | 17 | 3847 |
| HSV1-UL30-910 | − | CGAACGCGAGGAGGGCG | 17 | 3848 |
| HSV1-UL30-911 | − | GAACGCGAGGAGGGCGG | 17 | 3849 |
| HSV1-UL30-912 | − | AGGAGGGCGGGGGCGAG | 17 | 3850 |
| HSV1-UL30-913 | − | GGAGGGCGGGGGCGAGC | 17 | 3851 |
| HSV1-UL30-914 | − | CGGGGGCGAGCGGGAGC | 17 | 3852 |
| HSV1-UL30-915 | − | GGGCGAGCGGGAGCCGG | 17 | 3853 |
| HSV1-UL30-916 | − | GGCGAGCGGGAGCCGGA | 17 | 3854 |
| HSV1-UL30-917 | − | GGGAGCCGGAGGGCGCG | 17 | 3855 |
| HSV1-UL30-918 | − | GGAGCCGGAGGGCGCGC | 17 | 3856 |
| HSV1-UL30-919 | − | GGCGCGCGGGAGACCGC | 17 | 3857 |
| HSV1-UL30-920 | − | CGCGGGAGACCGCCGGC | 17 | 3858 |
| HSV1-UL30-921 | − | GACCGCCGGCAGGCACG | 17 | 3859 |
| HSV1-UL30-922 | − | ACCGCCGGCAGGCACGT | 17 | 3860 |
| HSV1-UL30-923 | − | CCGCCGGCAGGCACGTG | 17 | 3861 |
| HSV1-UL30-924 | − | CAGGCACGTGGGGTACC | 17 | 3862 |
| HSV1-UL30-925 | − | AGGCACGTGGGGTACCA | 17 | 3863 |
| HSV1-UL30-926 | − | GGCACGTGGGGTACCAG | 17 | 3864 |
| HSV1-UL30-927 | − | GCACGTGGGGTACCAGG | 17 | 3865 |
| HSV1-UL30-928 | − | TGGGGTACCAGGGGGCC | 17 | 3866 |
| HSV1-UL30-929 | − | GGGGTACCAGGGGGCCA | 17 | 3867 |
| HSV1-UL30-930 | − | GTCCTTGACCCCACTTC | 17 | 3868 |
| HSV1-UL30-931 | − | TCCTTGACCCCACTTCC | 17 | 3869 |
| HSV1-UL30-932 | − | GTTTCACGTGAACCCCG | 17 | 3870 |
| HSV1-UL30-933 | − | TCACGTGAACCCCGTGG | 17 | 3871 |
| HSV1-UL30-934 | − | GTACCCCAGCATCATCC | 17 | 3872 |
| HSV1-UL30-935 | − | TCAGCACGCTCTCCCTG | 17 | 3873 |
| HSV1-UL30-936 | − | CAGCACGCTCTCCCTGA | 17 | 3874 |
| HSV1-UL30-937 | − | CCTGAGGGCCGACGCAG | 17 | 3875 |
| HSV1-UL30-938 | − | CGACGCAGTGGCGCACC | 17 | 3876 |
| HSV1-UL30-939 | − | CGCAGTGGCGCACCTGG | 17 | 3877 |
| HSV1-UL30-940 | − | AGTGGCGCACCTGGAGG | 17 | 3878 |
| HSV1-UL30-941 | − | GTGGCGCACCTGGAGGC | 17 | 3879 |
| HSV1-UL30-942 | − | GCACCTGGAGGCGGGCA | 17 | 3880 |
| HSV1-UL30-943 | − | GGCGGGCAAGGACTACC | 17 | 3881 |
| HSV1-UL30-944 | − | GGACTACCTGGAGATCG | 17 | 3882 |
| HSV1-UL30-945 | − | CTACCTGGAGATCGAGG | 17 | 3883 |
| HSV1-UL30-946 | − | TACCTGGAGATCGAGGT | 17 | 3884 |
| HSV1-UL30-947 | − | ACCTGGAGATCGAGGTG | 17 | 3885 |
| HSV1-UL30-948 | − | CCTGGAGATCGAGGTGG | 17 | 3886 |
| HSV1-UL30-949 | − | CTGGAGATCGAGGTGGG | 17 | 3887 |
| HSV1-UL30-950 | − | TGGAGATCGAGGTGGGG | 17 | 3888 |
| HSV1-UL30-951 | − | TCGAGGTGGGGGGGCGA | 17 | 3889 |
| HSV1-UL30-952 | − | ACGGCTGTTCTTCGTCA | 17 | 3890 |
| HSV1-UL30-953 | − | TCCTCAGCATCCTCCTG | 17 | 3891 |
| HSV1-UL30-954 | − | CCTCAGCATCCTCCTGC | 17 | 3892 |
| HSV1-UL30-955 | − | GCATCCTCCTGCGGGAC | 17 | 3893 |
| HSV1-UL30-956 | − | GAAAGCAGATCCGCTCG | 17 | 3894 |
| HSV1-UL30-957 | − | TCCCCAGAGCAGCCCCG | 17 | 3895 |
| HSV1-UL30-958 | − | CCAGAGCAGCCCCGAGG | 17 | 3896 |
| HSV1-UL30-959 | − | CGAGGAGGCCGTGCTCC | 17 | 3897 |
| HSV1-UL30-960 | − | GCTCCTGGACAAGCAGC | 17 | 3898 |
| HSV1-UL30-961 | − | GCAGCAGGCCGCCATCA | 17 | 3899 |
| HSV1-UL30-962 | − | CAAGGTCGTGTGTAACT | 17 | 3900 |
| HSV1-UL30-963 | − | GTGTGTAACTCGGTGTA | 17 | 3901 |
| HSV1-UL30-964 | − | TGTGTAACTCGGTGTAC | 17 | 3902 |
| HSV1-UL30-965 | − | CTCGGTGTACGGGTTCA | 17 | 3903 |
| HSV1-UL30-966 | − | TCGGTGTACGGGTTCAC | 17 | 3904 |
| HSV1-UL30-967 | − | TTCACGGGAGTGCAGCA | 17 | 3905 |
| HSV1-UL30-968 | − | CCTGCACGTTGCCGCGA | 17 | 3906 |
| HSV1-UL30-969 | − | GCGACGGTGACGACCAT | 17 | 3907 |
| HSV1-UL30-970 | − | AGTACGTCCACGCGCGC | 17 | 3908 |
| HSV1-UL30-971 | − | GTACGTCCACGCGCGCT | 17 | 3909 |
| HSV1-UL30-972 | − | CGTCCACGCGCGCTGGG | 17 | 3910 |
| HSV1-UL30-973 | − | GGCCTTCGAACAGCTCC | 17 | 3911 |
| HSV1-UL30-974 | − | GCTCCTGGCCGATTTCC | 17 | 3912 |
| HSV1-UL30-975 | − | CCTGGCCGATTTCCCGG | 17 | 3913 |
| HSV1-UL30-976 | − | GGCCGATTTCCCGGAGG | 17 | 3914 |
| HSV1-UL30-977 | − | GCCGACATGCGCGCCCC | 17 | 3915 |
| HSV1-UL30-978 | − | CCGACATGCGCGCCCCC | 17 | 3916 |
| HSV1-UL30-979 | − | TCCATGCGCATCATCTA | 17 | 3917 |
| HSV1-UL30-980 | − | CCATGCGCATCATCTAC | 17 | 3918 |
| HSV1-UL30-981 | − | CATGCGCATCATCTACG | 17 | 3919 |
| HSV1-UL30-982 | − | CATCATCTACGGGGACA | 17 | 3920 |
| HSV1-UL30-983 | − | ATCTTTGTGCTGTGCCG | 17 | 3921 |
| HSV1-UL30-984 | − | GCTGTGCCGCGGCCTCA | 17 | 3922 |
| HSV1-UL30-985 | − | CGCGGCCTCACGGCCGC | 17 | 3923 |
| HSV1-UL30-986 | − | GCGGCCTCACGGCCGCC | 17 | 3924 |
| HSV1-UL30-987 | − | CACGGCCGCCGGGCTGA | 17 | 3925 |
| HSV1-UL30-988 | − | CGCCGGGCTGACGGCCG | 17 | 3926 |
| HSV1-UL30-989 | − | GCCGGGCTGACGGCCGT | 17 | 3927 |
| HSV1-UL30-990 | − | GGCCGTGGGCGACAAGA | 17 | 3928 |
| HSV1-UL30-991 | − | GCCAAGAAAAAGTACAT | 17 | 3929 |
| HSV1-UL30-992 | − | TACATCGGCGTCATCTA | 17 | 3930 |
| HSV1-UL30-993 | − | ACATCGGCGTCATCTAC | 17 | 3931 |
| HSV1-UL30-994 | − | CATCGGCGTCATCTACG | 17 | 3932 |
| HSV1-UL30-995 | − | ATCGGCGTCATCTACGG | 17 | 3933 |
| HSV1-UL30-996 | − | GGGTAAGATGCTCATCA | 17 | 3934 |
| HSV1-UL30-997 | − | GGTAAGATGCTCATCAA | 17 | 3935 |
| HSV1-UL30-998 | − | GATGCTCATCAAGGGCG | 17 | 3936 |
| HSV1-UL30-999 | − | CATCAAGGGCGTGGATC | 17 | 3937 |
| HSV1-UL30-1000 | − | TTATCAACCGCACCTCC | 17 | 3938 |
| HSV1-UL30-1001 | − | TATCAACCGCACCTCCA | 17 | 3939 |
| HSV1-UL30-1002 | − | CCGCACCTCCAGGGCCC | 17 | 3940 |
| HSV1-UL30-1003 | − | TACGACGATACCGTCTC | 17 | 3941 |
| HSV1-UL30-1004 | − | CGATACCGTCTCCGGAG | 17 | 3942 |
| HSV1-UL30-1005 | − | GTTAGCCGAGCGCCCCG | 17 | 3943 |
| HSV1-UL30-1006 | − | AGCCGAGCGCCCCGCGG | 17 | 3944 |
| HSV1-UL30-1007 | − | AGCGCCCCGCGGAGGAG | 17 | 3945 |
| HSV1-UL30-1008 | − | CCCCGCGGAGGAGTGGC | 17 | 3946 |
| HSV1-UL30-1009 | − | GGCGCGACCCCTGCCCG | 17 | 3947 |
| HSV1-UL30-1010 | − | GCGCGACCCCTGCCCGA | 17 | 3948 |
| HSV1-UL30-1011 | − | CCTGCCCGAGGGACTGC | 17 | 3949 |
| HSV1-UL30-1012 | − | GAGGGACTGCAGGCGTT | 17 | 3950 |
| HSV1-UL30-1013 | − | AGGGACTGCAGGCGTTC | 17 | 3951 |
| HSV1-UL30-1014 | − | GGGACTGCAGGCGTTCG | 17 | 3952 |
| HSV1-UL30-1015 | − | TCCTCGTAGACGCCCAT | 17 | 3953 |
| HSV1-UL30-1016 | − | TCGGCGCATCACCGACC | 17 | 3954 |
| HSV1-UL30-1017 | − | GCATCACCGACCCGGAG | 17 | 3955 |
| HSV1-UL30-1018 | − | CATCACCGACCCGGAGA | 17 | 3956 |
| HSV1-UL30-1019 | − | CCCGGAGAGGGACATCC | 17 | 3957 |
| HSV1-UL30-1020 | − | GTACACCAACAAGCGCC | 17 | 3958 |
| HSV1-UL30-1021 | − | GCGCCTGGCCCACCTGA | 17 | 3959 |
| HSV1-UL30-1022 | − | GGTGTATTACAAGCTCA | 17 | 3960 |
| HSV1-UL30-1023 | − | CATGGCCCGCCGCGCGC | 17 | 3961 |
| HSV1-UL30-1024 | − | GCAGGTCCCGTCCATCA | 17 | 3962 |
| HSV1-UL30-1025 | − | TCCCGTCCATCAAGGAC | 17 | 3963 |
| HSV1-UL30-1026 | − | GATCCCGTACGTGATCG | 17 | 3964 |
| HSV1-UL30-1027 | − | CGTGGCCCAGACCCGCG | 17 | 3965 |
| HSV1-UL30-1028 | − | CCAGACCCGCGAGGTAG | 17 | 3966 |
| HSV1-UL30-1029 | − | CCGCGAGGTAGAGGAGA | 17 | 3967 |
| HSV1-UL30-1030 | − | TAGAGGAGACGGTCGCG | 17 | 3968 |
| HSV1-UL30-1031 | − | GGAGACGGTCGCGCGGC | 17 | 3969 |
| HSV1-UL30-1032 | − | CTAGACGCCGCCGCCCC | 17 | 3970 |
| HSV1-UL30-1033 | − | TAGACGCCGCCGCCCCA | 17 | 3971 |
| HSV1-UL30-1034 | − | AGACGCCGCCGCCCCAG | 17 | 3972 |
| HSV1-UL30-1035 | − | CGAGCCCGCCCCCCCCG | 17 | 3973 |
| HSV1-UL30-1036 | − | CGCGGCCCTGCCCTCCC | 17 | 3974 |
| HSV1-UL30-1037 | − | CCCCGGCCAAGCGCCCC | 17 | 3975 |
| HSV1-UL30-1038 | − | CCCGGCCAAGCGCCCCC | 17 | 3976 |
| HSV1-UL30-1039 | − | GTCGCCTGCCGACCCCC | 17 | 3977 |
| HSV1-UL30-1040 | − | TCGCCTGCCGACCCCCC | 17 | 3978 |
| HSV1-UL30-1041 | − | CCTGCCGACCCCCCGGG | 17 | 3979 |
| HSV1-UL30-1042 | − | CAAGCCCCGCAAGCTGC | 17 | 3980 |
| HSV1-UL30-1043 | − | GCTGCTGGTGTCCGAGC | 17 | 3981 |
| HSV1-UL30-1044 | − | GGTGTCCGAGCTGGCCG | 17 | 3982 |
| HSV1-UL30-1045 | − | GCATACGCCATTGCCCA | 17 | 3983 |
| HSV1-UL30-1046 | − | CGGCGTCGCCCTGAACA | 17 | 3984 |
| HSV1-UL30-1047 | − | TTACTTCTCCCACCTGT | 17 | 3985 |
| HSV1-UL30-1048 | − | TACTTCTCCCACCTGTT | 17 | 3986 |
| HSV1-UL30-1049 | − | ACTTCTCCCACCTGTTG | 17 | 3987 |
| HSV1-UL30-1050 | − | CTTCTCCCACCTGTTGG | 17 | 3988 |
| HSV1-UL30-1051 | − | CTCCCACCTGTTGGGGG | 17 | 3989 |
| HSV1-UL30-1052 | − | GGCGTGCGTGACATTCA | 17 | 3990 |
| HSV1-UL30-1053 | − | ACATTCAAGGCCCTGTT | 17 | 3991 |
| HSV1-UL30-1054 | − | CATTCAAGGCCCTGTTT | 17 | 3992 |
| HSV1-UL30-1055 | − | CCGAGAGTCTGTTAAAA | 17 | 3993 |
| HSV1-UL30-1056 | − | GGTTTATTCCCGAAGTG | 17 | 3994 |
| HSV1-UL30-1057 | − | CGAAGTGTGGCACCCCC | 17 | 3995 |
| HSV1-UL30-1058 | − | GCACCCCCCGGACGACG | 17 | 3996 |
| HSV1-UL30-1059 | − | CGGACGACGTGGCCGCG | 17 | 3997 |
| HSV1-UL30-1060 | − | ACGTGGCCGCGCGGCTC | 17 | 3998 |
| HSV1-UL30-1061 | − | GCGCGGCTCCGGACCGC | 17 | 3999 |
| HSV1-UL30-1062 | − | CGCGGCTCCGGACCGCA | 17 | 4000 |
| HSV1-UL30-1063 | − | CTCCGGACCGCAGGGTT | 17 | 4001 |
| HSV1-UL30-1064 | − | TCCGGACCGCAGGGTTC | 17 | 4002 |
| HSV1-UL30-1065 | − | CCGGACCGCAGGGTTCG | 17 | 4003 |
| HSV1-UL30-1066 | − | GACCGCAGGGTTCGGGG | 17 | 4004 |
| HSV1-UL30-1067 | − | CGCAGGGTTCGGGGCGG | 17 | 4005 |
| HSV1-UL30-1068 | − | GCAGGGTTCGGGGCGGT | 17 | 4006 |
| HSV1-UL30-1069 | − | TTCGGGGCGGTGGGTGC | 17 | 4007 |
| HSV1-UL30-1070 | − | GGTGGGTGCCGGCGCTA | 17 | 4008 |
| HSV1-UL30-1071 | − | GGGTGCCGGCGCTACGG | 17 | 4009 |
| HSV1-UL30-1072 | − | TGCCGGCGCTACGGCGG | 17 | 4010 |
| HSV1-UL30-1073 | + | AGTTTCCTCCGCCGTAGCGC | 20 | 4011 |
| HSV1-UL30-1074 | + | ACCCACCGCCCCGAACCCTG | 20 | 4012 |
| HSV1-UL30-1075 | + | CCGCCCCGAACCCTGCGGTC | 20 | 4013 |
| HSV1-UL30-1076 | + | CCCTGCGGTCCGGAGCCGCG | 20 | 4014 |
| HSV1-UL30-1077 | + | AGCCGCGCGGCCACGTCGTC | 20 | 4015 |
| HSV1-UL30-1078 | + | GCCGCGCGGCCACGTCGTCC | 20 | 4016 |
| HSV1-UL30-1079 | + | CCGCGCGGCCACGTCGTCCG | 20 | 4017 |
| HSV1-UL30-1080 | + | CGCGCGGCCACGTCGTCCGG | 20 | 4018 |
| HSV1-UL30-1081 | + | GCGCGGCCACGTCGTCCGGG | 20 | 4019 |
| HSV1-UL30-1082 | + | GTCCGGGGGGTGCCACACTT | 20 | 4020 |
| HSV1-UL30-1083 | + | TCCGGGGGGTGCCACACTTC | 20 | 4021 |
| HSV1-UL30-1084 | + | AAACCTTTTTAACAGACTCT | 20 | 4022 |
| HSV1-UL30-1085 | + | TAACAGACTCTCGGTGATCT | 20 | 4023 |
| HSV1-UL30-1086 | + | TCTTGGCGTTATTCCCAAAC | 20 | 4024 |
| HSV1-UL30-1087 | + | CTTGGCGTTATTCCCAAACA | 20 | 4025 |
| HSV1-UL30-1088 | + | TCACGCACGCCGCCCCCAAC | 20 | 4026 |
| HSV1-UL30-1089 | + | CGCACGCCGCCCCCAACAGG | 20 | 4027 |
| HSV1-UL30-1090 | + | GCACGCCGCCCCCAACAGGT | 20 | 4028 |
| HSV1-UL30-1091 | + | AGAAGTAATAGTCCGTGTTC | 20 | 4029 |
| HSV1-UL30-1092 | + | GAAGTAATAGTCCGTGTTCA | 20 | 4030 |
| HSV1-UL30-1093 | + | CCGTGTTCAGGGCGACGCCG | 20 | 4031 |
| HSV1-UL30-1094 | + | CGTGTTCAGGGCGACGCCGT | 20 | 4032 |
| HSV1-UL30-1095 | + | CAGGGCGACGCCGTGGGCAA | 20 | 4033 |
| HSV1-UL30-1096 | + | GCCGTGGGCAATGGCGTATG | 20 | 4034 |
| HSV1-UL30-1097 | + | CCGTGGGCAATGGCGTATGC | 20 | 4035 |
| HSV1-UL30-1098 | + | AATGGCGTATGCGGGATCCT | 20 | 4036 |
| HSV1-UL30-1099 | + | TGCGGGATCCTCGGCCAGCT | 20 | 4037 |
| HSV1-UL30-1100 | + | GCTCGGACACCAGCAGCTTG | 20 | 4038 |
| HSV1-UL30-1101 | + | CTCGGACACCAGCAGCTTGC | 20 | 4039 |
| HSV1-UL30-1102 | + | TCGGACACCAGCAGCTTGCG | 20 | 4040 |
| HSV1-UL30-1103 | + | CACCAGCAGCTTGCGGGGCT | 20 | 4041 |
| HSV1-UL30-1104 | + | CGGGGCTTGGACGCGCCTCC | 20 | 4042 |
| HSV1-UL30-1105 | + | GGGGCTTGGACGCGCCTCCC | 20 | 4043 |
| HSV1-UL30-1106 | + | GGGCTTGGACGCGCCTCCCG | 20 | 4044 |
| HSV1-UL30-1107 | + | GGCTTGGACGCGCCTCCCGG | 20 | 4045 |
| HSV1-UL30-1108 | + | GCTTGGACGCGCCTCCCGGG | 20 | 4046 |
| HSV1-UL30-1109 | + | GGACGCGCCTCCCGGGGGGT | 20 | 4047 |
| HSV1-UL30-1110 | + | GCGCCTCCCGGGGGGTCGGC | 20 | 4048 |
| HSV1-UL30-1111 | + | CCCGGGGGGTCGGCAGGCGA | 20 | 4049 |
| HSV1-UL30-1112 | + | CGGCAGGCGACGGCGTCTCC | 20 | 4050 |
| HSV1-UL30-1113 | + | GGCAGGCGACGGCGTCTCCC | 20 | 4051 |
| HSV1-UL30-1114 | + | GCAGGCGACGGCGTCTCCCG | 20 | 4052 |
| HSV1-UL30-1115 | + | CAGGCGACGGCGTCTCCCGG | 20 | 4053 |
| HSV1-UL30-1116 | + | CGGCGTCTCCCGGGGGCGCT | 20 | 4054 |
| HSV1-UL30-1117 | + | GTCTCCCGGGGGCGCTTGGC | 20 | 4055 |
| HSV1-UL30-1118 | + | TCTCCCGGGGGCGCTTGGCC | 20 | 4056 |
| HSV1-UL30-1119 | + | CTCCCGGGGGCGCTTGGCCG | 20 | 4057 |
| HSV1-UL30-1120 | + | CCGGGGGCGCTTGGCCGGGG | 20 | 4058 |
| HSV1-UL30-1121 | + | CGGGGGCGCTTGGCCGGGGA | 20 | 4059 |
| HSV1-UL30-1122 | + | GGCGCTTGGCCGGGGAGGGC | 20 | 4060 |
| HSV1-UL30-1123 | + | GCGCTTGGCCGGGGAGGGCA | 20 | 4061 |
| HSV1-UL30-1124 | + | GGCCGGGGAGGGCAGGGCCG | 20 | 4062 |
| HSV1-UL30-1125 | + | GCCGGGGAGGGCAGGGCCGC | 20 | 4063 |
| HSV1-UL30-1126 | + | CCGGGGAGGGCAGGGCCGCG | 20 | 4064 |
| HSV1-UL30-1127 | + | CGGGGAGGGCAGGGCCGCGG | 20 | 4065 |
| HSV1-UL30-1128 | + | GGGGAGGGCAGGGCCGCGGG | 20 | 4066 |
| HSV1-UL30-1129 | + | GGGAGGGCAGGGCCGCGGGG | 20 | 4067 |
| HSV1-UL30-1130 | + | GGAGGGCAGGGCCGCGGGGG | 20 | 4068 |
| HSV1-UL30-1131 | + | GGGCAGGGCCGCGGGGGGGG | 20 | 4069 |
| HSV1-UL30-1132 | + | GGCAGGGCCGCGGGGGGGGC | 20 | 4070 |
| HSV1-UL30-1133 | + | GGGGGGGCGGGCTCGTCCCC | 20 | 4071 |
| HSV1-UL30-1134 | + | GGGGGGCGGGCTCGTCCCCT | 20 | 4072 |
| HSV1-UL30-1135 | + | GGGGGCGGGCTCGTCCCCTG | 20 | 4073 |
| HSV1-UL30-1136 | + | GGCGGGCTCGTCCCCTGGGG | 20 | 4074 |
| HSV1-UL30-1137 | + | GGGCTCGTCCCCTGGGGCGG | 20 | 4075 |
| HSV1-UL30-1138 | + | GGGCGGCGGCGTCTAGCTCG | 20 | 4076 |
| HSV1-UL30-1139 | + | CGGCGGCGTCTAGCTCGCGG | 20 | 4077 |
| HSV1-UL30-1140 | + | GGCGGCGTCTAGCTCGCGGA | 20 | 4078 |
| HSV1-UL30-1141 | + | GGCGTCTAGCTCGCGGAGGG | 20 | 4079 |
| HSV1-UL30-1142 | + | CGACCGTCTCCTCTACCTCG | 20 | 4080 |
| HSV1-UL30-1143 | + | GACCGTCTCCTCTACCTCGC | 20 | 4081 |
| HSV1-UL30-1144 | + | TCTCCTCTACCTCGCGGGTC | 20 | 4082 |
| HSV1-UL30-1145 | + | CTCCTCTACCTCGCGGGTCT | 20 | 4083 |
| HSV1-UL30-1146 | + | GTCTGGGCCACGATCACGTA | 20 | 4084 |
| HSV1-UL30-1147 | + | TCTGGGCCACGATCACGTAC | 20 | 4085 |
| HSV1-UL30-1148 | + | CCACGATCACGTACGGGATC | 20 | 4086 |
| HSV1-UL30-1149 | + | GTACGGGATCCGGTCCTTGA | 20 | 4087 |
| HSV1-UL30-1150 | + | GGGATCCGGTCCTTGATGGA | 20 | 4088 |
| HSV1-UL30-1151 | + | GGATCCGGTCCTTGATGGAC | 20 | 4089 |
| HSV1-UL30-1152 | + | TGATGGACGGGACCTGCGCG | 20 | 4090 |
| HSV1-UL30-1153 | + | TGGACGGGACCTGCGCGCGG | 20 | 4091 |
| HSV1-UL30-1154 | + | GGACGGGACCTGCGCGCGGC | 20 | 4092 |
| HSV1-UL30-1155 | + | TGAGCTTGTAATACACCGTC | 20 | 4093 |
| HSV1-UL30-1156 | + | GCTTGTAATACACCGTCAGG | 20 | 4094 |
| HSV1-UL30-1157 | + | CTTGTAATACACCGTCAGGT | 20 | 4095 |
| HSV1-UL30-1158 | + | AATACACCGTCAGGTGGGCC | 20 | 4096 |
| HSV1-UL30-1159 | + | CAGGTGGGCCAGGCGCTTGT | 20 | 4097 |
| HSV1-UL30-1160 | + | CGCTTGTTGGTGTACGCGCG | 20 | 4098 |
| HSV1-UL30-1161 | + | GCTTGTTGGTGTACGCGCGC | 20 | 4099 |
| HSV1-UL30-1162 | + | GCGCGGGTGTCTGCTCAGTT | 20 | 4100 |
| HSV1-UL30-1163 | + | CGGGTGTCTGCTCAGTTCGG | 20 | 4101 |
| HSV1-UL30-1164 | + | GTCTGCTCAGTTCGGCGGTG | 20 | 4102 |
| HSV1-UL30-1165 | + | CGGCGGTGAGGACAAAGTCC | 20 | 4103 |
| HSV1-UL30-1166 | + | AAGTCCTGGATGTCCCTCTC | 20 | 4104 |
| HSV1-UL30-1167 | + | AGTCCTGGATGTCCCTCTCC | 20 | 4105 |
| HSV1-UL30-1168 | + | CTGGATGTCCCTCTCCGGGT | 20 | 4106 |
| HSV1-UL30-1169 | + | CCGGGTCGGTGATGCGCCGA | 20 | 4107 |
| HSV1-UL30-1170 | + | CGGGTCGGTGATGCGCCGAT | 20 | 4108 |
| HSV1-UL30-1171 | + | TGCGCCGATGGGCGTCTACG | 20 | 4109 |
| HSV1-UL30-1172 | + | CCGATGGGCGTCTACGAGGA | 20 | 4110 |
| HSV1-UL30-1173 | + | CCCGAACGCCTGCAGTCCCT | 20 | 4111 |
| HSV1-UL30-1174 | + | CCGAACGCCTGCAGTCCCTC | 20 | 4112 |
| HSV1-UL30-1175 | + | ACGCCTGCAGTCCCTCGGGC | 20 | 4113 |
| HSV1-UL30-1176 | + | CGCCTGCAGTCCCTCGGGCA | 20 | 4114 |
| HSV1-UL30-1177 | + | GCCTGCAGTCCCTCGGGCAG | 20 | 4115 |
| HSV1-UL30-1178 | + | TCGCGCCAGCCACTCCTCCG | 20 | 4116 |
| HSV1-UL30-1179 | + | CGCGCCAGCCACTCCTCCGC | 20 | 4117 |
| HSV1-UL30-1180 | + | GCGCCAGCCACTCCTCCGCG | 20 | 4118 |
| HSV1-UL30-1181 | + | CCACTCCTCCGCGGGGCGCT | 20 | 4119 |
| HSV1-UL30-1182 | + | CGCGGGGCGCTCGGCTAACG | 20 | 4120 |
| HSV1-UL30-1183 | + | GGGGCGCTCGGCTAACGCGG | 20 | 4121 |
| HSV1-UL30-1184 | + | GGCTAACGCGGCGGCCGCTC | 20 | 4122 |
| HSV1-UL30-1185 | + | CGCGGCGGCCGCTCCGGAGA | 20 | 4123 |
| HSV1-UL30-1186 | + | CGGTATCGTCGTAAAACAGC | 20 | 4124 |
| HSV1-UL30-1187 | + | CGTAAAACAGCAGGTCGACC | 20 | 4125 |
| HSV1-UL30-1188 | + | GTAAAACAGCAGGTCGACCA | 20 | 4126 |
| HSV1-UL30-1189 | + | CAGCAGGTCGACCAGGGCCC | 20 | 4127 |
| HSV1-UL30-1190 | + | CAGGTCGACCAGGGCCCTGG | 20 | 4128 |
| HSV1-UL30-1191 | + | CGACCAGGGCCCTGGAGGTG | 20 | 4129 |
| HSV1-UL30-1192 | + | GACGCCGATGTACTTTTTCT | 20 | 4130 |
| HSV1-UL30-1193 | + | CTTGGCGATCAGCAGCAGCT | 20 | 4131 |
| HSV1-UL30-1194 | + | CTTTTCGCACTCGAGTTTGA | 20 | 4132 |
| HSV1-UL30-1195 | + | TTTTCGCACTCGAGTTTGAT | 20 | 4133 |
| HSV1-UL30-1196 | + | TTTCGCACTCGAGTTTGATG | 20 | 4134 |
| HSV1-UL30-1197 | + | TTCGCACTCGAGTTTGATGG | 20 | 4135 |
| HSV1-UL30-1198 | + | TCGCACTCGAGTTTGATGGG | 20 | 4136 |
| HSV1-UL30-1199 | + | GAAACAGCGCGCGCGAGATG | 20 | 4137 |
| HSV1-UL30-1200 | + | GCTCGCCATCTTGTCGCCCA | 20 | 4138 |
| HSV1-UL30-1201 | + | GTCGCCCACGGCCGTCAGCC | 20 | 4139 |
| HSV1-UL30-1202 | + | GCCCACGGCCGTCAGCCCGG | 20 | 4140 |
| HSV1-UL30-1203 | + | CCGTCAGCCCGGCGGCCGTG | 20 | 4141 |
| HSV1-UL30-1204 | + | GCCCGGCGGCCGTGAGGCCG | 20 | 4142 |
| HSV1-UL30-1205 | + | GCCGCGGCACAGCACAAAGA | 20 | 4143 |
| HSV1-UL30-1206 | + | GTCCCCGTAGATGATGCGCA | 20 | 4144 |
| HSV1-UL30-1207 | + | GTAGATGATGCGCATGGAAT | 20 | 4145 |
| HSV1-UL30-1208 | + | TAGATGATGCGCATGGAATA | 20 | 4146 |
| HSV1-UL30-1209 | + | GATGCGCATGGAATAGGGCC | 20 | 4147 |
| HSV1-UL30-1210 | + | ATGCGCATGGAATAGGGCCC | 20 | 4148 |
| HSV1-UL30-1211 | + | TGCGCATGGAATAGGGCCCG | 20 | 4149 |
| HSV1-UL30-1212 | + | GCGCATGGAATAGGGCCCGG | 20 | 4150 |
| HSV1-UL30-1213 | + | GGGCCCGGGGGCGCGCATGT | 20 | 4151 |
| HSV1-UL30-1214 | + | GCGCGCATGTCGGCCGCCTC | 20 | 4152 |
| HSV1-UL30-1215 | + | CGCGCATGTCGGCCGCCTCC | 20 | 4153 |
| HSV1-UL30-1216 | + | GTCGGCCGCCTCCGGGAAAT | 20 | 4154 |
| HSV1-UL30-1217 | + | CCGCCTCCGGGAAATCGGCC | 20 | 4155 |
| HSV1-UL30-1218 | + | ATCGGCCAGGAGCTGTTCGA | 20 | 4156 |
| HSV1-UL30-1219 | + | CGAAGGCCGCCCAGCGCGCG | 20 | 4157 |
| HSV1-UL30-1220 | + | AGCGCGCGTGGACGTACTCG | 20 | 4158 |
| HSV1-UL30-1221 | + | GCGCGCGTGGACGTACTCGC | 20 | 4159 |
| HSV1-UL30-1222 | + | GGGTCGCGAGCAGCATCTCG | 20 | 4160 |
| HSV1-UL30-1223 | + | GAGCAGCATCTCGCGGCCGA | 20 | 4161 |
| HSV1-UL30-1224 | + | GCCGATGGTCGTCACCGTCG | 20 | 4162 |
| HSV1-UL30-1225 | + | TCACCGTCGCGGCAACGTGC | 20 | 4163 |
| HSV1-UL30-1226 | + | GTCGCGGCAACGTGCAGGCA | 20 | 4164 |
| HSV1-UL30-1227 | + | CGGCAACGTGCAGGCACGGC | 20 | 4165 |
| HSV1-UL30-1228 | + | CGAGTTACACACGACCTTGA | 20 | 4166 |
| HSV1-UL30-1229 | + | GTTACACACGACCTTGATGG | 20 | 4167 |
| HSV1-UL30-1230 | + | TGGCGGCCTGCTGCTTGTCC | 20 | 4168 |
| HSV1-UL30-1231 | + | CTGCTGCTTGTCCAGGAGCA | 20 | 4169 |
| HSV1-UL30-1232 | + | GTCCAGGAGCACGGCCTCCT | 20 | 4170 |
| HSV1-UL30-1233 | + | TCCAGGAGCACGGCCTCCTC | 20 | 4171 |
| HSV1-UL30-1234 | + | CCAGGAGCACGGCCTCCTCG | 20 | 4172 |
| HSV1-UL30-1235 | + | CGGCCTCCTCGGGGCTGCTC | 20 | 4173 |
| HSV1-UL30-1236 | + | GGCCTCCTCGGGGCTGCTCT | 20 | 4174 |
| HSV1-UL30-1237 | + | GCCTCCTCGGGGCTGCTCTG | 20 | 4175 |
| HSV1-UL30-1238 | + | TGCTCTGGGGAATCCGCGAG | 20 | 4176 |
| HSV1-UL30-1239 | + | CGAGCGGATCTGCTTTCGCA | 20 | 4177 |
| HSV1-UL30-1240 | + | GCATGGCGAGCCAGTCCCGC | 20 | 4178 |
| HSV1-UL30-1241 | + | TGGCGAGCCAGTCCCGCAGG | 20 | 4179 |
| HSV1-UL30-1242 | + | AGTCCCGCAGGAGGATGCTG | 20 | 4180 |
| HSV1-UL30-1243 | + | CCCGCAGGAGGATGCTGAGG | 20 | 4181 |
| HSV1-UL30-1244 | + | GCCCCCCCACCTCGATCTCC | 20 | 4182 |
| HSV1-UL30-1245 | + | GGTAGTCCTTGCCCGCCTCC | 20 | 4183 |
| HSV1-UL30-1246 | + | CTCCAGGTGCGCCACTGCGT | 20 | 4184 |
| HSV1-UL30-1247 | + | GCGCCACTGCGTCGGCCCTC | 20 | 4185 |
| HSV1-UL30-1248 | + | CGCCACTGCGTCGGCCCTCA | 20 | 4186 |
| HSV1-UL30-1249 | + | GGGAGAGCGTGCTGAAGCAC | 20 | 4187 |
| HSV1-UL30-1250 | + | GCGTGCTGAAGCACAGGTTG | 20 | 4188 |
| HSV1-UL30-1251 | + | CGTGCTGAAGCACAGGTTGT | 20 | 4189 |
| HSV1-UL30-1252 | + | TGAAGCACAGGTTGTGGGCC | 20 | 4190 |
| HSV1-UL30-1253 | + | GTTGTGGGCCTGGATGATGC | 20 | 4191 |
| HSV1-UL30-1254 | + | TTGTGGGCCTGGATGATGCT | 20 | 4192 |
| HSV1-UL30-1255 | + | TGTGGGCCTGGATGATGCTG | 20 | 4193 |
| HSV1-UL30-1256 | + | CCTGGATGATGCTGGGGTAC | 20 | 4194 |
| HSV1-UL30-1257 | + | GATGATGCTGGGGTACAGGC | 20 | 4195 |
| HSV1-UL30-1258 | + | GGCAAAGTCGAACACCACCA | 20 | 4196 |
| HSV1-UL30-1259 | + | GCAAAGTCGAACACCACCAC | 20 | 4197 |
| HSV1-UL30-1260 | + | CAAAGTCGAACACCACCACG | 20 | 4198 |
| HSV1-UL30-1261 | + | CACGGGGTTCACGTGAAACC | 20 | 4199 |
| HSV1-UL30-1262 | + | GTTCACGTGAAACCCGGAAG | 20 | 4200 |
| HSV1-UL30-1263 | + | TTCACGTGAAACCCGGAAGT | 20 | 4201 |
| HSV1-UL30-1264 | + | TCACGTGAAACCCGGAAGTG | 20 | 4202 |
| HSV1-UL30-1265 | + | GAAACCCGGAAGTGGGGTCA | 20 | 4203 |
| HSV1-UL30-1266 | + | GGAAGTGGGGTCAAGGACCC | 20 | 4204 |
| HSV1-UL30-1267 | + | GGTCAAGGACCCTGGCCCCC | 20 | 4205 |
| HSV1-UL30-1268 | + | CTGGTACCCCACGTGCCTGC | 20 | 4206 |
| HSV1-UL30-1269 | + | GTACCCCACGTGCCTGCCGG | 20 | 4207 |
| HSV1-UL30-1270 | + | GCGGTCTCCCGCGCGCCCTC | 20 | 4208 |
| HSV1-UL30-1271 | + | TCGTCCTCCCCCTCCTCCTC | 20 | 4209 |
| HSV1-UL30-1272 | + | CTGGCCGCTCCTCGTCCTCC | 20 | 4210 |
| HSV1-UL30-1273 | + | TGGCCGCTCCTCGTCCTCCC | 20 | 4211 |
| HSV1-UL30-1274 | + | CTCCTCGTCCTCCCGGGCTG | 20 | 4212 |
| HSV1-UL30-1275 | + | TCGTCCTCCCGGGCTGCGGC | 20 | 4213 |
| HSV1-UL30-1276 | + | CCGGGCTGCGGCCGGACGCT | 20 | 4214 |
| HSV1-UL30-1277 | + | CGGGCTGCGGCCGGACGCTT | 20 | 4215 |
| HSV1-UL30-1278 | + | ACGCTTGGGCGCCTCCCCCC | 20 | 4216 |
| HSV1-UL30-1279 | + | CGGCGCCCCTAAATCGCCCC | 20 | 4217 |
| HSV1-UL30-1280 | + | GGCGCCCCTAAATCGCCCCT | 20 | 4218 |
| HSV1-UL30-1281 | + | CTAAATCGCCCCTGGGTGTC | 20 | 4219 |
| HSV1-UL30-1282 | + | CCGGCAGAATAAAGCCCTTC | 20 | 4220 |
| HSV1-UL30-1283 | + | CAGAATAAAGCCCTTCTGGT | 20 | 4221 |
| HSV1-UL30-1284 | + | TAAAGCCCTTCTGGTCGGCC | 20 | 4222 |
| HSV1-UL30-1285 | + | TCTGGTCGGCCAGGCGCAGC | 20 | 4223 |
| HSV1-UL30-1286 | + | GCAGCAGGCACGTAAAGACG | 20 | 4224 |
| HSV1-UL30-1287 | + | ACGTAAAGACGCGGATCTGC | 20 | 4225 |
| HSV1-UL30-1288 | + | GATCTGCTGGCCGTCGTAGA | 20 | 4226 |
| HSV1-UL30-1289 | + | GCTGGCCGTCGTAGATGGTG | 20 | 4227 |
| HSV1-UL30-1290 | + | CTGGCCGTCGTAGATGGTGC | 20 | 4228 |
| HSV1-UL30-1291 | + | AATACCCGCCAAGCGCGCGA | 20 | 4229 |
| HSV1-UL30-1292 | + | CGACGGCCGAGAGCTCCAGA | 20 | 4230 |
| HSV1-UL30-1293 | + | GACGGCCGAGAGCTCCAGAT | 20 | 4231 |
| HSV1-UL30-1294 | + | ACGGCCGAGAGCTCCAGATG | 20 | 4232 |
| HSV1-UL30-1295 | + | GCAAAAACTTAAAAAACAGC | 20 | 4233 |
| HSV1-UL30-1296 | + | AAAACAGCTGGCCCACCAGC | 20 | 4234 |
| HSV1-UL30-1297 | + | AAACAGCTGGCCCACCAGCA | 20 | 4235 |
| HSV1-UL30-1298 | + | GCCGATCACCCCGCGTTGCG | 20 | 4236 |
| HSV1-UL30-1299 | + | CCGATCACCCCGCGTTGCGC | 20 | 4237 |
| HSV1-UL30-1300 | + | CACCCCGCGTTGCGCGGGCC | 20 | 4238 |
| HSV1-UL30-1301 | + | CCCGCGTTGCGCGGGCCCGG | 20 | 4239 |
| HSV1-UL30-1302 | + | CGCGGGCCCGGCGGCGTAGT | 20 | 4240 |
| HSV1-UL30-1303 | + | GGGCCCGGCGGCGTAGTAGG | 20 | 4241 |
| HSV1-UL30-1304 | + | GGCCCGGCGGCGTAGTAGGC | 20 | 4242 |
| HSV1-UL30-1305 | + | GCCCGGCGGCGTAGTAGGCG | 20 | 4243 |
| HSV1-UL30-1306 | + | CGGGGATGTCGCGATAGCTC | 20 | 4244 |
| HSV1-UL30-1307 | + | GGTCCTTCTTCTTGTCCTTC | 20 | 4245 |
| HSV1-UL30-1308 | + | CTTCTTCTTGTCCTTCAGGA | 20 | 4246 |
| HSV1-UL30-1309 | + | CTTGTCCTTCAGGACGGCTT | 20 | 4247 |
| HSV1-UL30-1310 | + | CTTCAGGACGGCTTCGGCCA | 20 | 4248 |
| HSV1-UL30-1311 | + | GCTCGAGAGCTTGATCTTGT | 20 | 4249 |
| HSV1-UL30-1312 | + | CCTTTATCTTGCTGCGCTTC | 20 | 4250 |
| HSV1-UL30-1313 | + | TCTTGCTGCGCTTCTGGAAG | 20 | 4251 |
| HSV1-UL30-1314 | + | TGCGCTTCTGGAAGTGGCTC | 20 | 4252 |
| HSV1-UL30-1315 | + | CCCACACGCGAAACACGCCC | 20 | 4253 |
| HSV1-UL30-1316 | + | ACACGCCCCGGCCGTTCATG | 20 | 4254 |
| HSV1-UL30-1317 | + | TCATGCGGCCGTACCCGTCC | 20 | 4255 |
| HSV1-UL30-1318 | + | CATGCGGCCGTACCCGTCCA | 20 | 4256 |
| HSV1-UL30-1319 | + | ATGCGGCCGTACCCGTCCAG | 20 | 4257 |
| HSV1-UL30-1320 | + | TGCGGCCGTACCCGTCCAGG | 20 | 4258 |
| HSV1-UL30-1321 | + | CTTGTAAATGTCCGTCAGCT | 20 | 4259 |
| HSV1-UL30-1322 | + | CGTCAGCTTGGCCAGCAAGA | 20 | 4260 |
| HSV1-UL30-1323 | + | GTCAGCTTGGCCAGCAAGAA | 20 | 4261 |
| HSV1-UL30-1324 | + | GAAGTTGATGATGTTGTACC | 20 | 4262 |
| HSV1-UL30-1325 | + | GTTGTACCCGGTCACGAACT | 20 | 4263 |
| HSV1-UL30-1326 | + | TTGTACCCGGTCACGAACTC | 20 | 4264 |
| HSV1-UL30-1327 | + | TGTACCCGGTCACGAACTCG | 20 | 4265 |
| HSV1-UL30-1328 | + | CGGGGCCGTACTGTTTCACA | 20 | 4266 |
| HSV1-UL30-1329 | + | GGGGCCGTACTGTTTCACAA | 20 | 4267 |
| HSV1-UL30-1330 | + | CTGTTTCACAAGGGTCATGA | 20 | 4268 |
| HSV1-UL30-1331 | + | GCTGTCGAATTCCAGAACCA | 20 | 4269 |
| HSV1-UL30-1332 | + | CTGTCGAATTCCAGAACCAC | 20 | 4270 |
| HSV1-UL30-1333 | + | GAATTCCAGAACCACGGGCG | 20 | 4271 |
| HSV1-UL30-1334 | + | AATTCCAGAACCACGGGCGT | 20 | 4272 |
| HSV1-UL30-1335 | + | CCAGAACCACGGGCGTGGGC | 20 | 4273 |
| HSV1-UL30-1336 | + | CACGGGCGTGGGCAGGCCCC | 20 | 4274 |
| HSV1-UL30-1337 | + | CCCTGGCCGCCAGCTCGTTC | 20 | 4275 |
| HSV1-UL30-1338 | + | TGGCCGCCAGCTCGTTCAGG | 20 | 4276 |
| HSV1-UL30-1339 | + | GGCCGCCAGCTCGTTCAGGT | 20 | 4277 |
| HSV1-UL30-1340 | + | CAGCTCGTTCAGGTGGGATT | 20 | 4278 |
| HSV1-UL30-1341 | + | AGCTCGTTCAGGTGGGATTC | 20 | 4279 |
| HSV1-UL30-1342 | + | GCTCGTTCAGGTGGGATTCG | 20 | 4280 |
| HSV1-UL30-1343 | + | CGTTCAGGTGGGATTCGGGG | 20 | 4281 |
| HSV1-UL30-1344 | + | GTGGGATTCGGGGAGGTCGC | 20 | 4282 |
| HSV1-UL30-1345 | + | CGCAGGAACCGAGCGAAAAC | 20 | 4283 |
| HSV1-UL30-1346 | + | AGGAACCGAGCGAAAACAGG | 20 | 4284 |
| HSV1-UL30-1347 | + | AAAACAGGAGGACGTGCTCC | 20 | 4285 |
| HSV1-UL30-1348 | + | AAACAGGAGGACGTGCTCCA | 20 | 4286 |
| HSV1-UL30-1349 | + | CAGGAGGACGTGCTCCAGGG | 20 | 4287 |
| HSV1-UL30-1350 | + | GAGGACGTGCTCCAGGGCGG | 20 | 4288 |
| HSV1-UL30-1351 | + | GACGTGCTCCAGGGCGGTGG | 20 | 4289 |
| HSV1-UL30-1352 | + | GCTCCAGGGCGGTGGTGGAC | 20 | 4290 |
| HSV1-UL30-1353 | + | GGACAGGTCGTAGAGCAGAC | 20 | 4291 |
| HSV1-UL30-1354 | + | CGTAGAGCAGACAGGATATC | 20 | 4292 |
| HSV1-UL30-1355 | + | GACAGGATATCTGGATGACC | 20 | 4293 |
| HSV1-UL30-1356 | + | ATCTGGATGACCAGGTCCTC | 20 | 4294 |
| HSV1-UL30-1357 | + | TCTGGATGACCAGGTCCTCC | 20 | 4295 |
| HSV1-UL30-1358 | + | GACCAGGTCCTCCGGGTGCC | 20 | 4296 |
| HSV1-UL30-1359 | + | TCCTCCGGGTGCCCGGCCAC | 20 | 4297 |
| HSV1-UL30-1360 | + | CGGGTGCCCGGCCACCGGAA | 20 | 4298 |
| HSV1-UL30-1361 | + | AAGCACATGAGCTTGTATGC | 20 | 4299 |
| HSV1-UL30-1362 | + | ACATGAGCTTGTATGCCGGT | 20 | 4300 |
| HSV1-UL30-1363 | + | GTCGCTCATGCCCCCCTCGA | 20 | 4301 |
| HSV1-UL30-1364 | + | TCATGCCCCCCTCGATGGCC | 20 | 4302 |
| HSV1-UL30-1365 | + | ACAGTTAAACTCGACGTCGC | 20 | 4303 |
| HSV1-UL30-1366 | + | GACGTCGCTGGATGTCCCGA | 20 | 4304 |
| HSV1-UL30-1367 | + | CTGGATGTCCCGAAGGCCAT | 20 | 4305 |
| HSV1-UL30-1368 | + | TGGATGTCCCGAAGGCCATC | 20 | 4306 |
| HSV1-UL30-1369 | + | GGATGTCCCGAAGGCCATCG | 20 | 4307 |
| HSV1-UL30-1370 | + | CCGAAGGCCATCGGGGCCGC | 20 | 4308 |
| HSV1-UL30-1371 | + | AGGCCATCGGGGCCGCCGGC | 20 | 4309 |
| HSV1-UL30-1372 | + | GGCCATCGGGGCCGCCGGCT | 20 | 4310 |
| HSV1-UL30-1373 | + | GCTGGGCTAGCGTGTTGTTC | 20 | 4311 |
| HSV1-UL30-1374 | + | GCTAGCGTGTTGTTCCGGCC | 20 | 4312 |
| HSV1-UL30-1375 | + | TGTTCCGGCCCGGTTTGAGA | 20 | 4313 |
| HSV1-UL30-1376 | + | TTTGAGACGGTACCAGCCGA | 20 | 4314 |
| HSV1-UL30-1377 | + | CCAGCCGAAGGTGACGAACC | 20 | 4315 |
| HSV1-UL30-1378 | + | CAGCCGAAGGTGACGAACCC | 20 | 4316 |
| HSV1-UL30-1379 | + | AGCCGAAGGTGACGAACCCG | 20 | 4317 |
| HSV1-UL30-1380 | + | TGACGAACCCGGGGTTGTCC | 20 | 4318 |
| HSV1-UL30-1381 | + | CGGGGTTGTCCAGGATGAAC | 20 | 4319 |
| HSV1-UL30-1382 | + | GGGGTTGTCCAGGATGAACC | 20 | 4320 |
| HSV1-UL30-1383 | + | GTTGTCCAGGATGAACCGGG | 20 | 4321 |
| HSV1-UL30-1384 | + | GTCCAGGATGAACCGGGTGG | 20 | 4322 |
| HSV1-UL30-1385 | + | CCCACCCTCGTACTTCTTGA | 20 | 4323 |
| HSV1-UL30-1386 | + | CCCTCGTACTTCTTGATGGC | 20 | 4324 |
| HSV1-UL30-1387 | + | CCTCGTACTTCTTGATGGCC | 20 | 4325 |
| HSV1-UL30-1388 | + | CCGGGCAGAAGTTGTCGCAC | 20 | 4326 |
| HSV1-UL30-1389 | + | ACGACAGCACACGCCCGCTT | 20 | 4327 |
| HSV1-UL30-1390 | + | GCCCGCTTCGGACGTAGACG | 20 | 4328 |
| HSV1-UL30-1391 | + | GTAGACGCGGTAAAACAGAG | 20 | 4329 |
| HSV1-UL30-1392 | + | TAGACGCGGTAAAACAGAGC | 20 | 4330 |
| HSV1-UL30-1393 | + | AGACGCGGTAAAACAGAGCG | 20 | 4331 |
| HSV1-UL30-1394 | + | CGTCTCGTAGTAGTACACGT | 20 | 4332 |
| HSV1-UL30-1395 | + | CCACCACCTCCGCCTCGAAG | 20 | 4333 |
| HSV1-UL30-1396 | + | CTCCGCCTCGAAGTGGTCCG | 20 | 4334 |
| HSV1-UL30-1397 | + | AGTGGTCCGCGGAGATGCCG | 20 | 4335 |
| HSV1-UL30-1398 | + | ATGCCGCGGAACGACGCGCC | 20 | 4336 |
| HSV1-UL30-1399 | + | TGCCGCGGAACGACGCGCCC | 20 | 4337 |
| HSV1-UL30-1400 | + | GCCGCGGAACGACGCGCCCG | 20 | 4338 |
| HSV1-UL30-1401 | + | ACGCGCCCGGGGACTCGCGC | 20 | 4339 |
| HSV1-UL30-1402 | + | CGCGCCCGGGGACTCGCGCA | 20 | 4340 |
| HSV1-UL30-1403 | + | CGGGGACTCGCGCAGGGCCG | 20 | 4341 |
| HSV1-UL30-1404 | + | ATGCGCTCGCAGAGATCTCG | 20 | 4342 |
| HSV1-UL30-1405 | + | TGCGCTCGCAGAGATCTCGT | 20 | 4343 |
| HSV1-UL30-1406 | + | GCGCTCGCAGAGATCTCGTG | 20 | 4344 |
| HSV1-UL30-1407 | + | CGCAGAGATCTCGTGGGGCG | 20 | 4345 |
| HSV1-UL30-1408 | + | CTCGTGGGGCGCGGCATTGT | 20 | 4346 |
| HSV1-UL30-1409 | + | CCGCGTGCCGTAAACGTGAA | 20 | 4347 |
| HSV1-UL30-1410 | + | CGTAAACGTGAACGGCCACC | 20 | 4348 |
| HSV1-UL30-1411 | + | AAACGTGAACGGCCACCCGG | 20 | 4349 |
| HSV1-UL30-1412 | + | ACGGCCACCCGGTGGCCTTC | 20 | 4350 |
| HSV1-UL30-1413 | + | CCCGGTGGCCTTCCGGAGTC | 20 | 4351 |
| HSV1-UL30-1414 | + | GGCCTTCCGGAGTCAGGCCC | 20 | 4352 |
| HSV1-UL30-1415 | + | CAGGCCCAGGAGCGTGATGA | 20 | 4353 |
| HSV1-UL30-1416 | + | AGCGTGATGACGGTCCCCGT | 20 | 4354 |
| HSV1-UL30-1417 | + | GACGGTCCCCGTCGGTGTGA | 20 | 4355 |
| HSV1-UL30-1418 | + | TGGCGTCCATAAACCGCGCG | 20 | 4356 |
| HSV1-UL30-1419 | + | GGCGTCCATAAACCGCGCGT | 20 | 4357 |
| HSV1-UL30-1420 | + | GCGTCCATAAACCGCGCGTG | 20 | 4358 |
| HSV1-UL30-1421 | + | CGTCCATAAACCGCGCGTGG | 20 | 4359 |
| HSV1-UL30-1422 | + | TTCCTCCGCCGTAGCGC | 17 | 4360 |
| HSV1-UL30-1423 | + | CACCGCCCCGAACCCTG | 17 | 4361 |
| HSV1-UL30-1424 | + | CCCCGAACCCTGCGGTC | 17 | 4362 |
| HSV1-UL30-1425 | + | TGCGGTCCGGAGCCGCG | 17 | 4363 |
| HSV1-UL30-1426 | + | CGCGCGGCCACGTCGTC | 17 | 4364 |
| HSV1-UL30-1427 | + | GCGCGGCCACGTCGTCC | 17 | 4365 |
| HSV1-UL30-1428 | + | CGCGGCCACGTCGTCCG | 17 | 4366 |
| HSV1-UL30-1429 | + | GCGGCCACGTCGTCCGG | 17 | 4367 |
| HSV1-UL30-1430 | + | CGGCCACGTCGTCCGGG | 17 | 4368 |
| HSV1-UL30-1431 | + | CGGGGGGTGCCACACTT | 17 | 4369 |
| HSV1-UL30-1432 | + | GGGGGGTGCCACACTTC | 17 | 4370 |
| HSV1-UL30-1433 | + | CCTTTTTAACAGACTCT | 17 | 4371 |
| HSV1-UL30-1434 | + | CAGACTCTCGGTGATCT | 17 | 4372 |
| HSV1-UL30-1435 | + | TGGCGTTATTCCCAAAC | 17 | 4373 |
| HSV1-UL30-1436 | + | GGCGTTATTCCCAAACA | 17 | 4374 |
| HSV1-UL30-1437 | + | CGCACGCCGCCCCCAAC | 17 | 4375 |
| HSV1-UL30-1438 | + | ACGCCGCCCCCAACAGG | 17 | 4376 |
| HSV1-UL30-1439 | + | CGCCGCCCCCAACAGGT | 17 | 4377 |
| HSV1-UL30-1440 | + | AGTAATAGTCCGTGTTC | 17 | 4378 |
| HSV1-UL30-1441 | + | GTAATAGTCCGTGTTCA | 17 | 4379 |
| HSV1-UL30-1442 | + | TGTTCAGGGCGACGCCG | 17 | 4380 |
| HSV1-UL30-1443 | + | GTTCAGGGCGACGCCGT | 17 | 4381 |
| HSV1-UL30-1444 | + | GGCGACGCCGTGGGCAA | 17 | 4382 |
| HSV1-UL30-1445 | + | GTGGGCAATGGCGTATG | 17 | 4383 |
| HSV1-UL30-1446 | + | TGGGCAATGGCGTATGC | 17 | 4384 |
| HSV1-UL30-1447 | + | GGCGTATGCGGGATCCT | 17 | 4385 |
| HSV1-UL30-1448 | + | GGGATCCTCGGCCAGCT | 17 | 4386 |
| HSV1-UL30-1449 | + | CGGACACCAGCAGCTTG | 17 | 4387 |
| HSV1-UL30-1450 | + | GGACACCAGCAGCTTGC | 17 | 4388 |
| HSV1-UL30-1451 | + | GACACCAGCAGCTTGCG | 17 | 4389 |
| HSV1-UL30-1452 | + | CAGCAGCTTGCGGGGCT | 17 | 4390 |
| HSV1-UL30-1453 | + | GGCTTGGACGCGCCTCC | 17 | 4391 |
| HSV1-UL30-1454 | + | GCTTGGACGCGCCTCCC | 17 | 4392 |
| HSV1-UL30-1455 | + | CTTGGACGCGCCTCCCG | 17 | 4393 |
| HSV1-UL30-1456 | + | TTGGACGCGCCTCCCGG | 17 | 4394 |
| HSV1-UL30-1457 | + | TGGACGCGCCTCCCGGG | 17 | 4395 |
| HSV1-UL30-1458 | + | CGCGCCTCCCGGGGGGT | 17 | 4396 |
| HSV1-UL30-1459 | + | CCTCCCGGGGGGTCGGC | 17 | 4397 |
| HSV1-UL30-1460 | + | GGGGGGTCGGCAGGCGA | 17 | 4398 |
| HSV1-UL30-1461 | + | CAGGCGACGGCGTCTCC | 17 | 4399 |
| HSV1-UL30-1462 | + | AGGCGACGGCGTCTCCC | 17 | 4400 |
| HSV1-UL30-1463 | + | GGCGACGGCGTCTCCCG | 17 | 4401 |
| HSV1-UL30-1464 | + | GCGACGGCGTCTCCCGG | 17 | 4402 |
| HSV1-UL30-1465 | + | CGTCTCCCGGGGGCGCT | 17 | 4403 |
| HSV1-UL30-1466 | + | TCCCGGGGGCGCTTGGC | 17 | 4404 |
| HSV1-UL30-1467 | + | CCCGGGGGCGCTTGGCC | 17 | 4405 |
| HSV1-UL30-1468 | + | CCGGGGGCGCTTGGCCG | 17 | 4406 |
| HSV1-UL30-1469 | + | GGGGCGCTTGGCCGGGG | 17 | 4407 |
| HSV1-UL30-1470 | + | GGGCGCTTGGCCGGGGA | 17 | 4408 |
| HSV1-UL30-1471 | + | GCTTGGCCGGGGAGGGC | 17 | 4409 |
| HSV1-UL30-1472 | + | CTTGGCCGGGGAGGGCA | 17 | 4410 |
| HSV1-UL30-1473 | + | CGGGGAGGGCAGGGCCG | 17 | 4411 |
| HSV1-UL30-1474 | + | GGGGAGGGCAGGGCCGC | 17 | 4412 |
| HSV1-UL30-1475 | + | GGGAGGGCAGGGCCGCG | 17 | 4413 |
| HSV1-UL30-1476 | + | GGAGGGCAGGGCCGCGG | 17 | 4414 |
| HSV1-UL30-1477 | + | GAGGGCAGGGCCGCGGG | 17 | 4415 |
| HSV1-UL30-1478 | + | AGGGCAGGGCCGCGGGG | 17 | 4416 |
| HSV1-UL30-1479 | + | GGGCAGGGCCGCGGGGG | 17 | 4417 |
| HSV1-UL30-1480 | + | CAGGGCCGCGGGGGGGG | 17 | 4418 |
| HSV1-UL30-1481 | + | AGGGCCGCGGGGGGGGC | 17 | 4419 |
| HSV1-UL30-1482 | + | GGGGCGGGCTCGTCCCC | 17 | 4420 |
| HSV1-UL30-1483 | + | GGGCGGGCTCGTCCCCT | 17 | 4421 |
| HSV1-UL30-1484 | + | GGCGGGCTCGTCCCCTG | 17 | 4422 |
| HSV1-UL30-1485 | + | GGGCTCGTCCCCTGGGG | 17 | 4423 |
| HSV1-UL30-1486 | + | CTCGTCCCCTGGGGCGG | 17 | 4424 |
| HSV1-UL30-1487 | + | CGGCGGCGTCTAGCTCG | 17 | 4425 |
| HSV1-UL30-1488 | + | CGGCGTCTAGCTCGCGG | 17 | 4426 |
| HSV1-UL30-1489 | + | GGCGTCTAGCTCGCGGA | 17 | 4427 |
| HSV1-UL30-1490 | + | GTCTAGCTCGCGGAGGG | 17 | 4428 |
| HSV1-UL30-1491 | + | CCGTCTCCTCTACCTCG | 17 | 4429 |
| HSV1-UL30-1492 | + | CGTCTCCTCTACCTCGC | 17 | 4430 |
| HSV1-UL30-1493 | + | CCTCTACCTCGCGGGTC | 17 | 4431 |
| HSV1-UL30-1494 | + | CTCTACCTCGCGGGTCT | 17 | 4432 |
| HSV1-UL30-1495 | + | TGGGCCACGATCACGTA | 17 | 4433 |
| HSV1-UL30-1496 | + | GGGCCACGATCACGTAC | 17 | 4434 |
| HSV1-UL30-1497 | + | CGATCACGTACGGGATC | 17 | 4435 |
| HSV1-UL30-1498 | + | CGGGATCCGGTCCTTGA | 17 | 4436 |
| HSV1-UL30-1499 | + | ATCCGGTCCTTGATGGA | 17 | 4437 |
| HSV1-UL30-1500 | + | TCCGGTCCTTGATGGAC | 17 | 4438 |
| HSV1-UL30-1501 | + | TGGACGGGACCTGCGCG | 17 | 4439 |
| HSV1-UL30-1502 | + | ACGGGACCTGCGCGCGG | 17 | 4440 |
| HSV1-UL30-1503 | + | CGGGACCTGCGCGCGGC | 17 | 4441 |
| HSV1-UL30-1504 | + | GCTTGTAATACACCGTC | 17 | 4442 |
| HSV1-UL30-1505 | + | TGTAATACACCGTCAGG | 17 | 4443 |
| HSV1-UL30-1506 | + | GTAATACACCGTCAGGT | 17 | 4444 |
| HSV1-UL30-1507 | + | ACACCGTCAGGTGGGCC | 17 | 4445 |
| HSV1-UL30-1508 | + | GTGGGCCAGGCGCTTGT | 17 | 4446 |
| HSV1-UL30-1509 | + | TTGTTGGTGTACGCGCG | 17 | 4447 |
| HSV1-UL30-1510 | + | TGTTGGTGTACGCGCGC | 17 | 4448 |
| HSV1-UL30-1511 | + | CGGGTGTCTGCTCAGTT | 17 | 4449 |
| HSV1-UL30-1512 | + | GTGTCTGCTCAGTTCGG | 17 | 4450 |
| HSV1-UL30-1513 | + | TGCTCAGTTCGGCGGTG | 17 | 4451 |
| HSV1-UL30-1514 | + | CGGTGAGGACAAAGTCC | 17 | 4452 |
| HSV1-UL30-1515 | + | TCCTGGATGTCCCTCTC | 17 | 4453 |
| HSV1-UL30-1516 | + | CCTGGATGTCCCTCTCC | 17 | 4454 |
| HSV1-UL30-1517 | + | GATGTCCCTCTCCGGGT | 17 | 4455 |
| HSV1-UL30-1518 | + | GGTCGGTGATGCGCCGA | 17 | 4456 |
| HSV1-UL30-1519 | + | GTCGGTGATGCGCCGAT | 17 | 4457 |
| HSV1-UL30-1520 | + | GCCGATGGGCGTCTACG | 17 | 4458 |
| HSV1-UL30-1521 | + | ATGGGCGTCTACGAGGA | 17 | 4459 |
| HSV1-UL30-1522 | + | GAACGCCTGCAGTCCCT | 17 | 4460 |
| HSV1-UL30-1523 | + | AACGCCTGCAGTCCCTC | 17 | 4461 |
| HSV1-UL30-1524 | + | CCTGCAGTCCCTCGGGC | 17 | 4462 |
| HSV1-UL30-1525 | + | CTGCAGTCCCTCGGGCA | 17 | 4463 |
| HSV1-UL30-1526 | + | TGCAGTCCCTCGGGCAG | 17 | 4464 |
| HSV1-UL30-1527 | + | CGCCAGCCACTCCTCCG | 17 | 4465 |
| HSV1-UL30-1528 | + | GCCAGCCACTCCTCCGC | 17 | 4466 |
| HSV1-UL30-1529 | + | CCAGCCACTCCTCCGCG | 17 | 4467 |
| HSV1-UL30-1530 | + | CTCCTCCGCGGGGCGCT | 17 | 4468 |
| HSV1-UL30-1531 | + | GGGGCGCTCGGCTAACG | 17 | 4469 |
| HSV1-UL30-1532 | + | GCGCTCGGCTAACGCGG | 17 | 4470 |
| HSV1-UL30-1533 | + | TAACGCGGCGGCCGCTC | 17 | 4471 |
| HSV1-UL30-1534 | + | GGCGGCCGCTCCGGAGA | 17 | 4472 |
| HSV1-UL30-1535 | + | TATCGTCGTAAAACAGC | 17 | 4473 |
| HSV1-UL30-1536 | + | AAAACAGCAGGTCGACC | 17 | 4474 |
| HSV1-UL30-1537 | + | AAACAGCAGGTCGACCA | 17 | 4475 |
| HSV1-UL30-1538 | + | CAGGTCGACCAGGGCCC | 17 | 4476 |
| HSV1-UL30-1539 | + | GTCGACCAGGGCCCTGG | 17 | 4477 |
| HSV1-UL30-1540 | + | CCAGGGCCCTGGAGGTG | 17 | 4478 |
| HSV1-UL30-1541 | + | GCCGATGTACTTTTTCT | 17 | 4479 |
| HSV1-UL30-1542 | + | GGCGATCAGCAGCAGCT | 17 | 4480 |
| HSV1-UL30-1543 | + | TTCGCACTCGAGTTTGA | 17 | 4481 |
| HSV1-UL30-1544 | + | TCGCACTCGAGTTTGAT | 17 | 4482 |
| HSV1-UL30-1545 | + | CGCACTCGAGTTTGATG | 17 | 4483 |
| HSV1-UL30-1546 | + | GCACTCGAGTTTGATGG | 17 | 4484 |
| HSV1-UL30-1547 | + | CACTCGAGTTTGATGGG | 17 | 4485 |
| HSV1-UL30-1548 | + | ACAGCGCGCGCGAGATG | 17 | 4486 |
| HSV1-UL30-1549 | + | CGCCATCTTGTCGCCCA | 17 | 4487 |
| HSV1-UL30-1550 | + | GCCCACGGCCGTCAGCC | 17 | 4488 |
| HSV1-UL30-1551 | + | CACGGCCGTCAGCCCGG | 17 | 4489 |
| HSV1-UL30-1552 | + | TCAGCCCGGCGGCCGTG | 17 | 4490 |
| HSV1-UL30-1553 | + | CGGCGGCCGTGAGGCCG | 17 | 4491 |
| HSV1-UL30-1554 | + | GCGGCACAGCACAAAGA | 17 | 4492 |
| HSV1-UL30-1555 | + | CCCGTAGATGATGCGCA | 17 | 4493 |
| HSV1-UL30-1556 | + | GATGATGCGCATGGAAT | 17 | 4494 |
| HSV1-UL30-1557 | + | ATGATGCGCATGGAATA | 17 | 4495 |
| HSV1-UL30-1558 | + | GCGCATGGAATAGGGCC | 17 | 4496 |
| HSV1-UL30-1559 | + | CGCATGGAATAGGGCCC | 17 | 4497 |
| HSV1-UL30-1560 | + | GCATGGAATAGGGCCCG | 17 | 4498 |
| HSV1-UL30-1561 | + | CATGGAATAGGGCCCGG | 17 | 4499 |
| HSV1-UL30-1562 | + | CCCGGGGGCGCGCATGT | 17 | 4500 |
| HSV1-UL30-1563 | + | CGCATGTCGGCCGCCTC | 17 | 4501 |
| HSV1-UL30-1564 | + | GCATGTCGGCCGCCTCC | 17 | 4502 |
| HSV1-UL30-1565 | + | GGCCGCCTCCGGGAAAT | 17 | 4503 |
| HSV1-UL30-1566 | + | CCTCCGGGAAATCGGCC | 17 | 4504 |
| HSV1-UL30-1567 | + | GGCCAGGAGCTGTTCGA | 17 | 4505 |
| HSV1-UL30-1568 | + | AGGCCGCCCAGCGCGCG | 17 | 4506 |
| HSV1-UL30-1569 | + | GCGCGTGGACGTACTCG | 17 | 4507 |
| HSV1-UL30-1570 | + | CGCGTGGACGTACTCGC | 17 | 4508 |
| HSV1-UL30-1571 | + | TCGCGAGCAGCATCTCG | 17 | 4509 |
| HSV1-UL30-1572 | + | CAGCATCTCGCGGCCGA | 17 | 4510 |
| HSV1-UL30-1573 | + | GATGGTCGTCACCGTCG | 17 | 4511 |
| HSV1-UL30-1574 | + | CCGTCGCGGCAACGTGC | 17 | 4512 |
| HSV1-UL30-1575 | + | GCGGCAACGTGCAGGCA | 17 | 4513 |
| HSV1-UL30-1576 | + | CAACGTGCAGGCACGGC | 17 | 4514 |
| HSV1-UL30-1577 | + | GTTACACACGACCTTGA | 17 | 4515 |
| HSV1-UL30-1578 | + | ACACACGACCTTGATGG | 17 | 4516 |
| HSV1-UL30-1579 | + | CGGCCTGCTGCTTGTCC | 17 | 4517 |
| HSV1-UL30-1580 | + | CTGCTTGTCCAGGAGCA | 17 | 4518 |
| HSV1-UL30-1581 | + | CAGGAGCACGGCCTCCT | 17 | 4519 |
| HSV1-UL30-1582 | + | AGGAGCACGGCCTCCTC | 17 | 4520 |
| HSV1-UL30-1583 | + | GGAGCACGGCCTCCTCG | 17 | 4521 |
| HSV1-UL30-1584 | + | CCTCCTCGGGGCTGCTC | 17 | 4522 |
| HSV1-UL30-1585 | + | CTCCTCGGGGCTGCTCT | 17 | 4523 |
| HSV1-UL30-1586 | + | TCCTCGGGGCTGCTCTG | 17 | 4524 |
| HSV1-UL30-1587 | + | TCTGGGGAATCCGCGAG | 17 | 4525 |
| HSV1-UL30-1588 | + | GCGGATCTGCTTTCGCA | 17 | 4526 |
| HSV1-UL30-1589 | + | TGGCGAGCCAGTCCCGC | 17 | 4527 |
| HSV1-UL30-1590 | + | CGAGCCAGTCCCGCAGG | 17 | 4528 |
| HSV1-UL30-1591 | + | CCCGCAGGAGGATGCTG | 17 | 4529 |
| HSV1-UL30-1592 | + | GCAGGAGGATGCTGAGG | 17 | 4530 |
| HSV1-UL30-1593 | + | CCCCCACCTCGATCTCC | 17 | 4531 |
| HSV1-UL30-1594 | + | AGTCCTTGCCCGCCTCC | 17 | 4532 |
| HSV1-UL30-1595 | + | CAGGTGCGCCACTGCGT | 17 | 4533 |
| HSV1-UL30-1596 | + | CCACTGCGTCGGCCCTC | 17 | 4534 |
| HSV1-UL30-1597 | + | CACTGCGTCGGCCCTCA | 17 | 4535 |
| HSV1-UL30-1598 | + | AGAGCGTGCTGAAGCAC | 17 | 4536 |
| HSV1-UL30-1599 | + | TGCTGAAGCACAGGTTG | 17 | 4537 |
| HSV1-UL30-1600 | + | GCTGAAGCACAGGTTGT | 17 | 4538 |
| HSV1-UL30-1601 | + | AGCACAGGTTGTGGGCC | 17 | 4539 |
| HSV1-UL30-1602 | + | GTGGGCCTGGATGATGC | 17 | 4540 |
| HSV1-UL30-1603 | + | TGGGCCTGGATGATGCT | 17 | 4541 |
| HSV1-UL30-1604 | + | GGGCCTGGATGATGCTG | 17 | 4542 |
| HSV1-UL30-1605 | + | GGATGATGCTGGGGTAC | 17 | 4543 |
| HSV1-UL30-1606 | + | GATGCTGGGGTACAGGC | 17 | 4544 |
| HSV1-UL30-1607 | + | AAAGTCGAACACCACCA | 17 | 4545 |
| HSV1-UL30-1608 | + | AAGTCGAACACCACCAC | 17 | 4546 |
| HSV1-UL30-1609 | + | AGTCGAACACCACCACG | 17 | 4547 |
| HSV1-UL30-1610 | + | GGGGTTCACGTGAAACC | 17 | 4548 |
| HSV1-UL30-1611 | + | CACGTGAAACCCGGAAG | 17 | 4549 |
| HSV1-UL30-1612 | + | ACGTGAAACCCGGAAGT | 17 | 4550 |
| HSV1-UL30-1613 | + | CGTGAAACCCGGAAGTG | 17 | 4551 |
| HSV1-UL30-1614 | + | ACCCGGAAGTGGGGTCA | 17 | 4552 |
| HSV1-UL30-1615 | + | AGTGGGGTCAAGGACCC | 17 | 4553 |
| HSV1-UL30-1616 | + | CAAGGACCCTGGCCCCC | 17 | 4554 |
| HSV1-UL30-1617 | + | GTACCCCACGTGCCTGC | 17 | 4555 |
| HSV1-UL30-1618 | + | CCCCACGTGCCTGCCGG | 17 | 4556 |
| HSV1-UL30-1619 | + | GTCTCCCGCGCGCCCTC | 17 | 4557 |
| HSV1-UL30-1620 | + | TCCTCCCCCTCCTCCTC | 17 | 4558 |
| HSV1-UL30-1621 | + | GCCGCTCCTCGTCCTCC | 17 | 4559 |
| HSV1-UL30-1622 | + | CCGCTCCTCGTCCTCCC | 17 | 4560 |
| HSV1-UL30-1623 | + | CTCGTCCTCCCGGGCTG | 17 | 4561 |
| HSV1-UL30-1624 | + | TCCTCCCGGGCTGCGGC | 17 | 4562 |
| HSV1-UL30-1625 | + | GGCTGCGGCCGGACGCT | 17 | 4563 |
| HSV1-UL30-1626 | + | GCTGCGGCCGGACGCTT | 17 | 4564 |
| HSV1-UL30-1627 | + | CTTGGGCGCCTCCCCCC | 17 | 4565 |
| HSV1-UL30-1628 | + | CGCCCCTAAATCGCCCC | 17 | 4566 |
| HSV1-UL30-1629 | + | GCCCCTAAATCGCCCCT | 17 | 4567 |
| HSV1-UL30-1630 | + | AATCGCCCCTGGGTGTC | 17 | 4568 |
| HSV1-UL30-1631 | + | GCAGAATAAAGCCCTTC | 17 | 4569 |
| HSV1-UL30-1632 | + | AATAAAGCCCTTCTGGT | 17 | 4570 |
| HSV1-UL30-1633 | + | AGCCCTTCTGGTCGGCC | 17 | 4571 |
| HSV1-UL30-1634 | + | GGTCGGCCAGGCGCAGC | 17 | 4572 |
| HSV1-UL30-1635 | + | GCAGGCACGTAAAGACG | 17 | 4573 |
| HSV1-UL30-1636 | + | TAAAGACGCGGATCTGC | 17 | 4574 |
| HSV1-UL30-1637 | + | CTGCTGGCCGTCGTAGA | 17 | 4575 |
| HSV1-UL30-1638 | + | GGCCGTCGTAGATGGTG | 17 | 4576 |
| HSV1-UL30-1639 | + | GCCGTCGTAGATGGTGC | 17 | 4577 |
| HSV1-UL30-1640 | + | ACCCGCCAAGCGCGCGA | 17 | 4578 |
| HSV1-UL30-1641 | + | CGGCCGAGAGCTCCAGA | 17 | 4579 |
| HSV1-UL30-1642 | + | GGCCGAGAGCTCCAGAT | 17 | 4580 |
| HSV1-UL30-1643 | + | GCCGAGAGCTCCAGATG | 17 | 4581 |
| HSV1-UL30-1644 | + | AAAACTTAAAAAACAGC | 17 | 4582 |
| HSV1-UL30-1645 | + | ACAGCTGGCCCACCAGC | 17 | 4583 |
| HSV1-UL30-1646 | + | CAGCTGGCCCACCAGCA | 17 | 4584 |
| HSV1-UL30-1647 | + | GATCACCCCGCGTTGCG | 17 | 4585 |
| HSV1-UL30-1648 | + | ATCACCCCGCGTTGCGC | 17 | 4586 |
| HSV1-UL30-1649 | + | CCCGCGTTGCGCGGGCC | 17 | 4587 |
| HSV1-UL30-1650 | + | GCGTTGCGCGGGCCCGG | 17 | 4588 |
| HSV1-UL30-1651 | + | GGGCCCGGCGGCGTAGT | 17 | 4589 |
| HSV1-UL30-1652 | + | CCCGGCGGCGTAGTAGG | 17 | 4590 |
| HSV1-UL30-1653 | + | CCGGCGGCGTAGTAGGC | 17 | 4591 |
| HSV1-UL30-1654 | + | CGGCGGCGTAGTAGGCG | 17 | 4592 |
| HSV1-UL30-1655 | + | GGATGTCGCGATAGCTC | 17 | 4593 |
| HSV1-UL30-1656 | + | CCTTCTTCTTGTCCTTC | 17 | 4594 |
| HSV1-UL30-1657 | + | CTTCTTGTCCTTCAGGA | 17 | 4595 |
| HSV1-UL30-1658 | + | GTCCTTCAGGACGGCTT | 17 | 4596 |
| HSV1-UL30-1659 | + | CAGGACGGCTTCGGCCA | 17 | 4597 |
| HSV1-UL30-1660 | + | CGAGAGCTTGATCTTGT | 17 | 4598 |
| HSV1-UL30-1661 | + | TTATCTTGCTGCGCTTC | 17 | 4599 |
| HSV1-UL30-1662 | + | TGCTGCGCTTCTGGAAG | 17 | 4600 |
| HSV1-UL30-1663 | + | GCTTCTGGAAGTGGCTC | 17 | 4601 |
| HSV1-UL30-1664 | + | ACACGCGAAACACGCCC | 17 | 4602 |
| HSV1-UL30-1665 | + | CGCCCCGGCCGTTCATG | 17 | 4603 |
| HSV1-UL30-1666 | + | TGCGGCCGTACCCGTCC | 17 | 4604 |
| HSV1-UL30-1667 | + | GCGGCCGTACCCGTCCA | 17 | 4605 |
| HSV1-UL30-1668 | + | CGGCCGTACCCGTCCAG | 17 | 4606 |
| HSV1-UL30-1669 | + | GGCCGTACCCGTCCAGG | 17 | 4607 |
| HSV1-UL30-1670 | + | GTAAATGTCCGTCAGCT | 17 | 4608 |
| HSV1-UL30-1671 | + | CAGCTTGGCCAGCAAGA | 17 | 4609 |
| HSV1-UL30-1672 | + | AGCTTGGCCAGCAAGAA | 17 | 4610 |
| HSV1-UL30-1673 | + | GTTGATGATGTTGTACC | 17 | 4611 |
| HSV1-UL30-1674 | + | GTACCCGGTCACGAACT | 17 | 4612 |
| HSV1-UL30-1675 | + | TACCCGGTCACGAACTC | 17 | 4613 |
| HSV1-UL30-1676 | + | ACCCGGTCACGAACTCG | 17 | 4614 |
| HSV1-UL30-1677 | + | GGCCGTACTGTTTCACA | 17 | 4615 |
| HSV1-UL30-1678 | + | GCCGTACTGTTTCACAA | 17 | 4616 |
| HSV1-UL30-1679 | + | TTTCACAAGGGTCATGA | 17 | 4617 |
| HSV1-UL30-1680 | + | GTCGAATTCCAGAACCA | 17 | 4618 |
| HSV1-UL30-1681 | + | TCGAATTCCAGAACCAC | 17 | 4619 |
| HSV1-UL30-1682 | + | TTCCAGAACCACGGGCG | 17 | 4620 |
| HSV1-UL30-1683 | + | TCCAGAACCACGGGCGT | 17 | 4621 |
| HSV1-UL30-1684 | + | GAACCACGGGCGTGGGC | 17 | 4622 |
| HSV1-UL30-1685 | + | GGGCGTGGGCAGGCCCC | 17 | 4623 |
| HSV1-UL30-1686 | + | TGGCCGCCAGCTCGTTC | 17 | 4624 |
| HSV1-UL30-1687 | + | CCGCCAGCTCGTTCAGG | 17 | 4625 |
| HSV1-UL30-1688 | + | CGCCAGCTCGTTCAGGT | 17 | 4626 |
| HSV1-UL30-1689 | + | CTCGTTCAGGTGGGATT | 17 | 4627 |
| HSV1-UL30-1690 | + | TCGTTCAGGTGGGATTC | 17 | 4628 |
| HSV1-UL30-1691 | + | CGTTCAGGTGGGATTCG | 17 | 4629 |
| HSV1-UL30-1692 | + | TCAGGTGGGATTCGGGG | 17 | 4630 |
| HSV1-UL30-1693 | + | GGATTCGGGGAGGTCGC | 17 | 4631 |
| HSV1-UL30-1694 | + | AGGAACCGAGCGAAAAC | 17 | 4632 |
| HSV1-UL30-1695 | + | AACCGAGCGAAAACAGG | 17 | 4633 |
| HSV1-UL30-1696 | + | ACAGGAGGACGTGCTCC | 17 | 4634 |
| HSV1-UL30-1697 | + | CAGGAGGACGTGCTCCA | 17 | 4635 |
| HSV1-UL30-1698 | + | GAGGACGTGCTCCAGGG | 17 | 4636 |
| HSV1-UL30-1699 | + | GACGTGCTCCAGGGCGG | 17 | 4637 |
| HSV1-UL30-1700 | + | GTGCTCCAGGGCGGTGG | 17 | 4638 |
| HSV1-UL30-1701 | + | CCAGGGCGGTGGTGGAC | 17 | 4639 |
| HSV1-UL30-1702 | + | CAGGTCGTAGAGCAGAC | 17 | 4640 |
| HSV1-UL30-1703 | + | AGAGCAGACAGGATATC | 17 | 4641 |
| HSV1-UL30-1704 | + | AGGATATCTGGATGACC | 17 | 4642 |
| HSV1-UL30-1705 | + | TGGATGACCAGGTCCTC | 17 | 4643 |
| HSV1-UL30-1706 | + | GGATGACCAGGTCCTCC | 17 | 4644 |
| HSV1-UL30-1707 | + | CAGGTCCTCCGGGTGCC | 17 | 4645 |
| HSV1-UL30-1708 | + | TCCGGGTGCCCGGCCAC | 17 | 4646 |
| HSV1-UL30-1709 | + | GTGCCCGGCCACCGGAA | 17 | 4647 |
| HSV1-UL30-1710 | + | CACATGAGCTTGTATGC | 17 | 4648 |
| HSV1-UL30-1711 | + | TGAGCTTGTATGCCGGT | 17 | 4649 |
| HSV1-UL30-1712 | + | GCTCATGCCCCCCTCGA | 17 | 4650 |
| HSV1-UL30-1713 | + | TGCCCCCCTCGATGGCC | 17 | 4651 |
| HSV1-UL30-1714 | + | GTTAAACTCGACGTCGC | 17 | 4652 |
| HSV1-UL30-1715 | + | GTCGCTGGATGTCCCGA | 17 | 4653 |
| HSV1-UL30-1716 | + | GATGTCCCGAAGGCCAT | 17 | 4654 |
| HSV1-UL30-1717 | + | ATGTCCCGAAGGCCATC | 17 | 4655 |
| HSV1-UL30-1718 | + | TGTCCCGAAGGCCATCG | 17 | 4656 |
| HSV1-UL30-1719 | + | AAGGCCATCGGGGCCGC | 17 | 4657 |
| HSV1-UL30-1720 | + | CCATCGGGGCCGCCGGC | 17 | 4658 |
| HSV1-UL30-1721 | + | CATCGGGGCCGCCGGCT | 17 | 4659 |
| HSV1-UL30-1722 | + | GGGCTAGCGTGTTGTTC | 17 | 4660 |
| HSV1-UL30-1723 | + | AGCGTGTTGTTCCGGCC | 17 | 4661 |
| HSV1-UL30-1724 | + | TCCGGCCCGGTTTGAGA | 17 | 4662 |
| HSV1-UL30-1725 | + | GAGACGGTACCAGCCGA | 17 | 4663 |
| HSV1-UL30-1726 | + | GCCGAAGGTGACGAACC | 17 | 4664 |
| HSV1-UL30-1727 | + | CCGAAGGTGACGAACCC | 17 | 4665 |
| HSV1-UL30-1728 | + | CGAAGGTGACGAACCCG | 17 | 4666 |
| HSV1-UL30-1729 | + | CGAACCCGGGGTTGTCC | 17 | 4667 |
| HSV1-UL30-1730 | + | GGTTGTCCAGGATGAAC | 17 | 4668 |
| HSV1-UL30-1731 | + | GTTGTCCAGGATGAACC | 17 | 4669 |
| HSV1-UL30-1732 | + | GTCCAGGATGAACCGGG | 17 | 4670 |
| HSV1-UL30-1733 | + | CAGGATGAACCGGGTGG | 17 | 4671 |
| HSV1-UL30-1734 | + | ACCCTCGTACTTCTTGA | 17 | 4672 |
| HSV1-UL30-1735 | + | TCGTACTTCTTGATGGC | 17 | 4673 |
| HSV1-UL30-1736 | + | CGTACTTCTTGATGGCC | 17 | 4674 |
| HSV1-UL30-1737 | + | GGCAGAAGTTGTCGCAC | 17 | 4675 |
| HSV1-UL30-1738 | + | ACAGCACACGCCCGCTT | 17 | 4676 |
| HSV1-UL30-1739 | + | CGCTTCGGACGTAGACG | 17 | 4677 |
| HSV1-UL30-1740 | + | GACGCGGTAAAACAGAG | 17 | 4678 |
| HSV1-UL30-1741 | + | ACGCGGTAAAACAGAGC | 17 | 4679 |
| HSV1-UL30-1742 | + | CGCGGTAAAACAGAGCG | 17 | 4680 |
| HSV1-UL30-1743 | + | CTCGTAGTAGTACACGT | 17 | 4681 |
| HSV1-UL30-1744 | + | CCACCTCCGCCTCGAAG | 17 | 4682 |
| HSV1-UL30-1745 | + | CGCCTCGAAGTGGTCCG | 17 | 4683 |
| HSV1-UL30-1746 | + | GGTCCGCGGAGATGCCG | 17 | 4684 |
| HSV1-UL30-1747 | + | CCGCGGAACGACGCGCC | 17 | 4685 |
| HSV1-UL30-1748 | + | CGCGGAACGACGCGCCC | 17 | 4686 |
| HSV1-UL30-1749 | + | GCGGAACGACGCGCCCG | 17 | 4687 |
| HSV1-UL30-1750 | + | CGCCCGGGGACTCGCGC | 17 | 4688 |
| HSV1-UL30-1751 | + | GCCCGGGGACTCGCGCA | 17 | 4689 |
| HSV1-UL30-1752 | + | GGACTCGCGCAGGGCCG | 17 | 4690 |
| HSV1-UL30-1753 | + | CGCTCGCAGAGATCTCG | 17 | 4691 |
| HSV1-UL30-1754 | + | GCTCGCAGAGATCTCGT | 17 | 4692 |
| HSV1-UL30-1755 | + | CTCGCAGAGATCTCGTG | 17 | 4693 |
| HSV1-UL30-1756 | + | AGAGATCTCGTGGGGCG | 17 | 4694 |
| HSV1-UL30-1757 | + | GTGGGGCGCGGCATTGT | 17 | 4695 |
| HSV1-UL30-1758 | + | CGTGCCGTAAACGTGAA | 17 | 4696 |
| HSV1-UL30-1759 | + | AAACGTGAACGGCCACC | 17 | 4697 |
| HSV1-UL30-1760 | + | CGTGAACGGCCACCCGG | 17 | 4698 |
| HSV1-UL30-1761 | + | GCCACCCGGTGGCCTTC | 17 | 4699 |
| HSV1-UL30-1762 | + | GGTGGCCTTCCGGAGTC | 17 | 4700 |
| HSV1-UL30-1763 | + | CTTCCGGAGTCAGGCCC | 17 | 4701 |
| HSV1-UL30-1764 | + | GCCCAGGAGCGTGATGA | 17 | 4702 |
| HSV1-UL30-1765 | + | GTGATGACGGTCCCCGT | 17 | 4703 |
| HSV1-UL30-1766 | + | GGTCCCCGTCGGTGTGA | 17 | 4704 |
| HSV1-UL30-1767 | + | CGTCCATAAACCGCGCG | 17 | 4705 |
| HSV1-UL30-1768 | + | GTCCATAAACCGCGCGT | 17 | 4706 |
| HSV1-UL30-1769 | + | TCCATAAACCGCGCGTG | 17 | 4707 |
| HSV1-UL30-1770 | + | CCATAAACCGCGCGTGG | 17 | 4708 |

[0737] Table 2D provides exemplary targeting domains for knocking out the UL30 gene selected according to the first tier parameters. The targeting domains are selected based on location within first 500 bp of the coding sequence of the UL30 gene. It is contemplated herein that the targeting domain hybridizes to the target domain through complementary base pairing. Any of the targeting domains in the table can be used with a S. aureus Cas9 molecule that gives double stranded cleavage. Any of the targeting domains in the table can be used with a S. aureus Cas9 single-stranded break nucleases (nickases). In an embodiment, dual targeting is used to create two nicks on opposite DNA strands by using S. aureus Cas9 nickases with two targeting domains that are complementary to opposite DNA strands, e.g., a gRNA comprising any minus strand targeting domain may be paired any gRNA comprising a plus strand targeting domain provided that the two gRNAs are oriented on the DNA such that PAMs face outward and the distance between the 5′ ends of the gRNAs is 0-50 bp.

TABLE 2D
1st Tier

| | | | Target Site | Seq |
|---|---|---|---|---|
| gRNA Name | DNA Strand | Targeting Domain | Length | ID |
| HSV1-UL30-237 | − | UGGCGGCGGCCCGCUGUCCC | 20 | 4709 |
| HSV1-UL30-1 | − | GGCGGCGGCCCGCUGUCCCC | 20 | 3232 |
| HSV1-UL30-239 | − | CGGCGGCCCGCUGUCCCCCG | 20 | 4710 |
| HSV1-UL30-2 | − | GGCGGCCCGCUGUCCCCCGG | 20 | 3233 |
| HSV1-UL30-241 | − | CCCGGAGGAAAGUCGGCGGC | 20 | 4711 |
| HSV1-UL30-242 | − | GUCGGCGGCCAGGGCGGCGU | 20 | 4712 |
| HSV1-UL30-243 | − | UUUUGCGCCCGCCGGCCCUC | 20 | 4713 |
| HSV1-UL30-11 | − | UUUGCGCCCGCCGGCCCUCG | 20 | 3125 |
| HSV1-UL30-245 | − | GCCGGCCCUCGCGGAGCCAG | 20 | 4714 |
| HSV1-UL30-12 | − | CCGGCCCUCGCGGAGCCAGC | 20 | 3240 |
| HSV1-UL30-13 | − | CGGCCCUCGCGGAGCCAGCC | 20 | 3241 |
| HSV1-UL30-248 | − | GCCGGGGACCCCCGCCUUGU | 20 | 4715 |
| HSV1-UL30-249 | − | CAACCCCUACCUCGCCCCAG | 20 | 4716 |
| HSV1-UL30-16 | − | AACCCCUACCUCGCCCCAGU | 20 | 3244 |
| HSV1-UL30-251 | − | UCGCCCCAGUCGGGACGCAA | 20 | 4717 |
| HSV1-UL30-252 | − | CGGGACGCAACAGAAGCCGA | 20 | 4718 |
| HSV1-UL30-253 | − | CCAGCGCCAUACGUACUAUA | 20 | 4719 |
| HSV1-UL30-254 | − | UACGUACUAUAGCGAAUGCG | 20 | 4720 |
| HSV1-UL30-255 | − | GAAUUUCGAUUCAUCGCCCC | 20 | 4721 |
| HSV1-UL30-256 | − | GAUUCAUCGCCCCGCGGGUG | 20 | 4722 |
| HSV1-UL30-257 | − | CAUCGCCCCGCGGGUGCUGG | 20 | 4723 |
| HSV1-UL30-258 | − | UCGCCCCGCGGGUGCUGGAC | 20 | 4724 |
| HSV1-UL30-259 | − | UGCUGGACGAGGAUGCCCCC | 20 | 4725 |
| HSV1-UL30-24 | − | GCUGGACGAGGAUGCCCCCC | 20 | 3247 |
| HSV1-UL30-261 | − | UGGACGAGGAUGCCCCCCCG | 20 | 4726 |
| HSV1-UL30-262 | − | UGCCCCCCCGGAGAAGCGCG | 20 | 4727 |
| HSV1-UL30-25 | − | GCCCCCCCGGAGAAGCGCGC | 20 | 3131 |
| HSV1-UL30-264 | − | GCGCGCCCCCAAGGUGUACU | 20 | 4728 |
| HSV1-UL30-30 | − | CGCGCCCCCAAGGUGUACUG | 20 | 3135 |
| HSV1-UL30-31 | − | GCGCCCCCAAGGUGUACUGC | 20 | 3136 |
| HSV1-UL30-32 | − | CGCCCCCAAGGUGUACUGCG | 20 | 3137 |
| HSV1-UL30-33 | − | GCCCCCAAGGUGUACUGCGG | 20 | 3138 |
| HSV1-UL30-34 | − | CCCCCAAGGUGUACUGCGGG | 20 | 3249 |
| HSV1-UL30-270 | − | CAAGGUGUACUGCGGGGGGG | 20 | 4729 |
| HSV1-UL30-271 | − | CGAGCGCGACGUCCUCCGCG | 20 | 4730 |
| HSV1-UL30-272 | − | GCGACGUCCUCCGCGUCGGG | 20 | 4731 |
| HSV1-UL30-273 | − | UGGCCGCGGCGCUCGCGCCU | 20 | 4732 |
| HSV1-UL30-43 | − | GGCCGCGGCGCUCGCGCCUG | 20 | 3253 |
| HSV1-UL30-275 | − | GCUCGCGCCUGUGGGGCGGC | 20 | 4733 |
| HSV1-UL30-276 | − | GCGGCGUGGACCACGCCCCG | 20 | 4734 |
| HSV1-UL30-49 | − | CGGCGUGGACCACGCCCCGG | 20 | 3259 |
| HSV1-UL30-278 | − | UCUUUCACGUGUACGACAUC | 20 | 4735 |
| HSV1-UL30-52 | − | CUUUCACGUGUACGACAUCC | 20 | 3146 |
| HSV1-UL30-280 | − | UUCACGUGUACGACAUCCUG | 20 | 4736 |
| HSV1-UL30-281 | − | UGUACGACAUCCUGGAGAAC | 20 | 4737 |
| HSV1-UL30-53 | − | GUACGACAUCCUGGAGAACG | 20 | 3147 |
| HSV1-UL30-283 | − | CGGCGGCCCGCUGUCCC | 17 | 4738 |
| HSV1-UL30-119 | − | GGCGGCCCGCUGUCCCC | 17 | 3295 |
| HSV1-UL30-285 | − | CGGCCCGCUGUCCCCCG | 17 | 4739 |
| HSV1-UL30-120 | − | GGCCCGCUGUCCCCCGG | 17 | 3296 |
| HSV1-UL30-287 | − | GGAGGAAAGUCGGCGGC | 17 | 4740 |
| HSV1-UL30-288 | − | GGCGGCCAGGGCGGCGU | 17 | 4741 |
| HSV1-UL30-289 | − | UGCGCCCGCCGGCCCUC | 17 | 4742 |
| HSV1-UL30-129 | − | GCGCCCGCCGGCCCUCG | 17 | 3302 |
| HSV1-UL30-291 | − | GGCCCUCGCGGAGCCAG | 17 | 4743 |
| HSV1-UL30-130 | − | GCCCUCGCGGAGCCAGC | 17 | 3303 |
| HSV1-UL30-131 | − | CCCUCGCGGAGCCAGCC | 17 | 3304 |
| HSV1-UL30-294 | − | GGGGACCCCCGCCUUGU | 17 | 4744 |
| HSV1-UL30-295 | − | CCCCUACCUCGCCCCAG | 17 | 4745 |
| HSV1-UL30-134 | − | CCCUACCUCGCCCCAGU | 17 | 3307 |
| HSV1-UL30-297 | − | CCCCAGUCGGGACGCAA | 17 | 4746 |
| HSV1-UL30-298 | − | GACGCAACAGAAGCCGA | 17 | 4747 |
| HSV1-UL30-299 | − | GCGCCAUACGUACUAUA | 17 | 4748 |
| HSV1-UL30-300 | − | GUACUAUAGCGAAUGCG | 17 | 4749 |
| HSV1-UL30-301 | − | UUUCGAUUCAUCGCCCC | 17 | 4750 |
| HSV1-UL30-302 | − | UCAUCGCCCCGCGGGUG | 17 | 4751 |
| HSV1-UL30-303 | − | CGCCCCGCGGGUGCUGG | 17 | 4752 |
| HSV1-UL30-304 | − | CCCCGCGGGUGCUGGAC | 17 | 4753 |
| HSV1-UL30-305 | − | UGGACGAGGAUGCCCCC | 17 | 4754 |
| HSV1-UL30-142 | − | GGACGAGGAUGCCCCCC | 17 | 3310 |
| HSV1-UL30-307 | − | ACGAGGAUGCCCCCCCG | 17 | 4755 |
| HSV1-UL30-308 | − | CCCCCCGGAGAAGCGCG | 17 | 4756 |
| HSV1-UL30-143 | − | CCCCCGGAGAAGCGCGC | 17 | 3311 |
| HSV1-UL30-310 | − | CGCCCCCAAGGUGUACU | 17 | 4757 |
| HSV1-UL30-148 | − | GCCCCCAAGGUGUACUG | 17 | 3189 |
| HSV1-UL30-149 | − | CCCCCAAGGUGUACUGC | 17 | 3313 |
| HSV1-UL30-150 | − | CCCCAAGGUGUACUGCG | 17 | 3190 |
| HSV1-UL30-151 | − | CCCAAGGUGUACUGCGG | 17 | 3314 |
| HSV1-UL30-152 | − | CCAAGGUGUACUGCGGG | 17 | 3315 |
| HSV1-UL30-316 | − | GGUGUACUGCGGGGGGG | 17 | 4758 |
| HSV1-UL30-317 | − | GCGCGACGUCCUCCGCG | 17 | 4759 |
| HSV1-UL30-318 | − | ACGUCCUCCGCGUCGGG | 17 | 4760 |
| HSV1-UL30-319 | − | CCGCGGCGCUCGCGCCU | 17 | 4761 |
| HSV1-UL30-161 | − | CGCGGCGCUCGCGCCUG | 17 | 3320 |
| HSV1-UL30-321 | − | CGCGCCUGUGGGGCGGC | 17 | 4762 |
| HSV1-UL30-322 | − | GCGUGGACCACGCCCCG | 17 | 4763 |
| HSV1-UL30-167 | − | CGUGGACCACGCCCCGG | 17 | 3197 |
| HSV1-UL30-324 | − | UUCACGUGUACGACAUC | 17 | 4764 |
| HSV1-UL30-170 | − | UCACGUGUACGACAUCC | 17 | 3200 |
| HSV1-UL30-326 | − | ACGUGUACGACAUCCUG | 17 | 4765 |
| HSV1-UL30-327 | − | ACGACAUCCUGGAGAAC | 17 | 4766 |
| HSV1-UL30-171 | − | CGACAUCCUGGAGAACG | 17 | 3201 |
| HSV1-UL30-329 | + | UACGCGUGCUCCACGUUCUC | 20 | 4767 |
| HSV1-UL30-330 | + | UUCUCCAGGAUGUCGUACAC | 20 | 4768 |
| HSV1-UL30-331 | + | ACACGUGAAAGACGGUGACG | 20 | 4769 |
| HSV1-UL30-59 | + | CACGUGAAAGACGGUGACGG | 20 | 3262 |
| HSV1-UL30-333 | + | GAAAGACGGUGACGGUGGGG | 20 | 4770 |
| HSV1-UL30-334 | + | GACGGUGGGGUUGAACCCCG | 20 | 4771 |
| HSV1-UL30-62 | + | ACGGUGGGGUUGAACCCCGC | 20 | 3152 |
| HSV1-UL30-336 | + | GUCCACGCCGCCCCACAGGC | 20 | 4772 |
| HSV1-UL30-337 | + | ACAGGCGCGAGCGCCGCGGC | 20 | 4773 |
| HSV1-UL30-338 | + | CAGAAGCCGCCCGACCCGAC | 20 | 4774 |
| HSV1-UL30-68 | + | AGAAGCCGCCCGACCCGACG | 20 | 3155 |
| HSV1-UL30-340 | + | AAGCCGCCCGACCCGACGCG | 20 | 4775 |
| HSV1-UL30-341 | + | CGUCCCCCCCGCAGUACACC | 20 | 4776 |
| HSV1-UL30-70 | + | GUCCCCCCCGCAGUACACCU | 20 | 3157 |
| HSV1-UL30-71 | + | UCCCCCCCGCAGUACACCUU | 20 | 3267 |
| HSV1-UL30-344 | + | AGUACACCUUGGGGGCGCGC | 20 | 4777 |
| HSV1-UL30-345 | + | GUGCACCCCGGCGCGCUUCU | 20 | 4778 |
| HSV1-UL30-76 | + | UGCACCCCGGCGCGCUUCUC | 20 | 3270 |
| HSV1-UL30-77 | + | GCACCCCGGCGCGCUUCUCC | 20 | 3271 |
| HSV1-UL30-78 | + | CACCCCGGCGCGCUUCUCCG | 20 | 3272 |
| HSV1-UL30-79 | + | ACCCCGGCGCGCUUCUCCGG | 20 | 3273 |
| HSV1-UL30-350 | + | GGCAUCCUCGUCCAGCACCC | 20 | 4779 |
| HSV1-UL30-82 | + | GCAUCCUCGUCCAGCACCCG | 20 | 3161 |
| HSV1-UL30-352 | + | CGUCCAGCACCCGCGGGGCG | 20 | 4780 |
| HSV1-UL30-353 | + | AGCACCCGCGGGGCGAUGAA | 20 | 4781 |
| HSV1-UL30-354 | + | UCGCUAUAGUACGUAUGGCG | 20 | 4782 |
| HSV1-UL30-355 | + | CGGCUUCUGUUGCGUCCCGA | 20 | 4783 |
| HSV1-UL30-91 | + | GGCUUCUGUUGCGUCCCGAC | 20 | 3166 |
| HSV1-UL30-357 | + | UCUGUUGCGUCCCGACUGGG | 20 | 4784 |
| HSV1-UL30-358 | + | GCGUCCCGACUGGGGCGAGG | 20 | 4785 |
| HSV1-UL30-95 | + | CGUCCCGACUGGGGCGAGGU | 20 | 3170 |
| HSV1-UL30-360 | + | AAAGUUUUGCCUCAAACAAG | 20 | 4786 |
| HSV1-UL30-99 | + | AAGUUUUGCCUCAAACAAGG | 20 | 3282 |
| HSV1-UL30-100 | + | AGUUUUGCCUCAAACAAGGC | 20 | 3283 |
| HSV1-UL30-363 | + | GGGGGUCCCCGGCUGGCUCC | 20 | 4787 |
| HSV1-UL30-364 | + | GGGUCCCCGGCUGGCUCCGC | 20 | 4788 |
| HSV1-UL30-365 | + | GGCUGGCUCCGCGAGGGCCG | 20 | 4789 |
| HSV1-UL30-366 | + | GGCCGGCGGGCGCAAAAAAC | 20 | 4790 |
| HSV1-UL30-367 | + | CCCUGGCCGCCGACUUUCCU | 20 | 4791 |
| HSV1-UL30-112 | + | CCUGGCCGCCGACUUUCCUC | 20 | 3290 |
| HSV1-UL30-113 | + | CUGGCCGCCGACUUUCCUCC | 20 | 3291 |
| HSV1-UL30-114 | + | UGGCCGCCGACUUUCCUCCG | 20 | 3176 |
| HSV1-UL30-371 | + | CGACUUUCCUCCGGGGGACA | 20 | 4792 |
| HSV1-UL30-372 | + | GGGACAGCGGGCCGCCGCCA | 20 | 4793 |
| HSV1-UL30-118 | + | GGACAGCGGGCCGCCGCCAC | 20 | 3294 |
| HSV1-UL30-374 | + | GCGUGCUCCACGUUCUC | 17 | 4794 |
| HSV1-UL30-375 | + | UCCAGGAUGUCGUACAC | 17 | 4795 |
| HSV1-UL30-376 | + | CGUGAAAGACGGUGACG | 17 | 4796 |
| HSV1-UL30-177 | + | GUGAAAGACGGUGACGG | 17 | 3327 |
| HSV1-UL30-378 | + | AGACGGUGACGGUGGGG | 17 | 4797 |
| HSV1-UL30-379 | + | GGUGGGGUUGAACCCCG | 17 | 4798 |
| HSV1-UL30-180 | + | GUGGGGUUGAACCCCGC | 17 | 3329 |
| HSV1-UL30-381 | + | CACGCCGCCCCACAGGC | 17 | 4799 |
| HSV1-UL30-382 | + | GGCGCGAGCGCCGCGGC | 17 | 4800 |
| HSV1-UL30-383 | + | AAGCCGCCCGACCCGAC | 17 | 4801 |
| HSV1-UL30-186 | + | AGCCGCCCGACCCGACG | 17 | 3207 |
| HSV1-UL30-385 | + | CCGCCCGACCCGACGCG | 17 | 4802 |
| HSV1-UL30-386 | + | CCCCCCCGCAGUACACC | 17 | 4803 |
| HSV1-UL30-188 | + | CCCCCCGCAGUACACCU | 17 | 3209 |
| HSV1-UL30-189 | + | CCCCCGCAGUACACCUU | 17 | 3210 |
| HSV1-UL30-389 | + | ACACCUUGGGGGCGCGC | 17 | 4804 |
| HSV1-UL30-390 | + | CACCCCGGCGCGCUUCU | 17 | 4805 |
| HSV1-UL30-194 | + | ACCCCGGCGCGCUUCUC | 17 | 3335 |
| HSV1-UL30-195 | + | CCCCGGCGCGCUUCUCC | 17 | 3336 |
| HSV1-UL30-196 | + | CCCGGCGCGCUUCUCCG | 17 | 3213 |
| HSV1-UL30-197 | + | CCGGCGCGCUUCUCCGG | 17 | 3214 |
| HSV1-UL30-395 | + | AUCCUCGUCCAGCACCC | 17 | 4806 |
| HSV1-UL30-200 | + | UCCUCGUCCAGCACCCG | 17 | 3337 |
| HSV1-UL30-397 | + | CCAGCACCCGCGGGGCG | 17 | 4807 |
| HSV1-UL30-398 | + | ACCCGCGGGGCGAUGAA | 17 | 4808 |
| HSV1-UL30-399 | + | CUAUAGUACGUAUGGCG | 17 | 4809 |
| HSV1-UL30-400 | + | CUUCUGUUGCGUCCCGA | 17 | 4810 |
| HSV1-UL30-209 | + | UUCUGUUGCGUCCCGAC | 17 | 3222 |
| HSV1-UL30-402 | + | GUUGCGUCCCGACUGGG | 17 | 4811 |
| HSV1-UL30-403 | + | UCCCGACUGGGGCGAGG | 17 | 4812 |
| HSV1-UL30-213 | + | CCCGACUGGGGCGAGGU | 17 | 3341 |
| HSV1-UL30-405 | + | GUUUUGCCUCAAACAAG | 17 | 4813 |
| HSV1-UL30-217 | + | UUUUGCCUCAAACAAGG | 17 | 3344 |
| HSV1-UL30-218 | + | UUUGCCUCAAACAAGGC | 17 | 3345 |
| HSV1-UL30-408 | + | GGUCCCCGGCUGGCUCC | 17 | 4814 |
| HSV1-UL30-409 | + | UCCCCGGCUGGCUCCGC | 17 | 4815 |
| HSV1-UL30-410 | + | UGGCUCCGCGAGGGCCG | 17 | 4816 |
| HSV1-UL30-411 | + | CGGCGGGCGCAAAAAAC | 17 | 4817 |
| HSV1-UL30-412 | + | UGGCCGCCGACUUUCCU | 17 | 4818 |
| HSV1-UL30-230 | + | GGCCGCCGACUUUCCUC | 17 | 3228 |
| HSV1-UL30-231 | + | GCCGCCGACUUUCCUCC | 17 | 3229 |
| HSV1-UL30-232 | + | CCGCCGACUUUCCUCCG | 17 | 3230 |
| HSV1-UL30-416 | + | CUUUCCUCCGGGGGACA | 17 | 4819 |
| HSV1-UL30-417 | + | ACAGCGGGCCGCCGCCA | 17 | 4820 |
| HSV1-UL30-236 | + | CAGCGGGCCGCCGCCAC | 17 | 3358 |

[0738] Table 2E provides exemplary targeting domains for knocking out the UL30 gene selected according to the second tier parameters. The targeting domains are selected based on location within the coding sequence (but downstream of the first 500 bp) of the UL30 gene. It is contemplated herein that the targeting domain hybridizes to the target domain through complementary base pairing. Any of the targeting domains in the table can be used with a S. aureus Cas9 molecule that gives double stranded cleavage. Any of the targeting domains in the table can be used with a S. aureus Cas9 single-stranded break nucleases (nickases). In an embodiment, dual targeting is used to create two nicks on opposite DNA strands by using S. aureus Cas9 nickases with two targeting domains that are complementary to opposite DNA strands, e.g., a gRNA comprising any minus strand targeting domain may be paired any gRNA comprising a plus strand targeting domain provided that the two gRNAs are oriented on the DNA such that PAMs face outward and the distance between the 5′ ends of the gRNAs is 0-50 bp.

TABLE 2E
2nd Tier

| | DNA | | Target Site | |
|---|---|---|---|---|
| gRNA Name | Strand | Targeting Domain | Length | Seq ID |
| HSV1-UL30-1771 | − | UUAUGGACGCCAUCACACCG | 20 | 4821 |
| HSV1-UL30-1772 | − | UAUGGACGCCAUCACACCGA | 20 | 4822 |
| HSV1-UL30-1773 | − | AUGGACGCCAUCACACCGAC | 20 | 4823 |
| HSV1-UL30-1774 | − | CGGGGACCGUCAUCACGCUC | 20 | 4824 |
| HSV1-UL30-1775 | − | UCACGCUCCUGGGCCUGACU | 20 | 4825 |
| HSV1-UL30-1776 | − | CACGCUCCUGGGCCUGACUC | 20 | 4826 |
| HSV1-UL30-1777 | − | GGCCUGACUCCGGAAGGCCA | 20 | 4827 |
| HSV1-UL30-1778 | − | GCACGCGGCAGUACUUUUAC | 20 | 4828 |
| HSV1-UL30-1779 | − | GGCAGUACUUUUACAUGAAC | 20 | 4829 |
| HSV1-UL30-1780 | − | GCAGUACUUUUACAUGAACA | 20 | 4830 |
| HSV1-UL30-1781 | − | AGUACUUUUACAUGAACAAG | 20 | 4831 |
| HSV1-UL30-1782 | − | GUACUUUUACAUGAACAAGG | 20 | 4832 |
| HSV1-UL30-1783 | − | CACCUACAAUGCCGCGCCCC | 20 | 4833 |
| HSV1-UL30-1784 | − | CCGCGCCCCACGAGAUCUCU | 20 | 4834 |
| HSV1-UL30-1785 | − | GCGCAUGGCCGCGGCCCUGC | 20 | 4835 |
| HSV1-UL30-1786 | − | CCGCGGCCCUGCGCGAGUCC | 20 | 4836 |
| HSV1-UL30-1787 | − | CGUCGUUCCGCGGCAUCUCC | 20 | 4837 |
| HSV1-UL30-1788 | − | CGGCAUCUCCGCGGACCACU | 20 | 4838 |
| HSV1-UL30-1789 | − | UCUCCGCGGACCACUUCGAG | 20 | 4839 |
| HSV1-UL30-1790 | − | CUCCGCGGACCACUUCGAGG | 20 | 4840 |
| HSV1-UL30-1791 | − | ACCACUUCGAGGCGGAGGUG | 20 | 4841 |
| HSV1-UL30-1792 | − | CCACUUCGAGGCGGAGGUGG | 20 | 4842 |
| HSV1-UL30-1793 | − | GCGCACCGACGUGUACUACU | 20 | 4843 |
| HSV1-UL30-1794 | − | CUGUUUUACCGCGUCUACGU | 20 | 4844 |
| HSV1-UL30-1795 | − | UUACCGCGUCUACGUCCGAA | 20 | 4845 |
| HSV1-UL30-1796 | − | ACAACUUCUGCCCGGCCAUC | 20 | 4846 |
| HSV1-UL30-1797 | − | CUGCCCGGCCAUCAAGAAGU | 20 | 4847 |
| HSV1-UL30-1798 | − | GCCCGGCCAUCAAGAAGUAC | 20 | 4848 |
| HSV1-UL30-1799 | − | GGCCAUCAAGAAGUACGAGG | 20 | 4849 |
| HSV1-UL30-1800 | − | GCCAUCAAGAAGUACGAGGG | 20 | 4850 |
| HSV1-UL30-1801 | − | ACGCCACCACCCGGUUCAUC | 20 | 4851 |
| HSV1-UL30-1802 | − | CCGGUUCAUCCUGGACAACC | 20 | 4852 |
| HSV1-UL30-1803 | − | UCGGCUGGUACCGUCUCAAA | 20 | 4853 |
| HSV1-UL30-1804 | − | UGGUACCGUCUCAAACCGGG | 20 | 4854 |
| HSV1-UL30-1805 | − | GGUACCGUCUCAAACCGGGC | 20 | 4855 |
| HSV1-UL30-1806 | − | GCCGGCGGCCCCGAUGGCCU | 20 | 4856 |
| HSV1-UL30-1807 | − | CCGGCGGCCCCGAUGGCCUU | 20 | 4857 |
| HSV1-UL30-1808 | − | CUUCGGGACAUCCAGCGACG | 20 | 4858 |
| HSV1-UL30-1809 | − | ACGUCGAGUUUAACUGUACG | 20 | 4859 |
| HSV1-UL30-1810 | − | UACGGCGGACAACCUGGCCA | 20 | 4860 |
| HSV1-UL30-1811 | − | CGGCGGACAACCUGGCCAUC | 20 | 4861 |
| HSV1-UL30-1812 | − | GGCGGACAACCUGGCCAUCG | 20 | 4862 |
| HSV1-UL30-1813 | − | GCGGACAACCUGGCCAUCGA | 20 | 4863 |
| HSV1-UL30-1814 | − | CGGACAACCUGGCCAUCGAG | 20 | 4864 |
| HSV1-UL30-1815 | − | ACCUGGCCAUCGAGGGGGGC | 20 | 4865 |
| HSV1-UL30-1816 | − | CAAGCUCAUGUGCUUCGAUA | 20 | 4866 |
| HSV1-UL30-1817 | − | GCUUCGAUAUCGAAUGCAAG | 20 | 4867 |
| HSV1-UL30-1818 | − | CUUCGAUAUCGAAUGCAAGG | 20 | 4868 |
| HSV1-UL30-1819 | − | UUCGAUAUCGAAUGCAAGGC | 20 | 4869 |
| HSV1-UL30-1820 | − | UCGAUAUCGAAUGCAAGGCG | 20 | 4870 |
| HSV1-UL30-1821 | − | CGAUAUCGAAUGCAAGGCGG | 20 | 4871 |
| HSV1-UL30-1822 | − | GAUAUCGAAUGCAAGGCGGG | 20 | 4872 |
| HSV1-UL30-1823 | − | AUAUCGAAUGCAAGGCGGGG | 20 | 4873 |
| HSV1-UL30-1824 | − | UAUCGAAUGCAAGGCGGGGG | 20 | 4874 |
| HSV1-UL30-1825 | − | UCGAAUGCAAGGCGGGGGGG | 20 | 4875 |
| HSV1-UL30-1826 | − | AUGCAAGGCGGGGGGGGAGG | 20 | 4876 |
| HSV1-UL30-1827 | − | CGAGCUGGCCUUUCCGGUGG | 20 | 4877 |
| HSV1-UL30-1828 | − | CCUUUCCGGUGGCCGGGCAC | 20 | 4878 |
| HSV1-UL30-1829 | − | CUUUCCGGUGGCCGGGCACC | 20 | 4879 |
| HSV1-UL30-1830 | − | UUCCGGUGGCCGGGCACCCG | 20 | 4880 |
| HSV1-UL30-1831 | − | ACGACCUGUCCACCACCGCC | 20 | 4881 |
| HSV1-UL30-1832 | − | CGACCUGUCCACCACCGCCC | 20 | 4882 |
| HSV1-UL30-1833 | − | GCUCGGUUCCUGCGACCUCC | 20 | 4883 |
| HSV1-UL30-1834 | − | GCGACCUCCCCGAAUCCCAC | 20 | 4884 |
| HSV1-UL30-1835 | − | CCUCCCCGAAUCCCACCUGA | 20 | 4885 |
| HSV1-UL30-1836 | − | CACCUGAACGAGCUGGCGGC | 20 | 4886 |
| HSV1-UL30-1837 | − | ACCUGAACGAGCUGGCGGCC | 20 | 4887 |
| HSV1-UL30-1838 | − | GCCUGCCCACGCCCGUGGUU | 20 | 4888 |
| HSV1-UL30-1839 | − | CCUGCCCACGCCCGUGGUUC | 20 | 4889 |
| HSV1-UL30-1840 | − | CGUGGUUCUGGAAUUCGACA | 20 | 4890 |
| HSV1-UL30-1841 | − | UCUGGAAUUCGACAGCGAAU | 20 | 4891 |
| HSV1-UL30-1842 | − | UGUUGGCCUUCAUGACCCUU | 20 | 4892 |
| HSV1-UL30-1843 | − | CCUUGUGAAACAGUACGGCC | 20 | 4893 |
| HSV1-UL30-1844 | − | GUACGGCCCCGAGUUCGUGA | 20 | 4894 |
| HSV1-UL30-1845 | − | CCUUCUUGCUGGCCAAGCUG | 20 | 4895 |
| HSV1-UL30-1846 | − | CGGACAUUUACAAGGUCCCC | 20 | 4896 |
| HSV1-UL30-1847 | − | CAUUUACAAGGUCCCCCUGG | 20 | 4897 |
| HSV1-UL30-1848 | − | CCCUGGACGGGUACGGCCGC | 20 | 4898 |
| HSV1-UL30-1849 | − | GGGUACGGCCGCAUGAACGG | 20 | 4899 |
| HSV1-UL30-1850 | − | GGUACGGCCGCAUGAACGGC | 20 | 4900 |
| HSV1-UL30-1851 | − | GGCCGGGGCGUGUUUCGCGU | 20 | 4901 |
| HSV1-UL30-1852 | − | GCCGGGGCGUGUUUCGCGUG | 20 | 4902 |
| HSV1-UL30-1853 | − | UUCGCGUGUGGGACAUAGGC | 20 | 4903 |
| HSV1-UL30-1854 | − | ACAUAGGCCAGAGCCACUUC | 20 | 4904 |
| HSV1-UL30-1855 | − | AGAAGCGCAGCAAGAUAAAG | 20 | 4905 |
| HSV1-UL30-1856 | − | AGAUAAAGGUGAACGGCAUG | 20 | 4906 |
| HSV1-UL30-1857 | − | CAUGGUGAACAUCGACAUGU | 20 | 4907 |
| HSV1-UL30-1858 | − | AUGGUGAACAUCGACAUGUA | 20 | 4908 |
| HSV1-UL30-1859 | − | UAACCGACAAGAUCAAGCUC | 20 | 4909 |
| HSV1-UL30-1860 | − | CUACAAGCUCAACGCCGUGG | 20 | 4910 |
| HSV1-UL30-1861 | − | ACGCCGUGGCCGAAGCCGUC | 20 | 4911 |
| HSV1-UL30-1862 | − | CCGUGGCCGAAGCCGUCCUG | 20 | 4912 |
| HSV1-UL30-1863 | − | CCGAAGCCGUCCUGAAGGAC | 20 | 4913 |
| HSV1-UL30-1864 | − | AAGCCGUCCUGAAGGACAAG | 20 | 4914 |
| HSV1-UL30-1865 | − | CCGUCCUGAAGGACAAGAAG | 20 | 4915 |
| HSV1-UL30-1866 | − | UGAAGGACAAGAAGAAGGAC | 20 | 4916 |
| HSV1-UL30-1867 | − | CAUCCCCGCCUACUACGCCG | 20 | 4917 |
| HSV1-UL30-1868 | − | CGCCGCCGGGCCCGCGCAAC | 20 | 4918 |
| HSV1-UL30-534 | − | GCCGCCGGGCCCGCGCAACG | 20 | 3472 |
| HSV1-UL30-1870 | − | CGCGCAACGCGGGGUGAUCG | 20 | 4919 |
| HSV1-UL30-1871 | − | UGAUCGGCGAGUACUGCAUA | 20 | 4920 |
| HSV1-UL30-1872 | − | GCAUACAGGAUUCCCUGCUG | 20 | 4921 |
| HSV1-UL30-1873 | − | UUUUUAAGUUUUUGCCCCAU | 20 | 4922 |
| HSV1-UL30-1874 | − | UUUUAAGUUUUUGCCCCAUC | 20 | 4923 |
| HSV1-UL30-1875 | − | UCUCGGCCGUCGCGCGCUUG | 20 | 4924 |
| HSV1-UL30-1876 | − | GCCUGCUGCGCCUGGCCGAC | 20 | 4925 |
| HSV1-UL30-1877 | − | UGCUGCGCCUGGCCGACCAG | 20 | 4926 |
| HSV1-UL30-1878 | − | ACCAGAAGGGCUUUAUUCUG | 20 | 4927 |
| HSV1-UL30-1879 | − | GCUUUAUUCUGCCGGACACC | 20 | 4928 |
| HSV1-UL30-1880 | − | CUUUAUUCUGCCGGACACCC | 20 | 4929 |
| HSV1-UL30-1881 | − | CCGGACACCCAGGGGCGAUU | 20 | 4930 |
| HSV1-UL30-1882 | − | CGGACACCCAGGGGCGAUUU | 20 | 4931 |
| HSV1-UL30-1883 | − | CCAGGGGCGAUUUAGGGGCG | 20 | 4932 |
| HSV1-UL30-1884 | − | CAGGGGCGAUUUAGGGGCGC | 20 | 4933 |
| HSV1-UL30-1885 | − | AGGGGCGAUUUAGGGGCGCC | 20 | 4934 |
| HSV1-UL30-1886 | − | GGGGCGAUUUAGGGGCGCCG | 20 | 4935 |
| HSV1-UL30-1887 | − | GGGCGAUUUAGGGGCGCCGG | 20 | 4936 |
| HSV1-UL30-1888 | − | GGCGAUUUAGGGGCGCCGGG | 20 | 4937 |
| HSV1-UL30-1889 | − | GCGAUUUAGGGGCGCCGGGG | 20 | 4938 |
| HSV1-UL30-1890 | − | CCCAAGCGUCCGGCCGCAGC | 20 | 4939 |
| HSV1-UL30-1891 | − | CCAAGCGUCCGGCCGCAGCC | 20 | 4940 |
| HSV1-UL30-1892 | − | CAAGCGUCCGGCCGCAGCCC | 20 | 4941 |
| HSV1-UL30-1893 | − | AGCGUCCGGCCGCAGCCCGG | 20 | 4942 |
| HSV1-UL30-1894 | − | UCCGGCCGCAGCCCGGGAGG | 20 | 4943 |
| HSV1-UL30-1895 | − | CGGCCGCAGCCCGGGAGGAC | 20 | 4944 |
| HSV1-UL30-569 | − | GGCCGCAGCCCGGGAGGACG | 20 | 3507 |
| HSV1-UL30-1897 | − | CCGGGAGGACGAGGAGCGGC | 20 | 4945 |
| HSV1-UL30-1898 | − | GGGAGGACGAGGAGCGGCCA | 20 | 4946 |
| HSV1-UL30-571 | − | GGAGGACGAGGAGCGGCCAG | 20 | 3509 |
| HSV1-UL30-1900 | − | AGGACGAGGAGCGGCCAGAG | 20 | 4947 |
| HSV1-UL30-572 | − | GGACGAGGAGCGGCCAGAGG | 20 | 3510 |
| HSV1-UL30-1902 | − | ACGAGGAGCGGCCAGAGGAG | 20 | 4948 |
| HSV1-UL30-573 | − | CGAGGAGCGGCCAGAGGAGG | 20 | 3511 |
| HSV1-UL30-574 | − | GAGGAGCGGCCAGAGGAGGA | 20 | 3512 |
| HSV1-UL30-575 | − | AGGAGCGGCCAGAGGAGGAG | 20 | 3513 |
| HSV1-UL30-576 | − | GGAGCGGCCAGAGGAGGAGG | 20 | 3514 |
| HSV1-UL30-1907 | − | AGCGGCCAGAGGAGGAGGGG | 20 | 4949 |
| HSV1-UL30-1908 | − | GCCAGAGGAGGAGGGGGAGG | 20 | 4950 |
| HSV1-UL30-1909 | − | CAGAGGAGGAGGGGGAGGAC | 20 | 4951 |
| HSV1-UL30-1910 | − | GGAGGAGGGGGAGGACGAGG | 20 | 4952 |
| HSV1-UL30-1911 | − | GGGGGAGGACGAGGACGAAC | 20 | 4953 |
| HSV1-UL30-1912 | − | GGGAGGACGAGGACGAACGC | 20 | 4954 |
| HSV1-UL30-579 | − | GGAGGACGAGGACGAACGCG | 20 | 3517 |
| HSV1-UL30-1914 | − | AGGACGAGGACGAACGCGAG | 20 | 4955 |
| HSV1-UL30-1915 | − | CGAGGACGAACGCGAGGAGG | 20 | 4956 |
| HSV1-UL30-582 | − | GAGGACGAACGCGAGGAGGG | 20 | 3520 |
| HSV1-UL30-583 | − | AGGACGAACGCGAGGAGGGC | 20 | 3521 |
| HSV1-UL30-1918 | − | CGAACGCGAGGAGGGCGGGG | 20 | 4957 |
| HSV1-UL30-1919 | − | CGCGAGGAGGGCGGGGGCGA | 20 | 4958 |
| HSV1-UL30-586 | − | GCGAGGAGGGCGGGGGCGAG | 20 | 3524 |
| HSV1-UL30-587 | − | CGAGGAGGGCGGGGGCGAGC | 20 | 3525 |
| HSV1-UL30-1922 | − | AGGGCGGGGGCGAGCGGGAG | 20 | 4959 |
| HSV1-UL30-588 | − | GGGCGGGGGCGAGCGGGAGC | 20 | 3526 |
| HSV1-UL30-1924 | − | GCGGGGGCGAGCGGGAGCCG | 20 | 4960 |
| HSV1-UL30-1925 | − | GAGCGGGAGCCGGAGGGCGC | 20 | 4961 |
| HSV1-UL30-591 | − | AGCGGGAGCCGGAGGGCGCG | 20 | 3529 |
| HSV1-UL30-592 | − | GCGGGAGCCGGAGGGCGCGC | 20 | 3530 |
| HSV1-UL30-1928 | − | GGGAGACCGCCGGCAGGCAC | 20 | 4962 |
| HSV1-UL30-595 | − | GGAGACCGCCGGCAGGCACG | 20 | 3533 |
| HSV1-UL30-1930 | − | CCGGCAGGCACGUGGGGUAC | 20 | 4963 |
| HSV1-UL30-1931 | − | CGGCAGGCACGUGGGGUACC | 20 | 4964 |
| HSV1-UL30-1932 | − | GGCAGGCACGUGGGGUACCA | 20 | 4965 |
| HSV1-UL30-1933 | − | CACGUGGGGUACCAGGGGGC | 20 | 4966 |
| HSV1-UL30-1934 | − | CAGGGUCCUUGACCCCACUU | 20 | 4967 |
| HSV1-UL30-1935 | − | ACCCCACUUCCGGGUUUCAC | 20 | 4968 |
| HSV1-UL30-1936 | − | UGUGCUUCAGCACGCUCUCC | 20 | 4969 |
| HSV1-UL30-1937 | − | UGCUUCAGCACGCUCUCCCU | 20 | 4970 |
| HSV1-UL30-1938 | − | GGGCCGACGCAGUGGCGCAC | 20 | 4971 |
| HSV1-UL30-1939 | − | GGCCGACGCAGUGGCGCACC | 20 | 4972 |
| HSV1-UL30-1940 | − | ACGCAGUGGCGCACCUGGAG | 20 | 4973 |
| HSV1-UL30-1941 | − | UGGCGCACCUGGAGGCGGGC | 20 | 4974 |
| HSV1-UL30-1942 | − | UGGAGGCGGGCAAGGACUAC | 20 | 4975 |
| HSV1-UL30-1943 | − | GGAGGCGGGCAAGGACUACC | 20 | 4976 |
| HSV1-UL30-1944 | − | GGGCAAGGACUACCUGGAGA | 20 | 4977 |
| HSV1-UL30-1945 | − | AGGACUACCUGGAGAUCGAG | 20 | 4978 |
| HSV1-UL30-1946 | − | GGACUACCUGGAGAUCGAGG | 20 | 4979 |
| HSV1-UL30-1947 | − | GACUACCUGGAGAUCGAGGU | 20 | 4980 |
| HSV1-UL30-1948 | − | ACUACCUGGAGAUCGAGGUG | 20 | 4981 |
| HSV1-UL30-1949 | − | CUACCUGGAGAUCGAGGUGG | 20 | 4982 |
| HSV1-UL30-1950 | − | UUCUUCGUCAAGGCUCACGU | 20 | 4983 |
| HSV1-UL30-1951 | − | CUUCGUCAAGGCUCACGUGC | 20 | 4984 |
| HSV1-UL30-1952 | − | UCGUCAAGGCUCACGUGCGA | 20 | 4985 |
| HSV1-UL30-1953 | − | AGCCUCCUCAGCAUCCUCCU | 20 | 4986 |
| HSV1-UL30-1954 | − | GCCUCCUCAGCAUCCUCCUG | 20 | 4987 |
| HSV1-UL30-1955 | − | CUGCGGGACUGGCUCGCCAU | 20 | 4988 |
| HSV1-UL30-1956 | − | AUGCGAAAGCAGAUCCGCUC | 20 | 4989 |
| HSV1-UL30-1957 | − | AGAUCCGCUCGCGGAUUCCC | 20 | 4990 |
| HSV1-UL30-1958 | − | GCGGAUUCCCCAGAGCAGCC | 20 | 4991 |
| HSV1-UL30-1959 | − | GGAUUCCCCAGAGCAGCCCC | 20 | 4992 |
| HSV1-UL30-1960 | − | GAUUCCCCAGAGCAGCCCCG | 20 | 4993 |
| HSV1-UL30-1961 | − | GCCCCGAGGAGGCCGUGCUC | 20 | 4994 |
| HSV1-UL30-1962 | − | GGUCGUGUGUAACUCGGUGU | 20 | 4995 |
| HSV1-UL30-1963 | − | GUAACUCGGUGUACGGGUUC | 20 | 4996 |
| HSV1-UL30-1964 | − | UAACUCGGUGUACGGGUUCA | 20 | 4997 |
| HSV1-UL30-1965 | − | AACUCGGUGUACGGGUUCAC | 20 | 4998 |
| HSV1-UL30-1966 | − | CGGGUUCACGGGAGUGCAGC | 20 | 4999 |
| HSV1-UL30-1967 | − | GACGGUGACGACCAUCGGCC | 20 | 5000 |
| HSV1-UL30-1968 | − | CGAGAUGCUGCUCGCGACCC | 20 | 5001 |
| HSV1-UL30-1969 | − | CGCGAGUACGUCCACGCGCG | 20 | 5002 |
| HSV1-UL30-1970 | − | CCACGCGCGCUGGGCGGCCU | 20 | 5003 |
| HSV1-UL30-1971 | − | AACAGCUCCUGGCCGAUUUC | 20 | 5004 |
| HSV1-UL30-1972 | − | ACAGCUCCUGGCCGAUUUCC | 20 | 5005 |
| HSV1-UL30-1973 | − | GGCGGCCGACAUGCGCGCCC | 20 | 5006 |
| HSV1-UL30-1974 | − | CUAUUCCAUGCGCAUCAUCU | 20 | 5007 |
| HSV1-UL30-1975 | − | UAUUCCAUGCGCAUCAUCUA | 20 | 5008 |
| HSV1-UL30-1976 | − | AUUCCAUGCGCAUCAUCUAC | 20 | 5009 |
| HSV1-UL30-1977 | − | UGCGCAUCAUCUACGGGGAC | 20 | 5010 |
| HSV1-UL30-1978 | − | GUGCCGCGGCCUCACGGCCG | 20 | 5011 |
| HSV1-UL30-1979 | − | CGGCCGCCGGGCUGACGGCC | 20 | 5012 |
| HSV1-UL30-1980 | − | CGGCCGUGGGCGACAAGAUG | 20 | 5013 |
| HSV1-UL30-1981 | − | GUUUCUGCCCCCCAUCAAAC | 20 | 5014 |
| HSV1-UL30-1982 | − | GCCCCCCAUCAAACUCGAGU | 20 | 5015 |
| HSV1-UL30-1983 | − | CCAAGCUGCUGCUGAUCGCC | 20 | 5016 |
| HSV1-UL30-1984 | − | AAAGUACAUCGGCGUCAUCU | 20 | 5017 |
| HSV1-UL30-1985 | − | AAGUACAUCGGCGUCAUCUA | 20 | 5018 |
| HSV1-UL30-1986 | − | AGUACAUCGGCGUCAUCUAC | 20 | 5019 |
| HSV1-UL30-1987 | − | ACGGGGGUAAGAUGCUCAUC | 20 | 5020 |
| HSV1-UL30-1988 | − | GUAAGAUGCUCAUCAAGGGC | 20 | 5021 |
| HSV1-UL30-1989 | − | GCGUUUAUCAACCGCACCUC | 20 | 5022 |
| HSV1-UL30-1990 | − | GUUUUACGACGAUACCGUCU | 20 | 5023 |
| HSV1-UL30-1991 | − | UUUUACGACGAUACCGUCUC | 20 | 5024 |
| HSV1-UL30-1992 | − | CGGAGCGGCCGCCGCGUUAG | 20 | 5025 |
| HSV1-UL30-1993 | − | CCGCGUUAGCCGAGCGCCCC | 20 | 5026 |
| HSV1-UL30-1994 | − | CGCGUUAGCCGAGCGCCCCG | 20 | 5027 |
| HSV1-UL30-1995 | − | CGUUAGCCGAGCGCCCCGCG | 20 | 5028 |
| HSV1-UL30-1996 | − | GUUAGCCGAGCGCCCCGCGG | 20 | 5029 |
| HSV1-UL30-1997 | − | GUGGCUGGCGCGACCCCUGC | 20 | 5030 |
| HSV1-UL30-1998 | − | GGCUGGCGCGACCCCUGCCC | 20 | 5031 |
| HSV1-UL30-1999 | − | GCUGGCGCGACCCCUGCCCG | 20 | 5032 |
| HSV1-UL30-2000 | − | GCCCGAGGGACUGCAGGCGU | 20 | 5033 |
| HSV1-UL30-2001 | − | CCCGAGGGACUGCAGGCGUU | 20 | 5034 |
| HSV1-UL30-2002 | − | CCCAUCGGCGCAUCACCGAC | 20 | 5035 |
| HSV1-UL30-2003 | − | CCAUCGGCGCAUCACCGACC | 20 | 5036 |
| HSV1-UL30-2004 | − | AUCGGCGCAUCACCGACCCG | 20 | 5037 |
| HSV1-UL30-2005 | − | CGGCGCAUCACCGACCCGGA | 20 | 5038 |
| HSV1-UL30-2006 | − | GGCGCAUCACCGACCCGGAG | 20 | 5039 |
| HSV1-UL30-2007 | − | CCGACCCGGAGAGGGACAUC | 20 | 5040 |
| HSV1-UL30-2008 | − | CCAGGACUUUGUCCUCACCG | 20 | 5041 |
| HSV1-UL30-2009 | − | ACUUUGUCCUCACCGCCGAA | 20 | 5042 |
| HSV1-UL30-2010 | − | GCGCGCAGGUCCCGUCCAUC | 20 | 5043 |
| HSV1-UL30-2011 | − | CAGGUCCCGUCCAUCAAGGA | 20 | 5044 |
| HSV1-UL30-2012 | − | CGUGAUCGUGGCCCAGACCC | 20 | 5045 |
| HSV1-UL30-2013 | − | CGUGGCCCAGACCCGCGAGG | 20 | 5046 |
| HSV1-UL30-2014 | − | UGGCCCAGACCCGCGAGGUA | 20 | 5047 |
| HSV1-UL30-2015 | − | GGCCCAGACCCGCGAGGUAG | 20 | 5048 |
| HSV1-UL30-2016 | − | CGCGCGGCUGGCCGCCCUCC | 20 | 5049 |
| HSV1-UL30-2017 | − | CGAGCUAGACGCCGCCGCCC | 20 | 5050 |
| HSV1-UL30-2018 | − | GAGCUAGACGCCGCCGCCCC | 20 | 5051 |
| HSV1-UL30-2019 | − | AGCUAGACGCCGCCGCCCCA | 20 | 5052 |
| HSV1-UL30-2020 | − | AGACGCCGCCGCCCCAGGGG | 20 | 5053 |
| HSV1-UL30-2021 | − | CCCUCCCCGGCCAAGCGCCC | 20 | 5054 |
| HSV1-UL30-2022 | − | CCUCCCCGGCCAAGCGCCCC | 20 | 5055 |
| HSV1-UL30-2023 | − | CUCCCCGGCCAAGCGCCCCC | 20 | 5056 |
| HSV1-UL30-2024 | − | CGCCGUCGCCUGCCGACCCC | 20 | 5057 |
| HSV1-UL30-2025 | − | GCCGUCGCCUGCCGACCCCC | 20 | 5058 |
| HSV1-UL30-2026 | − | CCGUCGCCUGCCGACCCCCC | 20 | 5059 |
| HSV1-UL30-2027 | − | GCCCCGCAAGCUGCUGGUGU | 20 | 5060 |
| HSV1-UL30-2028 | − | GCUGCUGGUGUCCGAGCUGG | 20 | 5061 |
| HSV1-UL30-2029 | − | UGCUGGUGUCCGAGCUGGCC | 20 | 5062 |
| HSV1-UL30-2030 | − | CCAUUGCCCACGGCGUCGCC | 20 | 5063 |
| HSV1-UL30-2031 | − | CCCACGGCGUCGCCCUGAAC | 20 | 5064 |
| HSV1-UL30-2032 | − | ACUAUUACUUCUCCCACCUG | 20 | 5065 |
| HSV1-UL30-2033 | − | CUAUUACUUCUCCCACCUGU | 20 | 5066 |
| HSV1-UL30-2034 | − | UAUUACUUCUCCCACCUGUU | 20 | 5067 |
| HSV1-UL30-2035 | − | CGUGACAUUCAAGGCCCUGU | 20 | 5068 |
| HSV1-UL30-2036 | − | GUGACAUUCAAGGCCCUGUU | 20 | 5069 |
| HSV1-UL30-2037 | − | UGACAUUCAAGGCCCUGUUU | 20 | 5070 |
| HSV1-UL30-2038 | − | UGGGAAUAACGCCAAGAUCA | 20 | 5071 |
| HSV1-UL30-2039 | − | GGAAUAACGCCAAGAUCACC | 20 | 5072 |
| HSV1-UL30-2040 | − | UCUGUUAAAAAGGUUUAUUC | 20 | 5073 |
| HSV1-UL30-2041 | − | UUCCCGAAGUGUGGCACCCC | 20 | 5074 |
| HSV1-UL30-2042 | − | GACGACGUGGCCGCGCGGCU | 20 | 5075 |
| HSV1-UL30-2043 | − | GGCCGCGCGGCUCCGGACCG | 20 | 5076 |
| HSV1-UL30-2044 | − | GCGGCUCCGGACCGCAGGGU | 20 | 5077 |
| HSV1-UL30-2045 | − | CGGCUCCGGACCGCAGGGUU | 20 | 5078 |
| HSV1-UL30-2046 | − | GGACCGCAGGGUUCGGGGCG | 20 | 5079 |
| HSV1-UL30-2047 | − | CGGUGGGUGCCGGCGCUACG | 20 | 5080 |
| HSV1-UL30-2048 | − | GGUGGGUGCCGGCGCUACGG | 20 | 5081 |
| HSV1-UL30-2049 | − | UGGGUGCCGGCGCUACGGCG | 20 | 5082 |
| HSV1-UL30-2050 | − | GGGUGCCGGCGCUACGGCGG | 20 | 5083 |
| HSV1-UL30-2051 | − | GCUACGGCGGAGGAAACUCG | 20 | 5084 |
| HSV1-UL30-2052 | − | GAAACUCGUCGAAUGUUGCA | 20 | 5085 |
| HSV1-UL30-2053 | − | UGGACGCCAUCACACCG | 17 | 5086 |
| HSV1-UL30-2054 | − | GGACGCCAUCACACCGA | 17 | 5087 |
| HSV1-UL30-2055 | − | GACGCCAUCACACCGAC | 17 | 5088 |
| HSV1-UL30-2056 | − | GGACCGUCAUCACGCUC | 17 | 5089 |
| HSV1-UL30-2057 | − | CGCUCCUGGGCCUGACU | 17 | 5090 |
| HSV1-UL30-2058 | − | GCUCCUGGGCCUGACUC | 17 | 5091 |
| HSV1-UL30-2059 | − | CUGACUCCGGAAGGCCA | 17 | 5092 |
| HSV1-UL30-2060 | − | CGCGGCAGUACUUUUAC | 17 | 5093 |
| HSV1-UL30-2061 | − | AGUACUUUUACAUGAAC | 17 | 5094 |
| HSV1-UL30-2062 | − | GUACUUUUACAUGAACA | 17 | 5095 |
| HSV1-UL30-2063 | − | ACUUUUACAUGAACAAG | 17 | 5096 |
| HSV1-UL30-2064 | − | CUUUUACAUGAACAAGG | 17 | 5097 |
| HSV1-UL30-2065 | − | CUACAAUGCCGCGCCCC | 17 | 5098 |
| HSV1-UL30-2066 | − | CGCCCCACGAGAUCUCU | 17 | 5099 |
| HSV1-UL30-2067 | − | CAUGGCCGCGGCCCUGC | 17 | 5100 |
| HSV1-UL30-2068 | − | CGGCCCUGCGCGAGUCC | 17 | 5101 |
| HSV1-UL30-2069 | − | CGUUCCGCGGCAUCUCC | 17 | 5102 |
| HSV1-UL30-2070 | − | CAUCUCCGCGGACCACU | 17 | 5103 |
| HSV1-UL30-2071 | − | CCGCGGACCACUUCGAG | 17 | 5104 |
| HSV1-UL30-2072 | − | CGCGGACCACUUCGAGG | 17 | 5105 |
| HSV1-UL30-2073 | − | ACUUCGAGGCGGAGGUG | 17 | 5106 |
| HSV1-UL30-2074 | − | CUUCGAGGCGGAGGUGG | 17 | 5107 |
| HSV1-UL30-2075 | − | CACCGACGUGUACUACU | 17 | 5108 |
| HSV1-UL30-2076 | − | UUUUACCGCGUCUACGU | 17 | 5109 |
| HSV1-UL30-2077 | − | CCGCGUCUACGUCCGAA | 17 | 5110 |
| HSV1-UL30-2078 | − | ACUUCUGCCCGGCCAUC | 17 | 5111 |
| HSV1-UL30-2079 | − | CCCGGCCAUCAAGAAGU | 17 | 5112 |
| HSV1-UL30-2080 | − | CGGCCAUCAAGAAGUAC | 17 | 5113 |
| HSV1-UL30-2081 | − | CAUCAAGAAGUACGAGG | 17 | 5114 |
| HSV1-UL30-2082 | − | AUCAAGAAGUACGAGGG | 17 | 5115 |
| HSV1-UL30-2083 | − | CCACCACCCGGUUCAUC | 17 | 5116 |
| HSV1-UL30-2084 | − | GUUCAUCCUGGACAACC | 17 | 5117 |
| HSV1-UL30-2085 | − | GCUGGUACCGUCUCAAA | 17 | 5118 |
| HSV1-UL30-2086 | − | UACCGUCUCAAACCGGG | 17 | 5119 |
| HSV1-UL30-2087 | − | ACCGUCUCAAACCGGGC | 17 | 5120 |
| HSV1-UL30-2088 | − | GGCGGCCCCGAUGGCCU | 17 | 5121 |
| HSV1-UL30-2089 | − | GCGGCCCCGAUGGCCUU | 17 | 5122 |
| HSV1-UL30-2090 | − | CGGGACAUCCAGCGACG | 17 | 5123 |
| HSV1-UL30-2091 | − | UCGAGUUUAACUGUACG | 17 | 5124 |
| HSV1-UL30-2092 | − | GGCGGACAACCUGGCCA | 17 | 5125 |
| HSV1-UL30-2093 | − | CGGACAACCUGGCCAUC | 17 | 5126 |
| HSV1-UL30-2094 | − | GGACAACCUGGCCAUCG | 17 | 5127 |
| HSV1-UL30-2095 | − | GACAACCUGGCCAUCGA | 17 | 5128 |
| HSV1-UL30-2096 | − | ACAACCUGGCCAUCGAG | 17 | 5129 |
| HSV1-UL30-2097 | − | UGGCCAUCGAGGGGGGC | 17 | 5130 |
| HSV1-UL30-2098 | − | GCUCAUGUGCUUCGAUA | 17 | 5131 |
| HSV1-UL30-2099 | − | UCGAUAUCGAAUGCAAG | 17 | 5132 |
| HSV1-UL30-2100 | − | CGAUAUCGAAUGCAAGG | 17 | 5133 |
| HSV1-UL30-2101 | − | GAUAUCGAAUGCAAGGC | 17 | 5134 |
| HSV1-UL30-2102 | − | AUAUCGAAUGCAAGGCG | 17 | 5135 |
| HSV1-UL30-2103 | − | UAUCGAAUGCAAGGCGG | 17 | 5136 |
| HSV1-UL30-2104 | − | AUCGAAUGCAAGGCGGG | 17 | 5137 |
| HSV1-UL30-2105 | − | UCGAAUGCAAGGCGGGG | 17 | 5138 |
| HSV1-UL30-2106 | − | CGAAUGCAAGGCGGGGG | 17 | 5139 |
| HSV1-UL30-2107 | − | AAUGCAAGGCGGGGGGG | 17 | 5140 |
| HSV1-UL30-2108 | − | CAAGGCGGGGGGGGAGG | 17 | 5141 |
| HSV1-UL30-2109 | − | GCUGGCCUUUCCGGUGG | 17 | 5142 |
| HSV1-UL30-2110 | − | UUCCGGUGGCCGGGCAC | 17 | 5143 |
| HSV1-UL30-2111 | − | UCCGGUGGCCGGGCACC | 17 | 5144 |
| HSV1-UL30-2112 | − | CGGUGGCCGGGCACCCG | 17 | 5145 |
| HSV1-UL30-2113 | − | ACCUGUCCACCACCGCC | 17 | 5146 |
| HSV1-UL30-2114 | − | CCUGUCCACCACCGCCC | 17 | 5147 |
| HSV1-UL30-2115 | − | CGGUUCCUGCGACCUCC | 17 | 5148 |
| HSV1-UL30-2116 | − | ACCUCCCCGAAUCCCAC | 17 | 5149 |
| HSV1-UL30-2117 | − | CCCCGAAUCCCACCUGA | 17 | 5150 |
| HSV1-UL30-2118 | − | CUGAACGAGCUGGCGGC | 17 | 5151 |
| HSV1-UL30-2119 | − | UGAACGAGCUGGCGGCC | 17 | 5152 |
| HSV1-UL30-2120 | − | UGCCCACGCCCGUGGUU | 17 | 5153 |
| HSV1-UL30-2121 | − | GCCCACGCCCGUGGUUC | 17 | 5154 |
| HSV1-UL30-2122 | − | GGUUCUGGAAUUCGACA | 17 | 5155 |
| HSV1-UL30-2123 | − | GGAAUUCGACAGCGAAU | 17 | 5156 |
| HSV1-UL30-2124 | − | UGGCCUUCAUGACCCUU | 17 | 5157 |
| HSV1-UL30-2125 | − | UGUGAAACAGUACGGCC | 17 | 5158 |
| HSV1-UL30-2126 | − | CGGCCCCGAGUUCGUGA | 17 | 5159 |
| HSV1-UL30-2127 | − | UCUUGCUGGCCAAGCUG | 17 | 5160 |
| HSV1-UL30-2128 | − | ACAUUUACAAGGUCCCC | 17 | 5161 |
| HSV1-UL30-2129 | − | UUACAAGGUCCCCCUGG | 17 | 5162 |
| HSV1-UL30-2130 | − | UGGACGGGUACGGCCGC | 17 | 5163 |
| HSV1-UL30-2131 | − | UACGGCCGCAUGAACGG | 17 | 5164 |
| HSV1-UL30-2132 | − | ACGGCCGCAUGAACGGC | 17 | 5165 |
| HSV1-UL30-2133 | − | CGGGGCGUGUUUCGCGU | 17 | 5166 |
| HSV1-UL30-2134 | − | GGGGCGUGUUUCGCGUG | 17 | 5167 |
| HSV1-UL30-2135 | − | GCGUGUGGGACAUAGGC | 17 | 5168 |
| HSV1-UL30-2136 | − | UAGGCCAGAGCCACUUC | 17 | 5169 |
| HSV1-UL30-2137 | − | AGCGCAGCAAGAUAAAG | 17 | 5170 |
| HSV1-UL30-2138 | − | UAAAGGUGAACGGCAUG | 17 | 5171 |
| HSV1-UL30-2139 | − | GGUGAACAUCGACAUGU | 17 | 5172 |
| HSV1-UL30-2140 | − | GUGAACAUCGACAUGUA | 17 | 5173 |
| HSV1-UL30-2141 | − | CCGACAAGAUCAAGCUC | 17 | 5174 |
| HSV1-UL30-2142 | − | CAAGCUCAACGCCGUGG | 17 | 5175 |
| HSV1-UL30-2143 | − | CCGUGGCCGAAGCCGUC | 17 | 5176 |
| HSV1-UL30-2144 | − | UGGCCGAAGCCGUCCUG | 17 | 5177 |
| HSV1-UL30-2145 | − | AAGCCGUCCUGAAGGAC | 17 | 5178 |
| HSV1-UL30-2146 | − | CCGUCCUGAAGGACAAG | 17 | 5179 |
| HSV1-UL30-2147 | − | UCCUGAAGGACAAGAAG | 17 | 5180 |
| HSV1-UL30-2148 | − | AGGACAAGAAGAAGGAC | 17 | 5181 |
| HSV1-UL30-2149 | − | CCCCGCCUACUACGCCG | 17 | 5182 |
| HSV1-UL30-2150 | − | CGCCGGGCCCGCGCAAC | 17 | 5183 |
| HSV1-UL30-860 | − | GCCGGGCCCGCGCAACG | 17 | 3798 |
| HSV1-UL30-2152 | − | GCAACGCGGGGUGAUCG | 17 | 5184 |
| HSV1-UL30-2153 | − | UCGGCGAGUACUGCAUA | 17 | 5185 |
| HSV1-UL30-2154 | − | UACAGGAUUCCCUGCUG | 17 | 5186 |
| HSV1-UL30-2155 | − | UUAAGUUUUUGCCCCAU | 17 | 5187 |
| HSV1-UL30-2156 | − | UAAGUUUUUGCCCCAUC | 17 | 5188 |
| HSV1-UL30-2157 | − | CGGCCGUCGCGCGCUUG | 17 | 5189 |
| HSV1-UL30-2158 | − | UGCUGCGCCUGGCCGAC | 17 | 5190 |
| HSV1-UL30-2159 | − | UGCGCCUGGCCGACCAG | 17 | 5191 |
| HSV1-UL30-2160 | − | AGAAGGGCUUUAUUCUG | 17 | 5192 |
| HSV1-UL30-2161 | − | UUAUUCUGCCGGACACC | 17 | 5193 |
| HSV1-UL30-2162 | − | UAUUCUGCCGGACACCC | 17 | 5194 |
| HSV1-UL30-2163 | − | GACACCCAGGGGCGAUU | 17 | 5195 |
| HSV1-UL30-2164 | − | ACACCCAGGGGCGAUUU | 17 | 5196 |
| HSV1-UL30-2165 | − | GGGGCGAUUUAGGGGCG | 17 | 5197 |
| HSV1-UL30-2166 | − | GGGCGAUUUAGGGGCGC | 17 | 5198 |
| HSV1-UL30-2167 | − | GGCGAUUUAGGGGCGCC | 17 | 5199 |
| HSV1-UL30-2168 | − | GCGAUUUAGGGGCGCCG | 17 | 5200 |
| HSV1-UL30-2169 | − | CGAUUUAGGGGCGCCGG | 17 | 5201 |
| HSV1-UL30-2170 | − | GAUUUAGGGGCGCCGGG | 17 | 5202 |
| HSV1-UL30-2171 | − | AUUUAGGGGCGCCGGGG | 17 | 5203 |
| HSV1-UL30-2172 | − | AAGCGUCCGGCCGCAGC | 17 | 5204 |
| HSV1-UL30-2173 | − | AGCGUCCGGCCGCAGCC | 17 | 5205 |
| HSV1-UL30-2174 | − | GCGUCCGGCCGCAGCCC | 17 | 5206 |
| HSV1-UL30-2175 | − | GUCCGGCCGCAGCCCGG | 17 | 5207 |
| HSV1-UL30-2176 | − | GGCCGCAGCCCGGGAGG | 17 | 5208 |
| HSV1-UL30-2177 | − | CCGCAGCCCGGGAGGAC | 17 | 5209 |
| HSV1-UL30-895 | − | CGCAGCCCGGGAGGACG | 17 | 3833 |
| HSV1-UL30-2179 | − | GGAGGACGAGGAGCGGC | 17 | 5210 |
| HSV1-UL30-2180 | − | AGGACGAGGAGCGGCCA | 17 | 5211 |
| HSV1-UL30-897 | − | GGACGAGGAGCGGCCAG | 17 | 3835 |
| HSV1-UL30-2182 | − | ACGAGGAGCGGCCAGAG | 17 | 5212 |
| HSV1-UL30-898 | − | CGAGGAGCGGCCAGAGG | 17 | 3836 |
| HSV1-UL30-2184 | − | AGGAGCGGCCAGAGGAG | 17 | 5213 |
| HSV1-UL30-899 | − | GGAGCGGCCAGAGGAGG | 17 | 3837 |
| HSV1-UL30-900 | − | GAGCGGCCAGAGGAGGA | 17 | 3838 |
| HSV1-UL30-901 | − | AGCGGCCAGAGGAGGAG | 17 | 3839 |
| HSV1-UL30-902 | − | GCGGCCAGAGGAGGAGG | 17 | 3840 |
| HSV1-UL30-2189 | − | GGCCAGAGGAGGAGGGG | 17 | 5214 |
| HSV1-UL30-2190 | − | AGAGGAGGAGGGGGAGG | 17 | 5215 |
| HSV1-UL30-2191 | − | AGGAGGAGGGGGAGGAC | 17 | 5216 |
| HSV1-UL30-2192 | − | GGAGGGGGAGGACGAGG | 17 | 5217 |
| HSV1-UL30-2193 | − | GGAGGACGAGGACGAAC | 17 | 5218 |
| HSV1-UL30-2194 | − | AGGACGAGGACGAACGC | 17 | 5219 |
| HSV1-UL30-905 | − | GGACGAGGACGAACGCG | 17 | 3843 |
| HSV1-UL30-2196 | − | ACGAGGACGAACGCGAG | 17 | 5220 |
| HSV1-UL30-2197 | − | GGACGAACGCGAGGAGG | 17 | 5221 |
| HSV1-UL30-908 | − | GACGAACGCGAGGAGGG | 17 | 3846 |
| HSV1-UL30-909 | − | ACGAACGCGAGGAGGGC | 17 | 3847 |
| HSV1-UL30-2200 | − | ACGCGAGGAGGGCGGGG | 17 | 5222 |
| HSV1-UL30-2201 | − | GAGGAGGGCGGGGGCGA | 17 | 5223 |
| HSV1-UL30-912 | − | AGGAGGGCGGGGGCGAG | 17 | 3850 |
| HSV1-UL30-913 | − | GGAGGGCGGGGGCGAGC | 17 | 3851 |
| HSV1-UL30-2204 | − | GCGGGGGCGAGCGGGAG | 17 | 5224 |
| HSV1-UL30-914 | − | CGGGGGCGAGCGGGAGC | 17 | 3852 |
| HSV1-UL30-2206 | − | GGGGCGAGCGGGAGCCG | 17 | 5225 |
| HSV1-UL30-2207 | − | CGGGAGCCGGAGGGCGC | 17 | 5226 |
| HSV1-UL30-917 | − | GGGAGCCGGAGGGCGCG | 17 | 3855 |
| HSV1-UL30-918 | − | GGAGCCGGAGGGCGCGC | 17 | 3856 |
| HSV1-UL30-2210 | − | AGACCGCCGGCAGGCAC | 17 | 5227 |
| HSV1-UL30-921 | − | GACCGCCGGCAGGCACG | 17 | 3859 |
| HSV1-UL30-2212 | − | GCAGGCACGUGGGGUAC | 17 | 5228 |
| HSV1-UL30-2213 | − | CAGGCACGUGGGGUACC | 17 | 5229 |
| HSV1-UL30-2214 | − | AGGCACGUGGGGUACCA | 17 | 5230 |
| HSV1-UL30-2215 | − | GUGGGGUACCAGGGGGC | 17 | 5231 |
| HSV1-UL30-2216 | − | GGUCCUUGACCCCACUU | 17 | 5232 |
| HSV1-UL30-2217 | − | CCACUUCCGGGUUUCAC | 17 | 5233 |
| HSV1-UL30-2218 | − | GCUUCAGCACGCUCUCC | 17 | 5234 |
| HSV1-UL30-2219 | − | UUCAGCACGCUCUCCCU | 17 | 5235 |
| HSV1-UL30-2220 | − | CCGACGCAGUGGCGCAC | 17 | 5236 |
| HSV1-UL30-2221 | − | CGACGCAGUGGCGCACC | 17 | 5237 |
| HSV1-UL30-2222 | − | CAGUGGCGCACCUGGAG | 17 | 5238 |
| HSV1-UL30-2223 | − | CGCACCUGGAGGCGGGC | 17 | 5239 |
| HSV1-UL30-2224 | − | AGGCGGGCAAGGACUAC | 17 | 5240 |
| HSV1-UL30-2225 | − | GGCGGGCAAGGACUACC | 17 | 5241 |
| HSV1-UL30-2226 | − | CAAGGACUACCUGGAGA | 17 | 5242 |
| HSV1-UL30-2227 | − | ACUACCUGGAGAUCGAG | 17 | 5243 |
| HSV1-UL30-2228 | − | CUACCUGGAGAUCGAGG | 17 | 5244 |
| HSV1-UL30-2229 | − | UACCUGGAGAUCGAGGU | 17 | 5245 |
| HSV1-UL30-2230 | − | ACCUGGAGAUCGAGGUG | 17 | 5246 |
| HSV1-UL30-2231 | − | CCUGGAGAUCGAGGUGG | 17 | 5247 |
| HSV1-UL30-2232 | − | UUCGUCAAGGCUCACGU | 17 | 5248 |
| HSV1-UL30-2233 | − | CGUCAAGGCUCACGUGC | 17 | 5249 |
| HSV1-UL30-2234 | − | UCAAGGCUCACGUGCGA | 17 | 5250 |
| HSV1-UL30-2235 | − | CUCCUCAGCAUCCUCCU | 17 | 5251 |
| HSV1-UL30-2236 | − | UCCUCAGCAUCCUCCUG | 17 | 5252 |
| HSV1-UL30-2237 | − | CGGGACUGGCUCGCCAU | 17 | 5253 |
| HSV1-UL30-2238 | − | CGAAAGCAGAUCCGCUC | 17 | 5254 |
| HSV1-UL30-2239 | − | UCCGCUCGCGGAUUCCC | 17 | 5255 |
| HSV1-UL30-2240 | − | GAUUCCCCAGAGCAGCC | 17 | 5256 |
| HSV1-UL30-2241 | − | UUCCCCAGAGCAGCCCC | 17 | 5257 |
| HSV1-UL30-2242 | − | UCCCCAGAGCAGCCCCG | 17 | 5258 |
| HSV1-UL30-2243 | − | CCGAGGAGGCCGUGCUC | 17 | 5259 |
| HSV1-UL30-2244 | − | CGUGUGUAACUCGGUGU | 17 | 5260 |
| HSV1-UL30-2245 | − | ACUCGGUGUACGGGUUC | 17 | 5261 |
| HSV1-UL30-2246 | − | CUCGGUGUACGGGUUCA | 17 | 5262 |
| HSV1-UL30-2247 | − | UCGGUGUACGGGUUCAC | 17 | 5263 |
| HSV1-UL30-2248 | − | GUUCACGGGAGUGCAGC | 17 | 5264 |
| HSV1-UL30-2249 | − | GGUGACGACCAUCGGCC | 17 | 5265 |
| HSV1-UL30-2250 | − | GAUGCUGCUCGCGACCC | 17 | 5266 |
| HSV1-UL30-2251 | − | GAGUACGUCCACGCGCG | 17 | 5267 |
| HSV1-UL30-2252 | − | CGCGCGCUGGGCGGCCU | 17 | 5268 |
| HSV1-UL30-2253 | − | AGCUCCUGGCCGAUUUC | 17 | 5269 |
| HSV1-UL30-2254 | − | GCUCCUGGCCGAUUUCC | 17 | 5270 |
| HSV1-UL30-2255 | − | GGCCGACAUGCGCGCCC | 17 | 5271 |
| HSV1-UL30-2256 | − | UUCCAUGCGCAUCAUCU | 17 | 5272 |
| HSV1-UL30-2257 | − | UCCAUGCGCAUCAUCUA | 17 | 5273 |
| HSV1-UL30-2258 | − | CCAUGCGCAUCAUCUAC | 17 | 5274 |
| HSV1-UL30-2259 | − | GCAUCAUCUACGGGGAC | 17 | 5275 |
| HSV1-UL30-2260 | − | CCGCGGCCUCACGGCCG | 17 | 5276 |
| HSV1-UL30-2261 | − | CCGCCGGGCUGACGGCC | 17 | 5277 |
| HSV1-UL30-2262 | − | CCGUGGGCGACAAGAUG | 17 | 5278 |
| HSV1-UL30-2263 | − | UCUGCCCCCCAUCAAAC | 17 | 5279 |
| HSV1-UL30-2264 | − | CCCCAUCAAACUCGAGU | 17 | 5280 |
| HSV1-UL30-2265 | − | AGCUGCUGCUGAUCGCC | 17 | 5281 |
| HSV1-UL30-2266 | − | GUACAUCGGCGUCAUCU | 17 | 5282 |
| HSV1-UL30-2267 | − | UACAUCGGCGUCAUCUA | 17 | 5283 |
| HSV1-UL30-2268 | − | ACAUCGGCGUCAUCUAC | 17 | 5284 |
| HSV1-UL30-2269 | − | GGGGUAAGAUGCUCAUC | 17 | 5285 |
| HSV1-UL30-2270 | − | AGAUGCUCAUCAAGGGC | 17 | 5286 |
| HSV1-UL30-2271 | − | UUUAUCAACCGCACCUC | 17 | 5287 |
| HSV1-UL30-2272 | − | UUACGACGAUACCGUCU | 17 | 5288 |
| HSV1-UL30-2273 | − | UACGACGAUACCGUCUC | 17 | 5289 |
| HSV1-UL30-2274 | − | AGCGGCCGCCGCGUUAG | 17 | 5290 |
| HSV1-UL30-2275 | − | CGUUAGCCGAGCGCCCC | 17 | 5291 |
| HSV1-UL30-2276 | − | GUUAGCCGAGCGCCCCG | 17 | 5292 |
| HSV1-UL30-2277 | − | UAGCCGAGCGCCCCGCG | 17 | 5293 |
| HSV1-UL30-1006 | − | AGCCGAGCGCCCCGCGG | 17 | 3944 |
| HSV1-UL30-2279 | − | GCUGGCGCGACCCCUGC | 17 | 5294 |
| HSV1-UL30-2280 | − | UGGCGCGACCCCUGCCC | 17 | 5295 |
| HSV1-UL30-2281 | − | GGCGCGACCCCUGCCCG | 17 | 5296 |
| HSV1-UL30-2282 | − | CGAGGGACUGCAGGCGU | 17 | 5297 |
| HSV1-UL30-2283 | − | GAGGGACUGCAGGCGUU | 17 | 5298 |
| HSV1-UL30-2284 | − | AUCGGCGCAUCACCGAC | 17 | 5299 |
| HSV1-UL30-2285 | − | UCGGCGCAUCACCGACC | 17 | 5300 |
| HSV1-UL30-2286 | − | GGCGCAUCACCGACCCG | 17 | 5301 |
| HSV1-UL30-2287 | − | CGCAUCACCGACCCGGA | 17 | 5302 |
| HSV1-UL30-2288 | − | GCAUCACCGACCCGGAG | 17 | 5303 |
| HSV1-UL30-2289 | − | ACCCGGAGAGGGACAUC | 17 | 5304 |
| HSV1-UL30-2290 | − | GGACUUUGUCCUCACCG | 17 | 5305 |
| HSV1-UL30-2291 | − | UUGUCCUCACCGCCGAA | 17 | 5306 |
| HSV1-UL30-2292 | − | CGCAGGUCCCGUCCAUC | 17 | 5307 |
| HSV1-UL30-2293 | − | GUCCCGUCCAUCAAGGA | 17 | 5308 |
| HSV1-UL30-2294 | − | GAUCGUGGCCCAGACCC | 17 | 5309 |
| HSV1-UL30-2295 | − | GGCCCAGACCCGCGAGG | 17 | 5310 |
| HSV1-UL30-2296 | − | CCCAGACCCGCGAGGUA | 17 | 5311 |
| HSV1-UL30-2297 | − | CCAGACCCGCGAGGUAG | 17 | 5312 |
| HSV1-UL30-2298 | − | GCGGCUGGCCGCCCUCC | 17 | 5313 |
| HSV1-UL30-2299 | − | GCUAGACGCCGCCGCCC | 17 | 5314 |
| HSV1-UL30-2300 | − | CUAGACGCCGCCGCCCC | 17 | 5315 |
| HSV1-UL30-2301 | − | UAGACGCCGCCGCCCCA | 17 | 5316 |
| HSV1-UL30-2302 | − | CGCCGCCGCCCCAGGGG | 17 | 5317 |
| HSV1-UL30-2303 | − | UCCCCGGCCAAGCGCCC | 17 | 5318 |
| HSV1-UL30-1037 | − | CCCCGGCCAAGCGCCCC | 17 | 3975 |
| HSV1-UL30-1038 | − | CCCGGCCAAGCGCCCCC | 17 | 3976 |
| HSV1-UL30-2306 | − | CGUCGCCUGCCGACCCC | 17 | 5319 |
| HSV1-UL30-2307 | − | GUCGCCUGCCGACCCCC | 17 | 5320 |
| HSV1-UL30-2308 | − | UCGCCUGCCGACCCCCC | 17 | 5321 |
| HSV1-UL30-2309 | − | CCGCAAGCUGCUGGUGU | 17 | 5322 |
| HSV1-UL30-2310 | − | GCUGGUGUCCGAGCUGG | 17 | 5323 |
| HSV1-UL30-2311 | − | UGGUGUCCGAGCUGGCC | 17 | 5324 |
| HSV1-UL30-2312 | − | UUGCCCACGGCGUCGCC | 17 | 5325 |
| HSV1-UL30-2313 | − | ACGGCGUCGCCCUGAAC | 17 | 5326 |
| HSV1-UL30-2314 | − | AUUACUUCUCCCACCUG | 17 | 5327 |
| HSV1-UL30-2315 | − | UUACUUCUCCCACCUGU | 17 | 5328 |
| HSV1-UL30-2316 | − | UACUUCUCCCACCUGUU | 17 | 5329 |
| HSV1-UL30-2317 | − | GACAUUCAAGGCCCUGU | 17 | 5330 |
| HSV1-UL30-2318 | − | ACAUUCAAGGCCCUGUU | 17 | 5331 |
| HSV1-UL30-2319 | − | CAUUCAAGGCCCUGUUU | 17 | 5332 |
| HSV1-UL30-2320 | − | GAAUAACGCCAAGAUCA | 17 | 5333 |
| HSV1-UL30-2321 | − | AUAACGCCAAGAUCACC | 17 | 5334 |
| HSV1-UL30-2322 | − | GUUAAAAAGGUUUAUUC | 17 | 5335 |
| HSV1-UL30-2323 | − | CCGAAGUGUGGCACCCC | 17 | 5336 |
| HSV1-UL30-2324 | − | GACGUGGCCGCGCGGCU | 17 | 5337 |
| HSV1-UL30-2325 | − | CGCGCGGCUCCGGACCG | 17 | 5338 |
| HSV1-UL30-2326 | − | GCUCCGGACCGCAGGGU | 17 | 5339 |
| HSV1-UL30-2327 | − | CUCCGGACCGCAGGGUU | 17 | 5340 |
| HSV1-UL30-2328 | − | CCGCAGGGUUCGGGGCG | 17 | 5341 |
| HSV1-UL30-2329 | − | UGGGUGCCGGCGCUACG | 17 | 5342 |
| HSV1-UL30-2330 | − | GGGUGCCGGCGCUACGG | 17 | 5343 |
| HSV1-UL30-2331 | − | GUGCCGGCGCUACGGCG | 17 | 5344 |
| HSV1-UL30-2332 | − | UGCCGGCGCUACGGCGG | 17 | 5345 |
| HSV1-UL30-2333 | − | ACGGCGGAGGAAACUCG | 17 | 5346 |
| HSV1-UL30-2334 | − | ACUCGUCGAAUGUUGCA | 17 | 5347 |
| HSV1-UL30-2335 | + | AAGGCUCUAUGCAACAUUCG | 20 | 5348 |
| HSV1-UL30-2336 | + | UAGCGCCGGCACCCACCGCC | 20 | 5349 |
| HSV1-UL30-2337 | + | ACCGCCCCGAACCCUGCGGU | 20 | 5350 |
| HSV1-UL30-2338 | + | CCGCCCCGAACCCUGCGGUC | 20 | 5351 |
| HSV1-UL30-2339 | + | GAGCCGCGCGGCCACGUCGU | 20 | 5352 |
| HSV1-UL30-2340 | + | AGCCGCGCGGCCACGUCGUC | 20 | 5353 |
| HSV1-UL30-2341 | + | GCCGCGCGGCCACGUCGUCC | 20 | 5354 |
| HSV1-UL30-2342 | + | CCGCGCGGCCACGUCGUCCG | 20 | 5355 |
| HSV1-UL30-2343 | + | CGUCCGGGGGGUGCCACACU | 20 | 5356 |
| HSV1-UL30-2344 | + | GUCCGGGGGGUGCCACACUU | 20 | 5357 |
| HSV1-UL30-2345 | + | UCCGGGGGGUGCCACACUUC | 20 | 5358 |
| HSV1-UL30-2346 | + | AUCUUGGCGUUAUUCCCAAA | 20 | 5359 |
| HSV1-UL30-2347 | + | CGUUAUUCCCAAACAGGGCC | 20 | 5360 |
| HSV1-UL30-2348 | + | ACGCACGCCGCCCCCAACAG | 20 | 5361 |
| HSV1-UL30-1089 | + | CGCACGCCGCCCCCAACAGG | 20 | 4027 |
| HSV1-UL30-2350 | + | GCACGCCGCCCCCAACAGGU | 20 | 5362 |
| HSV1-UL30-2351 | + | ACGCCGCCCCCAACAGGUGG | 20 | 5363 |
| HSV1-UL30-2352 | + | GAGAAGUAAUAGUCCGUGUU | 20 | 5364 |
| HSV1-UL30-2353 | + | UCCGUGUUCAGGGCGACGCC | 20 | 5365 |
| HSV1-UL30-2354 | + | CGCCGUGGGCAAUGGCGUAU | 20 | 5366 |
| HSV1-UL30-2355 | + | GCCGUGGGCAAUGGCGUAUG | 20 | 5367 |
| HSV1-UL30-2356 | + | AUGCGGGAUCCUCGGCCAGC | 20 | 5368 |
| HSV1-UL30-2357 | + | AGCUCGGACACCAGCAGCUU | 20 | 5369 |
| HSV1-UL30-2358 | + | GCUCGGACACCAGCAGCUUG | 20 | 5370 |
| HSV1-UL30-2359 | + | ACACCAGCAGCUUGCGGGGC | 20 | 5371 |
| HSV1-UL30-2360 | + | GCGGGGCUUGGACGCGCCUC | 20 | 5372 |
| HSV1-UL30-2361 | + | CGGGGCUUGGACGCGCCUCC | 20 | 5373 |
| HSV1-UL30-2362 | + | GGGGCUUGGACGCGCCUCCC | 20 | 5374 |
| HSV1-UL30-2363 | + | GGGCUUGGACGCGCCUCCCG | 20 | 5375 |
| HSV1-UL30-2364 | + | UCGGCAGGCGACGGCGUCUC | 20 | 5376 |
| HSV1-UL30-2365 | + | CGGCAGGCGACGGCGUCUCC | 20 | 5377 |
| HSV1-UL30-2366 | + | GGCAGGCGACGGCGUCUCCC | 20 | 5378 |
| HSV1-UL30-2367 | + | CGUCUCCCGGGGGCGCUUGG | 20 | 5379 |
| HSV1-UL30-2368 | + | GUCUCCCGGGGGCGCUUGGC | 20 | 5380 |
| HSV1-UL30-2369 | + | UCUCCCGGGGGCGCUUGGCC | 20 | 5381 |
| HSV1-UL30-2370 | + | CUCCCGGGGGCGCUUGGCCG | 20 | 5382 |
| HSV1-UL30-2371 | + | CCCGGGGGCGCUUGGCCGGG | 20 | 5383 |
| HSV1-UL30-2372 | + | GGGCGCUUGGCCGGGGAGGG | 20 | 5384 |
| HSV1-UL30-2373 | + | UGGCCGGGGAGGGCAGGGCC | 20 | 5385 |
| HSV1-UL30-1124 | + | GGCCGGGGAGGGCAGGGCCG | 20 | 4062 |
| HSV1-UL30-1125 | + | GCCGGGGAGGGCAGGGCCGC | 20 | 4063 |
| HSV1-UL30-1126 | + | CCGGGGAGGGCAGGGCCGCG | 20 | 4064 |
| HSV1-UL30-1127 | + | CGGGGAGGGCAGGGCCGCGG | 20 | 4065 |
| HSV1-UL30-1128 | + | GGGGAGGGCAGGGCCGCGGG | 20 | 4066 |
| HSV1-UL30-2379 | + | AGGGCAGGGCCGCGGGGGGG | 20 | 5386 |
| HSV1-UL30-2380 | + | GGGGGGGGCGGGCUCGUCCC | 20 | 5387 |
| HSV1-UL30-2381 | + | GGGGGGGCGGGCUCGUCCCC | 20 | 5388 |
| HSV1-UL30-2382 | + | GGGGCGGCGGCGUCUAGCUC | 20 | 5389 |
| HSV1-UL30-2383 | + | GGGCGGCGGCGUCUAGCUCG | 20 | 5390 |
| HSV1-UL30-2384 | + | GCGGCGGCGUCUAGCUCGCG | 20 | 5391 |
| HSV1-UL30-2385 | + | GCGACCGUCUCCUCUACCUC | 20 | 5392 |
| HSV1-UL30-2386 | + | GUCUCCUCUACCUCGCGGGU | 20 | 5393 |
| HSV1-UL30-2387 | + | GGUCUGGGCCACGAUCACGU | 20 | 5394 |
| HSV1-UL30-2388 | + | GUCUGGGCCACGAUCACGUA | 20 | 5395 |
| HSV1-UL30-2389 | + | CGUACGGGAUCCGGUCCUUG | 20 | 5396 |
| HSV1-UL30-2390 | + | CGGGAUCCGGUCCUUGAUGG | 20 | 5397 |
| HSV1-UL30-2391 | + | GGGAUCCGGUCCUUGAUGGA | 20 | 5398 |
| HSV1-UL30-2392 | + | AUGGACGGGACCUGCGCGCG | 20 | 5399 |
| HSV1-UL30-2393 | + | GGACCUGCGCGCGGCGGGCC | 20 | 5400 |
| HSV1-UL30-2394 | + | AGCUUGUAAUACACCGUCAG | 20 | 5401 |
| HSV1-UL30-2395 | + | GCGCUUGUUGGUGUACGCGC | 20 | 5402 |
| HSV1-UL30-2396 | + | GGUGUCUGCUCAGUUCGGCG | 20 | 5403 |
| HSV1-UL30-2397 | + | UGUCUGCUCAGUUCGGCGGU | 20 | 5404 |
| HSV1-UL30-2398 | + | UCGGCGGUGAGGACAAAGUC | 20 | 5405 |
| HSV1-UL30-2399 | + | AAAGUCCUGGAUGUCCCUCU | 20 | 5406 |
| HSV1-UL30-2400 | + | UCCGGGUCGGUGAUGCGCCG | 20 | 5407 |
| HSV1-UL30-2401 | + | UGAUGCGCCGAUGGGCGUCU | 20 | 5408 |
| HSV1-UL30-2402 | + | AUGCGCCGAUGGGCGUCUAC | 20 | 5409 |
| HSV1-UL30-2403 | + | GGGCGUCUACGAGGACGGCC | 20 | 5410 |
| HSV1-UL30-2404 | + | CCCCGAACGCCUGCAGUCCC | 20 | 5411 |
| HSV1-UL30-2405 | + | AACGCCUGCAGUCCCUCGGG | 20 | 5412 |
| HSV1-UL30-2406 | + | ACGCCUGCAGUCCCUCGGGC | 20 | 5413 |
| HSV1-UL30-2407 | + | GUCGCGCCAGCCACUCCUCC | 20 | 5414 |
| HSV1-UL30-2408 | + | UCGCGCCAGCCACUCCUCCG | 20 | 5415 |
| HSV1-UL30-2409 | + | CGGCUAACGCGGCGGCCGCU | 20 | 5416 |
| HSV1-UL30-2410 | + | GGCUAACGCGGCGGCCGCUC | 20 | 5417 |
| HSV1-UL30-2411 | + | UCGUAAAACAGCAGGUCGAC | 20 | 5418 |
| HSV1-UL30-2412 | + | ACAGCAGGUCGACCAGGGCC | 20 | 5419 |
| HSV1-UL30-2413 | + | CAGCAGGUCGACCAGGGCCC | 20 | 5420 |
| HSV1-UL30-2414 | + | GCACCAGAUCCACGCCCUUG | 20 | 5421 |
| HSV1-UL30-2415 | + | UGGCGAUCAGCAGCAGCUUG | 20 | 5422 |
| HSV1-UL30-2416 | + | UGGUGAACGUCUUUUCGCAC | 20 | 5423 |
| HSV1-UL30-2417 | + | UCUUUUCGCACUCGAGUUUG | 20 | 5424 |
| HSV1-UL30-2418 | + | CUUUUCGCACUCGAGUUUGA | 20 | 5425 |
| HSV1-UL30-2419 | + | UUUUCGCACUCGAGUUUGAU | 20 | 5426 |
| HSV1-UL30-2420 | + | UUUCGCACUCGAGUUUGAUG | 20 | 5427 |
| HSV1-UL30-2421 | + | CACUCGAGUUUGAUGGGGGG | 20 | 5428 |
| HSV1-UL30-2422 | + | GGGGGGCAGAAACAGCGCGC | 20 | 5429 |
| HSV1-UL30-2423 | + | CGGCCGUCAGCCCGGCGGCC | 20 | 5430 |
| HSV1-UL30-2424 | + | GGCCGCGGCACAGCACAAAG | 20 | 5431 |
| HSV1-UL30-1205 | + | GCCGCGGCACAGCACAAAGA | 20 | 4143 |
| HSV1-UL30-2426 | + | UGUCCCCGUAGAUGAUGCGC | 20 | 5432 |
| HSV1-UL30-2427 | + | GUCCCCGUAGAUGAUGCGCA | 20 | 5433 |
| HSV1-UL30-2428 | + | CGUAGAUGAUGCGCAUGGAA | 20 | 5434 |
| HSV1-UL30-2429 | + | UGAUGCGCAUGGAAUAGGGC | 20 | 5435 |
| HSV1-UL30-2430 | + | GAUGCGCAUGGAAUAGGGCC | 20 | 5436 |
| HSV1-UL30-2431 | + | AUGCGCAUGGAAUAGGGCCC | 20 | 5437 |
| HSV1-UL30-2432 | + | GGCGCGCAUGUCGGCCGCCU | 20 | 5438 |
| HSV1-UL30-2433 | + | GCGCGCAUGUCGGCCGCCUC | 20 | 5439 |
| HSV1-UL30-2434 | + | CGCGCAUGUCGGCCGCCUCC | 20 | 5440 |
| HSV1-UL30-2435 | + | GCCGCCUCCGGGAAAUCGGC | 20 | 5441 |
| HSV1-UL30-2436 | + | CCGCCUCCGGGAAAUCGGCC | 20 | 5442 |
| HSV1-UL30-2437 | + | GGAAAUCGGCCAGGAGCUGU | 20 | 5443 |
| HSV1-UL30-2438 | + | UCGAAGGCCGCCCAGCGCGC | 20 | 5444 |
| HSV1-UL30-2439 | + | CAGCGCGCGUGGACGUACUC | 20 | 5445 |
| HSV1-UL30-2440 | + | CGUGGACGUACUCGCGGGUC | 20 | 5446 |
| HSV1-UL30-2441 | + | GCGGCAACGUGCAGGCACGG | 20 | 5447 |
| HSV1-UL30-2442 | + | CGGCAACGUGCAGGCACGGC | 20 | 5448 |
| HSV1-UL30-2443 | + | GGAGUCCGUGCUGCACUCCC | 20 | 5449 |
| HSV1-UL30-2444 | + | CACUCCCGUGAACCCGUACA | 20 | 5450 |
| HSV1-UL30-2445 | + | AUGGCGGCCUGCUGCUUGUC | 20 | 5451 |
| HSV1-UL30-2446 | + | UGGCGGCCUGCUGCUUGUCC | 20 | 5452 |
| HSV1-UL30-2447 | + | UGUCCAGGAGCACGGCCUCC | 20 | 5453 |
| HSV1-UL30-2448 | + | GUCCAGGAGCACGGCCUCCU | 20 | 5454 |
| HSV1-UL30-2449 | + | ACGGCCUCCUCGGGGCUGCU | 20 | 5455 |
| HSV1-UL30-2450 | + | CGGCCUCCUCGGGGCUGCUC | 20 | 5456 |
| HSV1-UL30-2451 | + | GGCCUCCUCGGGGCUGCUCU | 20 | 5457 |
| HSV1-UL30-2452 | + | GCCUCCUCGGGGCUGCUCUG | 20 | 5458 |
| HSV1-UL30-2453 | + | GGGGCUGCUCUGGGGAAUCC | 20 | 5459 |
| HSV1-UL30-2454 | + | CUGCUCUGGGGAAUCCGCGA | 20 | 5460 |
| HSV1-UL30-2455 | + | AGCGGAUCUGCUUUCGCAUG | 20 | 5461 |
| HSV1-UL30-2456 | + | CGCAUGGCGAGCCAGUCCCG | 20 | 5462 |
| HSV1-UL30-2457 | + | GCAUGGCGAGCCAGUCCCGC | 20 | 5463 |
| HSV1-UL30-2458 | + | AUGGCGAGCCAGUCCCGCAG | 20 | 5464 |
| HSV1-UL30-2459 | + | GCCAGUCCCGCAGGAGGAUG | 20 | 5465 |
| HSV1-UL30-2460 | + | CAGUCCCGCAGGAGGAUGCU | 20 | 5466 |
| HSV1-UL30-2461 | + | AGUCCCGCAGGAGGAUGCUG | 20 | 5467 |
| HSV1-UL30-2462 | + | CUGAGGAGGCUCUCUCGCAC | 20 | 5468 |
| HSV1-UL30-2463 | + | UCUCUCGCACGUGAGCCUUG | 20 | 5469 |
| HSV1-UL30-2464 | + | CUCGCACGUGAGCCUUGACG | 20 | 5470 |
| HSV1-UL30-2465 | + | UGCGCCACUGCGUCGGCCCU | 20 | 5471 |
| HSV1-UL30-2466 | + | GCGCCACUGCGUCGGCCCUC | 20 | 5472 |
| HSV1-UL30-2467 | + | CGCCACUGCGUCGGCCCUCA | 20 | 5473 |
| HSV1-UL30-2468 | + | CCACUGCGUCGGCCCUCAGG | 20 | 5474 |
| HSV1-UL30-2469 | + | CGGCCCUCAGGGAGAGCGUG | 20 | 5475 |
| HSV1-UL30-2470 | + | AGCGUGCUGAAGCACAGGUU | 20 | 5476 |
| HSV1-UL30-2471 | + | CUGAAGCACAGGUUGUGGGC | 20 | 5477 |
| HSV1-UL30-2472 | + | GGUUGUGGGCCUGGAUGAUG | 20 | 5478 |
| HSV1-UL30-2473 | + | GUUGUGGGCCUGGAUGAUGC | 20 | 5479 |
| HSV1-UL30-2474 | + | UGGGGUACAGGCUGGCAAAG | 20 | 5480 |
| HSV1-UL30-2475 | + | UGGCAAAGUCGAACACCACC | 20 | 5481 |
| HSV1-UL30-2476 | + | GGCAAAGUCGAACACCACCA | 20 | 5482 |
| HSV1-UL30-2477 | + | AACACCACCACGGGGUUCAC | 20 | 5483 |
| HSV1-UL30-2478 | + | CCACGGGGUUCACGUGAAAC | 20 | 5484 |
| HSV1-UL30-2479 | + | CACGGGGUUCACGUGAAACC | 20 | 5485 |
| HSV1-UL30-2480 | + | GGUUCACGUGAAACCCGGAA | 20 | 5486 |
| HSV1-UL30-2481 | + | GUUCACGUGAAACCCGGAAG | 20 | 5487 |
| HSV1-UL30-2482 | + | UGAAACCCGGAAGUGGGGUC | 20 | 5488 |
| HSV1-UL30-2483 | + | UCUGGCCGCUCCUCGUCCUC | 20 | 5489 |
| HSV1-UL30-2484 | + | CUCGUCCUCCCGGGCUGCGG | 20 | 5490 |
| HSV1-UL30-2485 | + | CCCGGGCUGCGGCCGGACGC | 20 | 5491 |
| HSV1-UL30-2486 | + | CCGGCGCCCCUAAAUCGCCC | 20 | 5492 |
| HSV1-UL30-2487 | + | AAUCGCCCCUGGGUGUCCGG | 20 | 5493 |
| HSV1-UL30-2488 | + | CGCAGCAGGCACGUAAAGAC | 20 | 5494 |
| HSV1-UL30-2489 | + | UGCUGGCCGUCGUAGAUGGU | 20 | 5495 |
| HSV1-UL30-2490 | + | ACCCGCCAAGCGCGCGACGG | 20 | 5496 |
| HSV1-UL30-2491 | + | CCGCCAAGCGCGCGACGGCC | 20 | 5497 |
| HSV1-UL30-2492 | + | GCGACGGCCGAGAGCUCCAG | 20 | 5498 |
| HSV1-UL30-2493 | + | CGACGGCCGAGAGCUCCAGA | 20 | 5499 |
| HSV1-UL30-2494 | + | AAAAACAGCUGGCCCACCAG | 20 | 5500 |
| HSV1-UL30-2495 | + | AAAACAGCUGGCCCACCAGC | 20 | 5501 |
| HSV1-UL30-2496 | + | AAACAGCUGGCCCACCAGCA | 20 | 5502 |
| HSV1-UL30-2497 | + | CGCCGAUCACCCCGCGUUGC | 20 | 5503 |
| HSV1-UL30-2498 | + | CGGGCCCGGCGGCGUAGUAG | 20 | 5504 |
| HSV1-UL30-2499 | + | GGGCCCGGCGGCGUAGUAGG | 20 | 5505 |
| HSV1-UL30-2500 | + | GGCCCGGCGGCGUAGUAGGC | 20 | 5506 |
| HSV1-UL30-2501 | + | AGGUCCUUCUUCUUGUCCUU | 20 | 5507 |
| HSV1-UL30-2502 | + | GGACGGCUUCGGCCACGGCG | 20 | 5508 |
| HSV1-UL30-2503 | + | CACGGCGUUGAGCUUGUAGC | 20 | 5509 |
| HSV1-UL30-2504 | + | CGGCGUUGAGCUUGUAGCUC | 20 | 5510 |
| HSV1-UL30-2505 | + | ACCUUUAUCUUGCUGCGCUU | 20 | 5511 |
| HSV1-UL30-2506 | + | CCUUUAUCUUGCUGCGCUUC | 20 | 5512 |
| HSV1-UL30-2507 | + | CUCUGGCCUAUGUCCCACAC | 20 | 5513 |
| HSV1-UL30-2508 | + | UUCAUGCGGCCGUACCCGUC | 20 | 5514 |
| HSV1-UL30-2509 | + | UCAUGCGGCCGUACCCGUCC | 20 | 5515 |
| HSV1-UL30-2510 | + | CAUGCGGCCGUACCCGUCCA | 20 | 5516 |
| HSV1-UL30-2511 | + | AUGCGGCCGUACCCGUCCAG | 20 | 5517 |
| HSV1-UL30-2512 | + | UGUCCGUCAGCUUGGCCAGC | 20 | 5518 |
| HSV1-UL30-2513 | + | CCGUCAGCUUGGCCAGCAAG | 20 | 5519 |
| HSV1-UL30-2514 | + | UGGCCAGCAAGAAGGGCCAG | 20 | 5520 |
| HSV1-UL30-2515 | + | UGAUGAUGUUGUACCCGGUC | 20 | 5521 |
| HSV1-UL30-2516 | + | UGUUGUACCCGGUCACGAAC | 20 | 5522 |
| HSV1-UL30-2517 | + | GUUGUACCCGGUCACGAACU | 20 | 5523 |
| HSV1-UL30-2518 | + | UCGGGGCCGUACUGUUUCAC | 20 | 5524 |
| HSV1-UL30-2519 | + | CGUACUGUUUCACAAGGGUC | 20 | 5525 |
| HSV1-UL30-2520 | + | UCAUGAAGGCCAACAGCAUC | 20 | 5526 |
| HSV1-UL30-2521 | + | ACAGCAUCUCGAAUUCGCUG | 20 | 5527 |
| HSV1-UL30-2522 | + | UCGAAUUCGCUGUCGAAUUC | 20 | 5528 |
| HSV1-UL30-2523 | + | CGCUGUCGAAUUCCAGAACC | 20 | 5529 |
| HSV1-UL30-2524 | + | CGAAUUCCAGAACCACGGGC | 20 | 5530 |
| HSV1-UL30-2525 | + | CUGGCCGCCAGCUCGUUCAG | 20 | 5531 |
| HSV1-UL30-2526 | + | UGGCCGCCAGCUCGUUCAGG | 20 | 5532 |
| HSV1-UL30-2527 | + | CCAGCUCGUUCAGGUGGGAU | 20 | 5533 |
| HSV1-UL30-2528 | + | CAGCUCGUUCAGGUGGGAUU | 20 | 5534 |
| HSV1-UL30-2529 | + | AGCUCGUUCAGGUGGGAUUC | 20 | 5535 |
| HSV1-UL30-2530 | + | GCUCGUUCAGGUGGGAUUCG | 20 | 5536 |
| HSV1-UL30-2531 | + | GGUGGGAUUCGGGGAGGUCG | 20 | 5537 |
| HSV1-UL30-2532 | + | GUGGGAUUCGGGGAGGUCGC | 20 | 5538 |
| HSV1-UL30-2533 | + | AUUCGGGGAGGUCGCAGGAA | 20 | 5539 |
| HSV1-UL30-2534 | + | GGGGAGGUCGCAGGAACCGA | 20 | 5540 |
| HSV1-UL30-2535 | + | UCGCAGGAACCGAGCGAAAA | 20 | 5541 |
| HSV1-UL30-1345 | + | CGCAGGAACCGAGCGAAAAC | 20 | 4283 |
| HSV1-UL30-2537 | + | CAGGAACCGAGCGAAAACAG | 20 | 5542 |
| HSV1-UL30-2538 | + | GAAAACAGGAGGACGUGCUC | 20 | 5543 |
| HSV1-UL30-2539 | + | GGACGUGCUCCAGGGCGGUG | 20 | 5544 |
| HSV1-UL30-2540 | + | GGGCGGUGGUGGACAGGUCG | 20 | 5545 |
| HSV1-UL30-2541 | + | UGGACAGGUCGUAGAGCAGA | 20 | 5546 |
| HSV1-UL30-2542 | + | UCGUAGAGCAGACAGGAUAU | 20 | 5547 |
| HSV1-UL30-2543 | + | UAUCUGGAUGACCAGGUCCU | 20 | 5548 |
| HSV1-UL30-2544 | + | GUCCUCCGGGUGCCCGGCCA | 20 | 5549 |
| HSV1-UL30-2545 | + | UCCUCCGGGUGCCCGGCCAC | 20 | 5550 |
| HSV1-UL30-2546 | + | CCCCCGCCUUGCAUUCGAUA | 20 | 5551 |
| HSV1-UL30-2547 | + | UGCAUUCGAUAUCGAAGCAC | 20 | 5552 |
| HSV1-UL30-2548 | + | UACAGUUAAACUCGACGUCG | 20 | 5553 |
| HSV1-UL30-2549 | + | ACUCGACGUCGCUGGAUGUC | 20 | 5554 |
| HSV1-UL30-2550 | + | GCUGGAUGUCCCGAAGGCCA | 20 | 5555 |
| HSV1-UL30-2551 | + | CUGGAUGUCCCGAAGGCCAU | 20 | 5556 |
| HSV1-UL30-2552 | + | AAGGCCAUCGGGGCCGCCGG | 20 | 5557 |
| HSV1-UL30-2553 | + | GCGUGUUGUUCCGGCCCGGU | 20 | 5558 |
| HSV1-UL30-2554 | + | CCGGUUUGAGACGGUACCAG | 20 | 5559 |
| HSV1-UL30-2555 | + | GACGGUACCAGCCGAAGGUG | 20 | 5560 |
| HSV1-UL30-2556 | + | ACCAGCCGAAGGUGACGAAC | 20 | 5561 |
| HSV1-UL30-2557 | + | CCAGCCGAAGGUGACGAACC | 20 | 5562 |
| HSV1-UL30-2558 | + | GUGACGAACCCGGGGUUGUC | 20 | 5563 |
| HSV1-UL30-2559 | + | CGAACCCGGGGUUGUCCAGG | 20 | 5564 |
| HSV1-UL30-2560 | + | CCGGGGUUGUCCAGGAUGAA | 20 | 5565 |
| HSV1-UL30-2561 | + | ACCCUCGUACUUCUUGAUGG | 20 | 5566 |
| HSV1-UL30-2562 | + | CGUACUUCUUGAUGGCCGGG | 20 | 5567 |
| HSV1-UL30-2563 | + | UACGACAGCACACGCCCGCU | 20 | 5568 |
| HSV1-UL30-2564 | + | CGGACGUAGACGCGGUAAAA | 20 | 5569 |
| HSV1-UL30-2565 | + | CGUAGACGCGGUAAAACAGA | 20 | 5570 |
| HSV1-UL30-2566 | + | GUAGACGCGGUAAAACAGAG | 20 | 5571 |
| HSV1-UL30-2567 | + | UGCGCUCCACCACCUCCGCC | 20 | 5572 |
| HSV1-UL30-2568 | + | CCUCCGCCUCGAAGUGGUCC | 20 | 5573 |
| HSV1-UL30-2569 | + | CUCCGCCUCGAAGUGGUCCG | 20 | 5574 |
| HSV1-UL30-2570 | + | AAGUGGUCCGCGGAGAUGCC | 20 | 5575 |
| HSV1-UL30-2571 | + | AGUGGUCCGCGGAGAUGCCG | 20 | 5576 |
| HSV1-UL30-2572 | + | GAUGCCGCGGAACGACGCGC | 20 | 5577 |
| HSV1-UL30-2573 | + | AUGCCGCGGAACGACGCGCC | 20 | 5578 |
| HSV1-UL30-2574 | + | UGCCGCGGAACGACGCGCCC | 20 | 5579 |
| HSV1-UL30-2575 | + | GACGCGCCCGGGGACUCGCG | 20 | 5580 |
| HSV1-UL30-2576 | + | GGGCCGCGGCCAUGCGCUCG | 20 | 5581 |
| HSV1-UL30-2577 | + | CAUGCGCUCGCAGAGAUCUC | 20 | 5582 |
| HSV1-UL30-2578 | + | AUGCGCUCGCAGAGAUCUCG | 20 | 5583 |
| HSV1-UL30-2579 | + | UACUGCCGCGUGCCGUAAAC | 20 | 5584 |
| HSV1-UL30-2580 | + | AACGGCCACCCGGUGGCCUU | 20 | 5585 |
| HSV1-UL30-2581 | + | ACGGCCACCCGGUGGCCUUC | 20 | 5586 |
| HSV1-UL30-2582 | + | UGGCCUUCCGGAGUCAGGCC | 20 | 5587 |
| HSV1-UL30-2583 | + | GGCCUUCCGGAGUCAGGCCC | 20 | 5588 |
| HSV1-UL30-2584 | + | GCUCUAUGCAACAUUCG | 17 | 5589 |
| HSV1-UL30-2585 | + | CGCCGGCACCCACCGCC | 17 | 5590 |
| HSV1-UL30-2586 | + | GCCCCGAACCCUGCGGU | 17 | 5591 |
| HSV1-UL30-2587 | + | CCCCGAACCCUGCGGUC | 17 | 5592 |
| HSV1-UL30-2588 | + | CCGCGCGGCCACGUCGU | 17 | 5593 |
| HSV1-UL30-2589 | + | CGCGCGGCCACGUCGUC | 17 | 5594 |
| HSV1-UL30-2590 | + | GCGCGGCCACGUCGUCC | 17 | 5595 |
| HSV1-UL30-2591 | + | CGCGGCCACGUCGUCCG | 17 | 5596 |
| HSV1-UL30-2592 | + | CCGGGGGGUGCCACACU | 17 | 5597 |
| HSV1-UL30-2593 | + | CGGGGGGUGCCACACUU | 17 | 5598 |
| HSV1-UL30-2594 | + | GGGGGGUGCCACACUUC | 17 | 5599 |
| HSV1-UL30-2595 | + | UUGGCGUUAUUCCCAAA | 17 | 5600 |
| HSV1-UL30-2596 | + | UAUUCCCAAACAGGGCC | 17 | 5601 |
| HSV1-UL30-2597 | + | CACGCCGCCCCCAACAG | 17 | 5602 |
| HSV1-UL30-1438 | + | ACGCCGCCCCCAACAGG | 17 | 4376 |
| HSV1-UL30-2599 | + | CGCCGCCCCCAACAGGU | 17 | 5603 |
| HSV1-UL30-2600 | + | CCGCCCCCAACAGGUGG | 17 | 5604 |
| HSV1-UL30-2601 | + | AAGUAAUAGUCCGUGUU | 17 | 5605 |
| HSV1-UL30-2602 | + | GUGUUCAGGGCGACGCC | 17 | 5606 |
| HSV1-UL30-2603 | + | CGUGGGCAAUGGCGUAU | 17 | 5607 |
| HSV1-UL30-2604 | + | GUGGGCAAUGGCGUAUG | 17 | 5608 |
| HSV1-UL30-2605 | + | CGGGAUCCUCGGCCAGC | 17 | 5609 |
| HSV1-UL30-2606 | + | UCGGACACCAGCAGCUU | 17 | 5610 |
| HSV1-UL30-2607 | + | CGGACACCAGCAGCUUG | 17 | 5611 |
| HSV1-UL30-2608 | + | CCAGCAGCUUGCGGGGC | 17 | 5612 |
| HSV1-UL30-2609 | + | GGGCUUGGACGCGCCUC | 17 | 5613 |
| HSV1-UL30-2610 | + | GGCUUGGACGCGCCUCC | 17 | 5614 |
| HSV1-UL30-2611 | + | GCUUGGACGCGCCUCCC | 17 | 5615 |
| HSV1-UL30-2612 | + | CUUGGACGCGCCUCCCG | 17 | 5616 |
| HSV1-UL30-2613 | + | GCAGGCGACGGCGUCUC | 17 | 5617 |
| HSV1-UL30-2614 | + | CAGGCGACGGCGUCUCC | 17 | 5618 |
| HSV1-UL30-2615 | + | AGGCGACGGCGUCUCCC | 17 | 5619 |
| HSV1-UL30-2616 | + | CUCCCGGGGGCGCUUGG | 17 | 5620 |
| HSV1-UL30-2617 | + | UCCCGGGGGCGCUUGGC | 17 | 5621 |
| HSV1-UL30-2618 | + | CCCGGGGGCGCUUGGCC | 17 | 5622 |
| HSV1-UL30-2619 | + | CCGGGGGCGCUUGGCCG | 17 | 5623 |
| HSV1-UL30-2620 | + | GGGGGCGCUUGGCCGGG | 17 | 5624 |
| HSV1-UL30-2621 | + | CGCUUGGCCGGGGAGGG | 17 | 5625 |
| HSV1-UL30-2622 | + | CCGGGGAGGGCAGGGCC | 17 | 5626 |
| HSV1-UL30-1473 | + | CGGGGAGGGCAGGGCCG | 17 | 4411 |
| HSV1-UL30-1474 | + | GGGGAGGGCAGGGCCGC | 17 | 4412 |
| HSV1-UL30-1475 | + | GGGAGGGCAGGGCCGCG | 17 | 4413 |
| HSV1-UL30-1476 | + | GGAGGGCAGGGCCGCGG | 17 | 4414 |
| HSV1-UL30-1477 | + | GAGGGCAGGGCCGCGGG | 17 | 4415 |
| HSV1-UL30-2628 | + | GCAGGGCCGCGGGGGGG | 17 | 5627 |
| HSV1-UL30-2629 | + | GGGGGCGGGCUCGUCCC | 17 | 5628 |
| HSV1-UL30-2630 | + | GGGGCGGGCUCGUCCCC | 17 | 5629 |
| HSV1-UL30-2631 | + | GCGGCGGCGUCUAGCUC | 17 | 5630 |
| HSV1-UL30-2632 | + | CGGCGGCGUCUAGCUCG | 17 | 5631 |
| HSV1-UL30-2633 | + | GCGGCGUCUAGCUCGCG | 17 | 5632 |
| HSV1-UL30-2634 | + | ACCGUCUCCUCUACCUC | 17 | 5633 |
| HSV1-UL30-2635 | + | UCCUCUACCUCGCGGGU | 17 | 5634 |
| HSV1-UL30-2636 | + | CUGGGCCACGAUCACGU | 17 | 5635 |
| HSV1-UL30-2637 | + | UGGGCCACGAUCACGUA | 17 | 5636 |
| HSV1-UL30-2638 | + | ACGGGAUCCGGUCCUUG | 17 | 5637 |
| HSV1-UL30-2639 | + | GAUCCGGUCCUUGAUGG | 17 | 5638 |
| HSV1-UL30-2640 | + | AUCCGGUCCUUGAUGGA | 17 | 5639 |
| HSV1-UL30-2641 | + | GACGGGACCUGCGCGCG | 17 | 5640 |
| HSV1-UL30-2642 | + | CCUGCGCGCGGCGGGCC | 17 | 5641 |
| HSV1-UL30-2643 | + | UUGUAAUACACCGUCAG | 17 | 5642 |
| HSV1-UL30-2644 | + | CUUGUUGGUGUACGCGC | 17 | 5643 |
| HSV1-UL30-2645 | + | GUCUGCUCAGUUCGGCG | 17 | 5644 |
| HSV1-UL30-2646 | + | CUGCUCAGUUCGGCGGU | 17 | 5645 |
| HSV1-UL30-2647 | + | GCGGUGAGGACAAAGUC | 17 | 5646 |
| HSV1-UL30-2648 | + | GUCCUGGAUGUCCCUCU | 17 | 5647 |
| HSV1-UL30-2649 | + | GGGUCGGUGAUGCGCCG | 17 | 5648 |
| HSV1-UL30-2650 | + | UGCGCCGAUGGGCGUCU | 17 | 5649 |
| HSV1-UL30-2651 | + | CGCCGAUGGGCGUCUAC | 17 | 5650 |
| HSV1-UL30-2652 | + | CGUCUACGAGGACGGCC | 17 | 5651 |
| HSV1-UL30-2653 | + | CGAACGCCUGCAGUCCC | 17 | 5652 |
| HSV1-UL30-2654 | + | GCCUGCAGUCCCUCGGG | 17 | 5653 |
| HSV1-UL30-2655 | + | CCUGCAGUCCCUCGGGC | 17 | 5654 |
| HSV1-UL30-2656 | + | GCGCCAGCCACUCCUCC | 17 | 5655 |
| HSV1-UL30-2657 | + | CGCCAGCCACUCCUCCG | 17 | 5656 |
| HSV1-UL30-2658 | + | CUAACGCGGCGGCCGCU | 17 | 5657 |
| HSV1-UL30-2659 | + | UAACGCGGCGGCCGCUC | 17 | 5658 |
| HSV1-UL30-2660 | + | UAAAACAGCAGGUCGAC | 17 | 5659 |
| HSV1-UL30-2661 | + | GCAGGUCGACCAGGGCC | 17 | 5660 |
| HSV1-UL30-2662 | + | CAGGUCGACCAGGGCCC | 17 | 5661 |
| HSV1-UL30-2663 | + | CCAGAUCCACGCCCUUG | 17 | 5662 |
| HSV1-UL30-2664 | + | CGAUCAGCAGCAGCUUG | 17 | 5663 |
| HSV1-UL30-2665 | + | UGAACGUCUUUUCGCAC | 17 | 5664 |
| HSV1-UL30-2666 | + | UUUCGCACUCGAGUUUG | 17 | 5665 |
| HSV1-UL30-2667 | + | UUCGCACUCGAGUUUGA | 17 | 5666 |
| HSV1-UL30-2668 | + | UCGCACUCGAGUUUGAU | 17 | 5667 |
| HSV1-UL30-2669 | + | CGCACUCGAGUUUGAUG | 17 | 5668 |
| HSV1-UL30-2670 | + | UCGAGUUUGAUGGGGGG | 17 | 5669 |
| HSV1-UL30-2671 | + | GGGCAGAAACAGCGCGC | 17 | 5670 |
| HSV1-UL30-2672 | + | CCGUCAGCCCGGCGGCC | 17 | 5671 |
| HSV1-UL30-2673 | + | CGCGGCACAGCACAAAG | 17 | 5672 |
| HSV1-UL30-1554 | + | GCGGCACAGCACAAAGA | 17 | 4492 |
| HSV1-UL30-2675 | + | CCCCGUAGAUGAUGCGC | 17 | 5673 |
| HSV1-UL30-2676 | + | CCCGUAGAUGAUGCGCA | 17 | 5674 |
| HSV1-UL30-2677 | + | AGAUGAUGCGCAUGGAA | 17 | 5675 |
| HSV1-UL30-2678 | + | UGCGCAUGGAAUAGGGC | 17 | 5676 |
| HSV1-UL30-2679 | + | GCGCAUGGAAUAGGGCC | 17 | 5677 |
| HSV1-UL30-2680 | + | CGCAUGGAAUAGGGCCC | 17 | 5678 |
| HSV1-UL30-2681 | + | GCGCAUGUCGGCCGCCU | 17 | 5679 |
| HSV1-UL30-2682 | + | CGCAUGUCGGCCGCCUC | 17 | 5680 |
| HSV1-UL30-2683 | + | GCAUGUCGGCCGCCUCC | 17 | 5681 |
| HSV1-UL30-2684 | + | GCCUCCGGGAAAUCGGC | 17 | 5682 |
| HSV1-UL30-2685 | + | CCUCCGGGAAAUCGGCC | 17 | 5683 |
| HSV1-UL30-2686 | + | AAUCGGCCAGGAGCUGU | 17 | 5684 |
| HSV1-UL30-2687 | + | AAGGCCGCCCAGCGCGC | 17 | 5685 |
| HSV1-UL30-2688 | + | CGCGCGUGGACGUACUC | 17 | 5686 |
| HSV1-UL30-2689 | + | GGACGUACUCGCGGGUC | 17 | 5687 |
| HSV1-UL30-2690 | + | GCAACGUGCAGGCACGG | 17 | 5688 |
| HSV1-UL30-2691 | + | CAACGUGCAGGCACGGC | 17 | 5689 |
| HSV1-UL30-2692 | + | GUCCGUGCUGCACUCCC | 17 | 5690 |
| HSV1-UL30-2693 | + | UCCCGUGAACCCGUACA | 17 | 5691 |
| HSV1-UL30-2694 | + | GCGGCCUGCUGCUUGUC | 17 | 5692 |
| HSV1-UL30-2695 | + | CGGCCUGCUGCUUGUCC | 17 | 5693 |
| HSV1-UL30-2696 | + | CCAGGAGCACGGCCUCC | 17 | 5694 |
| HSV1-UL30-2697 | + | CAGGAGCACGGCCUCCU | 17 | 5695 |
| HSV1-UL30-2698 | + | GCCUCCUCGGGGCUGCU | 17 | 5696 |
| HSV1-UL30-2699 | + | CCUCCUCGGGGCUGCUC | 17 | 5697 |
| HSV1-UL30-2700 | + | CUCCUCGGGGCUGCUCU | 17 | 5698 |
| HSV1-UL30-2701 | + | UCCUCGGGGCUGCUCUG | 17 | 5699 |
| HSV1-UL30-2702 | + | GCUGCUCUGGGGAAUCC | 17 | 5700 |
| HSV1-UL30-2703 | + | CUCUGGGGAAUCCGCGA | 17 | 5701 |
| HSV1-UL30-2704 | + | GGAUCUGCUUUCGCAUG | 17 | 5702 |
| HSV1-UL30-2705 | + | AUGGCGAGCCAGUCCCG | 17 | 5703 |
| HSV1-UL30-2706 | + | UGGCGAGCCAGUCCCGC | 17 | 5704 |
| HSV1-UL30-2707 | + | GCGAGCCAGUCCCGCAG | 17 | 5705 |
| HSV1-UL30-2708 | + | AGUCCCGCAGGAGGAUG | 17 | 5706 |
| HSV1-UL30-2709 | + | UCCCGCAGGAGGAUGCU | 17 | 5707 |
| HSV1-UL30-2710 | + | CCCGCAGGAGGAUGCUG | 17 | 5708 |
| HSV1-UL30-2711 | + | AGGAGGCUCUCUCGCAC | 17 | 5709 |
| HSV1-UL30-2712 | + | CUCGCACGUGAGCCUUG | 17 | 5710 |
| HSV1-UL30-2713 | + | GCACGUGAGCCUUGACG | 17 | 5711 |
| HSV1-UL30-2714 | + | GCCACUGCGUCGGCCCU | 17 | 5712 |
| HSV1-UL30-2715 | + | CCACUGCGUCGGCCCUC | 17 | 5713 |
| HSV1-UL30-2716 | + | CACUGCGUCGGCCCUCA | 17 | 5714 |
| HSV1-UL30-2717 | + | CUGCGUCGGCCCUCAGG | 17 | 5715 |
| HSV1-UL30-2718 | + | CCCUCAGGGAGAGCGUG | 17 | 5716 |
| HSV1-UL30-2719 | + | GUGCUGAAGCACAGGUU | 17 | 5717 |
| HSV1-UL30-2720 | + | AAGCACAGGUUGUGGGC | 17 | 5718 |
| HSV1-UL30-2721 | + | UGUGGGCCUGGAUGAUG | 17 | 5719 |
| HSV1-UL30-2722 | + | GUGGGCCUGGAUGAUGC | 17 | 5720 |
| HSV1-UL30-2723 | + | GGUACAGGCUGGCAAAG | 17 | 5721 |
| HSV1-UL30-2724 | + | CAAAGUCGAACACCACC | 17 | 5722 |
| HSV1-UL30-2725 | + | AAAGUCGAACACCACCA | 17 | 5723 |
| HSV1-UL30-2726 | + | ACCACCACGGGGUUCAC | 17 | 5724 |
| HSV1-UL30-2727 | + | CGGGGUUCACGUGAAAC | 17 | 5725 |
| HSV1-UL30-2728 | + | GGGGUUCACGUGAAACC | 17 | 5726 |
| HSV1-UL30-2729 | + | UCACGUGAAACCCGGAA | 17 | 5727 |
| HSV1-UL30-2730 | + | CACGUGAAACCCGGAAG | 17 | 5728 |
| HSV1-UL30-2731 | + | AACCCGGAAGUGGGGUC | 17 | 5729 |
| HSV1-UL30-2732 | + | GGCCGCUCCUCGUCCUC | 17 | 5730 |
| HSV1-UL30-2733 | + | GUCCUCCCGGGCUGCGG | 17 | 5731 |
| HSV1-UL30-2734 | + | GGGCUGCGGCCGGACGC | 17 | 5732 |
| HSV1-UL30-2735 | + | GCGCCCCUAAAUCGCCC | 17 | 5733 |
| HSV1-UL30-2736 | + | CGCCCCUGGGUGUCCGG | 17 | 5734 |
| HSV1-UL30-2737 | + | AGCAGGCACGUAAAGAC | 17 | 5735 |
| HSV1-UL30-2738 | + | UGGCCGUCGUAGAUGGU | 17 | 5736 |
| HSV1-UL30-2739 | + | CGCCAAGCGCGCGACGG | 17 | 5737 |
| HSV1-UL30-2740 | + | CCAAGCGCGCGACGGCC | 17 | 5738 |
| HSV1-UL30-2741 | + | ACGGCCGAGAGCUCCAG | 17 | 5739 |
| HSV1-UL30-2742 | + | CGGCCGAGAGCUCCAGA | 17 | 5740 |
| HSV1-UL30-2743 | + | AACAGCUGGCCCACCAG | 17 | 5741 |
| HSV1-UL30-2744 | + | ACAGCUGGCCCACCAGC | 17 | 5742 |
| HSV1-UL30-2745 | + | CAGCUGGCCCACCAGCA | 17 | 5743 |
| HSV1-UL30-2746 | + | CGAUCACCCCGCGUUGC | 17 | 5744 |
| HSV1-UL30-2747 | + | GCCCGGCGGCGUAGUAG | 17 | 5745 |
| HSV1-UL30-2748 | + | CCCGGCGGCGUAGUAGG | 17 | 5746 |
| HSV1-UL30-2749 | + | CCGGCGGCGUAGUAGGC | 17 | 5747 |
| HSV1-UL30-2750 | + | UCCUUCUUCUUGUCCUU | 17 | 5748 |
| HSV1-UL30-2751 | + | CGGCUUCGGCCACGGCG | 17 | 5749 |
| HSV1-UL30-2752 | + | GGCGUUGAGCUUGUAGC | 17 | 5750 |
| HSV1-UL30-2753 | + | CGUUGAGCUUGUAGCUC | 17 | 5751 |
| HSV1-UL30-2754 | + | UUUAUCUUGCUGCGCUU | 17 | 5752 |
| HSV1-UL30-2755 | + | UUAUCUUGCUGCGCUUC | 17 | 5753 |
| HSV1-UL30-2756 | + | UGGCCUAUGUCCCACAC | 17 | 5754 |
| HSV1-UL30-2757 | + | AUGCGGCCGUACCCGUC | 17 | 5755 |
| HSV1-UL30-2758 | + | UGCGGCCGUACCCGUCC | 17 | 5756 |
| HSV1-UL30-2759 | + | GCGGCCGUACCCGUCCA | 17 | 5757 |
| HSV1-UL30-2760 | + | CGGCCGUACCCGUCCAG | 17 | 5758 |
| HSV1-UL30-2761 | + | CCGUCAGCUUGGCCAGC | 17 | 5759 |
| HSV1-UL30-2762 | + | UCAGCUUGGCCAGCAAG | 17 | 5760 |
| HSV1-UL30-2763 | + | CCAGCAAGAAGGGCCAG | 17 | 5761 |
| HSV1-UL30-2764 | + | UGAUGUUGUACCCGGUC | 17 | 5762 |
| HSV1-UL30-2765 | + | UGUACCCGGUCACGAAC | 17 | 5763 |
| HSV1-UL30-2766 | + | GUACCCGGUCACGAACU | 17 | 5764 |
| HSV1-UL30-2767 | + | GGGCCGUACUGUUUCAC | 17 | 5765 |
| HSV1-UL30-2768 | + | ACUGUUUCACAAGGGUC | 17 | 5766 |
| HSV1-UL30-2769 | + | UGAAGGCCAACAGCAUC | 17 | 5767 |
| HSV1-UL30-2770 | + | GCAUCUCGAAUUCGCUG | 17 | 5768 |
| HSV1-UL30-2771 | + | AAUUCGCUGUCGAAUUC | 17 | 5769 |
| HSV1-UL30-2772 | + | UGUCGAAUUCCAGAACC | 17 | 5770 |
| HSV1-UL30-2773 | + | AUUCCAGAACCACGGGC | 17 | 5771 |
| HSV1-UL30-2774 | + | GCCGCCAGCUCGUUCAG | 17 | 5772 |
| HSV1-UL30-2775 | + | CCGCCAGCUCGUUCAGG | 17 | 5773 |
| HSV1-UL30-2776 | + | GCUCGUUCAGGUGGGAU | 17 | 5774 |
| HSV1-UL30-2777 | + | CUCGUUCAGGUGGGAUU | 17 | 5775 |
| HSV1-UL30-2778 | + | UCGUUCAGGUGGGAUUC | 17 | 5776 |
| HSV1-UL30-2779 | + | CGUUCAGGUGGGAUUCG | 17 | 5777 |
| HSV1-UL30-2780 | + | GGGAUUCGGGGAGGUCG | 17 | 5778 |
| HSV1-UL30-2781 | + | GGAUUCGGGGAGGUCGC | 17 | 5779 |
| HSV1-UL30-2782 | + | CGGGGAGGUCGCAGGAA | 17 | 5780 |
| HSV1-UL30-2783 | + | GAGGUCGCAGGAACCGA | 17 | 5781 |
| HSV1-UL30-2784 | + | CAGGAACCGAGCGAAAA | 17 | 5782 |
| HSV1-UL30-1694 | + | AGGAACCGAGCGAAAAC | 17 | 4632 |
| HSV1-UL30-2786 | + | GAACCGAGCGAAAACAG | 17 | 5783 |
| HSV1-UL30-2787 | + | AACAGGAGGACGUGCUC | 17 | 5784 |
| HSV1-UL30-2788 | + | CGUGCUCCAGGGCGGUG | 17 | 5785 |
| HSV1-UL30-2789 | + | CGGUGGUGGACAGGUCG | 17 | 5786 |
| HSV1-UL30-2790 | + | ACAGGUCGUAGAGCAGA | 17 | 5787 |
| HSV1-UL30-2791 | + | UAGAGCAGACAGGAUAU | 17 | 5788 |
| HSV1-UL30-2792 | + | CUGGAUGACCAGGUCCU | 17 | 5789 |
| HSV1-UL30-2793 | + | CUCCGGGUGCCCGGCCA | 17 | 5790 |
| HSV1-UL30-2794 | + | UCCGGGUGCCCGGCCAC | 17 | 5791 |
| HSV1-UL30-2795 | + | CCGCCUUGCAUUCGAUA | 17 | 5792 |
| HSV1-UL30-2796 | + | AUUCGAUAUCGAAGCAC | 17 | 5793 |
| HSV1-UL30-2797 | + | AGUUAAACUCGACGUCG | 17 | 5794 |
| HSV1-UL30-2798 | + | CGACGUCGCUGGAUGUC | 17 | 5795 |
| HSV1-UL30-2799 | + | GGAUGUCCCGAAGGCCA | 17 | 5796 |
| HSV1-UL30-2800 | + | GAUGUCCCGAAGGCCAU | 17 | 5797 |
| HSV1-UL30-2801 | + | GCCAUCGGGGCCGCCGG | 17 | 5798 |
| HSV1-UL30-2802 | + | UGUUGUUCCGGCCCGGU | 17 | 5799 |
| HSV1-UL30-2803 | + | GUUUGAGACGGUACCAG | 17 | 5800 |
| HSV1-UL30-2804 | + | GGUACCAGCCGAAGGUG | 17 | 5801 |
| HSV1-UL30-2805 | + | AGCCGAAGGUGACGAAC | 17 | 5802 |
| HSV1-UL30-2806 | + | GCCGAAGGUGACGAACC | 17 | 5803 |
| HSV1-UL30-2807 | + | ACGAACCCGGGGUUGUC | 17 | 5804 |
| HSV1-UL30-2808 | + | ACCCGGGGUUGUCCAGG | 17 | 5805 |
| HSV1-UL30-2809 | + | GGGUUGUCCAGGAUGAA | 17 | 5806 |
| HSV1-UL30-2810 | + | CUCGUACUUCUUGAUGG | 17 | 5807 |
| HSV1-UL30-2811 | + | ACUUCUUGAUGGCCGGG | 17 | 5808 |
| HSV1-UL30-2812 | + | GACAGCACACGCCCGCU | 17 | 5809 |
| HSV1-UL30-2813 | + | ACGUAGACGCGGUAAAA | 17 | 5810 |
| HSV1-UL30-2814 | + | AGACGCGGUAAAACAGA | 17 | 5811 |
| HSV1-UL30-2815 | + | GACGCGGUAAAACAGAG | 17 | 5812 |
| HSV1-UL30-2816 | + | GCUCCACCACCUCCGCC | 17 | 5813 |
| HSV1-UL30-2817 | + | CCGCCUCGAAGUGGUCC | 17 | 5814 |
| HSV1-UL30-2818 | + | CGCCUCGAAGUGGUCCG | 17 | 5815 |
| HSV1-UL30-2819 | + | UGGUCCGCGGAGAUGCC | 17 | 5816 |
| HSV1-UL30-2820 | + | GGUCCGCGGAGAUGCCG | 17 | 5817 |
| HSV1-UL30-2821 | + | GCCGCGGAACGACGCGC | 17 | 5818 |
| HSV1-UL30-1747 | + | CCGCGGAACGACGCGCC | 17 | 4685 |
| HSV1-UL30-1748 | + | CGCGGAACGACGCGCCC | 17 | 4686 |
| HSV1-UL30-2824 | + | GCGCCCGGGGACUCGCG | 17 | 5819 |
| HSV1-UL30-2825 | + | CCGCGGCCAUGCGCUCG | 17 | 5820 |
| HSV1-UL30-2826 | + | GCGCUCGCAGAGAUCUC | 17 | 5821 |
| HSV1-UL30-2827 | + | CGCUCGCAGAGAUCUCG | 17 | 5822 |
| HSV1-UL30-2828 | + | UGCCGCGUGCCGUAAAC | 17 | 5823 |
| HSV1-UL30-2829 | + | GGCCACCCGGUGGCCUU | 17 | 5824 |
| HSV1-UL30-2830 | + | GCCACCCGGUGGCCUUC | 17 | 5825 |
| HSV1-UL30-2831 | + | CCUUCCGGAGUCAGGCC | 17 | 5826 |
| HSV1-UL30-2832 | + | CUUCCGGAGUCAGGCCC | 17 | 5827 |

[0739] Table 2F provides exemplary targeting domains for knocking out the UL30 gene selected according to the first tier parameters. The targeting domains are selected based on location within first 500 bp of the coding sequence of the UL30 gene. It is contemplated herein that the targeting domain hybridizes to the target domain through complementary base pairing. Any of the targeting domains in the table can be used with a N. meningitidis Cas9 molecule that gives double stranded cleavage. Any of the targeting domains in the table can be used with a N. meningitidis Cas9 single-stranded break nucleases (nickases). In an embodiment, dual targeting is used to create two nicks on opposite DNA strands by using N. meningitidis Cas9 nickases with two targeting domains that are complementary to opposite DNA strands, e.g., a gRNA comprising any minus strand targeting domain may be paired any gRNA comprising a plus strand targeting domain provided that the two gRNAs are oriented on the DNA such that PAMs face outward and the distance between the 5′ ends of the gRNAs is 0-50 bp.

TABLE 2F
1st Tier

| | | | Target | |
|---|---|---|---|---|
| | DNA | | Site | |
| gRNA Name | Strand | Targeting Domain | Length | Seq ID |
| HSV1- | − | ACUAUAGCGAAUGCGAUGAA | 20 | 5828 |
| UL30-419 | | | | |
| HSV1- | − | AUAGCGAAUGCGAUGAA | 17 | 5829 |
| UL30-420 | | | | |

[0740] Table 2G provides targeting domains for knocking out the UL30 gene selected according to the second tier parameters. The targeting domains are selected based on location within the coding sequence (but downstream of the first 500 bp) of the UL30 gene. It is contemplated herein that the targeting domain hybridizes to the target domain through complementary base pairing. Any of the targeting domains in the table can be used with a N. meningitidis Cas9 molecule that gives double stranded cleavage. Any of the targeting domains in the table can be used with a N. meningitidis Cas9 single-stranded break nucleases (nickases). In an embodiment, dual targeting is used to create two nicks on opposite DNA strands by using N. meningitidis Cas9 nickases with two targeting domains that are complementary to opposite DNA strands, e.g., a gRNA comprising any minus strand targeting domain may be paired any gRNA comprising a plus strand targeting domain provided that the two gRNAs are oriented on the DNA such that PAMs face outward and the distance between the 5′ ends of the gRNAs is 0-50 bp.

TABLE 2G
2nd Tier

| | DNA | | Target Site | |
|---|---|---|---|---|
| gRNA Name | Strand | Targeting Domain | Length | Seq ID |
| HSV1-UL30-1857 | − | CAUGGUGAACAUCGACAUGU | 20 | 4907 |
| HSV1-UL30-2834 | − | GUGAUCGGCGAGUACUGCAU | 20 | 5830 |
| HSV1-UL30-2835 | − | UUAUUCUGCCGGACACCCAG | 20 | 5831 |
| HSV1-UL30-2836 | − | CAUGCGAAAGCAGAUCCGCU | 20 | 5832 |
| HSV1-UL30-2837 | − | GCGGCCUUCGAACAGCUCCU | 20 | 5833 |
| HSV1-UL30-2139 | − | GGUGAACAUCGACAUGU | 17 | 5172 |
| HSV1-UL30-2839 | − | AUCGGCGAGUACUGCAU | 17 | 5834 |
| HSV1-UL30-2840 | − | UUCUGCCGGACACCCAG | 17 | 5835 |
| HSV1-UL30-2841 | − | GCGAAAGCAGAUCCGCU | 17 | 5836 |
| HSV1-UL30-2842 | − | GCCUUCGAACAGCUCCU | 17 | 5837 |
| HSV1-UL30-2525 | + | CUGGCCGCCAGCUCGUUCAG | 20 | 5531 |
| HSV1-UL30-2774 | + | GCCGCCAGCUCGUUCAG | 17 | 5772 |

[0741] Table 3A provides exemplary targeting domains for knocking out the UL48 gene selected according to first tier parameters. The targeting domains are selected based on location within the first 500 bp of the coding sequence of the UL48 gene and orthogonality against the human genome. It is contemplated herein that the targeting domain hybridizes to the target domain through complementary base pairing. Any of the targeting domains in the table can be used with a S. pyogenes Cas9 molecule that gives double stranded cleavage. Any of the targeting domains in the table can be used with a S. pyogenes Cas9 single-stranded break nucleases (nickases). In an embodiment, dual targeting is used to create two nicks on opposite DNA strands by using S. pyogenes Cas9 nickases with two targeting domains that are complementary to opposite DNA strands, e.g., a gRNA comprising any minus strand targeting domain may be paired any gRNA comprising a plus strand targeting domain provided that the two gRNAs are oriented on the DNA such that PAMs face outward and the distance between the 5′ ends of the gRNAs is 0-50 bp.

TABLE 3A
1st Tier

| | | | Target Site | Seq |
|---|---|---|---|---|
| gRNA Name | DNA Strand | Targeting Domain | Length | ID |
| HSV1-UL48-8 | − | CGGGGGUCCCAAAAACACCC | 20 | 5838 |
| HSV1-UL48-9 | − | GGGUCCCAAAAACACCCCGG | 20 | 5839 |
| HSV1-UL48-10 | − | GGCCCCCCCGCUGUACGCAA | 20 | 5840 |
| HSV1-UL48-11 | − | GCCCCCCCGCUGUACGCAAC | 20 | 5841 |
| HSV1-UL48-12 | − | CCCCCCCGCUGUACGCAACG | 20 | 5842 |
| HSV1-UL48-13 | − | CGCAACGGGGCGCCUGAGCC | 20 | 5843 |
| HSV1-UL48-14 | − | UAACCGUCUCCUCGACGACU | 20 | 5844 |
| HSV1-UL48-15 | − | AACCGUCUCCUCGACGACUU | 20 | 5845 |
| HSV1-UL48-16 | − | CGACGACUUGGGCUUUAGCG | 20 | 5846 |
| HSV1-UL48-17 | − | GACGACUUGGGCUUUAGCGC | 20 | 5847 |
| HSV1-UL48-126 | − | GGGUCCCAAAAACACCC | 17 | 5848 |
| HSV1-UL48-127 | − | UCCCAAAAACACCCCGG | 17 | 5849 |
| HSV1-UL48-128 | − | CCCCCCGCUGUACGCAA | 17 | 5850 |
| HSV1-UL48-129 | − | CCCCCGCUGUACGCAAC | 17 | 5851 |
| HSV1-UL48-130 | − | CCCCGCUGUACGCAACG | 17 | 5852 |
| HSV1-UL48-131 | − | AACGGGGCGCCUGAGCC | 17 | 5853 |
| HSV1-UL48-132 | − | CCGUCUCCUCGACGACU | 17 | 5854 |
| HSV1-UL48-133 | − | CGUCUCCUCGACGACUU | 17 | 5855 |
| HSV1-UL48-134 | − | CGACUUGGGCUUUAGCG | 17 | 5856 |
| HSV1-UL48-135 | − | GACUUGGGCUUUAGCGC | 17 | 5857 |
| HSV1-UL48-19 | − | CAUGCUCGAUACCUGGAACG | 20 | 5858 |
| HSV1-UL48-20 | − | CUGGAACGAGGAUCUGUUUU | 20 | 5859 |
| HSV1-UL48-21 | − | CGACCAACGCCGACCUGUAC | 20 | 5860 |
| HSV1-UL48-22 | − | GACCAACGCCGACCUGUACC | 20 | 5861 |
| HSV1-UL48-23 | − | AUCAACGCUGCCCAGCGAUG | 20 | 5862 |
| HSV1-UL48-24 | − | AACGCUGCCCAGCGAUGUGG | 20 | 5863 |
| HSV1-UL48-25 | − | UGCCCAGCGAUGUGGUGGAA | 20 | 5864 |
| HSV1-UL48-137 | − | GCUCGAUACCUGGAACG | 17 | 5865 |
| HSV1-UL48-138 | − | GAACGAGGAUCUGUUUU | 17 | 5866 |
| HSV1-UL48-139 | − | CCAACGCCGACCUGUAC | 17 | 5867 |
| HSV1-UL48-140 | − | CAACGCCGACCUGUACC | 17 | 5868 |
| HSV1-UL48-141 | − | AACGCUGCCCAGCGAUG | 17 | 5869 |
| HSV1-UL48-142 | − | GCUGCCCAGCGAUGUGG | 17 | 5870 |
| HSV1-UL48-143 | − | CCAGCGAUGUGGUGGAA | 17 | 5871 |
| HSV1-UL48-31 | − | CAUUCGCGCCCACGGCGACG | 20 | 5872 |
| HSV1-UL48-32 | − | CGUGGCCUUCCCUACGCUUC | 20 | 5873 |
| HSV1-UL48-33 | − | ACGCUUCCGGCCACCCGCGA | 20 | 5874 |
| HSV1-UL48-34 | − | CCGGCCACCCGCGACGGCCU | 20 | 5875 |
| HSV1-UL48-35 | − | CGGCCACCCGCGACGGCCUC | 20 | 5876 |
| HSV1-UL48-36 | − | GUUUCUUCCACGCCGAGCUA | 20 | 5877 |
| HSV1-UL48-37 | − | UUUCUUCCACGCCGAGCUAC | 20 | 5878 |
| HSV1-UL48-38 | − | UCCACGCCGAGCUACGGGCG | 20 | 5879 |
| HSV1-UL48-39 | − | CCACGCCGAGCUACGGGCGC | 20 | 5880 |
| HSV1-UL48-149 | − | UCGCGCCCACGGCGACG | 17 | 5881 |
| HSV1-UL48-150 | − | GGCCUUCCCUACGCUUC | 17 | 5882 |
| HSV1-UL48-151 | − | CUUCCGGCCACCCGCGA | 17 | 5883 |
| HSV1-UL48-152 | − | GCCACCCGCGACGGCCU | 17 | 5884 |
| HSV1-UL48-153 | − | CCACCCGCGACGGCCUC | 17 | 5885 |
| HSV1-UL48-154 | − | UCUUCCACGCCGAGCUA | 17 | 5886 |
| HSV1-UL48-155 | − | CUUCCACGCCGAGCUAC | 17 | 5887 |
| HSV1-UL48-156 | − | ACGCCGAGCUACGGGCG | 17 | 5888 |
| HSV1-UL48-157 | − | CGCCGAGCUACGGGCGC | 17 | 5889 |
| HSV1-UL48-41 | + | CUCCUCCCGCGCCCGUAGCU | 20 | 5890 |
| HSV1-UL48-43 | + | GCGCUUCGUAGUAGAGCCCG | 20 | 5891 |
| HSV1-UL48-45 | + | GUAGAGCCCGAGGCCGUCGC | 20 | 5892 |
| HSV1-UL48-159 | + | CUCCCGCGCCCGUAGCU | 17 | 5893 |
| HSV1-UL48-161 | + | CUUCGUAGUAGAGCCCG | 17 | 5894 |
| HSV1-UL48-163 | + | GAGCCCGAGGCCGUCGC | 17 | 5895 |
| HSV1-UL48-48 | + | UCGCGGGUGGCCGGAAGCGU | 20 | 5896 |
| HSV1-UL48-166 | + | CGGGUGGCCGGAAGCGU | 17 | 5897 |
| HSV1-UL48-51 | + | UAGGGAAGGCCACGUCGCCG | 20 | 5898 |
| HSV1-UL48-52 | + | AGGGAAGGCCACGUCGCCGU | 20 | 5899 |
| HSV1-UL48-53 | + | CGUGGGCGCGAAUGUCGAUU | 20 | 5900 |
| HSV1-UL48-54 | + | GUGGGCGCGAAUGUCGAUUU | 20 | 5901 |
| HSV1-UL48-169 | + | GGAAGGCCACGUCGCCG | 17 | 5902 |
| HSV1-UL48-170 | + | GAAGGCCACGUCGCCGU | 17 | 5903 |
| HSV1-UL48-171 | + | GGGCGCGAAUGUCGAUU | 17 | 5904 |
| HSV1-UL48-172 | + | GGCGCGAAUGUCGAUUU | 17 | 5905 |
| HSV1-UL48-58 | + | CCCCCAUUCCACCACAUCGC | 20 | 5906 |
| HSV1-UL48-176 | + | CCAUUCCACCACAUCGC | 17 | 5907 |
| HSV1-UL48-64 | + | CUCCCGGUACAGGUCGGCGU | 20 | 5908 |
| HSV1-UL48-65 | + | CGGUACAGGUCGGCGUUGGU | 20 | 5909 |
| HSV1-UL48-66 | + | CGAAAACAGAUCCUCGUUCC | 20 | 5910 |
| HSV1-UL48-67 | + | CUCGUUCCAGGUAUCGAGCA | 20 | 5911 |
| HSV1-UL48-68 | + | AUCGAGCAUGGUACAUAGCG | 20 | 5912 |
| HSV1-UL48-69 | + | UCGAGCAUGGUACAUAGCGC | 20 | 5913 |
| HSV1-UL48-70 | + | CGAGCAUGGUACAUAGCGCG | 20 | 5914 |
| HSV1-UL48-71 | + | CGCUAAAGCCCAAGUCGUCG | 20 | 5915 |
| HSV1-UL48-182 | + | CCGGUACAGGUCGGCGU | 17 | 5916 |
| HSV1-UL48-183 | + | UACAGGUCGGCGUUGGU | 17 | 5917 |
| HSV1-UL48-184 | + | AAACAGAUCCUCGUUCC | 17 | 5918 |
| HSV1-UL48-185 | + | GUUCCAGGUAUCGAGCA | 17 | 5919 |
| HSV1-UL48-186 | + | GAGCAUGGUACAUAGCG | 17 | 5920 |
| HSV1-UL48-187 | + | AGCAUGGUACAUAGCGC | 17 | 5921 |
| HSV1-UL48-188 | + | GCAUGGUACAUAGCGCG | 17 | 5922 |
| HSV1-UL48-189 | + | UAAAGCCCAAGUCGUCG | 17 | 5923 |
| HSV1-UL48-73 | + | CGUCGAGGAGACGGUUAAAG | 20 | 5924 |
| HSV1-UL48-74 | + | GUCGAGGAGACGGUUAAAGA | 20 | 5925 |
| HSV1-UL48-191 | + | CGAGGAGACGGUUAAAG | 17 | 5926 |
| HSV1-UL48-192 | + | GAGGAGACGGUUAAAGA | 17 | 5927 |
| HSV1-UL48-76 | + | GAGACGGUUAAAGAGGGCGG | 20 | 5928 |
| HSV1-UL48-77 | + | AGACGGUUAAAGAGGGCGGC | 20 | 5929 |
| HSV1-UL48-78 | + | GACGGUUAAAGAGGGCGGCG | 20 | 5930 |
| HSV1-UL48-79 | + | ACGGUUAAAGAGGGCGGCGG | 20 | 5931 |
| HSV1-UL48-80 | + | CGGUUAAAGAGGGCGGCGGG | 20 | 5932 |
| HSV1-UL48-194 | + | ACGGUUAAAGAGGGCGG | 17 | 5933 |
| HSV1-UL48-195 | + | CGGUUAAAGAGGGCGGC | 17 | 5934 |
| HSV1-UL48-196 | + | GGUUAAAGAGGGCGGCG | 17 | 5935 |
| HSV1-UL48-197 | + | GUUAAAGAGGGCGGCGG | 17 | 5936 |
| HSV1-UL48-198 | + | UUAAAGAGGGCGGCGGG | 17 | 5937 |
| HSV1-UL48-97 | + | GCGCCCCGUUGCGUACAGCG | 20 | 5938 |
| HSV1-UL48-98 | + | CGCCCCGUUGCGUACAGCGG | 20 | 5939 |
| HSV1-UL48-99 | + | GCCCCGUUGCGUACAGCGGG | 20 | 5940 |
| HSV1-UL48-100 | + | CCCCGUUGCGUACAGCGGGG | 20 | 5941 |
| HSV1-UL48-215 | + | CCCCGUUGCGUACAGCG | 17 | 5942 |
| HSV1-UL48-216 | + | CCCGUUGCGUACAGCGG | 17 | 5943 |
| HSV1-UL48-217 | + | CCGUUGCGUACAGCGGG | 17 | 5944 |
| HSV1-UL48-218 | + | CGUUGCGUACAGCGGGG | 17 | 5945 |
| HSV1-UL48-102 | + | CGUACAGCGGGGGGGCCGCC | 20 | 5946 |
| HSV1-UL48-103 | + | GUACAGCGGGGGGGCCGCCG | 20 | 5947 |
| HSV1-UL48-104 | + | GGGGGCCGCCGGGGUGUUUU | 20 | 5948 |
| HSV1-UL48-105 | + | GGGGCCGCCGGGGUGUUUUU | 20 | 5949 |
| HSV1-UL48-220 | + | ACAGCGGGGGGGCCGCC | 17 | 5950 |
| HSV1-UL48-221 | + | CAGCGGGGGGGCCGCCG | 17 | 5951 |
| HSV1-UL48-222 | + | GGCCGCCGGGGUGUUUU | 17 | 5952 |
| HSV1-UL48-223 | + | GCCGCCGGGGUGUUUUU | 17 | 5953 |
| HSV1-UL48-107 | + | GUGUUUUUGGGACCCCCGGC | 20 | 5954 |
| HSV1-UL48-225 | + | UUUUUGGGACCCCCGGC | 17 | 5955 |
| HSV1-UL48-108 | + | UGUUUUUGGGACCCCCGGCC | 20 | 5956 |
| HSV1-UL48-226 | + | UUUUGGGACCCCCGGCC | 17 | 5957 |
| HSV1-UL48-118 | + | CAAACAGCUCGUCGACCAAG | 20 | 5958 |
| HSV1-UL48-236 | + | ACAGCUCGUCGACCAAG | 17 | 5959 |

[0742] Table 3B provides exemplary targeting domains for knocking out the UL48 gene selected according to the second tier parameters. The targeting domains are selected based on location within the first 500 bp of the coding sequence of the UL48 gene. It is contemplated herein that the targeting domain hybridizes to the target domain through complementary base pairing. Any of the targeting domains in the table can be used with a S. pyogenes Cas9 molecule that gives double stranded cleavage. Any of the targeting domains in the table can be used with a S. pyogenes Cas9 single-stranded break nucleases (nickases). In an embodiment, dual targeting is used to create two nicks on opposite DNA strands by using S. pyogenes Cas9 nickases with two targeting domains that are complementary to opposite DNA strands, e.g., a gRNA comprising any minus strand targeting domain may be paired any gRNA comprising a plus strand targeting domain provided that the two gRNAs are oriented on the DNA such that PAMs face outward and the distance between the 5′ ends of the gRNAs is 0-50 bp.

TABLE 3B
2nd Tier

| | | | Target Site | Seq |
|---|---|---|---|---|
| gRNA Name | DNA Strand | Targeting Domain | Length | ID |
| HSV1-UL48-1 | − | GCUGUUUGCCGACAUGAACG | 20 | 5960 |
| HSV1-UL48-2 | − | UUUGCCGACAUGAACGCGGA | 20 | 5961 |
| HSV1-UL48-3 | − | UUCGCCACCGCCCCCCCGCC | 20 | 5962 |
| HSV1-UL48-4 | − | CCACCGCCCCCCCGCCCGGC | 20 | 5963 |
| HSV1-UL48-5 | − | CACCGCCCCCCCGCCCGGCC | 20 | 5964 |
| HSV1-UL48-6 | − | ACCGCCCCCCCGCCCGGCCG | 20 | 5965 |
| HSV1-UL48-7 | − | CCGCCCCCCCGCCCGGCCGG | 20 | 5966 |
| HSV1-UL48-18 | − | UAUGUACCAUGCUCGAUACC | 20 | 5967 |
| HSV1-UL48-26 | − | GCCCAGCGAUGUGGUGGAAU | 20 | 5968 |
| HSV1-UL48-27 | − | CCCAGCGAUGUGGUGGAAUG | 20 | 5969 |
| HSV1-UL48-28 | − | CCAGCGAUGUGGUGGAAUGG | 20 | 5970 |
| HSV1-UL48-29 | − | CAGCGAUGUGGUGGAAUGGG | 20 | 5971 |
| HSV1-UL48-30 | − | CAAAUCGACAUUCGCGCCCA | 20 | 5972 |
| HSV1-UL48-40 | − | CGCCGAGCUACGGGCGCGGG | 20 | 5973 |
| HSV1-UL48-119 | − | GUUUGCCGACAUGAACG | 17 | 5974 |
| HSV1-UL48-120 | − | GCCGACAUGAACGCGGA | 17 | 5975 |
| HSV1-UL48-121 | − | GCCACCGCCCCCCCGCC | 17 | 5976 |
| HSV1-UL48-122 | − | CCGCCCCCCCGCCCGGC | 17 | 5977 |
| HSV1-UL48-123 | − | CGCCCCCCCGCCCGGCC | 17 | 5978 |
| HSV1-UL48-124 | − | GCCCCCCCGCCCGGCCG | 17 | 5979 |
| HSV1-UL48-125 | − | CCCCCCCGCCCGGCCGG | 17 | 5980 |
| HSV1-UL48-136 | − | GUACCAUGCUCGAUACC | 17 | 5981 |
| HSV1-UL48-144 | − | CAGCGAUGUGGUGGAAU | 17 | 5982 |
| HSV1-UL48-145 | − | AGCGAUGUGGUGGAAUG | 17 | 5983 |
| HSV1-UL48-146 | − | GCGAUGUGGUGGAAUGG | 17 | 5984 |
| HSV1-UL48-147 | − | CGAUGUGGUGGAAUGGG | 17 | 5985 |
| HSV1-UL48-148 | − | AUCGACAUUCGCGCCCA | 17 | 5986 |
| HSV1-UL48-158 | − | CGAGCUACGGGCGCGGG | 17 | 5987 |
| HSV1-UL48-42 | + | CCCGCGCCCGUAGCUCGGCG | 20 | 5988 |
| HSV1-UL48-44 | + | AGUAGAGCCCGAGGCCGUCG | 20 | 5989 |
| HSV1-UL48-46 | + | GAGCCCGAGGCCGUCGCGGG | 20 | 5990 |
| HSV1-UL48-47 | + | CCGAGGCCGUCGCGGGUGGC | 20 | 5991 |
| HSV1-UL48-49 | + | CGCGGGUGGCCGGAAGCGUA | 20 | 5992 |
| HSV1-UL48-50 | + | GGUGGCCGGAAGCGUAGGGA | 20 | 5993 |
| HSV1-UL48-55 | + | AAUGUCGAUUUGGGUGCGUU | 20 | 5994 |
| HSV1-UL48-56 | + | AUGUCGAUUUGGGUGCGUUC | 20 | 5995 |
| HSV1-UL48-57 | + | UGUCGAUUUGGGUGCGUUCG | 20 | 5996 |
| HSV1-UL48-59 | + | CCCCAUUCCACCACAUCGCU | 20 | 5997 |
| HSV1-UL48-60 | + | CAUCGCUGGGCAGCGUUGAU | 20 | 5998 |
| HSV1-UL48-61 | + | UUGAUAGGAAUUUACACUCC | 20 | 5999 |
| HSV1-UL48-62 | + | GGAAUUUACACUCCCGGUAC | 20 | 6000 |
| HSV1-UL48-63 | + | UUUACACUCCCGGUACAGGU | 20 | 6001 |
| HSV1-UL48-72 | + | AGCCCAAGUCGUCGAGGAGA | 20 | 6002 |
| HSV1-UL48-75 | + | GAGGAGACGGUUAAAGAGGG | 20 | 6003 |
| HSV1-UL48-81 | + | GGUUAAAGAGGGCGGCGGGG | 20 | 6004 |
| HSV1-UL48-82 | + | AAAGAGGGCGGCGGGGGGGA | 20 | 6005 |
| HSV1-UL48-83 | + | AAGAGGGCGGCGGGGGGGAC | 20 | 6006 |
| HSV1-UL48-84 | + | GGCGGCGGGGGGGACGGGCA | 20 | 6007 |
| HSV1-UL48-85 | + | GCGGCGGGGGGGACGGGCAU | 20 | 6008 |
| HSV1-UL48-86 | + | GCGGGGGGGACGGGCAUGGG | 20 | 6009 |
| HSV1-UL48-87 | + | CGGGGGGGACGGGCAUGGGU | 20 | 6010 |
| HSV1-UL48-88 | + | GGGGGGGACGGGCAUGGGUG | 20 | 6011 |
| HSV1-UL48-89 | + | GGGGACGGGCAUGGGUGGGG | 20 | 6012 |
| HSV1-UL48-90 | + | GGGACGGGCAUGGGUGGGGA | 20 | 6013 |
| HSV1-UL48-91 | + | UGGGUGGGGAGGGCAUGAGC | 20 | 6014 |
| HSV1-UL48-92 | + | GGGUGGGGAGGGCAUGAGCU | 20 | 6015 |
| HSV1-UL48-93 | + | GGGAGGGCAUGAGCUGGGCC | 20 | 6016 |
| HSV1-UL48-94 | + | GCAUGAGCUGGGCCUGGCUC | 20 | 6017 |
| HSV1-UL48-95 | + | AGGCGCCCCGUUGCGUACAG | 20 | 6018 |
| HSV1-UL48-96 | + | GGCGCCCCGUUGCGUACAGC | 20 | 6019 |
| HSV1-UL48-101 | + | GCGUACAGCGGGGGGGCCGC | 20 | 6020 |
| HSV1-UL48-106 | + | CGGGGUGUUUUUGGGACCCC | 20 | 6021 |
| HSV1-UL48-109 | + | UUUUGGGACCCCCGGCCGGG | 20 | 6022 |
| HSV1-UL48-110 | + | UUUGGGACCCCCGGCCGGGC | 20 | 6023 |
| HSV1-UL48-111 | + | UUGGGACCCCCGGCCGGGCG | 20 | 6024 |
| HSV1-UL48-112 | + | UGGGACCCCCGGCCGGGCGG | 20 | 6025 |
| HSV1-UL48-113 | + | GGGACCCCCGGCCGGGCGGG | 20 | 6026 |
| HSV1-UL48-114 | + | GGACCCCCGGCCGGGCGGGG | 20 | 6027 |
| HSV1-UL48-115 | + | CCCCCGGCCGGGCGGGGGGG | 20 | 6028 |
| HSV1-UL48-116 | + | CCGGCCGGGCGGGGGGGCGG | 20 | 6029 |
| HSV1-UL48-117 | + | AGCGCCGUCCGCGUUCAUGU | 20 | 6030 |
| HSV1-UL48-160 | + | GCGCCCGUAGCUCGGCG | 17 | 6031 |
| HSV1-UL48-162 | + | AGAGCCCGAGGCCGUCG | 17 | 6032 |
| HSV1-UL48-164 | + | CCCGAGGCCGUCGCGGG | 17 | 6033 |
| HSV1-UL48-165 | + | AGGCCGUCGCGGGUGGC | 17 | 6034 |
| HSV1-UL48-167 | + | GGGUGGCCGGAAGCGUA | 17 | 6035 |
| HSV1-UL48-168 | + | GGCCGGAAGCGUAGGGA | 17 | 6036 |
| HSV1-UL48-173 | + | GUCGAUUUGGGUGCGUU | 17 | 6037 |
| HSV1-UL48-174 | + | UCGAUUUGGGUGCGUUC | 17 | 6038 |
| HSV1-UL48-175 | + | CGAUUUGGGUGCGUUCG | 17 | 6039 |
| HSV1-UL48-177 | + | CAUUCCACCACAUCGCU | 17 | 6040 |
| HSV1-UL48-178 | + | CGCUGGGCAGCGUUGAU | 17 | 6041 |
| HSV1-UL48-179 | + | AUAGGAAUUUACACUCC | 17 | 6042 |
| HSV1-UL48-180 | + | AUUUACACUCCCGGUAC | 17 | 6043 |
| HSV1-UL48-181 | + | ACACUCCCGGUACAGGU | 17 | 6044 |
| HSV1-UL48-190 | + | CCAAGUCGUCGAGGAGA | 17 | 6045 |
| HSV1-UL48-193 | + | GAGACGGUUAAAGAGGG | 17 | 6046 |
| HSV1-UL48-199 | + | UAAAGAGGGCGGCGGGG | 17 | 6047 |
| HSV1-UL48-200 | + | GAGGGCGGCGGGGGGGA | 17 | 6048 |
| HSV1-UL48-201 | + | AGGGCGGCGGGGGGGAC | 17 | 6049 |
| HSV1-UL48-202 | + | GGCGGGGGGGACGGGCA | 17 | 6050 |
| HSV1-UL48-203 | + | GCGGGGGGGACGGGCAU | 17 | 6051 |
| HSV1-UL48-204 | + | GGGGGGACGGGCAUGGG | 17 | 6052 |
| HSV1-UL48-205 | + | GGGGGACGGGCAUGGGU | 17 | 6053 |
| HSV1-UL48-206 | + | GGGGACGGGCAUGGGUG | 17 | 6054 |
| HSV1-UL48-207 | + | GACGGGCAUGGGUGGGG | 17 | 6055 |
| HSV1-UL48-208 | + | ACGGGCAUGGGUGGGGA | 17 | 6056 |
| HSV1-UL48-209 | + | GUGGGGAGGGCAUGAGC | 17 | 6057 |
| HSV1-UL48-210 | + | UGGGGAGGGCAUGAGCU | 17 | 6058 |
| HSV1-UL48-211 | + | AGGGCAUGAGCUGGGCC | 17 | 6059 |
| HSV1-UL48-212 | + | UGAGCUGGGCCUGGCUC | 17 | 6060 |
| HSV1-UL48-213 | + | CGCCCCGUUGCGUACAG | 17 | 6061 |
| HSV1-UL48-214 | + | GCCCCGUUGCGUACAGC | 17 | 6062 |
| HSV1-UL48-219 | + | UACAGCGGGGGGGCCGC | 17 | 6063 |
| HSV1-UL48-224 | + | GGUGUUUUUGGGACCCC | 17 | 6064 |
| HSV1-UL48-227 | + | UGGGACCCCCGGCCGGG | 17 | 6065 |
| HSV1-UL48-228 | + | GGGACCCCCGGCCGGGC | 17 | 6066 |
| HSV1-UL48-229 | + | GGACCCCCGGCCGGGCG | 17 | 6067 |
| HSV1-UL48-230 | + | GACCCCCGGCCGGGCGG | 17 | 6068 |
| HSV1-UL48-231 | + | ACCCCCGGCCGGGCGGG | 17 | 6069 |
| HSV1-UL48-232 | + | CCCCCGGCCGGGCGGGG | 17 | 6070 |
| HSV1-UL48-233 | + | CCGGCCGGGCGGGGGGG | 17 | 6071 |
| HSV1-UL48-234 | + | GCCGGGCGGGGGGGCGG | 17 | 6072 |
| HSV1-UL48-235 | + | GCCGUCCGCGUUCAUGU | 17 | 6073 |

[0743] Table 3C provides exemplary targeting domains for knocking out the UL48 gene selected according to the third tier parameters. The targeting domains are selected based on location within the coding sequence, but downstream of the first 500 bp of the UL48 gene. It is contemplated herein that the targeting domain hybridizes to the target domain through complementary base pairing. Any of the targeting domains in the table can be used with a S. pyogenes Cas9 molecule that gives double stranded cleavage. Any of the targeting domains in the table can be used with a S. pyogenes Cas9 single-stranded break nucleases (nickases). In an embodiment, dual targeting is used to create two nicks on opposite DNA strands by using S. pyogenes Cas9 nickases with two targeting domains that are complementary to opposite DNA strands, e.g., a gRNA comprising any minus strand targeting domain may be paired any gRNA comprising a plus strand targeting domain provided that the two gRNAs are oriented on the DNA such that PAMs face outward and the distance between the 5′ ends of the gRNAs is 0-50 bp.

TABLE 3C
3rd Tier

| | | | Target Site | Seq |
|---|---|---|---|---|
| gRNA Name | DNA Strand | Targeting Domain | Length | ID |
| HSV1-UL48- | − | CGUGUUGGCCAACUUCUGCU | 20 | 6074 |
| 1126 | | | | |
| HSV1-UL48-237 | − | ACUUCUGCUCGGCCCUGUAC | 20 | 6075 |
| HSV1-UL48-238 | − | GGUACCUGCGCGCCAGCGUC | 20 | 6076 |
| HSV1-UL48-239 | − | CGUCCGGCAGCUGCACCGCC | 20 | 6077 |
| HSV1-UL48-240 | − | CACCGCCAGGCGCACAUGCG | 20 | 6078 |
| HSV1-UL48-241 | − | GCGCGGACGCGAUCGCGACC | 20 | 6079 |
| HSV1-UL48-242 | − | CGCGGACGCGAUCGCGACCU | 20 | 6080 |
| HSV1-UL48-243 | − | AAUGCUGCGCGCCACGAUCG | 20 | 6081 |
| HSV1-UL48-244 | − | UGCGCGCCACGAUCGCGGAC | 20 | 6082 |
| HSV1-UL48-245 | − | CUACCGAGAGACCGCUCGUC | 20 | 6083 |
| HSV1-UL48-246 | − | UUUUGACCCGCGAGAUCCUA | 20 | 6084 |
| HSV1-UL48-247 | − | UUUGACCCGCGAGAUCCUAU | 20 | 6085 |
| HSV1-UL48-248 | − | CGUACGCCGAGCAGAUGAUG | 20 | 6086 |
| HSV1-UL48-249 | − | UGACUGCCUCUGUUGCGACC | 20 | 6087 |
| HSV1-UL48-250 | − | UCUGUUGCGACCUGGAGAGC | 20 | 6088 |
| HSV1-UL48-251 | − | CCUGGAGAGCUGGCGUCAGU | 20 | 6089 |
| HSV1-UL48-252 | − | GGAGAGCUGGCGUCAGUUGG | 20 | 6090 |
| HSV1-UL48-253 | − | GAGAGCUGGCGUCAGUUGGC | 20 | 6091 |
| HSV1-UL48-254 | − | CAGCCCUUCAUGUUCGUCAA | 20 | 6092 |
| HSV1-UL48-255 | − | UCAACGGAGCGCUCACCGUC | 20 | 6093 |
| HSV1-UL48-256 | − | CAACGGAGCGCUCACCGUCC | 20 | 6094 |
| HSV1-UL48-257 | − | AACGGAGCGCUCACCGUCCG | 20 | 6095 |
| HSV1-UL48-258 | − | CGUCCGGGGAGUGCCAAUCG | 20 | 6096 |
| HSV1-UL48-259 | − | GAGUGCCAAUCGAGGCCCGC | 20 | 6097 |
| HSV1-UL48-260 | − | CAAUCGAGGCCCGCCGGCUG | 20 | 6098 |
| HSV1-UL48-261 | − | AAUCGAGGCCCGCCGGCUGC | 20 | 6099 |
| HSV1-UL48-262 | − | CGAGCACCUUAACCUCCCGC | 20 | 6100 |
| HSV1-UL48-263 | − | CCUCCCGCUGGUGCGCAGCG | 20 | 6101 |
| HSV1-UL48-264 | − | GCUGGUGCGCAGCGCGGCUA | 20 | 6102 |
| HSV1-UL48-265 | − | GGUGCGCAGCGCGGCUACGG | 20 | 6103 |
| HSV1-UL48-266 | − | AGCGCGGCUACGGAGGAGCC | 20 | 6104 |
| HSV1-UL48-267 | − | GCGCGGCUACGGAGGAGCCA | 20 | 6105 |
| HSV1-UL48-268 | − | CGCGGCUACGGAGGAGCCAG | 20 | 6106 |
| HSV1-UL48-269 | − | ACGACCCCUCCCACCCUGCA | 20 | 6107 |
| HSV1-UL48-270 | − | UCCCACCCUGCAUGGCAACC | 20 | 6108 |
| HSV1-UL48-271 | − | GGCAACCAGGCCCGCGCCUC | 20 | 6109 |
| HSV1-UL48-272 | − | GCAACCAGGCCCGCGCCUCU | 20 | 6110 |
| HSV1-UL48-273 | − | CCGCGCCUCUGGGUACUUUA | 20 | 6111 |
| HSV1-UL48-274 | − | GGUACUUUAUGGUGUUGAUU | 20 | 6112 |
| HSV1-UL48-275 | − | GUACUUUAUGGUGUUGAUUC | 20 | 6113 |
| HSV1-UL48-276 | − | GGUGUUGAUUCGGGCGAAGU | 20 | 6114 |
| HSV1-UL48-277 | − | CUUCACGACCUCGCCCUCCG | 20 | 6115 |
| HSV1-UL48-278 | − | CACGACCUCGCCCUCCGAGG | 20 | 6116 |
| HSV1-UL48-279 | − | CGCCCUCCGAGGCGGUCAUG | 20 | 6117 |
| HSV1-UL48-280 | − | GCCCUCCGAGGCGGUCAUGC | 20 | 6118 |
| HSV1-UL48-281 | − | GCGCGUACGAAAAACAAUUA | 20 | 6119 |
| HSV1-UL48-282 | − | CGCGUACGAAAAACAAUUAC | 20 | 6120 |
| HSV1-UL48-283 | − | CAAUUACGGGUCUACCAUCG | 20 | 6121 |
| HSV1-UL48-284 | − | AAUUACGGGUCUACCAUCGA | 20 | 6122 |
| HSV1-UL48-285 | − | CGAGGGCCUGCUCGAUCUCC | 20 | 6123 |
| HSV1-UL48-286 | − | GGACGACGACGCCCCCGAAG | 20 | 6124 |
| HSV1-UL48-287 | − | CGACGACGCCCCCGAAGAGG | 20 | 6125 |
| HSV1-UL48-288 | − | GACGACGCCCCCGAAGAGGC | 20 | 6126 |
| HSV1-UL48-289 | − | ACGACGCCCCCGAAGAGGCG | 20 | 6127 |
| HSV1-UL48-290 | − | CGCCCCCGAAGAGGCGGGGC | 20 | 6128 |
| HSV1-UL48-291 | − | CCCCGAAGAGGCGGGGCUGG | 20 | 6129 |
| HSV1-UL48-292 | − | GCGCCUGUCCUUUCUCCCCG | 20 | 6130 |
| HSV1-UL48-293 | − | CGCCUGUCCUUUCUCCCCGC | 20 | 6131 |
| HSV1-UL48-294 | − | ACACACGCGCAGACUGUCGA | 20 | 6132 |
| HSV1-UL48-295 | − | CCCCCCGACCGAUGUCAGCC | 20 | 6133 |
| HSV1-UL48-296 | − | CCCCCGACCGAUGUCAGCCU | 20 | 6134 |
| HSV1-UL48-297 | − | CCCCGACCGAUGUCAGCCUG | 20 | 6135 |
| HSV1-UL48-298 | − | CCCGACCGAUGUCAGCCUGG | 20 | 6136 |
| HSV1-UL48-299 | − | GGGGACGAGCUCCACUUAGA | 20 | 6137 |
| HSV1-UL48-300 | − | CGAGCUCCACUUAGACGGCG | 20 | 6138 |
| HSV1-UL48-301 | − | CCACUUAGACGGCGAGGACG | 20 | 6139 |
| HSV1-UL48-302 | − | AGACGGCGAGGACGUGGCGA | 20 | 6140 |
| HSV1-UL48-303 | − | CGCGCUAGACGAUUUCGAUC | 20 | 6141 |
| HSV1-UL48-304 | − | CGAUUUCGAUCUGGACAUGU | 20 | 6142 |
| HSV1-UL48-305 | − | GAUUUCGAUCUGGACAUGUU | 20 | 6143 |
| HSV1-UL48-306 | − | AUUUCGAUCUGGACAUGUUG | 20 | 6144 |
| HSV1-UL48-307 | − | UUUCGAUCUGGACAUGUUGG | 20 | 6145 |
| HSV1-UL48-308 | − | GAUCUGGACAUGUUGGGGGA | 20 | 6146 |
| HSV1-UL48-309 | − | AUCUGGACAUGUUGGGGGAC | 20 | 6147 |
| HSV1-UL48-310 | − | UCUGGACAUGUUGGGGGACG | 20 | 6148 |
| HSV1-UL48-311 | − | GUUGGGGGACGGGGAUUCCC | 20 | 6149 |
| HSV1-UL48-312 | − | UUGGGGGACGGGGAUUCCCC | 20 | 6150 |
| HSV1-UL48-313 | − | UGGGGGACGGGGAUUCCCCG | 20 | 6151 |
| HSV1-UL48-314 | − | GGACGGGGAUUCCCCGGGGC | 20 | 6152 |
| HSV1-UL48-315 | − | GACGGGGAUUCCCCGGGGCC | 20 | 6153 |
| HSV1-UL48-316 | − | CCCCACGACUCCGCCCCCUA | 20 | 6154 |
| HSV1-UL48-317 | − | CUCCGCCCCCUACGGCGCUC | 20 | 6155 |
| HSV1-UL48-318 | − | CCCCUACGGCGCUCUGGAUA | 20 | 6156 |
| HSV1-UL48-319 | − | CAGAUGUUUACCGAUGCCCU | 20 | 6157 |
| HSV1-UL48-320 | − | GCCCUUGGAAUUGACGAGUA | 20 | 6158 |
| HSV1-UL48-321 | − | CUUGGAAUUGACGAGUACGG | 20 | 6159 |
| HSV1-UL48-322 | − | UUGGAAUUGACGAGUACGGU | 20 | 6160 |
| HSV1-UL48-323 | + | CACCGUACUCGUCAAUUCCA | 20 | 6161 |
| HSV1-UL48-324 | + | ACCGUACUCGUCAAUUCCAA | 20 | 6162 |
| HSV1-UL48-325 | + | CUCGUCAAUUCCAAGGGCAU | 20 | 6163 |
| HSV1-UL48-326 | + | CAUCUGCUCAAACUCGAAGU | 20 | 6164 |
| HSV1-UL48-327 | + | GGCCAUAUCCAGAGCGCCGU | 20 | 6165 |
| HSV1-UL48-328 | + | GCCAUAUCCAGAGCGCCGUA | 20 | 6166 |
| HSV1-UL48-329 | + | CCAUAUCCAGAGCGCCGUAG | 20 | 6167 |
| HSV1-UL48-330 | + | CAUAUCCAGAGCGCCGUAGG | 20 | 6168 |
| HSV1-UL48-331 | + | AUCCAGAGCGCCGUAGGGGG | 20 | 6169 |
| HSV1-UL48-332 | + | CGCCGUAGGGGGCGGAGUCG | 20 | 6170 |
| HSV1-UL48-333 | + | GCCGUAGGGGGCGGAGUCGU | 20 | 6171 |
| HSV1-UL48-334 | + | CCGUAGGGGGCGGAGUCGUG | 20 | 6172 |
| HSV1-UL48-335 | + | CGUAGGGGGCGGAGUCGUGG | 20 | 6173 |
| HSV1-UL48-336 | + | GUAGGGGGCGGAGUCGUGGG | 20 | 6174 |
| HSV1-UL48-337 | + | GAGUCGUGGGGGGUAAAUCC | 20 | 6175 |
| HSV1-UL48-338 | + | UGGGGGGUAAAUCCCGGCCC | 20 | 6176 |
| HSV1-UL48-339 | + | GGGGGGUAAAUCCCGGCCCC | 20 | 6177 |
| HSV1-UL48-340 | + | GGGGGUAAAUCCCGGCCCCG | 20 | 6178 |
| HSV1-UL48-341 | + | AUCGAAAUCGUCUAGCGCGU | 20 | 6179 |
| HSV1-UL48-342 | + | CCACGUCCUCGCCGUCUAAG | 20 | 6180 |
| HSV1-UL48-343 | + | CUAAGUGGAGCUCGUCCCCC | 20 | 6181 |
| HSV1-UL48-344 | + | CUCGUCCCCCAGGCUGACAU | 20 | 6182 |
| HSV1-UL48-345 | + | UCCCCCAGGCUGACAUCGGU | 20 | 6183 |
| HSV1-UL48-346 | + | CCCCCAGGCUGACAUCGGUC | 20 | 6184 |
| HSV1-UL48-347 | + | CCCCAGGCUGACAUCGGUCG | 20 | 6185 |
| HSV1-UL48-348 | + | CCCAGGCUGACAUCGGUCGG | 20 | 6186 |
| HSV1-UL48-349 | + | CCAGGCUGACAUCGGUCGGG | 20 | 6187 |
| HSV1-UL48-350 | + | CAGGCUGACAUCGGUCGGGG | 20 | 6188 |
| HSV1-UL48-351 | + | CAGUCUGCGCGUGUGUCCCG | 20 | 6189 |
| HSV1-UL48-352 | + | AGUCUGCGCGUGUGUCCCGC | 20 | 6190 |
| HSV1-UL48-353 | + | GUCUGCGCGUGUGUCCCGCG | 20 | 6191 |
| HSV1-UL48-354 | + | CGUGUGUCCCGCGGGGAGAA | 20 | 6192 |
| HSV1-UL48-355 | + | GUCCCGCGGGGAGAAAGGAC | 20 | 6193 |
| HSV1-UL48-356 | + | GCGGGGAGAAAGGACAGGCG | 20 | 6194 |
| HSV1-UL48-357 | + | AGCCGCCAGCCCCGCCUCUU | 20 | 6195 |
| HSV1-UL48-358 | + | GCCGCCAGCCCCGCCUCUUC | 20 | 6196 |
| HSV1-UL48-359 | + | CCGCCAGCCCCGCCUCUUCG | 20 | 6197 |
| HSV1-UL48-360 | + | CGCCAGCCCCGCCUCUUCGG | 20 | 6198 |
| HSV1-UL48-361 | + | UCUUCGGGGGCGUCGUCGUC | 20 | 6199 |
| HSV1-UL48-362 | + | CUUCGGGGGCGUCGUCGUCC | 20 | 6200 |
| HSV1-UL48-363 | + | CGUCGUCCGGGAGAUCGAGC | 20 | 6201 |
| HSV1-UL48-364 | + | GAGAUCGAGCAGGCCCUCGA | 20 | 6202 |
| HSV1-UL48-365 | + | AAUUGUUUUUCGUACGCGCG | 20 | 6203 |
| HSV1-UL48-366 | + | GUGUUCCCGCAUGACCGCCU | 20 | 6204 |
| HSV1-UL48-367 | + | UUCCCGCAUGACCGCCUCGG | 20 | 6205 |
| HSV1-UL48-368 | + | UCCCGCAUGACCGCCUCGGA | 20 | 6206 |
| HSV1-UL48-369 | + | CAUGACCGCCUCGGAGGGCG | 20 | 6207 |
| HSV1-UL48-370 | + | GGAGGGCGAGGUCGUGAAGC | 20 | 6208 |
| HSV1-UL48-371 | + | CAACACCAUAAAGUACCCAG | 20 | 6209 |
| HSV1-UL48-372 | + | CCAUAAAGUACCCAGAGGCG | 20 | 6210 |
| HSV1-UL48-373 | + | CAUAAAGUACCCAGAGGCGC | 20 | 6211 |
| HSV1-UL48-374 | + | AGUACCCAGAGGCGCGGGCC | 20 | 6212 |
| HSV1-UL48-375 | + | CGCGGGCCUGGUUGCCAUGC | 20 | 6213 |
| HSV1-UL48-376 | + | GCGGGCCUGGUUGCCAUGCA | 20 | 6214 |
| HSV1-UL48-377 | + | GGCCUGGUUGCCAUGCAGGG | 20 | 6215 |
| HSV1-UL48-378 | + | GCCUGGUUGCCAUGCAGGGU | 20 | 6216 |
| HSV1-UL48-379 | + | UGGUUGCCAUGCAGGGUGGG | 20 | 6217 |
| HSV1-UL48-380 | + | GGUUGCCAUGCAGGGUGGGA | 20 | 6218 |
| HSV1-UL48-381 | + | GUUGCCAUGCAGGGUGGGAG | 20 | 6219 |
| HSV1-UL48-382 | + | AGGGUGGGAGGGGUCGUCAA | 20 | 6220 |
| HSV1-UL48-383 | + | GGGGUCGUCAACGGCGCCCC | 20 | 6221 |
| HSV1-UL48-384 | + | GUAGCCGCGCUGCGCACCAG | 20 | 6222 |
| HSV1-UL48-385 | + | UAGCCGCGCUGCGCACCAGC | 20 | 6223 |
| HSV1-UL48-386 | + | CCGCGCUGCGCACCAGCGGG | 20 | 6224 |
| HSV1-UL48-387 | + | UGCGCACCAGCGGGAGGUUA | 20 | 6225 |
| HSV1-UL48-388 | + | GGUUAAGGUGCUCGCGAAUG | 20 | 6226 |
| HSV1-UL48-389 | + | UGUGGUUUAGCUCCCGCAGC | 20 | 6227 |
| HSV1-UL48-390 | + | GGUUUAGCUCCCGCAGCCGG | 20 | 6228 |
| HSV1-UL48-391 | + | GUUUAGCUCCCGCAGCCGGC | 20 | 6229 |
| HSV1-UL48-392 | + | CGCAGCCGGCGGGCCUCGAU | 20 | 6230 |
| HSV1-UL48-393 | + | GGGCCUCGAUUGGCACUCCC | 20 | 6231 |
| HSV1-UL48-394 | + | CUCGAUUGGCACUCCCCGGA | 20 | 6232 |
| HSV1-UL48-395 | + | CGCUCCGUUGACGAACAUGA | 20 | 6233 |
| HSV1-UL48-396 | + | GCUCCGUUGACGAACAUGAA | 20 | 6234 |
| HSV1-UL48-397 | + | CGUUGACGAACAUGAAGGGC | 20 | 6235 |
| HSV1-UL48-398 | + | CCAACUGACGCCAGCUCUCC | 20 | 6236 |
| HSV1-UL48-399 | + | AGCUCUCCAGGUCGCAACAG | 20 | 6237 |
| HSV1-UL48-400 | + | CGCAACAGAGGCAGUCAAAC | 20 | 6238 |
| HSV1-UL48-401 | + | ACAGAGGCAGUCAAACAGGU | 20 | 6239 |
| HSV1-UL48-402 | + | CAGAGGCAGUCAAACAGGUC | 20 | 6240 |
| HSV1-UL48-403 | + | GUCGGGCCGCAUCAUCUGCU | 20 | 6241 |
| HSV1-UL48-404 | + | CAUCAUCUGCUCGGCGUACG | 20 | 6242 |
| HSV1-UL48-405 | + | GCUCGGCGUACGCGGCCCAU | 20 | 6243 |
| HSV1-UL48-406 | + | ACGCGGCCCAUAGGAUCUCG | 20 | 6244 |
| HSV1-UL48-407 | + | CGCGGCCCAUAGGAUCUCGC | 20 | 6245 |
| HSV1-UL48-408 | + | CAAAACACGCGCCAGACGAG | 20 | 6246 |
| HSV1-UL48-409 | + | GCGCCAGACGAGCGGUCUCU | 20 | 6247 |
| HSV1-UL48-410 | + | GUAGUACCUGUCCGCGAUCG | 20 | 6248 |
| HSV1-UL48-411 | + | UGGCGCGCAGCAUUUCUCCC | 20 | 6249 |
| HSV1-UL48-412 | + | CGCGUCCGCGCAUGUGCGCC | 20 | 6250 |
| HSV1-UL48-413 | + | GUCCGCGCAUGUGCGCCUGG | 20 | 6251 |
| HSV1-UL48-414 | + | GCGCCUGGCGGUGCAGCUGC | 20 | 6252 |
| HSV1-UL48-415 | + | GCGGUGCAGCUGCCGGACGC | 20 | 6253 |
| HSV1-UL48-416 | + | GCUGCCGGACGCUGGCGCGC | 20 | 6254 |
| HSV1-UL48-417 | + | GGACGCUGGCGCGCAGGUAC | 20 | 6255 |
| HSV1-UL48-418 | + | UGGCGCGCAGGUACCGGUAC | 20 | 6256 |
| HSV1-UL48-419 | + | GGCGCGCAGGUACCGGUACA | 20 | 6257 |
| HSV1-UL48-420 | + | GUACAGGGCCGAGCAGAAGU | 20 | 6258 |
| HSV1-UL48-421 | + | CGAGCAGAAGUUGGCCAACA | 20 | 6259 |
| HSV1-UL48-422 | − | GUUGGCCAACUUCUGCU | 17 | 6260 |
| HSV1-UL48-423 | − | UCUGCUCGGCCCUGUAC | 17 | 6261 |
| HSV1-UL48-424 | − | ACCUGCGCGCCAGCGUC | 17 | 6262 |
| HSV1-UL48-425 | − | CCGGCAGCUGCACCGCC | 17 | 6263 |
| HSV1-UL48-426 | − | CGCCAGGCGCACAUGCG | 17 | 6264 |
| HSV1-UL48-427 | − | CGGACGCGAUCGCGACC | 17 | 6265 |
| HSV1-UL48-428 | − | GGACGCGAUCGCGACCU | 17 | 6266 |
| HSV1-UL48-429 | − | GCUGCGCGCCACGAUCG | 17 | 6267 |
| HSV1-UL48-430 | − | GCGCCACGAUCGCGGAC | 17 | 6268 |
| HSV1-UL48-431 | − | CCGAGAGACCGCUCGUC | 17 | 6269 |
| HSV1-UL48-432 | − | UGACCCGCGAGAUCCUA | 17 | 6270 |
| HSV1-UL48-433 | − | GACCCGCGAGAUCCUAU | 17 | 6271 |
| HSV1-UL48-434 | − | ACGCCGAGCAGAUGAUG | 17 | 6272 |
| HSV1-UL48-435 | − | CUGCCUCUGUUGCGACC | 17 | 6273 |
| HSV1-UL48-436 | − | GUUGCGACCUGGAGAGC | 17 | 6274 |
| HSV1-UL48-437 | − | GGAGAGCUGGCGUCAGU | 17 | 6275 |
| HSV1-UL48-438 | − | GAGCUGGCGUCAGUUGG | 17 | 6276 |
| HSV1-UL48-439 | − | AGCUGGCGUCAGUUGGC | 17 | 6277 |
| HSV1-UL48-440 | − | CCCUUCAUGUUCGUCAA | 17 | 6278 |
| HSV1-UL48-441 | − | ACGGAGCGCUCACCGUC | 17 | 6279 |
| HSV1-UL48-442 | − | CGGAGCGCUCACCGUCC | 17 | 6280 |
| HSV1-UL48-443 | − | GGAGCGCUCACCGUCCG | 17 | 6281 |
| HSV1-UL48-444 | − | CCGGGGAGUGCCAAUCG | 17 | 6282 |
| HSV1-UL48-445 | − | UGCCAAUCGAGGCCCGC | 17 | 6283 |
| HSV1-UL48-446 | − | UCGAGGCCCGCCGGCUG | 17 | 6284 |
| HSV1-UL48-447 | − | CGAGGCCCGCCGGCUGC | 17 | 6285 |
| HSV1-UL48-448 | − | GCACCUUAACCUCCCGC | 17 | 6286 |
| HSV1-UL48-449 | − | CCCGCUGGUGCGCAGCG | 17 | 6287 |
| HSV1-UL48-450 | − | GGUGCGCAGCGCGGCUA | 17 | 6288 |
| HSV1-UL48-451 | − | GCGCAGCGCGGCUACGG | 17 | 6289 |
| HSV1-UL48-452 | − | GCGGCUACGGAGGAGCC | 17 | 6290 |
| HSV1-UL48-453 | − | CGGCUACGGAGGAGCCA | 17 | 6291 |
| HSV1-UL48-454 | − | GGCUACGGAGGAGCCAG | 17 | 6292 |
| HSV1-UL48-455 | − | ACCCCUCCCACCCUGCA | 17 | 6293 |
| HSV1-UL48-456 | − | CACCCUGCAUGGCAACC | 17 | 6294 |
| HSV1-UL48-457 | − | AACCAGGCCCGCGCCUC | 17 | 6295 |
| HSV1-UL48-458 | − | ACCAGGCCCGCGCCUCU | 17 | 6296 |
| HSV1-UL48-459 | − | CGCCUCUGGGUACUUUA | 17 | 6297 |
| HSV1-UL48-460 | − | ACUUUAUGGUGUUGAUU | 17 | 6298 |
| HSV1-UL48-461 | − | CUUUAUGGUGUUGAUUC | 17 | 6299 |
| HSV1-UL48-462 | − | GUUGAUUCGGGCGAAGU | 17 | 6300 |
| HSV1-UL48-463 | − | CACGACCUCGCCCUCCG | 17 | 6301 |
| HSV1-UL48-464 | − | GACCUCGCCCUCCGAGG | 17 | 6302 |
| HSV1-UL48-465 | − | CCUCCGAGGCGGUCAUG | 17 | 6303 |
| HSV1-UL48-466 | − | CUCCGAGGCGGUCAUGC | 17 | 6304 |
| HSV1-UL48-467 | − | CGUACGAAAAACAAUUA | 17 | 6305 |
| HSV1-UL48-468 | − | GUACGAAAAACAAUUAC | 17 | 6306 |
| HSV1-UL48-469 | − | UUACGGGUCUACCAUCG | 17 | 6307 |
| HSV1-UL48-470 | − | UACGGGUCUACCAUCGA | 17 | 6308 |
| HSV1-UL48-471 | − | GGGCCUGCUCGAUCUCC | 17 | 6309 |
| HSV1-UL48-472 | − | CGACGACGCCCCCGAAG | 17 | 6310 |
| HSV1-UL48-473 | − | CGACGCCCCCGAAGAGG | 17 | 6311 |
| HSV1-UL48-474 | − | GACGCCCCCGAAGAGGC | 17 | 6312 |
| HSV1-UL48-475 | − | ACGCCCCCGAAGAGGCG | 17 | 6313 |
| HSV1-UL48-476 | − | CCCCGAAGAGGCGGGGC | 17 | 6314 |
| HSV1-UL48-477 | − | CGAAGAGGCGGGGCUGG | 17 | 6315 |
| HSV1-UL48-478 | − | CCUGUCCUUUCUCCCCG | 17 | 6316 |
| HSV1-UL48-479 | − | CUGUCCUUUCUCCCCGC | 17 | 6317 |
| HSV1-UL48-480 | − | CACGCGCAGACUGUCGA | 17 | 6318 |
| HSV1-UL48-481 | − | CCCGACCGAUGUCAGCC | 17 | 6319 |
| HSV1-UL48-482 | − | CCGACCGAUGUCAGCCU | 17 | 6320 |
| HSV1-UL48-483 | − | CGACCGAUGUCAGCCUG | 17 | 6321 |
| HSV1-UL48-484 | − | GACCGAUGUCAGCCUGG | 17 | 6322 |
| HSV1-UL48-485 | − | GACGAGCUCCACUUAGA | 17 | 6323 |
| HSV1-UL48-486 | − | GCUCCACUUAGACGGCG | 17 | 6324 |
| HSV1-UL48-487 | − | CUUAGACGGCGAGGACG | 17 | 6325 |
| HSV1-UL48-488 | − | CGGCGAGGACGUGGCGA | 17 | 6326 |
| HSV1-UL48-489 | − | GCUAGACGAUUUCGAUC | 17 | 6327 |
| HSV1-UL48-490 | − | UUUCGAUCUGGACAUGU | 17 | 6328 |
| HSV1-UL48-491 | − | UUCGAUCUGGACAUGUU | 17 | 6329 |
| HSV1-UL48-492 | − | UCGAUCUGGACAUGUUG | 17 | 6330 |
| HSV1-UL48-493 | − | CGAUCUGGACAUGUUGG | 17 | 6331 |
| HSV1-UL48-494 | − | CUGGACAUGUUGGGGGA | 17 | 6332 |
| HSV1-UL48-495 | − | UGGACAUGUUGGGGGAC | 17 | 6333 |
| HSV1-UL48-496 | − | GGACAUGUUGGGGGACG | 17 | 6334 |
| HSV1-UL48-497 | − | GGGGGACGGGGAUUCCC | 17 | 6335 |
| HSV1-UL48-498 | − | GGGGACGGGGAUUCCCC | 17 | 6336 |
| HSV1-UL48-499 | − | GGGACGGGGAUUCCCCG | 17 | 6337 |
| HSV1-UL48-500 | − | CGGGGAUUCCCCGGGGC | 17 | 6338 |
| HSV1-UL48-501 | − | GGGGAUUCCCCGGGGCC | 17 | 6339 |
| HSV1-UL48-502 | − | CACGACUCCGCCCCCUA | 17 | 6340 |
| HSV1-UL48-503 | − | CGCCCCCUACGGCGCUC | 17 | 6341 |
| HSV1-UL48-504 | − | CUACGGCGCUCUGGAUA | 17 | 6342 |
| HSV1-UL48-505 | − | AUGUUUACCGAUGCCCU | 17 | 6343 |
| HSV1-UL48-506 | − | CUUGGAAUUGACGAGUA | 17 | 6344 |
| HSV1-UL48-507 | − | GGAAUUGACGAGUACGG | 17 | 6345 |
| HSV1-UL48-508 | − | GAAUUGACGAGUACGGU | 17 | 6346 |
| HSV1-UL48-509 | + | CGUACUCGUCAAUUCCA | 17 | 6347 |
| HSV1-UL48-510 | + | GUACUCGUCAAUUCCAA | 17 | 6348 |
| HSV1-UL48-511 | + | GUCAAUUCCAAGGGCAU | 17 | 6349 |
| HSV1-UL48-512 | + | CUGCUCAAACUCGAAGU | 17 | 6350 |
| HSV1-UL48-513 | + | CAUAUCCAGAGCGCCGU | 17 | 6351 |
| HSV1-UL48-514 | + | AUAUCCAGAGCGCCGUA | 17 | 6352 |
| HSV1-UL48-515 | + | UAUCCAGAGCGCCGUAG | 17 | 6353 |
| HSV1-UL48-516 | + | AUCCAGAGCGCCGUAGG | 17 | 6354 |
| HSV1-UL48-517 | + | CAGAGCGCCGUAGGGGG | 17 | 6355 |
| HSV1-UL48-518 | + | CGUAGGGGGCGGAGUCG | 17 | 6356 |
| HSV1-UL48-519 | + | GUAGGGGGCGGAGUCGU | 17 | 6357 |
| HSV1-UL48-520 | + | UAGGGGGCGGAGUCGUG | 17 | 6358 |
| HSV1-UL48-521 | + | AGGGGGCGGAGUCGUGG | 17 | 6359 |
| HSV1-UL48-522 | + | GGGGGCGGAGUCGUGGG | 17 | 6360 |
| HSV1-UL48-523 | + | UCGUGGGGGGUAAAUCC | 17 | 6361 |
| HSV1-UL48-524 | + | GGGGUAAAUCCCGGCCC | 17 | 6362 |
| HSV1-UL48-525 | + | GGGUAAAUCCCGGCCCC | 17 | 6363 |
| HSV1-UL48-526 | + | GGUAAAUCCCGGCCCCG | 17 | 6364 |
| HSV1-UL48-527 | + | GAAAUCGUCUAGCGCGU | 17 | 6365 |
| HSV1-UL48-528 | + | CGUCCUCGCCGUCUAAG | 17 | 6366 |
| HSV1-UL48-529 | + | AGUGGAGCUCGUCCCCC | 17 | 6367 |
| HSV1-UL48-530 | + | GUCCCCCAGGCUGACAU | 17 | 6368 |
| HSV1-UL48-531 | + | CCCAGGCUGACAUCGGU | 17 | 6369 |
| HSV1-UL48-532 | + | CCAGGCUGACAUCGGUC | 17 | 6370 |
| HSV1-UL48-533 | + | CAGGCUGACAUCGGUCG | 17 | 6371 |
| HSV1-UL48-534 | + | AGGCUGACAUCGGUCGG | 17 | 6372 |
| HSV1-UL48-535 | + | GGCUGACAUCGGUCGGG | 17 | 6373 |
| HSV1-UL48-536 | + | GCUGACAUCGGUCGGGG | 17 | 6374 |
| HSV1-UL48-537 | + | UCUGCGCGUGUGUCCCG | 17 | 6375 |
| HSV1-UL48-538 | + | CUGCGCGUGUGUCCCGC | 17 | 6376 |
| HSV1-UL48-539 | + | UGCGCGUGUGUCCCGCG | 17 | 6377 |
| HSV1-UL48-540 | + | GUGUCCCGCGGGGAGAA | 17 | 6378 |
| HSV1-UL48-541 | + | CCGCGGGGAGAAAGGAC | 17 | 6379 |
| HSV1-UL48-542 | + | GGGAGAAAGGACAGGCG | 17 | 6380 |
| HSV1-UL48-543 | + | CGCCAGCCCCGCCUCUU | 17 | 6381 |
| HSV1-UL48-544 | + | GCCAGCCCCGCCUCUUC | 17 | 6382 |
| HSV1-UL48-545 | + | CCAGCCCCGCCUCUUCG | 17 | 6383 |
| HSV1-UL48-546 | + | CAGCCCCGCCUCUUCGG | 17 | 6384 |
| HSV1-UL48-547 | + | UCGGGGGCGUCGUCGUC | 17 | 6385 |
| HSV1-UL48-548 | + | CGGGGGCGUCGUCGUCC | 17 | 6386 |
| HSV1-UL48-549 | + | CGUCCGGGAGAUCGAGC | 17 | 6387 |
| HSV1-UL48-550 | + | AUCGAGCAGGCCCUCGA | 17 | 6388 |
| HSV1-UL48-551 | + | UGUUUUUCGUACGCGCG | 17 | 6389 |
| HSV1-UL48-552 | + | UUCCCGCAUGACCGCCU | 17 | 6390 |
| HSV1-UL48-553 | + | CCGCAUGACCGCCUCGG | 17 | 6391 |
| HSV1-UL48-554 | + | CGCAUGACCGCCUCGGA | 17 | 6392 |
| HSV1-UL48-555 | + | GACCGCCUCGGAGGGCG | 17 | 6393 |
| HSV1-UL48-556 | + | GGGCGAGGUCGUGAAGC | 17 | 6394 |
| HSV1-UL48-557 | + | CACCAUAAAGUACCCAG | 17 | 6395 |
| HSV1-UL48-558 | + | UAAAGUACCCAGAGGCG | 17 | 6396 |
| HSV1-UL48-559 | + | AAAGUACCCAGAGGCGC | 17 | 6397 |
| HSV1-UL48-560 | + | ACCCAGAGGCGCGGGCC | 17 | 6398 |
| HSV1-UL48-561 | + | GGGCCUGGUUGCCAUGC | 17 | 6399 |
| HSV1-UL48-562 | + | GGCCUGGUUGCCAUGCA | 17 | 6400 |
| HSV1-UL48-563 | + | CUGGUUGCCAUGCAGGG | 17 | 6401 |
| HSV1-UL48-564 | + | UGGUUGCCAUGCAGGGU | 17 | 6402 |
| HSV1-UL48-565 | + | UUGCCAUGCAGGGUGGG | 17 | 6403 |
| HSV1-UL48-566 | + | UGCCAUGCAGGGUGGGA | 17 | 6404 |
| HSV1-UL48-567 | + | GCCAUGCAGGGUGGGAG | 17 | 6405 |
| HSV1-UL48-568 | + | GUGGGAGGGGUCGUCAA | 17 | 6406 |
| HSV1-UL48-569 | + | GUCGUCAACGGCGCCCC | 17 | 6407 |
| HSV1-UL48-570 | + | GCCGCGCUGCGCACCAG | 17 | 6408 |
| HSV1-UL48-571 | + | CCGCGCUGCGCACCAGC | 17 | 6409 |
| HSV1-UL48-572 | + | CGCUGCGCACCAGCGGG | 17 | 6410 |
| HSV1-UL48-573 | + | GCACCAGCGGGAGGUUA | 17 | 6411 |
| HSV1-UL48-574 | + | UAAGGUGCUCGCGAAUG | 17 | 6412 |
| HSV1-UL48-575 | + | GGUUUAGCUCCCGCAGC | 17 | 6413 |
| HSV1-UL48-576 | + | UUAGCUCCCGCAGCCGG | 17 | 6414 |
| HSV1-UL48-577 | + | UAGCUCCCGCAGCCGGC | 17 | 6415 |
| HSV1-UL48-578 | + | AGCCGGCGGGCCUCGAU | 17 | 6416 |
| HSV1-UL48-579 | + | CCUCGAUUGGCACUCCC | 17 | 6417 |
| HSV1-UL48-580 | + | GAUUGGCACUCCCCGGA | 17 | 6418 |
| HSV1-UL48-581 | + | UCCGUUGACGAACAUGA | 17 | 6419 |
| HSV1-UL48-582 | + | CCGUUGACGAACAUGAA | 17 | 6420 |
| HSV1-UL48-583 | + | UGACGAACAUGAAGGGC | 17 | 6421 |
| HSV1-UL48-584 | + | ACUGACGCCAGCUCUCC | 17 | 6422 |
| HSV1-UL48-585 | + | UCUCCAGGUCGCAACAG | 17 | 6423 |
| HSV1-UL48-586 | + | AACAGAGGCAGUCAAAC | 17 | 6424 |
| HSV1-UL48-587 | + | GAGGCAGUCAAACAGGU | 17 | 6425 |
| HSV1-UL48-588 | + | AGGCAGUCAAACAGGUC | 17 | 6426 |
| HSV1-UL48-589 | + | GGGCCGCAUCAUCUGCU | 17 | 6427 |
| HSV1-UL48-590 | + | CAUCUGCUCGGCGUACG | 17 | 6428 |
| HSV1-UL48-591 | + | CGGCGUACGCGGCCCAU | 17 | 6429 |
| HSV1-UL48-592 | + | CGGCCCAUAGGAUCUCG | 17 | 6430 |
| HSV1-UL48-593 | + | GGCCCAUAGGAUCUCGC | 17 | 6431 |
| HSV1-UL48-594 | + | AACACGCGCCAGACGAG | 17 | 6432 |
| HSV1-UL48-595 | + | CCAGACGAGCGGUCUCU | 17 | 6433 |
| HSV1-UL48-596 | + | GUACCUGUCCGCGAUCG | 17 | 6434 |
| HSV1-UL48-597 | + | CGCGCAGCAUUUCUCCC | 17 | 6435 |
| HSV1-UL48-598 | + | GUCCGCGCAUGUGCGCC | 17 | 6436 |
| HSV1-UL48-599 | + | CGCGCAUGUGCGCCUGG | 17 | 6437 |
| HSV1-UL48-600 | + | CCUGGCGGUGCAGCUGC | 17 | 6438 |
| HSV1-UL48-601 | + | GUGCAGCUGCCGGACGC | 17 | 6439 |
| HSV1-UL48-602 | + | GCCGGACGCUGGCGCGC | 17 | 6440 |
| HSV1-UL48-603 | + | CGCUGGCGCGCAGGUAC | 17 | 6441 |
| HSV1-UL48-604 | + | CGCGCAGGUACCGGUAC | 17 | 6442 |
| HSV1-UL48-605 | + | GCGCAGGUACCGGUACA | 17 | 6443 |
| HSV1-UL48-606 | + | CAGGGCCGAGCAGAAGU | 17 | 6444 |
| HSV1-UL48-607 | + | GCAGAAGUUGGCCAACA | 17 | 6445 |

[0744] Table 3D provides exemplary targeting domains for knocking out the UL48 gene selected according to the first tier parameters. The targeting domains are selected based on location within first 500 bp of the coding sequence of the UL48 gene. It is contemplated herein that the targeting domain hybridizes to the target domain through complementary base pairing. Any of the targeting domains in the table can be used with a S. aureus Cas9 molecule that gives double stranded cleavage. Any of the targeting domains in the table can be used with a S. aureus Cas9 single-stranded break nucleases (nickases). In an embodiment, dual targeting is used to create two nicks on opposite DNA strands by using S. aureus Cas9 nickases with two targeting domains that are complementary to opposite DNA strands, e.g., a gRNA comprising any minus strand targeting domain may be paired any gRNA comprising a plus strand targeting domain provided that the two gRNAs are oriented on the DNA such that PAMs face outward and the distance between the 5′ ends of the gRNAs is 0-50 bp.

TABLE 3D
1st Tier

| | | | Target Site | Seq |
|---|---|---|---|---|
| gRNA Name | DNA Strand | Targeting Domain | Length | ID |
| HSV1-UL48-608 | − | UCGACGAGCUGUUUGCCGAC | 20 | 6446 |
| HSV1-UL48-609 | − | AGCUGUUUGCCGACAUGAAC | 20 | 6447 |
| HSV1-UL48-610 | − | GCCACCGCCCCCCCGCCCGG | 20 | 6448 |
| HSV1-UL48-4 | − | CCACCGCCCCCCCGCCCGGC | 20 | 5963 |
| HSV1-UL48-5 | − | CACCGCCCCCCCGCCCGGCC | 20 | 5964 |
| HSV1-UL48-613 | − | CGGCCCCCCCGCUGUACGCA | 20 | 6449 |
| HSV1-UL48-10 | − | GGCCCCCCCGCUGUACGCAA | 20 | 5840 |
| HSV1-UL48-615 | − | CGCUGUACGCAACGGGGCGC | 20 | 6450 |
| HSV1-UL48-616 | − | UUAACCGUCUCCUCGACGAC | 20 | 6451 |
| HSV1-UL48-617 | − | UCGACGACUUGGGCUUUAGC | 20 | 6452 |
| HSV1-UL48-618 | − | CUAUGUACCAUGCUCGAUAC | 20 | 6453 |
| HSV1-UL48-18 | − | UAUGUACCAUGCUCGAUACC | 20 | 5967 |
| HSV1-UL48-620 | − | UACCAUGCUCGAUACCUGGA | 20 | 6454 |
| HSV1-UL48-621 | − | CCAUGCUCGAUACCUGGAAC | 20 | 6455 |
| HSV1-UL48-622 | − | CCGACCAACGCCGACCUGUA | 20 | 6456 |
| HSV1-UL48-21 | − | CGACCAACGCCGACCUGUAC | 20 | 5860 |
| HSV1-UL48-22 | − | GACCAACGCCGACCUGUACC | 20 | 5861 |
| HSV1-UL48-625 | − | CAACGCUGCCCAGCGAUGUG | 20 | 6457 |
| HSV1-UL48-24 | − | AACGCUGCCCAGCGAUGUGG | 20 | 5863 |
| HSV1-UL48-627 | − | CUGCCCAGCGAUGUGGUGGA | 20 | 6458 |
| HSV1-UL48-25 | − | UGCCCAGCGAUGUGGUGGAA | 20 | 5864 |
| HSV1-UL48-26 | − | GCCCAGCGAUGUGGUGGAAU | 20 | 5968 |
| HSV1-UL48-27 | − | CCCAGCGAUGUGGUGGAAUG | 20 | 5969 |
| HSV1-UL48-28 | − | CCAGCGAUGUGGUGGAAUGG | 20 | 5970 |
| HSV1-UL48-632 | − | AUGGGGGGACGCGUACGUCC | 20 | 6459 |
| HSV1-UL48-633 | − | UCCGGCCACCCGCGACGGCC | 20 | 6460 |
| HSV1-UL48-634 | − | CGACGGCCUCGGGCUCUACU | 20 | 6461 |
| HSV1-UL48-635 | − | GCUCUCUCGUUUCUUCCACG | 20 | 6462 |
| HSV1-UL48-636 | − | CGUUUCUUCCACGCCGAGCU | 20 | 6463 |
| HSV1-UL48-637 | − | UUCCACGCCGAGCUACGGGC | 20 | 6464 |
| HSV1-UL48-38 | − | UCCACGCCGAGCUACGGGCG | 20 | 5879 |
| HSV1-UL48-39 | − | CCACGCCGAGCUACGGGCGC | 20 | 5880 |
| HSV1-UL48-640 | − | ACGCCGAGCUACGGGCGCGG | 20 | 6465 |
| HSV1-UL48-40 | − | CGCCGAGCUACGGGCGCGGG | 20 | 5973 |
| HSV1-UL48-642 | − | CCGAGCUACGGGCGCGGGAG | 20 | 6466 |
| HSV1-UL48-643 | − | ACGAGCUGUUUGCCGAC | 17 | 6467 |
| HSV1-UL48-644 | − | UGUUUGCCGACAUGAAC | 17 | 6468 |
| HSV1-UL48-645 | − | ACCGCCCCCCCGCCCGG | 17 | 6469 |
| HSV1-UL48-122 | − | CCGCCCCCCCGCCCGGC | 17 | 5977 |
| HSV1-UL48-123 | − | CGCCCCCCCGCCCGGCC | 17 | 5978 |
| HSV1-UL48-648 | − | CCCCCCCGCUGUACGCA | 17 | 6470 |
| HSV1-UL48-128 | − | CCCCCCGCUGUACGCAA | 17 | 5850 |
| HSV1-UL48-650 | − | UGUACGCAACGGGGCGC | 17 | 6471 |
| HSV1-UL48-651 | − | ACCGUCUCCUCGACGAC | 17 | 6472 |
| HSV1-UL48-652 | − | ACGACUUGGGCUUUAGC | 17 | 6473 |
| HSV1-UL48-653 | − | UGUACCAUGCUCGAUAC | 17 | 6474 |
| HSV1-UL48-136 | − | GUACCAUGCUCGAUACC | 17 | 5981 |
| HSV1-UL48-655 | − | CAUGCUCGAUACCUGGA | 17 | 6475 |
| HSV1-UL48-656 | − | UGCUCGAUACCUGGAAC | 17 | 6476 |
| HSV1-UL48-657 | − | ACCAACGCCGACCUGUA | 17 | 6477 |
| HSV1-UL48-139 | − | CCAACGCCGACCUGUAC | 17 | 5867 |
| HSV1-UL48-140 | − | CAACGCCGACCUGUACC | 17 | 5868 |
| HSV1-UL48-660 | − | CGCUGCCCAGCGAUGUG | 17 | 6478 |
| HSV1-UL48-142 | − | GCUGCCCAGCGAUGUGG | 17 | 5870 |
| HSV1-UL48-662 | − | CCCAGCGAUGUGGUGGA | 17 | 6479 |
| HSV1-UL48-143 | − | CCAGCGAUGUGGUGGAA | 17 | 5871 |
| HSV1-UL48-144 | − | CAGCGAUGUGGUGGAAU | 17 | 5982 |
| HSV1-UL48-145 | − | AGCGAUGUGGUGGAAUG | 17 | 5983 |
| HSV1-UL48-146 | − | GCGAUGUGGUGGAAUGG | 17 | 5984 |
| HSV1-UL48-667 | − | GGGGGACGCGUACGUCC | 17 | 6480 |
| HSV1-UL48-668 | − | GGCCACCCGCGACGGCC | 17 | 6481 |
| HSV1-UL48-669 | − | CGGCCUCGGGCUCUACU | 17 | 6482 |
| HSV1-UL48-670 | − | CUCUCGUUUCUUCCACG | 17 | 6483 |
| HSV1-UL48-671 | − | UUCUUCCACGCCGAGCU | 17 | 6484 |
| HSV1-UL48-672 | − | CACGCCGAGCUACGGGC | 17 | 6485 |
| HSV1-UL48-156 | − | ACGCCGAGCUACGGGCG | 17 | 5888 |
| HSV1-UL48-157 | − | CGCCGAGCUACGGGCGC | 17 | 5889 |
| HSV1-UL48-675 | − | CCGAGCUACGGGCGCGG | 17 | 6486 |
| HSV1-UL48-158 | − | CGAGCUACGGGCGCGGG | 17 | 5987 |
| HSV1-UL48-677 | − | AGCUACGGGCGCGGGAG | 17 | 6487 |
| HSV1-UL48-678 | + | CGGCAAACAGCUCGUCGACC | 20 | 6488 |
| HSV1-UL48-679 | + | GGCCGGGCGGGGGGGCGGUG | 20 | 6489 |
| HSV1-UL48-112 | + | UGGGACCCCCGGCCGGGCGG | 20 | 6025 |
| HSV1-UL48-111 | + | UUGGGACCCCCGGCCGGGCG | 20 | 6024 |
| HSV1-UL48-110 | + | UUUGGGACCCCCGGCCGGGC | 20 | 6023 |
| HSV1-UL48-109 | + | UUUUGGGACCCCCGGCCGGG | 20 | 6022 |
| HSV1-UL48-684 | + | UUUUUGGGACCCCCGGCCGG | 20 | 6490 |
| HSV1-UL48-685 | + | GGUGUUUUUGGGACCCCCGG | 20 | 6491 |
| HSV1-UL48-104 | + | GGGGGCCGCCGGGGUGUUUU | 20 | 5948 |
| HSV1-UL48-687 | + | GGGGGGCCGCCGGGGUGUUU | 20 | 6492 |
| HSV1-UL48-101 | + | GCGUACAGCGGGGGGGCCGC | 20 | 6020 |
| HSV1-UL48-689 | + | UGCGUACAGCGGGGGGGCCG | 20 | 6493 |
| HSV1-UL48-98 | + | CGCCCCGUUGCGUACAGCGG | 20 | 5939 |
| HSV1-UL48-97 | + | GCGCCCCGUUGCGUACAGCG | 20 | 5938 |
| HSV1-UL48-96 | + | GGCGCCCCGUUGCGUACAGC | 20 | 6019 |
| HSV1-UL48-95 | + | AGGCGCCCCGUUGCGUACAG | 20 | 6018 |
| HSV1-UL48-694 | + | CAGGCGCCCCGUUGCGUACA | 20 | 6494 |
| HSV1-UL48-695 | + | AUGGGUGGGGAGGGCAUGAG | 20 | 6495 |
| HSV1-UL48-696 | + | CGGGCAUGGGUGGGGAGGGC | 20 | 6496 |
| HSV1-UL48-697 | + | GGGGGACGGGCAUGGGUGGG | 20 | 6497 |
| HSV1-UL48-88 | + | GGGGGGGACGGGCAUGGGUG | 20 | 6011 |
| HSV1-UL48-87 | + | CGGGGGGGACGGGCAUGGGU | 20 | 6010 |
| HSV1-UL48-86 | + | GCGGGGGGGACGGGCAUGGG | 20 | 6009 |
| HSV1-UL48-701 | + | GGCGGGGGGGACGGGCAUGG | 20 | 6498 |
| HSV1-UL48-702 | + | GGGCGGCGGGGGGGACGGGC | 20 | 6499 |
| HSV1-UL48-703 | + | UAAAGAGGGCGGCGGGGGGG | 20 | 6500 |
| HSV1-UL48-80 | + | CGGUUAAAGAGGGCGGCGGG | 20 | 5932 |
| HSV1-UL48-79 | + | ACGGUUAAAGAGGGCGGCGG | 20 | 5931 |
| HSV1-UL48-78 | + | GACGGUUAAAGAGGGCGGCG | 20 | 5930 |
| HSV1-UL48-77 | + | AGACGGUUAAAGAGGGCGGC | 20 | 5929 |
| HSV1-UL48-76 | + | GAGACGGUUAAAGAGGGCGG | 20 | 5928 |
| HSV1-UL48-709 | + | GGAGACGGUUAAAGAGGGCG | 20 | 6501 |
| HSV1-UL48-710 | + | UCGUCGAGGAGACGGUUAAA | 20 | 6502 |
| HSV1-UL48-711 | + | AGUCGUCGAGGAGACGGUUA | 20 | 6503 |
| HSV1-UL48-71 | + | CGCUAAAGCCCAAGUCGUCG | 20 | 5915 |
| HSV1-UL48-713 | + | GCGCUAAAGCCCAAGUCGUC | 20 | 6504 |
| HSV1-UL48-714 | + | CCGCGCUAAAGCCCAAGUCG | 20 | 6505 |
| HSV1-UL48-68 | + | AUCGAGCAUGGUACAUAGCG | 20 | 5912 |
| HSV1-UL48-716 | + | UAUCGAGCAUGGUACAUAGC | 20 | 6506 |
| HSV1-UL48-717 | + | ACAGAUCCUCGUUCCAGGUA | 20 | 6507 |
| HSV1-UL48-718 | + | GUCGGCGUUGGUCGGUAGCG | 20 | 6508 |
| HSV1-UL48-60 | + | CAUCGCUGGGCAGCGUUGAU | 20 | 5998 |
| HSV1-UL48-720 | + | ACAUCGCUGGGCAGCGUUGA | 20 | 6509 |
| HSV1-UL48-721 | + | CCCCCCAUUCCACCACAUCG | 20 | 6510 |
| HSV1-UL48-56 | + | AUGUCGAUUUGGGUGCGUUC | 20 | 5995 |
| HSV1-UL48-55 | + | AAUGUCGAUUUGGGUGCGUU | 20 | 5994 |
| HSV1-UL48-724 | + | GAAUGUCGAUUUGGGUGCGU | 20 | 6511 |
| HSV1-UL48-725 | + | CCGUGGGCGCGAAUGUCGAU | 20 | 6512 |
| HSV1-UL48-726 | + | AAGGCCACGUCGCCGUGGGC | 20 | 6513 |
| HSV1-UL48-727 | + | GUAGGGAAGGCCACGUCGCC | 20 | 6514 |
| HSV1-UL48-49 | + | CGCGGGUGGCCGGAAGCGUA | 20 | 5992 |
| HSV1-UL48-48 | + | UCGCGGGUGGCCGGAAGCGU | 20 | 5896 |
| HSV1-UL48-730 | + | GUCGCGGGUGGCCGGAAGCG | 20 | 6515 |
| HSV1-UL48-47 | + | CCGAGGCCGUCGCGGGUGGC | 20 | 5991 |
| HSV1-UL48-732 | + | CCCGAGGCCGUCGCGGGUGG | 20 | 6516 |
| HSV1-UL48-733 | + | UAGUAGAGCCCGAGGCCGUC | 20 | 6517 |
| HSV1-UL48-734 | + | AGAGCGCUUCGUAGUAGAGC | 20 | 6518 |
| HSV1-UL48-735 | + | AACGAGAGAGCGCUUCGUAG | 20 | 6519 |
| HSV1-UL48-736 | + | GCUCGGCGUGGAAGAAACGA | 20 | 6520 |
| HSV1-UL48-737 | + | UAGCUCGGCGUGGAAGAAAC | 20 | 6521 |
| HSV1-UL48-738 | + | CGUAGCUCGGCGUGGAAGAA | 20 | 6522 |
| HSV1-UL48-739 | + | GCGCCCGUAGCUCGGCGUGG | 20 | 6523 |
| HSV1-UL48-42 | + | CCCGCGCCCGUAGCUCGGCG | 20 | 5988 |
| HSV1-UL48-741 | + | UCCCGCGCCCGUAGCUCGGC | 20 | 6524 |
| HSV1-UL48-742 | + | CAAACAGCUCGUCGACC | 17 | 6525 |
| HSV1-UL48-743 | + | CGGGCGGGGGGGCGGUG | 17 | 6526 |
| HSV1-UL48-230 | + | GACCCCCGGCCGGGCGG | 17 | 6068 |
| HSV1-UL48-229 | + | GGACCCCCGGCCGGGCG | 17 | 6067 |
| HSV1-UL48-228 | + | GGGACCCCCGGCCGGGC | 17 | 6066 |
| HSV1-UL48-227 | + | UGGGACCCCCGGCCGGG | 17 | 6065 |
| HSV1-UL48-748 | + | UUGGGACCCCCGGCCGG | 17 | 6527 |
| HSV1-UL48-749 | + | GUUUUUGGGACCCCCGG | 17 | 6528 |
| HSV1-UL48-222 | + | GGCCGCCGGGGUGUUUU | 17 | 5952 |
| HSV1-UL48-751 | + | GGGCCGCCGGGGUGUUU | 17 | 6529 |
| HSV1-UL48-219 | + | UACAGCGGGGGGGCCGC | 17 | 6063 |
| HSV1-UL48-753 | + | GUACAGCGGGGGGGCCG | 17 | 6530 |
| HSV1-UL48-216 | + | CCCGUUGCGUACAGCGG | 17 | 5943 |
| HSV1-UL48-215 | + | CCCCGUUGCGUACAGCG | 17 | 5942 |
| HSV1-UL48-214 | + | GCCCCGUUGCGUACAGC | 17 | 6062 |
| HSV1-UL48-213 | + | CGCCCCGUUGCGUACAG | 17 | 6061 |
| HSV1-UL48-758 | + | GCGCCCCGUUGCGUACA | 17 | 6531 |
| HSV1-UL48-759 | + | GGUGGGGAGGGCAUGAG | 17 | 6532 |
| HSV1-UL48-760 | + | GCAUGGGUGGGGAGGGC | 17 | 6533 |
| HSV1-UL48-761 | + | GGACGGGCAUGGGUGGG | 17 | 6534 |
| HSV1-UL48-206 | + | GGGGACGGGCAUGGGUG | 17 | 6054 |
| HSV1-UL48-205 | + | GGGGGACGGGCAUGGGU | 17 | 6053 |
| HSV1-UL48-204 | + | GGGGGGACGGGCAUGGG | 17 | 6052 |
| HSV1-UL48-765 | + | GGGGGGGACGGGCAUGG | 17 | 6535 |
| HSV1-UL48-766 | + | CGGCGGGGGGGACGGGC | 17 | 6536 |
| HSV1-UL48-767 | + | AGAGGGCGGCGGGGGGG | 17 | 6537 |
| HSV1-UL48-198 | + | UUAAAGAGGGCGGCGGG | 17 | 5937 |
| HSV1-UL48-197 | + | GUUAAAGAGGGCGGCGG | 17 | 5936 |
| HSV1-UL48-196 | + | GGUUAAAGAGGGCGGCG | 17 | 5935 |
| HSV1-UL48-195 | + | CGGUUAAAGAGGGCGGC | 17 | 5934 |
| HSV1-UL48-194 | + | ACGGUUAAAGAGGGCGG | 17 | 5933 |
| HSV1-UL48-773 | + | GACGGUUAAAGAGGGCG | 17 | 6538 |
| HSV1-UL48-774 | + | UCGAGGAGACGGUUAAA | 17 | 6539 |
| HSV1-UL48-775 | + | CGUCGAGGAGACGGUUA | 17 | 6540 |
| HSV1-UL48-189 | + | UAAAGCCCAAGUCGUCG | 17 | 5923 |
| HSV1-UL48-777 | + | CUAAAGCCCAAGUCGUC | 17 | 6541 |
| HSV1-UL48-778 | + | CGCUAAAGCCCAAGUCG | 17 | 6542 |
| HSV1-UL48-186 | + | GAGCAUGGUACAUAGCG | 17 | 5920 |
| HSV1-UL48-780 | + | CGAGCAUGGUACAUAGC | 17 | 6543 |
| HSV1-UL48-781 | + | GAUCCUCGUUCCAGGUA | 17 | 6544 |
| HSV1-UL48-782 | + | GGCGUUGGUCGGUAGCG | 17 | 6545 |
| HSV1-UL48-178 | + | CGCUGGGCAGCGUUGAU | 17 | 6041 |
| HSV1-UL48-784 | + | UCGCUGGGCAGCGUUGA | 17 | 6546 |
| HSV1-UL48-785 | + | CCCAUUCCACCACAUCG | 17 | 6547 |
| HSV1-UL48-174 | + | UCGAUUUGGGUGCGUUC | 17 | 6038 |
| HSV1-UL48-173 | + | GUCGAUUUGGGUGCGUU | 17 | 6037 |
| HSV1-UL48-788 | + | UGUCGAUUUGGGUGCGU | 17 | 6548 |
| HSV1-UL48-789 | + | UGGGCGCGAAUGUCGAU | 17 | 6549 |
| HSV1-UL48-790 | + | GCCACGUCGCCGUGGGC | 17 | 6550 |
| HSV1-UL48-791 | + | GGGAAGGCCACGUCGCC | 17 | 6551 |
| HSV1-UL48-167 | + | GGGUGGCCGGAAGCGUA | 17 | 6035 |
| HSV1-UL48-166 | + | CGGGUGGCCGGAAGCGU | 17 | 5897 |
| HSV1-UL48-794 | + | GCGGGUGGCCGGAAGCG | 17 | 6552 |
| HSV1-UL48-165 | + | AGGCCGUCGCGGGUGGC | 17 | 6034 |
| HSV1-UL48-796 | + | GAGGCCGUCGCGGGUGG | 17 | 6553 |
| HSV1-UL48-797 | + | UAGAGCCCGAGGCCGUC | 17 | 6554 |
| HSV1-UL48-798 | + | GCGCUUCGUAGUAGAGC | 17 | 6555 |
| HSV1-UL48-799 | + | GAGAGAGCGCUUCGUAG | 17 | 6556 |
| HSV1-UL48-800 | + | CGGCGUGGAAGAAACGA | 17 | 6557 |
| HSV1-UL48-801 | + | CUCGGCGUGGAAGAAAC | 17 | 6558 |
| HSV1-UL48-802 | + | AGCUCGGCGUGGAAGAA | 17 | 6559 |
| HSV1-UL48-803 | + | CCCGUAGCUCGGCGUGG | 17 | 6560 |
| HSV1-UL48-160 | + | GCGCCCGUAGCUCGGCG | 17 | 6031 |
| HSV1-UL48-805 | + | CGCGCCCGUAGCUCGGC | 17 | 6561 |

[0745] Table 3E provides exemplary targeting domains for knocking out the UL48 gene selected according to the second tier parameters. The targeting domains are selected based on location within the coding sequence, but downstream of the first 500 bp of the UL48 gene. It is contemplated herein that the targeting domain hybridizes to the target domain through complementary base pairing. Any of the targeting domains in the table can be used with a S. aureus Cas9 molecule that gives double stranded cleavage. Any of the targeting domains in the table can be used with a S. aureus Cas9 single-stranded break nucleases (nickases). In an embodiment, dual targeting is used to create two nicks on opposite DNA strands by using S. aureus Cas9 nickases with two targeting domains that are complementary to opposite DNA strands, e.g., a gRNA comprising any minus strand targeting domain may be paired any gRNA comprising a plus strand targeting domain provided that the two gRNAs are oriented on the DNA such that PAMs face outward and the distance between the 5′ ends of the gRNAs is 0-50 bp.

TABLE 3E
2nd Tier

| | DNA | | Target Site | |
|---|---|---|---|---|
| gRNA Name | Strand | Targeting Domain | Length | Seq ID |
| HSV1-UL48-806 | − | GCACCGCCAGGCGCACAUGC | 20 | 6562 |
| HSV1-UL48-807 | − | UGCGCGGACGCGAUCGCGAC | 20 | 6563 |
| HSV1-UL48-241 | − | GCGCGGACGCGAUCGCGACC | 20 | 6079 |
| HSV1-UL48-242 | − | CGCGGACGCGAUCGCGACCU | 20 | 6080 |
| HSV1-UL48-810 | − | CGGACGCGAUCGCGACCUGG | 20 | 6564 |
| HSV1-UL48-811 | − | AAAUGCUGCGCGCCACGAUC | 20 | 6565 |
| HSV1-UL48-812 | − | ACGAUCGCGGACAGGUACUA | 20 | 6566 |
| HSV1-UL48-813 | − | GAUCGCGGACAGGUACUACC | 20 | 6567 |
| HSV1-UL48-814 | − | UUUGUAUCUAUUUUUGACCC | 20 | 6568 |
| HSV1-UL48-815 | − | UUUUUGACCCGCGAGAUCCU | 20 | 6569 |
| HSV1-UL48-816 | − | GAUCCUAUGGGCCGCGUACG | 20 | 6570 |
| HSV1-UL48-817 | − | UUGACUGCCUCUGUUGCGAC | 20 | 6571 |
| HSV1-UL48-249 | − | UGACUGCCUCUGUUGCGACC | 20 | 6087 |
| HSV1-UL48-819 | − | ACUGCCUCUGUUGCGACCUG | 20 | 6572 |
| HSV1-UL48-820 | − | UGGAGAGCUGGCGUCAGUUG | 20 | 6573 |
| HSV1-UL48-821 | − | CCAGCCCUUCAUGUUCGUCA | 20 | 6574 |
| HSV1-UL48-254 | − | CAGCCCUUCAUGUUCGUCAA | 20 | 6092 |
| HSV1-UL48-823 | − | GUCAACGGAGCGCUCACCGU | 20 | 6575 |
| HSV1-UL48-255 | − | UCAACGGAGCGCUCACCGUC | 20 | 6093 |
| HSV1-UL48-256 | − | CAACGGAGCGCUCACCGUCC | 20 | 6094 |
| HSV1-UL48-257 | − | AACGGAGCGCUCACCGUCCG | 20 | 6095 |
| HSV1-UL48-827 | − | CACCGUCCGGGGAGUGCCAA | 20 | 6576 |
| HSV1-UL48-828 | − | CCAAUCGAGGCCCGCCGGCU | 20 | 6577 |
| HSV1-UL48-260 | − | CAAUCGAGGCCCGCCGGCUG | 20 | 6098 |
| HSV1-UL48-261 | − | AAUCGAGGCCCGCCGGCUGC | 20 | 6099 |
| HSV1-UL48-831 | − | GCGGGAGCUAAACCACAUUC | 20 | 6578 |
| HSV1-UL48-832 | − | CGCUGGUGCGCAGCGCGGCU | 20 | 6579 |
| HSV1-UL48-264 | − | GCUGGUGCGCAGCGCGGCUA | 20 | 6102 |
| HSV1-UL48-834 | − | UGGUGCGCAGCGCGGCUACG | 20 | 6580 |
| HSV1-UL48-265 | − | GGUGCGCAGCGCGGCUACGG | 20 | 6103 |
| HSV1-UL48-836 | − | CAGCGCGGCUACGGAGGAGC | 20 | 6581 |
| HSV1-UL48-266 | − | AGCGCGGCUACGGAGGAGCC | 20 | 6104 |
| HSV1-UL48-838 | − | UGGCAACCAGGCCCGCGCCU | 20 | 6582 |
| HSV1-UL48-839 | − | GGGUACUUUAUGGUGUUGAU | 20 | 6583 |
| HSV1-UL48-840 | − | ACUUUAUGGUGUUGAUUCGG | 20 | 6584 |
| HSV1-UL48-841 | − | UGGUGUUGAUUCGGGCGAAG | 20 | 6585 |
| HSV1-UL48-842 | − | CAGCUUCACGACCUCGCCCU | 20 | 6586 |
| HSV1-UL48-843 | − | UCGCCCUCCGAGGCGGUCAU | 20 | 6587 |
| HSV1-UL48-279 | − | CGCCCUCCGAGGCGGUCAUG | 20 | 6117 |
| HSV1-UL48-280 | − | GCCCUCCGAGGCGGUCAUGC | 20 | 6118 |
| HSV1-UL48-846 | − | ACGCGUACAGCCGCGCGCGU | 20 | 6588 |
| HSV1-UL48-847 | − | CGCGCGUACGAAAAACAAUU | 20 | 6589 |
| HSV1-UL48-848 | − | AAACAAUUACGGGUCUACCA | 20 | 6590 |
| HSV1-UL48-849 | − | ACAAUUACGGGUCUACCAUC | 20 | 6591 |
| HSV1-UL48-850 | − | UCGAGGGCCUGCUCGAUCUC | 20 | 6592 |
| HSV1-UL48-851 | − | UCUCCCGGACGACGACGCCC | 20 | 6593 |
| HSV1-UL48-852 | − | CCCGGACGACGACGCCCCCG | 20 | 6594 |
| HSV1-UL48-853 | − | ACGACGACGCCCCCGAAGAG | 20 | 6595 |
| HSV1-UL48-287 | − | CGACGACGCCCCCGAAGAGG | 20 | 6125 |
| HSV1-UL48-855 | − | CGCGCCUGUCCUUUCUCCCC | 20 | 6596 |
| HSV1-UL48-292 | − | GCGCCUGUCCUUUCUCCCCG | 20 | 6130 |
| HSV1-UL48-857 | − | CCCCCCCGACCGAUGUCAGC | 20 | 6597 |
| HSV1-UL48-295 | − | CCCCCCGACCGAUGUCAGCC | 20 | 6133 |
| HSV1-UL48-296 | − | CCCCCGACCGAUGUCAGCCU | 20 | 6134 |
| HSV1-UL48-297 | − | CCCCGACCGAUGUCAGCCUG | 20 | 6135 |
| HSV1-UL48-861 | − | GACCGAUGUCAGCCUGGGGG | 20 | 6598 |
| HSV1-UL48-862 | − | GGACGAGCUCCACUUAGACG | 20 | 6599 |
| HSV1-UL48-863 | − | ACGAGCUCCACUUAGACGGC | 20 | 6600 |
| HSV1-UL48-864 | − | ACGCGCUAGACGAUUUCGAU | 20 | 6601 |
| HSV1-UL48-865 | − | ACGAUUUCGAUCUGGACAUG | 20 | 6602 |
| HSV1-UL48-304 | − | CGAUUUCGAUCUGGACAUGU | 20 | 6142 |
| HSV1-UL48-305 | − | GAUUUCGAUCUGGACAUGUU | 20 | 6143 |
| HSV1-UL48-306 | − | AUUUCGAUCUGGACAUGUUG | 20 | 6144 |
| HSV1-UL48-869 | − | CGAUCUGGACAUGUUGGGGG | 20 | 6603 |
| HSV1-UL48-308 | − | GAUCUGGACAUGUUGGGGGA | 20 | 6146 |
| HSV1-UL48-309 | − | AUCUGGACAUGUUGGGGGAC | 20 | 6147 |
| HSV1-UL48-872 | − | UGUUGGGGGACGGGGAUUCC | 20 | 6604 |
| HSV1-UL48-311 | − | GUUGGGGGACGGGGAUUCCC | 20 | 6149 |
| HSV1-UL48-874 | − | GGGACGGGGAUUCCCCGGGG | 20 | 6605 |
| HSV1-UL48-314 | − | GGACGGGGAUUCCCCGGGGC | 20 | 6152 |
| HSV1-UL48-876 | − | ACUCCGCCCCCUACGGCGCU | 20 | 6606 |
| HSV1-UL48-877 | − | CGCUCUGGAUAUGGCCGACU | 20 | 6607 |
| HSV1-UL48-878 | − | GGAUAUGGCCGACUUCGAGU | 20 | 6608 |
| HSV1-UL48-879 | − | GCAGAUGUUUACCGAUGCCC | 20 | 6609 |
| HSV1-UL48-319 | − | CAGAUGUUUACCGAUGCCCU | 20 | 6157 |
| HSV1-UL48-881 | − | UACCGAUGCCCUUGGAAUUG | 20 | 6610 |
| HSV1-UL48-882 | − | CCUUGGAAUUGACGAGUACG | 20 | 6611 |
| HSV1-UL48-883 | − | CCGCCAGGCGCACAUGC | 17 | 6612 |
| HSV1-UL48-884 | − | GCGGACGCGAUCGCGAC | 17 | 6613 |
| HSV1-UL48-427 | − | CGGACGCGAUCGCGACC | 17 | 6265 |
| HSV1-UL48-428 | − | GGACGCGAUCGCGACCU | 17 | 6266 |
| HSV1-UL48-887 | − | ACGCGAUCGCGACCUGG | 17 | 6614 |
| HSV1-UL48-888 | − | UGCUGCGCGCCACGAUC | 17 | 6615 |
| HSV1-UL48-889 | − | AUCGCGGACAGGUACUA | 17 | 6616 |
| HSV1-UL48-890 | − | CGCGGACAGGUACUACC | 17 | 6617 |
| HSV1-UL48-891 | − | GUAUCUAUUUUUGACCC | 17 | 6618 |
| HSV1-UL48-892 | − | UUGACCCGCGAGAUCCU | 17 | 6619 |
| HSV1-UL48-893 | − | CCUAUGGGCCGCGUACG | 17 | 6620 |
| HSV1-UL48-894 | − | ACUGCCUCUGUUGCGAC | 17 | 6621 |
| HSV1-UL48-435 | − | CUGCCUCUGUUGCGACC | 17 | 6273 |
| HSV1-UL48-896 | − | GCCUCUGUUGCGACCUG | 17 | 6622 |
| HSV1-UL48-897 | − | AGAGCUGGCGUCAGUUG | 17 | 6623 |
| HSV1-UL48-898 | − | GCCCUUCAUGUUCGUCA | 17 | 6624 |
| HSV1-UL48-440 | − | CCCUUCAUGUUCGUCAA | 17 | 6278 |
| HSV1-UL48-900 | − | AACGGAGCGCUCACCGU | 17 | 6625 |
| HSV1-UL48-441 | − | ACGGAGCGCUCACCGUC | 17 | 6279 |
| HSV1-UL48-442 | − | CGGAGCGCUCACCGUCC | 17 | 6280 |
| HSV1-UL48-443 | − | GGAGCGCUCACCGUCCG | 17 | 6281 |
| HSV1-UL48-904 | − | CGUCCGGGGAGUGCCAA | 17 | 6626 |
| HSV1-UL48-905 | − | AUCGAGGCCCGCCGGCU | 17 | 6627 |
| HSV1-UL48-446 | − | UCGAGGCCCGCCGGCUG | 17 | 6284 |
| HSV1-UL48-447 | − | CGAGGCCCGCCGGCUGC | 17 | 6285 |
| HSV1-UL48-908 | − | GGAGCUAAACCACAUUC | 17 | 6628 |
| HSV1-UL48-909 | − | UGGUGCGCAGCGCGGCU | 17 | 6629 |
| HSV1-UL48-450 | − | GGUGCGCAGCGCGGCUA | 17 | 6288 |
| HSV1-UL48-911 | − | UGCGCAGCGCGGCUACG | 17 | 6630 |
| HSV1-UL48-451 | − | GCGCAGCGCGGCUACGG | 17 | 6289 |
| HSV1-UL48-913 | − | CGCGGCUACGGAGGAGC | 17 | 6631 |
| HSV1-UL48-452 | − | GCGGCUACGGAGGAGCC | 17 | 6290 |
| HSV1-UL48-915 | − | CAACCAGGCCCGCGCCU | 17 | 6632 |
| HSV1-UL48-916 | − | UACUUUAUGGUGUUGAU | 17 | 6633 |
| HSV1-UL48-917 | − | UUAUGGUGUUGAUUCGG | 17 | 6634 |
| HSV1-UL48-918 | − | UGUUGAUUCGGGCGAAG | 17 | 6635 |
| HSV1-UL48-919 | − | CUUCACGACCUCGCCCU | 17 | 6636 |
| HSV1-UL48-920 | − | CCCUCCGAGGCGGUCAU | 17 | 6637 |
| HSV1-UL48-465 | − | CCUCCGAGGCGGUCAUG | 17 | 6303 |
| HSV1-UL48-466 | − | CUCCGAGGCGGUCAUGC | 17 | 6304 |
| HSV1-UL48-923 | − | CGUACAGCCGCGCGCGU | 17 | 6638 |
| HSV1-UL48-924 | − | GCGUACGAAAAACAAUU | 17 | 6639 |
| HSV1-UL48-925 | − | CAAUUACGGGUCUACCA | 17 | 6640 |
| HSV1-UL48-926 | − | AUUACGGGUCUACCAUC | 17 | 6641 |
| HSV1-UL48-927 | − | AGGGCCUGCUCGAUCUC | 17 | 6642 |
| HSV1-UL48-928 | − | CCCGGACGACGACGCCC | 17 | 6643 |
| HSV1-UL48-929 | − | GGACGACGACGCCCCCG | 17 | 6644 |
| HSV1-UL48-930 | − | ACGACGCCCCCGAAGAG | 17 | 6645 |
| HSV1-UL48-473 | − | CGACGCCCCCGAAGAGG | 17 | 6311 |
| HSV1-UL48-932 | − | GCCUGUCCUUUCUCCCC | 17 | 6646 |
| HSV1-UL48-478 | − | CCUGUCCUUUCUCCCCG | 17 | 6316 |
| HSV1-UL48-934 | − | CCCCGACCGAUGUCAGC | 17 | 6647 |
| HSV1-UL48-481 | − | CCCGACCGAUGUCAGCC | 17 | 6319 |
| HSV1-UL48-482 | − | CCGACCGAUGUCAGCCU | 17 | 6320 |
| HSV1-UL48-483 | − | CGACCGAUGUCAGCCUG | 17 | 6321 |
| HSV1-UL48-938 | − | CGAUGUCAGCCUGGGGG | 17 | 6648 |
| HSV1-UL48-939 | − | CGAGCUCCACUUAGACG | 17 | 6649 |
| HSV1-UL48-940 | − | AGCUCCACUUAGACGGC | 17 | 6650 |
| HSV1-UL48-941 | − | CGCUAGACGAUUUCGAU | 17 | 6651 |
| HSV1-UL48-942 | − | AUUUCGAUCUGGACAUG | 17 | 6652 |
| HSV1-UL48-490 | − | UUUCGAUCUGGACAUGU | 17 | 6328 |
| HSV1-UL48-491 | − | UUCGAUCUGGACAUGUU | 17 | 6329 |
| HSV1-UL48-492 | − | UCGAUCUGGACAUGUUG | 17 | 6330 |
| HSV1-UL48-946 | − | UCUGGACAUGUUGGGGG | 17 | 6653 |
| HSV1-UL48-494 | − | CUGGACAUGUUGGGGGA | 17 | 6332 |
| HSV1-UL48-495 | − | UGGACAUGUUGGGGGAC | 17 | 6333 |
| HSV1-UL48-949 | − | UGGGGGACGGGGAUUCC | 17 | 6654 |
| HSV1-UL48-497 | − | GGGGGACGGGGAUUCCC | 17 | 6335 |
| HSV1-UL48-951 | − | ACGGGGAUUCCCCGGGG | 17 | 6655 |
| HSV1-UL48-500 | − | CGGGGAUUCCCCGGGGC | 17 | 6338 |
| HSV1-UL48-953 | − | CCGCCCCCUACGGCGCU | 17 | 6656 |
| HSV1-UL48-954 | − | UCUGGAUAUGGCCGACU | 17 | 6657 |
| HSV1-UL48-955 | − | UAUGGCCGACUUCGAGU | 17 | 6658 |
| HSV1-UL48-956 | − | GAUGUUUACCGAUGCCC | 17 | 6659 |
| HSV1-UL48-505 | − | AUGUUUACCGAUGCCCU | 17 | 6343 |
| HSV1-UL48-958 | − | CGAUGCCCUUGGAAUUG | 17 | 6660 |
| HSV1-UL48-959 | − | UGGAAUUGACGAGUACG | 17 | 6661 |
| HSV1-UL48-960 | + | GGUACCGGUACAGGGCCGAG | 20 | 6662 |
| HSV1-UL48-961 | + | GCGCAGGUACCGGUACAGGG | 20 | 6663 |
| HSV1-UL48-962 | + | CUGGCGCGCAGGUACCGGUA | 20 | 6664 |
| HSV1-UL48-963 | + | UGCGCCUGGCGGUGCAGCUG | 20 | 6665 |
| HSV1-UL48-964 | + | AAAAACAAAACACGCGCCAG | 20 | 6666 |
| HSV1-UL48-965 | + | UACGCGGCCCAUAGGAUCUC | 20 | 6667 |
| HSV1-UL48-966 | + | UGCUCGGCGUACGCGGCCCA | 20 | 6668 |
| HSV1-UL48-967 | + | AACAGAGGCAGUCAAACAGG | 20 | 6669 |
| HSV1-UL48-968 | + | GCCAGCUCUCCAGGUCGCAA | 20 | 6670 |
| HSV1-UL48-397 | + | CGUUGACGAACAUGAAGGGC | 20 | 6235 |
| HSV1-UL48-970 | + | CCGUUGACGAACAUGAAGGG | 20 | 6671 |
| HSV1-UL48-971 | + | GCGCUCCGUUGACGAACAUG | 20 | 6672 |
| HSV1-UL48-972 | + | UGAGCGCUCCGUUGACGAAC | 20 | 6673 |
| HSV1-UL48-973 | + | GGACGGUGAGCGCUCCGUUG | 20 | 6674 |
| HSV1-UL48-974 | + | CGAUUGGCACUCCCCGGACG | 20 | 6675 |
| HSV1-UL48-975 | + | CGGGCCUCGAUUGGCACUCC | 20 | 6676 |
| HSV1-UL48-976 | + | UGGUUUAGCUCCCGCAGCCG | 20 | 6677 |
| HSV1-UL48-977 | + | AGCGGGAGGUUAAGGUGCUC | 20 | 6678 |
| HSV1-UL48-385 | + | UAGCCGCGCUGCGCACCAGC | 20 | 6223 |
| HSV1-UL48-384 | + | GUAGCCGCGCUGCGCACCAG | 20 | 6222 |
| HSV1-UL48-980 | + | CGUAGCCGCGCUGCGCACCA | 20 | 6679 |
| HSV1-UL48-379 | + | UGGUUGCCAUGCAGGGUGGG | 20 | 6217 |
| HSV1-UL48-982 | + | CUGGUUGCCAUGCAGGGUGG | 20 | 6680 |
| HSV1-UL48-378 | + | GCCUGGUUGCCAUGCAGGGU | 20 | 6216 |
| HSV1-UL48-377 | + | GGCCUGGUUGCCAUGCAGGG | 20 | 6215 |
| HSV1-UL48-985 | + | GGGCCUGGUUGCCAUGCAGG | 20 | 6681 |
| HSV1-UL48-986 | + | GCGCGGGCCUGGUUGCCAUG | 20 | 6682 |
| HSV1-UL48-987 | + | ACCAUAAAGUACCCAGAGGC | 20 | 6683 |
| HSV1-UL48-988 | + | AAUCAACACCAUAAAGUACC | 20 | 6684 |
| HSV1-UL48-989 | + | GAAUACGAGUCCAACUUCGC | 20 | 6685 |
| HSV1-UL48-990 | + | CGAGGUCGUGAAGCUGGAAU | 20 | 6686 |
| HSV1-UL48-370 | + | GGAGGGCGAGGUCGUGAAGC | 20 | 6208 |
| HSV1-UL48-992 | + | CGGAGGGCGAGGUCGUGAAG | 20 | 6687 |
| HSV1-UL48-993 | + | CCGCCUCGGAGGGCGAGGUC | 20 | 6688 |
| HSV1-UL48-994 | + | CCGCAUGACCGCCUCGGAGG | 20 | 6689 |
| HSV1-UL48-995 | + | GUUCCCGCAUGACCGCCUCG | 20 | 6690 |
| HSV1-UL48-366 | + | GUGUUCCCGCAUGACCGCCU | 20 | 6204 |
| HSV1-UL48-997 | + | CGUGUUCCCGCAUGACCGCC | 20 | 6691 |
| HSV1-UL48-998 | + | GGGCGUCGUCGUCCGGGAGA | 20 | 6692 |
| HSV1-UL48-362 | + | CUUCGGGGGCGUCGUCGUCC | 20 | 6200 |
| HSV1-UL48-361 | + | UCUUCGGGGGCGUCGUCGUC | 20 | 6199 |
| HSV1-UL48-1001 | + | CUCUUCGGGGGCGUCGUCGU | 20 | 6693 |
| HSV1-UL48-358 | + | GCCGCCAGCCCCGCCUCUUC | 20 | 6196 |
| HSV1-UL48-357 | + | AGCCGCCAGCCCCGCCUCUU | 20 | 6195 |
| HSV1-UL48-1004 | + | GAGCCGCCAGCCCCGCCUCU | 20 | 6694 |
| HSV1-UL48-356 | + | GCGGGGAGAAAGGACAGGCG | 20 | 6194 |
| HSV1-UL48-1006 | + | CGCGGGGAGAAAGGACAGGC | 20 | 6695 |
| HSV1-UL48-1007 | + | GCGUGUGUCCCGCGGGGAGA | 20 | 6696 |
| HSV1-UL48-1008 | + | CUGCGCGUGUGUCCCGCGGG | 20 | 6697 |
| HSV1-UL48-353 | + | GUCUGCGCGUGUGUCCCGCG | 20 | 6191 |
| HSV1-UL48-352 | + | AGUCUGCGCGUGUGUCCCGC | 20 | 6190 |
| HSV1-UL48-351 | + | CAGUCUGCGCGUGUGUCCCG | 20 | 6189 |
| HSV1-UL48-1012 | + | ACAGUCUGCGCGUGUGUCCC | 20 | 6698 |
| HSV1-UL48-348 | + | CCCAGGCUGACAUCGGUCGG | 20 | 6186 |
| HSV1-UL48-347 | + | CCCCAGGCUGACAUCGGUCG | 20 | 6185 |
| HSV1-UL48-346 | + | CCCCCAGGCUGACAUCGGUC | 20 | 6184 |
| HSV1-UL48-345 | + | UCCCCCAGGCUGACAUCGGU | 20 | 6183 |
| HSV1-UL48-1017 | + | GUCCCCCAGGCUGACAUCGG | 20 | 6699 |
| HSV1-UL48-342 | + | CCACGUCCUCGCCGUCUAAG | 20 | 6180 |
| HSV1-UL48-1019 | + | GCCACGUCCUCGCCGUCUAA | 20 | 6700 |
| HSV1-UL48-1020 | + | CGUCCCCCAACAUGUCCAGA | 20 | 6701 |
| HSV1-UL48-340 | + | GGGGGUAAAUCCCGGCCCCG | 20 | 6178 |
| HSV1-UL48-339 | + | GGGGGGUAAAUCCCGGCCCC | 20 | 6177 |
| HSV1-UL48-338 | + | UGGGGGGUAAAUCCCGGCCC | 20 | 6176 |
| HSV1-UL48-1024 | + | GUGGGGGGUAAAUCCCGGCC | 20 | 6702 |
| HSV1-UL48-334 | + | CCGUAGGGGGCGGAGUCGUG | 20 | 6172 |
| HSV1-UL48-333 | + | GCCGUAGGGGGCGGAGUCGU | 20 | 6171 |
| HSV1-UL48-332 | + | CGCCGUAGGGGGCGGAGUCG | 20 | 6170 |
| HSV1-UL48-1028 | + | GCGCCGUAGGGGGCGGAGUC | 20 | 6703 |
| HSV1-UL48-331 | + | AUCCAGAGCGCCGUAGGGGG | 20 | 6169 |
| HSV1-UL48-1030 | + | UAUCCAGAGCGCCGUAGGGG | 20 | 6704 |
| HSV1-UL48-328 | + | GCCAUAUCCAGAGCGCCGUA | 20 | 6166 |
| HSV1-UL48-327 | + | GGCCAUAUCCAGAGCGCCGU | 20 | 6165 |
| HSV1-UL48-1033 | + | CGGCCAUAUCCAGAGCGCCG | 20 | 6705 |
| HSV1-UL48-1034 | + | AACUCGAAGUCGGCCAUAUC | 20 | 6706 |
| HSV1-UL48-1035 | + | CGGUAAACAUCUGCUCAAAC | 20 | 6707 |
| HSV1-UL48-1036 | + | CCACCGUACUCGUCAAUUCC | 20 | 6708 |
| HSV1-UL48-1037 | + | ACCGGUACAGGGCCGAG | 17 | 6709 |
| HSV1-UL48-1038 | + | CAGGUACCGGUACAGGG | 17 | 6710 |
| HSV1-UL48-1039 | + | GCGCGCAGGUACCGGUA | 17 | 6711 |
| HSV1-UL48-1040 | + | GCCUGGCGGUGCAGCUG | 17 | 6712 |
| HSV1-UL48-1041 | + | AACAAAACACGCGCCAG | 17 | 6713 |
| HSV1-UL48-1042 | + | GCGGCCCAUAGGAUCUC | 17 | 6714 |
| HSV1-UL48-1043 | + | UCGGCGUACGCGGCCCA | 17 | 6715 |
| HSV1-UL48-1044 | + | AGAGGCAGUCAAACAGG | 17 | 6716 |
| HSV1-UL48-1045 | + | AGCUCUCCAGGUCGCAA | 17 | 6717 |
| HSV1-UL48-583 | + | UGACGAACAUGAAGGGC | 17 | 6421 |
| HSV1-UL48-1047 | + | UUGACGAACAUGAAGGG | 17 | 6718 |
| HSV1-UL48-1048 | + | CUCCGUUGACGAACAUG | 17 | 6719 |
| HSV1-UL48-1049 | + | GCGCUCCGUUGACGAAC | 17 | 6720 |
| HSV1-UL48-1050 | + | CGGUGAGCGCUCCGUUG | 17 | 6721 |
| HSV1-UL48-1051 | + | UUGGCACUCCCCGGACG | 17 | 6722 |
| HSV1-UL48-1052 | + | GCCUCGAUUGGCACUCC | 17 | 6723 |
| HSV1-UL48-1053 | + | UUUAGCUCCCGCAGCCG | 17 | 6724 |
| HSV1-UL48-1054 | + | GGGAGGUUAAGGUGCUC | 17 | 6725 |
| HSV1-UL48-571 | + | CCGCGCUGCGCACCAGC | 17 | 6409 |
| HSV1-UL48-570 | + | GCCGCGCUGCGCACCAG | 17 | 6408 |
| HSV1-UL48-1057 | + | AGCCGCGCUGCGCACCA | 17 | 6726 |
| HSV1-UL48-565 | + | UUGCCAUGCAGGGUGGG | 17 | 6403 |
| HSV1-UL48-1059 | + | GUUGCCAUGCAGGGUGG | 17 | 6727 |
| HSV1-UL48-564 | + | UGGUUGCCAUGCAGGGU | 17 | 6402 |
| HSV1-UL48-563 | + | CUGGUUGCCAUGCAGGG | 17 | 6401 |
| HSV1-UL48-1062 | + | CCUGGUUGCCAUGCAGG | 17 | 6728 |
| HSV1-UL48-1063 | + | CGGGCCUGGUUGCCAUG | 17 | 6729 |
| HSV1-UL48-1064 | + | AUAAAGUACCCAGAGGC | 17 | 6730 |
| HSV1-UL48-1065 | + | CAACACCAUAAAGUACC | 17 | 6731 |
| HSV1-UL48-1066 | + | UACGAGUCCAACUUCGC | 17 | 6732 |
| HSV1-UL48-1067 | + | GGUCGUGAAGCUGGAAU | 17 | 6733 |
| HSV1-UL48-556 | + | GGGCGAGGUCGUGAAGC | 17 | 6394 |
| HSV1-UL48-1069 | + | AGGGCGAGGUCGUGAAG | 17 | 6734 |
| HSV1-UL48-1070 | + | CCUCGGAGGGCGAGGUC | 17 | 6735 |
| HSV1-UL48-1071 | + | CAUGACCGCCUCGGAGG | 17 | 6736 |
| HSV1-UL48-1072 | + | CCCGCAUGACCGCCUCG | 17 | 6737 |
| HSV1-UL48-552 | + | UUCCCGCAUGACCGCCU | 17 | 6390 |
| HSV1-UL48-1074 | + | GUUCCCGCAUGACCGCC | 17 | 6738 |
| HSV1-UL48-1075 | + | CGUCGUCGUCCGGGAGA | 17 | 6739 |
| HSV1-UL48-548 | + | CGGGGGCGUCGUCGUCC | 17 | 6386 |
| HSV1-UL48-547 | + | UCGGGGGCGUCGUCGUC | 17 | 6385 |
| HSV1-UL48-1078 | + | UUCGGGGGCGUCGUCGU | 17 | 6740 |
| HSV1-UL48-544 | + | GCCAGCCCCGCCUCUUC | 17 | 6382 |
| HSV1-UL48-543 | + | CGCCAGCCCCGCCUCUU | 17 | 6381 |
| HSV1-UL48-1081 | + | CCGCCAGCCCCGCCUCU | 17 | 6741 |
| HSV1-UL48-542 | + | GGGAGAAAGGACAGGCG | 17 | 6380 |
| HSV1-UL48-1083 | + | GGGGAGAAAGGACAGGC | 17 | 6742 |
| HSV1-UL48-1084 | + | UGUGUCCCGCGGGGAGA | 17 | 6743 |
| HSV1-UL48-1085 | + | CGCGUGUGUCCCGCGGG | 17 | 6744 |
| HSV1-UL48-539 | + | UGCGCGUGUGUCCCGCG | 17 | 6377 |
| HSV1-UL48-538 | + | CUGCGCGUGUGUCCCGC | 17 | 6376 |
| HSV1-UL48-537 | + | UCUGCGCGUGUGUCCCG | 17 | 6375 |
| HSV1-UL48-1089 | + | GUCUGCGCGUGUGUCCC | 17 | 6745 |
| HSV1-UL48-534 | + | AGGCUGACAUCGGUCGG | 17 | 6372 |
| HSV1-UL48-533 | + | CAGGCUGACAUCGGUCG | 17 | 6371 |
| HSV1-UL48-532 | + | CCAGGCUGACAUCGGUC | 17 | 6370 |
| HSV1-UL48-531 | + | CCCAGGCUGACAUCGGU | 17 | 6369 |
| HSV1-UL48-1094 | + | CCCCAGGCUGACAUCGG | 17 | 6746 |
| HSV1-UL48-528 | + | CGUCCUCGCCGUCUAAG | 17 | 6366 |
| HSV1-UL48-1096 | + | ACGUCCUCGCCGUCUAA | 17 | 6747 |
| HSV1-UL48-1097 | + | CCCCCAACAUGUCCAGA | 17 | 6748 |
| HSV1-UL48-526 | + | GGUAAAUCCCGGCCCCG | 17 | 6364 |
| HSV1-UL48-525 | + | GGGUAAAUCCCGGCCCC | 17 | 6363 |
| HSV1-UL48-524 | + | GGGGUAAAUCCCGGCCC | 17 | 6362 |
| HSV1-UL48-1101 | + | GGGGGUAAAUCCCGGCC | 17 | 6749 |
| HSV1-UL48-520 | + | UAGGGGGCGGAGUCGUG | 17 | 6358 |
| HSV1-UL48-519 | + | GUAGGGGGCGGAGUCGU | 17 | 6357 |
| HSV1-UL48-518 | + | CGUAGGGGGCGGAGUCG | 17 | 6356 |
| HSV1-UL48-1105 | + | CCGUAGGGGGCGGAGUC | 17 | 6750 |
| HSV1-UL48-517 | + | CAGAGCGCCGUAGGGGG | 17 | 6355 |
| HSV1-UL48-1107 | + | CCAGAGCGCCGUAGGGG | 17 | 6751 |
| HSV1-UL48-514 | + | AUAUCCAGAGCGCCGUA | 17 | 6352 |
| HSV1-UL48-513 | + | CAUAUCCAGAGCGCCGU | 17 | 6351 |
| HSV1-UL48-1110 | + | CCAUAUCCAGAGCGCCG | 17 | 6752 |
| HSV1-UL48-1111 | + | UCGAAGUCGGCCAUAUC | 17 | 6753 |
| HSV1-UL48-1112 | + | UAAACAUCUGCUCAAAC | 17 | 6754 |
| HSV1-UL48-1113 | + | CCGUACUCGUCAAUUCC | 17 | 6755 |

[0746] Table 3F provides exemplary targeting domains for knocking out the UL48 gene selected according to the first tier parameters. The targeting domains are selected based on location within first 500 bp of the coding sequence of the UL48 gene. It is contemplated herein that the targeting domain hybridizes to the target domain through complementary base pairing. Any of the targeting domains in the table can be used with a N. meningitidis Cas9 molecule that gives double stranded cleavage. Any of the targeting domains in the table can be used with a N. meningitidis Cas9 single-stranded break nucleases (nickases). In an embodiment, dual targeting is used to create two nicks on opposite DNA strands by using N. meningitidis Cas9 nickases with two targeting domains that are complementary to opposite DNA strands, e.g., a gRNA comprising any minus strand targeting domain may be paired any gRNA comprising a plus strand targeting domain provided that the two gRNAs are oriented on the DNA such that PAMs face outward and the distance between the 5′ ends of the gRNAs is 0-50 bp.

TABLE 3F
1st Tier

| | | | Target | |
|---|---|---|---|---|
| | DNA | | Site | Seq |
| gRNA Name | Strand | Targeting Domain | Length | ID |
| HSV1-UL48- | + | CACGUCGCCGUGGGCGCGAA | 20 | 6756 |
| 1114 | | | | |
| HSV1-UL48- | + | GUCGCCGUGGGCGCGAA | 20 | 6757 |
| 1115 | | | | |

[0747] Table 3G provides exemplary targeting domains for knocking out the UL48 gene selected according to the second tier parameters. The targeting domains are selected based on location within the coding sequence (but downstream of the first 500 bp) of the UL48 gene. It is contemplated herein that the targeting domain hybridizes to the target domain through complementary base pairing. Any of the targeting domains in the table can be used with a N. meningitidis Cas9 molecule that gives double stranded cleavage. Any of the targeting domains in the table can be used with a N. meningitidis Cas9 single-stranded break nucleases (nickases). In an embodiment, dual targeting is used to create two nicks on opposite DNA strands by using N. meningitidis Cas9 nickases with two targeting domains that are complementary to opposite DNA strands, e.g., a gRNA comprising any minus strand targeting domain may be paired any gRNA comprising a plus strand targeting domain provided that the two gRNAs are oriented on the DNA such that PAMs face outward and the distance between the 5′ ends of the gRNAs is 0-50 bp.

TABLE 3G
2nd Tier

| | DNA | | Target Site | |
|---|---|---|---|---|
| gRNA Name | Strand | Targeting Domain | Length | Seq ID |
| HSV1-UL48-1116 | − | CGCCUCUGGGUACUUUAUGG | 20 | 6758 |
| HSV1-UL48-1117 | − | AUGGCGCAUGCCGACGCGCU | 20 | 6759 |
| HSV1-UL48-308 | − | GAUCUGGACAUGUUGGGGGA | 20 | 6146 |
| HSV1-UL48-874 | − | GGGACGGGGAUUCCCCGGGG | 20 | 6605 |
| HSV1-UL48-1120 | − | CUCUGGGUACUUUAUGG | 17 | 6760 |
| HSV1-UL48-1121 | − | GCGCAUGCCGACGCGCU | 17 | 6761 |
| HSV1-UL48-494 | − | CUGGACAUGUUGGGGGA | 17 | 6332 |
| HSV1-UL48-951 | − | ACGGGGAUUCCCCGGGG | 17 | 6655 |
| HSV1-UL48-1124 | + | UAGCUCCCGCAGCCGGCGGG | 20 | 6762 |
| HSV1-UL48-1125 | + | CUCCCGCAGCCGGCGGG | 20 | 6763 |

[0748] Table 4A provides exemplary targeting domains for knocking out the UL54 gene selected according to first tier parameters. The targeting domains are selected based on location within the first 500 bp of the coding sequence of the UL54 gene and orthogonality against the human genome. It is contemplated herein that the targeting domain hybridizes to the target domain through complementary base pairing. Any of the targeting domains in the table can be used with a S. pyogenes Cas9 molecule that gives double stranded cleavage. Any of the targeting domains in the table can be used with a S. pyogenes Cas9 single-stranded break nucleases (nickases). In an embodiment, dual targeting is used to create two nicks on opposite DNA strands by using S. pyogenes Cas9 nickases with two targeting domains that are complementary to opposite DNA strands, e.g., a gRNA comprising any minus strand targeting domain may be paired any gRNA comprising a plus strand targeting domain provided that the two gRNAs are oriented on the DNA such that PAMs face outward and the distance between the 5′ ends of the gRNAs is 0-50 bp.

TABLE 4A
1st Tier

| | | | Target | |
|---|---|---|---|---|
| gRNA Name | DNA Strand | Targeting Domain | Site Length | Seq ID |
| HSV1-UL54-1 | − | GGACCUCUCCGACAGCGAUC | 20 | 6764 |
| HSV1-UL54-2 | − | CUCCGACAGCGAUCUGGACG | 20 | 6765 |
| HSV1-UL54-3 | − | CCGCCGCGACGACCUGGAAU | 20 | 6766 |
| HSV1-UL54-4 | − | CAGCGGGGAGUGUUCCUCGU | 20 | 6767 |
| HSV1-UL54-5 | − | UUCCUCGUCGGACGAGGACA | 20 | 6768 |
| HSV1-UL54-6 | − | GAUACUCGACGCCGCUCGCC | 20 | 6769 |
| HSV1-UL54-7 | − | ACUCGACGCCGCUCGCCCGG | 20 | 6770 |
| HSV1-UL54-8 | − | CACCCAGACGCCUCGUCCGA | 20 | 6771 |
| HSV1-UL54-9 | − | GCCUCGUCCGACGGAGCGGC | 20 | 6772 |
| HSV1-UL54-10 | − | ACAGUGUGUGGUCGCGCCUC | 20 | 6773 |
| HSV1-UL54-11 | − | CAGUGUGUGGUCGCGCCUCG | 20 | 6774 |
| HSV1-UL54-12 | − | UGUGGUCGCGCCUCGGGGCC | 20 | 6775 |
| HSV1-UL54-13 | − | UUGCUCCCCCGAGCAGCACG | 20 | 6776 |
| HSV1-UL54-14 | − | UCGGGGUCGCGGUGGUCCCG | 20 | 6777 |
| HSV1-UL54-15 | − | CGGGGCUGCCGAUGGUUUGU | 20 | 6778 |
| HSV1-UL54-16 | − | AUGGUUUGUCGGACCCCCGC | 20 | 6779 |
| HSV1-UL54-17 | + | GCGGGGGUCCGACAAACCAU | 20 | 6780 |
| HSV1-UL54-18 | + | CGACAAACCAUCGGCAGCCC | 20 | 6781 |
| HSV1-UL54-19 | + | GACGCCCACGGCGUCCGCCG | 20 | 6782 |
| HSV1-UL54-20 | + | CCUUGCCCCCGUGCUGCUCG | 20 | 6783 |
| HSV1-UL54-21 | + | CUUGCCCCCGUGCUGCUCGG | 20 | 6784 |
| HSV1-UL54-22 | + | CGGGGGAGCAAGACGGUCGC | 20 | 6785 |
| HSV1-UL54-23 | + | GGGGGAGCAAGACGGUCGCC | 20 | 6786 |
| HSV1-UL54-24 | + | CGAGGCGCGACCACACACUG | 20 | 6787 |
| HSV1-UL54-25 | + | GAGGCGCGACCACACACUGU | 20 | 6788 |
| HSV1-UL54-26 | + | UUGGGGCCCUGCCGCUCCGU | 20 | 6789 |
| HSV1-UL54-27 | + | CCCUGCCGCUCCGUCGGACG | 20 | 6790 |
| HSV1-UL54-28 | + | GCUCCGUCGGACGAGGCGUC | 20 | 6791 |
| HSV1-UL54-29 | + | CUCCGUCGGACGAGGCGUCU | 20 | 6792 |
| HSV1-UL54-30 | + | GGUCUUCUGGACGAGACGGG | 20 | 6793 |
| HSV1-UL54-31 | + | GGGCGAGCGGCGUCGAGUAU | 20 | 6794 |
| HSV1-UL54-32 | + | UCCGGUCCGUCCUCUCCGUG | 20 | 6795 |
| HSV1-UL54-33 | + | UUCCAUGUCCUCGUCCGACG | 20 | 6796 |
| HSV1-UL54-34 | + | UGUCCGAUUCCAGGUCGUCG | 20 | 6797 |
| HSV1-UL54-35 | + | CCGAUUCCAGGUCGUCGCGG | 20 | 6798 |
| HSV1-UL54-36 | + | CGGCUCUCCGCCGGCUCGGG | 20 | 6799 |
| HSV1-UL54-37 | + | GUCCUCGUCCAGAUCGCUGU | 20 | 6800 |
| HSV1-UL54-38 | + | CGUCCAGAUCGCUGUCGGAG | 20 | 6801 |
| HSV1-UL54-39 | + | GAUCGCUGUCGGAGAGGUCC | 20 | 6802 |
| HSV1-UL54-40 | + | UGUCGGAGAGGUCCAGGCCG | 20 | 6803 |
| HSV1-UL54-41 | − | CCUCUCCGACAGCGAUC | 17 | 6804 |
| HSV1-UL54-42 | − | CGACAGCGAUCUGGACG | 17 | 6805 |
| HSV1-UL54-43 | − | CCGCGACGACCUGGAAU | 17 | 6806 |
| HSV1-UL54-44 | − | CGGGGAGUGUUCCUCGU | 17 | 6807 |
| HSV1-UL54-45 | − | CUCGUCGGACGAGGACA | 17 | 6808 |
| HSV1-UL54-46 | − | ACUCGACGCCGCUCGCC | 17 | 6809 |
| HSV1-UL54-47 | − | CGACGCCGCUCGCCCGG | 17 | 6810 |
| HSV1-UL54-48 | − | CCAGACGCCUCGUCCGA | 17 | 6811 |
| HSV1-UL54-49 | − | UCGUCCGACGGAGCGGC | 17 | 6812 |
| HSV1-UL54-50 | − | GUGUGUGGUCGCGCCUC | 17 | 6813 |
| HSV1-UL54-51 | − | UGUGUGGUCGCGCCUCG | 17 | 6814 |
| HSV1-UL54-52 | − | GGUCGCGCCUCGGGGCC | 17 | 6815 |
| HSV1-UL54-53 | − | CUCCCCCGAGCAGCACG | 17 | 6816 |
| HSV1-UL54-54 | − | GGGUCGCGGUGGUCCCG | 17 | 6817 |
| HSV1-UL54-55 | − | GGCUGCCGAUGGUUUGU | 17 | 6818 |
| HSV1-UL54-56 | − | GUUUGUCGGACCCCCGC | 17 | 6819 |
| HSV1-UL54-57 | + | GGGGUCCGACAAACCAU | 17 | 6820 |
| HSV1-UL54-58 | + | CAAACCAUCGGCAGCCC | 17 | 6821 |
| HSV1-UL54-59 | + | GCCCACGGCGUCCGCCG | 17 | 6822 |
| HSV1-UL54-60 | + | UGCCCCCGUGCUGCUCG | 17 | 6823 |
| HSV1-UL54-61 | + | GCCCCCGUGCUGCUCGG | 17 | 6824 |
| HSV1-UL54-62 | + | GGGAGCAAGACGGUCGC | 17 | 6825 |
| HSV1-UL54-63 | + | GGAGCAAGACGGUCGCC | 17 | 6826 |
| HSV1-UL54-64 | + | GGCGCGACCACACACUG | 17 | 6827 |
| HSV1-UL54-65 | + | GCGCGACCACACACUGU | 17 | 6828 |
| HSV1-UL54-66 | + | GGGCCCUGCCGCUCCGU | 17 | 6829 |
| HSV1-UL54-67 | + | UGCCGCUCCGUCGGACG | 17 | 6830 |
| HSV1-UL54-68 | + | CCGUCGGACGAGGCGUC | 17 | 6831 |
| HSV1-UL54-69 | + | CGUCGGACGAGGCGUCU | 17 | 6832 |
| HSV1-UL54-70 | + | CUUCUGGACGAGACGGG | 17 | 6833 |
| HSV1-UL54-71 | + | CGAGCGGCGUCGAGUAU | 17 | 6834 |
| HSV1-UL54-72 | + | GGUCCGUCCUCUCCGUG | 17 | 6835 |
| HSV1-UL54-73 | + | CAUGUCCUCGUCCGACG | 17 | 6836 |
| HSV1-UL54-74 | + | CCGAUUCCAGGUCGUCG | 17 | 6837 |
| HSV1-UL54-75 | + | AUUCCAGGUCGUCGCGG | 17 | 6838 |
| HSV1-UL54-76 | + | CUCUCCGCCGGCUCGGG | 17 | 6839 |
| HSV1-UL54-77 | + | CUCGUCCAGAUCGCUGU | 17 | 6840 |
| HSV1-UL54-78 | + | CCAGAUCGCUGUCGGAG | 17 | 6841 |
| HSV1-UL54-79 | + | CGCUGUCGGAGAGGUCC | 17 | 6842 |
| HSV1-UL54-80 | + | CGGAGAGGUCCAGGCCG | 17 | 6843 |

[0749] Table 4B provides exemplary targeting domains for knocking out the UL54 gene selected according to the second tier parameters. The targeting domains are selected based on location within the first 500 bp of the coding sequence of the UL54 gene. It is contemplated herein that the targeting domain hybridizes to the target domain through complementary base pairing. Any of the targeting domains in the table can be used with a S. pyogenes Cas9 molecule that gives double stranded cleavage. Any of the targeting domains in the table can be used with a S. pyogenes Cas9 single-stranded break nucleases (nickases). In an embodiment, dual targeting is used to create two nicks on opposite DNA strands by using S. pyogenes Cas9 nickases with two targeting domains that are complementary to opposite DNA strands, e.g., a gRNA comprising any minus strand targeting domain may be paired any gRNA comprising a plus strand targeting domain provided that the two gRNAs are oriented on the DNA such that PAMs face outward and the distance between the 5′ ends of the gRNAs is 0-50 bp.

TABLE 4B
2nd Tier

| | | | Target Site | |
|---|---|---|---|---|
| gRNA Name | DNA Strand | Targeting Domain | Length | Seq ID |
| HSV1-UL54-81 | − | AUUGAUAUGCUAAUUGACCU | 20 | 6844 |
| HSV1-UL54-82 | − | UAUGCUAAUUGACCUCGGCC | 20 | 6845 |
| HSV1-UL54-83 | − | GGACGAGGACCCCCCCGAGC | 20 | 6846 |
| HSV1-UL54-84 | − | CGAGGACCCCCCCGAGCCGG | 20 | 6847 |
| HSV1-UL54-85 | − | GGAGAGCCGCCGCGACGACC | 20 | 6848 |
| HSV1-UL54-86 | − | GACCUGGAAUCGGACAGCAG | 20 | 6849 |
| HSV1-UL54-87 | − | ACCUGGAAUCGGACAGCAGC | 20 | 6850 |
| HSV1-UL54-88 | − | CCUGGAAUCGGACAGCAGCG | 20 | 6851 |
| HSV1-UL54-89 | − | GGAGUGUUCCUCGUCGGACG | 20 | 6852 |
| HSV1-UL54-90 | − | GAGGACAUGGAAGACCCCCA | 20 | 6853 |
| HSV1-UL54-91 | − | CAUGGAAGACCCCCACGGAG | 20 | 6854 |
| HSV1-UL54-92 | − | GAAGACCCCCACGGAGAGGA | 20 | 6855 |
| HSV1-UL54-93 | − | CCCCCACGGAGAGGACGGAC | 20 | 6856 |
| HSV1-UL54-94 | − | CCGUCUCGUCCAGAAGACCC | 20 | 6857 |
| HSV1-UL54-95 | − | AGACGCCUCGUCCGACGGAG | 20 | 6858 |
| HSV1-UL54-96 | − | CCUCGUCCGACGGAGCGGCA | 20 | 6859 |
| HSV1-UL54-97 | − | AACCAGCGCCCCACAGUGUG | 20 | 6860 |
| HSV1-UL54-98 | − | CACAGUGUGUGGUCGCGCCU | 20 | 6861 |
| HSV1-UL54-99 | − | UCUUGCUCCCCCGAGCAGCA | 20 | 6862 |
| HSV1-UL54-100 | − | CUUGCUCCCCCGAGCAGCAC | 20 | 6863 |
| HSV1-UL54-101 | − | UGCUCCCCCGAGCAGCACGG | 20 | 6864 |
| HSV1-UL54-102 | − | CCCCGAGCAGCACGGGGGCA | 20 | 6865 |
| HSV1-UL54-103 | − | CGAGCAGCACGGGGGCAAGG | 20 | 6866 |
| HSV1-UL54-104 | − | ACCAAAGCCCAGCCUGCCCG | 20 | 6867 |
| HSV1-UL54-105 | − | AAAGCCCAGCCUGCCCGCGG | 20 | 6868 |
| HSV1-UL54-106 | − | CCUGCCCGCGGCGGACGCCG | 20 | 6869 |
| HSV1-UL54-107 | − | CUGCCCGCGGCGGACGCCGU | 20 | 6870 |
| HSV1-UL54-108 | − | GCGGACGCCGUGGGCGUCGC | 20 | 6871 |
| HSV1-UL54-109 | − | CGGACGCCGUGGGCGUCGCA | 20 | 6872 |
| HSV1-UL54-110 | − | GGACGCCGUGGGCGUCGCAG | 20 | 6873 |
| HSV1-UL54-111 | − | GCCGUGGGCGUCGCAGGGGU | 20 | 6874 |
| HSV1-UL54-112 | − | CCGUGGGCGUCGCAGGGGUC | 20 | 6875 |
| HSV1-UL54-113 | − | CGUGGGCGUCGCAGGGGUCG | 20 | 6876 |
| HSV1-UL54-114 | − | CGUCGCAGGGGUCGGGGUCG | 20 | 6877 |
| HSV1-UL54-115 | − | CGCAGGGGUCGGGGUCGCGG | 20 | 6878 |
| HSV1-UL54-116 | − | GGUCGGGGUCGCGGUGGUCC | 20 | 6879 |
| HSV1-UL54-117 | − | GUCGGGGUCGCGGUGGUCCC | 20 | 6880 |
| HSV1-UL54-118 | − | GGUGGUCCCGGGGCUGCCGA | 20 | 6881 |
| HSV1-UL54-119 | + | GACAAACCAUCGGCAGCCCC | 20 | 6882 |
| HSV1-UL54-120 | + | CCCGACCCCUGCGACGCCCA | 20 | 6883 |
| HSV1-UL54-121 | + | ACGCCCACGGCGUCCGCCGC | 20 | 6884 |
| HSV1-UL54-122 | + | CCACGGCGUCCGCCGCGGGC | 20 | 6885 |
| HSV1-UL54-123 | + | GGCGUCCGCCGCGGGCAGGC | 20 | 6886 |
| HSV1-UL54-124 | + | GCGUCCGCCGCGGGCAGGCU | 20 | 6887 |
| HSV1-UL54-125 | + | GCCGCGGGCAGGCUGGGCUU | 20 | 6888 |
| HSV1-UL54-126 | + | CGGGCAGGCUGGGCUUUGGU | 20 | 6889 |
| HSV1-UL54-127 | + | GCAGGCUGGGCUUUGGUCGG | 20 | 6890 |
| HSV1-UL54-128 | + | CAGGCUGGGCUUUGGUCGGU | 20 | 6891 |
| HSV1-UL54-129 | + | AGGCUGGGCUUUGGUCGGUG | 20 | 6892 |
| HSV1-UL54-130 | + | GGCUGGGCUUUGGUCGGUGG | 20 | 6893 |
| HSV1-UL54-131 | + | GGGCUUUGGUCGGUGGGGGU | 20 | 6894 |
| HSV1-UL54-132 | + | CUUUGGUCGGUGGGGGUUGG | 20 | 6895 |
| HSV1-UL54-133 | + | UGGUCGGUGGGGGUUGGAGG | 20 | 6896 |
| HSV1-UL54-134 | + | GGUCGGUGGGGGUUGGAGGC | 20 | 6897 |
| HSV1-UL54-135 | + | CACCUUGCCCCCGUGCUGCU | 20 | 6898 |
| HSV1-UL54-136 | + | ACCUUGCCCCCGUGCUGCUC | 20 | 6899 |
| HSV1-UL54-137 | + | UGCUGCUCGGGGGAGCAAGA | 20 | 6900 |
| HSV1-UL54-138 | + | AAGACGGUCGCCGGGCCCCG | 20 | 6901 |
| HSV1-UL54-139 | + | AGGCGCGACCACACACUGUG | 20 | 6902 |
| HSV1-UL54-140 | + | GACCACACACUGUGGGGCGC | 20 | 6903 |
| HSV1-UL54-141 | + | ACACUGUGGGGCGCUGGUUG | 20 | 6904 |
| HSV1-UL54-142 | + | GGGCGCUGGUUGAGGAUCGU | 20 | 6905 |
| HSV1-UL54-143 | + | GGCGCUGGUUGAGGAUCGUU | 20 | 6906 |
| HSV1-UL54-144 | + | GCGCUGGUUGAGGAUCGUUG | 20 | 6907 |
| HSV1-UL54-145 | + | CGGACGAGGCGUCUGGGUGC | 20 | 6908 |
| HSV1-UL54-146 | + | GGACGAGGCGUCUGGGUGCU | 20 | 6909 |
| HSV1-UL54-147 | + | CGUCUGGGUGCUGGGUACGC | 20 | 6910 |
| HSV1-UL54-148 | + | GUCUGGGUGCUGGGUACGCC | 20 | 6911 |
| HSV1-UL54-149 | + | UCUGGGUGCUGGGUACGCCG | 20 | 6912 |
| HSV1-UL54-150 | + | CUGGGUACGCCGGGGUCUUC | 20 | 6913 |
| HSV1-UL54-151 | + | CCGGGGUCUUCUGGACGAGA | 20 | 6914 |
| HSV1-UL54-152 | + | CGGGGUCUUCUGGACGAGAC | 20 | 6915 |
| HSV1-UL54-153 | + | GGACGAGACGGGCGGACCGC | 20 | 6916 |
| HSV1-UL54-154 | + | GACGAGACGGGCGGACCGCC | 20 | 6917 |
| HSV1-UL54-155 | + | CGGGCGGACCGCCGGGCGAG | 20 | 6918 |
| HSV1-UL54-156 | + | GCGGCGUCGAGUAUCGGCUC | 20 | 6919 |
| HSV1-UL54-157 | + | GCUCCGGUCCGUCCUCUCCG | 20 | 6920 |
| HSV1-UL54-158 | + | CUCCGGUCCGUCCUCUCCGU | 20 | 6921 |
| HSV1-UL54-159 | + | CCGGUCCGUCCUCUCCGUGG | 20 | 6922 |
| HSV1-UL54-160 | + | CCCCGCUGCUGUCCGAUUCC | 20 | 6923 |
| HSV1-UL54-161 | + | UCGUCGCGGCGGCUCUCCGC | 20 | 6924 |
| HSV1-UL54-162 | + | GCGGCGGCUCUCCGCCGGCU | 20 | 6925 |
| HSV1-UL54-163 | + | CGGCGGCUCUCCGCCGGCUC | 20 | 6926 |
| HSV1-UL54-164 | + | GGCGGCUCUCCGCCGGCUCG | 20 | 6927 |
| HSV1-UL54-165 | + | GCGGCUCUCCGCCGGCUCGG | 20 | 6928 |
| HSV1-UL54-166 | + | GGCUCUCCGCCGGCUCGGGG | 20 | 6929 |
| HSV1-UL54-167 | − | GAUAUGCUAAUUGACCU | 17 | 6930 |
| HSV1-UL54-168 | − | GCUAAUUGACCUCGGCC | 17 | 6931 |
| HSV1-UL54-169 | − | CGAGGACCCCCCCGAGC | 17 | 6932 |
| HSV1-UL54-170 | − | GGACCCCCCCGAGCCGG | 17 | 6933 |
| HSV1-UL54-171 | − | GAGCCGCCGCGACGACC | 17 | 6934 |
| HSV1-UL54-172 | − | CUGGAAUCGGACAGCAG | 17 | 6935 |
| HSV1-UL54-173 | − | UGGAAUCGGACAGCAGC | 17 | 6936 |
| HSV1-UL54-174 | − | GGAAUCGGACAGCAGCG | 17 | 6937 |
| HSV1-UL54-175 | − | GUGUUCCUCGUCGGACG | 17 | 6938 |
| HSV1-UL54-176 | − | GACAUGGAAGACCCCCA | 17 | 6939 |
| HSV1-UL54-177 | − | GGAAGACCCCCACGGAG | 17 | 6940 |
| HSV1-UL54-178 | − | GACCCCCACGGAGAGGA | 17 | 6941 |
| HSV1-UL54-179 | − | CCACGGAGAGGACGGAC | 17 | 6942 |
| HSV1-UL54-180 | − | UCUCGUCCAGAAGACCC | 17 | 6943 |
| HSV1-UL54-181 | − | CGCCUCGUCCGACGGAG | 17 | 6944 |
| HSV1-UL54-182 | − | CGUCCGACGGAGCGGCA | 17 | 6945 |
| HSV1-UL54-183 | − | CAGCGCCCCACAGUGUG | 17 | 6946 |
| HSV1-UL54-184 | − | AGUGUGUGGUCGCGCCU | 17 | 6947 |
| HSV1-UL54-185 | − | UGCUCCCCCGAGCAGCA | 17 | 6948 |
| HSV1-UL54-186 | − | GCUCCCCCGAGCAGCAC | 17 | 6949 |
| HSV1-UL54-187 | − | UCCCCCGAGCAGCACGG | 17 | 6950 |
| HSV1-UL54-188 | − | CGAGCAGCACGGGGGCA | 17 | 6951 |
| HSV1-UL54-189 | − | GCAGCACGGGGGCAAGG | 17 | 6952 |
| HSV1-UL54-190 | − | AAAGCCCAGCCUGCCCG | 17 | 6953 |
| HSV1-UL54-191 | − | GCCCAGCCUGCCCGCGG | 17 | 6954 |
| HSV1-UL54-192 | − | GCCCGCGGCGGACGCCG | 17 | 6955 |
| HSV1-UL54-193 | − | CCCGCGGCGGACGCCGU | 17 | 6956 |
| HSV1-UL54-194 | − | GACGCCGUGGGCGUCGC | 17 | 6957 |
| HSV1-UL54-195 | − | ACGCCGUGGGCGUCGCA | 17 | 6958 |
| HSV1-UL54-196 | − | CGCCGUGGGCGUCGCAG | 17 | 6959 |
| HSV1-UL54-197 | − | GUGGGCGUCGCAGGGGU | 17 | 6960 |
| HSV1-UL54-198 | − | UGGGCGUCGCAGGGGUC | 17 | 6961 |
| HSV1-UL54-199 | − | GGGCGUCGCAGGGGUCG | 17 | 6962 |
| HSV1-UL54-200 | − | CGCAGGGGUCGGGGUCG | 17 | 6963 |
| HSV1-UL54-201 | − | AGGGGUCGGGGUCGCGG | 17 | 6964 |
| HSV1-UL54-202 | − | CGGGGUCGCGGUGGUCC | 17 | 6965 |
| HSV1-UL54-203 | − | GGGGUCGCGGUGGUCCC | 17 | 6966 |
| HSV1-UL54-204 | − | GGUCCCGGGGCUGCCGA | 17 | 6967 |
| HSV1-UL54-205 | + | AAACCAUCGGCAGCCCC | 17 | 6968 |
| HSV1-UL54-206 | + | GACCCCUGCGACGCCCA | 17 | 6969 |
| HSV1-UL54-207 | + | CCCACGGCGUCCGCCGC | 17 | 6970 |
| HSV1-UL54-208 | + | CGGCGUCCGCCGCGGGC | 17 | 6971 |
| HSV1-UL54-209 | + | GUCCGCCGCGGGCAGGC | 17 | 6972 |
| HSV1-UL54-210 | + | UCCGCCGCGGGCAGGCU | 17 | 6973 |
| HSV1-UL54-211 | + | GCGGGCAGGCUGGGCUU | 17 | 6974 |
| HSV1-UL54-212 | + | GCAGGCUGGGCUUUGGU | 17 | 6975 |
| HSV1-UL54-213 | + | GGCUGGGCUUUGGUCGG | 17 | 6976 |
| HSV1-UL54-214 | + | GCUGGGCUUUGGUCGGU | 17 | 6977 |
| HSV1-UL54-215 | + | CUGGGCUUUGGUCGGUG | 17 | 6978 |
| HSV1-UL54-216 | + | UGGGCUUUGGUCGGUGG | 17 | 6979 |
| HSV1-UL54-217 | + | CUUUGGUCGGUGGGGGU | 17 | 6980 |
| HSV1-UL54-218 | + | UGGUCGGUGGGGGUUGG | 17 | 6981 |
| HSV1-UL54-219 | + | UCGGUGGGGGUUGGAGG | 17 | 6982 |
| HSV1-UL54-220 | + | CGGUGGGGGUUGGAGGC | 17 | 6983 |
| HSV1-UL54-221 | + | CUUGCCCCCGUGCUGCU | 17 | 6984 |
| HSV1-UL54-222 | + | UUGCCCCCGUGCUGCUC | 17 | 6985 |
| HSV1-UL54-223 | + | UGCUCGGGGGAGCAAGA | 17 | 6986 |
| HSV1-UL54-224 | + | ACGGUCGCCGGGCCCCG | 17 | 6987 |
| HSV1-UL54-225 | + | CGCGACCACACACUGUG | 17 | 6988 |
| HSV1-UL54-226 | + | CACACACUGUGGGGCGC | 17 | 6989 |
| HSV1-UL54-227 | + | CUGUGGGGCGCUGGUUG | 17 | 6990 |
| HSV1-UL54-228 | + | CGCUGGUUGAGGAUCGU | 17 | 6991 |
| HSV1-UL54-229 | + | GCUGGUUGAGGAUCGUU | 17 | 6992 |
| HSV1-UL54-230 | + | CUGGUUGAGGAUCGUUG | 17 | 6993 |
| HSV1-UL54-231 | + | ACGAGGCGUCUGGGUGC | 17 | 6994 |
| HSV1-UL54-232 | + | CGAGGCGUCUGGGUGCU | 17 | 6995 |
| HSV1-UL54-233 | + | CUGGGUGCUGGGUACGC | 17 | 6996 |
| HSV1-UL54-234 | + | UGGGUGCUGGGUACGCC | 17 | 6997 |
| HSV1-UL54-235 | + | GGGUGCUGGGUACGCCG | 17 | 6998 |
| HSV1-UL54-236 | + | GGUACGCCGGGGUCUUC | 17 | 6999 |
| HSV1-UL54-237 | + | GGGUCUUCUGGACGAGA | 17 | 7000 |
| HSV1-UL54-238 | + | GGUCUUCUGGACGAGAC | 17 | 7001 |
| HSV1-UL54-239 | + | CGAGACGGGCGGACCGC | 17 | 7002 |
| HSV1-UL54-240 | + | GAGACGGGCGGACCGCC | 17 | 7003 |
| HSV1-UL54-241 | + | GCGGACCGCCGGGCGAG | 17 | 7004 |
| HSV1-UL54-242 | + | GCGUCGAGUAUCGGCUC | 17 | 7005 |
| HSV1-UL54-243 | + | CCGGUCCGUCCUCUCCG | 17 | 7006 |
| HSV1-UL54-244 | + | CGGUCCGUCCUCUCCGU | 17 | 7007 |
| HSV1-UL54-245 | + | GUCCGUCCUCUCCGUGG | 17 | 7008 |
| HSV1-UL54-246 | + | CGCUGCUGUCCGAUUCC | 17 | 7009 |
| HSV1-UL54-247 | + | UCGCGGCGGCUCUCCGC | 17 | 7010 |
| HSV1-UL54-248 | + | GCGGCUCUCCGCCGGCU | 17 | 7011 |
| HSV1-UL54-249 | + | CGGCUCUCCGCCGGCUC | 17 | 7012 |
| HSV1-UL54-250 | + | GGCUCUCCGCCGGCUCG | 17 | 7013 |
| HSV1-UL54-251 | + | GCUCUCCGCCGGCUCGG | 17 | 7014 |
| HSV1-UL54-252 | + | UCUCCGCCGGCUCGGGG | 17 | 7015 |

[0750] Table 4C provides exemplary targeting domains for knocking out the UL54 gene selected according to the third tier parameters. The targeting domains are selected based on location within the coding sequence, but downstream of the first 500 bp of the UL54 gene. It is contemplated herein that the targeting domain hybridizes to the target domain through complementary base pairing. Any of the targeting domains in the table can be used with a S. pyogenes Cas9 molecule that gives double stranded cleavage. Any of the targeting domains in the table can be used with a S. pyogenes Cas9 single-stranded break nucleases (nickases). In an embodiment, dual targeting is used to create two nicks on opposite DNA strands by using S. pyogenes Cas9 nickases with two targeting domains that are complementary to opposite DNA strands, e.g., a gRNA comprising any minus strand targeting domain may be paired any gRNA comprising a plus strand targeting domain provided that the two gRNAs are oriented on the DNA such that PAMs face outward and the distance between the 5′ ends of the gRNAs is 0-50 bp.

TABLE 4C
3rd Tier

| | | | Target Site | |
|---|---|---|---|---|
| gRNA Name | DNA Strand | Targeting Domain | Length | Seq ID |
| HSV1-UL54-253 | − | AGAACCAAUCGCAACCCUGG | 20 | 7016 |
| HSV1-UL54-254 | − | AACCCUGGGGGACCCCGCCC | 20 | 7017 |
| HSV1-UL54-255 | − | ACCCUGGGGGACCCCGCCCC | 20 | 7018 |
| HSV1-UL54-256 | − | CCCUGGGGGACCCCGCCCCG | 20 | 7019 |
| HSV1-UL54-257 | − | UGGGGGACCCCGCCCCGGGG | 20 | 7020 |
| HSV1-UL54-258 | − | GGGGGACCCCGCCCCGGGGC | 20 | 7021 |
| HSV1-UL54-259 | − | GGGGACCCCGCCCCGGGGCG | 20 | 7022 |
| HSV1-UL54-260 | − | GACCCCGCCCCGGGGCGGGG | 20 | 7023 |
| HSV1-UL54-261 | − | CCGCCCCGGGGCGGGGUGGA | 20 | 7024 |
| HSV1-UL54-262 | − | CCCGGGGCGGGGUGGACGGA | 20 | 7025 |
| HSV1-UL54-263 | − | GCGGGGUGGACGGACGGCCC | 20 | 7026 |
| HSV1-UL54-264 | − | GACGGCCCCGGCGCCCCCCA | 20 | 7027 |
| HSV1-UL54-265 | − | CCCCGGCGCCCCCCAUGGCG | 20 | 7028 |
| HSV1-UL54-266 | − | GCGCCCCCCAUGGCGAGGCG | 20 | 7029 |
| HSV1-UL54-267 | − | CCCCAUGGCGAGGCGUGGCG | 20 | 7030 |
| HSV1-UL54-268 | − | AGUGAGCAGCCCGACCCACC | 20 | 7031 |
| HSV1-UL54-269 | − | GAGCAGCCCGACCCACCCGG | 20 | 7032 |
| HSV1-UL54-270 | − | CCGACCCACCCGGAGGCCAG | 20 | 7033 |
| HSV1-UL54-271 | − | CACCCGGAGGCCAGCGGACA | 20 | 7034 |
| HSV1-UL54-272 | − | ACCCGGAGGCCAGCGGACAC | 20 | 7035 |
| HSV1-UL54-273 | − | CCCGGAGGCCAGCGGACACG | 20 | 7036 |
| HSV1-UL54-274 | − | ACCCCCCCCGCUAAUGACGC | 20 | 7037 |
| HSV1-UL54-275 | − | GGCGAUUGCCCCCCCGCCCG | 20 | 7038 |
| HSV1-UL54-276 | − | GCCCGCGGACCCCCGCGCCC | 20 | 7039 |
| HSV1-UL54-277 | − | GGACCCCCGCGCCCCGGCCC | 20 | 7040 |
| HSV1-UL54-278 | − | CGCCCCGGCCCCGGAGCGAA | 20 | 7041 |
| HSV1-UL54-279 | − | ACACCAUCGACGCCACCACG | 20 | 7042 |
| HSV1-UL54-280 | − | CAUCGACGCCACCACGCGGU | 20 | 7043 |
| HSV1-UL54-281 | − | GCGCUCCAUCUCCGAGCGCG | 20 | 7044 |
| HSV1-UL54-282 | − | CUCCAUCUCCGAGCGCGCGG | 20 | 7045 |
| HSV1-UL54-283 | − | GACCGCAUCAGCGAGAGCUU | 20 | 7046 |
| HSV1-UL54-284 | − | GAGCUUUGGCCGCAGCGCAC | 20 | 7047 |
| HSV1-UL54-285 | − | CAGGUCAUGCACGACCCCUU | 20 | 7048 |
| HSV1-UL54-286 | − | AGGUCAUGCACGACCCCUUU | 20 | 7049 |
| HSV1-UL54-287 | − | GGUCAUGCACGACCCCUUUG | 20 | 7050 |
| HSV1-UL54-288 | − | GUCAUGCACGACCCCUUUGG | 20 | 7051 |
| HSV1-UL54-289 | − | UCAUGCACGACCCCUUUGGG | 20 | 7052 |
| HSV1-UL54-290 | − | UUCCCGCCGCGAAUAGCCCC | 20 | 7053 |
| HSV1-UL54-291 | − | UCCCGCCGCGAAUAGCCCCU | 20 | 7054 |
| HSV1-UL54-292 | − | CGCGAAUAGCCCCUGGGCCC | 20 | 7055 |
| HSV1-UL54-293 | − | UAGCCCCUGGGCCCCGGUGC | 20 | 7056 |
| HSV1-UL54-294 | − | CCCCUGGGCCCCGGUGCUGG | 20 | 7057 |
| HSV1-UL54-295 | − | CCCUGGGCCCCGGUGCUGGC | 20 | 7058 |
| HSV1-UL54-296 | − | GCCCCGGUGCUGGCGGGCCA | 20 | 7059 |
| HSV1-UL54-297 | − | CCGGUGCUGGCGGGCCAAGG | 20 | 7060 |
| HSV1-UL54-298 | − | CGGUGCUGGCGGGCCAAGGA | 20 | 7061 |
| HSV1-UL54-299 | − | CCUUUGACGCCGAGACCAGA | 20 | 7062 |
| HSV1-UL54-300 | − | CUUUGACGCCGAGACCAGAC | 20 | 7063 |
| HSV1-UL54-301 | − | CCGAGACCAGACGGGUCUCC | 20 | 7064 |
| HSV1-UL54-302 | − | CGAGACCAGACGGGUCUCCU | 20 | 7065 |
| HSV1-UL54-303 | − | ACGGGUCUCCUGGGAAACCU | 20 | 7066 |
| HSV1-UL54-304 | − | UGGGAAACCUUGGUCGCCCA | 20 | 7067 |
| HSV1-UL54-305 | − | AGCCUCUAUCGCACUUUUGC | 20 | 7068 |
| HSV1-UL54-306 | − | GCACUUUUGCCGGCAAUCCU | 20 | 7069 |
| HSV1-UL54-307 | − | CACUUUUGCCGGCAAUCCUC | 20 | 7070 |
| HSV1-UL54-308 | − | UCGGGCCGCAUCGACCGCCA | 20 | 7071 |
| HSV1-UL54-309 | − | GCGCCAAGAAAAUUUCAUCG | 20 | 7072 |
| HSV1-UL54-310 | − | AGAAAAUUUCAUCGAGGCGC | 20 | 7073 |
| HSV1-UL54-311 | − | GGCCUCCGCCGACGAGACGC | 20 | 7074 |
| HSV1-UL54-312 | − | CCGCCGACGAGACGCUGGCG | 20 | 7075 |
| HSV1-UL54-313 | − | CAACCUGCCGCUGCGCCCCC | 20 | 7076 |
| HSV1-UL54-314 | − | CGCCCCCAGGACCCCAUUAU | 20 | 7077 |
| HSV1-UL54-315 | − | GCCCCCAGGACCCCAUUAUC | 20 | 7078 |
| HSV1-UL54-316 | − | CCCCAUUAUCGGGACGACCG | 20 | 7079 |
| HSV1-UL54-317 | − | CGGGACGACCGCGGCUGUGC | 20 | 7080 |
| HSV1-UL54-318 | − | AUAACCUCGCCACGCGCCUG | 20 | 7081 |
| HSV1-UL54-319 | − | CUUUCUCCAGUGCUACCUGA | 20 | 7082 |
| HSV1-UL54-320 | − | CAGUGCUACCUGAAGGCGCG | 20 | 7083 |
| HSV1-UL54-321 | − | CUGAAGGCGCGAGGCCUGUG | 20 | 7084 |
| HSV1-UL54-322 | − | GGCGCGAGGCCUGUGCGGCC | 20 | 7085 |
| HSV1-UL54-323 | − | GCCUGGACGAACUGUGUUCG | 20 | 7086 |
| HSV1-UL54-324 | − | UGGACGAACUGUGUUCGCGG | 20 | 7087 |
| HSV1-UL54-325 | − | ACUGUGUUCGCGGCGGCGUC | 20 | 7088 |
| HSV1-UL54-326 | − | GUGUUCGCGGCGGCGUCUGG | 20 | 7089 |
| HSV1-UL54-327 | − | GCGGCGUCUGGCGGACAUUA | 20 | 7090 |
| HSV1-UL54-328 | − | AUCCUUCGUGUUUGUCAUUC | 20 | 7091 |
| HSV1-UL54-329 | − | UCGUGUUUGUCAUUCUGGCC | 20 | 7092 |
| HSV1-UL54-330 | − | CUCGCCAACCGCGUCGAGCG | 20 | 7093 |
| HSV1-UL54-331 | − | CCGCGUCGAGCGUGGCGUCG | 20 | 7094 |
| HSV1-UL54-332 | − | GAGAUCGACUACGCGACCCU | 20 | 7095 |
| HSV1-UL54-333 | − | GACUACGCGACCCUUGGUGU | 20 | 7096 |
| HSV1-UL54-334 | − | ACUACGCGACCCUUGGUGUC | 20 | 7097 |
| HSV1-UL54-335 | − | CUACGCGACCCUUGGUGUCG | 20 | 7098 |
| HSV1-UL54-336 | − | GCGACCCUUGGUGUCGGGGU | 20 | 7099 |
| HSV1-UL54-337 | − | AAGAUGCAUUUCUACCUCCC | 20 | 7100 |
| HSV1-UL54-338 | − | AGAUGCAUUUCUACCUCCCC | 20 | 7101 |
| HSV1-UL54-339 | − | GAUGCAUUUCUACCUCCCCG | 20 | 7102 |
| HSV1-UL54-340 | − | CUACCUCCCCGGGGCCUGCA | 20 | 7103 |
| HSV1-UL54-341 | − | CCUCCCCGGGGCCUGCAUGG | 20 | 7104 |
| HSV1-UL54-342 | − | CUCCCCGGGGCCUGCAUGGC | 20 | 7105 |
| HSV1-UL54-343 | − | AAUCCUAGACACGCACCGCC | 20 | 7106 |
| HSV1-UL54-344 | − | GAGUCGUGUCUGCGAGUUGA | 20 | 7107 |
| HSV1-UL54-345 | − | GUCGCCCCCCCGUACGUGCA | 20 | 7108 |
| HSV1-UL54-346 | + | AAAUAUUUGCCGUGCACGUA | 20 | 7109 |
| HSV1-UL54-347 | + | AAUAUUUGCCGUGCACGUAC | 20 | 7110 |
| HSV1-UL54-348 | + | AUAUUUGCCGUGCACGUACG | 20 | 7111 |
| HSV1-UL54-349 | + | UAUUUGCCGUGCACGUACGG | 20 | 7112 |
| HSV1-UL54-350 | + | AUUUGCCGUGCACGUACGGG | 20 | 7113 |
| HSV1-UL54-351 | + | UUUGCCGUGCACGUACGGGG | 20 | 7114 |
| HSV1-UL54-352 | + | CGGGGGGGCGACGAUGUGAC | 20 | 7115 |
| HSV1-UL54-353 | + | AGACACGACUCGAACACUCC | 20 | 7116 |
| HSV1-UL54-354 | + | CACGACUCGAACACUCCUGG | 20 | 7117 |
| HSV1-UL54-355 | + | ACUCCUGGCGGUGCGUGUCU | 20 | 7118 |
| HSV1-UL54-356 | + | GCGUGUCUAGGAUUUCGAUC | 20 | 7119 |
| HSV1-UL54-357 | + | UUCGAUCAGGCCCGCCAUGC | 20 | 7120 |
| HSV1-UL54-358 | + | CAGGCCCGCCAUGCAGGCCC | 20 | 7121 |
| HSV1-UL54-359 | + | AGGCCCGCCAUGCAGGCCCC | 20 | 7122 |
| HSV1-UL54-360 | + | GGCCCGCCAUGCAGGCCCCG | 20 | 7123 |
| HSV1-UL54-361 | + | CCGCCAUGCAGGCCCCGGGG | 20 | 7124 |
| HSV1-UL54-362 | + | UCUCUCCGACCCCGACACCA | 20 | 7125 |
| HSV1-UL54-363 | + | CUCUCCGACCCCGACACCAA | 20 | 7126 |
| HSV1-UL54-364 | + | CCGCGACGCCACGCUCGACG | 20 | 7127 |
| HSV1-UL54-365 | + | GACGCCACGCUCGACGCGGU | 20 | 7128 |
| HSV1-UL54-366 | + | CUCGACGCGGUUGGCGAGCC | 20 | 7129 |
| HSV1-UL54-367 | + | GGCCAGAAUGACAAACACGA | 20 | 7130 |
| HSV1-UL54-368 | + | GCCGCGAACACAGUUCGUCC | 20 | 7131 |
| HSV1-UL54-369 | + | ACAGUUCGUCCAGGCCGCAC | 20 | 7132 |
| HSV1-UL54-370 | + | CGCACAGGCCUCGCGCCUUC | 20 | 7133 |
| HSV1-UL54-371 | + | CUCGCGCCUUCAGGUAGCAC | 20 | 7134 |
| HSV1-UL54-372 | + | CUUCAGGUAGCACUGGAGAA | 20 | 7135 |
| HSV1-UL54-373 | + | UUCAGGUAGCACUGGAGAAA | 20 | 7136 |
| HSV1-UL54-374 | + | AGCACUGGAGAAAGGGCCGC | 20 | 7137 |
| HSV1-UL54-375 | + | GAGAAAGGGCCGCAGGCGCG | 20 | 7138 |
| HSV1-UL54-376 | + | AGGGCCGCAGGCGCGUGGCG | 20 | 7139 |
| HSV1-UL54-377 | + | GAGGUUAUCCAGCACAGCCG | 20 | 7140 |
| HSV1-UL54-378 | + | AGCCGCGGUCGUCCCGAUAA | 20 | 7141 |
| HSV1-UL54-379 | + | GCCGCGGUCGUCCCGAUAAU | 20 | 7142 |
| HSV1-UL54-380 | + | CCGCGGUCGUCCCGAUAAUG | 20 | 7143 |
| HSV1-UL54-381 | + | UCGUCCCGAUAAUGGGGUCC | 20 | 7144 |
| HSV1-UL54-382 | + | CGUCCCGAUAAUGGGGUCCU | 20 | 7145 |
| HSV1-UL54-383 | + | GUCCCGAUAAUGGGGUCCUG | 20 | 7146 |
| HSV1-UL54-384 | + | UCCCGAUAAUGGGGUCCUGG | 20 | 7147 |
| HSV1-UL54-385 | + | AUGGGGUCCUGGGGGCGCAG | 20 | 7148 |
| HSV1-UL54-386 | + | GGUCCUGGGGGCGCAGCGGC | 20 | 7149 |
| HSV1-UL54-387 | + | GGGGGCGCAGCGGCAGGUUG | 20 | 7150 |
| HSV1-UL54-388 | + | GGCGCAGCGGCAGGUUGUGG | 20 | 7151 |
| HSV1-UL54-389 | + | GCACCACGCCAGCGUCUCGU | 20 | 7152 |
| HSV1-UL54-390 | + | CCACGCCAGCGUCUCGUCGG | 20 | 7153 |
| HSV1-UL54-391 | + | CGCCAGCGUCUCGUCGGCGG | 20 | 7154 |
| HSV1-UL54-392 | + | GCGCCUCGAUGAAAUUUUCU | 20 | 7155 |
| HSV1-UL54-393 | + | GCGCAGCACGCAGUCGCGCA | 20 | 7156 |
| HSV1-UL54-394 | + | CACGCAGUCGCGCAUGGCCU | 20 | 7157 |
| HSV1-UL54-395 | + | GCAGUCGCGCAUGGCCUUGG | 20 | 7158 |
| HSV1-UL54-396 | + | CAUGGCCUUGGCGGUCGAUG | 20 | 7159 |
| HSV1-UL54-397 | + | UUGGCGGUCGAUGCGGCCCG | 20 | 7160 |
| HSV1-UL54-398 | + | CGAUGCGGCCCGAGGAUUGC | 20 | 7161 |
| HSV1-UL54-399 | + | UGCCGGCAAAAGUGCGAUAG | 20 | 7162 |
| HSV1-UL54-400 | + | GCAAAAGUGCGAUAGAGGCU | 20 | 7163 |
| HSV1-UL54-401 | + | CAAAAGUGCGAUAGAGGCUC | 20 | 7164 |
| HSV1-UL54-402 | + | UGCGAUAGAGGCUCGGGCCG | 20 | 7165 |
| HSV1-UL54-403 | + | GCGAUAGAGGCUCGGGCCGU | 20 | 7166 |
| HSV1-UL54-404 | + | GCUCGGGCCGUGGGCGACCA | 20 | 7167 |
| HSV1-UL54-405 | + | GUGGGCGACCAAGGUUUCCC | 20 | 7168 |
| HSV1-UL54-406 | + | GGUUUCCCAGGAGACCCGUC | 20 | 7169 |
| HSV1-UL54-407 | + | CCAGGAGACCCGUCUGGUCU | 20 | 7170 |
| HSV1-UL54-408 | + | CCGUCUGGUCUCGGCGUCAA | 20 | 7171 |
| HSV1-UL54-409 | + | CGUCUGGUCUCGGCGUCAAA | 20 | 7172 |
| HSV1-UL54-410 | + | CGGCGUCAAAGGGCCCUCCU | 20 | 7173 |
| HSV1-UL54-411 | + | CCUCCUUGGCCCGCCAGCAC | 20 | 7174 |
| HSV1-UL54-412 | + | CUCCUUGGCCCGCCAGCACC | 20 | 7175 |
| HSV1-UL54-413 | + | UCCUUGGCCCGCCAGCACCG | 20 | 7176 |
| HSV1-UL54-414 | + | GCCCGCCAGCACCGGGGCCC | 20 | 7177 |
| HSV1-UL54-415 | + | CCCGCCAGCACCGGGGCCCA | 20 | 7178 |
| HSV1-UL54-416 | + | CCGCCAGCACCGGGGCCCAG | 20 | 7179 |
| HSV1-UL54-417 | + | CGGGGCCCAGGGGCUAUUCG | 20 | 7180 |
| HSV1-UL54-418 | + | GGCCCAGGGGCUAUUCGCGG | 20 | 7181 |
| HSV1-UL54-419 | + | GCCCAGGGGCUAUUCGCGGC | 20 | 7182 |
| HSV1-UL54-420 | + | GGGCUAUUCGCGGCGGGAAA | 20 | 7183 |
| HSV1-UL54-421 | + | GGGAAACGGCUGCCCCCCAA | 20 | 7184 |
| HSV1-UL54-422 | + | GGAAACGGCUGCCCCCCAAA | 20 | 7185 |
| HSV1-UL54-423 | + | GAAACGGCUGCCCCCCAAAG | 20 | 7186 |
| HSV1-UL54-424 | + | CGUGCAUGACCUGUGCGCUG | 20 | 7187 |
| HSV1-UL54-425 | + | GGCCAAAGCUCUCGCUGAUG | 20 | 7188 |
| HSV1-UL54-426 | + | GCGGUCGACCGCCGCGCGCU | 20 | 7189 |
| HSV1-UL54-427 | + | GACCGCCGCGCGCUCGGAGA | 20 | 7190 |
| HSV1-UL54-428 | + | CGCGCUCGGAGAUGGAGCGC | 20 | 7191 |
| HSV1-UL54-429 | + | GGAGCGCAGGACCAACCGCG | 20 | 7192 |
| HSV1-UL54-430 | + | GCGCAGGACCAACCGCGUGG | 20 | 7193 |
| HSV1-UL54-431 | + | CAACCGCGUGGUGGCGUCGA | 20 | 7194 |
| HSV1-UL54-432 | + | CGUGGUGGCGUCGAUGGUGU | 20 | 7195 |
| HSV1-UL54-433 | + | GGUGGCGUCGAUGGUGUCGG | 20 | 7196 |
| HSV1-UL54-434 | + | GGCGUCGAUGGUGUCGGCGG | 20 | 7197 |
| HSV1-UL54-435 | + | GCGUCGAUGGUGUCGGCGGC | 20 | 7198 |
| HSV1-UL54-436 | + | GCGGCGGGCGCCUUUCGCUC | 20 | 7199 |
| HSV1-UL54-437 | + | CGGCGGGCGCCUUUCGCUCC | 20 | 7200 |
| HSV1-UL54-438 | + | GGCGGGCGCCUUUCGCUCCG | 20 | 7201 |
| HSV1-UL54-439 | + | GGCGCCUUUCGCUCCGGGGC | 20 | 7202 |
| HSV1-UL54-440 | + | GCGCCUUUCGCUCCGGGGCC | 20 | 7203 |
| HSV1-UL54-441 | + | CGCCUUUCGCUCCGGGGCCG | 20 | 7204 |
| HSV1-UL54-442 | + | UUCGCUCCGGGGCCGGGGCG | 20 | 7205 |
| HSV1-UL54-443 | + | UCGCUCCGGGGCCGGGGCGC | 20 | 7206 |
| HSV1-UL54-444 | + | CGCUCCGGGGCCGGGGCGCG | 20 | 7207 |
| HSV1-UL54-445 | + | GCUCCGGGGCCGGGGCGCGG | 20 | 7208 |
| HSV1-UL54-446 | + | GGCCGGGGCGCGGGGGUCCG | 20 | 7209 |
| HSV1-UL54-447 | + | GCCGGGGCGCGGGGGUCCGC | 20 | 7210 |
| HSV1-UL54-448 | + | GGGGCGCGGGGGUCCGCGGG | 20 | 7211 |
| HSV1-UL54-449 | + | GGGCGCGGGGGUCCGCGGGC | 20 | 7212 |
| HSV1-UL54-450 | + | GGCGCGGGGGUCCGCGGGCG | 20 | 7213 |
| HSV1-UL54-451 | + | GCGCGGGGGUCCGCGGGCGG | 20 | 7214 |
| HSV1-UL54-452 | + | CGCGGGGGUCCGCGGGCGGG | 20 | 7215 |
| HSV1-UL54-453 | + | GCGGGGGUCCGCGGGCGGGG | 20 | 7216 |
| HSV1-UL54-454 | + | GCAAUCGCCAGCGUCAUUAG | 20 | 7217 |
| HSV1-UL54-455 | + | CAAUCGCCAGCGUCAUUAGC | 20 | 7218 |
| HSV1-UL54-456 | + | AAUCGCCAGCGUCAUUAGCG | 20 | 7219 |
| HSV1-UL54-457 | + | AUCGCCAGCGUCAUUAGCGG | 20 | 7220 |
| HSV1-UL54-458 | + | UCGCCAGCGUCAUUAGCGGG | 20 | 7221 |
| HSV1-UL54-459 | + | CGCCAGCGUCAUUAGCGGGG | 20 | 7222 |
| HSV1-UL54-460 | + | GCCAGCGUCAUUAGCGGGGG | 20 | 7223 |
| HSV1-UL54-461 | + | UCAUUAGCGGGGGGGGUGCU | 20 | 7224 |
| HSV1-UL54-462 | + | GGCGCACGCCCCGUGUCCGC | 20 | 7225 |
| HSV1-UL54-463 | + | GCCCCGUGUCCGCUGGCCUC | 20 | 7226 |
| HSV1-UL54-464 | + | CCCCGUGUCCGCUGGCCUCC | 20 | 7227 |
| HSV1-UL54-465 | + | CGUGUCCGCUGGCCUCCGGG | 20 | 7228 |
| HSV1-UL54-466 | + | GUGUCCGCUGGCCUCCGGGU | 20 | 7229 |
| HSV1-UL54-467 | + | CCGCUGGCCUCCGGGUGGGU | 20 | 7230 |
| HSV1-UL54-468 | + | CGCUGGCCUCCGGGUGGGUC | 20 | 7231 |
| HSV1-UL54-469 | + | UGCCGCGCCACGCCUCGCCA | 20 | 7232 |
| HSV1-UL54-470 | + | GCCGCGCCACGCCUCGCCAU | 20 | 7233 |
| HSV1-UL54-471 | + | CCGCGCCACGCCUCGCCAUG | 20 | 7234 |
| HSV1-UL54-472 | + | CGCGCCACGCCUCGCCAUGG | 20 | 7235 |
| HSV1-UL54-473 | + | GCGCCACGCCUCGCCAUGGG | 20 | 7236 |
| HSV1-UL54-474 | + | CGCCUCGCCAUGGGGGGCGC | 20 | 7237 |
| HSV1-UL54-475 | + | GCCUCGCCAUGGGGGGCGCC | 20 | 7238 |
| HSV1-UL54-476 | + | CCUCGCCAUGGGGGGCGCCG | 20 | 7239 |
| HSV1-UL54-477 | + | GCCGUCCGUCCACCCCGCCC | 20 | 7240 |
| HSV1-UL54-478 | + | CCGUCCGUCCACCCCGCCCC | 20 | 7241 |
| HSV1-UL54-479 | + | CGUCCGUCCACCCCGCCCCG | 20 | 7242 |
| HSV1-UL54-480 | + | CCGUCCACCCCGCCCCGGGG | 20 | 7243 |
| HSV1-UL54-481 | + | CGUCCACCCCGCCCCGGGGC | 20 | 7244 |
| HSV1-UL54-482 | + | GUCCACCCCGCCCCGGGGCG | 20 | 7245 |
| HSV1-UL54-483 | + | GCCCCGGGGCGGGGUCCCCC | 20 | 7246 |
| HSV1-UL54-484 | + | CCCCGGGGCGGGGUCCCCCA | 20 | 7247 |
| HSV1-UL54-485 | + | GGGUCCCCCAGGGUUGCGAU | 20 | 7248 |
| HSV1-UL54-486 | − | AGAACCAAUCGCAACCC | 17 | 7249 |
| HSV1-UL54-487 | − | GAACCAAUCGCAACCCU | 17 | 7250 |
| HSV1-UL54-488 | − | AACCAAUCGCAACCCUG | 17 | 7251 |
| HSV1-UL54-489 | − | ACCAAUCGCAACCCUGG | 17 | 7252 |
| HSV1-UL54-490 | − | CCUGGGGGACCCCGCCC | 17 | 7253 |
| HSV1-UL54-491 | − | CUGGGGGACCCCGCCCC | 17 | 7254 |
| HSV1-UL54-492 | − | UGGGGGACCCCGCCCCG | 17 | 7255 |
| HSV1-UL54-493 | − | GGGACCCCGCCCCGGGG | 17 | 7256 |
| HSV1-UL54-494 | − | GGACCCCGCCCCGGGGC | 17 | 7257 |
| HSV1-UL54-495 | − | GACCCCGCCCCGGGGCG | 17 | 7258 |
| HSV1-UL54-496 | − | CCCGCCCCGGGGCGGGG | 17 | 7259 |
| HSV1-UL54-497 | − | CCCCGGGGCGGGGUGGA | 17 | 7260 |
| HSV1-UL54-498 | − | GGGGCGGGGUGGACGGA | 17 | 7261 |
| HSV1-UL54-499 | − | GGGUGGACGGACGGCCC | 17 | 7262 |
| HSV1-UL54-500 | − | GGCCCCGGCGCCCCCCA | 17 | 7263 |
| HSV1-UL54-501 | − | CGGCGCCCCCCAUGGCG | 17 | 7264 |
| HSV1-UL54-502 | − | CCCCCCAUGGCGAGGCG | 17 | 7265 |
| HSV1-UL54-503 | − | CAUGGCGAGGCGUGGCG | 17 | 7266 |
| HSV1-UL54-504 | − | GAGCAGCCCGACCCACC | 17 | 7267 |
| HSV1-UL54-505 | − | CAGCCCGACCCACCCGG | 17 | 7268 |
| HSV1-UL54-506 | − | ACCCACCCGGAGGCCAG | 17 | 7269 |
| HSV1-UL54-507 | − | CCGGAGGCCAGCGGACA | 17 | 7270 |
| HSV1-UL54-508 | − | CGGAGGCCAGCGGACAC | 17 | 7271 |
| HSV1-UL54-509 | − | GGAGGCCAGCGGACACG | 17 | 7272 |
| HSV1-UL54-510 | − | CCCCCCGCUAAUGACGC | 17 | 7273 |
| HSV1-UL54-511 | − | GAUUGCCCCCCCGCCCG | 17 | 7274 |
| HSV1-UL54-512 | − | CGCGGACCCCCGCGCCC | 17 | 7275 |
| HSV1-UL54-513 | − | CCCCCGCGCCCCGGCCC | 17 | 7276 |
| HSV1-UL54-514 | − | CCCGGCCCCGGAGCGAA | 17 | 7277 |
| HSV1-UL54-515 | − | CCAUCGACGCCACCACG | 17 | 7278 |
| HSV1-UL54-516 | − | CGACGCCACCACGCGGU | 17 | 7279 |
| HSV1-UL54-517 | − | CUCCAUCUCCGAGCGCG | 17 | 7280 |
| HSV1-UL54-518 | − | CAUCUCCGAGCGCGCGG | 17 | 7281 |
| HSV1-UL54-519 | − | CGCAUCAGCGAGAGCUU | 17 | 7282 |
| HSV1-UL54-520 | − | CUUUGGCCGCAGCGCAC | 17 | 7283 |
| HSV1-UL54-521 | − | GUCAUGCACGACCCCUU | 17 | 7284 |
| HSV1-UL54-522 | − | UCAUGCACGACCCCUUU | 17 | 7285 |
| HSV1-UL54-523 | − | CAUGCACGACCCCUUUG | 17 | 7286 |
| HSV1-UL54-524 | − | AUGCACGACCCCUUUGG | 17 | 7287 |
| HSV1-UL54-525 | − | UGCACGACCCCUUUGGG | 17 | 7288 |
| HSV1-UL54-526 | − | CCGCCGCGAAUAGCCCC | 17 | 7289 |
| HSV1-UL54-527 | − | CGCCGCGAAUAGCCCCU | 17 | 7290 |
| HSV1-UL54-528 | − | GAAUAGCCCCUGGGCCC | 17 | 7291 |
| HSV1-UL54-529 | − | CCCCUGGGCCCCGGUGC | 17 | 7292 |
| HSV1-UL54-530 | − | CUGGGCCCCGGUGCUGG | 17 | 7293 |
| HSV1-UL54-531 | − | UGGGCCCCGGUGCUGGC | 17 | 7294 |
| HSV1-UL54-532 | − | CCGGUGCUGGCGGGCCA | 17 | 7295 |
| HSV1-UL54-533 | − | GUGCUGGCGGGCCAAGG | 17 | 7296 |
| HSV1-UL54-534 | − | UGCUGGCGGGCCAAGGA | 17 | 7297 |
| HSV1-UL54-535 | − | UUGACGCCGAGACCAGA | 17 | 7298 |
| HSV1-UL54-536 | − | UGACGCCGAGACCAGAC | 17 | 7299 |
| HSV1-UL54-537 | − | AGACCAGACGGGUCUCC | 17 | 7300 |
| HSV1-UL54-538 | − | GACCAGACGGGUCUCCU | 17 | 7301 |
| HSV1-UL54-539 | − | GGUCUCCUGGGAAACCU | 17 | 7302 |
| HSV1-UL54-540 | − | GAAACCUUGGUCGCCCA | 17 | 7303 |
| HSV1-UL54-541 | − | CUCUAUCGCACUUUUGC | 17 | 7304 |
| HSV1-UL54-542 | − | CUUUUGCCGGCAAUCCU | 17 | 7305 |
| HSV1-UL54-543 | − | UUUUGCCGGCAAUCCUC | 17 | 7306 |
| HSV1-UL54-544 | − | GGCCGCAUCGACCGCCA | 17 | 7307 |
| HSV1-UL54-545 | − | CCAAGAAAAUUUCAUCG | 17 | 7308 |
| HSV1-UL54-546 | − | AAAUUUCAUCGAGGCGC | 17 | 7309 |
| HSV1-UL54-547 | − | CUCCGCCGACGAGACGC | 17 | 7310 |
| HSV1-UL54-548 | − | CCGACGAGACGCUGGCG | 17 | 7311 |
| HSV1-UL54-549 | − | CCUGCCGCUGCGCCCCC | 17 | 7312 |
| HSV1-UL54-550 | − | CCCCAGGACCCCAUUAU | 17 | 7313 |
| HSV1-UL54-551 | − | CCCAGGACCCCAUUAUC | 17 | 7314 |
| HSV1-UL54-552 | − | CAUUAUCGGGACGACCG | 17 | 7315 |
| HSV1-UL54-553 | − | GACGACCGCGGCUGUGC | 17 | 7316 |
| HSV1-UL54-554 | − | ACCUCGCCACGCGCCUG | 17 | 7317 |
| HSV1-UL54-555 | − | UCUCCAGUGCUACCUGA | 17 | 7318 |
| HSV1-UL54-556 | − | UGCUACCUGAAGGCGCG | 17 | 7319 |
| HSV1-UL54-557 | − | AAGGCGCGAGGCCUGUG | 17 | 7320 |
| HSV1-UL54-558 | − | GCGAGGCCUGUGCGGCC | 17 | 7321 |
| HSV1-UL54-559 | − | UGGACGAACUGUGUUCG | 17 | 7322 |
| HSV1-UL54-560 | − | ACGAACUGUGUUCGCGG | 17 | 7323 |
| HSV1-UL54-561 | − | GUGUUCGCGGCGGCGUC | 17 | 7324 |
| HSV1-UL54-562 | − | UUCGCGGCGGCGUCUGG | 17 | 7325 |
| HSV1-UL54-563 | − | GCGUCUGGCGGACAUUA | 17 | 7326 |
| HSV1-UL54-564 | − | CUUCGUGUUUGUCAUUC | 17 | 7327 |
| HSV1-UL54-565 | − | UGUUUGUCAUUCUGGCC | 17 | 7328 |
| HSV1-UL54-566 | − | GCCAACCGCGUCGAGCG | 17 | 7329 |
| HSV1-UL54-567 | − | CGUCGAGCGUGGCGUCG | 17 | 7330 |
| HSV1-UL54-568 | − | AUCGACUACGCGACCCU | 17 | 7331 |
| HSV1-UL54-569 | − | UACGCGACCCUUGGUGU | 17 | 7332 |
| HSV1-UL54-570 | − | ACGCGACCCUUGGUGUC | 17 | 7333 |
| HSV1-UL54-571 | − | CGCGACCCUUGGUGUCG | 17 | 7334 |
| HSV1-UL54-572 | − | ACCCUUGGUGUCGGGGU | 17 | 7335 |
| HSV1-UL54-573 | − | AUGCAUUUCUACCUCCC | 17 | 7336 |
| HSV1-UL54-574 | − | UGCAUUUCUACCUCCCC | 17 | 7337 |
| HSV1-UL54-575 | − | GCAUUUCUACCUCCCCG | 17 | 7338 |
| HSV1-UL54-576 | − | CCUCCCCGGGGCCUGCA | 17 | 7339 |
| HSV1-UL54-577 | − | CCCCGGGGCCUGCAUGG | 17 | 7340 |
| HSV1-UL54-578 | − | CCCGGGGCCUGCAUGGC | 17 | 7341 |
| HSV1-UL54-579 | − | CCUAGACACGCACCGCC | 17 | 7342 |
| HSV1-UL54-580 | − | UCGUGUCUGCGAGUUGA | 17 | 7343 |
| HSV1-UL54-581 | − | GCCCCCCCGUACGUGCA | 17 | 7344 |
| HSV1-UL54-582 | + | UAUUUGCCGUGCACGUA | 17 | 7345 |
| HSV1-UL54-583 | + | AUUUGCCGUGCACGUAC | 17 | 7346 |
| HSV1-UL54-584 | + | UUUGCCGUGCACGUACG | 17 | 7347 |
| HSV1-UL54-585 | + | UUGCCGUGCACGUACGG | 17 | 7348 |
| HSV1-UL54-586 | + | UGCCGUGCACGUACGGG | 17 | 7349 |
| HSV1-UL54-587 | + | GCCGUGCACGUACGGGG | 17 | 7350 |
| HSV1-UL54-588 | + | GGGGGCGACGAUGUGAC | 17 | 7351 |
| HSV1-UL54-589 | + | CACGACUCGAACACUCC | 17 | 7352 |
| HSV1-UL54-590 | + | GACUCGAACACUCCUGG | 17 | 7353 |
| HSV1-UL54-591 | + | CCUGGCGGUGCGUGUCU | 17 | 7354 |
| HSV1-UL54-592 | + | UGUCUAGGAUUUCGAUC | 17 | 7355 |
| HSV1-UL54-593 | + | GAUCAGGCCCGCCAUGC | 17 | 7356 |
| HSV1-UL54-594 | + | GCCCGCCAUGCAGGCCC | 17 | 7357 |
| HSV1-UL54-595 | + | CCCGCCAUGCAGGCCCC | 17 | 7358 |
| HSV1-UL54-596 | + | CCGCCAUGCAGGCCCCG | 17 | 7359 |
| HSV1-UL54-597 | + | CCAUGCAGGCCCCGGGG | 17 | 7360 |
| HSV1-UL54-598 | + | CUCCGACCCCGACACCA | 17 | 7361 |
| HSV1-UL54-599 | + | UCCGACCCCGACACCAA | 17 | 7362 |
| HSV1-UL54-600 | + | CGACGCCACGCUCGACG | 17 | 7363 |
| HSV1-UL54-601 | + | GCCACGCUCGACGCGGU | 17 | 7364 |
| HSV1-UL54-602 | + | GACGCGGUUGGCGAGCC | 17 | 7365 |
| HSV1-UL54-603 | + | CAGAAUGACAAACACGA | 17 | 7366 |
| HSV1-UL54-604 | + | GCGAACACAGUUCGUCC | 17 | 7367 |
| HSV1-UL54-605 | + | GUUCGUCCAGGCCGCAC | 17 | 7368 |
| HSV1-UL54-606 | + | ACAGGCCUCGCGCCUUC | 17 | 7369 |
| HSV1-UL54-607 | + | GCGCCUUCAGGUAGCAC | 17 | 7370 |
| HSV1-UL54-608 | + | CAGGUAGCACUGGAGAA | 17 | 7371 |
| HSV1-UL54-609 | + | AGGUAGCACUGGAGAAA | 17 | 7372 |
| HSV1-UL54-610 | + | ACUGGAGAAAGGGCCGC | 17 | 7373 |
| HSV1-UL54-611 | + | AAAGGGCCGCAGGCGCG | 17 | 7374 |
| HSV1-UL54-612 | + | GCCGCAGGCGCGUGGCG | 17 | 7375 |
| HSV1-UL54-613 | + | GUUAUCCAGCACAGCCG | 17 | 7376 |
| HSV1-UL54-614 | + | CGCGGUCGUCCCGAUAA | 17 | 7377 |
| HSV1-UL54-615 | + | GCGGUCGUCCCGAUAAU | 17 | 7378 |
| HSV1-UL54-616 | + | CGGUCGUCCCGAUAAUG | 17 | 7379 |
| HSV1-UL54-617 | + | UCCCGAUAAUGGGGUCC | 17 | 7380 |
| HSV1-UL54-618 | + | CCCGAUAAUGGGGUCCU | 17 | 7381 |
| HSV1-UL54-619 | + | CCGAUAAUGGGGUCCUG | 17 | 7382 |
| HSV1-UL54-620 | + | CGAUAAUGGGGUCCUGG | 17 | 7383 |
| HSV1-UL54-621 | + | GGGUCCUGGGGGCGCAG | 17 | 7384 |
| HSV1-UL54-622 | + | CCUGGGGGCGCAGCGGC | 17 | 7385 |
| HSV1-UL54-623 | + | GGCGCAGCGGCAGGUUG | 17 | 7386 |
| HSV1-UL54-624 | + | GCAGCGGCAGGUUGUGG | 17 | 7387 |
| HSV1-UL54-625 | + | CCACGCCAGCGUCUCGU | 17 | 7388 |
| HSV1-UL54-626 | + | CGCCAGCGUCUCGUCGG | 17 | 7389 |
| HSV1-UL54-627 | + | CAGCGUCUCGUCGGCGG | 17 | 7390 |
| HSV1-UL54-628 | + | CCUCGAUGAAAUUUUCU | 17 | 7391 |
| HSV1-UL54-629 | + | CAGCACGCAGUCGCGCA | 17 | 7392 |
| HSV1-UL54-630 | + | GCAGUCGCGCAUGGCCU | 17 | 7393 |
| HSV1-UL54-631 | + | GUCGCGCAUGGCCUUGG | 17 | 7394 |
| HSV1-UL54-632 | + | GGCCUUGGCGGUCGAUG | 17 | 7395 |
| HSV1-UL54-633 | + | GCGGUCGAUGCGGCCCG | 17 | 7396 |
| HSV1-UL54-634 | + | UGCGGCCCGAGGAUUGC | 17 | 7397 |
| HSV1-UL54-635 | + | CGGCAAAAGUGCGAUAG | 17 | 7398 |
| HSV1-UL54-636 | + | AAAGUGCGAUAGAGGCU | 17 | 7399 |
| HSV1-UL54-637 | + | AAGUGCGAUAGAGGCUC | 17 | 7400 |
| HSV1-UL54-638 | + | GAUAGAGGCUCGGGCCG | 17 | 7401 |
| HSV1-UL54-639 | + | AUAGAGGCUCGGGCCGU | 17 | 7402 |
| HSV1-UL54-640 | + | CGGGCCGUGGGCGACCA | 17 | 7403 |
| HSV1-UL54-641 | + | GGCGACCAAGGUUUCCC | 17 | 7404 |
| HSV1-UL54-642 | + | UUCCCAGGAGACCCGUC | 17 | 7405 |
| HSV1-UL54-643 | + | GGAGACCCGUCUGGUCU | 17 | 7406 |
| HSV1-UL54-644 | + | UCUGGUCUCGGCGUCAA | 17 | 7407 |
| HSV1-UL54-645 | + | CUGGUCUCGGCGUCAAA | 17 | 7408 |
| HSV1-UL54-646 | + | CGUCAAAGGGCCCUCCU | 17 | 7409 |
| HSV1-UL54-647 | + | CCUUGGCCCGCCAGCAC | 17 | 7410 |
| HSV1-UL54-648 | + | CUUGGCCCGCCAGCACC | 17 | 7411 |
| HSV1-UL54-649 | + | UUGGCCCGCCAGCACCG | 17 | 7412 |
| HSV1-UL54-650 | + | CGCCAGCACCGGGGCCC | 17 | 7413 |
| HSV1-UL54-651 | + | GCCAGCACCGGGGCCCA | 17 | 7414 |
| HSV1-UL54-652 | + | CCAGCACCGGGGCCCAG | 17 | 7415 |
| HSV1-UL54-653 | + | GGCCCAGGGGCUAUUCG | 17 | 7416 |
| HSV1-UL54-654 | + | CCAGGGGCUAUUCGCGG | 17 | 7417 |
| HSV1-UL54-655 | + | CAGGGGCUAUUCGCGGC | 17 | 7418 |
| HSV1-UL54-656 | + | CUAUUCGCGGCGGGAAA | 17 | 7419 |
| HSV1-UL54-657 | + | AAACGGCUGCCCCCCAA | 17 | 7420 |
| HSV1-UL54-658 | + | AACGGCUGCCCCCCAAA | 17 | 7421 |
| HSV1-UL54-659 | + | ACGGCUGCCCCCCAAAG | 17 | 7422 |
| HSV1-UL54-660 | + | GCAUGACCUGUGCGCUG | 17 | 7423 |
| HSV1-UL54-661 | + | CAAAGCUCUCGCUGAUG | 17 | 7424 |
| HSV1-UL54-662 | + | GUCGACCGCCGCGCGCU | 17 | 7425 |
| HSV1-UL54-663 | + | CGCCGCGCGCUCGGAGA | 17 | 7426 |
| HSV1-UL54-664 | + | GCUCGGAGAUGGAGCGC | 17 | 7427 |
| HSV1-UL54-665 | + | GCGCAGGACCAACCGCG | 17 | 7428 |
| HSV1-UL54-666 | + | CAGGACCAACCGCGUGG | 17 | 7429 |
| HSV1-UL54-667 | + | CCGCGUGGUGGCGUCGA | 17 | 7430 |
| HSV1-UL54-668 | + | GGUGGCGUCGAUGGUGU | 17 | 7431 |
| HSV1-UL54-669 | + | GGCGUCGAUGGUGUCGG | 17 | 7432 |
| HSV1-UL54-670 | + | GUCGAUGGUGUCGGCGG | 17 | 7433 |
| HSV1-UL54-671 | + | UCGAUGGUGUCGGCGGC | 17 | 7434 |
| HSV1-UL54-672 | + | GCGGGCGCCUUUCGCUC | 17 | 7435 |
| HSV1-UL54-673 | + | CGGGCGCCUUUCGCUCC | 17 | 7436 |
| HSV1-UL54-674 | + | GGGCGCCUUUCGCUCCG | 17 | 7437 |
| HSV1-UL54-675 | + | GCCUUUCGCUCCGGGGC | 17 | 7438 |
| HSV1-UL54-676 | + | CCUUUCGCUCCGGGGCC | 17 | 7439 |
| HSV1-UL54-677 | + | CUUUCGCUCCGGGGCCG | 17 | 7440 |
| HSV1-UL54-678 | + | GCUCCGGGGCCGGGGCG | 17 | 7441 |
| HSV1-UL54-679 | + | CUCCGGGGCCGGGGCGC | 17 | 7442 |
| HSV1-UL54-680 | + | UCCGGGGCCGGGGCGCG | 17 | 7443 |
| HSV1-UL54-681 | + | CCGGGGCCGGGGCGCGG | 17 | 7444 |
| HSV1-UL54-682 | + | CGGGGCGCGGGGGUCCG | 17 | 7445 |
| HSV1-UL54-683 | + | GGGGCGCGGGGGUCCGC | 17 | 7446 |
| HSV1-UL54-684 | + | GCGCGGGGGUCCGCGGG | 17 | 7447 |
| HSV1-UL54-685 | + | CGCGGGGGUCCGCGGGC | 17 | 7448 |
| HSV1-UL54-686 | + | GCGGGGGUCCGCGGGCG | 17 | 7449 |
| HSV1-UL54-687 | + | CGGGGGUCCGCGGGCGG | 17 | 7450 |
| HSV1-UL54-688 | + | GGGGGUCCGCGGGCGGG | 17 | 7451 |
| HSV1-UL54-689 | + | GGGGUCCGCGGGCGGGG | 17 | 7452 |
| HSV1-UL54-690 | + | AUCGCCAGCGUCAUUAG | 17 | 7453 |
| HSV1-UL54-691 | + | UCGCCAGCGUCAUUAGC | 17 | 7454 |
| HSV1-UL54-692 | + | CGCCAGCGUCAUUAGCG | 17 | 7455 |
| HSV1-UL54-693 | + | GCCAGCGUCAUUAGCGG | 17 | 7456 |
| HSV1-UL54-694 | + | CCAGCGUCAUUAGCGGG | 17 | 7457 |
| HSV1-UL54-695 | + | CAGCGUCAUUAGCGGGG | 17 | 7458 |
| HSV1-UL54-696 | + | AGCGUCAUUAGCGGGGG | 17 | 7459 |
| HSV1-UL54-697 | + | UUAGCGGGGGGGGUGCU | 17 | 7460 |
| HSV1-UL54-698 | + | GCACGCCCCGUGUCCGC | 17 | 7461 |
| HSV1-UL54-699 | + | CCGUGUCCGCUGGCCUC | 17 | 7462 |
| HSV1-UL54-700 | + | CGUGUCCGCUGGCCUCC | 17 | 7463 |
| HSV1-UL54-701 | + | GUCCGCUGGCCUCCGGG | 17 | 7464 |
| HSV1-UL54-702 | + | UCCGCUGGCCUCCGGGU | 17 | 7465 |
| HSV1-UL54-703 | + | CUGGCCUCCGGGUGGGU | 17 | 7466 |
| HSV1-UL54-704 | + | UGGCCUCCGGGUGGGUC | 17 | 7467 |
| HSV1-UL54-705 | + | CGCGCCACGCCUCGCCA | 17 | 7468 |
| HSV1-UL54-706 | + | GCGCCACGCCUCGCCAU | 17 | 7469 |
| HSV1-UL54-707 | + | CGCCACGCCUCGCCAUG | 17 | 7470 |
| HSV1-UL54-708 | + | GCCACGCCUCGCCAUGG | 17 | 7471 |
| HSV1-UL54-709 | + | CCACGCCUCGCCAUGGG | 17 | 7472 |
| HSV1-UL54-710 | + | CUCGCCAUGGGGGGCGC | 17 | 7473 |
| HSV1-UL54-711 | + | UCGCCAUGGGGGGCGCC | 17 | 7474 |
| HSV1-UL54-712 | + | CGCCAUGGGGGGCGCCG | 17 | 7475 |
| HSV1-UL54-713 | + | GUCCGUCCACCCCGCCC | 17 | 7476 |
| HSV1-UL54-714 | + | UCCGUCCACCCCGCCCC | 17 | 7477 |
| HSV1-UL54-715 | + | CCGUCCACCCCGCCCCG | 17 | 7478 |
| HSV1-UL54-716 | + | UCCACCCCGCCCCGGGG | 17 | 7479 |
| HSV1-UL54-717 | + | CCACCCCGCCCCGGGGC | 17 | 7480 |
| HSV1-UL54-718 | + | CACCCCGCCCCGGGGCG | 17 | 7481 |
| HSV1-UL54-719 | + | CCGGGGCGGGGUCCCCC | 17 | 7482 |
| HSV1-UL54-720 | + | CGGGGCGGGGUCCCCCA | 17 | 7483 |
| HSV1-UL54-721 | + | UCCCCCAGGGUUGCGAU | 17 | 7484 |

[0751] Table 4D provides exemplary targeting domains for knocking out the UL54 gene selected according to the first tier parameters. The targeting domains are selected based on location within first 500 bp of the coding sequence of the UL54 gene. It is contemplated herein that the targeting domain hybridizes to the target domain through complementary base pairing. Any of the targeting domains in the table can be used with a S. aureus Cas9 molecule that gives double stranded cleavage. Any of the targeting domains in the table can be used with a S. aureus Cas9 single-stranded break nucleases (nickases). In an embodiment, dual targeting is used to create two nicks on opposite DNA strands by using S. aureus Cas9 nickases with two targeting domains that are complementary to opposite DNA strands, e.g., a gRNA comprising any minus strand targeting domain may be paired any gRNA comprising a plus strand targeting domain provided that the two gRNAs are oriented on the DNA such that PAMs face outward and the distance between the 5′ ends of the gRNAs is 0-50 bp.

TABLE 4D
1st Tier

| | | | Target | |
|---|---|---|---|---|
| gRNA Name | DNA Strand | Targeting Domain | Site Length | Seq ID |
| HSV1-UL54-726 | − | CCUCUCCGACAGCGAUCUGG | 20 | 7487 |
| HSV1-UL54-727 | − | GGACAUGGAAGACCCCCACG | 20 | 7488 |
| HSV1-UL54-728 | − | GGAAGACCCCCACGGAGAGG | 20 | 7489 |
| HSV1-UL54-729 | − | ACGAGGACCCCCCCGAGCCG | 20 | 7490 |
| HSV1-UL54-730 | − | AGGACCCCCCCGAGCCGGCG | 20 | 7491 |
| HSV1-UL54-731 | − | CGGGGAGUGUUCCUCGUCGG | 20 | 7492 |
| HSV1-UL54-5 | − | UUCCUCGUCGGACGAGGACA | 20 | 6768 |
| HSV1-UL54-733 | − | AUAUGCUAAUUGACCUCGGC | 20 | 7493 |
| HSV1-UL54-734 | − | UGGACCUCUCCGACAGCGAU | 20 | 7494 |
| HSV1-UL54-735 | − | UCUCCGACAGCGAUCUGGAC | 20 | 7495 |
| HSV1-UL54-736 | − | CGAUCUGGACGAGGACCCCC | 20 | 7496 |
| HSV1-UL54-84 | − | CGAGGACCCCCCCGAGCCGG | 20 | 6847 |
| HSV1-UL54-738 | − | CGGAGAGCCGCCGCGACGAC | 20 | 7497 |
| HSV1-UL54-85 | − | GGAGAGCCGCCGCGACGACC | 20 | 6848 |
| HSV1-UL54-740 | − | GCCGCCGCGACGACCUGGAA | 20 | 7498 |
| HSV1-UL54-741 | − | CGACCUGGAAUCGGACAGCA | 20 | 7499 |
| HSV1-UL54-86 | − | GACCUGGAAUCGGACAGCAG | 20 | 6849 |
| HSV1-UL54-87 | − | ACCUGGAAUCGGACAGCAGC | 20 | 6850 |
| HSV1-UL54-88 | − | CCUGGAAUCGGACAGCAGCG | 20 | 6851 |
| HSV1-UL54-745 | − | GCAGCGGGGAGUGUUCCUCG | 20 | 7500 |
| HSV1-UL54-746 | − | GGGAGUGUUCCUCGUCGGAC | 20 | 7501 |
| HSV1-UL54-747 | − | GUUCCUCGUCGGACGAGGAC | 20 | 7502 |
| HSV1-UL54-748 | − | CGAGGACAUGGAAGACCCCC | 20 | 7503 |
| HSV1-UL54-90 | − | GAGGACAUGGAAGACCCCCA | 20 | 6853 |
| HSV1-UL54-750 | − | ACAUGGAAGACCCCCACGGA | 20 | 7504 |
| HSV1-UL54-751 | − | ACCCCCACGGAGAGGACGGA | 20 | 7505 |
| HSV1-UL54-93 | − | CCCCCACGGAGAGGACGGAC | 20 | 6856 |
| HSV1-UL54-753 | − | GGCGGUCCGCCCGUCUCGUC | 20 | 7506 |
| HSV1-UL54-754 | − | GCACCCAGACGCCUCGUCCG | 20 | 7507 |
| HSV1-UL54-8 | − | CACCCAGACGCCUCGUCCGA | 20 | 6771 |
| HSV1-UL54-756 | − | CGCCUCGUCCGACGGAGCGG | 20 | 7508 |
| HSV1-UL54-757 | − | CCACAGUGUGUGGUCGCGCC | 20 | 7509 |
| HSV1-UL54-98 | − | CACAGUGUGUGGUCGCGCCU | 20 | 6861 |
| HSV1-UL54-759 | − | CCGGCGACCGUCUUGCUCCC | 20 | 7510 |
| HSV1-UL54-760 | − | GUCUUGCUCCCCCGAGCAGC | 20 | 7511 |
| HSV1-UL54-99 | − | UCUUGCUCCCCCGAGCAGCA | 20 | 6862 |
| HSV1-UL54-100 | − | CUUGCUCCCCCGAGCAGCAC | 20 | 6863 |
| HSV1-UL54-763 | − | CAAAGCCCAGCCUGCCCGCG | 20 | 7512 |
| HSV1-UL54-764 | − | GCCUGCCCGCGGCGGACGCC | 20 | 7513 |
| HSV1-UL54-765 | − | GGCGGACGCCGUGGGCGUCG | 20 | 7514 |
| HSV1-UL54-108 | − | GCGGACGCCGUGGGCGUCGC | 20 | 6871 |
| HSV1-UL54-767 | − | CGCCGUGGGCGUCGCAGGGG | 20 | 7515 |
| HSV1-UL54-111 | − | GCCGUGGGCGUCGCAGGGGU | 20 | 6874 |
| HSV1-UL54-769 | − | GGGUCGGGGUCGCGGUGGUC | 20 | 7516 |
| HSV1-UL54-116 | − | GGUCGGGGUCGCGGUGGUCC | 20 | 6879 |
| HSV1-UL54-771 | − | CCGGGGCUGCCGAUGGUUUG | 20 | 7517 |
| HSV1-UL54-772 | + | GACCACCGCGACCCCGACCC | 20 | 7518 |
| HSV1-UL54-773 | + | GCGACGCCCACGGCGUCCGC | 20 | 7519 |
| HSV1-UL54-137 | + | UGCUGCUCGGGGGAGCAAGA | 20 | 6900 |
| HSV1-UL54-775 | + | GGCGCGACCACACACUGUGG | 20 | 7520 |
| HSV1-UL54-776 | + | CAAACCAUCGGCAGCCCCGG | 20 | 7521 |
| HSV1-UL54-777 | + | GGACCACCGCGACCCCGACC | 20 | 7522 |
| HSV1-UL54-778 | + | ACCCCUGCGACGCCCACGGC | 20 | 7523 |
| HSV1-UL54-779 | + | CCCCUGCGACGCCCACGGCG | 20 | 7524 |
| HSV1-UL54-780 | + | CGACGCCCACGGCGUCCGCC | 20 | 7525 |
| HSV1-UL54-123 | + | GGCGUCCGCCGCGGGCAGGC | 20 | 6886 |
| HSV1-UL54-782 | + | CGCGGGCAGGCUGGGCUUUG | 20 | 7526 |
| HSV1-UL54-783 | + | GUGCUGCUCGGGGGAGCAAG | 20 | 7527 |
| HSV1-UL54-784 | + | GCUGCUCGGGGGAGCAAGAC | 20 | 7528 |
| HSV1-UL54-785 | + | GGGAGCAAGACGGUCGCCGG | 20 | 7529 |
| HSV1-UL54-139 | + | AGGCGCGACCACACACUGUG | 20 | 6902 |
| HSV1-UL54-787 | + | CCGCUCCGUCGGACGAGGCG | 20 | 7530 |
| HSV1-UL54-788 | + | UCGGACGAGGCGUCUGGGUG | 20 | 7531 |
| HSV1-UL54-145 | + | CGGACGAGGCGUCUGGGUGC | 20 | 6908 |
| HSV1-UL54-154 | + | GACGAGACGGGCGGACCGCC | 20 | 6917 |
| HSV1-UL54-791 | + | GUCCGUCCUCUCCGUGGGGG | 20 | 7532 |
| HSV1-UL54-792 | + | UCCGUCCUCUCCGUGGGGGU | 20 | 7533 |
| HSV1-UL54-793 | + | CCUCUCCGUGGGGGUCUUCC | 20 | 7534 |
| HSV1-UL54-794 | + | UCCGUGGGGGUCUUCCAUGU | 20 | 7535 |
| HSV1-UL54-795 | + | CGUGGGGGUCUUCCAUGUCC | 20 | 7536 |
| HSV1-UL54-796 | + | UGGGGGUCUUCCAUGUCCUC | 20 | 7537 |
| HSV1-UL54-797 | + | GGGGGUCUUCCAUGUCCUCG | 20 | 7538 |
| HSV1-UL54-798 | + | UGUCCUCGUCCGACGAGGAA | 20 | 7539 |
| HSV1-UL54-799 | + | GUCCUCGUCCGACGAGGAAC | 20 | 7540 |
| HSV1-UL54-800 | + | GUCCGACGAGGAACACUCCC | 20 | 7541 |
| HSV1-UL54-801 | + | CCGACGAGGAACACUCCCCG | 20 | 7542 |
| HSV1-UL54-802 | + | CGAGGAACACUCCCCGCUGC | 20 | 7543 |
| HSV1-UL54-803 | + | CGCUGCUGUCCGAUUCCAGG | 20 | 7544 |
| HSV1-UL54-804 | + | GCUGCUGUCCGAUUCCAGGU | 20 | 7545 |
| HSV1-UL54-805 | + | CUGCUGUCCGAUUCCAGGUC | 20 | 7546 |
| HSV1-UL54-806 | + | UGCUGUCCGAUUCCAGGUCG | 20 | 7547 |
| HSV1-UL54-807 | + | UUCCAGGUCGUCGCGGCGGC | 20 | 7548 |
| HSV1-UL54-808 | + | GGUCGUCGCGGCGGCUCUCC | 20 | 7549 |
| HSV1-UL54-809 | + | GUCGUCGCGGCGGCUCUCCG | 20 | 7550 |
| HSV1-UL54-810 | + | CGCCGGCUCGGGGGGGUCCU | 20 | 7551 |
| HSV1-UL54-811 | + | CCGGCUCGGGGGGGUCCUCG | 20 | 7552 |
| HSV1-UL54-812 | + | CGGCUCGGGGGGGUCCUCGU | 20 | 7553 |
| HSV1-UL54-813 | + | GGGGGUCCUCGUCCAGAUCG | 20 | 7554 |
| HSV1-UL54-814 | + | GUCCAGAUCGCUGUCGGAGA | 20 | 7555 |
| HSV1-UL54-815 | + | CCAGAUCGCUGUCGGAGAGG | 20 | 7556 |
| HSV1-UL54-816 | + | AUCGCUGUCGGAGAGGUCCA | 20 | 7557 |
| HSV1-UL54-817 | + | GCCGAGGUCAAUUAGCAUAU | 20 | 7558 |
| HSV1-UL54-818 | − | CUCCGUGGGGGUCUUCCAUG | 17 | 7559 |
| HSV1-UL54-796 | − | UGGGGGUCUUCCAUGUCCUC | 20 | 7537 |
| HSV1-UL54-798 | − | UGUCCUCGUCCGACGAGGAA | 20 | 7539 |
| HSV1-UL54-821 | − | CGUCCGACGAGGAACACUCC | 20 | 7560 |
| HSV1-UL54-822 | − | ACGAGGAACACUCCCCGCUG | 20 | 7561 |
| HSV1-UL54-803 | − | CGCUGCUGUCCGAUUCCAGG | 20 | 7544 |
| HSV1-UL54-804 | + | GCUGCUGUCCGAUUCCAGGU | 20 | 7545 |
| HSV1-UL54-805 | + | CUGCUGUCCGAUUCCAGGUC | 20 | 7546 |
| HSV1-UL54-826 | + | AUUCCAGGUCGUCGCGGCGG | 20 | 7562 |
| HSV1-UL54-808 | + | GGUCGUCGCGGCGGCUCUCC | 20 | 7549 |
| HSV1-UL54-811 | + | CCGGCUCGGGGGGGUCCUCG | 20 | 7552 |
| HSV1-UL54-829 | + | GCUCGGGGGGGUCCUCGUCC | 20 | 7563 |
| HSV1-UL54-38 | + | CGUCCAGAUCGCUGUCGGAG | 20 | 6801 |
| HSV1-UL54-39 | + | GAUCGCUGUCGGAGAGGUCC | 20 | 6802 |
| HSV1-UL54-832 | + | GGCCGAGGUCAAUUAGCAUA | 20 | 7564 |
| HSV1-UL54-833 | − | AGGUCAAUUAGCAUAUCAAU | 20 | 7565 |
| HSV1-UL54-167 | − | GAUAUGCUAAUUGACCU | 17 | 6930 |
| HSV1-UL54-168 | − | GCUAAUUGACCUCGGCC | 17 | 6931 |
| HSV1-UL54-41 | − | CCUCUCCGACAGCGAUC | 17 | 6804 |
| HSV1-UL54-42 | − | CGACAGCGAUCUGGACG | 17 | 6805 |
| HSV1-UL54-169 | − | CGAGGACCCCCCCGAGC | 17 | 6932 |
| HSV1-UL54-170 | − | GGACCCCCCCGAGCCGG | 17 | 6933 |
| HSV1-UL54-171 | − | GAGCCGCCGCGACGACC | 17 | 6934 |
| HSV1-UL54-43 | − | CCGCGACGACCUGGAAU | 17 | 6806 |
| HSV1-UL54-172 | − | CUGGAAUCGGACAGCAG | 17 | 6935 |
| HSV1-UL54-173 | − | UGGAAUCGGACAGCAGC | 17 | 6936 |
| HSV1-UL54-174 | − | GGAAUCGGACAGCAGCG | 17 | 6937 |
| HSV1-UL54-44 | − | CGGGGAGUGUUCCUCGU | 17 | 6807 |
| HSV1-UL54-175 | − | GUGUUCCUCGUCGGACG | 17 | 6938 |
| HSV1-UL54-45 | − | CUCGUCGGACGAGGACA | 17 | 6808 |
| HSV1-UL54-176 | − | GACAUGGAAGACCCCCA | 17 | 6939 |
| HSV1-UL54-177 | − | GGAAGACCCCCACGGAG | 17 | 6940 |
| HSV1-UL54-178 | − | GACCCCCACGGAGAGGA | 17 | 6941 |
| HSV1-UL54-179 | − | CCACGGAGAGGACGGAC | 17 | 6942 |
| HSV1-UL54-46 | − | ACUCGACGCCGCUCGCC | 17 | 6809 |
| HSV1-UL54-47 | − | CGACGCCGCUCGCCCGG | 17 | 6810 |
| HSV1-UL54-180 | − | UCUCGUCCAGAAGACCC | 17 | 6943 |
| HSV1-UL54-48 | − | CCAGACGCCUCGUCCGA | 17 | 6811 |
| HSV1-UL54-181 | − | CGCCUCGUCCGACGGAG | 17 | 6944 |
| HSV1-UL54-49 | − | UCGUCCGACGGAGCGGC | 17 | 6812 |
| HSV1-UL54-182 | − | CGUCCGACGGAGCGGCA | 17 | 6945 |
| HSV1-UL54-183 | − | CAGCGCCCCACAGUGUG | 17 | 6946 |
| HSV1-UL54-184 | − | AGUGUGUGGUCGCGCCU | 17 | 6947 |
| HSV1-UL54-50 | − | GUGUGUGGUCGCGCCUC | 17 | 6813 |
| HSV1-UL54-51 | − | UGUGUGGUCGCGCCUCG | 17 | 6814 |
| HSV1-UL54-52 | − | GGUCGCGCCUCGGGGCC | 17 | 6815 |
| HSV1-UL54-185 | + | UGCUCCCCCGAGCAGCA | 17 | 6948 |
| HSV1-UL54-186 | + | GCUCCCCCGAGCAGCAC | 17 | 6949 |
| HSV1-UL54-53 | + | CUCCCCCGAGCAGCACG | 17 | 6816 |
| HSV1-UL54-187 | + | UCCCCCGAGCAGCACGG | 17 | 6950 |
| HSV1-UL54-188 | + | CGAGCAGCACGGGGGCA | 17 | 6951 |
| HSV1-UL54-189 | + | GCAGCACGGGGGCAAGG | 17 | 6952 |
| HSV1-UL54-190 | + | AAAGCCCAGCCUGCCCG | 17 | 6953 |
| HSV1-UL54-191 | + | GCCCAGCCUGCCCGCGG | 17 | 6954 |
| HSV1-UL54-192 | + | GCCCGCGGCGGACGCCG | 17 | 6955 |
| HSV1-UL54-193 | − | CCCGCGGCGGACGCCGU | 17 | 6956 |
| HSV1-UL54-194 | − | GACGCCGUGGGCGUCGC | 17 | 6957 |
| HSV1-UL54-195 | − | ACGCCGUGGGCGUCGCA | 17 | 6958 |
| HSV1-UL54-196 | − | CGCCGUGGGCGUCGCAG | 17 | 6959 |
| HSV1-UL54-197 | − | GUGGGCGUCGCAGGGGU | 17 | 6960 |
| HSV1-UL54-198 | − | UGGGCGUCGCAGGGGUC | 17 | 6961 |
| HSV1-UL54-199 | − | GGGCGUCGCAGGGGUCG | 17 | 6962 |
| HSV1-UL54-200 | − | CGCAGGGGUCGGGGUCG | 17 | 6963 |
| HSV1-UL54-201 | − | AGGGGUCGGGGUCGCGG | 17 | 6964 |
| HSV1-UL54-202 | − | CGGGGUCGCGGUGGUCC | 17 | 6965 |
| HSV1-UL54-203 | − | GGGGUCGCGGUGGUCCC | 17 | 6966 |
| HSV1-UL54-54 | − | GGGUCGCGGUGGUCCCG | 17 | 6817 |
| HSV1-UL54-204 | − | GGUCCCGGGGCUGCCGA | 17 | 6967 |
| HSV1-UL54-55 | − | GGCUGCCGAUGGUUUGU | 17 | 6818 |
| HSV1-UL54-56 | − | GUUUGUCGGACCCCCGC | 17 | 6819 |
| HSV1-UL54-888 | + | GCGGGGGUCCGACAAAC | 17 | 7566 |
| HSV1-UL54-889 | + | ACAAACCAUCGGCAGCC | 17 | 7567 |
| HSV1-UL54-890 | + | UCGGCAGCCCCGGGACC | 17 | 7568 |
| HSV1-UL54-891 | + | CGGGACCACCGCGACCC | 17 | 7569 |
| HSV1-UL54-892 | + | GGGACCACCGCGACCCC | 17 | 7570 |
| HSV1-UL54-893 | + | GGACCACCGCGACCCCG | 17 | 7571 |
| HSV1-UL54-894 | + | CCGCGACCCCGACCCCU | 17 | 7572 |
| HSV1-UL54-895 | + | CGACCCCGACCCCUGCG | 17 | 7573 |
| HSV1-UL54-896 | + | CGACCCCUGCGACGCCC | 17 | 7574 |
| HSV1-UL54-206 | + | GACCCCUGCGACGCCCA | 17 | 6969 |
| HSV1-UL54-898 | + | ACCCCUGCGACGCCCAC | 17 | 7575 |
| HSV1-UL54-899 | + | CUGCGACGCCCACGGCG | 17 | 7576 |
| HSV1-UL54-900 | + | UGCGACGCCCACGGCGU | 17 | 7577 |
| HSV1-UL54-901 | + | GCGACGCCCACGGCGUC | 17 | 7578 |
| HSV1-UL54-902 | + | ACGGCGUCCGCCGCGGG | 17 | 7579 |
| HSV1-UL54-208 | + | CGGCGUCCGCCGCGGGC | 17 | 6971 |
| HSV1-UL54-904 | + | CCGCGGGCAGGCUGGGC | 17 | 7580 |
| HSV1-UL54-905 | + | CGGGCAGGCUGGGCUUU | 17 | 7581 |
| HSV1-UL54-906 | + | CCUUGCCCCCGUGCUGC | 17 | 7582 |
| HSV1-UL54-60 | + | UGCCCCCGUGCUGCUCG | 17 | 6823 |
| HSV1-UL54-908 | + | CCGUGCUGCUCGGGGGA | 17 | 7583 |
| HSV1-UL54-909 | + | CGUGCUGCUCGGGGGAG | 17 | 7584 |

[0752] Table 4E provides exemplary targeting domains for knocking out the UL54 gene selected according to the second tier parameters. The targeting domains are selected based on location within the coding sequence, but downstream of the first 500 bp of the UL54 gene. It is contemplated herein that the targeting domain hybridizes to the target domain through complementary base pairing. Any of the targeting domains in the table can be used with a S. aureus Cas9 molecule that gives double stranded cleavage. Any of the targeting domains in the table can be used with a S. aureus Cas9 single-stranded break nucleases (nickases). In an embodiment, dual targeting is used to create two nicks on opposite DNA strands by using S. aureus Cas9 nickases with two targeting domains that are complementary to opposite DNA strands, e.g., a gRNA comprising any minus strand targeting domain may be paired any gRNA comprising a plus strand targeting domain provided that the two gRNAs are oriented on the DNA such that PAMs face outward and the distance between the 5′ ends of the gRNAs is 0-50 bp.

TABLE 4E
2nd Tier

| | DNA | | Target | |
|---|---|---|---|---|
| gRNA Name | Strand | Targeting Domain | Site Length | Seq ID |
| HSV1-UL54-910 | − | CAGAACCAAUCGCAACCCUG | 20 | 7585 |
| HSV1-UL54-911 | − | CCACCCGGAGGCCAGCGGAC | 20 | 7586 |
| HSV1-UL54-912 | − | CAACCCUGGGGGACCCCGCC | 20 | 7587 |
| HSV1-UL54-254 | − | AACCCUGGGGGACCCCGCCC | 20 | 7017 |
| HSV1-UL54-914 | − | CUGGGGGACCCCGCCCCGGG | 20 | 7588 |
| HSV1-UL54-257 | − | UGGGGGACCCCGCCCCGGGG | 20 | 7020 |
| HSV1-UL54-916 | − | GGACCCCGCCCCGGGGCGGG | 20 | 7589 |
| HSV1-UL54-917 | − | CCCGCCCCGGGGCGGGGUGG | 20 | 7590 |
| HSV1-UL54-918 | − | CGGCCCCGGCGCCCCCCAUG | 20 | 7591 |
| HSV1-UL54-919 | − | UGGCGAGGCGUGGCGCGGCA | 20 | 7592 |
| HSV1-UL54-920 | − | CAGUGAGCAGCCCGACCCAC | 20 | 7593 |
| HSV1-UL54-268 | − | AGUGAGCAGCCCGACCCACC | 20 | 7031 |
| HSV1-UL54-922 | − | CCCGACCCACCCGGAGGCCA | 20 | 7594 |
| HSV1-UL54-271 | − | CACCCGGAGGCCAGCGGACA | 20 | 7034 |
| HSV1-UL54-924 | − | UGGCGAUUGCCCCCCCGCCC | 20 | 7595 |
| HSV1-UL54-925 | − | CGGACCCCCGCGCCCCGGCC | 20 | 7596 |
| HSV1-UL54-277 | − | GGACCCCCGCGCCCCGGCCC | 20 | 7040 |
| HSV1-UL54-927 | − | CCCCGCGCCCCGGCCCCGGA | 20 | 7597 |
| HSV1-UL54-928 | − | GUUGGUCCUGCGCUCCAUCU | 20 | 7598 |
| HSV1-UL54-929 | − | CGCGGCGGUCGACCGCAUCA | 20 | 7599 |
| HSV1-UL54-930 | − | CGGCGGUCGACCGCAUCAGC | 20 | 7600 |
| HSV1-UL54-931 | − | ACAGGUCAUGCACGACCCCU | 20 | 7601 |
| HSV1-UL54-285 | − | CAGGUCAUGCACGACCCCUU | 20 | 7048 |
| HSV1-UL54-286 | − | AGGUCAUGCACGACCCCUUU | 20 | 7049 |
| HSV1-UL54-287 | − | GGUCAUGCACGACCCCUUUG | 20 | 7050 |
| HSV1-UL54-935 | − | GGGGGCAGCCGUUUCCCGCC | 20 | 7602 |
| HSV1-UL54-936 | − | UUUCCCGCCGCGAAUAGCCC | 20 | 7603 |
| HSV1-UL54-937 | − | GCCCCUGGGCCCCGGUGCUG | 20 | 7604 |
| HSV1-UL54-938 | − | GGCCCCGGUGCUGGCGGGCC | 20 | 7605 |
| HSV1-UL54-296 | − | GCCCCGGUGCUGGCGGGCCA | 20 | 7059 |
| HSV1-UL54-940 | − | CCCGGUGCUGGCGGGCCAAG | 20 | 7606 |
| HSV1-UL54-941 | − | CCAAGGAGGGCCCUUUGACG | 20 | 7607 |
| HSV1-UL54-942 | − | CCCUUUGACGCCGAGACCAG | 20 | 7608 |
| HSV1-UL54-943 | − | GCCGAGACCAGACGGGUCUC | 20 | 7609 |
| HSV1-UL54-301 | − | CCGAGACCAGACGGGUCUCC | 20 | 7064 |
| HSV1-UL54-302 | − | CGAGACCAGACGGGUCUCCU | 20 | 7065 |
| HSV1-UL54-946 | − | AAACCUUGGUCGCCCACGGC | 20 | 7610 |
| HSV1-UL54-947 | − | CGCACUUUUGCCGGCAAUCC | 20 | 7611 |
| HSV1-UL54-948 | − | GCGCGACUGCGUGCUGCGCC | 20 | 7612 |
| HSV1-UL54-949 | − | GCUGCGCCAAGAAAAUUUCA | 20 | 7613 |
| HSV1-UL54-950 | − | CGAGGCGCUGGCCUCCGCCG | 20 | 7614 |
| HSV1-UL54-951 | − | ACAACCUGCCGCUGCGCCCC | 20 | 7615 |
| HSV1-UL54-952 | − | GCGCCCCCAGGACCCCAUUA | 20 | 7616 |
| HSV1-UL54-314 | − | CGCCCCCAGGACCCCAUUAU | 20 | 7077 |
| HSV1-UL54-954 | − | UCGGGACGACCGCGGCUGUG | 20 | 7617 |
| HSV1-UL54-955 | − | GGCCCUUUCUCCAGUGCUAC | 20 | 7618 |
| HSV1-UL54-956 | − | CUCCAGUGCUACCUGAAGGC | 20 | 7619 |
| HSV1-UL54-957 | − | AGGCGCGAGGCCUGUGCGGC | 20 | 7620 |
| HSV1-UL54-958 | − | GCGAGGCCUGUGCGGCCUGG | 20 | 7621 |
| HSV1-UL54-959 | − | UGUGUUCGCGGCGGCGUCUG | 20 | 7622 |
| HSV1-UL54-960 | − | GGCGGCGUCUGGCGGACAUU | 20 | 7623 |
| HSV1-UL54-961 | − | GGCCAGGCUCGCCAACCGCG | 20 | 7624 |
| HSV1-UL54-962 | − | ACCGCGUCGAGCGUGGCGUC | 20 | 7625 |
| HSV1-UL54-331 | − | CCGCGUCGAGCGUGGCGUCG | 20 | 7094 |
| HSV1-UL54-964 | − | CGACUACGCGACCCUUGGUG | 20 | 7626 |
| HSV1-UL54-333 | − | GACUACGCGACCCUUGGUGU | 20 | 7096 |
| HSV1-UL54-966 | − | CGCGACCCUUGGUGUCGGGG | 20 | 7627 |
| HSV1-UL54-336 | − | GCGACCCUUGGUGUCGGGGU | 20 | 7099 |
| HSV1-UL54-968 | − | GACCCUUGGUGUCGGGGUCG | 20 | 7628 |
| HSV1-UL54-969 | − | CCCUUGGUGUCGGGGUCGGA | 20 | 7629 |
| HSV1-UL54-970 | − | GAAGAUGCAUUUCUACCUCC | 20 | 7630 |
| HSV1-UL54-337 | − | AAGAUGCAUUUCUACCUCCC | 20 | 7100 |
| HSV1-UL54-972 | − | ACCUCCCCGGGGCCUGCAUG | 20 | 7631 |
| HSV1-UL54-973 | − | GGCCUGCAUGGCGGGCCUGA | 20 | 7632 |
| HSV1-UL54-974 | − | AAAUCCUAGACACGCACCGC | 20 | 7633 |
| HSV1-UL54-343 | − | AAUCCUAGACACGCACCGCC | 20 | 7106 |
| HSV1-UL54-976 | − | ACACGCACCGCCAGGAGUGU | 20 | 7634 |
| HSV1-UL54-977 | − | GGAGUGUUCGAGUCGUGUCU | 20 | 7635 |
| HSV1-UL54-978 | + | ACACUCCUGGCGGUGCGUGU | 20 | 7636 |
| HSV1-UL54-979 | + | GGGAGGUAGAAAUGCAUCUU | 20 | 7637 |
| HSV1-UL54-980 | + | ACACCAAGGGUCGCGUAGUC | 20 | 7638 |
| HSV1-UL54-353 | + | AGACACGACUCGAACACUCC | 20 | 7116 |
| HSV1-UL54-982 | + | GGCGGUGCGUGUCUAGGAUU | 20 | 7639 |
| HSV1-UL54-983 | + | GCGGUGCGUGUCUAGGAUUU | 20 | 7640 |
| HSV1-UL54-984 | + | UCAGGCCCGCCAUGCAGGCC | 20 | 7641 |
| HSV1-UL54-985 | + | CAUGCAGGCCCCGGGGAGGU | 20 | 7642 |
| HSV1-UL54-986 | + | GGAGGUAGAAAUGCAUCUUC | 20 | 7643 |
| HSV1-UL54-987 | + | UCCGACCCCGACACCAAGGG | 20 | 7644 |
| HSV1-UL54-988 | + | CGACCCCGACACCAAGGGUC | 20 | 7645 |
| HSV1-UL54-989 | + | ACCCCGACACCAAGGGUCGC | 20 | 7646 |
| HSV1-UL54-990 | + | CCCCGACACCAAGGGUCGCG | 20 | 7647 |
| HSV1-UL54-991 | + | CACCAAGGGUCGCGUAGUCG | 20 | 7648 |
| HSV1-UL54-992 | + | CGACGCCACGCUCGACGCGG | 20 | 7649 |
| HSV1-UL54-365 | + | GACGCCACGCUCGACGCGGU | 20 | 7128 |
| HSV1-UL54-994 | + | CGCGGUUGGCGAGCCUGGCC | 20 | 7650 |
| HSV1-UL54-995 | + | AAUGUCCGCCAGACGCCGCC | 20 | 7651 |
| HSV1-UL54-996 | + | CAGACGCCGCCGCGAACACA | 20 | 7652 |
| HSV1-UL54-997 | + | CCAGGCCGCACAGGCCUCGC | 20 | 7653 |
| HSV1-UL54-998 | + | GCCGCACAGGCCUCGCGCCU | 20 | 7654 |
| HSV1-UL54-999 | + | GCCUUCAGGUAGCACUGGAG | 20 | 7655 |
| HSV1-UL54-1000 | + | GUAGCACUGGAGAAAGGGCC | 20 | 7656 |
| HSV1-UL54-1001 | + | CACAGCCGCGGUCGUCCCGA | 20 | 7657 |
| HSV1-UL54-1002 | + | AUAAUGGGGUCCUGGGGGCG | 20 | 7658 |
| HSV1-UL54-1003 | + | UAAUGGGGUCCUGGGGGCGC | 20 | 7659 |
| HSV1-UL54-1004 | + | GGGGCGCAGCGGCAGGUUGU | 20 | 7660 |
| HSV1-UL54-1005 | + | CGGCGGAGGCCAGCGCCUCG | 20 | 7661 |
| HSV1-UL54-1006 | + | UGAAAUUUUCUUGGCGCAGC | 20 | 7662 |
| HSV1-UL54-1007 | + | GGCGCAGCACGCAGUCGCGC | 20 | 7663 |
| HSV1-UL54-1008 | + | GGAUUGCCGGCAAAAGUGCG | 20 | 7664 |
| HSV1-UL54-1009 | + | GCCGUGGGCGACCAAGGUUU | 20 | 7665 |
| HSV1-UL54-1010 | + | AGGAGACCCGUCUGGUCUCG | 20 | 7666 |
| HSV1-UL54-1011 | + | GGAGACCCGUCUGGUCUCGG | 20 | 7667 |
| HSV1-UL54-1012 | + | GAGACCCGUCUGGUCUCGGC | 20 | 7668 |
| HSV1-UL54-1013 | + | CUGGUCUCGGCGUCAAAGGG | 20 | 7669 |
| HSV1-UL54-1014 | + | CGUCAAAGGGCCCUCCUUGG | 20 | 7670 |
| HSV1-UL54-1015 | + | CUUGGCCCGCCAGCACCGGG | 20 | 7671 |
| HSV1-UL54-1016 | + | UGGCCCGCCAGCACCGGGGC | 20 | 7672 |
| HSV1-UL54-1017 | + | GGCCCGCCAGCACCGGGGCC | 20 | 7673 |
| HSV1-UL54-1018 | + | CAGCACCGGGGCCCAGGGGC | 20 | 7674 |
| HSV1-UL54-420 | + | GGGCUAUUCGCGGCGGGAAA | 20 | 7183 |
| HSV1-UL54-1020 | + | GGCGGGAAACGGCUGCCCCC | 20 | 7675 |
| HSV1-UL54-1021 | + | CAAAGGGGUCGUGCAUGACC | 20 | 7676 |
| HSV1-UL54-1022 | + | AAAGGGGUCGUGCAUGACCU | 20 | 7677 |
| HSV1-UL54-1023 | + | AAGGGGUCGUGCAUGACCUG | 20 | 7678 |
| HSV1-UL54-1024 | + | AGGGGUCGUGCAUGACCUGU | 20 | 7679 |
| HSV1-UL54-1025 | + | GCUGAUGCGGUCGACCGCCG | 20 | 7680 |
| HSV1-UL54-1026 | + | UGAUGCGGUCGACCGCCGCG | 20 | 7681 |
| HSV1-UL54-1027 | + | AGAUGGAGCGCAGGACCAAC | 20 | 7682 |
| HSV1-UL54-1028 | + | UCCGGGGCCGGGGCGCGGGG | 20 | 7683 |
| HSV1-UL54-1029 | + | GGGCCGGGGCGCGGGGGUCC | 20 | 7684 |
| HSV1-UL54-446 | + | GGCCGGGGCGCGGGGGUCCG | 20 | 7209 |
| HSV1-UL54-1031 | + | GGGCGGGGGGGCAAUCGCCA | 20 | 7685 |
| HSV1-UL54-1032 | + | UGUCCGCUGGCCUCCGGGUG | 20 | 7686 |
| HSV1-UL54-1033 | + | GUCCGCUGGCCUCCGGGUGG | 20 | 7687 |
| HSV1-UL54-1034 | + | UGGCCUCCGGGUGGGUCGGG | 20 | 7688 |
| HSV1-UL54-1035 | + | GGUGGGUCGGGCUGCUCACU | 20 | 7689 |
| HSV1-UL54-1036 | + | GUGGGUCGGGCUGCUCACUG | 20 | 7690 |
| HSV1-UL54-469 | + | UGCCGCGCCACGCCUCGCCA | 20 | 7232 |
| HSV1-UL54-1038 | + | CAUGGGGGGCGCCGGGGCCG | 20 | 7691 |
| HSV1-UL54-1039 | + | CCACCCCGCCCCGGGGCGGG | 20 | 7692 |
| HSV1-UL54-1040 | + | CCCGCCCCGGGGCGGGGUCC | 20 | 7693 |
| HSV1-UL54-484 | + | CCCCGGGGCGGGGUCCCCCA | 20 | 7247 |
| HSV1-UL54-1042 | + | CCCGGGGCGGGGUCCCCCAG | 20 | 7694 |
| HSV1-UL54-1043 | + | GGGCGGGGUCCCCCAGGGUU | 20 | 7695 |
| HSV1-UL54-1044 | + | GGCGGGGUCCCCCAGGGUUG | 20 | 7696 |
| HSV1-UL54-1045 | + | CAGGGUUGCGAUUGGUUCUG | 20 | 7697 |
| HSV1-UL54-1045 | + | CAGGGUUGCGAUUGGUUCUG | 20 | 7697 |
| HSV1-UL54-1045 | + | CAGGGUUGCGAUUGGUUCUG | 20 | 7697 |
| HSV1-UL54-1045 | + | CAGGGUUGCGAUUGGUUCUG | 20 | 7697 |
| HSV1-UL54-488 | − | AACCAAUCGCAACCCUG | 17 | 7251 |
| HSV1-UL54-1050 | − | CCCGGAGGCCAGCGGAC | 17 | 7698 |
| HSV1-UL54-1051 | − | CCCUGGGGGACCCCGCC | 17 | 7699 |
| HSV1-UL54-490 | − | CCUGGGGGACCCCGCCC | 17 | 7253 |
| HSV1-UL54-1053 | − | GGGGACCCCGCCCCGGG | 17 | 7700 |
| HSV1-UL54-493 | − | GGGACCCCGCCCCGGGG | 17 | 7256 |
| HSV1-UL54-1055 | − | CCCCGCCCCGGGGCGGG | 17 | 7701 |
| HSV1-UL54-1056 | − | GCCCCGGGGCGGGGUGG | 17 | 7702 |
| HSV1-UL54-1057 | − | CCCCGGCGCCCCCCAUG | 17 | 7703 |
| HSV1-UL54-1058 | − | CGAGGCGUGGCGCGGCA | 17 | 7704 |
| HSV1-UL54-1059 | − | UGAGCAGCCCGACCCAC | 17 | 7705 |
| HSV1-UL54-504 | − | GAGCAGCCCGACCCACC | 17 | 7267 |
| HSV1-UL54-1061 | − | GACCCACCCGGAGGCCA | 17 | 7706 |
| HSV1-UL54-507 | − | CCGGAGGCCAGCGGACA | 17 | 7270 |
| HSV1-UL54-1063 | − | CGAUUGCCCCCCCGCCC | 17 | 7707 |
| HSV1-UL54-1064 | − | ACCCCCGCGCCCCGGCC | 17 | 7708 |
| HSV1-UL54-513 | − | CCCCCGCGCCCCGGCCC | 17 | 7276 |
| HSV1-UL54-1066 | − | CGCGCCCCGGCCCCGGA | 17 | 7709 |
| HSV1-UL54-1067 | − | GGUCCUGCGCUCCAUCU | 17 | 7710 |
| HSV1-UL54-1068 | − | GGCGGUCGACCGCAUCA | 17 | 7711 |
| HSV1-UL54-1069 | − | CGGUCGACCGCAUCAGC | 17 | 7712 |
| HSV1-UL54-1070 | − | GGUCAUGCACGACCCCU | 17 | 7713 |
| HSV1-UL54-521 | − | GUCAUGCACGACCCCUU | 17 | 7284 |
| HSV1-UL54-522 | − | UCAUGCACGACCCCUUU | 17 | 7285 |
| HSV1-UL54-523 | − | CAUGCACGACCCCUUUG | 17 | 7286 |
| HSV1-UL54-1074 | − | GGCAGCCGUUUCCCGCC | 17 | 7714 |
| HSV1-UL54-1075 | − | CCCGCCGCGAAUAGCCC | 17 | 7715 |
| HSV1-UL54-1076 | − | CCUGGGCCCCGGUGCUG | 17 | 7716 |
| HSV1-UL54-1077 | − | CCCGGUGCUGGCGGGCC | 17 | 7717 |
| HSV1-UL54-532 | − | CCGGUGCUGGCGGGCCA | 17 | 7295 |
| HSV1-UL54-1079 | − | GGUGCUGGCGGGCCAAG | 17 | 7718 |
| HSV1-UL54-1080 | − | AGGAGGGCCCUUUGACG | 17 | 7719 |
| HSV1-UL54-1081 | − | UUUGACGCCGAGACCAG | 17 | 7720 |
| HSV1-UL54-1082 | − | GAGACCAGACGGGUCUC | 17 | 7721 |
| HSV1-UL54-537 | − | AGACCAGACGGGUCUCC | 17 | 7300 |
| HSV1-UL54-538 | − | GACCAGACGGGUCUCCU | 17 | 7301 |
| HSV1-UL54-1085 | − | CCUUGGUCGCCCACGGC | 17 | 7722 |
| HSV1-UL54-1086 | − | ACUUUUGCCGGCAAUCC | 17 | 7723 |
| HSV1-UL54-1087 | − | CGACUGCGUGCUGCGCC | 17 | 7724 |
| HSV1-UL54-1088 | − | GCGCCAAGAAAAUUUCA | 17 | 7725 |
| HSV1-UL54-1089 | − | GGCGCUGGCCUCCGCCG | 17 | 7726 |
| HSV1-UL54-1090 | − | ACCUGCCGCUGCGCCCC | 17 | 7727 |
| HSV1-UL54-1091 | − | CCCCCAGGACCCCAUUA | 17 | 7728 |
| HSV1-UL54-550 | − | CCCCAGGACCCCAUUAU | 17 | 7313 |
| HSV1-UL54-1093 | − | GGACGACCGCGGCUGUG | 17 | 7729 |
| HSV1-UL54-1094 | − | CCUUUCUCCAGUGCUAC | 17 | 7730 |
| HSV1-UL54-1095 | − | CAGUGCUACCUGAAGGC | 17 | 7731 |
| HSV1-UL54-1096 | − | CGCGAGGCCUGUGCGGC | 17 | 7732 |
| HSV1-UL54-1097 | − | AGGCCUGUGCGGCCUGG | 17 | 7733 |
| HSV1-UL54-1098 | − | GUUCGCGGCGGCGUCUG | 17 | 7734 |
| HSV1-UL54-1099 | − | GGCGUCUGGCGGACAUU | 17 | 7735 |
| HSV1-UL54-1100 | − | CAGGCUCGCCAACCGCG | 17 | 7736 |
| HSV1-UL54-1101 | − | GCGUCGAGCGUGGCGUC | 17 | 7737 |
| HSV1-UL54-567 | − | CGUCGAGCGUGGCGUCG | 17 | 7330 |
| HSV1-UL54-1103 | − | CUACGCGACCCUUGGUG | 17 | 7738 |
| HSV1-UL54-569 | − | UACGCGACCCUUGGUGU | 17 | 7332 |
| HSV1-UL54-1105 | − | GACCCUUGGUGUCGGGG | 17 | 7739 |
| HSV1-UL54-572 | − | ACCCUUGGUGUCGGGGU | 17 | 7335 |
| HSV1-UL54-1107 | − | CCUUGGUGUCGGGGUCG | 17 | 7740 |
| HSV1-UL54-1108 | − | UUGGUGUCGGGGUCGGA | 17 | 7741 |
| HSV1-UL54-1109 | − | GAUGCAUUUCUACCUCC | 17 | 7742 |
| HSV1-UL54-573 | − | AUGCAUUUCUACCUCCC | 17 | 7336 |
| HSV1-UL54-1111 | − | UCCCCGGGGCCUGCAUG | 17 | 7743 |
| HSV1-UL54-1112 | − | CUGCAUGGCGGGCCUGA | 17 | 7744 |
| HSV1-UL54-1113 | − | UCCUAGACACGCACCGC | 17 | 7745 |
| HSV1-UL54-579 | − | CCUAGACACGCACCGCC | 17 | 7342 |
| HSV1-UL54-1115 | − | CGCACCGCCAGGAGUGU | 17 | 7746 |
| HSV1-UL54-1116 | − | GUGUUCGAGUCGUGUCU | 17 | 7747 |
| HSV1-UL54-1117 | − | ACACUCCUGGCGGUGCG | 17 | 7748 |
| HSV1-UL54-1118 | − | GGGAGGUAGAAAUGCAU | 17 | 7749 |
| HSV1-UL54-1119 | − | ACACCAAGGGUCGCGUA | 17 | 7750 |
| HSV1-UL54-1120 | − | AGACACGACUCGAACAC | 17 | 7751 |
| HSV1-UL54-1121 | − | GGCGGUGCGUGUCUAGG | 17 | 7752 |
| HSV1-UL54-1122 | − | GCGGUGCGUGUCUAGGA | 17 | 7753 |
| HSV1-UL54-1123 | − | UCAGGCCCGCCAUGCAG | 17 | 7754 |
| HSV1-UL54-1124 | − | CAUGCAGGCCCCGGGGA | 17 | 7755 |
| HSV1-UL54-1125 | − | GGAGGUAGAAAUGCAUC | 17 | 7756 |
| HSV1-UL54-599 | − | UCCGACCCCGACACCAA | 17 | 7362 |
| HSV1-UL54-1127 | − | CGACCCCGACACCAAGG | 17 | 7757 |
| HSV1-UL54-1128 | − | ACCCCGACACCAAGGGU | 17 | 7758 |
| HSV1-UL54-1129 | − | CCCCGACACCAAGGGUC | 17 | 7759 |
| HSV1-UL54-1130 | − | CACCAAGGGUCGCGUAG | 17 | 7760 |
| HSV1-UL54-600 | − | CGACGCCACGCUCGACG | 17 | 7363 |
| HSV1-UL54-1132 | − | GACGCCACGCUCGACGC | 17 | 7761 |
| HSV1-UL54-1133 | − | CGCGGUUGGCGAGCCUG | 17 | 7762 |
| HSV1-UL54-1134 | − | AAUGUCCGCCAGACGCC | 17 | 7763 |
| HSV1-UL54-1135 | − | CAGACGCCGCCGCGAAC | 17 | 7764 |
| HSV1-UL54-1136 | − | CCAGGCCGCACAGGCCU | 17 | 7765 |
| HSV1-UL54-1137 | − | GCCGCACAGGCCUCGCG | 17 | 7766 |
| HSV1-UL54-1138 | − | GCCUUCAGGUAGCACUG | 17 | 7767 |
| HSV1-UL54-1139 | − | GUAGCACUGGAGAAAGG | 17 | 7768 |
| HSV1-UL54-1140 | − | CACAGCCGCGGUCGUCC | 17 | 7769 |
| HSV1-UL54-1141 | − | AUAAUGGGGUCCUGGGG | 17 | 7770 |
| HSV1-UL54-1142 | − | UAAUGGGGUCCUGGGGG | 17 | 7771 |
| HSV1-UL54-1143 | − | GGGGCGCAGCGGCAGGU | 17 | 7772 |
| HSV1-UL54-1144 | − | CGGCGGAGGCCAGCGCC | 17 | 7773 |
| HSV1-UL54-1145 | − | UGAAAUUUUCUUGGCGC | 17 | 7774 |
| HSV1-UL54-1146 | − | GGCGCAGCACGCAGUCG | 17 | 7775 |
| HSV1-UL54-1147 | − | GGAUUGCCGGCAAAAGU | 17 | 7776 |
| HSV1-UL54-1148 | − | GCCGUGGGCGACCAAGG | 17 | 7777 |
| HSV1-UL54-1149 | − | AGGAGACCCGUCUGGUC | 17 | 7778 |
| HSV1-UL54-643 | − | GGAGACCCGUCUGGUCU | 17 | 7406 |
| HSV1-UL54-1151 | − | GAGACCCGUCUGGUCUC | 17 | 7779 |
| HSV1-UL54-645 | − | CUGGUCUCGGCGUCAAA | 17 | 7408 |
| HSV1-UL54-646 | − | CGUCAAAGGGCCCUCCU | 17 | 7409 |
| HSV1-UL54-648 | − | CUUGGCCCGCCAGCACC | 17 | 7411 |
| HSV1-UL54-1155 | − | UGGCCCGCCAGCACCGG | 17 | 7780 |
| HSV1-UL54-1156 | − | GGCCCGCCAGCACCGGG | 17 | 7781 |
| HSV1-UL54-1157 | − | CAGCACCGGGGCCCAGG | 17 | 7782 |
| HSV1-UL54-1158 | − | GGGCUAUUCGCGGCGGG | 17 | 7783 |
| HSV1-UL54-1159 | − | GGCGGGAAACGGCUGCC | 17 | 7784 |
| HSV1-UL54-1160 | − | CAAAGGGGUCGUGCAUG | 17 | 7785 |
| HSV1-UL54-1161 | − | AAAGGGGUCGUGCAUGA | 17 | 7786 |
| HSV1-UL54-1162 | − | AAGGGGUCGUGCAUGAC | 17 | 7787 |
| HSV1-UL54-1163 | − | AGGGGUCGUGCAUGACC | 17 | 7788 |
| HSV1-UL54-1164 | − | GCUGAUGCGGUCGACCG | 17 | 7789 |
| HSV1-UL54-1165 | − | UGAUGCGGUCGACCGCC | 17 | 7790 |
| HSV1-UL54-1166 | − | AGAUGGAGCGCAGGACC | 17 | 7791 |
| HSV1-UL54-680 | − | UCCGGGGCCGGGGCGCG | 17 | 7443 |
| HSV1-UL54-1168 | − | GGGCCGGGGCGCGGGGG | 17 | 7792 |
| HSV1-UL54-1169 | − | GGCCGGGGCGCGGGGGU | 17 | 7793 |
| HSV1-UL54-1170 | − | GGGCGGGGGGGCAAUCG | 17 | 7794 |
| HSV1-UL54-1171 | − | UGUCCGCUGGCCUCCGG | 17 | 7795 |
| HSV1-UL54-701 | − | GUCCGCUGGCCUCCGGG | 17 | 7464 |
| HSV1-UL54-704 | − | UGGCCUCCGGGUGGGUC | 17 | 7467 |
| HSV1-UL54-1174 | − | GGUGGGUCGGGCUGCUC | 17 | 7796 |
| HSV1-UL54-1175 | − | GUGGGUCGGGCUGCUCA | 17 | 7797 |
| HSV1-UL54-1176 | − | UGCCGCGCCACGCCUCG | 17 | 7798 |
| HSV1-UL54-1177 | − | CAUGGGGGGCGCCGGGG | 17 | 7799 |
| HSV1-UL54-717 | − | CCACCCCGCCCCGGGGC | 17 | 7480 |
| HSV1-UL54-496 | − | CCCGCCCCGGGGCGGGG | 17 | 7259 |
| HSV1-UL54-1180 | − | CCCCGGGGCGGGGUCCC | 17 | 7800 |
| HSV1-UL54-1181 | − | CCCGGGGCGGGGUCCCC | 17 | 7801 |
| HSV1-UL54-1182 | − | GGGCGGGGUCCCCCAGG | 17 | 7802 |
| HSV1-UL54-1183 | − | GGCGGGGUCCCCCAGGG | 17 | 7803 |
| HSV1-UL54-1184 | − | CAGGGUUGCGAUUGGUU | 17 | 7804 |
| HSV1-UL54-1185 | − | AGGGUUGCGAUUGGUUC | 17 | 7805 |
| HSV1-UL54-1186 | − | GGGUUGCGAUUGGUUCU | 17 | 7806 |
| HSV1-UL54-1187 | − | GGUUGCGAUUGGUUCUG | 17 | 7807 |

[0753] Table 4F provides exemplary targeting domains for knocking out the UL54 gene selected according to the first tier parameters. The targeting domains are selected based on location within first 500 bp of the coding sequence of the UL54 gene. It is contemplated herein that the targeting domain hybridizes to the target domain through complementary base pairing. Any of the targeting domains in the table can be used with a N. meningitidis Cas9 molecule that gives double stranded cleavage. Any of the targeting domains in the table can be used with a N. meningitidis Cas9 single-stranded break nucleases (nickases). In an embodiment, dual targeting is used to create two nicks on opposite DNA strands by using N. meningitidis Cas9 nickases with two targeting domains that are complementary to opposite DNA strands, e.g., a gRNA comprising any minus strand targeting domain may be paired any gRNA comprising a plus strand targeting domain provided that the two gRNAs are oriented on the DNA such that PAMs face outward and the distance between the 5′ ends of the gRNAs is 0-50 bp.

TABLE 4F
1st Tier

| | | | Target | |
|---|---|---|---|---|
| | DNA | | Site | |
| gRNA Name | Strand | Targeting Domain | Length | Seq ID |
| HSV1-UL54-274 | − | ACCCCCCCCGCUAAUGA | 20 | 7037 |
| | | CGC | | |
| HSV1-UL54-723 | + | GCGUCAUUAGCGGGGGG | 20 | 7485 |
| | | GGU | | |
| HSV1-UL54-510 | − | CCCCCCGCUAAUGACGC | 17 | 7273 |
| HSV1-UL54-725 | + | GCGUCAUUAGCGGGGGG | 17 | 7486 |

[0754] Table 5A provides exemplary targeting domains for knocking out the UL19 gene selected according to the first tier parameters. The targeting domains bind within the first 500 bp of the coding sequence (e.g., within 500 bp downstream from the start codon), have a high level of orthogonality, and start with a 5′G. It is contemplated herein that in an embodiment the targeting domain hybridizes to the target domain through complementary base pairing. Any of the targeting domains in the table can be used with a S. pyogenes Cas9 molecule that generates a double stranded break (Cas9 nuclease) or a single-stranded break (Cas9 nickase).

TABLE 5A
1st Tier

| | DNA | | Target | Seq ID |
|---|---|---|---|---|
| gRNA Name | Strand | Targeting Domain | Site Length | NO: |
| HSV1-UL19-179 | + | GGACCCGGUCGGCACCA | 17 | 569 |
| HSV1-UL19-136 | + | GAUACCCGUCCCGUCCA | 17 | 540 |
| HSV1-UL19-168 | + | GCAAUACGACCCCAGCA | 17 | 448 |
| HSV1-UL19-3209 | + | GCGAGCGAGCUGUUGGA | 17 | 7808 |
| HSV1-UL19-134 | + | GUUGGAUGGCGCGCAAC | 17 | 422 |
| HSV1-UL19-165 | + | GAAAGCGCACGAGCGAC | 17 | 445 |
| HSV1-UL19-97 | − | GCGACCCUCCGGGAUAC | 17 | 390 |
| HSV1-UL19-121 | − | GAACGCCGCCUUCAGCC | 17 | 529 |
| HSV1-UL19-182 | + | GCGGCAUACCGGUAUCC | 17 | 571 |
| HSV1-UL19-3210 | − | GCUCGCUCGCAACGUCC | 17 | 7809 |
| HSV1-UL19-156 | + | GUUGCUCGAUGGGGUGC | 17 | 558 |
| HSV1-UL19-107 | − | GUCGCUCGUGCGCUUUC | 17 | 400 |
| HSV1-UL19-98 | − | GGGAUACCGGUAUGCCG | 17 | 391 |
| HSV1-UL19-117 | − | GGGGCGCGUACAGUUCG | 17 | 413 |
| HSV1-UL19-105 | − | GAGUUCGACGCCCUGCU | 17 | 398 |
| HSV1-UL19-85 | + | GAGGGACCCGGUCGGCACCA | 20 | 512 |
| HSV1-UL19-3211 | + | GUCGCGGUUGGGAGCGGCCA | 20 | 7810 |
| HSV1-UL19-42 | + | GCCGAUACCCGUCCCGUCCA | 20 | 483 |
| HSV1-UL19-74 | + | GUUGCAAUACGACCCCAGCA | 20 | 440 |
| HSV1-UL19-3212 | + | GUUGCGAGCGAGCUGUUGGA | 20 | 7811 |
| HSV1-UL19-40 | + | GCUGUUGGAUGGCGCGCAAC | 20 | 421 |
| HSV1-UL19-87 | + | GCACCAUGGCCGCGGCAUAC | 20 | 453 |
| HSV1-UL19-26 | − | GACCAAGAUUAUCGACCGCC | 20 | 412 |
| HSV1-UL19-48 | + | GGGCGAUGGCCUCGGUGGCC | 20 | 489 |
| HSV1-UL19-88 | + | GCCGCGGCAUACCGGUAUCC | 20 | 514 |
| HSV1-UL19-78 | + | GUUUGCAUCGGAGCGCACGC | 20 | 506 |
| HSV1-UL19-190 | − | GCAACGUCCAGGCCGUCCUC | 20 | 576 |
| HSV1-UL19-18 | − | GUGCGUGUGUACCAAGUUUC | 20 | 404 |
| HSV1-UL19-65 | + | GGGCCGUCGCGGGCAAUCAG | 20 | 430 |
| HSV1-UL19-8 | − | GUCCCUCCUUAGCACGAUCG | 20 | 465 |
| HSV1-UL19-32 | − | GGCCAUCGCCCUGCUCACGG | 20 | 476 |
| HSV1-UL19-89 | + | GCGGCAUACCGGUAUCCCGG | 20 | 515 |
| HSV1-UL19-61 | + | GUGGGUUGCUCGAUGGGGUG | 20 | 500 |
| HSV1-UL19-76 | + | GUCGUACAGGCUGUUUGCAU | 20 | 442 |
| HSV1-UL19-39 | − | GCCCUGGACGGGACGGGUAU | 20 | 482 |
| HSV1-UL19-70 | + | GUAGGCCAGCUCCGGAAACU | 20 | 436 |
| HSV1-UL19-11 | − | GUCGAGUUCGACGCCCUGCU | 20 | 393 |
| HSV1-UL19-55 | + | GGCCCGGCGGUCGAUAAUCU | 20 | 496 |
| HSV1-UL19-3213 | + | GGACGUUGCGAGCGAGCUGU | 20 | 7812 |

[0755] Table 5B provides exemplary targeting domains for knocking out the UL19 gene selected according to the second tier parameters. The targeting domains bind within the first 500 bp of the coding sequence (e.g., within 500 bp downstream from the start codon) and have a high level of orthogonality. It is contemplated herein that in an embodiment the targeting domain hybridizes to the target domain through complementary base pairing. Any of the targeting domains in the table can be used with a S. pyogenes Cas9 molecule that generates a double stranded break (Cas9 nuclease) or a single-stranded break (Cas9 nickase).

TABLE 5B
2nd Tier

| | DNA | | Target | Seq ID |
|---|---|---|---|---|
| gRNA Name | Strand | Targeting Domain | Site Length | NO: |
| HSV1-UL19-166 | + | AAAGCGCACGAGCGACA | 17 | 446 |
| HSV1-UL19-3214 | − | AUCUCCACGCGACCCCA | 17 | 7813 |
| HSV1-UL19-99 | − | CCGGUAUGCCGCGGCCA | 17 | 392 |
| HSV1-UL19-115 | − | CUGGCCUACAUGAACGA | 17 | 527 |
| HSV1-UL19-118 | − | CCGCUGAUUGCCCGCGA | 17 | 414 |
| HSV1-UL19-176 | + | CUCGAUCGUGCUAAGGA | 17 | 452 |
| HSV1-UL19-184 | + | CAUACCGGUAUCCCGGA | 17 | 573 |
| HSV1-UL19-174 | + | CCACCUCGAUCGUGCUA | 17 | 565 |
| HSV1-UL19-181 | + | CCAUGGCCGCGGCAUAC | 17 | 454 |
| HSV1-UL19-169 | + | CGAACUCGACGUCGUAC | 17 | 449 |
| HSV1-UL19-1442 | + | ACGCCCCGAGGACGGCC | 17 | 1828 |
| HSV1-UL19-135 | + | CGAUACCCGUCCCGUCC | 17 | 424 |
| HSV1-UL19-172 | + | UGCAUCGGAGCGCACGC | 17 | 563 |
| HSV1-UL19-119 | − | CCAAGAUUAUCGACCGC | 17 | 415 |
| HSV1-UL19-160 | + | CGCGGGCAAUCAGCGGC | 17 | 560 |
| HSV1-UL19-104 | − | CGAGUUCGACGCCCUGC | 17 | 524 |
| HSV1-UL19-171 | + | UUGCAUCGGAGCGCACG | 17 | 562 |
| HSV1-UL19-125 | − | CCAUCGCCCUGCUCACG | 17 | 418 |
| HSV1-UL19-102 | − | CCUCCUUAGCACGAUCG | 17 | 522 |
| HSV1-UL19-175 | + | CCUCGAUCGUGCUAAGG | 17 | 566 |
| HSV1-UL19-103 | − | CCUUAGCACGAUCGAGG | 17 | 523 |
| HSV1-UL19-126 | − | CAUCGCCCUGCUCACGG | 17 | 533 |
| HSV1-UL19-106 | − | AGUUCGACGCCCUGCUG | 17 | 399 |
| HSV1-UL19-153 | + | UGUGUGGGUUGCUCGAU | 17 | 428 |
| HSV1-UL19-133 | − | CUGGACGGGACGGGUAU | 17 | 539 |
| HSV1-UL19-582 | − | AACGUCCAGGCCGUCCU | 17 | 968 |
| HSV1-UL19-149 | + | CCGGCGGUCGAUAAUCU | 17 | 553 |
| HSV1-UL19-3215 | + | CGUUGCGAGCGAGCUGU | 17 | 7814 |
| HSV1-UL19-187 | + | CCCGGAGGGUCGCGGUU | 17 | 460 |
| HSV1-UL19-72 | + | CAGAAAGCGCACGAGCGACA | 20 | 438 |
| HSV1-UL19-3216 | − | CCGAUCUCCACGCGACCCCA | 20 | 7815 |
| HSV1-UL19-5 | − | AUACCGGUAUGCCGCGGCCA | 20 | 389 |
| HSV1-UL19-29 | − | CGAGGCCAUCGCCCUGCUCA | 20 | 474 |
| HSV1-UL19-52 | + | CAGGCUGAAGGCGGCGUUCA | 20 | 493 |
| HSV1-UL19-24 | − | CAGCCGCUGAUUGCCCGCGA | 20 | 410 |
| HSV1-UL19-45 | + | CUCCCCCGUGAGCAGGGCGA | 20 | 486 |
| HSV1-UL19-82 | + | CACCUCGAUCGUGCUAAGGA | 20 | 451 |
| HSV1-UL19-90 | + | CGGCAUACCGGUAUCCCGGA | 20 | 516 |
| HSV1-UL19-80 | + | ACGCCACCUCGAUCGUGCUA | 20 | 508 |
| HSV1-UL19-71 | + | CCAGAAAGCGCACGAGCGAC | 20 | 437 |
| HSV1-UL19-3 | − | ACCGCGACCCUCCGGGAUAC | 20 | 387 |
| HSV1-UL19-75 | + | CGUCGAACUCGACGUCGUAC | 20 | 441 |
| HSV1-UL19-7 | − | CCGCGGCCAUGGUGCCGACC | 20 | 464 |
| HSV1-UL19-975 | + | CAAACGCCCCGAGGACGGCC | 20 | 1361 |
| HSV1-UL19-53 | + | UGAAGGCGGCGUUCAGGGCC | 20 | 494 |
| HSV1-UL19-3217 | − | ACAGCUCGCUCGCAACGUCC | 20 | 7816 |
| HSV1-UL19-41 | + | CGCCGAUACCCGUCCCGUCC | 20 | 423 |
| HSV1-UL19-73 | + | UGUUGCAAUACGACCCCAGC | 20 | 439 |
| HSV1-UL19-25 | − | UGACCAAGAUUAUCGACCGC | 20 | 411 |
| HSV1-UL19-66 | + | CGUCGCGGGCAAUCAGCGGC | 20 | 503 |
| HSV1-UL19-10 | − | CGUCGAGUUCGACGCCCUGC | 20 | 467 |
| HSV1-UL19-62 | + | UGGGUUGCUCGAUGGGGUGC | 20 | 501 |
| HSV1-UL19-1 | − | CGCUCCCAACCGCGACCCUC | 20 | 461 |
| HSV1-UL19-69 | + | UCGUUCAUGUAGGCCAGCUC | 20 | 435 |
| HSV1-UL19-15 | − | UCGUGCGCUUUCUGGAGCUC | 20 | 397 |
| HSV1-UL19-51 | + | CCAGGCUGAAGGCGGCGUUC | 20 | 492 |
| HSV1-UL19-13 | − | CCUGUCGCUCGUGCGCUUUC | 20 | 395 |
| HSV1-UL19-77 | + | UGUUUGCAUCGGAGCGCACG | 20 | 505 |
| HSV1-UL19-31 | − | AGGCCAUCGCCCUGCUCACG | 20 | 417 |
| HSV1-UL19-86 | + | CCCGGUCGGCACCAUGGCCG | 20 | 513 |
| HSV1-UL19-4 | − | UCCGGGAUACCGGUAUGCCG | 20 | 388 |
| HSV1-UL19-191 | − | CAACGUCCAGGCCGUCCUCG | 20 | 577 |
| HSV1-UL19-63 | + | CGAUGGGGUGCGGGCCGUCG | 20 | 502 |
| HSV1-UL19-91 | + | ACCGGUAUCCCGGAGGGUCG | 20 | 455 |
| HSV1-UL19-23 | − | CGAGGGGCGCGUACAGUUCG | 20 | 409 |
| HSV1-UL19-81 | + | CCACCUCGAUCGUGCUAAGG | 20 | 509 |
| HSV1-UL19-9 | − | CCUCCUUAGCACGAUCGAGG | 20 | 466 |
| HSV1-UL19-54 | + | AGGCGGCGUUCAGGGCCCGG | 20 | 495 |
| HSV1-UL19-17 | − | UCUGGAGCUCGGGUUGUCGG | 20 | 403 |
| HSV1-UL19-33 | − | CAUCGCCCUGCUCACGGGGG | 20 | 419 |
| HSV1-UL19-67 | + | CGCGGGCAAUCAGCGGCUGG | 20 | 433 |
| HSV1-UL19-3218 | + | CGCGGUUGGGAGCGGCCAUG | 20 | 7817 |
| HSV1-UL19-60 | + | UGUGUGUGGGUUGCUCGAUG | 20 | 499 |
| HSV1-UL19-12 | − | UCGAGUUCGACGCCCUGCUG | 20 | 394 |
| HSV1-UL19-3219 | + | UCGCGGUUGGGAGCGGCCAU | 20 | 7818 |
| HSV1-UL19-59 | + | UUGUGUGUGGGUUGCUCGAU | 20 | 426 |
| HSV1-UL19-189 | − | CGCAACGUCCAGGCCGUCCU | 20 | 575 |
| HSV1-UL19-14 | − | CUCGUGCGCUUUCUGGAGCU | 20 | 396 |
| HSV1-UL19-68 | + | UACGCGCCCCUCGUUCAUGU | 20 | 504 |
| HSV1-UL19-16 | − | CUUUCUGGAGCUCGGGUUGU | 20 | 468 |
| HSV1-UL19-93 | + | UAUCCCGGAGGGUCGCGGUU | 20 | 457 |

[0756] Table 5C provides exemplary targeting domains for knocking out the UL19 gene selected according to the third tier parameters. The targeting domains bind within the first 500 bp of the coding sequence (e.g., within 500 bp downstream from the start codon) and start with a 5′G. It is contemplated herein that in an embodiment the targeting domain hybridizes to the target domain through complementary base pairing. Any of the targeting domains in the table can be used with a S. pyogenes Cas9 molecule that generates a double stranded break (Cas9 nuclease) or a single-stranded break (Cas9 nickase).

TABLE 5C
3rd Tier

| | DNA | | Target | Seq ID |
|---|---|---|---|---|
| gRNA Name | Strand | Targeting Domain | Site Length | NO: |
| HSV1-UL19-3220 | + | GCGGUUGGGAGCGGCCA | 17 | 7819 |
| HSV1-UL19-138 | + | GGCCUCCCCCGUGAGCA | 17 | 542 |
| HSV1-UL19-123 | − | GGCCAUCGCCCUGCUCA | 17 | 531 |
| HSV1-UL19-146 | + | GCUGAAGGCGGCGUUCA | 17 | 550 |
| HSV1-UL19-152 | + | GUGUGUGGGUUGCUCGA | 17 | 427 |
| HSV1-UL19-131 | − | GGAGGCCCUGGACGGGA | 17 | 537 |
| HSV1-UL19-173 | + | GGGAAAAAAAAUCAAAC | 17 | 564 |
| HSV1-UL19-124 | − | GCCAUCGCCCUGCUCAC | 17 | 532 |
| HSV1-UL19-100 | − | GCGGCCAUGGUGCCGAC | 17 | 520 |
| HSV1-UL19-132 | − | GAGGCCCUGGACGGGAC | 17 | 538 |
| HSV1-UL19-128 | − | GCUCACGGGGGAGGCCC | 17 | 534 |
| HSV1-UL19-137 | + | GGGCCUCCCCCGUGAGC | 17 | 541 |
| HSV1-UL19-158 | + | GGGGUGCGGGCCGUCGC | 17 | 431 |
| HSV1-UL19-145 | + | GGCUGAAGGCGGCGUUC | 17 | 549 |
| HSV1-UL19-114 | − | GCUGGCCUACAUGAACG | 17 | 526 |
| HSV1-UL19-180 | + | GGUCGGCACCAUGGCCG | 17 | 570 |
| HSV1-UL19-3221 | + | GCGGCCAUGGGGUCGCG | 17 | 7820 |
| HSV1-UL19-185 | + | GGUAUCCCGGAGGGUCG | 17 | 458 |
| HSV1-UL19-144 | + | GGUGGCCAGGCUGAAGG | 17 | 548 |
| HSV1-UL19-183 | + | GCAUACCGGUAUCCCGG | 17 | 572 |
| HSV1-UL19-111 | − | GGAGCUCGGGUUGUCGG | 17 | 406 |
| HSV1-UL19-161 | + | GGGCAAUCAGCGGCUGG | 17 | 434 |
| HSV1-UL19-3222 | + | GGUUGGGAGCGGCCAUG | 17 | 7821 |
| HSV1-UL19-154 | + | GUGUGGGUUGCUCGAUG | 17 | 556 |
| HSV1-UL19-155 | + | GGUUGCUCGAUGGGGUG | 17 | 557 |
| HSV1-UL19-150 | + | GGUCAUGUAAUUGUGUG | 17 | 554 |
| HSV1-UL19-170 | + | GUACAGGCUGUUUGCAU | 17 | 450 |
| HSV1-UL19-164 | + | GGCCAGCUCCGGAAACU | 17 | 444 |
| HSV1-UL19-140 | + | GAGCAGGGCGAUGGCCU | 17 | 544 |
| HSV1-UL19-108 | − | GUGCGCUUUCUGGAGCU | 17 | 401 |
| HSV1-UL19-162 | + | GCGCCCCUCGUUCAUGU | 17 | 561 |
| HSV1-UL19-151 | + | GUCAUGUAAUUGUGUGU | 17 | 555 |
| HSV1-UL19-21 | − | GAGCUGGCCUACAUGAACGA | 20 | 470 |
| HSV1-UL19-37 | − | GGGGGAGGCCCUGGACGGGA | 20 | 480 |
| HSV1-UL19-49 | + | GGCCUCGGUGGCCAGGCUGA | 20 | 490 |
| HSV1-UL19-30 | − | GAGGCCAUCGCCCUGCUCAC | 20 | 475 |
| HSV1-UL19-6 | − | GCCGCGGCCAUGGUGCCGAC | 20 | 463 |
| HSV1-UL19-38 | − | GGGGAGGCCCUGGACGGGAC | 20 | 481 |
| HSV1-UL19-83 | + | GAUCGUGCUAAGGAGGGACC | 20 | 510 |
| HSV1-UL19-2 | − | GCUCCCAACCGCGACCCUCC | 20 | 462 |
| HSV1-UL19-19 | − | GUGUACCAAGUUUCCGGAGC | 20 | 405 |
| HSV1-UL19-64 | + | GAUGGGGUGCGGGCCGUCGC | 20 | 429 |
| HSV1-UL19-20 | − | GGAGCUGGCCUACAUGAACG | 20 | 469 |
| HSV1-UL19-3223 | + | GGAGCGGCCAUGGGGUCGCG | 20 | 7822 |
| HSV1-UL19-47 | + | GAGCAGGGCGAUGGCCUCGG | 20 | 488 |
| HSV1-UL19-84 | + | GUGCUAAGGAGGGACCCGGU | 20 | 511 |
| HSV1-UL19-92 | + | GUAUCCCGGAGGGUCGCGGU | 20 | 456 |

[0757] Table 5D provides exemplary targeting domains for knocking out the UL19 gene selected according to the fourth tier parameters. The targeting domains bind within the first 500 bp of the coding sequence (e.g., within 500 bp downstream from the start codon). It is contemplated herein that in an embodiment the targeting domain hybridizes to the target domain through complementary base pairing. Any of the targeting domains in the table can be used with a S. pyogenes Cas9 molecule that generates a double stranded break (Cas9 nuclease) or a single-stranded break (Cas9 nickase).

TABLE 5D
4th Tier

| | DNA | | Target | Seq ID |
|---|---|---|---|---|
| gRNA Name | Strand | Targeting Domain | Site Length | NO: |
| HSV1-UL19-139 | + | CCCCGUGAGCAGGGCGA | 17 | 543 |
| HSV1-UL19-129 | − | ACGGGGGAGGCCCUGGA | 17 | 535 |
| HSV1-UL19-143 | + | CUCGGUGGCCAGGCUGA | 17 | 547 |
| HSV1-UL19-130 | − | CGGGGGAGGCCCUGGAC | 17 | 536 |
| HSV1-UL19-101 | − | CGGCCAUGGUGCCGACC | 17 | 521 |
| HSV1-UL19-177 | + | CGUGCUAAGGAGGGACC | 17 | 567 |
| HSV1-UL19-120 | − | CAAGAUUAUCGACCGCC | 17 | 416 |
| HSV1-UL19-147 | + | AGGCGGCGUUCAGGGCC | 17 | 551 |
| HSV1-UL19-142 | + | CGAUGGCCUCGGUGGCC | 17 | 546 |
| HSV1-UL19-96 | − | CCCAACCGCGACCCUCC | 17 | 519 |
| HSV1-UL19-167 | + | UGCAAUACGACCCCAGC | 17 | 447 |
| HSV1-UL19-113 | − | UACCAAGUUUCCGGAGC | 17 | 408 |
| HSV1-UL19-95 | − | UCCCAACCGCGACCCUC | 17 | 518 |
| HSV1-UL19-583 | − | ACGUCCAGGCCGUCCUC | 17 | 969 |
| HSV1-UL19-163 | + | UUCAUGUAGGCCAGCUC | 17 | 443 |
| HSV1-UL19-109 | − | UGCGCUUUCUGGAGCUC | 17 | 402 |
| HSV1-UL19-112 | − | CGUGUGUACCAAGUUUC | 17 | 407 |
| HSV1-UL19-159 | + | CCGUCGCGGGCAAUCAG | 17 | 432 |
| HSV1-UL19-116 | − | UGGCCUACAUGAACGAG | 17 | 528 |
| HSV1-UL19-188 | + | AGGGUCGCGGUUGGGAG | 17 | 574 |
| HSV1-UL19-122 | − | CUUCAGCCUGGCCACCG | 17 | 530 |
| HSV1-UL19-584 | − | CGUCCAGGCCGUCCUCG | 17 | 970 |
| HSV1-UL19-157 | + | UGGGGUGCGGGCCGUCG | 17 | 559 |
| HSV1-UL19-148 | + | CGGCGUUCAGGGCCCGG | 17 | 552 |
| HSV1-UL19-141 | + | CAGGGCGAUGGCCUCGG | 17 | 545 |
| HSV1-UL19-127 | − | CGCCCUGCUCACGGGGG | 17 | 420 |
| HSV1-UL19-3224 | + | CGGUUGGGAGCGGCCAU | 17 | 7823 |
| HSV1-UL19-3225 | + | UGGGGUCGCGUGGAGAU | 17 | 7824 |
| HSV1-UL19-178 | + | CUAAGGAGGGACCCGGU | 17 | 568 |
| HSV1-UL19-186 | + | UCCCGGAGGGUCGCGGU | 17 | 459 |
| HSV1-UL19-110 | − | UCUGGAGCUCGGGUUGU | 17 | 525 |
| HSV1-UL19-44 | + | CAGGGCCUCCCCCGUGAGCA | 20 | 485 |
| HSV1-UL19-58 | + | AUUGUGUGUGGGUUGCUCGA | 20 | 425 |
| HSV1-UL19-35 | − | CUCACGGGGGAGGCCCUGGA | 20 | 478 |
| HSV1-UL19-79 | + | CGCGGGAAAAAAAAUCAAAC | 20 | 507 |
| HSV1-UL19-36 | − | UCACGGGGGAGGCCCUGGAC | 20 | 479 |
| HSV1-UL19-34 | − | CCUGCUCACGGGGGAGGCCC | 20 | 477 |
| HSV1-UL19-27 | − | CCUGAACGCCGCCUUCAGCC | 20 | 472 |
| HSV1-UL19-43 | + | CCAGGGCCUCCCCCGUGAGC | 20 | 484 |
| HSV1-UL19-22 | − | AGCUGGCCUACAUGAACGAG | 20 | 471 |
| HSV1-UL19-94 | + | CGGAGGGUCGCGGUUGGGAG | 20 | 517 |
| HSV1-UL19-28 | − | CGCCUUCAGCCUGGCCACCG | 20 | 473 |
| HSV1-UL19-50 | + | CUCGGUGGCCAGGCUGAAGG | 20 | 491 |
| HSV1-UL19-56 | + | CUUGGUCAUGUAAUUGUGUG | 20 | 497 |
| HSV1-UL19-3226 | + | CCAUGGGGUCGCGUGGAGAU | 20 | 7825 |
| HSV1-UL19-46 | + | CGUGAGCAGGGCGAUGGCCU | 20 | 487 |
| HSV1-UL19-57 | + | UUGGUCAUGUAAUUGUGUGU | 20 | 498 |

[0758] Table 5E provides exemplary targeting domains for knocking out the UL19 gene selected according to the fifth tier parameters. The targeting domains fall in the coding sequence of the gene, downstream of the first 500 bp of coding sequence (e.g., anywhere from +500 (relative to the start codon) to the stop codon of the gene). It is contemplated herein that in an embodiment the targeting domain hybridizes to the target domain through complementary base pairing. Any of the targeting domains in the table can be used with a S. pyogenes Cas9 molecule that generates a double stranded break (Cas9 nuclease) or a single-stranded break (Cas9 nickase).

TABLE 5E
5th Tier

| | DNA | | Target Site | Seq ID |
|---|---|---|---|---|
| gRNA Name | Strand | Targeting Domain | Length | NO: |
| HSV1-UL19-838 | − | GACCAUACCAUCCAAAA | 17 | 1224 |
| HSV1-UL19-588 | − | GCACGUGCUGCUGGAAA | 17 | 974 |
| HSV1-UL19-827 | − | CAUGGCCGAACGCACAA | 17 | 1213 |
| HSV1-UL19-818 | − | AACGCCAUGUUUCACAA | 17 | 1204 |
| HSV1-UL19-591 | − | CAACGAUACCUGGACAA | 17 | 977 |
| HSV1-UL19-967 | − | CUCCGCAGUGCCCGCAA | 17 | 1353 |
| HSV1-UL19-947 | − | GGGGCCUACCACCUCAA | 17 | 1333 |
| HSV1-UL19-973 | − | GACGCAUCCCCGCUCAA | 17 | 1359 |
| HSV1-UL19-1554 | + | CAACGUUCAUCAGCGAA | 17 | 1940 |
| HSV1-UL19-1617 | + | GUCGAACGCCCCGCGAA | 17 | 2003 |
| HSV1-UL19-655 | − | UCAAUCCGGUCAUGGAA | 17 | 1041 |
| HSV1-UL19-624 | − | GGCGAGAUGGUCCUGAA | 17 | 1010 |
| HSV1-UL19-720 | − | ACCUGGCGCGUGGUGAA | 17 | 1106 |
| HSV1-UL19-944 | − | GGGGACCUGCUCUAUAA | 17 | 1330 |
| HSV1-UL19-1712 | + | GCGCCCGUUGUGAAACA | 17 | 2098 |
| HSV1-UL19-826 | − | GGUGCUGGCCCACAACA | 17 | 1212 |
| HSV1-UL19-817 | − | CAAUCUGGUGGCCAACA | 17 | 1203 |
| HSV1-UL19-808 | − | CGCCACCCUGCAGAACA | 17 | 1194 |
| HSV1-UL19-1823 | + | CUGGGCGCACCCGAACA | 17 | 2209 |
| HSV1-UL19-1829 | + | GGCGAUAAACUCACACA | 17 | 2215 |
| HSV1-UL19-1886 | + | UCCUGAAACAGGCCACA | 17 | 2272 |
| HSV1-UL19-1552 | + | CAGCGAAGGGUGGCACA | 17 | 1938 |
| HSV1-UL19-890 | − | CAACCCCGUCACCGACA | 17 | 1276 |
| HSV1-UL19-1834 | + | GUUGACGUCGGUCGACA | 17 | 2220 |
| HSV1-UL19-929 | − | CGUUUACGCGGGGGACA | 17 | 1315 |
| HSV1-UL19-743 | − | CUGCAGGCCGCCAUACA | 17 | 1129 |
| HSV1-UL19-1665 | + | ACAUGCCGCCGCGUACA | 17 | 2051 |
| HSV1-UL19-1812 | + | CGCGUUCCGCAGGUACA | 17 | 2198 |
| HSV1-UL19-1635 | + | CACCAGGUCCCGGUACA | 17 | 2021 |
| HSV1-UL19-1516 | + | GUCCAUGGCGCCCACCA | 17 | 1902 |
| HSV1-UL19-594 | − | CGGCCGCCUGGCCACCA | 17 | 980 |
| HSV1-UL19-610 | − | GCUCGUGGACCUCACCA | 17 | 996 |
| HSV1-UL19-934 | − | GCCCUCAUGUACGACCA | 17 | 1320 |
| HSV1-UL19-1459 | + | CUUUAGCUCGGCGACCA | 17 | 1845 |
| HSV1-UL19-1759 | + | CAGAGCCGGGGGGACCA | 17 | 2145 |
| HSV1-UL19-915 | − | CGCGCAGGGAUGGACCA | 17 | 1301 |
| HSV1-UL19-1859 | + | AAUCGCUGCGACGCCCA | 17 | 2245 |
| HSV1-UL19-1522 | + | CGGAUUGAACAGGCCCA | 17 | 1908 |
| HSV1-UL19-688 | − | GGGCAGCGCCUGGCCCA | 17 | 1074 |
| HSV1-UL19-1449 | + | CGGCAACAACAAAGCCA | 17 | 1835 |
| HSV1-UL19-736 | − | GGUGGGACGCCACGCCA | 17 | 1122 |
| HSV1-UL19-1601 | + | CGCCGGACAUAGCGCCA | 17 | 1987 |
| HSV1-UL19-650 | − | CCCCCUGGUGGGCGCCA | 17 | 1036 |
| HSV1-UL19-1774 | + | CUGAUGAUGCAAGGCCA | 17 | 2160 |
| HSV1-UL19-1473 | + | CAGACGGGGCACGGCCA | 17 | 1859 |
| HSV1-UL19-938 | − | CCGGGCCUUCGCGGCCA | 17 | 1324 |
| HSV1-UL19-1624 | + | GACCACGAGCCGGGCCA | 17 | 2010 |
| HSV1-UL19-1609 | + | GAUGGUGGCGGGGGCCA | 17 | 1995 |
| HSV1-UL19-1638 | + | AUCAACCAGCUGGGCCA | 17 | 2024 |
| HSV1-UL19-889 | − | CACCGCCGUCGUGGCCA | 17 | 1275 |
| HSV1-UL19-1507 | + | GUAGAUGCGCUUCUCCA | 17 | 1893 |
| HSV1-UL19-1518 | + | GACGAACGUCAGGUCCA | 17 | 1904 |
| HSV1-UL19-1657 | + | GUCGCGAUGGCGGUCCA | 17 | 2043 |
| HSV1-UL19-958 | − | GGGUUCGGCGGUGUCCA | 17 | 1344 |
| HSV1-UL19-1867 | + | GUAAAGAACUUAAAGCA | 17 | 2253 |
| HSV1-UL19-1715 | + | CACCUGCAGCGUGAGCA | 17 | 2101 |
| HSV1-UL19-913 | − | AGGUGCCGCGGCGCGCA | 17 | 1299 |
| HSV1-UL19-1754 | + | CCGCGACAGGUCGCGCA | 17 | 2140 |
| HSV1-UL19-1495 | + | GUCGUCCAGACUUCGCA | 17 | 1881 |
| HSV1-UL19-586 | − | GGCGUUUGAGCGCGGCA | 17 | 972 |
| HSV1-UL19-1474 | + | AUGCGUCAGACGGGGCA | 17 | 1860 |
| HSV1-UL19-631 | − | GGCGCUCGUGAUGGGCA | 17 | 1017 |
| HSV1-UL19-601 | − | GAGCUUUUUCCUGGGCA | 17 | 987 |
| HSV1-UL19-1775 | + | CUUGAGCUGAUGAUGCA | 17 | 2161 |
| HSV1-UL19-1687 | + | GACCACCAUGUUCUGCA | 17 | 2073 |
| HSV1-UL19-756 | − | CCUUCCCGAGGAGUGCA | 17 | 1142 |
| HSV1-UL19-1706 | + | CAGAUUGGCCGGGUGCA | 17 | 2092 |
| HSV1-UL19-1678 | + | GUAAAUCUUGUGGUGCA | 17 | 2064 |
| HSV1-UL19-1838 | + | CGUCCCCGGGGGUUGCA | 17 | 2224 |
| HSV1-UL19-1655 | + | GGCCGCGCGCCGCAUCA | 17 | 2041 |
| HSV1-UL19-972 | − | UGACGCAUCCCCGCUCA | 17 | 1358 |
| HSV1-UL19-856 | − | GCUGACCUACGCGCUCA | 17 | 1242 |
| HSV1-UL19-1700 | + | GUGCGCGGGGUCCGUCA | 17 | 2086 |
| HSV1-UL19-1642 | + | CAGCUCCGGGCCGGUCA | 17 | 2028 |
| HSV1-UL19-654 | − | CCUGUUCAAUCCGGUCA | 17 | 1040 |
| HSV1-UL19-628 | − | CGGGGCCAACCUGGUCA | 17 | 1014 |
| HSV1-UL19-861 | − | GCAUCAUCAGCUCAAGA | 17 | 1247 |
| HSV1-UL19-1477 | + | UGUCGGCAUGCGUCAGA | 17 | 1863 |
| HSV1-UL19-1682 | + | GCAGCGGCCCCGCGAGA | 17 | 2068 |
| HSV1-UL19-623 | − | GGUGACGUACGGCGAGA | 17 | 1009 |
| HSV1-UL19-1809 | + | CCGCGUUGUCCAGGAGA | 17 | 2195 |
| HSV1-UL19-954 | − | GCGCCUGAUCGUGGAGA | 17 | 1340 |
| HSV1-UL19-788 | − | GACUUCAACCGCAACGA | 17 | 1174 |
| HSV1-UL19-1653 | + | GUCACAGUCCCACACGA | 17 | 2039 |
| HSV1-UL19-1793 | + | GGUUGCCGUGGCCACGA | 17 | 2179 |
| HSV1-UL19-1769 | + | GCGGACGUGCUGCACGA | 17 | 2155 |
| HSV1-UL19-1780 | + | GCGGUCCUGUCGGACGA | 17 | 2166 |
| HSV1-UL19-1506 | + | GACCAGCUUCUCGCCGA | 17 | 1892 |
| HSV1-UL19-692 | − | CCCACGGGCGGGUCCGA | 17 | 1078 |
| HSV1-UL19-1555 | + | UCAACGUUCAUCAGCGA | 17 | 1941 |
| HSV1-UL19-1855 | + | GUUGGCCGUGGCCGCGA | 17 | 2241 |
| HSV1-UL19-1660 | + | UAACCCGGCAGUCGCGA | 17 | 2046 |
| HSV1-UL19-1615 | + | CCCGCGAACGGCGGCGA | 17 | 2001 |
| HSV1-UL19-1466 | + | CACGAGCCAGGCCUCGA | 17 | 1852 |
| HSV1-UL19-616 | − | CGCGGGCGGCCGGUCGA | 17 | 1002 |
| HSV1-UL19-832 | − | AACAUGCGCAUAUUCGA | 17 | 1218 |
| HSV1-UL19-1560 | + | CGGAUUGGCGGCUUCGA | 17 | 1946 |
| HSV1-UL19-931 | − | UACGCGGGGGACAAGGA | 17 | 1317 |
| HSV1-UL19-1487 | + | GUCCUCCACUUUCAGGA | 17 | 1873 |
| HSV1-UL19-1443 | + | CUCAAACGCCCCGAGGA | 17 | 1829 |
| HSV1-UL19-1896 | + | GCGGGCACUGCGGAGGA | 17 | 2282 |
| HSV1-UL19-1471 | + | CGGGGCACGGCCACGGA | 17 | 1857 |
| HSV1-UL19-695 | − | GUCCGAUGGGUCGCGGA | 17 | 1081 |
| HSV1-UL19-1795 | + | GGUGACGGGGUUGCGGA | 17 | 2181 |
| HSV1-UL19-914 | − | GCCGCGGCGCGCAGGGA | 17 | 1300 |
| HSV1-UL19-1777 | + | UGAACCCAAACCCGGGA | 17 | 2163 |
| HSV1-UL19-1852 | + | GCCGCGAAGGCCCGGGA | 17 | 2238 |
| HSV1-UL19-1542 | + | CAGCUGGCGGGGCGGGA | 17 | 1928 |
| HSV1-UL19-1632 | + | CCAUGCACUCCUCGGGA | 17 | 2018 |
| HSV1-UL19-1820 | + | GCACCCGAACACGGGGA | 17 | 2206 |
| HSV1-UL19-1738 | + | CAGCGCGUGGACGGGGA | 17 | 2124 |
| HSV1-UL19-665 | − | GCUGUUUUUUUGGGGGA | 17 | 1051 |
| HSV1-UL19-1801 | + | GGUAAAAGUUUUGGGGA | 17 | 2187 |
| HSV1-UL19-822 | − | GGGCGCGUGGUAGUGGA | 17 | 1208 |
| HSV1-UL19-1742 | + | GGCGAACAGCGCGUGGA | 17 | 2128 |
| HSV1-UL19-3209 | + | GCGAGCGAGCUGUUGGA | 17 | 7808 |
| HSV1-UL19-1734 | + | AUAGUCGCCAUUUUGGA | 17 | 2120 |
| HSV1-UL19-1847 | + | GCCGUGGUCGUACAUGA | 17 | 2233 |
| HSV1-UL19-836 | − | CGCCGGAAUCCUGCUGA | 17 | 1222 |
| HSV1-UL19-800 | − | GAUUUACUACUACGUGA | 17 | 1186 |
| HSV1-UL19-813 | − | CCCCAGCGACCCCGUGA | 17 | 1199 |
| HSV1-UL19-629 | − | GGUCACGGCGCUCGUGA | 17 | 1015 |
| HSV1-UL19-1799 | + | GUUGCCCAUGUCGGUGA | 17 | 2185 |
| HSV1-UL19-622 | − | GACGUGCCGGUGACGUA | 17 | 1008 |
| HSV1-UL19-1563 | + | GCCACGUACGCCCCGUA | 17 | 1949 |
| HSV1-UL19-676 | − | GAAGCCGCCAAUCCGUA | 17 | 1062 |
| HSV1-UL19-941 | − | UCGCAGCGAUUUUCGUA | 17 | 1327 |
| HSV1-UL19-1512 | + | GCGCCCACCAGGGGGUA | 17 | 1898 |
| HSV1-UL19-1733 | + | CGCCAUUUUGGAUGGUA | 17 | 2119 |
| HSV1-UL19-1623 | + | GUGCUCGCUGCCGUGUA | 17 | 2009 |
| HSV1-UL19-1556 | + | CGACGGGGUCGCGGUUA | 17 | 1942 |
| HSV1-UL19-876 | − | GUGGCCCGGCACGAAAC | 17 | 1262 |
| HSV1-UL19-1887 | + | GGUAGGCCUCCUGAAAC | 17 | 2273 |
| HSV1-UL19-819 | − | ACGCCAUGUUUCACAAC | 17 | 1205 |
| HSV1-UL19-968 | − | UCCGCAGUGCCCGCAAC | 17 | 1354 |
| HSV1-UL19-134 | + | GUUGGAUGGCGCGCAAC | 17 | 422 |
| HSV1-UL19-948 | − | GGGCCUACCACCUCAAC | 17 | 1334 |
| HSV1-UL19-638 | − | AGCAGCUCGACCUGAAC | 17 | 1024 |
| HSV1-UL19-625 | − | GCGAGAUGGUCCUGAAC | 17 | 1011 |
| HSV1-UL19-1524 | + | CCAUGACCGGAUUGAAC | 17 | 1910 |
| HSV1-UL19-945 | − | GGGACCUGCUCUAUAAC | 17 | 1331 |
| HSV1-UL19-1822 | + | UGGGCGCACCCGAACAC | 17 | 2208 |
| HSV1-UL19-1885 | + | CCUGAAACAGGCCACAC | 17 | 2271 |
| HSV1-UL19-1833 | + | UUGACGUCGGUCGACAC | 17 | 2219 |
| HSV1-UL19-1664 | + | CAUGCCGCCGCGUACAC | 17 | 2050 |
| HSV1-UL19-1858 | + | AUCGCUGCGACGCCCAC | 17 | 2244 |
| HSV1-UL19-689 | − | GGCAGCGCCUGGCCCAC | 17 | 1075 |
| HSV1-UL19-1773 | + | UGAUGAUGCAAGGCCAC | 17 | 2159 |
| HSV1-UL19-1865 | + | AAGCAGGGGCUGAGCAC | 17 | 2251 |
| HSV1-UL19-793 | − | CGGAUGACCGGCCGCAC | 17 | 1179 |
| HSV1-UL19-1628 | + | AGUAGCUGGUGAUGCAC | 17 | 2014 |
| HSV1-UL19-1491 | + | AUCUCGCCGUACGUCAC | 17 | 1877 |
| HSV1-UL19-1699 | + | UGCGCGGGGUCCGUCAC | 17 | 2085 |
| HSV1-UL19-862 | − | CAUCAUCAGCUCAAGAC | 17 | 1248 |
| HSV1-UL19-1476 | + | GUCGGCAUGCGUCAGAC | 17 | 1862 |
| HSV1-UL19-1551 | + | UCGCGUGUUCCAGAGAC | 17 | 1937 |
| HSV1-UL19-955 | − | CGCCUGAUCGUGGAGAC | 17 | 1341 |
| HSV1-UL19-1768 | + | CGGACGUGCUGCACGAC | 17 | 2154 |
| HSV1-UL19-867 | − | GUUCACCGUCGUCCGAC | 17 | 1253 |
| HSV1-UL19-1756 | + | GGGGGACCUGCCGCGAC | 17 | 2142 |
| HSV1-UL19-1479 | + | ACGAGCACCCCGUCGAC | 17 | 1865 |
| HSV1-UL19-617 | − | GCGGGCGGCCGGUCGAC | 17 | 1003 |
| HSV1-UL19-833 | − | ACAUGCGCAUAUUCGAC | 17 | 1219 |
| HSV1-UL19-1559 | + | GGAUUGGCGGCUUCGAC | 17 | 1945 |
| HSV1-UL19-799 | − | CGCACCGGGGGGCGGAC | 17 | 1185 |
| HSV1-UL19-974 | − | AUCCCCGCUCAAGGGAC | 17 | 1360 |
| HSV1-UL19-1851 | + | CCGCGAAGGCCCGGGAC | 17 | 2237 |
| HSV1-UL19-1819 | + | CACCCGAACACGGGGAC | 17 | 2205 |
| HSV1-UL19-823 | − | GGCGCGUGGUAGUGGAC | 17 | 1209 |
| HSV1-UL19-1741 | + | GCGAACAGCGCGUGGAC | 17 | 2127 |
| HSV1-UL19-1525 | + | GCAAACCGUUCCAUGAC | 17 | 1911 |
| HSV1-UL19-792 | − | CGGACGCCGCGGAUGAC | 17 | 1178 |
| HSV1-UL19-764 | − | GAUGACUUUACCCUGAC | 17 | 1150 |
| HSV1-UL19-1798 | + | UUGCCCAUGUCGGUGAC | 17 | 2184 |
| HSV1-UL19-747 | − | AGUGCAUCACCAGCUAC | 17 | 1133 |
| HSV1-UL19-677 | − | AAGCCGCCAAUCCGUAC | 17 | 1063 |
| HSV1-UL19-942 | − | CGCAGCGAUUUUCGUAC | 17 | 1328 |
| HSV1-UL19-757 | − | AGUGCAUGGCCGUGUAC | 17 | 1143 |
| HSV1-UL19-1779 | + | GACGGUGAACCCAAACC | 17 | 2165 |
| HSV1-UL19-697 | − | GCCCGACAACGCCAACC | 17 | 1083 |
| HSV1-UL19-627 | − | CCUGAACGGGGCCAACC | 17 | 1013 |
| HSV1-UL19-1661 | + | GGCCCCCCGCGCUAACC | 17 | 2047 |
| HSV1-UL19-1517 | + | GGUCCAUGGCGCCCACC | 17 | 1903 |
| HSV1-UL19-1637 | + | CCUCGACGUGCGCCACC | 17 | 2023 |
| HSV1-UL19-718 | − | GGGAGAUCCAGGCCACC | 17 | 1104 |
| HSV1-UL19-660 | − | CCCCGCCCCCGGCCACC | 17 | 1046 |
| HSV1-UL19-1785 | + | UUUCGUGCCGGGCCACC | 17 | 2171 |
| HSV1-UL19-593 | − | ACGGCCGCCUGGCCACC | 17 | 979 |
| HSV1-UL19-1550 | + | GAGACAGGCGCAGCACC | 17 | 1936 |
| HSV1-UL19-794 | − | GGAUGACCGGCCGCACC | 17 | 1180 |
| HSV1-UL19-1825 | + | CUGCGCGCCGCGGCACC | 17 | 2211 |
| HSV1-UL19-814 | − | CGCGCACCCCCUGCACC | 17 | 1200 |
| HSV1-UL19-771 | − | UCACCUAAUGCGAGACC | 17 | 1157 |
| HSV1-UL19-1460 | + | GCUUUAGCUCGGCGACC | 17 | 1846 |
| HSV1-UL19-759 | − | GGCCGUGUACCGGGACC | 17 | 1145 |
| HSV1-UL19-1760 | + | CCAGAGCCGGGGGGACC | 17 | 2146 |
| HSV1-UL19-884 | − | GCGCGCGAACGUGGACC | 17 | 1270 |
| HSV1-UL19-1494 | + | UCACGAGCGCCGUGACC | 17 | 1880 |
| HSV1-UL19-590 | − | GCCGAUGCAACGAUACC | 17 | 976 |
| HSV1-UL19-740 | − | CGACGACCGCAACUACC | 17 | 1126 |
| HSV1-UL19-758 | − | GUGCAUGGCCGUGUACC | 17 | 1144 |
| HSV1-UL19-892 | − | UCCCCAAAACUUUUACC | 17 | 1278 |
| HSV1-UL19-1778 | + | ACGGUGAACCCAAACCC | 17 | 2164 |
| HSV1-UL19-789 | − | GCUGCUGCACAACACCC | 17 | 1175 |
| HSV1-UL19-1456 | + | GGUCGCCCGGGCCACCC | 17 | 1842 |
| HSV1-UL19-1883 | + | ACGAGUUCGCGGCACCC | 17 | 2269 |
| HSV1-UL19-598 | − | GGUGGCCCGGGCGACCC | 17 | 984 |
| HSV1-UL19-696 | − | GGAAGGCCAGAUGACCC | 17 | 1082 |
| HSV1-UL19-918 | − | GCCGGCCCUGCAACCCC | 17 | 1304 |
| HSV1-UL19-1882 | + | CGAGUUCGCGGCACCCC | 17 | 2268 |
| HSV1-UL19-919 | − | CCGGCCCUGCAACCCCC | 17 | 1305 |
| HSV1-UL19-647 | − | CAACGUUCCCUACCCCC | 17 | 1033 |
| HSV1-UL19-1589 | + | GGGGGAACGUCCCCCCC | 17 | 1975 |
| HSV1-UL19-960 | − | CAGUUUAAGCGCCCCCC | 17 | 1346 |
| HSV1-UL19-1677 | + | CGGUCCAGUCCGCCCCC | 17 | 2063 |
| HSV1-UL19-959 | − | ACAGUUUAAGCGCCCCC | 17 | 1345 |
| HSV1-UL19-1572 | + | GGCCAGGCGCUGCCCCC | 17 | 1958 |
| HSV1-UL19-1595 | + | UGGCCUGGAUCUCCCCC | 17 | 1981 |
| HSV1-UL19-846 | − | GUCGCGGCAGGUCCCCC | 17 | 1232 |
| HSV1-UL19-847 | − | GGUCCCCCUGGUCCCCC | 17 | 1233 |
| HSV1-UL19-843 | − | CGCGCCCAAUUUCCCCC | 17 | 1229 |
| HSV1-UL19-1845 | + | CCCCGCGUAAACGCCCC | 17 | 2231 |
| HSV1-UL19-659 | − | GACCUAGUCCCCGCCCC | 17 | 1045 |
| HSV1-UL19-589 | − | GGAAAAGGCGCCGCCCC | 17 | 975 |
| HSV1-UL19-811 | − | GUCCCGGAGAUCGCCCC | 17 | 1197 |
| HSV1-UL19-1605 | + | CCCCAGCUCCAGGCCCC | 17 | 1991 |
| HSV1-UL19-1815 | + | CGGGCUGGGCCGGCCCC | 17 | 2201 |
| HSV1-UL19-651 | − | GACGUUCGUCCUGCCCC | 17 | 1037 |
| HSV1-UL19-721 | − | GAACGGCAACUUGCCCC | 17 | 1107 |
| HSV1-UL19-1596 | + | GUGGCCUGGAUCUCCCC | 17 | 1982 |
| HSV1-UL19-1842 | + | CCCGGCGGCGCGUCCCC | 17 | 2228 |
| HSV1-UL19-711 | − | GGGGGGGGACGUUCCCC | 17 | 1097 |
| HSV1-UL19-1791 | + | CGGUGUAGCCCACGCCC | 17 | 2177 |
| HSV1-UL19-727 | − | GGCGUUCCGGGACGCCC | 17 | 1113 |
| HSV1-UL19-744 | − | GCACGUCUUCUGCGCCC | 17 | 1130 |
| HSV1-UL19-910 | − | CGUGUUCGGGUGCGCCC | 17 | 1296 |
| HSV1-UL19-1457 | + | GGCGACCAGGGUCGCCC | 17 | 1843 |
| HSV1-UL19-1853 | + | CGUGGCCGCGAAGGCCC | 17 | 2239 |
| HSV1-UL19-1523 | + | CCGGAUUGAACAGGCCC | 17 | 1909 |
| HSV1-UL19-1606 | + | CCCCCAGCUCCAGGCCC | 17 | 1992 |
| HSV1-UL19-762 | − | GGCGCACGUCGAGGCCC | 17 | 1148 |
| HSV1-UL19-646 | − | GGUCUUUCUGGAGGCCC | 17 | 1032 |
| HSV1-UL19-714 | − | GUUCCCCCGGCCGGCCC | 17 | 1100 |
| HSV1-UL19-1805 | + | GGGGAGCCCCGCGGCCC | 17 | 2191 |
| HSV1-UL19-776 | − | GAUGCGGCGCGCGGCCC | 17 | 1162 |
| HSV1-UL19-681 | − | GGCGUACGUGGCGGCCC | 17 | 1067 |
| HSV1-UL19-1744 | + | CGCCACGUGGUCGGCCC | 17 | 2130 |
| HSV1-UL19-1783 | + | CCACCUGGAGCUGGCCC | 17 | 2169 |
| HSV1-UL19-597 | − | GGCCACCAGGGUGGCCC | 17 | 983 |
| HSV1-UL19-1462 | + | GGUGGCCCGCCUUGCCC | 17 | 1848 |
| HSV1-UL19-864 | − | AGACGGGCCUCCAUCCC | 17 | 1250 |
| HSV1-UL19-1771 | + | GGUCAGCGCGUUCUCCC | 17 | 2157 |
| HSV1-UL19-936 | − | CCAGAGCGACCCGUCCC | 17 | 1322 |
| HSV1-UL19-1843 | + | CCCCGGCGGCGCGUCCC | 17 | 2229 |
| HSV1-UL19-1527 | + | GGCGGGGACUAGGUCCC | 17 | 1913 |
| HSV1-UL19-1450 | + | UCGGCAACAACAAAGCC | 17 | 1836 |
| HSV1-UL19-1584 | + | GGUGCAGCUCAAGAGCC | 17 | 1970 |
| HSV1-UL19-1764 | + | AGUUGGCCCCCAGAGCC | 17 | 2150 |
| HSV1-UL19-1626 | + | GCACUGGACCACGAGCC | 17 | 2012 |
| HSV1-UL19-1467 | + | GGUGAGGUCCACGAGCC | 17 | 1853 |
| HSV1-UL19-683 | − | AGCUGUUUUUGAACGCC | 17 | 1069 |
| HSV1-UL19-657 | − | GGUUUGCCGCGCACGCC | 17 | 1043 |
| HSV1-UL19-726 | − | CGGCGUUCCGGGACGCC | 17 | 1112 |
| HSV1-UL19-904 | − | CGUGGCGGGAAACCGCC | 17 | 1290 |
| HSV1-UL19-1619 | + | GCAGGUAAAACACCGCC | 17 | 2005 |
| HSV1-UL19-605 | − | CAAGGCGGGCCACCGCC | 17 | 991 |
| HSV1-UL19-666 | − | UUGGGGGAAGGACCGCC | 17 | 1052 |
| HSV1-UL19-922 | − | CCCGGGGACGCGCCGCC | 17 | 1308 |
| HSV1-UL19-592 | − | CCUGGACAACGGCCGCC | 17 | 978 |
| HSV1-UL19-1649 | + | GGGGUGGCAGCAGCGCC | 17 | 2035 |
| HSV1-UL19-687 | − | CGCCUGGGGGCAGCGCC | 17 | 1073 |
| HSV1-UL19-1602 | + | CCGCCGGACAUAGCGCC | 17 | 1988 |
| HSV1-UL19-1599 | + | GCCGUUCACCACGCGCC | 17 | 1985 |
| HSV1-UL19-1693 | + | CUGGGGCACUCCUCGCC | 17 | 2079 |
| HSV1-UL19-1458 | + | CGGCGACCAGGGUCGCC | 17 | 1844 |
| HSV1-UL19-840 | − | UCCACGCGCUGUUCGCC | 17 | 1226 |
| HSV1-UL19-1854 | + | CCGUGGCCGCGAAGGCC | 17 | 2240 |
| HSV1-UL19-608 | − | GGGAGGCCGUCGAGGCC | 17 | 994 |
| HSV1-UL19-916 | − | AGGGAUGGACCACGGCC | 17 | 1302 |
| HSV1-UL19-1442 | + | ACGCCCCGAGGACGGCC | 17 | 1828 |
| HSV1-UL19-765 | − | CUUUACCCUGACCGGCC | 17 | 1151 |
| HSV1-UL19-713 | − | CGUUCCCCCGGCCGGCC | 17 | 1099 |
| HSV1-UL19-1592 | + | UCUCCCCCGGGCCGGCC | 17 | 1978 |
| HSV1-UL19-1565 | + | CUGCGGCGGGGCCGGCC | 17 | 1951 |
| HSV1-UL19-854 | − | UCCGCGAGAGCGCGGCC | 17 | 1240 |
| HSV1-UL19-1752 | + | ACAGGUCGCGCAGGGCC | 17 | 2138 |
| HSV1-UL19-1625 | + | GGACCACGAGCCGGGCC | 17 | 2011 |
| HSV1-UL19-1670 | + | CGUCCGCGGCUCGGGCC | 17 | 2056 |
| HSV1-UL19-729 | − | CCGGGACGCCCGGGGCC | 17 | 1115 |
| HSV1-UL19-1639 | + | CAUCAACCAGCUGGGCC | 17 | 2025 |
| HSV1-UL19-1573 | + | GGACCCGCCCGUGGGCC | 17 | 1959 |
| HSV1-UL19-745 | − | UCUUCUGCGCCCUGGCC | 17 | 1131 |
| HSV1-UL19-1597 | + | CCACGCGCCAGGUGGCC | 17 | 1983 |
| HSV1-UL19-875 | − | GCCAGCUCCAGGUGGCC | 17 | 1261 |
| HSV1-UL19-596 | − | UGGCCACCAGGGUGGCC | 17 | 982 |
| HSV1-UL19-1534 | + | CGGGGAUCCGGGUGGCC | 17 | 1920 |
| HSV1-UL19-1454 | + | GGGCCACCCUGGUGGCC | 17 | 1840 |
| HSV1-UL19-1708 | + | UGGCCACCAGAUUGGCC | 17 | 2094 |
| HSV1-UL19-778 | − | CCGCCAUCGCGACUGCC | 17 | 1164 |
| HSV1-UL19-705 | − | GCCGACGUGGAGCUGCC | 17 | 1091 |
| HSV1-UL19-952 | − | CGCCAAACAUCGCUGCC | 17 | 1338 |
| HSV1-UL19-1786 | + | CCCGCCAGUUUCGUGCC | 17 | 2172 |
| HSV1-UL19-863 | − | AAGACGGGCCUCCAUCC | 17 | 1249 |
| HSV1-UL19-717 | − | CGGCCCGGGGGAGAUCC | 17 | 1103 |
| HSV1-UL19-1537 | + | GGAAGGCGCGGGGAUCC | 17 | 1923 |
| HSV1-UL19-1465 | + | AGGCCUCGACGGCCUCC | 17 | 1851 |
| HSV1-UL19-1607 | + | GUCCCACCCCCAGCUCC | 17 | 1993 |
| HSV1-UL19-1645 | + | CCUGCCCGCCCAGCUCC | 17 | 2031 |
| HSV1-UL19-873 | − | CUUCCUGGGCCAGCUCC | 17 | 1259 |
| HSV1-UL19-1872 | + | CCACGAUCAGGCGCUCC | 17 | 2258 |
| HSV1-UL19-1579 | + | GCUGCAUAAACUGCUCC | 17 | 1965 |
| HSV1-UL19-1689 | + | CGCCGGGGGCGAUCUCC | 17 | 2075 |
| HSV1-UL19-897 | − | CGGGGCUCCCCCUCUCC | 17 | 1283 |
| HSV1-UL19-1508 | + | CGUAGAUGCGCUUCUCC | 17 | 1894 |
| HSV1-UL19-3210 | − | GCUCGCUCGCAACGUCC | 17 | 7809 |
| HSV1-UL19-935 | − | GCCAGAGCGACCCGUCC | 17 | 1321 |
| HSV1-UL19-1828 | + | ACUCACACACGGCGUCC | 17 | 2214 |
| HSV1-UL19-1604 | + | CCAGGCCCCGGGCGUCC | 17 | 1990 |
| HSV1-UL19-1636 | + | CGUGCGCCACCAGGUCC | 17 | 2022 |
| HSV1-UL19-1658 | + | AGUCGCGAUGGCGGUCC | 17 | 2044 |
| HSV1-UL19-810 | − | GCAGAACAUGGUGGUCC | 17 | 1196 |
| HSV1-UL19-1452 | + | CCAGGCGGCCGUUGUCC | 17 | 1838 |
| HSV1-UL19-1811 | + | CGGCUGCCGCGUUGUCC | 17 | 2197 |
| HSV1-UL19-871 | − | GUCGGAGGCGUACUUCC | 17 | 1257 |
| HSV1-UL19-725 | − | AUGUCCGGCGGCGUUCC | 17 | 1111 |
| HSV1-UL19-599 | − | CGAGACGAGCUUUUUCC | 17 | 985 |
| HSV1-UL19-1868 | + | CGUAAAGAACUUAAAGC | 17 | 2254 |
| HSV1-UL19-643 | − | GUCCAUCGGCGAGAAGC | 17 | 1029 |
| HSV1-UL19-1548 | + | UCCCCCAAAAAAACAGC | 17 | 1934 |
| HSV1-UL19-1641 | + | UAAAGUCAUCAACCAGC | 17 | 2027 |
| HSV1-UL19-763 | − | CGAGGCCCUGGCCCAGC | 17 | 1149 |
| HSV1-UL19-1498 | + | CCUCCUGCAUCUCCAGC | 17 | 1884 |
| HSV1-UL19-1668 | + | GGGUGUUGUGCAGCAGC | 17 | 2054 |
| HSV1-UL19-1621 | + | GUAUGGCGGCCUGCAGC | 17 | 2007 |
| HSV1-UL19-1727 | + | GCUGGGGGGCCAUCAGC | 17 | 2113 |
| HSV1-UL19-1765 | + | UAGUUGGCCCCCAGAGC | 17 | 2151 |
| HSV1-UL19-1860 | + | AGGCCCCGUUAUAGAGC | 17 | 2246 |
| HSV1-UL19-1627 | + | UGCACUGGACCACGAGC | 17 | 2013 |
| HSV1-UL19-766 | − | CCUGACCGGCCCGGAGC | 17 | 1152 |
| HSV1-UL19-1784 | + | GCCGGGCCACCUGGAGC | 17 | 2170 |
| HSV1-UL19-730 | − | CGCCCGGGGCCUGGAGC | 17 | 1116 |
| HSV1-UL19-1889 | + | CGCUGGCGCAGGUGAGC | 17 | 2275 |
| HSV1-UL19-1907 | + | GAGCCAGUCCCUUGAGC | 17 | 2293 |
| HSV1-UL19-1629 | + | CGUGUUGUUCCAGUAGC | 17 | 2015 |
| HSV1-UL19-1586 | + | ACAAAGAAGUCGAACGC | 17 | 1972 |
| HSV1-UL19-656 | − | CGGUUUGCCGCGCACGC | 17 | 1042 |
| HSV1-UL19-835 | − | GACGGGGCGUUGCACGC | 17 | 1221 |
| HSV1-UL19-639 | − | CCUGAACCGGCAGACGC | 17 | 1025 |
| HSV1-UL19-831 | − | UCGGCGGCGCCCGACGC | 17 | 1217 |
| HSV1-UL19-926 | − | GCCGGGGGCGUUUACGC | 17 | 1312 |
| HSV1-UL19-1620 | + | AGCAGGUAAAACACCGC | 17 | 2006 |
| HSV1-UL19-604 | − | GCAAGGCGGGCCACCGC | 17 | 990 |
| HSV1-UL19-805 | − | GGCCGCUGCUGCACCGC | 17 | 1191 |
| HSV1-UL19-1603 | + | GCGUCCCGGAACGCCGC | 17 | 1989 |
| HSV1-UL19-921 | − | CCCCGGGGACGCGCCGC | 17 | 1307 |
| HSV1-UL19-895 | − | ACUUUUACCUGGGCCGC | 17 | 1281 |
| HSV1-UL19-917 | − | ACGUCAACUACUUCCGC | 17 | 1303 |
| HSV1-UL19-1813 | + | CCACGACCGCGUUCCGC | 17 | 2199 |
| HSV1-UL19-1650 | + | AGGGGUGGCAGCAGCGC | 17 | 2036 |
| HSV1-UL19-780 | − | GACUGCCGGGUUAGCGC | 17 | 1166 |
| HSV1-UL19-613 | − | CGCAUGCCGACACGCGC | 17 | 999 |
| HSV1-UL19-971 | − | CGGGGAAGCCCACGCGC | 17 | 1357 |
| HSV1-UL19-912 | − | CAGGUGCCGCGGCGCGC | 17 | 1298 |
| HSV1-UL19-1755 | + | GCCGCGACAGGUCGCGC | 17 | 2141 |
| HSV1-UL19-1540 | + | GCGGGGCGGGAAGGCGC | 17 | 1926 |
| HSV1-UL19-1891 | + | GGCGGGGUCGCUGGCGC | 17 | 2277 |
| HSV1-UL19-1702 | + | GGGUGCAGGGGGUGCGC | 17 | 2088 |
| HSV1-UL19-750 | − | CGUGAACGACUACUCGC | 17 | 1136 |
| HSV1-UL19-950 | − | CCUCAACGGGGCCUCGC | 17 | 1336 |
| HSV1-UL19-1694 | + | GCUGGGGCACUCCUCGC | 17 | 2080 |
| HSV1-UL19-802 | − | GGUGCCCGCCUUCUCGC | 17 | 1188 |
| HSV1-UL19-1878 | + | CUUAAACUGUACGUCGC | 17 | 2264 |
| HSV1-UL19-1697 | + | GUCCGUCACGGGGUCGC | 17 | 2083 |
| HSV1-UL19-1892 | + | GAGGAGGGCGGGGUCGC | 17 | 2278 |
| HSV1-UL19-738 | − | CCAUCGCCGCCGUUCGC | 17 | 1124 |
| HSV1-UL19-839 | − | GUCCACGCGCUGUUCGC | 17 | 1225 |
| HSV1-UL19-603 | − | UUUUUCCUGGGCAAGGC | 17 | 989 |
| HSV1-UL19-1680 | + | CGGCCCCGCGAGAAGGC | 17 | 2066 |
| HSV1-UL19-712 | − | GGGGACGUUCCCCCGGC | 17 | 1098 |
| HSV1-UL19-682 | − | UACGUGGCGGCCCCGGC | 17 | 1068 |
| HSV1-UL19-1593 | + | AUCUCCCCCGGGCCGGC | 17 | 1979 |
| HSV1-UL19-1566 | + | UCUGCGGCGGGGCCGGC | 17 | 1952 |
| HSV1-UL19-853 | − | GUCCGCGAGAGCGCGGC | 17 | 1239 |
| HSV1-UL19-1789 | + | CCACGUUCGCGCGCGGC | 17 | 2175 |
| HSV1-UL19-845 | − | GCGCGACCUGUCGCGGC | 17 | 1231 |
| HSV1-UL19-615 | − | CGACACGCGCGGGCGGC | 17 | 1001 |
| HSV1-UL19-1569 | + | UGCUGCAUGUCUGCGGC | 17 | 1955 |
| HSV1-UL19-1675 | + | CCGCCCCCCGGUGCGGC | 17 | 2061 |
| HSV1-UL19-3227 | + | CUACCCCAAGGAAGGGC | 17 | 7826 |
| HSV1-UL19-1753 | + | GACAGGUCGCGCAGGGC | 17 | 2139 |
| HSV1-UL19-1837 | + | CCCGGGGGUUGCAGGGC | 17 | 2223 |
| HSV1-UL19-1894 | + | GCACUGCGGAGGAGGGC | 17 | 2280 |
| HSV1-UL19-691 | − | GCGCCUGGCCCACGGGC | 17 | 1077 |
| HSV1-UL19-1818 | + | CGAACACGGGGACGGGC | 17 | 2204 |
| HSV1-UL19-1594 | + | CUGGAUCUCCCCCGGGC | 17 | 1980 |
| HSV1-UL19-1644 | + | CCCGCCCAGCUCCGGGC | 17 | 2030 |
| HSV1-UL19-770 | − | CCCGGAGCUGGGCGGGC | 17 | 1156 |
| HSV1-UL19-1520 | + | UGAACAGGCCCAGGGGC | 17 | 1906 |
| HSV1-UL19-1567 | + | CAUGUCUGCGGCGGGGC | 17 | 1953 |
| HSV1-UL19-1543 | + | AAAACAGCUGGCGGGGC | 17 | 1929 |
| HSV1-UL19-1530 | + | UCCGGGUGGCCGGGGGC | 17 | 1916 |
| HSV1-UL19-907 | − | GGGAAACCGCCUGGGGC | 17 | 1293 |
| HSV1-UL19-769 | − | CCGGCCCGGAGCUGGGC | 17 | 1155 |
| HSV1-UL19-1816 | + | ACGGGGACGGGCUGGGC | 17 | 2202 |
| HSV1-UL19-1713 | + | UGCAGCGUGAGCAUGGC | 17 | 2099 |
| HSV1-UL19-858 | − | ACCUACGCGCUCAUGGC | 17 | 1244 |
| HSV1-UL19-878 | − | CCCGGCACGAAACUGGC | 17 | 1264 |
| HSV1-UL19-1546 | + | CCAAAAAAACAGCUGGC | 17 | 1932 |
| HSV1-UL19-903 | − | CGGAACGCGGUCGUGGC | 17 | 1289 |
| HSV1-UL19-1535 | + | GCGGGGAUCCGGGUGGC | 17 | 1921 |
| HSV1-UL19-1612 | + | ACGGCGGCGAUGGUGGC | 17 | 1998 |
| HSV1-UL19-1709 | + | UUGGCCACCAGAUUGGC | 17 | 2095 |
| HSV1-UL19-1732 | + | UGGUAUGGUCCAGAUGC | 17 | 2118 |
| HSV1-UL19-636 | − | CCACCUGCUGGAGAUGC | 17 | 1022 |
| HSV1-UL19-777 | − | ACCGCCAUCGCGACUGC | 17 | 1163 |
| HSV1-UL19-1486 | + | CUUUCAGGAAGGACUGC | 17 | 1872 |
| HSV1-UL19-635 | − | CGUGGGCCGCCACCUGC | 17 | 1021 |
| HSV1-UL19-704 | − | GGCCGACGUGGAGCUGC | 17 | 1090 |
| HSV1-UL19-824 | − | CGCCAUGCUCACGCUGC | 17 | 1210 |
| HSV1-UL19-742 | − | GGUGUUUUACCUGCUGC | 17 | 1128 |
| HSV1-UL19-587 | − | GAUGCUGCACGUGCUGC | 17 | 973 |
| HSV1-UL19-1500 | + | GCUCGUCCAGCGUCUGC | 17 | 1886 |
| HSV1-UL19-1688 | + | GGACCACCAUGUUCUGC | 17 | 2074 |
| HSV1-UL19-621 | − | CACCGAAGCCGACGUGC | 17 | 1007 |
| HSV1-UL19-1787 | + | CCCCGCCAGUUUCGUGC | 17 | 2173 |
| HSV1-UL19-825 | − | GCUCACGCUGCAGGUGC | 17 | 1211 |
| HSV1-UL19-1707 | + | CCAGAUUGGCCGGGUGC | 17 | 2093 |
| HSV1-UL19-1900 | + | GUGGGCUUCCCCGUUGC | 17 | 2286 |
| HSV1-UL19-1839 | + | GCGUCCCCGGGGGUUGC | 17 | 2225 |
| HSV1-UL19-815 | − | CCUGCACCCGGCCAAUC | 17 | 1201 |
| HSV1-UL19-653 | − | CCUGGGCCUGUUCAAUC | 17 | 1039 |
| HSV1-UL19-837 | − | GAUGGCCCCCCAGCAUC | 17 | 1223 |
| HSV1-UL19-1446 | + | GCAGCACGUGCAGCAUC | 17 | 1832 |
| HSV1-UL19-1656 | + | GGGCCGCGCGCCGCAUC | 17 | 2042 |
| HSV1-UL19-1577 | + | ACUGCUCCGGGGUCAUC | 17 | 1963 |
| HSV1-UL19-1873 | + | AACCCGUCUCCACGAUC | 17 | 2259 |
| HSV1-UL19-669 | − | CUCUGGAACACGCGAUC | 17 | 1055 |
| HSV1-UL19-641 | − | GCGCGUGCGCGCGGAUC | 17 | 1027 |
| HSV1-UL19-1538 | + | GGGAAGGCGCGGGGAUC | 17 | 1924 |
| HSV1-UL19-1483 | + | GGAGGCGCUGUUUGAUC | 17 | 1869 |
| HSV1-UL19-752 | − | ACGUCGUGACCUACCUC | 17 | 1138 |
| HSV1-UL19-1633 | + | ACGGCCAUGCACUCCUC | 17 | 2019 |
| HSV1-UL19-583 | − | ACGUCCAGGCCGUCCUC | 17 | 969 |
| HSV1-UL19-1646 | + | GCCUGCCCGCCCAGCUC | 17 | 2032 |
| HSV1-UL19-1850 | + | CCCGGGACGGGUCGCUC | 17 | 2236 |
| HSV1-UL19-848 | − | CCUGGUCCCCCCGGCUC | 17 | 1234 |
| HSV1-UL19-1671 | + | CGCGGCGUCCGCGGCUC | 17 | 2057 |
| HSV1-UL19-1580 | + | GGCUGCAUAAACUGCUC | 17 | 1966 |
| HSV1-UL19-1690 | + | UCGCCGGGGGCGAUCUC | 17 | 2076 |
| HSV1-UL19-667 | − | GGUGCUGCGCCUGUCUC | 17 | 1053 |
| HSV1-UL19-632 | − | CAAGGCCGUGCGAAGUC | 17 | 1018 |
| HSV1-UL19-1519 | + | GGGGCAGGACGAACGUC | 17 | 1905 |
| HSV1-UL19-1719 | + | GUGUUGGCGCCCGCGUC | 17 | 2105 |
| HSV1-UL19-1505 | + | CGCGCACGCGCGUCGUC | 17 | 1891 |
| HSV1-UL19-1643 | + | CCAGCUCCGGGCCGGUC | 17 | 2029 |
| HSV1-UL19-673 | − | ACGUUGACGCGGCGGUC | 17 | 1059 |
| HSV1-UL19-722 | − | GCCCCUGGCGCUAUGUC | 17 | 1108 |
| HSV1-UL19-1581 | + | GCCAGGUUGGCGUUGUC | 17 | 1967 |
| HSV1-UL19-1726 | + | GGCCAUCAGCAGGAUUC | 17 | 2112 |
| HSV1-UL19-1492 | + | CCAGGUUGGCCCCGUUC | 17 | 1878 |
| HSV1-UL19-724 | − | UAUGUCCGGCGGCGUUC | 17 | 1110 |
| HSV1-UL19-1499 | + | CCAGCGUCUGCCGGUUC | 17 | 1885 |
| HSV1-UL19-909 | − | AGCCCGUCCCCGUGUUC | 17 | 1295 |
| HSV1-UL19-1488 | + | CGGUGUCCUCCACUUUC | 17 | 1874 |
| HSV1-UL19-644 | − | CGAGAAGCUGGUCUUUC | 17 | 1030 |
| HSV1-UL19-965 | − | CCCGUGUGGCCUGUUUC | 17 | 1351 |
| HSV1-UL19-1782 | + | CGUUCUCAGUCACAAAG | 17 | 2168 |
| HSV1-UL19-619 | − | GCAGUCCUUCCUGAAAG | 17 | 1005 |
| HSV1-UL19-1905 | + | CGAGAUACUGCGCGAAG | 17 | 2291 |
| HSV1-UL19-1515 | + | UCCAUGGCGCCCACCAG | 17 | 1901 |
| HSV1-UL19-1758 | + | AGAGCCGGGGGGACCAG | 17 | 2144 |
| HSV1-UL19-1521 | + | GGAUUGAACAGGCCCAG | 17 | 1907 |
| HSV1-UL19-1448 | + | GGCAACAACAAAGCCAG | 17 | 1834 |
| HSV1-UL19-1600 | + | GCCGGACAUAGCGCCAG | 17 | 1986 |
| HSV1-UL19-1866 | + | UAAAGAACUUAAAGCAG | 17 | 2252 |
| HSV1-UL19-1683 | + | CCCCCGCGGUGCAGCAG | 17 | 2069 |
| HSV1-UL19-1705 | + | AGAUUGGCCGGGUGCAG | 17 | 2091 |
| HSV1-UL19-1808 | + | CGCGUUGUCCAGGAGAG | 17 | 2194 |
| HSV1-UL19-1652 | + | UCACAGUCCCACACGAG | 17 | 2038 |
| HSV1-UL19-932 | − | ACGCGGGGGACAAGGAG | 17 | 1318 |
| HSV1-UL19-1810 | + | GCCGCGUUGUCCAGGAG | 17 | 2196 |
| HSV1-UL19-1737 | + | AGCGCGUGGACGGGGAG | 17 | 2123 |
| HSV1-UL19-1890 | + | UCGCUGGCGCAGGUGAG | 17 | 2276 |
| HSV1-UL19-1908 | + | AGAGCCAGUCCCUUGAG | 17 | 2294 |
| HSV1-UL19-821 | − | CAACGGGCGCGUGGUAG | 17 | 1207 |
| HSV1-UL19-898 | − | CCCUCUCCUGGACAACG | 17 | 1284 |
| HSV1-UL19-969 | − | CCGCAGUGCCCGCAACG | 17 | 1355 |
| HSV1-UL19-949 | − | GGCCUACCACCUCAACG | 17 | 1335 |
| HSV1-UL19-883 | − | CCAGCCGCGCGCGAACG | 17 | 1269 |
| HSV1-UL19-1587 | + | CACAAAGAAGUCGAACG | 17 | 1973 |
| HSV1-UL19-900 | − | CGUGUACCUGCGGAACG | 17 | 1286 |
| HSV1-UL19-626 | − | CGAGAUGGUCCUGAACG | 17 | 1012 |
| HSV1-UL19-946 | − | GGACCUGCUCUAUAACG | 17 | 1332 |
| HSV1-UL19-786 | − | CGCGGCGGCAUGUAACG | 17 | 1172 |
| HSV1-UL19-748 | − | GCUACUGGAACAACACG | 17 | 1134 |
| HSV1-UL19-1821 | + | GGGCGCACCCGAACACG | 17 | 2207 |
| HSV1-UL19-1654 | + | CGUCACAGUCCCACACG | 17 | 2040 |
| HSV1-UL19-1832 | + | UGACGUCGGUCGACACG | 17 | 2218 |
| HSV1-UL19-1663 | + | AUGCCGCCGCGUACACG | 17 | 2049 |
| HSV1-UL19-842 | − | CGCCGGGGCCGACCACG | 17 | 1228 |
| HSV1-UL19-1746 | + | UGGGCGCGUUCGCCACG | 17 | 2132 |
| HSV1-UL19-1698 | + | GCGCGGGGUCCGUCACG | 17 | 2084 |
| HSV1-UL19-1475 | + | UCGGCAUGCGUCAGACG | 17 | 1861 |
| HSV1-UL19-633 | − | GCGAAGUCUGGACGACG | 17 | 1019 |
| HSV1-UL19-830 | − | CUCGGCGGCGCCCGACG | 17 | 1216 |
| HSV1-UL19-703 | − | UGUGGGGGUGGCCGACG | 17 | 1089 |
| HSV1-UL19-618 | − | CGGGCGGCCGGUCGACG | 17 | 1004 |
| HSV1-UL19-834 | − | CAUGCGCAUAUUCGACG | 17 | 1220 |
| HSV1-UL19-1558 | + | GAUUGGCGGCUUCGACG | 17 | 1944 |
| HSV1-UL19-1740 | + | CGAACAGCGCGUGGACG | 17 | 2126 |
| HSV1-UL19-1722 | + | CAUGUUGGUGGUGGACG | 17 | 2108 |
| HSV1-UL19-1797 | + | UGCCCAUGUCGGUGACG | 17 | 2183 |
| HSV1-UL19-670 | − | GCUGAUGAACGUUGACG | 17 | 1056 |
| HSV1-UL19-1685 | + | GCAGGGUGGCGUAUACG | 17 | 2071 |
| HSV1-UL19-678 | − | AGCCGCCAAUCCGUACG | 17 | 1064 |
| HSV1-UL19-679 | − | UCCGUACGGGGCGUACG | 17 | 1065 |
| HSV1-UL19-943 | − | GCAGCGAUUUUCGUACG | 17 | 1329 |
| HSV1-UL19-784 | − | CCACGACCCCGUGUACG | 17 | 1170 |
| HSV1-UL19-925 | − | CGCCGGGGGCGUUUACG | 17 | 1311 |
| HSV1-UL19-795 | − | GAUGACCGGCCGCACCG | 17 | 1181 |
| HSV1-UL19-804 | − | GGGCCGCUGCUGCACCG | 17 | 1190 |
| HSV1-UL19-787 | − | AUGUAACGUGGCGACCG | 17 | 1173 |
| HSV1-UL19-939 | − | CGGCCACGGCCAACCCG | 17 | 1325 |
| HSV1-UL19-1881 | + | GAGUUCGCGGCACCCCG | 17 | 2267 |
| HSV1-UL19-920 | − | CGGCCCUGCAACCCCCG | 17 | 1306 |
| HSV1-UL19-1684 | + | GUCGAAGCGAACCCCCG | 17 | 2070 |
| HSV1-UL19-961 | − | AGUUUAAGCGCCCCCCG | 17 | 1347 |
| HSV1-UL19-1631 | + | CGGGAAGGUCUCCCCCG | 17 | 2017 |
| HSV1-UL19-1806 | + | GGAGAGGGGGAGCCCCG | 17 | 2192 |
| HSV1-UL19-1444 | + | CGCGCUCAAACGCCCCG | 17 | 1830 |
| HSV1-UL19-1841 | + | CCGGCGGCGCGUCCCCG | 17 | 2227 |
| HSV1-UL19-728 | − | GCGUUCCGGGACGCCCG | 17 | 1114 |
| HSV1-UL19-1575 | + | CCCAUCGGACCCGCCCG | 17 | 1961 |
| HSV1-UL19-715 | − | UUCCCCCGGCCGGCCCG | 17 | 1101 |
| HSV1-UL19-860 | − | CUUCAAGAUCAGUCCCG | 17 | 1246 |
| HSV1-UL19-755 | − | CGGGGGAGACCUUCCCG | 17 | 1141 |
| HSV1-UL19-1763 | + | GUUGGCCCCCAGAGCCG | 17 | 2149 |
| HSV1-UL19-790 | − | CACCCAGGCCCGAGCCG | 17 | 1176 |
| HSV1-UL19-658 | − | GUUUGCCGCGCACGCCG | 17 | 1044 |
| HSV1-UL19-791 | − | CCGAGCCGCGGACGCCG | 17 | 1177 |
| HSV1-UL19-923 | − | CCGGGGACGCGCCGCCG | 17 | 1309 |
| HSV1-UL19-1826 | + | UCCAUCCCUGCGCGCCG | 17 | 2212 |
| HSV1-UL19-1692 | + | UGGGGCACUCCUCGCCG | 17 | 2078 |
| HSV1-UL19-841 | − | CCACGCGCUGUUCGCCG | 17 | 1227 |
| HSV1-UL19-1591 | + | CUCCCCCGGGCCGGCCG | 17 | 1977 |
| HSV1-UL19-1564 | + | UGCGGCGGGGCCGGCCG | 17 | 1950 |
| HSV1-UL19-855 | − | CCGCGAGAGCGCGGCCG | 17 | 1241 |
| HSV1-UL19-1751 | + | CAGGUCGCGCAGGGCCG | 17 | 2137 |
| HSV1-UL19-894 | − | AACUUUUACCUGGGCCG | 17 | 1280 |
| HSV1-UL19-1827 | + | ACACGGCGUCCUGGCCG | 17 | 2213 |
| HSV1-UL19-1849 | + | ACGGGUCGCUCUGGCCG | 17 | 2235 |
| HSV1-UL19-1469 | + | GGAGGGCUGCGUGGCCG | 17 | 1855 |
| HSV1-UL19-1874 | + | GCUGGCGGCGGUGGCCG | 17 | 2260 |
| HSV1-UL19-1533 | + | GGGGAUCCGGGUGGCCG | 17 | 1919 |
| HSV1-UL19-1856 | + | CGCCCACGGGUUGGCCG | 17 | 2242 |
| HSV1-UL19-706 | − | CCGACGUGGAGCUGCCG | 17 | 1092 |
| HSV1-UL19-911 | − | GGUGCGCCCAGGUGCCG | 17 | 1297 |
| HSV1-UL19-1794 | + | GUUGCGGACGGUUGCCG | 17 | 2180 |
| HSV1-UL19-1674 | + | GUGCGGCCGGUCAUCCG | 17 | 2060 |
| HSV1-UL19-611 | − | GGCCACGCAGCCCUCCG | 17 | 997 |
| HSV1-UL19-1578 | + | CUGCAUAAACUGCUCCG | 17 | 1964 |
| HSV1-UL19-1666 | + | GUUGCGGUUGAAGUCCG | 17 | 2052 |
| HSV1-UL19-1673 | + | GUCAUCCGCGGCGUCCG | 17 | 2059 |
| HSV1-UL19-852 | − | GCACGUCCGCGAGAGCG | 17 | 1238 |
| HSV1-UL19-1906 | + | AGCCAGUCCCUUGAGCG | 17 | 2292 |
| HSV1-UL19-585 | − | CUCGGGGCGUUUGAGCG | 17 | 971 |
| HSV1-UL19-779 | − | CGACUGCCGGGUUAGCG | 17 | 1165 |
| HSV1-UL19-1585 | + | CAAAGAAGUCGAACGCG | 17 | 1971 |
| HSV1-UL19-612 | − | ACGCAUGCCGACACGCG | 17 | 998 |
| HSV1-UL19-970 | − | ACGGGGAAGCCCACGCG | 17 | 1356 |
| HSV1-UL19-927 | − | CCGGGGGCGUUUACGCG | 17 | 1313 |
| HSV1-UL19-806 | − | GCCGCUGCUGCACCGCG | 17 | 1192 |
| HSV1-UL19-896 | − | CUUUUACCUGGGCCGCG | 17 | 1282 |
| HSV1-UL19-1743 | + | CCCCGGCGAACAGCGCG | 17 | 2129 |
| HSV1-UL19-781 | − | ACUGCCGGGUUAGCGCG | 17 | 1167 |
| HSV1-UL19-1903 | + | AGUGGGUCUCCCGCGCG | 17 | 2289 |
| HSV1-UL19-1790 | + | AGGUCCACGUUCGCGCG | 17 | 2176 |
| HSV1-UL19-1539 | + | CGGGGCGGGAAGGCGCG | 17 | 1925 |
| HSV1-UL19-775 | − | CGCCCUGAUGCGGCGCG | 17 | 1161 |
| HSV1-UL19-820 | − | GUUUCACAACGGGCGCG | 17 | 1206 |
| HSV1-UL19-719 | − | CCAGGCCACCUGGCGCG | 17 | 1105 |
| HSV1-UL19-640 | − | GACGACGCGCGUGCGCG | 17 | 1026 |
| HSV1-UL19-1701 | + | GGUGCAGGGGGUGCGCG | 17 | 2087 |
| HSV1-UL19-803 | − | GUGCCCGCCUUCUCGCG | 17 | 1189 |
| HSV1-UL19-739 | − | CAUCGCCGCCGUUCGCG | 17 | 1125 |
| HSV1-UL19-1541 | + | GGCGGGGCGGGAAGGCG | 17 | 1927 |
| HSV1-UL19-1864 | + | GGGGCUGAGCACCGGCG | 17 | 2250 |
| HSV1-UL19-812 | − | GGAGAUCGCCCCCGGCG | 17 | 1198 |
| HSV1-UL19-1568 | + | GCUGCAUGUCUGCGGCG | 17 | 1954 |
| HSV1-UL19-3228 | + | UACCCCAAGGAAGGGCG | 17 | 7827 |
| HSV1-UL19-1893 | + | CACUGCGGAGGAGGGCG | 17 | 2279 |
| HSV1-UL19-1529 | + | CCGGGUGGCCGGGGGCG | 17 | 1915 |
| HSV1-UL19-886 | − | GAACGUGGACCUGGGCG | 17 | 1272 |
| HSV1-UL19-1608 | + | UGGCGGGGGCCAUGGCG | 17 | 1994 |
| HSV1-UL19-859 | − | CCUACGCGCUCAUGGCG | 17 | 1245 |
| HSV1-UL19-879 | − | CCGGCACGAAACUGGCG | 17 | 1265 |
| HSV1-UL19-1545 | + | CAAAAAAACAGCUGGCG | 17 | 1931 |
| HSV1-UL19-1611 | + | CGGCGGCGAUGGUGGCG | 17 | 1997 |
| HSV1-UL19-1470 | + | GGCCACGGAGGGCUGCG | 17 | 1856 |
| HSV1-UL19-1526 | + | UAGGUCCCCGGCGUGCG | 17 | 1912 |
| HSV1-UL19-749 | − | GAACAACACGCGGUGCG | 17 | 1135 |
| HSV1-UL19-1703 | + | CGGGUGCAGGGGGUGCG | 17 | 2089 |
| HSV1-UL19-953 | − | CCUGGAGCGCCUGAUCG | 17 | 1339 |
| HSV1-UL19-1482 | + | GAGGCGCUGUUUGAUCG | 17 | 1868 |
| HSV1-UL19-962 | − | GGGGUGCCGCGAACUCG | 17 | 1348 |
| HSV1-UL19-753 | − | CGUCGUGACCUACCUCG | 17 | 1139 |
| HSV1-UL19-584 | − | CGUCCAGGCCGUCCUCG | 17 | 970 |
| HSV1-UL19-746 | − | CGCCCUGGCCCGGCUCG | 17 | 1132 |
| HSV1-UL19-609 | − | CGUCGAGGCCUGGCUCG | 17 | 995 |
| HSV1-UL19-1770 | + | CCCCGGCCGCGCUCUCG | 17 | 2156 |
| HSV1-UL19-801 | − | UGGUGCCCGCCUUCUCG | 17 | 1187 |
| HSV1-UL19-761 | − | CCUGGUGGCGCACGUCG | 17 | 1147 |
| HSV1-UL19-888 | − | GGGCUACACCGCCGUCG | 17 | 1274 |
| HSV1-UL19-607 | − | CCGCCGGGAGGCCGUCG | 17 | 993 |
| HSV1-UL19-901 | − | CCUGCGGAACGCGGUCG | 17 | 1287 |
| HSV1-UL19-674 | − | CGUUGACGCGGCGGUCG | 17 | 1060 |
| HSV1-UL19-1662 | + | CCGCGUACACGGGGUCG | 17 | 2048 |
| HSV1-UL19-1557 | + | CGGCUUCGACGGGGUCG | 17 | 1943 |
| HSV1-UL19-694 | − | GCGGGUCCGAUGGGUCG | 17 | 1080 |
| HSV1-UL19-844 | − | CCCUGCGCGACCUGUCG | 17 | 1230 |
| HSV1-UL19-937 | − | CCCGUCCCGGGCCUUCG | 17 | 1323 |
| HSV1-UL19-1884 | + | GGUCCUCCACGAGUUCG | 17 | 2270 |
| HSV1-UL19-737 | − | ACCAUCGCCGCCGUUCG | 17 | 1123 |
| HSV1-UL19-930 | − | UUACGCGGGGGACAAGG | 17 | 1316 |
| HSV1-UL19-602 | − | CUUUUUCCUGGGCAAGG | 17 | 988 |
| HSV1-UL19-1681 | + | GCGGCCCCGCGAGAAGG | 17 | 2067 |
| HSV1-UL19-1514 | + | CCAUGGCGCCCACCAGG | 17 | 1900 |
| HSV1-UL19-1757 | + | GAGCCGGGGGGACCAGG | 17 | 2143 |
| HSV1-UL19-1814 | + | GCUGGGCCGGCCCCAGG | 17 | 2200 |
| HSV1-UL19-1598 | + | GUUCACCACGCGCCAGG | 17 | 1984 |
| HSV1-UL19-1453 | + | CCACCCUGGUGGCCAGG | 17 | 1839 |
| HSV1-UL19-874 | − | CCUGGGCCAGCUCCAGG | 17 | 1260 |
| HSV1-UL19-1497 | + | CCUGCAUCUCCAGCAGG | 17 | 1883 |
| HSV1-UL19-637 | − | CCUGCUGGAGAUGCAGG | 17 | 1023 |
| HSV1-UL19-1485 | + | UCAGGAAGGACUGCAGG | 17 | 1871 |
| HSV1-UL19-1704 | + | GAUUGGCCGGGUGCAGG | 17 | 2090 |
| HSV1-UL19-966 | − | GUGUGGCCUGUUUCAGG | 17 | 1352 |
| HSV1-UL19-1807 | + | GCGUUGUCCAGGAGAGG | 17 | 2193 |
| HSV1-UL19-933 | − | CGCGGGGGACAAGGAGG | 17 | 1319 |
| HSV1-UL19-1897 | + | UGCGGGCACUGCGGAGG | 17 | 2283 |
| HSV1-UL19-1736 | + | GCGCGUGGACGGGGAGG | 17 | 2122 |
| HSV1-UL19-1862 | + | GCGAGGCCCCGUUGAGG | 17 | 2248 |
| HSV1-UL19-1616 | + | GAACGCCCCGCGAACGG | 17 | 2002 |
| HSV1-UL19-1831 | + | GACGUCGGUCGACACGG | 17 | 2217 |
| HSV1-UL19-1472 | + | ACGGGGCACGGCCACGG | 17 | 1858 |
| HSV1-UL19-1792 | + | UGCCGUGGCCACGACGG | 17 | 2178 |
| HSV1-UL19-796 | − | AUGACCGGCCGCACCGG | 17 | 1182 |
| HSV1-UL19-741 | − | CGACCGCAACUACCCGG | 17 | 1127 |
| HSV1-UL19-1880 | + | AGUUCGCGGCACCCCGG | 17 | 2266 |
| HSV1-UL19-1844 | + | CGCGUAAACGCCCCCGG | 17 | 2230 |
| HSV1-UL19-1840 | + | CGGCGGCGCGUCCCCGG | 17 | 2226 |
| HSV1-UL19-716 | − | UCCCCCGGCCGGCCCGG | 17 | 1102 |
| HSV1-UL19-1464 | + | CCUCGACGGCCUCCCGG | 17 | 1850 |
| HSV1-UL19-1762 | + | UUGGCCCCCAGAGCCGG | 17 | 2148 |
| HSV1-UL19-924 | − | CGGGGACGCGCCGCCGG | 17 | 1310 |
| HSV1-UL19-1691 | + | GGGGCACUCCUCGCCGG | 17 | 2077 |
| HSV1-UL19-1590 | + | UCCCCCGGGCCGGCCGG | 17 | 1976 |
| HSV1-UL19-1750 | + | AGGUCGCGCAGGGCCGG | 17 | 2136 |
| HSV1-UL19-1836 | + | GGGGGUUGCAGGGCCGG | 17 | 2222 |
| HSV1-UL19-1532 | + | GGGAUCCGGGUGGCCGG | 17 | 1918 |
| HSV1-UL19-707 | − | CGACGUGGAGCUGCCGG | 17 | 1093 |
| HSV1-UL19-723 | − | CCUGGCGCUAUGUCCGG | 17 | 1109 |
| HSV1-UL19-671 | − | GAUGAACGUUGACGCGG | 17 | 1057 |
| HSV1-UL19-785 | − | CGACCCCGUGUACGCGG | 17 | 1171 |
| HSV1-UL19-928 | − | CGGGGGCGUUUACGCGG | 17 | 1314 |
| HSV1-UL19-807 | − | CCGCUGCUGCACCGCGG | 17 | 1193 |
| HSV1-UL19-782 | − | CUGCCGGGUUAGCGCGG | 17 | 1168 |
| HSV1-UL19-1463 | + | CGACGGCCUCCCGGCGG | 17 | 1849 |
| HSV1-UL19-1875 | + | UACGUCGCUGGCGGCGG | 17 | 2261 |
| HSV1-UL19-1480 | + | CUGUUUGAUCGGGGCGG | 17 | 1866 |
| HSV1-UL19-880 | − | CGGCACGAAACUGGCGG | 17 | 1266 |
| HSV1-UL19-1876 | + | CUGUACGUCGCUGGCGG | 17 | 2262 |
| HSV1-UL19-1610 | + | GGCGGCGAUGGUGGCGG | 17 | 1996 |
| HSV1-UL19-1898 | + | CGUUGCGGGCACUGCGG | 17 | 2284 |
| HSV1-UL19-1570 | + | CUGCUGCAUGUCUGCGG | 17 | 1956 |
| HSV1-UL19-754 | − | GUCGUGACCUACCUCGG | 17 | 1140 |
| HSV1-UL19-829 | − | GGCGCUGCUCUGCUCGG | 17 | 1215 |
| HSV1-UL19-870 | − | CUCGGAGCGCGCGUCGG | 17 | 1256 |
| HSV1-UL19-675 | − | GUUGACGCGGCGGUCGG | 17 | 1061 |
| HSV1-UL19-957 | − | CGUGGAGACGGGUUCGG | 17 | 1343 |
| HSV1-UL19-1553 | + | CGUUCAUCAGCGAAGGG | 17 | 1939 |
| HSV1-UL19-3229 | + | ACUACCCCAAGGAAGGG | 17 | 7828 |
| HSV1-UL19-595 | − | CCGCCUGGCCACCAGGG | 17 | 981 |
| HSV1-UL19-1686 | + | CACCAUGUUCUGCAGGG | 17 | 2072 |
| HSV1-UL19-1895 | + | GGCACUGCGGAGGAGGG | 17 | 2281 |
| HSV1-UL19-1846 | + | GUGGUCGUACAUGAGGG | 17 | 2232 |
| HSV1-UL19-690 | − | AGCGCCUGGCCCACGGG | 17 | 1076 |
| HSV1-UL19-797 | − | UGACCGGCCGCACCGGG | 17 | 1183 |
| HSV1-UL19-1879 | + | GUUCGCGGCACCCCGGG | 17 | 2265 |
| HSV1-UL19-1761 | + | UGGCCCCCAGAGCCGGG | 17 | 2147 |
| HSV1-UL19-606 | − | GGCGGGCCACCGCCGGG | 17 | 992 |
| HSV1-UL19-1749 | + | GGUCGCGCAGGGCCGGG | 17 | 2135 |
| HSV1-UL19-708 | − | GACGUGGAGCUGCCGGG | 17 | 1094 |
| HSV1-UL19-1536 | + | AGGCGCGGGGAUCCGGG | 17 | 1922 |
| HSV1-UL19-783 | − | UGCCGGGUUAGCGCGGG | 17 | 1169 |
| HSV1-UL19-614 | − | AUGCCGACACGCGCGGG | 17 | 1000 |
| HSV1-UL19-881 | − | GGCACGAAACUGGCGGG | 17 | 1267 |
| HSV1-UL19-1447 | + | AACAACAAAGCCAGGGG | 17 | 1833 |
| HSV1-UL19-1651 | + | CAGUCCCACACGAGGGG | 17 | 2037 |
| HSV1-UL19-1739 | + | ACAGCGCGUGGACGGGG | 17 | 2125 |
| HSV1-UL19-709 | − | ACGUGGAGCUGCCGGGG | 17 | 1095 |
| HSV1-UL19-3230 | + | CCCAAGGAAGGGCGGGG | 17 | 7829 |
| HSV1-UL19-882 | − | GCACGAAACUGGCGGGG | 17 | 1268 |
| HSV1-UL19-1544 | + | AAAAACAGCUGGCGGGG | 17 | 1930 |
| HSV1-UL19-1481 | + | GCGCUGUUUGAUCGGGG | 17 | 1867 |
| HSV1-UL19-1830 | + | GUCGGUCGACACGGGGG | 17 | 2216 |
| HSV1-UL19-1531 | + | AUCCGGGUGGCCGGGGG | 17 | 1917 |
| HSV1-UL19-710 | − | CGUGGAGCUGCCGGGGG | 17 | 1096 |
| HSV1-UL19-798 | − | CCGGCCGCACCGGGGGG | 17 | 1184 |
| HSV1-UL19-734 | − | GGGCCUGGAGCUGGGGG | 17 | 1120 |
| HSV1-UL19-702 | − | CGACUUCUUUGUGGGGG | 17 | 1088 |
| HSV1-UL19-768 | − | ACCGGCCCGGAGCUGGG | 17 | 1154 |
| HSV1-UL19-1728 | + | AUGGUCCAGAUGCUGGG | 17 | 2114 |
| HSV1-UL19-1501 | + | CACGCGCGUCGUCUGGG | 17 | 1887 |
| HSV1-UL19-809 | − | CACCCUGCAGAACAUGG | 17 | 1195 |
| HSV1-UL19-1714 | + | CUGCAGCGUGAGCAUGG | 17 | 2100 |
| HSV1-UL19-857 | − | GACCUACGCGCUCAUGG | 17 | 1243 |
| HSV1-UL19-1659 | + | CCCGGCAGUCGCGAUGG | 17 | 2045 |
| HSV1-UL19-1614 | + | GCGAACGGCGGCGAUGG | 17 | 2000 |
| HSV1-UL19-1776 | + | ACCCAAACCCGGGAUGG | 17 | 2162 |
| HSV1-UL19-1622 | + | CUCGCUGCCGUGUAUGG | 17 | 2008 |
| HSV1-UL19-877 | − | GCCCGGCACGAAACUGG | 17 | 1263 |
| HSV1-UL19-1549 | + | ACAGGCGCAGCACCUGG | 17 | 1935 |
| HSV1-UL19-760 | − | CGUGUACCGGGACCUGG | 17 | 1146 |
| HSV1-UL19-1455 | + | CGCCCGGGCCACCCUGG | 17 | 1841 |
| HSV1-UL19-648 | − | CGUUCCCUACCCCCUGG | 17 | 1034 |
| HSV1-UL19-686 | − | UGUUUUUGAACGCCUGG | 17 | 1072 |
| HSV1-UL19-1547 | + | CCCAAAAAAACAGCUGG | 17 | 1933 |
| HSV1-UL19-733 | − | CCGGGGCCUGGAGCUGG | 17 | 1119 |
| HSV1-UL19-1877 | + | AAACUGUACGUCGCUGG | 17 | 2263 |
| HSV1-UL19-1729 | + | UAUGGUCCAGAUGCUGG | 17 | 2115 |
| HSV1-UL19-816 | − | GCACCCGGCCAAUCUGG | 17 | 1202 |
| HSV1-UL19-851 | − | GGUCCCCCCGGCUCUGG | 17 | 1237 |
| HSV1-UL19-1502 | + | GCACGCGCGUCGUCUGG | 17 | 1888 |
| HSV1-UL19-645 | − | GAAGCUGGUCUUUCUGG | 17 | 1031 |
| HSV1-UL19-620 | − | GUCCUUCCUGAAAGUGG | 17 | 1006 |
| HSV1-UL19-680 | − | GUACGGGGCGUACGUGG | 17 | 1066 |
| HSV1-UL19-963 | − | GUGCCGCGAACUCGUGG | 17 | 1349 |
| HSV1-UL19-902 | − | GCGGAACGCGGUCGUGG | 17 | 1288 |
| HSV1-UL19-1496 | + | GCAUCUCCAGCAGGUGG | 17 | 1882 |
| HSV1-UL19-1613 | + | AACGGCGGCGAUGGUGG | 17 | 1999 |
| HSV1-UL19-1509 | + | GUAGGGAACGUUGGUGG | 17 | 1895 |
| HSV1-UL19-1723 | + | UAUGCGCAUGUUGGUGG | 17 | 2109 |
| HSV1-UL19-701 | − | GUUCGACUUCUUUGUGG | 17 | 1087 |
| HSV1-UL19-1561 | + | CGCCCCGUACGGAUUGG | 17 | 1947 |
| HSV1-UL19-1510 | + | GGGGUAGGGAACGUUGG | 17 | 1896 |
| HSV1-UL19-1724 | + | GAAUAUGCGCAUGUUGG | 17 | 2110 |
| HSV1-UL19-1870 | + | CAGGCAGCGAUGUUUGG | 17 | 2256 |
| HSV1-UL19-664 | − | GCCAGCUGUUUUUUUGG | 17 | 1050 |
| HSV1-UL19-1848 | + | GGCCGUGGUCGUACAUG | 17 | 2234 |
| HSV1-UL19-774 | − | ACUGUGACGCCCUGAUG | 17 | 1160 |
| HSV1-UL19-1899 | + | CCCCGUUGCGGGCACUG | 17 | 2285 |
| HSV1-UL19-899 | − | CGGCAGCCGUGUACCUG | 17 | 1285 |
| HSV1-UL19-685 | − | CUGUUUUUGAACGCCUG | 17 | 1071 |
| HSV1-UL19-906 | − | UGGCGGGAAACCGCCUG | 17 | 1292 |
| HSV1-UL19-732 | − | CCCGGGGCCUGGAGCUG | 17 | 1118 |
| HSV1-UL19-1695 | + | CCGUCACGGGGUCGCUG | 17 | 2081 |
| HSV1-UL19-1730 | + | GUAUGGUCCAGAUGCUG | 17 | 2116 |
| HSV1-UL19-850 | − | UGGUCCCCCCGGCUCUG | 17 | 1236 |
| HSV1-UL19-1503 | + | CGCACGCGCGUCGUCUG | 17 | 1889 |
| HSV1-UL19-1571 | + | CAGCUGCUGCAUGUCUG | 17 | 1957 |
| HSV1-UL19-964 | − | CUCGUGGAGGACCCGUG | 17 | 1350 |
| HSV1-UL19-772 | − | UGCUGCCACCCCUCGUG | 17 | 1158 |
| HSV1-UL19-1676 | + | CAGUCCGCCCCCCGGUG | 17 | 2062 |
| HSV1-UL19-1468 | + | GCUGCGUGGCCGUGGUG | 17 | 1854 |
| HSV1-UL19-700 | − | CGUUCGACUUCUUUGUG | 17 | 1086 |
| HSV1-UL19-3231 | − | CGCCCCGCCCUUCCUUG | 17 | 7830 |
| HSV1-UL19-1679 | + | CGUAGUAGUAAAUCUUG | 17 | 2065 |
| HSV1-UL19-1618 | + | ACACCGCCGGGUAGUUG | 17 | 2004 |
| HSV1-UL19-1863 | + | CCGGCGAGGCCCCGUUG | 17 | 2249 |
| HSV1-UL19-1901 | + | CGUGGGCUUCCCCGUUG | 17 | 2287 |
| HSV1-UL19-1667 | + | GCAGCUGGCCGUCGUUG | 17 | 2053 |
| HSV1-UL19-1796 | + | UGUCGGUGACGGGGUUG | 17 | 2182 |
| HSV1-UL19-1717 | + | UGCGUUCGGCCAUGUUG | 17 | 2103 |
| HSV1-UL19-698 | − | CGCGUUCGACUUCUUUG | 17 | 1084 |
| HSV1-UL19-1802 | + | CCCAGGUAAAAGUUUUG | 17 | 2188 |
| HSV1-UL19-663 | − | CGCCAGCUGUUUUUUUG | 17 | 1049 |
| HSV1-UL19-1748 | + | CAGGGCCGGGGGGAAAU | 17 | 2134 |
| HSV1-UL19-891 | − | AACCCCGUCACCGACAU | 17 | 1277 |
| HSV1-UL19-1576 | + | GGCCUUCCGCGACCCAU | 17 | 1962 |
| HSV1-UL19-642 | − | GCGGAUCUGGUGUCCAU | 17 | 1028 |
| HSV1-UL19-1451 | + | UCCAGGUAUCGUUGCAU | 17 | 1837 |
| HSV1-UL19-1710 | + | CGUGUUGGCCACCAGAU | 17 | 2096 |
| HSV1-UL19-693 | − | CCACGGGCGGGUCCGAU | 17 | 1079 |
| HSV1-UL19-668 | − | UCUCUGGAACACGCGAU | 17 | 1054 |
| HSV1-UL19-1562 | + | GUACGCCCCGUACGGAU | 17 | 1948 |
| HSV1-UL19-630 | − | GUCACGGCGCUCGUGAU | 17 | 1016 |
| HSV1-UL19-1484 | + | AGGAGGCGCUGUUUGAU | 17 | 1870 |
| HSV1-UL19-1528 | + | GGCCGGGGGCGGGGACU | 17 | 1914 |
| HSV1-UL19-1824 | + | UGCGCGCCGCGGCACCU | 17 | 2210 |
| HSV1-UL19-885 | − | CGCGCGAACGUGGACCU | 17 | 1271 |
| HSV1-UL19-751 | − | UACGUCGUGACCUACCU | 17 | 1137 |
| HSV1-UL19-893 | − | CCCCAAAACUUUUACCU | 17 | 1279 |
| HSV1-UL19-652 | − | ACGUUCGUCCUGCCCCU | 17 | 1038 |
| HSV1-UL19-684 | − | GCUGUUUUUGAACGCCU | 17 | 1070 |
| HSV1-UL19-905 | − | GUGGCGGGAAACCGCCU | 17 | 1291 |
| HSV1-UL19-1669 | + | GUCCGCGGCUCGGGCCU | 17 | 2055 |
| HSV1-UL19-1634 | + | CACGGCCAUGCACUCCU | 17 | 2020 |
| HSV1-UL19-582 | − | AACGUCCAGGCCGUCCU | 17 | 968 |
| HSV1-UL19-872 | − | UCGGAGGCGUACUUCCU | 17 | 1258 |
| HSV1-UL19-3232 | − | ACCGCCCCGCCCUUCCU | 17 | 7831 |
| HSV1-UL19-600 | − | GAGACGAGCUUUUUCCU | 17 | 986 |
| HSV1-UL19-1640 | + | AAAGUCAUCAACCAGCU | 17 | 2026 |
| HSV1-UL19-1647 | + | CAUUAGGUGAUUCAGCU | 17 | 2033 |
| HSV1-UL19-767 | − | CUGACCGGCCCGGAGCU | 17 | 1153 |
| HSV1-UL19-731 | − | GCCCGGGGCCUGGAGCU | 17 | 1117 |
| HSV1-UL19-1461 | + | GAAGCUUCGCUUUAGCU | 17 | 1847 |
| HSV1-UL19-1696 | + | UCCGUCACGGGGUCGCU | 17 | 2082 |
| HSV1-UL19-1672 | + | CCGCGGCGUCCGCGGCU | 17 | 2058 |
| HSV1-UL19-1788 | + | CACGUUCGCGCGCGGCU | 17 | 2174 |
| HSV1-UL19-1817 | + | GAACACGGGGACGGGCU | 17 | 2203 |
| HSV1-UL19-1731 | + | GGUAUGGUCCAGAUGCU | 17 | 2117 |
| HSV1-UL19-828 | − | AACGGCGCUGCUCUGCU | 17 | 1214 |
| HSV1-UL19-849 | − | CUGGUCCCCCCGGCUCU | 17 | 1235 |
| HSV1-UL19-1504 | + | GCGCACGCGCGUCGUCU | 17 | 1890 |
| HSV1-UL19-868 | − | UGAGAACGUGCUGUUCU | 17 | 1254 |
| HSV1-UL19-1904 | + | GAGAUACUGCGCGAAGU | 17 | 2290 |
| HSV1-UL19-1766 | + | GAUCGACGAAAAGUAGU | 17 | 2152 |
| HSV1-UL19-1511 | + | CAGGGGGUAGGGAACGU | 17 | 1897 |
| HSV1-UL19-1588 | + | CCCCGGCAGCUCCACGU | 17 | 1974 |
| HSV1-UL19-1490 | + | GUACGUCACCGGCACGU | 17 | 1876 |
| HSV1-UL19-634 | − | CGAAGUCUGGACGACGU | 17 | 1020 |
| HSV1-UL19-1835 | + | GCGGAAGUAGUUGACGU | 17 | 2221 |
| HSV1-UL19-951 | − | CUUUAAGUUCUUUACGU | 17 | 1337 |
| HSV1-UL19-940 | − | GGCCACGGCCAACCCGU | 17 | 1326 |
| HSV1-UL19-1574 | + | CCAUCGGACCCGCCCGU | 17 | 1960 |
| HSV1-UL19-1720 | + | GGUGUUGGCGCCCGCGU | 17 | 2106 |
| HSV1-UL19-1772 | + | CCCCGCCAUGAGCGCGU | 17 | 2158 |
| HSV1-UL19-1902 | + | GUGGGUCUCCCGCGCGU | 17 | 2288 |
| HSV1-UL19-869 | − | GUUCUCGGAGCGCGCGU | 17 | 1255 |
| HSV1-UL19-887 | − | AACGUGGACCUGGGCGU | 17 | 1273 |
| HSV1-UL19-1493 | + | GAGCGCCGUGACCAGGU | 17 | 1879 |
| HSV1-UL19-1583 | + | CAGCUCAAGAGCCAGGU | 17 | 1969 |
| HSV1-UL19-1630 | + | AAGGUCUCCCCCGAGGU | 17 | 2016 |
| HSV1-UL19-672 | − | AACGUUGACGCGGCGGU | 17 | 1058 |
| HSV1-UL19-1857 | + | CUGCGACGCCCACGGGU | 17 | 2243 |
| HSV1-UL19-1888 | + | GGCGCAGGUGAGCGGGU | 17 | 2274 |
| HSV1-UL19-1513 | + | GGCGCCCACCAGGGGGU | 17 | 1899 |
| HSV1-UL19-735 | − | GGCCUGGAGCUGGGGGU | 17 | 1121 |
| HSV1-UL19-649 | − | GUUCCCUACCCCCUGGU | 17 | 1035 |
| HSV1-UL19-1445 | + | CACGUGCAGCAUCUGGU | 17 | 1831 |
| HSV1-UL19-1745 | + | CGCGUUCGCCACGUGGU | 17 | 2131 |
| HSV1-UL19-1861 | + | GGCCCCGUUGAGGUGGU | 17 | 2247 |
| HSV1-UL19-1800 | + | GGGAAGGUUGCCCAUGU | 17 | 2186 |
| HSV1-UL19-1725 | + | GUCGAAUAUGCGCAUGU | 17 | 2111 |
| HSV1-UL19-1869 | + | AUGUUUGGCGGCGAUGU | 17 | 2255 |
| HSV1-UL19-1781 | + | UCACAAAGCGGUCCUGU | 17 | 2167 |
| HSV1-UL19-3215 | + | CGUUGCGAGCGAGCUGU | 17 | 7814 |
| HSV1-UL19-1767 | + | GCUGCACGACGGGCUGU | 17 | 2153 |
| HSV1-UL19-1711 | + | CAUGGCGUUGACCGUGU | 17 | 2097 |
| HSV1-UL19-1478 | + | CGGCCGCCCGCGCGUGU | 17 | 1864 |
| HSV1-UL19-773 | − | GCUGCCACCCCUCGUGU | 17 | 1159 |
| HSV1-UL19-1721 | + | GGUGGUGGACGCGGUGU | 17 | 2107 |
| HSV1-UL19-1582 | + | AGCCAGGUUGGCGUUGU | 17 | 1968 |
| HSV1-UL19-1716 | + | GCGUUCGGCCAUGUUGU | 17 | 2102 |
| HSV1-UL19-699 | − | GCGUUCGACUUCUUUGU | 17 | 1085 |
| HSV1-UL19-1747 | + | AGGGCCGGGGGGAAAUU | 17 | 2133 |
| HSV1-UL19-1648 | + | GCGCCGGGUCUCGCAUU | 17 | 2034 |
| HSV1-UL19-3233 | − | CCGCCCCGCCCUUCCUU | 17 | 7832 |
| HSV1-UL19-1489 | + | CACCGGCACGUCGGCUU | 17 | 1875 |
| HSV1-UL19-1718 | + | CAGCGCCGUUGUGCGUU | 17 | 2104 |
| HSV1-UL19-956 | − | GAUCGUGGAGACGGGUU | 17 | 1342 |
| HSV1-UL19-865 | − | GGCCUCCAUCCCGGGUU | 17 | 1251 |
| HSV1-UL19-1871 | + | CUCCAGGCAGCGAUGUU | 17 | 2257 |
| HSV1-UL19-908 | − | CAGCCCGUCCCCGUGUU | 17 | 1294 |
| HSV1-UL19-1735 | + | AAAAAUAGUCGCCAUUU | 17 | 2121 |
| HSV1-UL19-1804 | + | GGCCCAGGUAAAAGUUU | 17 | 2190 |
| HSV1-UL19-866 | − | GCCUCCAUCCCGGGUUU | 17 | 1252 |
| HSV1-UL19-1803 | + | GCCCAGGUAAAAGUUUU | 17 | 2189 |
| HSV1-UL19-661 | − | CCCGCCAGCUGUUUUUU | 17 | 1047 |
| HSV1-UL19-662 | − | CCGCCAGCUGUUUUUUU | 17 | 1048 |
| HSV1-UL19-445 | − | CUGGACCAUACCAUCCAAAA | 20 | 831 |
| HSV1-UL19-195 | − | GCUGCACGUGCUGCUGGAAA | 20 | 581 |
| HSV1-UL19-434 | − | CAACAUGGCCGAACGCACAA | 20 | 820 |
| HSV1-UL19-425 | − | GUCAACGCCAUGUUUCACAA | 20 | 811 |
| HSV1-UL19-198 | − | AUGCAACGAUACCUGGACAA | 20 | 584 |
| HSV1-UL19-574 | − | CUCCUCCGCAGUGCCCGCAA | 20 | 960 |
| HSV1-UL19-554 | − | AACGGGGCCUACCACCUCAA | 20 | 940 |
| HSV1-UL19-580 | − | UAUGACGCAUCCCCGCUCAA | 20 | 966 |
| HSV1-UL19-1087 | + | CGUCAACGUUCAUCAGCGAA | 20 | 1473 |
| HSV1-UL19-1150 | + | GUCGUCGAACGCCCCGCGAA | 20 | 1536 |
| HSV1-UL19-262 | − | UGUUCAAUCCGGUCAUGGAA | 20 | 648 |
| HSV1-UL19-231 | − | UACGGCGAGAUGGUCCUGAA | 20 | 617 |
| HSV1-UL19-327 | − | GCCACCUGGCGCGUGGUGAA | 20 | 713 |
| HSV1-UL19-551 | − | UACGGGGACCUGCUCUAUAA | 20 | 937 |
| HSV1-UL19-1245 | + | CACGCGCCCGUUGUGAAACA | 20 | 1631 |
| HSV1-UL19-433 | − | GCAGGUGCUGGCCCACAACA | 20 | 819 |
| HSV1-UL19-424 | − | GGCCAAUCUGGUGGCCAACA | 20 | 810 |
| HSV1-UL19-415 | − | AUACGCCACCCUGCAGAACA | 20 | 801 |
| HSV1-UL19-1356 | + | CACCUGGGCGCACCCGAACA | 20 | 1742 |
| HSV1-UL19-1362 | + | GGUGGCGAUAAACUCACACA | 20 | 1748 |
| HSV1-UL19-1419 | + | GCCUCCUGAAACAGGCCACA | 20 | 1805 |
| HSV1-UL19-1085 | + | CAUCAGCGAAGGGUGGCACA | 20 | 1471 |
| HSV1-UL19-497 | − | CCGCAACCCCGUCACCGACA | 20 | 883 |
| HSV1-UL19-1367 | + | GUAGUUGACGUCGGUCGACA | 20 | 1753 |
| HSV1-UL19-536 | − | GGGCGUUUACGCGGGGGACA | 20 | 922 |
| HSV1-UL19-350 | − | CUGCUGCAGGCCGCCAUACA | 20 | 736 |
| HSV1-UL19-1198 | + | GUUACAUGCCGCCGCGUACA | 20 | 1584 |
| HSV1-UL19-1345 | + | GACCGCGUUCCGCAGGUACA | 20 | 1731 |
| HSV1-UL19-1168 | + | CGCCACCAGGUCCCGGUACA | 20 | 1554 |
| HSV1-UL19-1049 | + | CAGGUCCAUGGCGCCCACCA | 20 | 1435 |
| HSV1-UL19-201 | − | CAACGGCCGCCUGGCCACCA | 20 | 587 |
| HSV1-UL19-217 | − | CUGGCUCGUGGACCUCACCA | 20 | 603 |
| HSV1-UL19-541 | − | ACCGCCCUCAUGUACGACCA | 20 | 927 |
| HSV1-UL19-992 | + | UCGCUUUAGCUCGGCGACCA | 20 | 1378 |
| HSV1-UL19-1292 | + | CCCCAGAGCCGGGGGGACCA | 20 | 1678 |
| HSV1-UL19-522 | − | CGGCGCGCAGGGAUGGACCA | 20 | 908 |
| HSV1-UL19-1392 | + | GAAAAUCGCUGCGACGCCCA | 20 | 1778 |
| HSV1-UL19-1055 | + | GACCGGAUUGAACAGGCCCA | 20 | 1441 |
| HSV1-UL19-295 | − | UGGGGGCAGCGCCUGGCCCA | 20 | 681 |
| HSV1-UL19-982 | + | CAUCGGCAACAACAAAGCCA | 20 | 1368 |
| HSV1-UL19-343 | − | GGGGGUGGGACGCCACGCCA | 20 | 729 |
| HSV1-UL19-1134 | + | CGCCGCCGGACAUAGCGCCA | 20 | 1520 |
| HSV1-UL19-257 | − | CUACCCCCUGGUGGGCGCCA | 20 | 643 |
| HSV1-UL19-1307 | + | GAGCUGAUGAUGCAAGGCCA | 20 | 1693 |
| HSV1-UL19-1006 | + | CGUCAGACGGGGCACGGCCA | 20 | 1392 |
| HSV1-UL19-545 | − | GUCCCGGGCCUUCGCGGCCA | 20 | 931 |
| HSV1-UL19-1157 | + | CUGGACCACGAGCCGGGCCA | 20 | 1543 |
| HSV1-UL19-1142 | + | GGCGAUGGUGGCGGGGGCCA | 20 | 1528 |
| HSV1-UL19-1171 | + | GUCAUCAACCAGCUGGGCCA | 20 | 1557 |
| HSV1-UL19-496 | − | CUACACCGCCGUCGUGGCCA | 20 | 882 |
| HSV1-UL19-1040 | + | GGCGUAGAUGCGCUUCUCCA | 20 | 1426 |
| HSV1-UL19-1051 | + | CAGGACGAACGUCAGGUCCA | 20 | 1437 |
| HSV1-UL19-1190 | + | GCAGUCGCGAUGGCGGUCCA | 20 | 1576 |
| HSV1-UL19-565 | − | GACGGGUUCGGCGGUGUCCA | 20 | 951 |
| HSV1-UL19-1400 | + | GACGUAAAGAACUUAAAGCA | 20 | 1786 |
| HSV1-UL19-1248 | + | CAGCACCUGCAGCGUGAGCA | 20 | 1634 |
| HSV1-UL19-520 | − | CCCAGGUGCCGCGGCGCGCA | 20 | 906 |
| HSV1-UL19-1287 | + | CUGCCGCGACAGGUCGCGCA | 20 | 1673 |
| HSV1-UL19-1028 | + | CACGUCGUCCAGACUUCGCA | 20 | 1414 |
| HSV1-UL19-193 | − | CGGGGCGUUUGAGCGCGGCA | 20 | 579 |
| HSV1-UL19-1007 | + | GGCAUGCGUCAGACGGGGCA | 20 | 1393 |
| HSV1-UL19-238 | − | CACGGCGCUCGUGAUGGGCA | 20 | 624 |
| HSV1-UL19-208 | − | GACGAGCUUUUUCCUGGGCA | 20 | 594 |
| HSV1-UL19-1308 | + | CGUCUUGAGCUGAUGAUGCA | 20 | 1694 |
| HSV1-UL19-1220 | + | CGGGACCACCAUGUUCUGCA | 20 | 1606 |
| HSV1-UL19-363 | − | AGACCUUCCCGAGGAGUGCA | 20 | 749 |
| HSV1-UL19-1239 | + | CACCAGAUUGGCCGGGUGCA | 20 | 1625 |
| HSV1-UL19-1211 | + | GUAGUAAAUCUUGUGGUGCA | 20 | 1597 |
| HSV1-UL19-1371 | + | GCGCGUCCCCGGGGGUUGCA | 20 | 1757 |
| HSV1-UL19-1188 | + | CAGGGCCGCGCGCCGCAUCA | 20 | 1574 |
| HSV1-UL19-579 | − | CUAUGACGCAUCCCCGCUCA | 20 | 965 |
| HSV1-UL19-463 | − | CGCGCUGACCUACGCGCUCA | 20 | 849 |
| HSV1-UL19-1233 | + | GGGGUGCGCGGGGUCCGUCA | 20 | 1619 |
| HSV1-UL19-1175 | + | GCCCAGCUCCGGGCCGGUCA | 20 | 1561 |
| HSV1-UL19-261 | − | GGGCCUGUUCAAUCCGGUCA | 20 | 647 |
| HSV1-UL19-235 | − | GAACGGGGCCAACCUGGUCA | 20 | 621 |
| HSV1-UL19-468 | − | CUUGCAUCAUCAGCUCAAGA | 20 | 854 |
| HSV1-UL19-1010 | + | GCGUGUCGGCAUGCGUCAGA | 20 | 1396 |
| HSV1-UL19-1215 | + | GCAGCAGCGGCCCCGCGAGA | 20 | 1601 |
| HSV1-UL19-230 | − | GCCGGUGACGUACGGCGAGA | 20 | 616 |
| HSV1-UL19-1342 | + | CUGCCGCGUUGUCCAGGAGA | 20 | 1728 |
| HSV1-UL19-561 | − | GGAGCGCCUGAUCGUGGAGA | 20 | 947 |
| HSV1-UL19-395 | − | GCGGACUUCAACCGCAACGA | 20 | 781 |
| HSV1-UL19-1186 | + | GGCGUCACAGUCCCACACGA | 20 | 1572 |
| HSV1-UL19-1326 | + | GACGGUUGCCGUGGCCACGA | 20 | 1712 |
| HSV1-UL19-1302 | + | CUCGCGGACGUGCUGCACGA | 20 | 1688 |
| HSV1-UL19-1313 | + | AAAGCGGUCCUGUCGGACGA | 20 | 1699 |
| HSV1-UL19-1039 | + | AAAGACCAGCUUCUCGCCGA | 20 | 1425 |
| HSV1-UL19-299 | − | UGGCCCACGGGCGGGUCCGA | 20 | 685 |
| HSV1-UL19-1088 | + | GCGUCAACGUUCAUCAGCGA | 20 | 1474 |
| HSV1-UL19-1388 | + | CGGGUUGGCCGUGGCCGCGA | 20 | 1774 |
| HSV1-UL19-1193 | + | CGCUAACCCGGCAGUCGCGA | 20 | 1579 |
| HSV1-UL19-1148 | + | CGCCCCGCGAACGGCGGCGA | 20 | 1534 |
| HSV1-UL19-999 | + | GUCCACGAGCCAGGCCUCGA | 20 | 1385 |
| HSV1-UL19-223 | − | ACGCGCGGGCGGCCGGUCGA | 20 | 609 |
| HSV1-UL19-439 | − | ACCAACAUGCGCAUAUUCGA | 20 | 825 |
| HSV1-UL19-1093 | + | GUACGGAUUGGCGGCUUCGA | 20 | 1479 |
| HSV1-UL19-538 | − | GUUUACGCGGGGGACAAGGA | 20 | 924 |
| HSV1-UL19-1020 | + | GGUGUCCUCCACUUUCAGGA | 20 | 1406 |
| HSV1-UL19-976 | + | GCGCUCAAACGCCCCGAGGA | 20 | 1362 |
| HSV1-UL19-1429 | + | GUUGCGGGCACUGCGGAGGA | 20 | 1815 |
| HSV1-UL19-1004 | + | AGACGGGGCACGGCCACGGA | 20 | 1390 |
| HSV1-UL19-302 | − | CGGGUCCGAUGGGUCGCGGA | 20 | 688 |
| HSV1-UL19-1328 | + | GUCGGUGACGGGGUUGCGGA | 20 | 1714 |
| HSV1-UL19-521 | − | GGUGCCGCGGCGCGCAGGGA | 20 | 907 |
| HSV1-UL19-1310 | + | CGGUGAACCCAAACCCGGGA | 20 | 1696 |
| HSV1-UL19-1385 | + | GUGGCCGCGAAGGCCCGGGA | 20 | 1771 |
| HSV1-UL19-1075 | + | AAACAGCUGGCGGGGCGGGA | 20 | 1461 |
| HSV1-UL19-1165 | + | CGGCCAUGCACUCCUCGGGA | 20 | 1551 |
| HSV1-UL19-1353 | + | GGCGCACCCGAACACGGGGA | 20 | 1739 |
| HSV1-UL19-1271 | + | GAACAGCGCGUGGACGGGGA | 20 | 1657 |
| HSV1-UL19-272 | − | CCAGCUGUUUUUUUGGGGGA | 20 | 658 |
| HSV1-UL19-1334 | + | CCAGGUAAAAGUUUUGGGGA | 20 | 1720 |
| HSV1-UL19-429 | − | AACGGGCGCGUGGUAGUGGA | 20 | 815 |
| HSV1-UL19-1275 | + | CCCGGCGAACAGCGCGUGGA | 20 | 1661 |
| HSV1-UL19-3212 | + | GUUGCGAGCGAGCUGUUGGA | 20 | 7811 |
| HSV1-UL19-1267 | + | AAAAUAGUCGCCAUUUUGGA | 20 | 1653 |
| HSV1-UL19-1380 | + | CUGGCCGUGGUCGUACAUGA | 20 | 1766 |
| HSV1-UL19-443 | − | GCACGCCGGAAUCCUGCUGA | 20 | 829 |
| HSV1-UL19-407 | − | CAAGAUUUACUACUACGUGA | 20 | 793 |
| HSV1-UL19-420 | − | GUGCCCCAGCGACCCCGUGA | 20 | 806 |
| HSV1-UL19-236 | − | CCUGGUCACGGCGCUCGUGA | 20 | 622 |
| HSV1-UL19-1332 | + | AAGGUUGCCCAUGUCGGUGA | 20 | 1718 |
| HSV1-UL19-229 | − | GCCGACGUGCCGGUGACGUA | 20 | 615 |
| HSV1-UL19-1096 | + | GCCGCCACGUACGCCCCGUA | 20 | 1482 |
| HSV1-UL19-283 | − | GUCGAAGCCGCCAAUCCGUA | 20 | 669 |
| HSV1-UL19-548 | − | GCGUCGCAGCGAUUUUCGUA | 20 | 934 |
| HSV1-UL19-1045 | + | AUGGCGCCCACCAGGGGGUA | 20 | 1431 |
| HSV1-UL19-1266 | + | AGUCGCCAUUUUGGAUGGUA | 20 | 1652 |
| HSV1-UL19-1156 | + | GACGUGCUCGCUGCCGUGUA | 20 | 1542 |
| HSV1-UL19-1089 | + | CUUCGACGGGGUCGCGGUUA | 20 | 1475 |
| HSV1-UL19-483 | − | CAGGUGGCCCGGCACGAAAC | 20 | 869 |
| HSV1-UL19-1420 | + | GCGGGUAGGCCUCCUGAAAC | 20 | 1806 |
| HSV1-UL19-426 | − | UCAACGCCAUGUUUCACAAC | 20 | 812 |
| HSV1-UL19-575 | − | UCCUCCGCAGUGCCCGCAAC | 20 | 961 |
| HSV1-UL19-40 | + | GCUGUUGGAUGGCGCGCAAC | 20 | 421 |
| HSV1-UL19-555 | − | ACGGGGCCUACCACCUCAAC | 20 | 941 |
| HSV1-UL19-245 | − | AGGAGCAGCUCGACCUGAAC | 20 | 631 |
| HSV1-UL19-232 | − | ACGGCGAGAUGGUCCUGAAC | 20 | 618 |
| HSV1-UL19-1057 | + | GUUCCAUGACCGGAUUGAAC | 20 | 1443 |
| HSV1-UL19-552 | − | ACGGGGACCUGCUCUAUAAC | 20 | 938 |
| HSV1-UL19-1355 | + | ACCUGGGCGCACCCGAACAC | 20 | 1741 |
| HSV1-UL19-1418 | + | CCUCCUGAAACAGGCCACAC | 20 | 1804 |
| HSV1-UL19-1366 | + | UAGUUGACGUCGGUCGACAC | 20 | 1752 |
| HSV1-UL19-1197 | + | UUACAUGCCGCCGCGUACAC | 20 | 1583 |
| HSV1-UL19-1391 | + | AAAAUCGCUGCGACGCCCAC | 20 | 1777 |
| HSV1-UL19-296 | − | GGGGGCAGCGCCUGGCCCAC | 20 | 682 |
| HSV1-UL19-1306 | + | AGCUGAUGAUGCAAGGCCAC | 20 | 1692 |
| HSV1-UL19-1398 | + | UUAAAGCAGGGGCUGAGCAC | 20 | 1784 |
| HSV1-UL19-400 | − | CCGCGGAUGACCGGCCGCAC | 20 | 786 |
| HSV1-UL19-1161 | + | UCCAGUAGCUGGUGAUGCAC | 20 | 1547 |
| HSV1-UL19-1024 | + | ACCAUCUCGCCGUACGUCAC | 20 | 1410 |
| HSV1-UL19-1232 | + | GGGUGCGCGGGGUCCGUCAC | 20 | 1618 |
| HSV1-UL19-469 | − | UUGCAUCAUCAGCUCAAGAC | 20 | 855 |
| HSV1-UL19-1009 | + | CGUGUCGGCAUGCGUCAGAC | 20 | 1395 |
| HSV1-UL19-1084 | + | CGAUCGCGUGUUCCAGAGAC | 20 | 1470 |
| HSV1-UL19-562 | − | GAGCGCCUGAUCGUGGAGAC | 20 | 948 |
| HSV1-UL19-1301 | + | UCGCGGACGUGCUGCACGAC | 20 | 1687 |
| HSV1-UL19-474 | − | UGGGUUCACCGUCGUCCGAC | 20 | 860 |
| HSV1-UL19-1289 | + | CCAGGGGGACCUGCCGCGAC | 20 | 1675 |
| HSV1-UL19-1012 | + | GUGACGAGCACCCCGUCGAC | 20 | 1398 |
| HSV1-UL19-224 | − | CGCGCGGGCGGCCGGUCGAC | 20 | 610 |
| HSV1-UL19-440 | − | CCAACAUGCGCAUAUUCGAC | 20 | 826 |
| HSV1-UL19-1092 | + | UACGGAUUGGCGGCUUCGAC | 20 | 1478 |
| HSV1-UL19-406 | − | GGCCGCACCGGGGGGCGGAC | 20 | 792 |
| HSV1-UL19-581 | − | CGCAUCCCCGCUCAAGGGAC | 20 | 967 |
| HSV1-UL19-1384 | + | UGGCCGCGAAGGCCCGGGAC | 20 | 1770 |
| HSV1-UL19-1352 | + | GCGCACCCGAACACGGGGAC | 20 | 1738 |
| HSV1-UL19-430 | − | ACGGGCGCGUGGUAGUGGAC | 20 | 816 |
| HSV1-UL19-1274 | + | CCGGCGAACAGCGCGUGGAC | 20 | 1660 |
| HSV1-UL19-1058 | + | GCGGCAAACCGUUCCAUGAC | 20 | 1444 |
| HSV1-UL19-399 | − | CCGCGGACGCCGCGGAUGAC | 20 | 785 |
| HSV1-UL19-371 | − | GUUGAUGACUUUACCCUGAC | 20 | 757 |
| HSV1-UL19-1331 | + | AGGUUGCCCAUGUCGGUGAC | 20 | 1717 |
| HSV1-UL19-354 | − | UCCAGUGCAUCACCAGCUAC | 20 | 740 |
| HSV1-UL19-284 | − | UCGAAGCCGCCAAUCCGUAC | 20 | 670 |
| HSV1-UL19-549 | − | CGUCGCAGCGAUUUUCGUAC | 20 | 935 |
| HSV1-UL19-364 | − | AGGAGUGCAUGGCCGUGUAC | 20 | 750 |
| HSV1-UL19-1312 | + | GACGACGGUGAACCCAAACC | 20 | 1698 |
| HSV1-UL19-304 | − | GCAGCCCGACAACGCCAACC | 20 | 690 |
| HSV1-UL19-234 | − | GGUCCUGAACGGGGCCAACC | 20 | 620 |
| HSV1-UL19-1194 | + | CGUGGCCCCCCGCGCUAACC | 20 | 1580 |
| HSV1-UL19-1050 | + | UCAGGUCCAUGGCGCCCACC | 20 | 1436 |
| HSV1-UL19-1170 | + | GGGCCUCGACGUGCGCCACC | 20 | 1556 |
| HSV1-UL19-325 | − | CGGGGGAGAUCCAGGCCACC | 20 | 711 |
| HSV1-UL19-267 | − | AGUCCCCGCCCCCGGCCACC | 20 | 653 |
| HSV1-UL19-1318 | + | CAGUUUCGUGCCGGGCCACC | 20 | 1704 |
| HSV1-UL19-200 | − | ACAACGGCCGCCUGGCCACC | 20 | 586 |
| HSV1-UL19-1083 | + | CCAGAGACAGGCGCAGCACC | 20 | 1469 |
| HSV1-UL19-401 | − | CGCGGAUGACCGGCCGCACC | 20 | 787 |
| HSV1-UL19-1358 | + | UCCCUGCGCGCCGCGGCACC | 20 | 1744 |
| HSV1-UL19-421 | − | CCCCGCGCACCCCCUGCACC | 20 | 807 |
| HSV1-UL19-378 | − | GAAUCACCUAAUGCGAGACC | 20 | 764 |
| HSV1-UL19-993 | + | UUCGCUUUAGCUCGGCGACC | 20 | 1379 |
| HSV1-UL19-366 | − | CAUGGCCGUGUACCGGGACC | 20 | 752 |
| HSV1-UL19-1293 | + | CCCCCAGAGCCGGGGGGACC | 20 | 1679 |
| HSV1-UL19-491 | − | GCCGCGCGCGAACGUGGACC | 20 | 877 |
| HSV1-UL19-1027 | + | CCAUCACGAGCGCCGUGACC | 20 | 1413 |
| HSV1-UL19-197 | − | GUUGCCGAUGCAACGAUACC | 20 | 583 |
| HSV1-UL19-347 | − | GUUCGACGACCGCAACUACC | 20 | 733 |
| HSV1-UL19-365 | − | GGAGUGCAUGGCCGUGUACC | 20 | 751 |
| HSV1-UL19-499 | − | CCUUCCCCAAAACUUUUACC | 20 | 885 |
| HSV1-UL19-1311 | + | ACGACGGUGAACCCAAACCC | 20 | 1697 |
| HSV1-UL19-396 | − | CCAGCUGCUGCACAACACCC | 20 | 782 |
| HSV1-UL19-989 | + | CAGGGUCGCCCGGGCCACCC | 20 | 1375 |
| HSV1-UL19-1416 | + | UCCACGAGUUCGCGGCACCC | 20 | 1802 |
| HSV1-UL19-205 | − | CAGGGUGGCCCGGGCGACCC | 20 | 591 |
| HSV1-UL19-303 | − | CGCGGAAGGCCAGAUGACCC | 20 | 689 |
| HSV1-UL19-525 | − | UCCGCCGGCCCUGCAACCCC | 20 | 911 |
| HSV1-UL19-1415 | + | CCACGAGUUCGCGGCACCCC | 20 | 1801 |
| HSV1-UL19-526 | − | CCGCCGGCCCUGCAACCCCC | 20 | 912 |
| HSV1-UL19-254 | − | CACCAACGUUCCCUACCCCC | 20 | 640 |
| HSV1-UL19-1122 | + | GCCGGGGGAACGUCCCCCCC | 20 | 1508 |
| HSV1-UL19-567 | − | GUACAGUUUAAGCGCCCCCC | 20 | 953 |
| HSV1-UL19-1210 | + | GCACGGUCCAGUCCGCCCCC | 20 | 1596 |
| HSV1-UL19-566 | − | CGUACAGUUUAAGCGCCCCC | 20 | 952 |
| HSV1-UL19-1105 | + | GUGGGCCAGGCGCUGCCCCC | 20 | 1491 |
| HSV1-UL19-1128 | + | AGGUGGCCUGGAUCUCCCCC | 20 | 1514 |
| HSV1-UL19-453 | − | CCUGUCGCGGCAGGUCCCCC | 20 | 839 |
| HSV1-UL19-454 | − | GCAGGUCCCCCUGGUCCCCC | 20 | 840 |
| HSV1-UL19-450 | − | GAACGCGCCCAAUUUCCCCC | 20 | 836 |
| HSV1-UL19-1378 | + | GUCCCCCGCGUAAACGCCCC | 20 | 1764 |
| HSV1-UL19-266 | − | GGGGACCUAGUCCCCGCCCC | 20 | 652 |
| HSV1-UL19-196 | − | GCUGGAAAAGGCGCCGCCCC | 20 | 582 |
| HSV1-UL19-418 | − | GUGGUCCCGGAGAUCGCCCC | 20 | 804 |
| HSV1-UL19-1138 | + | CACCCCCAGCUCCAGGCCCC | 20 | 1524 |
| HSV1-UL19-1348 | + | GGACGGGCUGGGCCGGCCCC | 20 | 1734 |
| HSV1-UL19-258 | − | CCUGACGUUCGUCCUGCCCC | 20 | 644 |
| HSV1-UL19-328 | − | GGUGAACGGCAACUUGCCCC | 20 | 714 |
| HSV1-UL19-1129 | + | CAGGUGGCCUGGAUCUCCCC | 20 | 1515 |
| HSV1-UL19-1375 | + | GCCCCCGGCGGCGCGUCCCC | 20 | 1761 |
| HSV1-UL19-318 | − | GCCGGGGGGGGACGUUCCCC | 20 | 704 |
| HSV1-UL19-1324 | + | CGGCGGUGUAGCCCACGCCC | 20 | 1710 |
| HSV1-UL19-334 | − | GGCGGCGUUCCGGGACGCCC | 20 | 720 |
| HSV1-UL19-351 | − | CGAGCACGUCUUCUGCGCCC | 20 | 737 |
| HSV1-UL19-517 | − | CCCCGUGUUCGGGUGCGCCC | 20 | 903 |
| HSV1-UL19-990 | + | CUCGGCGACCAGGGUCGCCC | 20 | 1376 |
| HSV1-UL19-1386 | + | GGCCGUGGCCGCGAAGGCCC | 20 | 1772 |
| HSV1-UL19-1056 | + | UGACCGGAUUGAACAGGCCC | 20 | 1442 |
| HSV1-UL19-1139 | + | CCACCCCCAGCUCCAGGCCC | 20 | 1525 |
| HSV1-UL19-369 | − | GGUGGCGCACGUCGAGGCCC | 20 | 755 |
| HSV1-UL19-253 | − | GCUGGUCUUUCUGGAGGCCC | 20 | 639 |
| HSV1-UL19-321 | − | GACGUUCCCCCGGCCGGCCC | 20 | 707 |
| HSV1-UL19-1338 | + | GAGGGGGAGCCCCGCGGCCC | 20 | 1724 |
| HSV1-UL19-383 | − | CCUGAUGCGGCGCGCGGCCC | 20 | 769 |
| HSV1-UL19-288 | − | CGGGGCGUACGUGGCGGCCC | 20 | 674 |
| HSV1-UL19-1277 | + | GUUCGCCACGUGGUCGGCCC | 20 | 1663 |
| HSV1-UL19-1316 | + | GGGCCACCUGGAGCUGGCCC | 20 | 1702 |
| HSV1-UL19-204 | − | CCUGGCCACCAGGGUGGCCC | 20 | 590 |
| HSV1-UL19-995 | + | GGCGGUGGCCCGCCUUGCCC | 20 | 1381 |
| HSV1-UL19-471 | − | UCAAGACGGGCCUCCAUCCC | 20 | 857 |
| HSV1-UL19-1304 | + | GUAGGUCAGCGCGUUCUCCC | 20 | 1690 |
| HSV1-UL19-543 | − | CGGCCAGAGCGACCCGUCCC | 20 | 929 |
| HSV1-UL19-1376 | + | CGCCCCCGGCGGCGCGUCCC | 20 | 1762 |
| HSV1-UL19-1060 | + | GGGGGCGGGGACUAGGUCCC | 20 | 1446 |
| HSV1-UL19-983 | + | GCAUCGGCAACAACAAAGCC | 20 | 1369 |
| HSV1-UL19-1117 | + | CGGGGUGCAGCUCAAGAGCC | 20 | 1503 |
| HSV1-UL19-1297 | + | AGUAGUUGGCCCCCAGAGCC | 20 | 1683 |
| HSV1-UL19-1159 | + | GAUGCACUGGACCACGAGCC | 20 | 1545 |
| HSV1-UL19-1000 | + | CGUGGUGAGGUCCACGAGCC | 20 | 1386 |
| HSV1-UL19-290 | − | AGCAGCUGUUUUUGAACGCC | 20 | 676 |
| HSV1-UL19-264 | − | AACGGUUUGCCGCGCACGCC | 20 | 650 |
| HSV1-UL19-333 | − | CGGCGGCGUUCCGGGACGCC | 20 | 719 |
| HSV1-UL19-511 | − | GGUCGUGGCGGGAAACCGCC | 20 | 897 |
| HSV1-UL19-1152 | + | GCAGCAGGUAAAACACCGCC | 20 | 1538 |
| HSV1-UL19-212 | − | GGGCAAGGCGGGCCACCGCC | 20 | 598 |
| HSV1-UL19-273 | − | UUUUUGGGGGAAGGACCGCC | 20 | 659 |
| HSV1-UL19-529 | − | ACCCCCGGGGACGCGCCGCC | 20 | 915 |
| HSV1-UL19-199 | − | AUACCUGGACAACGGCCGCC | 20 | 585 |
| HSV1-UL19-1182 | + | CGAGGGGUGGCAGCAGCGCC | 20 | 1568 |
| HSV1-UL19-294 | − | GAACGCCUGGGGGCAGCGCC | 20 | 680 |
| HSV1-UL19-1135 | + | ACGCCGCCGGACAUAGCGCC | 20 | 1521 |
| HSV1-UL19-1132 | + | GUUGCCGUUCACCACGCGCC | 20 | 1518 |
| HSV1-UL19-1226 | + | UCGCUGGGGCACUCCUCGCC | 20 | 1612 |
| HSV1-UL19-991 | + | GCUCGGCGACCAGGGUCGCC | 20 | 1377 |
| HSV1-UL19-447 | − | CCGUCCACGCGCUGUUCGCC | 20 | 833 |
| HSV1-UL19-1387 | + | UGGCCGUGGCCGCGAAGGCC | 20 | 1773 |
| HSV1-UL19-215 | − | GCCGGGAGGCCGUCGAGGCC | 20 | 601 |
| HSV1-UL19-523 | − | CGCAGGGAUGGACCACGGCC | 20 | 909 |
| HSV1-UL19-975 | + | CAAACGCCCCGAGGACGGCC | 20 | 1361 |
| HSV1-UL19-372 | − | UGACUUUACCCUGACCGGCC | 20 | 758 |
| HSV1-UL19-320 | − | GGACGUUCCCCCGGCCGGCC | 20 | 706 |
| HSV1-UL19-1125 | + | GGAUCUCCCCCGGGCCGGCC | 20 | 1511 |
| HSV1-UL19-1098 | + | UGUCUGCGGCGGGGCCGGCC | 20 | 1484 |
| HSV1-UL19-461 | − | ACGUCCGCGAGAGCGCGGCC | 20 | 847 |
| HSV1-UL19-1285 | + | GCGACAGGUCGCGCAGGGCC | 20 | 1671 |
| HSV1-UL19-1158 | + | ACUGGACCACGAGCCGGGCC | 20 | 1544 |
| HSV1-UL19-1203 | + | CGGCGUCCGCGGCUCGGGCC | 20 | 1589 |
| HSV1-UL19-336 | − | GUUCCGGGACGCCCGGGGCC | 20 | 722 |
| HSV1-UL19-1172 | + | AGUCAUCAACCAGCUGGGCC | 20 | 1558 |
| HSV1-UL19-1106 | + | AUCGGACCCGCCCGUGGGCC | 20 | 1492 |
| HSV1-UL19-352 | − | ACGUCUUCUGCGCCCUGGCC | 20 | 738 |
| HSV1-UL19-1130 | + | UCACCACGCGCCAGGUGGCC | 20 | 1516 |
| HSV1-UL19-482 | − | UGGGCCAGCUCCAGGUGGCC | 20 | 868 |
| HSV1-UL19-203 | − | GCCUGGCCACCAGGGUGGCC | 20 | 589 |
| HSV1-UL19-1067 | + | GCGCGGGGAUCCGGGUGGCC | 20 | 1453 |
| HSV1-UL19-987 | + | CCCGGGCCACCCUGGUGGCC | 20 | 1373 |
| HSV1-UL19-1241 | + | UGUUGGCCACCAGAUUGGCC | 20 | 1627 |
| HSV1-UL19-385 | − | GGACCGCCAUCGCGACUGCC | 20 | 771 |
| HSV1-UL19-312 | − | GUGGCCGACGUGGAGCUGCC | 20 | 698 |
| HSV1-UL19-559 | − | CGCCGCCAAACAUCGCUGCC | 20 | 945 |
| HSV1-UL19-1319 | + | CCCCCCGCCAGUUUCGUGCC | 20 | 1705 |
| HSV1-UL19-470 | − | CUCAAGACGGGCCUCCAUCC | 20 | 856 |
| HSV1-UL19-324 | − | GGCCGGCCCGGGGGAGAUCC | 20 | 710 |
| HSV1-UL19-1070 | + | GCGGGAAGGCGCGGGGAUCC | 20 | 1456 |
| HSV1-UL19-998 | + | GCCAGGCCUCGACGGCCUCC | 20 | 1384 |
| HSV1-UL19-1140 | + | GGCGUCCCACCCCCAGCUCC | 20 | 1526 |
| HSV1-UL19-1178 | + | GCGCCUGCCCGCCCAGCUCC | 20 | 1564 |
| HSV1-UL19-480 | − | GUACUUCCUGGGCCAGCUCC | 20 | 866 |
| HSV1-UL19-1405 | + | UCUCCACGAUCAGGCGCUCC | 20 | 1791 |
| HSV1-UL19-1112 | + | CGGGCUGCAUAAACUGCUCC | 20 | 1498 |
| HSV1-UL19-1222 | + | CCUCGCCGGGGGCGAUCUCC | 20 | 1608 |
| HSV1-UL19-504 | − | CCGCGGGGCUCCCCCUCUCC | 20 | 890 |
| HSV1-UL19-1041 | + | CGGCGUAGAUGCGCUUCUCC | 20 | 1427 |
| HSV1-UL19-3217 | − | ACAGCUCGCUCGCAACGUCC | 20 | 7816 |
| HSV1-UL19-542 | − | ACGGCCAGAGCGACCCGUCC | 20 | 928 |
| HSV1-UL19-1361 | + | UAAACUCACACACGGCGUCC | 20 | 1747 |
| HSV1-UL19-1137 | + | GCUCCAGGCCCCGGGCGUCC | 20 | 1523 |
| HSV1-UL19-1169 | + | CGACGUGCGCCACCAGGUCC | 20 | 1555 |
| HSV1-UL19-1191 | + | GGCAGUCGCGAUGGCGGUCC | 20 | 1577 |
| HSV1-UL19-417 | − | CCUGCAGAACAUGGUGGUCC | 20 | 803 |
| HSV1-UL19-985 | + | UGGCCAGGCGGCCGUUGUCC | 20 | 1371 |
| HSV1-UL19-1344 | + | ACACGGCUGCCGCGUUGUCC | 20 | 1730 |
| HSV1-UL19-478 | − | CGCGUCGGAGGCGUACUUCC | 20 | 864 |
| HSV1-UL19-332 | − | GCUAUGUCCGGCGGCGUUCC | 20 | 718 |
| HSV1-UL19-206 | − | CUGCGAGACGAGCUUUUUCC | 20 | 592 |
| HSV1-UL19-1401 | + | CGACGUAAAGAACUUAAAGC | 20 | 1787 |
| HSV1-UL19-250 | − | GGUGUCCAUCGGCGAGAAGC | 20 | 636 |
| HSV1-UL19-1081 | + | CCUUCCCCCAAAAAAACAGC | 20 | 1467 |
| HSV1-UL19-1174 | + | GGGUAAAGUCAUCAACCAGC | 20 | 1560 |
| HSV1-UL19-370 | − | CGUCGAGGCCCUGGCCCAGC | 20 | 756 |
| HSV1-UL19-1031 | + | GCUCCUCCUGCAUCUCCAGC | 20 | 1417 |
| HSV1-UL19-1201 | + | CCUGGGUGUUGUGCAGCAGC | 20 | 1587 |
| HSV1-UL19-1154 | + | CGUGUAUGGCGGCCUGCAGC | 20 | 1540 |
| HSV1-UL19-1260 | + | GAUGCUGGGGGGCCAUCAGC | 20 | 1646 |
| HSV1-UL19-1298 | + | AAGUAGUUGGCCCCCAGAGC | 20 | 1684 |
| HSV1-UL19-1393 | + | GGUAGGCCCCGUUAUAGAGC | 20 | 1779 |
| HSV1-UL19-1160 | + | UGAUGCACUGGACCACGAGC | 20 | 1546 |
| HSV1-UL19-373 | − | UACCCUGACCGGCCCGGAGC | 20 | 759 |
| HSV1-UL19-1317 | + | CGUGCCGGGCCACCUGGAGC | 20 | 1703 |
| HSV1-UL19-337 | − | GGACGCCCGGGGCCUGGAGC | 20 | 723 |
| HSV1-UL19-1422 | + | GGUCGCUGGCGCAGGUGAGC | 20 | 1808 |
| HSV1-UL19-1440 | + | ACAGAGCCAGUCCCUUGAGC | 20 | 1826 |
| HSV1-UL19-1162 | + | CCGCGUGUUGUUCCAGUAGC | 20 | 1548 |
| HSV1-UL19-1119 | + | CCCACAAAGAAGUCGAACGC | 20 | 1505 |
| HSV1-UL19-263 | − | GAACGGUUUGCCGCGCACGC | 20 | 649 |
| HSV1-UL19-442 | − | UUCGACGGGGCGUUGCACGC | 20 | 828 |
| HSV1-UL19-246 | − | CGACCUGAACCGGCAGACGC | 20 | 632 |
| HSV1-UL19-438 | − | UGCUCGGCGGCGCCCGACGC | 20 | 824 |
| HSV1-UL19-533 | − | GCCGCCGGGGGCGUUUACGC | 20 | 919 |
| HSV1-UL19-1153 | + | UGCAGCAGGUAAAACACCGC | 20 | 1539 |
| HSV1-UL19-211 | − | UGGGCAAGGCGGGCCACCGC | 20 | 597 |
| HSV1-UL19-412 | − | CGGGGCCGCUGCUGCACCGC | 20 | 798 |
| HSV1-UL19-1136 | + | CGGGCGUCCCGGAACGCCGC | 20 | 1522 |
| HSV1-UL19-528 | − | AACCCCCGGGGACGCGCCGC | 20 | 914 |
| HSV1-UL19-502 | − | AAAACUUUUACCUGGGCCGC | 20 | 888 |
| HSV1-UL19-524 | − | CCGACGUCAACUACUUCCGC | 20 | 910 |
| HSV1-UL19-1346 | + | CCGCCACGACCGCGUUCCGC | 20 | 1732 |
| HSV1-UL19-1183 | + | ACGAGGGGUGGCAGCAGCGC | 20 | 1569 |
| HSV1-UL19-387 | − | CGCGACUGCCGGGUUAGCGC | 20 | 773 |
| HSV1-UL19-220 | − | UGACGCAUGCCGACACGCGC | 20 | 606 |
| HSV1-UL19-578 | − | CAACGGGGAAGCCCACGCGC | 20 | 964 |
| HSV1-UL19-519 | − | GCCCAGGUGCCGCGGCGCGC | 20 | 905 |
| HSV1-UL19-1288 | + | CCUGCCGCGACAGGUCGCGC | 20 | 1674 |
| HSV1-UL19-1073 | + | CUGGCGGGGCGGGAAGGCGC | 20 | 1459 |
| HSV1-UL19-1424 | + | GAGGGCGGGGUCGCUGGCGC | 20 | 1810 |
| HSV1-UL19-1235 | + | GCCGGGUGCAGGGGGUGCGC | 20 | 1621 |
| HSV1-UL19-357 | − | GUUCGUGAACGACUACUCGC | 20 | 743 |
| HSV1-UL19-557 | − | CCACCUCAACGGGGCCUCGC | 20 | 943 |
| HSV1-UL19-1227 | + | GUCGCUGGGGCACUCCUCGC | 20 | 1613 |
| HSV1-UL19-409 | − | GAUGGUGCCCGCCUUCUCGC | 20 | 795 |
| HSV1-UL19-1411 | + | GCGCUUAAACUGUACGUCGC | 20 | 1797 |
| HSV1-UL19-1230 | + | GGGGUCCGUCACGGGGUCGC | 20 | 1616 |
| HSV1-UL19-1425 | + | GCGGAGGAGGGCGGGGUCGC | 20 | 1811 |
| HSV1-UL19-345 | − | CCACCAUCGCCGCCGUUCGC | 20 | 731 |
| HSV1-UL19-446 | − | CCCGUCCACGCGCUGUUCGC | 20 | 832 |
| HSV1-UL19-210 | − | AGCUUUUUCCUGGGCAAGGC | 20 | 596 |
| HSV1-UL19-1213 | + | CAGCGGCCCCGCGAGAAGGC | 20 | 1599 |
| HSV1-UL19-319 | − | GGGGGGGACGUUCCCCCGGC | 20 | 705 |
| HSV1-UL19-289 | − | GCGUACGUGGCGGCCCCGGC | 20 | 675 |
| HSV1-UL19-1126 | + | UGGAUCUCCCCCGGGCCGGC | 20 | 1512 |
| HSV1-UL19-1099 | + | AUGUCUGCGGCGGGGCCGGC | 20 | 1485 |
| HSV1-UL19-460 | − | CACGUCCGCGAGAGCGCGGC | 20 | 846 |
| HSV1-UL19-1322 | + | GGUCCACGUUCGCGCGCGGC | 20 | 1708 |
| HSV1-UL19-452 | − | CCUGCGCGACCUGUCGCGGC | 20 | 838 |
| HSV1-UL19-222 | − | UGCCGACACGCGCGGGCGGC | 20 | 608 |
| HSV1-UL19-1102 | + | AGCUGCUGCAUGUCUGCGGC | 20 | 1488 |
| HSV1-UL19-1208 | + | AGUCCGCCCCCCGGUGCGGC | 20 | 1594 |
| HSV1-UL19-1286 | + | CGCGACAGGUCGCGCAGGGC | 20 | 1672 |
| HSV1-UL19-1370 | + | GUCCCCGGGGGUUGCAGGGC | 20 | 1756 |
| HSV1-UL19-1427 | + | CGGGCACUGCGGAGGAGGGC | 20 | 1813 |
| HSV1-UL19-298 | − | GCAGCGCCUGGCCCACGGGC | 20 | 684 |
| HSV1-UL19-1351 | + | ACCCGAACACGGGGACGGGC | 20 | 1737 |
| HSV1-UL19-1127 | + | GGCCUGGAUCUCCCCCGGGC | 20 | 1513 |
| HSV1-UL19-1177 | + | CUGCCCGCCCAGCUCCGGGC | 20 | 1563 |
| HSV1-UL19-377 | − | CGGCCCGGAGCUGGGCGGGC | 20 | 763 |
| HSV1-UL19-1053 | + | GAUUGAACAGGCCCAGGGGC | 20 | 1439 |
| HSV1-UL19-1100 | + | CUGCAUGUCUGCGGCGGGGC | 20 | 1486 |
| HSV1-UL19-1076 | + | AAAAAAACAGCUGGCGGGGC | 20 | 1462 |
| HSV1-UL19-1063 | + | GGAUCCGGGUGGCCGGGGGC | 20 | 1449 |
| HSV1-UL19-514 | − | GGCGGGAAACCGCCUGGGGC | 20 | 900 |
| HSV1-UL19-376 | − | UGACCGGCCCGGAGCUGGGC | 20 | 762 |
| HSV1-UL19-1349 | + | AACACGGGGACGGGCUGGGC | 20 | 1735 |
| HSV1-UL19-1246 | + | ACCUGCAGCGUGAGCAUGGC | 20 | 1632 |
| HSV1-UL19-465 | − | CUGACCUACGCGCUCAUGGC | 20 | 851 |
| HSV1-UL19-485 | − | UGGCCCGGCACGAAACUGGC | 20 | 871 |
| HSV1-UL19-1079 | + | CCCCCAAAAAAACAGCUGGC | 20 | 1465 |
| HSV1-UL19-510 | − | CUGCGGAACGCGGUCGUGGC | 20 | 896 |
| HSV1-UL19-1068 | + | GGCGCGGGGAUCCGGGUGGC | 20 | 1454 |
| HSV1-UL19-1145 | + | CGAACGGCGGCGAUGGUGGC | 20 | 1531 |
| HSV1-UL19-1242 | + | GUGUUGGCCACCAGAUUGGC | 20 | 1628 |
| HSV1-UL19-1265 | + | GGAUGGUAUGGUCCAGAUGC | 20 | 1651 |
| HSV1-UL19-243 | − | CCGCCACCUGCUGGAGAUGC | 20 | 629 |
| HSV1-UL19-384 | − | UGGACCGCCAUCGCGACUGC | 20 | 770 |
| HSV1-UL19-1019 | + | CCACUUUCAGGAAGGACUGC | 20 | 1405 |
| HSV1-UL19-242 | − | CGACGUGGGCCGCCACCUGC | 20 | 628 |
| HSV1-UL19-311 | − | GGUGGCCGACGUGGAGCUGC | 20 | 697 |
| HSV1-UL19-431 | − | GCCCGCCAUGCUCACGCUGC | 20 | 817 |
| HSV1-UL19-349 | − | GGCGGUGUUUUACCUGCUGC | 20 | 735 |
| HSV1-UL19-194 | − | CCAGAUGCUGCACGUGCUGC | 20 | 580 |
| HSV1-UL19-1033 | + | CGAGCUCGUCCAGCGUCUGC | 20 | 1419 |
| HSV1-UL19-1221 | + | CCGGGACCACCAUGUUCUGC | 20 | 1607 |
| HSV1-UL19-228 | − | GGACACCGAAGCCGACGUGC | 20 | 614 |
| HSV1-UL19-1320 | + | CCCCCCCGCCAGUUUCGUGC | 20 | 1706 |
| HSV1-UL19-432 | − | CAUGCUCACGCUGCAGGUGC | 20 | 818 |
| HSV1-UL19-1240 | + | CCACCAGAUUGGCCGGGUGC | 20 | 1626 |
| HSV1-UL19-1433 | + | CGCGUGGGCUUCCCCGUUGC | 20 | 1819 |
| HSV1-UL19-1372 | + | GGCGCGUCCCCGGGGGUUGC | 20 | 1758 |
| HSV1-UL19-422 | − | CCCCCUGCACCCGGCCAAUC | 20 | 808 |
| HSV1-UL19-260 | − | GCCCCUGGGCCUGUUCAAUC | 20 | 646 |
| HSV1-UL19-444 | − | GCUGAUGGCCCCCCAGCAUC | 20 | 830 |
| HSV1-UL19-979 | + | CCAGCAGCACGUGCAGCAUC | 20 | 1365 |
| HSV1-UL19-1189 | + | CCAGGGCCGCGCGCCGCAUC | 20 | 1575 |
| HSV1-UL19-1110 | + | UAAACUGCUCCGGGGUCAUC | 20 | 1496 |
| HSV1-UL19-1406 | + | CCGAACCCGUCUCCACGAUC | 20 | 1792 |
| HSV1-UL19-276 | − | UGUCUCUGGAACACGCGAUC | 20 | 662 |
| HSV1-UL19-248 | − | GACGCGCGUGCGCGCGGAUC | 20 | 634 |
| HSV1-UL19-1071 | + | GGCGGGAAGGCGCGGGGAUC | 20 | 1457 |
| HSV1-UL19-1016 | + | GCAGGAGGCGCUGUUUGAUC | 20 | 1402 |
| HSV1-UL19-359 | − | CGUACGUCGUGACCUACCUC | 20 | 745 |
| HSV1-UL19-1166 | + | UACACGGCCAUGCACUCCUC | 20 | 1552 |
| HSV1-UL19-190 | − | GCAACGUCCAGGCCGUCCUC | 20 | 576 |
| HSV1-UL19-1179 | + | UGCGCCUGCCCGCCCAGCUC | 20 | 1565 |
| HSV1-UL19-1383 | + | AGGCCCGGGACGGGUCGCUC | 20 | 1769 |
| HSV1-UL19-455 | − | CCCCCUGGUCCCCCCGGCUC | 20 | 841 |
| HSV1-UL19-1204 | + | AUCCGCGGCGUCCGCGGCUC | 20 | 1590 |
| HSV1-UL19-1113 | + | UCGGGCUGCAUAAACUGCUC | 20 | 1499 |
| HSV1-UL19-1223 | + | UCCUCGCCGGGGGCGAUCUC | 20 | 1609 |
| HSV1-UL19-274 | − | CCAGGUGCUGCGCCUGUCUC | 20 | 660 |
| HSV1-UL19-239 | − | GGGCAAGGCCGUGCGAAGUC | 20 | 625 |
| HSV1-UL19-1052 | + | CCAGGGGCAGGACGAACGUC | 20 | 1438 |
| HSV1-UL19-1252 | + | GCGGUGUUGGCGCCCGCGUC | 20 | 1638 |
| HSV1-UL19-1038 | + | CCGCGCGCACGCGCGUCGUC | 20 | 1424 |
| HSV1-UL19-1176 | + | CGCCCAGCUCCGGGCCGGUC | 20 | 1562 |
| HSV1-UL19-280 | − | UGAACGUUGACGCGGCGGUC | 20 | 666 |
| HSV1-UL19-329 | − | CUUGCCCCUGGCGCUAUGUC | 20 | 715 |
| HSV1-UL19-1114 | + | AGAGCCAGGUUGGCGUUGUC | 20 | 1500 |
| HSV1-UL19-1259 | + | GGGGGCCAUCAGCAGGAUUC | 20 | 1645 |
| HSV1-UL19-1025 | + | UGACCAGGUUGGCCCCGUUC | 20 | 1411 |
| HSV1-UL19-331 | − | CGCUAUGUCCGGCGGCGUUC | 20 | 717 |
| HSV1-UL19-1032 | + | CGUCCAGCGUCUGCCGGUUC | 20 | 1418 |
| HSV1-UL19-516 | − | CCCAGCCCGUCCCCGUGUUC | 20 | 902 |
| HSV1-UL19-1021 | + | CUUCGGUGUCCUCCACUUUC | 20 | 1407 |
| HSV1-UL19-251 | − | CGGCGAGAAGCUGGUCUUUC | 20 | 637 |
| HSV1-UL19-572 | − | GGACCCGUGUGGCCUGUUUC | 20 | 958 |
| HSV1-UL19-1315 | + | GCACGUUCUCAGUCACAAAG | 20 | 1701 |
| HSV1-UL19-226 | − | CCUGCAGUCCUUCCUGAAAG | 20 | 612 |
| HSV1-UL19-1438 | + | AGACGAGAUACUGCGCGAAG | 20 | 1824 |
| HSV1-UL19-1048 | + | AGGUCCAUGGCGCCCACCAG | 20 | 1434 |
| HSV1-UL19-1291 | + | CCCAGAGCCGGGGGGACCAG | 20 | 1677 |
| HSV1-UL19-1054 | + | ACCGGAUUGAACAGGCCCAG | 20 | 1440 |
| HSV1-UL19-981 | + | AUCGGCAACAACAAAGCCAG | 20 | 1367 |
| HSV1-UL19-1133 | + | GCCGCCGGACAUAGCGCCAG | 20 | 1519 |
| HSV1-UL19-1399 | + | ACGUAAAGAACUUAAAGCAG | 20 | 1785 |
| HSV1-UL19-1216 | + | GAACCCCCGCGGUGCAGCAG | 20 | 1602 |
| HSV1-UL19-1238 | + | ACCAGAUUGGCCGGGUGCAG | 20 | 1624 |
| HSV1-UL19-1341 | + | UGCCGCGUUGUCCAGGAGAG | 20 | 1727 |
| HSV1-UL19-1185 | + | GCGUCACAGUCCCACACGAG | 20 | 1571 |
| HSV1-UL19-539 | − | UUUACGCGGGGGACAAGGAG | 20 | 925 |
| HSV1-UL19-1343 | + | GCUGCCGCGUUGUCCAGGAG | 20 | 1729 |
| HSV1-UL19-1270 | + | AACAGCGCGUGGACGGGGAG | 20 | 1656 |
| HSV1-UL19-1423 | + | GGGUCGCUGGCGCAGGUGAG | 20 | 1809 |
| HSV1-UL19-1441 | + | UACAGAGCCAGUCCCUUGAG | 20 | 1827 |
| HSV1-UL19-428 | − | UCACAACGGGCGCGUGGUAG | 20 | 814 |
| HSV1-UL19-505 | − | UCCCCCUCUCCUGGACAACG | 20 | 891 |
| HSV1-UL19-576 | − | CCUCCGCAGUGCCCGCAACG | 20 | 962 |
| HSV1-UL19-556 | − | CGGGGCCUACCACCUCAACG | 20 | 942 |
| HSV1-UL19-490 | − | CACCCAGCCGCGCGCGAACG | 20 | 876 |
| HSV1-UL19-1120 | + | CCCCACAAAGAAGUCGAACG | 20 | 1506 |
| HSV1-UL19-507 | − | AGCCGUGUACCUGCGGAACG | 20 | 893 |
| HSV1-UL19-233 | − | CGGCGAGAUGGUCCUGAACG | 20 | 619 |
| HSV1-UL19-553 | − | CGGGGACCUGCUCUAUAACG | 20 | 939 |
| HSV1-UL19-393 | − | GUACGCGGCGGCAUGUAACG | 20 | 779 |
| HSV1-UL19-355 | − | CCAGCUACUGGAACAACACG | 20 | 741 |
| HSV1-UL19-1354 | + | CCUGGGCGCACCCGAACACG | 20 | 1740 |
| HSV1-UL19-1187 | + | GGGCGUCACAGUCCCACACG | 20 | 1573 |
| HSV1-UL19-1365 | + | AGUUGACGUCGGUCGACACG | 20 | 1751 |
| HSV1-UL19-1196 | + | UACAUGCCGCCGCGUACACG | 20 | 1582 |
| HSV1-UL19-449 | − | GUUCGCCGGGGCCGACCACG | 20 | 835 |
| HSV1-UL19-1279 | + | AAUUGGGCGCGUUCGCCACG | 20 | 1665 |
| HSV1-UL19-1231 | + | GGUGCGCGGGGUCCGUCACG | 20 | 1617 |
| HSV1-UL19-1008 | + | GUGUCGGCAUGCGUCAGACG | 20 | 1394 |
| HSV1-UL19-240 | − | CGUGCGAAGUCUGGACGACG | 20 | 626 |
| HSV1-UL19-437 | − | CUGCUCGGCGGCGCCCGACG | 20 | 823 |
| HSV1-UL19-310 | − | CUUUGUGGGGGUGGCCGACG | 20 | 696 |
| HSV1-UL19-225 | − | GCGCGGGCGGCCGGUCGACG | 20 | 611 |
| HSV1-UL19-441 | − | CAACAUGCGCAUAUUCGACG | 20 | 827 |
| HSV1-UL19-1091 | + | ACGGAUUGGCGGCUUCGACG | 20 | 1477 |
| HSV1-UL19-1273 | + | CGGCGAACAGCGCGUGGACG | 20 | 1659 |
| HSV1-UL19-1255 | + | GCGCAUGUUGGUGGUGGACG | 20 | 1641 |
| HSV1-UL19-1330 | + | GGUUGCCCAUGUCGGUGACG | 20 | 1716 |
| HSV1-UL19-277 | − | UUCGCUGAUGAACGUUGACG | 20 | 663 |
| HSV1-UL19-1218 | + | UCUGCAGGGUGGCGUAUACG | 20 | 1604 |
| HSV1-UL19-285 | − | CGAAGCCGCCAAUCCGUACG | 20 | 671 |
| HSV1-UL19-550 | − | GUCGCAGCGAUUUUCGUACG | 20 | 936 |
| HSV1-UL19-391 | − | GGGCCACGACCCCGUGUACG | 20 | 777 |
| HSV1-UL19-532 | − | CGCCGCCGGGGGCGUUUACG | 20 | 918 |
| HSV1-UL19-402 | − | GCGGAUGACCGGCCGCACCG | 20 | 788 |
| HSV1-UL19-411 | − | GCGGGGCCGCUGCUGCACCG | 20 | 797 |
| HSV1-UL19-394 | − | GGCAUGUAACGUGGCGACCG | 20 | 780 |
| HSV1-UL19-546 | − | UCGCGGCCACGGCCAACCCG | 20 | 932 |
| HSV1-UL19-1414 | + | CACGAGUUCGCGGCACCCCG | 20 | 1800 |
| HSV1-UL19-527 | − | CGCCGGCCCUGCAACCCCCG | 20 | 913 |
| HSV1-UL19-1217 | + | GCGGUCGAAGCGAACCCCCG | 20 | 1603 |
| HSV1-UL19-568 | − | UACAGUUUAAGCGCCCCCCG | 20 | 954 |
| HSV1-UL19-1164 | + | CCUCGGGAAGGUCUCCCCCG | 20 | 1550 |
| HSV1-UL19-1339 | + | CCAGGAGAGGGGGAGCCCCG | 20 | 1725 |
| HSV1-UL19-977 | + | UGCCGCGCUCAAACGCCCCG | 20 | 1363 |
| HSV1-UL19-1374 | + | CCCCCGGCGGCGCGUCCCCG | 20 | 1760 |
| HSV1-UL19-335 | − | GCGGCGUUCCGGGACGCCCG | 20 | 721 |
| HSV1-UL19-1108 | + | CGACCCAUCGGACCCGCCCG | 20 | 1494 |
| HSV1-UL19-322 | − | ACGUUCCCCCGGCCGGCCCG | 20 | 708 |
| HSV1-UL19-467 | − | GUACUUCAAGAUCAGUCCCG | 20 | 853 |
| HSV1-UL19-362 | − | CCUCGGGGGAGACCUUCCCG | 20 | 748 |
| HSV1-UL19-1296 | + | GUAGUUGGCCCCCAGAGCCG | 20 | 1682 |
| HSV1-UL19-397 | − | CAACACCCAGGCCCGAGCCG | 20 | 783 |
| HSV1-UL19-265 | − | ACGGUUUGCCGCGCACGCCG | 20 | 651 |
| HSV1-UL19-398 | − | GGCCCGAGCCGCGGACGCCG | 20 | 784 |
| HSV1-UL19-530 | − | CCCCCGGGGACGCGCCGCCG | 20 | 916 |
| HSV1-UL19-1359 | + | UGGUCCAUCCCUGCGCGCCG | 20 | 1745 |
| HSV1-UL19-1225 | + | CGCUGGGGCACUCCUCGCCG | 20 | 1611 |
| HSV1-UL19-448 | − | CGUCCACGCGCUGUUCGCCG | 20 | 834 |
| HSV1-UL19-1124 | + | GAUCUCCCCCGGGCCGGCCG | 20 | 1510 |
| HSV1-UL19-1097 | + | GUCUGCGGCGGGGCCGGCCG | 20 | 1483 |
| HSV1-UL19-462 | − | CGUCCGCGAGAGCGCGGCCG | 20 | 848 |
| HSV1-UL19-1284 | + | CGACAGGUCGCGCAGGGCCG | 20 | 1670 |
| HSV1-UL19-501 | − | CAAAACUUUUACCUGGGCCG | 20 | 887 |
| HSV1-UL19-1360 | + | CACACACGGCGUCCUGGCCG | 20 | 1746 |
| HSV1-UL19-1382 | + | GGGACGGGUCGCUCUGGCCG | 20 | 1768 |
| HSV1-UL19-1002 | + | CACGGAGGGCUGCGUGGCCG | 20 | 1388 |
| HSV1-UL19-1407 | + | GUCGCUGGCGGCGGUGGCCG | 20 | 1793 |
| HSV1-UL19-1066 | + | CGCGGGGAUCCGGGUGGCCG | 20 | 1452 |
| HSV1-UL19-1389 | + | CGACGCCCACGGGUUGGCCG | 20 | 1775 |
| HSV1-UL19-313 | − | UGGCCGACGUGGAGCUGCCG | 20 | 699 |
| HSV1-UL19-518 | − | UCGGGUGCGCCCAGGUGCCG | 20 | 904 |
| HSV1-UL19-1327 | + | GGGGUUGCGGACGGUUGCCG | 20 | 1713 |
| HSV1-UL19-1207 | + | CCGGUGCGGCCGGUCAUCCG | 20 | 1593 |
| HSV1-UL19-218 | − | CACGGCCACGCAGCCCUCCG | 20 | 604 |
| HSV1-UL19-1111 | + | GGGCUGCAUAAACUGCUCCG | 20 | 1497 |
| HSV1-UL19-1199 | + | GUCGUUGCGGUUGAAGUCCG | 20 | 1585 |
| HSV1-UL19-1206 | + | CCGGUCAUCCGCGGCGUCCG | 20 | 1592 |
| HSV1-UL19-459 | − | GCAGCACGUCCGCGAGAGCG | 20 | 845 |
| HSV1-UL19-1439 | + | CAGAGCCAGUCCCUUGAGCG | 20 | 1825 |
| HSV1-UL19-192 | − | GUCCUCGGGGCGUUUGAGCG | 20 | 578 |
| HSV1-UL19-386 | − | UCGCGACUGCCGGGUUAGCG | 20 | 772 |
| HSV1-UL19-1118 | + | CCACAAAGAAGUCGAACGCG | 20 | 1504 |
| HSV1-UL19-219 | − | CUGACGCAUGCCGACACGCG | 20 | 605 |
| HSV1-UL19-577 | − | GCAACGGGGAAGCCCACGCG | 20 | 963 |
| HSV1-UL19-534 | − | CCGCCGGGGGCGUUUACGCG | 20 | 920 |
| HSV1-UL19-413 | − | GGGGCCGCUGCUGCACCGCG | 20 | 799 |
| HSV1-UL19-503 | − | AAACUUUUACCUGGGCCGCG | 20 | 889 |
| HSV1-UL19-1276 | + | CGGCCCCGGCGAACAGCGCG | 20 | 1662 |
| HSV1-UL19-388 | − | GCGACUGCCGGGUUAGCGCG | 20 | 774 |
| HSV1-UL19-1436 | + | CGAAGUGGGUCUCCCGCGCG | 20 | 1822 |
| HSV1-UL19-1323 | + | CCCAGGUCCACGUUCGCGCG | 20 | 1709 |
| HSV1-UL19-1072 | + | UGGCGGGGCGGGAAGGCGCG | 20 | 1458 |
| HSV1-UL19-382 | − | UGACGCCCUGAUGCGGCGCG | 20 | 768 |
| HSV1-UL19-427 | − | CAUGUUUCACAACGGGCGCG | 20 | 813 |
| HSV1-UL19-326 | − | GAUCCAGGCCACCUGGCGCG | 20 | 712 |
| HSV1-UL19-247 | − | CCAGACGACGCGCGUGCGCG | 20 | 633 |
| HSV1-UL19-1234 | + | CCGGGUGCAGGGGGUGCGCG | 20 | 1620 |
| HSV1-UL19-410 | − | AUGGUGCCCGCCUUCUCGCG | 20 | 796 |
| HSV1-UL19-346 | − | CACCAUCGCCGCCGUUCGCG | 20 | 732 |
| HSV1-UL19-1074 | + | GCUGGCGGGGCGGGAAGGCG | 20 | 1460 |
| HSV1-UL19-1397 | + | GCAGGGGCUGAGCACCGGCG | 20 | 1783 |
| HSV1-UL19-419 | − | CCCGGAGAUCGCCCCCGGCG | 20 | 805 |
| HSV1-UL19-1101 | + | GCUGCUGCAUGUCUGCGGCG | 20 | 1487 |
| HSV1-UL19-3234 | + | CACUACCCCAAGGAAGGGCG | 20 | 7833 |
| HSV1-UL19-1426 | + | GGGCACUGCGGAGGAGGGCG | 20 | 1812 |
| HSV1-UL19-1062 | + | GAUCCGGGUGGCCGGGGGCG | 20 | 1448 |
| HSV1-UL19-493 | − | CGCGAACGUGGACCUGGGCG | 20 | 879 |
| HSV1-UL19-1141 | + | UGGUGGCGGGGGCCAUGGCG | 20 | 1527 |
| HSV1-UL19-466 | − | UGACCUACGCGCUCAUGGCG | 20 | 852 |
| HSV1-UL19-486 | − | GGCCCGGCACGAAACUGGCG | 20 | 872 |
| HSV1-UL19-1078 | + | CCCCAAAAAAACAGCUGGCG | 20 | 1464 |
| HSV1-UL19-1144 | + | GAACGGCGGCGAUGGUGGCG | 20 | 1530 |
| HSV1-UL19-1003 | + | CACGGCCACGGAGGGCUGCG | 20 | 1389 |
| HSV1-UL19-1059 | + | GACUAGGUCCCCGGCGUGCG | 20 | 1445 |
| HSV1-UL19-356 | − | CUGGAACAACACGCGGUGCG | 20 | 742 |
| HSV1-UL19-1236 | + | GGCCGGGUGCAGGGGGUGCG | 20 | 1622 |
| HSV1-UL19-560 | − | CUGCCUGGAGCGCCUGAUCG | 20 | 946 |
| HSV1-UL19-1015 | + | CAGGAGGCGCUGUUUGAUCG | 20 | 1401 |
| HSV1-UL19-569 | − | CCCGGGGUGCCGCGAACUCG | 20 | 955 |
| HSV1-UL19-360 | − | GUACGUCGUGACCUACCUCG | 20 | 746 |
| HSV1-UL19-191 | − | CAACGUCCAGGCCGUCCUCG | 20 | 577 |
| HSV1-UL19-353 | − | CUGCGCCCUGGCCCGGCUCG | 20 | 739 |
| HSV1-UL19-216 | − | GGCCGUCGAGGCCUGGCUCG | 20 | 602 |
| HSV1-UL19-1303 | + | UCUCCCCGGCCGCGCUCUCG | 20 | 1689 |
| HSV1-UL19-408 | − | UGAUGGUGCCCGCCUUCUCG | 20 | 794 |
| HSV1-UL19-368 | − | GGACCUGGUGGCGCACGUCG | 20 | 754 |
| HSV1-UL19-495 | − | CGUGGGCUACACCGCCGUCG | 20 | 881 |
| HSV1-UL19-214 | − | CCACCGCCGGGAGGCCGUCG | 20 | 600 |
| HSV1-UL19-508 | − | GUACCUGCGGAACGCGGUCG | 20 | 894 |
| HSV1-UL19-281 | − | GAACGUUGACGCGGCGGUCG | 20 | 667 |
| HSV1-UL19-1195 | + | CCGCCGCGUACACGGGGUCG | 20 | 1581 |
| HSV1-UL19-1090 | + | UGGCGGCUUCGACGGGGUCG | 20 | 1476 |
| HSV1-UL19-301 | − | CGGGCGGGUCCGAUGGGUCG | 20 | 687 |
| HSV1-UL19-451 | − | CGGCCCUGCGCGACCUGUCG | 20 | 837 |
| HSV1-UL19-544 | − | CGACCCGUCCCGGGCCUUCG | 20 | 930 |
| HSV1-UL19-1417 | + | ACGGGUCCUCCACGAGUUCG | 20 | 1803 |
| HSV1-UL19-344 | − | GCCACCAUCGCCGCCGUUCG | 20 | 730 |
| HSV1-UL19-537 | − | CGUUUACGCGGGGGACAAGG | 20 | 923 |
| HSV1-UL19-209 | − | GAGCUUUUUCCUGGGCAAGG | 20 | 595 |
| HSV1-UL19-1214 | + | GCAGCGGCCCCGCGAGAAGG | 20 | 1600 |
| HSV1-UL19-1047 | + | GGUCCAUGGCGCCCACCAGG | 20 | 1433 |
| HSV1-UL19-1290 | + | CCAGAGCCGGGGGGACCAGG | 20 | 1676 |
| HSV1-UL19-1347 | + | CGGGCUGGGCCGGCCCCAGG | 20 | 1733 |
| HSV1-UL19-1131 | + | GCCGUUCACCACGCGCCAGG | 20 | 1517 |
| HSV1-UL19-986 | + | GGGCCACCCUGGUGGCCAGG | 20 | 1372 |
| HSV1-UL19-481 | − | CUUCCUGGGCCAGCUCCAGG | 20 | 867 |
| HSV1-UL19-1030 | + | CCUCCUGCAUCUCCAGCAGG | 20 | 1416 |
| HSV1-UL19-244 | − | CCACCUGCUGGAGAUGCAGG | 20 | 630 |
| HSV1-UL19-1018 | + | CUUUCAGGAAGGACUGCAGG | 20 | 1404 |
| HSV1-UL19-1237 | + | CCAGAUUGGCCGGGUGCAGG | 20 | 1623 |
| HSV1-UL19-573 | − | CCCGUGUGGCCUGUUUCAGG | 20 | 959 |
| HSV1-UL19-1340 | + | GCCGCGUUGUCCAGGAGAGG | 20 | 1726 |
| HSV1-UL19-540 | − | UUACGCGGGGGACAAGGAGG | 20 | 926 |
| HSV1-UL19-1430 | + | CGUUGCGGGCACUGCGGAGG | 20 | 1816 |
| HSV1-UL19-1269 | + | ACAGCGCGUGGACGGGGAGG | 20 | 1655 |
| HSV1-UL19-1395 | + | CCGGCGAGGCCCCGUUGAGG | 20 | 1781 |
| HSV1-UL19-1149 | + | GUCGAACGCCCCGCGAACGG | 20 | 1535 |
| HSV1-UL19-1364 | + | GUUGACGUCGGUCGACACGG | 20 | 1750 |
| HSV1-UL19-1005 | + | CAGACGGGGCACGGCCACGG | 20 | 1391 |
| HSV1-UL19-1325 | + | GGUUGCCGUGGCCACGACGG | 20 | 1711 |
| HSV1-UL19-403 | − | CGGAUGACCGGCCGCACCGG | 20 | 789 |
| HSV1-UL19-348 | − | CGACGACCGCAACUACCCGG | 20 | 734 |
| HSV1-UL19-1413 | + | ACGAGUUCGCGGCACCCCGG | 20 | 1799 |
| HSV1-UL19-1377 | + | CCCCGCGUAAACGCCCCCGG | 20 | 1763 |
| HSV1-UL19-1373 | + | CCCCGGCGGCGCGUCCCCGG | 20 | 1759 |
| HSV1-UL19-323 | − | CGUUCCCCCGGCCGGCCCGG | 20 | 709 |
| HSV1-UL19-997 | + | AGGCCUCGACGGCCUCCCGG | 20 | 1383 |
| HSV1-UL19-1295 | + | UAGUUGGCCCCCAGAGCCGG | 20 | 1681 |
| HSV1-UL19-531 | − | CCCCGGGGACGCGCCGCCGG | 20 | 917 |
| HSV1-UL19-1224 | + | GCUGGGGCACUCCUCGCCGG | 20 | 1610 |
| HSV1-UL19-1123 | + | AUCUCCCCCGGGCCGGCCGG | 20 | 1509 |
| HSV1-UL19-1283 | + | GACAGGUCGCGCAGGGCCGG | 20 | 1669 |
| HSV1-UL19-1369 | + | CCCGGGGGUUGCAGGGCCGG | 20 | 1755 |
| HSV1-UL19-1065 | + | GCGGGGAUCCGGGUGGCCGG | 20 | 1451 |
| HSV1-UL19-314 | − | GGCCGACGUGGAGCUGCCGG | 20 | 700 |
| HSV1-UL19-330 | − | GCCCCUGGCGCUAUGUCCGG | 20 | 716 |
| HSV1-UL19-278 | − | GCUGAUGAACGUUGACGCGG | 20 | 664 |
| HSV1-UL19-392 | − | CCACGACCCCGUGUACGCGG | 20 | 778 |
| HSV1-UL19-535 | − | CGCCGGGGGCGUUUACGCGG | 20 | 921 |
| HSV1-UL19-414 | − | GGGCCGCUGCUGCACCGCGG | 20 | 800 |
| HSV1-UL19-389 | − | CGACUGCCGGGUUAGCGCGG | 20 | 775 |
| HSV1-UL19-996 | + | CCUCGACGGCCUCCCGGCGG | 20 | 1382 |
| HSV1-UL19-1408 | + | CUGUACGUCGCUGGCGGCGG | 20 | 1794 |
| HSV1-UL19-1013 | + | GCGCUGUUUGAUCGGGGCGG | 20 | 1399 |
| HSV1-UL19-487 | − | GCCCGGCACGAAACUGGCGG | 20 | 873 |
| HSV1-UL19-1409 | + | AAACUGUACGUCGCUGGCGG | 20 | 1795 |
| HSV1-UL19-1143 | + | AACGGCGGCGAUGGUGGCGG | 20 | 1529 |
| HSV1-UL19-1431 | + | CCCCGUUGCGGGCACUGCGG | 20 | 1817 |
| HSV1-UL19-1103 | + | CAGCUGCUGCAUGUCUGCGG | 20 | 1489 |
| HSV1-UL19-361 | − | UACGUCGUGACCUACCUCGG | 20 | 747 |
| HSV1-UL19-436 | − | AACGGCGCUGCUCUGCUCGG | 20 | 822 |
| HSV1-UL19-477 | − | GUUCUCGGAGCGCGCGUCGG | 20 | 863 |
| HSV1-UL19-282 | − | AACGUUGACGCGGCGGUCGG | 20 | 668 |
| HSV1-UL19-564 | − | GAUCGUGGAGACGGGUUCGG | 20 | 950 |
| HSV1-UL19-1086 | + | CAACGUUCAUCAGCGAAGGG | 20 | 1472 |
| HSV1-UL19-202 | − | CGGCCGCCUGGCCACCAGGG | 20 | 588 |
| HSV1-UL19-1219 | + | GACCACCAUGUUCUGCAGGG | 20 | 1605 |
| HSV1-UL19-1428 | + | GCGGGCACUGCGGAGGAGGG | 20 | 1814 |
| HSV1-UL19-1379 | + | GCCGUGGUCGUACAUGAGGG | 20 | 1765 |
| HSV1-UL19-297 | − | GGCAGCGCCUGGCCCACGGG | 20 | 683 |
| HSV1-UL19-404 | − | GGAUGACCGGCCGCACCGGG | 20 | 790 |
| HSV1-UL19-1412 | + | CGAGUUCGCGGCACCCCGGG | 20 | 1798 |
| HSV1-UL19-1294 | + | AGUUGGCCCCCAGAGCCGGG | 20 | 1680 |
| HSV1-UL19-213 | − | CAAGGCGGGCCACCGCCGGG | 20 | 599 |
| HSV1-UL19-1282 | + | ACAGGUCGCGCAGGGCCGGG | 20 | 1668 |
| HSV1-UL19-315 | − | GCCGACGUGGAGCUGCCGGG | 20 | 701 |
| HSV1-UL19-1069 | + | GGAAGGCGCGGGGAUCCGGG | 20 | 1455 |
| HSV1-UL19-390 | − | GACUGCCGGGUUAGCGCGGG | 20 | 776 |
| HSV1-UL19-221 | − | CGCAUGCCGACACGCGCGGG | 20 | 607 |
| HSV1-UL19-488 | − | CCCGGCACGAAACUGGCGGG | 20 | 874 |
| HSV1-UL19-980 | + | GGCAACAACAAAGCCAGGGG | 20 | 1366 |
| HSV1-UL19-1184 | + | UCACAGUCCCACACGAGGGG | 20 | 1570 |
| HSV1-UL19-1272 | + | CGAACAGCGCGUGGACGGGG | 20 | 1658 |
| HSV1-UL19-316 | − | CCGACGUGGAGCUGCCGGGG | 20 | 702 |
| HSV1-UL19-3235 | + | UACCCCAAGGAAGGGCGGGG | 20 | 7834 |
| HSV1-UL19-489 | − | CCGGCACGAAACUGGCGGGG | 20 | 875 |
| HSV1-UL19-1077 | + | CAAAAAAACAGCUGGCGGGG | 20 | 1463 |
| HSV1-UL19-1014 | + | GAGGCGCUGUUUGAUCGGGG | 20 | 1400 |
| HSV1-UL19-1363 | + | GACGUCGGUCGACACGGGGG | 20 | 1749 |
| HSV1-UL19-1064 | + | GGGAUCCGGGUGGCCGGGGG | 20 | 1450 |
| HSV1-UL19-317 | − | CGACGUGGAGCUGCCGGGGG | 20 | 703 |
| HSV1-UL19-405 | − | UGACCGGCCGCACCGGGGGG | 20 | 791 |
| HSV1-UL19-341 | − | CCGGGGCCUGGAGCUGGGGG | 20 | 727 |
| HSV1-UL19-309 | − | GUUCGACUUCUUUGUGGGGG | 20 | 695 |
| HSV1-UL19-375 | − | CUGACCGGCCCGGAGCUGGG | 20 | 761 |
| HSV1-UL19-1261 | + | GGUAUGGUCCAGAUGCUGGG | 20 | 1647 |
| HSV1-UL19-1034 | + | GCGCACGCGCGUCGUCUGGG | 20 | 1420 |
| HSV1-UL19-416 | − | CGCCACCCUGCAGAACAUGG | 20 | 802 |
| HSV1-UL19-1247 | + | CACCUGCAGCGUGAGCAUGG | 20 | 1633 |
| HSV1-UL19-464 | − | GCUGACCUACGCGCUCAUGG | 20 | 850 |
| HSV1-UL19-1192 | + | UAACCCGGCAGUCGCGAUGG | 20 | 1578 |
| HSV1-UL19-1147 | + | CCCGCGAACGGCGGCGAUGG | 20 | 1533 |
| HSV1-UL19-1309 | + | UGAACCCAAACCCGGGAUGG | 20 | 1695 |
| HSV1-UL19-1155 | + | GUGCUCGCUGCCGUGUAUGG | 20 | 1541 |
| HSV1-UL19-484 | − | GUGGCCCGGCACGAAACUGG | 20 | 870 |
| HSV1-UL19-1082 | + | GAGACAGGCGCAGCACCUGG | 20 | 1468 |
| HSV1-UL19-367 | − | GGCCGUGUACCGGGACCUGG | 20 | 753 |
| HSV1-UL19-988 | + | GGUCGCCCGGGCCACCCUGG | 20 | 1374 |
| HSV1-UL19-255 | − | CAACGUUCCCUACCCCCUGG | 20 | 641 |
| HSV1-UL19-293 | − | AGCUGUUUUUGAACGCCUGG | 20 | 679 |
| HSV1-UL19-1080 | + | UCCCCCAAAAAAACAGCUGG | 20 | 1466 |
| HSV1-UL19-340 | − | CGCCCGGGGCCUGGAGCUGG | 20 | 726 |
| HSV1-UL19-1410 | + | CUUAAACUGUACGUCGCUGG | 20 | 1796 |
| HSV1-UL19-1262 | + | UGGUAUGGUCCAGAUGCUGG | 20 | 1648 |
| HSV1-UL19-423 | − | CCUGCACCCGGCCAAUCUGG | 20 | 809 |
| HSV1-UL19-458 | − | CCUGGUCCCCCCGGCUCUGG | 20 | 844 |
| HSV1-UL19-1035 | + | CGCGCACGCGCGUCGUCUGG | 20 | 1421 |
| HSV1-UL19-252 | − | CGAGAAGCUGGUCUUUCUGG | 20 | 638 |
| HSV1-UL19-227 | − | GCAGUCCUUCCUGAAAGUGG | 20 | 613 |
| HSV1-UL19-287 | − | UCCGUACGGGGCGUACGUGG | 20 | 673 |
| HSV1-UL19-570 | − | GGGGUGCCGCGAACUCGUGG | 20 | 956 |
| HSV1-UL19-509 | − | CCUGCGGAACGCGGUCGUGG | 20 | 895 |
| HSV1-UL19-1029 | + | CCUGCAUCUCCAGCAGGUGG | 20 | 1415 |
| HSV1-UL19-1146 | + | GCGAACGGCGGCGAUGGUGG | 20 | 1532 |
| HSV1-UL19-1042 | + | GGGGUAGGGAACGUUGGUGG | 20 | 1428 |
| HSV1-UL19-1256 | + | GAAUAUGCGCAUGUUGGUGG | 20 | 1642 |
| HSV1-UL19-308 | − | CGCGUUCGACUUCUUUGUGG | 20 | 694 |
| HSV1-UL19-1094 | + | GUACGCCCCGUACGGAUUGG | 20 | 1480 |
| HSV1-UL19-1043 | + | CAGGGGGUAGGGAACGUUGG | 20 | 1429 |
| HSV1-UL19-1257 | + | GUCGAAUAUGCGCAUGUUGG | 20 | 1643 |
| HSV1-UL19-1403 | + | CUCCAGGCAGCGAUGUUUGG | 20 | 1789 |
| HSV1-UL19-271 | − | CCCGCCAGCUGUUUUUUUGG | 20 | 657 |
| HSV1-UL19-1381 | + | UCUGGCCGUGGUCGUACAUG | 20 | 1767 |
| HSV1-UL19-381 | − | GGGACUGUGACGCCCUGAUG | 20 | 767 |
| HSV1-UL19-1432 | + | CUUCCCCGUUGCGGGCACUG | 20 | 1818 |
| HSV1-UL19-506 | − | ACGCGGCAGCCGUGUACCUG | 20 | 892 |
| HSV1-UL19-292 | − | CAGCUGUUUUUGAACGCCUG | 20 | 678 |
| HSV1-UL19-513 | − | UCGUGGCGGGAAACCGCCUG | 20 | 899 |
| HSV1-UL19-339 | − | ACGCCCGGGGCCUGGAGCUG | 20 | 725 |
| HSV1-UL19-1228 | + | GGUCCGUCACGGGGUCGCUG | 20 | 1614 |
| HSV1-UL19-1263 | + | AUGGUAUGGUCCAGAUGCUG | 20 | 1649 |
| HSV1-UL19-457 | − | CCCUGGUCCCCCCGGCUCUG | 20 | 843 |
| HSV1-UL19-1036 | + | GCGCGCACGCGCGUCGUCUG | 20 | 1422 |
| HSV1-UL19-1104 | + | AAACAGCUGCUGCAUGUCUG | 20 | 1490 |
| HSV1-UL19-571 | − | GAACUCGUGGAGGACCCGUG | 20 | 957 |
| HSV1-UL19-379 | − | CGCUGCUGCCACCCCUCGUG | 20 | 765 |
| HSV1-UL19-1209 | + | GUCCAGUCCGCCCCCCGGUG | 20 | 1595 |
| HSV1-UL19-1001 | + | AGGGCUGCGUGGCCGUGGUG | 20 | 1387 |
| HSV1-UL19-307 | − | CCGCGUUCGACUUCUUUGUG | 20 | 693 |
| HSV1-UL19-3236 | − | AACCGCCCCGCCCUUCCUUG | 20 | 7835 |
| HSV1-UL19-1212 | + | UCACGUAGUAGUAAAUCUUG | 20 | 1598 |
| HSV1-UL19-1151 | + | AAAACACCGCCGGGUAGUUG | 20 | 1537 |
| HSV1-UL19-1396 | + | GCACCGGCGAGGCCCCGUUG | 20 | 1782 |
| HSV1-UL19-1434 | + | GCGCGUGGGCUUCCCCGUUG | 20 | 1820 |
| HSV1-UL19-1200 | + | GCAGCAGCUGGCCGUCGUUG | 20 | 1586 |
| HSV1-UL19-1329 | + | CCAUGUCGGUGACGGGGUUG | 20 | 1715 |
| HSV1-UL19-1250 | + | UUGUGCGUUCGGCCAUGUUG | 20 | 1636 |
| HSV1-UL19-305 | − | CCCCGCGUUCGACUUCUUUG | 20 | 691 |
| HSV1-UL19-1335 | + | CGGCCCAGGUAAAAGUUUUG | 20 | 1721 |
| HSV1-UL19-270 | − | CCCCGCCAGCUGUUUUUUUG | 20 | 656 |
| HSV1-UL19-1281 | + | GCGCAGGGCCGGGGGGAAAU | 20 | 1667 |
| HSV1-UL19-498 | − | CGCAACCCCGUCACCGACAU | 20 | 884 |
| HSV1-UL19-1109 | + | UCUGGCCUUCCGCGACCCAU | 20 | 1495 |
| HSV1-UL19-249 | − | CGCGCGGAUCUGGUGUCCAU | 20 | 635 |
| HSV1-UL19-984 | + | UUGUCCAGGUAUCGUUGCAU | 20 | 1370 |
| HSV1-UL19-1243 | + | GACCGUGUUGGCCACCAGAU | 20 | 1629 |
| HSV1-UL19-300 | − | GGCCCACGGGCGGGUCCGAU | 20 | 686 |
| HSV1-UL19-275 | − | CUGUCUCUGGAACACGCGAU | 20 | 661 |
| HSV1-UL19-1095 | + | CACGUACGCCCCGUACGGAU | 20 | 1481 |
| HSV1-UL19-237 | − | CUGGUCACGGCGCUCGUGAU | 20 | 623 |
| HSV1-UL19-1017 | + | UGCAGGAGGCGCUGUUUGAU | 20 | 1403 |
| HSV1-UL19-1061 | + | GGUGGCCGGGGGCGGGGACU | 20 | 1447 |
| HSV1-UL19-1357 | + | CCCUGCGCGCCGCGGCACCU | 20 | 1743 |
| HSV1-UL19-492 | − | CCGCGCGCGAACGUGGACCU | 20 | 878 |
| HSV1-UL19-358 | − | UCGUACGUCGUGACCUACCU | 20 | 744 |
| HSV1-UL19-500 | − | CUUCCCCAAAACUUUUACCU | 20 | 886 |
| HSV1-UL19-259 | − | CUGACGUUCGUCCUGCCCCU | 20 | 645 |
| HSV1-UL19-291 | − | GCAGCUGUUUUUGAACGCCU | 20 | 677 |
| HSV1-UL19-512 | − | GUCGUGGCGGGAAACCGCCU | 20 | 898 |
| HSV1-UL19-1202 | + | GGCGUCCGCGGCUCGGGCCU | 20 | 1588 |
| HSV1-UL19-1167 | + | GUACACGGCCAUGCACUCCU | 20 | 1553 |
| HSV1-UL19-189 | − | CGCAACGUCCAGGCCGUCCU | 20 | 575 |
| HSV1-UL19-479 | − | GCGUCGGAGGCGUACUUCCU | 20 | 865 |
| HSV1-UL19-3237 | − | UAAACCGCCCCGCCCUUCCU | 20 | 7836 |
| HSV1-UL19-207 | − | UGCGAGACGAGCUUUUUCCU | 20 | 593 |
| HSV1-UL19-1173 | + | GGUAAAGUCAUCAACCAGCU | 20 | 1559 |
| HSV1-UL19-1180 | + | UCGCAUUAGGUGAUUCAGCU | 20 | 1566 |
| HSV1-UL19-374 | − | ACCCUGACCGGCCCGGAGCU | 20 | 760 |
| HSV1-UL19-338 | − | GACGCCCGGGGCCUGGAGCU | 20 | 724 |
| HSV1-UL19-994 | + | GCAGAAGCUUCGCUUUAGCU | 20 | 1380 |
| HSV1-UL19-1229 | + | GGGUCCGUCACGGGGUCGCU | 20 | 1615 |
| HSV1-UL19-1205 | + | CAUCCGCGGCGUCCGCGGCU | 20 | 1591 |
| HSV1-UL19-1321 | + | GUCCACGUUCGCGCGCGGCU | 20 | 1707 |
| HSV1-UL19-1350 | + | CCCGAACACGGGGACGGGCU | 20 | 1736 |
| HSV1-UL19-1264 | + | GAUGGUAUGGUCCAGAUGCU | 20 | 1650 |
| HSV1-UL19-435 | − | CACAACGGCGCUGCUCUGCU | 20 | 821 |
| HSV1-UL19-456 | − | CCCCUGGUCCCCCCGGCUCU | 20 | 842 |
| HSV1-UL19-1037 | + | CGCGCGCACGCGCGUCGUCU | 20 | 1423 |
| HSV1-UL19-475 | − | GACUGAGAACGUGCUGUUCU | 20 | 861 |
| HSV1-UL19-1437 | + | GACGAGAUACUGCGCGAAGU | 20 | 1823 |
| HSV1-UL19-1299 | + | UCGGAUCGACGAAAAGUAGU | 20 | 1685 |
| HSV1-UL19-1044 | + | CACCAGGGGGUAGGGAACGU | 20 | 1430 |
| HSV1-UL19-1121 | + | CCCCCCCGGCAGCUCCACGU | 20 | 1507 |
| HSV1-UL19-1023 | + | GCCGUACGUCACCGGCACGU | 20 | 1409 |
| HSV1-UL19-241 | − | GUGCGAAGUCUGGACGACGU | 20 | 627 |
| HSV1-UL19-1368 | + | CCGGCGGAAGUAGUUGACGU | 20 | 1754 |
| HSV1-UL19-558 | − | CUGCUUUAAGUUCUUUACGU | 20 | 944 |
| HSV1-UL19-547 | − | CGCGGCCACGGCCAACCCGU | 20 | 933 |
| HSV1-UL19-1107 | + | GACCCAUCGGACCCGCCCGU | 20 | 1493 |
| HSV1-UL19-1253 | + | CGCGGUGUUGGCGCCCGCGU | 20 | 1639 |
| HSV1-UL19-1305 | + | GUACCCCGCCAUGAGCGCGU | 20 | 1691 |
| HSV1-UL19-1435 | + | GAAGUGGGUCUCCCGCGCGU | 20 | 1821 |
| HSV1-UL19-476 | − | GCUGUUCUCGGAGCGCGCGU | 20 | 862 |
| HSV1-UL19-494 | − | GCGAACGUGGACCUGGGCGU | 20 | 880 |
| HSV1-UL19-1026 | + | CACGAGCGCCGUGACCAGGU | 20 | 1412 |
| HSV1-UL19-1116 | + | GUGCAGCUCAAGAGCCAGGU | 20 | 1502 |
| HSV1-UL19-1163 | + | GGGAAGGUCUCCCCCGAGGU | 20 | 1549 |
| HSV1-UL19-279 | − | AUGAACGUUGACGCGGCGGU | 20 | 665 |
| HSV1-UL19-1390 | + | UCGCUGCGACGCCCACGGGU | 20 | 1776 |
| HSV1-UL19-1421 | + | GCUGGCGCAGGUGAGCGGGU | 20 | 1807 |
| HSV1-UL19-1046 | + | CAUGGCGCCCACCAGGGGGU | 20 | 1432 |
| HSV1-UL19-342 | − | CGGGGCCUGGAGCUGGGGGU | 20 | 728 |
| HSV1-UL19-256 | − | AACGUUCCCUACCCCCUGGU | 20 | 642 |
| HSV1-UL19-978 | + | CAGCACGUGCAGCAUCUGGU | 20 | 1364 |
| HSV1-UL19-1278 | + | GGGCGCGUUCGCCACGUGGU | 20 | 1664 |
| HSV1-UL19-1394 | + | CGAGGCCCCGUUGAGGUGGU | 20 | 1780 |
| HSV1-UL19-1333 | + | UUGGGGAAGGUUGCCCAUGU | 20 | 1719 |
| HSV1-UL19-1258 | + | CCCGUCGAAUAUGCGCAUGU | 20 | 1644 |
| HSV1-UL19-1402 | + | GCGAUGUUUGGCGGCGAUGU | 20 | 1788 |
| HSV1-UL19-1314 | + | CAGUCACAAAGCGGUCCUGU | 20 | 1700 |
| HSV1-UL19-3213 | + | GGACGUUGCGAGCGAGCUGU | 20 | 7812 |
| HSV1-UL19-1300 | + | CGUGCUGCACGACGGGCUGU | 20 | 1686 |
| HSV1-UL19-1244 | + | AAACAUGGCGUUGACCGUGU | 20 | 1630 |
| HSV1-UL19-1011 | + | GACCGGCCGCCCGCGCGUGU | 20 | 1397 |
| HSV1-UL19-380 | − | GCUGCUGCCACCCCUCGUGU | 20 | 766 |
| HSV1-UL19-1254 | + | GUUGGUGGUGGACGCGGUGU | 20 | 1640 |
| HSV1-UL19-1115 | + | AAGAGCCAGGUUGGCGUUGU | 20 | 1501 |
| HSV1-UL19-1249 | + | UGUGCGUUCGGCCAUGUUGU | 20 | 1635 |
| HSV1-UL19-306 | − | CCCGCGUUCGACUUCUUUGU | 20 | 692 |
| HSV1-UL19-1280 | + | CGCAGGGCCGGGGGGAAAUU | 20 | 1666 |
| HSV1-UL19-1181 | + | GCAGCGCCGGGUCUCGCAUU | 20 | 1567 |
| HSV1-UL19-3238 | − | AAACCGCCCCGCCCUUCCUU | 20 | 7837 |
| HSV1-UL19-1022 | + | CGUCACCGGCACGUCGGCUU | 20 | 1408 |
| HSV1-UL19-1251 | + | GAGCAGCGCCGUUGUGCGUU | 20 | 1637 |
| HSV1-UL19-563 | − | CCUGAUCGUGGAGACGGGUU | 20 | 949 |
| HSV1-UL19-472 | − | ACGGGCCUCCAUCCCGGGUU | 20 | 858 |
| HSV1-UL19-1404 | + | GCGCUCCAGGCAGCGAUGUU | 20 | 1790 |
| HSV1-UL19-515 | − | GCCCAGCCCGUCCCCGUGUU | 20 | 901 |
| HSV1-UL19-1268 | + | GGUAAAAAUAGUCGCCAUUU | 20 | 1654 |
| HSV1-UL19-1337 | + | CGCGGCCCAGGUAAAAGUUU | 20 | 1723 |
| HSV1-UL19-473 | − | CGGGCCUCCAUCCCGGGUUU | 20 | 859 |
| HSV1-UL19-1336 | + | GCGGCCCAGGUAAAAGUUUU | 20 | 1722 |
| HSV1-UL19-268 | − | CGCCCCGCCAGCUGUUUUUU | 20 | 654 |
| HSV1-UL19-269 | − | GCCCCGCCAGCUGUUUUUUU | 20 | 655 |

[0759] Table 6A provides exemplary targeting domains for knocking out the UL19 gene selected according to the first tier parameters. The targeting domains bind within the first 500 bp of the coding sequence (e.g., within 500 bp downstream from the start codon), have a high level of orthogonality, and start with a 5′G. The PAM is NNGRRT. It is contemplated herein that in an embodiment the targeting domain hybridizes to the target domain through complementary base pairing. Any of the targeting domains in the table can be used with a S. aureus Cas9 molecule that generates a double stranded break (Cas9 nuclease) or a single-stranded break (Cas9 nickase).

TABLE 6A

| | | | Target | |
|---|---|---|---|---|
| 1st Tier | DNA | | Site | Seq ID |
| gRNA Name | Strand | Targeting Domain | Length | NO: |
| HSV1-UL19-3239 | + | GCUCCAGAAAGCGCACGAGCGA | 22 | 7838 |
| HSV1-UL19-3240 | + | GAGCUCCAGAAAGCGCACGAGCGA | 24 | 7839 |
| HSV1-UL19-3241 | + | GUAAUUGUGUGUGGGUUGCUCGA | 23 | 7840 |
| HSV1-UL19-3242 | + | GCGGCAUACCGGUAUCCCG | 19 | 7841 |
| HSV1-UL19-3243 | + | GCCGCGGCAUACCGGUAUCCCG | 22 | 7842 |
| HSV1-UL19-3244 | + | GGCCGCGGCAUACCGGUAUCCCG | 23 | 7843 |
| HSV1-UL19-3245 | + | GACGUUGCGAGCGAGCUG | 18 | 7844 |
| HSV1-UL19-3246 | + | GGACGUUGCGAGCGAGCUG | 19 | 7845 |
| HSV1-UL19-3247 | + | GCCUGGACGUUGCGAGCGAGCUG | 23 | 7846 |
| HSV1-UL19-3248 | + | GGCCUGGACGUUGCGAGCGAGCUG | 24 | 7847 |
| HSV1-UL19-3249 | - | GCCGCGGCCAUGGUGCCGA | 19 | 7848 |
| HSV1-UL19-3250 | - | GUAUGCCGCGGCCAUGGUGCCGA | 23 | 7849 |
| HSV1-UL19-3251 | - | GGUAUGCCGCGGCCAUGGUGCCGA | 24 | 7850 |
| HSV1-UL19-1918 | - | GCUCGUGCGCUUUCUGGAGC | 20 | 2301 |
| HSV1-UL19-3252 | - | GUCGCUCGUGCGCUUUCUGGAGC | 23 | 7851 |
| HSV1-UL19-3253 | - | GUCGAGUUCGACGCCCUGC | 19 | 7852 |
| HSV1-UL19-3254 | - | GACGUCGAGUUCGACGCCCUGC | 22 | 7853 |
| HSV1-UL19-3255 | - | GCUCCCAACCGCGACCCUC | 19 | 7854 |
| HSV1-UL19-3256 | - | GCCGCUCCCAACCGCGACCCUC | 22 | 7855 |
| HSV1-UL19-3257 | - | GGCCGCUCCCAACCGCGACCCUC | 23 | 7856 |
| HSV1-UL19-3258 | - | GCAAACAGCCUGUACGACG | 19 | 7857 |
| HSV1-UL19-3259 | - | GAUGCAAACAGCCUGUACGACG | 22 | 7858 |

[0760] Table 6B provides exemplary targeting domains for knocking out the UL19 gene selected according to the second tier parameters. The targeting domains bind within the first 500 bp of the coding sequence (e.g., within 500 bp downstream from the start codon) and have a high level of orthogonality. The PAM is NNGRRT. It is contemplated herein that in an embodiment the targeting domain hybridizes to the target domain through complementary base pairing. Any of the targeting domains in the table can be used with a S. aureus Cas9 molecule that generates a double stranded break (Cas9 nuclease) or a single-stranded break (Cas9 nickase).

TABLE 6B
2nd Tier

| | DNA | | Target Site | Seq ID |
|---|---|---|---|---|
| gRNA Name | Strand | Targeting Domain | Length | NO: |
| HSV1-UL19-3260 | + | CAGAAAGCGCACGAGCGA | 18 | 7859 |
| HSV1-UL19-3261 | + | CCAGAAAGCGCACGAGCGA | 19 | 7860 |
| HSV1-UL19-1986 | + | UCCAGAAAGCGCACGAGCGA | 20 | 2344 |
| HSV1-UL19-3262 | + | CUCCAGAAAGCGCACGAGCGA | 21 | 7861 |
| HSV1-UL19-3263 | + | AGCUCCAGAAAGCGCACGAGCGA | 23 | 7862 |
| HSV1-UL19-3264 | + | UGUGUGUGGGUUGCUCGA | 18 | 7863 |
| HSV1-UL19-3265 | + | UUGUGUGUGGGUUGCUCGA | 19 | 7864 |
| HSV1-UL19-58 | + | AUUGUGUGUGGGUUGCUCGA | 20 | 425 |
| HSV1-UL19-3266 | + | AAUUGUGUGUGGGUUGCUCGA | 21 | 7865 |
| HSV1-UL19-3267 | + | UAAUUGUGUGUGGGUUGCUCGA | 22 | 7866 |
| HSV1-UL19-3268 | + | UGUAAUUGUGUGUGGGUUGCUCGA | 24 | 7867 |
| HSV1-UL19-3269 | + | CGGCAUACCGGUAUCCCG | 18 | 7868 |
| HSV1-UL19-1972 | + | CGCGGCAUACCGGUAUCCCG | 20 | 2336 |
| HSV1-UL19-3270 | + | CCGCGGCAUACCGGUAUCCCG | 21 | 7869 |
| HSV1-UL19-3271 | + | UGGCCGCGGCAUACCGGUAUCCCG | 24 | 7870 |
| HSV1-UL19-3272 | + | UGGACGUUGCGAGCGAGCUG | 20 | 7871 |
| HSV1-UL19-3273 | + | CUGGACGUUGCGAGCGAGCUG | 21 | 7872 |
| HSV1-UL19-3274 | + | CCUGGACGUUGCGAGCGAGCUG | 22 | 7873 |
| HSV1-UL19-3275 | + | UUGGUCAUGUAAUUGUGU | 18 | 7874 |
| HSV1-UL19-3276 | + | CUUGGUCAUGUAAUUGUGU | 19 | 7875 |
| HSV1-UL19-1998 | + | UCUUGGUCAUGUAAUUGUGU | 20 | 2354 |
| HSV1-UL19-3277 | + | AUCUUGGUCAUGUAAUUGUGU | 21 | 7876 |
| HSV1-UL19-3278 | + | AAUCUUGGUCAUGUAAUUGUGU | 22 | 7877 |
| HSV1-UL19-3279 | + | UAAUCUUGGUCAUGUAAUUGUGU | 23 | 7878 |
| HSV1-UL19-3280 | + | AUAAUCUUGGUCAUGUAAUUGUGU | 24 | 7879 |
| HSV1-UL19-3281 | − | CCGCGGCCAUGGUGCCGA | 18 | 7880 |
| HSV1-UL19-1911 | − | UGCCGCGGCCAUGGUGCCGA | 20 | 2296 |
| HSV1-UL19-3282 | − | AUGCCGCGGCCAUGGUGCCGA | 21 | 7881 |
| HSV1-UL19-3283 | − | UAUGCCGCGGCCAUGGUGCCGA | 22 | 7882 |
| HSV1-UL19-3284 | − | UCGUGCGCUUUCUGGAGC | 18 | 7883 |
| HSV1-UL19-3285 | − | CUCGUGCGCUUUCUGGAGC | 19 | 7884 |
| HSV1-UL19-3286 | − | CGCUCGUGCGCUUUCUGGAGC | 21 | 7885 |
| HSV1-UL19-3287 | − | UCGCUCGUGCGCUUUCUGGAGC | 22 | 7886 |
| HSV1-UL19-3288 | − | UGUCGCUCGUGCGCUUUCUGGAGC | 24 | 7887 |
| HSV1-UL19-3289 | − | UCGAGUUCGACGCCCUGC | 18 | 7888 |
| HSV1-UL19-10 | − | CGUCGAGUUCGACGCCCUGC | 20 | 467 |
| HSV1-UL19-3290 | − | ACGUCGAGUUCGACGCCCUGC | 21 | 7889 |
| HSV1-UL19-3291 | − | CGACGUCGAGUUCGACGCCCUGC | 23 | 7890 |
| HSV1-UL19-3292 | − | ACGACGUCGAGUUCGACGCCCUGC | 24 | 7891 |
| HSV1-UL19-3293 | − | CUCCCAACCGCGACCCUC | 18 | 7892 |
| HSV1-UL19-1 | − | CGCUCCCAACCGCGACCCUC | 20 | 461 |
| HSV1-UL19-3294 | − | CCGCUCCCAACCGCGACCCUC | 21 | 7893 |
| HSV1-UL19-3295 | − | UGGCCGCUCCCAACCGCGACCCUC | 24 | 7894 |
| HSV1-UL19-3296 | − | CAAACAGCCUGUACGACG | 18 | 7895 |
| HSV1-UL19-1913 | − | UGCAAACAGCCUGUACGACG | 20 | 2298 |
| HSV1-UL19-3297 | − | AUGCAAACAGCCUGUACGACG | 21 | 7896 |
| HSV1-UL19-3298 | − | CGAUGCAAACAGCCUGUACGACG | 23 | 7897 |
| HSV1-UL19-3299 | − | CCGAUGCAAACAGCCUGUACGACG | 24 | 7898 |
| HSV1-UL19-3300 | − | ACGGGGGAGGCCCUGGACGGG | 21 | 7899 |
| HSV1-UL19-3301 | − | CACGGGGGAGGCCCUGGACGGG | 22 | 7900 |
| HSV1-UL19-3302 | − | UCACGGGGGAGGCCCUGGACGGG | 23 | 7901 |
| HSV1-UL19-3303 | − | CUCACGGGGGAGGCCCUGGACGGG | 24 | 7902 |

[0761] Table 6C provides exemplary targeting domains for knocking out the UL19 gene selected according to the third tier parameters. The targeting domains bind within the first 500 bp of the coding sequence (e.g., within 500 bp downstream from the start codon). The PAM is NNGRRT. It is contemplated herein that in an embodiment the targeting domain hybridizes to the target domain through complementary base pairing. Any of the targeting domains in the table can be used with a S. aureus Cas9 molecule that generates a double stranded break (Cas9 nuclease) or a single-stranded break (Cas9 nickase).

TABLE 6C
3rd Tier

| | DNA | | Target Site | Seq ID |
|---|---|---|---|---|
| gRNA Name | Strand | Targeting Domain | Length | NO: |
| HSV1-UL19-3304 | + | CGCGGUUGGGAGCGGCCA | 18 | 7903 |
| HSV1-UL19-3305 | + | UCGCGGUUGGGAGCGGCCA | 19 | 7904 |
| HSV1-UL19-3211 | + | GUCGCGGUUGGGAGCGGCCA | 20 | 7810 |
| HSV1-UL19-3306 | + | GGUCGCGGUUGGGAGCGGCCA | 21 | 7905 |
| HSV1-UL19-3307 | + | GGGUCGCGGUUGGGAGCGGCCA | 22 | 7906 |
| HSV1-UL19-3308 | + | AGGGUCGCGGUUGGGAGCGGCCA | 23 | 7907 |
| HSV1-UL19-3309 | + | GAGGGUCGCGGUUGGGAGCGGCCA | 24 | 7908 |
| HSV1-UL19-3310 | − | GGGGAGGCCCUGGACGGG | 18 | 7909 |
| HSV1-UL19-3311 | − | GGGGGAGGCCCUGGACGGG | 19 | 7910 |
| HSV1-UL19-1938 | − | CGGGGGAGGCCCUGGACGGG | 20 | 2314 |

[0762] Table 6D provides exemplary targeting domains for knocking out the UL19 gene selected according to the fourth tier parameters. The targeting domains bind within the first 500 bp of the coding sequence (e.g., within 500 bp downstream from the start codon). PAM is NNGRRV. It is contemplated herein that in an embodiment the targeting domain hybridizes to the target domain through complementary base pairing. Any of the targeting domains in the table can be used with a S. aureus Cas9 molecule that generates a double stranded break (Cas9 nuclease) or a single-stranded break (Cas9 nickase).

TABLE 6D
4th Tier

| | DNA | | Target Site | Seq ID |
|---|---|---|---|---|
| gRNA Name | Strand | Targeting Domain | Length | NO: |
| HSV1-UL19-3312 | + | UCGUACAGGCUGUUUGCA | 18 | 7911 |
| HSV1-UL19-3313 | + | GUCGUACAGGCUGUUUGCA | 19 | 7912 |
| HSV1-UL19-1983 | + | CGUCGUACAGGCUGUUUGCA | 20 | 2341 |
| HSV1-UL19-3314 | + | ACGUCGUACAGGCUGUUUGCA | 21 | 7913 |
| HSV1-UL19-3315 | + | GACGUCGUACAGGCUGUUUGCA | 22 | 7914 |
| HSV1-UL19-3316 | + | CGACGUCGUACAGGCUGUUUGCA | 23 | 7915 |
| HSV1-UL19-3317 | + | UCGACGUCGUACAGGCUGUUUGCA | 24 | 7916 |
| HSV1-UL19-3318 | + | ACGGCCUGGACGUUGCGA | 18 | 7917 |
| HSV1-UL19-3319 | + | GACGGCCUGGACGUUGCGA | 19 | 7918 |
| HSV1-UL19-3320 | + | GGACGGCCUGGACGUUGCGA | 20 | 7919 |
| HSV1-UL19-3321 | + | AGGACGGCCUGGACGUUGCGA | 21 | 7920 |
| HSV1-UL19-3322 | + | GAGGACGGCCUGGACGUUGCGA | 22 | 7921 |
| HSV1-UL19-3323 | + | CGAGGACGGCCUGGACGUUGCGA | 23 | 7922 |
| HSV1-UL19-3324 | + | CCGAGGACGGCCUGGACGUUGCGA | 24 | 7923 |
| HSV1-UL19-3325 | + | GCCACCUCGAUCGUGCUA | 18 | 7924 |
| HSV1-UL19-3326 | + | CGCCACCUCGAUCGUGCUA | 19 | 7925 |
| HSV1-UL19-80 | + | ACGCCACCUCGAUCGUGCUA | 20 | 508 |
| HSV1-UL19-3327 | + | GACGCCACCUCGAUCGUGCUA | 21 | 7926 |
| HSV1-UL19-3328 | + | CGACGCCACCUCGAUCGUGCUA | 22 | 7927 |
| HSV1-UL19-3329 | + | GCGACGCCACCUCGAUCGUGCUA | 23 | 7928 |
| HSV1-UL19-3330 | + | UGCGACGCCACCUCGAUCGUGCUA | 24 | 7929 |
| HSV1-UL19-3331 | + | ACGCACGCCACCGACAAC | 18 | 7930 |
| HSV1-UL19-3332 | + | CACGCACGCCACCGACAAC | 19 | 7931 |
| HSV1-UL19-1989 | + | ACACGCACGCCACCGACAAC | 20 | 2347 |
| HSV1-UL19-3333 | + | CACACGCACGCCACCGACAAC | 21 | 7932 |
| HSV1-UL19-3334 | + | ACACACGCACGCCACCGACAAC | 22 | 7933 |
| HSV1-UL19-3335 | + | UACACACGCACGCCACCGACAAC | 23 | 7934 |
| HSV1-UL19-3336 | + | GUACACACGCACGCCACCGACAAC | 24 | 7935 |
| HSV1-UL19-3337 | + | GUUUGCAUCGGAGCGCAC | 18 | 7936 |
| HSV1-UL19-3338 | + | UGUUUGCAUCGGAGCGCAC | 19 | 7937 |
| HSV1-UL19-1981 | + | CUGUUUGCAUCGGAGCGCAC | 20 | 2340 |
| HSV1-UL19-3339 | + | GCUGUUUGCAUCGGAGCGCAC | 21 | 7938 |
| HSV1-UL19-3340 | + | GGCUGUUUGCAUCGGAGCGCAC | 22 | 7939 |
| HSV1-UL19-3341 | + | AGGCUGUUUGCAUCGGAGCGCAC | 23 | 7940 |
| HSV1-UL19-3342 | + | CAGGCUGUUUGCAUCGGAGCGCAC | 24 | 7941 |
| HSV1-UL19-3343 | + | AUCAGCGGCUGGUGGACC | 18 | 7942 |
| HSV1-UL19-3344 | + | AAUCAGCGGCUGGUGGACC | 19 | 7943 |
| HSV1-UL19-1992 | + | CAAUCAGCGGCUGGUGGACC | 20 | 2349 |
| HSV1-UL19-3345 | + | GCAAUCAGCGGCUGGUGGACC | 21 | 7944 |
| HSV1-UL19-3346 | + | GGCAAUCAGCGGCUGGUGGACC | 22 | 7945 |
| HSV1-UL19-3347 | + | GGGCAAUCAGCGGCUGGUGGACC | 23 | 7946 |
| HSV1-UL19-3348 | + | CGGGCAAUCAGCGGCUGGUGGACC | 24 | 7947 |
| HSV1-UL19-3349 | + | CCGUCCAGGGCCUCCCCC | 18 | 7948 |
| HSV1-UL19-3350 | + | CCCGUCCAGGGCCUCCCCC | 19 | 7949 |
| HSV1-UL19-2002 | + | UCCCGUCCAGGGCCUCCCCC | 20 | 2358 |
| HSV1-UL19-3351 | + | GUCCCGUCCAGGGCCUCCCCC | 21 | 7950 |
| HSV1-UL19-3352 | + | CGUCCCGUCCAGGGCCUCCCCC | 22 | 7951 |
| HSV1-UL19-3353 | + | CCGUCCCGUCCAGGGCCUCCCCC | 23 | 7952 |
| HSV1-UL19-3354 | + | CCCGUCCCGUCCAGGGCCUCCCCC | 24 | 7953 |
| HSV1-UL19-3355 | + | UCGCGGUUGGGAGCGGCC | 18 | 7954 |
| HSV1-UL19-3356 | + | GUCGCGGUUGGGAGCGGCC | 19 | 7955 |
| HSV1-UL19-3357 | + | GGUCGCGGUUGGGAGCGGCC | 20 | 7956 |
| HSV1-UL19-3358 | + | GGGUCGCGGUUGGGAGCGGCC | 21 | 7957 |
| HSV1-UL19-3359 | + | AGGGUCGCGGUUGGGAGCGGCC | 22 | 7958 |
| HSV1-UL19-3360 | + | GAGGGUCGCGGUUGGGAGCGGCC | 23 | 7959 |
| HSV1-UL19-3361 | + | GGAGGGUCGCGGUUGGGAGCGGCC | 24 | 7960 |
| HSV1-UL19-3362 | + | CGCGGCAUACCGGUAUCC | 18 | 7961 |
| HSV1-UL19-3363 | + | CCGCGGCAUACCGGUAUCC | 19 | 7962 |
| HSV1-UL19-88 | + | GCCGCGGCAUACCGGUAUCC | 20 | 514 |
| HSV1-UL19-3364 | + | GGCCGCGGCAUACCGGUAUCC | 21 | 7963 |
| HSV1-UL19-3365 | + | UGGCCGCGGCAUACCGGUAUCC | 22 | 7964 |
| HSV1-UL19-3366 | + | AUGGCCGCGGCAUACCGGUAUCC | 23 | 7965 |
| HSV1-UL19-3367 | + | CAUGGCCGCGGCAUACCGGUAUCC | 24 | 7966 |
| HSV1-UL19-3368 | + | UUGCAUCGGAGCGCACGC | 18 | 7967 |
| HSV1-UL19-3369 | + | UUUGCAUCGGAGCGCACGC | 19 | 7968 |
| HSV1-UL19-78 | + | GUUUGCAUCGGAGCGCACGC | 20 | 506 |
| HSV1-UL19-3370 | + | UGUUUGCAUCGGAGCGCACGC | 21 | 7969 |
| HSV1-UL19-3371 | + | CUGUUUGCAUCGGAGCGCACGC | 22 | 7970 |
| HSV1-UL19-3372 | + | GCUGUUUGCAUCGGAGCGCACGC | 23 | 7971 |
| HSV1-UL19-3373 | + | GGCUGUUUGCAUCGGAGCGCACGC | 24 | 7972 |
| HSV1-UL19-3374 | + | CCGAGCUCCAGAAAGCGC | 18 | 7973 |
| HSV1-UL19-3375 | + | CCCGAGCUCCAGAAAGCGC | 19 | 7974 |
| HSV1-UL19-1987 | + | ACCCGAGCUCCAGAAAGCGC | 20 | 2345 |
| HSV1-UL19-3376 | + | AACCCGAGCUCCAGAAAGCGC | 21 | 7975 |
| HSV1-UL19-3377 | + | CAACCCGAGCUCCAGAAAGCGC | 22 | 7976 |
| HSV1-UL19-3378 | + | ACAACCCGAGCUCCAGAAAGCGC | 23 | 7977 |
| HSV1-UL19-3379 | + | GACAACCCGAGCUCCAGAAAGCGC | 24 | 7978 |
| HSV1-UL19-3380 | + | GAGCGGCCAUGGGGUCGC | 18 | 7979 |
| HSV1-UL19-3381 | + | GGAGCGGCCAUGGGGUCGC | 19 | 7980 |
| HSV1-UL19-3382 | + | GGGAGCGGCCAUGGGGUCGC | 20 | 7981 |
| HSV1-UL19-3383 | + | UGGGAGCGGCCAUGGGGUCGC | 21 | 7982 |
| HSV1-UL19-3384 | + | UUGGGAGCGGCCAUGGGGUCGC | 22 | 7983 |
| HSV1-UL19-3385 | + | GUUGGGAGCGGCCAUGGGGUCGC | 23 | 7984 |
| HSV1-UL19-3386 | + | GGUUGGGAGCGGCCAUGGGGUCGC | 24 | 7985 |
| HSV1-UL19-3387 | + | AAACGCCCCGAGGACGGC | 18 | 7986 |
| HSV1-UL19-3388 | + | CAAACGCCCCGAGGACGGC | 19 | 7987 |
| HSV1-UL19-2611 | + | UCAAACGCCCCGAGGACGGC | 20 | 2727 |
| HSV1-UL19-3389 | + | CCGCGGCAUACCGGUAUC | 18 | 7988 |
| HSV1-UL19-3390 | + | GCCGCGGCAUACCGGUAUC | 19 | 7989 |
| HSV1-UL19-1974 | + | GGCCGCGGCAUACCGGUAUC | 20 | 2337 |
| HSV1-UL19-3391 | + | UGGCCGCGGCAUACCGGUAUC | 21 | 7990 |
| HSV1-UL19-3392 | + | AUGGCCGCGGCAUACCGGUAUC | 22 | 7991 |
| HSV1-UL19-3393 | + | CAUGGCCGCGGCAUACCGGUAUC | 23 | 7992 |
| HSV1-UL19-3394 | + | CCAUGGCCGCGGCAUACCGGUAUC | 24 | 7993 |
| HSV1-UL19-3395 | + | GUUCAUGUAGGCCAGCUC | 18 | 7994 |
| HSV1-UL19-3396 | + | CGUUCAUGUAGGCCAGCUC | 19 | 7995 |
| HSV1-UL19-69 | + | UCGUUCAUGUAGGCCAGCUC | 20 | 435 |
| HSV1-UL19-3397 | + | CUCGUUCAUGUAGGCCAGCUC | 21 | 7996 |
| HSV1-UL19-3398 | + | CCUCGUUCAUGUAGGCCAGCUC | 22 | 7997 |
| HSV1-UL19-3399 | + | CCCUCGUUCAUGUAGGCCAGCUC | 23 | 7998 |
| HSV1-UL19-3400 | + | CCCCUCGUUCAUGUAGGCCAGCUC | 24 | 7999 |
| HSV1-UL19-3401 | + | CACCGACAACCCGAGCUC | 18 | 8000 |
| HSV1-UL19-3402 | + | CCACCGACAACCCGAGCUC | 19 | 8001 |
| HSV1-UL19-1988 | + | GCCACCGACAACCCGAGCUC | 20 | 2346 |
| HSV1-UL19-3403 | + | CGCCACCGACAACCCGAGCUC | 21 | 8002 |
| HSV1-UL19-3404 | + | ACGCCACCGACAACCCGAGCUC | 22 | 8003 |
| HSV1-UL19-3405 | + | CACGCCACCGACAACCCGAGCUC | 23 | 8004 |
| HSV1-UL19-3406 | + | GCACGCCACCGACAACCCGAGCUC | 24 | 8005 |
| HSV1-UL19-3407 | + | GCCGAUACCCGUCCCGUC | 18 | 8006 |
| HSV1-UL19-3408 | + | CGCCGAUACCCGUCCCGUC | 19 | 8007 |
| HSV1-UL19-2003 | + | GCGCCGAUACCCGUCCCGUC | 20 | 2359 |
| HSV1-UL19-3409 | + | CGCGCCGAUACCCGUCCCGUC | 21 | 8008 |
| HSV1-UL19-3410 | + | GCGCGCCGAUACCCGUCCCGUC | 22 | 8009 |
| HSV1-UL19-3411 | + | UGCGCGCCGAUACCCGUCCCGUC | 23 | 8010 |
| HSV1-UL19-3412 | + | AUGCGCGCCGAUACCCGUCCCGUC | 24 | 8011 |
| HSV1-UL19-3413 | + | GAUGGGGUGCGGGCCGUC | 18 | 8012 |
| HSV1-UL19-3414 | + | CGAUGGGGUGCGGGCCGUC | 19 | 8013 |
| HSV1-UL19-1994 | + | UCGAUGGGGUGCGGGCCGUC | 20 | 2351 |
| HSV1-UL19-3415 | + | CUCGAUGGGGUGCGGGCCGUC | 21 | 8014 |
| HSV1-UL19-3416 | + | GCUCGAUGGGGUGCGGGCCGUC | 22 | 8015 |
| HSV1-UL19-3417 | + | UGCUCGAUGGGGUGCGGGCCGUC | 23 | 8016 |
| HSV1-UL19-3418 | + | UUGCUCGAUGGGGUGCGGGCCGUC | 24 | 8017 |
| HSV1-UL19-3419 | + | CACCUCGAUCGUGCUAAG | 18 | 8018 |
| HSV1-UL19-3420 | + | CCACCUCGAUCGUGCUAAG | 19 | 8019 |
| HSV1-UL19-1976 | + | GCCACCUCGAUCGUGCUAAG | 20 | 2338 |
| HSV1-UL19-3421 | + | CGCCACCUCGAUCGUGCUAAG | 21 | 8020 |
| HSV1-UL19-3422 | + | ACGCCACCUCGAUCGUGCUAAG | 22 | 8021 |
| HSV1-UL19-3423 | + | GACGCCACCUCGAUCGUGCUAAG | 23 | 8022 |
| HSV1-UL19-3424 | + | CGACGCCACCUCGAUCGUGCUAAG | 24 | 8023 |
| HSV1-UL19-3425 | + | GUUGCAAUACGACCCCAG | 18 | 8024 |
| HSV1-UL19-3426 | + | UGUUGCAAUACGACCCCAG | 19 | 8025 |
| HSV1-UL19-1985 | + | GUGUUGCAAUACGACCCCAG | 20 | 2343 |
| HSV1-UL19-3427 | + | GGUGUUGCAAUACGACCCCAG | 21 | 8026 |
| HSV1-UL19-3428 | + | GGGUGUUGCAAUACGACCCCAG | 22 | 8027 |
| HSV1-UL19-3429 | + | AGGGUGUUGCAAUACGACCCCAG | 23 | 8028 |
| HSV1-UL19-3430 | + | CAGGGUGUUGCAAUACGACCCCAG | 24 | 8029 |
| HSV1-UL19-3431 | + | CAGGGCCUCCCCCGUGAG | 18 | 8030 |
| HSV1-UL19-3432 | + | CCAGGGCCUCCCCCGUGAG | 19 | 8031 |
| HSV1-UL19-2001 | + | UCCAGGGCCUCCCCCGUGAG | 20 | 2357 |
| HSV1-UL19-3433 | + | GUCCAGGGCCUCCCCCGUGAG | 21 | 8032 |
| HSV1-UL19-3434 | + | CGUCCAGGGCCUCCCCCGUGAG | 22 | 8033 |
| HSV1-UL19-3435 | + | CCGUCCAGGGCCUCCCCCGUGAG | 23 | 8034 |
| HSV1-UL19-3436 | + | CCCGUCCAGGGCCUCCCCCGUGAG | 24 | 8035 |
| HSV1-UL19-3437 | + | UUUGCAUCGGAGCGCACG | 18 | 8036 |
| HSV1-UL19-3438 | + | GUUUGCAUCGGAGCGCACG | 19 | 8037 |
| HSV1-UL19-77 | + | UGUUUGCAUCGGAGCGCACG | 20 | 505 |
| HSV1-UL19-3439 | + | CUGUUUGCAUCGGAGCGCACG | 21 | 8038 |
| HSV1-UL19-3440 | + | GCUGUUUGCAUCGGAGCGCACG | 22 | 8039 |
| HSV1-UL19-3441 | + | GGCUGUUUGCAUCGGAGCGCACG | 23 | 8040 |
| HSV1-UL19-3442 | + | AGGCUGUUUGCAUCGGAGCGCACG | 24 | 8041 |
| HSV1-UL19-3443 | + | AGCGGCCAUGGGGUCGCG | 18 | 8042 |
| HSV1-UL19-3444 | + | GAGCGGCCAUGGGGUCGCG | 19 | 8043 |
| HSV1-UL19-3223 | + | GGAGCGGCCAUGGGGUCGCG | 20 | 7822 |
| HSV1-UL19-3445 | + | GGGAGCGGCCAUGGGGUCGCG | 21 | 8044 |
| HSV1-UL19-3446 | + | UGGGAGCGGCCAUGGGGUCGCG | 22 | 8045 |
| HSV1-UL19-3447 | + | UUGGGAGCGGCCAUGGGGUCGCG | 23 | 8046 |
| HSV1-UL19-3448 | + | GUUGGGAGCGGCCAUGGGGUCGCG | 24 | 8047 |
| HSV1-UL19-3449 | + | UACGACCCCAGCAGGGCG | 18 | 8048 |
| HSV1-UL19-3450 | + | AUACGACCCCAGCAGGGCG | 19 | 8049 |
| HSV1-UL19-1984 | + | AAUACGACCCCAGCAGGGCG | 20 | 2342 |
| HSV1-UL19-3451 | + | CAAUACGACCCCAGCAGGGCG | 21 | 8050 |
| HSV1-UL19-3452 | + | GCAAUACGACCCCAGCAGGGCG | 22 | 8051 |
| HSV1-UL19-3453 | + | UGCAAUACGACCCCAGCAGGGCG | 23 | 8052 |
| HSV1-UL19-3454 | + | UUGCAAUACGACCCCAGCAGGGCG | 24 | 8053 |
| HSV1-UL19-3455 | + | UUGUGUGUGGGUUGCUCG | 18 | 8054 |
| HSV1-UL19-3456 | + | AUUGUGUGUGGGUUGCUCG | 19 | 8055 |
| HSV1-UL19-1997 | + | AAUUGUGUGUGGGUUGCUCG | 20 | 2353 |
| HSV1-UL19-3457 | + | UAAUUGUGUGUGGGUUGCUCG | 21 | 8056 |
| HSV1-UL19-3458 | + | GUAAUUGUGUGUGGGUUGCUCG | 22 | 8057 |
| HSV1-UL19-3459 | + | UGUAAUUGUGUGUGGGUUGCUCG | 23 | 8058 |
| HSV1-UL19-3460 | + | AUGUAAUUGUGUGUGGGUUGCUCG | 24 | 8059 |
| HSV1-UL19-3461 | + | ACCUCGAUCGUGCUAAGG | 18 | 8060 |
| HSV1-UL19-3462 | + | CACCUCGAUCGUGCUAAGG | 19 | 8061 |
| HSV1-UL19-81 | + | CCACCUCGAUCGUGCUAAGG | 20 | 509 |
| HSV1-UL19-3463 | + | GCCACCUCGAUCGUGCUAAGG | 21 | 8062 |
| HSV1-UL19-3464 | + | CGCCACCUCGAUCGUGCUAAGG | 22 | 8063 |
| HSV1-UL19-3465 | + | ACGCCACCUCGAUCGUGCUAAGG | 23 | 8064 |
| HSV1-UL19-3466 | + | GACGCCACCUCGAUCGUGCUAAGG | 24 | 8065 |
| HSV1-UL19-3467 | + | AUGGCCUCGGUGGCCAGG | 18 | 8066 |
| HSV1-UL19-3468 | + | GAUGGCCUCGGUGGCCAGG | 19 | 8067 |
| HSV1-UL19-2000 | + | CGAUGGCCUCGGUGGCCAGG | 20 | 2356 |
| HSV1-UL19-3469 | + | GCGAUGGCCUCGGUGGCCAGG | 21 | 8068 |
| HSV1-UL19-3470 | + | GGCGAUGGCCUCGGUGGCCAGG | 22 | 8069 |
| HSV1-UL19-3471 | + | GGGCGAUGGCCUCGGUGGCCAGG | 23 | 8070 |
| HSV1-UL19-3472 | + | AGGGCGAUGGCCUCGGUGGCCAGG | 24 | 8071 |
| HSV1-UL19-3473 | + | UAUCCCGGAGGGUCGCGG | 18 | 8072 |
| HSV1-UL19-3474 | + | GUAUCCCGGAGGGUCGCGG | 19 | 8073 |
| HSV1-UL19-1971 | + | GGUAUCCCGGAGGGUCGCGG | 20 | 2335 |
| HSV1-UL19-3475 | + | CGGUAUCCCGGAGGGUCGCGG | 21 | 8074 |
| HSV1-UL19-3476 | + | CCGGUAUCCCGGAGGGUCGCGG | 22 | 8075 |
| HSV1-UL19-3477 | + | ACCGGUAUCCCGGAGGGUCGCGG | 23 | 8076 |
| HSV1-UL19-3478 | + | UACCGGUAUCCCGGAGGGUCGCGG | 24 | 8077 |
| HSV1-UL19-3479 | + | GCGGGCAAUCAGCGGCUG | 18 | 8078 |
| HSV1-UL19-3480 | + | CGCGGGCAAUCAGCGGCUG | 19 | 8079 |
| HSV1-UL19-1993 | + | UCGCGGGCAAUCAGCGGCUG | 20 | 2350 |
| HSV1-UL19-3481 | + | GUCGCGGGCAAUCAGCGGCUG | 21 | 8080 |
| HSV1-UL19-3482 | + | CGUCGCGGGCAAUCAGCGGCUG | 22 | 8081 |
| HSV1-UL19-3483 | + | CCGUCGCGGGCAAUCAGCGGCUG | 23 | 8082 |
| HSV1-UL19-3484 | + | GCCGUCGCGGGCAAUCAGCGGCUG | 24 | 8083 |
| HSV1-UL19-3485 | + | CGUACAGGCUGUUUGCAU | 18 | 8084 |
| HSV1-UL19-3486 | + | UCGUACAGGCUGUUUGCAU | 19 | 8085 |
| HSV1-UL19-76 | + | GUCGUACAGGCUGUUUGCAU | 20 | 442 |
| HSV1-UL19-3487 | + | CGUCGUACAGGCUGUUUGCAU | 21 | 8086 |
| HSV1-UL19-3488 | + | ACGUCGUACAGGCUGUUUGCAU | 22 | 8087 |
| HSV1-UL19-3489 | + | GACGUCGUACAGGCUGUUUGCAU | 23 | 8088 |
| HSV1-UL19-3490 | + | CGACGUCGUACAGGCUGUUUGCAU | 24 | 8089 |
| HSV1-UL19-3491 | + | CGUUCAUGUAGGCCAGCU | 18 | 8090 |
| HSV1-UL19-3492 | + | UCGUUCAUGUAGGCCAGCU | 19 | 8091 |
| HSV1-UL19-1991 | + | CUCGUUCAUGUAGGCCAGCU | 20 | 2348 |
| HSV1-UL19-3493 | + | CCUCGUUCAUGUAGGCCAGCU | 21 | 8092 |
| HSV1-UL19-3494 | + | CCCUCGUUCAUGUAGGCCAGCU | 22 | 8093 |
| HSV1-UL19-3495 | + | CCCCUCGUUCAUGUAGGCCAGCU | 23 | 8094 |
| HSV1-UL19-3496 | + | GCCCCUCGUUCAUGUAGGCCAGCU | 24 | 8095 |
| HSV1-UL19-3497 | + | CGCCACCUCGAUCGUGCU | 18 | 8096 |
| HSV1-UL19-3498 | + | ACGCCACCUCGAUCGUGCU | 19 | 8097 |
| HSV1-UL19-1978 | + | GACGCCACCUCGAUCGUGCU | 20 | 2339 |
| HSV1-UL19-3499 | + | CGACGCCACCUCGAUCGUGCU | 21 | 8098 |
| HSV1-UL19-3500 | + | GCGACGCCACCUCGAUCGUGCU | 22 | 8099 |
| HSV1-UL19-3501 | + | UGCGACGCCACCUCGAUCGUGCU | 23 | 8100 |
| HSV1-UL19-3502 | + | AUGCGACGCCACCUCGAUCGUGCU | 24 | 8101 |
| HSV1-UL19-3503 | + | AUCCCGGAGGGUCGCGGU | 18 | 8102 |
| HSV1-UL19-3504 | + | UAUCCCGGAGGGUCGCGGU | 19 | 8103 |
| HSV1-UL19-92 | + | GUAUCCCGGAGGGUCGCGGU | 20 | 456 |
| HSV1-UL19-3505 | + | GGUAUCCCGGAGGGUCGCGGU | 21 | 8104 |
| HSV1-UL19-3506 | + | CGGUAUCCCGGAGGGUCGCGGU | 22 | 8105 |
| HSV1-UL19-3507 | + | CCGGUAUCCCGGAGGGUCGCGGU | 23 | 8106 |
| HSV1-UL19-3508 | + | ACCGGUAUCCCGGAGGGUCGCGGU | 24 | 8107 |
| HSV1-UL19-3509 | + | UGGGUUGCUCGAUGGGGU | 18 | 8108 |
| HSV1-UL19-3510 | + | GUGGGUUGCUCGAUGGGGU | 19 | 8109 |
| HSV1-UL19-1995 | + | UGUGGGUUGCUCGAUGGGGU | 20 | 2352 |
| HSV1-UL19-3511 | + | GUGUGGGUUGCUCGAUGGGGU | 21 | 8110 |
| HSV1-UL19-3512 | + | UGUGUGGGUUGCUCGAUGGGGU | 22 | 8111 |
| HSV1-UL19-3513 | + | GUGUGUGGGUUGCUCGAUGGGGU | 23 | 8112 |
| HSV1-UL19-3514 | + | UGUGUGUGGGUUGCUCGAUGGGGU | 24 | 8113 |
| HSV1-UL19-3515 | + | GAGGACGGCCUGGACGUU | 18 | 8114 |
| HSV1-UL19-3516 | + | CGAGGACGGCCUGGACGUU | 19 | 8115 |
| HSV1-UL19-3517 | + | CCGAGGACGGCCUGGACGUU | 20 | 8116 |
| HSV1-UL19-3518 | + | CCCGAGGACGGCCUGGACGUU | 21 | 8117 |
| HSV1-UL19-3519 | + | CCCCGAGGACGGCCUGGACGUU | 22 | 8118 |
| HSV1-UL19-3520 | + | GCCCCGAGGACGGCCUGGACGUU | 23 | 8119 |
| HSV1-UL19-3521 | + | CGCCCCGAGGACGGCCUGGACGUU | 24 | 8120 |
| HSV1-UL19-3522 | + | CAGGCUGAAGGCGGCGUU | 18 | 8121 |
| HSV1-UL19-3523 | + | CCAGGCUGAAGGCGGCGUU | 19 | 8122 |
| HSV1-UL19-1999 | + | GCCAGGCUGAAGGCGGCGUU | 20 | 2355 |
| HSV1-UL19-3524 | + | GGCCAGGCUGAAGGCGGCGUU | 21 | 8123 |
| HSV1-UL19-3525 | + | UGGCCAGGCUGAAGGCGGCGUU | 22 | 8124 |
| HSV1-UL19-3526 | + | GUGGCCAGGCUGAAGGCGGCGUU | 23 | 8125 |
| HSV1-UL19-3527 | + | GGUGGCCAGGCUGAAGGCGGCGUU | 24 | 8126 |
| HSV1-UL19-3528 | + | UCCCGGAGGGUCGCGGUU | 18 | 8127 |
| HSV1-UL19-3529 | + | AUCCCGGAGGGUCGCGGUU | 19 | 8128 |
| HSV1-UL19-93 | + | UAUCCCGGAGGGUCGCGGUU | 20 | 457 |
| HSV1-UL19-3530 | + | GUAUCCCGGAGGGUCGCGGUU | 21 | 8129 |
| HSV1-UL19-3531 | + | GGUAUCCCGGAGGGUCGCGGUU | 22 | 8130 |
| HSV1-UL19-3532 | + | CGGUAUCCCGGAGGGUCGCGGUU | 23 | 8131 |
| HSV1-UL19-3533 | + | CCGGUAUCCCGGAGGGUCGCGGUU | 24 | 8132 |
| HSV1-UL19-3534 | − | GCGACGGCCCGCACCCCA | 18 | 8133 |
| HSV1-UL19-3535 | − | CGCGACGGCCCGCACCCCA | 19 | 8134 |
| HSV1-UL19-1926 | − | CCGCGACGGCCCGCACCCCA | 20 | 2307 |
| HSV1-UL19-3536 | − | CCCGCGACGGCCCGCACCCCA | 21 | 8135 |
| HSV1-UL19-3537 | − | GCCCGCGACGGCCCGCACCCCA | 22 | 8136 |
| HSV1-UL19-3538 | − | UGCCCGCGACGGCCCGCACCCCA | 23 | 8137 |
| HSV1-UL19-3539 | − | UUGCCCGCGACGGCCCGCACCCCA | 24 | 8138 |
| HSV1-UL19-3540 | − | CCGCCUUCAGCCUGGCCA | 18 | 8139 |
| HSV1-UL19-3541 | − | GCCGCCUUCAGCCUGGCCA | 19 | 8140 |
| HSV1-UL19-1929 | − | CGCCGCCUUCAGCCUGGCCA | 20 | 2310 |
| HSV1-UL19-3542 | − | ACGCCGCCUUCAGCCUGGCCA | 21 | 8141 |
| HSV1-UL19-3543 | − | AACGCCGCCUUCAGCCUGGCCA | 22 | 8142 |
| HSV1-UL19-3544 | − | GAACGCCGCCUUCAGCCUGGCCA | 23 | 8143 |
| HSV1-UL19-3545 | − | UGAACGCCGCCUUCAGCCUGGCCA | 24 | 8144 |
| HSV1-UL19-3546 | − | AGGCCAUCGCCCUGCUCA | 18 | 8145 |
| HSV1-UL19-3547 | − | GAGGCCAUCGCCCUGCUCA | 19 | 8146 |
| HSV1-UL19-29 | − | CGAGGCCAUCGCCCUGCUCA | 20 | 474 |
| HSV1-UL19-3548 | − | CCGAGGCCAUCGCCCUGCUCA | 21 | 8147 |
| HSV1-UL19-3549 | − | ACCGAGGCCAUCGCCCUGCUCA | 22 | 8148 |
| HSV1-UL19-3550 | − | CACCGAGGCCAUCGCCCUGCUCA | 23 | 8149 |
| HSV1-UL19-3551 | − | CCACCGAGGCCAUCGCCCUGCUCA | 24 | 8150 |
| HSV1-UL19-3552 | − | GGUCCCUCCUUAGCACGA | 18 | 8151 |
| HSV1-UL19-3553 | − | GGGUCCCUCCUUAGCACGA | 19 | 8152 |
| HSV1-UL19-1912 | − | CGGGUCCCUCCUUAGCACGA | 20 | 2297 |
| HSV1-UL19-3554 | − | CCGGGUCCCUCCUUAGCACGA | 21 | 8153 |
| HSV1-UL19-3555 | − | ACCGGGUCCCUCCUUAGCACGA | 22 | 8154 |
| HSV1-UL19-3556 | − | GACCGGGUCCCUCCUUAGCACGA | 23 | 8155 |
| HSV1-UL19-3557 | − | CGACCGGGUCCCUCCUUAGCACGA | 24 | 8156 |
| HSV1-UL19-3558 | − | CACGGGGGAGGCCCUGGA | 18 | 8157 |
| HSV1-UL19-3559 | − | UCACGGGGGAGGCCCUGGA | 19 | 8158 |
| HSV1-UL19-35 | − | CUCACGGGGGAGGCCCUGGA | 20 | 478 |
| HSV1-UL19-3560 | − | GCUCACGGGGGAGGCCCUGGA | 21 | 8159 |
| HSV1-UL19-3561 | − | UGCUCACGGGGGAGGCCCUGGA | 22 | 8160 |
| HSV1-UL19-3562 | − | CUGCUCACGGGGGAGGCCCUGGA | 23 | 8161 |
| HSV1-UL19-3563 | − | CCUGCUCACGGGGGAGGCCCUGGA | 24 | 8162 |
| HSV1-UL19-3564 | − | CGGAGCUGGCCUACAUGA | 18 | 8163 |
| HSV1-UL19-3565 | − | CCGGAGCUGGCCUACAUGA | 19 | 8164 |
| HSV1-UL19-1922 | − | UCCGGAGCUGGCCUACAUGA | 20 | 2304 |
| HSV1-UL19-3566 | − | UUCCGGAGCUGGCCUACAUGA | 21 | 8165 |
| HSV1-UL19-3567 | − | UUUCCGGAGCUGGCCUACAUGA | 22 | 8166 |
| HSV1-UL19-3568 | − | GUUUCCGGAGCUGGCCUACAUGA | 23 | 8167 |
| HSV1-UL19-3569 | − | AGUUUCCGGAGCUGGCCUACAUGA | 24 | 8168 |
| HSV1-UL19-3570 | − | GAGCUGGCCUACAUGAAC | 18 | 8169 |
| HSV1-UL19-3571 | − | GGAGCUGGCCUACAUGAAC | 19 | 8170 |
| HSV1-UL19-1923 | − | CGGAGCUGGCCUACAUGAAC | 20 | 2305 |
| HSV1-UL19-3572 | − | CCGGAGCUGGCCUACAUGAAC | 21 | 8171 |
| HSV1-UL19-3573 | − | UCCGGAGCUGGCCUACAUGAAC | 22 | 8172 |
| HSV1-UL19-3574 | − | UUCCGGAGCUGGCCUACAUGAAC | 23 | 8173 |
| HSV1-UL19-3575 | − | UUUCCGGAGCUGGCCUACAUGAAC | 24 | 8174 |
| HSV1-UL19-3576 | − | GGCCAUCGCCCUGCUCAC | 18 | 8175 |
| HSV1-UL19-3577 | − | AGGCCAUCGCCCUGCUCAC | 19 | 8176 |
| HSV1-UL19-30 | − | GAGGCCAUCGCCCUGCUCAC | 20 | 475 |
| HSV1-UL19-3578 | − | CGAGGCCAUCGCCCUGCUCAC | 21 | 8177 |
| HSV1-UL19-3579 | − | CCGAGGCCAUCGCCCUGCUCAC | 22 | 8178 |
| HSV1-UL19-3580 | − | ACCGAGGCCAUCGCCCUGCUCAC | 23 | 8179 |
| HSV1-UL19-3581 | − | CACCGAGGCCAUCGCCCUGCUCAC | 24 | 8180 |
| HSV1-UL19-3582 | − | UUUCCGGAGCUGGCCUAC | 18 | 8181 |
| HSV1-UL19-3583 | − | GUUUCCGGAGCUGGCCUAC | 19 | 8182 |
| HSV1-UL19-1921 | − | AGUUUCCGGAGCUGGCCUAC | 20 | 2303 |
| HSV1-UL19-3584 | − | AAGUUUCCGGAGCUGGCCUAC | 21 | 8183 |
| HSV1-UL19-3585 | − | CAAGUUUCCGGAGCUGGCCUAC | 22 | 8184 |
| HSV1-UL19-3586 | − | CCAAGUUUCCGGAGCUGGCCUAC | 23 | 8185 |
| HSV1-UL19-3587 | − | ACCAAGUUUCCGGAGCUGGCCUAC | 24 | 8186 |
| HSV1-UL19-3588 | − | CUGCUCACGGGGGAGGCC | 18 | 8187 |
| HSV1-UL19-3589 | − | CCUGCUCACGGGGGAGGCC | 19 | 8188 |
| HSV1-UL19-1935 | − | CCCUGCUCACGGGGGAGGCC | 20 | 2312 |
| HSV1-UL19-3590 | − | GCCCUGCUCACGGGGGAGGCC | 21 | 8189 |
| HSV1-UL19-3591 | − | CGCCCUGCUCACGGGGGAGGCC | 22 | 8190 |
| HSV1-UL19-3592 | − | UCGCCCUGCUCACGGGGGAGGCC | 23 | 8191 |
| HSV1-UL19-3593 | − | AUCGCCCUGCUCACGGGGGAGGCC | 24 | 8192 |
| HSV1-UL19-3594 | − | AUUAUCGACCGCCGGGCC | 18 | 8193 |
| HSV1-UL19-3595 | − | GAUUAUCGACCGCCGGGCC | 19 | 8194 |
| HSV1-UL19-1928 | − | AGAUUAUCGACCGCCGGGCC | 20 | 2309 |
| HSV1-UL19-3596 | − | AAGAUUAUCGACCGCCGGGCC | 21 | 8195 |
| HSV1-UL19-3597 | − | CAAGAUUAUCGACCGCCGGGCC | 22 | 8196 |
| HSV1-UL19-3598 | − | CCAAGAUUAUCGACCGCCGGGCC | 23 | 8197 |
| HSV1-UL19-3599 | − | ACCAAGAUUAUCGACCGCCGGGCC | 24 | 8198 |
| HSV1-UL19-3600 | − | GCAACGUCCAGGCCGUCC | 18 | 8199 |
| HSV1-UL19-3601 | − | CGCAACGUCCAGGCCGUCC | 19 | 8200 |
| HSV1-UL19-3602 | − | UCGCAACGUCCAGGCCGUCC | 20 | 8201 |
| HSV1-UL19-3603 | − | CUCGCAACGUCCAGGCCGUCC | 21 | 8202 |
| HSV1-UL19-3604 | − | GCUCGCAACGUCCAGGCCGUCC | 22 | 8203 |
| HSV1-UL19-3605 | − | CGCUCGCAACGUCCAGGCCGUCC | 23 | 8204 |
| HSV1-UL19-3606 | − | UCGCUCGCAACGUCCAGGCCGUCC | 24 | 8205 |
| HSV1-UL19-3607 | − | GAGGCCAUCGCCCUGCUC | 18 | 8206 |
| HSV1-UL19-3608 | − | CGAGGCCAUCGCCCUGCUC | 19 | 8207 |
| HSV1-UL19-1930 | − | CCGAGGCCAUCGCCCUGCUC | 20 | 2311 |
| HSV1-UL19-3609 | − | ACCGAGGCCAUCGCCCUGCUC | 21 | 8208 |
| HSV1-UL19-3610 | − | CACCGAGGCCAUCGCCCUGCUC | 22 | 8209 |
| HSV1-UL19-3611 | − | CCACCGAGGCCAUCGCCCUGCUC | 23 | 8210 |
| HSV1-UL19-3612 | − | GCCACCGAGGCCAUCGCCCUGCUC | 24 | 8211 |
| HSV1-UL19-3613 | − | UGUCGCUCGUGCGCUUUC | 18 | 8212 |
| HSV1-UL19-3614 | − | CUGUCGCUCGUGCGCUUUC | 19 | 8213 |
| HSV1-UL19-13 | − | CCUGUCGCUCGUGCGCUUUC | 20 | 395 |
| HSV1-UL19-3615 | − | CCCUGUCGCUCGUGCGCUUUC | 21 | 8214 |
| HSV1-UL19-3616 | − | ACCCUGUCGCUCGUGCGCUUUC | 22 | 8215 |
| HSV1-UL19-3617 | − | CACCCUGUCGCUCGUGCGCUUUC | 23 | 8216 |
| HSV1-UL19-3618 | − | ACACCCUGUCGCUCGUGCGCUUUC | 24 | 8217 |
| HSV1-UL19-3619 | − | GCGUGUGUACCAAGUUUC | 18 | 8218 |
| HSV1-UL19-3620 | − | UGCGUGUGUACCAAGUUUC | 19 | 8219 |
| HSV1-UL19-18 | − | GUGCGUGUGUACCAAGUUUC | 20 | 404 |
| HSV1-UL19-3621 | − | CGUGCGUGUGUACCAAGUUUC | 21 | 8220 |
| HSV1-UL19-3622 | − | GCGUGCGUGUGUACCAAGUUUC | 22 | 8221 |
| HSV1-UL19-3623 | − | GGCGUGCGUGUGUACCAAGUUUC | 23 | 8222 |
| HSV1-UL19-3624 | − | UGGCGUGCGUGUGUACCAAGUUUC | 24 | 8223 |
| HSV1-UL19-3625 | − | AGCUGGCCUACAUGAACG | 18 | 8224 |
| HSV1-UL19-3626 | − | GAGCUGGCCUACAUGAACG | 19 | 8225 |
| HSV1-UL19-20 | − | GGAGCUGGCCUACAUGAACG | 20 | 469 |
| HSV1-UL19-3627 | − | CGGAGCUGGCCUACAUGAACG | 21 | 8226 |
| HSV1-UL19-3628 | − | CCGGAGCUGGCCUACAUGAACG | 22 | 8227 |
| HSV1-UL19-3629 | − | UCCGGAGCUGGCCUACAUGAACG | 23 | 8228 |
| HSV1-UL19-3630 | − | UUCCGGAGCUGGCCUACAUGAACG | 24 | 8229 |
| HSV1-UL19-3631 | − | GCCAUCGCCCUGCUCACG | 18 | 8230 |
| HSV1-UL19-3632 | − | GGCCAUCGCCCUGCUCACG | 19 | 8231 |
| HSV1-UL19-31 | − | AGGCCAUCGCCCUGCUCACG | 20 | 417 |
| HSV1-UL19-3633 | − | GAGGCCAUCGCCCUGCUCACG | 21 | 8232 |
| HSV1-UL19-3634 | − | CGAGGCCAUCGCCCUGCUCACG | 22 | 8233 |
| HSV1-UL19-3635 | − | CCGAGGCCAUCGCCCUGCUCACG | 23 | 8234 |
| HSV1-UL19-3636 | − | ACCGAGGCCAUCGCCCUGCUCACG | 24 | 8235 |
| HSV1-UL19-3637 | − | GACCAAGAUUAUCGACCG | 18 | 8236 |
| HSV1-UL19-3638 | − | UGACCAAGAUUAUCGACCG | 19 | 8237 |
| HSV1-UL19-1927 | − | AUGACCAAGAUUAUCGACCG | 20 | 2308 |
| HSV1-UL19-3639 | − | CAUGACCAAGAUUAUCGACCG | 21 | 8238 |
| HSV1-UL19-3640 | − | ACAUGACCAAGAUUAUCGACCG | 22 | 8239 |
| HSV1-UL19-3641 | − | UACAUGACCAAGAUUAUCGACCG | 23 | 8240 |
| HSV1-UL19-3642 | − | UUACAUGACCAAGAUUAUCGACCG | 24 | 8241 |
| HSV1-UL19-3643 | − | CCAUCGCCCUGCUCACGG | 18 | 8242 |
| HSV1-UL19-3644 | − | GCCAUCGCCCUGCUCACGG | 19 | 8243 |
| HSV1-UL19-32 | − | GGCCAUCGCCCUGCUCACGG | 20 | 476 |
| HSV1-UL19-3645 | − | AGGCCAUCGCCCUGCUCACGG | 21 | 8244 |
| HSV1-UL19-3646 | − | GAGGCCAUCGCCCUGCUCACGG | 22 | 8245 |
| HSV1-UL19-3647 | − | CGAGGCCAUCGCCCUGCUCACGG | 23 | 8246 |
| HSV1-UL19-3648 | − | CCGAGGCCAUCGCCCUGCUCACGG | 24 | 8247 |
| HSV1-UL19-3649 | − | UCACGGGGGAGGCCCUGG | 18 | 8248 |
| HSV1-UL19-3650 | − | CUCACGGGGGAGGCCCUGG | 19 | 8249 |
| HSV1-UL19-1936 | − | GCUCACGGGGGAGGCCCUGG | 20 | 2313 |
| HSV1-UL19-3651 | − | UGCUCACGGGGGAGGCCCUGG | 21 | 8250 |
| HSV1-UL19-3652 | − | CUGCUCACGGGGGAGGCCCUGG | 22 | 8251 |
| HSV1-UL19-3653 | − | CCUGCUCACGGGGGAGGCCCUGG | 23 | 8252 |
| HSV1-UL19-3654 | − | CCCUGCUCACGGGGGAGGCCCUGG | 24 | 8253 |
| HSV1-UL19-3655 | − | GUCGAGUUCGACGCCCUG | 18 | 8254 |
| HSV1-UL19-3656 | − | CGUCGAGUUCGACGCCCUG | 19 | 8255 |
| HSV1-UL19-1914 | − | ACGUCGAGUUCGACGCCCUG | 20 | 2299 |
| HSV1-UL19-3657 | − | GACGUCGAGUUCGACGCCCUG | 21 | 8256 |
| HSV1-UL19-3658 | − | CGACGUCGAGUUCGACGCCCUG | 22 | 8257 |
| HSV1-UL19-3659 | − | ACGACGUCGAGUUCGACGCCCUG | 23 | 8258 |
| HSV1-UL19-3660 | − | UACGACGUCGAGUUCGACGCCCUG | 24 | 8259 |
| HSV1-UL19-3661 | − | GCUCCCAACCGCGACCCU | 18 | 8260 |
| HSV1-UL19-3662 | − | CGCUCCCAACCGCGACCCU | 19 | 8261 |
| HSV1-UL19-1909 | − | CCGCUCCCAACCGCGACCCU | 20 | 2295 |
| HSV1-UL19-3663 | − | GCCGCUCCCAACCGCGACCCU | 21 | 8262 |
| HSV1-UL19-3664 | − | GGCCGCUCCCAACCGCGACCCU | 22 | 8263 |
| HSV1-UL19-3665 | − | UGGCCGCUCCCAACCGCGACCCU | 23 | 8264 |
| HSV1-UL19-3666 | − | AUGGCCGCUCCCAACCGCGACCCU | 24 | 8265 |
| HSV1-UL19-3667 | − | CAACGUCCAGGCCGUCCU | 18 | 8266 |
| HSV1-UL19-3668 | − | GCAACGUCCAGGCCGUCCU | 19 | 8267 |
| HSV1-UL19-189 | − | CGCAACGUCCAGGCCGUCCU | 20 | 575 |
| HSV1-UL19-3669 | − | UCGCAACGUCCAGGCCGUCCU | 21 | 8268 |
| HSV1-UL19-3670 | − | CUCGCAACGUCCAGGCCGUCCU | 22 | 8269 |
| HSV1-UL19-3671 | − | GCUCGCAACGUCCAGGCCGUCCU | 23 | 8270 |
| HSV1-UL19-3672 | − | CGCUCGCAACGUCCAGGCCGUCCU | 24 | 8271 |
| HSV1-UL19-3673 | − | ACGAGGGGCGCGUACAGU | 18 | 8272 |
| HSV1-UL19-3674 | − | AACGAGGGGCGCGUACAGU | 19 | 8273 |
| HSV1-UL19-1925 | − | GAACGAGGGGCGCGUACAGU | 20 | 2306 |
| HSV1-UL19-3675 | − | UGAACGAGGGGCGCGUACAGU | 21 | 8274 |
| HSV1-UL19-3676 | − | AUGAACGAGGGGCGCGUACAGU | 22 | 8275 |
| HSV1-UL19-3677 | − | CAUGAACGAGGGGCGCGUACAGU | 23 | 8276 |
| HSV1-UL19-3678 | − | ACAUGAACGAGGGGCGCGUACAGU | 24 | 8277 |
| HSV1-UL19-3679 | − | CUGUCGCUCGUGCGCUUU | 18 | 8278 |
| HSV1-UL19-3680 | − | CCUGUCGCUCGUGCGCUUU | 19 | 8279 |
| HSV1-UL19-1916 | − | CCCUGUCGCUCGUGCGCUUU | 20 | 2300 |
| HSV1-UL19-3681 | − | ACCCUGUCGCUCGUGCGCUUU | 21 | 8280 |
| HSV1-UL19-3682 | − | CACCCUGUCGCUCGUGCGCUUU | 22 | 8281 |
| HSV1-UL19-3683 | − | ACACCCUGUCGCUCGUGCGCUUU | 23 | 8282 |
| HSV1-UL19-3684 | − | AACACCCUGUCGCUCGUGCGCUUU | 24 | 8283 |
| HSV1-UL19-3685 | − | UGCGUGUGUACCAAGUUU | 18 | 8284 |
| HSV1-UL19-3686 | − | GUGCGUGUGUACCAAGUUU | 19 | 8285 |
| HSV1-UL19-1919 | − | CGUGCGUGUGUACCAAGUUU | 20 | 2302 |
| HSV1-UL19-3687 | − | GCGUGCGUGUGUACCAAGUUU | 21 | 8286 |
| HSV1-UL19-3688 | − | GGCGUGCGUGUGUACCAAGUUU | 22 | 8287 |
| HSV1-UL19-3689 | − | UGGCGUGCGUGUGUACCAAGUUU | 23 | 8288 |
| HSV1-UL19-3690 | − | GUGGCGUGCGUGUGUACCAAGUUU | 24 | 8289 |

[0763] Table 6E provides exemplary targeting domains for knocking out the UL19 gene selected according to the fifth tier parameters. The targeting domains fall in the coding sequence of the gene, downstream of the first 500 bp of coding sequence (e.g., anywhere from +500 (relative to the start codon) to the stop codon of the gene), and start with a 5′G. The PAM is NNGRRT. It is contemplated herein that in an embodiment the targeting domain hybridizes to the target domain through complementary base pairing. Any of the targeting domains in the table can be used with a S. aureus Cas9 molecule that generates a double stranded break (Cas9 nuclease) or a single-stranded break (Cas9 nickase).

TABLE 6E
5th Tier

| | DNA | | Target Site | Seq ID |
|---|---|---|---|---|
| gRNA Name | Strand | Targeting Domain | Length | NO: |
| HSV1-UL19-3691 | + | GACGAGAUACUGCGCGAA | 18 | 8290 |
| HSV1-UL19-3692 | + | GUCAUAGACGAGAUACUGCGCGAA | 24 | 8291 |
| HSV1-UL19-1198 | + | GUUACAUGCCGCCGCGUACA | 20 | 1584 |
| HSV1-UL19-3693 | + | GGUCCAUGGCGCCCACCA | 18 | 8292 |
| HSV1-UL19-3694 | + | GUCAGGUCCAUGGCGCCCACCA | 22 | 8293 |
| HSV1-UL19-3695 | + | GUCACGACGUACGAGACCA | 19 | 8294 |
| HSV1-UL19-2719 | + | GGUCACGACGUACGAGACCA | 20 | 2798 |
| HSV1-UL19-3696 | + | GUAGGUCACGACGUACGAGACCA | 23 | 8295 |
| HSV1-UL19-3697 | + | GGUAGGUCACGACGUACGAGACCA | 24 | 8296 |
| HSV1-UL19-3698 | + | GCCACCAGAUUGGCCGGGUGCA | 22 | 8297 |
| HSV1-UL19-3699 | + | GGCCACCAGAUUGGCCGGGUGCA | 23 | 8298 |
| HSV1-UL19-3700 | + | GGUGCGCGGGGUCCGUCA | 18 | 8299 |
| HSV1-UL19-3701 | + | GGGUGCGCGGGGUCCGUCA | 19 | 8300 |
| HSV1-UL19-1233 | + | GGGGUGCGCGGGGUCCGUCA | 20 | 1619 |
| HSV1-UL19-3702 | + | GGGGGUGCGCGGGGUCCGUCA | 21 | 8301 |
| HSV1-UL19-3703 | + | GCAGGGGGUGCGCGGGGUCCGUCA | 24 | 8302 |
| HSV1-UL19-1093 | + | GUACGGAUUGGCGGCUUCGA | 20 | 1479 |
| HSV1-UL19-1271 | + | GAACAGCGCGUGGACGGGGA | 20 | 1657 |
| HSV1-UL19-3704 | + | GCGAACAGCGCGUGGACGGGGA | 22 | 8303 |
| HSV1-UL19-3705 | + | GGCGAACAGCGCGUGGACGGGGA | 23 | 8304 |
| HSV1-UL19-3706 | + | GCGGCAAACCGUUCCAUGA | 19 | 8305 |
| HSV1-UL19-3707 | + | GCGCGGCAAACCGUUCCAUGA | 21 | 8306 |
| HSV1-UL19-3708 | + | GUGCGCGGCAAACCGUUCCAUGA | 23 | 8307 |
| HSV1-UL19-3709 | + | GGUCGCUGGCGCAGGUGA | 18 | 8308 |
| HSV1-UL19-3710 | + | GGGUCGCUGGCGCAGGUGA | 19 | 8309 |
| HSV1-UL19-2883 | + | GGGGUCGCUGGCGCAGGUGA | 20 | 2904 |
| HSV1-UL19-3711 | + | GCGGGGUCGCUGGCGCAGGUGA | 22 | 8310 |
| HSV1-UL19-3712 | + | GGCGGGGUCGCUGGCGCAGGUGA | 23 | 8311 |
| HSV1-UL19-3713 | + | GGGCGGGGUCGCUGGCGCAGGUGA | 24 | 8312 |
| HSV1-UL19-3714 | + | GGUUGCCCAUGUCGGUGA | 18 | 8313 |
| HSV1-UL19-3715 | + | GAAGGUUGCCCAUGUCGGUGA | 21 | 8314 |
| HSV1-UL19-3716 | + | GGAAGGUUGCCCAUGUCGGUGA | 22 | 8315 |
| HSV1-UL19-3717 | + | GGGAAGGUUGCCCAUGUCGGUGA | 23 | 8316 |
| HSV1-UL19-3718 | + | GGGGAAGGUUGCCCAUGUCGGUGA | 24 | 8317 |
| HSV1-UL19-3719 | + | GUUGACGUCGGUCGACAC | 18 | 8318 |
| HSV1-UL19-3720 | + | GUAGUUGACGUCGGUCGACAC | 21 | 8319 |
| HSV1-UL19-3721 | + | GAAGUAGUUGACGUCGGUCGACAC | 24 | 8320 |
| HSV1-UL19-3722 | + | GCCUCCUGAAACAGGCCAC | 19 | 8321 |
| HSV1-UL19-2881 | + | GGCCUCCUGAAACAGGCCAC | 20 | 2902 |
| HSV1-UL19-3723 | + | GUAGGCCUCCUGAAACAGGCCAC | 23 | 8322 |
| HSV1-UL19-3724 | + | GGUAGGCCUCCUGAAACAGGCCAC | 24 | 8323 |
| HSV1-UL19-3725 | + | GCUUCGCUUUAGCUCGGCGAC | 21 | 8324 |
| HSV1-UL19-3726 | + | GAAGCUUCGCUUUAGCUCGGCGAC | 24 | 8325 |
| HSV1-UL19-1312 | + | GACGACGGUGAACCCAAACC | 20 | 1698 |
| HSV1-UL19-3727 | + | GGACGACGGUGAACCCAAACC | 21 | 8326 |
| HSV1-UL19-3728 | + | GUCGGACGACGGUGAACCCAAACC | 24 | 8327 |
| HSV1-UL19-1375 | + | GCCCCCGGCGGCGCGUCCCC | 20 | 1761 |
| HSV1-UL19-3729 | + | GAAAAUCGCUGCGACGCCC | 19 | 8328 |
| HSV1-UL19-3730 | + | GUACGAAAAUCGCUGCGACGCCC | 23 | 8329 |
| HSV1-UL19-3731 | + | GAAACAGGCCACACGGGUCCUCC | 23 | 8330 |
| HSV1-UL19-3732 | + | GGCGGGGCGGGAAGGCGC | 18 | 8331 |
| HSV1-UL19-3733 | + | GCUGGCGGGGCGGGAAGGCGC | 21 | 8332 |
| HSV1-UL19-3734 | + | GGCGUCCGCGGCUCGGGC | 18 | 8333 |
| HSV1-UL19-2738 | + | GCGGCGUCCGCGGCUCGGGC | 20 | 2813 |
| HSV1-UL19-3735 | + | GUUCACCACGCGCCAGGUGGC | 21 | 8334 |
| HSV1-UL19-3736 | + | GCCGUUCACCACGCGCCAGGUGGC | 24 | 8335 |
| HSV1-UL19-3737 | + | GGGCUGCAUAAACUGCUC | 18 | 8336 |
| HSV1-UL19-3738 | + | GUCGGGCUGCAUAAACUGCUC | 21 | 8337 |
| HSV1-UL19-3739 | + | GUUGUCGGGCUGCAUAAACUGCUC | 24 | 8338 |
| HSV1-UL19-3740 | + | GAUGCUGGGGGGCCAUCAG | 19 | 8339 |
| HSV1-UL19-3741 | + | GUCCAGAUGCUGGGGGGCCAUCAG | 24 | 8340 |
| HSV1-UL19-3742 | + | GCGUCACAGUCCCACACG | 18 | 8341 |
| HSV1-UL19-3743 | + | GGCGUCACAGUCCCACACG | 19 | 8342 |
| HSV1-UL19-1187 | + | GGGCGUCACAGUCCCACACG | 20 | 1573 |
| HSV1-UL19-3744 | + | GCAGCAGGUAAAACACCG | 18 | 8343 |
| HSV1-UL19-3745 | + | GCCUGCAGCAGGUAAAACACCG | 22 | 8344 |
| HSV1-UL19-3746 | + | GGCCUGCAGCAGGUAAAACACCG | 23 | 8345 |
| HSV1-UL19-3747 | + | GAUUCCGGCGUGCAACGCCCCG | 22 | 8346 |
| HSV1-UL19-3748 | + | GGAUUCCGGCGUGCAACGCCCCG | 23 | 8347 |
| HSV1-UL19-3749 | + | GCGUCAACGUUCAUCAGCG | 19 | 8348 |
| HSV1-UL19-3750 | + | GCCGCGUCAACGUUCAUCAGCG | 22 | 8349 |
| HSV1-UL19-3751 | + | GCCGGGUGCAGGGGGUGCG | 19 | 8350 |
| HSV1-UL19-1236 | + | GGCCGGGUGCAGGGGGUGCG | 20 | 1622 |
| HSV1-UL19-3752 | + | GAUUGGCCGGGUGCAGGGGGUGCG | 24 | 8351 |
| HSV1-UL19-3753 | + | GUCCACGUUCGCGCGCGG | 18 | 8352 |
| HSV1-UL19-3754 | + | GGUCCACGUUCGCGCGCGG | 19 | 8353 |
| HSV1-UL19-3755 | + | GCCCAGGUCCACGUUCGCGCGCGG | 24 | 8354 |
| HSV1-UL19-3756 | + | GGGCACUGCGGAGGAGGG | 18 | 8355 |
| HSV1-UL19-1428 | + | GCGGGCACUGCGGAGGAGGG | 20 | 1814 |
| HSV1-UL19-3757 | + | GUUGCGGGCACUGCGGAGGAGGG | 23 | 8356 |
| HSV1-UL19-3758 | + | GUGGCCGCGAAGGCCCGGG | 19 | 8357 |
| HSV1-UL19-3759 | + | GCCGUGGCCGCGAAGGCCCGGG | 22 | 8358 |
| HSV1-UL19-3760 | + | GGCCGUGGCCGCGAAGGCCCGGG | 23 | 8359 |
| HSV1-UL19-3761 | + | GUGUUGGCCACCAGAUUGG | 19 | 8360 |
| HSV1-UL19-3762 | + | GACCGUGUUGGCCACCAGAUUGG | 23 | 8361 |
| HSV1-UL19-3245 | + | GACGUUGCGAGCGAGCUG | 18 | 7844 |
| HSV1-UL19-3246 | + | GGACGUUGCGAGCGAGCUG | 19 | 7845 |
| HSV1-UL19-3247 | + | GCCUGGACGUUGCGAGCGAGCUG | 23 | 7846 |
| HSV1-UL19-3248 | + | GGCCUGGACGUUGCGAGCGAGCUG | 24 | 7847 |
| HSV1-UL19-3763 | + | GUGCUGCACGACGGGCUG | 18 | 8362 |
| HSV1-UL19-3764 | + | GACGUGCUGCACGACGGGCUG | 21 | 8363 |
| HSV1-UL19-3765 | + | GGACGUGCUGCACGACGGGCUG | 22 | 8364 |
| HSV1-UL19-3766 | + | GCGGACGUGCUGCACGACGGGCUG | 24 | 8365 |
| HSV1-UL19-3767 | + | GAUCUCCGGGACCACCAUGUUCUG | 24 | 8366 |
| HSV1-UL19-3768 | + | GCGGGAAGGCGCGGGGAU | 18 | 8367 |
| HSV1-UL19-3769 | + | GGCGGGAAGGCGCGGGGAU | 19 | 8368 |
| HSV1-UL19-2665 | + | GGGCGGGAAGGCGCGGGGAU | 20 | 2762 |
| HSV1-UL19-3770 | + | GGGGCGGGAAGGCGCGGGGAU | 21 | 8369 |
| HSV1-UL19-3771 | + | GCGGGGCGGGAAGGCGCGGGGAU | 23 | 8370 |
| HSV1-UL19-3772 | + | GGCGGGGCGGGAAGGCGCGGGGAU | 24 | 8371 |
| HSV1-UL19-3773 | + | GCCGCCACGUACGCCCCGU | 19 | 8372 |
| HSV1-UL19-2679 | + | GGCCGCCACGUACGCCCCGU | 20 | 2770 |
| HSV1-UL19-3774 | + | GGGCCGCCACGUACGCCCCGU | 21 | 8373 |
| HSV1-UL19-3775 | + | GGGGCCGCCACGUACGCCCCGU | 22 | 8374 |
| HSV1-UL19-3776 | + | GCCCAGCUCCGGGCCGGU | 18 | 8375 |
| HSV1-UL19-3777 | + | GCCCGCCCAGCUCCGGGCCGGU | 22 | 8376 |
| HSV1-UL19-3778 | + | GUAAAAAUAGUCGCCAUU | 18 | 8377 |
| HSV1-UL19-3779 | + | GGUAAAAAUAGUCGCCAUU | 19 | 8378 |
| HSV1-UL19-2775 | + | GGGUAAAAAUAGUCGCCAUU | 20 | 2839 |
| HSV1-UL19-3780 | + | GGGGUAAAAAUAGUCGCCAUU | 21 | 8379 |
| HSV1-UL19-3781 | + | GGGGGUAAAAAUAGUCGCCAUU | 22 | 8380 |
| HSV1-UL19-3782 | + | GAGGGGGUAAAAAUAGUCGCCAUU | 24 | 8381 |
| HSV1-UL19-3783 | − | GCGCGGGCGGCCGGUCGA | 18 | 8382 |
| HSV1-UL19-3784 | − | GACACGCGCGGGCGGCCGGUCGA | 23 | 8383 |
| HSV1-UL19-3785 | − | GUCCCCGCCCCCGGCCAC | 18 | 8384 |
| HSV1-UL19-3786 | − | GACCUAGUCCCCGCCCCCGGCCAC | 24 | 8385 |
| HSV1-UL19-2044 | − | GACAACGGCCGCCUGGCCAC | 20 | 2388 |
| HSV1-UL19-3787 | − | GGACAACGGCCGCCUGGCCAC | 21 | 8386 |
| HSV1-UL19-3788 | − | GUACAGUUUAAGCGCCCCC | 19 | 8387 |
| HSV1-UL19-3789 | − | GACGUACAGUUUAAGCGCCCCC | 22 | 8388 |
| HSV1-UL19-3790 | − | GCGACGUACAGUUUAAGCGCCCCC | 24 | 8389 |
| HSV1-UL19-3791 | − | GCCCGAGCCGCGGACGCC | 18 | 8390 |
| HSV1-UL19-3792 | − | GGCCCGAGCCGCGGACGCC | 19 | 8391 |
| HSV1-UL19-3793 | − | GGGCCGCUGCUGCACCGC | 18 | 8392 |
| HSV1-UL19-3794 | − | GGGGCCGCUGCUGCACCGC | 19 | 8393 |
| HSV1-UL19-3795 | − | GCGGGGCCGCUGCUGCACCGC | 21 | 8394 |
| HSV1-UL19-519 | − | GCCCAGGUGCCGCGGCGCGC | 20 | 905 |
| HSV1-UL19-3796 | − | GCGCCCAGGUGCCGCGGCGCGC | 22 | 8395 |
| HSV1-UL19-3797 | − | GUGCGCCCAGGUGCCGCGGCGCGC | 24 | 8396 |
| HSV1-UL19-3798 | − | GCCCCCCAGACGACGCGCGUGCGC | 24 | 8397 |
| HSV1-UL19-2239 | − | GCUCAAGACGGGCCUCCAUC | 20 | 2508 |
| HSV1-UL19-3799 | − | GGGCAGGCGCAAGCCGAG | 18 | 8398 |
| HSV1-UL19-2181 | − | GCGGGCAGGCGCAAGCCGAG | 20 | 2471 |
| HSV1-UL19-3800 | − | GGCGGGCAGGCGCAAGCCGAG | 21 | 8399 |
| HSV1-UL19-3801 | − | GGGCGGGCAGGCGCAAGCCGAG | 22 | 8400 |
| HSV1-UL19-3802 | − | GUUUACGCGGGGGACAAGGAG | 21 | 8401 |
| HSV1-UL19-3803 | − | GCGUUUACGCGGGGGACAAGGAG | 23 | 8402 |
| HSV1-UL19-3804 | − | GGCGUUUACGCGGGGGACAAGGAG | 24 | 8403 |
| HSV1-UL19-3805 | − | GAGCGCCUGAUCGUGGAG | 18 | 8404 |
| HSV1-UL19-3806 | − | GGAGCGCCUGAUCGUGGAG | 19 | 8405 |
| HSV1-UL19-3807 | − | GCCUGGAGCGCCUGAUCGUGGAG | 23 | 8406 |
| HSV1-UL19-3808 | − | GGCCCACGGGCGGGUCCG | 18 | 8407 |
| HSV1-UL19-3809 | − | GCCUGGCCCACGGGCGGGUCCG | 22 | 8408 |
| HSV1-UL19-3810 | − | GCGCCUGGCCCACGGGCGGGUCCG | 24 | 8409 |
| HSV1-UL19-3811 | − | GUCCCGGAGAUCGCCCCCGGCG | 22 | 8410 |
| HSV1-UL19-3812 | − | GGUCCCGGAGAUCGCCCCCGGCG | 23 | 8411 |
| HSV1-UL19-3813 | − | GCAGCGCCUGGCCCACGG | 18 | 8412 |
| HSV1-UL19-3814 | − | GGCAGCGCCUGGCCCACGG | 19 | 8413 |
| HSV1-UL19-2123 | − | GGGCAGCGCCUGGCCCACGG | 20 | 2443 |
| HSV1-UL19-3815 | − | GGGGCAGCGCCUGGCCCACGG | 21 | 8414 |
| HSV1-UL19-3816 | − | GGGGGCAGCGCCUGGCCCACGG | 22 | 8415 |
| HSV1-UL19-487 | − | GCCCGGCACGAAACUGGCGG | 20 | 873 |
| HSV1-UL19-3817 | − | GGCCCGGCACGAAACUGGCGG | 21 | 8416 |
| HSV1-UL19-3818 | − | GUGGCCCGGCACGAAACUGGCGG | 23 | 8417 |
| HSV1-UL19-3819 | − | GGUGGCCCGGCACGAAACUGGCGG | 24 | 8418 |
| HSV1-UL19-464 | − | GCUGACCUACGCGCUCAUGG | 20 | 850 |
| HSV1-UL19-3820 | − | GCGCUGACCUACGCGCUCAUGG | 22 | 8419 |
| HSV1-UL19-3821 | − | GGACCGCCAUCGCGACUG | 18 | 8420 |
| HSV1-UL19-3822 | − | GCCCUGGACCGCCAUCGCGACUG | 23 | 8421 |
| HSV1-UL19-3823 | − | GGCCCUGGACCGCCAUCGCGACUG | 24 | 8422 |
| HSV1-UL19-3824 | − | GUAAUAAACCGCCCCGCCCUUCCU | 24 | 8423 |
| HSV1-UL19-338 | − | GACGCCCGGGGCCUGGAGCU | 20 | 724 |
| HSV1-UL19-3825 | − | GGACGCCCGGGGCCUGGAGCU | 21 | 8424 |
| HSV1-UL19-3826 | − | GGGACGCCCGGGGCCUGGAGCU | 22 | 8425 |
| HSV1-UL19-2240 | − | GACGGGCCUCCAUCCCGGGU | 20 | 2509 |
| HSV1-UL19-3827 | − | GCCCAGCCCGUCCCCGUGU | 19 | 8426 |
| HSV1-UL19-2271 | − | GGCCCAGCCCGUCCCCGUGU | 20 | 2529 |
| HSV1-UL19-3828 | − | GCCGGCCCAGCCCGUCCCCGUGU | 23 | 8427 |
| HSV1-UL19-3829 | − | GGCCGGCCCAGCCCGUCCCCGUGU | 24 | 8428 |
| HSV1-UL19-3830 | − | GACCACGGCCAGGACGCCGUGU | 22 | 8429 |
| HSV1-UL19-3831 | − | GGACCACGGCCAGGACGCCGUGU | 23 | 8430 |
| HSV1-UL19-3832 | − | GCACCCCGCGUUCGACUUCUUUGU | 24 | 8431 |

[0764] Table 6F provides exemplary targeting domains for knocking out the UL19 gene selected according to the six tier parameters. The targeting domains fall in the coding sequence of the gene, downstream of the first 500 bp of coding sequence (e.g., anywhere from +500 (relative to the start codon) to the stop codon of the gene). The PAM is NNGRRT. It is contemplated herein that in an embodiment the targeting domain hybridizes to the target domain through complementary base pairing. Any of the targeting domains in the table can be used with a S. aureus Cas9 molecule that generates a double stranded break (Cas9 nuclease) or a single-stranded break (Cas9 nickase).

TABLE 6F
6th Tier

| | DNA | | Target Site | Seq ID |
|---|---|---|---|---|
| gRNA Name | Strand | Targeting Domain | Length | NO: |
| HSV1-UL19-3833 | + | AGACGAGAUACUGCGCGAA | 19 | 8432 |
| HSV1-UL19-2894 | + | UAGACGAGAUACUGCGCGAA | 20 | 2912 |
| HSV1-UL19-3834 | + | AUAGACGAGAUACUGCGCGAA | 21 | 8433 |
| HSV1-UL19-3835 | + | CAUAGACGAGAUACUGCGCGAA | 22 | 8434 |
| HSV1-UL19-3836 | + | UCAUAGACGAGAUACUGCGCGAA | 23 | 8435 |
| HSV1-UL19-3837 | + | UACAUGCCGCCGCGUACA | 18 | 8436 |
| HSV1-UL19-3838 | + | UUACAUGCCGCCGCGUACA | 19 | 8437 |
| HSV1-UL19-3839 | + | CGUUACAUGCCGCCGCGUACA | 21 | 8438 |
| HSV1-UL19-3840 | + | ACGUUACAUGCCGCCGCGUACA | 22 | 8439 |
| HSV1-UL19-3841 | + | CACGUUACAUGCCGCCGCGUACA | 23 | 8440 |
| HSV1-UL19-3842 | + | CCACGUUACAUGCCGCCGCGUACA | 24 | 8441 |
| HSV1-UL19-3843 | + | AGGUCCAUGGCGCCCACCA | 19 | 8442 |
| HSV1-UL19-1049 | + | CAGGUCCAUGGCGCCCACCA | 20 | 1435 |
| HSV1-UL19-3844 | + | UCAGGUCCAUGGCGCCCACCA | 21 | 8443 |
| HSV1-UL19-3845 | + | CGUCAGGUCCAUGGCGCCCACCA | 23 | 8444 |
| HSV1-UL19-3846 | + | ACGUCAGGUCCAUGGCGCCCACCA | 24 | 8445 |
| HSV1-UL19-3847 | + | UCACGACGUACGAGACCA | 18 | 8446 |
| HSV1-UL19-3848 | + | AGGUCACGACGUACGAGACCA | 21 | 8447 |
| HSV1-UL19-3849 | + | UAGGUCACGACGUACGAGACCA | 22 | 8448 |
| HSV1-UL19-3850 | + | CCAGAUUGGCCGGGUGCA | 18 | 8449 |
| HSV1-UL19-3851 | + | ACCAGAUUGGCCGGGUGCA | 19 | 8450 |
| HSV1-UL19-1239 | + | CACCAGAUUGGCCGGGUGCA | 20 | 1625 |
| HSV1-UL19-3852 | + | CCACCAGAUUGGCCGGGUGCA | 21 | 8451 |
| HSV1-UL19-3853 | + | UGGCCACCAGAUUGGCCGGGUGCA | 24 | 8452 |
| HSV1-UL19-3854 | + | AGGGGGUGCGCGGGGUCCGUCA | 22 | 8453 |
| HSV1-UL19-3855 | + | CAGGGGGUGCGCGGGGUCCGUCA | 23 | 8454 |
| HSV1-UL19-3856 | + | ACGGAUUGGCGGCUUCGA | 18 | 8455 |
| HSV1-UL19-3857 | + | UACGGAUUGGCGGCUUCGA | 19 | 8456 |
| HSV1-UL19-3858 | + | CGUACGGAUUGGCGGCUUCGA | 21 | 8457 |
| HSV1-UL19-3859 | + | CCGUACGGAUUGGCGGCUUCGA | 22 | 8458 |
| HSV1-UL19-3860 | + | CCCGUACGGAUUGGCGGCUUCGA | 23 | 8459 |
| HSV1-UL19-3861 | + | CCCCGUACGGAUUGGCGGCUUCGA | 24 | 8460 |
| HSV1-UL19-3862 | + | ACAGCGCGUGGACGGGGA | 18 | 8461 |
| HSV1-UL19-3863 | + | AACAGCGCGUGGACGGGGA | 19 | 8462 |
| HSV1-UL19-3864 | + | CGAACAGCGCGUGGACGGGGA | 21 | 8463 |
| HSV1-UL19-3865 | + | CGGCGAACAGCGCGUGGACGGGGA | 24 | 8464 |
| HSV1-UL19-3866 | + | CGGCAAACCGUUCCAUGA | 18 | 8465 |
| HSV1-UL19-2658 | + | CGCGGCAAACCGUUCCAUGA | 20 | 2759 |
| HSV1-UL19-3867 | + | UGCGCGGCAAACCGUUCCAUGA | 22 | 8466 |
| HSV1-UL19-3868 | + | CGUGCGCGGCAAACCGUUCCAUGA | 24 | 8467 |
| HSV1-UL19-3869 | + | CGGGGUCGCUGGCGCAGGUGA | 21 | 8468 |
| HSV1-UL19-3870 | + | AGGUUGCCCAUGUCGGUGA | 19 | 8469 |
| HSV1-UL19-1332 | + | AAGGUUGCCCAUGUCGGUGA | 20 | 1718 |
| HSV1-UL19-3871 | + | AGUUGACGUCGGUCGACAC | 19 | 8470 |
| HSV1-UL19-1366 | + | UAGUUGACGUCGGUCGACAC | 20 | 1752 |
| HSV1-UL19-3872 | + | AGUAGUUGACGUCGGUCGACAC | 22 | 8471 |
| HSV1-UL19-3873 | + | AAGUAGUUGACGUCGGUCGACAC | 23 | 8472 |
| HSV1-UL19-3874 | + | CCUCCUGAAACAGGCCAC | 18 | 8473 |
| HSV1-UL19-3875 | + | AGGCCUCCUGAAACAGGCCAC | 21 | 8474 |
| HSV1-UL19-3876 | + | UAGGCCUCCUGAAACAGGCCAC | 22 | 8475 |
| HSV1-UL19-3877 | + | UCGCUUUAGCUCGGCGAC | 18 | 8476 |
| HSV1-UL19-3878 | + | UUCGCUUUAGCUCGGCGAC | 19 | 8477 |
| HSV1-UL19-2617 | + | CUUCGCUUUAGCUCGGCGAC | 20 | 2732 |
| HSV1-UL19-3879 | + | AGCUUCGCUUUAGCUCGGCGAC | 22 | 8478 |
| HSV1-UL19-3880 | + | AAGCUUCGCUUUAGCUCGGCGAC | 23 | 8479 |
| HSV1-UL19-3881 | + | CGACGGUGAACCCAAACC | 18 | 8480 |
| HSV1-UL19-3882 | + | ACGACGGUGAACCCAAACC | 19 | 8481 |
| HSV1-UL19-3883 | + | CGGACGACGGUGAACCCAAACC | 22 | 8482 |
| HSV1-UL19-3884 | + | UCGGACGACGGUGAACCCAAACC | 23 | 8483 |
| HSV1-UL19-3885 | + | CCCCGGCGGCGCGUCCCC | 18 | 8484 |
| HSV1-UL19-3886 | + | CCCCCGGCGGCGCGUCCCC | 19 | 8485 |
| HSV1-UL19-3887 | + | CGCCCCCGGCGGCGCGUCCCC | 21 | 8486 |
| HSV1-UL19-3888 | + | ACGCCCCCGGCGGCGCGUCCCC | 22 | 8487 |
| HSV1-UL19-3889 | + | AACGCCCCCGGCGGCGCGUCCCC | 23 | 8488 |
| HSV1-UL19-3890 | + | AAACGCCCCCGGCGGCGCGUCCCC | 24 | 8489 |
| HSV1-UL19-3891 | + | AAAAUCGCUGCGACGCCC | 18 | 8490 |
| HSV1-UL19-2865 | + | CGAAAAUCGCUGCGACGCCC | 20 | 2890 |
| HSV1-UL19-3892 | + | ACGAAAAUCGCUGCGACGCCC | 21 | 8491 |
| HSV1-UL19-3893 | + | UACGAAAAUCGCUGCGACGCCC | 22 | 8492 |
| HSV1-UL19-3894 | + | CGUACGAAAAUCGCUGCGACGCCC | 24 | 8493 |
| HSV1-UL19-3895 | + | AGGCCACACGGGUCCUCC | 18 | 8494 |
| HSV1-UL19-3896 | + | CAGGCCACACGGGUCCUCC | 19 | 8495 |
| HSV1-UL19-2880 | + | ACAGGCCACACGGGUCCUCC | 20 | 2901 |
| HSV1-UL19-3897 | + | AACAGGCCACACGGGUCCUCC | 21 | 8496 |
| HSV1-UL19-3898 | + | AAACAGGCCACACGGGUCCUCC | 22 | 8497 |
| HSV1-UL19-3899 | + | UGAAACAGGCCACACGGGUCCUCC | 24 | 8498 |
| HSV1-UL19-3900 | + | AGAGCCAGUCCCUUGAGC | 18 | 8499 |
| HSV1-UL19-3901 | + | CAGAGCCAGUCCCUUGAGC | 19 | 8500 |
| HSV1-UL19-1440 | + | ACAGAGCCAGUCCCUUGAGC | 20 | 1826 |
| HSV1-UL19-3902 | + | UACAGAGCCAGUCCCUUGAGC | 21 | 8501 |
| HSV1-UL19-3903 | + | UUACAGAGCCAGUCCCUUGAGC | 22 | 8502 |
| HSV1-UL19-3904 | + | AUUACAGAGCCAGUCCCUUGAGC | 23 | 8503 |
| HSV1-UL19-3905 | + | UAUUACAGAGCCAGUCCCUUGAGC | 24 | 8504 |
| HSV1-UL19-3906 | + | UGGCGGGGCGGGAAGGCGC | 19 | 8505 |
| HSV1-UL19-1073 | + | CUGGCGGGGCGGGAAGGCGC | 20 | 1459 |
| HSV1-UL19-3907 | + | AGCUGGCGGGGCGGGAAGGCGC | 22 | 8506 |
| HSV1-UL19-3908 | + | CAGCUGGCGGGGCGGGAAGGCGC | 23 | 8507 |
| HSV1-UL19-3909 | + | ACAGCUGGCGGGGCGGGAAGGCGC | 24 | 8508 |
| HSV1-UL19-3910 | + | CGGCGUCCGCGGCUCGGGC | 19 | 8509 |
| HSV1-UL19-3911 | + | CGCGGCGUCCGCGGCUCGGGC | 21 | 8510 |
| HSV1-UL19-3912 | + | CCGCGGCGUCCGCGGCUCGGGC | 22 | 8511 |
| HSV1-UL19-3913 | + | UCCGCGGCGUCCGCGGCUCGGGC | 23 | 8512 |
| HSV1-UL19-3914 | + | AUCCGCGGCGUCCGCGGCUCGGGC | 24 | 8513 |
| HSV1-UL19-3915 | + | CACCACGCGCCAGGUGGC | 18 | 8514 |
| HSV1-UL19-3916 | + | UCACCACGCGCCAGGUGGC | 19 | 8515 |
| HSV1-UL19-2700 | + | UUCACCACGCGCCAGGUGGC | 20 | 2783 |
| HSV1-UL19-3917 | + | CGUUCACCACGCGCCAGGUGGC | 22 | 8516 |
| HSV1-UL19-3918 | + | CCGUUCACCACGCGCCAGGUGGC | 23 | 8517 |
| HSV1-UL19-3919 | + | CGGGCUGCAUAAACUGCUC | 19 | 8518 |
| HSV1-UL19-1113 | + | UCGGGCUGCAUAAACUGCUC | 20 | 1499 |
| HSV1-UL19-3920 | + | UGUCGGGCUGCAUAAACUGCUC | 22 | 8519 |
| HSV1-UL19-3921 | + | UUGUCGGGCUGCAUAAACUGCUC | 23 | 8520 |
| HSV1-UL19-3922 | + | AUGCUGGGGGGCCAUCAG | 18 | 8521 |
| HSV1-UL19-2770 | + | AGAUGCUGGGGGGCCAUCAG | 20 | 2837 |
| HSV1-UL19-3923 | + | CAGAUGCUGGGGGGCCAUCAG | 21 | 8522 |
| HSV1-UL19-3924 | + | CCAGAUGCUGGGGGGCCAUCAG | 22 | 8523 |
| HSV1-UL19-3925 | + | UCCAGAUGCUGGGGGGCCAUCAG | 23 | 8524 |
| HSV1-UL19-3926 | + | CCACAAAGAAGUCGAACG | 18 | 8525 |
| HSV1-UL19-3927 | + | CCCACAAAGAAGUCGAACG | 19 | 8526 |
| HSV1-UL19-1120 | + | CCCCACAAAGAAGUCGAACG | 20 | 1506 |
| HSV1-UL19-3928 | + | CCCCCACAAAGAAGUCGAACG | 21 | 8527 |
| HSV1-UL19-3929 | + | ACCCCCACAAAGAAGUCGAACG | 22 | 8528 |
| HSV1-UL19-3930 | + | CACCCCCACAAAGAAGUCGAACG | 23 | 8529 |
| HSV1-UL19-3931 | + | CCACCCCCACAAAGAAGUCGAACG | 24 | 8530 |
| HSV1-UL19-3932 | + | AGGGCGUCACAGUCCCACACG | 21 | 8531 |
| HSV1-UL19-3933 | + | CAGGGCGUCACAGUCCCACACG | 22 | 8532 |
| HSV1-UL19-3934 | + | UCAGGGCGUCACAGUCCCACACG | 23 | 8533 |
| HSV1-UL19-3935 | + | AUCAGGGCGUCACAGUCCCACACG | 24 | 8534 |
| HSV1-UL19-3936 | + | UGCAGCAGGUAAAACACCG | 19 | 8535 |
| HSV1-UL19-2712 | + | CUGCAGCAGGUAAAACACCG | 20 | 2791 |
| HSV1-UL19-3937 | + | CCUGCAGCAGGUAAAACACCG | 21 | 8536 |
| HSV1-UL19-3938 | + | CGGCCUGCAGCAGGUAAAACACCG | 24 | 8537 |
| HSV1-UL19-3939 | + | CCGGCGUGCAACGCCCCG | 18 | 8538 |
| HSV1-UL19-3940 | + | UCCGGCGUGCAACGCCCCG | 19 | 8539 |
| HSV1-UL19-2769 | + | UUCCGGCGUGCAACGCCCCG | 20 | 2836 |
| HSV1-UL19-3941 | + | AUUCCGGCGUGCAACGCCCCG | 21 | 8540 |
| HSV1-UL19-3942 | + | AGGAUUCCGGCGUGCAACGCCCCG | 24 | 8541 |
| HSV1-UL19-3943 | + | CGAGGGGUGGCAGCAGCG | 18 | 8542 |
| HSV1-UL19-3944 | + | ACGAGGGGUGGCAGCAGCG | 19 | 8543 |
| HSV1-UL19-2729 | + | CACGAGGGGUGGCAGCAGCG | 20 | 2806 |
| HSV1-UL19-3945 | + | ACACGAGGGGUGGCAGCAGCG | 21 | 8544 |
| HSV1-UL19-3946 | + | CACACGAGGGGUGGCAGCAGCG | 22 | 8545 |
| HSV1-UL19-3947 | + | CCACACGAGGGGUGGCAGCAGCG | 23 | 8546 |
| HSV1-UL19-3948 | + | CCCACACGAGGGGUGGCAGCAGCG | 24 | 8547 |
| HSV1-UL19-3949 | + | CGUCAACGUUCAUCAGCG | 18 | 8548 |
| HSV1-UL19-2675 | + | CGCGUCAACGUUCAUCAGCG | 20 | 2767 |
| HSV1-UL19-3950 | + | CCGCGUCAACGUUCAUCAGCG | 21 | 8549 |
| HSV1-UL19-3951 | + | CGCCGCGUCAACGUUCAUCAGCG | 23 | 8550 |
| HSV1-UL19-3952 | + | CCGCCGCGUCAACGUUCAUCAGCG | 24 | 8551 |
| HSV1-UL19-3953 | + | CCGGGUGCAGGGGGUGCG | 18 | 8552 |
| HSV1-UL19-3954 | + | UGGCCGGGUGCAGGGGGUGCG | 21 | 8553 |
| HSV1-UL19-3955 | + | UUGGCCGGGUGCAGGGGGUGCG | 22 | 8554 |
| HSV1-UL19-3956 | + | AUUGGCCGGGUGCAGGGGGUGCG | 23 | 8555 |
| HSV1-UL19-2827 | + | AGGUCCACGUUCGCGCGCGG | 20 | 2869 |
| HSV1-UL19-3957 | + | CAGGUCCACGUUCGCGCGCGG | 21 | 8556 |
| HSV1-UL19-3958 | + | CCAGGUCCACGUUCGCGCGCGG | 22 | 8557 |
| HSV1-UL19-3959 | + | CCCAGGUCCACGUUCGCGCGCGG | 23 | 8558 |
| HSV1-UL19-3960 | + | CGGGCACUGCGGAGGAGGG | 19 | 8559 |
| HSV1-UL19-3961 | + | UGCGGGCACUGCGGAGGAGGG | 21 | 8560 |
| HSV1-UL19-3962 | + | UUGCGGGCACUGCGGAGGAGGG | 22 | 8561 |
| HSV1-UL19-3963 | + | CGUUGCGGGCACUGCGGAGGAGGG | 24 | 8562 |
| HSV1-UL19-3964 | + | UGGCCGCGAAGGCCCGGG | 18 | 8563 |
| HSV1-UL19-2861 | + | CGUGGCCGCGAAGGCCCGGG | 20 | 2887 |
| HSV1-UL19-3965 | + | CCGUGGCCGCGAAGGCCCGGG | 21 | 8564 |
| HSV1-UL19-3966 | + | UGGCCGUGGCCGCGAAGGCCCGGG | 24 | 8565 |
| HSV1-UL19-3967 | + | UGUUGGCCACCAGAUUGG | 18 | 8566 |
| HSV1-UL19-2760 | + | CGUGUUGGCCACCAGAUUGG | 20 | 2827 |
| HSV1-UL19-3968 | + | CCGUGUUGGCCACCAGAUUGG | 21 | 8567 |
| HSV1-UL19-3969 | + | ACCGUGUUGGCCACCAGAUUGG | 22 | 8568 |
| HSV1-UL19-3970 | + | UGACCGUGUUGGCCACCAGAUUGG | 24 | 8569 |
| HSV1-UL19-3272 | + | UGGACGUUGCGAGCGAGCUG | 20 | 7871 |
| HSV1-UL19-3273 | + | CUGGACGUUGCGAGCGAGCUG | 21 | 7872 |
| HSV1-UL19-3274 | + | CCUGGACGUUGCGAGCGAGCUG | 22 | 7873 |
| HSV1-UL19-3971 | + | CGUGCUGCACGACGGGCUG | 19 | 8570 |
| HSV1-UL19-2804 | + | ACGUGCUGCACGACGGGCUG | 20 | 2851 |
| HSV1-UL19-3972 | + | CGGACGUGCUGCACGACGGGCUG | 23 | 8571 |
| HSV1-UL19-3973 | + | CGGGACCACCAUGUUCUG | 18 | 8572 |
| HSV1-UL19-3974 | + | CCGGGACCACCAUGUUCUG | 19 | 8573 |
| HSV1-UL19-2745 | + | UCCGGGACCACCAUGUUCUG | 20 | 2820 |
| HSV1-UL19-3975 | + | CUCCGGGACCACCAUGUUCUG | 21 | 8574 |
| HSV1-UL19-3976 | + | UCUCCGGGACCACCAUGUUCUG | 22 | 8575 |
| HSV1-UL19-3977 | + | AUCUCCGGGACCACCAUGUUCUG | 23 | 8576 |
| HSV1-UL19-3978 | + | CGGGGCGGGAAGGCGCGGGGAU | 22 | 8577 |
| HSV1-UL19-3979 | + | CCGCCACGUACGCCCCGU | 18 | 8578 |
| HSV1-UL19-3980 | + | CGGGGCCGCCACGUACGCCCCGU | 23 | 8579 |
| HSV1-UL19-3981 | + | CCGGGGCCGCCACGUACGCCCCGU | 24 | 8580 |
| HSV1-UL19-3982 | + | CGCCCAGCUCCGGGCCGGU | 19 | 8581 |
| HSV1-UL19-2727 | + | CCGCCCAGCUCCGGGCCGGU | 20 | 2804 |
| HSV1-UL19-3983 | + | CCCGCCCAGCUCCGGGCCGGU | 21 | 8582 |
| HSV1-UL19-3984 | + | UGCCCGCCCAGCUCCGGGCCGGU | 23 | 8583 |
| HSV1-UL19-3985 | + | CUGCCCGCCCAGCUCCGGGCCGGU | 24 | 8584 |
| HSV1-UL19-3986 | + | AGGGGGUAAAAAUAGUCGCCAUU | 23 | 8585 |
| HSV1-UL19-3987 | − | CGCGCGGGCGGCCGGUCGA | 19 | 8586 |
| HSV1-UL19-223 | − | ACGCGCGGGCGGCCGGUCGA | 20 | 609 |
| HSV1-UL19-3988 | − | CACGCGCGGGCGGCCGGUCGA | 21 | 8587 |
| HSV1-UL19-3989 | − | ACACGCGCGGGCGGCCGGUCGA | 22 | 8588 |
| HSV1-UL19-3990 | − | CGACACGCGCGGGCGGCCGGUCGA | 24 | 8589 |
| HSV1-UL19-3991 | − | AGUCCCCGCCCCCGGCCAC | 19 | 8590 |
| HSV1-UL19-2100 | − | UAGUCCCCGCCCCCGGCCAC | 20 | 2431 |
| HSV1-UL19-3992 | − | CUAGUCCCCGCCCCCGGCCAC | 21 | 8591 |
| HSV1-UL19-3993 | − | CCUAGUCCCCGCCCCCGGCCAC | 22 | 8592 |
| HSV1-UL19-3994 | − | ACCUAGUCCCCGCCCCCGGCCAC | 23 | 8593 |
| HSV1-UL19-3995 | − | CAACGGCCGCCUGGCCAC | 18 | 8594 |
| HSV1-UL19-3996 | − | ACAACGGCCGCCUGGCCAC | 19 | 8595 |
| HSV1-UL19-3997 | − | UGGACAACGGCCGCCUGGCCAC | 22 | 8596 |
| HSV1-UL19-3998 | − | CUGGACAACGGCCGCCUGGCCAC | 23 | 8597 |
| HSV1-UL19-3999 | − | CCUGGACAACGGCCGCCUGGCCAC | 24 | 8598 |
| HSV1-UL19-4000 | − | UACAGUUUAAGCGCCCCC | 18 | 8599 |
| HSV1-UL19-566 | − | CGUACAGUUUAAGCGCCCCC | 20 | 952 |
| HSV1-UL19-4001 | − | ACGUACAGUUUAAGCGCCCCC | 21 | 8600 |
| HSV1-UL19-4002 | − | CGACGUACAGUUUAAGCGCCCCC | 23 | 8601 |
| HSV1-UL19-2194 | − | AGGCCCGAGCCGCGGACGCC | 20 | 2480 |
| HSV1-UL19-4003 | − | CAGGCCCGAGCCGCGGACGCC | 21 | 8602 |
| HSV1-UL19-4004 | − | CCAGGCCCGAGCCGCGGACGCC | 22 | 8603 |
| HSV1-UL19-4005 | − | CCCAGGCCCGAGCCGCGGACGCC | 23 | 8604 |
| HSV1-UL19-4006 | − | ACCCAGGCCCGAGCCGCGGACGCC | 24 | 8605 |
| HSV1-UL19-4007 | − | CGACGGGGCGUUGCACGC | 18 | 8606 |
| HSV1-UL19-4008 | − | UCGACGGGGCGUUGCACGC | 19 | 8607 |
| HSV1-UL19-442 | − | UUCGACGGGGCGUUGCACGC | 20 | 828 |
| HSV1-UL19-4009 | − | AUUCGACGGGGCGUUGCACGC | 21 | 8608 |
| HSV1-UL19-4010 | − | UAUUCGACGGGGCGUUGCACGC | 22 | 8609 |
| HSV1-UL19-4011 | − | AUAUUCGACGGGGCGUUGCACGC | 23 | 8610 |
| HSV1-UL19-4012 | − | CAUAUUCGACGGGGCGUUGCACGC | 24 | 8611 |
| HSV1-UL19-412 | − | CGGGGCCGCUGCUGCACCGC | 20 | 798 |
| HSV1-UL19-4013 | − | CGCGGGGCCGCUGCUGCACCGC | 22 | 8612 |
| HSV1-UL19-4014 | − | UCGCGGGGCCGCUGCUGCACCGC | 23 | 8613 |
| HSV1-UL19-4015 | − | CUCGCGGGGCCGCUGCUGCACCGC | 24 | 8614 |
| HSV1-UL19-4016 | − | CCAGGUGCCGCGGCGCGC | 18 | 8615 |
| HSV1-UL19-4017 | − | CCCAGGUGCCGCGGCGCGC | 19 | 8616 |
| HSV1-UL19-4018 | − | CGCCCAGGUGCCGCGGCGCGC | 21 | 8617 |
| HSV1-UL19-4019 | − | UGCGCCCAGGUGCCGCGGCGCGC | 23 | 8618 |
| HSV1-UL19-4020 | − | CAGACGACGCGCGUGCGC | 18 | 8619 |
| HSV1-UL19-4021 | − | CCAGACGACGCGCGUGCGC | 19 | 8620 |
| HSV1-UL19-2084 | − | CCCAGACGACGCGCGUGCGC | 20 | 2420 |
| HSV1-UL19-4022 | − | CCCCAGACGACGCGCGUGCGC | 21 | 8621 |
| HSV1-UL19-4023 | − | CCCCCAGACGACGCGCGUGCGC | 22 | 8622 |
| HSV1-UL19-4024 | − | CCCCCCAGACGACGCGCGUGCGC | 23 | 8623 |
| HSV1-UL19-4025 | − | UCAAGACGGGCCUCCAUC | 18 | 8624 |
| HSV1-UL19-4026 | − | CUCAAGACGGGCCUCCAUC | 19 | 8625 |
| HSV1-UL19-4027 | − | AGCUCAAGACGGGCCUCCAUC | 21 | 8626 |
| HSV1-UL19-4028 | − | CAGCUCAAGACGGGCCUCCAUC | 22 | 8627 |
| HSV1-UL19-4029 | − | UCAGCUCAAGACGGGCCUCCAUC | 23 | 8628 |
| HSV1-UL19-4030 | − | AUCAGCUCAAGACGGGCCUCCAUC | 24 | 8629 |
| HSV1-UL19-4031 | − | CGGGCAGGCGCAAGCCGAG | 19 | 8630 |
| HSV1-UL19-4032 | − | UGGGCGGGCAGGCGCAAGCCGAG | 23 | 8631 |
| HSV1-UL19-4033 | − | CUGGGCGGGCAGGCGCAAGCCGAG | 24 | 8632 |
| HSV1-UL19-4034 | − | UACGCGGGGGACAAGGAG | 18 | 8633 |
| HSV1-UL19-4035 | − | UUACGCGGGGGACAAGGAG | 19 | 8634 |
| HSV1-UL19-539 | − | UUUACGCGGGGGACAAGGAG | 20 | 925 |
| HSV1-UL19-4036 | − | CGUUUACGCGGGGGACAAGGAG | 22 | 8635 |
| HSV1-UL19-2307 | − | UGGAGCGCCUGAUCGUGGAG | 20 | 2547 |
| HSV1-UL19-4037 | − | CUGGAGCGCCUGAUCGUGGAG | 21 | 8636 |
| HSV1-UL19-4038 | − | CCUGGAGCGCCUGAUCGUGGAG | 22 | 8637 |
| HSV1-UL19-4039 | − | UGCCUGGAGCGCCUGAUCGUGGAG | 24 | 8638 |
| HSV1-UL19-4040 | − | UCGGGGGAGACCUUCCCG | 18 | 8639 |
| HSV1-UL19-4041 | − | CUCGGGGGAGACCUUCCCG | 19 | 8640 |
| HSV1-UL19-362 | − | CCUCGGGGGAGACCUUCCCG | 20 | 748 |
| HSV1-UL19-4042 | − | ACCUCGGGGGAGACCUUCCCG | 21 | 8641 |
| HSV1-UL19-4043 | − | UACCUCGGGGGAGACCUUCCCG | 22 | 8642 |
| HSV1-UL19-4044 | − | CUACCUCGGGGGAGACCUUCCCG | 23 | 8643 |
| HSV1-UL19-4045 | − | CCUACCUCGGGGGAGACCUUCCCG | 24 | 8644 |
| HSV1-UL19-4046 | − | UGGCCCACGGGCGGGUCCG | 19 | 8645 |
| HSV1-UL19-2124 | − | CUGGCCCACGGGCGGGUCCG | 20 | 2444 |
| HSV1-UL19-4047 | − | CCUGGCCCACGGGCGGGUCCG | 21 | 8646 |
| HSV1-UL19-4048 | − | CGCCUGGCCCACGGGCGGGUCCG | 23 | 8647 |
| HSV1-UL19-4049 | − | CGGAGAUCGCCCCCGGCG | 18 | 8648 |
| HSV1-UL19-4050 | − | CCGGAGAUCGCCCCCGGCG | 19 | 8649 |
| HSV1-UL19-419 | − | CCCGGAGAUCGCCCCCGGCG | 20 | 805 |
| HSV1-UL19-4051 | − | UCCCGGAGAUCGCCCCCGGCG | 21 | 8650 |
| HSV1-UL19-4052 | − | UGGUCCCGGAGAUCGCCCCCGGCG | 24 | 8651 |
| HSV1-UL19-4053 | − | UGGGGGCAGCGCCUGGCCCACGG | 23 | 8652 |
| HSV1-UL19-4054 | − | CUGGGGGCAGCGCCUGGCCCACGG | 24 | 8653 |
| HSV1-UL19-4055 | − | CCGGCACGAAACUGGCGG | 18 | 8654 |
| HSV1-UL19-4056 | − | CCCGGCACGAAACUGGCGG | 19 | 8655 |
| HSV1-UL19-4057 | − | UGGCCCGGCACGAAACUGGCGG | 22 | 8656 |
| HSV1-UL19-4058 | − | UGACCUACGCGCUCAUGG | 18 | 8657 |
| HSV1-UL19-4059 | − | CUGACCUACGCGCUCAUGG | 19 | 8658 |
| HSV1-UL19-4060 | − | CGCUGACCUACGCGCUCAUGG | 21 | 8659 |
| HSV1-UL19-4061 | − | CGCGCUGACCUACGCGCUCAUGG | 23 | 8660 |
| HSV1-UL19-4062 | − | ACGCGCUGACCUACGCGCUCAUGG | 24 | 8661 |
| HSV1-UL19-4063 | − | UGGACCGCCAUCGCGACUG | 19 | 8662 |
| HSV1-UL19-2186 | − | CUGGACCGCCAUCGCGACUG | 20 | 2475 |
| HSV1-UL19-4064 | − | CCUGGACCGCCAUCGCGACUG | 21 | 8663 |
| HSV1-UL19-4065 | − | CCCUGGACCGCCAUCGCGACUG | 22 | 8664 |
| HSV1-UL19-4066 | − | AACCGCCCCGCCCUUCCU | 18 | 8665 |
| HSV1-UL19-4067 | − | AAACCGCCCCGCCCUUCCU | 19 | 8666 |
| HSV1-UL19-3237 | − | UAAACCGCCCCGCCCUUCCU | 20 | 7836 |
| HSV1-UL19-4068 | − | AUAAACCGCCCCGCCCUUCCU | 21 | 8667 |
| HSV1-UL19-4069 | − | AAUAAACCGCCCCGCCCUUCCU | 22 | 8668 |
| HSV1-UL19-4070 | − | UAAUAAACCGCCCCGCCCUUCCU | 23 | 8669 |
| HSV1-UL19-4071 | − | CGCCCGGGGCCUGGAGCU | 18 | 8670 |
| HSV1-UL19-4072 | − | ACGCCCGGGGCCUGGAGCU | 19 | 8671 |
| HSV1-UL19-4073 | − | CGGGACGCCCGGGGCCUGGAGCU | 23 | 8672 |
| HSV1-UL19-4074 | − | CCGGGACGCCCGGGGCCUGGAGCU | 24 | 8673 |
| HSV1-UL19-4075 | − | CGGGCCUCCAUCCCGGGU | 18 | 8674 |
| HSV1-UL19-4076 | − | ACGGGCCUCCAUCCCGGGU | 19 | 8675 |
| HSV1-UL19-4077 | − | AGACGGGCCUCCAUCCCGGGU | 21 | 8676 |
| HSV1-UL19-4078 | − | AAGACGGGCCUCCAUCCCGGGU | 22 | 8677 |
| HSV1-UL19-4079 | − | CAAGACGGGCCUCCAUCCCGGGU | 23 | 8678 |
| HSV1-UL19-4080 | − | UCAAGACGGGCCUCCAUCCCGGGU | 24 | 8679 |
| HSV1-UL19-4081 | − | CCCAGCCCGUCCCCGUGU | 18 | 8680 |
| HSV1-UL19-4082 | − | CGGCCCAGCCCGUCCCCGUGU | 21 | 8681 |
| HSV1-UL19-4083 | − | CCGGCCCAGCCCGUCCCCGUGU | 22 | 8682 |
| HSV1-UL19-4084 | − | ACGGCCAGGACGCCGUGU | 18 | 8683 |
| HSV1-UL19-4085 | − | CACGGCCAGGACGCCGUGU | 19 | 8684 |
| HSV1-UL19-2276 | − | CCACGGCCAGGACGCCGUGU | 20 | 2533 |
| HSV1-UL19-4086 | − | ACCACGGCCAGGACGCCGUGU | 21 | 8685 |
| HSV1-UL19-4087 | − | UGGACCACGGCCAGGACGCCGUGU | 24 | 8686 |
| HSV1-UL19-4088 | − | CGCGUUCGACUUCUUUGU | 18 | 8687 |
| HSV1-UL19-4089 | − | CCGCGUUCGACUUCUUUGU | 19 | 8688 |
| HSV1-UL19-306 | − | CCCGCGUUCGACUUCUUUGU | 20 | 692 |
| HSV1-UL19-4090 | − | CCCCGCGUUCGACUUCUUUGU | 21 | 8689 |
| HSV1-UL19-4091 | − | ACCCCGCGUUCGACUUCUUUGU | 22 | 8690 |
| HSV1-UL19-4092 | − | CACCCCGCGUUCGACUUCUUUGU | 23 | 8691 |

[0765] Table 6G provides exemplary targeting domains for knocking out the UL19 gene selected according to the seven tier parameters. The targeting domains fall in the coding sequence of the gene, downstream of the first 500 bp of coding sequence (e.g., anywhere from +500 (relative to the start codon) to the stop codon of the gene). The PAM is NNGRRV. It is contemplated herein that in an embodiment the targeting domain hybridizes to the target domain through complementary base pairing. Any of the targeting domains in the table can be used with a S. aureus Cas9 molecule that generates a double stranded break (Cas9 nuclease) or a single-stranded break (Cas9 nickase).

TABLE 6G
7th Tier

| | DNA | | Target Site | Seq ID |
|---|---|---|---|---|
| gRNA Name | Strand | Targeting Domain | Length | NO: |
| HSV1-UL19-4093 | + | CGCAGGGCCGGGGGGAAA | 18 | 8692 |
| HSV1-UL19-4094 | + | GCGCAGGGCCGGGGGGAAA | 19 | 8693 |
| HSV1-UL19-2785 | + | CGCGCAGGGCCGGGGGGAAA | 20 | 2844 |
| HSV1-UL19-4095 | + | UCGCGCAGGGCCGGGGGGAAA | 21 | 8694 |
| HSV1-UL19-4096 | + | GUCGCGCAGGGCCGGGGGGAAA | 22 | 8695 |
| HSV1-UL19-4097 | + | GGUCGCGCAGGGCCGGGGGGAAA | 23 | 8696 |
| HSV1-UL19-4098 | + | AGGUCGCGCAGGGCCGGGGGGAAA | 24 | 8697 |
| HSV1-UL19-4099 | + | GGCGUAUACGCGGUCGAA | 18 | 8698 |
| HSV1-UL19-4100 | + | UGGCGUAUACGCGGUCGAA | 19 | 8699 |
| HSV1-UL19-2743 | + | GUGGCGUAUACGCGGUCGAA | 20 | 2818 |
| HSV1-UL19-4101 | + | GGUGGCGUAUACGCGGUCGAA | 21 | 8700 |
| HSV1-UL19-4102 | + | GGGUGGCGUAUACGCGGUCGAA | 22 | 8701 |
| HSV1-UL19-4103 | + | AGGGUGGCGUAUACGCGGUCGAA | 23 | 8702 |
| HSV1-UL19-4104 | + | CAGGGUGGCGUAUACGCGGUCGAA | 24 | 8703 |
| HSV1-UL19-4105 | + | CCUGGGCGCACCCGAACA | 18 | 8704 |
| HSV1-UL19-4106 | + | ACCUGGGCGCACCCGAACA | 19 | 8705 |
| HSV1-UL19-1356 | + | CACCUGGGCGCACCCGAACA | 20 | 1742 |
| HSV1-UL19-4107 | + | GCACCUGGGCGCACCCGAACA | 21 | 8706 |
| HSV1-UL19-4108 | + | GGCACCUGGGCGCACCCGAACA | 22 | 8707 |
| HSV1-UL19-4109 | + | CGGCACCUGGGCGCACCCGAACA | 23 | 8708 |
| HSV1-UL19-4110 | + | GCGGCACCUGGGCGCACCCGAACA | 24 | 8709 |
| HSV1-UL19-4111 | + | ACGUCGGCCACCCCCACA | 18 | 8710 |
| HSV1-UL19-4112 | + | CACGUCGGCCACCCCCACA | 19 | 8711 |
| HSV1-UL19-2693 | + | CCACGUCGGCCACCCCCACA | 20 | 2780 |
| HSV1-UL19-4113 | + | UCCACGUCGGCCACCCCCACA | 21 | 8712 |
| HSV1-UL19-4114 | + | CUCCACGUCGGCCACCCCCACA | 22 | 8713 |
| HSV1-UL19-4115 | + | GCUCCACGUCGGCCACCCCCACA | 23 | 8714 |
| HSV1-UL19-4116 | + | AGCUCCACGUCGGCCACCCCCACA | 24 | 8715 |
| HSV1-UL19-4117 | + | AGUUGACGUCGGUCGACA | 18 | 8716 |
| HSV1-UL19-4118 | + | UAGUUGACGUCGGUCGACA | 19 | 8717 |
| HSV1-UL19-1367 | + | GUAGUUGACGUCGGUCGACA | 20 | 1753 |
| HSV1-UL19-4119 | + | AGUAGUUGACGUCGGUCGACA | 21 | 8718 |
| HSV1-UL19-4120 | + | AAGUAGUUGACGUCGGUCGACA | 22 | 8719 |
| HSV1-UL19-4121 | + | GAAGUAGUUGACGUCGGUCGACA | 23 | 8720 |
| HSV1-UL19-4122 | + | GGAAGUAGUUGACGUCGGUCGACA | 24 | 8721 |
| HSV1-UL19-4123 | + | CCAGAGCCGGGGGGACCA | 18 | 8722 |
| HSV1-UL19-4124 | + | CCCAGAGCCGGGGGGACCA | 19 | 8723 |
| HSV1-UL19-1292 | + | CCCCAGAGCCGGGGGGACCA | 20 | 1678 |
| HSV1-UL19-4125 | + | CCCCCAGAGCCGGGGGGACCA | 21 | 8724 |
| HSV1-UL19-4126 | + | GCCCCCAGAGCCGGGGGGACCA | 22 | 8725 |
| HSV1-UL19-4127 | + | GGCCCCCAGAGCCGGGGGGACCA | 23 | 8726 |
| HSV1-UL19-4128 | + | UGGCCCCCAGAGCCGGGGGGACCA | 24 | 8727 |
| HSV1-UL19-4129 | + | CUGGCCUUCCGCGACCCA | 18 | 8728 |
| HSV1-UL19-4130 | + | UCUGGCCUUCCGCGACCCA | 19 | 8729 |
| HSV1-UL19-2685 | + | AUCUGGCCUUCCGCGACCCA | 20 | 2774 |
| HSV1-UL19-4131 | + | CAUCUGGCCUUCCGCGACCCA | 21 | 8730 |
| HSV1-UL19-4132 | + | UCAUCUGGCCUUCCGCGACCCA | 22 | 8731 |
| HSV1-UL19-4133 | + | GUCAUCUGGCCUUCCGCGACCCA | 23 | 8732 |
| HSV1-UL19-4134 | + | GGUCAUCUGGCCUUCCGCGACCCA | 24 | 8733 |
| HSV1-UL19-4135 | + | GCUGAUGAUGCAAGGCCA | 18 | 8734 |
| HSV1-UL19-4136 | + | AGCUGAUGAUGCAAGGCCA | 19 | 8735 |
| HSV1-UL19-1307 | + | GAGCUGAUGAUGCAAGGCCA | 20 | 1693 |
| HSV1-UL19-4137 | + | UGAGCUGAUGAUGCAAGGCCA | 21 | 8736 |
| HSV1-UL19-4138 | + | UUGAGCUGAUGAUGCAAGGCCA | 22 | 8737 |
| HSV1-UL19-4139 | + | CUUGAGCUGAUGAUGCAAGGCCA | 23 | 8738 |
| HSV1-UL19-4140 | + | UCUUGAGCUGAUGAUGCAAGGCCA | 24 | 8739 |
| HSV1-UL19-4141 | + | UCAGACGGGGCACGGCCA | 18 | 8740 |
| HSV1-UL19-4142 | + | GUCAGACGGGGCACGGCCA | 19 | 8741 |
| HSV1-UL19-1006 | + | CGUCAGACGGGGCACGGCCA | 20 | 1392 |
| HSV1-UL19-4143 | + | GCGUCAGACGGGGCACGGCCA | 21 | 8742 |
| HSV1-UL19-4144 | + | UGCGUCAGACGGGGCACGGCCA | 22 | 8743 |
| HSV1-UL19-4145 | + | AUGCGUCAGACGGGGCACGGCCA | 23 | 8744 |
| HSV1-UL19-4146 | + | CAUGCGUCAGACGGGGCACGGCCA | 24 | 8745 |
| HSV1-UL19-4147 | + | CCAGUAGCUGGUGAUGCA | 18 | 8746 |
| HSV1-UL19-4148 | + | UCCAGUAGCUGGUGAUGCA | 19 | 8747 |
| HSV1-UL19-2717 | + | UUCCAGUAGCUGGUGAUGCA | 20 | 2796 |
| HSV1-UL19-4149 | + | GUUCCAGUAGCUGGUGAUGCA | 21 | 8748 |
| HSV1-UL19-4150 | + | UGUUCCAGUAGCUGGUGAUGCA | 22 | 8749 |
| HSV1-UL19-4151 | + | UUGUUCCAGUAGCUGGUGAUGCA | 23 | 8750 |
| HSV1-UL19-4152 | + | GUUGUUCCAGUAGCUGGUGAUGCA | 24 | 8751 |
| HSV1-UL19-4153 | + | CCGCGUCAACGUUCAUCA | 18 | 8752 |
| HSV1-UL19-4154 | + | GCCGCGUCAACGUUCAUCA | 19 | 8753 |
| HSV1-UL19-2676 | + | CGCCGCGUCAACGUUCAUCA | 20 | 2768 |
| HSV1-UL19-4155 | + | CCGCCGCGUCAACGUUCAUCA | 21 | 8754 |
| HSV1-UL19-4156 | + | ACCGCCGCGUCAACGUUCAUCA | 22 | 8755 |
| HSV1-UL19-4157 | + | GACCGCCGCGUCAACGUUCAUCA | 23 | 8756 |
| HSV1-UL19-4158 | + | CGACCGCCGCGUCAACGUUCAUCA | 24 | 8757 |
| HSV1-UL19-4159 | + | GUGUCGGCAUGCGUCAGA | 18 | 8758 |
| HSV1-UL19-4160 | + | CGUGUCGGCAUGCGUCAGA | 19 | 8759 |
| HSV1-UL19-1010 | + | GCGUGUCGGCAUGCGUCAGA | 20 | 1396 |
| HSV1-UL19-4161 | + | CGCGUGUCGGCAUGCGUCAGA | 21 | 8760 |
| HSV1-UL19-4162 | + | GCGCGUGUCGGCAUGCGUCAGA | 22 | 8761 |
| HSV1-UL19-4163 | + | CGCGCGUGUCGGCAUGCGUCAGA | 23 | 8762 |
| HSV1-UL19-4164 | + | CCGCGCGUGUCGGCAUGCGUCAGA | 24 | 8763 |
| HSV1-UL19-4165 | + | GCCGCGUUGUCCAGGAGA | 18 | 8764 |
| HSV1-UL19-4166 | + | UGCCGCGUUGUCCAGGAGA | 19 | 8765 |
| HSV1-UL19-1342 | + | CUGCCGCGUUGUCCAGGAGA | 20 | 1728 |
| HSV1-UL19-4167 | + | GCUGCCGCGUUGUCCAGGAGA | 21 | 8766 |
| HSV1-UL19-4168 | + | GGCUGCCGCGUUGUCCAGGAGA | 22 | 8767 |
| HSV1-UL19-4169 | + | CGGCUGCCGCGUUGUCCAGGAGA | 23 | 8768 |
| HSV1-UL19-4170 | + | ACGGCUGCCGCGUUGUCCAGGAGA | 24 | 8769 |
| HSV1-UL19-3318 | + | ACGGCCUGGACGUUGCGA | 18 | 7917 |
| HSV1-UL19-3319 | + | GACGGCCUGGACGUUGCGA | 19 | 7918 |
| HSV1-UL19-3320 | + | GGACGGCCUGGACGUUGCGA | 20 | 7919 |
| HSV1-UL19-3321 | + | AGGACGGCCUGGACGUUGCGA | 21 | 7920 |
| HSV1-UL19-3322 | + | GAGGACGGCCUGGACGUUGCGA | 22 | 7921 |
| HSV1-UL19-3323 | + | CGAGGACGGCCUGGACGUUGCGA | 23 | 7922 |
| HSV1-UL19-3324 | + | CCGAGGACGGCCUGGACGUUGCGA | 24 | 7923 |
| HSV1-UL19-4171 | + | CUGCCGCGUUGUCCAGGA | 18 | 8770 |
| HSV1-UL19-4172 | + | GCUGCCGCGUUGUCCAGGA | 19 | 8771 |
| HSV1-UL19-2839 | + | GGCUGCCGCGUUGUCCAGGA | 20 | 2873 |
| HSV1-UL19-4173 | + | CGGCUGCCGCGUUGUCCAGGA | 21 | 8772 |
| HSV1-UL19-4174 | + | ACGGCUGCCGCGUUGUCCAGGA | 22 | 8773 |
| HSV1-UL19-4175 | + | CACGGCUGCCGCGUUGUCCAGGA | 23 | 8774 |
| HSV1-UL19-4176 | + | ACACGGCUGCCGCGUUGUCCAGGA | 24 | 8775 |
| HSV1-UL19-4177 | + | AACCGUUCCAUGACCGGA | 18 | 8776 |
| HSV1-UL19-4178 | + | AAACCGUUCCAUGACCGGA | 19 | 8777 |
| HSV1-UL19-2657 | + | CAAACCGUUCCAUGACCGGA | 20 | 2758 |
| HSV1-UL19-4179 | + | GCAAACCGUUCCAUGACCGGA | 21 | 8778 |
| HSV1-UL19-4180 | + | GGCAAACCGUUCCAUGACCGGA | 22 | 8779 |
| HSV1-UL19-4181 | + | CGGCAAACCGUUCCAUGACCGGA | 23 | 8780 |
| HSV1-UL19-4182 | + | GCGGCAAACCGUUCCAUGACCGGA | 24 | 8781 |
| HSV1-UL19-4183 | + | GUGAACCCAAACCCGGGA | 18 | 8782 |
| HSV1-UL19-4184 | + | GGUGAACCCAAACCCGGGA | 19 | 8783 |
| HSV1-UL19-1310 | + | CGGUGAACCCAAACCCGGGA | 20 | 1696 |
| HSV1-UL19-4185 | + | ACGGUGAACCCAAACCCGGGA | 21 | 8784 |
| HSV1-UL19-4186 | + | GACGGUGAACCCAAACCCGGGA | 22 | 8785 |
| HSV1-UL19-4187 | + | CGACGGUGAACCCAAACCCGGGA | 23 | 8786 |
| HSV1-UL19-4188 | + | ACGACGGUGAACCCAAACCCGGGA | 24 | 8787 |
| HSV1-UL19-4189 | + | CGGCGAACAGCGCGUGGA | 18 | 8788 |
| HSV1-UL19-4190 | + | CCGGCGAACAGCGCGUGGA | 19 | 8789 |
| HSV1-UL19-1275 | + | CCCGGCGAACAGCGCGUGGA | 20 | 1661 |
| HSV1-UL19-4191 | + | CCCCGGCGAACAGCGCGUGGA | 21 | 8790 |
| HSV1-UL19-4192 | + | GCCCCGGCGAACAGCGCGUGGA | 22 | 8791 |
| HSV1-UL19-4193 | + | GGCCCCGGCGAACAGCGCGUGGA | 23 | 8792 |
| HSV1-UL19-4194 | + | CGGCCCCGGCGAACAGCGCGUGGA | 24 | 8793 |
| HSV1-UL19-4195 | + | ACAGAGCCAGUCCCUUGA | 18 | 8794 |
| HSV1-UL19-4196 | + | UACAGAGCCAGUCCCUUGA | 19 | 8795 |
| HSV1-UL19-2899 | + | UUACAGAGCCAGUCCCUUGA | 20 | 2915 |
| HSV1-UL19-4197 | + | AUUACAGAGCCAGUCCCUUGA | 21 | 8796 |
| HSV1-UL19-4198 | + | UAUUACAGAGCCAGUCCCUUGA | 22 | 8797 |
| HSV1-UL19-4199 | + | UUAUUACAGAGCCAGUCCCUUGA | 23 | 8798 |
| HSV1-UL19-4200 | + | UUUAUUACAGAGCCAGUCCCUUGA | 24 | 8799 |
| HSV1-UL19-4201 | + | GCAGGAGGCGCUGUUUGA | 18 | 8800 |
| HSV1-UL19-4202 | + | UGCAGGAGGCGCUGUUUGA | 19 | 8801 |
| HSV1-UL19-2630 | + | CUGCAGGAGGCGCUGUUUGA | 20 | 2741 |
| HSV1-UL19-4203 | + | ACUGCAGGAGGCGCUGUUUGA | 21 | 8802 |
| HSV1-UL19-4204 | + | GACUGCAGGAGGCGCUGUUUGA | 22 | 8803 |
| HSV1-UL19-4205 | + | GGACUGCAGGAGGCGCUGUUUGA | 23 | 8804 |
| HSV1-UL19-4206 | + | AGGACUGCAGGAGGCGCUGUUUGA | 24 | 8805 |
| HSV1-UL19-4207 | + | GCGAUGUCGGCCGACGUA | 18 | 8806 |
| HSV1-UL19-4208 | + | GGCGAUGUCGGCCGACGUA | 19 | 8807 |
| HSV1-UL19-2873 | + | CGGCGAUGUCGGCCGACGUA | 20 | 2897 |
| HSV1-UL19-4209 | + | GCGGCGAUGUCGGCCGACGUA | 21 | 8808 |
| HSV1-UL19-4210 | + | GGCGGCGAUGUCGGCCGACGUA | 22 | 8809 |
| HSV1-UL19-4211 | + | UGGCGGCGAUGUCGGCCGACGUA | 23 | 8810 |
| HSV1-UL19-4212 | + | UUGGCGGCGAUGUCGGCCGACGUA | 24 | 8811 |
| HSV1-UL19-4213 | + | GGCGCCCACCAGGGGGUA | 18 | 8812 |
| HSV1-UL19-4214 | + | UGGCGCCCACCAGGGGGUA | 19 | 8813 |
| HSV1-UL19-1045 | + | AUGGCGCCCACCAGGGGGUA | 20 | 1431 |
| HSV1-UL19-4215 | + | CAUGGCGCCCACCAGGGGGUA | 21 | 8814 |
| HSV1-UL19-4216 | + | CCAUGGCGCCCACCAGGGGGUA | 22 | 8815 |
| HSV1-UL19-4217 | + | UCCAUGGCGCCCACCAGGGGGUA | 23 | 8816 |
| HSV1-UL19-4218 | + | GUCCAUGGCGCCCACCAGGGGGUA | 24 | 8817 |
| HSV1-UL19-4219 | + | GGGCGGGGCGGUUUAUUA | 18 | 8818 |
| HSV1-UL19-4220 | + | AGGGCGGGGCGGUUUAUUA | 19 | 8819 |
| HSV1-UL19-4221 | + | AAGGGCGGGGCGGUUUAUUA | 20 | 8820 |
| HSV1-UL19-4222 | + | GAAGGGCGGGGCGGUUUAUUA | 21 | 8821 |
| HSV1-UL19-4223 | + | GGAAGGGCGGGGCGGUUUAUUA | 22 | 8822 |
| HSV1-UL19-4224 | + | AGGAAGGGCGGGGCGGUUUAUUA | 23 | 8823 |
| HSV1-UL19-4225 | + | AAGGAAGGGCGGGGCGGUUUAUUA | 24 | 8824 |
| HSV1-UL19-4226 | + | AGGUGGUAGGCCCCGUUA | 18 | 8825 |
| HSV1-UL19-4227 | + | GAGGUGGUAGGCCCCGUUA | 19 | 8826 |
| HSV1-UL19-2867 | + | UGAGGUGGUAGGCCCCGUUA | 20 | 2892 |
| HSV1-UL19-4228 | + | UUGAGGUGGUAGGCCCCGUUA | 21 | 8827 |
| HSV1-UL19-4229 | + | GUUGAGGUGGUAGGCCCCGUUA | 22 | 8828 |
| HSV1-UL19-4230 | + | CGUUGAGGUGGUAGGCCCCGUUA | 23 | 8829 |
| HSV1-UL19-4231 | + | CCGUUGAGGUGGUAGGCCCCGUUA | 24 | 8830 |
| HSV1-UL19-4232 | + | ACGACGGUGAACCCAAAC | 18 | 8831 |
| HSV1-UL19-4233 | + | GACGACGGUGAACCCAAAC | 19 | 8832 |
| HSV1-UL19-2815 | + | GGACGACGGUGAACCCAAAC | 20 | 2859 |
| HSV1-UL19-4234 | + | CGGACGACGGUGAACCCAAAC | 21 | 8833 |
| HSV1-UL19-4235 | + | UCGGACGACGGUGAACCCAAAC | 22 | 8834 |
| HSV1-UL19-4236 | + | GUCGGACGACGGUGAACCCAAAC | 23 | 8835 |
| HSV1-UL19-4237 | + | UGUCGGACGACGGUGAACCCAAAC | 24 | 8836 |
| HSV1-UL19-4238 | + | ACCUGGGCGCACCCGAAC | 18 | 8837 |
| HSV1-UL19-4239 | + | CACCUGGGCGCACCCGAAC | 19 | 8838 |
| HSV1-UL19-2847 | + | GCACCUGGGCGCACCCGAAC | 20 | 2878 |
| HSV1-UL19-4240 | + | GGCACCUGGGCGCACCCGAAC | 21 | 8839 |
| HSV1-UL19-4241 | + | CGGCACCUGGGCGCACCCGAAC | 22 | 8840 |
| HSV1-UL19-4242 | + | GCGGCACCUGGGCGCACCCGAAC | 23 | 8841 |
| HSV1-UL19-4243 | + | CGCGGCACCUGGGCGCACCCGAAC | 24 | 8842 |
| HSV1-UL19-4244 | + | CCCACAAAGAAGUCGAAC | 18 | 8843 |
| HSV1-UL19-4245 | + | CCCCACAAAGAAGUCGAAC | 19 | 8844 |
| HSV1-UL19-2691 | + | CCCCCACAAAGAAGUCGAAC | 20 | 2778 |
| HSV1-UL19-4246 | + | ACCCCCACAAAGAAGUCGAAC | 21 | 8845 |
| HSV1-UL19-4247 | + | CACCCCCACAAAGAAGUCGAAC | 22 | 8846 |
| HSV1-UL19-4248 | + | CCACCCCCACAAAGAAGUCGAAC | 23 | 8847 |
| HSV1-UL19-4249 | + | GCCACCCCCACAAAGAAGUCGAAC | 24 | 8848 |
| HSV1-UL19-4250 | + | CUGGGCGCACCCGAACAC | 18 | 8849 |
| HSV1-UL19-4251 | + | CCUGGGCGCACCCGAACAC | 19 | 8850 |
| HSV1-UL19-1355 | + | ACCUGGGCGCACCCGAACAC | 20 | 1741 |
| HSV1-UL19-4252 | + | CACCUGGGCGCACCCGAACAC | 21 | 8851 |
| HSV1-UL19-4253 | + | GCACCUGGGCGCACCCGAACAC | 22 | 8852 |
| HSV1-UL19-4254 | + | GGCACCUGGGCGCACCCGAACAC | 23 | 8853 |
| HSV1-UL19-4255 | + | CGGCACCUGGGCGCACCCGAACAC | 24 | 8854 |
| HSV1-UL19-4256 | + | GGCGUCACAGUCCCACAC | 18 | 8855 |
| HSV1-UL19-4257 | + | GGGCGUCACAGUCCCACAC | 19 | 8856 |
| HSV1-UL19-2731 | + | AGGGCGUCACAGUCCCACAC | 20 | 2807 |
| HSV1-UL19-4258 | + | CAGGGCGUCACAGUCCCACAC | 21 | 8857 |
| HSV1-UL19-4259 | + | UCAGGGCGUCACAGUCCCACAC | 22 | 8858 |
| HSV1-UL19-4260 | + | AUCAGGGCGUCACAGUCCCACAC | 23 | 8859 |
| HSV1-UL19-4261 | + | CAUCAGGGCGUCACAGUCCCACAC | 24 | 8860 |
| HSV1-UL19-4262 | + | CAGGUCCAUGGCGCCCAC | 18 | 8861 |
| HSV1-UL19-4263 | + | UCAGGUCCAUGGCGCCCAC | 19 | 8862 |
| HSV1-UL19-2652 | + | GUCAGGUCCAUGGCGCCCAC | 20 | 2754 |
| HSV1-UL19-4264 | + | CGUCAGGUCCAUGGCGCCCAC | 21 | 8863 |
| HSV1-UL19-4265 | + | ACGUCAGGUCCAUGGCGCCCAC | 22 | 8864 |
| HSV1-UL19-4266 | + | AACGUCAGGUCCAUGGCGCCCAC | 23 | 8865 |
| HSV1-UL19-4267 | + | GAACGUCAGGUCCAUGGCGCCCAC | 24 | 8866 |
| HSV1-UL19-4268 | + | AGGGCGUCACAGUCCCAC | 18 | 8867 |
| HSV1-UL19-4269 | + | CAGGGCGUCACAGUCCCAC | 19 | 8868 |
| HSV1-UL19-2732 | + | UCAGGGCGUCACAGUCCCAC | 20 | 2808 |
| HSV1-UL19-4270 | + | AUCAGGGCGUCACAGUCCCAC | 21 | 8869 |
| HSV1-UL19-4271 | + | CAUCAGGGCGUCACAGUCCCAC | 22 | 8870 |
| HSV1-UL19-4272 | + | GCAUCAGGGCGUCACAGUCCCAC | 23 | 8871 |
| HSV1-UL19-4273 | + | CGCAUCAGGGCGUCACAGUCCCAC | 24 | 8872 |
| HSV1-UL19-4274 | + | AGUUUCGUGCCGGGCCAC | 18 | 8873 |
| HSV1-UL19-4275 | + | CAGUUUCGUGCCGGGCCAC | 19 | 8874 |
| HSV1-UL19-2823 | + | CCAGUUUCGUGCCGGGCCAC | 20 | 2865 |
| HSV1-UL19-4276 | + | GCCAGUUUCGUGCCGGGCCAC | 21 | 8875 |
| HSV1-UL19-4277 | + | CGCCAGUUUCGUGCCGGGCCAC | 22 | 8876 |
| HSV1-UL19-4278 | + | CCGCCAGUUUCGUGCCGGGCCAC | 23 | 8877 |
| HSV1-UL19-4279 | + | CCCGCCAGUUUCGUGCCGGGCCAC | 24 | 8878 |
| HSV1-UL19-4280 | + | CGCGGCACCUGGGCGCAC | 18 | 8879 |
| HSV1-UL19-4281 | + | CCGCGGCACCUGGGCGCAC | 19 | 8880 |
| HSV1-UL19-2848 | + | GCCGCGGCACCUGGGCGCAC | 20 | 2879 |
| HSV1-UL19-4282 | + | CGCCGCGGCACCUGGGCGCAC | 21 | 8881 |
| HSV1-UL19-4283 | + | GCGCCGCGGCACCUGGGCGCAC | 22 | 8882 |
| HSV1-UL19-4284 | + | CGCGCCGCGGCACCUGGGCGCAC | 23 | 8883 |
| HSV1-UL19-4285 | + | GCGCGCCGCGGCACCUGGGCGCAC | 24 | 8884 |
| HSV1-UL19-4286 | + | CCCUGCGCGCCGCGGCAC | 18 | 8885 |
| HSV1-UL19-4287 | + | UCCCUGCGCGCCGCGGCAC | 19 | 8886 |
| HSV1-UL19-2849 | + | AUCCCUGCGCGCCGCGGCAC | 20 | 2880 |
| HSV1-UL19-4288 | + | CAUCCCUGCGCGCCGCGGCAC | 21 | 8887 |
| HSV1-UL19-4289 | + | CCAUCCCUGCGCGCCGCGGCAC | 22 | 8888 |
| HSV1-UL19-4290 | + | UCCAUCCCUGCGCGCCGCGGCAC | 23 | 8889 |
| HSV1-UL19-4291 | + | GUCCAUCCCUGCGCGCCGCGGCAC | 24 | 8890 |
| HSV1-UL19-4292 | + | UAGUUGACGUCGGUCGAC | 18 | 8891 |
| HSV1-UL19-4293 | + | GUAGUUGACGUCGGUCGAC | 19 | 8892 |
| HSV1-UL19-2852 | + | AGUAGUUGACGUCGGUCGAC | 20 | 2881 |
| HSV1-UL19-4294 | + | AAGUAGUUGACGUCGGUCGAC | 21 | 8893 |
| HSV1-UL19-4295 | + | GAAGUAGUUGACGUCGGUCGAC | 22 | 8894 |
| HSV1-UL19-4296 | + | GGAAGUAGUUGACGUCGGUCGAC | 23 | 8895 |
| HSV1-UL19-4297 | + | CGGAAGUAGUUGACGUCGGUCGAC | 24 | 8896 |
| HSV1-UL19-4298 | + | CCCCAGAGCCGGGGGGAC | 18 | 8897 |
| HSV1-UL19-4299 | + | CCCCCAGAGCCGGGGGGAC | 19 | 8898 |
| HSV1-UL19-2796 | + | GCCCCCAGAGCCGGGGGGAC | 20 | 2847 |
| HSV1-UL19-4300 | + | GGCCCCCAGAGCCGGGGGGAC | 21 | 8899 |
| HSV1-UL19-4301 | + | UGGCCCCCAGAGCCGGGGGGAC | 22 | 8900 |
| HSV1-UL19-4302 | + | UUGGCCCCCAGAGCCGGGGGGAC | 23 | 8901 |
| HSV1-UL19-4303 | + | GUUGGCCCCCAGAGCCGGGGGGAC | 24 | 8902 |
| HSV1-UL19-4304 | + | GGCGAACAGCGCGUGGAC | 18 | 8903 |
| HSV1-UL19-4305 | + | CGGCGAACAGCGCGUGGAC | 19 | 8904 |
| HSV1-UL19-1274 | + | CCGGCGAACAGCGCGUGGAC | 20 | 1660 |
| HSV1-UL19-4306 | + | CCCGGCGAACAGCGCGUGGAC | 21 | 8905 |
| HSV1-UL19-4307 | + | CCCCGGCGAACAGCGCGUGGAC | 22 | 8906 |
| HSV1-UL19-4308 | + | GCCCCGGCGAACAGCGCGUGGAC | 23 | 8907 |
| HSV1-UL19-4309 | + | GGCCCCGGCGAACAGCGCGUGGAC | 24 | 8908 |
| HSV1-UL19-4310 | + | UUACAUGCCGCCGCGUAC | 18 | 8909 |
| HSV1-UL19-4311 | + | GUUACAUGCCGCCGCGUAC | 19 | 8910 |
| HSV1-UL19-2736 | + | CGUUACAUGCCGCCGCGUAC | 20 | 2811 |
| HSV1-UL19-4312 | + | ACGUUACAUGCCGCCGCGUAC | 21 | 8911 |
| HSV1-UL19-4313 | + | CACGUUACAUGCCGCCGCGUAC | 22 | 8912 |
| HSV1-UL19-4314 | + | CCACGUUACAUGCCGCCGCGUAC | 23 | 8913 |
| HSV1-UL19-4315 | + | GCCACGUUACAUGCCGCCGCGUAC | 24 | 8914 |
| HSV1-UL19-4316 | + | CUCUGGCCGUGGUCGUAC | 18 | 8915 |
| HSV1-UL19-4317 | + | GCUCUGGCCGUGGUCGUAC | 19 | 8916 |
| HSV1-UL19-2860 | + | CGCUCUGGCCGUGGUCGUAC | 20 | 2886 |
| HSV1-UL19-4318 | + | UCGCUCUGGCCGUGGUCGUAC | 21 | 8917 |
| HSV1-UL19-4319 | + | GUCGCUCUGGCCGUGGUCGUAC | 22 | 8918 |
| HSV1-UL19-4320 | + | GGUCGCUCUGGCCGUGGUCGUAC | 23 | 8919 |
| HSV1-UL19-4321 | + | GGGUCGCUCUGGCCGUGGUCGUAC | 24 | 8920 |
| HSV1-UL19-4322 | + | AGGUCCAUGGCGCCCACC | 18 | 8921 |
| HSV1-UL19-4323 | + | CAGGUCCAUGGCGCCCACC | 19 | 8922 |
| HSV1-UL19-1050 | + | UCAGGUCCAUGGCGCCCACC | 20 | 1436 |
| HSV1-UL19-4324 | + | GUCAGGUCCAUGGCGCCCACC | 21 | 8923 |
| HSV1-UL19-4325 | + | CGUCAGGUCCAUGGCGCCCACC | 22 | 8924 |
| HSV1-UL19-4326 | + | ACGUCAGGUCCAUGGCGCCCACC | 23 | 8925 |
| HSV1-UL19-4327 | + | AACGUCAGGUCCAUGGCGCCCACC | 24 | 8926 |
| HSV1-UL19-4328 | + | GUUUCGUGCCGGGCCACC | 18 | 8927 |
| HSV1-UL19-4329 | + | AGUUUCGUGCCGGGCCACC | 19 | 8928 |
| HSV1-UL19-1318 | + | CAGUUUCGUGCCGGGCCACC | 20 | 1704 |
| HSV1-UL19-4330 | + | CCAGUUUCGUGCCGGGCCACC | 21 | 8929 |
| HSV1-UL19-4331 | + | GCCAGUUUCGUGCCGGGCCACC | 22 | 8930 |
| HSV1-UL19-4332 | + | CGCCAGUUUCGUGCCGGGCCACC | 23 | 8931 |
| HSV1-UL19-4333 | + | CCGCCAGUUUCGUGCCGGGCCACC | 24 | 8932 |
| HSV1-UL19-4334 | + | CCACGAGUUCGCGGCACC | 18 | 8933 |
| HSV1-UL19-4335 | + | UCCACGAGUUCGCGGCACC | 19 | 8934 |
| HSV1-UL19-2879 | + | CUCCACGAGUUCGCGGCACC | 20 | 2900 |
| HSV1-UL19-4336 | + | CCUCCACGAGUUCGCGGCACC | 21 | 8935 |
| HSV1-UL19-4337 | + | UCCUCCACGAGUUCGCGGCACC | 22 | 8936 |
| HSV1-UL19-4338 | + | GUCCUCCACGAGUUCGCGGCACC | 23 | 8937 |
| HSV1-UL19-4339 | + | GGUCCUCCACGAGUUCGCGGCACC | 24 | 8938 |
| HSV1-UL19-4340 | + | CCCAGAGCCGGGGGGACC | 18 | 8939 |
| HSV1-UL19-4341 | + | CCCCAGAGCCGGGGGGACC | 19 | 8940 |
| HSV1-UL19-1293 | + | CCCCCAGAGCCGGGGGGACC | 20 | 1679 |
| HSV1-UL19-4342 | + | GCCCCCAGAGCCGGGGGGACC | 21 | 8941 |
| HSV1-UL19-4343 | + | GGCCCCCAGAGCCGGGGGGACC | 22 | 8942 |
| HSV1-UL19-4344 | + | UGGCCCCCAGAGCCGGGGGGACC | 23 | 8943 |
| HSV1-UL19-4345 | + | UUGGCCCCCAGAGCCGGGGGGACC | 24 | 8944 |
| HSV1-UL19-4346 | + | CUGGUGAUGCACUGGACC | 18 | 8945 |
| HSV1-UL19-4347 | + | GCUGGUGAUGCACUGGACC | 19 | 8946 |
| HSV1-UL19-2716 | + | AGCUGGUGAUGCACUGGACC | 20 | 2795 |
| HSV1-UL19-4348 | + | UAGCUGGUGAUGCACUGGACC | 21 | 8947 |
| HSV1-UL19-4349 | + | GUAGCUGGUGAUGCACUGGACC | 22 | 8948 |
| HSV1-UL19-4350 | + | AGUAGCUGGUGAUGCACUGGACC | 23 | 8949 |
| HSV1-UL19-4351 | + | CAGUAGCUGGUGAUGCACUGGACC | 24 | 8950 |
| HSV1-UL19-4352 | + | CACGAGUUCGCGGCACCC | 18 | 8951 |
| HSV1-UL19-4353 | + | CCACGAGUUCGCGGCACCC | 19 | 8952 |
| HSV1-UL19-1416 | + | UCCACGAGUUCGCGGCACCC | 20 | 1802 |
| HSV1-UL19-4354 | + | CUCCACGAGUUCGCGGCACCC | 21 | 8953 |
| HSV1-UL19-4355 | + | CCUCCACGAGUUCGCGGCACCC | 22 | 8954 |
| HSV1-UL19-4356 | + | UCCUCCACGAGUUCGCGGCACCC | 23 | 8955 |
| HSV1-UL19-4357 | + | GUCCUCCACGAGUUCGCGGCACCC | 24 | 8956 |
| HSV1-UL19-4358 | + | ACGAGUUCGCGGCACCCC | 18 | 8957 |
| HSV1-UL19-4359 | + | CACGAGUUCGCGGCACCCC | 19 | 8958 |
| HSV1-UL19-1415 | + | CCACGAGUUCGCGGCACCCC | 20 | 1801 |
| HSV1-UL19-4360 | + | UCCACGAGUUCGCGGCACCCC | 21 | 8959 |
| HSV1-UL19-4361 | + | CUCCACGAGUUCGCGGCACCCC | 22 | 8960 |
| HSV1-UL19-4362 | + | CCUCCACGAGUUCGCGGCACCCC | 23 | 8961 |
| HSV1-UL19-4363 | + | UCCUCCACGAGUUCGCGGCACCCC | 24 | 8962 |
| HSV1-UL19-4364 | + | GCCGCGCUCAAACGCCCC | 18 | 8963 |
| HSV1-UL19-4365 | + | UGCCGCGCUCAAACGCCCC | 19 | 8964 |
| HSV1-UL19-2612 | + | GUGCCGCGCUCAAACGCCCC | 20 | 2728 |
| HSV1-UL19-4366 | + | CGUGCCGCGCUCAAACGCCCC | 21 | 8965 |
| HSV1-UL19-4367 | + | CCGUGCCGCGCUCAAACGCCCC | 22 | 8966 |
| HSV1-UL19-4368 | + | GCCGUGCCGCGCUCAAACGCCCC | 23 | 8967 |
| HSV1-UL19-4369 | + | GGCCGUGCCGCGCUCAAACGCCCC | 24 | 8968 |
| HSV1-UL19-4370 | + | GCGGUCGUCGAACGCCCC | 18 | 8969 |
| HSV1-UL19-4371 | + | UGCGGUCGUCGAACGCCCC | 19 | 8970 |
| HSV1-UL19-2710 | + | UUGCGGUCGUCGAACGCCCC | 20 | 2789 |
| HSV1-UL19-4372 | + | GUUGCGGUCGUCGAACGCCCC | 21 | 8971 |
| HSV1-UL19-4373 | + | AGUUGCGGUCGUCGAACGCCCC | 22 | 8972 |
| HSV1-UL19-4374 | + | UAGUUGCGGUCGUCGAACGCCCC | 23 | 8973 |
| HSV1-UL19-4375 | + | GUAGUUGCGGUCGUCGAACGCCCC | 24 | 8974 |
| HSV1-UL19-4376 | + | CGGUGCAGCAGCGGCCCC | 18 | 8975 |
| HSV1-UL19-4377 | + | GCGGUGCAGCAGCGGCCCC | 19 | 8976 |
| HSV1-UL19-2742 | + | CGCGGUGCAGCAGCGGCCCC | 20 | 2817 |
| HSV1-UL19-4378 | + | CCGCGGUGCAGCAGCGGCCCC | 21 | 8977 |
| HSV1-UL19-4379 | + | CCCGCGGUGCAGCAGCGGCCCC | 22 | 8978 |
| HSV1-UL19-4380 | + | CCCCGCGGUGCAGCAGCGGCCCC | 23 | 8979 |
| HSV1-UL19-4381 | + | CCCCCGCGGUGCAGCAGCGGCCCC | 24 | 8980 |
| HSV1-UL19-4382 | + | CGAAAAGUAGUUGGCCCC | 18 | 8981 |
| HSV1-UL19-4383 | + | ACGAAAAGUAGUUGGCCCC | 19 | 8982 |
| HSV1-UL19-2802 | + | GACGAAAAGUAGUUGGCCCC | 20 | 2849 |
| HSV1-UL19-4384 | + | CGACGAAAAGUAGUUGGCCCC | 21 | 8983 |
| HSV1-UL19-4385 | + | UCGACGAAAAGUAGUUGGCCCC | 22 | 8984 |
| HSV1-UL19-4386 | + | AUCGACGAAAAGUAGUUGGCCCC | 23 | 8985 |
| HSV1-UL19-4387 | + | GAUCGACGAAAAGUAGUUGGCCCC | 24 | 8986 |
| HSV1-UL19-4388 | + | GACCCAUCGGACCCGCCC | 18 | 8987 |
| HSV1-UL19-4389 | + | CGACCCAUCGGACCCGCCC | 19 | 8988 |
| HSV1-UL19-2684 | + | GCGACCCAUCGGACCCGCCC | 20 | 2773 |
| HSV1-UL19-4390 | + | CGCGACCCAUCGGACCCGCCC | 21 | 8989 |
| HSV1-UL19-4391 | + | CCGCGACCCAUCGGACCCGCCC | 22 | 8990 |
| HSV1-UL19-4392 | + | UCCGCGACCCAUCGGACCCGCCC | 23 | 8991 |
| HSV1-UL19-4393 | + | UUCCGCGACCCAUCGGACCCGCCC | 24 | 8992 |
| HSV1-UL19-4394 | + | ACCGGAUUGAACAGGCCC | 18 | 8993 |
| HSV1-UL19-4395 | + | GACCGGAUUGAACAGGCCC | 19 | 8994 |
| HSV1-UL19-1056 | + | UGACCGGAUUGAACAGGCCC | 20 | 1442 |
| HSV1-UL19-4396 | + | AUGACCGGAUUGAACAGGCCC | 21 | 8995 |
| HSV1-UL19-4397 | + | CAUGACCGGAUUGAACAGGCCC | 22 | 8996 |
| HSV1-UL19-4398 | + | CCAUGACCGGAUUGAACAGGCCC | 23 | 8997 |
| HSV1-UL19-4399 | + | UCCAUGACCGGAUUGAACAGGCCC | 24 | 8998 |
| HSV1-UL19-4400 | + | GCCACCUGGAGCUGGCCC | 18 | 8999 |
| HSV1-UL19-4401 | + | GGCCACCUGGAGCUGGCCC | 19 | 9000 |
| HSV1-UL19-1316 | + | GGGCCACCUGGAGCUGGCCC | 20 | 1702 |
| HSV1-UL19-4402 | + | CGGGCCACCUGGAGCUGGCCC | 21 | 9001 |
| HSV1-UL19-4403 | + | CCGGGCCACCUGGAGCUGGCCC | 22 | 9002 |
| HSV1-UL19-4404 | + | GCCGGGCCACCUGGAGCUGGCCC | 23 | 9003 |
| HSV1-UL19-4405 | + | UGCCGGGCCACCUGGAGCUGGCCC | 24 | 9004 |
| HSV1-UL19-4406 | + | CGGUGGCCCGCCUUGCCC | 18 | 9005 |
| HSV1-UL19-4407 | + | GCGGUGGCCCGCCUUGCCC | 19 | 9006 |
| HSV1-UL19-995 | + | GGCGGUGGCCCGCCUUGCCC | 20 | 1381 |
| HSV1-UL19-4408 | + | CGGCGGUGGCCCGCCUUGCCC | 21 | 9007 |
| HSV1-UL19-4409 | + | CCGGCGGUGGCCCGCCUUGCCC | 22 | 9008 |
| HSV1-UL19-4410 | + | CCCGGCGGUGGCCCGCCUUGCCC | 23 | 9009 |
| HSV1-UL19-4411 | + | UCCCGGCGGUGGCCCGCCUUGCCC | 24 | 9010 |
| HSV1-UL19-4412 | + | AGGUGGCCUGGAUCUCCC | 18 | 9011 |
| HSV1-UL19-4413 | + | CAGGUGGCCUGGAUCUCCC | 19 | 9012 |
| HSV1-UL19-2699 | + | CCAGGUGGCCUGGAUCUCCC | 20 | 2782 |
| HSV1-UL19-4414 | + | GCCAGGUGGCCUGGAUCUCCC | 21 | 9013 |
| HSV1-UL19-4415 | + | CGCCAGGUGGCCUGGAUCUCCC | 22 | 9014 |
| HSV1-UL19-4416 | + | GCGCCAGGUGGCCUGGAUCUCCC | 23 | 9015 |
| HSV1-UL19-4417 | + | CGCGCCAGGUGGCCUGGAUCUCCC | 24 | 9016 |
| HSV1-UL19-4418 | + | UCCUCGGGAAGGUCUCCC | 18 | 9017 |
| HSV1-UL19-4419 | + | CUCCUCGGGAAGGUCUCCC | 19 | 9018 |
| HSV1-UL19-2721 | + | ACUCCUCGGGAAGGUCUCCC | 20 | 2800 |
| HSV1-UL19-4420 | + | CACUCCUCGGGAAGGUCUCCC | 21 | 9019 |
| HSV1-UL19-4421 | + | GCACUCCUCGGGAAGGUCUCCC | 22 | 9020 |
| HSV1-UL19-4422 | + | UGCACUCCUCGGGAAGGUCUCCC | 23 | 9021 |
| HSV1-UL19-4423 | + | AUGCACUCCUCGGGAAGGUCUCCC | 24 | 9022 |
| HSV1-UL19-4424 | + | UAUUACAGAGCCAGUCCC | 18 | 9023 |
| HSV1-UL19-4425 | + | UUAUUACAGAGCCAGUCCC | 19 | 9024 |
| HSV1-UL19-4426 | + | UUUAUUACAGAGCCAGUCCC | 20 | 9025 |
| HSV1-UL19-4427 | + | GUUUAUUACAGAGCCAGUCCC | 21 | 9026 |
| HSV1-UL19-4428 | + | GGUUUAUUACAGAGCCAGUCCC | 22 | 9027 |
| HSV1-UL19-4429 | + | CGGUUUAUUACAGAGCCAGUCCC | 23 | 9028 |
| HSV1-UL19-4430 | + | GCGGUUUAUUACAGAGCCAGUCCC | 24 | 9029 |
| HSV1-UL19-4431 | + | CCCCCGGCGGCGCGUCCC | 18 | 9030 |
| HSV1-UL19-4432 | + | GCCCCCGGCGGCGCGUCCC | 19 | 9031 |
| HSV1-UL19-1376 | + | CGCCCCCGGCGGCGCGUCCC | 20 | 1762 |
| HSV1-UL19-4433 | + | ACGCCCCCGGCGGCGCGUCCC | 21 | 9032 |
| HSV1-UL19-4434 | + | AACGCCCCCGGCGGCGCGUCCC | 22 | 9033 |
| HSV1-UL19-4435 | + | AAACGCCCCCGGCGGCGCGUCCC | 23 | 9034 |
| HSV1-UL19-4436 | + | UAAACGCCCCCGGCGGCGCGUCCC | 24 | 9035 |
| HSV1-UL19-4437 | + | AUCGGCAACAACAAAGCC | 18 | 9036 |
| HSV1-UL19-4438 | + | CAUCGGCAACAACAAAGCC | 19 | 9037 |
| HSV1-UL19-983 | + | GCAUCGGCAACAACAAAGCC | 20 | 1369 |
| HSV1-UL19-4439 | + | UGCAUCGGCAACAACAAAGCC | 21 | 9038 |
| HSV1-UL19-4440 | + | UUGCAUCGGCAACAACAAAGCC | 22 | 9039 |
| HSV1-UL19-4441 | + | GUUGCAUCGGCAACAACAAAGCC | 23 | 9040 |
| HSV1-UL19-4442 | + | CGUUGCAUCGGCAACAACAAAGCC | 24 | 9041 |
| HSV1-UL19-4443 | + | UAGUUGGCCCCCAGAGCC | 18 | 9042 |
| HSV1-UL19-4444 | + | GUAGUUGGCCCCCAGAGCC | 19 | 9043 |
| HSV1-UL19-1297 | + | AGUAGUUGGCCCCCAGAGCC | 20 | 1683 |
| HSV1-UL19-4445 | + | AAGUAGUUGGCCCCCAGAGCC | 21 | 9044 |
| HSV1-UL19-4446 | + | AAAGUAGUUGGCCCCCAGAGCC | 22 | 9045 |
| HSV1-UL19-4447 | + | AAAAGUAGUUGGCCCCCAGAGCC | 23 | 9046 |
| HSV1-UL19-4448 | + | GAAAAGUAGUUGGCCCCCAGAGCC | 24 | 9047 |
| HSV1-UL19-4449 | + | GUGCCGCGCUCAAACGCC | 18 | 9048 |
| HSV1-UL19-4450 | + | CGUGCCGCGCUCAAACGCC | 19 | 9049 |
| HSV1-UL19-2613 | + | CCGUGCCGCGCUCAAACGCC | 20 | 2729 |
| HSV1-UL19-4451 | + | GCCGUGCCGCGCUCAAACGCC | 21 | 9050 |
| HSV1-UL19-4452 | + | GGCCGUGCCGCGCUCAAACGCC | 22 | 9051 |
| HSV1-UL19-4453 | + | CGGCCGUGCCGCGCUCAAACGCC | 23 | 9052 |
| HSV1-UL19-4454 | + | UCGGCCGUGCCGCGCUCAAACGCC | 24 | 9053 |
| HSV1-UL19-4455 | + | AUCUUGAAGUACCCCGCC | 18 | 9054 |
| HSV1-UL19-4456 | + | GAUCUUGAAGUACCCCGCC | 19 | 9055 |
| HSV1-UL19-2807 | + | UGAUCUUGAAGUACCCCGCC | 20 | 2854 |
| HSV1-UL19-4457 | + | CUGAUCUUGAAGUACCCCGCC | 21 | 9056 |
| HSV1-UL19-4458 | + | ACUGAUCUUGAAGUACCCCGCC | 22 | 9057 |
| HSV1-UL19-4459 | + | GACUGAUCUUGAAGUACCCCGCC | 23 | 9058 |
| HSV1-UL19-4460 | + | GGACUGAUCUUGAAGUACCCCGCC | 24 | 9059 |
| HSV1-UL19-4461 | + | GCCGCCGGACAUAGCGCC | 18 | 9060 |
| HSV1-UL19-4462 | + | CGCCGCCGGACAUAGCGCC | 19 | 9061 |
| HSV1-UL19-1135 | + | ACGCCGCCGGACAUAGCGCC | 20 | 1521 |
| HSV1-UL19-4463 | + | AACGCCGCCGGACAUAGCGCC | 21 | 9062 |
| HSV1-UL19-4464 | + | GAACGCCGCCGGACAUAGCGCC | 22 | 9063 |
| HSV1-UL19-4465 | + | GGAACGCCGCCGGACAUAGCGCC | 23 | 9064 |
| HSV1-UL19-4466 | + | CGGAACGCCGCCGGACAUAGCGCC | 24 | 9065 |
| HSV1-UL19-4467 | + | GCUGGGGCACUCCUCGCC | 18 | 9066 |
| HSV1-UL19-4468 | + | CGCUGGGGCACUCCUCGCC | 19 | 9067 |
| HSV1-UL19-1226 | + | UCGCUGGGGCACUCCUCGCC | 20 | 1612 |
| HSV1-UL19-4469 | + | GUCGCUGGGGCACUCCUCGCC | 21 | 9068 |
| HSV1-UL19-4470 | + | GGUCGCUGGGGCACUCCUCGCC | 22 | 9069 |
| HSV1-UL19-4471 | + | GGGUCGCUGGGGCACUCCUCGCC | 23 | 9070 |
| HSV1-UL19-4472 | + | GGGGUCGCUGGGGCACUCCUCGCC | 24 | 9071 |
| HSV1-UL19-4473 | + | AGCUGAUGAUGCAAGGCC | 18 | 9072 |
| HSV1-UL19-4474 | + | GAGCUGAUGAUGCAAGGCC | 19 | 9073 |
| HSV1-UL19-2810 | + | UGAGCUGAUGAUGCAAGGCC | 20 | 2856 |
| HSV1-UL19-4475 | + | UUGAGCUGAUGAUGCAAGGCC | 21 | 9074 |
| HSV1-UL19-4476 | + | CUUGAGCUGAUGAUGCAAGGCC | 22 | 9075 |
| HSV1-UL19-4477 | + | UCUUGAGCUGAUGAUGCAAGGCC | 23 | 9076 |
| HSV1-UL19-4478 | + | GUCUUGAGCUGAUGAUGCAAGGCC | 24 | 9077 |
| HSV1-UL19-4479 | + | GCCGUGGCCGCGAAGGCC | 18 | 9078 |
| HSV1-UL19-4480 | + | GGCCGUGGCCGCGAAGGCC | 19 | 9079 |
| HSV1-UL19-1387 | + | UGGCCGUGGCCGCGAAGGCC | 20 | 1773 |
| HSV1-UL19-4481 | + | UUGGCCGUGGCCGCGAAGGCC | 21 | 9080 |
| HSV1-UL19-4482 | + | GUUGGCCGUGGCCGCGAAGGCC | 22 | 9081 |
| HSV1-UL19-4483 | + | GGUUGGCCGUGGCCGCGAAGGCC | 23 | 9082 |
| HSV1-UL19-4484 | + | GGGUUGGCCGUGGCCGCGAAGGCC | 24 | 9083 |
| HSV1-UL19-4485 | + | GACCGGAUUGAACAGGCC | 18 | 9084 |
| HSV1-UL19-4486 | + | UGACCGGAUUGAACAGGCC | 19 | 9085 |
| HSV1-UL19-2656 | + | AUGACCGGAUUGAACAGGCC | 20 | 2757 |
| HSV1-UL19-4487 | + | CAUGACCGGAUUGAACAGGCC | 21 | 9086 |
| HSV1-UL19-4488 | + | CCAUGACCGGAUUGAACAGGCC | 22 | 9087 |
| HSV1-UL19-4489 | + | UCCAUGACCGGAUUGAACAGGCC | 23 | 9088 |
| HSV1-UL19-4490 | + | UUCCAUGACCGGAUUGAACAGGCC | 24 | 9089 |
| HSV1-UL19-4491 | + | CACCCCCAGCUCCAGGCC | 18 | 9090 |
| HSV1-UL19-4492 | + | CCACCCCCAGCUCCAGGCC | 19 | 9091 |
| HSV1-UL19-2706 | + | CCCACCCCCAGCUCCAGGCC | 20 | 2787 |
| HSV1-UL19-4493 | + | UCCCACCCCCAGCUCCAGGCC | 21 | 9092 |
| HSV1-UL19-4494 | + | GUCCCACCCCCAGCUCCAGGCC | 22 | 9093 |
| HSV1-UL19-4495 | + | CGUCCCACCCCCAGCUCCAGGCC | 23 | 9094 |
| HSV1-UL19-4496 | + | GCGUCCCACCCCCAGCUCCAGGCC | 24 | 9095 |
| HSV1-UL19-4497 | + | GUCAGACGGGGCACGGCC | 18 | 9096 |
| HSV1-UL19-4498 | + | CGUCAGACGGGGCACGGCC | 19 | 9097 |
| HSV1-UL19-2625 | + | GCGUCAGACGGGGCACGGCC | 20 | 2738 |
| HSV1-UL19-4499 | + | UGCGUCAGACGGGGCACGGCC | 21 | 9098 |
| HSV1-UL19-4500 | + | AUGCGUCAGACGGGGCACGGCC | 22 | 9099 |
| HSV1-UL19-4501 | + | CAUGCGUCAGACGGGGCACGGCC | 23 | 9100 |
| HSV1-UL19-4502 | + | GCAUGCGUCAGACGGGGCACGGCC | 24 | 9101 |
| HSV1-UL19-4503 | + | AUCUCCCCCGGGCCGGCC | 18 | 9102 |
| HSV1-UL19-4504 | + | GAUCUCCCCCGGGCCGGCC | 19 | 9103 |
| HSV1-UL19-1125 | + | GGAUCUCCCCCGGGCCGGCC | 20 | 1511 |
| HSV1-UL19-4505 | + | UGGAUCUCCCCCGGGCCGGCC | 21 | 9104 |
| HSV1-UL19-4506 | + | CUGGAUCUCCCCCGGGCCGGCC | 22 | 9105 |
| HSV1-UL19-4507 | + | CCUGGAUCUCCCCCGGGCCGGCC | 23 | 9106 |
| HSV1-UL19-4508 | + | GCCUGGAUCUCCCCCGGGCCGGCC | 24 | 9107 |
| HSV1-UL19-4509 | + | GACAGGUCGCGCAGGGCC | 18 | 9108 |
| HSV1-UL19-4510 | + | CGACAGGUCGCGCAGGGCC | 19 | 9109 |
| HSV1-UL19-1285 | + | GCGACAGGUCGCGCAGGGCC | 20 | 1671 |
| HSV1-UL19-4511 | + | CGCGACAGGUCGCGCAGGGCC | 21 | 9110 |
| HSV1-UL19-4512 | + | CCGCGACAGGUCGCGCAGGGCC | 22 | 9111 |
| HSV1-UL19-4513 | + | GCCGCGACAGGUCGCGCAGGGCC | 23 | 9112 |
| HSV1-UL19-4514 | + | UGCCGCGACAGGUCGCGCAGGGCC | 24 | 9113 |
| HSV1-UL19-4515 | + | GGCCACCUGGAGCUGGCC | 18 | 9114 |
| HSV1-UL19-4516 | + | GGGCCACCUGGAGCUGGCC | 19 | 9115 |
| HSV1-UL19-2821 | + | CGGGCCACCUGGAGCUGGCC | 20 | 2864 |
| HSV1-UL19-4517 | + | CCGGGCCACCUGGAGCUGGCC | 21 | 9116 |
| HSV1-UL19-4518 | + | GCCGGGCCACCUGGAGCUGGCC | 22 | 9117 |
| HSV1-UL19-4519 | + | UGCCGGGCCACCUGGAGCUGGCC | 23 | 9118 |
| HSV1-UL19-4520 | + | GUGCCGGGCCACCUGGAGCUGGCC | 24 | 9119 |
| HSV1-UL19-4521 | + | CACGGGUUGGCCGUGGCC | 18 | 9120 |
| HSV1-UL19-4522 | + | CCACGGGUUGGCCGUGGCC | 19 | 9121 |
| HSV1-UL19-2864 | + | CCCACGGGUUGGCCGUGGCC | 20 | 2889 |
| HSV1-UL19-4523 | + | GCCCACGGGUUGGCCGUGGCC | 21 | 9122 |
| HSV1-UL19-4524 | + | CGCCCACGGGUUGGCCGUGGCC | 22 | 9123 |
| HSV1-UL19-4525 | + | ACGCCCACGGGUUGGCCGUGGCC | 23 | 9124 |
| HSV1-UL19-4526 | + | GACGCCCACGGGUUGGCCGUGGCC | 24 | 9125 |
| HSV1-UL19-4527 | + | UCGCUGGCGGCGGUGGCC | 18 | 9126 |
| HSV1-UL19-4528 | + | GUCGCUGGCGGCGGUGGCC | 19 | 9127 |
| HSV1-UL19-2875 | + | CGUCGCUGGCGGCGGUGGCC | 20 | 2899 |
| HSV1-UL19-4529 | + | ACGUCGCUGGCGGCGGUGGCC | 21 | 9128 |
| HSV1-UL19-4530 | + | UACGUCGCUGGCGGCGGUGGCC | 22 | 9129 |
| HSV1-UL19-4531 | + | GUACGUCGCUGGCGGCGGUGGCC | 23 | 9130 |
| HSV1-UL19-4532 | + | UGUACGUCGCUGGCGGCGGUGGCC | 24 | 9131 |
| HSV1-UL19-4533 | + | GCGGGGAUCCGGGUGGCC | 18 | 9132 |
| HSV1-UL19-4534 | + | CGCGGGGAUCCGGGUGGCC | 19 | 9133 |
| HSV1-UL19-1067 | + | GCGCGGGGAUCCGGGUGGCC | 20 | 1453 |
| HSV1-UL19-4535 | + | GGCGCGGGGAUCCGGGUGGCC | 21 | 9134 |
| HSV1-UL19-4536 | + | AGGCGCGGGGAUCCGGGUGGCC | 22 | 9135 |
| HSV1-UL19-4537 | + | AAGGCGCGGGGAUCCGGGUGGCC | 23 | 9136 |
| HSV1-UL19-4538 | + | GAAGGCGCGGGGAUCCGGGUGGCC | 24 | 9137 |
| HSV1-UL19-4539 | + | GCGGUGGCCCGCCUUGCC | 18 | 9138 |
| HSV1-UL19-4540 | + | GGCGGUGGCCCGCCUUGCC | 19 | 9139 |
| HSV1-UL19-2620 | + | CGGCGGUGGCCCGCCUUGCC | 20 | 2734 |
| HSV1-UL19-4541 | + | CCGGCGGUGGCCCGCCUUGCC | 21 | 9140 |
| HSV1-UL19-4542 | + | CCCGGCGGUGGCCCGCCUUGCC | 22 | 9141 |
| HSV1-UL19-4543 | + | UCCCGGCGGUGGCCCGCCUUGCC | 23 | 9142 |
| HSV1-UL19-4544 | + | CUCCCGGCGGUGGCCCGCCUUGCC | 24 | 9143 |
| HSV1-UL19-4545 | + | UACACGGCCAUGCACUCC | 18 | 9144 |
| HSV1-UL19-4546 | + | GUACACGGCCAUGCACUCC | 19 | 9145 |
| HSV1-UL19-2724 | + | GGUACACGGCCAUGCACUCC | 20 | 2801 |
| HSV1-UL19-4547 | + | CGGUACACGGCCAUGCACUCC | 21 | 9146 |
| HSV1-UL19-4548 | + | CCGGUACACGGCCAUGCACUCC | 22 | 9147 |
| HSV1-UL19-4549 | + | CCCGGUACACGGCCAUGCACUCC | 23 | 9148 |
| HSV1-UL19-4550 | + | UCCCGGUACACGGCCAUGCACUCC | 24 | 9149 |
| HSV1-UL19-4551 | + | GCCUCCGACGCGCGCUCC | 18 | 9150 |
| HSV1-UL19-4552 | + | CGCCUCCGACGCGCGCUCC | 19 | 9151 |
| HSV1-UL19-2818 | + | ACGCCUCCGACGCGCGCUCC | 20 | 2862 |
| HSV1-UL19-4553 | + | UACGCCUCCGACGCGCGCUCC | 21 | 9152 |
| HSV1-UL19-4554 | + | GUACGCCUCCGACGCGCGCUCC | 22 | 9153 |
| HSV1-UL19-4555 | + | AGUACGCCUCCGACGCGCGCUCC | 23 | 9154 |
| HSV1-UL19-4556 | + | AAGUACGCCUCCGACGCGCGCUCC | 24 | 9155 |
| HSV1-UL19-4557 | + | GCCCCCGGCGGCGCGUCC | 18 | 9156 |
| HSV1-UL19-4558 | + | CGCCCCCGGCGGCGCGUCC | 19 | 9157 |
| HSV1-UL19-2858 | + | ACGCCCCCGGCGGCGCGUCC | 20 | 2884 |
| HSV1-UL19-4559 | + | AACGCCCCCGGCGGCGCGUCC | 21 | 9158 |
| HSV1-UL19-4560 | + | AAACGCCCCCGGCGGCGCGUCC | 22 | 9159 |
| HSV1-UL19-4561 | + | UAAACGCCCCCGGCGGCGCGUCC | 23 | 9160 |
| HSV1-UL19-4562 | + | GUAAACGCCCCCGGCGGCGCGUCC | 24 | 9161 |
| HSV1-UL19-4563 | + | UCCAGGCCCCGGGCGUCC | 18 | 9162 |
| HSV1-UL19-4564 | + | CUCCAGGCCCCGGGCGUCC | 19 | 9163 |
| HSV1-UL19-1137 | + | GCUCCAGGCCCCGGGCGUCC | 20 | 1523 |
| HSV1-UL19-4565 | + | AGCUCCAGGCCCCGGGCGUCC | 21 | 9164 |
| HSV1-UL19-4566 | + | CAGCUCCAGGCCCCGGGCGUCC | 22 | 9165 |
| HSV1-UL19-4567 | + | CCAGCUCCAGGCCCCGGGCGUCC | 23 | 9166 |
| HSV1-UL19-4568 | + | CCCAGCUCCAGGCCCCGGGCGUCC | 24 | 9167 |
| HSV1-UL19-4569 | + | GUGGCCGUGGUGAGGUCC | 18 | 9168 |
| HSV1-UL19-4570 | + | CGUGGCCGUGGUGAGGUCC | 19 | 9169 |
| HSV1-UL19-2621 | + | GCGUGGCCGUGGUGAGGUCC | 20 | 2735 |
| HSV1-UL19-4571 | + | UGCGUGGCCGUGGUGAGGUCC | 21 | 9170 |
| HSV1-UL19-4572 | + | CUGCGUGGCCGUGGUGAGGUCC | 22 | 9171 |
| HSV1-UL19-4573 | + | GCUGCGUGGCCGUGGUGAGGUCC | 23 | 9172 |
| HSV1-UL19-4574 | + | GGCUGCGUGGCCGUGGUGAGGUCC | 24 | 9173 |
| HSV1-UL19-4575 | + | ACGGCUGCCGCGUUGUCC | 18 | 9174 |
| HSV1-UL19-4576 | + | CACGGCUGCCGCGUUGUCC | 19 | 9175 |
| HSV1-UL19-1344 | + | ACACGGCUGCCGCGUUGUCC | 20 | 1730 |
| HSV1-UL19-4577 | + | UACACGGCUGCCGCGUUGUCC | 21 | 9176 |
| HSV1-UL19-4578 | + | GUACACGGCUGCCGCGUUGUCC | 22 | 9177 |
| HSV1-UL19-4579 | + | GGUACACGGCUGCCGCGUUGUCC | 23 | 9178 |
| HSV1-UL19-4580 | + | AGGUACACGGCUGCCGCGUUGUCC | 24 | 9179 |
| HSV1-UL19-4581 | + | CAUCGGCAACAACAAAGC | 18 | 9180 |
| HSV1-UL19-4582 | + | GCAUCGGCAACAACAAAGC | 19 | 9181 |
| HSV1-UL19-2615 | + | UGCAUCGGCAACAACAAAGC | 20 | 2730 |
| HSV1-UL19-4583 | + | UUGCAUCGGCAACAACAAAGC | 21 | 9182 |
| HSV1-UL19-4584 | + | GUUGCAUCGGCAACAACAAAGC | 22 | 9183 |
| HSV1-UL19-4585 | + | CGUUGCAUCGGCAACAACAAAGC | 23 | 9184 |
| HSV1-UL19-4586 | + | UCGUUGCAUCGGCAACAACAAAGC | 24 | 9185 |
| HSV1-UL19-4587 | + | ACGUAAAGAACUUAAAGC | 18 | 9186 |
| HSV1-UL19-4588 | + | GACGUAAAGAACUUAAAGC | 19 | 9187 |
| HSV1-UL19-1401 | + | CGACGUAAAGAACUUAAAGC | 20 | 1787 |
| HSV1-UL19-4589 | + | CCGACGUAAAGAACUUAAAGC | 21 | 9188 |
| HSV1-UL19-4590 | + | GCCGACGUAAAGAACUUAAAGC | 22 | 9189 |
| HSV1-UL19-4591 | + | GGCCGACGUAAAGAACUUAAAGC | 23 | 9190 |
| HSV1-UL19-4592 | + | CGGCCGACGUAAAGAACUUAAAGC | 24 | 9191 |
| HSV1-UL19-4593 | + | UGGGCCAGCACCUGCAGC | 18 | 9192 |
| HSV1-UL19-4594 | + | GUGGGCCAGCACCUGCAGC | 19 | 9193 |
| HSV1-UL19-2763 | + | UGUGGGCCAGCACCUGCAGC | 20 | 2830 |
| HSV1-UL19-4595 | + | UUGUGGGCCAGCACCUGCAGC | 21 | 9194 |
| HSV1-UL19-4596 | + | GUUGUGGGCCAGCACCUGCAGC | 22 | 9195 |
| HSV1-UL19-4597 | + | UGUUGUGGGCCAGCACCUGCAGC | 23 | 9196 |
| HSV1-UL19-4598 | + | AUGUUGUGGGCCAGCACCUGCAGC | 24 | 9197 |
| HSV1-UL19-4599 | + | GUAGUUGGCCCCCAGAGC | 18 | 9198 |
| HSV1-UL19-4600 | + | AGUAGUUGGCCCCCAGAGC | 19 | 9199 |
| HSV1-UL19-1298 | + | AAGUAGUUGGCCCCCAGAGC | 20 | 1684 |
| HSV1-UL19-4601 | + | AAAGUAGUUGGCCCCCAGAGC | 21 | 9200 |
| HSV1-UL19-4602 | + | AAAAGUAGUUGGCCCCCAGAGC | 22 | 9201 |
| HSV1-UL19-4603 | + | GAAAAGUAGUUGGCCCCCAGAGC | 23 | 9202 |
| HSV1-UL19-4604 | + | CGAAAAGUAGUUGGCCCCCAGAGC | 24 | 9203 |
| HSV1-UL19-4605 | + | GCGCGCGGCUGGGUGAGC | 18 | 9204 |
| HSV1-UL19-4606 | + | CGCGCGCGGCUGGGUGAGC | 19 | 9205 |
| HSV1-UL19-2825 | + | UCGCGCGCGGCUGGGUGAGC | 20 | 2867 |
| HSV1-UL19-4607 | + | UUCGCGCGCGGCUGGGUGAGC | 21 | 9206 |
| HSV1-UL19-4608 | + | GUUCGCGCGCGGCUGGGUGAGC | 22 | 9207 |
| HSV1-UL19-4609 | + | CGUUCGCGCGCGGCUGGGUGAGC | 23 | 9208 |
| HSV1-UL19-4610 | + | ACGUUCGCGCGCGGCUGGGUGAGC | 24 | 9209 |
| HSV1-UL19-4611 | + | GUGCAGCAGCGGCCCCGC | 18 | 9210 |
| HSV1-UL19-4612 | + | GGUGCAGCAGCGGCCCCGC | 19 | 9211 |
| HSV1-UL19-2741 | + | CGGUGCAGCAGCGGCCCCGC | 20 | 2816 |
| HSV1-UL19-4613 | + | GCGGUGCAGCAGCGGCCCCGC | 21 | 9212 |
| HSV1-UL19-4614 | + | CGCGGUGCAGCAGCGGCCCCGC | 22 | 9213 |
| HSV1-UL19-4615 | + | CCGCGGUGCAGCAGCGGCCCCGC | 23 | 9214 |
| HSV1-UL19-4616 | + | CCCGCGGUGCAGCAGCGGCCCCGC | 24 | 9215 |
| HSV1-UL19-4617 | + | GGCCCCGGCGAACAGCGC | 18 | 9216 |
| HSV1-UL19-4618 | + | CGGCCCCGGCGAACAGCGC | 19 | 9217 |
| HSV1-UL19-2783 | + | UCGGCCCCGGCGAACAGCGC | 20 | 2842 |
| HSV1-UL19-4619 | + | GUCGGCCCCGGCGAACAGCGC | 21 | 9218 |
| HSV1-UL19-4620 | + | GGUCGGCCCCGGCGAACAGCGC | 22 | 9219 |
| HSV1-UL19-4621 | + | UGGUCGGCCCCGGCGAACAGCGC | 23 | 9220 |
| HSV1-UL19-4622 | + | GUGGUCGGCCCCGGCGAACAGCGC | 24 | 9221 |
| HSV1-UL19-4623 | + | CGCCGCCGGACAUAGCGC | 18 | 9222 |
| HSV1-UL19-4624 | + | ACGCCGCCGGACAUAGCGC | 19 | 9223 |
| HSV1-UL19-2702 | + | AACGCCGCCGGACAUAGCGC | 20 | 2784 |
| HSV1-UL19-4625 | + | GAACGCCGCCGGACAUAGCGC | 21 | 9224 |
| HSV1-UL19-4626 | + | GGAACGCCGCCGGACAUAGCGC | 22 | 9225 |
| HSV1-UL19-4627 | + | CGGAACGCCGCCGGACAUAGCGC | 23 | 9226 |
| HSV1-UL19-4628 | + | CCGGAACGCCGCCGGACAUAGCGC | 24 | 9227 |
| HSV1-UL19-4629 | + | GAAGUGGGUCUCCCGCGC | 18 | 9228 |
| HSV1-UL19-4630 | + | CGAAGUGGGUCUCCCGCGC | 19 | 9229 |
| HSV1-UL19-2893 | + | GCGAAGUGGGUCUCCCGCGC | 20 | 2911 |
| HSV1-UL19-4631 | + | CGCGAAGUGGGUCUCCCGCGC | 21 | 9230 |
| HSV1-UL19-4632 | + | GCGCGAAGUGGGUCUCCCGCGC | 22 | 9231 |
| HSV1-UL19-4633 | + | UGCGCGAAGUGGGUCUCCCGCGC | 23 | 9232 |
| HSV1-UL19-4634 | + | CUGCGCGAAGUGGGUCUCCCGCGC | 24 | 9233 |
| HSV1-UL19-4635 | + | CGCUGGGGCACUCCUCGC | 18 | 9234 |
| HSV1-UL19-4636 | + | UCGCUGGGGCACUCCUCGC | 19 | 9235 |
| HSV1-UL19-1227 | + | GUCGCUGGGGCACUCCUCGC | 20 | 1613 |
| HSV1-UL19-4637 | + | GGUCGCUGGGGCACUCCUCGC | 21 | 9236 |
| HSV1-UL19-4638 | + | GGGUCGCUGGGGCACUCCUCGC | 22 | 9237 |
| HSV1-UL19-4639 | + | GGGGUCGCUGGGGCACUCCUCGC | 23 | 9238 |
| HSV1-UL19-4640 | + | CGGGGUCGCUGGGGCACUCCUCGC | 24 | 9239 |
| HSV1-UL19-4641 | + | CUCGGCGACCAGGGUCGC | 18 | 9240 |
| HSV1-UL19-4642 | + | GCUCGGCGACCAGGGUCGC | 19 | 9241 |
| HSV1-UL19-2616 | + | AGCUCGGCGACCAGGGUCGC | 20 | 2731 |
| HSV1-UL19-4643 | + | UAGCUCGGCGACCAGGGUCGC | 21 | 9242 |
| HSV1-UL19-4644 | + | UUAGCUCGGCGACCAGGGUCGC | 22 | 9243 |
| HSV1-UL19-4645 | + | UUUAGCUCGGCGACCAGGGUCGC | 23 | 9244 |
| HSV1-UL19-4646 | + | CUUUAGCUCGGCGACCAGGGUCGC | 24 | 9245 |
| HSV1-UL19-4647 | + | GGUCCGUCACGGGGUCGC | 18 | 9246 |
| HSV1-UL19-4648 | + | GGGUCCGUCACGGGGUCGC | 19 | 9247 |
| HSV1-UL19-1230 | + | GGGGUCCGUCACGGGGUCGC | 20 | 1616 |
| HSV1-UL19-4649 | + | CGGGGUCCGUCACGGGGUCGC | 21 | 9248 |
| HSV1-UL19-4650 | + | GCGGGGUCCGUCACGGGGUCGC | 22 | 9249 |
| HSV1-UL19-4651 | + | CGCGGGGUCCGUCACGGGGUCGC | 23 | 9250 |
| HSV1-UL19-4652 | + | GCGCGGGGUCCGUCACGGGGUCGC | 24 | 9251 |
| HSV1-UL19-4653 | + | GGCCGUGGCCGCGAAGGC | 18 | 9252 |
| HSV1-UL19-4654 | + | UGGCCGUGGCCGCGAAGGC | 19 | 9253 |
| HSV1-UL19-2863 | + | UUGGCCGUGGCCGCGAAGGC | 20 | 2888 |
| HSV1-UL19-4655 | + | GUUGGCCGUGGCCGCGAAGGC | 21 | 9254 |
| HSV1-UL19-4656 | + | GGUUGGCCGUGGCCGCGAAGGC | 22 | 9255 |
| HSV1-UL19-4657 | + | GGGUUGGCCGUGGCCGCGAAGGC | 23 | 9256 |
| HSV1-UL19-4658 | + | CGGGUUGGCCGUGGCCGCGAAGGC | 24 | 9257 |
| HSV1-UL19-4659 | + | CUGGCGGGGCGGGAAGGC | 18 | 9258 |
| HSV1-UL19-4660 | + | GCUGGCGGGGCGGGAAGGC | 19 | 9259 |
| HSV1-UL19-2668 | + | AGCUGGCGGGGCGGGAAGGC | 20 | 2763 |
| HSV1-UL19-4661 | + | CAGCUGGCGGGGCGGGAAGGC | 21 | 9260 |
| HSV1-UL19-4662 | + | ACAGCUGGCGGGGCGGGAAGGC | 22 | 9261 |
| HSV1-UL19-4663 | + | AACAGCUGGCGGGGCGGGAAGGC | 23 | 9262 |
| HSV1-UL19-4664 | + | AAACAGCUGGCGGGGCGGGAAGGC | 24 | 9263 |
| HSV1-UL19-3387 | + | AAACGCCCCGAGGACGGC | 18 | 7986 |
| HSV1-UL19-3388 | + | CAAACGCCCCGAGGACGGC | 19 | 7987 |
| HSV1-UL19-2611 | + | UCAAACGCCCCGAGGACGGC | 20 | 2727 |
| HSV1-UL19-4665 | + | CUCAAACGCCCCGAGGACGGC | 21 | 9264 |
| HSV1-UL19-4666 | + | GCUCAAACGCCCCGAGGACGGC | 22 | 9265 |
| HSV1-UL19-4667 | + | CGCUCAAACGCCCCGAGGACGGC | 23 | 9266 |
| HSV1-UL19-4668 | + | GCGCUCAAACGCCCCGAGGACGGC | 24 | 9267 |
| HSV1-UL19-4669 | + | GAUCUCCCCCGGGCCGGC | 18 | 9268 |
| HSV1-UL19-4670 | + | GGAUCUCCCCCGGGCCGGC | 19 | 9269 |
| HSV1-UL19-1126 | + | UGGAUCUCCCCCGGGCCGGC | 20 | 1512 |
| HSV1-UL19-4671 | + | CUGGAUCUCCCCCGGGCCGGC | 21 | 9270 |
| HSV1-UL19-4672 | + | CCUGGAUCUCCCCCGGGCCGGC | 22 | 9271 |
| HSV1-UL19-4673 | + | GCCUGGAUCUCCCCCGGGCCGGC | 23 | 9272 |
| HSV1-UL19-4674 | + | GGCCUGGAUCUCCCCCGGGCCGGC | 24 | 9273 |
| HSV1-UL19-4675 | + | GUCUGCGGCGGGGCCGGC | 18 | 9274 |
| HSV1-UL19-4676 | + | UGUCUGCGGCGGGGCCGGC | 19 | 9275 |
| HSV1-UL19-1099 | + | AUGUCUGCGGCGGGGCCGGC | 20 | 1485 |
| HSV1-UL19-4677 | + | CAUGUCUGCGGCGGGGCCGGC | 21 | 9276 |
| HSV1-UL19-4678 | + | GCAUGUCUGCGGCGGGGCCGGC | 22 | 9277 |
| HSV1-UL19-4679 | + | UGCAUGUCUGCGGCGGGGCCGGC | 23 | 9278 |
| HSV1-UL19-4680 | + | CUGCAUGUCUGCGGCGGGGCCGGC | 24 | 9279 |
| HSV1-UL19-4681 | + | AUCCGCGGCGUCCGCGGC | 18 | 9280 |
| HSV1-UL19-4682 | + | CAUCCGCGGCGUCCGCGGC | 19 | 9281 |
| HSV1-UL19-2739 | + | UCAUCCGCGGCGUCCGCGGC | 20 | 2814 |
| HSV1-UL19-4683 | + | GUCAUCCGCGGCGUCCGCGGC | 21 | 9282 |
| HSV1-UL19-4684 | + | GGUCAUCCGCGGCGUCCGCGGC | 22 | 9283 |
| HSV1-UL19-4685 | + | CGGUCAUCCGCGGCGUCCGCGGC | 23 | 9284 |
| HSV1-UL19-4686 | + | CCGGUCAUCCGCGGCGUCCGCGGC | 24 | 9285 |
| HSV1-UL19-4687 | + | CGACAGGUCGCGCAGGGC | 18 | 9286 |
| HSV1-UL19-4688 | + | GCGACAGGUCGCGCAGGGC | 19 | 9287 |
| HSV1-UL19-1286 | + | CGCGACAGGUCGCGCAGGGC | 20 | 1672 |
| HSV1-UL19-4689 | + | CCGCGACAGGUCGCGCAGGGC | 21 | 9288 |
| HSV1-UL19-4690 | + | GCCGCGACAGGUCGCGCAGGGC | 22 | 9289 |
| HSV1-UL19-4691 | + | UGCCGCGACAGGUCGCGCAGGGC | 23 | 9290 |
| HSV1-UL19-4692 | + | CUGCCGCGACAGGUCGCGCAGGGC | 24 | 9291 |
| HSV1-UL19-4693 | + | CUGGACCACGAGCCGGGC | 18 | 9292 |
| HSV1-UL19-4694 | + | ACUGGACCACGAGCCGGGC | 19 | 9293 |
| HSV1-UL19-2714 | + | CACUGGACCACGAGCCGGGC | 20 | 2793 |
| HSV1-UL19-4695 | + | GCACUGGACCACGAGCCGGGC | 21 | 9294 |
| HSV1-UL19-4696 | + | UGCACUGGACCACGAGCCGGGC | 22 | 9295 |
| HSV1-UL19-4697 | + | AUGCACUGGACCACGAGCCGGGC | 23 | 9296 |
| HSV1-UL19-4698 | + | GAUGCACUGGACCACGAGCCGGGC | 24 | 9297 |
| HSV1-UL19-4699 | + | AAAAACAGCUGGCGGGGC | 18 | 9298 |
| HSV1-UL19-4700 | + | AAAAAACAGCUGGCGGGGC | 19 | 9299 |
| HSV1-UL19-1076 | + | AAAAAAACAGCUGGCGGGGC | 20 | 1462 |
| HSV1-UL19-4701 | + | CAAAAAAACAGCUGGCGGGGC | 21 | 9300 |
| HSV1-UL19-4702 | + | CCAAAAAAACAGCUGGCGGGGC | 22 | 9301 |
| HSV1-UL19-4703 | + | CCCAAAAAAACAGCUGGCGGGGC | 23 | 9302 |
| HSV1-UL19-4704 | + | CCCCAAAAAAACAGCUGGCGGGGC | 24 | 9303 |
| HSV1-UL19-4705 | + | AUCCGGGUGGCCGGGGGC | 18 | 9304 |
| HSV1-UL19-4706 | + | GAUCCGGGUGGCCGGGGGC | 19 | 9305 |
| HSV1-UL19-1063 | + | GGAUCCGGGUGGCCGGGGGC | 20 | 1449 |
| HSV1-UL19-4707 | + | GGGAUCCGGGUGGCCGGGGGC | 21 | 9306 |
| HSV1-UL19-4708 | + | GGGGAUCCGGGUGGCCGGGGGC | 22 | 9307 |
| HSV1-UL19-4709 | + | CGGGGAUCCGGGUGGCCGGGGGC | 23 | 9308 |
| HSV1-UL19-4710 | + | GCGGGGAUCCGGGUGGCCGGGGGC | 24 | 9309 |
| HSV1-UL19-4711 | + | GUCAUCAACCAGCUGGGC | 18 | 9310 |
| HSV1-UL19-4712 | + | AGUCAUCAACCAGCUGGGC | 19 | 9311 |
| HSV1-UL19-2725 | + | AAGUCAUCAACCAGCUGGGC | 20 | 2802 |
| HSV1-UL19-4713 | + | AAAGUCAUCAACCAGCUGGGC | 21 | 9312 |
| HSV1-UL19-4714 | + | UAAAGUCAUCAACCAGCUGGGC | 22 | 9313 |
| HSV1-UL19-4715 | + | GUAAAGUCAUCAACCAGCUGGGC | 23 | 9314 |
| HSV1-UL19-4716 | + | GGUAAAGUCAUCAACCAGCUGGGC | 24 | 9315 |
| HSV1-UL19-4717 | + | CGCGGGGAUCCGGGUGGC | 18 | 9316 |
| HSV1-UL19-4718 | + | GCGCGGGGAUCCGGGUGGC | 19 | 9317 |
| HSV1-UL19-1068 | + | GGCGCGGGGAUCCGGGUGGC | 20 | 1454 |
| HSV1-UL19-4719 | + | AGGCGCGGGGAUCCGGGUGGC | 21 | 9318 |
| HSV1-UL19-4720 | + | AAGGCGCGGGGAUCCGGGUGGC | 22 | 9319 |
| HSV1-UL19-4721 | + | GAAGGCGCGGGGAUCCGGGUGGC | 23 | 9320 |
| HSV1-UL19-4722 | + | GGAAGGCGCGGGGAUCCGGGUGGC | 24 | 9321 |
| HSV1-UL19-4723 | + | AACGGCGGCGAUGGUGGC | 18 | 9322 |
| HSV1-UL19-4724 | + | GAACGGCGGCGAUGGUGGC | 19 | 9323 |
| HSV1-UL19-1145 | + | CGAACGGCGGCGAUGGUGGC | 20 | 1531 |
| HSV1-UL19-4725 | + | GCGAACGGCGGCGAUGGUGGC | 21 | 9324 |
| HSV1-UL19-4726 | + | CGCGAACGGCGGCGAUGGUGGC | 22 | 9325 |
| HSV1-UL19-4727 | + | CCGCGAACGGCGGCGAUGGUGGC | 23 | 9326 |
| HSV1-UL19-4728 | + | CCCGCGAACGGCGGCGAUGGUGGC | 24 | 9327 |
| HSV1-UL19-4729 | + | AUGGUAUGGUCCAGAUGC | 18 | 9328 |
| HSV1-UL19-4730 | + | GAUGGUAUGGUCCAGAUGC | 19 | 9329 |
| HSV1-UL19-1265 | + | GGAUGGUAUGGUCCAGAUGC | 20 | 1651 |
| HSV1-UL19-4731 | + | UGGAUGGUAUGGUCCAGAUGC | 21 | 9330 |
| HSV1-UL19-4732 | + | UUGGAUGGUAUGGUCCAGAUGC | 22 | 9331 |
| HSV1-UL19-4733 | + | UUUGGAUGGUAUGGUCCAGAUGC | 23 | 9332 |
| HSV1-UL19-4734 | + | UUUUGGAUGGUAUGGUCCAGAUGC | 24 | 9333 |
| HSV1-UL19-4735 | + | ACUUUCAGGAAGGACUGC | 18 | 9334 |
| HSV1-UL19-4736 | + | CACUUUCAGGAAGGACUGC | 19 | 9335 |
| HSV1-UL19-1019 | + | CCACUUUCAGGAAGGACUGC | 20 | 1405 |
| HSV1-UL19-4737 | + | UCCACUUUCAGGAAGGACUGC | 21 | 9336 |
| HSV1-UL19-4738 | + | CUCCACUUUCAGGAAGGACUGC | 22 | 9337 |
| HSV1-UL19-4739 | + | CCUCCACUUUCAGGAAGGACUGC | 23 | 9338 |
| HSV1-UL19-4740 | + | UCCUCCACUUUCAGGAAGGACUGC | 24 | 9339 |
| HSV1-UL19-4741 | + | UCAUAGACGAGAUACUGC | 18 | 9340 |
| HSV1-UL19-4742 | + | GUCAUAGACGAGAUACUGC | 19 | 9341 |
| HSV1-UL19-2895 | + | CGUCAUAGACGAGAUACUGC | 20 | 2913 |
| HSV1-UL19-4743 | + | GCGUCAUAGACGAGAUACUGC | 21 | 9342 |
| HSV1-UL19-4744 | + | UGCGUCAUAGACGAGAUACUGC | 22 | 9343 |
| HSV1-UL19-4745 | + | AUGCGUCAUAGACGAGAUACUGC | 23 | 9344 |
| HSV1-UL19-4746 | + | GAUGCGUCAUAGACGAGAUACUGC | 24 | 9345 |
| HSV1-UL19-4747 | + | ACCAGAUUGGCCGGGUGC | 18 | 9346 |
| HSV1-UL19-4748 | + | CACCAGAUUGGCCGGGUGC | 19 | 9347 |
| HSV1-UL19-1240 | + | CCACCAGAUUGGCCGGGUGC | 20 | 1626 |
| HSV1-UL19-4749 | + | GCCACCAGAUUGGCCGGGUGC | 21 | 9348 |
| HSV1-UL19-4750 | + | GGCCACCAGAUUGGCCGGGUGC | 22 | 9349 |
| HSV1-UL19-4751 | + | UGGCCACCAGAUUGGCCGGGUGC | 23 | 9350 |
| HSV1-UL19-4752 | + | UUGGCCACCAGAUUGGCCGGGUGC | 24 | 9351 |
| HSV1-UL19-4753 | + | GCCGGGUGCAGGGGGUGC | 18 | 9352 |
| HSV1-UL19-4754 | + | GGCCGGGUGCAGGGGGUGC | 19 | 9353 |
| HSV1-UL19-2756 | + | UGGCCGGGUGCAGGGGGUGC | 20 | 2825 |
| HSV1-UL19-4755 | + | UUGGCCGGGUGCAGGGGGUGC | 21 | 9354 |
| HSV1-UL19-4756 | + | AUUGGCCGGGUGCAGGGGGUGC | 22 | 9355 |
| HSV1-UL19-4757 | + | GAUUGGCCGGGUGCAGGGGGUGC | 23 | 9356 |
| HSV1-UL19-4758 | + | AGAUUGGCCGGGUGCAGGGGGUGC | 24 | 9357 |
| HSV1-UL19-4759 | + | CGCACGGCCUUGCCCAUC | 18 | 9358 |
| HSV1-UL19-4760 | + | UCGCACGGCCUUGCCCAUC | 19 | 9359 |
| HSV1-UL19-2637 | + | UUCGCACGGCCUUGCCCAUC | 20 | 2746 |
| HSV1-UL19-4761 | + | CUUCGCACGGCCUUGCCCAUC | 21 | 9360 |
| HSV1-UL19-4762 | + | ACUUCGCACGGCCUUGCCCAUC | 22 | 9361 |
| HSV1-UL19-4763 | + | GACUUCGCACGGCCUUGCCCAUC | 23 | 9362 |
| HSV1-UL19-4764 | + | AGACUUCGCACGGCCUUGCCCAUC | 24 | 9363 |
| HSV1-UL19-4765 | + | AAGGCCACGGGACUGAUC | 18 | 9364 |
| HSV1-UL19-4766 | + | CAAGGCCACGGGACUGAUC | 19 | 9365 |
| HSV1-UL19-2808 | + | GCAAGGCCACGGGACUGAUC | 20 | 2855 |
| HSV1-UL19-4767 | + | UGCAAGGCCACGGGACUGAUC | 21 | 9366 |
| HSV1-UL19-4768 | + | AUGCAAGGCCACGGGACUGAUC | 22 | 9367 |
| HSV1-UL19-4769 | + | GAUGCAAGGCCACGGGACUGAUC | 23 | 9368 |
| HSV1-UL19-4770 | + | UGAUGCAAGGCCACGGGACUGAUC | 24 | 9369 |
| HSV1-UL19-4771 | + | GGUGAGCGGGUAGGCCUC | 18 | 9370 |
| HSV1-UL19-4772 | + | AGGUGAGCGGGUAGGCCUC | 19 | 9371 |
| HSV1-UL19-2882 | + | CAGGUGAGCGGGUAGGCCUC | 20 | 2903 |
| HSV1-UL19-4773 | + | GCAGGUGAGCGGGUAGGCCUC | 21 | 9372 |
| HSV1-UL19-4774 | + | CGCAGGUGAGCGGGUAGGCCUC | 22 | 9373 |
| HSV1-UL19-4775 | + | GCGCAGGUGAGCGGGUAGGCCUC | 23 | 9374 |
| HSV1-UL19-4776 | + | GGCGCAGGUGAGCGGGUAGGCCUC | 24 | 9375 |
| HSV1-UL19-4777 | + | GCGCUUCUCCAGGGCCUC | 18 | 9376 |
| HSV1-UL19-4778 | + | UGCGCUUCUCCAGGGCCUC | 19 | 9377 |
| HSV1-UL19-2645 | + | AUGCGCUUCUCCAGGGCCUC | 20 | 2751 |
| HSV1-UL19-4779 | + | GAUGCGCUUCUCCAGGGCCUC | 21 | 9378 |
| HSV1-UL19-4780 | + | AGAUGCGCUUCUCCAGGGCCUC | 22 | 9379 |
| HSV1-UL19-4781 | + | UAGAUGCGCUUCUCCAGGGCCUC | 23 | 9380 |
| HSV1-UL19-4782 | + | GUAGAUGCGCUUCUCCAGGGCCUC | 24 | 9381 |
| HSV1-UL19-4783 | + | CACGGCCAUGCACUCCUC | 18 | 9382 |
| HSV1-UL19-4784 | + | ACACGGCCAUGCACUCCUC | 19 | 9383 |
| HSV1-UL19-1166 | + | UACACGGCCAUGCACUCCUC | 20 | 1552 |
| HSV1-UL19-4785 | + | GUACACGGCCAUGCACUCCUC | 21 | 9384 |
| HSV1-UL19-4786 | + | GGUACACGGCCAUGCACUCCUC | 22 | 9385 |
| HSV1-UL19-4787 | + | CGGUACACGGCCAUGCACUCCUC | 23 | 9386 |
| HSV1-UL19-4788 | + | CCGGUACACGGCCAUGCACUCCUC | 24 | 9387 |
| HSV1-UL19-4789 | + | GAACGCGGGGUGCAGCUC | 18 | 9388 |
| HSV1-UL19-4790 | + | CGAACGCGGGGUGCAGCUC | 19 | 9389 |
| HSV1-UL19-2689 | + | UCGAACGCGGGGUGCAGCUC | 20 | 2777 |
| HSV1-UL19-4791 | + | GUCGAACGCGGGGUGCAGCUC | 21 | 9390 |
| HSV1-UL19-4792 | + | AGUCGAACGCGGGGUGCAGCUC | 22 | 9391 |
| HSV1-UL19-4793 | + | AAGUCGAACGCGGGGUGCAGCUC | 23 | 9392 |
| HSV1-UL19-4794 | + | GAAGUCGAACGCGGGGUGCAGCUC | 24 | 9393 |
| HSV1-UL19-4795 | + | GUCGUCUGGGGGGCGCUC | 18 | 9394 |
| HSV1-UL19-4796 | + | CGUCGUCUGGGGGGCGCUC | 19 | 9395 |
| HSV1-UL19-2639 | + | GCGUCGUCUGGGGGGCGCUC | 20 | 2748 |
| HSV1-UL19-4797 | + | CGCGUCGUCUGGGGGGCGCUC | 21 | 9396 |
| HSV1-UL19-4798 | + | GCGCGUCGUCUGGGGGGCGCUC | 22 | 9397 |
| HSV1-UL19-4799 | + | CGCGCGUCGUCUGGGGGGCGCUC | 23 | 9398 |
| HSV1-UL19-4800 | + | ACGCGCGUCGUCUGGGGGGCGCUC | 24 | 9399 |
| HSV1-UL19-4801 | + | CUCGCCGGGGGCGAUCUC | 18 | 9400 |
| HSV1-UL19-4802 | + | CCUCGCCGGGGGCGAUCUC | 19 | 9401 |
| HSV1-UL19-1223 | + | UCCUCGCCGGGGGCGAUCUC | 20 | 1609 |
| HSV1-UL19-4803 | + | CUCCUCGCCGGGGGCGAUCUC | 21 | 9402 |
| HSV1-UL19-4804 | + | ACUCCUCGCCGGGGGCGAUCUC | 22 | 9403 |
| HSV1-UL19-4805 | + | CACUCCUCGCCGGGGGCGAUCUC | 23 | 9404 |
| HSV1-UL19-4806 | + | GCACUCCUCGCCGGGGGCGAUCUC | 24 | 9405 |
| HSV1-UL19-4807 | + | CUCCCCGGCCGCGCUCUC | 18 | 9406 |
| HSV1-UL19-4808 | + | UCUCCCCGGCCGCGCUCUC | 19 | 9407 |
| HSV1-UL19-2806 | + | UUCUCCCCGGCCGCGCUCUC | 20 | 2853 |
| HSV1-UL19-4809 | + | GUUCUCCCCGGCCGCGCUCUC | 21 | 9408 |
| HSV1-UL19-4810 | + | CGUUCUCCCCGGCCGCGCUCUC | 22 | 9409 |
| HSV1-UL19-4811 | + | GCGUUCUCCCCGGCCGCGCUCUC | 23 | 9410 |
| HSV1-UL19-4812 | + | CGCGUUCUCCCCGGCCGCGCUCUC | 24 | 9411 |
| HSV1-UL19-4813 | + | GGCGUAGAUGCGCUUCUC | 18 | 9412 |
| HSV1-UL19-4814 | + | CGGCGUAGAUGCGCUUCUC | 19 | 9413 |
| HSV1-UL19-2646 | + | GCGGCGUAGAUGCGCUUCUC | 20 | 2752 |
| HSV1-UL19-4815 | + | GGCGGCGUAGAUGCGCUUCUC | 21 | 9414 |
| HSV1-UL19-4816 | + | UGGCGGCGUAGAUGCGCUUCUC | 22 | 9415 |
| HSV1-UL19-4817 | + | GUGGCGGCGUAGAUGCGCUUCUC | 23 | 9416 |
| HSV1-UL19-4818 | + | GGUGGCGGCGUAGAUGCGCUUCUC | 24 | 9417 |
| HSV1-UL19-4819 | + | CCGGGAUGGAGGCCCGUC | 18 | 9418 |
| HSV1-UL19-4820 | + | CCCGGGAUGGAGGCCCGUC | 19 | 9419 |
| HSV1-UL19-2811 | + | ACCCGGGAUGGAGGCCCGUC | 20 | 2857 |
| HSV1-UL19-4821 | + | AACCCGGGAUGGAGGCCCGUC | 21 | 9420 |
| HSV1-UL19-4822 | + | AAACCCGGGAUGGAGGCCCGUC | 22 | 9421 |
| HSV1-UL19-4823 | + | CAAACCCGGGAUGGAGGCCCGUC | 23 | 9422 |
| HSV1-UL19-4824 | + | CCAAACCCGGGAUGGAGGCCCGUC | 24 | 9423 |
| HSV1-UL19-4825 | + | GGGUGCGCGGGGUCCGUC | 18 | 9424 |
| HSV1-UL19-4826 | + | GGGGUGCGCGGGGUCCGUC | 19 | 9425 |
| HSV1-UL19-2754 | + | GGGGGUGCGCGGGGUCCGUC | 20 | 2824 |
| HSV1-UL19-4827 | + | AGGGGGUGCGCGGGGUCCGUC | 21 | 9426 |
| HSV1-UL19-4828 | + | CAGGGGGUGCGCGGGGUCCGUC | 22 | 9427 |
| HSV1-UL19-4829 | + | GCAGGGGGUGCGCGGGGUCCGUC | 23 | 9428 |
| HSV1-UL19-4830 | + | UGCAGGGGGUGCGCGGGGUCCGUC | 24 | 9429 |
| HSV1-UL19-4831 | + | CUCCAGGCCCCGGGCGUC | 18 | 9430 |
| HSV1-UL19-4832 | + | GCUCCAGGCCCCGGGCGUC | 19 | 9431 |
| HSV1-UL19-2705 | + | AGCUCCAGGCCCCGGGCGUC | 20 | 2786 |
| HSV1-UL19-4833 | + | CAGCUCCAGGCCCCGGGCGUC | 21 | 9432 |
| HSV1-UL19-4834 | + | CCAGCUCCAGGCCCCGGGCGUC | 22 | 9433 |
| HSV1-UL19-4835 | + | CCCAGCUCCAGGCCCCGGGCGUC | 23 | 9434 |
| HSV1-UL19-4836 | + | CCCCAGCUCCAGGCCCCGGGCGUC | 24 | 9435 |
| HSV1-UL19-4837 | + | GCGCGCACGCGCGUCGUC | 18 | 9436 |
| HSV1-UL19-4838 | + | CGCGCGCACGCGCGUCGUC | 19 | 9437 |
| HSV1-UL19-1038 | + | CCGCGCGCACGCGCGUCGUC | 20 | 1424 |
| HSV1-UL19-4839 | + | UCCGCGCGCACGCGCGUCGUC | 21 | 9438 |
| HSV1-UL19-4840 | + | AUCCGCGCGCACGCGCGUCGUC | 22 | 9439 |
| HSV1-UL19-4841 | + | GAUCCGCGCGCACGCGCGUCGUC | 23 | 9440 |
| HSV1-UL19-4842 | + | AGAUCCGCGCGCACGCGCGUCGUC | 24 | 9441 |
| HSV1-UL19-4843 | + | GCAGUCGCGAUGGCGGUC | 18 | 9442 |
| HSV1-UL19-4844 | + | GGCAGUCGCGAUGGCGGUC | 19 | 9443 |
| HSV1-UL19-2734 | + | CGGCAGUCGCGAUGGCGGUC | 20 | 2810 |
| HSV1-UL19-4845 | + | CCGGCAGUCGCGAUGGCGGUC | 21 | 9444 |
| HSV1-UL19-4846 | + | CCCGGCAGUCGCGAUGGCGGUC | 22 | 9445 |
| HSV1-UL19-4847 | + | ACCCGGCAGUCGCGAUGGCGGUC | 23 | 9446 |
| HSV1-UL19-4848 | + | AACCCGGCAGUCGCGAUGGCGGUC | 24 | 9447 |
| HSV1-UL19-4849 | + | CACGGCUGCCGCGUUGUC | 18 | 9448 |
| HSV1-UL19-4850 | + | ACACGGCUGCCGCGUUGUC | 19 | 9449 |
| HSV1-UL19-2842 | + | UACACGGCUGCCGCGUUGUC | 20 | 2875 |
| HSV1-UL19-4851 | + | GUACACGGCUGCCGCGUUGUC | 21 | 9450 |
| HSV1-UL19-4852 | + | GGUACACGGCUGCCGCGUUGUC | 22 | 9451 |
| HSV1-UL19-4853 | + | AGGUACACGGCUGCCGCGUUGUC | 23 | 9452 |
| HSV1-UL19-4854 | + | CAGGUACACGGCUGCCGCGUUGUC | 24 | 9453 |
| HSV1-UL19-4855 | + | ACCAGCGAGUAGUCGUUC | 18 | 9454 |
| HSV1-UL19-4856 | + | GACCAGCGAGUAGUCGUUC | 19 | 9455 |
| HSV1-UL19-2718 | + | AGACCAGCGAGUAGUCGUUC | 20 | 2797 |
| HSV1-UL19-4857 | + | GAGACCAGCGAGUAGUCGUUC | 21 | 9456 |
| HSV1-UL19-4858 | + | CGAGACCAGCGAGUAGUCGUUC | 22 | 9457 |
| HSV1-UL19-4859 | + | ACGAGACCAGCGAGUAGUCGUUC | 23 | 9458 |
| HSV1-UL19-4860 | + | UACGAGACCAGCGAGUAGUCGUUC | 24 | 9459 |
| HSV1-UL19-4861 | + | GGUCCCGAUCGCGUGUUC | 18 | 9460 |
| HSV1-UL19-4862 | + | CGGUCCCGAUCGCGUGUUC | 19 | 9461 |
| HSV1-UL19-2674 | + | ACGGUCCCGAUCGCGUGUUC | 20 | 2766 |
| HSV1-UL19-4863 | + | CACGGUCCCGAUCGCGUGUUC | 21 | 9462 |
| HSV1-UL19-4864 | + | ACACGGUCCCGAUCGCGUGUUC | 22 | 9463 |
| HSV1-UL19-4865 | + | CACACGGUCCCGAUCGCGUGUUC | 23 | 9464 |
| HSV1-UL19-4866 | + | GCACACGGUCCCGAUCGCGUGUUC | 24 | 9465 |
| HSV1-UL19-4867 | + | UCGGUGUCCUCCACUUUC | 18 | 9466 |
| HSV1-UL19-4868 | + | UUCGGUGUCCUCCACUUUC | 19 | 9467 |
| HSV1-UL19-1021 | + | CUUCGGUGUCCUCCACUUUC | 20 | 1407 |
| HSV1-UL19-4869 | + | GCUUCGGUGUCCUCCACUUUC | 21 | 9468 |
| HSV1-UL19-4870 | + | GGCUUCGGUGUCCUCCACUUUC | 22 | 9469 |
| HSV1-UL19-4871 | + | CGGCUUCGGUGUCCUCCACUUUC | 23 | 9470 |
| HSV1-UL19-4872 | + | UCGGCUUCGGUGUCCUCCACUUUC | 24 | 9471 |
| HSV1-UL19-4873 | + | GACGUAAAGAACUUAAAG | 18 | 9472 |
| HSV1-UL19-4874 | + | CGACGUAAAGAACUUAAAG | 19 | 9473 |
| HSV1-UL19-2872 | + | CCGACGUAAAGAACUUAAAG | 20 | 2896 |
| HSV1-UL19-4875 | + | GCCGACGUAAAGAACUUAAAG | 21 | 9474 |
| HSV1-UL19-4876 | + | GGCCGACGUAAAGAACUUAAAG | 22 | 9475 |
| HSV1-UL19-4877 | + | CGGCCGACGUAAAGAACUUAAAG | 23 | 9476 |
| HSV1-UL19-4878 | + | UCGGCCGACGUAAAGAACUUAAAG | 24 | 9477 |
| HSV1-UL19-4879 | + | GCCACCCCCACAAAGAAG | 18 | 9478 |
| HSV1-UL19-4880 | + | GGCCACCCCCACAAAGAAG | 19 | 9479 |
| HSV1-UL19-2692 | + | CGGCCACCCCCACAAAGAAG | 20 | 2779 |
| HSV1-UL19-4881 | + | UCGGCCACCCCCACAAAGAAG | 21 | 9480 |
| HSV1-UL19-4882 | + | GUCGGCCACCCCCACAAAGAAG | 22 | 9481 |
| HSV1-UL19-4883 | + | CGUCGGCCACCCCCACAAAGAAG | 23 | 9482 |
| HSV1-UL19-4884 | + | ACGUCGGCCACCCCCACAAAGAAG | 24 | 9483 |
| HSV1-UL19-4885 | + | CAGCGGCCCCGCGAGAAG | 18 | 9484 |
| HSV1-UL19-4886 | + | GCAGCGGCCCCGCGAGAAG | 19 | 9485 |
| HSV1-UL19-2740 | + | AGCAGCGGCCCCGCGAGAAG | 20 | 2815 |
| HSV1-UL19-4887 | + | CAGCAGCGGCCCCGCGAGAAG | 21 | 9486 |
| HSV1-UL19-4888 | + | GCAGCAGCGGCCCCGCGAGAAG | 22 | 9487 |
| HSV1-UL19-4889 | + | UGCAGCAGCGGCCCCGCGAGAAG | 23 | 9488 |
| HSV1-UL19-4890 | + | GUGCAGCAGCGGCCCCGCGAGAAG | 24 | 9489 |
| HSV1-UL19-4891 | + | GGUAAAGUCAUCAACCAG | 18 | 9490 |
| HSV1-UL19-4892 | + | GGGUAAAGUCAUCAACCAG | 19 | 9491 |
| HSV1-UL19-2726 | + | AGGGUAAAGUCAUCAACCAG | 20 | 2803 |
| HSV1-UL19-4893 | + | CAGGGUAAAGUCAUCAACCAG | 21 | 9492 |
| HSV1-UL19-4894 | + | UCAGGGUAAAGUCAUCAACCAG | 22 | 9493 |
| HSV1-UL19-4895 | + | GUCAGGGUAAAGUCAUCAACCAG | 23 | 9494 |
| HSV1-UL19-4896 | + | GGUCAGGGUAAAGUCAUCAACCAG | 24 | 9495 |
| HSV1-UL19-4897 | + | CAGAGCCGGGGGGACCAG | 18 | 9496 |
| HSV1-UL19-4898 | + | CCAGAGCCGGGGGGACCAG | 19 | 9497 |
| HSV1-UL19-1291 | + | CCCAGAGCCGGGGGGACCAG | 20 | 1677 |
| HSV1-UL19-4899 | + | CCCCAGAGCCGGGGGGACCAG | 21 | 9498 |
| HSV1-UL19-4900 | + | CCCCCAGAGCCGGGGGGACCAG | 22 | 9499 |
| HSV1-UL19-4901 | + | GCCCCCAGAGCCGGGGGGACCAG | 23 | 9500 |
| HSV1-UL19-4902 | + | GGCCCCCAGAGCCGGGGGGACCAG | 24 | 9501 |
| HSV1-UL19-4903 | + | GGCUGCCGCGUUGUCCAG | 18 | 9502 |
| HSV1-UL19-4904 | + | CGGCUGCCGCGUUGUCCAG | 19 | 9503 |
| HSV1-UL19-2840 | + | ACGGCUGCCGCGUUGUCCAG | 20 | 2874 |
| HSV1-UL19-4905 | + | CACGGCUGCCGCGUUGUCCAG | 21 | 9504 |
| HSV1-UL19-4906 | + | ACACGGCUGCCGCGUUGUCCAG | 22 | 9505 |
| HSV1-UL19-4907 | + | UACACGGCUGCCGCGUUGUCCAG | 23 | 9506 |
| HSV1-UL19-4908 | + | GUACACGGCUGCCGCGUUGUCCAG | 24 | 9507 |
| HSV1-UL19-4909 | + | GCGGGGUCGCUGGCGCAG | 18 | 9508 |
| HSV1-UL19-4910 | + | GGCGGGGUCGCUGGCGCAG | 19 | 9509 |
| HSV1-UL19-2884 | + | GGGCGGGGUCGCUGGCGCAG | 20 | 2905 |
| HSV1-UL19-4911 | + | AGGGCGGGGUCGCUGGCGCAG | 21 | 9510 |
| HSV1-UL19-4912 | + | GAGGGCGGGGUCGCUGGCGCAG | 22 | 9511 |
| HSV1-UL19-4913 | + | GGAGGGCGGGGUCGCUGGCGCAG | 23 | 9512 |
| HSV1-UL19-4914 | + | AGGAGGGCGGGGUCGCUGGCGCAG | 24 | 9513 |
| HSV1-UL19-4915 | + | CGUGUCGGCAUGCGUCAG | 18 | 9514 |
| HSV1-UL19-4916 | + | GCGUGUCGGCAUGCGUCAG | 19 | 9515 |
| HSV1-UL19-2627 | + | CGCGUGUCGGCAUGCGUCAG | 20 | 2739 |
| HSV1-UL19-4917 | + | GCGCGUGUCGGCAUGCGUCAG | 21 | 9516 |
| HSV1-UL19-4918 | + | CGCGCGUGUCGGCAUGCGUCAG | 22 | 9517 |
| HSV1-UL19-4919 | + | CCGCGCGUGUCGGCAUGCGUCAG | 23 | 9518 |
| HSV1-UL19-4920 | + | CCCGCGCGUGUCGGCAUGCGUCAG | 24 | 9519 |
| HSV1-UL19-4921 | + | AGUAGUUGGCCCCCAGAG | 18 | 9520 |
| HSV1-UL19-4922 | + | AAGUAGUUGGCCCCCAGAG | 19 | 9521 |
| HSV1-UL19-2801 | + | AAAGUAGUUGGCCCCCAGAG | 20 | 2848 |
| HSV1-UL19-4923 | + | AAAAGUAGUUGGCCCCCAGAG | 21 | 9522 |
| HSV1-UL19-4924 | + | GAAAAGUAGUUGGCCCCCAGAG | 22 | 9523 |
| HSV1-UL19-4925 | + | CGAAAAGUAGUUGGCCCCCAGAG | 23 | 9524 |
| HSV1-UL19-4926 | + | ACGAAAAGUAGUUGGCCCCCAGAG | 24 | 9525 |
| HSV1-UL19-4927 | + | CCGCGUUGUCCAGGAGAG | 18 | 9526 |
| HSV1-UL19-4928 | + | GCCGCGUUGUCCAGGAGAG | 19 | 9527 |
| HSV1-UL19-1341 | + | UGCCGCGUUGUCCAGGAGAG | 20 | 1727 |
| HSV1-UL19-4929 | + | CUGCCGCGUUGUCCAGGAGAG | 21 | 9528 |
| HSV1-UL19-4930 | + | GCUGCCGCGUUGUCCAGGAGAG | 22 | 9529 |
| HSV1-UL19-4931 | + | GGCUGCCGCGUUGUCCAGGAGAG | 23 | 9530 |
| HSV1-UL19-4932 | + | CGGCUGCCGCGUUGUCCAGGAGAG | 24 | 9531 |
| HSV1-UL19-4933 | + | GAUGCACUGGACCACGAG | 18 | 9532 |
| HSV1-UL19-4934 | + | UGAUGCACUGGACCACGAG | 19 | 9533 |
| HSV1-UL19-2715 | + | GUGAUGCACUGGACCACGAG | 20 | 2794 |
| HSV1-UL19-4935 | + | GGUGAUGCACUGGACCACGAG | 21 | 9534 |
| HSV1-UL19-4936 | + | UGGUGAUGCACUGGACCACGAG | 22 | 9535 |
| HSV1-UL19-4937 | + | CUGGUGAUGCACUGGACCACGAG | 23 | 9536 |
| HSV1-UL19-4938 | + | GCUGGUGAUGCACUGGACCACGAG | 24 | 9537 |
| HSV1-UL19-4939 | + | GCGUCGGGCGCCGCCGAG | 18 | 9538 |
| HSV1-UL19-4940 | + | CGCGUCGGGCGCCGCCGAG | 19 | 9539 |
| HSV1-UL19-2765 | + | CCGCGUCGGGCGCCGCCGAG | 20 | 2832 |
| HSV1-UL19-4941 | + | CCCGCGUCGGGCGCCGCCGAG | 21 | 9540 |
| HSV1-UL19-4942 | + | GCCCGCGUCGGGCGCCGCCGAG | 22 | 9541 |
| HSV1-UL19-4943 | + | CGCCCGCGUCGGGCGCCGCCGAG | 23 | 9542 |
| HSV1-UL19-4944 | + | GCGCCCGCGUCGGGCGCCGCCGAG | 24 | 9543 |
| HSV1-UL19-4945 | + | UGCCGCGUUGUCCAGGAG | 18 | 9544 |
| HSV1-UL19-4946 | + | CUGCCGCGUUGUCCAGGAG | 19 | 9545 |
| HSV1-UL19-1343 | + | GCUGCCGCGUUGUCCAGGAG | 20 | 1729 |
| HSV1-UL19-4947 | + | GGCUGCCGCGUUGUCCAGGAG | 21 | 9546 |
| HSV1-UL19-4948 | + | CGGCUGCCGCGUUGUCCAGGAG | 22 | 9547 |
| HSV1-UL19-4949 | + | ACGGCUGCCGCGUUGUCCAGGAG | 23 | 9548 |
| HSV1-UL19-4950 | + | CACGGCUGCCGCGUUGUCCAGGAG | 24 | 9549 |
| HSV1-UL19-4951 | + | GUUGCGGGCACUGCGGAG | 18 | 9550 |
| HSV1-UL19-4952 | + | CGUUGCGGGCACUGCGGAG | 19 | 9551 |
| HSV1-UL19-2887 | + | CCGUUGCGGGCACUGCGGAG | 20 | 2907 |
| HSV1-UL19-4953 | + | CCCGUUGCGGGCACUGCGGAG | 21 | 9552 |
| HSV1-UL19-4954 | + | CCCCGUUGCGGGCACUGCGGAG | 22 | 9553 |
| HSV1-UL19-4955 | + | UCCCCGUUGCGGGCACUGCGGAG | 23 | 9554 |
| HSV1-UL19-4956 | + | UUCCCCGUUGCGGGCACUGCGGAG | 24 | 9555 |
| HSV1-UL19-4957 | + | CAGAGCCAGUCCCUUGAG | 18 | 9556 |
| HSV1-UL19-4958 | + | ACAGAGCCAGUCCCUUGAG | 19 | 9557 |
| HSV1-UL19-1441 | + | UACAGAGCCAGUCCCUUGAG | 20 | 1827 |
| HSV1-UL19-4959 | + | UUACAGAGCCAGUCCCUUGAG | 21 | 9558 |
| HSV1-UL19-4960 | + | AUUACAGAGCCAGUCCCUUGAG | 22 | 9559 |
| HSV1-UL19-4961 | + | UAUUACAGAGCCAGUCCCUUGAG | 23 | 9560 |
| HSV1-UL19-4962 | + | UUAUUACAGAGCCAGUCCCUUGAG | 24 | 9561 |
| HSV1-UL19-4963 | + | AGCGGGGAUGCGUCAUAG | 18 | 9562 |
| HSV1-UL19-4964 | + | GAGCGGGGAUGCGUCAUAG | 19 | 9563 |
| HSV1-UL19-2896 | + | UGAGCGGGGAUGCGUCAUAG | 20 | 2914 |
| HSV1-UL19-4965 | + | UUGAGCGGGGAUGCGUCAUAG | 21 | 9564 |
| HSV1-UL19-4966 | + | CUUGAGCGGGGAUGCGUCAUAG | 22 | 9565 |
| HSV1-UL19-4967 | + | CCUUGAGCGGGGAUGCGUCAUAG | 23 | 9566 |
| HSV1-UL19-4968 | + | CCCUUGAGCGGGGAUGCGUCAUAG | 24 | 9567 |
| HSV1-UL19-4969 | + | AGACGGGGCACGGCCACG | 18 | 9568 |
| HSV1-UL19-4970 | + | CAGACGGGGCACGGCCACG | 19 | 9569 |
| HSV1-UL19-2623 | + | UCAGACGGGGCACGGCCACG | 20 | 2737 |
| HSV1-UL19-4971 | + | GUCAGACGGGGCACGGCCACG | 21 | 9570 |
| HSV1-UL19-4972 | + | CGUCAGACGGGGCACGGCCACG | 22 | 9571 |
| HSV1-UL19-4973 | + | GCGUCAGACGGGGCACGGCCACG | 23 | 9572 |
| HSV1-UL19-4974 | + | UGCGUCAGACGGGGCACGGCCACG | 24 | 9573 |
| HSV1-UL19-4975 | + | UCGCGGACGUGCUGCACG | 18 | 9574 |
| HSV1-UL19-4976 | + | CUCGCGGACGUGCUGCACG | 19 | 9575 |
| HSV1-UL19-2805 | + | UCUCGCGGACGUGCUGCACG | 20 | 2852 |
| HSV1-UL19-4977 | + | CUCUCGCGGACGUGCUGCACG | 21 | 9576 |
| HSV1-UL19-4978 | + | GCUCUCGCGGACGUGCUGCACG | 22 | 9577 |
| HSV1-UL19-4979 | + | CGCUCUCGCGGACGUGCUGCACG | 23 | 9578 |
| HSV1-UL19-4980 | + | GCGCUCUCGCGGACGUGCUGCACG | 24 | 9579 |
| HSV1-UL19-4981 | + | CGGUCCUGUCGGACGACG | 18 | 9580 |
| HSV1-UL19-4982 | + | GCGGUCCUGUCGGACGACG | 19 | 9581 |
| HSV1-UL19-2816 | + | AGCGGUCCUGUCGGACGACG | 20 | 2860 |
| HSV1-UL19-4983 | + | AAGCGGUCCUGUCGGACGACG | 21 | 9582 |
| HSV1-UL19-4984 | + | AAAGCGGUCCUGUCGGACGACG | 22 | 9583 |
| HSV1-UL19-4985 | + | CAAAGCGGUCCUGUCGGACGACG | 23 | 9584 |
| HSV1-UL19-4986 | + | ACAAAGCGGUCCUGUCGGACGACG | 24 | 9585 |
| HSV1-UL19-4987 | + | GCGAACAGCGCGUGGACG | 18 | 9586 |
| HSV1-UL19-4988 | + | GGCGAACAGCGCGUGGACG | 19 | 9587 |
| HSV1-UL19-1273 | + | CGGCGAACAGCGCGUGGACG | 20 | 1659 |
| HSV1-UL19-4989 | + | CCGGCGAACAGCGCGUGGACG | 21 | 9588 |
| HSV1-UL19-4990 | + | CCCGGCGAACAGCGCGUGGACG | 22 | 9589 |
| HSV1-UL19-4991 | + | CCCCGGCGAACAGCGCGUGGACG | 23 | 9590 |
| HSV1-UL19-4992 | + | GCCCCGGCGAACAGCGCGUGGACG | 24 | 9591 |
| HSV1-UL19-4993 | + | CGGUGGCCGUGGACACCG | 18 | 9592 |
| HSV1-UL19-4994 | + | GCGGUGGCCGUGGACACCG | 19 | 9593 |
| HSV1-UL19-2874 | + | GGCGGUGGCCGUGGACACCG | 20 | 2898 |
| HSV1-UL19-4995 | + | CGGCGGUGGCCGUGGACACCG | 21 | 9594 |
| HSV1-UL19-4996 | + | GCGGCGGUGGCCGUGGACACCG | 22 | 9595 |
| HSV1-UL19-4997 | + | GGCGGCGGUGGCCGUGGACACCG | 23 | 9596 |
| HSV1-UL19-4998 | + | UGGCGGCGGUGGCCGUGGACACCG | 24 | 9597 |
| HSV1-UL19-4999 | + | AGCAGGGGCUGAGCACCG | 18 | 9598 |
| HSV1-UL19-5000 | + | AAGCAGGGGCUGAGCACCG | 19 | 9599 |
| HSV1-UL19-2869 | + | AAAGCAGGGGCUGAGCACCG | 20 | 2894 |
| HSV1-UL19-5001 | + | UAAAGCAGGGGCUGAGCACCG | 21 | 9600 |
| HSV1-UL19-5002 | + | UUAAAGCAGGGGCUGAGCACCG | 22 | 9601 |
| HSV1-UL19-5003 | + | CUUAAAGCAGGGGCUGAGCACCG | 23 | 9602 |
| HSV1-UL19-5004 | + | ACUUAAAGCAGGGGCUGAGCACCG | 24 | 9603 |
| HSV1-UL19-5005 | + | CGAGUUCGCGGCACCCCG | 18 | 9604 |
| HSV1-UL19-5006 | + | ACGAGUUCGCGGCACCCCG | 19 | 9605 |
| HSV1-UL19-1414 | + | CACGAGUUCGCGGCACCCCG | 20 | 1800 |
| HSV1-UL19-5007 | + | CCACGAGUUCGCGGCACCCCG | 21 | 9606 |
| HSV1-UL19-5008 | + | UCCACGAGUUCGCGGCACCCCG | 22 | 9607 |
| HSV1-UL19-5009 | + | CUCCACGAGUUCGCGGCACCCCG | 23 | 9608 |
| HSV1-UL19-5010 | + | CCUCCACGAGUUCGCGGCACCCCG | 24 | 9609 |
| HSV1-UL19-5011 | + | AGCACCGGCGAGGCCCCG | 18 | 9610 |
| HSV1-UL19-5012 | + | GAGCACCGGCGAGGCCCCG | 19 | 9611 |
| HSV1-UL19-2868 | + | UGAGCACCGGCGAGGCCCCG | 20 | 2893 |
| HSV1-UL19-5013 | + | CUGAGCACCGGCGAGGCCCCG | 21 | 9612 |
| HSV1-UL19-5014 | + | GCUGAGCACCGGCGAGGCCCCG | 22 | 9613 |
| HSV1-UL19-5015 | + | GGCUGAGCACCGGCGAGGCCCCG | 23 | 9614 |
| HSV1-UL19-5016 | + | GGGCUGAGCACCGGCGAGGCCCCG | 24 | 9615 |
| HSV1-UL19-5017 | + | GCCACGUGGUCGGCCCCG | 18 | 9616 |
| HSV1-UL19-5018 | + | CGCCACGUGGUCGGCCCCG | 19 | 9617 |
| HSV1-UL19-2784 | + | UCGCCACGUGGUCGGCCCCG | 20 | 2843 |
| HSV1-UL19-5019 | + | UUCGCCACGUGGUCGGCCCCG | 21 | 9618 |
| HSV1-UL19-5020 | + | GUUCGCCACGUGGUCGGCCCCG | 22 | 9619 |
| HSV1-UL19-5021 | + | CGUUCGCCACGUGGUCGGCCCCG | 23 | 9620 |
| HSV1-UL19-5022 | + | GCGUUCGCCACGUGGUCGGCCCCG | 24 | 9621 |
| HSV1-UL19-5023 | + | AGUUGGCCCCCAGAGCCG | 18 | 9622 |
| HSV1-UL19-5024 | + | UAGUUGGCCCCCAGAGCCG | 19 | 9623 |
| HSV1-UL19-1296 | + | GUAGUUGGCCCCCAGAGCCG | 20 | 1682 |
| HSV1-UL19-5025 | + | AGUAGUUGGCCCCCAGAGCCG | 21 | 9624 |
| HSV1-UL19-5026 | + | AAGUAGUUGGCCCCCAGAGCCG | 22 | 9625 |
| HSV1-UL19-5027 | + | AAAGUAGUUGGCCCCCAGAGCCG | 23 | 9626 |
| HSV1-UL19-5028 | + | AAAAGUAGUUGGCCCCCAGAGCCG | 24 | 9627 |
| HSV1-UL19-5029 | + | GGGCGUCCCGGAACGCCG | 18 | 9628 |
| HSV1-UL19-5030 | + | CGGGCGUCCCGGAACGCCG | 19 | 9629 |
| HSV1-UL19-2703 | + | CCGGGCGUCCCGGAACGCCG | 20 | 2785 |
| HSV1-UL19-5031 | + | CCCGGGCGUCCCGGAACGCCG | 21 | 9630 |
| HSV1-UL19-5032 | + | CCCCGGGCGUCCCGGAACGCCG | 22 | 9631 |
| HSV1-UL19-5033 | + | GCCCCGGGCGUCCCGGAACGCCG | 23 | 9632 |
| HSV1-UL19-5034 | + | GGCCCCGGGCGUCCCGGAACGCCG | 24 | 9633 |
| HSV1-UL19-5035 | + | CGCCCGCGUCGGGCGCCG | 18 | 9634 |
| HSV1-UL19-5036 | + | GCGCCCGCGUCGGGCGCCG | 19 | 9635 |
| HSV1-UL19-2766 | + | GGCGCCCGCGUCGGGCGCCG | 20 | 2833 |
| HSV1-UL19-5037 | + | UGGCGCCCGCGUCGGGCGCCG | 21 | 9636 |
| HSV1-UL19-5038 | + | UUGGCGCCCGCGUCGGGCGCCG | 22 | 9637 |
| HSV1-UL19-5039 | + | GUUGGCGCCCGCGUCGGGCGCCG | 23 | 9638 |
| HSV1-UL19-5040 | + | UGUUGGCGCCCGCGUCGGGCGCCG | 24 | 9639 |
| HSV1-UL19-5041 | + | AAGACCAGCUUCUCGCCG | 18 | 9640 |
| HSV1-UL19-5042 | + | AAAGACCAGCUUCUCGCCG | 19 | 9641 |
| HSV1-UL19-2644 | + | GAAAGACCAGCUUCUCGCCG | 20 | 2750 |
| HSV1-UL19-5043 | + | AGAAAGACCAGCUUCUCGCCG | 21 | 9642 |
| HSV1-UL19-5044 | + | CAGAAAGACCAGCUUCUCGCCG | 22 | 9643 |
| HSV1-UL19-5045 | + | CCAGAAAGACCAGCUUCUCGCCG | 23 | 9644 |
| HSV1-UL19-5046 | + | UCCAGAAAGACCAGCUUCUCGCCG | 24 | 9645 |
| HSV1-UL19-5047 | + | UCUCCCCCGGGCCGGCCG | 18 | 9646 |
| HSV1-UL19-5048 | + | AUCUCCCCCGGGCCGGCCG | 19 | 9647 |
| HSV1-UL19-1124 | + | GAUCUCCCCCGGGCCGGCCG | 20 | 1510 |
| HSV1-UL19-5049 | + | GGAUCUCCCCCGGGCCGGCCG | 21 | 9648 |
| HSV1-UL19-5050 | + | UGGAUCUCCCCCGGGCCGGCCG | 22 | 9649 |
| HSV1-UL19-5051 | + | CUGGAUCUCCCCCGGGCCGGCCG | 23 | 9650 |
| HSV1-UL19-5052 | + | CCUGGAUCUCCCCCGGGCCGGCCG | 24 | 9651 |
| HSV1-UL19-5053 | + | ACAGGUCGCGCAGGGCCG | 18 | 9652 |
| HSV1-UL19-5054 | + | GACAGGUCGCGCAGGGCCG | 19 | 9653 |
| HSV1-UL19-1284 | + | CGACAGGUCGCGCAGGGCCG | 20 | 1670 |
| HSV1-UL19-5055 | + | GCGACAGGUCGCGCAGGGCCG | 21 | 9654 |
| HSV1-UL19-5056 | + | CGCGACAGGUCGCGCAGGGCCG | 22 | 9655 |
| HSV1-UL19-5057 | + | CCGCGACAGGUCGCGCAGGGCCG | 23 | 9656 |
| HSV1-UL19-5058 | + | GCCGCGACAGGUCGCGCAGGGCCG | 24 | 9657 |
| HSV1-UL19-5059 | + | CCGGGGGUUGCAGGGCCG | 18 | 9658 |
| HSV1-UL19-5060 | + | CCCGGGGGUUGCAGGGCCG | 19 | 9659 |
| HSV1-UL19-2854 | + | CCCCGGGGGUUGCAGGGCCG | 20 | 2882 |
| HSV1-UL19-5061 | + | UCCCCGGGGGUUGCAGGGCCG | 21 | 9660 |
| HSV1-UL19-5062 | + | GUCCCCGGGGGUUGCAGGGCCG | 22 | 9661 |
| HSV1-UL19-5063 | + | CGUCCCCGGGGGUUGCAGGGCCG | 23 | 9662 |
| HSV1-UL19-5064 | + | GCGUCCCCGGGGGUUGCAGGGCCG | 24 | 9663 |
| HSV1-UL19-5065 | + | GCGGUGUUGGCGCCCGCG | 18 | 9664 |
| HSV1-UL19-5066 | + | CGCGGUGUUGGCGCCCGCG | 19 | 9665 |
| HSV1-UL19-2767 | + | ACGCGGUGUUGGCGCCCGCG | 20 | 2834 |
| HSV1-UL19-5067 | + | GACGCGGUGUUGGCGCCCGCG | 21 | 9666 |
| HSV1-UL19-5068 | + | GGACGCGGUGUUGGCGCCCGCG | 22 | 9667 |
| HSV1-UL19-5069 | + | UGGACGCGGUGUUGGCGCCCGCG | 23 | 9668 |
| HSV1-UL19-5070 | + | GUGGACGCGGUGUUGGCGCCCGCG | 24 | 9669 |
| HSV1-UL19-5071 | + | CUGCCGCGACAGGUCGCG | 18 | 9670 |
| HSV1-UL19-5072 | + | CCUGCCGCGACAGGUCGCG | 19 | 9671 |
| HSV1-UL19-2792 | + | ACCUGCCGCGACAGGUCGCG | 20 | 2846 |
| HSV1-UL19-5073 | + | GACCUGCCGCGACAGGUCGCG | 21 | 9672 |
| HSV1-UL19-5074 | + | GGACCUGCCGCGACAGGUCGCG | 22 | 9673 |
| HSV1-UL19-5075 | + | GGGACCUGCCGCGACAGGUCGCG | 23 | 9674 |
| HSV1-UL19-5076 | + | GGGGACCUGCCGCGACAGGUCGCG | 24 | 9675 |
| HSV1-UL19-5077 | + | UGGCGGGGCGGGAAGGCG | 18 | 9676 |
| HSV1-UL19-5078 | + | CUGGCGGGGCGGGAAGGCG | 19 | 9677 |
| HSV1-UL19-1074 | + | GCUGGCGGGGCGGGAAGGCG | 20 | 1460 |
| HSV1-UL19-5079 | + | AGCUGGCGGGGCGGGAAGGCG | 21 | 9678 |
| HSV1-UL19-5080 | + | CAGCUGGCGGGGCGGGAAGGCG | 22 | 9679 |
| HSV1-UL19-5081 | + | ACAGCUGGCGGGGCGGGAAGGCG | 23 | 9680 |
| HSV1-UL19-5082 | + | AACAGCUGGCGGGGCGGGAAGGCG | 24 | 9681 |
| HSV1-UL19-5083 | + | ACGAGCCGGGCCAGGGCG | 18 | 9682 |
| HSV1-UL19-5084 | + | CACGAGCCGGGCCAGGGCG | 19 | 9683 |
| HSV1-UL19-2713 | + | CCACGAGCCGGGCCAGGGCG | 20 | 2792 |
| HSV1-UL19-5085 | + | ACCACGAGCCGGGCCAGGGCG | 21 | 9684 |
| HSV1-UL19-5086 | + | GACCACGAGCCGGGCCAGGGCG | 22 | 9685 |
| HSV1-UL19-5087 | + | GGACCACGAGCCGGGCCAGGGCG | 23 | 9686 |
| HSV1-UL19-5088 | + | UGGACCACGAGCCGGGCCAGGGCG | 24 | 9687 |
| HSV1-UL19-5089 | + | CCCGUUGCGGGCACUGCG | 18 | 9688 |
| HSV1-UL19-5090 | + | CCCCGUUGCGGGCACUGCG | 19 | 9689 |
| HSV1-UL19-2889 | + | UCCCCGUUGCGGGCACUGCG | 20 | 2908 |
| HSV1-UL19-5091 | + | UUCCCCGUUGCGGGCACUGCG | 21 | 9690 |
| HSV1-UL19-5092 | + | CUUCCCCGUUGCGGGCACUGCG | 22 | 9691 |
| HSV1-UL19-5093 | + | GCUUCCCCGUUGCGGGCACUGCG | 23 | 9692 |
| HSV1-UL19-5094 | + | GGCUUCCCCGUUGCGGGCACUGCG | 24 | 9693 |
| HSV1-UL19-5095 | + | AGCUGCUGCAUGUCUGCG | 18 | 9694 |
| HSV1-UL19-5096 | + | CAGCUGCUGCAUGUCUGCG | 19 | 9695 |
| HSV1-UL19-2683 | + | ACAGCUGCUGCAUGUCUGCG | 20 | 2772 |
| HSV1-UL19-5097 | + | AACAGCUGCUGCAUGUCUGCG | 21 | 9696 |
| HSV1-UL19-5098 | + | AAACAGCUGCUGCAUGUCUGCG | 22 | 9697 |
| HSV1-UL19-5099 | + | AAAACAGCUGCUGCAUGUCUGCG | 23 | 9698 |
| HSV1-UL19-5100 | + | AAAAACAGCUGCUGCAUGUCUGCG | 24 | 9699 |
| HSV1-UL19-5101 | + | CGACGGGCUGUCGGAUCG | 18 | 9700 |
| HSV1-UL19-5102 | + | ACGACGGGCUGUCGGAUCG | 19 | 9701 |
| HSV1-UL19-2803 | + | CACGACGGGCUGUCGGAUCG | 20 | 2850 |
| HSV1-UL19-5103 | + | GCACGACGGGCUGUCGGAUCG | 21 | 9702 |
| HSV1-UL19-5104 | + | UGCACGACGGGCUGUCGGAUCG | 22 | 9703 |
| HSV1-UL19-5105 | + | CUGCACGACGGGCUGUCGGAUCG | 23 | 9704 |
| HSV1-UL19-5106 | + | GCUGCACGACGGGCUGUCGGAUCG | 24 | 9705 |
| HSV1-UL19-5107 | + | UCGCUGGGGCACUCCUCG | 18 | 9706 |
| HSV1-UL19-5108 | + | GUCGCUGGGGCACUCCUCG | 19 | 9707 |
| HSV1-UL19-2750 | + | GGUCGCUGGGGCACUCCUCG | 20 | 2822 |
| HSV1-UL19-5109 | + | GGGUCGCUGGGGCACUCCUCG | 21 | 9708 |
| HSV1-UL19-5110 | + | GGGGUCGCUGGGGCACUCCUCG | 22 | 9709 |
| HSV1-UL19-5111 | + | CGGGGUCGCUGGGGCACUCCUCG | 23 | 9710 |
| HSV1-UL19-5112 | + | ACGGGGUCGCUGGGGCACUCCUCG | 24 | 9711 |
| HSV1-UL19-5113 | + | AGGAAAAAGCUCGUCUCG | 18 | 9712 |
| HSV1-UL19-5114 | + | CAGGAAAAAGCUCGUCUCG | 19 | 9713 |
| HSV1-UL19-2618 | + | CCAGGAAAAAGCUCGUCUCG | 20 | 2733 |
| HSV1-UL19-5115 | + | CCCAGGAAAAAGCUCGUCUCG | 21 | 9714 |
| HSV1-UL19-5116 | + | GCCCAGGAAAAAGCUCGUCUCG | 22 | 9715 |
| HSV1-UL19-5117 | + | UGCCCAGGAAAAAGCUCGUCUCG | 23 | 9716 |
| HSV1-UL19-5118 | + | UUGCCCAGGAAAAAGCUCGUCUCG | 24 | 9717 |
| HSV1-UL19-5119 | + | GCCGGGUAGUUGCGGUCG | 18 | 9718 |
| HSV1-UL19-5120 | + | CGCCGGGUAGUUGCGGUCG | 19 | 9719 |
| HSV1-UL19-2711 | + | CCGCCGGGUAGUUGCGGUCG | 20 | 2790 |
| HSV1-UL19-5121 | + | ACCGCCGGGUAGUUGCGGUCG | 21 | 9720 |
| HSV1-UL19-5122 | + | CACCGCCGGGUAGUUGCGGUCG | 22 | 9721 |
| HSV1-UL19-5123 | + | ACACCGCCGGGUAGUUGCGGUCG | 23 | 9722 |
| HSV1-UL19-5124 | + | AACACCGCCGGGUAGUUGCGGUCG | 24 | 9723 |
| HSV1-UL19-5125 | + | GGGUCCGUCACGGGGUCG | 18 | 9724 |
| HSV1-UL19-5126 | + | GGGGUCCGUCACGGGGUCG | 19 | 9725 |
| HSV1-UL19-2752 | + | CGGGGUCCGUCACGGGGUCG | 20 | 2823 |
| HSV1-UL19-5127 | + | GCGGGGUCCGUCACGGGGUCG | 21 | 9726 |
| HSV1-UL19-5128 | + | CGCGGGGUCCGUCACGGGGUCG | 22 | 9727 |
| HSV1-UL19-5129 | + | GCGCGGGGUCCGUCACGGGGUCG | 23 | 9728 |
| HSV1-UL19-5130 | + | UGCGCGGGGUCCGUCACGGGGUCG | 24 | 9729 |
| HSV1-UL19-5131 | + | UACGGAUUGGCGGCUUCG | 18 | 9730 |
| HSV1-UL19-5132 | + | GUACGGAUUGGCGGCUUCG | 19 | 9731 |
| HSV1-UL19-2678 | + | CGUACGGAUUGGCGGCUUCG | 20 | 2769 |
| HSV1-UL19-5133 | + | CCGUACGGAUUGGCGGCUUCG | 21 | 9732 |
| HSV1-UL19-5134 | + | CCCGUACGGAUUGGCGGCUUCG | 22 | 9733 |
| HSV1-UL19-5135 | + | CCCCGUACGGAUUGGCGGCUUCG | 23 | 9734 |
| HSV1-UL19-5136 | + | GCCCCGUACGGAUUGGCGGCUUCG | 24 | 9735 |
| HSV1-UL19-5137 | + | AACAGGCCCAGGGGCAGG | 18 | 9736 |
| HSV1-UL19-5138 | + | GAACAGGCCCAGGGGCAGG | 19 | 9737 |
| HSV1-UL19-2653 | + | UGAACAGGCCCAGGGGCAGG | 20 | 2755 |
| HSV1-UL19-5139 | + | UUGAACAGGCCCAGGGGCAGG | 21 | 9738 |
| HSV1-UL19-5140 | + | AUUGAACAGGCCCAGGGGCAGG | 22 | 9739 |
| HSV1-UL19-5141 | + | GAUUGAACAGGCCCAGGGGCAGG | 23 | 9740 |
| HSV1-UL19-5142 | + | GGAUUGAACAGGCCCAGGGGCAGG | 24 | 9741 |
| HSV1-UL19-5143 | + | AGCGUCUGCCGGUUCAGG | 18 | 9742 |
| HSV1-UL19-5144 | + | CAGCGUCUGCCGGUUCAGG | 19 | 9743 |
| HSV1-UL19-2638 | + | CCAGCGUCUGCCGGUUCAGG | 20 | 2747 |
| HSV1-UL19-5145 | + | UCCAGCGUCUGCCGGUUCAGG | 21 | 9744 |
| HSV1-UL19-5146 | + | GUCCAGCGUCUGCCGGUUCAGG | 22 | 9745 |
| HSV1-UL19-5147 | + | CGUCCAGCGUCUGCCGGUUCAGG | 23 | 9746 |
| HSV1-UL19-5148 | + | UCGUCCAGCGUCUGCCGGUUCAGG | 24 | 9747 |
| HSV1-UL19-5149 | + | GUGUCCUCCACUUUCAGG | 18 | 9748 |
| HSV1-UL19-5150 | + | GGUGUCCUCCACUUUCAGG | 19 | 9749 |
| HSV1-UL19-2633 | + | CGGUGUCCUCCACUUUCAGG | 20 | 2743 |
| HSV1-UL19-5151 | + | UCGGUGUCCUCCACUUUCAGG | 21 | 9750 |
| HSV1-UL19-5152 | + | UUCGGUGUCCUCCACUUUCAGG | 22 | 9751 |
| HSV1-UL19-5153 | + | CUUCGGUGUCCUCCACUUUCAGG | 23 | 9752 |
| HSV1-UL19-5154 | + | GCUUCGGUGUCCUCCACUUUCAGG | 24 | 9753 |
| HSV1-UL19-5155 | + | CGCGUUGUCCAGGAGAGG | 18 | 9754 |
| HSV1-UL19-5156 | + | CCGCGUUGUCCAGGAGAGG | 19 | 9755 |
| HSV1-UL19-1340 | + | GCCGCGUUGUCCAGGAGAGG | 20 | 1726 |
| HSV1-UL19-5157 | + | UGCCGCGUUGUCCAGGAGAGG | 21 | 9756 |
| HSV1-UL19-5158 | + | CUGCCGCGUUGUCCAGGAGAGG | 22 | 9757 |
| HSV1-UL19-5159 | + | GCUGCCGCGUUGUCCAGGAGAGG | 23 | 9758 |
| HSV1-UL19-5160 | + | GGCUGCCGCGUUGUCCAGGAGAGG | 24 | 9759 |
| HSV1-UL19-5161 | + | CGGGCACUGCGGAGGAGG | 18 | 9760 |
| HSV1-UL19-5162 | + | GCGGGCACUGCGGAGGAGG | 19 | 9761 |
| HSV1-UL19-2886 | + | UGCGGGCACUGCGGAGGAGG | 20 | 2906 |
| HSV1-UL19-5163 | + | UUGCGGGCACUGCGGAGGAGG | 21 | 9762 |
| HSV1-UL19-5164 | + | GUUGCGGGCACUGCGGAGGAGG | 22 | 9763 |
| HSV1-UL19-5165 | + | CGUUGCGGGCACUGCGGAGGAGG | 23 | 9764 |
| HSV1-UL19-5166 | + | CCGUUGCGGGCACUGCGGAGGAGG | 24 | 9765 |
| HSV1-UL19-5167 | + | GUUGGCCCCCAGAGCCGG | 18 | 9766 |
| HSV1-UL19-5168 | + | AGUUGGCCCCCAGAGCCGG | 19 | 9767 |
| HSV1-UL19-1295 | + | UAGUUGGCCCCCAGAGCCGG | 20 | 1681 |
| HSV1-UL19-5169 | + | GUAGUUGGCCCCCAGAGCCGG | 21 | 9768 |
| HSV1-UL19-5170 | + | AGUAGUUGGCCCCCAGAGCCGG | 22 | 9769 |
| HSV1-UL19-5171 | + | AAGUAGUUGGCCCCCAGAGCCGG | 23 | 9770 |
| HSV1-UL19-5172 | + | AAAGUAGUUGGCCCCCAGAGCCGG | 24 | 9771 |
| HSV1-UL19-5173 | + | CUCCCCCGGGCCGGCCGG | 18 | 9772 |
| HSV1-UL19-5174 | + | UCUCCCCCGGGCCGGCCGG | 19 | 9773 |
| HSV1-UL19-1123 | + | AUCUCCCCCGGGCCGGCCGG | 20 | 1509 |
| HSV1-UL19-5175 | + | GAUCUCCCCCGGGCCGGCCGG | 21 | 9774 |
| HSV1-UL19-5176 | + | GGAUCUCCCCCGGGCCGGCCGG | 22 | 9775 |
| HSV1-UL19-5177 | + | UGGAUCUCCCCCGGGCCGGCCGG | 23 | 9776 |
| HSV1-UL19-5178 | + | CUGGAUCUCCCCCGGGCCGGCCGG | 24 | 9777 |
| HSV1-UL19-5179 | + | CAGGUCGCGCAGGGCCGG | 18 | 9778 |
| HSV1-UL19-5180 | + | ACAGGUCGCGCAGGGCCGG | 19 | 9779 |
| HSV1-UL19-1283 | + | GACAGGUCGCGCAGGGCCGG | 20 | 1669 |
| HSV1-UL19-5181 | + | CGACAGGUCGCGCAGGGCCGG | 21 | 9780 |
| HSV1-UL19-5182 | + | GCGACAGGUCGCGCAGGGCCGG | 22 | 9781 |
| HSV1-UL19-5183 | + | CGCGACAGGUCGCGCAGGGCCGG | 23 | 9782 |
| HSV1-UL19-5184 | + | CCGCGACAGGUCGCGCAGGGCCGG | 24 | 9783 |
| HSV1-UL19-5185 | + | CGGGGGUUGCAGGGCCGG | 18 | 9784 |
| HSV1-UL19-5186 | + | CCGGGGGUUGCAGGGCCGG | 19 | 9785 |
| HSV1-UL19-1369 | + | CCCGGGGGUUGCAGGGCCGG | 20 | 1755 |
| HSV1-UL19-5187 | + | CCCCGGGGGUUGCAGGGCCGG | 21 | 9786 |
| HSV1-UL19-5188 | + | UCCCCGGGGGUUGCAGGGCCGG | 22 | 9787 |
| HSV1-UL19-5189 | + | GUCCCCGGGGGUUGCAGGGCCGG | 23 | 9788 |
| HSV1-UL19-5190 | + | CGUCCCCGGGGGUUGCAGGGCCGG | 24 | 9789 |
| HSV1-UL19-5191 | + | GGAUCUCCCCCGGGCCGG | 18 | 9790 |
| HSV1-UL19-5192 | + | UGGAUCUCCCCCGGGCCGG | 19 | 9791 |
| HSV1-UL19-2698 | + | CUGGAUCUCCCCCGGGCCGG | 20 | 2781 |
| HSV1-UL19-5193 | + | CCUGGAUCUCCCCCGGGCCGG | 21 | 9792 |
| HSV1-UL19-5194 | + | GCCUGGAUCUCCCCCGGGCCGG | 22 | 9793 |
| HSV1-UL19-5195 | + | GGCCUGGAUCUCCCCCGGGCCGG | 23 | 9794 |
| HSV1-UL19-5196 | + | UGGCCUGGAUCUCCCCCGGGCCGG | 24 | 9795 |
| HSV1-UL19-5197 | + | UGUCUGCGGCGGGGCCGG | 18 | 9796 |
| HSV1-UL19-5198 | + | AUGUCUGCGGCGGGGCCGG | 19 | 9797 |
| HSV1-UL19-2681 | + | CAUGUCUGCGGCGGGGCCGG | 20 | 2771 |
| HSV1-UL19-5199 | + | GCAUGUCUGCGGCGGGGCCGG | 21 | 9798 |
| HSV1-UL19-5200 | + | UGCAUGUCUGCGGCGGGGCCGG | 22 | 9799 |
| HSV1-UL19-5201 | + | CUGCAUGUCUGCGGCGGGGCCGG | 23 | 9800 |
| HSV1-UL19-5202 | + | GCUGCAUGUCUGCGGCGGGGCCGG | 24 | 9801 |
| HSV1-UL19-5203 | + | AGGGUGGCGUAUACGCGG | 18 | 9802 |
| HSV1-UL19-5204 | + | CAGGGUGGCGUAUACGCGG | 19 | 9803 |
| HSV1-UL19-2744 | + | GCAGGGUGGCGUAUACGCGG | 20 | 2819 |
| HSV1-UL19-5205 | + | UGCAGGGUGGCGUAUACGCGG | 21 | 9804 |
| HSV1-UL19-5206 | + | CUGCAGGGUGGCGUAUACGCGG | 22 | 9805 |
| HSV1-UL19-5207 | + | UCUGCAGGGUGGCGUAUACGCGG | 23 | 9806 |
| HSV1-UL19-5208 | + | UUCUGCAGGGUGGCGUAUACGCGG | 24 | 9807 |
| HSV1-UL19-5209 | + | CCGUUGCGGGCACUGCGG | 18 | 9808 |
| HSV1-UL19-5210 | + | CCCGUUGCGGGCACUGCGG | 19 | 9809 |
| HSV1-UL19-1431 | + | CCCCGUUGCGGGCACUGCGG | 20 | 1817 |
| HSV1-UL19-5211 | + | UCCCCGUUGCGGGCACUGCGG | 21 | 9810 |
| HSV1-UL19-5212 | + | UUCCCCGUUGCGGGCACUGCGG | 22 | 9811 |
| HSV1-UL19-5213 | + | CUUCCCCGUUGCGGGCACUGCGG | 23 | 9812 |
| HSV1-UL19-5214 | + | GCUUCCCCGUUGCGGGCACUGCGG | 24 | 9813 |
| HSV1-UL19-5215 | + | GCUGCUGCAUGUCUGCGG | 18 | 9814 |
| HSV1-UL19-5216 | + | AGCUGCUGCAUGUCUGCGG | 19 | 9815 |
| HSV1-UL19-1103 | + | CAGCUGCUGCAUGUCUGCGG | 20 | 1489 |
| HSV1-UL19-5217 | + | ACAGCUGCUGCAUGUCUGCGG | 21 | 9816 |
| HSV1-UL19-5218 | + | AACAGCUGCUGCAUGUCUGCGG | 22 | 9817 |
| HSV1-UL19-5219 | + | AAACAGCUGCUGCAUGUCUGCGG | 23 | 9818 |
| HSV1-UL19-5220 | + | AAAACAGCUGCUGCAUGUCUGCGG | 24 | 9819 |
| HSV1-UL19-5221 | + | AGCUGGCCGUCGUUGCGG | 18 | 9820 |
| HSV1-UL19-5222 | + | CAGCUGGCCGUCGUUGCGG | 19 | 9821 |
| HSV1-UL19-2737 | + | GCAGCUGGCCGUCGUUGCGG | 20 | 2812 |
| HSV1-UL19-5223 | + | AGCAGCUGGCCGUCGUUGCGG | 21 | 9822 |
| HSV1-UL19-5224 | + | CAGCAGCUGGCCGUCGUUGCGG | 22 | 9823 |
| HSV1-UL19-5225 | + | GCAGCAGCUGGCCGUCGUUGCGG | 23 | 9824 |
| HSV1-UL19-5226 | + | UGCAGCAGCUGGCCGUCGUUGCGG | 24 | 9825 |
| HSV1-UL19-5227 | + | GCGACAGGUCGCGCAGGG | 18 | 9826 |
| HSV1-UL19-5228 | + | CGCGACAGGUCGCGCAGGG | 19 | 9827 |
| HSV1-UL19-2791 | + | CCGCGACAGGUCGCGCAGGG | 20 | 2845 |
| HSV1-UL19-5229 | + | GCCGCGACAGGUCGCGCAGGG | 21 | 9828 |
| HSV1-UL19-5230 | + | UGCCGCGACAGGUCGCGCAGGG | 22 | 9829 |
| HSV1-UL19-5231 | + | CUGCCGCGACAGGUCGCGCAGGG | 23 | 9830 |
| HSV1-UL19-5232 | + | CCUGCCGCGACAGGUCGCGCAGGG | 24 | 9831 |
| HSV1-UL19-5233 | + | CCCGAACACGGGGACGGG | 18 | 9832 |
| HSV1-UL19-5234 | + | ACCCGAACACGGGGACGGG | 19 | 9833 |
| HSV1-UL19-2843 | + | CACCCGAACACGGGGACGGG | 20 | 2876 |
| HSV1-UL19-5235 | + | GCACCCGAACACGGGGACGGG | 21 | 9834 |
| HSV1-UL19-5236 | + | CGCACCCGAACACGGGGACGGG | 22 | 9835 |
| HSV1-UL19-5237 | + | GCGCACCCGAACACGGGGACGGG | 23 | 9836 |
| HSV1-UL19-5238 | + | GGCGCACCCGAACACGGGGACGGG | 24 | 9837 |
| HSV1-UL19-5239 | + | GAACAGCGCGUGGACGGG | 18 | 9838 |
| HSV1-UL19-5240 | + | CGAACAGCGCGUGGACGGG | 19 | 9839 |
| HSV1-UL19-2778 | + | GCGAACAGCGCGUGGACGGG | 20 | 2840 |
| HSV1-UL19-5241 | + | GGCGAACAGCGCGUGGACGGG | 21 | 9840 |
| HSV1-UL19-5242 | + | CGGCGAACAGCGCGUGGACGGG | 22 | 9841 |
| HSV1-UL19-5243 | + | CCGGCGAACAGCGCGUGGACGGG | 23 | 9842 |
| HSV1-UL19-5244 | + | CCCGGCGAACAGCGCGUGGACGGG | 24 | 9843 |
| HSV1-UL19-5245 | + | GGUGAACCCAAACCCGGG | 18 | 9844 |
| HSV1-UL19-5246 | + | CGGUGAACCCAAACCCGGG | 19 | 9845 |
| HSV1-UL19-2813 | + | ACGGUGAACCCAAACCCGGG | 20 | 2858 |
| HSV1-UL19-5247 | + | GACGGUGAACCCAAACCCGGG | 21 | 9846 |
| HSV1-UL19-5248 | + | CGACGGUGAACCCAAACCCGGG | 22 | 9847 |
| HSV1-UL19-5249 | + | ACGACGGUGAACCCAAACCCGGG | 23 | 9848 |
| HSV1-UL19-5250 | + | GACGACGGUGAACCCAAACCCGGG | 24 | 9849 |
| HSV1-UL19-5251 | + | AGGUCGCGCAGGGCCGGG | 18 | 9850 |
| HSV1-UL19-5252 | + | CAGGUCGCGCAGGGCCGGG | 19 | 9851 |
| HSV1-UL19-1282 | + | ACAGGUCGCGCAGGGCCGGG | 20 | 1668 |
| HSV1-UL19-5253 | + | GACAGGUCGCGCAGGGCCGGG | 21 | 9852 |
| HSV1-UL19-5254 | + | CGACAGGUCGCGCAGGGCCGGG | 22 | 9853 |
| HSV1-UL19-5255 | + | GCGACAGGUCGCGCAGGGCCGGG | 23 | 9854 |
| HSV1-UL19-5256 | + | CGCGACAGGUCGCGCAGGGCCGGG | 24 | 9855 |
| HSV1-UL19-5257 | + | AAAAAAACAGCUGGCGGG | 18 | 9856 |
| HSV1-UL19-5258 | + | CAAAAAAACAGCUGGCGGG | 19 | 9857 |
| HSV1-UL19-2671 | + | CCAAAAAAACAGCUGGCGGG | 20 | 2764 |
| HSV1-UL19-5259 | + | CCCAAAAAAACAGCUGGCGGG | 21 | 9858 |
| HSV1-UL19-5260 | + | CCCCAAAAAAACAGCUGGCGGG | 22 | 9859 |
| HSV1-UL19-5261 | + | CCCCCAAAAAAACAGCUGGCGGG | 23 | 9860 |
| HSV1-UL19-5262 | + | UCCCCCAAAAAAACAGCUGGCGGG | 24 | 9861 |
| HSV1-UL19-5263 | + | AUUGAACAGGCCCAGGGG | 18 | 9862 |
| HSV1-UL19-5264 | + | GAUUGAACAGGCCCAGGGG | 19 | 9863 |
| HSV1-UL19-2654 | + | GGAUUGAACAGGCCCAGGGG | 20 | 2756 |
| HSV1-UL19-5265 | + | CGGAUUGAACAGGCCCAGGGG | 21 | 9864 |
| HSV1-UL19-5266 | + | CCGGAUUGAACAGGCCCAGGGG | 22 | 9865 |
| HSV1-UL19-5267 | + | ACCGGAUUGAACAGGCCCAGGGG | 23 | 9866 |
| HSV1-UL19-5268 | + | GACCGGAUUGAACAGGCCCAGGGG | 24 | 9867 |
| HSV1-UL19-5269 | + | AAGAACUUAAAGCAGGGG | 18 | 9868 |
| HSV1-UL19-5270 | + | AAAGAACUUAAAGCAGGGG | 19 | 9869 |
| HSV1-UL19-2870 | + | UAAAGAACUUAAAGCAGGGG | 20 | 2895 |
| HSV1-UL19-5271 | + | GUAAAGAACUUAAAGCAGGGG | 21 | 9870 |
| HSV1-UL19-5272 | + | CGUAAAGAACUUAAAGCAGGGG | 22 | 9871 |
| HSV1-UL19-5273 | + | ACGUAAAGAACUUAAAGCAGGGG | 23 | 9872 |
| HSV1-UL19-5274 | + | GACGUAAAGAACUUAAAGCAGGGG | 24 | 9873 |
| HSV1-UL19-5275 | + | GCGCACCCGAACACGGGG | 18 | 9874 |
| HSV1-UL19-5276 | + | GGCGCACCCGAACACGGGG | 19 | 9875 |
| HSV1-UL19-2844 | + | GGGCGCACCCGAACACGGGG | 20 | 2877 |
| HSV1-UL19-5277 | + | UGGGCGCACCCGAACACGGGG | 21 | 9876 |
| HSV1-UL19-5278 | + | CUGGGCGCACCCGAACACGGGG | 22 | 9877 |
| HSV1-UL19-5279 | + | CCUGGGCGCACCCGAACACGGGG | 23 | 9878 |
| HSV1-UL19-5280 | + | ACCUGGGCGCACCCGAACACGGGG | 24 | 9879 |
| HSV1-UL19-5281 | + | AACAGCGCGUGGACGGGG | 18 | 9880 |
| HSV1-UL19-5282 | + | GAACAGCGCGUGGACGGGG | 19 | 9881 |
| HSV1-UL19-1272 | + | CGAACAGCGCGUGGACGGGG | 20 | 1658 |
| HSV1-UL19-5283 | + | GCGAACAGCGCGUGGACGGGG | 21 | 9882 |
| HSV1-UL19-5284 | + | GGCGAACAGCGCGUGGACGGGG | 22 | 9883 |
| HSV1-UL19-5285 | + | CGGCGAACAGCGCGUGGACGGGG | 23 | 9884 |
| HSV1-UL19-5286 | + | CCGGCGAACAGCGCGUGGACGGGG | 24 | 9885 |
| HSV1-UL19-5287 | + | GGAUCCGGGUGGCCGGGG | 18 | 9886 |
| HSV1-UL19-5288 | + | GGGAUCCGGGUGGCCGGGG | 19 | 9887 |
| HSV1-UL19-2661 | + | GGGGAUCCGGGUGGCCGGGG | 20 | 2760 |
| HSV1-UL19-5289 | + | CGGGGAUCCGGGUGGCCGGGG | 21 | 9888 |
| HSV1-UL19-5290 | + | GCGGGGAUCCGGGUGGCCGGGG | 22 | 9889 |
| HSV1-UL19-5291 | + | CGCGGGGAUCCGGGUGGCCGGGG | 23 | 9890 |
| HSV1-UL19-5292 | + | GCGCGGGGAUCCGGGUGGCCGGGG | 24 | 9891 |
| HSV1-UL19-5293 | + | AAAAAACAGCUGGCGGGG | 18 | 9892 |
| HSV1-UL19-5294 | + | AAAAAAACAGCUGGCGGGG | 19 | 9893 |
| HSV1-UL19-1077 | + | CAAAAAAACAGCUGGCGGGG | 20 | 1463 |
| HSV1-UL19-5295 | + | CCAAAAAAACAGCUGGCGGGG | 21 | 9894 |
| HSV1-UL19-5296 | + | CCCAAAAAAACAGCUGGCGGGG | 22 | 9895 |
| HSV1-UL19-5297 | + | CCCCAAAAAAACAGCUGGCGGGG | 23 | 9896 |
| HSV1-UL19-5298 | + | CCCCCAAAAAAACAGCUGGCGGGG | 24 | 9897 |
| HSV1-UL19-5299 | + | AUGGCGCCCACCAGGGGG | 18 | 9898 |
| HSV1-UL19-5300 | + | CAUGGCGCCCACCAGGGGG | 19 | 9899 |
| HSV1-UL19-2649 | + | CCAUGGCGCCCACCAGGGGG | 20 | 2753 |
| HSV1-UL19-5301 | + | UCCAUGGCGCCCACCAGGGGG | 21 | 9900 |
| HSV1-UL19-5302 | + | GUCCAUGGCGCCCACCAGGGGG | 22 | 9901 |
| HSV1-UL19-5303 | + | GGUCCAUGGCGCCCACCAGGGGG | 23 | 9902 |
| HSV1-UL19-5304 | + | AGGUCCAUGGCGCCCACCAGGGGG | 24 | 9903 |
| HSV1-UL19-5305 | + | GAUCCGGGUGGCCGGGGG | 18 | 9904 |
| HSV1-UL19-5306 | + | GGAUCCGGGUGGCCGGGGG | 19 | 9905 |
| HSV1-UL19-1064 | + | GGGAUCCGGGUGGCCGGGGG | 20 | 1450 |
| HSV1-UL19-5307 | + | GGGGAUCCGGGUGGCCGGGGG | 21 | 9906 |
| HSV1-UL19-5308 | + | CGGGGAUCCGGGUGGCCGGGGG | 22 | 9907 |
| HSV1-UL19-5309 | + | GCGGGGAUCCGGGUGGCCGGGGG | 23 | 9908 |
| HSV1-UL19-5310 | + | CGCGGGGAUCCGGGUGGCCGGGGG | 24 | 9909 |
| HSV1-UL19-5311 | + | CCCCAAAAAAACAGCUGG | 18 | 9910 |
| HSV1-UL19-5312 | + | CCCCCAAAAAAACAGCUGG | 19 | 9911 |
| HSV1-UL19-1080 | + | UCCCCCAAAAAAACAGCUGG | 20 | 1466 |
| HSV1-UL19-5313 | + | UUCCCCCAAAAAAACAGCUGG | 21 | 9912 |
| HSV1-UL19-5314 | + | CUUCCCCCAAAAAAACAGCUGG | 22 | 9913 |
| HSV1-UL19-5315 | + | CCUUCCCCCAAAAAAACAGCUGG | 23 | 9914 |
| HSV1-UL19-5316 | + | UCCUUCCCCCAAAAAAACAGCUGG | 24 | 9915 |
| HSV1-UL19-5317 | + | ACGUUCGCGCGCGGCUGG | 18 | 9916 |
| HSV1-UL19-5318 | + | CACGUUCGCGCGCGGCUGG | 19 | 9917 |
| HSV1-UL19-2826 | + | CCACGUUCGCGCGCGGCUGG | 20 | 2868 |
| HSV1-UL19-5319 | + | UCCACGUUCGCGCGCGGCUGG | 21 | 9918 |
| HSV1-UL19-5320 | + | GUCCACGUUCGCGCGCGGCUGG | 22 | 9919 |
| HSV1-UL19-5321 | + | GGUCCACGUUCGCGCGCGGCUGG | 23 | 9920 |
| HSV1-UL19-5322 | + | AGGUCCACGUUCGCGCGCGGCUGG | 24 | 9921 |
| HSV1-UL19-5323 | + | CCGGCGAACAGCGCGUGG | 18 | 9922 |
| HSV1-UL19-5324 | + | CCCGGCGAACAGCGCGUGG | 19 | 9923 |
| HSV1-UL19-2782 | + | CCCCGGCGAACAGCGCGUGG | 20 | 2841 |
| HSV1-UL19-5325 | + | GCCCCGGCGAACAGCGCGUGG | 21 | 9924 |
| HSV1-UL19-5326 | + | GGCCCCGGCGAACAGCGCGUGG | 22 | 9925 |
| HSV1-UL19-5327 | + | CGGCCCCGGCGAACAGCGCGUGG | 23 | 9926 |
| HSV1-UL19-5328 | + | UCGGCCCCGGCGAACAGCGCGUGG | 24 | 9927 |
| HSV1-UL19-5329 | + | GCGCGGGGAUCCGGGUGG | 18 | 9928 |
| HSV1-UL19-5330 | + | GGCGCGGGGAUCCGGGUGG | 19 | 9929 |
| HSV1-UL19-2664 | + | AGGCGCGGGGAUCCGGGUGG | 20 | 2761 |
| HSV1-UL19-5331 | + | AAGGCGCGGGGAUCCGGGUGG | 21 | 9930 |
| HSV1-UL19-5332 | + | GAAGGCGCGGGGAUCCGGGUGG | 22 | 9931 |
| HSV1-UL19-5333 | + | GGAAGGCGCGGGGAUCCGGGUGG | 23 | 9932 |
| HSV1-UL19-5334 | + | GGGAAGGCGCGGGGAUCCGGGUGG | 24 | 9933 |
| HSV1-UL19-5335 | + | GAACGGCGGCGAUGGUGG | 18 | 9934 |
| HSV1-UL19-5336 | + | CGAACGGCGGCGAUGGUGG | 19 | 9935 |
| HSV1-UL19-1146 | + | GCGAACGGCGGCGAUGGUGG | 20 | 1532 |
| HSV1-UL19-5337 | + | CGCGAACGGCGGCGAUGGUGG | 21 | 9936 |
| HSV1-UL19-5338 | + | CCGCGAACGGCGGCGAUGGUGG | 22 | 9937 |
| HSV1-UL19-5339 | + | CCCGCGAACGGCGGCGAUGGUGG | 23 | 9938 |
| HSV1-UL19-5340 | + | CCCCGCGAACGGCGGCGAUGGUGG | 24 | 9939 |
| HSV1-UL19-5341 | + | ACCUGCAGCGUGAGCAUG | 18 | 9940 |
| HSV1-UL19-5342 | + | CACCUGCAGCGUGAGCAUG | 19 | 9941 |
| HSV1-UL19-2762 | + | GCACCUGCAGCGUGAGCAUG | 20 | 2829 |
| HSV1-UL19-5343 | + | AGCACCUGCAGCGUGAGCAUG | 21 | 9942 |
| HSV1-UL19-5344 | + | CAGCACCUGCAGCGUGAGCAUG | 22 | 9943 |
| HSV1-UL19-5345 | + | CCAGCACCUGCAGCGUGAGCAUG | 23 | 9944 |
| HSV1-UL19-5346 | + | GCCAGCACCUGCAGCGUGAGCAUG | 24 | 9945 |
| HSV1-UL19-5347 | + | GAUGGUAUGGUCCAGAUG | 18 | 9946 |
| HSV1-UL19-5348 | + | GGAUGGUAUGGUCCAGAUG | 19 | 9947 |
| HSV1-UL19-2774 | + | UGGAUGGUAUGGUCCAGAUG | 20 | 2838 |
| HSV1-UL19-5349 | + | UUGGAUGGUAUGGUCCAGAUG | 21 | 9948 |
| HSV1-UL19-5350 | + | UUUGGAUGGUAUGGUCCAGAUG | 22 | 9949 |
| HSV1-UL19-5351 | + | UUUUGGAUGGUAUGGUCCAGAUG | 23 | 9950 |
| HSV1-UL19-5352 | + | AUUUUGGAUGGUAUGGUCCAGAUG | 24 | 9951 |
| HSV1-UL19-5353 | + | UCCCCGUUGCGGGCACUG | 18 | 9952 |
| HSV1-UL19-5354 | + | UUCCCCGUUGCGGGCACUG | 19 | 9953 |
| HSV1-UL19-1432 | + | CUUCCCCGUUGCGGGCACUG | 20 | 1818 |
| HSV1-UL19-5355 | + | GCUUCCCCGUUGCGGGCACUG | 21 | 9954 |
| HSV1-UL19-5356 | + | GGCUUCCCCGUUGCGGGCACUG | 22 | 9955 |
| HSV1-UL19-5357 | + | GGGCUUCCCCGUUGCGGGCACUG | 23 | 9956 |
| HSV1-UL19-5358 | + | UGGGCUUCCCCGUUGCGGGCACUG | 24 | 9957 |
| HSV1-UL19-5359 | + | CACUUUCAGGAAGGACUG | 18 | 9958 |
| HSV1-UL19-5360 | + | CCACUUUCAGGAAGGACUG | 19 | 9959 |
| HSV1-UL19-2632 | + | UCCACUUUCAGGAAGGACUG | 20 | 2742 |
| HSV1-UL19-5361 | + | CUCCACUUUCAGGAAGGACUG | 21 | 9960 |
| HSV1-UL19-5362 | + | CCUCCACUUUCAGGAAGGACUG | 22 | 9961 |
| HSV1-UL19-5363 | + | UCCUCCACUUUCAGGAAGGACUG | 23 | 9962 |
| HSV1-UL19-5364 | + | GUCCUCCACUUUCAGGAAGGACUG | 24 | 9963 |
| HSV1-UL19-5365 | + | AGUCACAAAGCGGUCCUG | 18 | 9964 |
| HSV1-UL19-5366 | + | CAGUCACAAAGCGGUCCUG | 19 | 9965 |
| HSV1-UL19-2817 | + | UCAGUCACAAAGCGGUCCUG | 20 | 2861 |
| HSV1-UL19-5367 | + | CUCAGUCACAAAGCGGUCCUG | 21 | 9966 |
| HSV1-UL19-5368 | + | UCUCAGUCACAAAGCGGUCCUG | 22 | 9967 |
| HSV1-UL19-5369 | + | UUCUCAGUCACAAAGCGGUCCUG | 23 | 9968 |
| HSV1-UL19-5370 | + | GUUCUCAGUCACAAAGCGGUCCUG | 24 | 9969 |
| HSV1-UL19-5371 | + | CCCCCAAAAAAACAGCUG | 18 | 9970 |
| HSV1-UL19-5372 | + | UCCCCCAAAAAAACAGCUG | 19 | 9971 |
| HSV1-UL19-2673 | + | UUCCCCCAAAAAAACAGCUG | 20 | 2765 |
| HSV1-UL19-5373 | + | CUUCCCCCAAAAAAACAGCUG | 21 | 9972 |
| HSV1-UL19-5374 | + | CCUUCCCCCAAAAAAACAGCUG | 22 | 9973 |
| HSV1-UL19-5375 | + | UCCUUCCCCCAAAAAAACAGCUG | 23 | 9974 |
| HSV1-UL19-5376 | + | GUCCUUCCCCCAAAAAAACAGCUG | 24 | 9975 |
| HSV1-UL19-5377 | + | GGUAUGGUCCAGAUGCUG | 18 | 9976 |
| HSV1-UL19-5378 | + | UGGUAUGGUCCAGAUGCUG | 19 | 9977 |
| HSV1-UL19-1263 | + | AUGGUAUGGUCCAGAUGCUG | 20 | 1649 |
| HSV1-UL19-5379 | + | GAUGGUAUGGUCCAGAUGCUG | 21 | 9978 |
| HSV1-UL19-5380 | + | GGAUGGUAUGGUCCAGAUGCUG | 22 | 9979 |
| HSV1-UL19-5381 | + | UGGAUGGUAUGGUCCAGAUGCUG | 23 | 9980 |
| HSV1-UL19-5382 | + | UUGGAUGGUAUGGUCCAGAUGCUG | 24 | 9981 |
| HSV1-UL19-5383 | + | GCGCACGCGCGUCGUCUG | 18 | 9982 |
| HSV1-UL19-5384 | + | CGCGCACGCGCGUCGUCUG | 19 | 9983 |
| HSV1-UL19-1036 | + | GCGCGCACGCGCGUCGUCUG | 20 | 1422 |
| HSV1-UL19-5385 | + | CGCGCGCACGCGCGUCGUCUG | 21 | 9984 |
| HSV1-UL19-5386 | + | CCGCGCGCACGCGCGUCGUCUG | 22 | 9985 |
| HSV1-UL19-5387 | + | UCCGCGCGCACGCGCGUCGUCUG | 23 | 9986 |
| HSV1-UL19-5388 | + | AUCCGCGCGCACGCGCGUCGUCUG | 24 | 9987 |
| HSV1-UL19-5389 | + | GAGGGCUGCGUGGCCGUG | 18 | 9988 |
| HSV1-UL19-5390 | + | GGAGGGCUGCGUGGCCGUG | 19 | 9989 |
| HSV1-UL19-2622 | + | CGGAGGGCUGCGUGGCCGUG | 20 | 2736 |
| HSV1-UL19-5391 | + | ACGGAGGGCUGCGUGGCCGUG | 21 | 9990 |
| HSV1-UL19-5392 | + | CACGGAGGGCUGCGUGGCCGUG | 22 | 9991 |
| HSV1-UL19-5393 | + | CCACGGAGGGCUGCGUGGCCGUG | 23 | 9992 |
| HSV1-UL19-5394 | + | GCCACGGAGGGCUGCGUGGCCGUG | 24 | 9993 |
| HSV1-UL19-5395 | + | CCCCCCGCCAGUUUCGUG | 18 | 9994 |
| HSV1-UL19-5396 | + | CCCCCCCGCCAGUUUCGUG | 19 | 9995 |
| HSV1-UL19-2824 | + | ACCCCCCCGCCAGUUUCGUG | 20 | 2866 |
| HSV1-UL19-5397 | + | UACCCCCCCGCCAGUUUCGUG | 21 | 9996 |
| HSV1-UL19-5398 | + | UUACCCCCCCGCCAGUUUCGUG | 22 | 9997 |
| HSV1-UL19-5399 | + | UUUACCCCCCCGCCAGUUUCGUG | 23 | 9998 |
| HSV1-UL19-5400 | + | GUUUACCCCCCCGCCAGUUUCGUG | 24 | 9999 |
| HSV1-UL19-5401 | + | AGGUUGCCCAUGUCGGUG | 18 | 10000 |
| HSV1-UL19-5402 | + | AAGGUUGCCCAUGUCGGUG | 19 | 10001 |
| HSV1-UL19-2830 | + | GAAGGUUGCCCAUGUCGGUG | 20 | 2871 |
| HSV1-UL19-5403 | + | GGAAGGUUGCCCAUGUCGGUG | 21 | 10002 |
| HSV1-UL19-5404 | + | GGGAAGGUUGCCCAUGUCGGUG | 22 | 10003 |
| HSV1-UL19-5405 | + | GGGGAAGGUUGCCCAUGUCGGUG | 23 | 10004 |
| HSV1-UL19-5406 | + | UGGGGAAGGUUGCCCAUGUCGGUG | 24 | 10005 |
| HSV1-UL19-5407 | + | CACCAGAUUGGCCGGGUG | 18 | 10006 |
| HSV1-UL19-5408 | + | CCACCAGAUUGGCCGGGUG | 19 | 10007 |
| HSV1-UL19-2759 | + | GCCACCAGAUUGGCCGGGUG | 20 | 2826 |
| HSV1-UL19-5409 | + | GGCCACCAGAUUGGCCGGGUG | 21 | 10008 |
| HSV1-UL19-5410 | + | UGGCCACCAGAUUGGCCGGGUG | 22 | 10009 |
| HSV1-UL19-5411 | + | UUGGCCACCAGAUUGGCCGGGUG | 23 | 10010 |
| HSV1-UL19-5412 | + | GUUGGCCACCAGAUUGGCCGGGUG | 24 | 10011 |
| HSV1-UL19-5413 | + | CGAACGGCGGCGAUGGUG | 18 | 10012 |
| HSV1-UL19-5414 | + | GCGAACGGCGGCGAUGGUG | 19 | 10013 |
| HSV1-UL19-2709 | + | CGCGAACGGCGGCGAUGGUG | 20 | 2788 |
| HSV1-UL19-5415 | + | CCGCGAACGGCGGCGAUGGUG | 21 | 10014 |
| HSV1-UL19-5416 | + | CCCGCGAACGGCGGCGAUGGUG | 22 | 10015 |
| HSV1-UL19-5417 | + | CCCCGCGAACGGCGGCGAUGGUG | 23 | 10016 |
| HSV1-UL19-5418 | + | GCCCCGCGAACGGCGGCGAUGGUG | 24 | 10017 |
| HSV1-UL19-5419 | + | UUGAUCGGGGCGGUGGUG | 18 | 10018 |
| HSV1-UL19-5420 | + | UUUGAUCGGGGCGGUGGUG | 19 | 10019 |
| HSV1-UL19-2628 | + | GUUUGAUCGGGGCGGUGGUG | 20 | 2740 |
| HSV1-UL19-5421 | + | UGUUUGAUCGGGGCGGUGGUG | 21 | 10020 |
| HSV1-UL19-5422 | + | CUGUUUGAUCGGGGCGGUGGUG | 22 | 10021 |
| HSV1-UL19-5423 | + | GCUGUUUGAUCGGGGCGGUGGUG | 23 | 10022 |
| HSV1-UL19-5424 | + | CGCUGUUUGAUCGGGGCGGUGGUG | 24 | 10023 |
| HSV1-UL19-5425 | + | AAUAUGCGCAUGUUGGUG | 18 | 10024 |
| HSV1-UL19-5426 | + | GAAUAUGCGCAUGUUGGUG | 19 | 10025 |
| HSV1-UL19-2768 | + | CGAAUAUGCGCAUGUUGGUG | 20 | 2835 |
| HSV1-UL19-5427 | + | UCGAAUAUGCGCAUGUUGGUG | 21 | 10026 |
| HSV1-UL19-5428 | + | GUCGAAUAUGCGCAUGUUGGUG | 22 | 10027 |
| HSV1-UL19-5429 | + | CGUCGAAUAUGCGCAUGUUGGUG | 23 | 10028 |
| HSV1-UL19-5430 | + | CCGUCGAAUAUGCGCAUGUUGGUG | 24 | 10029 |
| HSV1-UL19-5431 | + | AGAGCCAGGUUGGCGUUG | 18 | 10030 |
| HSV1-UL19-5432 | + | AAGAGCCAGGUUGGCGUUG | 19 | 10031 |
| HSV1-UL19-2688 | + | CAAGAGCCAGGUUGGCGUUG | 20 | 2776 |
| HSV1-UL19-5433 | + | UCAAGAGCCAGGUUGGCGUUG | 21 | 10032 |
| HSV1-UL19-5434 | + | CUCAAGAGCCAGGUUGGCGUUG | 22 | 10033 |
| HSV1-UL19-5435 | + | GCUCAAGAGCCAGGUUGGCGUUG | 23 | 10034 |
| HSV1-UL19-5436 | + | AGCUCAAGAGCCAGGUUGGCGUUG | 24 | 10035 |
| HSV1-UL19-5437 | + | GCGCGUCCCCGGGGGUUG | 18 | 10036 |
| HSV1-UL19-5438 | + | GGCGCGUCCCCGGGGGUUG | 19 | 10037 |
| HSV1-UL19-2855 | + | CGGCGCGUCCCCGGGGGUUG | 20 | 2883 |
| HSV1-UL19-5439 | + | GCGGCGCGUCCCCGGGGGUUG | 21 | 10038 |
| HSV1-UL19-5440 | + | GGCGGCGCGUCCCCGGGGGUUG | 22 | 10039 |
| HSV1-UL19-5441 | + | CGGCGGCGCGUCCCCGGGGGUUG | 23 | 10040 |
| HSV1-UL19-5442 | + | CCGGCGGCGCGUCCCCGGGGGUUG | 24 | 10041 |
| HSV1-UL19-5443 | + | GCCCAGGUAAAAGUUUUG | 18 | 10042 |
| HSV1-UL19-5444 | + | GGCCCAGGUAAAAGUUUUG | 19 | 10043 |
| HSV1-UL19-1335 | + | CGGCCCAGGUAAAAGUUUUG | 20 | 1721 |
| HSV1-UL19-5445 | + | GCGGCCCAGGUAAAAGUUUUG | 21 | 10044 |
| HSV1-UL19-5446 | + | CGCGGCCCAGGUAAAAGUUUUG | 22 | 10045 |
| HSV1-UL19-5447 | + | CCGCGGCCCAGGUAAAAGUUUUG | 23 | 10046 |
| HSV1-UL19-5448 | + | CCCGCGGCCCAGGUAAAAGUUUUG | 24 | 10047 |
| HSV1-UL19-5449 | + | CUGGCCGUGGUCGUACAU | 18 | 10048 |
| HSV1-UL19-5450 | + | UCUGGCCGUGGUCGUACAU | 19 | 10049 |
| HSV1-UL19-2859 | + | CUCUGGCCGUGGUCGUACAU | 20 | 2885 |
| HSV1-UL19-5451 | + | GCUCUGGCCGUGGUCGUACAU | 21 | 10050 |
| HSV1-UL19-5452 | + | CGCUCUGGCCGUGGUCGUACAU | 22 | 10051 |
| HSV1-UL19-5453 | + | UCGCUCUGGCCGUGGUCGUACAU | 23 | 10052 |
| HSV1-UL19-5454 | + | GUCGCUCUGGCCGUGGUCGUACAU | 24 | 10053 |
| HSV1-UL19-5455 | + | CAGGGCCGCGCGCCGCAU | 18 | 10054 |
| HSV1-UL19-5456 | + | CCAGGGCCGCGCGCCGCAU | 19 | 10055 |
| HSV1-UL19-2733 | + | UCCAGGGCCGCGCGCCGCAU | 20 | 2809 |
| HSV1-UL19-5457 | + | GUCCAGGGCCGCGCGCCGCAU | 21 | 10056 |
| HSV1-UL19-5458 | + | GGUCCAGGGCCGCGCGCCGCAU | 22 | 10057 |
| HSV1-UL19-5459 | + | CGGUCCAGGGCCGCGCGCCGCAU | 23 | 10058 |
| HSV1-UL19-5460 | + | GCGGUCCAGGGCCGCGCGCCGCAU | 24 | 10059 |
| HSV1-UL19-5461 | + | CAGGAGGCGCUGUUUGAU | 18 | 10060 |
| HSV1-UL19-5462 | + | GCAGGAGGCGCUGUUUGAU | 19 | 10061 |
| HSV1-UL19-1017 | + | UGCAGGAGGCGCUGUUUGAU | 20 | 1403 |
| HSV1-UL19-5463 | + | CUGCAGGAGGCGCUGUUUGAU | 21 | 10062 |
| HSV1-UL19-5464 | + | ACUGCAGGAGGCGCUGUUUGAU | 22 | 10063 |
| HSV1-UL19-5465 | + | GACUGCAGGAGGCGCUGUUUGAU | 23 | 10064 |
| HSV1-UL19-5466 | + | GGACUGCAGGAGGCGCUGUUUGAU | 24 | 10065 |
| HSV1-UL19-5467 | + | UUCCCCGUUGCGGGCACU | 18 | 10066 |
| HSV1-UL19-5468 | + | CUUCCCCGUUGCGGGCACU | 19 | 10067 |
| HSV1-UL19-2891 | + | GCUUCCCCGUUGCGGGCACU | 20 | 2909 |
| HSV1-UL19-5469 | + | GGCUUCCCCGUUGCGGGCACU | 21 | 10068 |
| HSV1-UL19-5470 | + | GGGCUUCCCCGUUGCGGGCACU | 22 | 10069 |
| HSV1-UL19-5471 | + | UGGGCUUCCCCGUUGCGGGCACU | 23 | 10070 |
| HSV1-UL19-5472 | + | GUGGGCUUCCCCGUUGCGGGCACU | 24 | 10071 |
| HSV1-UL19-5473 | + | ACACGGCCAUGCACUCCU | 18 | 10072 |
| HSV1-UL19-5474 | + | UACACGGCCAUGCACUCCU | 19 | 10073 |
| HSV1-UL19-1167 | + | GUACACGGCCAUGCACUCCU | 20 | 1553 |
| HSV1-UL19-5475 | + | GGUACACGGCCAUGCACUCCU | 21 | 10074 |
| HSV1-UL19-5476 | + | CGGUACACGGCCAUGCACUCCU | 22 | 10075 |
| HSV1-UL19-5477 | + | CCGGUACACGGCCAUGCACUCCU | 23 | 10076 |
| HSV1-UL19-5478 | + | CCCGGUACACGGCCAUGCACUCCU | 24 | 10077 |
| HSV1-UL19-5479 | + | GCGCCUGCCCGCCCAGCU | 18 | 10078 |
| HSV1-UL19-5480 | + | UGCGCCUGCCCGCCCAGCU | 19 | 10079 |
| HSV1-UL19-2728 | + | UUGCGCCUGCCCGCCCAGCU | 20 | 2805 |
| HSV1-UL19-5481 | + | CUUGCGCCUGCCCGCCCAGCU | 21 | 10080 |
| HSV1-UL19-5482 | + | GCUUGCGCCUGCCCGCCCAGCU | 22 | 10081 |
| HSV1-UL19-5483 | + | GGCUUGCGCCUGCCCGCCCAGCU | 23 | 10082 |
| HSV1-UL19-5484 | + | CGGCUUGCGCCUGCCCGCCCAGCU | 24 | 10083 |
| HSV1-UL19-5485 | + | ACGCCUCCGACGCGCGCU | 18 | 10084 |
| HSV1-UL19-5486 | + | UACGCCUCCGACGCGCGCU | 19 | 10085 |
| HSV1-UL19-2819 | + | GUACGCCUCCGACGCGCGCU | 20 | 2863 |
| HSV1-UL19-5487 | + | AGUACGCCUCCGACGCGCGCU | 21 | 10086 |
| HSV1-UL19-5488 | + | AAGUACGCCUCCGACGCGCGCU | 22 | 10087 |
| HSV1-UL19-5489 | + | GAAGUACGCCUCCGACGCGCGCU | 23 | 10088 |
| HSV1-UL19-5490 | + | GGAAGUACGCCUCCGACGCGCGCU | 24 | 10089 |
| HSV1-UL19-5491 | + | UGGUAUGGUCCAGAUGCU | 18 | 10090 |
| HSV1-UL19-5492 | + | AUGGUAUGGUCCAGAUGCU | 19 | 10091 |
| HSV1-UL19-1264 | + | GAUGGUAUGGUCCAGAUGCU | 20 | 1650 |
| HSV1-UL19-5493 | + | GGAUGGUAUGGUCCAGAUGCU | 21 | 10092 |
| HSV1-UL19-5494 | + | UGGAUGGUAUGGUCCAGAUGCU | 22 | 10093 |
| HSV1-UL19-5495 | + | UUGGAUGGUAUGGUCCAGAUGCU | 23 | 10094 |
| HSV1-UL19-5496 | + | UUUGGAUGGUAUGGUCCAGAUGCU | 24 | 10095 |
| HSV1-UL19-5497 | + | CGGGCUGCAUAAACUGCU | 18 | 10096 |
| HSV1-UL19-5498 | + | UCGGGCUGCAUAAACUGCU | 19 | 10097 |
| HSV1-UL19-2687 | + | GUCGGGCUGCAUAAACUGCU | 20 | 2775 |
| HSV1-UL19-5499 | + | UGUCGGGCUGCAUAAACUGCU | 21 | 10098 |
| HSV1-UL19-5500 | + | UUGUCGGGCUGCAUAAACUGCU | 22 | 10099 |
| HSV1-UL19-5501 | + | GUUGUCGGGCUGCAUAAACUGCU | 23 | 10100 |
| HSV1-UL19-5502 | + | CGUUGUCGGGCUGCAUAAACUGCU | 24 | 10101 |
| HSV1-UL19-5503 | + | CCUCGCCGGGGGCGAUCU | 18 | 10102 |
| HSV1-UL19-5504 | + | UCCUCGCCGGGGGCGAUCU | 19 | 10103 |
| HSV1-UL19-2747 | + | CUCCUCGCCGGGGGCGAUCU | 20 | 2821 |
| HSV1-UL19-5505 | + | ACUCCUCGCCGGGGGCGAUCU | 21 | 10104 |
| HSV1-UL19-5506 | + | CACUCCUCGCCGGGGGCGAUCU | 22 | 10105 |
| HSV1-UL19-5507 | + | GCACUCCUCGCCGGGGGCGAUCU | 23 | 10106 |
| HSV1-UL19-5508 | + | GGCACUCCUCGCCGGGGGCGAUCU | 24 | 10107 |
| HSV1-UL19-5509 | + | CGCGCACGCGCGUCGUCU | 18 | 10108 |
| HSV1-UL19-5510 | + | GCGCGCACGCGCGUCGUCU | 19 | 10109 |
| HSV1-UL19-1037 | + | CGCGCGCACGCGCGUCGUCU | 20 | 1423 |
| HSV1-UL19-5511 | + | CCGCGCGCACGCGCGUCGUCU | 21 | 10110 |
| HSV1-UL19-5512 | + | UCCGCGCGCACGCGCGUCGUCU | 22 | 10111 |
| HSV1-UL19-5513 | + | AUCCGCGCGCACGCGCGUCGUCU | 23 | 10112 |
| HSV1-UL19-5514 | + | GAUCCGCGCGCACGCGCGUCGUCU | 24 | 10113 |
| HSV1-UL19-5515 | + | CGAGGUAGGUCACGACGU | 18 | 10114 |
| HSV1-UL19-5516 | + | CCGAGGUAGGUCACGACGU | 19 | 10115 |
| HSV1-UL19-2720 | + | CCCGAGGUAGGUCACGACGU | 20 | 2799 |
| HSV1-UL19-5517 | + | CCCCGAGGUAGGUCACGACGU | 21 | 10116 |
| HSV1-UL19-5518 | + | CCCCCGAGGUAGGUCACGACGU | 22 | 10117 |
| HSV1-UL19-5519 | + | UCCCCCGAGGUAGGUCACGACGU | 23 | 10118 |
| HSV1-UL19-5520 | + | CUCCCCCGAGGUAGGUCACGACGU | 24 | 10119 |
| HSV1-UL19-5521 | + | UAUAGAGCAGGUCCCCGU | 18 | 10120 |
| HSV1-UL19-5522 | + | UUAUAGAGCAGGUCCCCGU | 19 | 10121 |
| HSV1-UL19-2866 | + | GUUAUAGAGCAGGUCCCCGU | 20 | 2891 |
| HSV1-UL19-5523 | + | CGUUAUAGAGCAGGUCCCCGU | 21 | 10122 |
| HSV1-UL19-5524 | + | CCGUUAUAGAGCAGGUCCCCGU | 22 | 10123 |
| HSV1-UL19-5525 | + | CCCGUUAUAGAGCAGGUCCCCGU | 23 | 10124 |
| HSV1-UL19-5526 | + | CCCCGUUAUAGAGCAGGUCCCCGU | 24 | 10125 |
| HSV1-UL19-5527 | + | CGCGCGCACGCGCGUCGU | 18 | 10126 |
| HSV1-UL19-5528 | + | CCGCGCGCACGCGCGUCGU | 19 | 10127 |
| HSV1-UL19-2643 | + | UCCGCGCGCACGCGCGUCGU | 20 | 2749 |
| HSV1-UL19-5529 | + | AUCCGCGCGCACGCGCGUCGU | 21 | 10128 |
| HSV1-UL19-5530 | + | GAUCCGCGCGCACGCGCGUCGU | 22 | 10129 |
| HSV1-UL19-5531 | + | AGAUCCGCGCGCACGCGCGUCGU | 23 | 10130 |
| HSV1-UL19-5532 | + | CAGAUCCGCGCGCACGCGCGUCGU | 24 | 10131 |
| HSV1-UL19-5533 | + | UGGCGCCCACCAGGGGGU | 18 | 10132 |
| HSV1-UL19-5534 | + | AUGGCGCCCACCAGGGGGU | 19 | 10133 |
| HSV1-UL19-1046 | + | CAUGGCGCCCACCAGGGGGU | 20 | 1432 |
| HSV1-UL19-5535 | + | CCAUGGCGCCCACCAGGGGGU | 21 | 10134 |
| HSV1-UL19-5536 | + | UCCAUGGCGCCCACCAGGGGGU | 22 | 10135 |
| HSV1-UL19-5537 | + | GUCCAUGGCGCCCACCAGGGGGU | 23 | 10136 |
| HSV1-UL19-5538 | + | GGUCCAUGGCGCCCACCAGGGGGU | 24 | 10137 |
| HSV1-UL19-5539 | + | GCGGCCCAGGUAAAAGUU | 18 | 10138 |
| HSV1-UL19-5540 | + | CGCGGCCCAGGUAAAAGUU | 19 | 10139 |
| HSV1-UL19-2834 | + | CCGCGGCCCAGGUAAAAGUU | 20 | 2872 |
| HSV1-UL19-5541 | + | CCCGCGGCCCAGGUAAAAGUU | 21 | 10140 |
| HSV1-UL19-5542 | + | CCCCGCGGCCCAGGUAAAAGUU | 22 | 10141 |
| HSV1-UL19-5543 | + | GCCCCGCGGCCCAGGUAAAAGUU | 23 | 10142 |
| HSV1-UL19-5544 | + | AGCCCCGCGGCCCAGGUAAAAGUU | 24 | 10143 |
| HSV1-UL19-3515 | + | GAGGACGGCCUGGACGUU | 18 | 8114 |
| HSV1-UL19-3516 | + | CGAGGACGGCCUGGACGUU | 19 | 8115 |
| HSV1-UL19-3517 | + | CCGAGGACGGCCUGGACGUU | 20 | 8116 |
| HSV1-UL19-3518 | + | CCCGAGGACGGCCUGGACGUU | 21 | 8117 |
| HSV1-UL19-3519 | + | CCCCGAGGACGGCCUGGACGUU | 22 | 8118 |
| HSV1-UL19-3520 | + | GCCCCGAGGACGGCCUGGACGUU | 23 | 8119 |
| HSV1-UL19-3521 | + | CGCCCCGAGGACGGCCUGGACGUU | 24 | 8120 |
| HSV1-UL19-5545 | + | GACCAGGUUGGCCCCGUU | 18 | 10144 |
| HSV1-UL19-5546 | + | UGACCAGGUUGGCCCCGUU | 19 | 10145 |
| HSV1-UL19-2636 | + | GUGACCAGGUUGGCCCCGUU | 20 | 2745 |
| HSV1-UL19-5547 | + | CGUGACCAGGUUGGCCCCGUU | 21 | 10146 |
| HSV1-UL19-5548 | + | CCGUGACCAGGUUGGCCCCGUU | 22 | 10147 |
| HSV1-UL19-5549 | + | GCCGUGACCAGGUUGGCCCCGUU | 23 | 10148 |
| HSV1-UL19-5550 | + | CGCCGUGACCAGGUUGGCCCCGUU | 24 | 10149 |
| HSV1-UL19-5551 | + | CGCGUGGGCUUCCCCGUU | 18 | 10150 |
| HSV1-UL19-5552 | + | GCGCGUGGGCUUCCCCGUU | 19 | 10151 |
| HSV1-UL19-2892 | + | CGCGCGUGGGCUUCCCCGUU | 20 | 2910 |
| HSV1-UL19-5553 | + | CCGCGCGUGGGCUUCCCCGUU | 21 | 10152 |
| HSV1-UL19-5554 | + | CCCGCGCGUGGGCUUCCCCGUU | 22 | 10153 |
| HSV1-UL19-5555 | + | UCCCGCGCGUGGGCUUCCCCGUU | 23 | 10154 |
| HSV1-UL19-5556 | + | CUCCCGCGCGUGGGCUUCCCCGUU | 24 | 10155 |
| HSV1-UL19-5557 | + | CACUACCACGCGCCCGUU | 18 | 10156 |
| HSV1-UL19-5558 | + | CCACUACCACGCGCCCGUU | 19 | 10157 |
| HSV1-UL19-2761 | + | UCCACUACCACGCGCCCGUU | 20 | 2828 |
| HSV1-UL19-5559 | + | GUCCACUACCACGCGCCCGUU | 21 | 10158 |
| HSV1-UL19-5560 | + | CGUCCACUACCACGCGCCCGUU | 22 | 10159 |
| HSV1-UL19-5561 | + | CCGUCCACUACCACGCGCCCGUU | 23 | 10160 |
| HSV1-UL19-5562 | + | CCCGUCCACUACCACGCGCCCGUU | 24 | 10161 |
| HSV1-UL19-5563 | + | CAUGUCGGUGACGGGGUU | 18 | 10162 |
| HSV1-UL19-5564 | + | CCAUGUCGGUGACGGGGUU | 19 | 10163 |
| HSV1-UL19-2828 | + | CCCAUGUCGGUGACGGGGUU | 20 | 2870 |
| HSV1-UL19-5565 | + | GCCCAUGUCGGUGACGGGGUU | 21 | 10164 |
| HSV1-UL19-5566 | + | UGCCCAUGUCGGUGACGGGGUU | 22 | 10165 |
| HSV1-UL19-5567 | + | UUGCCCAUGUCGGUGACGGGGUU | 23 | 10166 |
| HSV1-UL19-5568 | + | GUUGCCCAUGUCGGUGACGGGGUU | 24 | 10167 |
| HSV1-UL19-5569 | + | UGUGCGUUCGGCCAUGUU | 18 | 10168 |
| HSV1-UL19-5570 | + | UUGUGCGUUCGGCCAUGUU | 19 | 10169 |
| HSV1-UL19-2764 | + | GUUGUGCGUUCGGCCAUGUU | 20 | 2831 |
| HSV1-UL19-5571 | + | CGUUGUGCGUUCGGCCAUGUU | 21 | 10170 |
| HSV1-UL19-5572 | + | CCGUUGUGCGUUCGGCCAUGUU | 22 | 10171 |
| HSV1-UL19-5573 | + | GCCGUUGUGCGUUCGGCCAUGUU | 23 | 10172 |
| HSV1-UL19-5574 | + | CGCCGUUGUGCGUUCGGCCAUGUU | 24 | 10173 |
| HSV1-UL19-5575 | + | UUCGGUGUCCUCCACUUU | 18 | 10174 |
| HSV1-UL19-5576 | + | CUUCGGUGUCCUCCACUUU | 19 | 10175 |
| HSV1-UL19-2635 | + | GCUUCGGUGUCCUCCACUUU | 20 | 2744 |
| HSV1-UL19-5577 | + | GGCUUCGGUGUCCUCCACUUU | 21 | 10176 |
| HSV1-UL19-5578 | + | CGGCUUCGGUGUCCUCCACUUU | 22 | 10177 |
| HSV1-UL19-5579 | + | UCGGCUUCGGUGUCCUCCACUUU | 23 | 10178 |
| HSV1-UL19-5580 | + | GUCGGCUUCGGUGUCCUCCACUUU | 24 | 10179 |
| HSV1-UL19-5581 | + | CGGCCCAGGUAAAAGUUU | 18 | 10180 |
| HSV1-UL19-5582 | + | GCGGCCCAGGUAAAAGUUU | 19 | 10181 |
| HSV1-UL19-1337 | + | CGCGGCCCAGGUAAAAGUUU | 20 | 1723 |
| HSV1-UL19-5583 | + | CCGCGGCCCAGGUAAAAGUUU | 21 | 10182 |
| HSV1-UL19-5584 | + | CCCGCGGCCCAGGUAAAAGUUU | 22 | 10183 |
| HSV1-UL19-5585 | + | CCCCGCGGCCCAGGUAAAAGUUU | 23 | 10184 |
| HSV1-UL19-5586 | + | GCCCCGCGGCCCAGGUAAAAGUUU | 24 | 10185 |
| HSV1-UL19-5587 | + | GGCCCAGGUAAAAGUUUU | 18 | 10186 |
| HSV1-UL19-5588 | + | CGGCCCAGGUAAAAGUUUU | 19 | 10187 |
| HSV1-UL19-1336 | + | GCGGCCCAGGUAAAAGUUUU | 20 | 1722 |
| HSV1-UL19-5589 | + | CGCGGCCCAGGUAAAAGUUUU | 21 | 10188 |
| HSV1-UL19-5590 | + | CCGCGGCCCAGGUAAAAGUUUU | 22 | 10189 |
| HSV1-UL19-5591 | + | CCCGCGGCCCAGGUAAAAGUUUU | 23 | 10190 |
| HSV1-UL19-5592 | + | CCCCGCGGCCCAGGUAAAAGUUUU | 24 | 10191 |
| HSV1-UL19-5593 | − | CUGCAGUCCUUCCUGAAA | 18 | 10192 |
| HSV1-UL19-5594 | − | CCUGCAGUCCUUCCUGAAA | 19 | 10193 |
| HSV1-UL19-2061 | − | UCCUGCAGUCCUUCCUGAAA | 20 | 2402 |
| HSV1-UL19-5595 | − | CUCCUGCAGUCCUUCCUGAAA | 21 | 10194 |
| HSV1-UL19-5596 | − | CCUCCUGCAGUCCUUCCUGAAA | 22 | 10195 |
| HSV1-UL19-5597 | − | GCCUCCUGCAGUCCUUCCUGAAA | 23 | 10196 |
| HSV1-UL19-5598 | − | CGCCUCCUGCAGUCCUUCCUGAAA | 24 | 10197 |
| HSV1-UL19-5599 | − | CCUGGUCGCCGAGCUAAA | 18 | 10198 |
| HSV1-UL19-5600 | − | CCCUGGUCGCCGAGCUAAA | 19 | 10199 |
| HSV1-UL19-2047 | − | ACCCUGGUCGCCGAGCUAAA | 20 | 2391 |
| HSV1-UL19-5601 | − | GACCCUGGUCGCCGAGCUAAA | 21 | 10200 |
| HSV1-UL19-5602 | − | CGACCCUGGUCGCCGAGCUAAA | 22 | 10201 |
| HSV1-UL19-5603 | − | GCGACCCUGGUCGCCGAGCUAAA | 23 | 10202 |
| HSV1-UL19-5604 | − | GGCGACCCUGGUCGCCGAGCUAAA | 24 | 10203 |
| HSV1-UL19-5605 | − | CCUCCGCAGUGCCCGCAA | 18 | 10204 |
| HSV1-UL19-5606 | − | UCCUCCGCAGUGCCCGCAA | 19 | 10205 |
| HSV1-UL19-574 | − | CUCCUCCGCAGUGCCCGCAA | 20 | 960 |
| HSV1-UL19-5607 | − | CCUCCUCCGCAGUGCCCGCAA | 21 | 10206 |
| HSV1-UL19-5608 | − | CCCUCCUCCGCAGUGCCCGCAA | 22 | 10207 |
| HSV1-UL19-5609 | − | GCCCUCCUCCGCAGUGCCCGCAA | 23 | 10208 |
| HSV1-UL19-5610 | − | CGCCCUCCUCCGCAGUGCCCGCAA | 24 | 10209 |
| HSV1-UL19-5611 | − | CGGGGCCUACCACCUCAA | 18 | 10210 |
| HSV1-UL19-5612 | − | ACGGGGCCUACCACCUCAA | 19 | 10211 |
| HSV1-UL19-554 | − | AACGGGGCCUACCACCUCAA | 20 | 940 |
| HSV1-UL19-5613 | − | UAACGGGGCCUACCACCUCAA | 21 | 10212 |
| HSV1-UL19-5614 | − | AUAACGGGGCCUACCACCUCAA | 22 | 10213 |
| HSV1-UL19-5615 | − | UAUAACGGGGCCUACCACCUCAA | 23 | 10214 |
| HSV1-UL19-5616 | − | CUAUAACGGGGCCUACCACCUCAA | 24 | 10215 |
| HSV1-UL19-5617 | − | CGGCGAGAUGGUCCUGAA | 18 | 10216 |
| HSV1-UL19-5618 | − | ACGGCGAGAUGGUCCUGAA | 19 | 10217 |
| HSV1-UL19-231 | − | UACGGCGAGAUGGUCCUGAA | 20 | 617 |
| HSV1-UL19-5619 | − | GUACGGCGAGAUGGUCCUGAA | 21 | 10218 |
| HSV1-UL19-5620 | − | CGUACGGCGAGAUGGUCCUGAA | 22 | 10219 |
| HSV1-UL19-5621 | − | ACGUACGGCGAGAUGGUCCUGAA | 23 | 10220 |
| HSV1-UL19-5622 | − | GACGUACGGCGAGAUGGUCCUGAA | 24 | 10221 |
| HSV1-UL19-5623 | − | CGGGGACCUGCUCUAUAA | 18 | 10222 |
| HSV1-UL19-5624 | − | ACGGGGACCUGCUCUAUAA | 19 | 10223 |
| HSV1-UL19-551 | − | UACGGGGACCUGCUCUAUAA | 20 | 937 |
| HSV1-UL19-5625 | − | GUACGGGGACCUGCUCUAUAA | 21 | 10224 |
| HSV1-UL19-5626 | − | CGUACGGGGACCUGCUCUAUAA | 22 | 10225 |
| HSV1-UL19-5627 | − | UCGUACGGGGACCUGCUCUAUAA | 23 | 10226 |
| HSV1-UL19-5628 | − | UUCGUACGGGGACCUGCUCUAUAA | 24 | 10227 |
| HSV1-UL19-5629 | − | UCAACGCCAUGUUUCACA | 18 | 10228 |
| HSV1-UL19-5630 | − | GUCAACGCCAUGUUUCACA | 19 | 10229 |
| HSV1-UL19-2213 | − | GGUCAACGCCAUGUUUCACA | 20 | 2491 |
| HSV1-UL19-5631 | − | CGGUCAACGCCAUGUUUCACA | 21 | 10230 |
| HSV1-UL19-5632 | − | ACGGUCAACGCCAUGUUUCACA | 22 | 10231 |
| HSV1-UL19-5633 | − | CACGGUCAACGCCAUGUUUCACA | 23 | 10232 |
| HSV1-UL19-5634 | − | ACACGGUCAACGCCAUGUUUCACA | 24 | 10233 |
| HSV1-UL19-5635 | − | UCCUGAAAGUGGAGGACA | 18 | 10234 |
| HSV1-UL19-5636 | − | UUCCUGAAAGUGGAGGACA | 19 | 10235 |
| HSV1-UL19-2064 | − | CUUCCUGAAAGUGGAGGACA | 20 | 2404 |
| HSV1-UL19-5637 | − | CCUUCCUGAAAGUGGAGGACA | 21 | 10236 |
| HSV1-UL19-5638 | − | UCCUUCCUGAAAGUGGAGGACA | 22 | 10237 |
| HSV1-UL19-5639 | − | GUCCUUCCUGAAAGUGGAGGACA | 23 | 10238 |
| HSV1-UL19-5640 | − | AGUCCUUCCUGAAAGUGGAGGACA | 24 | 10239 |
| HSV1-UL19-5641 | − | GCGUUUACGCGGGGGACA | 18 | 10240 |
| HSV1-UL19-5642 | − | GGCGUUUACGCGGGGGACA | 19 | 10241 |
| HSV1-UL19-536 | − | GGGCGUUUACGCGGGGGACA | 20 | 922 |
| HSV1-UL19-5643 | − | GGGGCGUUUACGCGGGGGACA | 21 | 10242 |
| HSV1-UL19-5644 | − | GGGGGCGUUUACGCGGGGGACA | 22 | 10243 |
| HSV1-UL19-5645 | − | CGGGGGCGUUUACGCGGGGGACA | 23 | 10244 |
| HSV1-UL19-5646 | − | CCGGGGGCGUUUACGCGGGGGACA | 24 | 10245 |
| HSV1-UL19-5647 | − | UCCUCCGCAGUGCCCGCA | 18 | 10246 |
| HSV1-UL19-5648 | − | CUCCUCCGCAGUGCCCGCA | 19 | 10247 |
| HSV1-UL19-2316 | − | CCUCCUCCGCAGUGCCCGCA | 20 | 2553 |
| HSV1-UL19-5649 | − | CCCUCCUCCGCAGUGCCCGCA | 21 | 10248 |
| HSV1-UL19-5650 | − | GCCCUCCUCCGCAGUGCCCGCA | 22 | 10249 |
| HSV1-UL19-5651 | − | CGCCCUCCUCCGCAGUGCCCGCA | 23 | 10250 |
| HSV1-UL19-5652 | − | CCGCCCUCCUCCGCAGUGCCCGCA | 24 | 10251 |
| HSV1-UL19-5653 | − | CGCGGAUGACCGGCCGCA | 18 | 10252 |
| HSV1-UL19-5654 | − | CCGCGGAUGACCGGCCGCA | 19 | 10253 |
| HSV1-UL19-2195 | − | GCCGCGGAUGACCGGCCGCA | 20 | 2481 |
| HSV1-UL19-5655 | − | CGCCGCGGAUGACCGGCCGCA | 21 | 10254 |
| HSV1-UL19-5656 | − | ACGCCGCGGAUGACCGGCCGCA | 22 | 10255 |
| HSV1-UL19-5657 | − | GACGCCGCGGAUGACCGGCCGCA | 23 | 10256 |
| HSV1-UL19-5658 | − | GGACGCCGCGGAUGACCGGCCGCA | 24 | 10257 |
| HSV1-UL19-5659 | − | AGGCCGCCAUACACGGCA | 18 | 10258 |
| HSV1-UL19-5660 | − | CAGGCCGCCAUACACGGCA | 19 | 10259 |
| HSV1-UL19-2161 | − | GCAGGCCGCCAUACACGGCA | 20 | 2459 |
| HSV1-UL19-5661 | − | UGCAGGCCGCCAUACACGGCA | 21 | 10260 |
| HSV1-UL19-5662 | − | CUGCAGGCCGCCAUACACGGCA | 22 | 10261 |
| HSV1-UL19-5663 | − | GCUGCAGGCCGCCAUACACGGCA | 23 | 10262 |
| HSV1-UL19-5664 | − | UGCUGCAGGCCGCCAUACACGGCA | 24 | 10263 |
| HSV1-UL19-5665 | − | ACGGGGCCUACCACCUCA | 18 | 10264 |
| HSV1-UL19-5666 | − | AACGGGGCCUACCACCUCA | 19 | 10265 |
| HSV1-UL19-2301 | − | UAACGGGGCCUACCACCUCA | 20 | 2544 |
| HSV1-UL19-5667 | − | AUAACGGGGCCUACCACCUCA | 21 | 10266 |
| HSV1-UL19-5668 | − | UAUAACGGGGCCUACCACCUCA | 22 | 10267 |
| HSV1-UL19-5669 | − | CUAUAACGGGGCCUACCACCUCA | 23 | 10268 |
| HSV1-UL19-5670 | − | UCUAUAACGGGGCCUACCACCUCA | 24 | 10269 |
| HSV1-UL19-5671 | − | AUGACGCAUCCCCGCUCA | 18 | 10270 |
| HSV1-UL19-5672 | − | UAUGACGCAUCCCCGCUCA | 19 | 10271 |
| HSV1-UL19-579 | − | CUAUGACGCAUCCCCGCUCA | 20 | 965 |
| HSV1-UL19-5673 | − | UCUAUGACGCAUCCCCGCUCA | 21 | 10272 |
| HSV1-UL19-5674 | − | GUCUAUGACGCAUCCCCGCUCA | 22 | 10273 |
| HSV1-UL19-5675 | − | CGUCUAUGACGCAUCCCCGCUCA | 23 | 10274 |
| HSV1-UL19-5676 | − | UCGUCUAUGACGCAUCCCCGCUCA | 24 | 10275 |
| HSV1-UL19-5677 | − | GCCUGUUCAAUCCGGUCA | 18 | 10276 |
| HSV1-UL19-5678 | − | GGCCUGUUCAAUCCGGUCA | 19 | 10277 |
| HSV1-UL19-261 | − | GGGCCUGUUCAAUCCGGUCA | 20 | 647 |
| HSV1-UL19-5679 | − | UGGGCCUGUUCAAUCCGGUCA | 21 | 10278 |
| HSV1-UL19-5680 | − | CUGGGCCUGUUCAAUCCGGUCA | 22 | 10279 |
| HSV1-UL19-5681 | − | CCUGGGCCUGUUCAAUCCGGUCA | 23 | 10280 |
| HSV1-UL19-5682 | − | CCCUGGGCCUGUUCAAUCCGGUCA | 24 | 10281 |
| HSV1-UL19-5683 | − | GGGUUCACCGUCGUCCGA | 18 | 10282 |
| HSV1-UL19-5684 | − | UGGGUUCACCGUCGUCCGA | 19 | 10283 |
| HSV1-UL19-2241 | − | UUGGGUUCACCGUCGUCCGA | 20 | 2510 |
| HSV1-UL19-5685 | − | UUUGGGUUCACCGUCGUCCGA | 21 | 10284 |
| HSV1-UL19-5686 | − | GUUUGGGUUCACCGUCGUCCGA | 22 | 10285 |
| HSV1-UL19-5687 | − | GGUUUGGGUUCACCGUCGUCCGA | 23 | 10286 |
| HSV1-UL19-5688 | − | GGGUUUGGGUUCACCGUCGUCCGA | 24 | 10287 |
| HSV1-UL19-5689 | − | UGUCUCUGGAACACGCGA | 18 | 10288 |
| HSV1-UL19-5690 | − | CUGUCUCUGGAACACGCGA | 19 | 10289 |
| HSV1-UL19-2109 | − | CCUGUCUCUGGAACACGCGA | 20 | 2435 |
| HSV1-UL19-5691 | − | GCCUGUCUCUGGAACACGCGA | 21 | 10290 |
| HSV1-UL19-5692 | − | CGCCUGUCUCUGGAACACGCGA | 22 | 10291 |
| HSV1-UL19-5693 | − | GCGCCUGUCUCUGGAACACGCGA | 23 | 10292 |
| HSV1-UL19-5694 | − | UGCGCCUGUCUCUGGAACACGCGA | 24 | 10293 |
| HSV1-UL19-5695 | − | CAACAUGCGCAUAUUCGA | 18 | 10294 |
| HSV1-UL19-5696 | − | CCAACAUGCGCAUAUUCGA | 19 | 10295 |
| HSV1-UL19-439 | − | ACCAACAUGCGCAUAUUCGA | 20 | 825 |
| HSV1-UL19-5697 | − | CACCAACAUGCGCAUAUUCGA | 21 | 10296 |
| HSV1-UL19-5698 | − | CCACCAACAUGCGCAUAUUCGA | 22 | 10297 |
| HSV1-UL19-5699 | − | ACCACCAACAUGCGCAUAUUCGA | 23 | 10298 |
| HSV1-UL19-5700 | − | CACCACCAACAUGCGCAUAUUCGA | 24 | 10299 |
| HSV1-UL19-5701 | − | UUACGCGGGGGACAAGGA | 18 | 10300 |
| HSV1-UL19-5702 | − | UUUACGCGGGGGACAAGGA | 19 | 10301 |
| HSV1-UL19-538 | − | GUUUACGCGGGGGACAAGGA | 20 | 924 |
| HSV1-UL19-5703 | − | CGUUUACGCGGGGGACAAGGA | 21 | 10302 |
| HSV1-UL19-5704 | − | GCGUUUACGCGGGGGACAAGGA | 22 | 10303 |
| HSV1-UL19-5705 | − | GGCGUUUACGCGGGGGACAAGGA | 23 | 10304 |
| HSV1-UL19-5706 | − | GGGCGUUUACGCGGGGGACAAGGA | 24 | 10305 |
| HSV1-UL19-5707 | − | GCCGCACCGGGGGGCGGA | 18 | 10306 |
| HSV1-UL19-5708 | − | GGCCGCACCGGGGGGCGGA | 19 | 10307 |
| HSV1-UL19-2200 | − | CGGCCGCACCGGGGGGCGGA | 20 | 2483 |
| HSV1-UL19-5709 | − | CCGGCCGCACCGGGGGGCGGA | 21 | 10308 |
| HSV1-UL19-5710 | − | ACCGGCCGCACCGGGGGGCGGA | 22 | 10309 |
| HSV1-UL19-5711 | − | GACCGGCCGCACCGGGGGGCGGA | 23 | 10310 |
| HSV1-UL19-5712 | − | UGACCGGCCGCACCGGGGGGCGGA | 24 | 10311 |
| HSV1-UL19-5713 | − | ACGGCGAGAUGGUCCUGA | 18 | 10312 |
| HSV1-UL19-5714 | − | UACGGCGAGAUGGUCCUGA | 19 | 10313 |
| HSV1-UL19-2067 | − | GUACGGCGAGAUGGUCCUGA | 20 | 2407 |
| HSV1-UL19-5715 | − | CGUACGGCGAGAUGGUCCUGA | 21 | 10314 |
| HSV1-UL19-5716 | − | ACGUACGGCGAGAUGGUCCUGA | 22 | 10315 |
| HSV1-UL19-5717 | − | GACGUACGGCGAGAUGGUCCUGA | 23 | 10316 |
| HSV1-UL19-5718 | − | UGACGUACGGCGAGAUGGUCCUGA | 24 | 10317 |
| HSV1-UL19-5719 | − | GACAGGACCGCUUUGUGA | 18 | 10318 |
| HSV1-UL19-5720 | − | CGACAGGACCGCUUUGUGA | 19 | 10319 |
| HSV1-UL19-2242 | − | CCGACAGGACCGCUUUGUGA | 20 | 2511 |
| HSV1-UL19-5721 | − | UCCGACAGGACCGCUUUGUGA | 21 | 10320 |
| HSV1-UL19-5722 | − | GUCCGACAGGACCGCUUUGUGA | 22 | 10321 |
| HSV1-UL19-5723 | − | CGUCCGACAGGACCGCUUUGUGA | 23 | 10322 |
| HSV1-UL19-5724 | − | UCGUCCGACAGGACCGCUUUGUGA | 24 | 10323 |
| HSV1-UL19-5725 | − | ACGGGGACCUGCUCUAUA | 18 | 10324 |
| HSV1-UL19-5726 | − | UACGGGGACCUGCUCUAUA | 19 | 10325 |
| HSV1-UL19-2299 | − | GUACGGGGACCUGCUCUAUA | 20 | 2543 |
| HSV1-UL19-5727 | − | CGUACGGGGACCUGCUCUAUA | 21 | 10326 |
| HSV1-UL19-5728 | − | UCGUACGGGGACCUGCUCUAUA | 22 | 10327 |
| HSV1-UL19-5729 | − | UUCGUACGGGGACCUGCUCUAUA | 23 | 10328 |
| HSV1-UL19-5730 | − | UUUCGUACGGGGACCUGCUCUAUA | 24 | 10329 |
| HSV1-UL19-5731 | − | CCAGUGCAUCACCAGCUA | 18 | 10330 |
| HSV1-UL19-5732 | − | UCCAGUGCAUCACCAGCUA | 19 | 10331 |
| HSV1-UL19-2162 | − | GUCCAGUGCAUCACCAGCUA | 20 | 2460 |
| HSV1-UL19-5733 | − | GGUCCAGUGCAUCACCAGCUA | 21 | 10332 |
| HSV1-UL19-5734 | − | UGGUCCAGUGCAUCACCAGCUA | 22 | 10333 |
| HSV1-UL19-5735 | − | GUGGUCCAGUGCAUCACCAGCUA | 23 | 10334 |
| HSV1-UL19-5736 | − | CGUGGUCCAGUGCAUCACCAGCUA | 24 | 10335 |
| HSV1-UL19-5737 | − | CGAAGCCGCCAAUCCGUA | 18 | 10336 |
| HSV1-UL19-5738 | − | UCGAAGCCGCCAAUCCGUA | 19 | 10337 |
| HSV1-UL19-283 | − | GUCGAAGCCGCCAAUCCGUA | 20 | 669 |
| HSV1-UL19-5739 | − | CGUCGAAGCCGCCAAUCCGUA | 21 | 10338 |
| HSV1-UL19-5740 | − | CCGUCGAAGCCGCCAAUCCGUA | 22 | 10339 |
| HSV1-UL19-5741 | − | CCCGUCGAAGCCGCCAAUCCGUA | 23 | 10340 |
| HSV1-UL19-5742 | − | CCCCGUCGAAGCCGCCAAUCCGUA | 24 | 10341 |
| HSV1-UL19-5743 | − | GUCGCAGCGAUUUUCGUA | 18 | 10342 |
| HSV1-UL19-5744 | − | CGUCGCAGCGAUUUUCGUA | 19 | 10343 |
| HSV1-UL19-548 | − | GCGUCGCAGCGAUUUUCGUA | 20 | 934 |
| HSV1-UL19-5745 | − | GGCGUCGCAGCGAUUUUCGUA | 21 | 10344 |
| HSV1-UL19-5746 | − | GGGCGUCGCAGCGAUUUUCGUA | 22 | 10345 |
| HSV1-UL19-5747 | − | UGGGCGUCGCAGCGAUUUUCGUA | 23 | 10346 |
| HSV1-UL19-5748 | − | GUGGGCGUCGCAGCGAUUUUCGUA | 24 | 10347 |
| HSV1-UL19-5749 | − | CACAACGGGCGCGUGGUA | 18 | 10348 |
| HSV1-UL19-5750 | − | UCACAACGGGCGCGUGGUA | 19 | 10349 |
| HSV1-UL19-2214 | − | UUCACAACGGGCGCGUGGUA | 20 | 2492 |
| HSV1-UL19-5751 | − | UUUCACAACGGGCGCGUGGUA | 21 | 10350 |
| HSV1-UL19-5752 | − | GUUUCACAACGGGCGCGUGGUA | 22 | 10351 |
| HSV1-UL19-5753 | − | UGUUUCACAACGGGCGCGUGGUA | 23 | 10352 |
| HSV1-UL19-5754 | − | AUGUUUCACAACGGGCGCGUGGUA | 24 | 10353 |
| HSV1-UL19-5755 | − | GGAGUGCAUGGCCGUGUA | 18 | 10354 |
| HSV1-UL19-5756 | − | AGGAGUGCAUGGCCGUGUA | 19 | 10355 |
| HSV1-UL19-2173 | − | GAGGAGUGCAUGGCCGUGUA | 20 | 2465 |
| HSV1-UL19-5757 | − | CGAGGAGUGCAUGGCCGUGUA | 21 | 10356 |
| HSV1-UL19-5758 | − | CCGAGGAGUGCAUGGCCGUGUA | 22 | 10357 |
| HSV1-UL19-5759 | − | CCCGAGGAGUGCAUGGCCGUGUA | 23 | 10358 |
| HSV1-UL19-5760 | − | UCCCGAGGAGUGCAUGGCCGUGUA | 24 | 10359 |
| HSV1-UL19-5761 | − | CUCCGCAGUGCCCGCAAC | 18 | 10360 |
| HSV1-UL19-5762 | − | CCUCCGCAGUGCCCGCAAC | 19 | 10361 |
| HSV1-UL19-575 | − | UCCUCCGCAGUGCCCGCAAC | 20 | 961 |
| HSV1-UL19-5763 | − | CUCCUCCGCAGUGCCCGCAAC | 21 | 10362 |
| HSV1-UL19-5764 | − | CCUCCUCCGCAGUGCCCGCAAC | 22 | 10363 |
| HSV1-UL19-5765 | − | CCCUCCUCCGCAGUGCCCGCAAC | 23 | 10364 |
| HSV1-UL19-5766 | − | GCCCUCCUCCGCAGUGCCCGCAAC | 24 | 10365 |
| HSV1-UL19-5767 | − | ACCCAGCCGCGCGCGAAC | 18 | 10366 |
| HSV1-UL19-5768 | − | CACCCAGCCGCGCGCGAAC | 19 | 10367 |
| HSV1-UL19-2256 | − | UCACCCAGCCGCGCGCGAAC | 20 | 2519 |
| HSV1-UL19-5769 | − | CUCACCCAGCCGCGCGCGAAC | 21 | 10368 |
| HSV1-UL19-5770 | − | GCUCACCCAGCCGCGCGCGAAC | 22 | 10369 |
| HSV1-UL19-5771 | − | CGCUCACCCAGCCGCGCGCGAAC | 23 | 10370 |
| HSV1-UL19-5772 | − | ACGCUCACCCAGCCGCGCGCGAAC | 24 | 10371 |
| HSV1-UL19-5773 | − | GCGGAUGACCGGCCGCAC | 18 | 10372 |
| HSV1-UL19-5774 | − | CGCGGAUGACCGGCCGCAC | 19 | 10373 |
| HSV1-UL19-400 | − | CCGCGGAUGACCGGCCGCAC | 20 | 786 |
| HSV1-UL19-5775 | − | GCCGCGGAUGACCGGCCGCAC | 21 | 10374 |
| HSV1-UL19-5776 | − | CGCCGCGGAUGACCGGCCGCAC | 22 | 10375 |
| HSV1-UL19-5777 | − | ACGCCGCGGAUGACCGGCCGCAC | 23 | 10376 |
| HSV1-UL19-5778 | − | GACGCCGCGGAUGACCGGCCGCAC | 24 | 10377 |
| HSV1-UL19-5779 | − | GUGCGAAGUCUGGACGAC | 18 | 10378 |
| HSV1-UL19-5780 | − | CGUGCGAAGUCUGGACGAC | 19 | 10379 |
| HSV1-UL19-2072 | − | CCGUGCGAAGUCUGGACGAC | 20 | 2411 |
| HSV1-UL19-5781 | − | GCCGUGCGAAGUCUGGACGAC | 21 | 10380 |
| HSV1-UL19-5782 | − | GGCCGUGCGAAGUCUGGACGAC | 22 | 10381 |
| HSV1-UL19-5783 | − | AGGCCGUGCGAAGUCUGGACGAC | 23 | 10382 |
| HSV1-UL19-5784 | − | AAGGCCGUGCGAAGUCUGGACGAC | 24 | 10383 |
| HSV1-UL19-5785 | − | CGCAACCCCGUCACCGAC | 18 | 10384 |
| HSV1-UL19-5786 | − | CCGCAACCCCGUCACCGAC | 19 | 10385 |
| HSV1-UL19-2259 | − | UCCGCAACCCCGUCACCGAC | 20 | 2522 |
| HSV1-UL19-5787 | − | GUCCGCAACCCCGUCACCGAC | 21 | 10386 |
| HSV1-UL19-5788 | − | CGUCCGCAACCCCGUCACCGAC | 22 | 10387 |
| HSV1-UL19-5789 | − | CCGUCCGCAACCCCGUCACCGAC | 23 | 10388 |
| HSV1-UL19-5790 | − | ACCGUCCGCAACCCCGUCACCGAC | 24 | 10389 |
| HSV1-UL19-5791 | − | UGCUCGGCGGCGCCCGAC | 18 | 10390 |
| HSV1-UL19-5792 | − | CUGCUCGGCGGCGCCCGAC | 19 | 10391 |
| HSV1-UL19-2217 | − | UCUGCUCGGCGGCGCCCGAC | 20 | 2495 |
| HSV1-UL19-5793 | − | CUCUGCUCGGCGGCGCCCGAC | 21 | 10392 |
| HSV1-UL19-5794 | − | GCUCUGCUCGGCGGCGCCCGAC | 22 | 10393 |
| HSV1-UL19-5795 | − | UGCUCUGCUCGGCGGCGCCCGAC | 23 | 10394 |
| HSV1-UL19-5796 | − | CUGCUCUGCUCGGCGGCGCCCGAC | 24 | 10395 |
| HSV1-UL19-5797 | − | UUUGUGGGGGUGGCCGAC | 18 | 10396 |
| HSV1-UL19-5798 | − | CUUUGUGGGGGUGGCCGAC | 19 | 10397 |
| HSV1-UL19-2133 | − | UCUUUGUGGGGGUGGCCGAC | 20 | 2449 |
| HSV1-UL19-5799 | − | UUCUUUGUGGGGGUGGCCGAC | 21 | 10398 |
| HSV1-UL19-5800 | − | CUUCUUUGUGGGGGUGGCCGAC | 22 | 10399 |
| HSV1-UL19-5801 | − | ACUUCUUUGUGGGGGUGGCCGAC | 23 | 10400 |
| HSV1-UL19-5802 | − | GACUUCUUUGUGGGGGUGGCCGAC | 24 | 10401 |
| HSV1-UL19-5803 | − | CAGGAGGAGCAGCUCGAC | 18 | 10402 |
| HSV1-UL19-5804 | − | GCAGGAGGAGCAGCUCGAC | 19 | 10403 |
| HSV1-UL19-2079 | − | UGCAGGAGGAGCAGCUCGAC | 20 | 2415 |
| HSV1-UL19-5805 | − | AUGCAGGAGGAGCAGCUCGAC | 21 | 10404 |
| HSV1-UL19-5806 | − | GAUGCAGGAGGAGCAGCUCGAC | 22 | 10405 |
| HSV1-UL19-5807 | − | AGAUGCAGGAGGAGCAGCUCGAC | 23 | 10406 |
| HSV1-UL19-5808 | − | GAGAUGCAGGAGGAGCAGCUCGAC | 24 | 10407 |
| HSV1-UL19-5809 | − | GGCGUUUACGCGGGGGAC | 18 | 10408 |
| HSV1-UL19-5810 | − | GGGCGUUUACGCGGGGGAC | 19 | 10409 |
| HSV1-UL19-2287 | − | GGGGCGUUUACGCGGGGGAC | 20 | 2537 |
| HSV1-UL19-5811 | − | GGGGGCGUUUACGCGGGGGAC | 21 | 10410 |
| HSV1-UL19-5812 | − | CGGGGGCGUUUACGCGGGGGAC | 22 | 10411 |
| HSV1-UL19-5813 | − | CCGGGGGCGUUUACGCGGGGGAC | 23 | 10412 |
| HSV1-UL19-5814 | − | GCCGGGGGCGUUUACGCGGGGGAC | 24 | 10413 |
| HSV1-UL19-5815 | − | CCGCGCGCGAACGUGGAC | 18 | 10414 |
| HSV1-UL19-5816 | − | GCCGCGCGCGAACGUGGAC | 19 | 10415 |
| HSV1-UL19-2257 | − | AGCCGCGCGCGAACGUGGAC | 20 | 2520 |
| HSV1-UL19-5817 | − | CAGCCGCGCGCGAACGUGGAC | 21 | 10416 |
| HSV1-UL19-5818 | − | CCAGCCGCGCGCGAACGUGGAC | 22 | 10417 |
| HSV1-UL19-5819 | − | CCCAGCCGCGCGCGAACGUGGAC | 23 | 10418 |
| HSV1-UL19-5820 | − | ACCCAGCCGCGCGCGAACGUGGAC | 24 | 10419 |
| HSV1-UL19-5821 | − | UUGCCGAUGCAACGAUAC | 18 | 10420 |
| HSV1-UL19-5822 | − | GUUGCCGAUGCAACGAUAC | 19 | 10421 |
| HSV1-UL19-2043 | − | UGUUGCCGAUGCAACGAUAC | 20 | 2387 |
| HSV1-UL19-5823 | − | UUGUUGCCGAUGCAACGAUAC | 21 | 10422 |
| HSV1-UL19-5824 | − | GUUGUUGCCGAUGCAACGAUAC | 22 | 10423 |
| HSV1-UL19-5825 | − | UGUUGUUGCCGAUGCAACGAUAC | 23 | 10424 |
| HSV1-UL19-5826 | − | UUGUUGUUGCCGAUGCAACGAUAC | 24 | 10425 |
| HSV1-UL19-5827 | − | CAGUGCAUCACCAGCUAC | 18 | 10426 |
| HSV1-UL19-5828 | − | CCAGUGCAUCACCAGCUAC | 19 | 10427 |
| HSV1-UL19-354 | − | UCCAGUGCAUCACCAGCUAC | 20 | 740 |
| HSV1-UL19-5829 | − | GUCCAGUGCAUCACCAGCUAC | 21 | 10428 |
| HSV1-UL19-5830 | − | GGUCCAGUGCAUCACCAGCUAC | 22 | 10429 |
| HSV1-UL19-5831 | − | UGGUCCAGUGCAUCACCAGCUAC | 23 | 10430 |
| HSV1-UL19-5832 | − | GUGGUCCAGUGCAUCACCAGCUAC | 24 | 10431 |
| HSV1-UL19-5833 | − | UCGCAGCGAUUUUCGUAC | 18 | 10432 |
| HSV1-UL19-5834 | − | GUCGCAGCGAUUUUCGUAC | 19 | 10433 |
| HSV1-UL19-549 | − | CGUCGCAGCGAUUUUCGUAC | 20 | 935 |
| HSV1-UL19-5835 | − | GCGUCGCAGCGAUUUUCGUAC | 21 | 10434 |
| HSV1-UL19-5836 | − | GGCGUCGCAGCGAUUUUCGUAC | 22 | 10435 |
| HSV1-UL19-5837 | − | GGGCGUCGCAGCGAUUUUCGUAC | 23 | 10436 |
| HSV1-UL19-5838 | − | UGGGCGUCGCAGCGAUUUUCGUAC | 24 | 10437 |
| HSV1-UL19-5839 | − | GAGUGCAUGGCCGUGUAC | 18 | 10438 |
| HSV1-UL19-5840 | − | GGAGUGCAUGGCCGUGUAC | 19 | 10439 |
| HSV1-UL19-364 | − | AGGAGUGCAUGGCCGUGUAC | 20 | 750 |
| HSV1-UL19-5841 | − | GAGGAGUGCAUGGCCGUGUAC | 21 | 10440 |
| HSV1-UL19-5842 | − | CGAGGAGUGCAUGGCCGUGUAC | 22 | 10441 |
| HSV1-UL19-5843 | − | CCGAGGAGUGCAUGGCCGUGUAC | 23 | 10442 |
| HSV1-UL19-5844 | − | CCCGAGGAGUGCAUGGCCGUGUAC | 24 | 10443 |
| HSV1-UL19-5845 | − | GCCGCCGGGGGCGUUUAC | 18 | 10444 |
| HSV1-UL19-5846 | − | CGCCGCCGGGGGCGUUUAC | 19 | 10445 |
| HSV1-UL19-2283 | − | GCGCCGCCGGGGGCGUUUAC | 20 | 2536 |
| HSV1-UL19-5847 | − | CGCGCCGCCGGGGGCGUUUAC | 21 | 10446 |
| HSV1-UL19-5848 | − | ACGCGCCGCCGGGGGCGUUUAC | 22 | 10447 |
| HSV1-UL19-5849 | − | GACGCGCCGCCGGGGGCGUUUAC | 23 | 10448 |
| HSV1-UL19-5850 | − | GGACGCGCCGCCGGGGGCGUUUAC | 24 | 10449 |
| HSV1-UL19-5851 | − | CUUCCCCAAAACUUUUAC | 18 | 10450 |
| HSV1-UL19-5852 | − | CCUUCCCCAAAACUUUUAC | 19 | 10451 |
| HSV1-UL19-2260 | − | ACCUUCCCCAAAACUUUUAC | 20 | 2523 |
| HSV1-UL19-5853 | − | AACCUUCCCCAAAACUUUUAC | 21 | 10452 |
| HSV1-UL19-5854 | − | CAACCUUCCCCAAAACUUUUAC | 22 | 10453 |
| HSV1-UL19-5855 | − | GCAACCUUCCCCAAAACUUUUAC | 23 | 10454 |
| HSV1-UL19-5856 | − | GGCAACCUUCCCCAAAACUUUUAC | 24 | 10455 |
| HSV1-UL19-5857 | − | CGGAUGACCGGCCGCACC | 18 | 10456 |
| HSV1-UL19-5858 | − | GCGGAUGACCGGCCGCACC | 19 | 10457 |
| HSV1-UL19-401 | − | CGCGGAUGACCGGCCGCACC | 20 | 787 |
| HSV1-UL19-5859 | − | CCGCGGAUGACCGGCCGCACC | 21 | 10458 |
| HSV1-UL19-5860 | − | GCCGCGGAUGACCGGCCGCACC | 22 | 10459 |
| HSV1-UL19-5861 | − | CGCCGCGGAUGACCGGCCGCACC | 23 | 10460 |
| HSV1-UL19-5862 | − | ACGCCGCGGAUGACCGGCCGCACC | 24 | 10461 |
| HSV1-UL19-5863 | − | CGGGGCCGCUGCUGCACC | 18 | 10462 |
| HSV1-UL19-5864 | − | GCGGGGCCGCUGCUGCACC | 19 | 10463 |
| HSV1-UL19-2203 | − | CGCGGGGCCGCUGCUGCACC | 20 | 2485 |
| HSV1-UL19-5865 | − | UCGCGGGGCCGCUGCUGCACC | 21 | 10464 |
| HSV1-UL19-5866 | − | CUCGCGGGGCCGCUGCUGCACC | 22 | 10465 |
| HSV1-UL19-5867 | − | UCUCGCGGGGCCGCUGCUGCACC | 23 | 10466 |
| HSV1-UL19-5868 | − | UUCUCGCGGGGCCGCUGCUGCACC | 24 | 10467 |
| HSV1-UL19-5869 | − | GCAUGUAACGUGGCGACC | 18 | 10468 |
| HSV1-UL19-5870 | − | GGCAUGUAACGUGGCGACC | 19 | 10469 |
| HSV1-UL19-2191 | − | CGGCAUGUAACGUGGCGACC | 20 | 2477 |
| HSV1-UL19-5871 | − | GCGGCAUGUAACGUGGCGACC | 21 | 10470 |
| HSV1-UL19-5872 | − | GGCGGCAUGUAACGUGGCGACC | 22 | 10471 |
| HSV1-UL19-5873 | − | CGGCGGCAUGUAACGUGGCGACC | 23 | 10472 |
| HSV1-UL19-5874 | − | GCGGCGGCAUGUAACGUGGCGACC | 24 | 10473 |
| HSV1-UL19-5875 | − | GCGGAAGGCCAGAUGACC | 18 | 10474 |
| HSV1-UL19-5876 | − | CGCGGAAGGCCAGAUGACC | 19 | 10475 |
| HSV1-UL19-2127 | − | UCGCGGAAGGCCAGAUGACC | 20 | 2446 |
| HSV1-UL19-5877 | − | GUCGCGGAAGGCCAGAUGACC | 21 | 10476 |
| HSV1-UL19-5878 | − | GGUCGCGGAAGGCCAGAUGACC | 22 | 10477 |
| HSV1-UL19-5879 | − | GGGUCGCGGAAGGCCAGAUGACC | 23 | 10478 |
| HSV1-UL19-5880 | − | UGGGUCGCGGAAGGCCAGAUGACC | 24 | 10479 |
| HSV1-UL19-5881 | − | CGUACGUCGUGACCUACC | 18 | 10480 |
| HSV1-UL19-5882 | − | UCGUACGUCGUGACCUACC | 19 | 10481 |
| HSV1-UL19-2165 | − | CUCGUACGUCGUGACCUACC | 20 | 2462 |
| HSV1-UL19-5883 | − | UCUCGUACGUCGUGACCUACC | 21 | 10482 |
| HSV1-UL19-5884 | − | GUCUCGUACGUCGUGACCUACC | 22 | 10483 |
| HSV1-UL19-5885 | − | GGUCUCGUACGUCGUGACCUACC | 23 | 10484 |
| HSV1-UL19-5886 | − | UGGUCUCGUACGUCGUGACCUACC | 24 | 10485 |
| HSV1-UL19-5887 | − | CGCGGCCACGGCCAACCC | 18 | 10486 |
| HSV1-UL19-5888 | − | UCGCGGCCACGGCCAACCC | 19 | 10487 |
| HSV1-UL19-2295 | − | UUCGCGGCCACGGCCAACCC | 20 | 2541 |
| HSV1-UL19-5889 | − | CUUCGCGGCCACGGCCAACCC | 21 | 10488 |
| HSV1-UL19-5890 | − | CCUUCGCGGCCACGGCCAACCC | 22 | 10489 |
| HSV1-UL19-5891 | − | GCCUUCGCGGCCACGGCCAACCC | 23 | 10490 |
| HSV1-UL19-5892 | − | GGCCUUCGCGGCCACGGCCAACCC | 24 | 10491 |
| HSV1-UL19-5893 | − | CCGCCGGCCCUGCAACCC | 18 | 10492 |
| HSV1-UL19-5894 | − | UCCGCCGGCCCUGCAACCC | 19 | 10493 |
| HSV1-UL19-2277 | − | UUCCGCCGGCCCUGCAACCC | 20 | 2534 |
| HSV1-UL19-5895 | − | CUUCCGCCGGCCCUGCAACCC | 21 | 10494 |
| HSV1-UL19-5896 | − | ACUUCCGCCGGCCCUGCAACCC | 22 | 10495 |
| HSV1-UL19-5897 | − | UACUUCCGCCGGCCCUGCAACCC | 23 | 10496 |
| HSV1-UL19-5898 | − | CUACUUCCGCCGGCCCUGCAACCC | 24 | 10497 |
| HSV1-UL19-5899 | − | CGGAAGGCCAGAUGACCC | 18 | 10498 |
| HSV1-UL19-5900 | − | GCGGAAGGCCAGAUGACCC | 19 | 10499 |
| HSV1-UL19-303 | − | CGCGGAAGGCCAGAUGACCC | 20 | 689 |
| HSV1-UL19-5901 | − | UCGCGGAAGGCCAGAUGACCC | 21 | 10500 |
| HSV1-UL19-5902 | − | GUCGCGGAAGGCCAGAUGACCC | 22 | 10501 |
| HSV1-UL19-5903 | − | GGUCGCGGAAGGCCAGAUGACCC | 23 | 10502 |
| HSV1-UL19-5904 | − | GGGUCGCGGAAGGCCAGAUGACCC | 24 | 10503 |
| HSV1-UL19-5905 | − | CGCCGGCCCUGCAACCCC | 18 | 10504 |
| HSV1-UL19-5906 | − | CCGCCGGCCCUGCAACCCC | 19 | 10505 |
| HSV1-UL19-525 | − | UCCGCCGGCCCUGCAACCCC | 20 | 911 |
| HSV1-UL19-5907 | − | UUCCGCCGGCCCUGCAACCCC | 21 | 10506 |
| HSV1-UL19-5908 | − | CUUCCGCCGGCCCUGCAACCCC | 22 | 10507 |
| HSV1-UL19-5909 | − | ACUUCCGCCGGCCCUGCAACCCC | 23 | 10508 |
| HSV1-UL19-5910 | − | UACUUCCGCCGGCCCUGCAACCCC | 24 | 10509 |
| HSV1-UL19-5911 | − | GCCGGCCCUGCAACCCCC | 18 | 10510 |
| HSV1-UL19-5912 | − | CGCCGGCCCUGCAACCCCC | 19 | 10511 |
| HSV1-UL19-526 | − | CCGCCGGCCCUGCAACCCCC | 20 | 912 |
| HSV1-UL19-5913 | − | UCCGCCGGCCCUGCAACCCCC | 21 | 10512 |
| HSV1-UL19-5914 | − | UUCCGCCGGCCCUGCAACCCCC | 22 | 10513 |
| HSV1-UL19-5915 | − | CUUCCGCCGGCCCUGCAACCCCC | 23 | 10514 |
| HSV1-UL19-5916 | − | ACUUCCGCCGGCCCUGCAACCCCC | 24 | 10515 |
| HSV1-UL19-5917 | − | GUACAGUUUAAGCGCCCC | 18 | 10516 |
| HSV1-UL19-5918 | − | CGUACAGUUUAAGCGCCCC | 19 | 10517 |
| HSV1-UL19-2308 | − | ACGUACAGUUUAAGCGCCCC | 20 | 2548 |
| HSV1-UL19-5919 | − | GACGUACAGUUUAAGCGCCCC | 21 | 10518 |
| HSV1-UL19-5920 | − | CGACGUACAGUUUAAGCGCCCC | 22 | 10519 |
| HSV1-UL19-5921 | − | GCGACGUACAGUUUAAGCGCCCC | 23 | 10520 |
| HSV1-UL19-5922 | − | AGCGACGUACAGUUUAAGCGCCCC | 24 | 10521 |
| HSV1-UL19-5923 | − | UGGUCUUUCUGGAGGCCC | 18 | 10522 |
| HSV1-UL19-5924 | − | CUGGUCUUUCUGGAGGCCC | 19 | 10523 |
| HSV1-UL19-253 | − | GCUGGUCUUUCUGGAGGCCC | 20 | 639 |
| HSV1-UL19-5925 | − | AGCUGGUCUUUCUGGAGGCCC | 21 | 10524 |
| HSV1-UL19-5926 | − | AAGCUGGUCUUUCUGGAGGCCC | 22 | 10525 |
| HSV1-UL19-5927 | − | GAAGCUGGUCUUUCUGGAGGCCC | 23 | 10526 |
| HSV1-UL19-5928 | − | AGAAGCUGGUCUUUCUGGAGGCCC | 24 | 10527 |
| HSV1-UL19-5929 | − | CGUUCCCCCGGCCGGCCC | 18 | 10528 |
| HSV1-UL19-5930 | − | ACGUUCCCCCGGCCGGCCC | 19 | 10529 |
| HSV1-UL19-321 | − | GACGUUCCCCCGGCCGGCCC | 20 | 707 |
| HSV1-UL19-5931 | − | GGACGUUCCCCCGGCCGGCCC | 21 | 10530 |
| HSV1-UL19-5932 | − | GGGACGUUCCCCCGGCCGGCCC | 22 | 10531 |
| HSV1-UL19-5933 | − | GGGGACGUUCCCCCGGCCGGCCC | 23 | 10532 |
| HSV1-UL19-5934 | − | GGGGGACGUUCCCCCGGCCGGCCC | 24 | 10533 |
| HSV1-UL19-5935 | − | GGGGGCAGCGCCUGGCCC | 18 | 10534 |
| HSV1-UL19-5936 | − | UGGGGGCAGCGCCUGGCCC | 19 | 10535 |
| HSV1-UL19-2122 | − | CUGGGGGCAGCGCCUGGCCC | 20 | 2442 |
| HSV1-UL19-5937 | − | CCUGGGGGCAGCGCCUGGCCC | 21 | 10536 |
| HSV1-UL19-5938 | − | GCCUGGGGGCAGCGCCUGGCCC | 22 | 10537 |
| HSV1-UL19-5939 | − | CGCCUGGGGGCAGCGCCUGGCCC | 23 | 10538 |
| HSV1-UL19-5940 | − | ACGCCUGGGGGCAGCGCCUGGCCC | 24 | 10539 |
| HSV1-UL19-5941 | − | CUGACGUUCGUCCUGCCC | 18 | 10540 |
| HSV1-UL19-5942 | − | CCUGACGUUCGUCCUGCCC | 19 | 10541 |
| HSV1-UL19-2094 | − | ACCUGACGUUCGUCCUGCCC | 20 | 2428 |
| HSV1-UL19-5943 | − | GACCUGACGUUCGUCCUGCCC | 21 | 10542 |
| HSV1-UL19-5944 | − | GGACCUGACGUUCGUCCUGCCC | 22 | 10543 |
| HSV1-UL19-5945 | − | UGGACCUGACGUUCGUCCUGCCC | 23 | 10544 |
| HSV1-UL19-5946 | − | AUGGACCUGACGUUCGUCCUGCCC | 24 | 10545 |
| HSV1-UL19-5947 | − | CUCGGGGGAGACCUUCCC | 18 | 10546 |
| HSV1-UL19-5948 | − | CCUCGGGGGAGACCUUCCC | 19 | 10547 |
| HSV1-UL19-2171 | − | ACCUCGGGGGAGACCUUCCC | 20 | 2464 |
| HSV1-UL19-5949 | − | UACCUCGGGGGAGACCUUCCC | 21 | 10548 |
| HSV1-UL19-5950 | − | CUACCUCGGGGGAGACCUUCCC | 22 | 10549 |
| HSV1-UL19-5951 | − | CCUACCUCGGGGGAGACCUUCCC | 23 | 10550 |
| HSV1-UL19-5952 | − | ACCUACCUCGGGGGAGACCUUCCC | 24 | 10551 |
| HSV1-UL19-5953 | − | AACACCCAGGCCCGAGCC | 18 | 10552 |
| HSV1-UL19-5954 | − | CAACACCCAGGCCCGAGCC | 19 | 10553 |
| HSV1-UL19-2193 | − | ACAACACCCAGGCCCGAGCC | 20 | 2479 |
| HSV1-UL19-5955 | − | CACAACACCCAGGCCCGAGCC | 21 | 10554 |
| HSV1-UL19-5956 | − | GCACAACACCCAGGCCCGAGCC | 22 | 10555 |
| HSV1-UL19-5957 | − | UGCACAACACCCAGGCCCGAGCC | 23 | 10556 |
| HSV1-UL19-5958 | − | CUGCACAACACCCAGGCCCGAGCC | 24 | 10557 |
| HSV1-UL19-5959 | − | CAGCUGUUUUUGAACGCC | 18 | 10558 |
| HSV1-UL19-5960 | − | GCAGCUGUUUUUGAACGCC | 19 | 10559 |
| HSV1-UL19-290 | − | AGCAGCUGUUUUUGAACGCC | 20 | 676 |
| HSV1-UL19-5961 | − | CAGCAGCUGUUUUUGAACGCC | 21 | 10560 |
| HSV1-UL19-5962 | − | GCAGCAGCUGUUUUUGAACGCC | 22 | 10561 |
| HSV1-UL19-5963 | − | UGCAGCAGCUGUUUUUGAACGCC | 23 | 10562 |
| HSV1-UL19-5964 | − | AUGCAGCAGCUGUUUUUGAACGCC | 24 | 10563 |
| HSV1-UL19-5965 | − | CGGUUUGCCGCGCACGCC | 18 | 10564 |
| HSV1-UL19-5966 | − | ACGGUUUGCCGCGCACGCC | 19 | 10565 |
| HSV1-UL19-264 | − | AACGGUUUGCCGCGCACGCC | 20 | 650 |
| HSV1-UL19-5967 | − | GAACGGUUUGCCGCGCACGCC | 21 | 10566 |
| HSV1-UL19-5968 | − | GGAACGGUUUGCCGCGCACGCC | 22 | 10567 |
| HSV1-UL19-5969 | − | UGGAACGGUUUGCCGCGCACGCC | 23 | 10568 |
| HSV1-UL19-5970 | − | AUGGAACGGUUUGCCGCGCACGCC | 24 | 10569 |
| HSV1-UL19-5971 | − | GCGGCGUUCCGGGACGCC | 18 | 10570 |
| HSV1-UL19-5972 | − | GGCGGCGUUCCGGGACGCC | 19 | 10571 |
| HSV1-UL19-333 | − | CGGCGGCGUUCCGGGACGCC | 20 | 719 |
| HSV1-UL19-5973 | − | CCGGCGGCGUUCCGGGACGCC | 21 | 10572 |
| HSV1-UL19-5974 | − | UCCGGCGGCGUUCCGGGACGCC | 22 | 10573 |
| HSV1-UL19-5975 | − | GUCCGGCGGCGUUCCGGGACGCC | 23 | 10574 |
| HSV1-UL19-5976 | − | UGUCCGGCGGCGUUCCGGGACGCC | 24 | 10575 |
| HSV1-UL19-5977 | − | UCGUGGCGGGAAACCGCC | 18 | 10576 |
| HSV1-UL19-5978 | − | GUCGUGGCGGGAAACCGCC | 19 | 10577 |
| HSV1-UL19-511 | − | GGUCGUGGCGGGAAACCGCC | 20 | 897 |
| HSV1-UL19-5979 | − | CGGUCGUGGCGGGAAACCGCC | 21 | 10578 |
| HSV1-UL19-5980 | − | GCGGUCGUGGCGGGAAACCGCC | 22 | 10579 |
| HSV1-UL19-5981 | − | CGCGGUCGUGGCGGGAAACCGCC | 23 | 10580 |
| HSV1-UL19-5982 | − | ACGCGGUCGUGGCGGGAAACCGCC | 24 | 10581 |
| HSV1-UL19-5983 | − | GCAAGGCGGGCCACCGCC | 18 | 10582 |
| HSV1-UL19-5984 | − | GGCAAGGCGGGCCACCGCC | 19 | 10583 |
| HSV1-UL19-212 | − | GGGCAAGGCGGGCCACCGCC | 20 | 598 |
| HSV1-UL19-5985 | − | UGGGCAAGGCGGGCCACCGCC | 21 | 10584 |
| HSV1-UL19-5986 | − | CUGGGCAAGGCGGGCCACCGCC | 22 | 10585 |
| HSV1-UL19-5987 | − | CCUGGGCAAGGCGGGCCACCGCC | 23 | 10586 |
| HSV1-UL19-5988 | − | UCCUGGGCAAGGCGGGCCACCGCC | 24 | 10587 |
| HSV1-UL19-5989 | − | CCCCGGGGACGCGCCGCC | 18 | 10588 |
| HSV1-UL19-5990 | − | CCCCCGGGGACGCGCCGCC | 19 | 10589 |
| HSV1-UL19-529 | − | ACCCCCGGGGACGCGCCGCC | 20 | 915 |
| HSV1-UL19-5991 | − | AACCCCCGGGGACGCGCCGCC | 21 | 10590 |
| HSV1-UL19-5992 | − | CAACCCCCGGGGACGCGCCGCC | 22 | 10591 |
| HSV1-UL19-5993 | − | GCAACCCCCGGGGACGCGCCGCC | 23 | 10592 |
| HSV1-UL19-5994 | − | UGCAACCCCCGGGGACGCGCCGCC | 24 | 10593 |
| HSV1-UL19-5995 | − | UACCCCCUGGUGGGCGCC | 18 | 10594 |
| HSV1-UL19-5996 | − | CUACCCCCUGGUGGGCGCC | 19 | 10595 |
| HSV1-UL19-2093 | − | CCUACCCCCUGGUGGGCGCC | 20 | 2427 |
| HSV1-UL19-5997 | − | CCCUACCCCCUGGUGGGCGCC | 21 | 10596 |
| HSV1-UL19-5998 | − | UCCCUACCCCCUGGUGGGCGCC | 22 | 10597 |
| HSV1-UL19-5999 | − | UUCCCUACCCCCUGGUGGGCGCC | 23 | 10598 |
| HSV1-UL19-6000 | − | GUUCCCUACCCCCUGGUGGGCGCC | 24 | 10599 |
| HSV1-UL19-6001 | − | CUGGUCUUUCUGGAGGCC | 18 | 10600 |
| HSV1-UL19-6002 | − | GCUGGUCUUUCUGGAGGCC | 19 | 10601 |
| HSV1-UL19-2089 | − | AGCUGGUCUUUCUGGAGGCC | 20 | 2424 |
| HSV1-UL19-6003 | − | AAGCUGGUCUUUCUGGAGGCC | 21 | 10602 |
| HSV1-UL19-6004 | − | GAAGCUGGUCUUUCUGGAGGCC | 22 | 10603 |
| HSV1-UL19-6005 | − | AGAAGCUGGUCUUUCUGGAGGCC | 23 | 10604 |
| HSV1-UL19-6006 | − | GAGAAGCUGGUCUUUCUGGAGGCC | 24 | 10605 |
| HSV1-UL19-6007 | − | ACUUUACCCUGACCGGCC | 18 | 10606 |
| HSV1-UL19-6008 | − | GACUUUACCCUGACCGGCC | 19 | 10607 |
| HSV1-UL19-372 | − | UGACUUUACCCUGACCGGCC | 20 | 758 |
| HSV1-UL19-6009 | − | AUGACUUUACCCUGACCGGCC | 21 | 10608 |
| HSV1-UL19-6010 | − | GAUGACUUUACCCUGACCGGCC | 22 | 10609 |
| HSV1-UL19-6011 | − | UGAUGACUUUACCCUGACCGGCC | 23 | 10610 |
| HSV1-UL19-6012 | − | UUGAUGACUUUACCCUGACCGGCC | 24 | 10611 |
| HSV1-UL19-6013 | − | ACGUUCCCCCGGCCGGCC | 18 | 10612 |
| HSV1-UL19-6014 | − | GACGUUCCCCCGGCCGGCC | 19 | 10613 |
| HSV1-UL19-320 | − | GGACGUUCCCCCGGCCGGCC | 20 | 706 |
| HSV1-UL19-6015 | − | GGGACGUUCCCCCGGCCGGCC | 21 | 10614 |
| HSV1-UL19-6016 | − | GGGGACGUUCCCCCGGCCGGCC | 22 | 10615 |
| HSV1-UL19-6017 | − | GGGGGACGUUCCCCCGGCCGGCC | 23 | 10616 |
| HSV1-UL19-6018 | − | GGGGGGACGUUCCCCCGGCCGGCC | 24 | 10617 |
| HSV1-UL19-6019 | − | GUCCGCGAGAGCGCGGCC | 18 | 10618 |
| HSV1-UL19-6020 | − | CGUCCGCGAGAGCGCGGCC | 19 | 10619 |
| HSV1-UL19-461 | − | ACGUCCGCGAGAGCGCGGCC | 20 | 847 |
| HSV1-UL19-6021 | − | CACGUCCGCGAGAGCGCGGCC | 21 | 10620 |
| HSV1-UL19-6022 | − | GCACGUCCGCGAGAGCGCGGCC | 22 | 10621 |
| HSV1-UL19-6023 | − | AGCACGUCCGCGAGAGCGCGGCC | 23 | 10622 |
| HSV1-UL19-6024 | − | CAGCACGUCCGCGAGAGCGCGGCC | 24 | 10623 |
| HSV1-UL19-6025 | − | CUGAUGCGGCGCGCGGCC | 18 | 10624 |
| HSV1-UL19-6026 | − | CCUGAUGCGGCGCGCGGCC | 19 | 10625 |
| HSV1-UL19-2185 | − | CCCUGAUGCGGCGCGCGGCC | 20 | 2474 |
| HSV1-UL19-6027 | − | GCCCUGAUGCGGCGCGCGGCC | 21 | 10626 |
| HSV1-UL19-6028 | − | CGCCCUGAUGCGGCGCGCGGCC | 22 | 10627 |
| HSV1-UL19-6029 | − | ACGCCCUGAUGCGGCGCGCGGCC | 23 | 10628 |
| HSV1-UL19-6030 | − | GACGCCCUGAUGCGGCGCGCGGCC | 24 | 10629 |
| HSV1-UL19-6031 | − | UCCGGGACGCCCGGGGCC | 18 | 10630 |
| HSV1-UL19-6032 | − | UUCCGGGACGCCCGGGGCC | 19 | 10631 |
| HSV1-UL19-336 | − | GUUCCGGGACGCCCGGGGCC | 20 | 722 |
| HSV1-UL19-6033 | − | CGUUCCGGGACGCCCGGGGCC | 21 | 10632 |
| HSV1-UL19-6034 | − | GCGUUCCGGGACGCCCGGGGCC | 22 | 10633 |
| HSV1-UL19-6035 | − | GGCGUUCCGGGACGCCCGGGGCC | 23 | 10634 |
| HSV1-UL19-6036 | − | CGGCGUUCCGGGACGCCCGGGGCC | 24 | 10635 |
| HSV1-UL19-6037 | − | AAAACUUUUACCUGGGCC | 18 | 10636 |
| HSV1-UL19-6038 | − | CAAAACUUUUACCUGGGCC | 19 | 10637 |
| HSV1-UL19-2261 | − | CCAAAACUUUUACCUGGGCC | 20 | 2524 |
| HSV1-UL19-6039 | − | CCCAAAACUUUUACCUGGGCC | 21 | 10638 |
| HSV1-UL19-6040 | − | CCCCAAAACUUUUACCUGGGCC | 22 | 10639 |
| HSV1-UL19-6041 | − | UCCCCAAAACUUUUACCUGGGCC | 23 | 10640 |
| HSV1-UL19-6042 | − | UUCCCCAAAACUUUUACCUGGGCC | 24 | 10641 |
| HSV1-UL19-6043 | − | GGCCGACGUGGAGCUGCC | 18 | 10642 |
| HSV1-UL19-6044 | − | UGGCCGACGUGGAGCUGCC | 19 | 10643 |
| HSV1-UL19-312 | − | GUGGCCGACGUGGAGCUGCC | 20 | 698 |
| HSV1-UL19-6045 | − | GGUGGCCGACGUGGAGCUGCC | 21 | 10644 |
| HSV1-UL19-6046 | − | GGGUGGCCGACGUGGAGCUGCC | 22 | 10645 |
| HSV1-UL19-6047 | − | GGGGUGGCCGACGUGGAGCUGCC | 23 | 10646 |
| HSV1-UL19-6048 | − | GGGGGUGGCCGACGUGGAGCUGCC | 24 | 10647 |
| HSV1-UL19-6049 | − | CCGCCAAACAUCGCUGCC | 18 | 10648 |
| HSV1-UL19-6050 | − | GCCGCCAAACAUCGCUGCC | 19 | 10649 |
| HSV1-UL19-559 | − | CGCCGCCAAACAUCGCUGCC | 20 | 945 |
| HSV1-UL19-6051 | − | UCGCCGCCAAACAUCGCUGCC | 21 | 10650 |
| HSV1-UL19-6052 | − | AUCGCCGCCAAACAUCGCUGCC | 22 | 10651 |
| HSV1-UL19-6053 | − | CAUCGCCGCCAAACAUCGCUGCC | 23 | 10652 |
| HSV1-UL19-6054 | − | ACAUCGCCGCCAAACAUCGCUGCC | 24 | 10653 |
| HSV1-UL19-6055 | − | AGCGCCCCCCGGGGUGCC | 18 | 10654 |
| HSV1-UL19-6056 | − | AAGCGCCCCCCGGGGUGCC | 19 | 10655 |
| HSV1-UL19-2310 | − | UAAGCGCCCCCCGGGGUGCC | 20 | 2549 |
| HSV1-UL19-6057 | − | UUAAGCGCCCCCCGGGGUGCC | 21 | 10656 |
| HSV1-UL19-6058 | − | UUUAAGCGCCCCCCGGGGUGCC | 22 | 10657 |
| HSV1-UL19-6059 | − | GUUUAAGCGCCCCCCGGGGUGCC | 23 | 10658 |
| HSV1-UL19-6060 | − | AGUUUAAGCGCCCCCCGGGGUGCC | 24 | 10659 |
| HSV1-UL19-6061 | − | CCGUCGUGCAGCACGUCC | 18 | 10660 |
| HSV1-UL19-6062 | − | CCCGUCGUGCAGCACGUCC | 19 | 10661 |
| HSV1-UL19-2229 | − | GCCCGUCGUGCAGCACGUCC | 20 | 2502 |
| HSV1-UL19-6063 | − | AGCCCGUCGUGCAGCACGUCC | 21 | 10662 |
| HSV1-UL19-6064 | − | CAGCCCGUCGUGCAGCACGUCC | 22 | 10663 |
| HSV1-UL19-6065 | − | ACAGCCCGUCGUGCAGCACGUCC | 23 | 10664 |
| HSV1-UL19-6066 | − | GACAGCCCGUCGUGCAGCACGUCC | 24 | 10665 |
| HSV1-UL19-3600 | − | GCAACGUCCAGGCCGUCC | 18 | 8199 |
| HSV1-UL19-3601 | − | CGCAACGUCCAGGCCGUCC | 19 | 8200 |
| HSV1-UL19-3602 | − | UCGCAACGUCCAGGCCGUCC | 20 | 8201 |
| HSV1-UL19-3603 | − | CUCGCAACGUCCAGGCCGUCC | 21 | 8202 |
| HSV1-UL19-3604 | − | GCUCGCAACGUCCAGGCCGUCC | 22 | 8203 |
| HSV1-UL19-3605 | − | CGCUCGCAACGUCCAGGCCGUCC | 23 | 8204 |
| HSV1-UL19-3606 | − | UCGCUCGCAACGUCCAGGCCGUCC | 24 | 8205 |
| HSV1-UL19-6067 | − | UGCAGAACAUGGUGGUCC | 18 | 10666 |
| HSV1-UL19-6068 | − | CUGCAGAACAUGGUGGUCC | 19 | 10667 |
| HSV1-UL19-417 | − | CCUGCAGAACAUGGUGGUCC | 20 | 803 |
| HSV1-UL19-6069 | − | CCCUGCAGAACAUGGUGGUCC | 21 | 10668 |
| HSV1-UL19-6070 | − | ACCCUGCAGAACAUGGUGGUCC | 22 | 10669 |
| HSV1-UL19-6071 | − | CACCCUGCAGAACAUGGUGGUCC | 23 | 10670 |
| HSV1-UL19-6072 | − | CCACCCUGCAGAACAUGGUGGUCC | 24 | 10671 |
| HSV1-UL19-6073 | − | AAACCGCCCCGCCCUUCC | 18 | 10672 |
| HSV1-UL19-6074 | − | UAAACCGCCCCGCCCUUCC | 19 | 10673 |
| HSV1-UL19-6075 | − | AUAAACCGCCCCGCCCUUCC | 20 | 10674 |
| HSV1-UL19-6076 | − | AAUAAACCGCCCCGCCCUUCC | 21 | 10675 |
| HSV1-UL19-6077 | − | UAAUAAACCGCCCCGCCCUUCC | 22 | 10676 |
| HSV1-UL19-6078 | − | GUAAUAAACCGCCCCGCCCUUCC | 23 | 10677 |
| HSV1-UL19-6079 | − | UGUAAUAAACCGCCCCGCCCUUCC | 24 | 10678 |
| HSV1-UL19-6080 | − | GGCAGACGCUGGACGAGC | 18 | 10679 |
| HSV1-UL19-6081 | − | CGGCAGACGCUGGACGAGC | 19 | 10680 |
| HSV1-UL19-2082 | − | CCGGCAGACGCUGGACGAGC | 20 | 2418 |
| HSV1-UL19-6082 | − | ACCGGCAGACGCUGGACGAGC | 21 | 10681 |
| HSV1-UL19-6083 | − | AACCGGCAGACGCUGGACGAGC | 22 | 10682 |
| HSV1-UL19-6084 | − | GAACCGGCAGACGCUGGACGAGC | 23 | 10683 |
| HSV1-UL19-6085 | − | UGAACCGGCAGACGCUGGACGAGC | 24 | 10684 |
| HSV1-UL19-6086 | − | ACGCCCGGGGCCUGGAGC | 18 | 10685 |
| HSV1-UL19-6087 | − | GACGCCCGGGGCCUGGAGC | 19 | 10686 |
| HSV1-UL19-337 | − | GGACGCCCGGGGCCUGGAGC | 20 | 723 |
| HSV1-UL19-6088 | − | GGGACGCCCGGGGCCUGGAGC | 21 | 10687 |
| HSV1-UL19-6089 | − | CGGGACGCCCGGGGCCUGGAGC | 22 | 10688 |
| HSV1-UL19-6090 | − | CCGGGACGCCCGGGGCCUGGAGC | 23 | 10689 |
| HSV1-UL19-6091 | − | UCCGGGACGCCCGGGGCCUGGAGC | 24 | 10690 |
| HSV1-UL19-6092 | − | CGCGACUGCCGGGUUAGC | 18 | 10691 |
| HSV1-UL19-6093 | − | UCGCGACUGCCGGGUUAGC | 19 | 10692 |
| HSV1-UL19-2187 | − | AUCGCGACUGCCGGGUUAGC | 20 | 2476 |
| HSV1-UL19-6094 | − | CAUCGCGACUGCCGGGUUAGC | 21 | 10693 |
| HSV1-UL19-6095 | − | CCAUCGCGACUGCCGGGUUAGC | 22 | 10694 |
| HSV1-UL19-6096 | − | GCCAUCGCGACUGCCGGGUUAGC | 23 | 10695 |
| HSV1-UL19-6097 | − | CGCCAUCGCGACUGCCGGGUUAGC | 24 | 10696 |
| HSV1-UL19-6098 | − | GCAGCUGUUUUUGAACGC | 18 | 10697 |
| HSV1-UL19-6099 | − | AGCAGCUGUUUUUGAACGC | 19 | 10698 |
| HSV1-UL19-2119 | − | CAGCAGCUGUUUUUGAACGC | 20 | 2441 |
| HSV1-UL19-6100 | − | GCAGCAGCUGUUUUUGAACGC | 21 | 10699 |
| HSV1-UL19-6101 | − | UGCAGCAGCUGUUUUUGAACGC | 22 | 10700 |
| HSV1-UL19-6102 | − | AUGCAGCAGCUGUUUUUGAACGC | 23 | 10701 |
| HSV1-UL19-6103 | − | CAUGCAGCAGCUGUUUUUGAACGC | 24 | 10702 |
| HSV1-UL19-6104 | − | UGACGCAUGCCGACACGC | 18 | 10703 |
| HSV1-UL19-6105 | − | CUGACGCAUGCCGACACGC | 19 | 10704 |
| HSV1-UL19-2057 | − | UCUGACGCAUGCCGACACGC | 20 | 2399 |
| HSV1-UL19-6106 | − | GUCUGACGCAUGCCGACACGC | 21 | 10705 |
| HSV1-UL19-6107 | − | CGUCUGACGCAUGCCGACACGC | 22 | 10706 |
| HSV1-UL19-6108 | − | CCGUCUGACGCAUGCCGACACGC | 23 | 10707 |
| HSV1-UL19-6109 | − | CCCGUCUGACGCAUGCCGACACGC | 24 | 10708 |
| HSV1-UL19-6110 | − | CAACGGGGAAGCCCACGC | 18 | 10709 |
| HSV1-UL19-6111 | − | GCAACGGGGAAGCCCACGC | 19 | 10710 |
| HSV1-UL19-2320 | − | CGCAACGGGGAAGCCCACGC | 20 | 2554 |
| HSV1-UL19-6112 | − | CCGCAACGGGGAAGCCCACGC | 21 | 10711 |
| HSV1-UL19-6113 | − | CCCGCAACGGGGAAGCCCACGC | 22 | 10712 |
| HSV1-UL19-6114 | − | GCCCGCAACGGGGAAGCCCACGC | 23 | 10713 |
| HSV1-UL19-6115 | − | UGCCCGCAACGGGGAAGCCCACGC | 24 | 10714 |
| HSV1-UL19-6116 | − | ACGGUUUGCCGCGCACGC | 18 | 10715 |
| HSV1-UL19-6117 | − | AACGGUUUGCCGCGCACGC | 19 | 10716 |
| HSV1-UL19-263 | − | GAACGGUUUGCCGCGCACGC | 20 | 649 |
| HSV1-UL19-6118 | − | GGAACGGUUUGCCGCGCACGC | 21 | 10717 |
| HSV1-UL19-6119 | − | UGGAACGGUUUGCCGCGCACGC | 22 | 10718 |
| HSV1-UL19-6120 | − | AUGGAACGGUUUGCCGCGCACGC | 23 | 10719 |
| HSV1-UL19-6121 | − | CAUGGAACGGUUUGCCGCGCACGC | 24 | 10720 |
| HSV1-UL19-6122 | − | GGCGGCGUUCCGGGACGC | 18 | 10721 |
| HSV1-UL19-6123 | − | CGGCGGCGUUCCGGGACGC | 19 | 10722 |
| HSV1-UL19-2150 | − | CCGGCGGCGUUCCGGGACGC | 20 | 2454 |
| HSV1-UL19-6124 | − | UCCGGCGGCGUUCCGGGACGC | 21 | 10723 |
| HSV1-UL19-6125 | − | GUCCGGCGGCGUUCCGGGACGC | 22 | 10724 |
| HSV1-UL19-6126 | − | UGUCCGGCGGCGUUCCGGGACGC | 23 | 10725 |
| HSV1-UL19-6127 | − | AUGUCCGGCGGCGUUCCGGGACGC | 24 | 10726 |
| HSV1-UL19-6128 | − | CGCCGGGGGCGUUUACGC | 18 | 10727 |
| HSV1-UL19-6129 | − | CCGCCGGGGGCGUUUACGC | 19 | 10728 |
| HSV1-UL19-533 | − | GCCGCCGGGGGCGUUUACGC | 20 | 919 |
| HSV1-UL19-6130 | − | CGCCGCCGGGGGCGUUUACGC | 21 | 10729 |
| HSV1-UL19-6131 | − | GCGCCGCCGGGGGCGUUUACGC | 22 | 10730 |
| HSV1-UL19-6132 | − | CGCGCCGCCGGGGGCGUUUACGC | 23 | 10731 |
| HSV1-UL19-6133 | − | ACGCGCCGCCGGGGGCGUUUACGC | 24 | 10732 |
| HSV1-UL19-6134 | − | GUCGUGGCGGGAAACCGC | 18 | 10733 |
| HSV1-UL19-6135 | − | GGUCGUGGCGGGAAACCGC | 19 | 10734 |
| HSV1-UL19-2269 | − | CGGUCGUGGCGGGAAACCGC | 20 | 2528 |
| HSV1-UL19-6136 | − | GCGGUCGUGGCGGGAAACCGC | 21 | 10735 |
| HSV1-UL19-6137 | − | CGCGGUCGUGGCGGGAAACCGC | 22 | 10736 |
| HSV1-UL19-6138 | − | ACGCGGUCGUGGCGGGAAACCGC | 23 | 10737 |
| HSV1-UL19-6139 | − | AACGCGGUCGUGGCGGGAAACCGC | 24 | 10738 |
| HSV1-UL19-6140 | − | GGCAAGGCGGGCCACCGC | 18 | 10739 |
| HSV1-UL19-6141 | − | GGGCAAGGCGGGCCACCGC | 19 | 10740 |
| HSV1-UL19-211 | − | UGGGCAAGGCGGGCCACCGC | 20 | 597 |
| HSV1-UL19-6142 | − | CUGGGCAAGGCGGGCCACCGC | 21 | 10741 |
| HSV1-UL19-6143 | − | CCUGGGCAAGGCGGGCCACCGC | 22 | 10742 |
| HSV1-UL19-6144 | − | UCCUGGGCAAGGCGGGCCACCGC | 23 | 10743 |
| HSV1-UL19-6145 | − | UUCCUGGGCAAGGCGGGCCACCGC | 24 | 10744 |
| HSV1-UL19-6146 | − | CCCCCGGGGACGCGCCGC | 18 | 10745 |
| HSV1-UL19-6147 | − | ACCCCCGGGGACGCGCCGC | 19 | 10746 |
| HSV1-UL19-528 | − | AACCCCCGGGGACGCGCCGC | 20 | 914 |
| HSV1-UL19-6148 | − | CAACCCCCGGGGACGCGCCGC | 21 | 10747 |
| HSV1-UL19-6149 | − | GCAACCCCCGGGGACGCGCCGC | 22 | 10748 |
| HSV1-UL19-6150 | − | UGCAACCCCCGGGGACGCGCCGC | 23 | 10749 |
| HSV1-UL19-6151 | − | CUGCAACCCCCGGGGACGCGCCGC | 24 | 10750 |
| HSV1-UL19-6152 | − | GUCGUGCAGCACGUCCGC | 18 | 10751 |
| HSV1-UL19-6153 | − | CGUCGUGCAGCACGUCCGC | 19 | 10752 |
| HSV1-UL19-2230 | − | CCGUCGUGCAGCACGUCCGC | 20 | 2503 |
| HSV1-UL19-6154 | − | CCCGUCGUGCAGCACGUCCGC | 21 | 10753 |
| HSV1-UL19-6155 | − | GCCCGUCGUGCAGCACGUCCGC | 22 | 10754 |
| HSV1-UL19-6156 | − | AGCCCGUCGUGCAGCACGUCCGC | 23 | 10755 |
| HSV1-UL19-6157 | − | CAGCCCGUCGUGCAGCACGUCCGC | 24 | 10756 |
| HSV1-UL19-6158 | − | CGACUGCCGGGUUAGCGC | 18 | 10757 |
| HSV1-UL19-6159 | − | GCGACUGCCGGGUUAGCGC | 19 | 10758 |
| HSV1-UL19-387 | − | CGCGACUGCCGGGUUAGCGC | 20 | 773 |
| HSV1-UL19-6160 | − | UCGCGACUGCCGGGUUAGCGC | 21 | 10759 |
| HSV1-UL19-6161 | − | AUCGCGACUGCCGGGUUAGCGC | 22 | 10760 |
| HSV1-UL19-6162 | − | CAUCGCGACUGCCGGGUUAGCGC | 23 | 10761 |
| HSV1-UL19-6163 | − | CCAUCGCGACUGCCGGGUUAGCGC | 24 | 10762 |
| HSV1-UL19-6164 | − | ACGGGGAAGCCCACGCGC | 18 | 10763 |
| HSV1-UL19-6165 | − | AACGGGGAAGCCCACGCGC | 19 | 10764 |
| HSV1-UL19-578 | − | CAACGGGGAAGCCCACGCGC | 20 | 964 |
| HSV1-UL19-6166 | − | GCAACGGGGAAGCCCACGCGC | 21 | 10765 |
| HSV1-UL19-6167 | − | CGCAACGGGGAAGCCCACGCGC | 22 | 10766 |
| HSV1-UL19-6168 | − | CCGCAACGGGGAAGCCCACGCGC | 23 | 10767 |
| HSV1-UL19-6169 | − | CCCGCAACGGGGAAGCCCACGCGC | 24 | 10768 |
| HSV1-UL19-6170 | − | ACGCUCACCCAGCCGCGC | 18 | 10769 |
| HSV1-UL19-6171 | − | CACGCUCACCCAGCCGCGC | 19 | 10770 |
| HSV1-UL19-2255 | − | UCACGCUCACCCAGCCGCGC | 20 | 2518 |
| HSV1-UL19-6172 | − | UUCACGCUCACCCAGCCGCGC | 21 | 10771 |
| HSV1-UL19-6173 | − | CUUCACGCUCACCCAGCCGCGC | 22 | 10772 |
| HSV1-UL19-6174 | − | ACUUCACGCUCACCCAGCCGCGC | 23 | 10773 |
| HSV1-UL19-6175 | − | AACUUCACGCUCACCCAGCCGCGC | 24 | 10774 |
| HSV1-UL19-6176 | − | CGUCCACGCGCUGUUCGC | 18 | 10775 |
| HSV1-UL19-6177 | − | CCGUCCACGCGCUGUUCGC | 19 | 10776 |
| HSV1-UL19-446 | − | CCCGUCCACGCGCUGUUCGC | 20 | 832 |
| HSV1-UL19-6178 | − | CCCCGUCCACGCGCUGUUCGC | 21 | 10777 |
| HSV1-UL19-6179 | − | UCCCCGUCCACGCGCUGUUCGC | 22 | 10778 |
| HSV1-UL19-6180 | − | CUCCCCGUCCACGCGCUGUUCGC | 23 | 10779 |
| HSV1-UL19-6181 | − | CCUCCCCGUCCACGCGCUGUUCGC | 24 | 10780 |
| HSV1-UL19-6182 | − | GCUGCACAACACCCAGGC | 18 | 10781 |
| HSV1-UL19-6183 | − | UGCUGCACAACACCCAGGC | 19 | 10782 |
| HSV1-UL19-2192 | − | CUGCUGCACAACACCCAGGC | 20 | 2478 |
| HSV1-UL19-6184 | − | GCUGCUGCACAACACCCAGGC | 21 | 10783 |
| HSV1-UL19-6185 | − | AGCUGCUGCACAACACCCAGGC | 22 | 10784 |
| HSV1-UL19-6186 | − | CAGCUGCUGCACAACACCCAGGC | 23 | 10785 |
| HSV1-UL19-6187 | − | CCAGCUGCUGCACAACACCCAGGC | 24 | 10786 |
| HSV1-UL19-6188 | − | CUCAUGUACGACCACGGC | 18 | 10787 |
| HSV1-UL19-6189 | − | CCUCAUGUACGACCACGGC | 19 | 10788 |
| HSV1-UL19-2293 | − | CCCUCAUGUACGACCACGGC | 20 | 2539 |
| HSV1-UL19-6190 | − | GCCCUCAUGUACGACCACGGC | 21 | 10789 |
| HSV1-UL19-6191 | − | CGCCCUCAUGUACGACCACGGC | 22 | 10790 |
| HSV1-UL19-6192 | − | CCGCCCUCAUGUACGACCACGGC | 23 | 10791 |
| HSV1-UL19-6193 | − | ACCGCCCUCAUGUACGACCACGGC | 24 | 10792 |
| HSV1-UL19-6194 | − | GCAGGGAUGGACCACGGC | 18 | 10793 |
| HSV1-UL19-6195 | − | CGCAGGGAUGGACCACGGC | 19 | 10794 |
| HSV1-UL19-2275 | − | GCGCAGGGAUGGACCACGGC | 20 | 2532 |
| HSV1-UL19-6196 | − | CGCGCAGGGAUGGACCACGGC | 21 | 10795 |
| HSV1-UL19-6197 | − | GCGCGCAGGGAUGGACCACGGC | 22 | 10796 |
| HSV1-UL19-6198 | − | GGCGCGCAGGGAUGGACCACGGC | 23 | 10797 |
| HSV1-UL19-6199 | − | CGGCGCGCAGGGAUGGACCACGGC | 24 | 10798 |
| HSV1-UL19-6200 | − | GACUUUACCCUGACCGGC | 18 | 10799 |
| HSV1-UL19-6201 | − | UGACUUUACCCUGACCGGC | 19 | 10800 |
| HSV1-UL19-2176 | − | AUGACUUUACCCUGACCGGC | 20 | 2467 |
| HSV1-UL19-6202 | − | GAUGACUUUACCCUGACCGGC | 21 | 10801 |
| HSV1-UL19-6203 | − | UGAUGACUUUACCCUGACCGGC | 22 | 10802 |
| HSV1-UL19-6204 | − | UUGAUGACUUUACCCUGACCGGC | 23 | 10803 |
| HSV1-UL19-6205 | − | GUUGAUGACUUUACCCUGACCGGC | 24 | 10804 |
| HSV1-UL19-6206 | − | CCGGAGAUCGCCCCCGGC | 18 | 10805 |
| HSV1-UL19-6207 | − | CCCGGAGAUCGCCCCCGGC | 19 | 10806 |
| HSV1-UL19-2210 | − | UCCCGGAGAUCGCCCCCGGC | 20 | 2489 |
| HSV1-UL19-6208 | − | GUCCCGGAGAUCGCCCCCGGC | 21 | 10807 |
| HSV1-UL19-6209 | − | GGUCCCGGAGAUCGCCCCCGGC | 22 | 10808 |
| HSV1-UL19-6210 | − | UGGUCCCGGAGAUCGCCCCCGGC | 23 | 10809 |
| HSV1-UL19-6211 | − | GUGGUCCCGGAGAUCGCCCCCGGC | 24 | 10810 |
| HSV1-UL19-6212 | − | AGCUCCAGGUGGCCCGGC | 18 | 10811 |
| HSV1-UL19-6213 | − | CAGCUCCAGGUGGCCCGGC | 19 | 10812 |
| HSV1-UL19-2249 | − | CCAGCUCCAGGUGGCCCGGC | 20 | 2516 |
| HSV1-UL19-6214 | − | GCCAGCUCCAGGUGGCCCGGC | 21 | 10813 |
| HSV1-UL19-6215 | − | GGCCAGCUCCAGGUGGCCCGGC | 22 | 10814 |
| HSV1-UL19-6216 | − | GGGCCAGCUCCAGGUGGCCCGGC | 23 | 10815 |
| HSV1-UL19-6217 | − | UGGGCCAGCUCCAGGUGGCCCGGC | 24 | 10816 |
| HSV1-UL19-6218 | − | GACGUUCCCCCGGCCGGC | 18 | 10817 |
| HSV1-UL19-6219 | − | GGACGUUCCCCCGGCCGGC | 19 | 10818 |
| HSV1-UL19-2142 | − | GGGACGUUCCCCCGGCCGGC | 20 | 2451 |
| HSV1-UL19-6220 | − | GGGGACGUUCCCCCGGCCGGC | 21 | 10819 |
| HSV1-UL19-6221 | − | GGGGGACGUUCCCCCGGCCGGC | 22 | 10820 |
| HSV1-UL19-6222 | − | GGGGGGACGUUCCCCCGGCCGGC | 23 | 10821 |
| HSV1-UL19-6223 | − | GGGGGGGACGUUCCCCCGGCCGGC | 24 | 10822 |
| HSV1-UL19-6224 | − | CGUCCGCGAGAGCGCGGC | 18 | 10823 |
| HSV1-UL19-6225 | − | ACGUCCGCGAGAGCGCGGC | 19 | 10824 |
| HSV1-UL19-460 | − | CACGUCCGCGAGAGCGCGGC | 20 | 846 |
| HSV1-UL19-6226 | − | GCACGUCCGCGAGAGCGCGGC | 21 | 10825 |
| HSV1-UL19-6227 | − | AGCACGUCCGCGAGAGCGCGGC | 22 | 10826 |
| HSV1-UL19-6228 | − | CAGCACGUCCGCGAGAGCGCGGC | 23 | 10827 |
| HSV1-UL19-6229 | − | GCAGCACGUCCGCGAGAGCGCGGC | 24 | 10828 |
| HSV1-UL19-6230 | − | GAUCUGGUGUCCAUCGGC | 18 | 10829 |
| HSV1-UL19-6231 | − | GGAUCUGGUGUCCAUCGGC | 19 | 10830 |
| HSV1-UL19-2086 | − | CGGAUCUGGUGUCCAUCGGC | 20 | 2422 |
| HSV1-UL19-6232 | − | GCGGAUCUGGUGUCCAUCGGC | 21 | 10831 |
| HSV1-UL19-6233 | − | CGCGGAUCUGGUGUCCAUCGGC | 22 | 10832 |
| HSV1-UL19-6234 | − | GCGCGGAUCUGGUGUCCAUCGGC | 23 | 10833 |
| HSV1-UL19-6235 | − | CGCGCGGAUCUGGUGUCCAUCGGC | 24 | 10834 |
| HSV1-UL19-6236 | − | UUCCGGGACGCCCGGGGC | 18 | 10835 |
| HSV1-UL19-6237 | − | GUUCCGGGACGCCCGGGGC | 19 | 10836 |
| HSV1-UL19-2152 | − | CGUUCCGGGACGCCCGGGGC | 20 | 2455 |
| HSV1-UL19-6238 | − | GCGUUCCGGGACGCCCGGGGC | 21 | 10837 |
| HSV1-UL19-6239 | − | GGCGUUCCGGGACGCCCGGGGC | 22 | 10838 |
| HSV1-UL19-6240 | − | CGGCGUUCCGGGACGCCCGGGGC | 23 | 10839 |
| HSV1-UL19-6241 | − | GCGGCGUUCCGGGACGCCCGGGGC | 24 | 10840 |
| HSV1-UL19-6242 | − | GCGAACGUGGACCUGGGC | 18 | 10841 |
| HSV1-UL19-6243 | − | CGCGAACGUGGACCUGGGC | 19 | 10842 |
| HSV1-UL19-2258 | − | GCGCGAACGUGGACCUGGGC | 20 | 2521 |
| HSV1-UL19-6244 | − | CGCGCGAACGUGGACCUGGGC | 21 | 10843 |
| HSV1-UL19-6245 | − | GCGCGCGAACGUGGACCUGGGC | 22 | 10844 |
| HSV1-UL19-6246 | − | CGCGCGCGAACGUGGACCUGGGC | 23 | 10845 |
| HSV1-UL19-6247 | − | CCGCGCGCGAACGUGGACCUGGGC | 24 | 10846 |
| HSV1-UL19-6248 | − | GCCCGGCACGAAACUGGC | 18 | 10847 |
| HSV1-UL19-6249 | − | GGCCCGGCACGAAACUGGC | 19 | 10848 |
| HSV1-UL19-485 | − | UGGCCCGGCACGAAACUGGC | 20 | 871 |
| HSV1-UL19-6250 | − | GUGGCCCGGCACGAAACUGGC | 21 | 10849 |
| HSV1-UL19-6251 | − | GGUGGCCCGGCACGAAACUGGC | 22 | 10850 |
| HSV1-UL19-6252 | − | AGGUGGCCCGGCACGAAACUGGC | 23 | 10851 |
| HSV1-UL19-6253 | − | CAGGUGGCCCGGCACGAAACUGGC | 24 | 10852 |
| HSV1-UL19-6254 | − | GCGGAACGCGGUCGUGGC | 18 | 10853 |
| HSV1-UL19-6255 | − | UGCGGAACGCGGUCGUGGC | 19 | 10854 |
| HSV1-UL19-510 | − | CUGCGGAACGCGGUCGUGGC | 20 | 896 |
| HSV1-UL19-6256 | − | CCUGCGGAACGCGGUCGUGGC | 21 | 10855 |
| HSV1-UL19-6257 | − | ACCUGCGGAACGCGGUCGUGGC | 22 | 10856 |
| HSV1-UL19-6258 | − | UACCUGCGGAACGCGGUCGUGGC | 23 | 10857 |
| HSV1-UL19-6259 | − | GUACCUGCGGAACGCGGUCGUGGC | 24 | 10858 |
| HSV1-UL19-6260 | − | CCUGGCCACCAGGGUGGC | 18 | 10859 |
| HSV1-UL19-6261 | − | GCCUGGCCACCAGGGUGGC | 19 | 10860 |
| HSV1-UL19-2045 | − | CGCCUGGCCACCAGGGUGGC | 20 | 2389 |
| HSV1-UL19-6262 | − | CCGCCUGGCCACCAGGGUGGC | 21 | 10861 |
| HSV1-UL19-6263 | − | GCCGCCUGGCCACCAGGGUGGC | 22 | 10862 |
| HSV1-UL19-6264 | − | GGCCGCCUGGCCACCAGGGUGGC | 23 | 10863 |
| HSV1-UL19-6265 | − | CGGCCGCCUGGCCACCAGGGUGGC | 24 | 10864 |
| HSV1-UL19-6266 | − | GCCACCUGCUGGAGAUGC | 18 | 10865 |
| HSV1-UL19-6267 | − | CGCCACCUGCUGGAGAUGC | 19 | 10866 |
| HSV1-UL19-243 | − | CCGCCACCUGCUGGAGAUGC | 20 | 629 |
| HSV1-UL19-6268 | − | GCCGCCACCUGCUGGAGAUGC | 21 | 10867 |
| HSV1-UL19-6269 | − | GGCCGCCACCUGCUGGAGAUGC | 22 | 10868 |
| HSV1-UL19-6270 | − | GGGCCGCCACCUGCUGGAGAUGC | 23 | 10869 |
| HSV1-UL19-6271 | − | UGGGCCGCCACCUGCUGGAGAUGC | 24 | 10870 |
| HSV1-UL19-6272 | − | ACGUGGGCCGCCACCUGC | 18 | 10871 |
| HSV1-UL19-6273 | − | GACGUGGGCCGCCACCUGC | 19 | 10872 |
| HSV1-UL19-242 | − | CGACGUGGGCCGCCACCUGC | 20 | 628 |
| HSV1-UL19-6274 | − | ACGACGUGGGCCGCCACCUGC | 21 | 10873 |
| HSV1-UL19-6275 | − | GACGACGUGGGCCGCCACCUGC | 22 | 10874 |
| HSV1-UL19-6276 | − | GGACGACGUGGGCCGCCACCUGC | 23 | 10875 |
| HSV1-UL19-6277 | − | UGGACGACGUGGGCCGCCACCUGC | 24 | 10876 |
| HSV1-UL19-6278 | − | UGGCCGACGUGGAGCUGC | 18 | 10877 |
| HSV1-UL19-6279 | − | GUGGCCGACGUGGAGCUGC | 19 | 10878 |
| HSV1-UL19-311 | − | GGUGGCCGACGUGGAGCUGC | 20 | 697 |
| HSV1-UL19-6280 | − | GGGUGGCCGACGUGGAGCUGC | 21 | 10879 |
| HSV1-UL19-6281 | − | GGGGUGGCCGACGUGGAGCUGC | 22 | 10880 |
| HSV1-UL19-6282 | − | GGGGGUGGCCGACGUGGAGCUGC | 23 | 10881 |
| HSV1-UL19-6283 | − | UGGGGGUGGCCGACGUGGAGCUGC | 24 | 10882 |
| HSV1-UL19-6284 | − | GCCGCCAAACAUCGCUGC | 18 | 10883 |
| HSV1-UL19-6285 | − | CGCCGCCAAACAUCGCUGC | 19 | 10884 |
| HSV1-UL19-2303 | − | UCGCCGCCAAACAUCGCUGC | 20 | 2545 |
| HSV1-UL19-6286 | − | AUCGCCGCCAAACAUCGCUGC | 21 | 10885 |
| HSV1-UL19-6287 | − | CAUCGCCGCCAAACAUCGCUGC | 22 | 10886 |
| HSV1-UL19-6288 | − | ACAUCGCCGCCAAACAUCGCUGC | 23 | 10887 |
| HSV1-UL19-6289 | − | GACAUCGCCGCCAAACAUCGCUGC | 24 | 10888 |
| HSV1-UL19-6290 | − | AGAUGCUGCACGUGCUGC | 18 | 10889 |
| HSV1-UL19-6291 | − | CAGAUGCUGCACGUGCUGC | 19 | 10890 |
| HSV1-UL19-194 | − | CCAGAUGCUGCACGUGCUGC | 20 | 580 |
| HSV1-UL19-6292 | − | ACCAGAUGCUGCACGUGCUGC | 21 | 10891 |
| HSV1-UL19-6293 | − | GACCAGAUGCUGCACGUGCUGC | 22 | 10892 |
| HSV1-UL19-6294 | − | CGACCAGAUGCUGCACGUGCUGC | 23 | 10893 |
| HSV1-UL19-6295 | − | CCGACCAGAUGCUGCACGUGCUGC | 24 | 10894 |
| HSV1-UL19-6296 | − | UGCCUGGAGCGCCUGAUC | 18 | 10895 |
| HSV1-UL19-6297 | − | CUGCCUGGAGCGCCUGAUC | 19 | 10896 |
| HSV1-UL19-2305 | − | GCUGCCUGGAGCGCCUGAUC | 20 | 2546 |
| HSV1-UL19-6298 | − | CGCUGCCUGGAGCGCCUGAUC | 21 | 10897 |
| HSV1-UL19-6299 | − | UCGCUGCCUGGAGCGCCUGAUC | 22 | 10898 |
| HSV1-UL19-6300 | − | AUCGCUGCCUGGAGCGCCUGAUC | 23 | 10899 |
| HSV1-UL19-6301 | − | CAUCGCUGCCUGGAGCGCCUGAUC | 24 | 10900 |
| HSV1-UL19-6302 | − | CCGGGGUGCCGCGAACUC | 18 | 10901 |
| HSV1-UL19-6303 | − | CCCGGGGUGCCGCGAACUC | 19 | 10902 |
| HSV1-UL19-2311 | − | CCCCGGGGUGCCGCGAACUC | 20 | 2550 |
| HSV1-UL19-6304 | − | CCCCCGGGGUGCCGCGAACUC | 21 | 10903 |
| HSV1-UL19-6305 | − | CCCCCCGGGGUGCCGCGAACUC | 22 | 10904 |
| HSV1-UL19-6306 | − | GCCCCCCGGGGUGCCGCGAACUC | 23 | 10905 |
| HSV1-UL19-6307 | − | CGCCCCCCGGGGUGCCGCGAACUC | 24 | 10906 |
| HSV1-UL19-6308 | − | UACGUCGUGACCUACCUC | 18 | 10907 |
| HSV1-UL19-6309 | − | GUACGUCGUGACCUACCUC | 19 | 10908 |
| HSV1-UL19-359 | − | CGUACGUCGUGACCUACCUC | 20 | 745 |
| HSV1-UL19-6310 | − | UCGUACGUCGUGACCUACCUC | 21 | 10909 |
| HSV1-UL19-6311 | − | CUCGUACGUCGUGACCUACCUC | 22 | 10910 |
| HSV1-UL19-6312 | − | UCUCGUACGUCGUGACCUACCUC | 23 | 10911 |
| HSV1-UL19-6313 | − | GUCUCGUACGUCGUGACCUACCUC | 24 | 10912 |
| HSV1-UL19-6314 | − | CAGACGCUGGACGAGCUC | 18 | 10913 |
| HSV1-UL19-6315 | − | GCAGACGCUGGACGAGCUC | 19 | 10914 |
| HSV1-UL19-2083 | − | GGCAGACGCUGGACGAGCUC | 20 | 2419 |
| HSV1-UL19-6316 | − | CGGCAGACGCUGGACGAGCUC | 21 | 10915 |
| HSV1-UL19-6317 | − | CCGGCAGACGCUGGACGAGCUC | 22 | 10916 |
| HSV1-UL19-6318 | − | ACCGGCAGACGCUGGACGAGCUC | 23 | 10917 |
| HSV1-UL19-6319 | − | AACCGGCAGACGCUGGACGAGCUC | 24 | 10918 |
| HSV1-UL19-6320 | − | UAUGACGCAUCCCCGCUC | 18 | 10919 |
| HSV1-UL19-6321 | − | CUAUGACGCAUCCCCGCUC | 19 | 10920 |
| HSV1-UL19-2323 | − | UCUAUGACGCAUCCCCGCUC | 20 | 2555 |
| HSV1-UL19-6322 | − | GUCUAUGACGCAUCCCCGCUC | 21 | 10921 |
| HSV1-UL19-6323 | − | CGUCUAUGACGCAUCCCCGCUC | 22 | 10922 |
| HSV1-UL19-6324 | − | UCGUCUAUGACGCAUCCCCGCUC | 23 | 10923 |
| HSV1-UL19-6325 | − | CUCGUCUAUGACGCAUCCCCGCUC | 24 | 10924 |
| HSV1-UL19-6326 | − | CCCUGGUCCCCCCGGCUC | 18 | 10925 |
| HSV1-UL19-6327 | − | CCCCUGGUCCCCCCGGCUC | 19 | 10926 |
| HSV1-UL19-455 | − | CCCCCUGGUCCCCCCGGCUC | 20 | 841 |
| HSV1-UL19-6328 | − | UCCCCCUGGUCCCCCCGGCUC | 21 | 10927 |
| HSV1-UL19-6329 | − | GUCCCCCUGGUCCCCCCGGCUC | 22 | 10928 |
| HSV1-UL19-6330 | − | GGUCCCCCUGGUCCCCCCGGCUC | 23 | 10929 |
| HSV1-UL19-6331 | − | AGGUCCCCCUGGUCCCCCCGGCUC | 24 | 10930 |
| HSV1-UL19-6332 | − | ACAACGCCAACCUGGCUC | 18 | 10931 |
| HSV1-UL19-6333 | − | GACAACGCCAACCUGGCUC | 19 | 10932 |
| HSV1-UL19-2129 | − | CGACAACGCCAACCUGGCUC | 20 | 2447 |
| HSV1-UL19-6334 | − | CCGACAACGCCAACCUGGCUC | 21 | 10933 |
| HSV1-UL19-6335 | − | CCCGACAACGCCAACCUGGCUC | 22 | 10934 |
| HSV1-UL19-6336 | − | GCCCGACAACGCCAACCUGGCUC | 23 | 10935 |
| HSV1-UL19-6337 | − | AGCCCGACAACGCCAACCUGGCUC | 24 | 10936 |
| HSV1-UL19-6338 | − | GCCGUCGAGGCCUGGCUC | 18 | 10937 |
| HSV1-UL19-6339 | − | GGCCGUCGAGGCCUGGCUC | 19 | 10938 |
| HSV1-UL19-2056 | − | AGGCCGUCGAGGCCUGGCUC | 20 | 2398 |
| HSV1-UL19-6340 | − | GAGGCCGUCGAGGCCUGGCUC | 21 | 10939 |
| HSV1-UL19-6341 | − | GGAGGCCGUCGAGGCCUGGCUC | 22 | 10940 |
| HSV1-UL19-6342 | − | GGGAGGCCGUCGAGGCCUGGCUC | 23 | 10941 |
| HSV1-UL19-6343 | − | CGGGAGGCCGUCGAGGCCUGGCUC | 24 | 10942 |
| HSV1-UL19-6344 | − | CGCGGGGCUCCCCCUCUC | 18 | 10943 |
| HSV1-UL19-6345 | − | CCGCGGGGCUCCCCCUCUC | 19 | 10944 |
| HSV1-UL19-2263 | − | GCCGCGGGGCUCCCCCUCUC | 20 | 2525 |
| HSV1-UL19-6346 | − | GGCCGCGGGGCUCCCCCUCUC | 21 | 10945 |
| HSV1-UL19-6347 | − | GGGCCGCGGGGCUCCCCCUCUC | 22 | 10946 |
| HSV1-UL19-6348 | − | UGGGCCGCGGGGCUCCCCCUCUC | 23 | 10947 |
| HSV1-UL19-6349 | − | CUGGGCCGCGGGGCUCCCCCUCUC | 24 | 10948 |
| HSV1-UL19-6350 | − | AGGUGCUGCGCCUGUCUC | 18 | 10949 |
| HSV1-UL19-6351 | − | CAGGUGCUGCGCCUGUCUC | 19 | 10950 |
| HSV1-UL19-274 | − | CCAGGUGCUGCGCCUGUCUC | 20 | 660 |
| HSV1-UL19-6352 | − | GCCAGGUGCUGCGCCUGUCUC | 21 | 10951 |
| HSV1-UL19-6353 | − | CGCCAGGUGCUGCGCCUGUCUC | 22 | 10952 |
| HSV1-UL19-6354 | − | CCGCCAGGUGCUGCGCCUGUCUC | 23 | 10953 |
| HSV1-UL19-6355 | − | ACCGCCAGGUGCUGCGCCUGUCUC | 24 | 10954 |
| HSV1-UL19-6356 | − | GAUGGUGCCCGCCUUCUC | 18 | 10955 |
| HSV1-UL19-6357 | − | UGAUGGUGCCCGCCUUCUC | 19 | 10956 |
| HSV1-UL19-2201 | − | GUGAUGGUGCCCGCCUUCUC | 20 | 2484 |
| HSV1-UL19-6358 | − | CGUGAUGGUGCCCGCCUUCUC | 21 | 10957 |
| HSV1-UL19-6359 | − | ACGUGAUGGUGCCCGCCUUCUC | 22 | 10958 |
| HSV1-UL19-6360 | − | UACGUGAUGGUGCCCGCCUUCUC | 23 | 10959 |
| HSV1-UL19-6361 | − | CUACGUGAUGGUGCCCGCCUUCUC | 24 | 10960 |
| HSV1-UL19-6362 | − | CGGCCAGAGCGACCCGUC | 18 | 10961 |
| HSV1-UL19-6363 | − | ACGGCCAGAGCGACCCGUC | 19 | 10962 |
| HSV1-UL19-2294 | − | CACGGCCAGAGCGACCCGUC | 20 | 2540 |
| HSV1-UL19-6364 | − | CCACGGCCAGAGCGACCCGUC | 21 | 10963 |
| HSV1-UL19-6365 | − | ACCACGGCCAGAGCGACCCGUC | 22 | 10964 |
| HSV1-UL19-6366 | − | GACCACGGCCAGAGCGACCCGUC | 23 | 10965 |
| HSV1-UL19-6367 | − | CGACCACGGCCAGAGCGACCCGUC | 24 | 10966 |
| HSV1-UL19-6368 | − | GGCCUGUUCAAUCCGGUC | 18 | 10967 |
| HSV1-UL19-6369 | − | GGGCCUGUUCAAUCCGGUC | 19 | 10968 |
| HSV1-UL19-2095 | − | UGGGCCUGUUCAAUCCGGUC | 20 | 2429 |
| HSV1-UL19-6370 | − | CUGGGCCUGUUCAAUCCGGUC | 21 | 10969 |
| HSV1-UL19-6371 | − | CCUGGGCCUGUUCAAUCCGGUC | 22 | 10970 |
| HSV1-UL19-6372 | − | CCCUGGGCCUGUUCAAUCCGGUC | 23 | 10971 |
| HSV1-UL19-6373 | − | CCCCUGGGCCUGUUCAAUCCGGUC | 24 | 10972 |
| HSV1-UL19-6374 | − | AACGUUGACGCGGCGGUC | 18 | 10973 |
| HSV1-UL19-6375 | − | GAACGUUGACGCGGCGGUC | 19 | 10974 |
| HSV1-UL19-280 | − | UGAACGUUGACGCGGCGGUC | 20 | 666 |
| HSV1-UL19-6376 | − | AUGAACGUUGACGCGGCGGUC | 21 | 10975 |
| HSV1-UL19-6377 | − | GAUGAACGUUGACGCGGCGGUC | 22 | 10976 |
| HSV1-UL19-6378 | − | UGAUGAACGUUGACGCGGCGGUC | 23 | 10977 |
| HSV1-UL19-6379 | − | CUGAUGAACGUUGACGCGGCGGUC | 24 | 10978 |
| HSV1-UL19-6380 | − | GGGCGGGUCCGAUGGGUC | 18 | 10979 |
| HSV1-UL19-6381 | − | CGGGCGGGUCCGAUGGGUC | 19 | 10980 |
| HSV1-UL19-2125 | − | ACGGGCGGGUCCGAUGGGUC | 20 | 2445 |
| HSV1-UL19-6382 | − | CACGGGCGGGUCCGAUGGGUC | 21 | 10981 |
| HSV1-UL19-6383 | − | CCACGGGCGGGUCCGAUGGGUC | 22 | 10982 |
| HSV1-UL19-6384 | − | CCCACGGGCGGGUCCGAUGGGUC | 23 | 10983 |
| HSV1-UL19-6385 | − | GCCCACGGGCGGGUCCGAUGGGUC | 24 | 10984 |
| HSV1-UL19-6386 | − | ACGUACGGCGAGAUGGUC | 18 | 10985 |
| HSV1-UL19-6387 | − | GACGUACGGCGAGAUGGUC | 19 | 10986 |
| HSV1-UL19-2066 | − | UGACGUACGGCGAGAUGGUC | 20 | 2406 |
| HSV1-UL19-6388 | − | GUGACGUACGGCGAGAUGGUC | 21 | 10987 |
| HSV1-UL19-6389 | − | GGUGACGUACGGCGAGAUGGUC | 22 | 10988 |
| HSV1-UL19-6390 | − | CGGUGACGUACGGCGAGAUGGUC | 23 | 10989 |
| HSV1-UL19-6391 | − | CCGGUGACGUACGGCGAGAUGGUC | 24 | 10990 |
| HSV1-UL19-6392 | − | CUGCAGAACAUGGUGGUC | 18 | 10991 |
| HSV1-UL19-6393 | − | CCUGCAGAACAUGGUGGUC | 19 | 10992 |
| HSV1-UL19-2207 | − | CCCUGCAGAACAUGGUGGUC | 20 | 2487 |
| HSV1-UL19-6394 | − | ACCCUGCAGAACAUGGUGGUC | 21 | 10993 |
| HSV1-UL19-6395 | − | CACCCUGCAGAACAUGGUGGUC | 22 | 10994 |
| HSV1-UL19-6396 | − | CCACCCUGCAGAACAUGGUGGUC | 23 | 10995 |
| HSV1-UL19-6397 | − | GCCACCCUGCAGAACAUGGUGGUC | 24 | 10996 |
| HSV1-UL19-6398 | − | GCGUCGGAGGCGUACUUC | 18 | 10997 |
| HSV1-UL19-6399 | − | CGCGUCGGAGGCGUACUUC | 19 | 10998 |
| HSV1-UL19-2248 | − | GCGCGUCGGAGGCGUACUUC | 20 | 2515 |
| HSV1-UL19-6400 | − | CGCGCGUCGGAGGCGUACUUC | 21 | 10999 |
| HSV1-UL19-6401 | − | GCGCGCGUCGGAGGCGUACUUC | 22 | 11000 |
| HSV1-UL19-6402 | − | AGCGCGCGUCGGAGGCGUACUUC | 23 | 11001 |
| HSV1-UL19-6403 | − | GAGCGCGCGUCGGAGGCGUACUUC | 24 | 11002 |
| HSV1-UL19-6404 | − | ACCUCGGGGGAGACCUUC | 18 | 11003 |
| HSV1-UL19-6405 | − | UACCUCGGGGGAGACCUUC | 19 | 11004 |
| HSV1-UL19-2170 | − | CUACCUCGGGGGAGACCUUC | 20 | 2463 |
| HSV1-UL19-6406 | − | CCUACCUCGGGGGAGACCUUC | 21 | 11005 |
| HSV1-UL19-6407 | − | ACCUACCUCGGGGGAGACCUUC | 22 | 11006 |
| HSV1-UL19-6408 | − | GACCUACCUCGGGGGAGACCUUC | 23 | 11007 |
| HSV1-UL19-6409 | − | UGACCUACCUCGGGGGAGACCUUC | 24 | 11008 |
| HSV1-UL19-6410 | − | CGCCUCCUGCAGUCCUUC | 18 | 11009 |
| HSV1-UL19-6411 | − | GCGCCUCCUGCAGUCCUUC | 19 | 11010 |
| HSV1-UL19-2060 | − | AGCGCCUCCUGCAGUCCUUC | 20 | 2401 |
| HSV1-UL19-6412 | − | CAGCGCCUCCUGCAGUCCUUC | 21 | 11011 |
| HSV1-UL19-6413 | − | ACAGCGCCUCCUGCAGUCCUUC | 22 | 11012 |
| HSV1-UL19-6414 | − | AACAGCGCCUCCUGCAGUCCUUC | 23 | 11013 |
| HSV1-UL19-6415 | − | AAACAGCGCCUCCUGCAGUCCUUC | 24 | 11014 |
| HSV1-UL19-6416 | − | CCACCAUCGCCGCCGUUC | 18 | 11015 |
| HSV1-UL19-6417 | − | GCCACCAUCGCCGCCGUUC | 19 | 11016 |
| HSV1-UL19-2159 | − | CGCCACCAUCGCCGCCGUUC | 20 | 2458 |
| HSV1-UL19-6418 | − | CCGCCACCAUCGCCGCCGUUC | 21 | 11017 |
| HSV1-UL19-6419 | − | CCCGCCACCAUCGCCGCCGUUC | 22 | 11018 |
| HSV1-UL19-6420 | − | CCCCGCCACCAUCGCCGCCGUUC | 23 | 11019 |
| HSV1-UL19-6421 | − | CCCCCGCCACCAUCGCCGCCGUUC | 24 | 11020 |
| HSV1-UL19-6422 | − | ACGCGGUGCGCGGCGUUC | 18 | 11021 |
| HSV1-UL19-6423 | − | CACGCGGUGCGCGGCGUUC | 19 | 11022 |
| HSV1-UL19-2164 | − | ACACGCGGUGCGCGGCGUUC | 20 | 2461 |
| HSV1-UL19-6424 | − | AACACGCGGUGCGCGGCGUUC | 21 | 11023 |
| HSV1-UL19-6425 | − | CAACACGCGGUGCGCGGCGUUC | 22 | 11024 |
| HSV1-UL19-6426 | − | ACAACACGCGGUGCGCGGCGUUC | 23 | 11025 |
| HSV1-UL19-6427 | − | AACAACACGCGGUGCGCGGCGUUC | 24 | 11026 |
| HSV1-UL19-6428 | − | CUAUGUCCGGCGGCGUUC | 18 | 11027 |
| HSV1-UL19-6429 | − | GCUAUGUCCGGCGGCGUUC | 19 | 11028 |
| HSV1-UL19-331 | − | CGCUAUGUCCGGCGGCGUUC | 20 | 717 |
| HSV1-UL19-6430 | − | GCGCUAUGUCCGGCGGCGUUC | 21 | 11029 |
| HSV1-UL19-6431 | − | GGCGCUAUGUCCGGCGGCGUUC | 22 | 11030 |
| HSV1-UL19-6432 | − | UGGCGCUAUGUCCGGCGGCGUUC | 23 | 11031 |
| HSV1-UL19-6433 | − | CUGGCGCUAUGUCCGGCGGCGUUC | 24 | 11032 |
| HSV1-UL19-6434 | − | ACUGAGAACGUGCUGUUC | 18 | 11033 |
| HSV1-UL19-6435 | − | GACUGAGAACGUGCUGUUC | 19 | 11034 |
| HSV1-UL19-2244 | − | UGACUGAGAACGUGCUGUUC | 20 | 2513 |
| HSV1-UL19-6436 | − | GUGACUGAGAACGUGCUGUUC | 21 | 11035 |
| HSV1-UL19-6437 | − | UGUGACUGAGAACGUGCUGUUC | 22 | 11036 |
| HSV1-UL19-6438 | − | UUGUGACUGAGAACGUGCUGUUC | 23 | 11037 |
| HSV1-UL19-6439 | − | UUUGUGACUGAGAACGUGCUGUUC | 24 | 11038 |
| HSV1-UL19-6440 | − | GCGAGAAGCUGGUCUUUC | 18 | 11039 |
| HSV1-UL19-6441 | − | GGCGAGAAGCUGGUCUUUC | 19 | 11040 |
| HSV1-UL19-251 | − | CGGCGAGAAGCUGGUCUUUC | 20 | 637 |
| HSV1-UL19-6442 | − | UCGGCGAGAAGCUGGUCUUUC | 21 | 11041 |
| HSV1-UL19-6443 | − | AUCGGCGAGAAGCUGGUCUUUC | 22 | 11042 |
| HSV1-UL19-6444 | − | CAUCGGCGAGAAGCUGGUCUUUC | 23 | 11043 |
| HSV1-UL19-6445 | − | CCAUCGGCGAGAAGCUGGUCUUUC | 24 | 11044 |
| HSV1-UL19-6446 | − | ACCCGUGUGGCCUGUUUC | 18 | 11045 |
| HSV1-UL19-6447 | − | GACCCGUGUGGCCUGUUUC | 19 | 11046 |
| HSV1-UL19-572 | − | GGACCCGUGUGGCCUGUUUC | 20 | 958 |
| HSV1-UL19-6448 | − | AGGACCCGUGUGGCCUGUUUC | 21 | 11047 |
| HSV1-UL19-6449 | − | GAGGACCCGUGUGGCCUGUUUC | 22 | 11048 |
| HSV1-UL19-6450 | − | GGAGGACCCGUGUGGCCUGUUUC | 23 | 11049 |
| HSV1-UL19-6451 | − | UGGAGGACCCGUGUGGCCUGUUUC | 24 | 11050 |
| HSV1-UL19-6452 | − | UGCGAGACGAGCUUUUUC | 18 | 11051 |
| HSV1-UL19-6453 | − | CUGCGAGACGAGCUUUUUC | 19 | 11052 |
| HSV1-UL19-2050 | − | UCUGCGAGACGAGCUUUUUC | 20 | 2394 |
| HSV1-UL19-6454 | − | UUCUGCGAGACGAGCUUUUUC | 21 | 11053 |
| HSV1-UL19-6455 | − | CUUCUGCGAGACGAGCUUUUUC | 22 | 11054 |
| HSV1-UL19-6456 | − | GCUUCUGCGAGACGAGCUUUUUC | 23 | 11055 |
| HSV1-UL19-6457 | − | AGCUUCUGCGAGACGAGCUUUUUC | 24 | 11056 |
| HSV1-UL19-6458 | − | UGCAGUCCUUCCUGAAAG | 18 | 11057 |
| HSV1-UL19-6459 | − | CUGCAGUCCUUCCUGAAAG | 19 | 11058 |
| HSV1-UL19-226 | − | CCUGCAGUCCUUCCUGAAAG | 20 | 612 |
| HSV1-UL19-6460 | − | UCCUGCAGUCCUUCCUGAAAG | 21 | 11059 |
| HSV1-UL19-6461 | − | CUCCUGCAGUCCUUCCUGAAAG | 22 | 11060 |
| HSV1-UL19-6462 | − | CCUCCUGCAGUCCUUCCUGAAAG | 23 | 11061 |
| HSV1-UL19-6463 | − | GCCUCCUGCAGUCCUUCCUGAAAG | 24 | 11062 |
| HSV1-UL19-6464 | − | GUUUACGCGGGGGACAAG | 18 | 11063 |
| HSV1-UL19-6465 | − | CGUUUACGCGGGGGACAAG | 19 | 11064 |
| HSV1-UL19-2289 | − | GCGUUUACGCGGGGGACAAG | 20 | 2538 |
| HSV1-UL19-6466 | − | GGCGUUUACGCGGGGGACAAG | 21 | 11065 |
| HSV1-UL19-6467 | − | GGGCGUUUACGCGGGGGACAAG | 22 | 11066 |
| HSV1-UL19-6468 | − | GGGGCGUUUACGCGGGGGACAAG | 23 | 11067 |
| HSV1-UL19-6469 | − | GGGGGCGUUUACGCGGGGGACAAG | 24 | 11068 |
| HSV1-UL19-6470 | − | UGGGCGGGCAGGCGCAAG | 18 | 11069 |
| HSV1-UL19-6471 | − | CUGGGCGGGCAGGCGCAAG | 19 | 11070 |
| HSV1-UL19-2180 | − | GCUGGGCGGGCAGGCGCAAG | 20 | 2470 |
| HSV1-UL19-6472 | − | AGCUGGGCGGGCAGGCGCAAG | 21 | 11071 |
| HSV1-UL19-6473 | − | GAGCUGGGCGGGCAGGCGCAAG | 22 | 11072 |
| HSV1-UL19-6474 | − | GGAGCUGGGCGGGCAGGCGCAAG | 23 | 11073 |
| HSV1-UL19-6475 | − | CGGAGCUGGGCGGGCAGGCGCAAG | 24 | 11074 |
| HSV1-UL19-6476 | − | AGCUUUUUCCUGGGCAAG | 18 | 11075 |
| HSV1-UL19-6477 | − | GAGCUUUUUCCUGGGCAAG | 19 | 11076 |
| HSV1-UL19-2051 | − | CGAGCUUUUUCCUGGGCAAG | 20 | 2395 |
| HSV1-UL19-6478 | − | ACGAGCUUUUUCCUGGGCAAG | 21 | 11077 |
| HSV1-UL19-6479 | − | GACGAGCUUUUUCCUGGGCAAG | 22 | 11078 |
| HSV1-UL19-6480 | − | AGACGAGCUUUUUCCUGGGCAAG | 23 | 11079 |
| HSV1-UL19-6481 | − | GAGACGAGCUUUUUCCUGGGCAAG | 24 | 11080 |
| HSV1-UL19-6482 | − | UUGCAUCAUCAGCUCAAG | 18 | 11081 |
| HSV1-UL19-6483 | − | CUUGCAUCAUCAGCUCAAG | 19 | 11082 |
| HSV1-UL19-2238 | − | CCUUGCAUCAUCAGCUCAAG | 20 | 2507 |
| HSV1-UL19-6484 | − | GCCUUGCAUCAUCAGCUCAAG | 21 | 11083 |
| HSV1-UL19-6485 | − | GGCCUUGCAUCAUCAGCUCAAG | 22 | 11084 |
| HSV1-UL19-6486 | − | UGGCCUUGCAUCAUCAGCUCAAG | 23 | 11085 |
| HSV1-UL19-6487 | − | GUGGCCUUGCAUCAUCAGCUCAAG | 24 | 11086 |
| HSV1-UL19-6488 | − | CACCUGCUGGAGAUGCAG | 18 | 11087 |
| HSV1-UL19-6489 | − | CCACCUGCUGGAGAUGCAG | 19 | 11088 |
| HSV1-UL19-2077 | − | GCCACCUGCUGGAGAUGCAG | 20 | 2414 |
| HSV1-UL19-6490 | − | CGCCACCUGCUGGAGAUGCAG | 21 | 11089 |
| HSV1-UL19-6491 | − | CCGCCACCUGCUGGAGAUGCAG | 22 | 11090 |
| HSV1-UL19-6492 | − | GCCGCCACCUGCUGGAGAUGCAG | 23 | 11091 |
| HSV1-UL19-6493 | − | GGCCGCCACCUGCUGGAGAUGCAG | 24 | 11092 |
| HSV1-UL19-6494 | − | AAGCGAAGCUUCUGCGAG | 18 | 11093 |
| HSV1-UL19-6495 | − | AAAGCGAAGCUUCUGCGAG | 19 | 11094 |
| HSV1-UL19-2049 | − | UAAAGCGAAGCUUCUGCGAG | 20 | 2393 |
| HSV1-UL19-6496 | − | CUAAAGCGAAGCUUCUGCGAG | 21 | 11095 |
| HSV1-UL19-6497 | − | GCUAAAGCGAAGCUUCUGCGAG | 22 | 11096 |
| HSV1-UL19-6498 | − | AGCUAAAGCGAAGCUUCUGCGAG | 23 | 11097 |
| HSV1-UL19-6499 | − | GAGCUAAAGCGAAGCUUCUGCGAG | 24 | 11098 |
| HSV1-UL19-6500 | − | ACCCUGACCGGCCCGGAG | 18 | 11099 |
| HSV1-UL19-6501 | − | UACCCUGACCGGCCCGGAG | 19 | 11100 |
| HSV1-UL19-2178 | − | UUACCCUGACCGGCCCGGAG | 20 | 2468 |
| HSV1-UL19-6502 | − | UUUACCCUGACCGGCCCGGAG | 21 | 11101 |
| HSV1-UL19-6503 | − | CUUUACCCUGACCGGCCCGGAG | 22 | 11102 |
| HSV1-UL19-6504 | − | ACUUUACCCUGACCGGCCCGGAG | 23 | 11103 |
| HSV1-UL19-6505 | − | GACUUUACCCUGACCGGCCCGGAG | 24 | 11104 |
| HSV1-UL19-6506 | − | GACGCCCGGGGCCUGGAG | 18 | 11105 |
| HSV1-UL19-6507 | − | GGACGCCCGGGGCCUGGAG | 19 | 11106 |
| HSV1-UL19-2154 | − | GGGACGCCCGGGGCCUGGAG | 20 | 2456 |
| HSV1-UL19-6508 | − | CGGGACGCCCGGGGCCUGGAG | 21 | 11107 |
| HSV1-UL19-6509 | − | CCGGGACGCCCGGGGCCUGGAG | 22 | 11108 |
| HSV1-UL19-6510 | − | UCCGGGACGCCCGGGGCCUGGAG | 23 | 11109 |
| HSV1-UL19-6511 | − | UUCCGGGACGCCCGGGGCCUGGAG | 24 | 11110 |
| HSV1-UL19-6512 | − | UCCGCAGUGCCCGCAACG | 18 | 11111 |
| HSV1-UL19-6513 | − | CUCCGCAGUGCCCGCAACG | 19 | 11112 |
| HSV1-UL19-576 | − | CCUCCGCAGUGCCCGCAACG | 20 | 962 |
| HSV1-UL19-6514 | − | UCCUCCGCAGUGCCCGCAACG | 21 | 11113 |
| HSV1-UL19-6515 | − | CUCCUCCGCAGUGCCCGCAACG | 22 | 11114 |
| HSV1-UL19-6516 | − | CCUCCUCCGCAGUGCCCGCAACG | 23 | 11115 |
| HSV1-UL19-6517 | − | CCCUCCUCCGCAGUGCCCGCAACG | 24 | 11116 |
| HSV1-UL19-6518 | − | AACGGUUUGCCGCGCACG | 18 | 11117 |
| HSV1-UL19-6519 | − | GAACGGUUUGCCGCGCACG | 19 | 11118 |
| HSV1-UL19-2097 | − | GGAACGGUUUGCCGCGCACG | 20 | 2430 |
| HSV1-UL19-6520 | − | UGGAACGGUUUGCCGCGCACG | 21 | 11119 |
| HSV1-UL19-6521 | − | AUGGAACGGUUUGCCGCGCACG | 22 | 11120 |
| HSV1-UL19-6522 | − | CAUGGAACGGUUUGCCGCGCACG | 23 | 11121 |
| HSV1-UL19-6523 | − | UCAUGGAACGGUUUGCCGCGCACG | 24 | 11122 |
| HSV1-UL19-6524 | − | GGGACCUGGUGGCGCACG | 18 | 11123 |
| HSV1-UL19-6525 | − | CGGGACCUGGUGGCGCACG | 19 | 11124 |
| HSV1-UL19-2175 | − | CCGGGACCUGGUGGCGCACG | 20 | 2466 |
| HSV1-UL19-6526 | − | ACCGGGACCUGGUGGCGCACG | 21 | 11125 |
| HSV1-UL19-6527 | − | UACCGGGACCUGGUGGCGCACG | 22 | 11126 |
| HSV1-UL19-6528 | − | GUACCGGGACCUGGUGGCGCACG | 23 | 11127 |
| HSV1-UL19-6529 | − | UGUACCGGGACCUGGUGGCGCACG | 24 | 11128 |
| HSV1-UL19-6530 | − | UCGACGGGGCGUUGCACG | 18 | 11129 |
| HSV1-UL19-6531 | − | UUCGACGGGGCGUUGCACG | 19 | 11130 |
| HSV1-UL19-2220 | − | AUUCGACGGGGCGUUGCACG | 20 | 2497 |
| HSV1-UL19-6532 | − | UAUUCGACGGGGCGUUGCACG | 21 | 11131 |
| HSV1-UL19-6533 | − | AUAUUCGACGGGGCGUUGCACG | 22 | 11132 |
| HSV1-UL19-6534 | − | CAUAUUCGACGGGGCGUUGCACG | 23 | 11133 |
| HSV1-UL19-6535 | − | GCAUAUUCGACGGGGCGUUGCACG | 24 | 11134 |
| HSV1-UL19-6536 | − | GACCUGAACCGGCAGACG | 18 | 11135 |
| HSV1-UL19-6537 | − | CGACCUGAACCGGCAGACG | 19 | 11136 |
| HSV1-UL19-2080 | − | UCGACCUGAACCGGCAGACG | 20 | 2416 |
| HSV1-UL19-6538 | − | CUCGACCUGAACCGGCAGACG | 21 | 11137 |
| HSV1-UL19-6539 | − | GCUCGACCUGAACCGGCAGACG | 22 | 11138 |
| HSV1-UL19-6540 | − | AGCUCGACCUGAACCGGCAGACG | 23 | 11139 |
| HSV1-UL19-6541 | − | CAGCUCGACCUGAACCGGCAGACG | 24 | 11140 |
| HSV1-UL19-6542 | − | UUGUGGGGGUGGCCGACG | 18 | 11141 |
| HSV1-UL19-6543 | − | UUUGUGGGGGUGGCCGACG | 19 | 11142 |
| HSV1-UL19-310 | − | CUUUGUGGGGGUGGCCGACG | 20 | 696 |
| HSV1-UL19-6544 | − | UCUUUGUGGGGGUGGCCGACG | 21 | 11143 |
| HSV1-UL19-6545 | − | UUCUUUGUGGGGGUGGCCGACG | 22 | 11144 |
| HSV1-UL19-6546 | − | CUUCUUUGUGGGGGUGGCCGACG | 23 | 11145 |
| HSV1-UL19-6547 | − | ACUUCUUUGUGGGGGUGGCCGACG | 24 | 11146 |
| HSV1-UL19-6548 | − | ACGUGCCGGUGACGUACG | 18 | 11147 |
| HSV1-UL19-6549 | − | GACGUGCCGGUGACGUACG | 19 | 11148 |
| HSV1-UL19-2065 | − | CGACGUGCCGGUGACGUACG | 20 | 2405 |
| HSV1-UL19-6550 | − | CCGACGUGCCGGUGACGUACG | 21 | 11149 |
| HSV1-UL19-6551 | − | GCCGACGUGCCGGUGACGUACG | 22 | 11150 |
| HSV1-UL19-6552 | − | AGCCGACGUGCCGGUGACGUACG | 23 | 11151 |
| HSV1-UL19-6553 | − | AAGCCGACGUGCCGGUGACGUACG | 24 | 11152 |
| HSV1-UL19-6554 | − | CCGCCGGGGGCGUUUACG | 18 | 11153 |
| HSV1-UL19-6555 | − | GCCGCCGGGGGCGUUUACG | 19 | 11154 |
| HSV1-UL19-532 | − | CGCCGCCGGGGGCGUUUACG | 20 | 918 |
| HSV1-UL19-6556 | − | GCGCCGCCGGGGGCGUUUACG | 21 | 11155 |
| HSV1-UL19-6557 | − | CGCGCCGCCGGGGGCGUUUACG | 22 | 11156 |
| HSV1-UL19-6558 | − | ACGCGCCGCCGGGGGCGUUUACG | 23 | 11157 |
| HSV1-UL19-6559 | − | GACGCGCCGCCGGGGGCGUUUACG | 24 | 11158 |
| HSV1-UL19-6560 | − | GGGCAAGGCGGGCCACCG | 18 | 11159 |
| HSV1-UL19-6561 | − | UGGGCAAGGCGGGCCACCG | 19 | 11160 |
| HSV1-UL19-2052 | − | CUGGGCAAGGCGGGCCACCG | 20 | 2396 |
| HSV1-UL19-6562 | − | CCUGGGCAAGGCGGGCCACCG | 21 | 11161 |
| HSV1-UL19-6563 | − | UCCUGGGCAAGGCGGGCCACCG | 22 | 11162 |
| HSV1-UL19-6564 | − | UUCCUGGGCAAGGCGGGCCACCG | 23 | 11163 |
| HSV1-UL19-6565 | − | UUUCCUGGGCAAGGCGGGCCACCG | 24 | 11164 |
| HSV1-UL19-6566 | − | GGAUGACCGGCCGCACCG | 18 | 11165 |
| HSV1-UL19-6567 | − | CGGAUGACCGGCCGCACCG | 19 | 11166 |
| HSV1-UL19-402 | − | GCGGAUGACCGGCCGCACCG | 20 | 788 |
| HSV1-UL19-6568 | − | CGCGGAUGACCGGCCGCACCG | 21 | 11167 |
| HSV1-UL19-6569 | − | CCGCGGAUGACCGGCCGCACCG | 22 | 11168 |
| HSV1-UL19-6570 | − | GCCGCGGAUGACCGGCCGCACCG | 23 | 11169 |
| HSV1-UL19-6571 | − | CGCCGCGGAUGACCGGCCGCACCG | 24 | 11170 |
| HSV1-UL19-6572 | − | GGGGCCGCUGCUGCACCG | 18 | 11171 |
| HSV1-UL19-6573 | − | CGGGGCCGCUGCUGCACCG | 19 | 11172 |
| HSV1-UL19-411 | − | GCGGGGCCGCUGCUGCACCG | 20 | 797 |
| HSV1-UL19-6574 | − | CGCGGGGCCGCUGCUGCACCG | 21 | 11173 |
| HSV1-UL19-6575 | − | UCGCGGGGCCGCUGCUGCACCG | 22 | 11174 |
| HSV1-UL19-6576 | − | CUCGCGGGGCCGCUGCUGCACCG | 23 | 11175 |
| HSV1-UL19-6577 | − | UCUCGCGGGGCCGCUGCUGCACCG | 24 | 11176 |
| HSV1-UL19-6578 | − | GCCUUAACCGCGACCCCG | 18 | 11177 |
| HSV1-UL19-6579 | − | GGCCUUAACCGCGACCCCG | 19 | 11178 |
| HSV1-UL19-2115 | − | GGGCCUUAACCGCGACCCCG | 20 | 2438 |
| HSV1-UL19-6580 | − | GGGGCCUUAACCGCGACCCCG | 21 | 11179 |
| HSV1-UL19-6581 | − | GGGGGCCUUAACCGCGACCCCG | 22 | 11180 |
| HSV1-UL19-6582 | − | CGGGGGCCUUAACCGCGACCCCG | 23 | 11181 |
| HSV1-UL19-6583 | − | UCGGGGGCCUUAACCGCGACCCCG | 24 | 11182 |
| HSV1-UL19-6584 | − | UCCCGGAGAUCGCCCCCG | 18 | 11183 |
| HSV1-UL19-6585 | − | GUCCCGGAGAUCGCCCCCG | 19 | 11184 |
| HSV1-UL19-2209 | − | GGUCCCGGAGAUCGCCCCCG | 20 | 2488 |
| HSV1-UL19-6586 | − | UGGUCCCGGAGAUCGCCCCCG | 21 | 11185 |
| HSV1-UL19-6587 | − | GUGGUCCCGGAGAUCGCCCCCG | 22 | 11186 |
| HSV1-UL19-6588 | − | GGUGGUCCCGGAGAUCGCCCCCG | 23 | 11187 |
| HSV1-UL19-6589 | − | UGGUGGUCCCGGAGAUCGCCCCCG | 24 | 11188 |
| HSV1-UL19-6590 | − | GUUCCCCCGGCCGGCCCG | 18 | 11189 |
| HSV1-UL19-6591 | − | CGUUCCCCCGGCCGGCCCG | 19 | 11190 |
| HSV1-UL19-322 | − | ACGUUCCCCCGGCCGGCCCG | 20 | 708 |
| HSV1-UL19-6592 | − | GACGUUCCCCCGGCCGGCCCG | 21 | 11191 |
| HSV1-UL19-6593 | − | GGACGUUCCCCCGGCCGGCCCG | 22 | 11192 |
| HSV1-UL19-6594 | − | GGGACGUUCCCCCGGCCGGCCCG | 23 | 11193 |
| HSV1-UL19-6595 | − | GGGGACGUUCCCCCGGCCGGCCCG | 24 | 11194 |
| HSV1-UL19-6596 | − | ACCCCCGGGGACGCGCCG | 18 | 11195 |
| HSV1-UL19-6597 | − | AACCCCCGGGGACGCGCCG | 19 | 11196 |
| HSV1-UL19-2280 | − | CAACCCCCGGGGACGCGCCG | 20 | 2535 |
| HSV1-UL19-6598 | − | GCAACCCCCGGGGACGCGCCG | 21 | 11197 |
| HSV1-UL19-6599 | − | UGCAACCCCCGGGGACGCGCCG | 22 | 11198 |
| HSV1-UL19-6600 | − | CUGCAACCCCCGGGGACGCGCCG | 23 | 11199 |
| HSV1-UL19-6601 | − | CCUGCAACCCCCGGGGACGCGCCG | 24 | 11200 |
| HSV1-UL19-6602 | − | GCCACCGCCGGGAGGCCG | 18 | 11201 |
| HSV1-UL19-6603 | − | GGCCACCGCCGGGAGGCCG | 19 | 11202 |
| HSV1-UL19-2055 | − | GGGCCACCGCCGGGAGGCCG | 20 | 2397 |
| HSV1-UL19-6604 | − | CGGGCCACCGCCGGGAGGCCG | 21 | 11203 |
| HSV1-UL19-6605 | − | GCGGGCCACCGCCGGGAGGCCG | 22 | 11204 |
| HSV1-UL19-6606 | − | GGCGGGCCACCGCCGGGAGGCCG | 23 | 11205 |
| HSV1-UL19-6607 | − | AGGCGGGCCACCGCCGGGAGGCCG | 24 | 11206 |
| HSV1-UL19-6608 | − | UCCGCGAGAGCGCGGCCG | 18 | 11207 |
| HSV1-UL19-6609 | − | GUCCGCGAGAGCGCGGCCG | 19 | 11208 |
| HSV1-UL19-462 | − | CGUCCGCGAGAGCGCGGCCG | 20 | 848 |
| HSV1-UL19-6610 | − | ACGUCCGCGAGAGCGCGGCCG | 21 | 11209 |
| HSV1-UL19-6611 | − | CACGUCCGCGAGAGCGCGGCCG | 22 | 11210 |
| HSV1-UL19-6612 | − | GCACGUCCGCGAGAGCGCGGCCG | 23 | 11211 |
| HSV1-UL19-6613 | − | AGCACGUCCGCGAGAGCGCGGCCG | 24 | 11212 |
| HSV1-UL19-6614 | − | AAACUUUUACCUGGGCCG | 18 | 11213 |
| HSV1-UL19-6615 | − | AAAACUUUUACCUGGGCCG | 19 | 11214 |
| HSV1-UL19-501 | − | CAAAACUUUUACCUGGGCCG | 20 | 887 |
| HSV1-UL19-6616 | − | CCAAAACUUUUACCUGGGCCG | 21 | 11215 |
| HSV1-UL19-6617 | − | CCCAAAACUUUUACCUGGGCCG | 22 | 11216 |
| HSV1-UL19-6618 | − | CCCCAAAACUUUUACCUGGGCCG | 23 | 11217 |
| HSV1-UL19-6619 | − | UCCCCAAAACUUUUACCUGGGCCG | 24 | 11218 |
| HSV1-UL19-6620 | − | GCCGACGUGGAGCUGCCG | 18 | 11219 |
| HSV1-UL19-6621 | − | GGCCGACGUGGAGCUGCCG | 19 | 11220 |
| HSV1-UL19-313 | − | UGGCCGACGUGGAGCUGCCG | 20 | 699 |
| HSV1-UL19-6622 | − | GUGGCCGACGUGGAGCUGCCG | 21 | 11221 |
| HSV1-UL19-6623 | − | GGUGGCCGACGUGGAGCUGCCG | 22 | 11222 |
| HSV1-UL19-6624 | − | GGGUGGCCGACGUGGAGCUGCCG | 23 | 11223 |
| HSV1-UL19-6625 | − | GGGGUGGCCGACGUGGAGCUGCCG | 24 | 11224 |
| HSV1-UL19-6626 | − | GCGACUGCCGGGUUAGCG | 18 | 11225 |
| HSV1-UL19-6627 | − | CGCGACUGCCGGGUUAGCG | 19 | 11226 |
| HSV1-UL19-386 | − | UCGCGACUGCCGGGUUAGCG | 20 | 772 |
| HSV1-UL19-6628 | − | AUCGCGACUGCCGGGUUAGCG | 21 | 11227 |
| HSV1-UL19-6629 | − | CAUCGCGACUGCCGGGUUAGCG | 22 | 11228 |
| HSV1-UL19-6630 | − | CCAUCGCGACUGCCGGGUUAGCG | 23 | 11229 |
| HSV1-UL19-6631 | − | GCCAUCGCGACUGCCGGGUUAGCG | 24 | 11230 |
| HSV1-UL19-6632 | − | AACGGGGAAGCCCACGCG | 18 | 11231 |
| HSV1-UL19-6633 | − | CAACGGGGAAGCCCACGCG | 19 | 11232 |
| HSV1-UL19-577 | − | GCAACGGGGAAGCCCACGCG | 20 | 963 |
| HSV1-UL19-6634 | − | CGCAACGGGGAAGCCCACGCG | 21 | 11233 |
| HSV1-UL19-6635 | − | CCGCAACGGGGAAGCCCACGCG | 22 | 11234 |
| HSV1-UL19-6636 | − | CCCGCAACGGGGAAGCCCACGCG | 23 | 11235 |
| HSV1-UL19-6637 | − | GCCCGCAACGGGGAAGCCCACGCG | 24 | 11236 |
| HSV1-UL19-6638 | − | GCCGGGGGCGUUUACGCG | 18 | 11237 |
| HSV1-UL19-6639 | − | CGCCGGGGGCGUUUACGCG | 19 | 11238 |
| HSV1-UL19-534 | − | CCGCCGGGGGCGUUUACGCG | 20 | 920 |
| HSV1-UL19-6640 | − | GCCGCCGGGGGCGUUUACGCG | 21 | 11239 |
| HSV1-UL19-6641 | − | CGCCGCCGGGGGCGUUUACGCG | 22 | 11240 |
| HSV1-UL19-6642 | − | GCGCCGCCGGGGGCGUUUACGCG | 23 | 11241 |
| HSV1-UL19-6643 | − | CGCGCCGCCGGGGGCGUUUACGCG | 24 | 11242 |
| HSV1-UL19-6644 | − | GACUGCCGGGUUAGCGCG | 18 | 11243 |
| HSV1-UL19-6645 | − | CGACUGCCGGGUUAGCGCG | 19 | 11244 |
| HSV1-UL19-388 | − | GCGACUGCCGGGUUAGCGCG | 20 | 774 |
| HSV1-UL19-6646 | − | CGCGACUGCCGGGUUAGCGCG | 21 | 11245 |
| HSV1-UL19-6647 | − | UCGCGACUGCCGGGUUAGCGCG | 22 | 11246 |
| HSV1-UL19-6648 | − | AUCGCGACUGCCGGGUUAGCGCG | 23 | 11247 |
| HSV1-UL19-6649 | − | CAUCGCGACUGCCGGGUUAGCGCG | 24 | 11248 |
| HSV1-UL19-6650 | − | CUGUUCUCGGAGCGCGCG | 18 | 11249 |
| HSV1-UL19-6651 | − | GCUGUUCUCGGAGCGCGCG | 19 | 11250 |
| HSV1-UL19-2246 | − | UGCUGUUCUCGGAGCGCGCG | 20 | 2514 |
| HSV1-UL19-6652 | − | GUGCUGUUCUCGGAGCGCGCG | 21 | 11251 |
| HSV1-UL19-6653 | − | CGUGCUGUUCUCGGAGCGCGCG | 22 | 11252 |
| HSV1-UL19-6654 | − | ACGUGCUGUUCUCGGAGCGCGCG | 23 | 11253 |
| HSV1-UL19-6655 | − | AACGUGCUGUUCUCGGAGCGCGCG | 24 | 11254 |
| HSV1-UL19-6656 | − | CCCAGGUGCCGCGGCGCG | 18 | 11255 |
| HSV1-UL19-6657 | − | GCCCAGGUGCCGCGGCGCG | 19 | 11256 |
| HSV1-UL19-2272 | − | CGCCCAGGUGCCGCGGCGCG | 20 | 2530 |
| HSV1-UL19-6658 | − | GCGCCCAGGUGCCGCGGCGCG | 21 | 11257 |
| HSV1-UL19-6659 | − | UGCGCCCAGGUGCCGCGGCGCG | 22 | 11258 |
| HSV1-UL19-6660 | − | GUGCGCCCAGGUGCCGCGGCGCG | 23 | 11259 |
| HSV1-UL19-6661 | − | GGUGCGCCCAGGUGCCGCGGCGCG | 24 | 11260 |
| HSV1-UL19-6662 | − | CCCGGCACGAAACUGGCG | 18 | 11261 |
| HSV1-UL19-6663 | − | GCCCGGCACGAAACUGGCG | 19 | 11262 |
| HSV1-UL19-486 | − | GGCCCGGCACGAAACUGGCG | 20 | 872 |
| HSV1-UL19-6664 | − | UGGCCCGGCACGAAACUGGCG | 21 | 11263 |
| HSV1-UL19-6665 | − | GUGGCCCGGCACGAAACUGGCG | 22 | 11264 |
| HSV1-UL19-6666 | − | GGUGGCCCGGCACGAAACUGGCG | 23 | 11265 |
| HSV1-UL19-6667 | − | AGGUGGCCCGGCACGAAACUGGCG | 24 | 11266 |
| HSV1-UL19-6668 | − | CGGAUCUGGUGUCCAUCG | 18 | 11267 |
| HSV1-UL19-6669 | − | GCGGAUCUGGUGUCCAUCG | 19 | 11268 |
| HSV1-UL19-2085 | − | CGCGGAUCUGGUGUCCAUCG | 20 | 2421 |
| HSV1-UL19-6670 | − | GCGCGGAUCUGGUGUCCAUCG | 21 | 11269 |
| HSV1-UL19-6671 | − | CGCGCGGAUCUGGUGUCCAUCG | 22 | 11270 |
| HSV1-UL19-6672 | − | GCGCGCGGAUCUGGUGUCCAUCG | 23 | 11271 |
| HSV1-UL19-6673 | − | UGCGCGCGGAUCUGGUGUCCAUCG | 24 | 11272 |
| HSV1-UL19-6674 | − | GCCUGGAGCGCCUGAUCG | 18 | 11273 |
| HSV1-UL19-6675 | − | UGCCUGGAGCGCCUGAUCG | 19 | 11274 |
| HSV1-UL19-560 | − | CUGCCUGGAGCGCCUGAUCG | 20 | 946 |
| HSV1-UL19-6676 | − | GCUGCCUGGAGCGCCUGAUCG | 21 | 11275 |
| HSV1-UL19-6677 | − | CGCUGCCUGGAGCGCCUGAUCG | 22 | 11276 |
| HSV1-UL19-6678 | − | UCGCUGCCUGGAGCGCCUGAUCG | 23 | 11277 |
| HSV1-UL19-6679 | − | AUCGCUGCCUGGAGCGCCUGAUCG | 24 | 11278 |
| HSV1-UL19-6680 | − | CGGGGUGCCGCGAACUCG | 18 | 11279 |
| HSV1-UL19-6681 | − | CCGGGGUGCCGCGAACUCG | 19 | 11280 |
| HSV1-UL19-569 | − | CCCGGGGUGCCGCGAACUCG | 20 | 955 |
| HSV1-UL19-6682 | − | CCCCGGGGUGCCGCGAACUCG | 21 | 11281 |
| HSV1-UL19-6683 | − | CCCCCGGGGUGCCGCGAACUCG | 22 | 11282 |
| HSV1-UL19-6684 | − | CCCCCCGGGGUGCCGCGAACUCG | 23 | 11283 |
| HSV1-UL19-6685 | − | GCCCCCCGGGGUGCCGCGAACUCG | 24 | 11284 |
| HSV1-UL19-6686 | − | ACGUCGUGACCUACCUCG | 18 | 11285 |
| HSV1-UL19-6687 | − | UACGUCGUGACCUACCUCG | 19 | 11286 |
| HSV1-UL19-360 | − | GUACGUCGUGACCUACCUCG | 20 | 746 |
| HSV1-UL19-6688 | − | CGUACGUCGUGACCUACCUCG | 21 | 11287 |
| HSV1-UL19-6689 | − | UCGUACGUCGUGACCUACCUCG | 22 | 11288 |
| HSV1-UL19-6690 | − | CUCGUACGUCGUGACCUACCUCG | 23 | 11289 |
| HSV1-UL19-6691 | − | UCUCGUACGUCGUGACCUACCUCG | 24 | 11290 |
| HSV1-UL19-6692 | − | AUGGUGCCCGCCUUCUCG | 18 | 11291 |
| HSV1-UL19-6693 | − | GAUGGUGCCCGCCUUCUCG | 19 | 11292 |
| HSV1-UL19-408 | − | UGAUGGUGCCCGCCUUCUCG | 20 | 794 |
| HSV1-UL19-6694 | − | GUGAUGGUGCCCGCCUUCUCG | 21 | 11293 |
| HSV1-UL19-6695 | − | CGUGAUGGUGCCCGCCUUCUCG | 22 | 11294 |
| HSV1-UL19-6696 | − | ACGUGAUGGUGCCCGCCUUCUCG | 23 | 11295 |
| HSV1-UL19-6697 | − | UACGUGAUGGUGCCCGCCUUCUCG | 24 | 11296 |
| HSV1-UL19-6698 | − | CGCGCGGGCGGCCGGUCG | 18 | 11297 |
| HSV1-UL19-6699 | − | ACGCGCGGGCGGCCGGUCG | 19 | 11298 |
| HSV1-UL19-2058 | − | CACGCGCGGGCGGCCGGUCG | 20 | 2400 |
| HSV1-UL19-6700 | − | ACACGCGCGGGCGGCCGGUCG | 21 | 11299 |
| HSV1-UL19-6701 | − | GACACGCGCGGGCGGCCGGUCG | 22 | 11300 |
| HSV1-UL19-6702 | − | CGACACGCGCGGGCGGCCGGUCG | 23 | 11301 |
| HSV1-UL19-6703 | − | CCGACACGCGCGGGCGGCCGGUCG | 24 | 11302 |
| HSV1-UL19-6704 | − | GGCGGGUCCGAUGGGUCG | 18 | 11303 |
| HSV1-UL19-6705 | − | GGGCGGGUCCGAUGGGUCG | 19 | 11304 |
| HSV1-UL19-301 | − | CGGGCGGGUCCGAUGGGUCG | 20 | 687 |
| HSV1-UL19-6706 | − | ACGGGCGGGUCCGAUGGGUCG | 21 | 11305 |
| HSV1-UL19-6707 | − | CACGGGCGGGUCCGAUGGGUCG | 22 | 11306 |
| HSV1-UL19-6708 | − | CCACGGGCGGGUCCGAUGGGUCG | 23 | 11307 |
| HSV1-UL19-6709 | − | CCCACGGGCGGGUCCGAUGGGUCG | 24 | 11308 |
| HSV1-UL19-6710 | − | CCCGGGCGACCCUGGUCG | 18 | 11309 |
| HSV1-UL19-6711 | − | GCCCGGGCGACCCUGGUCG | 19 | 11310 |
| HSV1-UL19-2046 | − | GGCCCGGGCGACCCUGGUCG | 20 | 2390 |
| HSV1-UL19-6712 | − | UGGCCCGGGCGACCCUGGUCG | 21 | 11311 |
| HSV1-UL19-6713 | − | GUGGCCCGGGCGACCCUGGUCG | 22 | 11312 |
| HSV1-UL19-6714 | − | GGUGGCCCGGGCGACCCUGGUCG | 23 | 11313 |
| HSV1-UL19-6715 | − | GGGUGGCCCGGGCGACCCUGGUCG | 24 | 11314 |
| HSV1-UL19-6716 | − | CCAACAUGCGCAUAUUCG | 18 | 11315 |
| HSV1-UL19-6717 | − | ACCAACAUGCGCAUAUUCG | 19 | 11316 |
| HSV1-UL19-2218 | − | CACCAACAUGCGCAUAUUCG | 20 | 2496 |
| HSV1-UL19-6718 | − | CCACCAACAUGCGCAUAUUCG | 21 | 11317 |
| HSV1-UL19-6719 | − | ACCACCAACAUGCGCAUAUUCG | 22 | 11318 |
| HSV1-UL19-6720 | − | CACCACCAACAUGCGCAUAUUCG | 23 | 11319 |
| HSV1-UL19-6721 | − | CCACCACCAACAUGCGCAUAUUCG | 24 | 11320 |
| HSV1-UL19-6722 | − | CACCAUCGCCGCCGUUCG | 18 | 11321 |
| HSV1-UL19-6723 | − | CCACCAUCGCCGCCGUUCG | 19 | 11322 |
| HSV1-UL19-344 | − | GCCACCAUCGCCGCCGUUCG | 20 | 730 |
| HSV1-UL19-6724 | − | CGCCACCAUCGCCGCCGUUCG | 21 | 11323 |
| HSV1-UL19-6725 | − | CCGCCACCAUCGCCGCCGUUCG | 22 | 11324 |
| HSV1-UL19-6726 | − | CCCGCCACCAUCGCCGCCGUUCG | 23 | 11325 |
| HSV1-UL19-6727 | − | CCCCGCCACCAUCGCCGCCGUUCG | 24 | 11326 |
| HSV1-UL19-6728 | − | CCGUCCACGCGCUGUUCG | 18 | 11327 |
| HSV1-UL19-6729 | − | CCCGUCCACGCGCUGUUCG | 19 | 11328 |
| HSV1-UL19-2223 | − | CCCCGUCCACGCGCUGUUCG | 20 | 2499 |
| HSV1-UL19-6730 | − | UCCCCGUCCACGCGCUGUUCG | 21 | 11329 |
| HSV1-UL19-6731 | − | CUCCCCGUCCACGCGCUGUUCG | 22 | 11330 |
| HSV1-UL19-6732 | − | CCUCCCCGUCCACGCGCUGUUCG | 23 | 11331 |
| HSV1-UL19-6733 | − | CCCUCCCCGUCCACGCGCUGUUCG | 24 | 11332 |
| HSV1-UL19-6734 | − | UUUACGCGGGGGACAAGG | 18 | 11333 |
| HSV1-UL19-6735 | − | GUUUACGCGGGGGACAAGG | 19 | 11334 |
| HSV1-UL19-537 | − | CGUUUACGCGGGGGACAAGG | 20 | 923 |
| HSV1-UL19-6736 | − | GCGUUUACGCGGGGGACAAGG | 21 | 11335 |
| HSV1-UL19-6737 | − | GGCGUUUACGCGGGGGACAAGG | 22 | 11336 |
| HSV1-UL19-6738 | − | GGGCGUUUACGCGGGGGACAAGG | 23 | 11337 |
| HSV1-UL19-6739 | − | GGGGCGUUUACGCGGGGGACAAGG | 24 | 11338 |
| HSV1-UL19-6740 | − | ACCUGCUGGAGAUGCAGG | 18 | 11339 |
| HSV1-UL19-6741 | − | CACCUGCUGGAGAUGCAGG | 19 | 11340 |
| HSV1-UL19-244 | − | CCACCUGCUGGAGAUGCAGG | 20 | 630 |
| HSV1-UL19-6742 | − | GCCACCUGCUGGAGAUGCAGG | 21 | 11341 |
| HSV1-UL19-6743 | − | CGCCACCUGCUGGAGAUGCAGG | 22 | 11342 |
| HSV1-UL19-6744 | − | CCGCCACCUGCUGGAGAUGCAGG | 23 | 11343 |
| HSV1-UL19-6745 | − | GCCGCCACCUGCUGGAGAUGCAGG | 24 | 11344 |
| HSV1-UL19-6746 | − | UUCCCCCGGCCGGCCCGG | 18 | 11345 |
| HSV1-UL19-6747 | − | GUUCCCCCGGCCGGCCCGG | 19 | 11346 |
| HSV1-UL19-323 | − | CGUUCCCCCGGCCGGCCCGG | 20 | 709 |
| HSV1-UL19-6748 | − | ACGUUCCCCCGGCCGGCCCGG | 21 | 11347 |
| HSV1-UL19-6749 | − | GACGUUCCCCCGGCCGGCCCGG | 22 | 11348 |
| HSV1-UL19-6750 | − | GGACGUUCCCCCGGCCGGCCCGG | 23 | 11349 |
| HSV1-UL19-6751 | − | GGGACGUUCCCCCGGCCGGCCCGG | 24 | 11350 |
| HSV1-UL19-6752 | − | CCGACGUGGAGCUGCCGG | 18 | 11351 |
| HSV1-UL19-6753 | − | GCCGACGUGGAGCUGCCGG | 19 | 11352 |
| HSV1-UL19-314 | − | GGCCGACGUGGAGCUGCCGG | 20 | 700 |
| HSV1-UL19-6754 | − | UGGCCGACGUGGAGCUGCCGG | 21 | 11353 |
| HSV1-UL19-6755 | − | GUGGCCGACGUGGAGCUGCCGG | 22 | 11354 |
| HSV1-UL19-6756 | − | GGUGGCCGACGUGGAGCUGCCGG | 23 | 11355 |
| HSV1-UL19-6757 | − | GGGUGGCCGACGUGGAGCUGCCGG | 24 | 11356 |
| HSV1-UL19-6758 | − | ACGUCCGCGAGAGCGCGG | 18 | 11357 |
| HSV1-UL19-6759 | − | CACGUCCGCGAGAGCGCGG | 19 | 11358 |
| HSV1-UL19-2231 | − | GCACGUCCGCGAGAGCGCGG | 20 | 2504 |
| HSV1-UL19-6760 | − | AGCACGUCCGCGAGAGCGCGG | 21 | 11359 |
| HSV1-UL19-6761 | − | CAGCACGUCCGCGAGAGCGCGG | 22 | 11360 |
| HSV1-UL19-6762 | − | GCAGCACGUCCGCGAGAGCGCGG | 23 | 11361 |
| HSV1-UL19-6763 | − | UGCAGCACGUCCGCGAGAGCGCGG | 24 | 11362 |
| HSV1-UL19-6764 | − | UGAACGUUGACGCGGCGG | 18 | 11363 |
| HSV1-UL19-6765 | − | AUGAACGUUGACGCGGCGG | 19 | 11364 |
| HSV1-UL19-2112 | − | GAUGAACGUUGACGCGGCGG | 20 | 2437 |
| HSV1-UL19-6766 | − | UGAUGAACGUUGACGCGGCGG | 21 | 11365 |
| HSV1-UL19-6767 | − | CUGAUGAACGUUGACGCGGCGG | 22 | 11366 |
| HSV1-UL19-6768 | − | GCUGAUGAACGUUGACGCGGCGG | 23 | 11367 |
| HSV1-UL19-6769 | − | CGCUGAUGAACGUUGACGCGGCGG | 24 | 11368 |
| HSV1-UL19-6770 | − | CGUCGUGACCUACCUCGG | 18 | 11369 |
| HSV1-UL19-6771 | − | ACGUCGUGACCUACCUCGG | 19 | 11370 |
| HSV1-UL19-361 | − | UACGUCGUGACCUACCUCGG | 20 | 747 |
| HSV1-UL19-6772 | − | GUACGUCGUGACCUACCUCGG | 21 | 11371 |
| HSV1-UL19-6773 | − | CGUACGUCGUGACCUACCUCGG | 22 | 11372 |
| HSV1-UL19-6774 | − | UCGUACGUCGUGACCUACCUCGG | 23 | 11373 |
| HSV1-UL19-6775 | − | CUCGUACGUCGUGACCUACCUCGG | 24 | 11374 |
| HSV1-UL19-6776 | − | GUGCCGCGGCGCGCAGGG | 18 | 11375 |
| HSV1-UL19-6777 | − | GGUGCCGCGGCGCGCAGGG | 19 | 11376 |
| HSV1-UL19-2274 | − | AGGUGCCGCGGCGCGCAGGG | 20 | 2531 |
| HSV1-UL19-6778 | − | CAGGUGCCGCGGCGCGCAGGG | 21 | 11377 |
| HSV1-UL19-6779 | − | CCAGGUGCCGCGGCGCGCAGGG | 22 | 11378 |
| HSV1-UL19-6780 | − | CCCAGGUGCCGCGGCGCGCAGGG | 23 | 11379 |
| HSV1-UL19-6781 | − | GCCCAGGUGCCGCGGCGCGCAGGG | 24 | 11380 |
| HSV1-UL19-6782 | − | CGCGAGAGCGCGGCCGGG | 18 | 11381 |
| HSV1-UL19-6783 | − | CCGCGAGAGCGCGGCCGGG | 19 | 11382 |
| HSV1-UL19-2235 | − | UCCGCGAGAGCGCGGCCGGG | 20 | 2505 |
| HSV1-UL19-6784 | − | GUCCGCGAGAGCGCGGCCGGG | 21 | 11383 |
| HSV1-UL19-6785 | − | CGUCCGCGAGAGCGCGGCCGGG | 22 | 11384 |
| HSV1-UL19-6786 | − | ACGUCCGCGAGAGCGCGGCCGGG | 23 | 11385 |
| HSV1-UL19-6787 | − | CACGUCCGCGAGAGCGCGGCCGGG | 24 | 11386 |
| HSV1-UL19-6788 | − | CGACGUGGAGCUGCCGGG | 18 | 11387 |
| HSV1-UL19-6789 | − | CCGACGUGGAGCUGCCGGG | 19 | 11388 |
| HSV1-UL19-315 | − | GCCGACGUGGAGCUGCCGGG | 20 | 701 |
| HSV1-UL19-6790 | − | GGCCGACGUGGAGCUGCCGGG | 21 | 11389 |
| HSV1-UL19-6791 | − | UGGCCGACGUGGAGCUGCCGGG | 22 | 11390 |
| HSV1-UL19-6792 | − | GUGGCCGACGUGGAGCUGCCGGG | 23 | 11391 |
| HSV1-UL19-6793 | − | GGUGGCCGACGUGGAGCUGCCGGG | 24 | 11392 |
| HSV1-UL19-6794 | − | GACGUGGAGCUGCCGGGG | 18 | 11393 |
| HSV1-UL19-6795 | − | CGACGUGGAGCUGCCGGGG | 19 | 11394 |
| HSV1-UL19-316 | − | CCGACGUGGAGCUGCCGGGG | 20 | 702 |
| HSV1-UL19-6796 | − | GCCGACGUGGAGCUGCCGGGG | 21 | 11395 |
| HSV1-UL19-6797 | − | GGCCGACGUGGAGCUGCCGGGG | 22 | 11396 |
| HSV1-UL19-6798 | − | UGGCCGACGUGGAGCUGCCGGGG | 23 | 11397 |
| HSV1-UL19-6799 | − | GUGGCCGACGUGGAGCUGCCGGGG | 24 | 11398 |
| HSV1-UL19-6800 | − | GACCGGCCGCACCGGGGG | 18 | 11399 |
| HSV1-UL19-6801 | − | UGACCGGCCGCACCGGGGG | 19 | 11400 |
| HSV1-UL19-2199 | − | AUGACCGGCCGCACCGGGGG | 20 | 2482 |
| HSV1-UL19-6802 | − | GAUGACCGGCCGCACCGGGGG | 21 | 11401 |
| HSV1-UL19-6803 | − | GGAUGACCGGCCGCACCGGGGG | 22 | 11402 |
| HSV1-UL19-6804 | − | CGGAUGACCGGCCGCACCGGGGG | 23 | 11403 |
| HSV1-UL19-6805 | − | GCGGAUGACCGGCCGCACCGGGGG | 24 | 11404 |
| HSV1-UL19-6806 | − | GGGGCCUGGAGCUGGGGG | 18 | 11405 |
| HSV1-UL19-6807 | − | CGGGGCCUGGAGCUGGGGG | 19 | 11406 |
| HSV1-UL19-341 | − | CCGGGGCCUGGAGCUGGGGG | 20 | 727 |
| HSV1-UL19-6808 | − | CCCGGGGCCUGGAGCUGGGGG | 21 | 11407 |
| HSV1-UL19-6809 | − | GCCCGGGGCCUGGAGCUGGGGG | 22 | 11408 |
| HSV1-UL19-6810 | − | CGCCCGGGGCCUGGAGCUGGGGG | 23 | 11409 |
| HSV1-UL19-6811 | − | ACGCCCGGGGCCUGGAGCUGGGGG | 24 | 11410 |
| HSV1-UL19-6812 | − | CAGCUGUUUUUUUGGGGG | 18 | 11411 |
| HSV1-UL19-6813 | − | CCAGCUGUUUUUUUGGGGG | 19 | 11412 |
| HSV1-UL19-2106 | − | GCCAGCUGUUUUUUUGGGGG | 20 | 2433 |
| HSV1-UL19-6814 | − | CGCCAGCUGUUUUUUUGGGGG | 21 | 11413 |
| HSV1-UL19-6815 | − | CCGCCAGCUGUUUUUUUGGGGG | 22 | 11414 |
| HSV1-UL19-6816 | − | CCCGCCAGCUGUUUUUUUGGGGG | 23 | 11415 |
| HSV1-UL19-6817 | − | CCCCGCCAGCUGUUUUUUUGGGGG | 24 | 11416 |
| HSV1-UL19-6818 | − | CGGGGCCUGGAGCUGGGG | 18 | 11417 |
| HSV1-UL19-6819 | − | CCGGGGCCUGGAGCUGGGG | 19 | 11418 |
| HSV1-UL19-2157 | − | CCCGGGGCCUGGAGCUGGGG | 20 | 2457 |
| HSV1-UL19-6820 | − | GCCCGGGGCCUGGAGCUGGGG | 21 | 11419 |
| HSV1-UL19-6821 | − | CGCCCGGGGCCUGGAGCUGGGG | 22 | 11420 |
| HSV1-UL19-6822 | − | ACGCCCGGGGCCUGGAGCUGGGG | 23 | 11421 |
| HSV1-UL19-6823 | − | GACGCCCGGGGCCUGGAGCUGGGG | 24 | 11422 |
| HSV1-UL19-6824 | − | UGCUGGCCCACAACAUGG | 18 | 11423 |
| HSV1-UL19-6825 | − | GUGCUGGCCCACAACAUGG | 19 | 11424 |
| HSV1-UL19-2216 | − | GGUGCUGGCCCACAACAUGG | 20 | 2494 |
| HSV1-UL19-6826 | − | AGGUGCUGGCCCACAACAUGG | 21 | 11425 |
| HSV1-UL19-6827 | − | CAGGUGCUGGCCCACAACAUGG | 22 | 11426 |
| HSV1-UL19-6828 | − | GCAGGUGCUGGCCCACAACAUGG | 23 | 11427 |
| HSV1-UL19-6829 | − | UGCAGGUGCUGGCCCACAACAUGG | 24 | 11428 |
| HSV1-UL19-6830 | − | GGCCCGGCACGAAACUGG | 18 | 11429 |
| HSV1-UL19-6831 | − | UGGCCCGGCACGAAACUGG | 19 | 11430 |
| HSV1-UL19-484 | − | GUGGCCCGGCACGAAACUGG | 20 | 870 |
| HSV1-UL19-6832 | − | GGUGGCCCGGCACGAAACUGG | 21 | 11431 |
| HSV1-UL19-6833 | − | AGGUGGCCCGGCACGAAACUGG | 22 | 11432 |
| HSV1-UL19-6834 | − | CAGGUGGCCCGGCACGAAACUGG | 23 | 11433 |
| HSV1-UL19-6835 | − | CCAGGUGGCCCGGCACGAAACUGG | 24 | 11434 |
| HSV1-UL19-6836 | − | UGACCGGCCCGGAGCUGG | 18 | 11435 |
| HSV1-UL19-6837 | − | CUGACCGGCCCGGAGCUGG | 19 | 11436 |
| HSV1-UL19-2179 | − | CCUGACCGGCCCGGAGCUGG | 20 | 2469 |
| HSV1-UL19-6838 | − | CCCUGACCGGCCCGGAGCUGG | 21 | 11437 |
| HSV1-UL19-6839 | − | ACCCUGACCGGCCCGGAGCUGG | 22 | 11438 |
| HSV1-UL19-6840 | − | UACCCUGACCGGCCCGGAGCUGG | 23 | 11439 |
| HSV1-UL19-6841 | − | UUACCCUGACCGGCCCGGAGCUGG | 24 | 11440 |
| HSV1-UL19-6842 | − | UGAACCGGCAGACGCUGG | 18 | 11441 |
| HSV1-UL19-6843 | − | CUGAACCGGCAGACGCUGG | 19 | 11442 |
| HSV1-UL19-2081 | − | CCUGAACCGGCAGACGCUGG | 20 | 2417 |
| HSV1-UL19-6844 | − | ACCUGAACCGGCAGACGCUGG | 21 | 11443 |
| HSV1-UL19-6845 | − | GACCUGAACCGGCAGACGCUGG | 22 | 11444 |
| HSV1-UL19-6846 | − | CGACCUGAACCGGCAGACGCUGG | 23 | 11445 |
| HSV1-UL19-6847 | − | UCGACCUGAACCGGCAGACGCUGG | 24 | 11446 |
| HSV1-UL19-6848 | − | ACGGGCGCGUGGUAGUGG | 18 | 11447 |
| HSV1-UL19-6849 | − | AACGGGCGCGUGGUAGUGG | 19 | 11448 |
| HSV1-UL19-2215 | − | CAACGGGCGCGUGGUAGUGG | 20 | 2493 |
| HSV1-UL19-6850 | − | ACAACGGGCGCGUGGUAGUGG | 21 | 11449 |
| HSV1-UL19-6851 | − | CACAACGGGCGCGUGGUAGUGG | 22 | 11450 |
| HSV1-UL19-6852 | − | UCACAACGGGCGCGUGGUAGUGG | 23 | 11451 |
| HSV1-UL19-6853 | − | UUCACAACGGGCGCGUGGUAGUGG | 24 | 11452 |
| HSV1-UL19-6854 | − | UGCGGAACGCGGUCGUGG | 18 | 11453 |
| HSV1-UL19-6855 | − | CUGCGGAACGCGGUCGUGG | 19 | 11454 |
| HSV1-UL19-509 | − | CCUGCGGAACGCGGUCGUGG | 20 | 895 |
| HSV1-UL19-6856 | − | ACCUGCGGAACGCGGUCGUGG | 21 | 11455 |
| HSV1-UL19-6857 | − | UACCUGCGGAACGCGGUCGUGG | 22 | 11456 |
| HSV1-UL19-6858 | − | GUACCUGCGGAACGCGGUCGUGG | 23 | 11457 |
| HSV1-UL19-6859 | − | UGUACCUGCGGAACGCGGUCGUGG | 24 | 11458 |
| HSV1-UL19-6860 | − | CGCCAGCUGUUUUUUUGG | 18 | 11459 |
| HSV1-UL19-6861 | − | CCGCCAGCUGUUUUUUUGG | 19 | 11460 |
| HSV1-UL19-271 | − | CCCGCCAGCUGUUUUUUUGG | 20 | 657 |
| HSV1-UL19-6862 | − | CCCCGCCAGCUGUUUUUUUGG | 21 | 11461 |
| HSV1-UL19-6863 | − | GCCCCGCCAGCUGUUUUUUUGG | 22 | 11462 |
| HSV1-UL19-6864 | − | CGCCCCGCCAGCUGUUUUUUUGG | 23 | 11463 |
| HSV1-UL19-6865 | − | CCGCCCCGCCAGCUGUUUUUUUGG | 24 | 11464 |
| HSV1-UL19-6866 | − | CUGACCUACGCGCUCAUG | 18 | 11465 |
| HSV1-UL19-6867 | − | GCUGACCUACGCGCUCAUG | 19 | 11466 |
| HSV1-UL19-2236 | − | CGCUGACCUACGCGCUCAUG | 20 | 2506 |
| HSV1-UL19-6868 | − | GCGCUGACCUACGCGCUCAUG | 21 | 11467 |
| HSV1-UL19-6869 | − | CGCGCUGACCUACGCGCUCAUG | 22 | 11468 |
| HSV1-UL19-6870 | − | ACGCGCUGACCUACGCGCUCAUG | 23 | 11469 |
| HSV1-UL19-6871 | − | AACGCGCUGACCUACGCGCUCAUG | 24 | 11470 |
| HSV1-UL19-6872 | − | CGCCACCUGCUGGAGAUG | 18 | 11471 |
| HSV1-UL19-6873 | − | CCGCCACCUGCUGGAGAUG | 19 | 11472 |
| HSV1-UL19-2075 | − | GCCGCCACCUGCUGGAGAUG | 20 | 2413 |
| HSV1-UL19-6874 | − | GGCCGCCACCUGCUGGAGAUG | 21 | 11473 |
| HSV1-UL19-6875 | − | GGGCCGCCACCUGCUGGAGAUG | 22 | 11474 |
| HSV1-UL19-6876 | − | UGGGCCGCCACCUGCUGGAGAUG | 23 | 11475 |
| HSV1-UL19-6877 | − | GUGGGCCGCCACCUGCUGGAGAUG | 24 | 11476 |
| HSV1-UL19-6878 | − | UGGCCCGGCACGAAACUG | 18 | 11477 |
| HSV1-UL19-6879 | − | GUGGCCCGGCACGAAACUG | 19 | 11478 |
| HSV1-UL19-2250 | − | GGUGGCCCGGCACGAAACUG | 20 | 2517 |
| HSV1-UL19-6880 | − | AGGUGGCCCGGCACGAAACUG | 21 | 11479 |
| HSV1-UL19-6881 | − | CAGGUGGCCCGGCACGAAACUG | 22 | 11480 |
| HSV1-UL19-6882 | − | CCAGGUGGCCCGGCACGAAACUG | 23 | 11481 |
| HSV1-UL19-6883 | − | UCCAGGUGGCCCGGCACGAAACUG | 24 | 11482 |
| HSV1-UL19-6884 | − | GACGUGGGCCGCCACCUG | 18 | 11483 |
| HSV1-UL19-6885 | − | CGACGUGGGCCGCCACCUG | 19 | 11484 |
| HSV1-UL19-2073 | − | ACGACGUGGGCCGCCACCUG | 20 | 2412 |
| HSV1-UL19-6886 | − | GACGACGUGGGCCGCCACCUG | 21 | 11485 |
| HSV1-UL19-6887 | − | GGACGACGUGGGCCGCCACCUG | 22 | 11486 |
| HSV1-UL19-6888 | − | UGGACGACGUGGGCCGCCACCUG | 23 | 11487 |
| HSV1-UL19-6889 | − | CUGGACGACGUGGGCCGCCACCUG | 24 | 11488 |
| HSV1-UL19-6890 | − | GCGGCAGCCGUGUACCUG | 18 | 11489 |
| HSV1-UL19-6891 | − | CGCGGCAGCCGUGUACCUG | 19 | 11490 |
| HSV1-UL19-506 | − | ACGCGGCAGCCGUGUACCUG | 20 | 892 |
| HSV1-UL19-6892 | − | AACGCGGCAGCCGUGUACCUG | 21 | 11491 |
| HSV1-UL19-6893 | − | CAACGCGGCAGCCGUGUACCUG | 22 | 11492 |
| HSV1-UL19-6894 | − | ACAACGCGGCAGCCGUGUACCUG | 23 | 11493 |
| HSV1-UL19-6895 | − | GACAACGCGGCAGCCGUGUACCUG | 24 | 11494 |
| HSV1-UL19-6896 | − | CGCGUAUACGCCACCCUG | 18 | 11495 |
| HSV1-UL19-6897 | − | CCGCGUAUACGCCACCCUG | 19 | 11496 |
| HSV1-UL19-2206 | − | ACCGCGUAUACGCCACCCUG | 20 | 2486 |
| HSV1-UL19-6898 | − | GACCGCGUAUACGCCACCCUG | 21 | 11497 |
| HSV1-UL19-6899 | − | CGACCGCGUAUACGCCACCCUG | 22 | 11498 |
| HSV1-UL19-6900 | − | UCGACCGCGUAUACGCCACCCUG | 23 | 11499 |
| HSV1-UL19-6901 | − | UUCGACCGCGUAUACGCCACCCUG | 24 | 11500 |
| HSV1-UL19-6902 | − | AACGUUCCCUACCCCCUG | 18 | 11501 |
| HSV1-UL19-6903 | − | CAACGUUCCCUACCCCCUG | 19 | 11502 |
| HSV1-UL19-2092 | − | CCAACGUUCCCUACCCCCUG | 20 | 2426 |
| HSV1-UL19-6904 | − | ACCAACGUUCCCUACCCCCUG | 21 | 11503 |
| HSV1-UL19-6905 | − | CACCAACGUUCCCUACCCCCUG | 22 | 11504 |
| HSV1-UL19-6906 | − | CCACCAACGUUCCCUACCCCCUG | 23 | 11505 |
| HSV1-UL19-6907 | − | GCCACCAACGUUCCCUACCCCCUG | 24 | 11506 |
| HSV1-UL19-6908 | − | GUCUUUCUGGAGGCCCUG | 18 | 11507 |
| HSV1-UL19-6909 | − | GGUCUUUCUGGAGGCCCUG | 19 | 11508 |
| HSV1-UL19-2091 | − | UGGUCUUUCUGGAGGCCCUG | 20 | 2425 |
| HSV1-UL19-6910 | − | CUGGUCUUUCUGGAGGCCCUG | 21 | 11509 |
| HSV1-UL19-6911 | − | GCUGGUCUUUCUGGAGGCCCUG | 22 | 11510 |
| HSV1-UL19-6912 | − | AGCUGGUCUUUCUGGAGGCCCUG | 23 | 11511 |
| HSV1-UL19-6913 | − | AAGCUGGUCUUUCUGGAGGCCCUG | 24 | 11512 |
| HSV1-UL19-6914 | − | GUGGCCGACGUGGAGCUG | 18 | 11513 |
| HSV1-UL19-6915 | − | GGUGGCCGACGUGGAGCUG | 19 | 11514 |
| HSV1-UL19-2135 | − | GGGUGGCCGACGUGGAGCUG | 20 | 2450 |
| HSV1-UL19-6916 | − | GGGGUGGCCGACGUGGAGCUG | 21 | 11515 |
| HSV1-UL19-6917 | − | GGGGGUGGCCGACGUGGAGCUG | 22 | 11516 |
| HSV1-UL19-6918 | − | UGGGGGUGGCCGACGUGGAGCUG | 23 | 11517 |
| HSV1-UL19-6919 | − | GUGGGGGUGGCCGACGUGGAGCUG | 24 | 11518 |
| HSV1-UL19-6920 | − | GUGUGCCACCCUUCGCUG | 18 | 11519 |
| HSV1-UL19-6921 | − | CGUGUGCCACCCUUCGCUG | 19 | 11520 |
| HSV1-UL19-2111 | − | CCGUGUGCCACCCUUCGCUG | 20 | 2436 |
| HSV1-UL19-6922 | − | ACCGUGUGCCACCCUUCGCUG | 21 | 11521 |
| HSV1-UL19-6923 | − | GACCGUGUGCCACCCUUCGCUG | 22 | 11522 |
| HSV1-UL19-6924 | − | GGACCGUGUGCCACCCUUCGCUG | 23 | 11523 |
| HSV1-UL19-6925 | − | GGGACCGUGUGCCACCCUUCGCUG | 24 | 11524 |
| HSV1-UL19-6926 | − | CAGAUGCUGCACGUGCUG | 18 | 11525 |
| HSV1-UL19-6927 | − | CCAGAUGCUGCACGUGCUG | 19 | 11526 |
| HSV1-UL19-2041 | − | ACCAGAUGCUGCACGUGCUG | 20 | 2386 |
| HSV1-UL19-6928 | − | GACCAGAUGCUGCACGUGCUG | 21 | 11527 |
| HSV1-UL19-6929 | − | CGACCAGAUGCUGCACGUGCUG | 22 | 11528 |
| HSV1-UL19-6930 | − | CCGACCAGAUGCUGCACGUGCUG | 23 | 11529 |
| HSV1-UL19-6931 | − | GCCGACCAGAUGCUGCACGUGCUG | 24 | 11530 |
| HSV1-UL19-6932 | − | CAGUCCUUCCUGAAAGUG | 18 | 11531 |
| HSV1-UL19-6933 | − | GCAGUCCUUCCUGAAAGUG | 19 | 11532 |
| HSV1-UL19-2063 | − | UGCAGUCCUUCCUGAAAGUG | 20 | 2403 |
| HSV1-UL19-6934 | − | CUGCAGUCCUUCCUGAAAGUG | 21 | 11533 |
| HSV1-UL19-6935 | − | CCUGCAGUCCUUCCUGAAAGUG | 22 | 11534 |
| HSV1-UL19-6936 | − | UCCUGCAGUCCUUCCUGAAAGUG | 23 | 11535 |
| HSV1-UL19-6937 | − | CUCCUGCAGUCCUUCCUGAAAGUG | 24 | 11536 |
| HSV1-UL19-6938 | − | GCCGGGGCCGACCACGUG | 18 | 11537 |
| HSV1-UL19-6939 | − | CGCCGGGGCCGACCACGUG | 19 | 11538 |
| HSV1-UL19-2225 | − | UCGCCGGGGCCGACCACGUG | 20 | 2500 |
| HSV1-UL19-6940 | − | UUCGCCGGGGCCGACCACGUG | 21 | 11539 |
| HSV1-UL19-6941 | − | GUUCGCCGGGGCCGACCACGUG | 22 | 11540 |
| HSV1-UL19-6942 | − | UGUUCGCCGGGGCCGACCACGUG | 23 | 11541 |
| HSV1-UL19-6943 | − | CUGUUCGCCGGGGCCGACCACGUG | 24 | 11542 |
| HSV1-UL19-6944 | − | UGCCCCAGCGACCCCGUG | 18 | 11543 |
| HSV1-UL19-6945 | − | GUGCCCCAGCGACCCCGUG | 19 | 11544 |
| HSV1-UL19-2212 | − | AGUGCCCCAGCGACCCCGUG | 20 | 2490 |
| HSV1-UL19-6946 | − | GAGUGCCCCAGCGACCCCGUG | 21 | 11545 |
| HSV1-UL19-6947 | − | GGAGUGCCCCAGCGACCCCGUG | 22 | 11546 |
| HSV1-UL19-6948 | − | AGGAGUGCCCCAGCGACCCCGUG | 23 | 11547 |
| HSV1-UL19-6949 | − | GAGGAGUGCCCCAGCGACCCCGUG | 24 | 11548 |
| HSV1-UL19-6950 | − | CAGGCCACCUGGCGCGUG | 18 | 11549 |
| HSV1-UL19-6951 | − | CCAGGCCACCUGGCGCGUG | 19 | 11550 |
| HSV1-UL19-2147 | − | UCCAGGCCACCUGGCGCGUG | 20 | 2452 |
| HSV1-UL19-6952 | − | AUCCAGGCCACCUGGCGCGUG | 21 | 11551 |
| HSV1-UL19-6953 | − | GAUCCAGGCCACCUGGCGCGUG | 22 | 11552 |
| HSV1-UL19-6954 | − | AGAUCCAGGCCACCUGGCGCGUG | 23 | 11553 |
| HSV1-UL19-6955 | − | GAGAUCCAGGCCACCUGGCGCGUG | 24 | 11554 |
| HSV1-UL19-6956 | − | GGGUGCCGCGAACUCGUG | 18 | 11555 |
| HSV1-UL19-6957 | − | GGGGUGCCGCGAACUCGUG | 19 | 11556 |
| HSV1-UL19-2313 | − | CGGGGUGCCGCGAACUCGUG | 20 | 2551 |
| HSV1-UL19-6958 | − | CCGGGGUGCCGCGAACUCGUG | 21 | 11557 |
| HSV1-UL19-6959 | − | CCCGGGGUGCCGCGAACUCGUG | 22 | 11558 |
| HSV1-UL19-6960 | − | CCCCGGGGUGCCGCGAACUCGUG | 23 | 11559 |
| HSV1-UL19-6961 | − | CCCCCGGGGUGCCGCGAACUCGUG | 24 | 11560 |
| HSV1-UL19-6962 | − | CUGCUGCCACCCCUCGUG | 18 | 11561 |
| HSV1-UL19-6963 | − | GCUGCUGCCACCCCUCGUG | 19 | 11562 |
| HSV1-UL19-379 | − | CGCUGCUGCCACCCCUCGUG | 20 | 765 |
| HSV1-UL19-6964 | − | GCGCUGCUGCCACCCCUCGUG | 21 | 11563 |
| HSV1-UL19-6965 | − | GGCGCUGCUGCCACCCCUCGUG | 22 | 11564 |
| HSV1-UL19-6966 | − | CGGCGCUGCUGCCACCCCUCGUG | 23 | 11565 |
| HSV1-UL19-6967 | − | CCGGCGCUGCUGCCACCCCUCGUG | 24 | 11566 |
| HSV1-UL19-6968 | − | CUGGUCACGGCGCUCGUG | 18 | 11567 |
| HSV1-UL19-6969 | − | CCUGGUCACGGCGCUCGUG | 19 | 11568 |
| HSV1-UL19-2069 | − | ACCUGGUCACGGCGCUCGUG | 20 | 2408 |
| HSV1-UL19-6970 | − | AACCUGGUCACGGCGCUCGUG | 21 | 11569 |
| HSV1-UL19-6971 | − | CAACCUGGUCACGGCGCUCGUG | 22 | 11570 |
| HSV1-UL19-6972 | − | CCAACCUGGUCACGGCGCUCGUG | 23 | 11571 |
| HSV1-UL19-6973 | − | GCCAACCUGGUCACGGCGCUCGUG | 24 | 11572 |
| HSV1-UL19-6974 | − | CUGCGGAACGCGGUCGUG | 18 | 11573 |
| HSV1-UL19-6975 | − | CCUGCGGAACGCGGUCGUG | 19 | 11574 |
| HSV1-UL19-2266 | − | ACCUGCGGAACGCGGUCGUG | 20 | 2527 |
| HSV1-UL19-6976 | − | UACCUGCGGAACGCGGUCGUG | 21 | 11575 |
| HSV1-UL19-6977 | − | GUACCUGCGGAACGCGGUCGUG | 22 | 11576 |
| HSV1-UL19-6978 | − | UGUACCUGCGGAACGCGGUCGUG | 23 | 11577 |
| HSV1-UL19-6979 | − | GUGUACCUGCGGAACGCGGUCGUG | 24 | 11578 |
| HSV1-UL19-6980 | − | CCGCGUUCGACUUCUUUG | 18 | 11579 |
| HSV1-UL19-6981 | − | CCCGCGUUCGACUUCUUUG | 19 | 11580 |
| HSV1-UL19-305 | − | CCCCGCGUUCGACUUCUUUG | 20 | 691 |
| HSV1-UL19-6982 | − | ACCCCGCGUUCGACUUCUUUG | 21 | 11581 |
| HSV1-UL19-6983 | − | CACCCCGCGUUCGACUUCUUUG | 22 | 11582 |
| HSV1-UL19-6984 | − | GCACCCCGCGUUCGACUUCUUUG | 23 | 11583 |
| HSV1-UL19-6985 | − | UGCACCCCGCGUUCGACUUCUUUG | 24 | 11584 |
| HSV1-UL19-6986 | − | CCGCCAGCUGUUUUUUUG | 18 | 11585 |
| HSV1-UL19-6987 | − | CCCGCCAGCUGUUUUUUUG | 19 | 11586 |
| HSV1-UL19-270 | − | CCCCGCCAGCUGUUUUUUUG | 20 | 656 |
| HSV1-UL19-6988 | − | GCCCCGCCAGCUGUUUUUUUG | 21 | 11587 |
| HSV1-UL19-6989 | − | CGCCCCGCCAGCUGUUUUUUUG | 22 | 11588 |
| HSV1-UL19-6990 | − | CCGCCCCGCCAGCUGUUUUUUUG | 23 | 11589 |
| HSV1-UL19-6991 | − | CCCGCCCCGCCAGCUGUUUUUUUG | 24 | 11590 |
| HSV1-UL19-6992 | − | CGAGCUGAAUCACCUAAU | 18 | 11591 |
| HSV1-UL19-6993 | − | CCGAGCUGAAUCACCUAAU | 19 | 11592 |
| HSV1-UL19-2182 | − | GCCGAGCUGAAUCACCUAAU | 20 | 2472 |
| HSV1-UL19-6994 | − | AGCCGAGCUGAAUCACCUAAU | 21 | 11593 |
| HSV1-UL19-6995 | − | AAGCCGAGCUGAAUCACCUAAU | 22 | 11594 |
| HSV1-UL19-6996 | − | CAAGCCGAGCUGAAUCACCUAAU | 23 | 11595 |
| HSV1-UL19-6997 | − | GCAAGCCGAGCUGAAUCACCUAAU | 24 | 11596 |
| HSV1-UL19-6998 | − | CUGAUGGCCCCCCAGCAU | 18 | 11597 |
| HSV1-UL19-6999 | − | GCUGAUGGCCCCCCAGCAU | 19 | 11598 |
| HSV1-UL19-2222 | − | UGCUGAUGGCCCCCCAGCAU | 20 | 2498 |
| HSV1-UL19-7000 | − | CUGCUGAUGGCCCCCCAGCAU | 21 | 11599 |
| HSV1-UL19-7001 | − | CCUGCUGAUGGCCCCCCAGCAU | 22 | 11600 |
| HSV1-UL19-7002 | − | UCCUGCUGAUGGCCCCCCAGCAU | 23 | 11601 |
| HSV1-UL19-7003 | − | AUCCUGCUGAUGGCCCCCCAGCAU | 24 | 11602 |
| HSV1-UL19-7004 | − | GUCUCUGGAACACGCGAU | 18 | 11603 |
| HSV1-UL19-7005 | − | UGUCUCUGGAACACGCGAU | 19 | 11604 |
| HSV1-UL19-275 | − | CUGUCUCUGGAACACGCGAU | 20 | 661 |
| HSV1-UL19-7006 | − | CCUGUCUCUGGAACACGCGAU | 21 | 11605 |
| HSV1-UL19-7007 | − | GCCUGUCUCUGGAACACGCGAU | 22 | 11606 |
| HSV1-UL19-7008 | − | CGCCUGUCUCUGGAACACGCGAU | 23 | 11607 |
| HSV1-UL19-7009 | − | GCGCCUGUCUCUGGAACACGCGAU | 24 | 11608 |
| HSV1-UL19-7010 | − | CAGGACCGCUUUGUGACU | 18 | 11609 |
| HSV1-UL19-7011 | − | ACAGGACCGCUUUGUGACU | 19 | 11610 |
| HSV1-UL19-2243 | − | GACAGGACCGCUUUGUGACU | 20 | 2512 |
| HSV1-UL19-7012 | − | CGACAGGACCGCUUUGUGACU | 21 | 11611 |
| HSV1-UL19-7013 | − | CCGACAGGACCGCUUUGUGACU | 22 | 11612 |
| HSV1-UL19-7014 | − | UCCGACAGGACCGCUUUGUGACU | 23 | 11613 |
| HSV1-UL19-7015 | − | GUCCGACAGGACCGCUUUGUGACU | 24 | 11614 |
| HSV1-UL19-7016 | − | GUACGUCGUGACCUACCU | 18 | 11615 |
| HSV1-UL19-7017 | − | CGUACGUCGUGACCUACCU | 19 | 11616 |
| HSV1-UL19-358 | − | UCGUACGUCGUGACCUACCU | 20 | 744 |
| HSV1-UL19-7018 | − | CUCGUACGUCGUGACCUACCU | 21 | 11617 |
| HSV1-UL19-7019 | − | UCUCGUACGUCGUGACCUACCU | 22 | 11618 |
| HSV1-UL19-7020 | − | GUCUCGUACGUCGUGACCUACCU | 23 | 11619 |
| HSV1-UL19-7021 | − | GGUCUCGUACGUCGUGACCUACCU | 24 | 11620 |
| HSV1-UL19-7022 | − | CGCGGCAGCCGUGUACCU | 18 | 11621 |
| HSV1-UL19-7023 | − | ACGCGGCAGCCGUGUACCU | 19 | 11622 |
| HSV1-UL19-2264 | − | AACGCGGCAGCCGUGUACCU | 20 | 2526 |
| HSV1-UL19-7024 | − | CAACGCGGCAGCCGUGUACCU | 21 | 11623 |
| HSV1-UL19-7025 | − | ACAACGCGGCAGCCGUGUACCU | 22 | 11624 |
| HSV1-UL19-7026 | − | GACAACGCGGCAGCCGUGUACCU | 23 | 11625 |
| HSV1-UL19-7027 | − | GGACAACGCGGCAGCCGUGUACCU | 24 | 11626 |
| HSV1-UL19-7028 | − | AGCUGUUUUUGAACGCCU | 18 | 11627 |
| HSV1-UL19-7029 | − | CAGCUGUUUUUGAACGCCU | 19 | 11628 |
| HSV1-UL19-291 | − | GCAGCUGUUUUUGAACGCCU | 20 | 677 |
| HSV1-UL19-7030 | − | AGCAGCUGUUUUUGAACGCCU | 21 | 11629 |
| HSV1-UL19-7031 | − | CAGCAGCUGUUUUUGAACGCCU | 22 | 11630 |
| HSV1-UL19-7032 | − | GCAGCAGCUGUUUUUGAACGCCU | 23 | 11631 |
| HSV1-UL19-7033 | − | UGCAGCAGCUGUUUUUGAACGCCU | 24 | 11632 |
| HSV1-UL19-3667 | − | CAACGUCCAGGCCGUCCU | 18 | 8266 |
| HSV1-UL19-3668 | − | GCAACGUCCAGGCCGUCCU | 19 | 8267 |
| HSV1-UL19-189 | − | CGCAACGUCCAGGCCGUCCU | 20 | 575 |
| HSV1-UL19-3669 | − | UCGCAACGUCCAGGCCGUCCU | 21 | 8268 |
| HSV1-UL19-3670 | − | CUCGCAACGUCCAGGCCGUCCU | 22 | 8269 |
| HSV1-UL19-3671 | − | GCUCGCAACGUCCAGGCCGUCCU | 23 | 8270 |
| HSV1-UL19-3672 | − | CGCUCGCAACGUCCAGGCCGUCCU | 24 | 8271 |
| HSV1-UL19-7034 | − | CCCCUGGUCCCCCCGGCU | 18 | 11633 |
| HSV1-UL19-7035 | − | CCCCCUGGUCCCCCCGGCU | 19 | 11634 |
| HSV1-UL19-2226 | − | UCCCCCUGGUCCCCCCGGCU | 20 | 2501 |
| HSV1-UL19-7036 | − | GUCCCCCUGGUCCCCCCGGCU | 21 | 11635 |
| HSV1-UL19-7037 | − | GGUCCCCCUGGUCCCCCCGGCU | 22 | 11636 |
| HSV1-UL19-7038 | − | AGGUCCCCCUGGUCCCCCCGGCU | 23 | 11637 |
| HSV1-UL19-7039 | − | CAGGUCCCCCUGGUCCCCCCGGCU | 24 | 11638 |
| HSV1-UL19-7040 | − | CCUGGUCCCCCCGGCUCU | 18 | 11639 |
| HSV1-UL19-7041 | − | CCCUGGUCCCCCCGGCUCU | 19 | 11640 |
| HSV1-UL19-456 | − | CCCCUGGUCCCCCCGGCUCU | 20 | 842 |
| HSV1-UL19-7042 | − | CCCCCUGGUCCCCCCGGCUCU | 21 | 11641 |
| HSV1-UL19-7043 | − | UCCCCCUGGUCCCCCCGGCUCU | 22 | 11642 |
| HSV1-UL19-7044 | − | GUCCCCCUGGUCCCCCCGGCUCU | 23 | 11643 |
| HSV1-UL19-7045 | − | GGUCCCCCUGGUCCCCCCGGCUCU | 24 | 11644 |
| HSV1-UL19-7046 | − | CAGGUGCUGCGCCUGUCU | 18 | 11645 |
| HSV1-UL19-7047 | − | CCAGGUGCUGCGCCUGUCU | 19 | 11646 |
| HSV1-UL19-2107 | − | GCCAGGUGCUGCGCCUGUCU | 20 | 2434 |
| HSV1-UL19-7048 | − | CGCCAGGUGCUGCGCCUGUCU | 21 | 11647 |
| HSV1-UL19-7049 | − | CCGCCAGGUGCUGCGCCUGUCU | 22 | 11648 |
| HSV1-UL19-7050 | − | ACCGCCAGGUGCUGCGCCUGUCU | 23 | 11649 |
| HSV1-UL19-7051 | − | GACCGCCAGGUGCUGCGCCUGUCU | 24 | 11650 |
| HSV1-UL19-7052 | − | AGCUAAAGCGAAGCUUCU | 18 | 11651 |
| HSV1-UL19-7053 | − | GAGCUAAAGCGAAGCUUCU | 19 | 11652 |
| HSV1-UL19-2048 | − | CGAGCUAAAGCGAAGCUUCU | 20 | 2392 |
| HSV1-UL19-7054 | − | CCGAGCUAAAGCGAAGCUUCU | 21 | 11653 |
| HSV1-UL19-7055 | − | GCCGAGCUAAAGCGAAGCUUCU | 22 | 11654 |
| HSV1-UL19-7056 | − | CGCCGAGCUAAAGCGAAGCUUCU | 23 | 11655 |
| HSV1-UL19-7057 | − | UCGCCGAGCUAAAGCGAAGCUUCU | 24 | 11656 |
| HSV1-UL19-7058 | − | CUGAGAACGUGCUGUUCU | 18 | 11657 |
| HSV1-UL19-7059 | − | ACUGAGAACGUGCUGUUCU | 19 | 11658 |
| HSV1-UL19-475 | − | GACUGAGAACGUGCUGUUCU | 20 | 861 |
| HSV1-UL19-7060 | − | UGACUGAGAACGUGCUGUUCU | 21 | 11659 |
| HSV1-UL19-7061 | − | GUGACUGAGAACGUGCUGUUCU | 22 | 11660 |
| HSV1-UL19-7062 | − | UGUGACUGAGAACGUGCUGUUCU | 23 | 11661 |
| HSV1-UL19-7063 | − | UUGUGACUGAGAACGUGCUGUUCU | 24 | 11662 |
| HSV1-UL19-7064 | − | GGCAAGGCCGUGCGAAGU | 18 | 11663 |
| HSV1-UL19-7065 | − | GGGCAAGGCCGUGCGAAGU | 19 | 11664 |
| HSV1-UL19-2071 | − | UGGGCAAGGCCGUGCGAAGU | 20 | 2410 |
| HSV1-UL19-7066 | − | AUGGGCAAGGCCGUGCGAAGU | 21 | 11665 |
| HSV1-UL19-7067 | − | GAUGGGCAAGGCCGUGCGAAGU | 22 | 11666 |
| HSV1-UL19-7068 | − | UGAUGGGCAAGGCCGUGCGAAGU | 23 | 11667 |
| HSV1-UL19-7069 | − | GUGAUGGGCAAGGCCGUGCGAAGU | 24 | 11668 |
| HSV1-UL19-7070 | − | CGUGAUGGGCAAGGCCGU | 18 | 11669 |
| HSV1-UL19-7071 | − | UCGUGAUGGGCAAGGCCGU | 19 | 11670 |
| HSV1-UL19-2070 | − | CUCGUGAUGGGCAAGGCCGU | 20 | 2409 |
| HSV1-UL19-7072 | − | GCUCGUGAUGGGCAAGGCCGU | 21 | 11671 |
| HSV1-UL19-7073 | − | CGCUCGUGAUGGGCAAGGCCGU | 22 | 11672 |
| HSV1-UL19-7074 | − | GCGCUCGUGAUGGGCAAGGCCGU | 23 | 11673 |
| HSV1-UL19-7075 | − | GGCGCUCGUGAUGGGCAAGGCCGU | 24 | 11674 |
| HSV1-UL19-7076 | − | UCGAAGCCGCCAAUCCGU | 18 | 11675 |
| HSV1-UL19-7077 | − | GUCGAAGCCGCCAAUCCGU | 19 | 11676 |
| HSV1-UL19-2116 | − | CGUCGAAGCCGCCAAUCCGU | 20 | 2439 |
| HSV1-UL19-7078 | − | CCGUCGAAGCCGCCAAUCCGU | 21 | 11677 |
| HSV1-UL19-7079 | − | CCCGUCGAAGCCGCCAAUCCGU | 22 | 11678 |
| HSV1-UL19-7080 | − | CCCCGUCGAAGCCGCCAAUCCGU | 23 | 11679 |
| HSV1-UL19-7081 | − | ACCCCGUCGAAGCCGCCAAUCCGU | 24 | 11680 |
| HSV1-UL19-7082 | − | UGUUCUCGGAGCGCGCGU | 18 | 11681 |
| HSV1-UL19-7083 | − | CUGUUCUCGGAGCGCGCGU | 19 | 11682 |
| HSV1-UL19-476 | − | GCUGUUCUCGGAGCGCGCGU | 20 | 862 |
| HSV1-UL19-7084 | − | UGCUGUUCUCGGAGCGCGCGU | 21 | 11683 |
| HSV1-UL19-7085 | − | GUGCUGUUCUCGGAGCGCGCGU | 22 | 11684 |
| HSV1-UL19-7086 | − | CGUGCUGUUCUCGGAGCGCGCGU | 23 | 11685 |
| HSV1-UL19-7087 | − | ACGUGCUGUUCUCGGAGCGCGCGU | 24 | 11686 |
| HSV1-UL19-7088 | − | AGGCCGUCCUCGGGGCGU | 18 | 11687 |
| HSV1-UL19-7089 | − | CAGGCCGUCCUCGGGGCGU | 19 | 11688 |
| HSV1-UL19-2040 | − | CCAGGCCGUCCUCGGGGCGU | 20 | 2385 |
| HSV1-UL19-7090 | − | UCCAGGCCGUCCUCGGGGCGU | 21 | 11689 |
| HSV1-UL19-7091 | − | GUCCAGGCCGUCCUCGGGGCGU | 22 | 11690 |
| HSV1-UL19-7092 | − | CGUCCAGGCCGUCCUCGGGGCGU | 23 | 11691 |
| HSV1-UL19-7093 | − | ACGUCCAGGCCGUCCUCGGGGCGU | 24 | 11692 |
| HSV1-UL19-7094 | − | GCUGCUGCCACCCCUCGU | 18 | 11693 |
| HSV1-UL19-7095 | − | CGCUGCUGCCACCCCUCGU | 19 | 11694 |
| HSV1-UL19-2183 | − | GCGCUGCUGCCACCCCUCGU | 20 | 2473 |
| HSV1-UL19-7096 | − | GGCGCUGCUGCCACCCCUCGU | 21 | 11695 |
| HSV1-UL19-7097 | − | CGGCGCUGCUGCCACCCCUCGU | 22 | 11696 |
| HSV1-UL19-7098 | − | CCGGCGCUGCUGCCACCCCUCGU | 23 | 11697 |
| HSV1-UL19-7099 | − | CCCGGCGCUGCUGCCACCCCUCGU | 24 | 11698 |
| HSV1-UL19-7100 | − | CGUCGCAGCGAUUUUCGU | 18 | 11699 |
| HSV1-UL19-7101 | − | GCGUCGCAGCGAUUUUCGU | 19 | 11700 |
| HSV1-UL19-2296 | − | GGCGUCGCAGCGAUUUUCGU | 20 | 2542 |
| HSV1-UL19-7102 | − | GGGCGUCGCAGCGAUUUUCGU | 21 | 11701 |
| HSV1-UL19-7103 | − | UGGGCGUCGCAGCGAUUUUCGU | 22 | 11702 |
| HSV1-UL19-7104 | − | GUGGGCGUCGCAGCGAUUUUCGU | 23 | 11703 |
| HSV1-UL19-7105 | − | CGUGGGCGUCGCAGCGAUUUUCGU | 24 | 11704 |
| HSV1-UL19-7106 | − | GAACGUUGACGCGGCGGU | 18 | 11705 |
| HSV1-UL19-7107 | − | UGAACGUUGACGCGGCGGU | 19 | 11706 |
| HSV1-UL19-279 | − | AUGAACGUUGACGCGGCGGU | 20 | 665 |
| HSV1-UL19-7108 | − | GAUGAACGUUGACGCGGCGGU | 21 | 11707 |
| HSV1-UL19-7109 | − | UGAUGAACGUUGACGCGGCGGU | 22 | 11708 |
| HSV1-UL19-7110 | − | CUGAUGAACGUUGACGCGGCGGU | 23 | 11709 |
| HSV1-UL19-7111 | − | GCUGAUGAACGUUGACGCGGCGGU | 24 | 11710 |
| HSV1-UL19-7112 | − | GCUAUGUCCGGCGGCGUU | 18 | 11711 |
| HSV1-UL19-7113 | − | CGCUAUGUCCGGCGGCGUU | 19 | 11712 |
| HSV1-UL19-2148 | − | GCGCUAUGUCCGGCGGCGUU | 20 | 2453 |
| HSV1-UL19-7114 | − | GGCGCUAUGUCCGGCGGCGUU | 21 | 11713 |
| HSV1-UL19-7115 | − | UGGCGCUAUGUCCGGCGGCGUU | 22 | 11714 |
| HSV1-UL19-7116 | − | CUGGCGCUAUGUCCGGCGGCGUU | 23 | 11715 |
| HSV1-UL19-7117 | − | CCUGGCGCUAUGUCCGGCGGCGUU | 24 | 11716 |
| HSV1-UL19-7118 | − | GGCGAGAAGCUGGUCUUU | 18 | 11717 |
| HSV1-UL19-7119 | − | CGGCGAGAAGCUGGUCUUU | 19 | 11718 |
| HSV1-UL19-2087 | − | UCGGCGAGAAGCUGGUCUUU | 20 | 2423 |
| HSV1-UL19-7120 | − | AUCGGCGAGAAGCUGGUCUUU | 21 | 11719 |
| HSV1-UL19-7121 | − | CAUCGGCGAGAAGCUGGUCUUU | 22 | 11720 |
| HSV1-UL19-7122 | − | CCAUCGGCGAGAAGCUGGUCUUU | 23 | 11721 |
| HSV1-UL19-7123 | − | UCCAUCGGCGAGAAGCUGGUCUUU | 24 | 11722 |
| HSV1-UL19-7124 | − | CCCGCGUUCGACUUCUUU | 18 | 11723 |
| HSV1-UL19-7125 | − | CCCCGCGUUCGACUUCUUU | 19 | 11724 |
| HSV1-UL19-2130 | − | ACCCCGCGUUCGACUUCUUU | 20 | 2448 |
| HSV1-UL19-7126 | − | CACCCCGCGUUCGACUUCUUU | 21 | 11725 |
| HSV1-UL19-7127 | − | GCACCCCGCGUUCGACUUCUUU | 22 | 11726 |
| HSV1-UL19-7128 | − | UGCACCCCGCGUUCGACUUCUUU | 23 | 11727 |
| HSV1-UL19-7129 | − | CUGCACCCCGCGUUCGACUUCUUU | 24 | 11728 |
| HSV1-UL19-7130 | − | GACCCGUGUGGCCUGUUU | 18 | 11729 |
| HSV1-UL19-7131 | − | GGACCCGUGUGGCCUGUUU | 19 | 11730 |
| HSV1-UL19-2314 | − | AGGACCCGUGUGGCCUGUUU | 20 | 2552 |
| HSV1-UL19-7132 | − | GAGGACCCGUGUGGCCUGUUU | 21 | 11731 |
| HSV1-UL19-7133 | − | GGAGGACCCGUGUGGCCUGUUU | 22 | 11732 |
| HSV1-UL19-7134 | − | UGGAGGACCCGUGUGGCCUGUUU | 23 | 11733 |
| HSV1-UL19-7135 | − | GUGGAGGACCCGUGUGGCCUGUUU | 24 | 11734 |
| HSV1-UL19-7136 | − | GACAUGCAGCAGCUGUUU | 18 | 11735 |
| HSV1-UL19-7137 | − | AGACAUGCAGCAGCUGUUU | 19 | 11736 |
| HSV1-UL19-2118 | − | CAGACAUGCAGCAGCUGUUU | 20 | 2440 |
| HSV1-UL19-7138 | − | GCAGACAUGCAGCAGCUGUUU | 21 | 11737 |
| HSV1-UL19-7139 | − | CGCAGACAUGCAGCAGCUGUUU | 22 | 11738 |
| HSV1-UL19-7140 | − | CCGCAGACAUGCAGCAGCUGUUU | 23 | 11739 |
| HSV1-UL19-7141 | − | GCCGCAGACAUGCAGCAGCUGUUU | 24 | 11740 |
| HSV1-UL19-7142 | − | GCCCCGCCAGCUGUUUUU | 18 | 11741 |
| HSV1-UL19-7143 | − | CGCCCCGCCAGCUGUUUUU | 19 | 11742 |
| HSV1-UL19-2101 | − | CCGCCCCGCCAGCUGUUUUU | 20 | 2432 |
| HSV1-UL19-7144 | − | CCCGCCCCGCCAGCUGUUUUU | 21 | 11743 |
| HSV1-UL19-7145 | − | UCCCGCCCCGCCAGCUGUUUUU | 22 | 11744 |
| HSV1-UL19-7146 | − | UUCCCGCCCCGCCAGCUGUUUUU | 23 | 11745 |
| HSV1-UL19-7147 | − | CUUCCCGCCCCGCCAGCUGUUUUU | 24 | 11746 |
| HSV1-UL19-7148 | − | CCCCGCCAGCUGUUUUUU | 18 | 11747 |
| HSV1-UL19-7149 | − | GCCCCGCCAGCUGUUUUUU | 19 | 11748 |
| HSV1-UL19-268 | − | CGCCCCGCCAGCUGUUUUUU | 20 | 654 |
| HSV1-UL19-7150 | − | CCGCCCCGCCAGCUGUUUUUU | 21 | 11749 |
| HSV1-UL19-7151 | − | CCCGCCCCGCCAGCUGUUUUUU | 22 | 11750 |
| HSV1-UL19-7152 | − | UCCCGCCCCGCCAGCUGUUUUUU | 23 | 11751 |
| HSV1-UL19-7153 | − | UUCCCGCCCCGCCAGCUGUUUUUU | 24 | 11752 |
| HSV1-UL19-7154 | − | CCCGCCAGCUGUUUUUUU | 18 | 11753 |
| HSV1-UL19-7155 | − | CCCCGCCAGCUGUUUUUUU | 19 | 11754 |
| HSV1-UL19-269 | − | GCCCCGCCAGCUGUUUUUUU | 20 | 655 |
| HSV1-UL19-7156 | − | CGCCCCGCCAGCUGUUUUUUU | 21 | 11755 |
| HSV1-UL19-7157 | − | CCGCCCCGCCAGCUGUUUUUUU | 22 | 11756 |
| HSV1-UL19-7158 | − | CCCGCCCCGCCAGCUGUUUUUUU | 23 | 11757 |
| HSV1-UL19-7159 | − | UCCCGCCCCGCCAGCUGUUUUUUU | 24 | 11758 |

[0766] Table 7A provides exemplary targeting domains for knocking out the UL19 gene selected according to the first tier parameters. The targeting domains bind within the first 500 bp of the coding sequence (e.g., within 500 bp downstream from the start codon), have a high level of orthogonality, and start with a 5′G. It is contemplated herein that in an embodiment the targeting domain hybridizes to the target domain through complementary base pairing. Any of the targeting domains in the table can be used with a N. meningitidis Cas9 molecule that generates a double stranded break (Cas9 nuclease) or a single-stranded break (Cas9 nickase).

TABLE 7A
1st Tier

| | | | Target | |
|---|---|---|---|---|
| | DNA | | Site | Seq ID |
| gRNA Name | Strand | Targeting Domain | Length | NO: |
| HSV1-UL19- | − | GUUCGAGGUCCACCAGC | 17 | 3109 |
| 3193 | | | | |
| HSV1-UL19- | − | GCAACACCCUGUCGCUC | 17 | 11759 |
| 7160 | | | | |
| HSV1-UL19- | − | GCGUCGCAUCGACGCCU | 17 | 3108 |
| 3192 | | | | |

[0767] Table 7B provides exemplary targeting domains for knocking out the UL19 gene selected according to the second tier parameters. The targeting domains bind within the first 500 bp of the coding sequence (e.g., within 500 bp downstream from the start codon) and have a high level of orthogonality. It is contemplated herein that in an embodiment the targeting domain hybridizes to the target domain through complementary base pairing. Any of the targeting domains in the table can be used with a N. meningitidis Cas9 molecule that generates a double stranded break (Cas9 nuclease) or a single-stranded break (Cas9 nickase).

TABLE 7B
2nd Tier

| | | | Target | |
|---|---|---|---|---|
| | DNA | | Site | Seq ID |
| gRNA Name | Strand | Targeting Domain | Length | NO: |
| HSV1- | − | ACCCACACACAAUUACAUGA | 20 | 3107 |
| UL19-3191 | | | | |
| HSV1- | − | ACAGUUCGAGGUCCACCAGC | 20 | 3106 |
| UL19-3190 | | | | |
| HSV1- | − | AUUGCAACACCCUGUCGCUC | 20 | 11760 |
| UL19-7161 | | | | |

[0768] Table 7C provides exemplary targeting domains for knocking out the UL19 gene selected according to the fourth tier parameters. The targeting domains bind within the first 500 bp of the coding sequence (e.g., within 500 bp downstream from the start codon). It is contemplated herein that in an embodiment the targeting domain hybridizes to the target domain through complementary base pairing. Any of the targeting domains in the table can be used with a N. meningitidis Cas9 molecule that generates a double stranded break (Cas9 nuclease) or a single-stranded break (Cas9 nickase).

TABLE 7C
4th Tier

| | | | Target | Seq |
|---|---|---|---|---|
| | DNA | | Site | ID |
| gRNA Name | Strand | Targeting Domain | Length | NO: |
| HSV1-UL19-3194 | − | CACACACAAUUACAUGA | 17 | 3110 |

[0769] Table 7D provides exemplary targeting domains for knocking out the UL19 gene selected according to the fifth tier parameters. The targeting domains fall in the coding sequence of the gene, downstream of the first 500 bp of coding sequence (e.g., anywhere from +500 (relative to the start codon) to the stop codon of the gene). It is contemplated herein that in an embodiment the targeting domain hybridizes to the target domain through complementary base pairing. Any of the targeting domains in the table can be used with a N. meningitidis Cas9 molecule that generates a double stranded break (Cas9 nuclease) or a single-stranded break (Cas9 nickase).

TABLE 7D
5th Tier

| | DNA | | Target Site | Seq ID |
|---|---|---|---|---|
| gRNA Name | Strand | Targeting Domain | Length | NO: |
| HSV1-UL19-3208 | + | AUGCUGGGGGGCCAUCA | 17 | 3122 |
| HSV1-UL19-7162 | + | CCGUACGUCACCGGCAC | 17 | 11761 |
| HSV1-UL19-3198 | − | GGACUGGACCGUGCACC | 17 | 3114 |
| HSV1-UL19-7163 | − | CUGGAAAAGGCGCCGCC | 17 | 11762 |
| HSV1-UL19-3207 | + | CGUUGACCGUGUUGGCC | 17 | 3121 |
| HSV1-UL19-7164 | − | CCUCGCCGGUGCUCAGC | 17 | 11763 |
| HSV1-UL19-3182 | + | AAGUGGGUCUCCCGCGC | 17 | 3100 |
| HSV1-UL19-7165 | + | GAAAAAGCUCGUCUCGC | 17 | 11764 |
| HSV1-UL19-7166 | + | CCAGGGCCUCCAGAAAG | 17 | 11765 |
| HSV1-UL19-7167 | − | UGGUCGCCGAGCUAAAG | 17 | 11766 |
| HSV1-UL19-7168 | + | AGCUCGUCUCGCAGAAG | 17 | 11767 |
| HSV1-UL19-7169 | + | CGCAUUAGGUGAUUCAG | 17 | 11768 |
| HSV1-UL19-2335 | − | AGCGAAGCUUCUGCGAG | 17 | 2564 |
| HSV1-UL19-7170 | + | CGUUGGUGGCGGCGUAG | 17 | 11769 |
| HSV1-UL19-3205 | + | CCGCCACGUACGCCCCG | 17 | 3120 |
| HSV1-UL19-3197 | − | CCAACCCGUGGGCGUCG | 17 | 3113 |
| HSV1-UL19-1879 | + | GUUCGCGGCACCCCGGG | 17 | 2265 |
| HSV1-UL19-7171 | − | GCUGCUGCACCGCGGGG | 17 | 11770 |
| HSV1-UL19-3204 | + | CGGCAAACCGUUCCAUG | 17 | 3119 |
| HSV1-UL19-1648 | + | GCGCCGGGUCUCGCAUU | 17 | 2034 |
| HSV1-UL19-7172 | + | UACGCCCCGUACGGAUU | 17 | 11771 |
| HSV1-UL19-3203 | + | CAGAUGCUGGGGGGCCAUCA | 20 | 3118 |
| HSV1-UL19-7173 | + | UCGCCGUACGUCACCGGCAC | 20 | 11772 |
| HSV1-UL19-3196 | − | GGCGGACUGGACCGUGCACC | 20 | 3112 |
| HSV1-UL19-7174 | − | CUGCUGGAAAAGGCGCCGCC | 20 | 11773 |
| HSV1-UL19-3202 | + | UGGCGUUGACCGUGUUGGCC | 20 | 3117 |
| HSV1-UL19-7175 | − | GGGCCUCGCCGGUGCUCAGC | 20 | 11774 |
| HSV1-UL19-2893 | + | GCGAAGUGGGUCUCCCGCGC | 20 | 2911 |
| HSV1-UL19-7176 | + | CAGGAAAAAGCUCGUCUCGC | 20 | 11775 |
| HSV1-UL19-7177 | + | UCUCCAGGGCCUCCAGAAAG | 20 | 11776 |
| HSV1-UL19-7178 | − | CCCUGGUCGCCGAGCUAAAG | 20 | 11777 |
| HSV1-UL19-7179 | + | AAAAGCUCGUCUCGCAGAAG | 20 | 11778 |
| HSV1-UL19-7180 | − | GGUUCACCGUCGUCCGACAG | 20 | 11779 |
| HSV1-UL19-7181 | + | UCUCGCAUUAGGUGAUUCAG | 20 | 11780 |
| HSV1-UL19-2049 | − | UAAAGCGAAGCUUCUGCGAG | 20 | 2393 |
| HSV1-UL19-7182 | + | GAACGUUGGUGGCGGCGUAG | 20 | 11781 |
| HSV1-UL19-3200 | + | GGGCCGCCACGUACGCCCCG | 20 | 3116 |
| HSV1-UL19-1412 | + | CGAGUUCGCGGCACCCCGGG | 20 | 1798 |
| HSV1-UL19-7183 | − | GCCGCUGCUGCACCGCGGGG | 20 | 11782 |
| HSV1-UL19-3199 | + | GCGCGGCAAACCGUUCCAUG | 20 | 3115 |
| HSV1-UL19-1181 | + | GCAGCGCCGGGUCUCGCAUU | 20 | 1567 |

[0770] Table 8A provides exemplary targeting domains for knocking out the UL30 gene selected according to the first tier parameters. The targeting domains bind within the first 500 bp of the coding sequence (e.g., within 500 bp downstream from the start codon), have a high level of orthogonality, and start with a 5′G. It is contemplated herein that in an embodiment the targeting domain hybridizes to the target domain through complementary base pairing. Any of the targeting domains in the table can be used with a S. pyogenes Cas9 molecule that generates a double stranded break (Cas9 nuclease) or a single-stranded break (Cas9 nickase).

TABLE 8A
1st Tier

| | | | | Seq |
|---|---|---|---|---|
| | DNA | | Target Site | ID |
| gRNA Name | Strand | Targeting Domain | Length | NO: |
| HSV1-UL30-175 | + | GUCGUACACGUGAAAGA | 17 | 3203 |
| HSV1-UL30-2843 | − | GUUCCACGCGCGGUUUA | 17 | 11783 |
| HSV1-UL30-228 | + | GGCGGGCGCAAAAAACC | 17 | 3227 |
| HSV1-UL30-193 | + | GUGACCGUCGUGCACCC | 17 | 3212 |
| HSV1-UL30-128 | − | GGGUUUUUUGCGCCCGC | 17 | 3180 |
| HSV1-UL30-168 | − | GUGGACCACGCCCCGGC | 17 | 3198 |
| HSV1-UL30-230 | + | GGCCGCCGACUUUCCUC | 17 | 3228 |
| HSV1-UL30-155 | − | GCGACGUCCUCCGCGUC | 17 | 3191 |
| HSV1-UL30-157 | − | GUCCUCCGCGUCGGGUC | 17 | 3193 |
| HSV1-UL30-182 | + | GGGGUUGAACCCCGCCG | 17 | 3205 |
| HSV1-UL30-212 | + | GCGUCCCGACUGGGGCG | 17 | 3225 |
| HSV1-UL30-2844 | + | GCCACCGGAAAACAUCG | 17 | 11784 |
| HSV1-UL30-2845 | − | GCGAUGUUUUCCGGUGG | 17 | 11785 |
| HSV1-UL30-57 | + | GAUGUCGUACACGUGAAAGA | 20 | 3150 |
| HSV1-UL30-54 | − | GAGAACGUGGAGCACGCGUA | 20 | 3148 |
| HSV1-UL30-91 | + | GGCUUCUGUUGCGUCCCGAC | 20 | 3166 |
| HSV1-UL30-18 | − | GGGACGCAACAGAAGCCGAC | 20 | 3126 |
| HSV1-UL30-110 | + | GCCGGCGGGCGCAAAAAACC | 20 | 3174 |
| HSV1-UL30-19 | − | GGACGCAACAGAAGCCGACC | 20 | 3127 |
| HSV1-UL30-75 | + | GAGGUGACCGUCGUGCACCC | 20 | 3159 |
| HSV1-UL30-48 | − | GGGCGGCGUGGACCACGCCC | 20 | 3258 |
| HSV1-UL30-77 | + | GCACCCCGGCGCGCUUCUCC | 20 | 3271 |
| HSV1-UL30-25 | − | GCCCCCCCGGAGAAGCGCGC | 20 | 3131 |
| HSV1-UL30-50 | − | GGCGUGGACCACGCCCCGGC | 20 | 3144 |
| HSV1-UL30-31 | − | GCGCCCCCAAGGUGUACUGC | 20 | 3136 |
| HSV1-UL30-39 | − | GACGUCCUCCGCGUCGGGUC | 20 | 3142 |
| HSV1-UL30-2846 | − | GGAACAACCGCGAUGUUUUC | 20 | 11786 |
| HSV1-UL30-53 | − | GUACGACAUCCUGGAGAACG | 20 | 3147 |
| HSV1-UL30-82 | + | GCAUCCUCGUCCAGCACCCG | 20 | 3161 |
| HSV1-UL30-64 | + | GGUGGGGUUGAACCCCGCCG | 20 | 3153 |
| HSV1-UL30-2847 | − | GCGCGGCCCAGUUCCACGCG | 20 | 11787 |
| HSV1-UL30-55 | − | GCACGCGUACGGCAUGCGCG | 20 | 3260 |
| HSV1-UL30-101 | + | GUUUUGCCUCAAACAAGGCG | 20 | 3171 |
| HSV1-UL30-51 | − | GCGUGGACCACGCCCCGGCG | 20 | 3145 |
| HSV1-UL30-65 | + | GGUUGAACCCCGCCGGGGCG | 20 | 3154 |
| HSV1-UL30-94 | + | GUUGCGUCCCGACUGGGGCG | 20 | 3169 |
| HSV1-UL30-2848 | + | GCCGCCACCGGAAAACAUCG | 20 | 11788 |
| HSV1-UL30-108 | + | GCUGGCUCCGCGAGGGCCGG | 20 | 3288 |
| HSV1-UL30-115 | + | GGCCGCCGACUUUCCUCCGG | 20 | 3177 |
| HSV1-UL30-2849 | − | GCGAUGUUUUCCGGUGGCGG | 20 | 11789 |
| HSV1-UL30-4 | − | GUCCCCCGGAGGAAAGUCGG | 20 | 3123 |
| HSV1-UL30-40 | − | GUCCUCCGCGUCGGGUCGGG | 20 | 3143 |
| HSV1-UL30-92 | + | GCUUCUGUUGCGUCCCGACU | 20 | 3167 |
| HSV1-UL30-70 | + | GUCCCCCCCGCAGUACACCU | 20 | 3157 |
| HSV1-UL30-87 | + | GCUAUAGUACGUAUGGCGCU | 20 | 3163 |
| HSV1-UL30-3 | − | GCUGUCCCCCGGAGGAAAGU | 20 | 3234 |
| HSV1-UL30-36 | − | GAGCGCGACGUCCUCCGCGU | 20 | 3139 |

[0771] Table 8B provides exemplary targeting domains for knocking out the UL30 gene selected according to the second tier parameters. The targeting domains bind within the first 500 bp of the coding sequence (e.g., within 500 bp downstream from the start codon) and have a high level of orthogonality. It is contemplated herein that in an embodiment the targeting domain hybridizes to the target domain through complementary base pairing. Any of the targeting domains in the table can be used with a S. pyogenes Cas9 molecule that generates a double stranded break (Cas9 nuclease) or a single-stranded break (Cas9 nickase).

TABLE 8B
2nd Tier

| | DNA | | Target Site | Seq ID |
|---|---|---|---|---|
| gRNA Name | Strand | Targeting Domain | Length | NO: |
| HSV1-UL30-147 | − | CCUCAAGCGCGCCCCCA | 17 | 3188 |
| HSV1-UL30-203 | + | AUUCGCUAUAGUACGUA | 17 | 3218 |
| HSV1-UL30-172 | − | AACGUGGAGCACGCGUA | 17 | 3202 |
| HSV1-UL30-2850 | + | UAAACCGCGCGUGGAAC | 17 | 11790 |
| HSV1-UL30-209 | + | UUCUGUUGCGUCCCGAC | 17 | 3222 |
| HSV1-UL30-136 | − | ACGCAACAGAAGCCGAC | 17 | 3181 |
| HSV1-UL30-137 | − | CGCAACAGAAGCCGACC | 17 | 3182 |
| HSV1-UL30-229 | + | AAACCCGGACGCCGCCC | 17 | 3355 |
| HSV1-UL30-170 | − | UCACGUGUACGACAUCC | 17 | 3200 |
| HSV1-UL30-139 | − | UCGAUUCAUCGCCCCGC | 17 | 3184 |
| HSV1-UL30-204 | + | UAUAGUACGUAUGGCGC | 17 | 3219 |
| HSV1-UL30-2851 | − | ACAACCGCGAUGUUUUC | 17 | 11791 |
| HSV1-UL30-215 | + | CGACUGGGGCGAGGUAG | 17 | 3226 |
| HSV1-UL30-186 | + | AGCCGCCCGACCCGACG | 17 | 3207 |
| HSV1-UL30-138 | − | UUCGAUUCAUCGCCCCG | 17 | 3183 |
| HSV1-UL30-185 | + | CACAGGCGCGAGCGCCG | 17 | 3206 |
| HSV1-UL30-232 | + | CCGCCGACUUUCCUCCG | 17 | 3230 |
| HSV1-UL30-196 | + | CCCGGCGCGCUUCUCCG | 17 | 3213 |
| HSV1-UL30-202 | + | CUCGUCCAGCACCCGCG | 17 | 3217 |
| HSV1-UL30-2852 | + | CGUCCAUAAACCGCGCG | 17 | 11792 |
| HSV1-UL30-173 | − | CGCGUACGGCAUGCGCG | 17 | 3324 |
| HSV1-UL30-169 | − | UGGACCACGCCCCGGCG | 17 | 3199 |
| HSV1-UL30-150 | − | CCCCAAGGUGUACUGCG | 17 | 3190 |
| HSV1-UL30-167 | − | CGUGGACCACGCCCCGG | 17 | 3197 |
| HSV1-UL30-233 | + | CGCCGACUUUCCUCCGG | 17 | 3231 |
| HSV1-UL30-2853 | − | ACCGCGAUGUUUUCCGG | 17 | 11793 |
| HSV1-UL30-187 | + | CGCCCGACCCGACGCGG | 17 | 3208 |
| HSV1-UL30-198 | + | CGGCGCGCUUCUCCGGG | 17 | 3215 |
| HSV1-UL30-158 | − | CUCCGCGUCGGGUCGGG | 17 | 3194 |
| HSV1-UL30-164 | − | CGCUCGCGCCUGUGGGG | 17 | 3196 |
| HSV1-UL30-211 | + | CUGUUGCGUCCCGACUG | 17 | 3224 |
| HSV1-UL30-163 | − | CGGCGCUCGCGCCUGUG | 17 | 3195 |
| HSV1-UL30-190 | + | CCCCGCAGUACACCUUG | 17 | 3211 |
| HSV1-UL30-192 | + | CCUUGGGGGCGCGCUUG | 17 | 3334 |
| HSV1-UL30-2854 | + | AAACCGCGCGUGGAACU | 17 | 11794 |
| HSV1-UL30-210 | + | UCUGUUGCGUCCCGACU | 17 | 3223 |
| HSV1-UL30-205 | + | AUAGUACGUAUGGCGCU | 17 | 3220 |
| HSV1-UL30-154 | − | CGCGACGUCCUCCGCGU | 17 | 3317 |
| HSV1-UL30-178 | + | UGAAAGACGGUGACGGU | 17 | 3204 |
| HSV1-UL30-156 | − | CGUCCUCCGCGUCGGGU | 17 | 3192 |
| HSV1-UL30-206 | + | UACGUAUGGCGCUGGGU | 17 | 3221 |
| HSV1-UL30-29 | − | UCACCUCAAGCGCGCCCCCA | 20 | 3134 |
| HSV1-UL30-6 | − | CGGAGGAAAGUCGGCGGCCA | 20 | 3235 |
| HSV1-UL30-85 | + | CGCAUUCGCUAUAGUACGUA | 20 | 3276 |
| HSV1-UL30-2855 | − | CCAGUUCCACGCGCGGUUUA | 20 | 11795 |
| HSV1-UL30-2856 | + | CCAUAAACCGCGCGUGGAAC | 20 | 11796 |
| HSV1-UL30-66 | + | CGUGGUCCACGCCGCCCCAC | 20 | 3265 |
| HSV1-UL30-103 | + | UCAAACAAGGCGGGGGUCCC | 20 | 3173 |
| HSV1-UL30-63 | + | CGGUGGGGUUGAACCCCGCC | 20 | 3264 |
| HSV1-UL30-89 | + | CGUAUGGCGCUGGGUUGGCC | 20 | 3165 |
| HSV1-UL30-52 | − | CUUUCACGUGUACGACAUCC | 20 | 3146 |
| HSV1-UL30-113 | + | CUGGCCGCCGACUUUCCUCC | 20 | 3291 |
| HSV1-UL30-56 | + | ACGCGUGCUCCACGUUCUCC | 20 | 3149 |
| HSV1-UL30-117 | + | ACUUUCCUCCGGGGGACAGC | 20 | 3293 |
| HSV1-UL30-12 | − | CCGGCCCUCGCGGAGCCAGC | 20 | 3240 |
| HSV1-UL30-83 | + | CAUCCUCGUCCAGCACCCGC | 20 | 3275 |
| HSV1-UL30-62 | + | ACGGUGGGGUUGAACCCCGC | 20 | 3152 |
| HSV1-UL30-21 | − | AUUUCGAUUCAUCGCCCCGC | 20 | 3129 |
| HSV1-UL30-10 | − | UCCGGGUUUUUUGCGCCCGC | 20 | 3239 |
| HSV1-UL30-86 | + | CGCUAUAGUACGUAUGGCGC | 20 | 3277 |
| HSV1-UL30-109 | + | CUGGCUCCGCGAGGGCCGGC | 20 | 3289 |
| HSV1-UL30-22 | − | AUUCAUCGCCCCGCGGGUGC | 20 | 3130 |
| HSV1-UL30-112 | + | CCUGGCCGCCGACUUUCCUC | 20 | 3290 |
| HSV1-UL30-76 | + | UGCACCCCGGCGCGCUUCUC | 20 | 3270 |
| HSV1-UL30-37 | − | AGCGCGACGUCCUCCGCGUC | 20 | 3140 |
| HSV1-UL30-68 | + | AGAAGCCGCCCGACCCGACG | 20 | 3155 |
| HSV1-UL30-23 | − | CGCCCCGCGGGUGCUGGACG | 20 | 3246 |
| HSV1-UL30-20 | − | AAUUUCGAUUCAUCGCCCCG | 20 | 3128 |
| HSV1-UL30-67 | + | CCCCACAGGCGCGAGCGCCG | 20 | 3266 |
| HSV1-UL30-27 | − | CCCCCCGGAGAAGCGCGCCG | 20 | 3132 |
| HSV1-UL30-114 | + | UGGCCGCCGACUUUCCUCCG | 20 | 3176 |
| HSV1-UL30-78 | + | CACCCCGGCGCGCUUCUCCG | 20 | 3272 |
| HSV1-UL30-84 | + | AUCCUCGUCCAGCACCCGCG | 20 | 3162 |
| HSV1-UL30-2857 | + | UGGCGUCCAUAAACCGCGCG | 20 | 11797 |
| HSV1-UL30-47 | − | CUCGCGCCUGUGGGGCGGCG | 20 | 3257 |
| HSV1-UL30-32 | − | CGCCCCCAAGGUGUACUGCG | 20 | 3137 |
| HSV1-UL30-11 | − | UUUGCGCCCGCCGGCCCUCG | 20 | 3125 |
| HSV1-UL30-99 | + | AAGUUUUGCCUCAAACAAGG | 20 | 3282 |
| HSV1-UL30-59 | + | CACGUGAAAGACGGUGACGG | 20 | 3262 |
| HSV1-UL30-2858 | − | ACAACCGCGAUGUUUUCCGG | 20 | 11798 |
| HSV1-UL30-69 | + | AGCCGCCCGACCCGACGCGG | 20 | 3156 |
| HSV1-UL30-102 | + | UUUUGCCUCAAACAAGGCGG | 20 | 3172 |
| HSV1-UL30-80 | + | CCCCGGCGCGCUUCUCCGGG | 20 | 3160 |
| HSV1-UL30-46 | − | CGGCGCUCGCGCCUGUGGGG | 20 | 3256 |
| HSV1-UL30-2859 | − | ACCGCGAUGUUUUCCGGUGG | 20 | 11799 |
| HSV1-UL30-73 | + | CCCCCCGCAGUACACCUUGG | 20 | 3269 |
| HSV1-UL30-93 | + | CUUCUGUUGCGUCCCGACUG | 20 | 3168 |
| HSV1-UL30-30 | − | CGCGCCCCCAAGGUGUACUG | 20 | 3135 |
| HSV1-UL30-61 | + | CGUGAAAGACGGUGACGGUG | 20 | 3151 |
| HSV1-UL30-45 | − | CCGCGGCGCUCGCGCCUGUG | 20 | 3255 |
| HSV1-UL30-74 | + | ACACCUUGGGGGCGCGCUUG | 20 | 3158 |
| HSV1-UL30-2860 | + | CAUAAACCGCGCGUGGAACU | 20 | 11800 |
| HSV1-UL30-60 | + | ACGUGAAAGACGGUGACGGU | 20 | 3263 |
| HSV1-UL30-90 | + | UGGCGCUGGGUUGGCCCGGU | 20 | 3278 |
| HSV1-UL30-38 | − | CGACGUCCUCCGCGUCGGGU | 20 | 3141 |
| HSV1-UL30-88 | + | UAGUACGUAUGGCGCUGGGU | 20 | 3164 |

[0772] Table 8C provides exemplary targeting domains for knocking out the UL30 gene selected according to the third tier parameters. The targeting domains bind within the first 500 bp of the coding sequence (e.g., within 500 bp downstream from the start codon) and start with a 5′G. It is contemplated herein that in an embodiment the targeting domain hybridizes to the target domain through complementary base pairing. Any of the targeting domains in the table can be used with a S. pyogenes Cas9 molecule that generates a double stranded break (Cas9 nuclease) or a single-stranded break (Cas9 nickase).

TABLE 8C
3rd Tier

| | DNA | | Target Site | Seq ID |
|---|---|---|---|---|
| gRNA Name | Strand | Targeting Domain | Length | NO: |
| HSV1-UL30-184 | + | GGUCCACGCCGCCCCAC | 17 | 3332 |
| HSV1-UL30-142 | − | GGACGAGGAUGCCCCCC | 17 | 3310 |
| HSV1-UL30-119 | − | GGCGGCCCGCUGUCCCC | 17 | 3295 |
| HSV1-UL30-123 | − | GAGGAAAGUCGGCGGCC | 17 | 3298 |
| HSV1-UL30-231 | + | GCCGCCGACUUUCCUCC | 17 | 3229 |
| HSV1-UL30-130 | − | GCCCUCGCGGAGCCAGC | 17 | 3303 |
| HSV1-UL30-180 | + | GUGGGGUUGAACCCCGC | 17 | 3329 |
| HSV1-UL30-227 | + | GCUCCGCGAGGGCCGGC | 17 | 3354 |
| HSV1-UL30-225 | + | GCUGGCUCCGCGAGGGC | 17 | 3352 |
| HSV1-UL30-126 | − | GCGGCCAGGGCGGCGUC | 17 | 3300 |
| HSV1-UL30-165 | − | GCGCCUGUGGGGCGGCG | 17 | 3322 |
| HSV1-UL30-129 | − | GCGCCCGCCGGCCCUCG | 17 | 3302 |
| HSV1-UL30-177 | + | GUGAAAGACGGUGACGG | 17 | 3327 |
| HSV1-UL30-120 | − | GGCCCGCUGUCCCCCGG | 17 | 3296 |
| HSV1-UL30-226 | + | GGCUCCGCGAGGGCCGG | 17 | 3353 |
| HSV1-UL30-199 | + | GGCGCGCUUCUCCGGGG | 17 | 3216 |
| HSV1-UL30-148 | − | GCCCCCAAGGUGUACUG | 17 | 3189 |
| HSV1-UL30-179 | + | GAAAGACGGUGACGGUG | 17 | 3328 |
| HSV1-UL30-133 | − | GACCCCCGCCUUGUUUG | 17 | 3306 |
| HSV1-UL30-121 | − | GUCCCCCGGAGGAAAGU | 17 | 3178 |
| HSV1-UL30-162 | − | GCGGCGCUCGCGCCUGU | 17 | 3321 |
| HSV1-UL30-106 | + | GUCCCCGGCUGGCUCCGCGA | 20 | 3286 |
| HSV1-UL30-58 | + | GUACACGUGAAAGACGGUGA | 20 | 3261 |
| HSV1-UL30-96 | + | GUCCCGACUGGGGCGAGGUA | 20 | 3279 |
| HSV1-UL30-118 | + | GGACAGCGGGCCGCCGCCAC | 20 | 3294 |
| HSV1-UL30-24 | − | GCUGGACGAGGAUGCCCCCC | 20 | 3247 |
| HSV1-UL30-1 | − | GGCGGCGGCCCGCUGUCCCC | 20 | 3232 |
| HSV1-UL30-41 | − | GCGUCGGGUCGGGCGGCUUC | 20 | 3251 |
| HSV1-UL30-116 | + | GACUUUCCUCCGGGGGACAG | 20 | 3292 |
| HSV1-UL30-14 | − | GGCCCUCGCGGAGCCAGCCG | 20 | 3242 |
| HSV1-UL30-42 | − | GGUCGGGCGGCUUCUGGCCG | 20 | 3252 |
| HSV1-UL30-105 | + | GGUCCCCGGCUGGCUCCGCG | 20 | 3285 |
| HSV1-UL30-2 | − | GGCGGCCCGCUGUCCCCCGG | 20 | 3233 |
| HSV1-UL30-33 | − | GCCCCCAAGGUGUACUGCGG | 20 | 3138 |
| HSV1-UL30-43 | − | GGCCGCGGCGCUCGCGCCUG | 20 | 3253 |
| HSV1-UL30-15 | − | GGGGACCCCCGCCUUGUUUG | 20 | 3243 |
| HSV1-UL30-44 | − | GCCGCGGCGCUCGCGCCUGU | 20 | 3254 |

[0773] Table 8D provides exemplary targeting domains for knocking out the UL30 gene selected according to the fourth tier parameters. The targeting domains bind within the first 500 bp of the coding sequence (e.g., within 500 bp downstream from the start codon). It is contemplated herein that in an embodiment the targeting domain hybridizes to the target domain through complementary base pairing. Any of the targeting domains in the table can be used with a S. pyogenes Cas9 molecule that generates a double stranded break (Cas9 nuclease) or a single-stranded break (Cas9 nickase).

TABLE 8D
4th Tier

| | DNA | | Target Site | Seq ID |
|---|---|---|---|---|
| gRNA Name | Strand | Targeting Domain | Length | NO: |
| HSV1-UL30-216 | + | AAGUUUUGCCUCAAACA | 17 | 3343 |
| HSV1-UL30-124 | − | AGGAAAGUCGGCGGCCA | 17 | 3299 |
| HSV1-UL30-146 | − | CGCGCCGGGGUGCACGA | 17 | 3187 |
| HSV1-UL30-224 | + | CCCGGCUGGCUCCGCGA | 17 | 3351 |
| HSV1-UL30-176 | + | CACGUGAAAGACGGUGA | 17 | 3326 |
| HSV1-UL30-214 | + | CCGACUGGGGCGAGGUA | 17 | 3342 |
| HSV1-UL30-236 | + | CAGCGGGCCGCCGCCAC | 17 | 3358 |
| HSV1-UL30-166 | − | CGGCGUGGACCACGCCC | 17 | 3323 |
| HSV1-UL30-221 | + | AACAAGGCGGGGGUCCC | 17 | 3348 |
| HSV1-UL30-131 | − | CCCUCGCGGAGCCAGCC | 17 | 3304 |
| HSV1-UL30-181 | + | UGGGGUUGAACCCCGCC | 17 | 3330 |
| HSV1-UL30-144 | − | CCCCGGAGAAGCGCGCC | 17 | 3186 |
| HSV1-UL30-207 | + | AUGGCGCUGGGUUGGCC | 17 | 3339 |
| HSV1-UL30-195 | + | CCCCGGCGCGCUUCUCC | 17 | 3336 |
| HSV1-UL30-174 | + | CGUGCUCCACGUUCUCC | 17 | 3325 |
| HSV1-UL30-127 | − | CGGCCAGGGCGGCGUCC | 17 | 3301 |
| HSV1-UL30-235 | + | UUCCUCCGGGGGACAGC | 17 | 3357 |
| HSV1-UL30-201 | + | CCUCGUCCAGCACCCGC | 17 | 3338 |
| HSV1-UL30-143 | − | CCCCCGGAGAAGCGCGC | 17 | 3311 |
| HSV1-UL30-218 | + | UUUGCCUCAAACAAGGC | 17 | 3345 |
| HSV1-UL30-222 | + | AGGCGGGGGUCCCCGGC | 17 | 3349 |
| HSV1-UL30-149 | − | CCCCCAAGGUGUACUGC | 17 | 3313 |
| HSV1-UL30-140 | − | CAUCGCCCCGCGGGUGC | 17 | 3185 |
| HSV1-UL30-194 | + | ACCCCGGCGCGCUUCUC | 17 | 3335 |
| HSV1-UL30-135 | − | CCUACCUCGCCCCAGUC | 17 | 3308 |
| HSV1-UL30-159 | − | UCGGGUCGGGCGGCUUC | 17 | 3318 |
| HSV1-UL30-234 | + | UUUCCUCCGGGGGACAG | 17 | 3356 |
| HSV1-UL30-171 | − | CGACAUCCUGGAGAACG | 17 | 3201 |
| HSV1-UL30-141 | − | CCCGCGGGUGCUGGACG | 17 | 3309 |
| HSV1-UL30-200 | + | UCCUCGUCCAGCACCCG | 17 | 3337 |
| HSV1-UL30-132 | − | CCUCGCGGAGCCAGCCG | 17 | 3305 |
| HSV1-UL30-145 | − | CCCGGAGAAGCGCGCCG | 17 | 3312 |
| HSV1-UL30-160 | − | CGGGCGGCUUCUGGCCG | 17 | 3319 |
| HSV1-UL30-2861 | − | CGGCCCAGUUCCACGCG | 17 | 11801 |
| HSV1-UL30-223 | + | CCCCGGCUGGCUCCGCG | 17 | 3350 |
| HSV1-UL30-219 | + | UUGCCUCAAACAAGGCG | 17 | 3346 |
| HSV1-UL30-183 | + | UGAACCCCGCCGGGGCG | 17 | 3331 |
| HSV1-UL30-217 | + | UUUUGCCUCAAACAAGG | 17 | 3344 |
| HSV1-UL30-197 | + | CCGGCGCGCUUCUCCGG | 17 | 3214 |
| HSV1-UL30-220 | + | UGCCUCAAACAAGGCGG | 17 | 3347 |
| HSV1-UL30-2862 | − | AUGUUUUCCGGUGGCGG | 17 | 11802 |
| HSV1-UL30-151 | − | CCCAAGGUGUACUGCGG | 17 | 3314 |
| HSV1-UL30-122 | − | CCCCGGAGGAAAGUCGG | 17 | 3297 |
| HSV1-UL30-125 | − | AAAGUCGGCGGCCAGGG | 17 | 3179 |
| HSV1-UL30-152 | − | CCAAGGUGUACUGCGGG | 17 | 3315 |
| HSV1-UL30-153 | − | CAAGGUGUACUGCGGGG | 17 | 3316 |
| HSV1-UL30-191 | + | CCCGCAGUACACCUUGG | 17 | 3333 |
| HSV1-UL30-161 | − | CGCGGCGCUCGCGCCUG | 17 | 3320 |
| HSV1-UL30-188 | + | CCCCCCGCAGUACACCU | 17 | 3209 |
| HSV1-UL30-134 | − | CCCUACCUCGCCCCAGU | 17 | 3307 |
| HSV1-UL30-213 | + | CCCGACUGGGGCGAGGU | 17 | 3341 |
| HSV1-UL30-208 | + | CGCUGGGUUGGCCCGGU | 17 | 3340 |
| HSV1-UL30-2863 | − | UCUUUAGGGGUUCGGGU | 17 | 11803 |
| HSV1-UL30-189 | + | CCCCCGCAGUACACCUU | 17 | 3210 |
| HSV1-UL30-98 | + | UAAAAGUUUUGCCUCAAACA | 20 | 3281 |
| HSV1-UL30-28 | − | AAGCGCGCCGGGGUGCACGA | 20 | 3133 |
| HSV1-UL30-111 | + | AAAAAACCCGGACGCCGCCC | 20 | 3175 |
| HSV1-UL30-13 | − | CGGCCCUCGCGGAGCCAGCC | 20 | 3241 |
| HSV1-UL30-26 | − | CCCCCCCGGAGAAGCGCGCC | 20 | 3248 |
| HSV1-UL30-5 | − | CCGGAGGAAAGUCGGCGGCC | 20 | 3124 |
| HSV1-UL30-9 | − | CGGCGGCCAGGGCGGCGUCC | 20 | 3238 |
| HSV1-UL30-100 | + | AGUUUUGCCUCAAACAAGGC | 20 | 3283 |
| HSV1-UL30-104 | + | ACAAGGCGGGGGUCCCCGGC | 20 | 3284 |
| HSV1-UL30-107 | + | CCGGCUGGCUCCGCGAGGGC | 20 | 3287 |
| HSV1-UL30-17 | − | ACCCCUACCUCGCCCCAGUC | 20 | 3245 |
| HSV1-UL30-8 | − | UCGGCGGCCAGGGCGGCGUC | 20 | 3237 |
| HSV1-UL30-97 | + | UCCCGACUGGGGCGAGGUAG | 20 | 3280 |
| HSV1-UL30-49 | − | CGGCGUGGACCACGCCCCGG | 20 | 3259 |
| HSV1-UL30-79 | + | ACCCCGGCGCGCUUCUCCGG | 20 | 3273 |
| HSV1-UL30-7 | − | AGGAAAGUCGGCGGCCAGGG | 20 | 3236 |
| HSV1-UL30-34 | − | CCCCCAAGGUGUACUGCGGG | 20 | 3249 |
| HSV1-UL30-81 | + | CCCGGCGCGCUUCUCCGGGG | 20 | 3274 |
| HSV1-UL30-35 | − | CCCCAAGGUGUACUGCGGGG | 20 | 3250 |
| HSV1-UL30-72 | + | CCCCCCCGCAGUACACCUUG | 20 | 3268 |
| HSV1-UL30-16 | − | AACCCCUACCUCGCCCCAGU | 20 | 3244 |
| HSV1-UL30-95 | + | CGUCCCGACUGGGGCGAGGU | 20 | 3170 |
| HSV1-UL30-71 | + | UCCCCCCCGCAGUACACCUU | 20 | 3267 |

[0774] Table 8E provides exemplary targeting domains for knocking out the UL30 gene selected according to the fifth tier parameters. The targeting domains fall in the coding sequence of the gene, downstream of the first 500 bp of coding sequence (e.g., anywhere from +500 (relative to the start codon) to the stop codon of the gene). It is contemplated herein that in an embodiment the targeting domain hybridizes to the target domain through complementary base pairing. Any of the targeting domains in the table can be used with a S. pyogenes Cas9 molecule that generates a double stranded break (Cas9 nuclease) or a single-stranded break (Cas9 nickase).

TABLE 8E
5th Tier

| | | | | Seq |
|---|---|---|---|---|
| | DNA | | Target Site | ID |
| gRNA Name | Strand | Targeting Domain | Length | NO: |
| HSV1-UL30-2864 | − | CCGAGAGUCUGUUAAAA | 17 | 11804 |
| HSV1-UL30-2865 | + | GCCGUACUGUUUCACAA | 17 | 11805 |
| HSV1-UL30-2866 | + | GGCGACGCCGUGGGCAA | 17 | 11806 |
| HSV1-UL30-2867 | − | GGUAAGAUGCUCAUCAA | 17 | 11807 |
| HSV1-UL30-2868 | + | UCAUGCUAGAGUAUCAA | 17 | 11808 |
| HSV1-UL30-2869 | + | AGCUUGGCCAGCAAGAA | 17 | 11809 |
| HSV1-UL30-2870 | − | CGCCUGGCCGACCAGAA | 17 | 11810 |
| HSV1-UL30-2871 | + | GUGCCCGGCCACCGGAA | 17 | 11811 |
| HSV1-UL30-2872 | − | GGGUACGGCCGCAUGAA | 17 | 11812 |
| HSV1-UL30-2873 | + | CGUGCCGUAAACGUGAA | 17 | 11813 |
| HSV1-UL30-2874 | − | AGCAAGAUAAAGGUGAA | 17 | 11814 |
| HSV1-UL30-2875 | − | GAAGCGCAGCAAGAUAA | 17 | 11815 |
| HSV1-UL30-2876 | + | GGCGUUAUUCCCAAACA | 17 | 11816 |
| HSV1-UL30-2062 | − | GUACUUUUACAUGAACA | 17 | 5095 |
| HSV1-UL30-2877 | − | CGGCGUCGCCCUGAACA | 17 | 11817 |
| HSV1-UL30-2878 | + | GGCCGUACUGUUUCACA | 17 | 11818 |
| HSV1-UL30-2879 | − | CAUCAUCUACGGGGACA | 17 | 11819 |
| HSV1-UL30-2880 | − | GCUGACGGACAUUUACA | 17 | 11820 |
| HSV1-UL30-2881 | + | GUCGAAUUCCAGAACCA | 17 | 11821 |
| HSV1-UL30-2725 | + | AAAGUCGAACACCACCA | 17 | 5723 |
| HSV1-UL30-2882 | + | AAACAGCAGGUCGACCA | 17 | 11822 |
| HSV1-UL30-2214 | − | AGGCACGUGGGGUACCA | 17 | 5230 |
| HSV1-UL30-2883 | − | AUUCUGCCGGACACCCA | 17 | 11823 |
| HSV1-UL30-2301 | − | UAGACGCCGCCGCCCCA | 17 | 5316 |
| HSV1-UL30-2884 | + | CGCCAUCUUGUCGCCCA | 17 | 11824 |
| HSV1-UL30-2885 | − | GCAUACGCCAUUGCCCA | 17 | 11825 |
| HSV1-UL30-2886 | − | GAACGAGCUGGCGGCCA | 17 | 11826 |
| HSV1-UL30-2887 | + | CAGGACGGCUUCGGCCA | 17 | 11827 |
| HSV1-UL30-2888 | − | GGGGUACCAGGGGGCCA | 17 | 11828 |
| HSV1-UL30-2889 | − | UAUCAACCGCACCUCCA | 17 | 11829 |
| HSV1-UL30-2890 | + | CAGGAGGACGUGCUCCA | 17 | 11830 |
| HSV1-UL30-2759 | + | GCGGCCGUACCCGUCCA | 17 | 5757 |
| HSV1-UL30-2745 | + | CAGCUGGCCCACCAGCA | 17 | 5743 |
| HSV1-UL30-2891 | − | UUCACGGGAGUGCAGCA | 17 | 11831 |
| HSV1-UL30-2892 | + | CUGCUUGUCCAGGAGCA | 17 | 11832 |
| HSV1-UL30-2893 | − | CGCGGCUCCGGACCGCA | 17 | 11833 |
| HSV1-UL30-2894 | − | AGAUCUCUGCGAGCGCA | 17 | 11834 |
| HSV1-UL30-2895 | + | GCCCGGGGACUCGCGCA | 17 | 11835 |
| HSV1-UL30-2676 | + | CCCGUAGAUGAUGCGCA | 17 | 5674 |
| HSV1-UL30-2896 | + | GCGGAUCUGCUUUCGCA | 17 | 11836 |
| HSV1-UL30-2897 | + | GCGGCAACGUGCAGGCA | 17 | 11837 |
| HSV1-UL30-2898 | − | GAUAAAGGUGAACGGCA | 17 | 11838 |
| HSV1-UL30-2899 | + | CUUGGCCGGGGAGGGCA | 17 | 11839 |
| HSV1-UL30-2900 | − | GCACCUGGAGGCGGGCA | 17 | 11840 |
| HSV1-UL30-2901 | + | CUGCAGUCCCUCGGGCA | 17 | 11841 |
| HSV1-UL30-2902 | − | CUUCGAUAUCGAAUGCA | 17 | 11842 |
| HSV1-UL30-2903 | − | GCAGCAGGCCGCCAUCA | 17 | 11843 |
| HSV1-UL30-2904 | − | GCAGGUCCCGUCCAUCA | 17 | 11844 |
| HSV1-UL30-2905 | − | GGGUAAGAUGCUCAUCA | 17 | 11845 |
| HSV1-UL30-2716 | + | CACUGCGUCGGCCCUCA | 17 | 5714 |
| HSV1-UL30-2906 | − | GCUGUGCCGCGGCCUCA | 17 | 11846 |
| HSV1-UL30-2907 | − | GGUGUAUUACAAGCUCA | 17 | 11847 |
| HSV1-UL30-2908 | − | ACGGCUGUUCUUCGUCA | 17 | 11848 |
| HSV1-UL30-2909 | + | ACCCGGAAGUGGGGUCA | 17 | 11849 |
| HSV1-UL30-2910 | − | GGCGUGCGUGACAUUCA | 17 | 11850 |
| HSV1-UL30-2246 | − | CUCGGUGUACGGGUUCA | 17 | 5262 |
| HSV1-UL30-2911 | + | GUAAUAGUCCGUGUUCA | 17 | 11851 |
| HSV1-UL30-1554 | + | GCGGCACAGCACAAAGA | 17 | 4492 |
| HSV1-UL30-2912 | − | GGCCGUGGGCGACAAGA | 17 | 11852 |
| HSV1-UL30-2913 | + | CAGCUUGGCCAGCAAGA | 17 | 11853 |
| HSV1-UL30-2914 | − | CCUGAAGGACAAGAAGA | 17 | 11854 |
| HSV1-UL30-2915 | − | GCGCCUGGCCGACCAGA | 17 | 11855 |
| HSV1-UL30-2742 | + | CGGCCGAGAGCUCCAGA | 17 | 5740 |
| HSV1-UL30-2916 | − | CCGCGAGGUAGAGGAGA | 17 | 11856 |
| HSV1-UL30-2917 | − | CAUCACCGACCCGGAGA | 17 | 11857 |
| HSV1-UL30-2918 | + | GGCGGCCGCUCCGGAGA | 17 | 11858 |
| HSV1-UL30-2919 | + | UCCGGCCCGGUUUGAGA | 17 | 11859 |
| HSV1-UL30-2920 | + | CUGCUGGCCGUCGUAGA | 17 | 11860 |
| HSV1-UL30-2921 | − | ACCCGCACCAUCUACGA | 17 | 11861 |
| HSV1-UL30-2922 | − | GCCAUCAAGAAGUACGA | 17 | 11862 |
| HSV1-UL30-2054 | − | GGACGCCAUCACACCGA | 17 | 5087 |
| HSV1-UL30-793 | − | CCAGCCGGCGGCCCCGA | 17 | 3731 |
| HSV1-UL30-2923 | − | GCGCGACCCCUGCCCGA | 17 | 11863 |
| HSV1-UL30-2924 | + | GUCGCUGGAUGUCCCGA | 17 | 11864 |
| HSV1-UL30-2925 | + | GAGACGGUACCAGCCGA | 17 | 11865 |
| HSV1-UL30-2926 | + | GGUCGGUGAUGCGCCGA | 17 | 11866 |
| HSV1-UL30-2927 | + | CAGCAUCUCGCGGCCGA | 17 | 11867 |
| HSV1-UL30-2928 | − | CCUGCACGUUGCCGCGA | 17 | 11868 |
| HSV1-UL30-1640 | + | ACCCGCCAAGCGCGCGA | 17 | 4578 |
| HSV1-UL30-2929 | + | GGGGGGUCGGCAGGCGA | 17 | 11869 |
| HSV1-UL30-2930 | − | UCGAGGUGGGGGGGCGA | 17 | 11870 |
| HSV1-UL30-2095 | − | GACAACCUGGCCAUCGA | 17 | 5128 |
| HSV1-UL30-2931 | + | GCUCAUGCCCCCCUCGA | 17 | 11871 |
| HSV1-UL30-2932 | + | GGCCAGGAGCUGUUCGA | 17 | 11872 |
| HSV1-UL30-2933 | + | CUUCUUGUCCUUCAGGA | 17 | 11873 |
| HSV1-UL30-2934 | + | AUGGGCGUCUACGAGGA | 17 | 11874 |
| HSV1-UL30-907 | − | GAGGACGAACGCGAGGA | 17 | 3845 |
| HSV1-UL30-900 | − | GAGCGGCCAGAGGAGGA | 17 | 3838 |
| HSV1-UL30-916 | − | GGCGAGCGGGAGCCGGA | 17 | 3854 |
| HSV1-UL30-2935 | − | CUGGGCCUGACUCCGGA | 17 | 11875 |
| HSV1-UL30-2936 | + | GGCGUCUAGCUCGCGGA | 17 | 11876 |
| HSV1-UL30-2937 | + | GGGCGCUUGGCCGGGGA | 17 | 11877 |
| HSV1-UL30-2640 | + | AUCCGGUCCUUGAUGGA | 17 | 5639 |
| HSV1-UL30-2938 | − | UACAAGGUCCCCCUGGA | 17 | 11878 |
| HSV1-UL30-2939 | + | UUUCACAAGGGUCAUGA | 17 | 11879 |
| HSV1-UL30-2940 | + | GCCCAGGAGCGUGAUGA | 17 | 11880 |
| HSV1-UL30-2941 | − | GCGCCUGGCCCACCUGA | 17 | 11881 |
| HSV1-UL30-2942 | − | CAGCACGCUCUCCCUGA | 17 | 11882 |
| HSV1-UL30-2943 | − | GGCCGAAGCCGUCCUGA | 17 | 11883 |
| HSV1-UL30-2944 | − | CUUGCUGGCCAAGCUGA | 17 | 11884 |
| HSV1-UL30-2945 | − | CACGGCCGCCGGGCUGA | 17 | 11885 |
| HSV1-UL30-2946 | + | GGUCCCCGUCGGUGUGA | 17 | 11886 |
| HSV1-UL30-2947 | + | GUUACACACGACCUUGA | 17 | 11887 |
| HSV1-UL30-2948 | + | CGGGAUCCGGUCCUUGA | 17 | 11888 |
| HSV1-UL30-2949 | + | ACCCUCGUACUUCUUGA | 17 | 11889 |
| HSV1-UL30-2667 | + | UUCGCACUCGAGUUUGA | 17 | 5666 |
| HSV1-UL30-2950 | + | AUGAUGCGCAUGGAAUA | 17 | 11890 |
| HSV1-UL30-2951 | − | GGUGGGUGCCGGCGCUA | 17 | 11891 |
| HSV1-UL30-2257 | − | UCCAUGCGCAUCAUCUA | 17 | 5273 |
| HSV1-UL30-2267 | − | UACAUCGGCGUCAUCUA | 17 | 5283 |
| HSV1-UL30-2952 | − | ACCCUUGUGAAACAGUA | 17 | 11892 |
| HSV1-UL30-2637 | + | UGGGCCACGAUCACGUA | 17 | 5636 |
| HSV1-UL30-2953 | − | GUCCCCCUGGACGGGUA | 17 | 11893 |
| HSV1-UL30-2140 | − | GUGAACAUCGACAUGUA | 17 | 5173 |
| HSV1-UL30-2954 | − | CGUCGAGUUUAACUGUA | 17 | 11894 |
| HSV1-UL30-2955 | − | GUGUGUAACUCGGUGUA | 17 | 11895 |
| HSV1-UL30-2956 | − | CACCCAGGGGCGAUUUA | 17 | 11896 |
| HSV1-UL30-2957 | − | GUGGCCGUUCACGUUUA | 17 | 11897 |
| HSV1-UL30-2843 | − | GUUCCACGCGCGGUUUA | 17 | 11783 |
| HSV1-UL30-1694 | + | AGGAACCGAGCGAAAAC | 17 | 4632 |
| HSV1-UL30-2958 | + | UGGCGUUAUUCCCAAAC | 17 | 11898 |
| HSV1-UL30-2959 | − | CUGGUACCGUCUCAAAC | 17 | 11899 |
| HSV1-UL30-1437 | + | CGCACGCCGCCCCCAAC | 17 | 4375 |
| HSV1-UL30-2850 | + | UAAACCGCGCGUGGAAC | 17 | 11790 |
| HSV1-UL30-2960 | + | GGUUGUCCAGGAUGAAC | 17 | 11900 |
| HSV1-UL30-2961 | + | UCGAAUUCCAGAACCAC | 17 | 11901 |
| HSV1-UL30-2962 | + | AAGUCGAACACCACCAC | 17 | 11902 |
| HSV1-UL30-2963 | − | UGACUCCGGAAGGCCAC | 17 | 11903 |
| HSV1-UL30-2794 | + | UCCGGGUGCCCGGCCAC | 17 | 5791 |
| HSV1-UL30-2964 | + | AGAGCGUGCUGAAGCAC | 17 | 11904 |
| HSV1-UL30-2965 | + | GGCAGAAGUUGUCGCAC | 17 | 11905 |
| HSV1-UL30-2247 | − | UCGGUGUACGGGUUCAC | 17 | 5263 |
| HSV1-UL30-2966 | + | CAGGUCGUAGAGCAGAC | 17 | 11906 |
| HSV1-UL30-2055 | − | GACGCCAUCACACCGAC | 17 | 5088 |
| HSV1-UL30-2967 | − | ACAAGGAGGAGGUCGAC | 17 | 11907 |
| HSV1-UL30-2968 | − | ACAUCAUCAACUUCGAC | 17 | 11908 |
| HSV1-UL30-2969 | − | UCCCGUCCAUCAAGGAC | 17 | 11909 |
| HSV1-UL30-2970 | − | GCAUCCUCCUGCGGGAC | 17 | 11910 |
| HSV1-UL30-2971 | + | UCCGGUCCUUGAUGGAC | 17 | 11911 |
| HSV1-UL30-2972 | − | ACAAGGUCCCCCUGGAC | 17 | 11912 |
| HSV1-UL30-2973 | + | CCAGGGCGGUGGUGGAC | 17 | 11913 |
| HSV1-UL30-2974 | − | GGCCCCGAGUUCGUGAC | 17 | 11914 |
| HSV1-UL30-2975 | − | CGGCGAGUACUGCAUAC | 17 | 11915 |
| HSV1-UL30-2976 | − | GGGCAUGAGCGACCUAC | 17 | 11916 |
| HSV1-UL30-2258 | − | CCAUGCGCAUCAUCUAC | 17 | 5274 |
| HSV1-UL30-2268 | − | ACAUCGGCGUCAUCUAC | 17 | 5284 |
| HSV1-UL30-2977 | + | GGGCCACGAUCACGUAC | 17 | 11917 |
| HSV1-UL30-2978 | + | GGAUGAUGCUGGGGUAC | 17 | 11918 |
| HSV1-UL30-2979 | − | UGAACAUCGACAUGUAC | 17 | 11919 |
| HSV1-UL30-2980 | − | UGUGUAACUCGGUGUAC | 17 | 11920 |
| HSV1-UL30-2981 | − | UGGUACCGUCUCAAACC | 17 | 11921 |
| HSV1-UL30-2728 | + | GGGGUUCACGUGAAACC | 17 | 5726 |
| HSV1-UL30-2982 | − | CUGUACGGCGGACAACC | 17 | 11922 |
| HSV1-UL30-2806 | + | GCCGAAGGUGACGAACC | 17 | 5803 |
| HSV1-UL30-2983 | + | GUUGUCCAGGAUGAACC | 17 | 11923 |
| HSV1-UL30-2984 | − | GGGUCGACGCCACCACC | 17 | 11924 |
| HSV1-UL30-2985 | − | GACUCCGGAAGGCCACC | 17 | 11925 |
| HSV1-UL30-2986 | + | AAACGUGAACGGCCACC | 17 | 11926 |
| HSV1-UL30-2221 | − | CGACGCAGUGGCGCACC | 17 | 5237 |
| HSV1-UL30-2111 | − | UCCGGUGGCCGGGCACC | 17 | 5144 |
| HSV1-UL30-2285 | − | UCGGCGCAUCACCGACC | 17 | 5300 |
| HSV1-UL30-2987 | + | AAAACAGCAGGUCGACC | 17 | 11927 |
| HSV1-UL30-821 | − | CGGGCACCCGGAGGACC | 17 | 3759 |
| HSV1-UL30-2988 | + | AGGAUAUCUGGAUGACC | 17 | 11928 |
| HSV1-UL30-2989 | − | GCCCCGAGUUCGUGACC | 17 | 11929 |
| HSV1-UL30-2225 | − | GGCGGGCAAGGACUACC | 17 | 5241 |
| HSV1-UL30-2213 | − | CAGGCACGUGGGGUACC | 17 | 5229 |
| HSV1-UL30-2990 | + | GUUGAUGAUGUUGUACC | 17 | 11930 |
| HSV1-UL30-2991 | − | UUCAUCCUGGACAACCC | 17 | 11931 |
| HSV1-UL30-2992 | + | CCGAAGGUGACGAACCC | 17 | 11932 |
| HSV1-UL30-2162 | − | UAUUCUGCCGGACACCC | 17 | 5194 |
| HSV1-UL30-2993 | + | AGUGGGGUCAAGGACCC | 17 | 11933 |
| HSV1-UL30-2994 | − | UCAUCCUGGACAACCCC | 17 | 11934 |
| HSV1-UL30-2995 | − | CGAAGUGUGGCACCCCC | 17 | 11935 |
| HSV1-UL30-2307 | − | GUCGCCUGCCGACCCCC | 17 | 5320 |
| HSV1-UL30-2308 | − | UCGCCUGCCGACCCCCC | 17 | 5321 |
| HSV1-UL30-2996 | + | CUUGGGCGCCUCCCCCC | 17 | 11936 |
| HSV1-UL30-1038 | − | CCCGGCCAAGCGCCCCC | 17 | 3976 |
| HSV1-UL30-2997 | − | CCGACAUGCGCGCCCCC | 17 | 11937 |
| HSV1-UL30-2998 | + | CAAGGACCCUGGCCCCC | 17 | 11938 |
| HSV1-UL30-2999 | − | CAUUUACAAGGUCCCCC | 17 | 11939 |
| HSV1-UL30-2300 | − | CUAGACGCCGCCGCCCC | 17 | 5315 |
| HSV1-UL30-1037 | − | CCCCGGCCAAGCGCCCC | 17 | 3975 |
| HSV1-UL30-3000 | − | GCCGACAUGCGCGCCCC | 17 | 11940 |
| HSV1-UL30-3001 | + | CGCCCCUAAAUCGCCCC | 17 | 11941 |
| HSV1-UL30-3002 | + | GGGCGUGGGCAGGCCCC | 17 | 11942 |
| HSV1-UL30-3003 | − | GCCCUGCGCGAGUCCCC | 17 | 11943 |
| HSV1-UL30-2630 | + | GGGGCGGGCUCGUCCCC | 17 | 5629 |
| HSV1-UL30-2174 | − | GCGUCCGGCCGCAGCCC | 17 | 5206 |
| HSV1-UL30-1664 | + | ACACGCGAAACACGCCC | 17 | 4602 |
| HSV1-UL30-2114 | − | CCUGUCCACCACCGCCC | 17 | 5147 |
| HSV1-UL30-1748 | + | CGCGGAACGACGCGCCC | 17 | 4686 |
| HSV1-UL30-2832 | + | CUUCCGGAGUCAGGCCC | 17 | 5827 |
| HSV1-UL30-2662 | + | CAGGUCGACCAGGGCCC | 17 | 5661 |
| HSV1-UL30-3004 | − | CCGCACCUCCAGGGCCC | 17 | 11944 |
| HSV1-UL30-2680 | + | CGCAUGGAAUAGGGCCC | 17 | 5678 |
| HSV1-UL30-3005 | − | CGCGGCCCUGCCCUCCC | 17 | 11945 |
| HSV1-UL30-2611 | + | GCUUGGACGCGCCUCCC | 17 | 5615 |
| HSV1-UL30-3006 | + | CCGCUCCUCGUCCUCCC | 17 | 11946 |
| HSV1-UL30-2615 | + | AGGCGACGGCGUCUCCC | 17 | 5619 |
| HSV1-UL30-3007 | − | GGCCCUGCGCGAGUCCC | 17 | 11947 |
| HSV1-UL30-2173 | − | AGCGUCCGGCCGCAGCC | 17 | 5205 |
| HSV1-UL30-3008 | + | GCCCACGGCCGUCAGCC | 17 | 11948 |
| HSV1-UL30-3009 | − | CCGCCUACUACGCCGCC | 17 | 11949 |
| HSV1-UL30-3010 | − | GCGGCCUCACGGCCGCC | 17 | 11950 |
| HSV1-UL30-3011 | − | GUACACCAACAAGCGCC | 17 | 11951 |
| HSV1-UL30-1747 | + | CCGCGGAACGACGCGCC | 17 | 4685 |
| HSV1-UL30-2167 | − | GGCGAUUUAGGGGCGCC | 17 | 5199 |
| HSV1-UL30-3012 | − | UACGUGCCUGCUGCGCC | 17 | 11952 |
| HSV1-UL30-3013 | − | CGGCCGCAUGAACGGCC | 17 | 11953 |
| HSV1-UL30-3014 | + | AGCGUGUUGUUCCGGCC | 17 | 11954 |
| HSV1-UL30-2119 | − | UGAACGAGCUGGCGGCC | 17 | 5152 |
| HSV1-UL30-2685 | + | CCUCCGGGAAAUCGGCC | 17 | 5683 |
| HSV1-UL30-3015 | + | AGCCCUUCUGGUCGGCC | 17 | 11955 |
| HSV1-UL30-2679 | + | GCGCAUGGAAUAGGGCC | 17 | 5677 |
| HSV1-UL30-3016 | + | CCCGCGUUGCGCGGGCC | 17 | 11956 |
| HSV1-UL30-3017 | − | UGGGGUACCAGGGGGCC | 17 | 11957 |
| HSV1-UL30-3018 | + | ACACCGUCAGGUGGGCC | 17 | 11958 |
| HSV1-UL30-3019 | + | AGCACAGGUUGUGGGCC | 17 | 11959 |
| HSV1-UL30-3020 | + | UGCCCCCCUCGAUGGCC | 17 | 11960 |
| HSV1-UL30-3021 | + | CGUACUUCUUGAUGGCC | 17 | 11961 |
| HSV1-UL30-3022 | − | UGGCCUUUCCGGUGGCC | 17 | 11962 |
| HSV1-UL30-2618 | + | CCCGGGGGCGCUUGGCC | 17 | 5622 |
| HSV1-UL30-3023 | − | GUGCGACAACUUCUGCC | 17 | 11963 |
| HSV1-UL30-3024 | + | CAGGUCCUCCGGGUGCC | 17 | 11964 |
| HSV1-UL30-3025 | − | CCCGGAGAGGGACAUCC | 17 | 11965 |
| HSV1-UL30-3026 | − | GUACCCCAGCAUCAUCC | 17 | 11966 |
| HSV1-UL30-3027 | − | CACCACCCGGUUCAUCC | 17 | 11967 |
| HSV1-UL30-3028 | − | UUAUCAACCGCACCUCC | 17 | 11968 |
| HSV1-UL30-3029 | + | AGUCCUUGCCCGCCUCC | 17 | 11969 |
| HSV1-UL30-2683 | + | GCAUGUCGGCCGCCUCC | 17 | 5681 |
| HSV1-UL30-2610 | + | GGCUUGGACGCGCCUCC | 17 | 5614 |
| HSV1-UL30-3030 | + | GCCGCUCCUCGUCCUCC | 17 | 11970 |
| HSV1-UL30-3031 | + | GGAUGACCAGGUCCUCC | 17 | 11971 |
| HSV1-UL30-3032 | − | GGCCUUCGAACAGCUCC | 17 | 11972 |
| HSV1-UL30-3033 | − | GACCGUCAUCACGCUCC | 17 | 11973 |
| HSV1-UL30-3034 | + | ACAGGAGGACGUGCUCC | 17 | 11974 |
| HSV1-UL30-3035 | − | CGAGGAGGCCGUGCUCC | 17 | 11975 |
| HSV1-UL30-3036 | + | CCCCCACCUCGAUCUCC | 17 | 11976 |
| HSV1-UL30-3037 | + | CCUGGAUGUCCCUCUCC | 17 | 11977 |
| HSV1-UL30-2614 | + | CAGGCGACGGCGUCUCC | 17 | 5618 |
| HSV1-UL30-3038 | + | CGGUGAGGACAAAGUCC | 17 | 11978 |
| HSV1-UL30-2758 | + | UGCGGCCGUACCCGUCC | 17 | 5756 |
| HSV1-UL30-2590 | + | GCGCGGCCACGUCGUCC | 17 | 5595 |
| HSV1-UL30-2695 | + | CGGCCUGCUGCUUGUCC | 17 | 5693 |
| HSV1-UL30-3039 | + | CGAACCCGGGGUUGUCC | 17 | 11979 |
| HSV1-UL30-3040 | − | UCCUUGACCCCACUUCC | 17 | 11980 |
| HSV1-UL30-2254 | − | GCUCCUGGCCGAUUUCC | 17 | 5270 |
| HSV1-UL30-3041 | − | GCGUCUACGUCCGAAGC | 17 | 11981 |
| HSV1-UL30-3042 | + | AAAACUUAAAAAACAGC | 17 | 11982 |
| HSV1-UL30-3043 | + | UAUCGUCGUAAAACAGC | 17 | 11983 |
| HSV1-UL30-2744 | + | ACAGCUGGCCCACCAGC | 17 | 5742 |
| HSV1-UL30-3044 | − | CAACACGCUAGCCCAGC | 17 | 11984 |
| HSV1-UL30-3045 | − | GCUCCUGGACAAGCAGC | 17 | 11985 |
| HSV1-UL30-3046 | + | GGUCGGCCAGGCGCAGC | 17 | 11986 |
| HSV1-UL30-3047 | + | ACGCGGUAAAACAGAGC | 17 | 11987 |
| HSV1-UL30-3048 | − | AUCCCACCUGAACGAGC | 17 | 11988 |
| HSV1-UL30-814 | − | GGGGGGGGAGGACGAGC | 17 | 3752 |
| HSV1-UL30-3049 | − | GCUGCUGGUGUCCGAGC | 17 | 11989 |
| HSV1-UL30-913 | − | GGAGGGCGGGGGCGAGC | 17 | 3851 |
| HSV1-UL30-914 | − | CGGGGGCGAGCGGGAGC | 17 | 3852 |
| HSV1-UL30-861 | − | CCGGGCCCGCGCAACGC | 17 | 3799 |
| HSV1-UL30-919 | − | GGCGCGCGGGAGACCGC | 17 | 3857 |
| HSV1-UL30-3050 | − | GCGCGGCUCCGGACCGC | 17 | 11990 |
| HSV1-UL30-2706 | + | UGGCGAGCCAGUCCCGC | 17 | 5704 |
| HSV1-UL30-3051 | − | CCCGCCUACUACGCCGC | 17 | 11991 |
| HSV1-UL30-3052 | − | CGCGGCCUCACGGCCGC | 17 | 11992 |
| HSV1-UL30-1474 | + | GGGGAGGGCAGGGCCGC | 17 | 4412 |
| HSV1-UL30-3053 | + | AAGGCCAUCGGGGCCGC | 17 | 11993 |
| HSV1-UL30-3054 | + | GCCAGCCACUCCUCCGC | 17 | 11994 |
| HSV1-UL30-3055 | + | UUCCUCCGCCGUAGCGC | 17 | 11995 |
| HSV1-UL30-3056 | − | AGUACGUCCACGCGCGC | 17 | 11996 |
| HSV1-UL30-3057 | + | UGUUGGUGUACGCGCGC | 17 | 11997 |
| HSV1-UL30-3058 | − | CAUGGCCCGCCGCGCGC | 17 | 11998 |
| HSV1-UL30-918 | − | GGAGCCGGAGGGCGCGC | 17 | 3856 |
| HSV1-UL30-3059 | + | CGCCCGGGGACUCGCGC | 17 | 11999 |
| HSV1-UL30-2166 | − | GGGCGAUUUAGGGGCGC | 17 | 5198 |
| HSV1-UL30-3060 | + | AUCACCCCGCGUUGCGC | 17 | 12000 |
| HSV1-UL30-3061 | + | CGCGUGGACGUACUCGC | 17 | 12001 |
| HSV1-UL30-3062 | + | CGUCUCCUCUACCUCGC | 17 | 12002 |
| HSV1-UL30-3063 | + | GUUAAACUCGACGUCGC | 17 | 12003 |
| HSV1-UL30-2781 | + | GGAUUCGGGGAGGUCGC | 17 | 5779 |
| HSV1-UL30-2101 | − | GAUAUCGAAUGCAAGGC | 17 | 5134 |
| HSV1-UL30-3064 | + | GAUGCUGGGGUACAGGC | 17 | 12004 |
| HSV1-UL30-3065 | − | GUGGCGCACCUGGAGGC | 17 | 12005 |
| HSV1-UL30-2749 | + | CCGGCGGCGUAGUAGGC | 17 | 5747 |
| HSV1-UL30-2132 | − | ACGGCCGCAUGAACGGC | 17 | 5165 |
| HSV1-UL30-2691 | + | CAACGUGCAGGCACGGC | 17 | 5689 |
| HSV1-UL30-920 | − | CGCGGGAGACCGCCGGC | 17 | 3858 |
| HSV1-UL30-3066 | + | CCAUCGGGGCCGCCGGC | 17 | 12006 |
| HSV1-UL30-3067 | + | CGGGACCUGCGCGCGGC | 17 | 12007 |
| HSV1-UL30-3068 | − | GGAGACGGUCGCGCGGC | 17 | 12008 |
| HSV1-UL30-3069 | + | UCCUCCCGGGCUGCGGC | 17 | 12009 |
| HSV1-UL30-3070 | + | CCUCCCGGGGGGUCGGC | 17 | 12010 |
| HSV1-UL30-3071 | − | GGUUCGUCACCUUCGGC | 17 | 12011 |
| HSV1-UL30-909 | − | ACGAACGCGAGGAGGGC | 17 | 3847 |
| HSV1-UL30-3072 | + | GCUUGGCCGGGGAGGGC | 17 | 12012 |
| HSV1-UL30-2087 | − | ACCGUCUCAAACCGGGC | 17 | 5120 |
| HSV1-UL30-2655 | + | CCUGCAGUCCCUCGGGC | 17 | 5654 |
| HSV1-UL30-1481 | + | AGGGCCGCGGGGGGGGC | 17 | 4419 |
| HSV1-UL30-3073 | + | GAACCACGGGCGUGGGC | 17 | 12013 |
| HSV1-UL30-3074 | + | UCGUACUUCUUGAUGGC | 17 | 12014 |
| HSV1-UL30-3075 | − | CCCCGCGGAGGAGUGGC | 17 | 12015 |
| HSV1-UL30-3076 | − | CUGGCCUUUCCGGUGGC | 17 | 12016 |
| HSV1-UL30-3077 | − | GCCGUCGCGCGCUUGGC | 17 | 12017 |
| HSV1-UL30-2617 | + | UCCCGGGGGCGCUUGGC | 17 | 5621 |
| HSV1-UL30-2722 | + | GUGGGCCUGGAUGAUGC | 17 | 5720 |
| HSV1-UL30-3078 | + | UGGGCAAUGGCGUAUGC | 17 | 12018 |
| HSV1-UL30-3079 | + | CACAUGAGCUUGUAUGC | 17 | 12019 |
| HSV1-UL30-3080 | − | CCUGCCCGAGGGACUGC | 17 | 12020 |
| HSV1-UL30-3081 | − | CAUACAGGAUUCCCUGC | 17 | 12021 |
| HSV1-UL30-3082 | + | GUACCCCACGUGCCUGC | 17 | 12022 |
| HSV1-UL30-3083 | − | CCUCAGCAUCCUCCUGC | 17 | 12023 |
| HSV1-UL30-3084 | − | CAAGCCCCGCAAGCUGC | 17 | 12024 |
| HSV1-UL30-3085 | + | UAAAGACGCGGAUCUGC | 17 | 12025 |
| HSV1-UL30-3086 | − | GAAGGGCUUUAUUCUGC | 17 | 12026 |
| HSV1-UL30-3087 | + | CCGUCGCGGCAACGUGC | 17 | 12027 |
| HSV1-UL30-3088 | − | UUCGGGGCGGUGGGUGC | 17 | 12028 |
| HSV1-UL30-3089 | + | GCCGUCGUAGAUGGUGC | 17 | 12029 |
| HSV1-UL30-3090 | + | GGACACCAGCAGCUUGC | 17 | 12030 |
| HSV1-UL30-3091 | − | CGACUGGCCCUUCUUGC | 17 | 12031 |
| HSV1-UL30-2156 | − | UAAGUUUUUGCCCCAUC | 17 | 5188 |
| HSV1-UL30-3092 | + | AUGUCCCGAAGGCCAUC | 17 | 12032 |
| HSV1-UL30-3093 | + | CGAUCACGUACGGGAUC | 17 | 12033 |
| HSV1-UL30-3094 | − | CAUCAAGGGCGUGGAUC | 17 | 12034 |
| HSV1-UL30-3095 | + | AGAGCAGACAGGAUAUC | 17 | 12035 |
| HSV1-UL30-3096 | + | UACCCGGUCACGAACUC | 17 | 12036 |
| HSV1-UL30-2058 | − | GCUCCUGGGCCUGACUC | 17 | 5091 |
| HSV1-UL30-3097 | + | GUCUCCCGCGCGCCCUC | 17 | 12037 |
| HSV1-UL30-2715 | + | CCACUGCGUCGGCCCUC | 17 | 5713 |
| HSV1-UL30-3098 | + | AACGCCUGCAGUCCCUC | 17 | 12038 |
| HSV1-UL30-2682 | + | CGCAUGUCGGCCGCCUC | 17 | 5680 |
| HSV1-UL30-3099 | + | AGGAGCACGGCCUCCUC | 17 | 12039 |
| HSV1-UL30-3100 | + | UCCUCCCCCUCCUCCUC | 17 | 12040 |
| HSV1-UL30-3101 | + | UGGAUGACCAGGUCCUC | 17 | 12041 |
| HSV1-UL30-3102 | + | GGAUGUCGCGAUAGCUC | 17 | 12042 |
| HSV1-UL30-2659 | + | UAACGCGGCGGCCGCUC | 17 | 5658 |
| HSV1-UL30-3103 | − | ACGUGGCCGCGCGGCUC | 17 | 12043 |
| HSV1-UL30-3104 | + | GCUUCUGGAAGUGGCUC | 17 | 12044 |
| HSV1-UL30-2699 | + | CCUCCUCGGGGCUGCUC | 17 | 5697 |
| HSV1-UL30-3105 | + | UCCUGGAUGUCCCUCUC | 17 | 12045 |
| HSV1-UL30-2273 | − | UACGACGAUACCGUCUC | 17 | 5289 |
| HSV1-UL30-3106 | + | GGUGGCCUUCCGGAGUC | 17 | 12046 |
| HSV1-UL30-3107 | + | GCUUGUAAUACACCGUC | 17 | 12047 |
| HSV1-UL30-3108 | − | GGAGGCGCCCAAGCGUC | 17 | 12048 |
| HSV1-UL30-2589 | + | CGCGCGGCCACGUCGUC | 17 | 5594 |
| HSV1-UL30-2587 | + | CCCCGAACCCUGCGGUC | 17 | 5592 |
| HSV1-UL30-3109 | + | CCUCUACCUCGCGGGUC | 17 | 12049 |
| HSV1-UL30-3110 | + | AAUCGCCCCUGGGUGUC | 17 | 12050 |
| HSV1-UL30-2778 | + | UCGUUCAGGUGGGAUUC | 17 | 5776 |
| HSV1-UL30-2594 | + | GGGGGGUGCCACACUUC | 17 | 5599 |
| HSV1-UL30-3111 | − | GUCCUUGACCCCACUUC | 17 | 12051 |
| HSV1-UL30-3112 | + | GCAGAAUAAAGCCCUUC | 17 | 12052 |
| HSV1-UL30-3113 | − | CGGCCCCGAUGGCCUUC | 17 | 12053 |
| HSV1-UL30-2830 | + | GCCACCCGGUGGCCUUC | 17 | 5825 |
| HSV1-UL30-3114 | + | CCUUCUUCUUGUCCUUC | 17 | 12054 |
| HSV1-UL30-2755 | + | UUAUCUUGCUGCGCUUC | 17 | 5753 |
| HSV1-UL30-3115 | − | AGGGACUGCAGGCGUUC | 17 | 12055 |
| HSV1-UL30-3116 | + | UGGCCGCCAGCUCGUUC | 17 | 12056 |
| HSV1-UL30-3117 | − | UCCGGACCGCAGGGUUC | 17 | 12057 |
| HSV1-UL30-2121 | − | GCCCACGCCCGUGGUUC | 17 | 5154 |
| HSV1-UL30-3118 | + | AGUAAUAGUCCGUGUUC | 17 | 12058 |
| HSV1-UL30-3119 | + | GGGCUAGCGUGUUGUUC | 17 | 12059 |
| HSV1-UL30-3120 | − | GGACGAGCUGGCCUUUC | 17 | 12060 |
| HSV1-UL30-3121 | − | CGCGUCUACGUCCGAAG | 17 | 12061 |
| HSV1-UL30-3122 | + | CCACCUCCGCCUCGAAG | 17 | 12062 |
| HSV1-UL30-2730 | + | CACGUGAAACCCGGAAG | 17 | 5728 |
| HSV1-UL30-3123 | + | UGCUGCGCUUCUGGAAG | 17 | 12063 |
| HSV1-UL30-3124 | − | GGCACGUGGGGUACCAG | 17 | 12064 |
| HSV1-UL30-2840 | − | UUCUGCCGGACACCCAG | 17 | 5835 |
| HSV1-UL30-1034 | − | AGACGCCGCCGCCCCAG | 17 | 3972 |
| HSV1-UL30-897 | − | GGACGAGGAGCGGCCAG | 17 | 3835 |
| HSV1-UL30-3125 | − | AACGAGCUGGCGGCCAG | 17 | 12065 |
| HSV1-UL30-2760 | + | CGGCCGUACCCGUCCAG | 17 | 5758 |
| HSV1-UL30-3126 | − | CCUGAGGGCCGACGCAG | 17 | 12066 |
| HSV1-UL30-3127 | + | UGCAGUCCCUCGGGCAG | 17 | 12067 |
| HSV1-UL30-2815 | + | GACGCGGUAAAACAGAG | 17 | 5812 |
| HSV1-UL30-3128 | + | UCUGGGGAAUCCGCGAG | 17 | 12068 |
| HSV1-UL30-912 | − | AGGAGGGCGGGGGCGAG | 17 | 3850 |
| HSV1-UL30-2096 | − | ACAACCUGGCCAUCGAG | 17 | 5129 |
| HSV1-UL30-896 | − | CCCGGGAGGACGAGGAG | 17 | 3834 |
| HSV1-UL30-901 | − | AGCGGCCAGAGGAGGAG | 17 | 3839 |
| HSV1-UL30-1007 | − | AGCGCCCCGCGGAGGAG | 17 | 3945 |
| HSV1-UL30-2288 | − | GCAUCACCGACCCGGAG | 17 | 5303 |
| HSV1-UL30-3129 | − | CGAUACCGUCUCCGGAG | 17 | 12069 |
| HSV1-UL30-2297 | − | CCAGACCCGCGAGGUAG | 17 | 5312 |
| HSV1-UL30-3130 | − | ACCCAGGGGCGAUUUAG | 17 | 12070 |
| HSV1-UL30-860 | − | GCCGGGCCCGCGCAACG | 17 | 3798 |
| HSV1-UL30-3131 | + | GGGGCGCUCGGCUAACG | 17 | 12071 |
| HSV1-UL30-3132 | + | AGUCGAACACCACCACG | 17 | 12072 |
| HSV1-UL30-921 | − | GACCGCCGGCAGGCACG | 17 | 3859 |
| HSV1-UL30-3133 | − | UUCACGUUUACGGCACG | 17 | 12073 |
| HSV1-UL30-3134 | + | GCAGGCACGUAAAGACG | 17 | 12074 |
| HSV1-UL30-3135 | + | CGCUUCGGACGUAGACG | 17 | 12075 |
| HSV1-UL30-1058 | − | GCACCCCCCGGACGACG | 17 | 3996 |
| HSV1-UL30-3136 | − | ACGCCAUCACACCGACG | 17 | 12076 |
| HSV1-UL30-895 | − | CGCAGCCCGGGAGGACG | 17 | 3833 |
| HSV1-UL30-904 | − | GGAGGAGGGGGAGGACG | 17 | 3842 |
| HSV1-UL30-3137 | − | CAUGCGCAUCAUCUACG | 17 | 12077 |
| HSV1-UL30-3138 | − | CAUCGGCGUCAUCUACG | 17 | 12078 |
| HSV1-UL30-3139 | + | GCCGAUGGGCGUCUACG | 17 | 12079 |
| HSV1-UL30-3140 | − | GGCCAUCAAGAAGUACG | 17 | 12080 |
| HSV1-UL30-3141 | + | CGAAGGUGACGAACCCG | 17 | 12081 |
| HSV1-UL30-3142 | − | GUUUCACGUGAACCCCG | 17 | 12082 |
| HSV1-UL30-1035 | − | CGAGCCCGCCCCCCCCG | 17 | 3973 |
| HSV1-UL30-2242 | − | UCCCCAGAGCAGCCCCG | 17 | 5258 |
| HSV1-UL30-2276 | − | GUUAGCCGAGCGCCCCG | 17 | 5292 |
| HSV1-UL30-3143 | − | GGGCCUGCCCACGCCCG | 17 | 12083 |
| HSV1-UL30-1749 | + | GCGGAACGACGCGCCCG | 17 | 4687 |
| HSV1-UL30-3144 | + | GCAUGGAAUAGGGCCCG | 17 | 12084 |
| HSV1-UL30-2281 | − | GGCGCGACCCCUGCCCG | 17 | 5296 |
| HSV1-UL30-2612 | + | CUUGGACGCGCCUCCCG | 17 | 5616 |
| HSV1-UL30-3145 | + | GGCGACGGCGUCUCCCG | 17 | 12085 |
| HSV1-UL30-3146 | − | CUACAAGCUCAACGCCG | 17 | 12086 |
| HSV1-UL30-3147 | + | UGUUCAGGGCGACGCCG | 17 | 12087 |
| HSV1-UL30-2168 | − | GCGAUUUAGGGGCGCCG | 17 | 5200 |
| HSV1-UL30-3148 | + | CGGCGGCCGUGAGGCCG | 17 | 12088 |
| HSV1-UL30-3149 | − | GGCCGCAUGAACGGCCG | 17 | 12089 |
| HSV1-UL30-3150 | − | CGCCGGGCUGACGGCCG | 17 | 12090 |
| HSV1-UL30-3151 | + | GGACUCGCGCAGGGCCG | 17 | 12091 |
| HSV1-UL30-1473 | + | CGGGGAGGGCAGGGCCG | 17 | 4411 |
| HSV1-UL30-3152 | − | CUGCGAGCGCAUGGCCG | 17 | 12092 |
| HSV1-UL30-3153 | − | GGUGUCCGAGCUGGCCG | 17 | 12093 |
| HSV1-UL30-2619 | + | CCGGGGGCGCUUGGCCG | 17 | 5623 |
| HSV1-UL30-2820 | + | GGUCCGCGGAGAUGCCG | 17 | 5817 |
| HSV1-UL30-3154 | − | AUCUUUGUGCUGUGCCG | 17 | 12094 |
| HSV1-UL30-2657 | + | CGCCAGCCACUCCUCCG | 17 | 5656 |
| HSV1-UL30-3155 | − | GUUCCGCGGCAUCUCCG | 17 | 12095 |
| HSV1-UL30-2591 | + | CGCGGCCACGUCGUCCG | 17 | 5596 |
| HSV1-UL30-2818 | + | CGCCUCGAAGUGGUCCG | 17 | 5815 |
| HSV1-UL30-3156 | − | CCGGGCGCGUCGUUCCG | 17 | 12096 |
| HSV1-UL30-3157 | + | CGCGGUAAAACAGAGCG | 17 | 12097 |
| HSV1-UL30-862 | − | CGGGCCCGCGCAACGCG | 17 | 3800 |
| HSV1-UL30-905 | − | GGACGAGGACGAACGCG | 17 | 3843 |
| HSV1-UL30-2861 | − | CGGCCCAGUUCCACGCG | 17 | 11801 |
| HSV1-UL30-3158 | − | CGUGGCCCAGACCCGCG | 17 | 12098 |
| HSV1-UL30-3159 | + | UGCGGUCCGGAGCCGCG | 17 | 12099 |
| HSV1-UL30-1475 | + | GGGAGGGCAGGGCCGCG | 17 | 4413 |
| HSV1-UL30-3160 | − | CGGACGACGUGGCCGCG | 17 | 12100 |
| HSV1-UL30-3161 | + | CCAGCCACUCCUCCGCG | 17 | 12101 |
| HSV1-UL30-3162 | + | UUGUUGGUGUACGCGCG | 17 | 12102 |
| HSV1-UL30-2852 | + | CGUCCAUAAACCGCGCG | 17 | 11792 |
| HSV1-UL30-1568 | + | AGGCCGCCCAGCGCGCG | 17 | 4506 |
| HSV1-UL30-917 | − | GGGAGCCGGAGGGCGCG | 17 | 3855 |
| HSV1-UL30-173 | − | CGCGUACGGCAUGCGCG | 17 | 3324 |
| HSV1-UL30-3163 | + | UGGACGGGACCUGCGCG | 17 | 12103 |
| HSV1-UL30-3164 | − | UAGAGGAGACGGUCGCG | 17 | 12104 |
| HSV1-UL30-2102 | − | AUAUCGAAUGCAAGGCG | 17 | 5135 |
| HSV1-UL30-3165 | + | CGGCGGCGUAGUAGGCG | 17 | 12105 |
| HSV1-UL30-3166 | − | GAUGCUCAUCAAGGGCG | 17 | 12106 |
| HSV1-UL30-910 | − | CGAACGCGAGGAGGGCG | 17 | 3848 |
| HSV1-UL30-3167 | + | UUCCAGAACCACGGGCG | 17 | 12107 |
| HSV1-UL30-3168 | + | AGAGAUCUCGUGGGGCG | 17 | 12108 |
| HSV1-UL30-3169 | + | GACACCAGCAGCUUGCG | 17 | 12109 |
| HSV1-UL30-3170 | + | GAUCACCCCGCGUUGCG | 17 | 12110 |
| HSV1-UL30-3171 | + | UGUCCCGAAGGCCAUCG | 17 | 12111 |
| HSV1-UL30-2094 | − | GGACAACCUGGCCAUCG | 17 | 5127 |
| HSV1-UL30-3172 | − | GGACUACCUGGAGAUCG | 17 | 12112 |
| HSV1-UL30-3173 | − | GAUCCCGUACGUGAUCG | 17 | 12113 |
| HSV1-UL30-3174 | + | ACCCGGUCACGAACUCG | 17 | 12114 |
| HSV1-UL30-3175 | + | GCGCGUGGACGUACUCG | 17 | 12115 |
| HSV1-UL30-3176 | + | CCGUCUCCUCUACCUCG | 17 | 12116 |
| HSV1-UL30-3177 | + | GGAGCACGGCCUCCUCG | 17 | 12117 |
| HSV1-UL30-2632 | + | CGGCGGCGUCUAGCUCG | 17 | 5631 |
| HSV1-UL30-3178 | − | GAAAGCAGAUCCGCUCG | 17 | 12118 |
| HSV1-UL30-3179 | + | UCGCGAGCAGCAUCUCG | 17 | 12119 |
| HSV1-UL30-2827 | + | CGCUCGCAGAGAUCUCG | 17 | 5822 |
| HSV1-UL30-3180 | + | GAUGGUCGUCACCGUCG | 17 | 12120 |
| HSV1-UL30-2779 | + | CGUUCAGGUGGGAUUCG | 17 | 5777 |
| HSV1-UL30-3181 | − | CUCCGCGGACCACUUCG | 17 | 12121 |
| HSV1-UL30-3182 | − | GGGACUGCAGGCGUUCG | 17 | 12122 |
| HSV1-UL30-3183 | − | CCGGACCGCAGGGUUCG | 17 | 12123 |
| HSV1-UL30-2064 | − | CUUUUACAUGAACAAGG | 17 | 5097 |
| HSV1-UL30-2100 | − | CGAUAUCGAAUGCAAGG | 17 | 5133 |
| HSV1-UL30-1695 | + | AACCGAGCGAAAACAGG | 17 | 4633 |
| HSV1-UL30-1438 | + | ACGCCGCCCCCAACAGG | 17 | 4376 |
| HSV1-UL30-3184 | − | GCACGUGGGGUACCAGG | 17 | 12124 |
| HSV1-UL30-3185 | + | GGCCGUACCCGUCCAGG | 17 | 12125 |
| HSV1-UL30-3186 | + | CGAGCCAGUCCCGCAGG | 17 | 12126 |
| HSV1-UL30-3187 | + | UGUAAUACACCGUCAGG | 17 | 12127 |
| HSV1-UL30-2775 | + | CCGCCAGCUCGUUCAGG | 17 | 5773 |
| HSV1-UL30-898 | − | CGAGGAGCGGCCAGAGG | 17 | 3836 |
| HSV1-UL30-958 | − | CCAGAGCAGCCCCGAGG | 17 | 3896 |
| HSV1-UL30-906 | − | CGAGGACGAACGCGAGG | 17 | 3844 |
| HSV1-UL30-3188 | − | CAACCUGGCCAUCGAGG | 17 | 12128 |
| HSV1-UL30-2228 | − | CUACCUGGAGAUCGAGG | 17 | 5244 |
| HSV1-UL30-2072 | − | CGCGGACCACUUCGAGG | 17 | 5105 |
| HSV1-UL30-3189 | − | UUACAUGAACAAGGAGG | 17 | 12129 |
| HSV1-UL30-899 | − | GGAGCGGCCAGAGGAGG | 17 | 3837 |
| HSV1-UL30-902 | − | GCGGCCAGAGGAGGAGG | 17 | 3840 |
| HSV1-UL30-3190 | − | GGCCGAUUUCCCGGAGG | 17 | 12130 |
| HSV1-UL30-3191 | − | CCACUUCGAGGCGGAGG | 17 | 12131 |
| HSV1-UL30-3192 | − | AGUGGCGCACCUGGAGG | 17 | 12132 |
| HSV1-UL30-3193 | + | GCAGGAGGAUGCUGAGG | 17 | 12133 |
| HSV1-UL30-2748 | + | CCCGGCGGCGUAGUAGG | 17 | 5746 |
| HSV1-UL30-2330 | − | GGGUGCCGGCGCUACGG | 17 | 5343 |
| HSV1-UL30-3194 | − | AUCGGCGUCAUCUACGG | 17 | 12134 |
| HSV1-UL30-3195 | − | CGAGUUUAACUGUACGG | 17 | 12135 |
| HSV1-UL30-3196 | + | CGUGAACGGCCACCCGG | 17 | 12136 |
| HSV1-UL30-3197 | − | GGUGGCCGGGCACCCGG | 17 | 12137 |
| HSV1-UL30-3198 | + | CACGGCCGUCAGCCCGG | 17 | 12138 |
| HSV1-UL30-3199 | + | CAUGGAAUAGGGCCCGG | 17 | 12139 |
| HSV1-UL30-3200 | + | GCGUUGCGCGGGCCCGG | 17 | 12140 |
| HSV1-UL30-3201 | + | UUGGACGCGCCUCCCGG | 17 | 12141 |
| HSV1-UL30-3202 | + | GCGACGGCGUCUCCCGG | 17 | 12142 |
| HSV1-UL30-3203 | − | CCUGGCCGAUUUCCCGG | 17 | 12143 |
| HSV1-UL30-3204 | − | CACGCUAGCCCAGCCGG | 17 | 12144 |
| HSV1-UL30-915 | − | GGGCGAGCGGGAGCCGG | 17 | 3853 |
| HSV1-UL30-2169 | − | CGAUUUAGGGGCGCCGG | 17 | 5201 |
| HSV1-UL30-3205 | + | CCCCACGUGCCUGCCGG | 17 | 12145 |
| HSV1-UL30-3206 | + | GCGGCCACGUCGUCCGG | 17 | 12146 |
| HSV1-UL30-3207 | − | CGAGCUGGCCUUUCCGG | 17 | 12147 |
| HSV1-UL30-3208 | + | GCGCUCGGCUAACGCGG | 17 | 12148 |
| HSV1-UL30-1006 | − | AGCCGAGCGCCCCGCGG | 17 | 3944 |
| HSV1-UL30-1476 | + | GGAGGGCAGGGCCGCGG | 17 | 4414 |
| HSV1-UL30-3209 | + | ACGGGACCUGCGCGCGG | 17 | 12149 |
| HSV1-UL30-3210 | + | CGGCGUCUAGCUCGCGG | 17 | 12150 |
| HSV1-UL30-2103 | − | UAUCGAAUGCAAGGCGG | 17 | 5136 |
| HSV1-UL30-3211 | − | GGACCACUUCGAGGCGG | 17 | 12151 |
| HSV1-UL30-2332 | − | UGCCGGCGCUACGGCGG | 17 | 5345 |
| HSV1-UL30-3212 | + | GACGUGCUCCAGGGCGG | 17 | 12152 |
| HSV1-UL30-911 | − | GAACGCGAGGAGGGCGG | 17 | 3849 |
| HSV1-UL30-3213 | − | CGCAGGGUUCGGGGCGG | 17 | 12153 |
| HSV1-UL30-3214 | + | CUCGUCCCCUGGGGCGG | 17 | 12154 |
| HSV1-UL30-3215 | + | GUGUCUGCUCAGUUCGG | 17 | 12155 |
| HSV1-UL30-3216 | + | GAGGACGUGCUCCAGGG | 17 | 12156 |
| HSV1-UL30-2082 | − | AUCAAGAAGUACGAGGG | 17 | 5115 |
| HSV1-UL30-3217 | − | AACCUGGCCAUCGAGGG | 17 | 12157 |
| HSV1-UL30-908 | − | GACGAACGCGAGGAGGG | 17 | 3846 |
| HSV1-UL30-3218 | + | GUCUAGCUCGCGGAGGG | 17 | 12158 |
| HSV1-UL30-3219 | + | GUCCAGGAUGAACCGGG | 17 | 12159 |
| HSV1-UL30-3220 | − | UCCGGAAGGCCACCGGG | 17 | 12160 |
| HSV1-UL30-3221 | − | CCUGCCGACCCCCCGGG | 17 | 12161 |
| HSV1-UL30-3222 | − | UCCGGCCGCAGCCCGGG | 17 | 12162 |
| HSV1-UL30-3223 | + | UGGACGCGCCUCCCGGG | 17 | 12163 |
| HSV1-UL30-2170 | − | GAUUUAGGGGCGCCGGG | 17 | 5202 |
| HSV1-UL30-3224 | + | CGGCCACGUCGUCCGGG | 17 | 12164 |
| HSV1-UL30-1477 | + | GAGGGCAGGGCCGCGGG | 17 | 4415 |
| HSV1-UL30-2104 | − | AUCGAAUGCAAGGCGGG | 17 | 5137 |
| HSV1-UL30-2171 | − | AUUUAGGGGCGCCGGGG | 17 | 5203 |
| HSV1-UL30-3225 | + | GGGGCGCUUGGCCGGGG | 17 | 12165 |
| HSV1-UL30-1478 | + | AGGGCAGGGCCGCGGGG | 17 | 4416 |
| HSV1-UL30-2105 | − | UCGAAUGCAAGGCGGGG | 17 | 5138 |
| HSV1-UL30-3226 | + | UCAGGUGGGAUUCGGGG | 17 | 12166 |
| HSV1-UL30-3227 | − | GACCGCAGGGUUCGGGG | 17 | 12167 |
| HSV1-UL30-903 | − | GCCAGAGGAGGAGGGGG | 17 | 3841 |
| HSV1-UL30-1479 | + | GGGCAGGGCCGCGGGGG | 17 | 4417 |
| HSV1-UL30-2106 | − | CGAAUGCAAGGCGGGGG | 17 | 5139 |
| HSV1-UL30-3228 | − | UAGGGGCGCCGGGGGGG | 17 | 12168 |
| HSV1-UL30-1480 | + | CAGGGCCGCGGGGGGGG | 17 | 4418 |
| HSV1-UL30-3229 | − | AUGCAAGGCGGGGGGGG | 17 | 12169 |
| HSV1-UL30-3230 | − | CUCCCACCUGUUGGGGG | 17 | 12170 |
| HSV1-UL30-3231 | + | GGGCUCGUCCCCUGGGG | 17 | 12171 |
| HSV1-UL30-3232 | − | UGGAGAUCGAGGUGGGG | 17 | 12172 |
| HSV1-UL30-3233 | + | CACUCGAGUUUGAUGGG | 17 | 12173 |
| HSV1-UL30-3234 | − | CGUCCACGCGCGCUGGG | 17 | 12174 |
| HSV1-UL30-3235 | − | CUGGAGAUCGAGGUGGG | 17 | 12175 |
| HSV1-UL30-3236 | + | ACACACGACCUUGAUGG | 17 | 12176 |
| HSV1-UL30-3237 | + | GCACUCGAGUUUGAUGG | 17 | 12177 |
| HSV1-UL30-3238 | − | CGCAGUGGCGCACCUGG | 17 | 12178 |
| HSV1-UL30-3239 | + | GUCGACCAGGGCCCUGG | 17 | 12179 |
| HSV1-UL30-3240 | − | CCACCUGAACGAGCUGG | 17 | 12180 |
| HSV1-UL30-3241 | − | ACAGGAUUCCCUGCUGG | 17 | 12181 |
| HSV1-UL30-3242 | − | UCACGUGAACCCCGUGG | 17 | 12182 |
| HSV1-UL30-2231 | − | CCUGGAGAUCGAGGUGG | 17 | 5247 |
| HSV1-UL30-2074 | − | CUUCGAGGCGGAGGUGG | 17 | 5107 |
| HSV1-UL30-3243 | + | GUGCUCCAGGGCGGUGG | 17 | 12183 |
| HSV1-UL30-3244 | + | CAGGAUGAACCGGGUGG | 17 | 12184 |
| HSV1-UL30-3245 | − | GGCCGUCGCGCGCUUGG | 17 | 12185 |
| HSV1-UL30-3246 | − | CUUCUCCCACCUGUUGG | 17 | 12186 |
| HSV1-UL30-3247 | + | CGCCCCGGCCGUUCAUG | 17 | 12187 |
| HSV1-UL30-3248 | + | GCCGAGAGCUCCAGAUG | 17 | 12188 |
| HSV1-UL30-3249 | + | ACAGCGCGCGCGAGAUG | 17 | 12189 |
| HSV1-UL30-2669 | + | CGCACUCGAGUUUGAUG | 17 | 5668 |
| HSV1-UL30-2604 | + | GUGGGCAAUGGCGUAUG | 17 | 5608 |
| HSV1-UL30-3250 | + | CACCGCCCCGAACCCUG | 17 | 12190 |
| HSV1-UL30-3251 | + | GGCGGGCUCGUCCCCUG | 17 | 12191 |
| HSV1-UL30-3252 | − | UCAGCACGCUCUCCCUG | 17 | 12192 |
| HSV1-UL30-2236 | − | UCCUCAGCAUCCUCCUG | 17 | 5252 |
| HSV1-UL30-3253 | + | CUCGUCCUCCCGGGCUG | 17 | 12193 |
| HSV1-UL30-2710 | + | CCCGCAGGAGGAUGCUG | 17 | 5708 |
| HSV1-UL30-3254 | + | GGGCCUGGAUGAUGCUG | 17 | 12194 |
| HSV1-UL30-2701 | + | UCCUCGGGGCUGCUCUG | 17 | 5699 |
| HSV1-UL30-3255 | − | GGUUUAUUCCCGAAGUG | 17 | 12195 |
| HSV1-UL30-3256 | + | CGUGAAACCCGGAAGUG | 17 | 12196 |
| HSV1-UL30-3257 | − | CCGCCGGCAGGCACGUG | 17 | 12197 |
| HSV1-UL30-3258 | + | UCAGCCCGGCGGCCGUG | 17 | 12198 |
| HSV1-UL30-2134 | − | GGGGCGUGUUUCGCGUG | 17 | 5167 |
| HSV1-UL30-3259 | + | CUCGCAGAGAUCUCGUG | 17 | 12199 |
| HSV1-UL30-2230 | − | ACCUGGAGAUCGAGGUG | 17 | 5246 |
| HSV1-UL30-3260 | + | CCAGGGCCCUGGAGGUG | 17 | 12200 |
| HSV1-UL30-3261 | + | UGCUCAGUUCGGCGGUG | 17 | 12201 |
| HSV1-UL30-3262 | − | CAAGAAGUACGAGGGUG | 17 | 12202 |
| HSV1-UL30-3263 | + | GGCCGUCGUAGAUGGUG | 17 | 12203 |
| HSV1-UL30-2607 | + | CGGACACCAGCAGCUUG | 17 | 5611 |
| HSV1-UL30-3264 | + | UGCUGAAGCACAGGUUG | 17 | 12204 |
| HSV1-UL30-3265 | − | ACUUCUCCCACCUGUUG | 17 | 12205 |
| HSV1-UL30-3266 | + | GGCCGCCUCCGGGAAAU | 17 | 12206 |
| HSV1-UL30-3267 | + | GAUGAUGCGCAUGGAAU | 17 | 12207 |
| HSV1-UL30-3268 | − | UUUCGCGUGUGGGACAU | 17 | 12208 |
| HSV1-UL30-3269 | − | GCCAAGAAAAAGUACAU | 17 | 12209 |
| HSV1-UL30-3270 | − | GCGACGGUGACGACCAU | 17 | 12210 |
| HSV1-UL30-3271 | − | UCCUCGUAGACGCCCAU | 17 | 12211 |
| HSV1-UL30-2800 | + | GAUGUCCCGAAGGCCAU | 17 | 5797 |
| HSV1-UL30-3272 | + | GGCCGAGAGCUCCAGAU | 17 | 12212 |
| HSV1-UL30-3273 | + | GUCGGUGAUGCGCCGAU | 17 | 12213 |
| HSV1-UL30-3274 | − | GCGCAACGCGGGGUGAU | 17 | 12214 |
| HSV1-UL30-2668 | + | UCGCACUCGAGUUUGAU | 17 | 5667 |
| HSV1-UL30-2766 | + | GUACCCGGUCACGAACU | 17 | 5764 |
| HSV1-UL30-2854 | + | AAACCGCGCGUGGAACU | 17 | 11794 |
| HSV1-UL30-3275 | − | CAAGGUCGUGUGUAACU | 17 | 12215 |
| HSV1-UL30-3276 | + | GCCCCUAAAUCGCCCCU | 17 | 12216 |
| HSV1-UL30-3277 | + | GGGCGGGCUCGUCCCCU | 17 | 12217 |
| HSV1-UL30-3278 | + | GAACGCCUGCAGUCCCU | 17 | 12218 |
| HSV1-UL30-3279 | + | GGCGUAUGCGGGAUCCU | 17 | 12219 |
| HSV1-UL30-2697 | + | CAGGAGCACGGCCUCCU | 17 | 5695 |
| HSV1-UL30-3280 | − | ACCGUCAUCACGCUCCU | 17 | 12220 |
| HSV1-UL30-3281 | + | GGGAUCCUCGGCCAGCU | 17 | 12221 |
| HSV1-UL30-3282 | + | GGCGAUCAGCAGCAGCU | 17 | 12222 |
| HSV1-UL30-3283 | + | GUAAAUGUCCGUCAGCU | 17 | 12223 |
| HSV1-UL30-3284 | + | GGCUGCGGCCGGACGCU | 17 | 12224 |
| HSV1-UL30-3285 | − | GUACGUCCACGCGCGCU | 17 | 12225 |
| HSV1-UL30-3286 | − | CUCGGCCGUCGCGCGCU | 17 | 12226 |
| HSV1-UL30-3287 | + | CUCCUCCGCGGGGCGCU | 17 | 12227 |
| HSV1-UL30-3288 | + | CGUCUCCCGGGGGCGCU | 17 | 12228 |
| HSV1-UL30-3289 | − | GUCCUCCUGUUUUCGCU | 17 | 12229 |
| HSV1-UL30-3290 | + | CAUCGGGGCCGCCGGCU | 17 | 12230 |
| HSV1-UL30-3291 | + | CAGCAGCUUGCGGGGCU | 17 | 12231 |
| HSV1-UL30-3292 | + | UGGGCCUGGAUGAUGCU | 17 | 12232 |
| HSV1-UL30-3293 | + | CAGACUCUCGGUGAUCU | 17 | 12233 |
| HSV1-UL30-3294 | + | CCUUUUUAACAGACUCU | 17 | 12234 |
| HSV1-UL30-3295 | − | GCCCCAUCUGGAGCUCU | 17 | 12235 |
| HSV1-UL30-2700 | + | CUCCUCGGGGCUGCUCU | 17 | 5698 |
| HSV1-UL30-3296 | + | CUCUACCUCGCGGGUCU | 17 | 12236 |
| HSV1-UL30-3297 | + | GCCGAUGUACUUUUUCU | 17 | 12237 |
| HSV1-UL30-3298 | + | ACGUGAAACCCGGAAGU | 17 | 12238 |
| HSV1-UL30-3299 | + | GGGCCCGGCGGCGUAGU | 17 | 12239 |
| HSV1-UL30-3300 | + | CUCGUAGUAGUACACGU | 17 | 12240 |
| HSV1-UL30-3301 | − | ACCGCCGGCAGGCACGU | 17 | 12241 |
| HSV1-UL30-3302 | + | GUGAUGACGGUCCCCGU | 17 | 12242 |
| HSV1-UL30-3303 | + | GUUCAGGGCGACGCCGU | 17 | 12243 |
| HSV1-UL30-3304 | − | GCCGGGCUGACGGCCGU | 17 | 12244 |
| HSV1-UL30-3305 | + | UCCAGAACCACGGGCGU | 17 | 12245 |
| HSV1-UL30-3306 | + | CAGGUGCGCCACUGCGU | 17 | 12246 |
| HSV1-UL30-3307 | + | GCUCGCAGAGAUCUCGU | 17 | 12247 |
| HSV1-UL30-2599 | + | CGCCGCCCCCAACAGGU | 17 | 5603 |
| HSV1-UL30-3308 | + | GUAAUACACCGUCAGGU | 17 | 12248 |
| HSV1-UL30-3309 | + | CGCCAGCUCGUUCAGGU | 17 | 12249 |
| HSV1-UL30-2229 | − | UACCUGGAGAUCGAGGU | 17 | 5245 |
| HSV1-UL30-3310 | + | UGAGCUUGUAUGCCGGU | 17 | 12250 |
| HSV1-UL30-3311 | − | GCAGGGUUCGGGGCGGU | 17 | 12251 |
| HSV1-UL30-3312 | − | UCAAGAAGUACGAGGGU | 17 | 12252 |
| HSV1-UL30-3313 | + | GAUGUCCCUCUCCGGGU | 17 | 12253 |
| HSV1-UL30-3314 | + | CGCGCCUCCCGGGGGGU | 17 | 12254 |
| HSV1-UL30-3315 | − | CAGGAUUCCCUGCUGGU | 17 | 12255 |
| HSV1-UL30-3316 | + | AAUAAAGCCCUUCUGGU | 17 | 12256 |
| HSV1-UL30-3317 | + | CCCGGGGGCGCGCAUGU | 17 | 12257 |
| HSV1-UL30-2315 | − | UUACUUCUCCCACCUGU | 17 | 5328 |
| HSV1-UL30-3318 | − | CGAAUUCGAGAUGCUGU | 17 | 12258 |
| HSV1-UL30-3319 | − | GGGCGUGUUUCGCGUGU | 17 | 12259 |
| HSV1-UL30-3320 | + | GUGGGGCGCGGCAUUGU | 17 | 12260 |
| HSV1-UL30-3321 | + | GUGGGCCAGGCGCUUGU | 17 | 12261 |
| HSV1-UL30-3322 | + | CGAGAGCUUGAUCUUGU | 17 | 12262 |
| HSV1-UL30-3323 | + | GCUGAAGCACAGGUUGU | 17 | 12263 |
| HSV1-UL30-2777 | + | CUCGUUCAGGUGGGAUU | 17 | 5775 |
| HSV1-UL30-2593 | + | CGGGGGGUGCCACACUU | 17 | 5598 |
| HSV1-UL30-3324 | − | CCCGGGUUCGUCACCUU | 17 | 12264 |
| HSV1-UL30-2089 | − | GCGGCCCCGAUGGCCUU | 17 | 5122 |
| HSV1-UL30-3325 | + | GCUGCGGCCGGACGCUU | 17 | 12265 |
| HSV1-UL30-3326 | + | ACAGCACACGCCCGCUU | 17 | 12266 |
| HSV1-UL30-3327 | + | GUCCUUCAGGACGGCUU | 17 | 12267 |
| HSV1-UL30-3328 | + | CGGGUGUCUGCUCAGUU | 17 | 12268 |
| HSV1-UL30-2283 | − | GAGGGACUGCAGGCGUU | 17 | 5298 |
| HSV1-UL30-2327 | − | CUCCGGACCGCAGGGUU | 17 | 5340 |
| HSV1-UL30-2316 | − | UACUUCUCCCACCUGUU | 17 | 5329 |
| HSV1-UL30-2318 | − | ACAUUCAAGGCCCUGUU | 17 | 5331 |
| HSV1-UL30-2164 | − | ACACCCAGGGGCGAUUU | 17 | 5196 |
| HSV1-UL30-2319 | − | CAUUCAAGGCCCUGUUU | 17 | 5332 |
| HSV1-UL30-3329 | − | UCACCGAGAGUCUGUUAAAA | 20 | 12269 |
| HSV1-UL30-3330 | + | GGGGCCGUACUGUUUCACAA | 20 | 12270 |
| HSV1-UL30-3331 | + | CAGGGCGACGCCGUGGGCAA | 20 | 12271 |
| HSV1-UL30-3332 | − | GGGGGUAAGAUGCUCAUCAA | 20 | 12272 |
| HSV1-UL30-3333 | + | GUCAGCUUGGCCAGCAAGAA | 20 | 12273 |
| HSV1-UL30-3334 | − | CUGCGCCUGGCCGACCAGAA | 20 | 12274 |
| HSV1-UL30-3335 | + | CGGGUGCCCGGCCACCGGAA | 20 | 12275 |
| HSV1-UL30-3336 | − | GACGGGUACGGCCGCAUGAA | 20 | 12276 |
| HSV1-UL30-3337 | + | CCGCGUGCCGUAAACGUGAA | 20 | 12277 |
| HSV1-UL30-3338 | − | CGCAGCAAGAUAAAGGUGAA | 20 | 12278 |
| HSV1-UL30-3339 | − | CCAGAAGCGCAGCAAGAUAA | 20 | 12279 |
| HSV1-UL30-3340 | + | CUUGGCGUUAUUCCCAAACA | 20 | 12280 |
| HSV1-UL30-1780 | − | GCAGUACUUUUACAUGAACA | 20 | 4830 |
| HSV1-UL30-3341 | − | CCACGGCGUCGCCCUGAACA | 20 | 12281 |
| HSV1-UL30-3342 | + | CGGGGCCGUACUGUUUCACA | 20 | 12282 |
| HSV1-UL30-3343 | − | GCGCAUCAUCUACGGGGACA | 20 | 12283 |
| HSV1-UL30-3344 | − | CAAGCUGACGGACAUUUACA | 20 | 12284 |
| HSV1-UL30-3345 | + | GCUGUCGAAUUCCAGAACCA | 20 | 12285 |
| HSV1-UL30-2476 | + | GGCAAAGUCGAACACCACCA | 20 | 5482 |
| HSV1-UL30-3346 | + | GUAAAACAGCAGGUCGACCA | 20 | 12286 |
| HSV1-UL30-1932 | − | GGCAGGCACGUGGGGUACCA | 20 | 4965 |
| HSV1-UL30-3347 | − | UUUAUUCUGCCGGACACCCA | 20 | 12287 |
| HSV1-UL30-2019 | − | AGCUAGACGCCGCCGCCCCA | 20 | 5052 |
| HSV1-UL30-3348 | + | GCUCGCCAUCUUGUCGCCCA | 20 | 12288 |
| HSV1-UL30-3349 | − | CCCGCAUACGCCAUUGCCCA | 20 | 12289 |
| HSV1-UL30-3350 | − | CCUGAACGAGCUGGCGGCCA | 20 | 12290 |
| HSV1-UL30-3351 | + | CUUCAGGACGGCUUCGGCCA | 20 | 12291 |
| HSV1-UL30-3352 | − | CGUGGGGUACCAGGGGGCCA | 20 | 12292 |
| HSV1-UL30-3353 | − | GUUUAUCAACCGCACCUCCA | 20 | 12293 |
| HSV1-UL30-3354 | + | AAACAGGAGGACGUGCUCCA | 20 | 12294 |
| HSV1-UL30-2510 | + | CAUGCGGCCGUACCCGUCCA | 20 | 5516 |
| HSV1-UL30-2496 | + | AAACAGCUGGCCCACCAGCA | 20 | 5502 |
| HSV1-UL30-3355 | − | GGGUUCACGGGAGUGCAGCA | 20 | 12295 |
| HSV1-UL30-3356 | + | CUGCUGCUUGUCCAGGAGCA | 20 | 12296 |
| HSV1-UL30-3357 | − | CCGCGCGGCUCCGGACCGCA | 20 | 12297 |
| HSV1-UL30-3358 | − | ACGAGAUCUCUGCGAGCGCA | 20 | 12298 |
| HSV1-UL30-3359 | + | CGCGCCCGGGGACUCGCGCA | 20 | 12299 |
| HSV1-UL30-2427 | + | GUCCCCGUAGAUGAUGCGCA | 20 | 5433 |
| HSV1-UL30-3360 | + | CGAGCGGAUCUGCUUUCGCA | 20 | 12300 |
| HSV1-UL30-3361 | + | GUCGCGGCAACGUGCAGGCA | 20 | 12301 |
| HSV1-UL30-3362 | − | CAAGAUAAAGGUGAACGGCA | 20 | 12302 |
| HSV1-UL30-3363 | + | GCGCUUGGCCGGGGAGGGCA | 20 | 12303 |
| HSV1-UL30-3364 | − | GGCGCACCUGGAGGCGGGCA | 20 | 12304 |
| HSV1-UL30-3365 | + | CGCCUGCAGUCCCUCGGGCA | 20 | 12305 |
| HSV1-UL30-3366 | − | GUGCUUCGAUAUCGAAUGCA | 20 | 12306 |
| HSV1-UL30-3367 | − | CAAGCAGCAGGCCGCCAUCA | 20 | 12307 |
| HSV1-UL30-3368 | − | CGCGCAGGUCCCGUCCAUCA | 20 | 12308 |
| HSV1-UL30-3369 | − | CGGGGGUAAGAUGCUCAUCA | 20 | 12309 |
| HSV1-UL30-2467 | + | CGCCACUGCGUCGGCCCUCA | 20 | 5473 |
| HSV1-UL30-3370 | − | UGUGCUGUGCCGCGGCCUCA | 20 | 12310 |
| HSV1-UL30-3371 | − | GACGGUGUAUUACAAGCUCA | 20 | 12311 |
| HSV1-UL30-3372 | − | GCGACGGCUGUUCUUCGUCA | 20 | 12312 |
| HSV1-UL30-3373 | + | GAAACCCGGAAGUGGGGUCA | 20 | 12313 |
| HSV1-UL30-3374 | − | GGCGGCGUGCGUGACAUUCA | 20 | 12314 |
| HSV1-UL30-1964 | − | UAACUCGGUGUACGGGUUCA | 20 | 4997 |
| HSV1-UL30-3375 | + | GAAGUAAUAGUCCGUGUUCA | 20 | 12315 |
| HSV1-UL30-1205 | + | GCCGCGGCACAGCACAAAGA | 20 | 4143 |
| HSV1-UL30-3376 | − | GACGGCCGUGGGCGACAAGA | 20 | 12316 |
| HSV1-UL30-3377 | + | CGUCAGCUUGGCCAGCAAGA | 20 | 12317 |
| HSV1-UL30-3378 | − | CGUCCUGAAGGACAAGAAGA | 20 | 12318 |
| HSV1-UL30-3379 | − | GCUGCGCCUGGCCGACCAGA | 20 | 12319 |
| HSV1-UL30-2493 | + | CGACGGCCGAGAGCUCCAGA | 20 | 5499 |
| HSV1-UL30-3380 | − | GACCCGCGAGGUAGAGGAGA | 20 | 12320 |
| HSV1-UL30-3381 | − | GCGCAUCACCGACCCGGAGA | 20 | 12321 |
| HSV1-UL30-3382 | + | CGCGGCGGCCGCUCCGGAGA | 20 | 12322 |
| HSV1-UL30-3383 | + | UGUUCCGGCCCGGUUUGAGA | 20 | 12323 |
| HSV1-UL30-3384 | + | GAUCUGCUGGCCGUCGUAGA | 20 | 12324 |
| HSV1-UL30-3385 | − | AUCACCCGCACCAUCUACGA | 20 | 12325 |
| HSV1-UL30-3386 | − | CCGGCCAUCAAGAAGUACGA | 20 | 12326 |
| HSV1-UL30-1772 | − | UAUGGACGCCAUCACACCGA | 20 | 4822 |
| HSV1-UL30-467 | − | AGCCCAGCCGGCGGCCCCGA | 20 | 3405 |
| HSV1-UL30-3387 | − | CUGGCGCGACCCCUGCCCGA | 20 | 12327 |
| HSV1-UL30-3388 | + | GACGUCGCUGGAUGUCCCGA | 20 | 12328 |
| HSV1-UL30-3389 | + | UUUGAGACGGUACCAGCCGA | 20 | 12329 |
| HSV1-UL30-3390 | + | CCGGGUCGGUGAUGCGCCGA | 20 | 12330 |
| HSV1-UL30-3391 | + | GAGCAGCAUCUCGCGGCCGA | 20 | 12331 |
| HSV1-UL30-3392 | − | GUGCCUGCACGUUGCCGCGA | 20 | 12332 |
| HSV1-UL30-3393 | + | AAUACCCGCCAAGCGCGCGA | 20 | 12333 |
| HSV1-UL30-3394 | + | CCCGGGGGGUCGGCAGGCGA | 20 | 12334 |
| HSV1-UL30-3395 | − | AGAUCGAGGUGGGGGGGCGA | 20 | 12335 |
| HSV1-UL30-1813 | − | GCGGACAACCUGGCCAUCGA | 20 | 4863 |
| HSV1-UL30-3396 | + | GUCGCUCAUGCCCCCCUCGA | 20 | 12336 |
| HSV1-UL30-3397 | + | AUCGGCCAGGAGCUGUUCGA | 20 | 12337 |
| HSV1-UL30-3398 | + | CUUCUUCUUGUCCUUCAGGA | 20 | 12338 |
| HSV1-UL30-3399 | + | CCGAUGGGCGUCUACGAGGA | 20 | 12339 |
| HSV1-UL30-581 | − | GACGAGGACGAACGCGAGGA | 20 | 3519 |
| HSV1-UL30-574 | − | GAGGAGCGGCCAGAGGAGGA | 20 | 3512 |
| HSV1-UL30-590 | − | GGGGGCGAGCGGGAGCCGGA | 20 | 3528 |
| HSV1-UL30-3400 | − | CUCCUGGGCCUGACUCCGGA | 20 | 12340 |
| HSV1-UL30-3401 | + | GGCGGCGUCUAGCUCGCGGA | 20 | 12341 |
| HSV1-UL30-3402 | + | CGGGGGCGCUUGGCCGGGGA | 20 | 12342 |
| HSV1-UL30-2391 | + | GGGAUCCGGUCCUUGAUGGA | 20 | 5398 |
| HSV1-UL30-3403 | − | AUUUACAAGGUCCCCCUGGA | 20 | 12343 |
| HSV1-UL30-3404 | + | CUGUUUCACAAGGGUCAUGA | 20 | 12344 |
| HSV1-UL30-3405 | + | CAGGCCCAGGAGCGUGAUGA | 20 | 12345 |
| HSV1-UL30-3406 | − | CAAGCGCCUGGCCCACCUGA | 20 | 12346 |
| HSV1-UL30-3407 | − | CUUCAGCACGCUCUCCCUGA | 20 | 12347 |
| HSV1-UL30-3408 | − | CGUGGCCGAAGCCGUCCUGA | 20 | 12348 |
| HSV1-UL30-3409 | − | CUUCUUGCUGGCCAAGCUGA | 20 | 12349 |
| HSV1-UL30-3410 | − | CCUCACGGCCGCCGGGCUGA | 20 | 12350 |
| HSV1-UL30-3411 | + | GACGGUCCCCGUCGGUGUGA | 20 | 12351 |
| HSV1-UL30-3412 | + | CGAGUUACACACGACCUUGA | 20 | 12352 |
| HSV1-UL30-3413 | + | GUACGGGAUCCGGUCCUUGA | 20 | 12353 |
| HSV1-UL30-3414 | + | CCCACCCUCGUACUUCUUGA | 20 | 12354 |
| HSV1-UL30-2418 | + | CUUUUCGCACUCGAGUUUGA | 20 | 5425 |
| HSV1-UL30-3415 | + | UAGAUGAUGCGCAUGGAAUA | 20 | 12355 |
| HSV1-UL30-3416 | − | GGCGGUGGGUGCCGGCGCUA | 20 | 12356 |
| HSV1-UL30-1975 | − | UAUUCCAUGCGCAUCAUCUA | 20 | 5008 |
| HSV1-UL30-1985 | − | AAGUACAUCGGCGUCAUCUA | 20 | 5018 |
| HSV1-UL30-3417 | − | AUGACCCUUGUGAAACAGUA | 20 | 12357 |
| HSV1-UL30-2388 | + | GUCUGGGCCACGAUCACGUA | 20 | 5395 |
| HSV1-UL30-3418 | − | AAGGUCCCCCUGGACGGGUA | 20 | 12358 |
| HSV1-UL30-1858 | − | AUGGUGAACAUCGACAUGUA | 20 | 4908 |
| HSV1-UL30-3419 | − | CGACGUCGAGUUUAACUGUA | 20 | 12359 |
| HSV1-UL30-3420 | − | GUCGUGUGUAACUCGGUGUA | 20 | 12360 |
| HSV1-UL30-3421 | − | GGACACCCAGGGGCGAUUUA | 20 | 12361 |
| HSV1-UL30-3422 | − | CGGGUGGCCGUUCACGUUUA | 20 | 12362 |
| HSV1-UL30-2855 | − | CCAGUUCCACGCGCGGUUUA | 20 | 11795 |
| HSV1-UL30-1345 | + | CGCAGGAACCGAGCGAAAAC | 20 | 4283 |
| HSV1-UL30-3423 | + | UCUUGGCGUUAUUCCCAAAC | 20 | 12363 |
| HSV1-UL30-3424 | − | CGGCUGGUACCGUCUCAAAC | 20 | 12364 |
| HSV1-UL30-3425 | + | UCACGCACGCCGCCCCCAAC | 20 | 12365 |
| HSV1-UL30-2856 | + | CCAUAAACCGCGCGUGGAAC | 20 | 11796 |
| HSV1-UL30-3426 | + | CGGGGUUGUCCAGGAUGAAC | 20 | 12366 |
| HSV1-UL30-3427 | + | CUGUCGAAUUCCAGAACCAC | 20 | 12367 |
| HSV1-UL30-3428 | + | GCAAAGUCGAACACCACCAC | 20 | 12368 |
| HSV1-UL30-3429 | − | GCCUGACUCCGGAAGGCCAC | 20 | 12369 |
| HSV1-UL30-2545 | + | UCCUCCGGGUGCCCGGCCAC | 20 | 5550 |
| HSV1-UL30-3430 | + | GGGAGAGCGUGCUGAAGCAC | 20 | 12370 |
| HSV1-UL30-3431 | + | CCGGGCAGAAGUUGUCGCAC | 20 | 12371 |
| HSV1-UL30-1965 | − | AACUCGGUGUACGGGUUCAC | 20 | 4998 |
| HSV1-UL30-3432 | + | GGACAGGUCGUAGAGCAGAC | 20 | 12372 |
| HSV1-UL30-1773 | − | AUGGACGCCAUCACACCGAC | 20 | 4823 |
| HSV1-UL30-3433 | − | UGAACAAGGAGGAGGUCGAC | 20 | 12373 |
| HSV1-UL30-3434 | − | ACAACAUCAUCAACUUCGAC | 20 | 12374 |
| HSV1-UL30-3435 | − | AGGUCCCGUCCAUCAAGGAC | 20 | 12375 |
| HSV1-UL30-3436 | − | UCAGCAUCCUCCUGCGGGAC | 20 | 12376 |
| HSV1-UL30-3437 | + | GGAUCCGGUCCUUGAUGGAC | 20 | 12377 |
| HSV1-UL30-3438 | − | UUUACAAGGUCCCCCUGGAC | 20 | 12378 |
| HSV1-UL30-3439 | + | GCUCCAGGGCGGUGGUGGAC | 20 | 12379 |
| HSV1-UL30-3440 | − | UACGGCCCCGAGUUCGUGAC | 20 | 12380 |
| HSV1-UL30-3441 | − | GAUCGGCGAGUACUGCAUAC | 20 | 12381 |
| HSV1-UL30-3442 | − | GGGGGGCAUGAGCGACCUAC | 20 | 12382 |
| HSV1-UL30-1976 | − | AUUCCAUGCGCAUCAUCUAC | 20 | 5009 |
| HSV1-UL30-1986 | − | AGUACAUCGGCGUCAUCUAC | 20 | 5019 |
| HSV1-UL30-3443 | + | UCUGGGCCACGAUCACGUAC | 20 | 12383 |
| HSV1-UL30-3444 | + | CCUGGAUGAUGCUGGGGUAC | 20 | 12384 |
| HSV1-UL30-3445 | − | UGGUGAACAUCGACAUGUAC | 20 | 12385 |
| HSV1-UL30-3446 | − | UCGUGUGUAACUCGGUGUAC | 20 | 12386 |
| HSV1-UL30-3447 | − | GGCUGGUACCGUCUCAAACC | 20 | 12387 |
| HSV1-UL30-2479 | + | CACGGGGUUCACGUGAAACC | 20 | 5485 |
| HSV1-UL30-3448 | − | UAACUGUACGGCGGACAACC | 20 | 12388 |
| HSV1-UL30-2557 | + | CCAGCCGAAGGUGACGAACC | 20 | 5562 |
| HSV1-UL30-3449 | + | GGGGUUGUCCAGGAUGAACC | 20 | 12389 |
| HSV1-UL30-3450 | − | GUGGGGUCGACGCCACCACC | 20 | 12390 |
| HSV1-UL30-3451 | − | CCUGACUCCGGAAGGCCACC | 20 | 12391 |
| HSV1-UL30-3452 | + | CGUAAACGUGAACGGCCACC | 20 | 12392 |
| HSV1-UL30-1939 | − | GGCCGACGCAGUGGCGCACC | 20 | 4972 |
| HSV1-UL30-1829 | − | CUUUCCGGUGGCCGGGCACC | 20 | 4879 |
| HSV1-UL30-2003 | − | CCAUCGGCGCAUCACCGACC | 20 | 5036 |
| HSV1-UL30-3453 | + | CGUAAAACAGCAGGUCGACC | 20 | 12393 |
| HSV1-UL30-495 | − | GGCCGGGCACCCGGAGGACC | 20 | 3433 |
| HSV1-UL30-3454 | + | GACAGGAUAUCUGGAUGACC | 20 | 12394 |
| HSV1-UL30-3455 | − | ACGGCCCCGAGUUCGUGACC | 20 | 12395 |
| HSV1-UL30-1943 | − | GGAGGCGGGCAAGGACUACC | 20 | 4976 |
| HSV1-UL30-1931 | − | CGGCAGGCACGUGGGGUACC | 20 | 4964 |
| HSV1-UL30-3456 | + | GAAGUUGAUGAUGUUGUACC | 20 | 12396 |
| HSV1-UL30-3457 | − | CGGUUCAUCCUGGACAACCC | 20 | 12397 |
| HSV1-UL30-3458 | + | CAGCCGAAGGUGACGAACCC | 20 | 12398 |
| HSV1-UL30-1880 | − | CUUUAUUCUGCCGGACACCC | 20 | 4929 |
| HSV1-UL30-3459 | + | GGAAGUGGGGUCAAGGACCC | 20 | 12399 |
| HSV1-UL30-3460 | − | GGUUCAUCCUGGACAACCCC | 20 | 12400 |
| HSV1-UL30-3461 | − | UCCCGAAGUGUGGCACCCCC | 20 | 12401 |
| HSV1-UL30-2025 | − | GCCGUCGCCUGCCGACCCCC | 20 | 5058 |
| HSV1-UL30-2026 | − | CCGUCGCCUGCCGACCCCCC | 20 | 5059 |
| HSV1-UL30-3462 | + | ACGCUUGGGCGCCUCCCCCC | 20 | 12402 |
| HSV1-UL30-2023 | − | CUCCCCGGCCAAGCGCCCCC | 20 | 5056 |
| HSV1-UL30-3463 | − | CGGCCGACAUGCGCGCCCCC | 20 | 12403 |
| HSV1-UL30-3464 | + | GGUCAAGGACCCUGGCCCCC | 20 | 12404 |
| HSV1-UL30-3465 | − | GGACAUUUACAAGGUCCCCC | 20 | 12405 |
| HSV1-UL30-2018 | − | GAGCUAGACGCCGCCGCCCC | 20 | 5051 |
| HSV1-UL30-2022 | − | CCUCCCCGGCCAAGCGCCCC | 20 | 5055 |
| HSV1-UL30-3466 | − | GCGGCCGACAUGCGCGCCCC | 20 | 12406 |
| HSV1-UL30-3467 | + | CGGCGCCCCUAAAUCGCCCC | 20 | 12407 |
| HSV1-UL30-3468 | + | CACGGGCGUGGGCAGGCCCC | 20 | 12408 |
| HSV1-UL30-3469 | − | GCGGCCCUGCGCGAGUCCCC | 20 | 12409 |
| HSV1-UL30-2381 | + | GGGGGGGCGGGCUCGUCCCC | 20 | 5388 |
| HSV1-UL30-1892 | − | CAAGCGUCCGGCCGCAGCCC | 20 | 4941 |
| HSV1-UL30-1315 | + | CCCACACGCGAAACACGCCC | 20 | 4253 |
| HSV1-UL30-1832 | − | CGACCUGUCCACCACCGCCC | 20 | 4882 |
| HSV1-UL30-2574 | + | UGCCGCGGAACGACGCGCCC | 20 | 5579 |
| HSV1-UL30-2583 | + | GGCCUUCCGGAGUCAGGCCC | 20 | 5588 |
| HSV1-UL30-2413 | + | CAGCAGGUCGACCAGGGCCC | 20 | 5420 |
| HSV1-UL30-3470 | − | CAACCGCACCUCCAGGGCCC | 20 | 12410 |
| HSV1-UL30-2431 | + | AUGCGCAUGGAAUAGGGCCC | 20 | 5437 |
| HSV1-UL30-3471 | − | CCCCGCGGCCCUGCCCUCCC | 20 | 12411 |
| HSV1-UL30-2362 | + | GGGGCUUGGACGCGCCUCCC | 20 | 5374 |
| HSV1-UL30-3472 | + | UGGCCGCUCCUCGUCCUCCC | 20 | 12412 |
| HSV1-UL30-2366 | + | GGCAGGCGACGGCGUCUCCC | 20 | 5378 |
| HSV1-UL30-3473 | − | CGCGGCCCUGCGCGAGUCCC | 20 | 12413 |
| HSV1-UL30-1891 | − | CCAAGCGUCCGGCCGCAGCC | 20 | 4940 |
| HSV1-UL30-3474 | + | GUCGCCCACGGCCGUCAGCC | 20 | 12414 |
| HSV1-UL30-3475 | − | UCCCCGCCUACUACGCCGCC | 20 | 12415 |
| HSV1-UL30-3476 | − | GCCGCGGCCUCACGGCCGCC | 20 | 12416 |
| HSV1-UL30-3477 | − | CGCGUACACCAACAAGCGCC | 20 | 12417 |
| HSV1-UL30-2573 | + | AUGCCGCGGAACGACGCGCC | 20 | 5578 |
| HSV1-UL30-1885 | − | AGGGGCGAUUUAGGGGCGCC | 20 | 4934 |
| HSV1-UL30-3478 | − | CUUUACGUGCCUGCUGCGCC | 20 | 12418 |
| HSV1-UL30-3479 | − | GUACGGCCGCAUGAACGGCC | 20 | 12419 |
| HSV1-UL30-3480 | + | GCUAGCGUGUUGUUCCGGCC | 20 | 12420 |
| HSV1-UL30-1837 | − | ACCUGAACGAGCUGGCGGCC | 20 | 4887 |
| HSV1-UL30-2436 | + | CCGCCUCCGGGAAAUCGGCC | 20 | 5442 |
| HSV1-UL30-3481 | + | UAAAGCCCUUCUGGUCGGCC | 20 | 12421 |
| HSV1-UL30-2430 | + | GAUGCGCAUGGAAUAGGGCC | 20 | 5436 |
| HSV1-UL30-3482 | + | CACCCCGCGUUGCGCGGGCC | 20 | 12422 |
| HSV1-UL30-3483 | − | ACGUGGGGUACCAGGGGGCC | 20 | 12423 |
| HSV1-UL30-3484 | + | AAUACACCGUCAGGUGGGCC | 20 | 12424 |
| HSV1-UL30-3485 | + | UGAAGCACAGGUUGUGGGCC | 20 | 12425 |
| HSV1-UL30-3486 | + | UCAUGCCCCCCUCGAUGGCC | 20 | 12426 |
| HSV1-UL30-3487 | + | CCUCGUACUUCUUGAUGGCC | 20 | 12427 |
| HSV1-UL30-3488 | − | AGCUGGCCUUUCCGGUGGCC | 20 | 12428 |
| HSV1-UL30-2369 | + | UCUCCCGGGGGCGCUUGGCC | 20 | 5381 |
| HSV1-UL30-3489 | − | CCUGUGCGACAACUUCUGCC | 20 | 12429 |
| HSV1-UL30-3490 | + | GACCAGGUCCUCCGGGUGCC | 20 | 12430 |
| HSV1-UL30-3491 | − | CGACCCGGAGAGGGACAUCC | 20 | 12431 |
| HSV1-UL30-3492 | − | CCUGUACCCCAGCAUCAUCC | 20 | 12432 |
| HSV1-UL30-3493 | − | CGCCACCACCCGGUUCAUCC | 20 | 12433 |
| HSV1-UL30-3494 | − | CGUUUAUCAACCGCACCUCC | 20 | 12434 |
| HSV1-UL30-3495 | + | GGUAGUCCUUGCCCGCCUCC | 20 | 12435 |
| HSV1-UL30-2434 | + | CGCGCAUGUCGGCCGCCUCC | 20 | 5440 |
| HSV1-UL30-2361 | + | CGGGGCUUGGACGCGCCUCC | 20 | 5373 |
| HSV1-UL30-3496 | + | CUGGCCGCUCCUCGUCCUCC | 20 | 12436 |
| HSV1-UL30-3497 | + | UCUGGAUGACCAGGUCCUCC | 20 | 12437 |
| HSV1-UL30-3498 | − | GGCGGCCUUCGAACAGCUCC | 20 | 12438 |
| HSV1-UL30-3499 | − | GGGGACCGUCAUCACGCUCC | 20 | 12439 |
| HSV1-UL30-3500 | + | AAAACAGGAGGACGUGCUCC | 20 | 12440 |
| HSV1-UL30-3501 | − | CCCCGAGGAGGCCGUGCUCC | 20 | 12441 |
| HSV1-UL30-3502 | + | GCCCCCCCACCUCGAUCUCC | 20 | 12442 |
| HSV1-UL30-3503 | + | AGUCCUGGAUGUCCCUCUCC | 20 | 12443 |
| HSV1-UL30-2365 | + | CGGCAGGCGACGGCGUCUCC | 20 | 5377 |
| HSV1-UL30-3504 | + | CGGCGGUGAGGACAAAGUCC | 20 | 12444 |
| HSV1-UL30-2509 | + | UCAUGCGGCCGUACCCGUCC | 20 | 5515 |
| HSV1-UL30-2341 | + | GCCGCGCGGCCACGUCGUCC | 20 | 5354 |
| HSV1-UL30-2446 | + | UGGCGGCCUGCUGCUUGUCC | 20 | 5452 |
| HSV1-UL30-3505 | + | UGACGAACCCGGGGUUGUCC | 20 | 12445 |
| HSV1-UL30-3506 | − | GGGUCCUUGACCCCACUUCC | 20 | 12446 |
| HSV1-UL30-1972 | − | ACAGCUCCUGGCCGAUUUCC | 20 | 5005 |
| HSV1-UL30-3507 | − | ACCGCGUCUACGUCCGAAGC | 20 | 12447 |
| HSV1-UL30-3508 | + | GCAAAAACUUAAAAAACAGC | 20 | 12448 |
| HSV1-UL30-3509 | + | CGGUAUCGUCGUAAAACAGC | 20 | 12449 |
| HSV1-UL30-2495 | + | AAAACAGCUGGCCCACCAGC | 20 | 5501 |
| HSV1-UL30-3510 | − | GAACAACACGCUAGCCCAGC | 20 | 12450 |
| HSV1-UL30-3511 | − | CGUGCUCCUGGACAAGCAGC | 20 | 12451 |
| HSV1-UL30-3512 | + | UCUGGUCGGCCAGGCGCAGC | 20 | 12452 |
| HSV1-UL30-3513 | + | UAGACGCGGUAAAACAGAGC | 20 | 12453 |
| HSV1-UL30-3514 | − | CGAAUCCCACCUGAACGAGC | 20 | 12454 |
| HSV1-UL30-488 | − | GGCGGGGGGGGAGGACGAGC | 20 | 3426 |
| HSV1-UL30-3515 | − | CAAGCUGCUGGUGUCCGAGC | 20 | 12455 |
| HSV1-UL30-587 | − | CGAGGAGGGCGGGGGCGAGC | 20 | 3525 |
| HSV1-UL30-588 | − | GGGCGGGGGCGAGCGGGAGC | 20 | 3526 |
| HSV1-UL30-535 | − | CCGCCGGGCCCGCGCAACGC | 20 | 3473 |
| HSV1-UL30-593 | − | GAGGGCGCGCGGGAGACCGC | 20 | 3531 |
| HSV1-UL30-3516 | − | GCCGCGCGGCUCCGGACCGC | 20 | 12456 |
| HSV1-UL30-2457 | + | GCAUGGCGAGCCAGUCCCGC | 20 | 5463 |
| HSV1-UL30-3517 | − | AUCCCCGCCUACUACGCCGC | 20 | 12457 |
| HSV1-UL30-3518 | − | UGCCGCGGCCUCACGGCCGC | 20 | 12458 |
| HSV1-UL30-1125 | + | GCCGGGGAGGGCAGGGCCGC | 20 | 4063 |
| HSV1-UL30-3519 | + | CCGAAGGCCAUCGGGGCCGC | 20 | 12459 |
| HSV1-UL30-3520 | + | CGCGCCAGCCACUCCUCCGC | 20 | 12460 |
| HSV1-UL30-3521 | + | AGUUUCCUCCGCCGUAGCGC | 20 | 12461 |
| HSV1-UL30-3522 | − | GCGAGUACGUCCACGCGCGC | 20 | 12462 |
| HSV1-UL30-3523 | + | GCUUGUUGGUGUACGCGCGC | 20 | 12463 |
| HSV1-UL30-3524 | − | GCUCAUGGCCCGCCGCGCGC | 20 | 12464 |
| HSV1-UL30-592 | − | GCGGGAGCCGGAGGGCGCGC | 20 | 3530 |
| HSV1-UL30-3525 | + | ACGCGCCCGGGGACUCGCGC | 20 | 12465 |
| HSV1-UL30-1884 | − | CAGGGGCGAUUUAGGGGCGC | 20 | 4933 |
| HSV1-UL30-3526 | + | CCGAUCACCCCGCGUUGCGC | 20 | 12466 |
| HSV1-UL30-3527 | + | GCGCGCGUGGACGUACUCGC | 20 | 12467 |
| HSV1-UL30-3528 | + | GACCGUCUCCUCUACCUCGC | 20 | 12468 |
| HSV1-UL30-3529 | + | ACAGUUAAACUCGACGUCGC | 20 | 12469 |
| HSV1-UL30-2532 | + | GUGGGAUUCGGGGAGGUCGC | 20 | 5538 |
| HSV1-UL30-1819 | − | UUCGAUAUCGAAUGCAAGGC | 20 | 4869 |
| HSV1-UL30-3530 | + | GAUGAUGCUGGGGUACAGGC | 20 | 12470 |
| HSV1-UL30-3531 | − | GCAGUGGCGCACCUGGAGGC | 20 | 12471 |
| HSV1-UL30-2500 | + | GGCCCGGCGGCGUAGUAGGC | 20 | 5506 |
| HSV1-UL30-1850 | − | GGUACGGCCGCAUGAACGGC | 20 | 4900 |
| HSV1-UL30-2442 | + | CGGCAACGUGCAGGCACGGC | 20 | 5448 |
| HSV1-UL30-594 | − | GCGCGCGGGAGACCGCCGGC | 20 | 3532 |
| HSV1-UL30-3532 | + | AGGCCAUCGGGGCCGCCGGC | 20 | 12472 |
| HSV1-UL30-3533 | + | GGACGGGACCUGCGCGCGGC | 20 | 12473 |
| HSV1-UL30-3534 | − | AGAGGAGACGGUCGCGCGGC | 20 | 12474 |
| HSV1-UL30-3535 | + | UCGUCCUCCCGGGCUGCGGC | 20 | 12475 |
| HSV1-UL30-3536 | + | GCGCCUCCCGGGGGGUCGGC | 20 | 12476 |
| HSV1-UL30-3537 | − | CCGGGUUCGUCACCUUCGGC | 20 | 12477 |
| HSV1-UL30-583 | − | AGGACGAACGCGAGGAGGGC | 20 | 3521 |
| HSV1-UL30-3538 | + | GGCGCUUGGCCGGGGAGGGC | 20 | 12478 |
| HSV1-UL30-1805 | − | GGUACCGUCUCAAACCGGGC | 20 | 4855 |
| HSV1-UL30-2406 | + | ACGCCUGCAGUCCCUCGGGC | 20 | 5413 |
| HSV1-UL30-1132 | + | GGCAGGGCCGCGGGGGGGGC | 20 | 4070 |
| HSV1-UL30-3539 | + | CCAGAACCACGGGCGUGGGC | 20 | 12479 |
| HSV1-UL30-3540 | + | CCCUCGUACUUCUUGAUGGC | 20 | 12480 |
| HSV1-UL30-3541 | − | GCGCCCCGCGGAGGAGUGGC | 20 | 12481 |
| HSV1-UL30-3542 | − | GAGCUGGCCUUUCCGGUGGC | 20 | 12482 |
| HSV1-UL30-3543 | − | UCGGCCGUCGCGCGCUUGGC | 20 | 12483 |
| HSV1-UL30-2368 | + | GUCUCCCGGGGGCGCUUGGC | 20 | 5380 |
| HSV1-UL30-2473 | + | GUUGUGGGCCUGGAUGAUGC | 20 | 5479 |
| HSV1-UL30-3544 | + | CCGUGGGCAAUGGCGUAUGC | 20 | 12484 |
| HSV1-UL30-3545 | + | AAGCACAUGAGCUUGUAUGC | 20 | 12485 |
| HSV1-UL30-3546 | − | ACCCCUGCCCGAGGGACUGC | 20 | 12486 |
| HSV1-UL30-3547 | − | CUGCAUACAGGAUUCCCUGC | 20 | 12487 |
| HSV1-UL30-3548 | + | CUGGUACCCCACGUGCCUGC | 20 | 12488 |
| HSV1-UL30-3549 | − | CCUCCUCAGCAUCCUCCUGC | 20 | 12489 |
| HSV1-UL30-3550 | − | GUCCAAGCCCCGCAAGCUGC | 20 | 12490 |
| HSV1-UL30-3551 | + | ACGUAAAGACGCGGAUCUGC | 20 | 12491 |
| HSV1-UL30-3552 | − | CCAGAAGGGCUUUAUUCUGC | 20 | 12492 |
| HSV1-UL30-3553 | + | UCACCGUCGCGGCAACGUGC | 20 | 12493 |
| HSV1-UL30-3554 | − | GGGUUCGGGGCGGUGGGUGC | 20 | 12494 |
| HSV1-UL30-3555 | + | CUGGCCGUCGUAGAUGGUGC | 20 | 12495 |
| HSV1-UL30-3556 | + | CUCGGACACCAGCAGCUUGC | 20 | 12496 |
| HSV1-UL30-3557 | − | CUUCGACUGGCCCUUCUUGC | 20 | 12497 |
| HSV1-UL30-1874 | − | UUUUAAGUUUUUGCCCCAUC | 20 | 4923 |
| HSV1-UL30-3558 | + | UGGAUGUCCCGAAGGCCAUC | 20 | 12498 |
| HSV1-UL30-3559 | + | CCACGAUCACGUACGGGAUC | 20 | 12499 |
| HSV1-UL30-3560 | − | GCUCAUCAAGGGCGUGGAUC | 20 | 12500 |
| HSV1-UL30-3561 | + | CGUAGAGCAGACAGGAUAUC | 20 | 12501 |
| HSV1-UL30-3562 | + | UUGUACCCGGUCACGAACUC | 20 | 12502 |
| HSV1-UL30-1776 | − | CACGCUCCUGGGCCUGACUC | 20 | 4826 |
| HSV1-UL30-3563 | + | GCGGUCUCCCGCGCGCCCUC | 20 | 12503 |
| HSV1-UL30-2466 | + | GCGCCACUGCGUCGGCCCUC | 20 | 5472 |
| HSV1-UL30-3564 | + | CCGAACGCCUGCAGUCCCUC | 20 | 12504 |
| HSV1-UL30-2433 | + | GCGCGCAUGUCGGCCGCCUC | 20 | 5439 |
| HSV1-UL30-3565 | + | UCCAGGAGCACGGCCUCCUC | 20 | 12505 |
| HSV1-UL30-3566 | + | UCGUCCUCCCCCUCCUCCUC | 20 | 12506 |
| HSV1-UL30-3567 | + | AUCUGGAUGACCAGGUCCUC | 20 | 12507 |
| HSV1-UL30-3568 | + | CGGGGAUGUCGCGAUAGCUC | 20 | 12508 |
| HSV1-UL30-2410 | + | GGCUAACGCGGCGGCCGCUC | 20 | 5417 |
| HSV1-UL30-3569 | − | ACGACGUGGCCGCGCGGCUC | 20 | 12509 |
| HSV1-UL30-3570 | + | UGCGCUUCUGGAAGUGGCUC | 20 | 12510 |
| HSV1-UL30-2450 | + | CGGCCUCCUCGGGGCUGCUC | 20 | 5456 |
| HSV1-UL30-3571 | + | AAGUCCUGGAUGUCCCUCUC | 20 | 12511 |
| HSV1-UL30-1991 | − | UUUUACGACGAUACCGUCUC | 20 | 5024 |
| HSV1-UL30-3572 | + | CCCGGUGGCCUUCCGGAGUC | 20 | 12512 |
| HSV1-UL30-3573 | + | UGAGCUUGUAAUACACCGUC | 20 | 12513 |
| HSV1-UL30-3574 | − | GGGGGAGGCGCCCAAGCGUC | 20 | 12514 |
| HSV1-UL30-2340 | + | AGCCGCGCGGCCACGUCGUC | 20 | 5353 |
| HSV1-UL30-2338 | + | CCGCCCCGAACCCUGCGGUC | 20 | 5351 |
| HSV1-UL30-3575 | + | UCUCCUCUACCUCGCGGGUC | 20 | 12515 |
| HSV1-UL30-3576 | + | CUAAAUCGCCCCUGGGUGUC | 20 | 12516 |
| HSV1-UL30-2529 | + | AGCUCGUUCAGGUGGGAUUC | 20 | 5535 |
| HSV1-UL30-2345 | + | UCCGGGGGGUGCCACACUUC | 20 | 5358 |
| HSV1-UL30-3577 | − | AGGGUCCUUGACCCCACUUC | 20 | 12517 |
| HSV1-UL30-3578 | + | CCGGCAGAAUAAAGCCCUUC | 20 | 12518 |
| HSV1-UL30-3579 | − | CGGCGGCCCCGAUGGCCUUC | 20 | 12519 |
| HSV1-UL30-2581 | + | ACGGCCACCCGGUGGCCUUC | 20 | 5586 |
| HSV1-UL30-3580 | + | GGUCCUUCUUCUUGUCCUUC | 20 | 12520 |
| HSV1-UL30-2506 | + | CCUUUAUCUUGCUGCGCUUC | 20 | 5512 |
| HSV1-UL30-3581 | − | CCGAGGGACUGCAGGCGUUC | 20 | 12521 |
| HSV1-UL30-3582 | + | CCCUGGCCGCCAGCUCGUUC | 20 | 12522 |
| HSV1-UL30-3583 | − | GGCUCCGGACCGCAGGGUUC | 20 | 12523 |
| HSV1-UL30-1839 | − | CCUGCCCACGCCCGUGGUUC | 20 | 4889 |
| HSV1-UL30-3584 | + | AGAAGUAAUAGUCCGUGUUC | 20 | 12524 |
| HSV1-UL30-3585 | + | GCUGGGCUAGCGUGUUGUUC | 20 | 12525 |
| HSV1-UL30-3586 | − | GGAGGACGAGCUGGCCUUUC | 20 | 12526 |
| HSV1-UL30-3587 | − | UACCGCGUCUACGUCCGAAG | 20 | 12527 |
| HSV1-UL30-3588 | + | CCACCACCUCCGCCUCGAAG | 20 | 12528 |
| HSV1-UL30-2481 | + | GUUCACGUGAAACCCGGAAG | 20 | 5487 |
| HSV1-UL30-3589 | + | UCUUGCUGCGCUUCUGGAAG | 20 | 12529 |
| HSV1-UL30-3590 | − | GCAGGCACGUGGGGUACCAG | 20 | 12530 |
| HSV1-UL30-2835 | − | UUAUUCUGCCGGACACCCAG | 20 | 5831 |
| HSV1-UL30-3591 | − | GCUAGACGCCGCCGCCCCAG | 20 | 12531 |
| HSV1-UL30-571 | − | GGAGGACGAGGAGCGGCCAG | 20 | 3509 |
| HSV1-UL30-3592 | − | CUGAACGAGCUGGCGGCCAG | 20 | 12532 |
| HSV1-UL30-2511 | + | AUGCGGCCGUACCCGUCCAG | 20 | 5517 |
| HSV1-UL30-3593 | − | CUCCCUGAGGGCCGACGCAG | 20 | 12533 |
| HSV1-UL30-3594 | + | GCCUGCAGUCCCUCGGGCAG | 20 | 12534 |
| HSV1-UL30-2566 | + | GUAGACGCGGUAAAACAGAG | 20 | 5571 |
| HSV1-UL30-3595 | + | UGCUCUGGGGAAUCCGCGAG | 20 | 12535 |
| HSV1-UL30-586 | − | GCGAGGAGGGCGGGGGCGAG | 20 | 3524 |
| HSV1-UL30-1814 | − | CGGACAACCUGGCCAUCGAG | 20 | 4864 |
| HSV1-UL30-570 | − | CAGCCCGGGAGGACGAGGAG | 20 | 3508 |
| HSV1-UL30-575 | − | AGGAGCGGCCAGAGGAGGAG | 20 | 3513 |
| HSV1-UL30-681 | − | CCGAGCGCCCCGCGGAGGAG | 20 | 3619 |
| HSV1-UL30-2006 | − | GGCGCAUCACCGACCCGGAG | 20 | 5039 |
| HSV1-UL30-3596 | − | CGACGAUACCGUCUCCGGAG | 20 | 12536 |
| HSV1-UL30-2015 | − | GGCCCAGACCCGCGAGGUAG | 20 | 5048 |
| HSV1-UL30-3597 | − | GACACCCAGGGGCGAUUUAG | 20 | 12537 |
| HSV1-UL30-534 | − | GCCGCCGGGCCCGCGCAACG | 20 | 3472 |
| HSV1-UL30-3598 | + | CGCGGGGCGCUCGGCUAACG | 20 | 12538 |
| HSV1-UL30-3599 | + | CAAAGUCGAACACCACCACG | 20 | 12539 |
| HSV1-UL30-595 | − | GGAGACCGCCGGCAGGCACG | 20 | 3533 |
| HSV1-UL30-3600 | − | CCGUUCACGUUUACGGCACG | 20 | 12540 |
| HSV1-UL30-3601 | + | GCAGCAGGCACGUAAAGACG | 20 | 12541 |
| HSV1-UL30-3602 | + | GCCCGCUUCGGACGUAGACG | 20 | 12542 |
| HSV1-UL30-3603 | − | GUGGCACCCCCCGGACGACG | 20 | 12543 |
| HSV1-UL30-3604 | − | UGGACGCCAUCACACCGACG | 20 | 12544 |
| HSV1-UL30-569 | − | GGCCGCAGCCCGGGAGGACG | 20 | 3507 |
| HSV1-UL30-578 | − | AGAGGAGGAGGGGGAGGACG | 20 | 3516 |
| HSV1-UL30-3605 | − | UUCCAUGCGCAUCAUCUACG | 20 | 12545 |
| HSV1-UL30-3606 | − | GUACAUCGGCGUCAUCUACG | 20 | 12546 |
| HSV1-UL30-3607 | + | UGCGCCGAUGGGCGUCUACG | 20 | 12547 |
| HSV1-UL30-3608 | − | CCCGGCCAUCAAGAAGUACG | 20 | 12548 |
| HSV1-UL30-3609 | + | AGCCGAAGGUGACGAACCCG | 20 | 12549 |
| HSV1-UL30-3610 | − | CGGGUUUCACGUGAACCCCG | 20 | 12550 |
| HSV1-UL30-709 | − | GGACGAGCCCGCCCCCCCCG | 20 | 3647 |
| HSV1-UL30-1960 | − | GAUUCCCCAGAGCAGCCCCG | 20 | 4993 |
| HSV1-UL30-1994 | − | CGCGUUAGCCGAGCGCCCCG | 20 | 5027 |
| HSV1-UL30-3611 | − | CAGGGGCCUGCCCACGCCCG | 20 | 12551 |
| HSV1-UL30-1400 | + | GCCGCGGAACGACGCGCCCG | 20 | 4338 |
| HSV1-UL30-3612 | + | UGCGCAUGGAAUAGGGCCCG | 20 | 12552 |
| HSV1-UL30-1999 | − | GCUGGCGCGACCCCUGCCCG | 20 | 5032 |
| HSV1-UL30-2363 | + | GGGCUUGGACGCGCCUCCCG | 20 | 5375 |
| HSV1-UL30-3613 | + | GCAGGCGACGGCGUCUCCCG | 20 | 12553 |
| HSV1-UL30-3614 | − | GAGCUACAAGCUCAACGCCG | 20 | 12554 |
| HSV1-UL30-3615 | + | CCGUGUUCAGGGCGACGCCG | 20 | 12555 |
| HSV1-UL30-1886 | − | GGGGCGAUUUAGGGGCGCCG | 20 | 4935 |
| HSV1-UL30-3616 | + | GCCCGGCGGCCGUGAGGCCG | 20 | 12556 |
| HSV1-UL30-3617 | − | UACGGCCGCAUGAACGGCCG | 20 | 12557 |
| HSV1-UL30-3618 | − | GGCCGCCGGGCUGACGGCCG | 20 | 12558 |
| HSV1-UL30-3619 | + | CGGGGACUCGCGCAGGGCCG | 20 | 12559 |
| HSV1-UL30-1124 | + | GGCCGGGGAGGGCAGGGCCG | 20 | 4062 |
| HSV1-UL30-3620 | − | UCUCUGCGAGCGCAUGGCCG | 20 | 12560 |
| HSV1-UL30-3621 | − | GCUGGUGUCCGAGCUGGCCG | 20 | 12561 |
| HSV1-UL30-2370 | + | CUCCCGGGGGCGCUUGGCCG | 20 | 5382 |
| HSV1-UL30-2571 | + | AGUGGUCCGCGGAGAUGCCG | 20 | 5576 |
| HSV1-UL30-3622 | − | UCCAUCUUUGUGCUGUGCCG | 20 | 12562 |
| HSV1-UL30-2408 | + | UCGCGCCAGCCACUCCUCCG | 20 | 5415 |
| HSV1-UL30-3623 | − | GUCGUUCCGCGGCAUCUCCG | 20 | 12563 |
| HSV1-UL30-2342 | + | CCGCGCGGCCACGUCGUCCG | 20 | 5355 |
| HSV1-UL30-2569 | + | CUCCGCCUCGAAGUGGUCCG | 20 | 5574 |
| HSV1-UL30-3624 | − | UCCCCGGGCGCGUCGUUCCG | 20 | 12564 |
| HSV1-UL30-3625 | + | AGACGCGGUAAAACAGAGCG | 20 | 12565 |
| HSV1-UL30-536 | − | CGCCGGGCCCGCGCAACGCG | 20 | 3474 |
| HSV1-UL30-579 | − | GGAGGACGAGGACGAACGCG | 20 | 3517 |
| HSV1-UL30-2847 | − | GCGCGGCCCAGUUCCACGCG | 20 | 11787 |
| HSV1-UL30-3626 | − | GAUCGUGGCCCAGACCCGCG | 20 | 12566 |
| HSV1-UL30-3627 | + | CCCUGCGGUCCGGAGCCGCG | 20 | 12567 |
| HSV1-UL30-1126 | + | CCGGGGAGGGCAGGGCCGCG | 20 | 4064 |
| HSV1-UL30-3628 | − | CCCCGGACGACGUGGCCGCG | 20 | 12568 |
| HSV1-UL30-3629 | + | GCGCCAGCCACUCCUCCGCG | 20 | 12569 |
| HSV1-UL30-3630 | + | CGCUUGUUGGUGUACGCGCG | 20 | 12570 |
| HSV1-UL30-2857 | + | UGGCGUCCAUAAACCGCGCG | 20 | 11797 |
| HSV1-UL30-1219 | + | CGAAGGCCGCCCAGCGCGCG | 20 | 4157 |
| HSV1-UL30-591 | − | AGCGGGAGCCGGAGGGCGCG | 20 | 3529 |
| HSV1-UL30-55 | − | GCACGCGUACGGCAUGCGCG | 20 | 3260 |
| HSV1-UL30-3631 | + | UGAUGGACGGGACCUGCGCG | 20 | 12571 |
| HSV1-UL30-3632 | − | AGGUAGAGGAGACGGUCGCG | 20 | 12572 |
| HSV1-UL30-1820 | − | UCGAUAUCGAAUGCAAGGCG | 20 | 4870 |
| HSV1-UL30-3633 | + | GCCCGGCGGCGUAGUAGGCG | 20 | 12573 |
| HSV1-UL30-3634 | − | UAAGAUGCUCAUCAAGGGCG | 20 | 12574 |
| HSV1-UL30-584 | − | GGACGAACGCGAGGAGGGCG | 20 | 3522 |
| HSV1-UL30-3635 | + | GAAUUCCAGAACCACGGGCG | 20 | 12575 |
| HSV1-UL30-3636 | + | CGCAGAGAUCUCGUGGGGCG | 20 | 12576 |
| HSV1-UL30-3637 | + | UCGGACACCAGCAGCUUGCG | 20 | 12577 |
| HSV1-UL30-3638 | + | GCCGAUCACCCCGCGUUGCG | 20 | 12578 |
| HSV1-UL30-3639 | + | GGAUGUCCCGAAGGCCAUCG | 20 | 12579 |
| HSV1-UL30-1812 | − | GGCGGACAACCUGGCCAUCG | 20 | 4862 |
| HSV1-UL30-3640 | − | CAAGGACUACCUGGAGAUCG | 20 | 12580 |
| HSV1-UL30-3641 | − | CCGGAUCCCGUACGUGAUCG | 20 | 12581 |
| HSV1-UL30-3642 | + | UGUACCCGGUCACGAACUCG | 20 | 12582 |
| HSV1-UL30-3643 | + | AGCGCGCGUGGACGUACUCG | 20 | 12583 |
| HSV1-UL30-3644 | + | CGACCGUCUCCUCUACCUCG | 20 | 12584 |
| HSV1-UL30-3645 | + | CCAGGAGCACGGCCUCCUCG | 20 | 12585 |
| HSV1-UL30-2383 | + | GGGCGGCGGCGUCUAGCUCG | 20 | 5390 |
| HSV1-UL30-3646 | − | UGCGAAAGCAGAUCCGCUCG | 20 | 12586 |
| HSV1-UL30-3647 | + | GGGUCGCGAGCAGCAUCUCG | 20 | 12587 |
| HSV1-UL30-2578 | + | AUGCGCUCGCAGAGAUCUCG | 20 | 5583 |
| HSV1-UL30-3648 | + | GCCGAUGGUCGUCACCGUCG | 20 | 12588 |
| HSV1-UL30-2530 | + | GCUCGUUCAGGUGGGAUUCG | 20 | 5536 |
| HSV1-UL30-3649 | − | CAUCUCCGCGGACCACUUCG | 20 | 12589 |
| HSV1-UL30-3650 | − | CGAGGGACUGCAGGCGUUCG | 20 | 12590 |
| HSV1-UL30-3651 | − | GCUCCGGACCGCAGGGUUCG | 20 | 12591 |
| HSV1-UL30-1782 | − | GUACUUUUACAUGAACAAGG | 20 | 4832 |
| HSV1-UL30-1818 | − | CUUCGAUAUCGAAUGCAAGG | 20 | 4868 |
| HSV1-UL30-1346 | + | AGGAACCGAGCGAAAACAGG | 20 | 4284 |
| HSV1-UL30-1089 | + | CGCACGCCGCCCCCAACAGG | 20 | 4027 |
| HSV1-UL30-3652 | − | CAGGCACGUGGGGUACCAGG | 20 | 12592 |
| HSV1-UL30-3653 | + | UGCGGCCGUACCCGUCCAGG | 20 | 12593 |
| HSV1-UL30-3654 | + | UGGCGAGCCAGUCCCGCAGG | 20 | 12594 |
| HSV1-UL30-3655 | + | GCUUGUAAUACACCGUCAGG | 20 | 12595 |
| HSV1-UL30-2526 | + | UGGCCGCCAGCUCGUUCAGG | 20 | 5532 |
| HSV1-UL30-572 | − | GGACGAGGAGCGGCCAGAGG | 20 | 3510 |
| HSV1-UL30-3656 | − | UCCCCAGAGCAGCCCCGAGG | 20 | 12596 |
| HSV1-UL30-580 | − | GGACGAGGACGAACGCGAGG | 20 | 3518 |
| HSV1-UL30-3657 | − | GGACAACCUGGCCAUCGAGG | 20 | 12597 |
| HSV1-UL30-1946 | − | GGACUACCUGGAGAUCGAGG | 20 | 4979 |
| HSV1-UL30-1790 | − | CUCCGCGGACCACUUCGAGG | 20 | 4840 |
| HSV1-UL30-3658 | − | CUUUUACAUGAACAAGGAGG | 20 | 12598 |
| HSV1-UL30-573 | − | CGAGGAGCGGCCAGAGGAGG | 20 | 3511 |
| HSV1-UL30-576 | − | GGAGCGGCCAGAGGAGGAGG | 20 | 3514 |
| HSV1-UL30-3659 | − | CCUGGCCGAUUUCCCGGAGG | 20 | 12599 |
| HSV1-UL30-3660 | − | GGACCACUUCGAGGCGGAGG | 20 | 12600 |
| HSV1-UL30-3661 | − | CGCAGUGGCGCACCUGGAGG | 20 | 12601 |
| HSV1-UL30-3662 | + | CCCGCAGGAGGAUGCUGAGG | 20 | 12602 |
| HSV1-UL30-2499 | + | GGGCCCGGCGGCGUAGUAGG | 20 | 5505 |
| HSV1-UL30-2048 | − | GGUGGGUGCCGGCGCUACGG | 20 | 5081 |
| HSV1-UL30-3663 | − | UACAUCGGCGUCAUCUACGG | 20 | 12603 |
| HSV1-UL30-3664 | − | CGUCGAGUUUAACUGUACGG | 20 | 12604 |
| HSV1-UL30-3665 | + | AAACGUGAACGGCCACCCGG | 20 | 12605 |
| HSV1-UL30-3666 | − | UCCGGUGGCCGGGCACCCGG | 20 | 12606 |
| HSV1-UL30-3667 | + | GCCCACGGCCGUCAGCCCGG | 20 | 12607 |
| HSV1-UL30-3668 | + | GCGCAUGGAAUAGGGCCCGG | 20 | 12608 |
| HSV1-UL30-3669 | + | CCCGCGUUGCGCGGGCCCGG | 20 | 12609 |
| HSV1-UL30-3670 | + | GGCUUGGACGCGCCUCCCGG | 20 | 12610 |
| HSV1-UL30-3671 | + | CAGGCGACGGCGUCUCCCGG | 20 | 12611 |
| HSV1-UL30-3672 | − | GCUCCUGGCCGAUUUCCCGG | 20 | 12612 |
| HSV1-UL30-3673 | − | CAACACGCUAGCCCAGCCGG | 20 | 12613 |
| HSV1-UL30-589 | − | CGGGGGCGAGCGGGAGCCGG | 20 | 3527 |
| HSV1-UL30-1887 | − | GGGCGAUUUAGGGGCGCCGG | 20 | 4936 |
| HSV1-UL30-3674 | + | GUACCCCACGUGCCUGCCGG | 20 | 12614 |
| HSV1-UL30-3675 | + | CGCGCGGCCACGUCGUCCGG | 20 | 12615 |
| HSV1-UL30-3676 | − | GGACGAGCUGGCCUUUCCGG | 20 | 12616 |
| HSV1-UL30-3677 | + | GGGGCGCUCGGCUAACGCGG | 20 | 12617 |
| HSV1-UL30-1996 | − | GUUAGCCGAGCGCCCCGCGG | 20 | 5029 |
| HSV1-UL30-1127 | + | CGGGGAGGGCAGGGCCGCGG | 20 | 4065 |
| HSV1-UL30-3678 | + | UGGACGGGACCUGCGCGCGG | 20 | 12618 |
| HSV1-UL30-3679 | + | CGGCGGCGUCUAGCUCGCGG | 20 | 12619 |
| HSV1-UL30-1821 | − | CGAUAUCGAAUGCAAGGCGG | 20 | 4871 |
| HSV1-UL30-3680 | − | CGCGGACCACUUCGAGGCGG | 20 | 12620 |
| HSV1-UL30-2050 | − | GGGUGCCGGCGCUACGGCGG | 20 | 5083 |
| HSV1-UL30-3681 | + | GAGGACGUGCUCCAGGGCGG | 20 | 12621 |
| HSV1-UL30-585 | − | GACGAACGCGAGGAGGGCGG | 20 | 3523 |
| HSV1-UL30-3682 | − | GACCGCAGGGUUCGGGGCGG | 20 | 12622 |
| HSV1-UL30-3683 | + | GGGCUCGUCCCCUGGGGCGG | 20 | 12623 |
| HSV1-UL30-3684 | + | CGGGUGUCUGCUCAGUUCGG | 20 | 12624 |
| HSV1-UL30-3685 | + | CAGGAGGACGUGCUCCAGGG | 20 | 12625 |
| HSV1-UL30-1800 | − | GCCAUCAAGAAGUACGAGGG | 20 | 4850 |
| HSV1-UL30-3686 | − | GACAACCUGGCCAUCGAGGG | 20 | 12626 |
| HSV1-UL30-582 | − | GAGGACGAACGCGAGGAGGG | 20 | 3520 |
| HSV1-UL30-3687 | + | GGCGUCUAGCUCGCGGAGGG | 20 | 12627 |
| HSV1-UL30-3688 | + | GUUGUCCAGGAUGAACCGGG | 20 | 12628 |
| HSV1-UL30-3689 | − | GACUCCGGAAGGCCACCGGG | 20 | 12629 |
| HSV1-UL30-3690 | − | UCGCCUGCCGACCCCCCGGG | 20 | 12630 |
| HSV1-UL30-3691 | − | GCGUCCGGCCGCAGCCCGGG | 20 | 12631 |
| HSV1-UL30-3692 | + | GCUUGGACGCGCCUCCCGGG | 20 | 12632 |
| HSV1-UL30-1888 | − | GGCGAUUUAGGGGCGCCGGG | 20 | 4937 |
| HSV1-UL30-3693 | + | GCGCGGCCACGUCGUCCGGG | 20 | 12633 |
| HSV1-UL30-1128 | + | GGGGAGGGCAGGGCCGCGGG | 20 | 4066 |
| HSV1-UL30-1822 | − | GAUAUCGAAUGCAAGGCGGG | 20 | 4872 |
| HSV1-UL30-1889 | − | GCGAUUUAGGGGCGCCGGGG | 20 | 4938 |
| HSV1-UL30-3694 | + | CCGGGGGCGCUUGGCCGGGG | 20 | 12634 |
| HSV1-UL30-1129 | + | GGGAGGGCAGGGCCGCGGGG | 20 | 4067 |
| HSV1-UL30-1823 | − | AUAUCGAAUGCAAGGCGGGG | 20 | 4873 |
| HSV1-UL30-3695 | + | CGUUCAGGUGGGAUUCGGGG | 20 | 12635 |
| HSV1-UL30-3696 | − | CCGGACCGCAGGGUUCGGGG | 20 | 12636 |
| HSV1-UL30-577 | − | GCGGCCAGAGGAGGAGGGGG | 20 | 3515 |
| HSV1-UL30-1130 | + | GGAGGGCAGGGCCGCGGGGG | 20 | 4068 |
| HSV1-UL30-1824 | − | UAUCGAAUGCAAGGCGGGGG | 20 | 4874 |
| HSV1-UL30-3697 | − | AUUUAGGGGCGCCGGGGGGG | 20 | 12637 |
| HSV1-UL30-1131 | + | GGGCAGGGCCGCGGGGGGGG | 20 | 4069 |
| HSV1-UL30-3698 | − | CGAAUGCAAGGCGGGGGGGG | 20 | 12638 |
| HSV1-UL30-3699 | − | CUUCUCCCACCUGUUGGGGG | 20 | 12639 |
| HSV1-UL30-3700 | + | GGCGGGCUCGUCCCCUGGGG | 20 | 12640 |
| HSV1-UL30-3701 | − | ACCUGGAGAUCGAGGUGGGG | 20 | 12641 |
| HSV1-UL30-3702 | + | UCGCACUCGAGUUUGAUGGG | 20 | 12642 |
| HSV1-UL30-3703 | − | GUACGUCCACGCGCGCUGGG | 20 | 12643 |
| HSV1-UL30-3704 | − | UACCUGGAGAUCGAGGUGGG | 20 | 12644 |
| HSV1-UL30-3705 | + | GUUACACACGACCUUGAUGG | 20 | 12645 |
| HSV1-UL30-3706 | + | UUCGCACUCGAGUUUGAUGG | 20 | 12646 |
| HSV1-UL30-3707 | − | CGACGCAGUGGCGCACCUGG | 20 | 12647 |
| HSV1-UL30-3708 | + | CAGGUCGACCAGGGCCCUGG | 20 | 12648 |
| HSV1-UL30-3709 | − | AUCCCACCUGAACGAGCUGG | 20 | 12649 |
| HSV1-UL30-3710 | − | CAUACAGGAUUCCCUGCUGG | 20 | 12650 |
| HSV1-UL30-3711 | − | GUUUCACGUGAACCCCGUGG | 20 | 12651 |
| HSV1-UL30-1949 | − | CUACCUGGAGAUCGAGGUGG | 20 | 4982 |
| HSV1-UL30-1792 | − | CCACUUCGAGGCGGAGGUGG | 20 | 4842 |
| HSV1-UL30-3712 | + | GACGUGCUCCAGGGCGGUGG | 20 | 12652 |
| HSV1-UL30-3713 | + | GUCCAGGAUGAACCGGGUGG | 20 | 12653 |
| HSV1-UL30-3714 | − | CUCGGCCGUCGCGCGCUUGG | 20 | 12654 |
| HSV1-UL30-3715 | − | UUACUUCUCCCACCUGUUGG | 20 | 12655 |
| HSV1-UL30-3716 | + | ACACGCCCCGGCCGUUCAUG | 20 | 12656 |
| HSV1-UL30-3717 | + | ACGGCCGAGAGCUCCAGAUG | 20 | 12657 |
| HSV1-UL30-3718 | + | GAAACAGCGCGCGCGAGAUG | 20 | 12658 |
| HSV1-UL30-2420 | + | UUUCGCACUCGAGUUUGAUG | 20 | 5427 |
| HSV1-UL30-2355 | + | GCCGUGGGCAAUGGCGUAUG | 20 | 5367 |
| HSV1-UL30-3719 | + | ACCCACCGCCCCGAACCCUG | 20 | 12659 |
| HSV1-UL30-3720 | + | GGGGGCGGGCUCGUCCCCUG | 20 | 12660 |
| HSV1-UL30-3721 | − | GCUUCAGCACGCUCUCCCUG | 20 | 12661 |
| HSV1-UL30-1954 | − | GCCUCCUCAGCAUCCUCCUG | 20 | 4987 |
| HSV1-UL30-3722 | + | CUCCUCGUCCUCCCGGGCUG | 20 | 12662 |
| HSV1-UL30-2461 | + | AGUCCCGCAGGAGGAUGCUG | 20 | 5467 |
| HSV1-UL30-3723 | + | UGUGGGCCUGGAUGAUGCUG | 20 | 12663 |
| HSV1-UL30-2452 | + | GCCUCCUCGGGGCUGCUCUG | 20 | 5458 |
| HSV1-UL30-3724 | − | AAAGGUUUAUUCCCGAAGUG | 20 | 12664 |
| HSV1-UL30-3725 | + | UCACGUGAAACCCGGAAGUG | 20 | 12665 |
| HSV1-UL30-3726 | − | AGACCGCCGGCAGGCACGUG | 20 | 12666 |
| HSV1-UL30-3727 | + | CCGUCAGCCCGGCGGCCGUG | 20 | 12667 |
| HSV1-UL30-1852 | − | GCCGGGGCGUGUUUCGCGUG | 20 | 4902 |
| HSV1-UL30-3728 | + | GCGCUCGCAGAGAUCUCGUG | 20 | 12668 |
| HSV1-UL30-1948 | − | ACUACCUGGAGAUCGAGGUG | 20 | 4981 |
| HSV1-UL30-3729 | + | CGACCAGGGCCCUGGAGGUG | 20 | 12669 |
| HSV1-UL30-3730 | + | GUCUGCUCAGUUCGGCGGUG | 20 | 12670 |
| HSV1-UL30-3731 | − | CAUCAAGAAGUACGAGGGUG | 20 | 12671 |
| HSV1-UL30-3732 | + | GCUGGCCGUCGUAGAUGGUG | 20 | 12672 |
| HSV1-UL30-2358 | + | GCUCGGACACCAGCAGCUUG | 20 | 5370 |
| HSV1-UL30-3733 | + | GCGUGCUGAAGCACAGGUUG | 20 | 12673 |
| HSV1-UL30-3734 | − | AUUACUUCUCCCACCUGUUG | 20 | 12674 |
| HSV1-UL30-3735 | + | GUCGGCCGCCUCCGGGAAAU | 20 | 12675 |
| HSV1-UL30-3736 | + | GUAGAUGAUGCGCAUGGAAU | 20 | 12676 |
| HSV1-UL30-3737 | − | GUGUUUCGCGUGUGGGACAU | 20 | 12677 |
| HSV1-UL30-3738 | − | AUCGCCAAGAAAAAGUACAU | 20 | 12678 |
| HSV1-UL30-3739 | − | GCCGCGACGGUGACGACCAU | 20 | 12679 |
| HSV1-UL30-3740 | − | CCGUCCUCGUAGACGCCCAU | 20 | 12680 |
| HSV1-UL30-2551 | + | CUGGAUGUCCCGAAGGCCAU | 20 | 5556 |
| HSV1-UL30-3741 | + | GACGGCCGAGAGCUCCAGAU | 20 | 12681 |
| HSV1-UL30-3742 | + | CGGGUCGGUGAUGCGCCGAU | 20 | 12682 |
| HSV1-UL30-3743 | − | CCCGCGCAACGCGGGGUGAU | 20 | 12683 |
| HSV1-UL30-2419 | + | UUUUCGCACUCGAGUUUGAU | 20 | 5426 |
| HSV1-UL30-2517 | + | GUUGUACCCGGUCACGAACU | 20 | 5523 |
| HSV1-UL30-2860 | + | CAUAAACCGCGCGUGGAACU | 20 | 11800 |
| HSV1-UL30-3744 | − | CAUCAAGGUCGUGUGUAACU | 20 | 12684 |
| HSV1-UL30-3745 | + | GGCGCCCCUAAAUCGCCCCU | 20 | 12685 |
| HSV1-UL30-3746 | + | GGGGGGCGGGCUCGUCCCCU | 20 | 12686 |
| HSV1-UL30-3747 | + | CCCGAACGCCUGCAGUCCCU | 20 | 12687 |
| HSV1-UL30-3748 | + | AAUGGCGUAUGCGGGAUCCU | 20 | 12688 |
| HSV1-UL30-2448 | + | GUCCAGGAGCACGGCCUCCU | 20 | 5454 |
| HSV1-UL30-3749 | − | GGGACCGUCAUCACGCUCCU | 20 | 12689 |
| HSV1-UL30-3750 | + | UGCGGGAUCCUCGGCCAGCU | 20 | 12690 |
| HSV1-UL30-3751 | + | CUUGGCGAUCAGCAGCAGCU | 20 | 12691 |
| HSV1-UL30-3752 | + | CUUGUAAAUGUCCGUCAGCU | 20 | 12692 |
| HSV1-UL30-3753 | + | CCGGGCUGCGGCCGGACGCU | 20 | 12693 |
| HSV1-UL30-3754 | − | CGAGUACGUCCACGCGCGCU | 20 | 12694 |
| HSV1-UL30-3755 | − | GCUCUCGGCCGUCGCGCGCU | 20 | 12695 |
| HSV1-UL30-3756 | + | CCACUCCUCCGCGGGGCGCU | 20 | 12696 |
| HSV1-UL30-3757 | + | CGGCGUCUCCCGGGGGCGCU | 20 | 12697 |
| HSV1-UL30-3758 | − | CACGUCCUCCUGUUUUCGCU | 20 | 12698 |
| HSV1-UL30-3759 | + | GGCCAUCGGGGCCGCCGGCU | 20 | 12699 |
| HSV1-UL30-3760 | + | CACCAGCAGCUUGCGGGGCU | 20 | 12700 |
| HSV1-UL30-3761 | + | UUGUGGGCCUGGAUGAUGCU | 20 | 12701 |
| HSV1-UL30-3762 | + | UAACAGACUCUCGGUGAUCU | 20 | 12702 |
| HSV1-UL30-3763 | + | AAACCUUUUUAACAGACUCU | 20 | 12703 |
| HSV1-UL30-3764 | − | UUUGCCCCAUCUGGAGCUCU | 20 | 12704 |
| HSV1-UL30-2451 | + | GGCCUCCUCGGGGCUGCUCU | 20 | 5457 |
| HSV1-UL30-3765 | + | CUCCUCUACCUCGCGGGUCU | 20 | 12705 |
| HSV1-UL30-3766 | + | GACGCCGAUGUACUUUUUCU | 20 | 12706 |
| HSV1-UL30-3767 | + | UUCACGUGAAACCCGGAAGU | 20 | 12707 |
| HSV1-UL30-3768 | + | CGCGGGCCCGGCGGCGUAGU | 20 | 12708 |
| HSV1-UL30-3769 | + | CGUCUCGUAGUAGUACACGU | 20 | 12709 |
| HSV1-UL30-3770 | − | GAGACCGCCGGCAGGCACGU | 20 | 12710 |
| HSV1-UL30-3771 | + | AGCGUGAUGACGGUCCCCGU | 20 | 12711 |
| HSV1-UL30-3772 | + | CGUGUUCAGGGCGACGCCGU | 20 | 12712 |
| HSV1-UL30-3773 | − | GCCGCCGGGCUGACGGCCGU | 20 | 12713 |
| HSV1-UL30-3774 | + | AAUUCCAGAACCACGGGCGU | 20 | 12714 |
| HSV1-UL30-3775 | + | CUCCAGGUGCGCCACUGCGU | 20 | 12715 |
| HSV1-UL30-3776 | + | UGCGCUCGCAGAGAUCUCGU | 20 | 12716 |
| HSV1-UL30-2350 | + | GCACGCCGCCCCCAACAGGU | 20 | 5362 |
| HSV1-UL30-3777 | + | CUUGUAAUACACCGUCAGGU | 20 | 12717 |
| HSV1-UL30-3778 | + | GGCCGCCAGCUCGUUCAGGU | 20 | 12718 |
| HSV1-UL30-1947 | − | GACUACCUGGAGAUCGAGGU | 20 | 4980 |
| HSV1-UL30-3779 | + | ACAUGAGCUUGUAUGCCGGU | 20 | 12719 |
| HSV1-UL30-3780 | − | ACCGCAGGGUUCGGGGCGGU | 20 | 12720 |
| HSV1-UL30-3781 | − | CCAUCAAGAAGUACGAGGGU | 20 | 12721 |
| HSV1-UL30-3782 | + | CUGGAUGUCCCUCUCCGGGU | 20 | 12722 |
| HSV1-UL30-3783 | + | GGACGCGCCUCCCGGGGGGU | 20 | 12723 |
| HSV1-UL30-3784 | − | AUACAGGAUUCCCUGCUGGU | 20 | 12724 |
| HSV1-UL30-3785 | + | CAGAAUAAAGCCCUUCUGGU | 20 | 12725 |
| HSV1-UL30-3786 | + | GGGCCCGGGGGCGCGCAUGU | 20 | 12726 |
| HSV1-UL30-2033 | − | CUAUUACUUCUCCCACCUGU | 20 | 5066 |
| HSV1-UL30-3787 | − | CAGCGAAUUCGAGAUGCUGU | 20 | 12727 |
| HSV1-UL30-3788 | − | CCGGGGCGUGUUUCGCGUGU | 20 | 12728 |
| HSV1-UL30-3789 | + | CUCGUGGGGCGCGGCAUUGU | 20 | 12729 |
| HSV1-UL30-3790 | + | CAGGUGGGCCAGGCGCUUGU | 20 | 12730 |
| HSV1-UL30-3791 | + | GCUCGAGAGCUUGAUCUUGU | 20 | 12731 |
| HSV1-UL30-3792 | + | CGUGCUGAAGCACAGGUUGU | 20 | 12732 |
| HSV1-UL30-2528 | + | CAGCUCGUUCAGGUGGGAUU | 20 | 5534 |
| HSV1-UL30-2344 | + | GUCCGGGGGGUGCCACACUU | 20 | 5357 |
| HSV1-UL30-3793 | − | AACCCCGGGUUCGUCACCUU | 20 | 12733 |
| HSV1-UL30-1807 | − | CCGGCGGCCCCGAUGGCCUU | 20 | 4857 |
| HSV1-UL30-3794 | + | CGGGCUGCGGCCGGACGCUU | 20 | 12734 |
| HSV1-UL30-3795 | + | ACGACAGCACACGCCCGCUU | 20 | 12735 |
| HSV1-UL30-3796 | + | CUUGUCCUUCAGGACGGCUU | 20 | 12736 |
| HSV1-UL30-3797 | + | GCGCGGGUGUCUGCUCAGUU | 20 | 12737 |
| HSV1-UL30-2001 | − | CCCGAGGGACUGCAGGCGUU | 20 | 5034 |
| HSV1-UL30-2045 | − | CGGCUCCGGACCGCAGGGUU | 20 | 5078 |
| HSV1-UL30-2034 | − | UAUUACUUCUCCCACCUGUU | 20 | 5067 |
| HSV1-UL30-2036 | − | GUGACAUUCAAGGCCCUGUU | 20 | 5069 |
| HSV1-UL30-1882 | − | CGGACACCCAGGGGCGAUUU | 20 | 4931 |
| HSV1-UL30-2037 | − | UGACAUUCAAGGCCCUGUUU | 20 | 5070 |

[0775] Table 9A provides exemplary targeting domains for knocking out the UL30 gene selected according to the first tier parameters. The targeting domains bind within the first 500 bp of the coding sequence (e.g., within 500 bp downstream from the start codon), have a high level of orthogonality, and start with a 5′G. PAM is NNGRRT. It is contemplated herein that in an embodiment the targeting domain hybridizes to the target domain through complementary base pairing. Any of the targeting domains in the table can be used with a S. aureus Cas9 molecule that generates a double stranded break (Cas9 nuclease) or a single-stranded break (Cas9 nickase).

TABLE 9A

| | | | Target | |
|---|---|---|---|---|
| 1st Tier | DNA | | Site | Seq ID |
| gRNA Name | Strand | Targeting Domain | Length | NO: |
| HSV1-UL30-3798 | + | GUUUUGCCUCAAACAAGGC | 19 | 12738 |
| HSV1-UL30-3799 | + | GUACGCGUGCUCCACGUUCUC | 21 | 12739 |
| HSV1-UL30-3800 | + | GCCGUACGCGUGCUCCACGUUCUC | 24 | 12740 |
| HSV1-UL30-3801 | + | GUCCAGCACCCGCGGGGCG | 19 | 12741 |
| HSV1-UL30-3802 | + | GCUAUAGUACGUAUGGCG | 18 | 12742 |
| HSV1-UL30-3803 | + | GCAUUCGCUAUAGUACGUAUGGCG | 24 | 12743 |
| HSV1-UL30-3804 | + | GUACACGUGAAAGACGGUGACGG | 23 | 12744 |
| HSV1-UL30-3805 | + | GCGUCCCGACUGGGGCGAGGU | 21 | 12745 |
| HSV1-UL30-3806 | + | GUUGCGUCCCGACUGGGGCGAGGU | 24 | 12746 |
| HSV1-UL30-3807 | − | GCCCCGCGGGUGCUGGAC | 18 | 12747 |
| HSV1-UL30-255 | − | GAAUUUCGAUUCAUCGCCCC | 20 | 4721 |
| HSV1-UL30-3808 | − | GAUGAAUUUCGAUUCAUCGCCCC | 23 | 12748 |
| HSV1-UL30-25 | − | GCCCCCCCGGAGAAGCGCGC | 20 | 3131 |
| HSV1-UL30-3809 | − | GAUGCCCCCCCGGAGAAGCGCGC | 23 | 12749 |
| HSV1-UL30-3810 | − | GGAUGCCCCCCCGGAGAAGCGCGC | 24 | 12750 |
| HSV1-UL30-3811 | − | GAGCGCGACGUCCUCCGCG | 19 | 12751 |
| HSV1-UL30-3812 | − | GACGAGCGCGACGUCCUCCGCG | 22 | 12752 |
| HSV1-UL30-3813 | − | GGACGAGCGCGACGUCCUCCGCG | 23 | 12753 |
| HSV1-UL30-3814 | − | GGGACGAGCGCGACGUCCUCCGCG | 24 | 12754 |
| HSV1-UL30-3815 | − | GCCAUACGUACUAUAGCGAAUGCG | 24 | 12755 |
| HSV1-UL30-3816 | − | GCGGCGUGGACCACGCCCCGG | 21 | 12756 |
| HSV1-UL30-3817 | − | GGCGGCGUGGACCACGCCCCGG | 22 | 12757 |
| HSV1-UL30-3818 | − | GGGCGGCGUGGACCACGCCCCGG | 23 | 12758 |
| HSV1-UL30-3819 | − | GGGGCGGCGUGGACCACGCCCCGG | 24 | 12759 |
| HSV1-UL30-3820 | − | GAAAGUCGGCGGCCAGGGCGGCGU | 24 | 12760 |

[0776] Table 9B provides exemplary targeting domains for knocking out the UL30 gene selected according to the second tier parameters. The targeting domains bind within the first 500 bp of the coding sequence (e.g., within 500 bp downstream from the start codon) and have a high level of orthogonality. The PAM is NNGRRT. It is contemplated herein that in an embodiment the targeting domain hybridizes to the target domain through complementary base pairing. Any of the targeting domains in the table can be used with a S. aureus Cas9 molecule that generates a double stranded break (Cas9 nuclease) or a single-stranded break (Cas9 nickase).

TABLE 9B

| | | | Target | Seq |
|---|---|---|---|---|
| 2nd Tier | DNA | | Site | ID |
| gRNA Name | Strand | Targeting Domain | Length | NO: |
| HSV1-UL30-3821 | + | UUUUGCCUCAAACAAGGC | 18 | 12761 |
| HSV1-UL30-100 | + | AGUUUUGCCUCAAACAAGGC | 20 | 3283 |
| HSV1-UL30-3822 | + | AAGUUUUGCCUCAAACAAGGC | 21 | 12762 |
| HSV1-UL30-3823 | + | AAAGUUUUGCCUCAAACAAGGC | 22 | 12763 |
| HSV1-UL30-3824 | + | AAAAGUUUUGCCUCAAACAAGGC | 23 | 12764 |
| HSV1-UL30-3825 | + | UAAAAGUUUUGCCUCAAACAAGGC | 24 | 12765 |
| HSV1-UL30-3826 | + | CGCGUGCUCCACGUUCUC | 18 | 12766 |
| HSV1-UL30-3827 | + | ACGCGUGCUCCACGUUCUC | 19 | 12767 |
| HSV1-UL30-329 | + | UACGCGUGCUCCACGUUCUC | 20 | 4767 |
| HSV1-UL30-3828 | + | CGUACGCGUGCUCCACGUUCUC | 22 | 12768 |
| HSV1-UL30-3829 | + | CCGUACGCGUGCUCCACGUUCUC | 23 | 12769 |
| HSV1-UL30-3830 | + | UCCAGCACCCGCGGGGCG | 18 | 12770 |
| HSV1-UL30-352 | + | CGUCCAGCACCCGCGGGGCG | 20 | 4780 |
| HSV1-UL30-3831 | + | UCGUCCAGCACCCGCGGGGCG | 21 | 12771 |
| HSV1-UL30-3832 | + | CUCGUCCAGCACCCGCGGGGCG | 22 | 12772 |
| HSV1-UL30-3833 | + | CCUCGUCCAGCACCCGCGGGGCG | 23 | 12773 |
| HSV1-UL30-3834 | + | UCCUCGUCCAGCACCCGCGGGGCG | 24 | 12774 |
| HSV1-UL30-3835 | + | CGCUAUAGUACGUAUGGCG | 19 | 12775 |
| HSV1-UL30-354 | + | UCGCUAUAGUACGUAUGGCG | 20 | 4782 |
| HSV1-UL30-3836 | + | UUCGCUAUAGUACGUAUGGCG | 21 | 12776 |
| HSV1-UL30-3837 | + | AUUCGCUAUAGUACGUAUGGCG | 22 | 12777 |
| HSV1-UL30-3838 | + | CAUUCGCUAUAGUACGUAUGGCG | 23 | 12778 |
| HSV1-UL30-3839 | + | CGUGAAAGACGGUGACGG | 18 | 12779 |
| HSV1-UL30-3840 | + | ACGUGAAAGACGGUGACGG | 19 | 12780 |
| HSV1-UL30-59 | + | CACGUGAAAGACGGUGACGG | 20 | 3262 |
| HSV1-UL30-3841 | + | ACACGUGAAAGACGGUGACGG | 21 | 12781 |
| HSV1-UL30-3842 | + | UACACGUGAAAGACGGUGACGG | 22 | 12782 |
| HSV1-UL30-3843 | + | CGUACACGUGAAAGACGGUGACGG | 24 | 12783 |
| HSV1-UL30-3844 | + | UGCGUCCCGACUGGGGCGAGGU | 22 | 12784 |
| HSV1-UL30-3845 | + | UUGCGUCCCGACUGGGGCGAGGU | 23 | 12785 |
| HSV1-UL30-3846 | − | AGCGCCAUACGUACUAUA | 18 | 12786 |
| HSV1-UL30-3847 | − | CAGCGCCAUACGUACUAUA | 19 | 12787 |
| HSV1-UL30-253 | − | CCAGCGCCAUACGUACUAUA | 20 | 4719 |
| HSV1-UL30-3848 | − | CCCAGCGCCAUACGUACUAUA | 21 | 12788 |
| HSV1-UL30-3849 | − | ACCCAGCGCCAUACGUACUAUA | 22 | 12789 |
| HSV1-UL30-3850 | − | AACCCAGCGCCAUACGUACUAUA | 23 | 12790 |
| HSV1-UL30-3851 | − | CAACCCAGCGCCAUACGUACUAUA | 24 | 12791 |
| HSV1-UL30-3852 | − | CGCCCCGCGGGUGCUGGAC | 19 | 12792 |
| HSV1-UL30-258 | − | UCGCCCCGCGGGUGCUGGAC | 20 | 4724 |
| HSV1-UL30-3853 | − | AUCGCCCCGCGGGUGCUGGAC | 21 | 12793 |
| HSV1-UL30-3854 | − | CAUCGCCCCGCGGGUGCUGGAC | 22 | 12794 |
| HSV1-UL30-3855 | − | UCAUCGCCCCGCGGGUGCUGGAC | 23 | 12795 |
| HSV1-UL30-3856 | − | UUCAUCGCCCCGCGGGUGCUGGAC | 24 | 12796 |
| HSV1-UL30-3857 | − | AUUUCGAUUCAUCGCCCC | 18 | 12797 |
| HSV1-UL30-3858 | − | AAUUUCGAUUCAUCGCCCC | 19 | 12798 |
| HSV1-UL30-3859 | − | UGAAUUUCGAUUCAUCGCCCC | 21 | 12799 |
| HSV1-UL30-3860 | − | AUGAAUUUCGAUUCAUCGCCCC | 22 | 12800 |
| HSV1-UL30-3861 | − | CGAUGAAUUUCGAUUCAUCGCCCC | 24 | 12801 |
| HSV1-UL30-3862 | − | CCCCCCGGAGAAGCGCGC | 18 | 12802 |
| HSV1-UL30-3863 | − | CCCCCCCGGAGAAGCGCGC | 19 | 12803 |
| HSV1-UL30-3864 | − | UGCCCCCCCGGAGAAGCGCGC | 21 | 12804 |
| HSV1-UL30-3865 | − | AUGCCCCCCCGGAGAAGCGCGC | 22 | 12805 |
| HSV1-UL30-3866 | − | AGCGCGACGUCCUCCGCG | 18 | 12806 |
| HSV1-UL30-271 | − | CGAGCGCGACGUCCUCCGCG | 20 | 4730 |
| HSV1-UL30-3867 | − | ACGAGCGCGACGUCCUCCGCG | 21 | 12807 |
| HSV1-UL30-3868 | − | CGUACUAUAGCGAAUGCG | 18 | 12808 |
| HSV1-UL30-3869 | − | ACGUACUAUAGCGAAUGCG | 19 | 12809 |
| HSV1-UL30-254 | − | UACGUACUAUAGCGAAUGCG | 20 | 4720 |
| HSV1-UL30-3870 | − | AUACGUACUAUAGCGAAUGCG | 21 | 12810 |
| HSV1-UL30-3871 | − | CAUACGUACUAUAGCGAAUGCG | 22 | 12811 |
| HSV1-UL30-3872 | − | CCAUACGUACUAUAGCGAAUGCG | 23 | 12812 |
| HSV1-UL30-3873 | − | AGUCGGCGGCCAGGGCGGCGU | 21 | 12813 |
| HSV1-UL30-3874 | − | AAGUCGGCGGCCAGGGCGGCGU | 22 | 12814 |
| HSV1-UL30-3875 | − | AAAGUCGGCGGCCAGGGCGGCGU | 23 | 12815 |

[0777] Table 9C provides exemplary targeting domains for knocking out the UL30 gene selected according to the third tier parameters. The targeting domains bind within the first 500 bp of the coding sequence (e.g., within 500 bp downstream from the start codon). The PAM is NNGRRT. It is contemplated herein that in an embodiment the targeting domain hybridizes to the target domain through complementary base pairing. Any of the targeting domains in the table can be used with a S. aureus Cas9 molecule that generates a double stranded break (Cas9 nuclease) or a single-stranded break (Cas9 nickase).

TABLE 9C

| | | | Target | |
|---|---|---|---|---|
| 3rd Tier | DNA | | Site | Seq ID |
| gRNA Name | Strand | Targeting Domain | Length | NO: |
| HSV1-UL30-3876 | + | UCCCGACUGGGGCGAGGU | 18 | 12816 |
| HSV1-UL30-3877 | + | GUCCCGACUGGGGCGAGGU | 19 | 12817 |
| HSV1-UL30-95 | + | CGUCCCGACUGGGGCGAGGU | 20 | 3170 |
| HSV1-UL30-3878 | − | GCGUGGACCACGCCCCGG | 18 | 12818 |
| HSV1-UL30-3879 | − | GGCGUGGACCACGCCCCGG | 19 | 12819 |
| HSV1-UL30-49 | − | CGGCGUGGACCACGCCCCGG | 20 | 3259 |
| HSV1-UL30-3880 | − | CGGCGGCCAGGGCGGCGU | 18 | 12820 |
| HSV1-UL30-3881 | − | UCGGCGGCCAGGGCGGCGU | 19 | 12821 |
| HSV1-UL30-242 | − | GUCGGCGGCCAGGGCGGCGU | 20 | 4712 |

[0778] Table 9D provides exemplary targeting domains for knocking out the UL30 gene selected according to the fourth tier parameters. The targeting domains bind within the first 500 bp of the coding sequence (e.g., within 500 bp downstream from the start codon). The PAM is NNGRRV. It is contemplated herein that in an embodiment the targeting domain hybridizes to the target domain through complementary base pairing. Any of the targeting domains in the table can be used with a S. aureus Cas9 molecule that generates a double stranded break (Cas9 nuclease) or a single-stranded break (Cas9 nickase).

TABLE 9D

| | | | Target | |
|---|---|---|---|---|
| 4th Tier | DNA | | Site | Seq ID |
| gRNA Name | Strand | Targeting Domain | Length | NO: |
| HSV1-UL30-3882 | + | CAUAAACCGCGCGUGGAA | 18 | 12822 |
| HSV1-UL30-3883 | + | CCAUAAACCGCGCGUGGAA | 19 | 12823 |
| HSV1-UL30-3884 | + | UCCAUAAACCGCGCGUGGAA | 20 | 12824 |
| HSV1-UL30-3885 | + | GUCCAUAAACCGCGCGUGGAA | 21 | 12825 |
| HSV1-UL30-3886 | + | CGUCCAUAAACCGCGCGUGGAA | 22 | 12826 |
| HSV1-UL30-3887 | + | GCGUCCAUAAACCGCGCGUGGAA | 23 | 12827 |
| HSV1-UL30-3888 | + | GGCGUCCAUAAACCGCGCGUGGAA | 24 | 12828 |
| HSV1-UL30-3889 | + | CACCCGCGGGGCGAUGAA | 18 | 12829 |
| HSV1-UL30-3890 | + | GCACCCGCGGGGCGAUGAA | 19 | 12830 |
| HSV1-UL30-353 | + | AGCACCCGCGGGGCGAUGAA | 20 | 4781 |
| HSV1-UL30-3891 | + | CAGCACCCGCGGGGCGAUGAA | 21 | 12831 |
| HSV1-UL30-3892 | + | CCAGCACCCGCGGGGCGAUGAA | 22 | 12832 |
| HSV1-UL30-3893 | + | UCCAGCACCCGCGGGGCGAUGAA | 23 | 12833 |
| HSV1-UL30-3894 | + | GUCCAGCACCCGCGGGGCGAUGAA | 24 | 12834 |
| HSV1-UL30-3895 | + | ACUUUCCUCCGGGGGACA | 18 | 12835 |
| HSV1-UL30-3896 | + | GACUUUCCUCCGGGGGACA | 19 | 12836 |
| HSV1-UL30-371 | + | CGACUUUCCUCCGGGGGACA | 20 | 4792 |
| HSV1-UL30-3897 | + | CCGACUUUCCUCCGGGGGACA | 21 | 12837 |
| HSV1-UL30-3898 | + | GCCGACUUUCCUCCGGGGGACA | 22 | 12838 |
| HSV1-UL30-3899 | + | CGCCGACUUUCCUCCGGGGGACA | 23 | 12839 |
| HSV1-UL30-3900 | + | CCGCCGACUUUCCUCCGGGGGACA | 24 | 12840 |
| HSV1-UL30-3901 | + | GACAGCGGGCCGCCGCCA | 18 | 12841 |
| HSV1-UL30-3902 | + | GGACAGCGGGCCGCCGCCA | 19 | 12842 |
| HSV1-UL30-372 | + | GGGACAGCGGGCCGCCGCCA | 20 | 4793 |
| HSV1-UL30-3903 | + | GGGGACAGCGGGCCGCCGCCA | 21 | 12843 |
| HSV1-UL30-3904 | + | GGGGGACAGCGGGCCGCCGCCA | 22 | 12844 |
| HSV1-UL30-3905 | + | CGGGGGACAGCGGGCCGCCGCCA | 23 | 12845 |
| HSV1-UL30-3906 | + | CCGGGGGACAGCGGGCCGCCGCCA | 24 | 12846 |
| HSV1-UL30-3907 | + | GCUUCUGUUGCGUCCCGA | 18 | 12847 |
| HSV1-UL30-3908 | + | GGCUUCUGUUGCGUCCCGA | 19 | 12848 |
| HSV1-UL30-355 | + | CGGCUUCUGUUGCGUCCCGA | 20 | 4783 |
| HSV1-UL30-3909 | + | UCGGCUUCUGUUGCGUCCCGA | 21 | 12849 |
| HSV1-UL30-3910 | + | GUCGGCUUCUGUUGCGUCCCGA | 22 | 12850 |
| HSV1-UL30-3911 | + | GGUCGGCUUCUGUUGCGUCCCGA | 23 | 12851 |
| HSV1-UL30-3912 | + | CGGUCGGCUUCUGUUGCGUCCCGA | 24 | 12852 |
| HSV1-UL30-3913 | + | CCGGCGGGCGCAAAAAAC | 18 | 12853 |
| HSV1-UL30-3914 | + | GCCGGCGGGCGCAAAAAAC | 19 | 12854 |
| HSV1-UL30-366 | + | GGCCGGCGGGCGCAAAAAAC | 20 | 4790 |
| HSV1-UL30-3915 | + | GGGCCGGCGGGCGCAAAAAAC | 21 | 12855 |
| HSV1-UL30-3916 | + | AGGGCCGGCGGGCGCAAAAAAC | 22 | 12856 |
| HSV1-UL30-3917 | + | GAGGGCCGGCGGGCGCAAAAAAC | 23 | 12857 |
| HSV1-UL30-3918 | + | CGAGGGCCGGCGGGCGCAAAAAAC | 24 | 12858 |
| HSV1-UL30-3919 | + | CUCCAGGAUGUCGUACAC | 18 | 12859 |
| HSV1-UL30-3920 | + | UCUCCAGGAUGUCGUACAC | 19 | 12860 |
| HSV1-UL30-330 | + | UUCUCCAGGAUGUCGUACAC | 20 | 4768 |
| HSV1-UL30-3921 | + | GUUCUCCAGGAUGUCGUACAC | 21 | 12861 |
| HSV1-UL30-3922 | + | CGUUCUCCAGGAUGUCGUACAC | 22 | 12862 |
| HSV1-UL30-3923 | + | ACGUUCUCCAGGAUGUCGUACAC | 23 | 12863 |
| HSV1-UL30-3924 | + | CACGUUCUCCAGGAUGUCGUACAC | 24 | 12864 |
| HSV1-UL30-3925 | + | CAUCGCGGUUGUUCCCAC | 18 | 12865 |
| HSV1-UL30-3926 | + | ACAUCGCGGUUGUUCCCAC | 19 | 12866 |
| HSV1-UL30-3927 | + | AACAUCGCGGUUGUUCCCAC | 20 | 12867 |
| HSV1-UL30-3928 | + | AAACAUCGCGGUUGUUCCCAC | 21 | 12868 |
| HSV1-UL30-3929 | + | AAAACAUCGCGGUUGUUCCCAC | 22 | 12869 |
| HSV1-UL30-3930 | + | GAAAACAUCGCGGUUGUUCCCAC | 23 | 12870 |
| HSV1-UL30-3931 | + | GGAAAACAUCGCGGUUGUUCCCAC | 24 | 12871 |
| HSV1-UL30-3932 | + | ACAGCGGGCCGCCGCCAC | 18 | 12872 |
| HSV1-UL30-3933 | + | GACAGCGGGCCGCCGCCAC | 19 | 12873 |
| HSV1-UL30-118 | + | GGACAGCGGGCCGCCGCCAC | 20 | 3294 |
| HSV1-UL30-3934 | + | GGGACAGCGGGCCGCCGCCAC | 21 | 12874 |
| HSV1-UL30-3935 | + | GGGGACAGCGGGCCGCCGCCAC | 22 | 12875 |
| HSV1-UL30-3936 | + | GGGGGACAGCGGGCCGCCGCCAC | 23 | 12876 |
| HSV1-UL30-3937 | + | CGGGGGACAGCGGGCCGCCGCCAC | 24 | 12877 |
| HSV1-UL30-3938 | + | GAAGCCGCCCGACCCGAC | 18 | 12878 |
| HSV1-UL30-3939 | + | AGAAGCCGCCCGACCCGAC | 19 | 12879 |
| HSV1-UL30-338 | + | CAGAAGCCGCCCGACCCGAC | 20 | 4774 |
| HSV1-UL30-3940 | + | CCAGAAGCCGCCCGACCCGAC | 21 | 12880 |
| HSV1-UL30-3941 | + | GCCAGAAGCCGCCCGACCCGAC | 22 | 12881 |
| HSV1-UL30-3942 | + | GGCCAGAAGCCGCCCGACCCGAC | 23 | 12882 |
| HSV1-UL30-3943 | + | CGGCCAGAAGCCGCCCGACCCGAC | 24 | 12883 |
| HSV1-UL30-3944 | + | CUUCUGUUGCGUCCCGAC | 18 | 12884 |
| HSV1-UL30-3945 | + | GCUUCUGUUGCGUCCCGAC | 19 | 12885 |
| HSV1-UL30-91 | + | GGCUUCUGUUGCGUCCCGAC | 20 | 3166 |
| HSV1-UL30-3946 | + | CGGCUUCUGUUGCGUCCCGAC | 21 | 12886 |
| HSV1-UL30-3947 | + | UCGGCUUCUGUUGCGUCCCGAC | 22 | 12887 |
| HSV1-UL30-3948 | + | GUCGGCUUCUGUUGCGUCCCGAC | 23 | 12888 |
| HSV1-UL30-3949 | + | GGUCGGCUUCUGUUGCGUCCCGAC | 24 | 12889 |
| HSV1-UL30-3950 | + | UCCCCCCCGCAGUACACC | 18 | 12890 |
| HSV1-UL30-3951 | + | GUCCCCCCCGCAGUACACC | 19 | 12891 |
| HSV1-UL30-341 | + | CGUCCCCCCCGCAGUACACC | 20 | 4776 |
| HSV1-UL30-3952 | + | UCGUCCCCCCCGCAGUACACC | 21 | 12892 |
| HSV1-UL30-3953 | + | CUCGUCCCCCCCGCAGUACACC | 22 | 12893 |
| HSV1-UL30-3954 | + | GCUCGUCCCCCCCGCAGUACACC | 23 | 12894 |
| HSV1-UL30-3955 | + | CGCUCGUCCCCCCCGCAGUACACC | 24 | 12895 |
| HSV1-UL30-3956 | + | CAUCCUCGUCCAGCACCC | 18 | 12896 |
| HSV1-UL30-3957 | + | GCAUCCUCGUCCAGCACCC | 19 | 12897 |
| HSV1-UL30-350 | + | GGCAUCCUCGUCCAGCACCC | 20 | 4779 |
| HSV1-UL30-3958 | + | GGGCAUCCUCGUCCAGCACCC | 21 | 12898 |
| HSV1-UL30-3959 | + | GGGGCAUCCUCGUCCAGCACCC | 22 | 12899 |
| HSV1-UL30-3960 | + | GGGGGCAUCCUCGUCCAGCACCC | 23 | 12900 |
| HSV1-UL30-3961 | + | GGGGGGCAUCCUCGUCCAGCACCC | 24 | 12901 |
| HSV1-UL30-3962 | + | GGCCGCCGACUUUCCUCC | 18 | 12902 |
| HSV1-UL30-3963 | + | UGGCCGCCGACUUUCCUCC | 19 | 12903 |
| HSV1-UL30-113 | + | CUGGCCGCCGACUUUCCUCC | 20 | 3291 |
| HSV1-UL30-3964 | + | CCUGGCCGCCGACUUUCCUCC | 21 | 12904 |
| HSV1-UL30-3965 | + | CCCUGGCCGCCGACUUUCCUCC | 22 | 12905 |
| HSV1-UL30-3966 | + | GCCCUGGCCGCCGACUUUCCUCC | 23 | 12906 |
| HSV1-UL30-3967 | + | CGCCCUGGCCGCCGACUUUCCUCC | 24 | 12907 |
| HSV1-UL30-3968 | + | GGGUCCCCGGCUGGCUCC | 18 | 12908 |
| HSV1-UL30-3969 | + | GGGGUCCCCGGCUGGCUCC | 19 | 12909 |
| HSV1-UL30-363 | + | GGGGGUCCCCGGCUGGCUCC | 20 | 4787 |
| HSV1-UL30-3970 | + | CGGGGGUCCCCGGCUGGCUCC | 21 | 12910 |
| HSV1-UL30-3971 | + | GCGGGGGUCCCCGGCUGGCUCC | 22 | 12911 |
| HSV1-UL30-3972 | + | GGCGGGGGUCCCCGGCUGGCUCC | 23 | 12912 |
| HSV1-UL30-3973 | + | AGGCGGGGGUCCCCGGCUGGCUCC | 24 | 12913 |
| HSV1-UL30-3974 | + | ACCCCGGCGCGCUUCUCC | 18 | 12914 |
| HSV1-UL30-3975 | + | CACCCCGGCGCGCUUCUCC | 19 | 12915 |
| HSV1-UL30-77 | + | GCACCCCGGCGCGCUUCUCC | 20 | 3271 |
| HSV1-UL30-3976 | + | UGCACCCCGGCGCGCUUCUCC | 21 | 12916 |
| HSV1-UL30-3977 | + | GUGCACCCCGGCGCGCUUCUCC | 22 | 12917 |
| HSV1-UL30-3978 | + | CGUGCACCCCGGCGCGCUUCUCC | 23 | 12918 |
| HSV1-UL30-3979 | + | UCGUGCACCCCGGCGCGCUUCUCC | 24 | 12919 |
| HSV1-UL30-3980 | + | GGUGGGGUUGAACCCCGC | 18 | 12920 |
| HSV1-UL30-3981 | + | CGGUGGGGUUGAACCCCGC | 19 | 12921 |
| HSV1-UL30-62 | + | ACGGUGGGGUUGAACCCCGC | 20 | 3152 |
| HSV1-UL30-3982 | + | GACGGUGGGGUUGAACCCCGC | 21 | 12922 |
| HSV1-UL30-3983 | + | UGACGGUGGGGUUGAACCCCGC | 22 | 12923 |
| HSV1-UL30-3984 | + | GUGACGGUGGGGUUGAACCCCGC | 23 | 12924 |
| HSV1-UL30-3985 | + | GGUGACGGUGGGGUUGAACCCCGC | 24 | 12925 |
| HSV1-UL30-3986 | + | GUCCCCGGCUGGCUCCGC | 18 | 12926 |
| HSV1-UL30-3987 | + | GGUCCCCGGCUGGCUCCGC | 19 | 12927 |
| HSV1-UL30-364 | + | GGGUCCCCGGCUGGCUCCGC | 20 | 4788 |
| HSV1-UL30-3988 | + | GGGGUCCCCGGCUGGCUCCGC | 21 | 12928 |
| HSV1-UL30-3989 | + | GGGGGUCCCCGGCUGGCUCCGC | 22 | 12929 |
| HSV1-UL30-3990 | + | CGGGGGUCCCCGGCUGGCUCCGC | 23 | 12930 |
| HSV1-UL30-3991 | + | GCGGGGGUCCCCGGCUGGCUCCGC | 24 | 12931 |
| HSV1-UL30-3992 | + | GGCGUCCAUAAACCGCGC | 18 | 12932 |
| HSV1-UL30-3993 | + | UGGCGUCCAUAAACCGCGC | 19 | 12933 |
| HSV1-UL30-3994 | + | AUGGCGUCCAUAAACCGCGC | 20 | 12934 |
| HSV1-UL30-3995 | + | GAUGGCGUCCAUAAACCGCGC | 21 | 12935 |
| HSV1-UL30-3996 | + | UGAUGGCGUCCAUAAACCGCGC | 22 | 12936 |
| HSV1-UL30-3997 | + | GUGAUGGCGUCCAUAAACCGCGC | 23 | 12937 |
| HSV1-UL30-3998 | + | UGUGAUGGCGUCCAUAAACCGCGC | 24 | 12938 |
| HSV1-UL30-3999 | + | UACACCUUGGGGGCGCGC | 18 | 12939 |
| HSV1-UL30-4000 | + | GUACACCUUGGGGGCGCGC | 19 | 12940 |
| HSV1-UL30-344 | + | AGUACACCUUGGGGGCGCGC | 20 | 4777 |
| HSV1-UL30-4001 | + | CAGUACACCUUGGGGGCGCGC | 21 | 12941 |
| HSV1-UL30-4002 | + | GCAGUACACCUUGGGGGCGCGC | 22 | 12942 |
| HSV1-UL30-4003 | + | CGCAGUACACCUUGGGGGCGCGC | 23 | 12943 |
| HSV1-UL30-4004 | + | CCGCAGUACACCUUGGGGGCGCGC | 24 | 12944 |
| HSV1-UL30-4005 | + | CCACGCCGCCCCACAGGC | 18 | 12945 |
| HSV1-UL30-4006 | + | UCCACGCCGCCCCACAGGC | 19 | 12946 |
| HSV1-UL30-336 | + | GUCCACGCCGCCCCACAGGC | 20 | 4772 |
| HSV1-UL30-4007 | + | GGUCCACGCCGCCCCACAGGC | 21 | 12947 |
| HSV1-UL30-4008 | + | UGGUCCACGCCGCCCCACAGGC | 22 | 12948 |
| HSV1-UL30-4009 | + | GUGGUCCACGCCGCCCCACAGGC | 23 | 12949 |
| HSV1-UL30-4010 | + | CGUGGUCCACGCCGCCCCACAGGC | 24 | 12950 |
| HSV1-UL30-4011 | + | AGGCGCGAGCGCCGCGGC | 18 | 12951 |
| HSV1-UL30-4012 | + | CAGGCGCGAGCGCCGCGGC | 19 | 12952 |
| HSV1-UL30-337 | + | ACAGGCGCGAGCGCCGCGGC | 20 | 4773 |
| HSV1-UL30-4013 | + | CACAGGCGCGAGCGCCGCGGC | 21 | 12953 |
| HSV1-UL30-4014 | + | CCACAGGCGCGAGCGCCGCGGC | 22 | 12954 |
| HSV1-UL30-4015 | + | CCCACAGGCGCGAGCGCCGCGGC | 23 | 12955 |
| HSV1-UL30-4016 | + | CCCCACAGGCGCGAGCGCCGCGGC | 24 | 12956 |
| HSV1-UL30-4017 | + | UGGCCGCCGACUUUCCUC | 18 | 12957 |
| HSV1-UL30-4018 | + | CUGGCCGCCGACUUUCCUC | 19 | 12958 |
| HSV1-UL30-112 | + | CCUGGCCGCCGACUUUCCUC | 20 | 3290 |
| HSV1-UL30-4019 | + | CCCUGGCCGCCGACUUUCCUC | 21 | 12959 |
| HSV1-UL30-4020 | + | GCCCUGGCCGCCGACUUUCCUC | 22 | 12960 |
| HSV1-UL30-4021 | + | CGCCCUGGCCGCCGACUUUCCUC | 23 | 12961 |
| HSV1-UL30-4022 | + | CCGCCCUGGCCGCCGACUUUCCUC | 24 | 12962 |
| HSV1-UL30-4023 | + | CACCCCGGCGCGCUUCUC | 18 | 12963 |
| HSV1-UL30-4024 | + | GCACCCCGGCGCGCUUCUC | 19 | 12964 |
| HSV1-UL30-76 | + | UGCACCCCGGCGCGCUUCUC | 20 | 3270 |
| HSV1-UL30-4025 | + | GUGCACCCCGGCGCGCUUCUC | 21 | 12965 |
| HSV1-UL30-4026 | + | CGUGCACCCCGGCGCGCUUCUC | 22 | 12966 |
| HSV1-UL30-4027 | + | UCGUGCACCCCGGCGCGCUUCUC | 23 | 12967 |
| HSV1-UL30-4028 | + | GUCGUGCACCCCGGCGCGCUUCUC | 24 | 12968 |
| HSV1-UL30-4029 | + | AGUUUUGCCUCAAACAAG | 18 | 12969 |
| HSV1-UL30-4030 | + | AAGUUUUGCCUCAAACAAG | 19 | 12970 |
| HSV1-UL30-360 | + | AAAGUUUUGCCUCAAACAAG | 20 | 4786 |
| HSV1-UL30-4031 | + | AAAAGUUUUGCCUCAAACAAG | 21 | 12971 |
| HSV1-UL30-4032 | + | UAAAAGUUUUGCCUCAAACAAG | 22 | 12972 |
| HSV1-UL30-4033 | + | GUAAAAGUUUUGCCUCAAACAAG | 23 | 12973 |
| HSV1-UL30-4034 | + | UGUAAAAGUUUUGCCUCAAACAAG | 24 | 12974 |
| HSV1-UL30-4035 | + | AAGCCGCCCGACCCGACG | 18 | 12975 |
| HSV1-UL30-4036 | + | GAAGCCGCCCGACCCGACG | 19 | 12976 |
| HSV1-UL30-68 | + | AGAAGCCGCCCGACCCGACG | 20 | 3155 |
| HSV1-UL30-4037 | + | CAGAAGCCGCCCGACCCGACG | 21 | 12977 |
| HSV1-UL30-4038 | + | CCAGAAGCCGCCCGACCCGACG | 22 | 12978 |
| HSV1-UL30-4039 | + | GCCAGAAGCCGCCCGACCCGACG | 23 | 12979 |
| HSV1-UL30-4040 | + | GGCCAGAAGCCGCCCGACCCGACG | 24 | 12980 |
| HSV1-UL30-4041 | + | ACGUGAAAGACGGUGACG | 18 | 12981 |
| HSV1-UL30-4042 | + | CACGUGAAAGACGGUGACG | 19 | 12982 |
| HSV1-UL30-331 | + | ACACGUGAAAGACGGUGACG | 20 | 4769 |
| HSV1-UL30-4043 | + | UACACGUGAAAGACGGUGACG | 21 | 12983 |
| HSV1-UL30-4044 | + | GUACACGUGAAAGACGGUGACG | 22 | 12984 |
| HSV1-UL30-4045 | + | CGUACACGUGAAAGACGGUGACG | 23 | 12985 |
| HSV1-UL30-4046 | + | UCGUACACGUGAAAGACGGUGACG | 24 | 12986 |
| HSV1-UL30-4047 | + | AUCCUCGUCCAGCACCCG | 18 | 12987 |
| HSV1-UL30-4048 | + | CAUCCUCGUCCAGCACCCG | 19 | 12988 |
| HSV1-UL30-82 | + | GCAUCCUCGUCCAGCACCCG | 20 | 3161 |
| HSV1-UL30-4049 | + | GGCAUCCUCGUCCAGCACCCG | 21 | 12989 |
| HSV1-UL30-4050 | + | GGGCAUCCUCGUCCAGCACCCG | 22 | 12990 |
| HSV1-UL30-4051 | + | GGGGCAUCCUCGUCCAGCACCCG | 23 | 12991 |
| HSV1-UL30-4052 | + | GGGGGCAUCCUCGUCCAGCACCCG | 24 | 12992 |
| HSV1-UL30-4053 | + | CGGUGGGGUUGAACCCCG | 18 | 12993 |
| HSV1-UL30-4054 | + | ACGGUGGGGUUGAACCCCG | 19 | 12994 |
| HSV1-UL30-334 | + | GACGGUGGGGUUGAACCCCG | 20 | 4771 |
| HSV1-UL30-4055 | + | UGACGGUGGGGUUGAACCCCG | 21 | 12995 |
| HSV1-UL30-4056 | + | GUGACGGUGGGGUUGAACCCCG | 22 | 12996 |
| HSV1-UL30-4057 | + | GGUGACGGUGGGGUUGAACCCCG | 23 | 12997 |
| HSV1-UL30-4058 | + | CGGUGACGGUGGGGUUGAACCCCG | 24 | 12998 |
| HSV1-UL30-4059 | + | CUGGCUCCGCGAGGGCCG | 18 | 12999 |
| HSV1-UL30-4060 | + | GCUGGCUCCGCGAGGGCCG | 19 | 13000 |
| HSV1-UL30-365 | + | GGCUGGCUCCGCGAGGGCCG | 20 | 4789 |
| HSV1-UL30-4061 | + | CGGCUGGCUCCGCGAGGGCCG | 21 | 13001 |
| HSV1-UL30-4062 | + | CCGGCUGGCUCCGCGAGGGCCG | 22 | 13002 |
| HSV1-UL30-4063 | + | CCCGGCUGGCUCCGCGAGGGCCG | 23 | 13003 |
| HSV1-UL30-4064 | + | CCCCGGCUGGCUCCGCGAGGGCCG | 24 | 13004 |
| HSV1-UL30-4065 | + | GCCGCCGACUUUCCUCCG | 18 | 13005 |
| HSV1-UL30-4066 | + | GGCCGCCGACUUUCCUCCG | 19 | 13006 |
| HSV1-UL30-114 | + | UGGCCGCCGACUUUCCUCCG | 20 | 3176 |
| HSV1-UL30-4067 | + | CUGGCCGCCGACUUUCCUCCG | 21 | 13007 |
| HSV1-UL30-4068 | + | CCUGGCCGCCGACUUUCCUCCG | 22 | 13008 |
| HSV1-UL30-4069 | + | CCCUGGCCGCCGACUUUCCUCCG | 23 | 13009 |
| HSV1-UL30-4070 | + | GCCCUGGCCGCCGACUUUCCUCCG | 24 | 13010 |
| HSV1-UL30-4071 | + | CCCCGGCGCGCUUCUCCG | 18 | 13011 |
| HSV1-UL30-4072 | + | ACCCCGGCGCGCUUCUCCG | 19 | 13012 |
| HSV1-UL30-78 | + | CACCCCGGCGCGCUUCUCCG | 20 | 3272 |
| HSV1-UL30-4073 | + | GCACCCCGGCGCGCUUCUCCG | 21 | 13013 |
| HSV1-UL30-4074 | + | UGCACCCCGGCGCGCUUCUCCG | 22 | 13014 |
| HSV1-UL30-4075 | + | GUGCACCCCGGCGCGCUUCUCCG | 23 | 13015 |
| HSV1-UL30-4076 | + | CGUGCACCCCGGCGCGCUUCUCCG | 24 | 13016 |
| HSV1-UL30-4077 | + | GCCGCCCGACCCGACGCG | 18 | 13017 |
| HSV1-UL30-4078 | + | AGCCGCCCGACCCGACGCG | 19 | 13018 |
| HSV1-UL30-340 | + | AAGCCGCCCGACCCGACGCG | 20 | 4775 |
| HSV1-UL30-4079 | + | GAAGCCGCCCGACCCGACGCG | 21 | 13019 |
| HSV1-UL30-4080 | + | AGAAGCCGCCCGACCCGACGCG | 22 | 13020 |
| HSV1-UL30-4081 | + | CAGAAGCCGCCCGACCCGACGCG | 23 | 13021 |
| HSV1-UL30-4082 | + | CCAGAAGCCGCCCGACCCGACGCG | 24 | 13022 |
| HSV1-UL30-4083 | + | GCGUCCAUAAACCGCGCG | 18 | 13023 |
| HSV1-UL30-4084 | + | GGCGUCCAUAAACCGCGCG | 19 | 13024 |
| HSV1-UL30-2857 | + | UGGCGUCCAUAAACCGCGCG | 20 | 11797 |
| HSV1-UL30-4085 | + | AUGGCGUCCAUAAACCGCGCG | 21 | 13025 |
| HSV1-UL30-4086 | + | GAUGGCGUCCAUAAACCGCGCG | 22 | 13026 |
| HSV1-UL30-4087 | + | UGAUGGCGUCCAUAAACCGCGCG | 23 | 13027 |
| HSV1-UL30-4088 | + | GUGAUGGCGUCCAUAAACCGCGCG | 24 | 13028 |
| HSV1-UL30-4089 | + | GUUUUGCCUCAAACAAGG | 18 | 13029 |
| HSV1-UL30-4090 | + | AGUUUUGCCUCAAACAAGG | 19 | 13030 |
| HSV1-UL30-99 | + | AAGUUUUGCCUCAAACAAGG | 20 | 3282 |
| HSV1-UL30-4091 | + | AAAGUUUUGCCUCAAACAAGG | 21 | 13031 |
| HSV1-UL30-4092 | + | AAAAGUUUUGCCUCAAACAAGG | 22 | 13032 |
| HSV1-UL30-4093 | + | UAAAAGUUUUGCCUCAAACAAGG | 23 | 13033 |
| HSV1-UL30-4094 | + | GUAAAAGUUUUGCCUCAAACAAGG | 24 | 13034 |
| HSV1-UL30-4095 | + | GUCCCGACUGGGGCGAGG | 18 | 13035 |
| HSV1-UL30-4096 | + | CGUCCCGACUGGGGCGAGG | 19 | 13036 |
| HSV1-UL30-358 | + | GCGUCCCGACUGGGGCGAGG | 20 | 4785 |
| HSV1-UL30-4097 | + | UGCGUCCCGACUGGGGCGAGG | 21 | 13037 |
| HSV1-UL30-4098 | + | UUGCGUCCCGACUGGGGCGAGG | 22 | 13038 |
| HSV1-UL30-4099 | + | GUUGCGUCCCGACUGGGGCGAGG | 23 | 13039 |
| HSV1-UL30-4100 | + | UGUUGCGUCCCGACUGGGGCGAGG | 24 | 13040 |
| HSV1-UL30-4101 | + | CCCGGCGCGCUUCUCCGG | 18 | 13041 |
| HSV1-UL30-4102 | + | CCCCGGCGCGCUUCUCCGG | 19 | 13042 |
| HSV1-UL30-79 | + | ACCCCGGCGCGCUUCUCCGG | 20 | 3273 |
| HSV1-UL30-4103 | + | CACCCCGGCGCGCUUCUCCGG | 21 | 13043 |
| HSV1-UL30-4104 | + | GCACCCCGGCGCGCUUCUCCGG | 22 | 13044 |
| HSV1-UL30-4105 | + | UGCACCCCGGCGCGCUUCUCCGG | 23 | 13045 |
| HSV1-UL30-4106 | + | GUGCACCCCGGCGCGCUUCUCCGG | 24 | 13046 |
| HSV1-UL30-4107 | + | AAGACGGUGACGGUGGGG | 18 | 13047 |
| HSV1-UL30-4108 | + | AAAGACGGUGACGGUGGGG | 19 | 13048 |
| HSV1-UL30-333 | + | GAAAGACGGUGACGGUGGGG | 20 | 4770 |
| HSV1-UL30-4109 | + | UGAAAGACGGUGACGGUGGGG | 21 | 13049 |
| HSV1-UL30-4110 | + | GUGAAAGACGGUGACGGUGGGG | 22 | 13050 |
| HSV1-UL30-4111 | + | CGUGAAAGACGGUGACGGUGGGG | 23 | 13051 |
| HSV1-UL30-4112 | + | ACGUGAAAGACGGUGACGGUGGGG | 24 | 13052 |
| HSV1-UL30-4113 | + | UGUUGCGUCCCGACUGGG | 18 | 13053 |
| HSV1-UL30-4114 | + | CUGUUGCGUCCCGACUGGG | 19 | 13054 |
| HSV1-UL30-357 | + | UCUGUUGCGUCCCGACUGGG | 20 | 4784 |
| HSV1-UL30-4115 | + | UUCUGUUGCGUCCCGACUGGG | 21 | 13055 |
| HSV1-UL30-4116 | + | CUUCUGUUGCGUCCCGACUGGG | 22 | 13056 |
| HSV1-UL30-4117 | + | GCUUCUGUUGCGUCCCGACUGGG | 23 | 13057 |
| HSV1-UL30-4118 | + | GGCUUCUGUUGCGUCCCGACUGGG | 24 | 13058 |
| HSV1-UL30-4119 | + | CCCCCCCGCAGUACACCU | 18 | 13059 |
| HSV1-UL30-4120 | + | UCCCCCCCGCAGUACACCU | 19 | 13060 |
| HSV1-UL30-70 | + | GUCCCCCCCGCAGUACACCU | 20 | 3157 |
| HSV1-UL30-4121 | + | CGUCCCCCCCGCAGUACACCU | 21 | 13061 |
| HSV1-UL30-4122 | + | UCGUCCCCCCCGCAGUACACCU | 22 | 13062 |
| HSV1-UL30-4123 | + | CUCGUCCCCCCCGCAGUACACCU | 23 | 13063 |
| HSV1-UL30-4124 | + | GCUCGUCCCCCCCGCAGUACACCU | 24 | 13064 |
| HSV1-UL30-4125 | + | CUGGCCGCCGACUUUCCU | 18 | 13065 |
| HSV1-UL30-4126 | + | CCUGGCCGCCGACUUUCCU | 19 | 13066 |
| HSV1-UL30-367 | + | CCCUGGCCGCCGACUUUCCU | 20 | 4791 |
| HSV1-UL30-4127 | + | GCCCUGGCCGCCGACUUUCCU | 21 | 13067 |
| HSV1-UL30-4128 | + | CGCCCUGGCCGCCGACUUUCCU | 22 | 13068 |
| HSV1-UL30-4129 | + | CCGCCCUGGCCGCCGACUUUCCU | 23 | 13069 |
| HSV1-UL30-4130 | + | GCCGCCCUGGCCGCCGACUUUCCU | 24 | 13070 |
| HSV1-UL30-4131 | + | GCACCCCGGCGCGCUUCU | 18 | 13071 |
| HSV1-UL30-4132 | + | UGCACCCCGGCGCGCUUCU | 19 | 13072 |
| HSV1-UL30-345 | + | GUGCACCCCGGCGCGCUUCU | 20 | 4778 |
| HSV1-UL30-4133 | + | CGUGCACCCCGGCGCGCUUCU | 21 | 13073 |
| HSV1-UL30-4134 | + | UCGUGCACCCCGGCGCGCUUCU | 22 | 13074 |
| HSV1-UL30-4135 | + | GUCGUGCACCCCGGCGCGCUUCU | 23 | 13075 |
| HSV1-UL30-4136 | + | CGUCGUGCACCCCGGCGCGCUUCU | 24 | 13076 |
| HSV1-UL30-4137 | + | CCCCCCGCAGUACACCUU | 18 | 13077 |
| HSV1-UL30-4138 | + | CCCCCCCGCAGUACACCUU | 19 | 13078 |
| HSV1-UL30-71 | + | UCCCCCCCGCAGUACACCUU | 20 | 3267 |
| HSV1-UL30-4139 | + | GUCCCCCCCGCAGUACACCUU | 21 | 13079 |
| HSV1-UL30-4140 | + | CGUCCCCCCCGCAGUACACCUU | 22 | 13080 |
| HSV1-UL30-4141 | + | UCGUCCCCCCCGCAGUACACCUU | 23 | 13081 |
| HSV1-UL30-4142 | + | CUCGUCCCCCCCGCAGUACACCUU | 24 | 13082 |
| HSV1-UL30-4143 | − | GCCCCAGUCGGGACGCAA | 18 | 13083 |
| HSV1-UL30-4144 | − | CGCCCCAGUCGGGACGCAA | 19 | 13084 |
| HSV1-UL30-251 | − | UCGCCCCAGUCGGGACGCAA | 20 | 4717 |
| HSV1-UL30-4145 | − | CUCGCCCCAGUCGGGACGCAA | 21 | 13085 |
| HSV1-UL30-4146 | − | CCUCGCCCCAGUCGGGACGCAA | 22 | 13086 |
| HSV1-UL30-4147 | − | ACCUCGCCCCAGUCGGGACGCAA | 23 | 13087 |
| HSV1-UL30-4148 | − | UACCUCGCCCCAGUCGGGACGCAA | 24 | 13088 |
| HSV1-UL30-4149 | − | GGACGCAACAGAAGCCGA | 18 | 13089 |
| HSV1-UL30-4150 | − | GGGACGCAACAGAAGCCGA | 19 | 13090 |
| HSV1-UL30-252 | − | CGGGACGCAACAGAAGCCGA | 20 | 4718 |
| HSV1-UL30-4151 | − | UCGGGACGCAACAGAAGCCGA | 21 | 13091 |
| HSV1-UL30-4152 | − | GUCGGGACGCAACAGAAGCCGA | 22 | 13092 |
| HSV1-UL30-4153 | − | AGUCGGGACGCAACAGAAGCCGA | 23 | 13093 |
| HSV1-UL30-4154 | − | CAGUCGGGACGCAACAGAAGCCGA | 24 | 13094 |
| HSV1-UL30-4155 | − | UACGACAUCCUGGAGAAC | 18 | 13095 |
| HSV1-UL30-4156 | − | GUACGACAUCCUGGAGAAC | 19 | 13096 |
| HSV1-UL30-281 | − | UGUACGACAUCCUGGAGAAC | 20 | 4737 |
| HSV1-UL30-4157 | − | GUGUACGACAUCCUGGAGAAC | 21 | 13097 |
| HSV1-UL30-4158 | − | CGUGUACGACAUCCUGGAGAAC | 22 | 13098 |
| HSV1-UL30-4159 | − | ACGUGUACGACAUCCUGGAGAAC | 23 | 13099 |
| HSV1-UL30-4160 | − | CACGUGUACGACAUCCUGGAGAAC | 24 | 13100 |
| HSV1-UL30-4161 | − | UGGACGAGGAUGCCCCCC | 18 | 13101 |
| HSV1-UL30-4162 | − | CUGGACGAGGAUGCCCCCC | 19 | 13102 |
| HSV1-UL30-24 | − | GCUGGACGAGGAUGCCCCCC | 20 | 3247 |
| HSV1-UL30-4163 | − | UGCUGGACGAGGAUGCCCCCC | 21 | 13103 |
| HSV1-UL30-4164 | − | GUGCUGGACGAGGAUGCCCCCC | 22 | 13104 |
| HSV1-UL30-4165 | − | GGUGCUGGACGAGGAUGCCCCCC | 23 | 13105 |
| HSV1-UL30-4166 | − | GGGUGCUGGACGAGGAUGCCCCCC | 24 | 13106 |
| HSV1-UL30-4167 | − | CUGGACGAGGAUGCCCCC | 18 | 13107 |
| HSV1-UL30-4168 | − | GCUGGACGAGGAUGCCCCC | 19 | 13108 |
| HSV1-UL30-259 | − | UGCUGGACGAGGAUGCCCCC | 20 | 4725 |
| HSV1-UL30-4169 | − | GUGCUGGACGAGGAUGCCCCC | 21 | 13109 |
| HSV1-UL30-4170 | − | GGUGCUGGACGAGGAUGCCCCC | 22 | 13110 |
| HSV1-UL30-4171 | − | GGGUGCUGGACGAGGAUGCCCCC | 23 | 13111 |
| HSV1-UL30-4172 | − | CGGGUGCUGGACGAGGAUGCCCCC | 24 | 13112 |
| HSV1-UL30-4173 | − | CGGCGGCCCGCUGUCCCC | 18 | 13113 |
| HSV1-UL30-4174 | − | GCGGCGGCCCGCUGUCCCC | 19 | 13114 |
| HSV1-UL30-1 | − | GGCGGCGGCCCGCUGUCCCC | 20 | 3232 |
| HSV1-UL30-4175 | − | UGGCGGCGGCCCGCUGUCCCC | 21 | 13115 |
| HSV1-UL30-4176 | − | GUGGCGGCGGCCCGCUGUCCCC | 22 | 13116 |
| HSV1-UL30-4177 | − | GGUGGCGGCGGCCCGCUGUCCCC | 23 | 13117 |
| HSV1-UL30-4178 | − | CGGUGGCGGCGGCCCGCUGUCCCC | 24 | 13118 |
| HSV1-UL30-4179 | − | GCGGCGGCCCGCUGUCCC | 18 | 13119 |
| HSV1-UL30-4180 | − | GGCGGCGGCCCGCUGUCCC | 19 | 13120 |
| HSV1-UL30-237 | − | UGGCGGCGGCCCGCUGUCCC | 20 | 4709 |
| HSV1-UL30-4181 | − | GUGGCGGCGGCCCGCUGUCCC | 21 | 13121 |
| HSV1-UL30-4182 | − | GGUGGCGGCGGCCCGCUGUCCC | 22 | 13122 |
| HSV1-UL30-4183 | − | CGGUGGCGGCGGCCCGCUGUCCC | 23 | 13123 |
| HSV1-UL30-4184 | − | CCGGUGGCGGCGGCCCGCUGUCCC | 24 | 13124 |
| HSV1-UL30-4185 | − | GCCCUCGCGGAGCCAGCC | 18 | 13125 |
| HSV1-UL30-4186 | − | GGCCCUCGCGGAGCCAGCC | 19 | 13126 |
| HSV1-UL30-13 | − | CGGCCCUCGCGGAGCCAGCC | 20 | 3241 |
| HSV1-UL30-4187 | − | CCGGCCCUCGCGGAGCCAGCC | 21 | 13127 |
| HSV1-UL30-4188 | − | GCCGGCCCUCGCGGAGCCAGCC | 22 | 13128 |
| HSV1-UL30-4189 | − | CGCCGGCCCUCGCGGAGCCAGCC | 23 | 13129 |
| HSV1-UL30-4190 | − | CCGCCGGCCCUCGCGGAGCCAGCC | 24 | 13130 |
| HSV1-UL30-4191 | − | UUCACGUGUACGACAUCC | 18 | 13131 |
| HSV1-UL30-4192 | − | UUUCACGUGUACGACAUCC | 19 | 13132 |
| HSV1-UL30-52 | − | CUUUCACGUGUACGACAUCC | 20 | 3146 |
| HSV1-UL30-4193 | − | UCUUUCACGUGUACGACAUCC | 21 | 13133 |
| HSV1-UL30-4194 | − | GUCUUUCACGUGUACGACAUCC | 22 | 13134 |
| HSV1-UL30-4195 | − | CGUCUUUCACGUGUACGACAUCC | 23 | 13135 |
| HSV1-UL30-4196 | − | CCGUCUUUCACGUGUACGACAUCC | 24 | 13136 |
| HSV1-UL30-4197 | − | GGCCCUCGCGGAGCCAGC | 18 | 13137 |
| HSV1-UL30-4198 | − | CGGCCCUCGCGGAGCCAGC | 19 | 13138 |
| HSV1-UL30-12 | − | CCGGCCCUCGCGGAGCCAGC | 20 | 3240 |
| HSV1-UL30-4199 | − | GCCGGCCCUCGCGGAGCCAGC | 21 | 13139 |
| HSV1-UL30-4200 | − | CGCCGGCCCUCGCGGAGCCAGC | 22 | 13140 |
| HSV1-UL30-4201 | − | CCGCCGGCCCUCGCGGAGCCAGC | 23 | 13141 |
| HSV1-UL30-4202 | − | CCCGCCGGCCCUCGCGGAGCCAGC | 24 | 13142 |
| HSV1-UL30-4203 | − | CGGAGGAAAGUCGGCGGC | 18 | 13143 |
| HSV1-UL30-4204 | − | CCGGAGGAAAGUCGGCGGC | 19 | 13144 |
| HSV1-UL30-241 | − | CCCGGAGGAAAGUCGGCGGC | 20 | 4711 |
| HSV1-UL30-4205 | − | CCCCGGAGGAAAGUCGGCGGC | 21 | 13145 |
| HSV1-UL30-4206 | − | CCCCCGGAGGAAAGUCGGCGGC | 22 | 13146 |
| HSV1-UL30-4207 | − | UCCCCCGGAGGAAAGUCGGCGGC | 23 | 13147 |
| HSV1-UL30-4208 | − | GUCCCCCGGAGGAAAGUCGGCGGC | 24 | 13148 |
| HSV1-UL30-4209 | − | UCGCGCCUGUGGGGCGGC | 18 | 13149 |
| HSV1-UL30-4210 | − | CUCGCGCCUGUGGGGCGGC | 19 | 13150 |
| HSV1-UL30-275 | − | GCUCGCGCCUGUGGGGCGGC | 20 | 4733 |
| HSV1-UL30-4211 | − | CGCUCGCGCCUGUGGGGCGGC | 21 | 13151 |
| HSV1-UL30-4212 | − | GCGCUCGCGCCUGUGGGGCGGC | 22 | 13152 |
| HSV1-UL30-4213 | − | GGCGCUCGCGCCUGUGGGGCGGC | 23 | 13153 |
| HSV1-UL30-4214 | − | CGGCGCUCGCGCCUGUGGGGCGGC | 24 | 13154 |
| HSV1-UL30-4215 | − | GCCCCCAAGGUGUACUGC | 18 | 13155 |
| HSV1-UL30-4216 | − | CGCCCCCAAGGUGUACUGC | 19 | 13156 |
| HSV1-UL30-31 | − | GCGCCCCCAAGGUGUACUGC | 20 | 3136 |
| HSV1-UL30-4217 | − | CGCGCCCCCAAGGUGUACUGC | 21 | 13157 |
| HSV1-UL30-4218 | − | GCGCGCCCCCAAGGUGUACUGC | 22 | 13158 |
| HSV1-UL30-4219 | − | AGCGCGCCCCCAAGGUGUACUGC | 23 | 13159 |
| HSV1-UL30-4220 | − | AAGCGCGCCCCCAAGGUGUACUGC | 24 | 13160 |
| HSV1-UL30-4221 | − | UUUCACGUGUACGACAUC | 18 | 13161 |
| HSV1-UL30-4222 | − | CUUUCACGUGUACGACAUC | 19 | 13162 |
| HSV1-UL30-278 | − | UCUUUCACGUGUACGACAUC | 20 | 4735 |
| HSV1-UL30-4223 | − | GUCUUUCACGUGUACGACAUC | 21 | 13163 |
| HSV1-UL30-4224 | − | CGUCUUUCACGUGUACGACAUC | 22 | 13164 |
| HSV1-UL30-4225 | − | CCGUCUUUCACGUGUACGACAUC | 23 | 13165 |
| HSV1-UL30-4226 | − | ACCGUCUUUCACGUGUACGACAUC | 24 | 13166 |
| HSV1-UL30-4227 | − | UUGCGCCCGCCGGCCCUC | 18 | 13167 |
| HSV1-UL30-4228 | − | UUUGCGCCCGCCGGCCCUC | 19 | 13168 |
| HSV1-UL30-243 | − | UUUUGCGCCCGCCGGCCCUC | 20 | 4713 |
| HSV1-UL30-4229 | − | UUUUUGCGCCCGCCGGCCCUC | 21 | 13169 |
| HSV1-UL30-4230 | − | UUUUUUGCGCCCGCCGGCCCUC | 22 | 13170 |
| HSV1-UL30-4231 | − | GUUUUUUGCGCCCGCCGGCCCUC | 23 | 13171 |
| HSV1-UL30-4232 | − | GGUUUUUUGCGCCCGCCGGCCCUC | 24 | 13172 |
| HSV1-UL30-4233 | − | ACCCCUACCUCGCCCCAG | 18 | 13173 |
| HSV1-UL30-4234 | − | AACCCCUACCUCGCCCCAG | 19 | 13174 |
| HSV1-UL30-249 | − | CAACCCCUACCUCGCCCCAG | 20 | 4716 |
| HSV1-UL30-4235 | − | ACAACCCCUACCUCGCCCCAG | 21 | 13175 |
| HSV1-UL30-4236 | − | UACAACCCCUACCUCGCCCCAG | 22 | 13176 |
| HSV1-UL30-4237 | − | UUACAACCCCUACCUCGCCCCAG | 23 | 13177 |
| HSV1-UL30-4238 | − | UUUACAACCCCUACCUCGCCCCAG | 24 | 13178 |
| HSV1-UL30-4239 | − | CGGCCCUCGCGGAGCCAG | 18 | 13179 |
| HSV1-UL30-4240 | − | CCGGCCCUCGCGGAGCCAG | 19 | 13180 |
| HSV1-UL30-245 | − | GCCGGCCCUCGCGGAGCCAG | 20 | 4714 |
| HSV1-UL30-4241 | − | CGCCGGCCCUCGCGGAGCCAG | 21 | 13181 |
| HSV1-UL30-4242 | − | CCGCCGGCCCUCGCGGAGCCAG | 22 | 13182 |
| HSV1-UL30-4243 | − | CCCGCCGGCCCUCGCGGAGCCAG | 23 | 13183 |
| HSV1-UL30-4244 | − | GCCCGCCGGCCCUCGCGGAGCCAG | 24 | 13184 |
| HSV1-UL30-4245 | − | ACGACAUCCUGGAGAACG | 18 | 13185 |
| HSV1-UL30-4246 | − | UACGACAUCCUGGAGAACG | 19 | 13186 |
| HSV1-UL30-53 | − | GUACGACAUCCUGGAGAACG | 20 | 3147 |
| HSV1-UL30-4247 | − | UGUACGACAUCCUGGAGAACG | 21 | 13187 |
| HSV1-UL30-4248 | − | GUGUACGACAUCCUGGAGAACG | 22 | 13188 |
| HSV1-UL30-4249 | − | CGUGUACGACAUCCUGGAGAACG | 23 | 13189 |
| HSV1-UL30-4250 | − | ACGUGUACGACAUCCUGGAGAACG | 24 | 13190 |
| HSV1-UL30-4251 | − | GACGAGGAUGCCCCCCCG | 18 | 13191 |
| HSV1-UL30-4252 | − | GGACGAGGAUGCCCCCCCG | 19 | 13192 |
| HSV1-UL30-261 | − | UGGACGAGGAUGCCCCCCCG | 20 | 4726 |
| HSV1-UL30-4253 | − | CUGGACGAGGAUGCCCCCCCG | 21 | 13193 |
| HSV1-UL30-4254 | − | GCUGGACGAGGAUGCCCCCCCG | 22 | 13194 |
| HSV1-UL30-4255 | − | UGCUGGACGAGGAUGCCCCCCCG | 23 | 13195 |
| HSV1-UL30-4256 | − | GUGCUGGACGAGGAUGCCCCCCCG | 24 | 13196 |
| HSV1-UL30-4257 | − | GCGGCCCGCUGUCCCCCG | 18 | 13197 |
| HSV1-UL30-4258 | − | GGCGGCCCGCUGUCCCCCG | 19 | 13198 |
| HSV1-UL30-239 | − | CGGCGGCCCGCUGUCCCCCG | 20 | 4710 |
| HSV1-UL30-4259 | − | GCGGCGGCCCGCUGUCCCCCG | 21 | 13199 |
| HSV1-UL30-4260 | − | GGCGGCGGCCCGCUGUCCCCCG | 22 | 13200 |
| HSV1-UL30-4261 | − | UGGCGGCGGCCCGCUGUCCCCCG | 23 | 13201 |
| HSV1-UL30-4262 | − | GUGGCGGCGGCCCGCUGUCCCCCG | 24 | 13202 |
| HSV1-UL30-4263 | − | GGCGUGGACCACGCCCCG | 18 | 13203 |
| HSV1-UL30-4264 | − | CGGCGUGGACCACGCCCCG | 19 | 13204 |
| HSV1-UL30-276 | − | GCGGCGUGGACCACGCCCCG | 20 | 4734 |
| HSV1-UL30-4265 | − | GGCGGCGUGGACCACGCCCCG | 21 | 13205 |
| HSV1-UL30-4266 | − | GGGCGGCGUGGACCACGCCCCG | 22 | 13206 |
| HSV1-UL30-4267 | − | GGGGCGGCGUGGACCACGCCCCG | 23 | 13207 |
| HSV1-UL30-4268 | − | UGGGGCGGCGUGGACCACGCCCCG | 24 | 13208 |
| HSV1-UL30-4269 | − | CCCCCCCGGAGAAGCGCG | 18 | 13209 |
| HSV1-UL30-4270 | − | GCCCCCCCGGAGAAGCGCG | 19 | 13210 |
| HSV1-UL30-262 | − | UGCCCCCCCGGAGAAGCGCG | 20 | 4727 |
| HSV1-UL30-4271 | − | AUGCCCCCCCGGAGAAGCGCG | 21 | 13211 |
| HSV1-UL30-4272 | − | GAUGCCCCCCCGGAGAAGCGCG | 22 | 13212 |
| HSV1-UL30-4273 | − | GGAUGCCCCCCCGGAGAAGCGCG | 23 | 13213 |
| HSV1-UL30-4274 | − | AGGAUGCCCCCCCGGAGAAGCGCG | 24 | 13214 |
| HSV1-UL30-4275 | − | CCCCCAAGGUGUACUGCG | 18 | 13215 |
| HSV1-UL30-4276 | − | GCCCCCAAGGUGUACUGCG | 19 | 13216 |
| HSV1-UL30-32 | − | CGCCCCCAAGGUGUACUGCG | 20 | 3137 |
| HSV1-UL30-4277 | − | GCGCCCCCAAGGUGUACUGCG | 21 | 13217 |
| HSV1-UL30-4278 | − | CGCGCCCCCAAGGUGUACUGCG | 22 | 13218 |
| HSV1-UL30-4279 | − | GCGCGCCCCCAAGGUGUACUGCG | 23 | 13219 |
| HSV1-UL30-4280 | − | AGCGCGCCCCCAAGGUGUACUGCG | 24 | 13220 |
| HSV1-UL30-4281 | − | UGCGCCCGCCGGCCCUCG | 18 | 13221 |
| HSV1-UL30-4282 | − | UUGCGCCCGCCGGCCCUCG | 19 | 13222 |
| HSV1-UL30-11 | − | UUUGCGCCCGCCGGCCCUCG | 20 | 3125 |
| HSV1-UL30-4283 | − | UUUUGCGCCCGCCGGCCCUCG | 21 | 13223 |
| HSV1-UL30-4284 | − | UUUUUGCGCCCGCCGGCCCUCG | 22 | 13224 |
| HSV1-UL30-4285 | − | UUUUUUGCGCCCGCCGGCCCUCG | 23 | 13225 |
| HSV1-UL30-4286 | − | GUUUUUUGCGCCCGCCGGCCCUCG | 24 | 13226 |
| HSV1-UL30-4287 | − | CGGCCCGCUGUCCCCCGG | 18 | 13227 |
| HSV1-UL30-4288 | − | GCGGCCCGCUGUCCCCCGG | 19 | 13228 |
| HSV1-UL30-2 | − | GGCGGCCCGCUGUCCCCCGG | 20 | 3233 |
| HSV1-UL30-4289 | − | CGGCGGCCCGCUGUCCCCCGG | 21 | 13229 |
| HSV1-UL30-4290 | − | GCGGCGGCCCGCUGUCCCCCGG | 22 | 13230 |
| HSV1-UL30-4291 | − | GGCGGCGGCCCGCUGUCCCCCGG | 23 | 13231 |
| HSV1-UL30-4292 | − | UGGCGGCGGCCCGCUGUCCCCCGG | 24 | 13232 |
| HSV1-UL30-4293 | − | CCCCAAGGUGUACUGCGG | 18 | 13233 |
| HSV1-UL30-4294 | − | CCCCCAAGGUGUACUGCGG | 19 | 13234 |
| HSV1-UL30-33 | − | GCCCCCAAGGUGUACUGCGG | 20 | 3138 |
| HSV1-UL30-4295 | − | CGCCCCCAAGGUGUACUGCGG | 21 | 13235 |
| HSV1-UL30-4296 | − | GCGCCCCCAAGGUGUACUGCGG | 22 | 13236 |
| HSV1-UL30-4297 | − | CGCGCCCCCAAGGUGUACUGCGG | 23 | 13237 |
| HSV1-UL30-4298 | − | GCGCGCCCCCAAGGUGUACUGCGG | 24 | 13238 |
| HSV1-UL30-4299 | − | CCCAAGGUGUACUGCGGG | 18 | 13239 |
| HSV1-UL30-4300 | − | CCCCAAGGUGUACUGCGGG | 19 | 13240 |
| HSV1-UL30-34 | − | CCCCCAAGGUGUACUGCGGG | 20 | 3249 |
| HSV1-UL30-4301 | − | GCCCCCAAGGUGUACUGCGGG | 21 | 13241 |
| HSV1-UL30-4302 | − | CGCCCCCAAGGUGUACUGCGGG | 22 | 13242 |
| HSV1-UL30-4303 | − | GCGCCCCCAAGGUGUACUGCGGG | 23 | 13243 |
| HSV1-UL30-4304 | − | CGCGCCCCCAAGGUGUACUGCGGG | 24 | 13244 |
| HSV1-UL30-4305 | − | GACGUCCUCCGCGUCGGG | 18 | 13245 |
| HSV1-UL30-4306 | − | CGACGUCCUCCGCGUCGGG | 19 | 13246 |
| HSV1-UL30-272 | − | GCGACGUCCUCCGCGUCGGG | 20 | 4731 |
| HSV1-UL30-4307 | − | CGCGACGUCCUCCGCGUCGGG | 21 | 13247 |
| HSV1-UL30-4308 | − | GCGCGACGUCCUCCGCGUCGGG | 22 | 13248 |
| HSV1-UL30-4309 | − | AGCGCGACGUCCUCCGCGUCGGG | 23 | 13249 |
| HSV1-UL30-4310 | − | GAGCGCGACGUCCUCCGCGUCGGG | 24 | 13250 |
| HSV1-UL30-4311 | − | AGGUGUACUGCGGGGGGG | 18 | 13251 |
| HSV1-UL30-4312 | − | AAGGUGUACUGCGGGGGGG | 19 | 13252 |
| HSV1-UL30-270 | − | CAAGGUGUACUGCGGGGGGG | 20 | 4729 |
| HSV1-UL30-4313 | − | CCAAGGUGUACUGCGGGGGGG | 21 | 13253 |
| HSV1-UL30-4314 | − | CCCAAGGUGUACUGCGGGGGGG | 22 | 13254 |
| HSV1-UL30-4315 | − | CCCCAAGGUGUACUGCGGGGGGG | 23 | 13255 |
| HSV1-UL30-4316 | − | CCCCCAAGGUGUACUGCGGGGGGG | 24 | 13256 |
| HSV1-UL30-4317 | − | UCGCCCCGCGGGUGCUGG | 18 | 13257 |
| HSV1-UL30-4318 | − | AUCGCCCCGCGGGUGCUGG | 19 | 13258 |
| HSV1-UL30-257 | − | CAUCGCCCCGCGGGUGCUGG | 20 | 4723 |
| HSV1-UL30-4319 | − | UCAUCGCCCCGCGGGUGCUGG | 21 | 13259 |
| HSV1-UL30-4320 | − | UUCAUCGCCCCGCGGGUGCUGG | 22 | 13260 |
| HSV1-UL30-4321 | − | AUUCAUCGCCCCGCGGGUGCUGG | 23 | 13261 |
| HSV1-UL30-4322 | − | GAUUCAUCGCCCCGCGGGUGCUGG | 24 | 13262 |
| HSV1-UL30-4323 | − | CGCCCCCAAGGUGUACUG | 18 | 13263 |
| HSV1-UL30-4324 | − | GCGCCCCCAAGGUGUACUG | 19 | 13264 |
| HSV1-UL30-30 | − | CGCGCCCCCAAGGUGUACUG | 20 | 3135 |
| HSV1-UL30-4325 | − | GCGCGCCCCCAAGGUGUACUG | 21 | 13265 |
| HSV1-UL30-4326 | − | AGCGCGCCCCCAAGGUGUACUG | 22 | 13266 |
| HSV1-UL30-4327 | − | AAGCGCGCCCCCAAGGUGUACUG | 23 | 13267 |
| HSV1-UL30-4328 | − | CAAGCGCGCCCCCAAGGUGUACUG | 24 | 13268 |
| HSV1-UL30-4329 | − | CCGCGGCGCUCGCGCCUG | 18 | 13269 |
| HSV1-UL30-4330 | − | GCCGCGGCGCUCGCGCCUG | 19 | 13270 |
| HSV1-UL30-43 | − | GGCCGCGGCGCUCGCGCCUG | 20 | 3253 |
| HSV1-UL30-4331 | − | UGGCCGCGGCGCUCGCGCCUG | 21 | 13271 |
| HSV1-UL30-4332 | − | CUGGCCGCGGCGCUCGCGCCUG | 22 | 13272 |
| HSV1-UL30-4333 | − | UCUGGCCGCGGCGCUCGCGCCUG | 23 | 13273 |
| HSV1-UL30-4334 | − | UUCUGGCCGCGGCGCUCGCGCCUG | 24 | 13274 |
| HSV1-UL30-4335 | − | CACGUGUACGACAUCCUG | 18 | 13275 |
| HSV1-UL30-4336 | − | UCACGUGUACGACAUCCUG | 19 | 13276 |
| HSV1-UL30-280 | − | UUCACGUGUACGACAUCCUG | 20 | 4736 |
| HSV1-UL30-4337 | − | UUUCACGUGUACGACAUCCUG | 21 | 13277 |
| HSV1-UL30-4338 | − | CUUUCACGUGUACGACAUCCUG | 22 | 13278 |
| HSV1-UL30-4339 | − | UCUUUCACGUGUACGACAUCCUG | 23 | 13279 |
| HSV1-UL30-4340 | − | GUCUUUCACGUGUACGACAUCCUG | 24 | 13280 |
| HSV1-UL30-4341 | − | UUCAUCGCCCCGCGGGUG | 18 | 13281 |
| HSV1-UL30-4342 | − | AUUCAUCGCCCCGCGGGUG | 19 | 13282 |
| HSV1-UL30-256 | − | GAUUCAUCGCCCCGCGGGUG | 20 | 4722 |
| HSV1-UL30-4343 | − | CGAUUCAUCGCCCCGCGGGUG | 21 | 13283 |
| HSV1-UL30-4344 | − | UCGAUUCAUCGCCCCGCGGGUG | 22 | 13284 |
| HSV1-UL30-4345 | − | UUCGAUUCAUCGCCCCGCGGGUG | 23 | 13285 |
| HSV1-UL30-4346 | − | UUUCGAUUCAUCGCCCCGCGGGUG | 24 | 13286 |
| HSV1-UL30-4347 | − | GCGCCCCCAAGGUGUACU | 18 | 13287 |
| HSV1-UL30-4348 | − | CGCGCCCCCAAGGUGUACU | 19 | 13288 |
| HSV1-UL30-264 | − | GCGCGCCCCCAAGGUGUACU | 20 | 4728 |
| HSV1-UL30-4349 | − | AGCGCGCCCCCAAGGUGUACU | 21 | 13289 |
| HSV1-UL30-4350 | − | AAGCGCGCCCCCAAGGUGUACU | 22 | 13290 |
| HSV1-UL30-4351 | − | CAAGCGCGCCCCCAAGGUGUACU | 23 | 13291 |
| HSV1-UL30-4352 | − | UCAAGCGCGCCCCCAAGGUGUACU | 24 | 13292 |
| HSV1-UL30-4353 | − | GCCGCGGCGCUCGCGCCU | 18 | 13293 |
| HSV1-UL30-4354 | − | GGCCGCGGCGCUCGCGCCU | 19 | 13294 |
| HSV1-UL30-273 | − | UGGCCGCGGCGCUCGCGCCU | 20 | 4732 |
| HSV1-UL30-4355 | − | CUGGCCGCGGCGCUCGCGCCU | 21 | 13295 |
| HSV1-UL30-4356 | − | UCUGGCCGCGGCGCUCGCGCCU | 22 | 13296 |
| HSV1-UL30-4357 | − | UUCUGGCCGCGGCGCUCGCGCCU | 23 | 13297 |
| HSV1-UL30-4358 | − | CUUCUGGCCGCGGCGCUCGCGCCU | 24 | 13298 |
| HSV1-UL30-4359 | − | CCCCUACCUCGCCCCAGU | 18 | 13299 |
| HSV1-UL30-4360 | − | ACCCCUACCUCGCCCCAGU | 19 | 13300 |
| HSV1-UL30-16 | − | AACCCCUACCUCGCCCCAGU | 20 | 3244 |
| HSV1-UL30-4361 | − | CAACCCCUACCUCGCCCCAGU | 21 | 13301 |
| HSV1-UL30-4362 | − | ACAACCCCUACCUCGCCCCAGU | 22 | 13302 |
| HSV1-UL30-4363 | − | UACAACCCCUACCUCGCCCCAGU | 23 | 13303 |
| HSV1-UL30-4364 | − | UUACAACCCCUACCUCGCCCCAGU | 24 | 13304 |
| HSV1-UL30-4365 | − | CGGGGACCCCCGCCUUGU | 18 | 13305 |
| HSV1-UL30-4366 | − | CCGGGGACCCCCGCCUUGU | 19 | 13306 |
| HSV1-UL30-248 | − | GCCGGGGACCCCCGCCUUGU | 20 | 4715 |
| HSV1-UL30-4367 | − | AGCCGGGGACCCCCGCCUUGU | 21 | 13307 |
| HSV1-UL30-4368 | − | CAGCCGGGGACCCCCGCCUUGU | 22 | 13308 |
| HSV1-UL30-4369 | − | CCAGCCGGGGACCCCCGCCUUGU | 23 | 13309 |
| HSV1-UL30-4370 | − | GCCAGCCGGGGACCCCCGCCUUGU | 24 | 13310 |
| HSV1-UL30-4371 | − | CAGUUCCACGCGCGGUUU | 18 | 13311 |
| HSV1-UL30-4372 | − | CCAGUUCCACGCGCGGUUU | 19 | 13312 |
| HSV1-UL30-4373 | − | CCCAGUUCCACGCGCGGUUU | 20 | 13313 |
| HSV1-UL30-4374 | − | GCCCAGUUCCACGCGCGGUUU | 21 | 13314 |
| HSV1-UL30-4375 | − | GGCCCAGUUCCACGCGCGGUUU | 22 | 13315 |
| HSV1-UL30-4376 | − | CGGCCCAGUUCCACGCGCGGUUU | 23 | 13316 |
| HSV1-UL30-4377 | − | GCGGCCCAGUUCCACGCGCGGUUU | 24 | 13317 |

[0779] Table 9E provides exemplary targeting domains for knocking out the UL30 gene selected according to the fifth tier parameters. The targeting domains fall in the coding sequence of the gene, downstream of the first 500 bp of coding sequence (e.g., anywhere from +500 (relative to the start codon) to the stop codon of the gene), and start with a 5′G. The PAM is NNGRRT. It is contemplated herein that in an embodiment the targeting domain hybridizes to the target domain through complementary base pairing. Any of the targeting domains in the table can be used with a S. aureus Cas9 molecule that generates a double stranded break (Cas9 nuclease) or a single-stranded break (Cas9 nickase).

TABLE 9E

| | | | Target | |
|---|---|---|---|---|
| 5th Tier | DNA | | Site | Seq ID |
| gRNA Name | Strand | Targeting Domain | Length | NO: |
| HSV1-UL30-4378 | + | GGGGUUGUCCAGGAUGAA | 18 | 13318 |
| HSV1-UL30-4379 | + | GAACCCGGGGUUGUCCAGGAUGAA | 24 | 13319 |
| HSV1-UL30-4380 | + | GCACUCCCGUGAACCCGUACA | 21 | 13320 |
| HSV1-UL30-4381 | + | GCUGCACUCCCGUGAACCCGUACA | 24 | 13321 |
| HSV1-UL30-4382 | + | GCAAAGUCGAACACCACCA | 19 | 13322 |
| HSV1-UL30-2476 | + | GGCAAAGUCGAACACCACCA | 20 | 5482 |
| HSV1-UL30-4383 | + | GCUGGCAAAGUCGAACACCACCA | 23 | 13323 |
| HSV1-UL30-4384 | + | GGCUGGCAAAGUCGAACACCACCA | 24 | 13324 |
| HSV1-UL30-2427 | + | GUCCCCGUAGAUGAUGCGCA | 20 | 5433 |
| HSV1-UL30-4385 | + | GUGUCCCCGUAGAUGAUGCGCA | 22 | 13325 |
| HSV1-UL30-1205 | + | GCCGCGGCACAGCACAAAGA | 20 | 4143 |
| HSV1-UL30-4386 | + | GGCCGCGGCACAGCACAAAGA | 21 | 13326 |
| HSV1-UL30-4387 | + | GAGGCCGCGGCACAGCACAAAGA | 23 | 13327 |
| HSV1-UL30-4388 | + | GACAGGUCGUAGAGCAGA | 18 | 13328 |
| HSV1-UL30-4389 | + | GGACAGGUCGUAGAGCAGA | 19 | 13329 |
| HSV1-UL30-4390 | + | GUGGACAGGUCGUAGAGCAGA | 21 | 13330 |
| HSV1-UL30-4391 | + | GGUGGACAGGUCGUAGAGCAGA | 22 | 13331 |
| HSV1-UL30-4392 | + | GUGGUGGACAGGUCGUAGAGCAGA | 24 | 13332 |
| HSV1-UL30-4393 | + | GCUCUGGGGAAUCCGCGA | 18 | 13333 |
| HSV1-UL30-4394 | + | GCUGCUCUGGGGAAUCCGCGA | 21 | 13334 |
| HSV1-UL30-4395 | + | GGCUGCUCUGGGGAAUCCGCGA | 22 | 13335 |
| HSV1-UL30-4396 | + | GGGCUGCUCUGGGGAAUCCGCGA | 23 | 13336 |
| HSV1-UL30-4397 | + | GGGGCUGCUCUGGGGAAUCCGCGA | 24 | 13337 |
| HSV1-UL30-2388 | + | GUCUGGGCCACGAUCACGUA | 20 | 5395 |
| HSV1-UL30-4398 | + | GGUCUGGGCCACGAUCACGUA | 21 | 13338 |
| HSV1-UL30-4399 | + | GGGUCUGGGCCACGAUCACGUA | 22 | 13339 |
| HSV1-UL30-4400 | + | GCGGGUCUGGGCCACGAUCACGUA | 24 | 13340 |
| HSV1-UL30-4401 | + | GUGAACGUCUUUUCGCAC | 18 | 13341 |
| HSV1-UL30-4402 | + | GGUGAACGUCUUUUCGCAC | 19 | 13342 |
| HSV1-UL30-4403 | + | GCUUGGUGAACGUCUUUUCGCAC | 23 | 13343 |
| HSV1-UL30-4404 | + | GGGGCCGUACUGUUUCAC | 18 | 13344 |
| HSV1-UL30-4405 | + | GAACUCGGGGCCGUACUGUUUCAC | 24 | 13345 |
| HSV1-UL30-4406 | + | GCAGCAGGCACGUAAAGAC | 19 | 13346 |
| HSV1-UL30-4407 | + | GCGCAGCAGGCACGUAAAGAC | 21 | 13347 |
| HSV1-UL30-4408 | + | GGCGCAGCAGGCACGUAAAGAC | 22 | 13348 |
| HSV1-UL30-4409 | + | GUACCAGCCGAAGGUGACGAACC | 23 | 13349 |
| HSV1-UL30-4410 | + | GGUACCAGCCGAAGGUGACGAACC | 24 | 13350 |
| HSV1-UL30-4411 | + | GGCGCCCCUAAAUCGCCC | 18 | 13351 |
| HSV1-UL30-4412 | + | GUUAUUCCCAAACAGGGCC | 19 | 13352 |
| HSV1-UL30-4413 | + | GCGUUAUUCCCAAACAGGGCC | 21 | 13353 |
| HSV1-UL30-4414 | + | GGCGUUAUUCCCAAACAGGGCC | 22 | 13354 |
| HSV1-UL30-4415 | + | GCUUGUUGGUGUACGCGC | 18 | 13355 |
| HSV1-UL30-2395 | + | GCGCUUGUUGGUGUACGCGC | 20 | 5402 |
| HSV1-UL30-4416 | + | GGCGCUUGUUGGUGUACGCGC | 21 | 13356 |
| HSV1-UL30-4417 | + | GCCCGGCGGCGUAGUAGGC | 19 | 13357 |
| HSV1-UL30-2500 | + | GGCCCGGCGGCGUAGUAGGC | 20 | 5506 |
| HSV1-UL30-4418 | + | GGGCCCGGCGGCGUAGUAGGC | 21 | 13358 |
| HSV1-UL30-4419 | + | GCGGGCCCGGCGGCGUAGUAGGC | 23 | 13359 |
| HSV1-UL30-4420 | + | GCAACGUGCAGGCACGGC | 18 | 13360 |
| HSV1-UL30-4421 | + | GGCAACGUGCAGGCACGGC | 19 | 13361 |
| HSV1-UL30-4422 | + | GCGGCAACGUGCAGGCACGGC | 21 | 13362 |
| HSV1-UL30-4423 | + | GUCGCGGCAACGUGCAGGCACGGC | 24 | 13363 |
| HSV1-UL30-4424 | + | GCCUGCAGUCCCUCGGGC | 18 | 13364 |
| HSV1-UL30-4425 | + | GAACGCCUGCAGUCCCUCGGGC | 22 | 13365 |
| HSV1-UL30-4426 | + | GAAGCACAGGUUGUGGGC | 18 | 13366 |
| HSV1-UL30-4427 | + | GCUGAAGCACAGGUUGUGGGC | 21 | 13367 |
| HSV1-UL30-4428 | + | GUGCUGAAGCACAGGUUGUGGGC | 23 | 13368 |
| HSV1-UL30-2473 | + | GUUGUGGGCCUGGAUGAUGC | 20 | 5479 |
| HSV1-UL30-4429 | + | GGUUGUGGGCCUGGAUGAUGC | 21 | 13369 |
| HSV1-UL30-4430 | + | GUCAUGAAGGCCAACAGCAUC | 21 | 13370 |
| HSV1-UL30-4431 | + | GGUCAUGAAGGCCAACAGCAUC | 22 | 13371 |
| HSV1-UL30-4432 | + | GGGUCAUGAAGGCCAACAGCAUC | 23 | 13372 |
| HSV1-UL30-4433 | + | GCGCGCGUGGACGUACUC | 18 | 13373 |
| HSV1-UL30-4434 | + | GCCCAGCGCGCGUGGACGUACUC | 23 | 13374 |
| HSV1-UL30-4435 | + | GACCGUCUCCUCUACCUC | 18 | 13375 |
| HSV1-UL30-2385 | + | GCGACCGUCUCCUCUACCUC | 20 | 5392 |
| HSV1-UL30-4436 | + | GCGCGACCGUCUCCUCUACCUC | 22 | 13376 |
| HSV1-UL30-4437 | + | GGCGGUGAGGACAAAGUC | 18 | 13377 |
| HSV1-UL30-4438 | + | GUUCGGCGGUGAGGACAAAGUC | 22 | 13378 |
| HSV1-UL30-4439 | + | GACGAACCCGGGGUUGUC | 18 | 13379 |
| HSV1-UL30-2558 | + | GUGACGAACCCGGGGUUGUC | 20 | 5563 |
| HSV1-UL30-4440 | + | GGUGACGAACCCGGGGUUGUC | 21 | 13380 |
| HSV1-UL30-4441 | + | GAAGGUGACGAACCCGGGGUUGUC | 24 | 13381 |
| HSV1-UL30-4442 | + | GUCCGGGGGGUGCCACACUUC | 21 | 13382 |
| HSV1-UL30-4443 | + | GUCGUCCGGGGGGUGCCACACUUC | 24 | 13383 |
| HSV1-UL30-4444 | + | GGCCACCCGGUGGCCUUC | 18 | 13384 |
| HSV1-UL30-4445 | + | GAACGGCCACCCGGUGGCCUUC | 22 | 13385 |
| HSV1-UL30-4446 | + | GUGAACGGCCACCCGGUGGCCUUC | 24 | 13386 |
| HSV1-UL30-2481 | + | GUUCACGUGAAACCCGGAAG | 20 | 5487 |
| HSV1-UL30-4447 | + | GGUUCACGUGAAACCCGGAAG | 21 | 13387 |
| HSV1-UL30-4448 | + | GGGUUCACGUGAAACCCGGAAG | 22 | 13388 |
| HSV1-UL30-4449 | + | GGGGUUCACGUGAAACCCGGAAG | 23 | 13389 |
| HSV1-UL30-4450 | + | GGCGAGCCAGUCCCGCAG | 18 | 13390 |
| HSV1-UL30-4451 | + | GCAUGGCGAGCCAGUCCCGCAG | 22 | 13391 |
| HSV1-UL30-4452 | + | GCUUGGACGCGCCUCCCG | 18 | 13392 |
| HSV1-UL30-4453 | + | GGCUUGGACGCGCCUCCCG | 19 | 13393 |
| HSV1-UL30-2363 | + | GGGCUUGGACGCGCCUCCCG | 20 | 5375 |
| HSV1-UL30-4454 | + | GGGGCUUGGACGCGCCUCCCG | 21 | 13394 |
| HSV1-UL30-4455 | + | GCGGGGCUUGGACGCGCCUCCCG | 23 | 13395 |
| HSV1-UL30-4456 | + | GCGCGGCCACGUCGUCCG | 18 | 13396 |
| HSV1-UL30-4457 | + | GCCGCGCGGCCACGUCGUCCG | 21 | 13397 |
| HSV1-UL30-4458 | + | GAGCCGCGCGGCCACGUCGUCCG | 23 | 13398 |
| HSV1-UL30-4459 | + | GGAGCCGCGCGGCCACGUCGUCCG | 24 | 13399 |
| HSV1-UL30-4460 | + | GUACAGUUAAACUCGACGUCG | 21 | 13400 |
| HSV1-UL30-4461 | + | GCCGUACAGUUAAACUCGACGUCG | 24 | 13401 |
| HSV1-UL30-4462 | + | GGCUCUAUGCAACAUUCG | 18 | 13402 |
| HSV1-UL30-4463 | + | GCCGCCAGCUCGUUCAGG | 18 | 13403 |
| HSV1-UL30-4464 | + | GGCCGCCAGCUCGUUCAGG | 19 | 13404 |
| HSV1-UL30-2355 | + | GCCGUGGGCAAUGGCGUAUG | 20 | 5367 |
| HSV1-UL30-4465 | + | GACGCCGUGGGCAAUGGCGUAUG | 23 | 13405 |
| HSV1-UL30-4466 | + | GCCAACAGCAUCUCGAAUUCGCUG | 24 | 13406 |
| HSV1-UL30-2452 | + | GCCUCCUCGGGGCUGCUCUG | 20 | 5458 |
| HSV1-UL30-4467 | + | GGCCUCCUCGGGGCUGCUCUG | 21 | 13407 |
| HSV1-UL30-4468 | + | GUAGAGCAGACAGGAUAU | 18 | 13408 |
| HSV1-UL30-4469 | + | GUCGUAGAGCAGACAGGAUAU | 21 | 13409 |
| HSV1-UL30-4470 | + | GGUCGUAGAGCAGACAGGAUAU | 22 | 13410 |
| HSV1-UL30-4471 | + | GAUAUCUGGAUGACCAGGUCCU | 22 | 13411 |
| HSV1-UL30-4472 | + | GGAUAUCUGGAUGACCAGGUCCU | 23 | 13412 |
| HSV1-UL30-4473 | + | GACAAAGUCCUGGAUGUCCCUCU | 23 | 13413 |
| HSV1-UL30-4474 | + | GGACAAAGUCCUGGAUGUCCCUCU | 24 | 13414 |
| HSV1-UL30-4475 | + | GCUGGCCGUCGUAGAUGGU | 19 | 13415 |
| HSV1-UL30-4476 | + | GAUCUGCUGGCCGUCGUAGAUGGU | 24 | 13416 |
| HSV1-UL30-4477 | − | GUGGUUCUGGAAUUCGACA | 19 | 13417 |
| HSV1-UL30-4478 | − | GCCCGUGGUUCUGGAAUUCGACA | 23 | 13418 |
| HSV1-UL30-4479 | − | GCCUGACUCCGGAAGGCCA | 19 | 13419 |
| HSV1-UL30-1777 | − | GGCCUGACUCCGGAAGGCCA | 20 | 4827 |
| HSV1-UL30-4480 | − | GGGCCUGACUCCGGAAGGCCA | 21 | 13420 |
| HSV1-UL30-4481 | − | GGUCCCGUCCAUCAAGGA | 18 | 13421 |
| HSV1-UL30-4482 | − | GCAGGUCCCGUCCAUCAAGGA | 21 | 13422 |
| HSV1-UL30-4483 | − | GCGCAGGUCCCGUCCAUCAAGGA | 23 | 13423 |
| HSV1-UL30-1844 | − | GUACGGCCCCGAGUUCGUGA | 20 | 4894 |
| HSV1-UL30-4484 | − | GAUCGGCGAGUACUGCAUA | 19 | 13424 |
| HSV1-UL30-4485 | − | GUGAUCGGCGAGUACUGCAUA | 21 | 13425 |
| HSV1-UL30-4486 | − | GGUGAUCGGCGAGUACUGCAUA | 22 | 13426 |
| HSV1-UL30-4487 | − | GGGUGAUCGGCGAGUACUGCAUA | 23 | 13427 |
| HSV1-UL30-4488 | − | GGGGUGAUCGGCGAGUACUGCAUA | 24 | 13428 |
| HSV1-UL30-4489 | − | GGUGAACAUCGACAUGUA | 18 | 13429 |
| HSV1-UL30-4490 | − | GCAUGGUGAACAUCGACAUGUA | 22 | 13430 |
| HSV1-UL30-4491 | − | GGCAUGGUGAACAUCGACAUGUA | 23 | 13431 |
| HSV1-UL30-1981 | − | GUUUCUGCCCCCCAUCAAAC | 20 | 5014 |
| HSV1-UL30-4492 | − | GCUGUUUCUGCCCCCCAUCAAAC | 23 | 13432 |
| HSV1-UL30-4493 | − | GUAACUCGGUGUACGGGUUCAC | 22 | 13433 |
| HSV1-UL30-4494 | − | GUGUAACUCGGUGUACGGGUUCAC | 24 | 13434 |
| HSV1-UL30-4495 | − | GUACAUCGGCGUCAUCUAC | 19 | 13435 |
| HSV1-UL30-1798 | − | GCCCGGCCAUCAAGAAGUAC | 20 | 4848 |
| HSV1-UL30-4496 | − | GGUUCAUCCUGGACAACC | 18 | 13436 |
| HSV1-UL30-4497 | − | GAAUAACGCCAAGAUCACC | 19 | 13437 |
| HSV1-UL30-2039 | − | GGAAUAACGCCAAGAUCACC | 20 | 5072 |
| HSV1-UL30-4498 | − | GGGAAUAACGCCAAGAUCACC | 21 | 13438 |
| HSV1-UL30-4499 | − | GAGAUGCUGCUCGCGACCC | 19 | 13439 |
| HSV1-UL30-4500 | − | GCGAGAUGCUGCUCGCGACCC | 21 | 13440 |
| HSV1-UL30-4501 | − | GCCGCGAGAUGCUGCUCGCGACCC | 24 | 13441 |
| HSV1-UL30-4502 | − | GACCCUUGUGAAACAGUACGGCC | 23 | 13442 |
| HSV1-UL30-4503 | − | GCUGGUGUCCGAGCUGGCC | 19 | 13443 |
| HSV1-UL30-4504 | − | GCUGCUGGUGUCCGAGCUGGCC | 22 | 13444 |
| HSV1-UL30-1833 | − | GCUCGGUUCCUGCGACCUCC | 20 | 4883 |
| HSV1-UL30-1988 | − | GUAAGAUGCUCAUCAAGGGC | 20 | 5021 |
| HSV1-UL30-4505 | − | GGUAAGAUGCUCAUCAAGGGC | 21 | 13445 |
| HSV1-UL30-4506 | − | GGGUAAGAUGCUCAUCAAGGGC | 22 | 13446 |
| HSV1-UL30-4507 | − | GGGGUAAGAUGCUCAUCAAGGGC | 23 | 13447 |
| HSV1-UL30-4508 | − | GGGGGUAAGAUGCUCAUCAAGGGC | 24 | 13448 |
| HSV1-UL30-4509 | − | GCACGUGGGGUACCAGGGGGC | 21 | 13449 |
| HSV1-UL30-4510 | − | GGCACGUGGGGUACCAGGGGGC | 22 | 13450 |
| HSV1-UL30-4511 | − | GCAUGGCCGCGGCCCUGC | 18 | 13451 |
| HSV1-UL30-1785 | − | GCGCAUGGCCGCGGCCCUGC | 20 | 4835 |
| HSV1-UL30-4512 | − | GAGCGCAUGGCCGCGGCCCUGC | 22 | 13452 |
| HSV1-UL30-4513 | − | GCGAGCGCAUGGCCGCGGCCCUGC | 24 | 13453 |
| HSV1-UL30-4514 | − | GCGAAAGCAGAUCCGCUC | 18 | 13454 |
| HSV1-UL30-4515 | − | GCCAUGCGAAAGCAGAUCCGCUC | 23 | 13455 |
| HSV1-UL30-4516 | − | GCCUGCCCACGCCCGUGGUUC | 21 | 13456 |
| HSV1-UL30-4517 | − | GGCCUGCCCACGCCCGUGGUUC | 22 | 13457 |
| HSV1-UL30-4518 | − | GGGCCUGCCCACGCCCGUGGUUC | 23 | 13458 |
| HSV1-UL30-4519 | − | GGGGCCUGCCCACGCCCGUGGUUC | 24 | 13459 |
| HSV1-UL30-534 | − | GCCGCCGGGCCCGCGCAACG | 20 | 3472 |
| HSV1-UL30-4520 | − | GAGACCGCCGGCAGGCACG | 19 | 13460 |
| HSV1-UL30-595 | − | GGAGACCGCCGGCAGGCACG | 20 | 3533 |
| HSV1-UL30-4521 | − | GGGAGACCGCCGGCAGGCACG | 21 | 13461 |
| HSV1-UL30-4522 | − | GCGGGAGACCGCCGGCAGGCACG | 23 | 13462 |
| HSV1-UL30-4523 | − | GCCUUCGGGACAUCCAGCGACG | 22 | 13463 |
| HSV1-UL30-4524 | − | GGCCUUCGGGACAUCCAGCGACG | 23 | 13464 |
| HSV1-UL30-4525 | − | GCCGCGCGGCUCCGGACCG | 19 | 13465 |
| HSV1-UL30-2043 | − | GGCCGCGCGGCUCCGGACCG | 20 | 5076 |
| HSV1-UL30-4526 | − | GUGGCCGCGCGGCUCCGGACCG | 22 | 13466 |
| HSV1-UL30-4527 | − | GACCGCAGGGUUCGGGGCG | 19 | 13467 |
| HSV1-UL30-2046 | − | GGACCGCAGGGUUCGGGGCG | 20 | 5079 |
| HSV1-UL30-4528 | − | GCGCAACGCGGGGUGAUCG | 19 | 13468 |
| HSV1-UL30-4529 | − | GCCCGCGCAACGCGGGGUGAUCG | 23 | 13469 |
| HSV1-UL30-4530 | − | GGCCCGCGCAACGCGGGGUGAUCG | 24 | 13470 |
| HSV1-UL30-2051 | − | GCUACGGCGGAGGAAACUCG | 20 | 5084 |
| HSV1-UL30-4531 | − | GCGCUACGGCGGAGGAAACUCG | 22 | 13471 |
| HSV1-UL30-4532 | − | GGCGCUACGGCGGAGGAAACUCG | 23 | 13472 |
| HSV1-UL30-1996 | − | GUUAGCCGAGCGCCCCGCGG | 20 | 5029 |
| HSV1-UL30-4533 | − | GCGUUAGCCGAGCGCCCCGCGG | 22 | 13473 |
| HSV1-UL30-1800 | − | GCCAUCAAGAAGUACGAGGG | 20 | 4850 |
| HSV1-UL30-4534 | − | GGCCAUCAAGAAGUACGAGGG | 21 | 13474 |
| HSV1-UL30-4535 | − | GACAUUUACAAGGUCCCCCUGG | 22 | 13475 |
| HSV1-UL30-4536 | − | GGACAUUUACAAGGUCCCCCUGG | 23 | 13476 |
| HSV1-UL30-4537 | − | GCUCUCGGCCGUCGCGCGCUUG | 22 | 13477 |
| HSV1-UL30-4538 | − | GAGCUCUCGGCCGUCGCGCGCUUG | 24 | 13478 |
| HSV1-UL30-4539 | − | GUCGUGUGUAACUCGGUGU | 19 | 13479 |
| HSV1-UL30-1962 | − | GGUCGUGUGUAACUCGGUGU | 20 | 4995 |
| HSV1-UL30-4540 | − | GGGUCCUUGACCCCACUU | 18 | 13480 |
| HSV1-UL30-4541 | − | GCCAGGGUCCUUGACCCCACUU | 22 | 13481 |
| HSV1-UL30-4542 | − | GGCCAGGGUCCUUGACCCCACUU | 23 | 13482 |
| HSV1-UL30-4543 | − | GGGCCAGGGUCCUUGACCCCACUU | 24 | 13483 |
| HSV1-UL30-4544 | − | GACAUUCAAGGCCCUGUUU | 19 | 13484 |
| HSV1-UL30-4545 | − | GUGACAUUCAAGGCCCUGUUU | 21 | 13485 |
| HSV1-UL30-4546 | − | GCGUGACAUUCAAGGCCCUGUUU | 23 | 13486 |

[0780] Table 9F provides exemplary targeting domains for knocking out the UL30 gene selected according to the six tier parameters. The targeting domains fall in the coding sequence of the gene, downstream of the first 500 bp of coding sequence (e.g., anywhere from +500 (relative to the start codon) to the stop codon of the gene). The PAM is NNGRRT. It is contemplated herein that in an embodiment the targeting domain hybridizes to the target domain through complementary base pairing. Any of the targeting domains in the table can be used with a S. aureus Cas9 molecule that generates a double stranded break (Cas9 nuclease) or a single-stranded break (Cas9 nickase).

TABLE 9F

| | | | Target | |
|---|---|---|---|---|
| 6th Tier | DNA | | Site | Seq ID |
| gRNA Name | Strand | Targeting Domain | Length | NO: |
| HSV1-UL30-4547 | + | CGGGGUUGUCCAGGAUGAA | 19 | 13487 |
| HSV1-UL30-2560 | + | CCGGGGUUGUCCAGGAUGAA | 20 | 5565 |
| HSV1-UL30-4548 | + | CCCGGGGUUGUCCAGGAUGAA | 21 | 13488 |
| HSV1-UL30-4549 | + | ACCCGGGGUUGUCCAGGAUGAA | 22 | 13489 |
| HSV1-UL30-4550 | + | AACCCGGGGUUGUCCAGGAUGAA | 23 | 13490 |
| HSV1-UL30-4551 | + | CUCCCGUGAACCCGUACA | 18 | 13491 |
| HSV1-UL30-4552 | + | ACUCCCGUGAACCCGUACA | 19 | 13492 |
| HSV1-UL30-2444 | + | CACUCCCGUGAACCCGUACA | 20 | 5450 |
| HSV1-UL30-4553 | + | UGCACUCCCGUGAACCCGUACA | 22 | 13493 |
| HSV1-UL30-4554 | + | CUGCACUCCCGUGAACCCGUACA | 23 | 13494 |
| HSV1-UL30-4555 | + | CAAAGUCGAACACCACCA | 18 | 13495 |
| HSV1-UL30-4556 | + | UGGCAAAGUCGAACACCACCA | 21 | 13496 |
| HSV1-UL30-4557 | + | CUGGCAAAGUCGAACACCACCA | 22 | 13497 |
| HSV1-UL30-4558 | + | ACAGCUGGCCCACCAGCA | 18 | 13498 |
| HSV1-UL30-4559 | + | AACAGCUGGCCCACCAGCA | 19 | 13499 |
| HSV1-UL30-2496 | + | AAACAGCUGGCCCACCAGCA | 20 | 5502 |
| HSV1-UL30-4560 | + | AAAACAGCUGGCCCACCAGCA | 21 | 13500 |
| HSV1-UL30-4561 | + | AAAAACAGCUGGCCCACCAGCA | 22 | 13501 |
| HSV1-UL30-4562 | + | AAAAAACAGCUGGCCCACCAGCA | 23 | 13502 |
| HSV1-UL30-4563 | + | UAAAAAACAGCUGGCCCACCAGCA | 24 | 13503 |
| HSV1-UL30-4564 | + | CCCCGUAGAUGAUGCGCA | 18 | 13504 |
| HSV1-UL30-4565 | + | UCCCCGUAGAUGAUGCGCA | 19 | 13505 |
| HSV1-UL30-4566 | + | UGUCCCCGUAGAUGAUGCGCA | 21 | 13506 |
| HSV1-UL30-4567 | + | CGUGUCCCCGUAGAUGAUGCGCA | 23 | 13507 |
| HSV1-UL30-4568 | + | CCGUGUCCCCGUAGAUGAUGCGCA | 24 | 13508 |
| HSV1-UL30-4569 | + | CGCGGCACAGCACAAAGA | 18 | 13509 |
| HSV1-UL30-4570 | + | CCGCGGCACAGCACAAAGA | 19 | 13510 |
| HSV1-UL30-4571 | + | AGGCCGCGGCACAGCACAAAGA | 22 | 13511 |
| HSV1-UL30-4572 | + | UGAGGCCGCGGCACAGCACAAAGA | 24 | 13512 |
| HSV1-UL30-2541 | + | UGGACAGGUCGUAGAGCAGA | 20 | 5546 |
| HSV1-UL30-4573 | + | UGGUGGACAGGUCGUAGAGCAGA | 23 | 13513 |
| HSV1-UL30-4574 | + | UGCUCUGGGGAAUCCGCGA | 19 | 13514 |
| HSV1-UL30-2454 | + | CUGCUCUGGGGAAUCCGCGA | 20 | 5460 |
| HSV1-UL30-4575 | + | CUGGGCCACGAUCACGUA | 18 | 13515 |
| HSV1-UL30-4576 | + | UCUGGGCCACGAUCACGUA | 19 | 13516 |
| HSV1-UL30-4577 | + | CGGGUCUGGGCCACGAUCACGUA | 23 | 13517 |
| HSV1-UL30-2416 | + | UGGUGAACGUCUUUUCGCAC | 20 | 5423 |
| HSV1-UL30-4578 | + | UUGGUGAACGUCUUUUCGCAC | 21 | 13518 |
| HSV1-UL30-4579 | + | CUUGGUGAACGUCUUUUCGCAC | 22 | 13519 |
| HSV1-UL30-4580 | + | AGCUUGGUGAACGUCUUUUCGCAC | 24 | 13520 |
| HSV1-UL30-4581 | + | CGGGGCCGUACUGUUUCAC | 19 | 13521 |
| HSV1-UL30-2518 | + | UCGGGGCCGUACUGUUUCAC | 20 | 5524 |
| HSV1-UL30-4582 | + | CUCGGGGCCGUACUGUUUCAC | 21 | 13522 |
| HSV1-UL30-4583 | + | ACUCGGGGCCGUACUGUUUCAC | 22 | 13523 |
| HSV1-UL30-4584 | + | AACUCGGGGCCGUACUGUUUCAC | 23 | 13524 |
| HSV1-UL30-4585 | + | CAGCAGGCACGUAAAGAC | 18 | 13525 |
| HSV1-UL30-2488 | + | CGCAGCAGGCACGUAAAGAC | 20 | 5494 |
| HSV1-UL30-4586 | + | AGGCGCAGCAGGCACGUAAAGAC | 23 | 13526 |
| HSV1-UL30-4587 | + | CAGGCGCAGCAGGCACGUAAAGAC | 24 | 13527 |
| HSV1-UL30-4588 | + | AGCCGAAGGUGACGAACC | 18 | 13528 |
| HSV1-UL30-4589 | + | CAGCCGAAGGUGACGAACC | 19 | 13529 |
| HSV1-UL30-2557 | + | CCAGCCGAAGGUGACGAACC | 20 | 5562 |
| HSV1-UL30-4590 | + | ACCAGCCGAAGGUGACGAACC | 21 | 13530 |
| HSV1-UL30-4591 | + | UACCAGCCGAAGGUGACGAACC | 22 | 13531 |
| HSV1-UL30-4592 | + | CGGCGCCCCUAAAUCGCCC | 19 | 13532 |
| HSV1-UL30-2486 | + | CCGGCGCCCCUAAAUCGCCC | 20 | 5492 |
| HSV1-UL30-4593 | + | CCCGGCGCCCCUAAAUCGCCC | 21 | 13533 |
| HSV1-UL30-4594 | + | CCCCGGCGCCCCUAAAUCGCCC | 22 | 13534 |
| HSV1-UL30-4595 | + | CCCCCGGCGCCCCUAAAUCGCCC | 23 | 13535 |
| HSV1-UL30-4596 | + | CCCCCCGGCGCCCCUAAAUCGCCC | 24 | 13536 |
| HSV1-UL30-4597 | + | UUAUUCCCAAACAGGGCC | 18 | 13537 |
| HSV1-UL30-2347 | + | CGUUAUUCCCAAACAGGGCC | 20 | 5360 |
| HSV1-UL30-4598 | + | UGGCGUUAUUCCCAAACAGGGCC | 23 | 13538 |
| HSV1-UL30-4599 | + | UUGGCGUUAUUCCCAAACAGGGCC | 24 | 13539 |
| HSV1-UL30-4600 | + | CGCUUGUUGGUGUACGCGC | 19 | 13540 |
| HSV1-UL30-4601 | + | AGGCGCUUGUUGGUGUACGCGC | 22 | 13541 |
| HSV1-UL30-4602 | + | CAGGCGCUUGUUGGUGUACGCGC | 23 | 13542 |
| HSV1-UL30-4603 | + | CCAGGCGCUUGUUGGUGUACGCGC | 24 | 13543 |
| HSV1-UL30-4604 | + | CCCGGCGGCGUAGUAGGC | 18 | 13544 |
| HSV1-UL30-4605 | + | CGGGCCCGGCGGCGUAGUAGGC | 22 | 13545 |
| HSV1-UL30-4606 | + | CGCGGGCCCGGCGGCGUAGUAGGC | 24 | 13546 |
| HSV1-UL30-2442 | + | CGGCAACGUGCAGGCACGGC | 20 | 5448 |
| HSV1-UL30-4607 | + | CGCGGCAACGUGCAGGCACGGC | 22 | 13547 |
| HSV1-UL30-4608 | + | UCGCGGCAACGUGCAGGCACGGC | 23 | 13548 |
| HSV1-UL30-4609 | + | CGCCUGCAGUCCCUCGGGC | 19 | 13549 |
| HSV1-UL30-2406 | + | ACGCCUGCAGUCCCUCGGGC | 20 | 5413 |
| HSV1-UL30-4610 | + | AACGCCUGCAGUCCCUCGGGC | 21 | 13550 |
| HSV1-UL30-4611 | + | CGAACGCCUGCAGUCCCUCGGGC | 23 | 13551 |
| HSV1-UL30-4612 | + | CCGAACGCCUGCAGUCCCUCGGGC | 24 | 13552 |
| HSV1-UL30-4613 | + | UGAAGCACAGGUUGUGGGC | 19 | 13553 |
| HSV1-UL30-2471 | + | CUGAAGCACAGGUUGUGGGC | 20 | 5477 |
| HSV1-UL30-4614 | + | UGCUGAAGCACAGGUUGUGGGC | 22 | 13554 |
| HSV1-UL30-4615 | + | CGUGCUGAAGCACAGGUUGUGGGC | 24 | 13555 |
| HSV1-UL30-4616 | + | UGUGGGCCUGGAUGAUGC | 18 | 13556 |
| HSV1-UL30-4617 | + | UUGUGGGCCUGGAUGAUGC | 19 | 13557 |
| HSV1-UL30-4618 | + | AGGUUGUGGGCCUGGAUGAUGC | 22 | 13558 |
| HSV1-UL30-4619 | + | CAGGUUGUGGGCCUGGAUGAUGC | 23 | 13559 |
| HSV1-UL30-4620 | + | ACAGGUUGUGGGCCUGGAUGAUGC | 24 | 13560 |
| HSV1-UL30-4621 | + | AUGAAGGCCAACAGCAUC | 18 | 13561 |
| HSV1-UL30-4622 | + | CAUGAAGGCCAACAGCAUC | 19 | 13562 |
| HSV1-UL30-2520 | + | UCAUGAAGGCCAACAGCAUC | 20 | 5526 |
| HSV1-UL30-4623 | + | AGGGUCAUGAAGGCCAACAGCAUC | 24 | 13563 |
| HSV1-UL30-4624 | + | AGCGCGCGUGGACGUACUC | 19 | 13564 |
| HSV1-UL30-2439 | + | CAGCGCGCGUGGACGUACUC | 20 | 5445 |
| HSV1-UL30-4625 | + | CCAGCGCGCGUGGACGUACUC | 21 | 13565 |
| HSV1-UL30-4626 | + | CCCAGCGCGCGUGGACGUACUC | 22 | 13566 |
| HSV1-UL30-4627 | + | CGCCCAGCGCGCGUGGACGUACUC | 24 | 13567 |
| HSV1-UL30-4628 | + | CGACCGUCUCCUCUACCUC | 19 | 13568 |
| HSV1-UL30-4629 | + | CGCGACCGUCUCCUCUACCUC | 21 | 13569 |
| HSV1-UL30-4630 | + | CGCGCGACCGUCUCCUCUACCUC | 23 | 13570 |
| HSV1-UL30-4631 | + | CCGCGCGACCGUCUCCUCUACCUC | 24 | 13571 |
| HSV1-UL30-4632 | + | CGGCGGUGAGGACAAAGUC | 19 | 13572 |
| HSV1-UL30-2398 | + | UCGGCGGUGAGGACAAAGUC | 20 | 5405 |
| HSV1-UL30-4633 | + | UUCGGCGGUGAGGACAAAGUC | 21 | 13573 |
| HSV1-UL30-4634 | + | AGUUCGGCGGUGAGGACAAAGUC | 23 | 13574 |
| HSV1-UL30-4635 | + | CAGUUCGGCGGUGAGGACAAAGUC | 24 | 13575 |
| HSV1-UL30-4636 | + | UGACGAACCCGGGGUUGUC | 19 | 13576 |
| HSV1-UL30-4637 | + | AGGUGACGAACCCGGGGUUGUC | 22 | 13577 |
| HSV1-UL30-4638 | + | AAGGUGACGAACCCGGGGUUGUC | 23 | 13578 |
| HSV1-UL30-4639 | + | CGGGGGGUGCCACACUUC | 18 | 13579 |
| HSV1-UL30-4640 | + | CCGGGGGGUGCCACACUUC | 19 | 13580 |
| HSV1-UL30-2345 | + | UCCGGGGGGUGCCACACUUC | 20 | 5358 |
| HSV1-UL30-4641 | + | CGUCCGGGGGGUGCCACACUUC | 22 | 13581 |
| HSV1-UL30-4642 | + | UCGUCCGGGGGGUGCCACACUUC | 23 | 13582 |
| HSV1-UL30-4643 | + | CGGCCACCCGGUGGCCUUC | 19 | 13583 |
| HSV1-UL30-2581 | + | ACGGCCACCCGGUGGCCUUC | 20 | 5586 |
| HSV1-UL30-4644 | + | AACGGCCACCCGGUGGCCUUC | 21 | 13584 |
| HSV1-UL30-4645 | + | UGAACGGCCACCCGGUGGCCUUC | 23 | 13585 |
| HSV1-UL30-4646 | + | UCACGUGAAACCCGGAAG | 18 | 13586 |
| HSV1-UL30-4647 | + | UUCACGUGAAACCCGGAAG | 19 | 13587 |
| HSV1-UL30-4648 | + | CGGGGUUCACGUGAAACCCGGAAG | 24 | 13588 |
| HSV1-UL30-4649 | + | UGGCGAGCCAGUCCCGCAG | 19 | 13589 |
| HSV1-UL30-2458 | + | AUGGCGAGCCAGUCCCGCAG | 20 | 5464 |
| HSV1-UL30-4650 | + | CAUGGCGAGCCAGUCCCGCAG | 21 | 13590 |
| HSV1-UL30-4651 | + | CGCAUGGCGAGCCAGUCCCGCAG | 23 | 13591 |
| HSV1-UL30-4652 | + | UCGCAUGGCGAGCCAGUCCCGCAG | 24 | 13592 |
| HSV1-UL30-4653 | + | CGGGGCUUGGACGCGCCUCCCG | 22 | 13593 |
| HSV1-UL30-4654 | + | UGCGGGGCUUGGACGCGCCUCCCG | 24 | 13594 |
| HSV1-UL30-4655 | + | CGCGCGGCCACGUCGUCCG | 19 | 13595 |
| HSV1-UL30-2342 | + | CCGCGCGGCCACGUCGUCCG | 20 | 5355 |
| HSV1-UL30-4656 | + | AGCCGCGCGGCCACGUCGUCCG | 22 | 13596 |
| HSV1-UL30-4657 | + | CAGUUAAACUCGACGUCG | 18 | 13597 |
| HSV1-UL30-4658 | + | ACAGUUAAACUCGACGUCG | 19 | 13598 |
| HSV1-UL30-2548 | + | UACAGUUAAACUCGACGUCG | 20 | 5553 |
| HSV1-UL30-4659 | + | CGUACAGUUAAACUCGACGUCG | 22 | 13599 |
| HSV1-UL30-4660 | + | CCGUACAGUUAAACUCGACGUCG | 23 | 13600 |
| HSV1-UL30-4661 | + | AGGCUCUAUGCAACAUUCG | 19 | 13601 |
| HSV1-UL30-2335 | + | AAGGCUCUAUGCAACAUUCG | 20 | 5348 |
| HSV1-UL30-4662 | + | AAAGGCUCUAUGCAACAUUCG | 21 | 13602 |
| HSV1-UL30-4663 | + | CAAAGGCUCUAUGCAACAUUCG | 22 | 13603 |
| HSV1-UL30-4664 | + | UCAAAGGCUCUAUGCAACAUUCG | 23 | 13604 |
| HSV1-UL30-4665 | + | AUCAAAGGCUCUAUGCAACAUUCG | 24 | 13605 |
| HSV1-UL30-2526 | + | UGGCCGCCAGCUCGUUCAGG | 20 | 5532 |
| HSV1-UL30-4666 | + | CUGGCCGCCAGCUCGUUCAGG | 21 | 13606 |
| HSV1-UL30-4667 | + | CCUGGCCGCCAGCUCGUUCAGG | 22 | 13607 |
| HSV1-UL30-4668 | + | CCCUGGCCGCCAGCUCGUUCAGG | 23 | 13608 |
| HSV1-UL30-4669 | + | CCCCUGGCCGCCAGCUCGUUCAGG | 24 | 13609 |
| HSV1-UL30-4670 | + | UCGCCCCUGGGUGUCCGG | 18 | 13610 |
| HSV1-UL30-4671 | + | AUCGCCCCUGGGUGUCCGG | 19 | 13611 |
| HSV1-UL30-2487 | + | AAUCGCCCCUGGGUGUCCGG | 20 | 5493 |
| HSV1-UL30-4672 | + | AAAUCGCCCCUGGGUGUCCGG | 21 | 13612 |
| HSV1-UL30-4673 | + | UAAAUCGCCCCUGGGUGUCCGG | 22 | 13613 |
| HSV1-UL30-4674 | + | CUAAAUCGCCCCUGGGUGUCCGG | 23 | 13614 |
| HSV1-UL30-4675 | + | CCUAAAUCGCCCCUGGGUGUCCGG | 24 | 13615 |
| HSV1-UL30-4676 | + | CGUGGGCAAUGGCGUAUG | 18 | 13616 |
| HSV1-UL30-4677 | + | CCGUGGGCAAUGGCGUAUG | 19 | 13617 |
| HSV1-UL30-4678 | + | CGCCGUGGGCAAUGGCGUAUG | 21 | 13618 |
| HSV1-UL30-4679 | + | ACGCCGUGGGCAAUGGCGUAUG | 22 | 13619 |
| HSV1-UL30-4680 | + | CGACGCCGUGGGCAAUGGCGUAUG | 24 | 13620 |
| HSV1-UL30-4681 | + | AGCAUCUCGAAUUCGCUG | 18 | 13621 |
| HSV1-UL30-4682 | + | CAGCAUCUCGAAUUCGCUG | 19 | 13622 |
| HSV1-UL30-2521 | + | ACAGCAUCUCGAAUUCGCUG | 20 | 5527 |
| HSV1-UL30-4683 | + | AACAGCAUCUCGAAUUCGCUG | 21 | 13623 |
| HSV1-UL30-4684 | + | CAACAGCAUCUCGAAUUCGCUG | 22 | 13624 |
| HSV1-UL30-4685 | + | CCAACAGCAUCUCGAAUUCGCUG | 23 | 13625 |
| HSV1-UL30-4686 | + | CUCCUCGGGGCUGCUCUG | 18 | 13626 |
| HSV1-UL30-4687 | + | CCUCCUCGGGGCUGCUCUG | 19 | 13627 |
| HSV1-UL30-4688 | + | CGGCCUCCUCGGGGCUGCUCUG | 22 | 13628 |
| HSV1-UL30-4689 | + | ACGGCCUCCUCGGGGCUGCUCUG | 23 | 13629 |
| HSV1-UL30-4690 | + | CACGGCCUCCUCGGGGCUGCUCUG | 24 | 13630 |
| HSV1-UL30-4691 | + | CGUAGAGCAGACAGGAUAU | 19 | 13631 |
| HSV1-UL30-2542 | + | UCGUAGAGCAGACAGGAUAU | 20 | 5547 |
| HSV1-UL30-4692 | + | AGGUCGUAGAGCAGACAGGAUAU | 23 | 13632 |
| HSV1-UL30-4693 | + | CAGGUCGUAGAGCAGACAGGAUAU | 24 | 13633 |
| HSV1-UL30-4694 | + | UCUGGAUGACCAGGUCCU | 18 | 13634 |
| HSV1-UL30-4695 | + | AUCUGGAUGACCAGGUCCU | 19 | 13635 |
| HSV1-UL30-2543 | + | UAUCUGGAUGACCAGGUCCU | 20 | 5548 |
| HSV1-UL30-4696 | + | AUAUCUGGAUGACCAGGUCCU | 21 | 13636 |
| HSV1-UL30-4697 | + | AGGAUAUCUGGAUGACCAGGUCCU | 24 | 13637 |
| HSV1-UL30-4698 | + | AGUCCUGGAUGUCCCUCU | 18 | 13638 |
| HSV1-UL30-4699 | + | AAGUCCUGGAUGUCCCUCU | 19 | 13639 |
| HSV1-UL30-2399 | + | AAAGUCCUGGAUGUCCCUCU | 20 | 5406 |
| HSV1-UL30-4700 | + | CAAAGUCCUGGAUGUCCCUCU | 21 | 13640 |
| HSV1-UL30-4701 | + | ACAAAGUCCUGGAUGUCCCUCU | 22 | 13641 |
| HSV1-UL30-4702 | + | CUGGCCGUCGUAGAUGGU | 18 | 13642 |
| HSV1-UL30-2489 | + | UGCUGGCCGUCGUAGAUGGU | 20 | 5495 |
| HSV1-UL30-4703 | + | CUGCUGGCCGUCGUAGAUGGU | 21 | 13643 |
| HSV1-UL30-4704 | + | UCUGCUGGCCGUCGUAGAUGGU | 22 | 13644 |
| HSV1-UL30-4705 | + | AUCUGCUGGCCGUCGUAGAUGGU | 23 | 13645 |
| HSV1-UL30-4706 | − | UGGUUCUGGAAUUCGACA | 18 | 13646 |
| HSV1-UL30-1840 | − | CGUGGUUCUGGAAUUCGACA | 20 | 4890 |
| HSV1-UL30-4707 | − | CCGUGGUUCUGGAAUUCGACA | 21 | 13647 |
| HSV1-UL30-4708 | − | CCCGUGGUUCUGGAAUUCGACA | 22 | 13648 |
| HSV1-UL30-4709 | − | CGCCCGUGGUUCUGGAAUUCGACA | 24 | 13649 |
| HSV1-UL30-4710 | − | CCUGACUCCGGAAGGCCA | 18 | 13650 |
| HSV1-UL30-4711 | − | UGGGCCUGACUCCGGAAGGCCA | 22 | 13651 |
| HSV1-UL30-4712 | − | CUGGGCCUGACUCCGGAAGGCCA | 23 | 13652 |
| HSV1-UL30-4713 | − | CCUGGGCCUGACUCCGGAAGGCCA | 24 | 13653 |
| HSV1-UL30-4714 | − | AGGUCCCGUCCAUCAAGGA | 19 | 13654 |
| HSV1-UL30-2011 | − | CAGGUCCCGUCCAUCAAGGA | 20 | 5044 |
| HSV1-UL30-4715 | − | CGCAGGUCCCGUCCAUCAAGGA | 22 | 13655 |
| HSV1-UL30-4716 | − | CGCGCAGGUCCCGUCCAUCAAGGA | 24 | 13656 |
| HSV1-UL30-4717 | − | ACGGCCCCGAGUUCGUGA | 18 | 13657 |
| HSV1-UL30-4718 | − | UACGGCCCCGAGUUCGUGA | 19 | 13658 |
| HSV1-UL30-4719 | − | AGUACGGCCCCGAGUUCGUGA | 21 | 13659 |
| HSV1-UL30-4720 | − | CAGUACGGCCCCGAGUUCGUGA | 22 | 13660 |
| HSV1-UL30-4721 | − | ACAGUACGGCCCCGAGUUCGUGA | 23 | 13661 |
| HSV1-UL30-4722 | − | AACAGUACGGCCCCGAGUUCGUGA | 24 | 13662 |
| HSV1-UL30-4723 | − | AUCGGCGAGUACUGCAUA | 18 | 13663 |
| HSV1-UL30-1871 | − | UGAUCGGCGAGUACUGCAUA | 20 | 4920 |
| HSV1-UL30-4724 | − | AGCUCAUGUGCUUCGAUA | 18 | 13664 |
| HSV1-UL30-4725 | − | AAGCUCAUGUGCUUCGAUA | 19 | 13665 |
| HSV1-UL30-1816 | − | CAAGCUCAUGUGCUUCGAUA | 20 | 4866 |
| HSV1-UL30-4726 | − | ACAAGCUCAUGUGCUUCGAUA | 21 | 13666 |
| HSV1-UL30-4727 | − | UACAAGCUCAUGUGCUUCGAUA | 22 | 13667 |
| HSV1-UL30-4728 | − | AUACAAGCUCAUGUGCUUCGAUA | 23 | 13668 |
| HSV1-UL30-4729 | − | CAUACAAGCUCAUGUGCUUCGAUA | 24 | 13669 |
| HSV1-UL30-4730 | − | UGGUGAACAUCGACAUGUA | 19 | 13670 |
| HSV1-UL30-1858 | − | AUGGUGAACAUCGACAUGUA | 20 | 4908 |
| HSV1-UL30-4731 | − | CAUGGUGAACAUCGACAUGUA | 21 | 13671 |
| HSV1-UL30-4732 | − | CGGCAUGGUGAACAUCGACAUGUA | 24 | 13672 |
| HSV1-UL30-4733 | − | UUCUGCCCCCCAUCAAAC | 18 | 13673 |
| HSV1-UL30-4734 | − | UUUCUGCCCCCCAUCAAAC | 19 | 13674 |
| HSV1-UL30-4735 | − | UGUUUCUGCCCCCCAUCAAAC | 21 | 13675 |
| HSV1-UL30-4736 | − | CUGUUUCUGCCCCCCAUCAAAC | 22 | 13676 |
| HSV1-UL30-4737 | − | CGCUGUUUCUGCCCCCCAUCAAAC | 24 | 13677 |
| HSV1-UL30-4738 | − | CUCGGUGUACGGGUUCAC | 18 | 13678 |
| HSV1-UL30-4739 | − | ACUCGGUGUACGGGUUCAC | 19 | 13679 |
| HSV1-UL30-1965 | − | AACUCGGUGUACGGGUUCAC | 20 | 4998 |
| HSV1-UL30-4740 | − | UAACUCGGUGUACGGGUUCAC | 21 | 13680 |
| HSV1-UL30-4741 | − | UGUAACUCGGUGUACGGGUUCAC | 23 | 13681 |
| HSV1-UL30-4742 | − | UACAUCGGCGUCAUCUAC | 18 | 13682 |
| HSV1-UL30-1986 | − | AGUACAUCGGCGUCAUCUAC | 20 | 5019 |
| HSV1-UL30-4743 | − | AAGUACAUCGGCGUCAUCUAC | 21 | 13683 |
| HSV1-UL30-4744 | − | AAAGUACAUCGGCGUCAUCUAC | 22 | 13684 |
| HSV1-UL30-4745 | − | AAAAGUACAUCGGCGUCAUCUAC | 23 | 13685 |
| HSV1-UL30-4746 | − | AAAAAGUACAUCGGCGUCAUCUAC | 24 | 13686 |
| HSV1-UL30-4747 | − | CCGGCCAUCAAGAAGUAC | 18 | 13687 |
| HSV1-UL30-4748 | − | CCCGGCCAUCAAGAAGUAC | 19 | 13688 |
| HSV1-UL30-4749 | − | UGCCCGGCCAUCAAGAAGUAC | 21 | 13689 |
| HSV1-UL30-4750 | − | CUGCCCGGCCAUCAAGAAGUAC | 22 | 13690 |
| HSV1-UL30-4751 | − | UCUGCCCGGCCAUCAAGAAGUAC | 23 | 13691 |
| HSV1-UL30-4752 | − | UUCUGCCCGGCCAUCAAGAAGUAC | 24 | 13692 |
| HSV1-UL30-4753 | − | CGGUUCAUCCUGGACAACC | 19 | 13693 |
| HSV1-UL30-1802 | − | CCGGUUCAUCCUGGACAACC | 20 | 4852 |
| HSV1-UL30-4754 | − | CCCGGUUCAUCCUGGACAACC | 21 | 13694 |
| HSV1-UL30-4755 | − | ACCCGGUUCAUCCUGGACAACC | 22 | 13695 |
| HSV1-UL30-4756 | − | CACCCGGUUCAUCCUGGACAACC | 23 | 13696 |
| HSV1-UL30-4757 | − | CCACCCGGUUCAUCCUGGACAACC | 24 | 13697 |
| HSV1-UL30-4758 | − | AAUAACGCCAAGAUCACC | 18 | 13698 |
| HSV1-UL30-4759 | − | UGGGAAUAACGCCAAGAUCACC | 22 | 13699 |
| HSV1-UL30-4760 | − | UUGGGAAUAACGCCAAGAUCACC | 23 | 13700 |
| HSV1-UL30-4761 | − | UUUGGGAAUAACGCCAAGAUCACC | 24 | 13701 |
| HSV1-UL30-4762 | − | AGAUGCUGCUCGCGACCC | 18 | 13702 |
| HSV1-UL30-1968 | − | CGAGAUGCUGCUCGCGACCC | 20 | 5001 |
| HSV1-UL30-4763 | − | CGCGAGAUGCUGCUCGCGACCC | 22 | 13703 |
| HSV1-UL30-4764 | − | CCGCGAGAUGCUGCUCGCGACCC | 23 | 13704 |
| HSV1-UL30-4765 | − | UUGUGAAACAGUACGGCC | 18 | 13705 |
| HSV1-UL30-4766 | − | CUUGUGAAACAGUACGGCC | 19 | 13706 |
| HSV1-UL30-1843 | − | CCUUGUGAAACAGUACGGCC | 20 | 4893 |
| HSV1-UL30-4767 | − | CCCUUGUGAAACAGUACGGCC | 21 | 13707 |
| HSV1-UL30-4768 | − | ACCCUUGUGAAACAGUACGGCC | 22 | 13708 |
| HSV1-UL30-4769 | − | UGACCCUUGUGAAACAGUACGGCC | 24 | 13709 |
| HSV1-UL30-4770 | − | CUGGUGUCCGAGCUGGCC | 18 | 13710 |
| HSV1-UL30-2029 | − | UGCUGGUGUCCGAGCUGGCC | 20 | 5062 |
| HSV1-UL30-4771 | − | CUGCUGGUGUCCGAGCUGGCC | 21 | 13711 |
| HSV1-UL30-4772 | − | AGCUGCUGGUGUCCGAGCUGGCC | 23 | 13712 |
| HSV1-UL30-4773 | − | AAGCUGCUGGUGUCCGAGCUGGCC | 24 | 13713 |
| HSV1-UL30-4774 | − | UCGGUUCCUGCGACCUCC | 18 | 13714 |
| HSV1-UL30-4775 | − | CUCGGUUCCUGCGACCUCC | 19 | 13715 |
| HSV1-UL30-4776 | − | CGCUCGGUUCCUGCGACCUCC | 21 | 13716 |
| HSV1-UL30-4777 | − | UCGCUCGGUUCCUGCGACCUCC | 22 | 13717 |
| HSV1-UL30-4778 | − | UUCGCUCGGUUCCUGCGACCUCC | 23 | 13718 |
| HSV1-UL30-4779 | − | UUUCGCUCGGUUCCUGCGACCUCC | 24 | 13719 |
| HSV1-UL30-4780 | − | AAGAUGCUCAUCAAGGGC | 18 | 13720 |
| HSV1-UL30-4781 | − | UAAGAUGCUCAUCAAGGGC | 19 | 13721 |
| HSV1-UL30-4782 | − | CGUGGGGUACCAGGGGGC | 18 | 13722 |
| HSV1-UL30-4783 | − | ACGUGGGGUACCAGGGGGC | 19 | 13723 |
| HSV1-UL30-1933 | − | CACGUGGGGUACCAGGGGGC | 20 | 4966 |
| HSV1-UL30-4784 | − | AGGCACGUGGGGUACCAGGGGGC | 23 | 13724 |
| HSV1-UL30-4785 | − | CAGGCACGUGGGGUACCAGGGGGC | 24 | 13725 |
| HSV1-UL30-4786 | − | CGCAUGGCCGCGGCCCUGC | 19 | 13726 |
| HSV1-UL30-4787 | − | AGCGCAUGGCCGCGGCCCUGC | 21 | 13727 |
| HSV1-UL30-4788 | − | CGAGCGCAUGGCCGCGGCCCUGC | 23 | 13728 |
| HSV1-UL30-4789 | − | UGCGAAAGCAGAUCCGCUC | 19 | 13729 |
| HSV1-UL30-1956 | − | AUGCGAAAGCAGAUCCGCUC | 20 | 4989 |
| HSV1-UL30-4790 | − | CAUGCGAAAGCAGAUCCGCUC | 21 | 13730 |
| HSV1-UL30-4791 | − | CCAUGCGAAAGCAGAUCCGCUC | 22 | 13731 |
| HSV1-UL30-4792 | − | CGCCAUGCGAAAGCAGAUCCGCUC | 24 | 13732 |
| HSV1-UL30-4793 | − | UGCCCACGCCCGUGGUUC | 18 | 13733 |
| HSV1-UL30-4794 | − | CUGCCCACGCCCGUGGUUC | 19 | 13734 |
| HSV1-UL30-1839 | − | CCUGCCCACGCCCGUGGUUC | 20 | 4889 |
| HSV1-UL30-4795 | − | CGCCGGGCCCGCGCAACG | 18 | 13735 |
| HSV1-UL30-4796 | − | CCGCCGGGCCCGCGCAACG | 19 | 13736 |
| HSV1-UL30-4797 | − | CGCCGCCGGGCCCGCGCAACG | 21 | 13737 |
| HSV1-UL30-4798 | − | ACGCCGCCGGGCCCGCGCAACG | 22 | 13738 |
| HSV1-UL30-4799 | − | UACGCCGCCGGGCCCGCGCAACG | 23 | 13739 |
| HSV1-UL30-4800 | − | CUACGCCGCCGGGCCCGCGCAACG | 24 | 13740 |
| HSV1-UL30-4801 | − | AGACCGCCGGCAGGCACG | 18 | 13741 |
| HSV1-UL30-4802 | − | CGGGAGACCGCCGGCAGGCACG | 22 | 13742 |
| HSV1-UL30-4803 | − | CGCGGGAGACCGCCGGCAGGCACG | 24 | 13743 |
| HSV1-UL30-4804 | − | UCGGGACAUCCAGCGACG | 18 | 13744 |
| HSV1-UL30-4805 | − | UUCGGGACAUCCAGCGACG | 19 | 13745 |
| HSV1-UL30-1808 | − | CUUCGGGACAUCCAGCGACG | 20 | 4858 |
| HSV1-UL30-4806 | − | CCUUCGGGACAUCCAGCGACG | 21 | 13746 |
| HSV1-UL30-4807 | − | UGGCCUUCGGGACAUCCAGCGACG | 24 | 13747 |
| HSV1-UL30-4808 | − | CCGCGCGGCUCCGGACCG | 18 | 13748 |
| HSV1-UL30-4809 | − | UGGCCGCGCGGCUCCGGACCG | 21 | 13749 |
| HSV1-UL30-4810 | − | CGUGGCCGCGCGGCUCCGGACCG | 23 | 13750 |
| HSV1-UL30-4811 | − | ACGUGGCCGCGCGGCUCCGGACCG | 24 | 13751 |
| HSV1-UL30-4812 | − | ACCGCAGGGUUCGGGGCG | 18 | 13752 |
| HSV1-UL30-4813 | − | CGGACCGCAGGGUUCGGGGCG | 21 | 13753 |
| HSV1-UL30-4814 | − | CCGGACCGCAGGGUUCGGGGCG | 22 | 13754 |
| HSV1-UL30-4815 | − | UCCGGACCGCAGGGUUCGGGGCG | 23 | 13755 |
| HSV1-UL30-4816 | − | CUCCGGACCGCAGGGUUCGGGGCG | 24 | 13756 |
| HSV1-UL30-4817 | − | CGCAACGCGGGGUGAUCG | 18 | 13757 |
| HSV1-UL30-1870 | − | CGCGCAACGCGGGGUGAUCG | 20 | 4919 |
| HSV1-UL30-4818 | − | CCGCGCAACGCGGGGUGAUCG | 21 | 13758 |
| HSV1-UL30-4819 | − | CCCGCGCAACGCGGGGUGAUCG | 22 | 13759 |
| HSV1-UL30-4820 | − | UACGGCGGAGGAAACUCG | 18 | 13760 |
| HSV1-UL30-4821 | − | CUACGGCGGAGGAAACUCG | 19 | 13761 |
| HSV1-UL30-4822 | − | CGCUACGGCGGAGGAAACUCG | 21 | 13762 |
| HSV1-UL30-4823 | − | CGGCGCUACGGCGGAGGAAACUCG | 24 | 13763 |
| HSV1-UL30-4824 | − | UAGCCGAGCGCCCCGCGG | 18 | 13764 |
| HSV1-UL30-4825 | − | UUAGCCGAGCGCCCCGCGG | 19 | 13765 |
| HSV1-UL30-4826 | − | CGUUAGCCGAGCGCCCCGCGG | 21 | 13766 |
| HSV1-UL30-4827 | − | CGCGUUAGCCGAGCGCCCCGCGG | 23 | 13767 |
| HSV1-UL30-4828 | − | CCGCGUUAGCCGAGCGCCCCGCGG | 24 | 13768 |
| HSV1-UL30-4829 | − | CAUCAAGAAGUACGAGGG | 18 | 13769 |
| HSV1-UL30-4830 | − | CCAUCAAGAAGUACGAGGG | 19 | 13770 |
| HSV1-UL30-4831 | − | CGGCCAUCAAGAAGUACGAGGG | 22 | 13771 |
| HSV1-UL30-4832 | − | CCGGCCAUCAAGAAGUACGAGGG | 23 | 13772 |
| HSV1-UL30-4833 | − | CCCGGCCAUCAAGAAGUACGAGGG | 24 | 13773 |
| HSV1-UL30-4834 | − | UUUACAAGGUCCCCCUGG | 18 | 13774 |
| HSV1-UL30-4835 | − | AUUUACAAGGUCCCCCUGG | 19 | 13775 |
| HSV1-UL30-1847 | − | CAUUUACAAGGUCCCCCUGG | 20 | 4897 |
| HSV1-UL30-4836 | − | ACAUUUACAAGGUCCCCCUGG | 21 | 13776 |
| HSV1-UL30-4837 | − | CGGACAUUUACAAGGUCCCCCUGG | 24 | 13777 |
| HSV1-UL30-4838 | − | UCGGCCGUCGCGCGCUUG | 18 | 13778 |
| HSV1-UL30-4839 | − | CUCGGCCGUCGCGCGCUUG | 19 | 13779 |
| HSV1-UL30-1875 | − | UCUCGGCCGUCGCGCGCUUG | 20 | 4924 |
| HSV1-UL30-4840 | − | CUCUCGGCCGUCGCGCGCUUG | 21 | 13780 |
| HSV1-UL30-4841 | − | AGCUCUCGGCCGUCGCGCGCUUG | 23 | 13781 |
| HSV1-UL30-4842 | − | UCGUGUGUAACUCGGUGU | 18 | 13782 |
| HSV1-UL30-4843 | − | AGGUCGUGUGUAACUCGGUGU | 21 | 13783 |
| HSV1-UL30-4844 | − | AAGGUCGUGUGUAACUCGGUGU | 22 | 13784 |
| HSV1-UL30-4845 | − | CAAGGUCGUGUGUAACUCGGUGU | 23 | 13785 |
| HSV1-UL30-4846 | − | UCAAGGUCGUGUGUAACUCGGUGU | 24 | 13786 |
| HSV1-UL30-4847 | − | AGGGUCCUUGACCCCACUU | 19 | 13787 |
| HSV1-UL30-1934 | − | CAGGGUCCUUGACCCCACUU | 20 | 4967 |
| HSV1-UL30-4848 | − | CCAGGGUCCUUGACCCCACUU | 21 | 13788 |
| HSV1-UL30-4849 | − | ACAUUCAAGGCCCUGUUU | 18 | 13789 |
| HSV1-UL30-2037 | − | UGACAUUCAAGGCCCUGUUU | 20 | 5070 |
| HSV1-UL30-4850 | − | CGUGACAUUCAAGGCCCUGUUU | 22 | 13790 |
| HSV1-UL30-4851 | − | UGCGUGACAUUCAAGGCCCUGUUU | 24 | 13791 |

[0781] Table 9G provides exemplary targeting domains for knocking out the UL30 gene selected according to the seven tier parameters. The targeting domains fall in the coding sequence of the gene, downstream of the first 500 bp of coding sequence (e.g., anywhere from +500 (relative to the start codon) to the stop codon of the gene). The PAM is NNGRRV. It is contemplated herein that in an embodiment the targeting domain hybridizes to the target domain through complementary base pairing. Any of the targeting domains in the table can be used with a S. aureus Cas9 molecule that generates a double stranded break (Cas9 nuclease) or a single-stranded break (Cas9 nickase).

TABLE 9G

| | | | Target | |
|---|---|---|---|---|
| 7th Tier | DNA | | Site | Seq ID |
| gRNA Name | Strand | Targeting Domain | Length | NO: |
| HSV1-UL30-4852 | + | GCAGGAACCGAGCGAAAA | 18 | 13792 |
| HSV1-UL30-4853 | + | CGCAGGAACCGAGCGAAAA | 19 | 13793 |
| HSV1-UL30-2535 | + | UCGCAGGAACCGAGCGAAAA | 20 | 5541 |
| HSV1-UL30-4854 | + | GUCGCAGGAACCGAGCGAAAA | 21 | 13794 |
| HSV1-UL30-4855 | + | GGUCGCAGGAACCGAGCGAAAA | 22 | 13795 |
| HSV1-UL30-4856 | + | AGGUCGCAGGAACCGAGCGAAAA | 23 | 13796 |
| HSV1-UL30-4857 | + | GAGGUCGCAGGAACCGAGCGAAAA | 24 | 13797 |
| HSV1-UL30-4858 | + | GACGUAGACGCGGUAAAA | 18 | 13798 |
| HSV1-UL30-4859 | + | GGACGUAGACGCGGUAAAA | 19 | 13799 |
| HSV1-UL30-2564 | + | CGGACGUAGACGCGGUAAAA | 20 | 5569 |
| HSV1-UL30-4860 | + | UCGGACGUAGACGCGGUAAAA | 21 | 13800 |
| HSV1-UL30-4861 | + | UUCGGACGUAGACGCGGUAAAA | 22 | 13801 |
| HSV1-UL30-4862 | + | CUUCGGACGUAGACGCGGUAAAA | 23 | 13802 |
| HSV1-UL30-4863 | + | GCUUCGGACGUAGACGCGGUAAAA | 24 | 13803 |
| HSV1-UL30-4864 | + | CUUGGCGUUAUUCCCAAA | 18 | 13804 |
| HSV1-UL30-4865 | + | UCUUGGCGUUAUUCCCAAA | 19 | 13805 |
| HSV1-UL30-2346 | + | AUCUUGGCGUUAUUCCCAAA | 20 | 5359 |
| HSV1-UL30-4866 | + | GAUCUUGGCGUUAUUCCCAAA | 21 | 13806 |
| HSV1-UL30-4867 | + | UGAUCUUGGCGUUAUUCCCAAA | 22 | 13807 |
| HSV1-UL30-4868 | + | GUGAUCUUGGCGUUAUUCCCAAA | 23 | 13808 |
| HSV1-UL30-4869 | + | GGUGAUCUUGGCGUUAUUCCCAAA | 24 | 13809 |
| HSV1-UL30-4870 | + | UCGGGGAGGUCGCAGGAA | 18 | 13810 |
| HSV1-UL30-4871 | + | UUCGGGGAGGUCGCAGGAA | 19 | 13811 |
| HSV1-UL30-2533 | + | AUUCGGGGAGGUCGCAGGAA | 20 | 5539 |
| HSV1-UL30-4872 | + | GAUUCGGGGAGGUCGCAGGAA | 21 | 13812 |
| HSV1-UL30-4873 | + | GGAUUCGGGGAGGUCGCAGGAA | 22 | 13813 |
| HSV1-UL30-4874 | + | GGGAUUCGGGGAGGUCGCAGGAA | 23 | 13814 |
| HSV1-UL30-4875 | + | UGGGAUUCGGGGAGGUCGCAGGAA | 24 | 13815 |
| HSV1-UL30-4876 | + | UUCACGUGAAACCCGGAA | 18 | 13816 |
| HSV1-UL30-4877 | + | GUUCACGUGAAACCCGGAA | 19 | 13817 |
| HSV1-UL30-2480 | + | GGUUCACGUGAAACCCGGAA | 20 | 5486 |
| HSV1-UL30-4878 | + | GGGUUCACGUGAAACCCGGAA | 21 | 13818 |
| HSV1-UL30-4879 | + | GGGGUUCACGUGAAACCCGGAA | 22 | 13819 |
| HSV1-UL30-4880 | + | CGGGGUUCACGUGAAACCCGGAA | 23 | 13820 |
| HSV1-UL30-4881 | + | ACGGGGUUCACGUGAAACCCGGAA | 24 | 13821 |
| HSV1-UL30-4882 | + | UAGAUGAUGCGCAUGGAA | 18 | 13822 |
| HSV1-UL30-4883 | + | GUAGAUGAUGCGCAUGGAA | 19 | 13823 |
| HSV1-UL30-2428 | + | CGUAGAUGAUGCGCAUGGAA | 20 | 5434 |
| HSV1-UL30-4884 | + | CCGUAGAUGAUGCGCAUGGAA | 21 | 13824 |
| HSV1-UL30-4885 | + | CCCGUAGAUGAUGCGCAUGGAA | 22 | 13825 |
| HSV1-UL30-4886 | + | CCCCGUAGAUGAUGCGCAUGGAA | 23 | 13826 |
| HSV1-UL30-4887 | + | UCCCCGUAGAUGAUGCGCAUGGAA | 24 | 13827 |
| HSV1-UL30-3882 | + | CAUAAACCGCGCGUGGAA | 18 | 12822 |
| HSV1-UL30-3883 | + | CCAUAAACCGCGCGUGGAA | 19 | 12823 |
| HSV1-UL30-3884 | + | UCCAUAAACCGCGCGUGGAA | 20 | 12824 |
| HSV1-UL30-3885 | + | GUCCAUAAACCGCGCGUGGAA | 21 | 12825 |
| HSV1-UL30-3886 | + | CGUCCAUAAACCGCGCGUGGAA | 22 | 12826 |
| HSV1-UL30-3887 | + | GCGUCCAUAAACCGCGCGUGGAA | 23 | 12827 |
| HSV1-UL30-3888 | + | GGCGUCCAUAAACCGCGCGUGGAA | 24 | 12828 |
| HSV1-UL30-4888 | + | UGGAUGUCCCGAAGGCCA | 18 | 13828 |
| HSV1-UL30-4889 | + | CUGGAUGUCCCGAAGGCCA | 19 | 13829 |
| HSV1-UL30-2550 | + | GCUGGAUGUCCCGAAGGCCA | 20 | 5555 |
| HSV1-UL30-4890 | + | CGCUGGAUGUCCCGAAGGCCA | 21 | 13830 |
| HSV1-UL30-4891 | + | UCGCUGGAUGUCCCGAAGGCCA | 22 | 13831 |
| HSV1-UL30-4892 | + | GUCGCUGGAUGUCCCGAAGGCCA | 23 | 13832 |
| HSV1-UL30-4893 | + | CGUCGCUGGAUGUCCCGAAGGCCA | 24 | 13833 |
| HSV1-UL30-4894 | + | CCUCCGGGUGCCCGGCCA | 18 | 13834 |
| HSV1-UL30-4895 | + | UCCUCCGGGUGCCCGGCCA | 19 | 13835 |
| HSV1-UL30-2544 | + | GUCCUCCGGGUGCCCGGCCA | 20 | 5549 |
| HSV1-UL30-4896 | + | GGUCCUCCGGGUGCCCGGCCA | 21 | 13836 |
| HSV1-UL30-4897 | + | AGGUCCUCCGGGUGCCCGGCCA | 22 | 13837 |
| HSV1-UL30-4898 | + | CAGGUCCUCCGGGUGCCCGGCCA | 23 | 13838 |
| HSV1-UL30-4899 | + | CCAGGUCCUCCGGGUGCCCGGCCA | 24 | 13839 |
| HSV1-UL30-4900 | + | UGCGGCCGUACCCGUCCA | 18 | 13840 |
| HSV1-UL30-4901 | + | AUGCGGCCGUACCCGUCCA | 19 | 13841 |
| HSV1-UL30-2510 | + | CAUGCGGCCGUACCCGUCCA | 20 | 5516 |
| HSV1-UL30-4902 | + | UCAUGCGGCCGUACCCGUCCA | 21 | 13842 |
| HSV1-UL30-4903 | + | UUCAUGCGGCCGUACCCGUCCA | 22 | 13843 |
| HSV1-UL30-4904 | + | GUUCAUGCGGCCGUACCCGUCCA | 23 | 13844 |
| HSV1-UL30-4905 | + | CGUUCAUGCGGCCGUACCCGUCCA | 24 | 13845 |
| HSV1-UL30-4906 | + | CCACUGCGUCGGCCCUCA | 18 | 13846 |
| HSV1-UL30-4907 | + | GCCACUGCGUCGGCCCUCA | 19 | 13847 |
| HSV1-UL30-2467 | + | CGCCACUGCGUCGGCCCUCA | 20 | 5473 |
| HSV1-UL30-4908 | + | GCGCCACUGCGUCGGCCCUCA | 21 | 13848 |
| HSV1-UL30-4909 | + | UGCGCCACUGCGUCGGCCCUCA | 22 | 13849 |
| HSV1-UL30-4910 | + | GUGCGCCACUGCGUCGGCCCUCA | 23 | 13850 |
| HSV1-UL30-4911 | + | GGUGCGCCACUGCGUCGGCCCUCA | 24 | 13851 |
| HSV1-UL30-4912 | + | UAGACGCGGUAAAACAGA | 18 | 13852 |
| HSV1-UL30-4913 | + | GUAGACGCGGUAAAACAGA | 19 | 13853 |
| HSV1-UL30-2565 | + | CGUAGACGCGGUAAAACAGA | 20 | 5570 |
| HSV1-UL30-4914 | + | ACGUAGACGCGGUAAAACAGA | 21 | 13854 |
| HSV1-UL30-4915 | + | GACGUAGACGCGGUAAAACAGA | 22 | 13855 |
| HSV1-UL30-4916 | + | GGACGUAGACGCGGUAAAACAGA | 23 | 13856 |
| HSV1-UL30-4917 | + | CGGACGUAGACGCGGUAAAACAGA | 24 | 13857 |
| HSV1-UL30-4918 | + | ACGGCCGAGAGCUCCAGA | 18 | 13858 |
| HSV1-UL30-4919 | + | GACGGCCGAGAGCUCCAGA | 19 | 13859 |
| HSV1-UL30-2493 | + | CGACGGCCGAGAGCUCCAGA | 20 | 5499 |
| HSV1-UL30-4920 | + | GCGACGGCCGAGAGCUCCAGA | 21 | 13860 |
| HSV1-UL30-4921 | + | CGCGACGGCCGAGAGCUCCAGA | 22 | 13861 |
| HSV1-UL30-4922 | + | GCGCGACGGCCGAGAGCUCCAGA | 23 | 13862 |
| HSV1-UL30-4923 | + | CGCGCGACGGCCGAGAGCUCCAGA | 24 | 13863 |
| HSV1-UL30-4924 | + | GGAGGUCGCAGGAACCGA | 18 | 13864 |
| HSV1-UL30-4925 | + | GGGAGGUCGCAGGAACCGA | 19 | 13865 |
| HSV1-UL30-2534 | + | GGGGAGGUCGCAGGAACCGA | 20 | 5540 |
| HSV1-UL30-4926 | + | CGGGGAGGUCGCAGGAACCGA | 21 | 13866 |
| HSV1-UL30-4927 | + | UCGGGGAGGUCGCAGGAACCGA | 22 | 13867 |
| HSV1-UL30-4928 | + | UUCGGGGAGGUCGCAGGAACCGA | 23 | 13868 |
| HSV1-UL30-4929 | + | AUUCGGGGAGGUCGCAGGAACCGA | 24 | 13869 |
| HSV1-UL30-4930 | + | GAUCCGGUCCUUGAUGGA | 18 | 13870 |
| HSV1-UL30-4931 | + | GGAUCCGGUCCUUGAUGGA | 19 | 13871 |
| HSV1-UL30-2391 | + | GGGAUCCGGUCCUUGAUGGA | 20 | 5398 |
| HSV1-UL30-4932 | + | CGGGAUCCGGUCCUUGAUGGA | 21 | 13872 |
| HSV1-UL30-4933 | + | ACGGGAUCCGGUCCUUGAUGGA | 22 | 13873 |
| HSV1-UL30-4934 | + | UACGGGAUCCGGUCCUUGAUGGA | 23 | 13874 |
| HSV1-UL30-4935 | + | GUACGGGAUCCGGUCCUUGAUGGA | 24 | 13875 |
| HSV1-UL30-4936 | + | UUUCGCACUCGAGUUUGA | 18 | 13876 |
| HSV1-UL30-4937 | + | UUUUCGCACUCGAGUUUGA | 19 | 13877 |
| HSV1-UL30-2418 | + | CUUUUCGCACUCGAGUUUGA | 20 | 5425 |
| HSV1-UL30-4938 | + | UCUUUUCGCACUCGAGUUUGA | 21 | 13878 |
| HSV1-UL30-4939 | + | GUCUUUUCGCACUCGAGUUUGA | 22 | 13879 |
| HSV1-UL30-4940 | + | CGUCUUUUCGCACUCGAGUUUGA | 23 | 13880 |
| HSV1-UL30-4941 | + | ACGUCUUUUCGCACUCGAGUUUGA | 24 | 13881 |
| HSV1-UL30-4942 | + | CCCGCCUUGCAUUCGAUA | 18 | 13882 |
| HSV1-UL30-4943 | + | CCCCGCCUUGCAUUCGAUA | 19 | 13883 |
| HSV1-UL30-2546 | + | CCCCCGCCUUGCAUUCGAUA | 20 | 5551 |
| HSV1-UL30-4944 | + | CCCCCCGCCUUGCAUUCGAUA | 21 | 13884 |
| HSV1-UL30-4945 | + | CCCCCCCGCCUUGCAUUCGAUA | 22 | 13885 |
| HSV1-UL30-4946 | + | CCCCCCCCGCCUUGCAUUCGAUA | 23 | 13886 |
| HSV1-UL30-4947 | + | UCCCCCCCCGCCUUGCAUUCGAUA | 24 | 13887 |
| HSV1-UL30-4948 | + | CAGGAACCGAGCGAAAAC | 18 | 13888 |
| HSV1-UL30-4949 | + | GCAGGAACCGAGCGAAAAC | 19 | 13889 |
| HSV1-UL30-1345 | + | CGCAGGAACCGAGCGAAAAC | 20 | 4283 |
| HSV1-UL30-4950 | + | UCGCAGGAACCGAGCGAAAAC | 21 | 13890 |
| HSV1-UL30-4951 | + | GUCGCAGGAACCGAGCGAAAAC | 22 | 13891 |
| HSV1-UL30-4952 | + | GGUCGCAGGAACCGAGCGAAAAC | 23 | 13892 |
| HSV1-UL30-4953 | + | AGGUCGCAGGAACCGAGCGAAAAC | 24 | 13893 |
| HSV1-UL30-4954 | + | ACGGGGUUCACGUGAAAC | 18 | 13894 |
| HSV1-UL30-4955 | + | CACGGGGUUCACGUGAAAC | 19 | 13895 |
| HSV1-UL30-2478 | + | CCACGGGGUUCACGUGAAAC | 20 | 5484 |
| HSV1-UL30-4956 | + | ACCACGGGGUUCACGUGAAAC | 21 | 13896 |
| HSV1-UL30-4957 | + | CACCACGGGGUUCACGUGAAAC | 22 | 13897 |
| HSV1-UL30-4958 | + | CCACCACGGGGUUCACGUGAAAC | 23 | 13898 |
| HSV1-UL30-4959 | + | ACCACCACGGGGUUCACGUGAAAC | 24 | 13899 |
| HSV1-UL30-4960 | + | CUGCCGCGUGCCGUAAAC | 18 | 13900 |
| HSV1-UL30-4961 | + | ACUGCCGCGUGCCGUAAAC | 19 | 13901 |
| HSV1-UL30-2579 | + | UACUGCCGCGUGCCGUAAAC | 20 | 5584 |
| HSV1-UL30-4962 | + | GUACUGCCGCGUGCCGUAAAC | 21 | 13902 |
| HSV1-UL30-4963 | + | AGUACUGCCGCGUGCCGUAAAC | 22 | 13903 |
| HSV1-UL30-4964 | + | AAGUACUGCCGCGUGCCGUAAAC | 23 | 13904 |
| HSV1-UL30-4965 | + | AAAGUACUGCCGCGUGCCGUAAAC | 24 | 13905 |
| HSV1-UL30-4966 | + | UUGUACCCGGUCACGAAC | 18 | 13906 |
| HSV1-UL30-4967 | + | GUUGUACCCGGUCACGAAC | 19 | 13907 |
| HSV1-UL30-2516 | + | UGUUGUACCCGGUCACGAAC | 20 | 5522 |
| HSV1-UL30-4968 | + | AUGUUGUACCCGGUCACGAAC | 21 | 13908 |
| HSV1-UL30-4969 | + | GAUGUUGUACCCGGUCACGAAC | 22 | 13909 |
| HSV1-UL30-4970 | + | UGAUGUUGUACCCGGUCACGAAC | 23 | 13910 |
| HSV1-UL30-4971 | + | AUGAUGUUGUACCCGGUCACGAAC | 24 | 13911 |
| HSV1-UL30-4972 | + | CAGCCGAAGGUGACGAAC | 18 | 13912 |
| HSV1-UL30-4973 | + | CCAGCCGAAGGUGACGAAC | 19 | 13913 |
| HSV1-UL30-2556 | + | ACCAGCCGAAGGUGACGAAC | 20 | 5561 |
| HSV1-UL30-4974 | + | UACCAGCCGAAGGUGACGAAC | 21 | 13914 |
| HSV1-UL30-4975 | + | GUACCAGCCGAAGGUGACGAAC | 22 | 13915 |
| HSV1-UL30-4976 | + | GGUACCAGCCGAAGGUGACGAAC | 23 | 13916 |
| HSV1-UL30-4977 | + | CGGUACCAGCCGAAGGUGACGAAC | 24 | 13917 |
| HSV1-UL30-4978 | + | CUGGCCUAUGUCCCACAC | 18 | 13918 |
| HSV1-UL30-4979 | + | UCUGGCCUAUGUCCCACAC | 19 | 13919 |
| HSV1-UL30-2507 | + | CUCUGGCCUAUGUCCCACAC | 20 | 5513 |
| HSV1-UL30-4980 | + | GCUCUGGCCUAUGUCCCACAC | 21 | 13920 |
| HSV1-UL30-4981 | + | GGCUCUGGCCUAUGUCCCACAC | 22 | 13921 |
| HSV1-UL30-4982 | + | UGGCUCUGGCCUAUGUCCCACAC | 23 | 13922 |
| HSV1-UL30-4983 | + | GUGGCUCUGGCCUAUGUCCCACAC | 24 | 13923 |
| HSV1-UL30-4984 | + | CUCCGGGUGCCCGGCCAC | 18 | 13924 |
| HSV1-UL30-4985 | + | CCUCCGGGUGCCCGGCCAC | 19 | 13925 |
| HSV1-UL30-2545 | + | UCCUCCGGGUGCCCGGCCAC | 20 | 5550 |
| HSV1-UL30-4986 | + | GUCCUCCGGGUGCCCGGCCAC | 21 | 13926 |
| HSV1-UL30-4987 | + | GGUCCUCCGGGUGCCCGGCCAC | 22 | 13927 |
| HSV1-UL30-4988 | + | AGGUCCUCCGGGUGCCCGGCCAC | 23 | 13928 |
| HSV1-UL30-4989 | + | CAGGUCCUCCGGGUGCCCGGCCAC | 24 | 13929 |
| HSV1-UL30-4990 | + | CAUUCGAUAUCGAAGCAC | 18 | 13930 |
| HSV1-UL30-4991 | + | GCAUUCGAUAUCGAAGCAC | 19 | 13931 |
| HSV1-UL30-2547 | + | UGCAUUCGAUAUCGAAGCAC | 20 | 5552 |
| HSV1-UL30-4992 | + | UUGCAUUCGAUAUCGAAGCAC | 21 | 13932 |
| HSV1-UL30-4993 | + | CUUGCAUUCGAUAUCGAAGCAC | 22 | 13933 |
| HSV1-UL30-4994 | + | CCUUGCAUUCGAUAUCGAAGCAC | 23 | 13934 |
| HSV1-UL30-4995 | + | GCCUUGCAUUCGAUAUCGAAGCAC | 24 | 13935 |
| HSV1-UL30-4996 | + | GAGGAGGCUCUCUCGCAC | 18 | 13936 |
| HSV1-UL30-4997 | + | UGAGGAGGCUCUCUCGCAC | 19 | 13937 |
| HSV1-UL30-2462 | + | CUGAGGAGGCUCUCUCGCAC | 20 | 5468 |
| HSV1-UL30-4998 | + | GCUGAGGAGGCUCUCUCGCAC | 21 | 13938 |
| HSV1-UL30-4999 | + | UGCUGAGGAGGCUCUCUCGCAC | 22 | 13939 |
| HSV1-UL30-5000 | + | AUGCUGAGGAGGCUCUCUCGCAC | 23 | 13940 |
| HSV1-UL30-5001 | + | GAUGCUGAGGAGGCUCUCUCGCAC | 24 | 13941 |
| HSV1-UL30-5002 | + | CACCACCACGGGGUUCAC | 18 | 13942 |
| HSV1-UL30-5003 | + | ACACCACCACGGGGUUCAC | 19 | 13943 |
| HSV1-UL30-2477 | + | AACACCACCACGGGGUUCAC | 20 | 5483 |
| HSV1-UL30-5004 | + | GAACACCACCACGGGGUUCAC | 21 | 13944 |
| HSV1-UL30-5005 | + | CGAACACCACCACGGGGUUCAC | 22 | 13945 |
| HSV1-UL30-5006 | + | UCGAACACCACCACGGGGUUCAC | 23 | 13946 |
| HSV1-UL30-5007 | + | GUCGAACACCACCACGGGGUUCAC | 24 | 13947 |
| HSV1-UL30-5008 | + | GUAAAACAGCAGGUCGAC | 18 | 13948 |
| HSV1-UL30-5009 | + | CGUAAAACAGCAGGUCGAC | 19 | 13949 |
| HSV1-UL30-2411 | + | UCGUAAAACAGCAGGUCGAC | 20 | 5418 |
| HSV1-UL30-5010 | + | GUCGUAAAACAGCAGGUCGAC | 21 | 13950 |
| HSV1-UL30-5011 | + | CGUCGUAAAACAGCAGGUCGAC | 22 | 13951 |
| HSV1-UL30-5012 | + | UCGUCGUAAAACAGCAGGUCGAC | 23 | 13952 |
| HSV1-UL30-5013 | + | AUCGUCGUAAAACAGCAGGUCGAC | 24 | 13953 |
| HSV1-UL30-5014 | + | GCGCCGAUGGGCGUCUAC | 18 | 13954 |
| HSV1-UL30-5015 | + | UGCGCCGAUGGGCGUCUAC | 19 | 13955 |
| HSV1-UL30-2402 | + | AUGCGCCGAUGGGCGUCUAC | 20 | 5409 |
| HSV1-UL30-5016 | + | GAUGCGCCGAUGGGCGUCUAC | 21 | 13956 |
| HSV1-UL30-5017 | + | UGAUGCGCCGAUGGGCGUCUAC | 22 | 13957 |
| HSV1-UL30-5018 | + | GUGAUGCGCCGAUGGGCGUCUAC | 23 | 13958 |
| HSV1-UL30-5019 | + | GGUGAUGCGCCGAUGGGCGUCUAC | 24 | 13959 |
| HSV1-UL30-5020 | + | CGGGGUUCACGUGAAACC | 18 | 13960 |
| HSV1-UL30-5021 | + | ACGGGGUUCACGUGAAACC | 19 | 13961 |
| HSV1-UL30-2479 | + | CACGGGGUUCACGUGAAACC | 20 | 5485 |
| HSV1-UL30-5022 | + | CCACGGGGUUCACGUGAAACC | 21 | 13962 |
| HSV1-UL30-5023 | + | ACCACGGGGUUCACGUGAAACC | 22 | 13963 |
| HSV1-UL30-5024 | + | CACCACGGGGUUCACGUGAAACC | 23 | 13964 |
| HSV1-UL30-5025 | + | CCACCACGGGGUUCACGUGAAACC | 24 | 13965 |
| HSV1-UL30-5026 | + | CUGUCGAAUUCCAGAACC | 18 | 13966 |
| HSV1-UL30-5027 | + | GCUGUCGAAUUCCAGAACC | 19 | 13967 |
| HSV1-UL30-2523 | + | CGCUGUCGAAUUCCAGAACC | 20 | 5529 |
| HSV1-UL30-5028 | + | UCGCUGUCGAAUUCCAGAACC | 21 | 13968 |
| HSV1-UL30-5029 | + | UUCGCUGUCGAAUUCCAGAACC | 22 | 13969 |
| HSV1-UL30-5030 | + | AUUCGCUGUCGAAUUCCAGAACC | 23 | 13970 |
| HSV1-UL30-5031 | + | AAUUCGCUGUCGAAUUCCAGAACC | 24 | 13971 |
| HSV1-UL30-5032 | + | GCAAAGUCGAACACCACC | 18 | 13972 |
| HSV1-UL30-5033 | + | GGCAAAGUCGAACACCACC | 19 | 13973 |
| HSV1-UL30-2475 | + | UGGCAAAGUCGAACACCACC | 20 | 5481 |
| HSV1-UL30-5034 | + | CUGGCAAAGUCGAACACCACC | 21 | 13974 |
| HSV1-UL30-5035 | + | GCUGGCAAAGUCGAACACCACC | 22 | 13975 |
| HSV1-UL30-5036 | + | GGCUGGCAAAGUCGAACACCACC | 23 | 13976 |
| HSV1-UL30-5037 | + | AGGCUGGCAAAGUCGAACACCACC | 24 | 13977 |
| HSV1-UL30-5038 | + | GGGGGCGGGCUCGUCCCC | 18 | 13978 |
| HSV1-UL30-5039 | + | GGGGGGCGGGCUCGUCCCC | 19 | 13979 |
| HSV1-UL30-2381 | + | GGGGGGGCGGGCUCGUCCCC | 20 | 5388 |
| HSV1-UL30-5040 | + | GGGGGGGGCGGGCUCGUCCCC | 21 | 13980 |
| HSV1-UL30-5041 | + | CGGGGGGGGCGGGCUCGUCCCC | 22 | 13981 |
| HSV1-UL30-5042 | + | GCGGGGGGGGCGGGCUCGUCCCC | 23 | 13982 |
| HSV1-UL30-5043 | + | CGCGGGGGGGGCGGGCUCGUCCCC | 24 | 13983 |
| HSV1-UL30-5044 | + | CCGCGGAACGACGCGCCC | 18 | 13984 |
| HSV1-UL30-5045 | + | GCCGCGGAACGACGCGCCC | 19 | 13985 |
| HSV1-UL30-2574 | + | UGCCGCGGAACGACGCGCCC | 20 | 5579 |
| HSV1-UL30-5046 | + | AUGCCGCGGAACGACGCGCCC | 21 | 13986 |
| HSV1-UL30-5047 | + | GAUGCCGCGGAACGACGCGCCC | 22 | 13987 |
| HSV1-UL30-5048 | + | AGAUGCCGCGGAACGACGCGCCC | 23 | 13988 |
| HSV1-UL30-5049 | + | GAGAUGCCGCGGAACGACGCGCCC | 24 | 13989 |
| HSV1-UL30-5050 | + | CCUUCCGGAGUCAGGCCC | 18 | 13990 |
| HSV1-UL30-5051 | + | GCCUUCCGGAGUCAGGCCC | 19 | 13991 |
| HSV1-UL30-2583 | + | GGCCUUCCGGAGUCAGGCCC | 20 | 5588 |
| HSV1-UL30-5052 | + | UGGCCUUCCGGAGUCAGGCCC | 21 | 13992 |
| HSV1-UL30-5053 | + | GUGGCCUUCCGGAGUCAGGCCC | 22 | 13993 |
| HSV1-UL30-5054 | + | GGUGGCCUUCCGGAGUCAGGCCC | 23 | 13994 |
| HSV1-UL30-5055 | + | CGGUGGCCUUCCGGAGUCAGGCCC | 24 | 13995 |
| HSV1-UL30-5056 | + | GCAGGUCGACCAGGGCCC | 18 | 13996 |
| HSV1-UL30-5057 | + | AGCAGGUCGACCAGGGCCC | 19 | 13997 |
| HSV1-UL30-2413 | + | CAGCAGGUCGACCAGGGCCC | 20 | 5420 |
| HSV1-UL30-5058 | + | ACAGCAGGUCGACCAGGGCCC | 21 | 13998 |
| HSV1-UL30-5059 | + | AACAGCAGGUCGACCAGGGCCC | 22 | 13999 |
| HSV1-UL30-5060 | + | AAACAGCAGGUCGACCAGGGCCC | 23 | 14000 |
| HSV1-UL30-5061 | + | AAAACAGCAGGUCGACCAGGGCCC | 24 | 14001 |
| HSV1-UL30-5062 | + | GCGCAUGGAAUAGGGCCC | 18 | 14002 |
| HSV1-UL30-5063 | + | UGCGCAUGGAAUAGGGCCC | 19 | 14003 |
| HSV1-UL30-2431 | + | AUGCGCAUGGAAUAGGGCCC | 20 | 5437 |
| HSV1-UL30-5064 | + | GAUGCGCAUGGAAUAGGGCCC | 21 | 14004 |
| HSV1-UL30-5065 | + | UGAUGCGCAUGGAAUAGGGCCC | 22 | 14005 |
| HSV1-UL30-5066 | + | AUGAUGCGCAUGGAAUAGGGCCC | 23 | 14006 |
| HSV1-UL30-5067 | + | GAUGAUGCGCAUGGAAUAGGGCCC | 24 | 14007 |
| HSV1-UL30-5068 | + | AGUCCGUGCUGCACUCCC | 18 | 14008 |
| HSV1-UL30-5069 | + | GAGUCCGUGCUGCACUCCC | 19 | 14009 |
| HSV1-UL30-2443 | + | GGAGUCCGUGCUGCACUCCC | 20 | 5449 |
| HSV1-UL30-5070 | + | AGGAGUCCGUGCUGCACUCCC | 21 | 14010 |
| HSV1-UL30-5071 | + | CAGGAGUCCGUGCUGCACUCCC | 22 | 14011 |
| HSV1-UL30-5072 | + | GCAGGAGUCCGUGCUGCACUCCC | 23 | 14012 |
| HSV1-UL30-5073 | + | GGCAGGAGUCCGUGCUGCACUCCC | 24 | 14013 |
| HSV1-UL30-5074 | + | GGCUUGGACGCGCCUCCC | 18 | 14014 |
| HSV1-UL30-5075 | + | GGGCUUGGACGCGCCUCCC | 19 | 14015 |
| HSV1-UL30-2362 | + | GGGGCUUGGACGCGCCUCCC | 20 | 5374 |
| HSV1-UL30-5076 | + | CGGGGCUUGGACGCGCCUCCC | 21 | 14016 |
| HSV1-UL30-5077 | + | GCGGGGCUUGGACGCGCCUCCC | 22 | 14017 |
| HSV1-UL30-5078 | + | UGCGGGGCUUGGACGCGCCUCCC | 23 | 14018 |
| HSV1-UL30-5079 | + | UUGCGGGGCUUGGACGCGCCUCCC | 24 | 14019 |
| HSV1-UL30-5080 | + | CAGGCGACGGCGUCUCCC | 18 | 14020 |
| HSV1-UL30-5081 | + | GCAGGCGACGGCGUCUCCC | 19 | 14021 |
| HSV1-UL30-2366 | + | GGCAGGCGACGGCGUCUCCC | 20 | 5378 |
| HSV1-UL30-5082 | + | CGGCAGGCGACGGCGUCUCCC | 21 | 14022 |
| HSV1-UL30-5083 | + | UCGGCAGGCGACGGCGUCUCCC | 22 | 14023 |
| HSV1-UL30-5084 | + | GUCGGCAGGCGACGGCGUCUCCC | 23 | 14024 |
| HSV1-UL30-5085 | + | GGUCGGCAGGCGACGGCGUCUCCC | 24 | 14025 |
| HSV1-UL30-5086 | + | CCGAACGCCUGCAGUCCC | 18 | 14026 |
| HSV1-UL30-5087 | + | CCCGAACGCCUGCAGUCCC | 19 | 14027 |
| HSV1-UL30-2404 | + | CCCCGAACGCCUGCAGUCCC | 20 | 5411 |
| HSV1-UL30-5088 | + | GCCCCGAACGCCUGCAGUCCC | 21 | 14028 |
| HSV1-UL30-5089 | + | GGCCCCGAACGCCUGCAGUCCC | 22 | 14029 |
| HSV1-UL30-5090 | + | CGGCCCCGAACGCCUGCAGUCCC | 23 | 14030 |
| HSV1-UL30-5091 | + | ACGGCCCCGAACGCCUGCAGUCCC | 24 | 14031 |
| HSV1-UL30-5092 | + | GGGGGGCGGGCUCGUCCC | 18 | 14032 |
| HSV1-UL30-5093 | + | GGGGGGGCGGGCUCGUCCC | 19 | 14033 |
| HSV1-UL30-2380 | + | GGGGGGGGCGGGCUCGUCCC | 20 | 5387 |
| HSV1-UL30-5094 | + | CGGGGGGGGCGGGCUCGUCCC | 21 | 14034 |
| HSV1-UL30-5095 | + | GCGGGGGGGGCGGGCUCGUCCC | 22 | 14035 |
| HSV1-UL30-5096 | + | CGCGGGGGGGGCGGGCUCGUCCC | 23 | 14036 |
| HSV1-UL30-5097 | + | CCGCGGGGGGGGCGGGCUCGUCCC | 24 | 14037 |
| HSV1-UL30-5098 | + | CGUGUUCAGGGCGACGCC | 18 | 14038 |
| HSV1-UL30-5099 | + | CCGUGUUCAGGGCGACGCC | 19 | 14039 |
| HSV1-UL30-2353 | + | UCCGUGUUCAGGGCGACGCC | 20 | 5365 |
| HSV1-UL30-5100 | + | GUCCGUGUUCAGGGCGACGCC | 21 | 14040 |
| HSV1-UL30-5101 | + | AGUCCGUGUUCAGGGCGACGCC | 22 | 14041 |
| HSV1-UL30-5102 | + | UAGUCCGUGUUCAGGGCGACGCC | 23 | 14042 |
| HSV1-UL30-5103 | + | AUAGUCCGUGUUCAGGGCGACGCC | 24 | 14043 |
| HSV1-UL30-5104 | + | GCGCCGGCACCCACCGCC | 18 | 14044 |
| HSV1-UL30-5105 | + | AGCGCCGGCACCCACCGCC | 19 | 14045 |
| HSV1-UL30-2336 | + | UAGCGCCGGCACCCACCGCC | 20 | 5349 |
| HSV1-UL30-5106 | + | GUAGCGCCGGCACCCACCGCC | 21 | 14046 |
| HSV1-UL30-5107 | + | CGUAGCGCCGGCACCCACCGCC | 22 | 14047 |
| HSV1-UL30-5108 | + | CCGUAGCGCCGGCACCCACCGCC | 23 | 14048 |
| HSV1-UL30-5109 | + | GCCGUAGCGCCGGCACCCACCGCC | 24 | 14049 |
| HSV1-UL30-5110 | + | CGCUCCACCACCUCCGCC | 18 | 14050 |
| HSV1-UL30-5111 | + | GCGCUCCACCACCUCCGCC | 19 | 14051 |
| HSV1-UL30-2567 | + | UGCGCUCCACCACCUCCGCC | 20 | 5572 |
| HSV1-UL30-5112 | + | GUGCGCUCCACCACCUCCGCC | 21 | 14052 |
| HSV1-UL30-5113 | + | GGUGCGCUCCACCACCUCCGCC | 22 | 14053 |
| HSV1-UL30-5114 | + | CGGUGCGCUCCACCACCUCCGCC | 23 | 14054 |
| HSV1-UL30-5115 | + | UCGGUGCGCUCCACCACCUCCGCC | 24 | 14055 |
| HSV1-UL30-5116 | + | GCCGCGGAACGACGCGCC | 18 | 14056 |
| HSV1-UL30-5117 | + | UGCCGCGGAACGACGCGCC | 19 | 14057 |
| HSV1-UL30-2573 | + | AUGCCGCGGAACGACGCGCC | 20 | 5578 |
| HSV1-UL30-5118 | + | GAUGCCGCGGAACGACGCGCC | 21 | 14058 |
| HSV1-UL30-5119 | + | AGAUGCCGCGGAACGACGCGCC | 22 | 14059 |
| HSV1-UL30-5120 | + | GAGAUGCCGCGGAACGACGCGCC | 23 | 14060 |
| HSV1-UL30-5121 | + | GGAGAUGCCGCGGAACGACGCGCC | 24 | 14061 |
| HSV1-UL30-5122 | + | GCCUUCCGGAGUCAGGCC | 18 | 14062 |
| HSV1-UL30-5123 | + | GGCCUUCCGGAGUCAGGCC | 19 | 14063 |
| HSV1-UL30-2582 | + | UGGCCUUCCGGAGUCAGGCC | 20 | 5587 |
| HSV1-UL30-5124 | + | GUGGCCUUCCGGAGUCAGGCC | 21 | 14064 |
| HSV1-UL30-5125 | + | GGUGGCCUUCCGGAGUCAGGCC | 22 | 14065 |
| HSV1-UL30-5126 | + | CGGUGGCCUUCCGGAGUCAGGCC | 23 | 14066 |
| HSV1-UL30-5127 | + | CCGGUGGCCUUCCGGAGUCAGGCC | 24 | 14067 |
| HSV1-UL30-5128 | + | GCCAAGCGCGCGACGGCC | 18 | 14068 |
| HSV1-UL30-5129 | + | CGCCAAGCGCGCGACGGCC | 19 | 14069 |
| HSV1-UL30-2491 | + | CCGCCAAGCGCGCGACGGCC | 20 | 5497 |
| HSV1-UL30-5130 | + | CCCGCCAAGCGCGCGACGGCC | 21 | 14070 |
| HSV1-UL30-5131 | + | ACCCGCCAAGCGCGCGACGGCC | 22 | 14071 |
| HSV1-UL30-5132 | + | UACCCGCCAAGCGCGCGACGGCC | 23 | 14072 |
| HSV1-UL30-5133 | + | AUACCCGCCAAGCGCGCGACGGCC | 24 | 14073 |
| HSV1-UL30-5134 | + | GCGUCUACGAGGACGGCC | 18 | 14074 |
| HSV1-UL30-5135 | + | GGCGUCUACGAGGACGGCC | 19 | 14075 |
| HSV1-UL30-2403 | + | GGGCGUCUACGAGGACGGCC | 20 | 5410 |
| HSV1-UL30-5136 | + | UGGGCGUCUACGAGGACGGCC | 21 | 14076 |
| HSV1-UL30-5137 | + | AUGGGCGUCUACGAGGACGGCC | 22 | 14077 |
| HSV1-UL30-5138 | + | GAUGGGCGUCUACGAGGACGGCC | 23 | 14078 |
| HSV1-UL30-5139 | + | CGAUGGGCGUCUACGAGGACGGCC | 24 | 14079 |
| HSV1-UL30-5140 | + | GCCGUCAGCCCGGCGGCC | 18 | 14080 |
| HSV1-UL30-5141 | + | GGCCGUCAGCCCGGCGGCC | 19 | 14081 |
| HSV1-UL30-2423 | + | CGGCCGUCAGCCCGGCGGCC | 20 | 5430 |
| HSV1-UL30-5142 | + | ACGGCCGUCAGCCCGGCGGCC | 21 | 14082 |
| HSV1-UL30-5143 | + | CACGGCCGUCAGCCCGGCGGCC | 22 | 14083 |
| HSV1-UL30-5144 | + | CCACGGCCGUCAGCCCGGCGGCC | 23 | 14084 |
| HSV1-UL30-5145 | + | CCCACGGCCGUCAGCCCGGCGGCC | 24 | 14085 |
| HSV1-UL30-5146 | + | GCCUCCGGGAAAUCGGCC | 18 | 14086 |
| HSV1-UL30-5147 | + | CGCCUCCGGGAAAUCGGCC | 19 | 14087 |
| HSV1-UL30-2436 | + | CCGCCUCCGGGAAAUCGGCC | 20 | 5442 |
| HSV1-UL30-5148 | + | GCCGCCUCCGGGAAAUCGGCC | 21 | 14088 |
| HSV1-UL30-5149 | + | GGCCGCCUCCGGGAAAUCGGCC | 22 | 14089 |
| HSV1-UL30-5150 | + | CGGCCGCCUCCGGGAAAUCGGCC | 23 | 14090 |
| HSV1-UL30-5151 | + | UCGGCCGCCUCCGGGAAAUCGGCC | 24 | 14091 |
| HSV1-UL30-5152 | + | AGCAGGUCGACCAGGGCC | 18 | 14092 |
| HSV1-UL30-5153 | + | CAGCAGGUCGACCAGGGCC | 19 | 14093 |
| HSV1-UL30-2412 | + | ACAGCAGGUCGACCAGGGCC | 20 | 5419 |
| HSV1-UL30-5154 | + | AACAGCAGGUCGACCAGGGCC | 21 | 14094 |
| HSV1-UL30-5155 | + | AAACAGCAGGUCGACCAGGGCC | 22 | 14095 |
| HSV1-UL30-5156 | + | AAAACAGCAGGUCGACCAGGGCC | 23 | 14096 |
| HSV1-UL30-5157 | + | UAAAACAGCAGGUCGACCAGGGCC | 24 | 14097 |
| HSV1-UL30-5158 | + | GCCGGGGAGGGCAGGGCC | 18 | 14098 |
| HSV1-UL30-5159 | + | GGCCGGGGAGGGCAGGGCC | 19 | 14099 |
| HSV1-UL30-2373 | + | UGGCCGGGGAGGGCAGGGCC | 20 | 5385 |
| HSV1-UL30-5160 | + | UUGGCCGGGGAGGGCAGGGCC | 21 | 14100 |
| HSV1-UL30-5161 | + | CUUGGCCGGGGAGGGCAGGGCC | 22 | 14101 |
| HSV1-UL30-5162 | + | GCUUGGCCGGGGAGGGCAGGGCC | 23 | 14102 |
| HSV1-UL30-5163 | + | CGCUUGGCCGGGGAGGGCAGGGCC | 24 | 14103 |
| HSV1-UL30-5164 | + | UGCGCAUGGAAUAGGGCC | 18 | 14104 |
| HSV1-UL30-5165 | + | AUGCGCAUGGAAUAGGGCC | 19 | 14105 |
| HSV1-UL30-2430 | + | GAUGCGCAUGGAAUAGGGCC | 20 | 5436 |
| HSV1-UL30-5166 | + | UGAUGCGCAUGGAAUAGGGCC | 21 | 14106 |
| HSV1-UL30-5167 | + | AUGAUGCGCAUGGAAUAGGGCC | 22 | 14107 |
| HSV1-UL30-5168 | + | GAUGAUGCGCAUGGAAUAGGGCC | 23 | 14108 |
| HSV1-UL30-5169 | + | AGAUGAUGCGCAUGGAAUAGGGCC | 24 | 14109 |
| HSV1-UL30-5170 | + | ACCUGCGCGCGGCGGGCC | 18 | 14110 |
| HSV1-UL30-5171 | + | GACCUGCGCGCGGCGGGCC | 19 | 14111 |
| HSV1-UL30-2393 | + | GGACCUGCGCGCGGCGGGCC | 20 | 5400 |
| HSV1-UL30-5172 | + | GGGACCUGCGCGCGGCGGGCC | 21 | 14112 |
| HSV1-UL30-5173 | + | CGGGACCUGCGCGCGGCGGGCC | 22 | 14113 |
| HSV1-UL30-5174 | + | ACGGGACCUGCGCGCGGCGGGCC | 23 | 14114 |
| HSV1-UL30-5175 | + | GACGGGACCUGCGCGCGGCGGGCC | 24 | 14115 |
| HSV1-UL30-5176 | + | UCCCGGGGGCGCUUGGCC | 18 | 14116 |
| HSV1-UL30-5177 | + | CUCCCGGGGGCGCUUGGCC | 19 | 14117 |
| HSV1-UL30-2369 | + | UCUCCCGGGGGCGCUUGGCC | 20 | 5381 |
| HSV1-UL30-5178 | + | GUCUCCCGGGGGCGCUUGGCC | 21 | 14118 |
| HSV1-UL30-5179 | + | CGUCUCCCGGGGGCGCUUGGCC | 22 | 14119 |
| HSV1-UL30-5180 | + | GCGUCUCCCGGGGGCGCUUGGCC | 23 | 14120 |
| HSV1-UL30-5181 | + | GGCGUCUCCCGGGGGCGCUUGGCC | 24 | 14121 |
| HSV1-UL30-5182 | + | GUGGUCCGCGGAGAUGCC | 18 | 14122 |
| HSV1-UL30-5183 | + | AGUGGUCCGCGGAGAUGCC | 19 | 14123 |
| HSV1-UL30-2570 | + | AAGUGGUCCGCGGAGAUGCC | 20 | 5575 |
| HSV1-UL30-5184 | + | GAAGUGGUCCGCGGAGAUGCC | 21 | 14124 |
| HSV1-UL30-5185 | + | CGAAGUGGUCCGCGGAGAUGCC | 22 | 14125 |
| HSV1-UL30-5186 | + | UCGAAGUGGUCCGCGGAGAUGCC | 23 | 14126 |
| HSV1-UL30-5187 | + | CUCGAAGUGGUCCGCGGAGAUGCC | 24 | 14127 |
| HSV1-UL30-5188 | + | GGCUGCUCUGGGGAAUCC | 18 | 14128 |
| HSV1-UL30-5189 | + | GGGCUGCUCUGGGGAAUCC | 19 | 14129 |
| HSV1-UL30-2453 | + | GGGGCUGCUCUGGGGAAUCC | 20 | 5459 |
| HSV1-UL30-5190 | + | CGGGGCUGCUCUGGGGAAUCC | 21 | 14130 |
| HSV1-UL30-5191 | + | UCGGGGCUGCUCUGGGGAAUCC | 22 | 14131 |
| HSV1-UL30-5192 | + | CUCGGGGCUGCUCUGGGGAAUCC | 23 | 14132 |
| HSV1-UL30-5193 | + | CCUCGGGGCUGCUCUGGGGAAUCC | 24 | 14133 |
| HSV1-UL30-5194 | + | CGCAUGUCGGCCGCCUCC | 18 | 14134 |
| HSV1-UL30-5195 | + | GCGCAUGUCGGCCGCCUCC | 19 | 14135 |
| HSV1-UL30-2434 | + | CGCGCAUGUCGGCCGCCUCC | 20 | 5440 |
| HSV1-UL30-5196 | + | GCGCGCAUGUCGGCCGCCUCC | 21 | 14136 |
| HSV1-UL30-5197 | + | GGCGCGCAUGUCGGCCGCCUCC | 22 | 14137 |
| HSV1-UL30-5198 | + | GGGCGCGCAUGUCGGCCGCCUCC | 23 | 14138 |
| HSV1-UL30-5199 | + | GGGGCGCGCAUGUCGGCCGCCUCC | 24 | 14139 |
| HSV1-UL30-5200 | + | GGGCUUGGACGCGCCUCC | 18 | 14140 |
| HSV1-UL30-5201 | + | GGGGCUUGGACGCGCCUCC | 19 | 14141 |
| HSV1-UL30-2361 | + | CGGGGCUUGGACGCGCCUCC | 20 | 5373 |
| HSV1-UL30-5202 | + | GCGGGGCUUGGACGCGCCUCC | 21 | 14142 |
| HSV1-UL30-5203 | + | UGCGGGGCUUGGACGCGCCUCC | 22 | 14143 |
| HSV1-UL30-5204 | + | UUGCGGGGCUUGGACGCGCCUCC | 23 | 14144 |
| HSV1-UL30-5205 | + | CUUGCGGGGCUUGGACGCGCCUCC | 24 | 14145 |
| HSV1-UL30-5206 | + | UCCAGGAGCACGGCCUCC | 18 | 14146 |
| HSV1-UL30-5207 | + | GUCCAGGAGCACGGCCUCC | 19 | 14147 |
| HSV1-UL30-2447 | + | UGUCCAGGAGCACGGCCUCC | 20 | 5453 |
| HSV1-UL30-5208 | + | UUGUCCAGGAGCACGGCCUCC | 21 | 14148 |
| HSV1-UL30-5209 | + | CUUGUCCAGGAGCACGGCCUCC | 22 | 14149 |
| HSV1-UL30-5210 | + | GCUUGUCCAGGAGCACGGCCUCC | 23 | 14150 |
| HSV1-UL30-5211 | + | UGCUUGUCCAGGAGCACGGCCUCC | 24 | 14151 |
| HSV1-UL30-5212 | + | CGCGCCAGCCACUCCUCC | 18 | 14152 |
| HSV1-UL30-5213 | + | UCGCGCCAGCCACUCCUCC | 19 | 14153 |
| HSV1-UL30-2407 | + | GUCGCGCCAGCCACUCCUCC | 20 | 5414 |
| HSV1-UL30-5214 | + | GGUCGCGCCAGCCACUCCUCC | 21 | 14154 |
| HSV1-UL30-5215 | + | GGGUCGCGCCAGCCACUCCUCC | 22 | 14155 |
| HSV1-UL30-5216 | + | GGGGUCGCGCCAGCCACUCCUCC | 23 | 14156 |
| HSV1-UL30-5217 | + | AGGGGUCGCGCCAGCCACUCCUCC | 24 | 14157 |
| HSV1-UL30-5218 | + | GCAGGCGACGGCGUCUCC | 18 | 14158 |
| HSV1-UL30-5219 | + | GGCAGGCGACGGCGUCUCC | 19 | 14159 |
| HSV1-UL30-2365 | + | CGGCAGGCGACGGCGUCUCC | 20 | 5377 |
| HSV1-UL30-5220 | + | UCGGCAGGCGACGGCGUCUCC | 21 | 14160 |
| HSV1-UL30-5221 | + | GUCGGCAGGCGACGGCGUCUCC | 22 | 14161 |
| HSV1-UL30-5222 | + | GGUCGGCAGGCGACGGCGUCUCC | 23 | 14162 |
| HSV1-UL30-5223 | + | GGGUCGGCAGGCGACGGCGUCUCC | 24 | 14163 |
| HSV1-UL30-5224 | + | AUGCGGCCGUACCCGUCC | 18 | 14164 |
| HSV1-UL30-5225 | + | CAUGCGGCCGUACCCGUCC | 19 | 14165 |
| HSV1-UL30-2509 | + | UCAUGCGGCCGUACCCGUCC | 20 | 5515 |
| HSV1-UL30-5226 | + | UUCAUGCGGCCGUACCCGUCC | 21 | 14166 |
| HSV1-UL30-5227 | + | GUUCAUGCGGCCGUACCCGUCC | 22 | 14167 |
| HSV1-UL30-5228 | + | CGUUCAUGCGGCCGUACCCGUCC | 23 | 14168 |
| HSV1-UL30-5229 | + | CCGUUCAUGCGGCCGUACCCGUCC | 24 | 14169 |
| HSV1-UL30-5230 | + | CGCGCGGCCACGUCGUCC | 18 | 14170 |
| HSV1-UL30-5231 | + | CCGCGCGGCCACGUCGUCC | 19 | 14171 |
| HSV1-UL30-2341 | + | GCCGCGCGGCCACGUCGUCC | 20 | 5354 |
| HSV1-UL30-5232 | + | AGCCGCGCGGCCACGUCGUCC | 21 | 14172 |
| HSV1-UL30-5233 | + | GAGCCGCGCGGCCACGUCGUCC | 22 | 14173 |
| HSV1-UL30-5234 | + | GGAGCCGCGCGGCCACGUCGUCC | 23 | 14174 |
| HSV1-UL30-5235 | + | CGGAGCCGCGCGGCCACGUCGUCC | 24 | 14175 |
| HSV1-UL30-5236 | + | UCCGCCUCGAAGUGGUCC | 18 | 14176 |
| HSV1-UL30-5237 | + | CUCCGCCUCGAAGUGGUCC | 19 | 14177 |
| HSV1-UL30-2568 | + | CCUCCGCCUCGAAGUGGUCC | 20 | 5573 |
| HSV1-UL30-5238 | + | ACCUCCGCCUCGAAGUGGUCC | 21 | 14178 |
| HSV1-UL30-5239 | + | CACCUCCGCCUCGAAGUGGUCC | 22 | 14179 |
| HSV1-UL30-5240 | + | CCACCUCCGCCUCGAAGUGGUCC | 23 | 14180 |
| HSV1-UL30-5241 | + | ACCACCUCCGCCUCGAAGUGGUCC | 24 | 14181 |
| HSV1-UL30-5242 | + | GCGGCCUGCUGCUUGUCC | 18 | 14182 |
| HSV1-UL30-5243 | + | GGCGGCCUGCUGCUUGUCC | 19 | 14183 |
| HSV1-UL30-2446 | + | UGGCGGCCUGCUGCUUGUCC | 20 | 5452 |
| HSV1-UL30-5244 | + | AUGGCGGCCUGCUGCUUGUCC | 21 | 14184 |
| HSV1-UL30-5245 | + | GAUGGCGGCCUGCUGCUUGUCC | 22 | 14185 |
| HSV1-UL30-5246 | + | UGAUGGCGGCCUGCUGCUUGUCC | 23 | 14186 |
| HSV1-UL30-5247 | + | UUGAUGGCGGCCUGCUGCUUGUCC | 24 | 14187 |
| HSV1-UL30-5248 | + | AACAGCUGGCCCACCAGC | 18 | 14188 |
| HSV1-UL30-5249 | + | AAACAGCUGGCCCACCAGC | 19 | 14189 |
| HSV1-UL30-2495 | + | AAAACAGCUGGCCCACCAGC | 20 | 5501 |
| HSV1-UL30-5250 | + | AAAAACAGCUGGCCCACCAGC | 21 | 14190 |
| HSV1-UL30-5251 | + | AAAAAACAGCUGGCCCACCAGC | 22 | 14191 |
| HSV1-UL30-5252 | + | UAAAAAACAGCUGGCCCACCAGC | 23 | 14192 |
| HSV1-UL30-5253 | + | UUAAAAAACAGCUGGCCCACCAGC | 24 | 14193 |
| HSV1-UL30-5254 | + | GCGGGAUCCUCGGCCAGC | 18 | 14194 |
| HSV1-UL30-5255 | + | UGCGGGAUCCUCGGCCAGC | 19 | 14195 |
| HSV1-UL30-2356 | + | AUGCGGGAUCCUCGGCCAGC | 20 | 5368 |
| HSV1-UL30-5256 | + | UAUGCGGGAUCCUCGGCCAGC | 21 | 14196 |
| HSV1-UL30-5257 | + | GUAUGCGGGAUCCUCGGCCAGC | 22 | 14197 |
| HSV1-UL30-5258 | + | CGUAUGCGGGAUCCUCGGCCAGC | 23 | 14198 |
| HSV1-UL30-5259 | + | GCGUAUGCGGGAUCCUCGGCCAGC | 24 | 14199 |
| HSV1-UL30-5260 | + | UCCGUCAGCUUGGCCAGC | 18 | 14200 |
| HSV1-UL30-5261 | + | GUCCGUCAGCUUGGCCAGC | 19 | 14201 |
| HSV1-UL30-2512 | + | UGUCCGUCAGCUUGGCCAGC | 20 | 5518 |
| HSV1-UL30-5262 | + | AUGUCCGUCAGCUUGGCCAGC | 21 | 14202 |
| HSV1-UL30-5263 | + | AAUGUCCGUCAGCUUGGCCAGC | 22 | 14203 |
| HSV1-UL30-5264 | + | AAAUGUCCGUCAGCUUGGCCAGC | 23 | 14204 |
| HSV1-UL30-5265 | + | UAAAUGUCCGUCAGCUUGGCCAGC | 24 | 14205 |
| HSV1-UL30-5266 | + | CGGCGUUGAGCUUGUAGC | 18 | 14206 |
| HSV1-UL30-5267 | + | ACGGCGUUGAGCUUGUAGC | 19 | 14207 |
| HSV1-UL30-2503 | + | CACGGCGUUGAGCUUGUAGC | 20 | 5509 |
| HSV1-UL30-5268 | + | CCACGGCGUUGAGCUUGUAGC | 21 | 14208 |
| HSV1-UL30-5269 | + | GCCACGGCGUUGAGCUUGUAGC | 22 | 14209 |
| HSV1-UL30-5270 | + | GGCCACGGCGUUGAGCUUGUAGC | 23 | 14210 |
| HSV1-UL30-5271 | + | CGGCCACGGCGUUGAGCUUGUAGC | 24 | 14211 |
| HSV1-UL30-5272 | + | CGGGCUGCGGCCGGACGC | 18 | 14212 |
| HSV1-UL30-5273 | + | CCGGGCUGCGGCCGGACGC | 19 | 14213 |
| HSV1-UL30-2485 | + | CCCGGGCUGCGGCCGGACGC | 20 | 5491 |
| HSV1-UL30-5274 | + | UCCCGGGCUGCGGCCGGACGC | 21 | 14214 |
| HSV1-UL30-5275 | + | CUCCCGGGCUGCGGCCGGACGC | 22 | 14215 |
| HSV1-UL30-5276 | + | CCUCCCGGGCUGCGGCCGGACGC | 23 | 14216 |
| HSV1-UL30-5277 | + | UCCUCCCGGGCUGCGGCCGGACGC | 24 | 14217 |
| HSV1-UL30-5278 | + | AUGGCGAGCCAGUCCCGC | 18 | 14218 |
| HSV1-UL30-5279 | + | CAUGGCGAGCCAGUCCCGC | 19 | 14219 |
| HSV1-UL30-2457 | + | GCAUGGCGAGCCAGUCCCGC | 20 | 5463 |
| HSV1-UL30-5280 | + | CGCAUGGCGAGCCAGUCCCGC | 21 | 14220 |
| HSV1-UL30-5281 | + | UCGCAUGGCGAGCCAGUCCCGC | 22 | 14221 |
| HSV1-UL30-5282 | + | UUCGCAUGGCGAGCCAGUCCCGC | 23 | 14222 |
| HSV1-UL30-5283 | + | UUUCGCAUGGCGAGCCAGUCCCGC | 24 | 14223 |
| HSV1-UL30-5284 | + | CGGGGAGGGCAGGGCCGC | 18 | 14224 |
| HSV1-UL30-5285 | + | CCGGGGAGGGCAGGGCCGC | 19 | 14225 |
| HSV1-UL30-1125 | + | GCCGGGGAGGGCAGGGCCGC | 20 | 4063 |
| HSV1-UL30-5286 | + | GGCCGGGGAGGGCAGGGCCGC | 21 | 14226 |
| HSV1-UL30-5287 | + | UGGCCGGGGAGGGCAGGGCCGC | 22 | 14227 |
| HSV1-UL30-5288 | + | UUGGCCGGGGAGGGCAGGGCCGC | 23 | 14228 |
| HSV1-UL30-5289 | + | CUUGGCCGGGGAGGGCAGGGCCGC | 24 | 14229 |
| HSV1-UL30-5290 | + | UGCCGCGGAACGACGCGC | 18 | 14230 |
| HSV1-UL30-5291 | + | AUGCCGCGGAACGACGCGC | 19 | 14231 |
| HSV1-UL30-2572 | + | GAUGCCGCGGAACGACGCGC | 20 | 5577 |
| HSV1-UL30-5292 | + | AGAUGCCGCGGAACGACGCGC | 21 | 14232 |
| HSV1-UL30-5293 | + | GAGAUGCCGCGGAACGACGCGC | 22 | 14233 |
| HSV1-UL30-5294 | + | GGAGAUGCCGCGGAACGACGCGC | 23 | 14234 |
| HSV1-UL30-5295 | + | CGGAGAUGCCGCGGAACGACGCGC | 24 | 14235 |
| HSV1-UL30-3992 | + | GGCGUCCAUAAACCGCGC | 18 | 12932 |
| HSV1-UL30-3993 | + | UGGCGUCCAUAAACCGCGC | 19 | 12933 |
| HSV1-UL30-3994 | + | AUGGCGUCCAUAAACCGCGC | 20 | 12934 |
| HSV1-UL30-3995 | + | GAUGGCGUCCAUAAACCGCGC | 21 | 12935 |
| HSV1-UL30-3996 | + | UGAUGGCGUCCAUAAACCGCGC | 22 | 12936 |
| HSV1-UL30-3997 | + | GUGAUGGCGUCCAUAAACCGCGC | 23 | 12937 |
| HSV1-UL30-3998 | + | UGUGAUGGCGUCCAUAAACCGCGC | 24 | 12938 |
| HSV1-UL30-5296 | + | GGGGCAGAAACAGCGCGC | 18 | 14236 |
| HSV1-UL30-5297 | + | GGGGGCAGAAACAGCGCGC | 19 | 14237 |
| HSV1-UL30-2422 | + | GGGGGGCAGAAACAGCGCGC | 20 | 5429 |
| HSV1-UL30-5298 | + | UGGGGGGCAGAAACAGCGCGC | 21 | 14238 |
| HSV1-UL30-5299 | + | AUGGGGGGCAGAAACAGCGCGC | 22 | 14239 |
| HSV1-UL30-5300 | + | GAUGGGGGGCAGAAACAGCGCGC | 23 | 14240 |
| HSV1-UL30-5301 | + | UGAUGGGGGGCAGAAACAGCGCGC | 24 | 14241 |
| HSV1-UL30-5302 | + | GAAGGCCGCCCAGCGCGC | 18 | 14242 |
| HSV1-UL30-5303 | + | CGAAGGCCGCCCAGCGCGC | 19 | 14243 |
| HSV1-UL30-2438 | + | UCGAAGGCCGCCCAGCGCGC | 20 | 5444 |
| HSV1-UL30-5304 | + | UUCGAAGGCCGCCCAGCGCGC | 21 | 14244 |
| HSV1-UL30-5305 | + | GUUCGAAGGCCGCCCAGCGCGC | 22 | 14245 |
| HSV1-UL30-5306 | + | UGUUCGAAGGCCGCCCAGCGCGC | 23 | 14246 |
| HSV1-UL30-5307 | + | CUGUUCGAAGGCCGCCCAGCGCGC | 24 | 14247 |
| HSV1-UL30-5308 | + | UCCCCGUAGAUGAUGCGC | 18 | 14248 |
| HSV1-UL30-5309 | + | GUCCCCGUAGAUGAUGCGC | 19 | 14249 |
| HSV1-UL30-2426 | + | UGUCCCCGUAGAUGAUGCGC | 20 | 5432 |
| HSV1-UL30-5310 | + | GUGUCCCCGUAGAUGAUGCGC | 21 | 14250 |
| HSV1-UL30-5311 | + | CGUGUCCCCGUAGAUGAUGCGC | 22 | 14251 |
| HSV1-UL30-5312 | + | CCGUGUCCCCGUAGAUGAUGCGC | 23 | 14252 |
| HSV1-UL30-5313 | + | UCCGUGUCCCCGUAGAUGAUGCGC | 24 | 14253 |
| HSV1-UL30-5314 | + | GGGAUUCGGGGAGGUCGC | 18 | 14254 |
| HSV1-UL30-5315 | + | UGGGAUUCGGGGAGGUCGC | 19 | 14255 |
| HSV1-UL30-2532 | + | GUGGGAUUCGGGGAGGUCGC | 20 | 5538 |
| HSV1-UL30-5316 | + | GGUGGGAUUCGGGGAGGUCGC | 21 | 14256 |
| HSV1-UL30-5317 | + | AGGUGGGAUUCGGGGAGGUCGC | 22 | 14257 |
| HSV1-UL30-5318 | + | CAGGUGGGAUUCGGGGAGGUCGC | 23 | 14258 |
| HSV1-UL30-5319 | + | UCAGGUGGGAUUCGGGGAGGUCGC | 24 | 14259 |
| HSV1-UL30-5320 | + | CGCCUCCGGGAAAUCGGC | 18 | 14260 |
| HSV1-UL30-5321 | + | CCGCCUCCGGGAAAUCGGC | 19 | 14261 |
| HSV1-UL30-2435 | + | GCCGCCUCCGGGAAAUCGGC | 20 | 5441 |
| HSV1-UL30-5322 | + | GGCCGCCUCCGGGAAAUCGGC | 21 | 14262 |
| HSV1-UL30-5323 | + | CGGCCGCCUCCGGGAAAUCGGC | 22 | 14263 |
| HSV1-UL30-5324 | + | UCGGCCGCCUCCGGGAAAUCGGC | 23 | 14264 |
| HSV1-UL30-5325 | + | GUCGGCCGCCUCCGGGAAAUCGGC | 24 | 14265 |
| HSV1-UL30-5326 | + | AUGCGCAUGGAAUAGGGC | 18 | 14266 |
| HSV1-UL30-5327 | + | GAUGCGCAUGGAAUAGGGC | 19 | 14267 |
| HSV1-UL30-2429 | + | UGAUGCGCAUGGAAUAGGGC | 20 | 5435 |
| HSV1-UL30-5328 | + | AUGAUGCGCAUGGAAUAGGGC | 21 | 14268 |
| HSV1-UL30-5329 | + | GAUGAUGCGCAUGGAAUAGGGC | 22 | 14269 |
| HSV1-UL30-5330 | + | AGAUGAUGCGCAUGGAAUAGGGC | 23 | 14270 |
| HSV1-UL30-5331 | + | UAGAUGAUGCGCAUGGAAUAGGGC | 24 | 14271 |
| HSV1-UL30-5332 | + | AAUUCCAGAACCACGGGC | 18 | 14272 |
| HSV1-UL30-5333 | + | GAAUUCCAGAACCACGGGC | 19 | 14273 |
| HSV1-UL30-2524 | + | CGAAUUCCAGAACCACGGGC | 20 | 5530 |
| HSV1-UL30-5334 | + | UCGAAUUCCAGAACCACGGGC | 21 | 14274 |
| HSV1-UL30-5335 | + | GUCGAAUUCCAGAACCACGGGC | 22 | 14275 |
| HSV1-UL30-5336 | + | UGUCGAAUUCCAGAACCACGGGC | 23 | 14276 |
| HSV1-UL30-5337 | + | CUGUCGAAUUCCAGAACCACGGGC | 24 | 14277 |
| HSV1-UL30-5338 | + | ACCAGCAGCUUGCGGGGC | 18 | 14278 |
| HSV1-UL30-5339 | + | CACCAGCAGCUUGCGGGGC | 19 | 14279 |
| HSV1-UL30-2359 | + | ACACCAGCAGCUUGCGGGGC | 20 | 5371 |
| HSV1-UL30-5340 | + | GACACCAGCAGCUUGCGGGGC | 21 | 14280 |
| HSV1-UL30-5341 | + | GGACACCAGCAGCUUGCGGGGC | 22 | 14281 |
| HSV1-UL30-5342 | + | CGGACACCAGCAGCUUGCGGGGC | 23 | 14282 |
| HSV1-UL30-5343 | + | UCGGACACCAGCAGCUUGCGGGGC | 24 | 14283 |
| HSV1-UL30-5344 | + | CUCCCGGGGGCGCUUGGC | 18 | 14284 |
| HSV1-UL30-5345 | + | UCUCCCGGGGGCGCUUGGC | 19 | 14285 |
| HSV1-UL30-2368 | + | GUCUCCCGGGGGCGCUUGGC | 20 | 5380 |
| HSV1-UL30-5346 | + | CGUCUCCCGGGGGCGCUUGGC | 21 | 14286 |
| HSV1-UL30-5347 | + | GCGUCUCCCGGGGGCGCUUGGC | 22 | 14287 |
| HSV1-UL30-5348 | + | GGCGUCUCCCGGGGGCGCUUGGC | 23 | 14288 |
| HSV1-UL30-5349 | + | CGGCGUCUCCCGGGGGCGCUUGGC | 24 | 14289 |
| HSV1-UL30-5350 | + | CCGAUCACCCCGCGUUGC | 18 | 14290 |
| HSV1-UL30-5351 | + | GCCGAUCACCCCGCGUUGC | 19 | 14291 |
| HSV1-UL30-2497 | + | CGCCGAUCACCCCGCGUUGC | 20 | 5503 |
| HSV1-UL30-5352 | + | UCGCCGAUCACCCCGCGUUGC | 21 | 14292 |
| HSV1-UL30-5353 | + | CUCGCCGAUCACCCCGCGUUGC | 22 | 14293 |
| HSV1-UL30-5354 | + | ACUCGCCGAUCACCCCGCGUUGC | 23 | 14294 |
| HSV1-UL30-5355 | + | UACUCGCCGAUCACCCCGCGUUGC | 24 | 14295 |
| HSV1-UL30-5356 | + | GCCACUGCGUCGGCCCUC | 18 | 14296 |
| HSV1-UL30-5357 | + | CGCCACUGCGUCGGCCCUC | 19 | 14297 |
| HSV1-UL30-2466 | + | GCGCCACUGCGUCGGCCCUC | 20 | 5472 |
| HSV1-UL30-5358 | + | UGCGCCACUGCGUCGGCCCUC | 21 | 14298 |
| HSV1-UL30-5359 | + | GUGCGCCACUGCGUCGGCCCUC | 22 | 14299 |
| HSV1-UL30-5360 | + | GGUGCGCCACUGCGUCGGCCCUC | 23 | 14300 |
| HSV1-UL30-5361 | + | AGGUGCGCCACUGCGUCGGCCCUC | 24 | 14301 |
| HSV1-UL30-5362 | + | GCGCAUGUCGGCCGCCUC | 18 | 14302 |
| HSV1-UL30-5363 | + | CGCGCAUGUCGGCCGCCUC | 19 | 14303 |
| HSV1-UL30-2433 | + | GCGCGCAUGUCGGCCGCCUC | 20 | 5439 |
| HSV1-UL30-5364 | + | GGCGCGCAUGUCGGCCGCCUC | 21 | 14304 |
| HSV1-UL30-5365 | + | GGGCGCGCAUGUCGGCCGCCUC | 22 | 14305 |
| HSV1-UL30-5366 | + | GGGGCGCGCAUGUCGGCCGCCUC | 23 | 14306 |
| HSV1-UL30-5367 | + | GGGGGCGCGCAUGUCGGCCGCCUC | 24 | 14307 |
| HSV1-UL30-5368 | + | GGGGCUUGGACGCGCCUC | 18 | 14308 |
| HSV1-UL30-5369 | + | CGGGGCUUGGACGCGCCUC | 19 | 14309 |
| HSV1-UL30-2360 | + | GCGGGGCUUGGACGCGCCUC | 20 | 5372 |
| HSV1-UL30-5370 | + | UGCGGGGCUUGGACGCGCCUC | 21 | 14310 |
| HSV1-UL30-5371 | + | UUGCGGGGCUUGGACGCGCCUC | 22 | 14311 |
| HSV1-UL30-5372 | + | CUUGCGGGGCUUGGACGCGCCUC | 23 | 14312 |
| HSV1-UL30-5373 | + | GCUUGCGGGGCUUGGACGCGCCUC | 24 | 14313 |
| HSV1-UL30-5374 | + | UGGCCGCUCCUCGUCCUC | 18 | 14314 |
| HSV1-UL30-5375 | + | CUGGCCGCUCCUCGUCCUC | 19 | 14315 |
| HSV1-UL30-2483 | + | UCUGGCCGCUCCUCGUCCUC | 20 | 5489 |
| HSV1-UL30-5376 | + | CUCUGGCCGCUCCUCGUCCUC | 21 | 14316 |
| HSV1-UL30-5377 | + | CCUCUGGCCGCUCCUCGUCCUC | 22 | 14317 |
| HSV1-UL30-5378 | + | UCCUCUGGCCGCUCCUCGUCCUC | 23 | 14318 |
| HSV1-UL30-5379 | + | CUCCUCUGGCCGCUCCUCGUCCUC | 24 | 14319 |
| HSV1-UL30-5380 | + | GGCGGCGGCGUCUAGCUC | 18 | 14320 |
| HSV1-UL30-5381 | + | GGGCGGCGGCGUCUAGCUC | 19 | 14321 |
| HSV1-UL30-2382 | + | GGGGCGGCGGCGUCUAGCUC | 20 | 5389 |
| HSV1-UL30-5382 | + | UGGGGCGGCGGCGUCUAGCUC | 21 | 14322 |
| HSV1-UL30-5383 | + | CUGGGGCGGCGGCGUCUAGCUC | 22 | 14323 |
| HSV1-UL30-5384 | + | CCUGGGGCGGCGGCGUCUAGCUC | 23 | 14324 |
| HSV1-UL30-5385 | + | CCCUGGGGCGGCGGCGUCUAGCUC | 24 | 14325 |
| HSV1-UL30-5386 | + | GCGUUGAGCUUGUAGCUC | 18 | 14326 |
| HSV1-UL30-5387 | + | GGCGUUGAGCUUGUAGCUC | 19 | 14327 |
| HSV1-UL30-2504 | + | CGGCGUUGAGCUUGUAGCUC | 20 | 5510 |
| HSV1-UL30-5388 | + | ACGGCGUUGAGCUUGUAGCUC | 21 | 14328 |
| HSV1-UL30-5389 | + | CACGGCGUUGAGCUUGUAGCUC | 22 | 14329 |
| HSV1-UL30-5390 | + | CCACGGCGUUGAGCUUGUAGCUC | 23 | 14330 |
| HSV1-UL30-5391 | + | GCCACGGCGUUGAGCUUGUAGCUC | 24 | 14331 |
| HSV1-UL30-5392 | + | CUAACGCGGCGGCCGCUC | 18 | 14332 |
| HSV1-UL30-5393 | + | GCUAACGCGGCGGCCGCUC | 19 | 14333 |
| HSV1-UL30-2410 | + | GGCUAACGCGGCGGCCGCUC | 20 | 5417 |
| HSV1-UL30-5394 | + | CGGCUAACGCGGCGGCCGCUC | 21 | 14334 |
| HSV1-UL30-5395 | + | UCGGCUAACGCGGCGGCCGCUC | 22 | 14335 |
| HSV1-UL30-5396 | + | CUCGGCUAACGCGGCGGCCGCUC | 23 | 14336 |
| HSV1-UL30-5397 | + | GCUCGGCUAACGCGGCGGCCGCUC | 24 | 14337 |
| HSV1-UL30-5398 | + | GCCUCCUCGGGGCUGCUC | 18 | 14338 |
| HSV1-UL30-5399 | + | GGCCUCCUCGGGGCUGCUC | 19 | 14339 |
| HSV1-UL30-2450 | + | CGGCCUCCUCGGGGCUGCUC | 20 | 5456 |
| HSV1-UL30-5400 | + | ACGGCCUCCUCGGGGCUGCUC | 21 | 14340 |
| HSV1-UL30-5401 | + | CACGGCCUCCUCGGGGCUGCUC | 22 | 14341 |
| HSV1-UL30-5402 | + | GCACGGCCUCCUCGGGGCUGCUC | 23 | 14342 |
| HSV1-UL30-5403 | + | AGCACGGCCUCCUCGGGGCUGCUC | 24 | 14343 |
| HSV1-UL30-5404 | + | AAACAGGAGGACGUGCUC | 18 | 14344 |
| HSV1-UL30-5405 | + | AAAACAGGAGGACGUGCUC | 19 | 14345 |
| HSV1-UL30-2538 | + | GAAAACAGGAGGACGUGCUC | 20 | 5543 |
| HSV1-UL30-5406 | + | CGAAAACAGGAGGACGUGCUC | 21 | 14346 |
| HSV1-UL30-5407 | + | GCGAAAACAGGAGGACGUGCUC | 22 | 14347 |
| HSV1-UL30-5408 | + | AGCGAAAACAGGAGGACGUGCUC | 23 | 14348 |
| HSV1-UL30-5409 | + | GAGCGAAAACAGGAGGACGUGCUC | 24 | 14349 |
| HSV1-UL30-5410 | + | UGCGCUCGCAGAGAUCUC | 18 | 14350 |
| HSV1-UL30-5411 | + | AUGCGCUCGCAGAGAUCUC | 19 | 14351 |
| HSV1-UL30-2577 | + | CAUGCGCUCGCAGAGAUCUC | 20 | 5582 |
| HSV1-UL30-5412 | + | CCAUGCGCUCGCAGAGAUCUC | 21 | 14352 |
| HSV1-UL30-5413 | + | GCCAUGCGCUCGCAGAGAUCUC | 22 | 14353 |
| HSV1-UL30-5414 | + | GGCCAUGCGCUCGCAGAGAUCUC | 23 | 14354 |
| HSV1-UL30-5415 | + | CGGCCAUGCGCUCGCAGAGAUCUC | 24 | 14355 |
| HSV1-UL30-5416 | + | GGCAGGCGACGGCGUCUC | 18 | 14356 |
| HSV1-UL30-5417 | + | CGGCAGGCGACGGCGUCUC | 19 | 14357 |
| HSV1-UL30-2364 | + | UCGGCAGGCGACGGCGUCUC | 20 | 5376 |
| HSV1-UL30-5418 | + | GUCGGCAGGCGACGGCGUCUC | 21 | 14358 |
| HSV1-UL30-5419 | + | GGUCGGCAGGCGACGGCGUCUC | 22 | 14359 |
| HSV1-UL30-5420 | + | GGGUCGGCAGGCGACGGCGUCUC | 23 | 14360 |
| HSV1-UL30-5421 | + | GGGGUCGGCAGGCGACGGCGUCUC | 24 | 14361 |
| HSV1-UL30-5422 | + | CAUGCGGCCGUACCCGUC | 18 | 14362 |
| HSV1-UL30-5423 | + | UCAUGCGGCCGUACCCGUC | 19 | 14363 |
| HSV1-UL30-2508 | + | UUCAUGCGGCCGUACCCGUC | 20 | 5514 |
| HSV1-UL30-5424 | + | GUUCAUGCGGCCGUACCCGUC | 21 | 14364 |
| HSV1-UL30-5425 | + | CGUUCAUGCGGCCGUACCCGUC | 22 | 14365 |
| HSV1-UL30-5426 | + | CCGUUCAUGCGGCCGUACCCGUC | 23 | 14366 |
| HSV1-UL30-5427 | + | GCCGUUCAUGCGGCCGUACCCGUC | 24 | 14367 |
| HSV1-UL30-5428 | + | CCGCGCGGCCACGUCGUC | 18 | 14368 |
| HSV1-UL30-5429 | + | GCCGCGCGGCCACGUCGUC | 19 | 14369 |
| HSV1-UL30-2340 | + | AGCCGCGCGGCCACGUCGUC | 20 | 5353 |
| HSV1-UL30-5430 | + | GAGCCGCGCGGCCACGUCGUC | 21 | 14370 |
| HSV1-UL30-5431 | + | GGAGCCGCGCGGCCACGUCGUC | 22 | 14371 |
| HSV1-UL30-5432 | + | CGGAGCCGCGCGGCCACGUCGUC | 23 | 14372 |
| HSV1-UL30-5433 | + | CCGGAGCCGCGCGGCCACGUCGUC | 24 | 14373 |
| HSV1-UL30-5434 | + | AUGAUGUUGUACCCGGUC | 18 | 14374 |
| HSV1-UL30-5435 | + | GAUGAUGUUGUACCCGGUC | 19 | 14375 |
| HSV1-UL30-2515 | + | UGAUGAUGUUGUACCCGGUC | 20 | 5521 |
| HSV1-UL30-5436 | + | UUGAUGAUGUUGUACCCGGUC | 21 | 14376 |
| HSV1-UL30-5437 | + | GUUGAUGAUGUUGUACCCGGUC | 22 | 14377 |
| HSV1-UL30-5438 | + | AGUUGAUGAUGUUGUACCCGGUC | 23 | 14378 |
| HSV1-UL30-5439 | + | AAGUUGAUGAUGUUGUACCCGGUC | 24 | 14379 |
| HSV1-UL30-5440 | + | GCCCCGAACCCUGCGGUC | 18 | 14380 |
| HSV1-UL30-5441 | + | CGCCCCGAACCCUGCGGUC | 19 | 14381 |
| HSV1-UL30-2338 | + | CCGCCCCGAACCCUGCGGUC | 20 | 5351 |
| HSV1-UL30-5442 | + | ACCGCCCCGAACCCUGCGGUC | 21 | 14382 |
| HSV1-UL30-5443 | + | CACCGCCCCGAACCCUGCGGUC | 22 | 14383 |
| HSV1-UL30-5444 | + | CCACCGCCCCGAACCCUGCGGUC | 23 | 14384 |
| HSV1-UL30-5445 | + | CCCACCGCCCCGAACCCUGCGGUC | 24 | 14385 |
| HSV1-UL30-5446 | + | UACUGUUUCACAAGGGUC | 18 | 14386 |
| HSV1-UL30-5447 | + | GUACUGUUUCACAAGGGUC | 19 | 14387 |
| HSV1-UL30-2519 | + | CGUACUGUUUCACAAGGGUC | 20 | 5525 |
| HSV1-UL30-5448 | + | CCGUACUGUUUCACAAGGGUC | 21 | 14388 |
| HSV1-UL30-5449 | + | GCCGUACUGUUUCACAAGGGUC | 22 | 14389 |
| HSV1-UL30-5450 | + | GGCCGUACUGUUUCACAAGGGUC | 23 | 14390 |
| HSV1-UL30-5451 | + | GGGCCGUACUGUUUCACAAGGGUC | 24 | 14391 |
| HSV1-UL30-5452 | + | UGGACGUACUCGCGGGUC | 18 | 14392 |
| HSV1-UL30-5453 | + | GUGGACGUACUCGCGGGUC | 19 | 14393 |
| HSV1-UL30-2440 | + | CGUGGACGUACUCGCGGGUC | 20 | 5446 |
| HSV1-UL30-5454 | + | GCGUGGACGUACUCGCGGGUC | 21 | 14394 |
| HSV1-UL30-5455 | + | CGCGUGGACGUACUCGCGGGUC | 22 | 14395 |
| HSV1-UL30-5456 | + | GCGCGUGGACGUACUCGCGGGUC | 23 | 14396 |
| HSV1-UL30-5457 | + | CGCGCGUGGACGUACUCGCGGGUC | 24 | 14397 |
| HSV1-UL30-5458 | + | AAACCCGGAAGUGGGGUC | 18 | 14398 |
| HSV1-UL30-5459 | + | GAAACCCGGAAGUGGGGUC | 19 | 14399 |
| HSV1-UL30-2482 | + | UGAAACCCGGAAGUGGGGUC | 20 | 5488 |
| HSV1-UL30-5460 | + | GUGAAACCCGGAAGUGGGGUC | 21 | 14400 |
| HSV1-UL30-5461 | + | CGUGAAACCCGGAAGUGGGGUC | 22 | 14401 |
| HSV1-UL30-5462 | + | ACGUGAAACCCGGAAGUGGGGUC | 23 | 14402 |
| HSV1-UL30-5463 | + | CACGUGAAACCCGGAAGUGGGGUC | 24 | 14403 |
| HSV1-UL30-5464 | + | UCGACGUCGCUGGAUGUC | 18 | 14404 |
| HSV1-UL30-5465 | + | CUCGACGUCGCUGGAUGUC | 19 | 14405 |
| HSV1-UL30-2549 | + | ACUCGACGUCGCUGGAUGUC | 20 | 5554 |
| HSV1-UL30-5466 | + | AACUCGACGUCGCUGGAUGUC | 21 | 14406 |
| HSV1-UL30-5467 | + | AAACUCGACGUCGCUGGAUGUC | 22 | 14407 |
| HSV1-UL30-5468 | + | UAAACUCGACGUCGCUGGAUGUC | 23 | 14408 |
| HSV1-UL30-5469 | + | UUAAACUCGACGUCGCUGGAUGUC | 24 | 14409 |
| HSV1-UL30-5470 | + | GGCGGCCUGCUGCUUGUC | 18 | 14410 |
| HSV1-UL30-5471 | + | UGGCGGCCUGCUGCUUGUC | 19 | 14411 |
| HSV1-UL30-2445 | + | AUGGCGGCCUGCUGCUUGUC | 20 | 5451 |
| HSV1-UL30-5472 | + | GAUGGCGGCCUGCUGCUUGUC | 21 | 14412 |
| HSV1-UL30-5473 | + | UGAUGGCGGCCUGCUGCUUGUC | 22 | 14413 |
| HSV1-UL30-5474 | + | UUGAUGGCGGCCUGCUGCUUGUC | 23 | 14414 |
| HSV1-UL30-5475 | + | CUUGAUGGCGGCCUGCUGCUUGUC | 24 | 14415 |
| HSV1-UL30-5476 | + | GAAUUCGCUGUCGAAUUC | 18 | 14416 |
| HSV1-UL30-5477 | + | CGAAUUCGCUGUCGAAUUC | 19 | 14417 |
| HSV1-UL30-2522 | + | UCGAAUUCGCUGUCGAAUUC | 20 | 5528 |
| HSV1-UL30-5478 | + | CUCGAAUUCGCUGUCGAAUUC | 21 | 14418 |
| HSV1-UL30-5479 | + | UCUCGAAUUCGCUGUCGAAUUC | 22 | 14419 |
| HSV1-UL30-5480 | + | AUCUCGAAUUCGCUGUCGAAUUC | 23 | 14420 |
| HSV1-UL30-5481 | + | CAUCUCGAAUUCGCUGUCGAAUUC | 24 | 14421 |
| HSV1-UL30-5482 | + | CUCGUUCAGGUGGGAUUC | 18 | 14422 |
| HSV1-UL30-5483 | + | GCUCGUUCAGGUGGGAUUC | 19 | 14423 |
| HSV1-UL30-2529 | + | AGCUCGUUCAGGUGGGAUUC | 20 | 5535 |
| HSV1-UL30-5484 | + | CAGCUCGUUCAGGUGGGAUUC | 21 | 14424 |
| HSV1-UL30-5485 | + | CCAGCUCGUUCAGGUGGGAUUC | 22 | 14425 |
| HSV1-UL30-5486 | + | GCCAGCUCGUUCAGGUGGGAUUC | 23 | 14426 |
| HSV1-UL30-5487 | + | CGCCAGCUCGUUCAGGUGGGAUUC | 24 | 14427 |
| HSV1-UL30-5488 | + | UUUAUCUUGCUGCGCUUC | 18 | 14428 |
| HSV1-UL30-5489 | + | CUUUAUCUUGCUGCGCUUC | 19 | 14429 |
| HSV1-UL30-2506 | + | CCUUUAUCUUGCUGCGCUUC | 20 | 5512 |
| HSV1-UL30-5490 | + | ACCUUUAUCUUGCUGCGCUUC | 21 | 14430 |
| HSV1-UL30-5491 | + | CACCUUUAUCUUGCUGCGCUUC | 22 | 14431 |
| HSV1-UL30-5492 | + | UCACCUUUAUCUUGCUGCGCUUC | 23 | 14432 |
| HSV1-UL30-5493 | + | UUCACCUUUAUCUUGCUGCGCUUC | 24 | 14433 |
| HSV1-UL30-5494 | + | CCGCGGCACAGCACAAAG | 18 | 14434 |
| HSV1-UL30-5495 | + | GCCGCGGCACAGCACAAAG | 19 | 14435 |
| HSV1-UL30-2424 | + | GGCCGCGGCACAGCACAAAG | 20 | 5431 |
| HSV1-UL30-5496 | + | AGGCCGCGGCACAGCACAAAG | 21 | 14436 |
| HSV1-UL30-5497 | + | GAGGCCGCGGCACAGCACAAAG | 22 | 14437 |
| HSV1-UL30-5498 | + | UGAGGCCGCGGCACAGCACAAAG | 23 | 14438 |
| HSV1-UL30-5499 | + | GUGAGGCCGCGGCACAGCACAAAG | 24 | 14439 |
| HSV1-UL30-5500 | + | GGGUACAGGCUGGCAAAG | 18 | 14440 |
| HSV1-UL30-5501 | + | GGGGUACAGGCUGGCAAAG | 19 | 14441 |
| HSV1-UL30-2474 | + | UGGGGUACAGGCUGGCAAAG | 20 | 5480 |
| HSV1-UL30-5502 | + | CUGGGGUACAGGCUGGCAAAG | 21 | 14442 |
| HSV1-UL30-5503 | + | GCUGGGGUACAGGCUGGCAAAG | 22 | 14443 |
| HSV1-UL30-5504 | + | UGCUGGGGUACAGGCUGGCAAAG | 23 | 14444 |
| HSV1-UL30-5505 | + | AUGCUGGGGUACAGGCUGGCAAAG | 24 | 14445 |
| HSV1-UL30-5506 | + | GUCAGCUUGGCCAGCAAG | 18 | 14446 |
| HSV1-UL30-5507 | + | CGUCAGCUUGGCCAGCAAG | 19 | 14447 |
| HSV1-UL30-2513 | + | CCGUCAGCUUGGCCAGCAAG | 20 | 5519 |
| HSV1-UL30-5508 | + | UCCGUCAGCUUGGCCAGCAAG | 21 | 14448 |
| HSV1-UL30-5509 | + | GUCCGUCAGCUUGGCCAGCAAG | 22 | 14449 |
| HSV1-UL30-5510 | + | UGUCCGUCAGCUUGGCCAGCAAG | 23 | 14450 |
| HSV1-UL30-5511 | + | AUGUCCGUCAGCUUGGCCAGCAAG | 24 | 14451 |
| HSV1-UL30-5512 | + | GGAACCGAGCGAAAACAG | 18 | 14452 |
| HSV1-UL30-5513 | + | AGGAACCGAGCGAAAACAG | 19 | 14453 |
| HSV1-UL30-2537 | + | CAGGAACCGAGCGAAAACAG | 20 | 5542 |
| HSV1-UL30-5514 | + | GCAGGAACCGAGCGAAAACAG | 21 | 14454 |
| HSV1-UL30-5515 | + | CGCAGGAACCGAGCGAAAACAG | 22 | 14455 |
| HSV1-UL30-5516 | + | UCGCAGGAACCGAGCGAAAACAG | 23 | 14456 |
| HSV1-UL30-5517 | + | GUCGCAGGAACCGAGCGAAAACAG | 24 | 14457 |
| HSV1-UL30-5518 | + | GCACGCCGCCCCCAACAG | 18 | 14458 |
| HSV1-UL30-5519 | + | CGCACGCCGCCCCCAACAG | 19 | 14459 |
| HSV1-UL30-2348 | + | ACGCACGCCGCCCCCAACAG | 20 | 5361 |
| HSV1-UL30-5520 | + | CACGCACGCCGCCCCCAACAG | 21 | 14460 |
| HSV1-UL30-5521 | + | UCACGCACGCCGCCCCCAACAG | 22 | 14461 |
| HSV1-UL30-5522 | + | GUCACGCACGCCGCCCCCAACAG | 23 | 14462 |
| HSV1-UL30-5523 | + | UGUCACGCACGCCGCCCCCAACAG | 24 | 14463 |
| HSV1-UL30-5524 | + | AAACAGCUGGCCCACCAG | 18 | 14464 |
| HSV1-UL30-5525 | + | AAAACAGCUGGCCCACCAG | 19 | 14465 |
| HSV1-UL30-2494 | + | AAAAACAGCUGGCCCACCAG | 20 | 5500 |
| HSV1-UL30-5526 | + | AAAAAACAGCUGGCCCACCAG | 21 | 14466 |
| HSV1-UL30-5527 | + | UAAAAAACAGCUGGCCCACCAG | 22 | 14467 |
| HSV1-UL30-5528 | + | UUAAAAAACAGCUGGCCCACCAG | 23 | 14468 |
| HSV1-UL30-5529 | + | CUUAAAAAACAGCUGGCCCACCAG | 24 | 14469 |
| HSV1-UL30-5530 | + | GGUUUGAGACGGUACCAG | 18 | 14470 |
| HSV1-UL30-5531 | + | CGGUUUGAGACGGUACCAG | 19 | 14471 |
| HSV1-UL30-2554 | + | CCGGUUUGAGACGGUACCAG | 20 | 5559 |
| HSV1-UL30-5532 | + | CCCGGUUUGAGACGGUACCAG | 21 | 14472 |
| HSV1-UL30-5533 | + | GCCCGGUUUGAGACGGUACCAG | 22 | 14473 |
| HSV1-UL30-5534 | + | GGCCCGGUUUGAGACGGUACCAG | 23 | 14474 |
| HSV1-UL30-5535 | + | CGGCCCGGUUUGAGACGGUACCAG | 24 | 14475 |
| HSV1-UL30-5536 | + | GCCAGCAAGAAGGGCCAG | 18 | 14476 |
| HSV1-UL30-5537 | + | GGCCAGCAAGAAGGGCCAG | 19 | 14477 |
| HSV1-UL30-2514 | + | UGGCCAGCAAGAAGGGCCAG | 20 | 5520 |
| HSV1-UL30-5538 | + | UUGGCCAGCAAGAAGGGCCAG | 21 | 14478 |
| HSV1-UL30-5539 | + | CUUGGCCAGCAAGAAGGGCCAG | 22 | 14479 |
| HSV1-UL30-5540 | + | GCUUGGCCAGCAAGAAGGGCCAG | 23 | 14480 |
| HSV1-UL30-5541 | + | AGCUUGGCCAGCAAGAAGGGCCAG | 24 | 14481 |
| HSV1-UL30-5542 | + | GACGGCCGAGAGCUCCAG | 18 | 14482 |
| HSV1-UL30-5543 | + | CGACGGCCGAGAGCUCCAG | 19 | 14483 |
| HSV1-UL30-2492 | + | GCGACGGCCGAGAGCUCCAG | 20 | 5498 |
| HSV1-UL30-5544 | + | CGCGACGGCCGAGAGCUCCAG | 21 | 14484 |
| HSV1-UL30-5545 | + | GCGCGACGGCCGAGAGCUCCAG | 22 | 14485 |
| HSV1-UL30-5546 | + | CGCGCGACGGCCGAGAGCUCCAG | 23 | 14486 |
| HSV1-UL30-5547 | + | GCGCGCGACGGCCGAGAGCUCCAG | 24 | 14487 |
| HSV1-UL30-5548 | + | GCGGCCGUACCCGUCCAG | 18 | 14488 |
| HSV1-UL30-5549 | + | UGCGGCCGUACCCGUCCAG | 19 | 14489 |
| HSV1-UL30-2511 | + | AUGCGGCCGUACCCGUCCAG | 20 | 5517 |
| HSV1-UL30-5550 | + | CAUGCGGCCGUACCCGUCCAG | 21 | 14490 |
| HSV1-UL30-5551 | + | UCAUGCGGCCGUACCCGUCCAG | 22 | 14491 |
| HSV1-UL30-5552 | + | UUCAUGCGGCCGUACCCGUCCAG | 23 | 14492 |
| HSV1-UL30-5553 | + | GUUCAUGCGGCCGUACCCGUCCAG | 24 | 14493 |
| HSV1-UL30-5554 | + | CUUGUAAUACACCGUCAG | 18 | 14494 |
| HSV1-UL30-5555 | + | GCUUGUAAUACACCGUCAG | 19 | 14495 |
| HSV1-UL30-2394 | + | AGCUUGUAAUACACCGUCAG | 20 | 5401 |
| HSV1-UL30-5556 | + | GAGCUUGUAAUACACCGUCAG | 21 | 14496 |
| HSV1-UL30-5557 | + | UGAGCUUGUAAUACACCGUCAG | 22 | 14497 |
| HSV1-UL30-5558 | + | AUGAGCUUGUAAUACACCGUCAG | 23 | 14498 |
| HSV1-UL30-5559 | + | CAUGAGCUUGUAAUACACCGUCAG | 24 | 14499 |
| HSV1-UL30-5560 | + | GGCCGCCAGCUCGUUCAG | 18 | 14500 |
| HSV1-UL30-5561 | + | UGGCCGCCAGCUCGUUCAG | 19 | 14501 |
| HSV1-UL30-2525 | + | CUGGCCGCCAGCUCGUUCAG | 20 | 5531 |
| HSV1-UL30-5562 | + | CCUGGCCGCCAGCUCGUUCAG | 21 | 14502 |
| HSV1-UL30-5563 | + | CCCUGGCCGCCAGCUCGUUCAG | 22 | 14503 |
| HSV1-UL30-5564 | + | CCCCUGGCCGCCAGCUCGUUCAG | 23 | 14504 |
| HSV1-UL30-5565 | + | GCCCCUGGCCGCCAGCUCGUUCAG | 24 | 14505 |
| HSV1-UL30-5566 | + | AGACGCGGUAAAACAGAG | 18 | 14506 |
| HSV1-UL30-5567 | + | UAGACGCGGUAAAACAGAG | 19 | 14507 |
| HSV1-UL30-2566 | + | GUAGACGCGGUAAAACAGAG | 20 | 5571 |
| HSV1-UL30-5568 | + | CGUAGACGCGGUAAAACAGAG | 21 | 14508 |
| HSV1-UL30-5569 | + | ACGUAGACGCGGUAAAACAGAG | 22 | 14509 |
| HSV1-UL30-5570 | + | GACGUAGACGCGGUAAAACAGAG | 23 | 14510 |
| HSV1-UL30-5571 | + | GGACGUAGACGCGGUAAAACAGAG | 24 | 14511 |
| HSV1-UL30-5572 | + | GGCCCGGCGGCGUAGUAG | 18 | 14512 |
| HSV1-UL30-5573 | + | GGGCCCGGCGGCGUAGUAG | 19 | 14513 |
| HSV1-UL30-2498 | + | CGGGCCCGGCGGCGUAGUAG | 20 | 5504 |
| HSV1-UL30-5574 | + | GCGGGCCCGGCGGCGUAGUAG | 21 | 14514 |
| HSV1-UL30-5575 | + | CGCGGGCCCGGCGGCGUAGUAG | 22 | 14515 |
| HSV1-UL30-5576 | + | GCGCGGGCCCGGCGGCGUAGUAG | 23 | 14516 |
| HSV1-UL30-5577 | + | UGCGCGGGCCCGGCGGCGUAGUAG | 24 | 14517 |
| HSV1-UL30-5578 | + | CGCACGUGAGCCUUGACG | 18 | 14518 |
| HSV1-UL30-5579 | + | UCGCACGUGAGCCUUGACG | 19 | 14519 |
| HSV1-UL30-2464 | + | CUCGCACGUGAGCCUUGACG | 20 | 5470 |
| HSV1-UL30-5580 | + | UCUCGCACGUGAGCCUUGACG | 21 | 14520 |
| HSV1-UL30-5581 | + | CUCUCGCACGUGAGCCUUGACG | 22 | 14521 |
| HSV1-UL30-5582 | + | UCUCUCGCACGUGAGCCUUGACG | 23 | 14522 |
| HSV1-UL30-5583 | + | CUCUCUCGCACGUGAGCCUUGACG | 24 | 14523 |
| HSV1-UL30-5584 | + | CAUGGCGAGCCAGUCCCG | 18 | 14524 |
| HSV1-UL30-5585 | + | GCAUGGCGAGCCAGUCCCG | 19 | 14525 |
| HSV1-UL30-2456 | + | CGCAUGGCGAGCCAGUCCCG | 20 | 5462 |
| HSV1-UL30-5586 | + | UCGCAUGGCGAGCCAGUCCCG | 21 | 14526 |
| HSV1-UL30-5587 | + | UUCGCAUGGCGAGCCAGUCCCG | 22 | 14527 |
| HSV1-UL30-5588 | + | UUUCGCAUGGCGAGCCAGUCCCG | 23 | 14528 |
| HSV1-UL30-5589 | + | CUUUCGCAUGGCGAGCCAGUCCCG | 24 | 14529 |
| HSV1-UL30-5590 | + | CGGGUCGGUGAUGCGCCG | 18 | 14530 |
| HSV1-UL30-5591 | + | CCGGGUCGGUGAUGCGCCG | 19 | 14531 |
| HSV1-UL30-2400 | + | UCCGGGUCGGUGAUGCGCCG | 20 | 5407 |
| HSV1-UL30-5592 | + | CUCCGGGUCGGUGAUGCGCCG | 21 | 14532 |
| HSV1-UL30-5593 | + | UCUCCGGGUCGGUGAUGCGCCG | 22 | 14533 |
| HSV1-UL30-5594 | + | CUCUCCGGGUCGGUGAUGCGCCG | 23 | 14534 |
| HSV1-UL30-5595 | + | CCUCUCCGGGUCGGUGAUGCGCCG | 24 | 14535 |
| HSV1-UL30-5596 | + | CCGGGGAGGGCAGGGCCG | 18 | 14536 |
| HSV1-UL30-5597 | + | GCCGGGGAGGGCAGGGCCG | 19 | 14537 |
| HSV1-UL30-1124 | + | GGCCGGGGAGGGCAGGGCCG | 20 | 4062 |
| HSV1-UL30-5598 | + | UGGCCGGGGAGGGCAGGGCCG | 21 | 14538 |
| HSV1-UL30-5599 | + | UUGGCCGGGGAGGGCAGGGCCG | 22 | 14539 |
| HSV1-UL30-5600 | + | CUUGGCCGGGGAGGGCAGGGCCG | 23 | 14540 |
| HSV1-UL30-5601 | + | GCUUGGCCGGGGAGGGCAGGGCCG | 24 | 14541 |
| HSV1-UL30-5602 | + | CCCGGGGGCGCUUGGCCG | 18 | 14542 |
| HSV1-UL30-5603 | + | UCCCGGGGGCGCUUGGCCG | 19 | 14543 |
| HSV1-UL30-2370 | + | CUCCCGGGGGCGCUUGGCCG | 20 | 5382 |
| HSV1-UL30-5604 | + | UCUCCCGGGGGCGCUUGGCCG | 21 | 14544 |
| HSV1-UL30-5605 | + | GUCUCCCGGGGGCGCUUGGCCG | 22 | 14545 |
| HSV1-UL30-5606 | + | CGUCUCCCGGGGGCGCUUGGCCG | 23 | 14546 |
| HSV1-UL30-5607 | + | GCGUCUCCCGGGGGCGCUUGGCCG | 24 | 14547 |
| HSV1-UL30-5608 | + | UGGUCCGCGGAGAUGCCG | 18 | 14548 |
| HSV1-UL30-5609 | + | GUGGUCCGCGGAGAUGCCG | 19 | 14549 |
| HSV1-UL30-2571 | + | AGUGGUCCGCGGAGAUGCCG | 20 | 5576 |
| HSV1-UL30-5610 | + | AAGUGGUCCGCGGAGAUGCCG | 21 | 14550 |
| HSV1-UL30-5611 | + | GAAGUGGUCCGCGGAGAUGCCG | 22 | 14551 |
| HSV1-UL30-5612 | + | CGAAGUGGUCCGCGGAGAUGCCG | 23 | 14552 |
| HSV1-UL30-5613 | + | UCGAAGUGGUCCGCGGAGAUGCCG | 24 | 14553 |
| HSV1-UL30-5614 | + | GCGCCAGCCACUCCUCCG | 18 | 14554 |
| HSV1-UL30-5615 | + | CGCGCCAGCCACUCCUCCG | 19 | 14555 |
| HSV1-UL30-2408 | + | UCGCGCCAGCCACUCCUCCG | 20 | 5415 |
| HSV1-UL30-5616 | + | GUCGCGCCAGCCACUCCUCCG | 21 | 14556 |
| HSV1-UL30-5617 | + | GGUCGCGCCAGCCACUCCUCCG | 22 | 14557 |
| HSV1-UL30-5618 | + | GGGUCGCGCCAGCCACUCCUCCG | 23 | 14558 |
| HSV1-UL30-5619 | + | GGGGUCGCGCCAGCCACUCCUCCG | 24 | 14559 |
| HSV1-UL30-5620 | + | CCGCCUCGAAGUGGUCCG | 18 | 14560 |
| HSV1-UL30-5621 | + | UCCGCCUCGAAGUGGUCCG | 19 | 14561 |
| HSV1-UL30-2569 | + | CUCCGCCUCGAAGUGGUCCG | 20 | 5574 |
| HSV1-UL30-5622 | + | CCUCCGCCUCGAAGUGGUCCG | 21 | 14562 |
| HSV1-UL30-5623 | + | ACCUCCGCCUCGAAGUGGUCCG | 22 | 14563 |
| HSV1-UL30-5624 | + | CACCUCCGCCUCGAAGUGGUCCG | 23 | 14564 |
| HSV1-UL30-5625 | + | CCACCUCCGCCUCGAAGUGGUCCG | 24 | 14565 |
| HSV1-UL30-5626 | + | GGGGAGGGCAGGGCCGCG | 18 | 14566 |
| HSV1-UL30-5627 | + | CGGGGAGGGCAGGGCCGCG | 19 | 14567 |
| HSV1-UL30-1126 | + | CCGGGGAGGGCAGGGCCGCG | 20 | 4064 |
| HSV1-UL30-5628 | + | GCCGGGGAGGGCAGGGCCGCG | 21 | 14568 |
| HSV1-UL30-5629 | + | GGCCGGGGAGGGCAGGGCCGCG | 22 | 14569 |
| HSV1-UL30-5630 | + | UGGCCGGGGAGGGCAGGGCCGCG | 23 | 14570 |
| HSV1-UL30-5631 | + | UUGGCCGGGGAGGGCAGGGCCGCG | 24 | 14571 |
| HSV1-UL30-4083 | + | GCGUCCAUAAACCGCGCG | 18 | 13023 |
| HSV1-UL30-4084 | + | GGCGUCCAUAAACCGCGCG | 19 | 13024 |
| HSV1-UL30-2857 | + | UGGCGUCCAUAAACCGCGCG | 20 | 11797 |
| HSV1-UL30-4085 | + | AUGGCGUCCAUAAACCGCGCG | 21 | 13025 |
| HSV1-UL30-4086 | + | GAUGGCGUCCAUAAACCGCGCG | 22 | 13026 |
| HSV1-UL30-4087 | + | UGAUGGCGUCCAUAAACCGCGCG | 23 | 13027 |
| HSV1-UL30-4088 | + | GUGAUGGCGUCCAUAAACCGCGCG | 24 | 13028 |
| HSV1-UL30-5632 | + | GGACGGGACCUGCGCGCG | 18 | 14572 |
| HSV1-UL30-5633 | + | UGGACGGGACCUGCGCGCG | 19 | 14573 |
| HSV1-UL30-2392 | + | AUGGACGGGACCUGCGCGCG | 20 | 5399 |
| HSV1-UL30-5634 | + | GAUGGACGGGACCUGCGCGCG | 21 | 14574 |
| HSV1-UL30-5635 | + | UGAUGGACGGGACCUGCGCGCG | 22 | 14575 |
| HSV1-UL30-5636 | + | UUGAUGGACGGGACCUGCGCGCG | 23 | 14576 |
| HSV1-UL30-5637 | + | CUUGAUGGACGGGACCUGCGCGCG | 24 | 14577 |
| HSV1-UL30-5638 | + | CGCGCCCGGGGACUCGCG | 18 | 14578 |
| HSV1-UL30-5639 | + | ACGCGCCCGGGGACUCGCG | 19 | 14579 |
| HSV1-UL30-2575 | + | GACGCGCCCGGGGACUCGCG | 20 | 5580 |
| HSV1-UL30-5640 | + | CGACGCGCCCGGGGACUCGCG | 21 | 14580 |
| HSV1-UL30-5641 | + | ACGACGCGCCCGGGGACUCGCG | 22 | 14581 |
| HSV1-UL30-5642 | + | AACGACGCGCCCGGGGACUCGCG | 23 | 14582 |
| HSV1-UL30-5643 | + | GAACGACGCGCCCGGGGACUCGCG | 24 | 14583 |
| HSV1-UL30-5644 | + | GGCGGCGUCUAGCUCGCG | 18 | 14584 |
| HSV1-UL30-5645 | + | CGGCGGCGUCUAGCUCGCG | 19 | 14585 |
| HSV1-UL30-2384 | + | GCGGCGGCGUCUAGCUCGCG | 20 | 5391 |
| HSV1-UL30-5646 | + | GGCGGCGGCGUCUAGCUCGCG | 21 | 14586 |
| HSV1-UL30-5647 | + | GGGCGGCGGCGUCUAGCUCGCG | 22 | 14587 |
| HSV1-UL30-5648 | + | GGGGCGGCGGCGUCUAGCUCGCG | 23 | 14588 |
| HSV1-UL30-5649 | + | UGGGGCGGCGGCGUCUAGCUCGCG | 24 | 14589 |
| HSV1-UL30-5650 | + | ACGGCUUCGGCCACGGCG | 18 | 14590 |
| HSV1-UL30-5651 | + | GACGGCUUCGGCCACGGCG | 19 | 14591 |
| HSV1-UL30-2502 | + | GGACGGCUUCGGCCACGGCG | 20 | 5508 |
| HSV1-UL30-5652 | + | AGGACGGCUUCGGCCACGGCG | 21 | 14592 |
| HSV1-UL30-5653 | + | CAGGACGGCUUCGGCCACGGCG | 22 | 14593 |
| HSV1-UL30-5654 | + | UCAGGACGGCUUCGGCCACGGCG | 23 | 14594 |
| HSV1-UL30-5655 | + | UUCAGGACGGCUUCGGCCACGGCG | 24 | 14595 |
| HSV1-UL30-5656 | + | UGUCUGCUCAGUUCGGCG | 18 | 14596 |
| HSV1-UL30-5657 | + | GUGUCUGCUCAGUUCGGCG | 19 | 14597 |
| HSV1-UL30-2396 | + | GGUGUCUGCUCAGUUCGGCG | 20 | 5403 |
| HSV1-UL30-5658 | + | GGGUGUCUGCUCAGUUCGGCG | 21 | 14598 |
| HSV1-UL30-5659 | + | CGGGUGUCUGCUCAGUUCGGCG | 22 | 14599 |
| HSV1-UL30-5660 | + | GCGGGUGUCUGCUCAGUUCGGCG | 23 | 14600 |
| HSV1-UL30-5661 | + | CGCGGGUGUCUGCUCAGUUCGGCG | 24 | 14601 |
| HSV1-UL30-5662 | + | GCGGCGGCGUCUAGCUCG | 18 | 14602 |
| HSV1-UL30-5663 | + | GGCGGCGGCGUCUAGCUCG | 19 | 14603 |
| HSV1-UL30-2383 | + | GGGCGGCGGCGUCUAGCUCG | 20 | 5390 |
| HSV1-UL30-5664 | + | GGGGCGGCGGCGUCUAGCUCG | 21 | 14604 |
| HSV1-UL30-5665 | + | UGGGGCGGCGGCGUCUAGCUCG | 22 | 14605 |
| HSV1-UL30-5666 | + | CUGGGGCGGCGGCGUCUAGCUCG | 23 | 14606 |
| HSV1-UL30-5667 | + | CCUGGGGCGGCGGCGUCUAGCUCG | 24 | 14607 |
| HSV1-UL30-5668 | + | GCCGCGGCCAUGCGCUCG | 18 | 14608 |
| HSV1-UL30-5669 | + | GGCCGCGGCCAUGCGCUCG | 19 | 14609 |
| HSV1-UL30-2576 | + | GGGCCGCGGCCAUGCGCUCG | 20 | 5581 |
| HSV1-UL30-5670 | + | AGGGCCGCGGCCAUGCGCUCG | 21 | 14610 |
| HSV1-UL30-5671 | + | CAGGGCCGCGGCCAUGCGCUCG | 22 | 14611 |
| HSV1-UL30-5672 | + | GCAGGGCCGCGGCCAUGCGCUCG | 23 | 14612 |
| HSV1-UL30-5673 | + | CGCAGGGCCGCGGCCAUGCGCUCG | 24 | 14613 |
| HSV1-UL30-5674 | + | GCGCUCGCAGAGAUCUCG | 18 | 14614 |
| HSV1-UL30-5675 | + | UGCGCUCGCAGAGAUCUCG | 19 | 14615 |
| HSV1-UL30-2578 | + | AUGCGCUCGCAGAGAUCUCG | 20 | 5583 |
| HSV1-UL30-5676 | + | CAUGCGCUCGCAGAGAUCUCG | 21 | 14616 |
| HSV1-UL30-5677 | + | CCAUGCGCUCGCAGAGAUCUCG | 22 | 14617 |
| HSV1-UL30-5678 | + | GCCAUGCGCUCGCAGAGAUCUCG | 23 | 14618 |
| HSV1-UL30-5679 | + | GGCCAUGCGCUCGCAGAGAUCUCG | 24 | 14619 |
| HSV1-UL30-5680 | + | GCGGUGGUGGACAGGUCG | 18 | 14620 |
| HSV1-UL30-5681 | + | GGCGGUGGUGGACAGGUCG | 19 | 14621 |
| HSV1-UL30-2540 | + | GGGCGGUGGUGGACAGGUCG | 20 | 5545 |
| HSV1-UL30-5682 | + | AGGGCGGUGGUGGACAGGUCG | 21 | 14622 |
| HSV1-UL30-5683 | + | CAGGGCGGUGGUGGACAGGUCG | 22 | 14623 |
| HSV1-UL30-5684 | + | CCAGGGCGGUGGUGGACAGGUCG | 23 | 14624 |
| HSV1-UL30-5685 | + | UCCAGGGCGGUGGUGGACAGGUCG | 24 | 14625 |
| HSV1-UL30-5686 | + | UGGGAUUCGGGGAGGUCG | 18 | 14626 |
| HSV1-UL30-5687 | + | GUGGGAUUCGGGGAGGUCG | 19 | 14627 |
| HSV1-UL30-2531 | + | GGUGGGAUUCGGGGAGGUCG | 20 | 5537 |
| HSV1-UL30-5688 | + | AGGUGGGAUUCGGGGAGGUCG | 21 | 14628 |
| HSV1-UL30-5689 | + | CAGGUGGGAUUCGGGGAGGUCG | 22 | 14629 |
| HSV1-UL30-5690 | + | UCAGGUGGGAUUCGGGGAGGUCG | 23 | 14630 |
| HSV1-UL30-5691 | + | UUCAGGUGGGAUUCGGGGAGGUCG | 24 | 14631 |
| HSV1-UL30-5692 | + | UCGUUCAGGUGGGAUUCG | 18 | 14632 |
| HSV1-UL30-5693 | + | CUCGUUCAGGUGGGAUUCG | 19 | 14633 |
| HSV1-UL30-2530 | + | GCUCGUUCAGGUGGGAUUCG | 20 | 5536 |
| HSV1-UL30-5694 | + | AGCUCGUUCAGGUGGGAUUCG | 21 | 14634 |
| HSV1-UL30-5695 | + | CAGCUCGUUCAGGUGGGAUUCG | 22 | 14635 |
| HSV1-UL30-5696 | + | CCAGCUCGUUCAGGUGGGAUUCG | 23 | 14636 |
| HSV1-UL30-5697 | + | GCCAGCUCGUUCAGGUGGGAUUCG | 24 | 14637 |
| HSV1-UL30-5698 | + | CACGCCGCCCCCAACAGG | 18 | 14638 |
| HSV1-UL30-5699 | + | GCACGCCGCCCCCAACAGG | 19 | 14639 |
| HSV1-UL30-1089 | + | CGCACGCCGCCCCCAACAGG | 20 | 4027 |
| HSV1-UL30-5700 | + | ACGCACGCCGCCCCCAACAGG | 21 | 14640 |
| HSV1-UL30-5701 | + | CACGCACGCCGCCCCCAACAGG | 22 | 14641 |
| HSV1-UL30-5702 | + | UCACGCACGCCGCCCCCAACAGG | 23 | 14642 |
| HSV1-UL30-5703 | + | GUCACGCACGCCGCCCCCAACAGG | 24 | 14643 |
| HSV1-UL30-5704 | + | AACCCGGGGUUGUCCAGG | 18 | 14644 |
| HSV1-UL30-5705 | + | GAACCCGGGGUUGUCCAGG | 19 | 14645 |
| HSV1-UL30-2559 | + | CGAACCCGGGGUUGUCCAGG | 20 | 5564 |
| HSV1-UL30-5706 | + | ACGAACCCGGGGUUGUCCAGG | 21 | 14646 |
| HSV1-UL30-5707 | + | GACGAACCCGGGGUUGUCCAGG | 22 | 14647 |
| HSV1-UL30-5708 | + | UGACGAACCCGGGGUUGUCCAGG | 23 | 14648 |
| HSV1-UL30-5709 | + | GUGACGAACCCGGGGUUGUCCAGG | 24 | 14649 |
| HSV1-UL30-5710 | + | ACUGCGUCGGCCCUCAGG | 18 | 14650 |
| HSV1-UL30-5711 | + | CACUGCGUCGGCCCUCAGG | 19 | 14651 |
| HSV1-UL30-2468 | + | CCACUGCGUCGGCCCUCAGG | 20 | 5474 |
| HSV1-UL30-5712 | + | GCCACUGCGUCGGCCCUCAGG | 21 | 14652 |
| HSV1-UL30-5713 | + | CGCCACUGCGUCGGCCCUCAGG | 22 | 14653 |
| HSV1-UL30-5714 | + | GCGCCACUGCGUCGGCCCUCAGG | 23 | 14654 |
| HSV1-UL30-5715 | + | UGCGCCACUGCGUCGGCCCUCAGG | 24 | 14655 |
| HSV1-UL30-5716 | + | GCCCGGCGGCGUAGUAGG | 18 | 14656 |
| HSV1-UL30-5717 | + | GGCCCGGCGGCGUAGUAGG | 19 | 14657 |
| HSV1-UL30-2499 | + | GGGCCCGGCGGCGUAGUAGG | 20 | 5505 |
| HSV1-UL30-5718 | + | CGGGCCCGGCGGCGUAGUAGG | 21 | 14658 |
| HSV1-UL30-5719 | + | GCGGGCCCGGCGGCGUAGUAGG | 22 | 14659 |
| HSV1-UL30-5720 | + | CGCGGGCCCGGCGGCGUAGUAGG | 23 | 14660 |
| HSV1-UL30-5721 | + | GCGCGGGCCCGGCGGCGUAGUAGG | 24 | 14661 |
| HSV1-UL30-5722 | + | GGCAACGUGCAGGCACGG | 18 | 14662 |
| HSV1-UL30-5723 | + | CGGCAACGUGCAGGCACGG | 19 | 14663 |
| HSV1-UL30-2441 | + | GCGGCAACGUGCAGGCACGG | 20 | 5447 |
| HSV1-UL30-5724 | + | CGCGGCAACGUGCAGGCACGG | 21 | 14664 |
| HSV1-UL30-5725 | + | UCGCGGCAACGUGCAGGCACGG | 22 | 14665 |
| HSV1-UL30-5726 | + | GUCGCGGCAACGUGCAGGCACGG | 23 | 14666 |
| HSV1-UL30-5727 | + | CGUCGCGGCAACGUGCAGGCACGG | 24 | 14667 |
| HSV1-UL30-5728 | + | CCGCCAAGCGCGCGACGG | 18 | 14668 |
| HSV1-UL30-5729 | + | CCCGCCAAGCGCGCGACGG | 19 | 14669 |
| HSV1-UL30-2490 | + | ACCCGCCAAGCGCGCGACGG | 20 | 5496 |
| HSV1-UL30-5730 | + | UACCCGCCAAGCGCGCGACGG | 21 | 14670 |
| HSV1-UL30-5731 | + | AUACCCGCCAAGCGCGCGACGG | 22 | 14671 |
| HSV1-UL30-5732 | + | AAUACCCGCCAAGCGCGCGACGG | 23 | 14672 |
| HSV1-UL30-5733 | + | UAAUACCCGCCAAGCGCGCGACGG | 24 | 14673 |
| HSV1-UL30-5734 | + | GGCCAUCGGGGCCGCCGG | 18 | 14674 |
| HSV1-UL30-5735 | + | AGGCCAUCGGGGCCGCCGG | 19 | 14675 |
| HSV1-UL30-2552 | + | AAGGCCAUCGGGGCCGCCGG | 20 | 5557 |
| HSV1-UL30-5736 | + | GAAGGCCAUCGGGGCCGCCGG | 21 | 14676 |
| HSV1-UL30-5737 | + | CGAAGGCCAUCGGGGCCGCCGG | 22 | 14677 |
| HSV1-UL30-5738 | + | CCGAAGGCCAUCGGGGCCGCCGG | 23 | 14678 |
| HSV1-UL30-5739 | + | CCCGAAGGCCAUCGGGGCCGCCGG | 24 | 14679 |
| HSV1-UL30-5740 | + | GGGAGGGCAGGGCCGCGG | 18 | 14680 |
| HSV1-UL30-5741 | + | GGGGAGGGCAGGGCCGCGG | 19 | 14681 |
| HSV1-UL30-1127 | + | CGGGGAGGGCAGGGCCGCGG | 20 | 4065 |
| HSV1-UL30-5742 | + | CCGGGGAGGGCAGGGCCGCGG | 21 | 14682 |
| HSV1-UL30-5743 | + | GCCGGGGAGGGCAGGGCCGCGG | 22 | 14683 |
| HSV1-UL30-5744 | + | GGCCGGGGAGGGCAGGGCCGCGG | 23 | 14684 |
| HSV1-UL30-5745 | + | UGGCCGGGGAGGGCAGGGCCGCGG | 24 | 14685 |
| HSV1-UL30-5746 | + | CGUCCUCCCGGGCUGCGG | 18 | 14686 |
| HSV1-UL30-5747 | + | UCGUCCUCCCGGGCUGCGG | 19 | 14687 |
| HSV1-UL30-2484 | + | CUCGUCCUCCCGGGCUGCGG | 20 | 5490 |
| HSV1-UL30-5748 | + | CCUCGUCCUCCCGGGCUGCGG | 21 | 14688 |
| HSV1-UL30-5749 | + | UCCUCGUCCUCCCGGGCUGCGG | 22 | 14689 |
| HSV1-UL30-5750 | + | CUCCUCGUCCUCCCGGGCUGCGG | 23 | 14690 |
| HSV1-UL30-5751 | + | GCUCCUCGUCCUCCCGGGCUGCGG | 24 | 14691 |
| HSV1-UL30-5752 | + | GCGCUUGGCCGGGGAGGG | 18 | 14692 |
| HSV1-UL30-5753 | + | GGCGCUUGGCCGGGGAGGG | 19 | 14693 |
| HSV1-UL30-2372 | + | GGGCGCUUGGCCGGGGAGGG | 20 | 5384 |
| HSV1-UL30-5754 | + | GGGGCGCUUGGCCGGGGAGGG | 21 | 14694 |
| HSV1-UL30-5755 | + | GGGGGCGCUUGGCCGGGGAGGG | 22 | 14695 |
| HSV1-UL30-5756 | + | CGGGGGCGCUUGGCCGGGGAGGG | 23 | 14696 |
| HSV1-UL30-5757 | + | CCGGGGGCGCUUGGCCGGGGAGGG | 24 | 14697 |
| HSV1-UL30-5758 | + | UACUUCUUGAUGGCCGGG | 18 | 14698 |
| HSV1-UL30-5759 | + | GUACUUCUUGAUGGCCGGG | 19 | 14699 |
| HSV1-UL30-2562 | + | CGUACUUCUUGAUGGCCGGG | 20 | 5567 |
| HSV1-UL30-5760 | + | UCGUACUUCUUGAUGGCCGGG | 21 | 14700 |
| HSV1-UL30-5761 | + | CUCGUACUUCUUGAUGGCCGGG | 22 | 14701 |
| HSV1-UL30-5762 | + | CCUCGUACUUCUUGAUGGCCGGG | 23 | 14702 |
| HSV1-UL30-5763 | + | CCCUCGUACUUCUUGAUGGCCGGG | 24 | 14703 |
| HSV1-UL30-5764 | + | CGGGGGCGCUUGGCCGGG | 18 | 14704 |
| HSV1-UL30-5765 | + | CCGGGGGCGCUUGGCCGGG | 19 | 14705 |
| HSV1-UL30-2371 | + | CCCGGGGGCGCUUGGCCGGG | 20 | 5383 |
| HSV1-UL30-5766 | + | UCCCGGGGGCGCUUGGCCGGG | 21 | 14706 |
| HSV1-UL30-5767 | + | CUCCCGGGGGCGCUUGGCCGGG | 22 | 14707 |
| HSV1-UL30-5768 | + | UCUCCCGGGGGCGCUUGGCCGGG | 23 | 14708 |
| HSV1-UL30-5769 | + | GUCUCCCGGGGGCGCUUGGCCGGG | 24 | 14709 |
| HSV1-UL30-5770 | + | GGAGGGCAGGGCCGCGGG | 18 | 14710 |
| HSV1-UL30-5771 | + | GGGAGGGCAGGGCCGCGGG | 19 | 14711 |
| HSV1-UL30-1128 | + | GGGGAGGGCAGGGCCGCGGG | 20 | 4066 |
| HSV1-UL30-5772 | + | CGGGGAGGGCAGGGCCGCGGG | 21 | 14712 |
| HSV1-UL30-5773 | + | CCGGGGAGGGCAGGGCCGCGGG | 22 | 14713 |
| HSV1-UL30-5774 | + | GCCGGGGAGGGCAGGGCCGCGGG | 23 | 14714 |
| HSV1-UL30-5775 | + | GGCCGGGGAGGGCAGGGCCGCGGG | 24 | 14715 |
| HSV1-UL30-5776 | + | CGCCUGCAGUCCCUCGGG | 18 | 14716 |
| HSV1-UL30-5777 | + | ACGCCUGCAGUCCCUCGGG | 19 | 14717 |
| HSV1-UL30-2405 | + | AACGCCUGCAGUCCCUCGGG | 20 | 5412 |
| HSV1-UL30-5778 | + | GAACGCCUGCAGUCCCUCGGG | 21 | 14718 |
| HSV1-UL30-5779 | + | CGAACGCCUGCAGUCCCUCGGG | 22 | 14719 |
| HSV1-UL30-5780 | + | CCGAACGCCUGCAGUCCCUCGGG | 23 | 14720 |
| HSV1-UL30-5781 | + | CCCGAACGCCUGCAGUCCCUCGGG | 24 | 14721 |
| HSV1-UL30-5782 | + | GGCAGGGCCGCGGGGGGG | 18 | 14722 |
| HSV1-UL30-5783 | + | GGGCAGGGCCGCGGGGGGG | 19 | 14723 |
| HSV1-UL30-2379 | + | AGGGCAGGGCCGCGGGGGGG | 20 | 5386 |
| HSV1-UL30-5784 | + | GAGGGCAGGGCCGCGGGGGGG | 21 | 14724 |
| HSV1-UL30-5785 | + | GGAGGGCAGGGCCGCGGGGGGG | 22 | 14725 |
| HSV1-UL30-5786 | + | GGGAGGGCAGGGCCGCGGGGGGG | 23 | 14726 |
| HSV1-UL30-5787 | + | GGGGAGGGCAGGGCCGCGGGGGGG | 24 | 14727 |
| HSV1-UL30-5788 | + | CUCGAGUUUGAUGGGGGG | 18 | 14728 |
| HSV1-UL30-5789 | + | ACUCGAGUUUGAUGGGGGG | 19 | 14729 |
| HSV1-UL30-2421 | + | CACUCGAGUUUGAUGGGGGG | 20 | 5428 |
| HSV1-UL30-5790 | + | GCACUCGAGUUUGAUGGGGGG | 21 | 14730 |
| HSV1-UL30-5791 | + | CGCACUCGAGUUUGAUGGGGGG | 22 | 14731 |
| HSV1-UL30-5792 | + | UCGCACUCGAGUUUGAUGGGGGG | 23 | 14732 |
| HSV1-UL30-5793 | + | UUCGCACUCGAGUUUGAUGGGGGG | 24 | 14733 |
| HSV1-UL30-5794 | + | GGAUCCGGUCCUUGAUGG | 18 | 14734 |
| HSV1-UL30-5795 | + | GGGAUCCGGUCCUUGAUGG | 19 | 14735 |
| HSV1-UL30-2390 | + | CGGGAUCCGGUCCUUGAUGG | 20 | 5397 |
| HSV1-UL30-5796 | + | ACGGGAUCCGGUCCUUGAUGG | 21 | 14736 |
| HSV1-UL30-5797 | + | UACGGGAUCCGGUCCUUGAUGG | 22 | 14737 |
| HSV1-UL30-5798 | + | GUACGGGAUCCGGUCCUUGAUGG | 23 | 14738 |
| HSV1-UL30-5799 | + | CGUACGGGAUCCGGUCCUUGAUGG | 24 | 14739 |
| HSV1-UL30-5800 | + | CCUCGUACUUCUUGAUGG | 18 | 14740 |
| HSV1-UL30-5801 | + | CCCUCGUACUUCUUGAUGG | 19 | 14741 |
| HSV1-UL30-2561 | + | ACCCUCGUACUUCUUGAUGG | 20 | 5566 |
| HSV1-UL30-5802 | + | CACCCUCGUACUUCUUGAUGG | 21 | 14742 |
| HSV1-UL30-5803 | + | CCACCCUCGUACUUCUUGAUGG | 22 | 14743 |
| HSV1-UL30-5804 | + | CCCACCCUCGUACUUCUUGAUGG | 23 | 14744 |
| HSV1-UL30-5805 | + | CCCCACCCUCGUACUUCUUGAUGG | 24 | 14745 |
| HSV1-UL30-5806 | + | GCCGCCCCCAACAGGUGG | 18 | 14746 |
| HSV1-UL30-5807 | + | CGCCGCCCCCAACAGGUGG | 19 | 14747 |
| HSV1-UL30-2351 | + | ACGCCGCCCCCAACAGGUGG | 20 | 5363 |
| HSV1-UL30-5808 | + | CACGCCGCCCCCAACAGGUGG | 21 | 14748 |
| HSV1-UL30-5809 | + | GCACGCCGCCCCCAACAGGUGG | 22 | 14749 |
| HSV1-UL30-5810 | + | CGCACGCCGCCCCCAACAGGUGG | 23 | 14750 |
| HSV1-UL30-5811 | + | ACGCACGCCGCCCCCAACAGGUGG | 24 | 14751 |
| HSV1-UL30-5812 | + | UCUCCCGGGGGCGCUUGG | 18 | 14752 |
| HSV1-UL30-5813 | + | GUCUCCCGGGGGCGCUUGG | 19 | 14753 |
| HSV1-UL30-2367 | + | CGUCUCCCGGGGGCGCUUGG | 20 | 5379 |
| HSV1-UL30-5814 | + | GCGUCUCCCGGGGGCGCUUGG | 21 | 14754 |
| HSV1-UL30-5815 | + | GGCGUCUCCCGGGGGCGCUUGG | 22 | 14755 |
| HSV1-UL30-5816 | + | CGGCGUCUCCCGGGGGCGCUUGG | 23 | 14756 |
| HSV1-UL30-5817 | + | ACGGCGUCUCCCGGGGGCGCUUGG | 24 | 14757 |
| HSV1-UL30-5818 | + | CGGAUCUGCUUUCGCAUG | 18 | 14758 |
| HSV1-UL30-5819 | + | GCGGAUCUGCUUUCGCAUG | 19 | 14759 |
| HSV1-UL30-2455 | + | AGCGGAUCUGCUUUCGCAUG | 20 | 5461 |
| HSV1-UL30-5820 | + | GAGCGGAUCUGCUUUCGCAUG | 21 | 14760 |
| HSV1-UL30-5821 | + | CGAGCGGAUCUGCUUUCGCAUG | 22 | 14761 |
| HSV1-UL30-5822 | + | GCGAGCGGAUCUGCUUUCGCAUG | 23 | 14762 |
| HSV1-UL30-5823 | + | CGCGAGCGGAUCUGCUUUCGCAUG | 24 | 14763 |
| HSV1-UL30-5824 | + | CAGUCCCGCAGGAGGAUG | 18 | 14764 |
| HSV1-UL30-5825 | + | CCAGUCCCGCAGGAGGAUG | 19 | 14765 |
| HSV1-UL30-2459 | + | GCCAGUCCCGCAGGAGGAUG | 20 | 5465 |
| HSV1-UL30-5826 | + | AGCCAGUCCCGCAGGAGGAUG | 21 | 14766 |
| HSV1-UL30-5827 | + | GAGCCAGUCCCGCAGGAGGAUG | 22 | 14767 |
| HSV1-UL30-5828 | + | CGAGCCAGUCCCGCAGGAGGAUG | 23 | 14768 |
| HSV1-UL30-5829 | + | GCGAGCCAGUCCCGCAGGAGGAUG | 24 | 14769 |
| HSV1-UL30-5830 | + | UUGUGGGCCUGGAUGAUG | 18 | 14770 |
| HSV1-UL30-5831 | + | GUUGUGGGCCUGGAUGAUG | 19 | 14771 |
| HSV1-UL30-2472 | + | GGUUGUGGGCCUGGAUGAUG | 20 | 5478 |
| HSV1-UL30-5832 | + | AGGUUGUGGGCCUGGAUGAUG | 21 | 14772 |
| HSV1-UL30-5833 | + | CAGGUUGUGGGCCUGGAUGAUG | 22 | 14773 |
| HSV1-UL30-5834 | + | ACAGGUUGUGGGCCUGGAUGAUG | 23 | 14774 |
| HSV1-UL30-5835 | + | CACAGGUUGUGGGCCUGGAUGAUG | 24 | 14775 |
| HSV1-UL30-5836 | + | UCGCACUCGAGUUUGAUG | 18 | 14776 |
| HSV1-UL30-5837 | + | UUCGCACUCGAGUUUGAUG | 19 | 14777 |
| HSV1-UL30-2420 | + | UUUCGCACUCGAGUUUGAUG | 20 | 5427 |
| HSV1-UL30-5838 | + | UUUUCGCACUCGAGUUUGAUG | 21 | 14778 |
| HSV1-UL30-5839 | + | CUUUUCGCACUCGAGUUUGAUG | 22 | 14779 |
| HSV1-UL30-5840 | + | UCUUUUCGCACUCGAGUUUGAUG | 23 | 14780 |
| HSV1-UL30-5841 | + | GUCUUUUCGCACUCGAGUUUGAUG | 24 | 14781 |
| HSV1-UL30-5842 | + | UCCCGCAGGAGGAUGCUG | 18 | 14782 |
| HSV1-UL30-5843 | + | GUCCCGCAGGAGGAUGCUG | 19 | 14783 |
| HSV1-UL30-2461 | + | AGUCCCGCAGGAGGAUGCUG | 20 | 5467 |
| HSV1-UL30-5844 | + | CAGUCCCGCAGGAGGAUGCUG | 21 | 14784 |
| HSV1-UL30-5845 | + | CCAGUCCCGCAGGAGGAUGCUG | 22 | 14785 |
| HSV1-UL30-5846 | + | GCCAGUCCCGCAGGAGGAUGCUG | 23 | 14786 |
| HSV1-UL30-5847 | + | AGCCAGUCCCGCAGGAGGAUGCUG | 24 | 14787 |
| HSV1-UL30-5848 | + | GCCCUCAGGGAGAGCGUG | 18 | 14788 |
| HSV1-UL30-5849 | + | GGCCCUCAGGGAGAGCGUG | 19 | 14789 |
| HSV1-UL30-2469 | + | CGGCCCUCAGGGAGAGCGUG | 20 | 5475 |
| HSV1-UL30-5850 | + | UCGGCCCUCAGGGAGAGCGUG | 21 | 14790 |
| HSV1-UL30-5851 | + | GUCGGCCCUCAGGGAGAGCGUG | 22 | 14791 |
| HSV1-UL30-5852 | + | CGUCGGCCCUCAGGGAGAGCGUG | 23 | 14792 |
| HSV1-UL30-5853 | + | GCGUCGGCCCUCAGGGAGAGCGUG | 24 | 14793 |
| HSV1-UL30-5854 | + | CGGUACCAGCCGAAGGUG | 18 | 14794 |
| HSV1-UL30-5855 | + | ACGGUACCAGCCGAAGGUG | 19 | 14795 |
| HSV1-UL30-2555 | + | GACGGUACCAGCCGAAGGUG | 20 | 5560 |
| HSV1-UL30-5856 | + | AGACGGUACCAGCCGAAGGUG | 21 | 14796 |
| HSV1-UL30-5857 | + | GAGACGGUACCAGCCGAAGGUG | 22 | 14797 |
| HSV1-UL30-5858 | + | UGAGACGGUACCAGCCGAAGGUG | 23 | 14798 |
| HSV1-UL30-5859 | + | UUGAGACGGUACCAGCCGAAGGUG | 24 | 14799 |
| HSV1-UL30-5860 | + | ACGUGCUCCAGGGCGGUG | 18 | 14800 |
| HSV1-UL30-5861 | + | GACGUGCUCCAGGGCGGUG | 19 | 14801 |
| HSV1-UL30-2539 | + | GGACGUGCUCCAGGGCGGUG | 20 | 5544 |
| HSV1-UL30-5862 | + | AGGACGUGCUCCAGGGCGGUG | 21 | 14802 |
| HSV1-UL30-5863 | + | GAGGACGUGCUCCAGGGCGGUG | 22 | 14803 |
| HSV1-UL30-5864 | + | GGAGGACGUGCUCCAGGGCGGUG | 23 | 14804 |
| HSV1-UL30-5865 | + | AGGAGGACGUGCUCCAGGGCGGUG | 24 | 14805 |
| HSV1-UL30-5866 | + | ACCAGAUCCACGCCCUUG | 18 | 14806 |
| HSV1-UL30-5867 | + | CACCAGAUCCACGCCCUUG | 19 | 14807 |
| HSV1-UL30-2414 | + | GCACCAGAUCCACGCCCUUG | 20 | 5421 |
| HSV1-UL30-5868 | + | CGCACCAGAUCCACGCCCUUG | 21 | 14808 |
| HSV1-UL30-5869 | + | GCGCACCAGAUCCACGCCCUUG | 22 | 14809 |
| HSV1-UL30-5870 | + | UGCGCACCAGAUCCACGCCCUUG | 23 | 14810 |
| HSV1-UL30-5871 | + | UUGCGCACCAGAUCCACGCCCUUG | 24 | 14811 |
| HSV1-UL30-5872 | + | UCUCGCACGUGAGCCUUG | 18 | 14812 |
| HSV1-UL30-5873 | + | CUCUCGCACGUGAGCCUUG | 19 | 14813 |
| HSV1-UL30-2463 | + | UCUCUCGCACGUGAGCCUUG | 20 | 5469 |
| HSV1-UL30-5874 | + | CUCUCUCGCACGUGAGCCUUG | 21 | 14814 |
| HSV1-UL30-5875 | + | GCUCUCUCGCACGUGAGCCUUG | 22 | 14815 |
| HSV1-UL30-5876 | + | GGCUCUCUCGCACGUGAGCCUUG | 23 | 14816 |
| HSV1-UL30-5877 | + | AGGCUCUCUCGCACGUGAGCCUUG | 24 | 14817 |
| HSV1-UL30-5878 | + | UACGGGAUCCGGUCCUUG | 18 | 14818 |
| HSV1-UL30-5879 | + | GUACGGGAUCCGGUCCUUG | 19 | 14819 |
| HSV1-UL30-2389 | + | CGUACGGGAUCCGGUCCUUG | 20 | 5396 |
| HSV1-UL30-5880 | + | ACGUACGGGAUCCGGUCCUUG | 21 | 14820 |
| HSV1-UL30-5881 | + | CACGUACGGGAUCCGGUCCUUG | 22 | 14821 |
| HSV1-UL30-5882 | + | UCACGUACGGGAUCCGGUCCUUG | 23 | 14822 |
| HSV1-UL30-5883 | + | AUCACGUACGGGAUCCGGUCCUUG | 24 | 14823 |
| HSV1-UL30-5884 | + | UCGGACACCAGCAGCUUG | 18 | 14824 |
| HSV1-UL30-5885 | + | CUCGGACACCAGCAGCUUG | 19 | 14825 |
| HSV1-UL30-2358 | + | GCUCGGACACCAGCAGCUUG | 20 | 5370 |
| HSV1-UL30-5886 | + | AGCUCGGACACCAGCAGCUUG | 21 | 14826 |
| HSV1-UL30-5887 | + | CAGCUCGGACACCAGCAGCUUG | 22 | 14827 |
| HSV1-UL30-5888 | + | CCAGCUCGGACACCAGCAGCUUG | 23 | 14828 |
| HSV1-UL30-5889 | + | GCCAGCUCGGACACCAGCAGCUUG | 24 | 14829 |
| HSV1-UL30-5890 | + | GCGAUCAGCAGCAGCUUG | 18 | 14830 |
| HSV1-UL30-5891 | + | GGCGAUCAGCAGCAGCUUG | 19 | 14831 |
| HSV1-UL30-2415 | + | UGGCGAUCAGCAGCAGCUUG | 20 | 5422 |
| HSV1-UL30-5892 | + | UUGGCGAUCAGCAGCAGCUUG | 21 | 14832 |
| HSV1-UL30-5893 | + | CUUGGCGAUCAGCAGCAGCUUG | 22 | 14833 |
| HSV1-UL30-5894 | + | UCUUGGCGAUCAGCAGCAGCUUG | 23 | 14834 |
| HSV1-UL30-5895 | + | UUCUUGGCGAUCAGCAGCAGCUUG | 24 | 14835 |
| HSV1-UL30-5896 | + | UUUUCGCACUCGAGUUUG | 18 | 14836 |
| HSV1-UL30-5897 | + | CUUUUCGCACUCGAGUUUG | 19 | 14837 |
| HSV1-UL30-2417 | + | UCUUUUCGCACUCGAGUUUG | 20 | 5424 |
| HSV1-UL30-5898 | + | GUCUUUUCGCACUCGAGUUUG | 21 | 14838 |
| HSV1-UL30-5899 | + | CGUCUUUUCGCACUCGAGUUUG | 22 | 14839 |
| HSV1-UL30-5900 | + | ACGUCUUUUCGCACUCGAGUUUG | 23 | 14840 |
| HSV1-UL30-5901 | + | AACGUCUUUUCGCACUCGAGUUUG | 24 | 14841 |
| HSV1-UL30-5902 | + | GGAUGUCCCGAAGGCCAU | 18 | 14842 |
| HSV1-UL30-5903 | + | UGGAUGUCCCGAAGGCCAU | 19 | 14843 |
| HSV1-UL30-2551 | + | CUGGAUGUCCCGAAGGCCAU | 20 | 5556 |
| HSV1-UL30-5904 | + | GCUGGAUGUCCCGAAGGCCAU | 21 | 14844 |
| HSV1-UL30-5905 | + | CGCUGGAUGUCCCGAAGGCCAU | 22 | 14845 |
| HSV1-UL30-5906 | + | UCGCUGGAUGUCCCGAAGGCCAU | 23 | 14846 |
| HSV1-UL30-5907 | + | GUCGCUGGAUGUCCCGAAGGCCAU | 24 | 14847 |
| HSV1-UL30-5908 | + | AGCUCGUUCAGGUGGGAU | 18 | 14848 |
| HSV1-UL30-5909 | + | CAGCUCGUUCAGGUGGGAU | 19 | 14849 |
| HSV1-UL30-2527 | + | CCAGCUCGUUCAGGUGGGAU | 20 | 5533 |
| HSV1-UL30-5910 | + | GCCAGCUCGUUCAGGUGGGAU | 21 | 14850 |
| HSV1-UL30-5911 | + | CGCCAGCUCGUUCAGGUGGGAU | 22 | 14851 |
| HSV1-UL30-5912 | + | CCGCCAGCUCGUUCAGGUGGGAU | 23 | 14852 |
| HSV1-UL30-5913 | + | GCCGCCAGCUCGUUCAGGUGGGAU | 24 | 14853 |
| HSV1-UL30-5914 | + | UUCGCACUCGAGUUUGAU | 18 | 14854 |
| HSV1-UL30-5915 | + | UUUCGCACUCGAGUUUGAU | 19 | 14855 |
| HSV1-UL30-2419 | + | UUUUCGCACUCGAGUUUGAU | 20 | 5426 |
| HSV1-UL30-5916 | + | CUUUUCGCACUCGAGUUUGAU | 21 | 14856 |
| HSV1-UL30-5917 | + | UCUUUUCGCACUCGAGUUUGAU | 22 | 14857 |
| HSV1-UL30-5918 | + | GUCUUUUCGCACUCGAGUUUGAU | 23 | 14858 |
| HSV1-UL30-5919 | + | CGUCUUUUCGCACUCGAGUUUGAU | 24 | 14859 |
| HSV1-UL30-5920 | + | CCGUGGGCAAUGGCGUAU | 18 | 14860 |
| HSV1-UL30-5921 | + | GCCGUGGGCAAUGGCGUAU | 19 | 14861 |
| HSV1-UL30-2354 | + | CGCCGUGGGCAAUGGCGUAU | 20 | 5366 |
| HSV1-UL30-5922 | + | ACGCCGUGGGCAAUGGCGUAU | 21 | 14862 |
| HSV1-UL30-5923 | + | GACGCCGUGGGCAAUGGCGUAU | 22 | 14863 |
| HSV1-UL30-5924 | + | CGACGCCGUGGGCAAUGGCGUAU | 23 | 14864 |
| HSV1-UL30-5925 | + | GCGACGCCGUGGGCAAUGGCGUAU | 24 | 14865 |
| HSV1-UL30-5926 | + | UGUACCCGGUCACGAACU | 18 | 14866 |
| HSV1-UL30-5927 | + | UUGUACCCGGUCACGAACU | 19 | 14867 |
| HSV1-UL30-2517 | + | GUUGUACCCGGUCACGAACU | 20 | 5523 |
| HSV1-UL30-5928 | + | UGUUGUACCCGGUCACGAACU | 21 | 14868 |
| HSV1-UL30-5929 | + | AUGUUGUACCCGGUCACGAACU | 22 | 14869 |
| HSV1-UL30-5930 | + | GAUGUUGUACCCGGUCACGAACU | 23 | 14870 |
| HSV1-UL30-5931 | + | UGAUGUUGUACCCGGUCACGAACU | 24 | 14871 |
| HSV1-UL30-5932 | + | UCCGGGGGGUGCCACACU | 18 | 14872 |
| HSV1-UL30-5933 | + | GUCCGGGGGGUGCCACACU | 19 | 14873 |
| HSV1-UL30-2343 | + | CGUCCGGGGGGUGCCACACU | 20 | 5356 |
| HSV1-UL30-5934 | + | UCGUCCGGGGGGUGCCACACU | 21 | 14874 |
| HSV1-UL30-5935 | + | GUCGUCCGGGGGGUGCCACACU | 22 | 14875 |
| HSV1-UL30-5936 | + | CGUCGUCCGGGGGGUGCCACACU | 23 | 14876 |
| HSV1-UL30-5937 | + | ACGUCGUCCGGGGGGUGCCACACU | 24 | 14877 |
| HSV1-UL30-5938 | + | CGCCACUGCGUCGGCCCU | 18 | 14878 |
| HSV1-UL30-5939 | + | GCGCCACUGCGUCGGCCCU | 19 | 14879 |
| HSV1-UL30-2465 | + | UGCGCCACUGCGUCGGCCCU | 20 | 5471 |
| HSV1-UL30-5940 | + | GUGCGCCACUGCGUCGGCCCU | 21 | 14880 |
| HSV1-UL30-5941 | + | GGUGCGCCACUGCGUCGGCCCU | 22 | 14881 |
| HSV1-UL30-5942 | + | AGGUGCGCCACUGCGUCGGCCCU | 23 | 14882 |
| HSV1-UL30-5943 | + | CAGGUGCGCCACUGCGUCGGCCCU | 24 | 14883 |
| HSV1-UL30-5944 | + | CGCGCAUGUCGGCCGCCU | 18 | 14884 |
| HSV1-UL30-5945 | + | GCGCGCAUGUCGGCCGCCU | 19 | 14885 |
| HSV1-UL30-2432 | + | GGCGCGCAUGUCGGCCGCCU | 20 | 5438 |
| HSV1-UL30-5946 | + | GGGCGCGCAUGUCGGCCGCCU | 21 | 14886 |
| HSV1-UL30-5947 | + | GGGGCGCGCAUGUCGGCCGCCU | 22 | 14887 |
| HSV1-UL30-5948 | + | GGGGGCGCGCAUGUCGGCCGCCU | 23 | 14888 |
| HSV1-UL30-5949 | + | CGGGGGCGCGCAUGUCGGCCGCCU | 24 | 14889 |
| HSV1-UL30-5950 | + | CCAGGAGCACGGCCUCCU | 18 | 14890 |
| HSV1-UL30-5951 | + | UCCAGGAGCACGGCCUCCU | 19 | 14891 |
| HSV1-UL30-2448 | + | GUCCAGGAGCACGGCCUCCU | 20 | 5454 |
| HSV1-UL30-5952 | + | UGUCCAGGAGCACGGCCUCCU | 21 | 14892 |
| HSV1-UL30-5953 | + | UUGUCCAGGAGCACGGCCUCCU | 22 | 14893 |
| HSV1-UL30-5954 | + | CUUGUCCAGGAGCACGGCCUCCU | 23 | 14894 |
| HSV1-UL30-5955 | + | GCUUGUCCAGGAGCACGGCCUCCU | 24 | 14895 |
| HSV1-UL30-5956 | + | CGACAGCACACGCCCGCU | 18 | 14896 |
| HSV1-UL30-5957 | + | ACGACAGCACACGCCCGCU | 19 | 14897 |
| HSV1-UL30-2563 | + | UACGACAGCACACGCCCGCU | 20 | 5568 |
| HSV1-UL30-5958 | + | GUACGACAGCACACGCCCGCU | 21 | 14898 |
| HSV1-UL30-5959 | + | GGUACGACAGCACACGCCCGCU | 22 | 14899 |
| HSV1-UL30-5960 | + | AGGUACGACAGCACACGCCCGCU | 23 | 14900 |
| HSV1-UL30-5961 | + | CAGGUACGACAGCACACGCCCGCU | 24 | 14901 |
| HSV1-UL30-5962 | + | GCUAACGCGGCGGCCGCU | 18 | 14902 |
| HSV1-UL30-5963 | + | GGCUAACGCGGCGGCCGCU | 19 | 14903 |
| HSV1-UL30-2409 | + | CGGCUAACGCGGCGGCCGCU | 20 | 5416 |
| HSV1-UL30-5964 | + | UCGGCUAACGCGGCGGCCGCU | 21 | 14904 |
| HSV1-UL30-5965 | + | CUCGGCUAACGCGGCGGCCGCU | 22 | 14905 |
| HSV1-UL30-5966 | + | GCUCGGCUAACGCGGCGGCCGCU | 23 | 14906 |
| HSV1-UL30-5967 | + | CGCUCGGCUAACGCGGCGGCCGCU | 24 | 14907 |
| HSV1-UL30-5968 | + | GUCCCGCAGGAGGAUGCU | 18 | 14908 |
| HSV1-UL30-5969 | + | AGUCCCGCAGGAGGAUGCU | 19 | 14909 |
| HSV1-UL30-2460 | + | CAGUCCCGCAGGAGGAUGCU | 20 | 5466 |
| HSV1-UL30-5970 | + | CCAGUCCCGCAGGAGGAUGCU | 21 | 14910 |
| HSV1-UL30-5971 | + | GCCAGUCCCGCAGGAGGAUGCU | 22 | 14911 |
| HSV1-UL30-5972 | + | AGCCAGUCCCGCAGGAGGAUGCU | 23 | 14912 |
| HSV1-UL30-5973 | + | GAGCCAGUCCCGCAGGAGGAUGCU | 24 | 14913 |
| HSV1-UL30-5974 | + | GGCCUCCUCGGGGCUGCU | 18 | 14914 |
| HSV1-UL30-5975 | + | CGGCCUCCUCGGGGCUGCU | 19 | 14915 |
| HSV1-UL30-2449 | + | ACGGCCUCCUCGGGGCUGCU | 20 | 5455 |
| HSV1-UL30-5976 | + | CACGGCCUCCUCGGGGCUGCU | 21 | 14916 |
| HSV1-UL30-5977 | + | GCACGGCCUCCUCGGGGCUGCU | 22 | 14917 |
| HSV1-UL30-5978 | + | AGCACGGCCUCCUCGGGGCUGCU | 23 | 14918 |
| HSV1-UL30-5979 | + | GAGCACGGCCUCCUCGGGGCUGCU | 24 | 14919 |
| HSV1-UL30-5980 | + | CCUCCUCGGGGCUGCUCU | 18 | 14920 |
| HSV1-UL30-5981 | + | GCCUCCUCGGGGCUGCUCU | 19 | 14921 |
| HSV1-UL30-2451 | + | GGCCUCCUCGGGGCUGCUCU | 20 | 5457 |
| HSV1-UL30-5982 | + | CGGCCUCCUCGGGGCUGCUCU | 21 | 14922 |
| HSV1-UL30-5983 | + | ACGGCCUCCUCGGGGCUGCUCU | 22 | 14923 |
| HSV1-UL30-5984 | + | CACGGCCUCCUCGGGGCUGCUCU | 23 | 14924 |
| HSV1-UL30-5985 | + | GCACGGCCUCCUCGGGGCUGCUCU | 24 | 14925 |
| HSV1-UL30-5986 | + | AUGCGCCGAUGGGCGUCU | 18 | 14926 |
| HSV1-UL30-5987 | + | GAUGCGCCGAUGGGCGUCU | 19 | 14927 |
| HSV1-UL30-2401 | + | UGAUGCGCCGAUGGGCGUCU | 20 | 5408 |
| HSV1-UL30-5988 | + | GUGAUGCGCCGAUGGGCGUCU | 21 | 14928 |
| HSV1-UL30-5989 | + | GGUGAUGCGCCGAUGGGCGUCU | 22 | 14929 |
| HSV1-UL30-5990 | + | CGGUGAUGCGCCGAUGGGCGUCU | 23 | 14930 |
| HSV1-UL30-5991 | + | UCGGUGAUGCGCCGAUGGGCGUCU | 24 | 14931 |
| HSV1-UL30-5992 | + | UCUGGGCCACGAUCACGU | 18 | 14932 |
| HSV1-UL30-5993 | + | GUCUGGGCCACGAUCACGU | 19 | 14933 |
| HSV1-UL30-2387 | + | GGUCUGGGCCACGAUCACGU | 20 | 5394 |
| HSV1-UL30-5994 | + | GGGUCUGGGCCACGAUCACGU | 21 | 14934 |
| HSV1-UL30-5995 | + | CGGGUCUGGGCCACGAUCACGU | 22 | 14935 |
| HSV1-UL30-5996 | + | GCGGGUCUGGGCCACGAUCACGU | 23 | 14936 |
| HSV1-UL30-5997 | + | CGCGGGUCUGGGCCACGAUCACGU | 24 | 14937 |
| HSV1-UL30-5998 | + | GCCGCGCGGCCACGUCGU | 18 | 14938 |
| HSV1-UL30-5999 | + | AGCCGCGCGGCCACGUCGU | 19 | 14939 |
| HSV1-UL30-2339 | + | GAGCCGCGCGGCCACGUCGU | 20 | 5352 |
| HSV1-UL30-6000 | + | GGAGCCGCGCGGCCACGUCGU | 21 | 14940 |
| HSV1-UL30-6001 | + | CGGAGCCGCGCGGCCACGUCGU | 22 | 14941 |
| HSV1-UL30-6002 | + | CCGGAGCCGCGCGGCCACGUCGU | 23 | 14942 |
| HSV1-UL30-6003 | + | UCCGGAGCCGCGCGGCCACGUCGU | 24 | 14943 |
| HSV1-UL30-6004 | + | ACGCCGCCCCCAACAGGU | 18 | 14944 |
| HSV1-UL30-6005 | + | CACGCCGCCCCCAACAGGU | 19 | 14945 |
| HSV1-UL30-2350 | + | GCACGCCGCCCCCAACAGGU | 20 | 5362 |
| HSV1-UL30-6006 | + | CGCACGCCGCCCCCAACAGGU | 21 | 14946 |
| HSV1-UL30-6007 | + | ACGCACGCCGCCCCCAACAGGU | 22 | 14947 |
| HSV1-UL30-6008 | + | CACGCACGCCGCCCCCAACAGGU | 23 | 14948 |
| HSV1-UL30-6009 | + | UCACGCACGCCGCCCCCAACAGGU | 24 | 14949 |
| HSV1-UL30-6010 | + | GUGUUGUUCCGGCCCGGU | 18 | 14950 |
| HSV1-UL30-6011 | + | CGUGUUGUUCCGGCCCGGU | 19 | 14951 |
| HSV1-UL30-2553 | + | GCGUGUUGUUCCGGCCCGGU | 20 | 5558 |
| HSV1-UL30-6012 | + | AGCGUGUUGUUCCGGCCCGGU | 21 | 14952 |
| HSV1-UL30-6013 | + | UAGCGUGUUGUUCCGGCCCGGU | 22 | 14953 |
| HSV1-UL30-6014 | + | CUAGCGUGUUGUUCCGGCCCGGU | 23 | 14954 |
| HSV1-UL30-6015 | + | GCUAGCGUGUUGUUCCGGCCCGGU | 24 | 14955 |
| HSV1-UL30-6016 | + | UCUGCUCAGUUCGGCGGU | 18 | 14956 |
| HSV1-UL30-6017 | + | GUCUGCUCAGUUCGGCGGU | 19 | 14957 |
| HSV1-UL30-2397 | + | UGUCUGCUCAGUUCGGCGGU | 20 | 5404 |
| HSV1-UL30-6018 | + | GUGUCUGCUCAGUUCGGCGGU | 21 | 14958 |
| HSV1-UL30-6019 | + | GGUGUCUGCUCAGUUCGGCGGU | 22 | 14959 |
| HSV1-UL30-6020 | + | GGGUGUCUGCUCAGUUCGGCGGU | 23 | 14960 |
| HSV1-UL30-6021 | + | CGGGUGUCUGCUCAGUUCGGCGGU | 24 | 14961 |
| HSV1-UL30-6022 | + | CGCCCCGAACCCUGCGGU | 18 | 14962 |
| HSV1-UL30-6023 | + | CCGCCCCGAACCCUGCGGU | 19 | 14963 |
| HSV1-UL30-2337 | + | ACCGCCCCGAACCCUGCGGU | 20 | 5350 |
| HSV1-UL30-6024 | + | CACCGCCCCGAACCCUGCGGU | 21 | 14964 |
| HSV1-UL30-6025 | + | CCACCGCCCCGAACCCUGCGGU | 22 | 14965 |
| HSV1-UL30-6026 | + | CCCACCGCCCCGAACCCUGCGGU | 23 | 14966 |
| HSV1-UL30-6027 | + | ACCCACCGCCCCGAACCCUGCGGU | 24 | 14967 |
| HSV1-UL30-6028 | + | CUCCUCUACCUCGCGGGU | 18 | 14968 |
| HSV1-UL30-6029 | + | UCUCCUCUACCUCGCGGGU | 19 | 14969 |
| HSV1-UL30-2386 | + | GUCUCCUCUACCUCGCGGGU | 20 | 5393 |
| HSV1-UL30-6030 | + | CGUCUCCUCUACCUCGCGGGU | 21 | 14970 |
| HSV1-UL30-6031 | + | CCGUCUCCUCUACCUCGCGGGU | 22 | 14971 |
| HSV1-UL30-6032 | + | ACCGUCUCCUCUACCUCGCGGGU | 23 | 14972 |
| HSV1-UL30-6033 | + | GACCGUCUCCUCUACCUCGCGGGU | 24 | 14973 |
| HSV1-UL30-6034 | + | AAAUCGGCCAGGAGCUGU | 18 | 14974 |
| HSV1-UL30-6035 | + | GAAAUCGGCCAGGAGCUGU | 19 | 14975 |
| HSV1-UL30-2437 | + | GGAAAUCGGCCAGGAGCUGU | 20 | 5443 |
| HSV1-UL30-6036 | + | GGGAAAUCGGCCAGGAGCUGU | 21 | 14976 |
| HSV1-UL30-6037 | + | CGGGAAAUCGGCCAGGAGCUGU | 22 | 14977 |
| HSV1-UL30-6038 | + | CCGGGAAAUCGGCCAGGAGCUGU | 23 | 14978 |
| HSV1-UL30-6039 | + | UCCGGGAAAUCGGCCAGGAGCUGU | 24 | 14979 |
| HSV1-UL30-6040 | + | GCUCGUUCAGGUGGGAUU | 18 | 14980 |
| HSV1-UL30-6041 | + | AGCUCGUUCAGGUGGGAUU | 19 | 14981 |
| HSV1-UL30-2528 | + | CAGCUCGUUCAGGUGGGAUU | 20 | 5534 |
| HSV1-UL30-6042 | + | CCAGCUCGUUCAGGUGGGAUU | 21 | 14982 |
| HSV1-UL30-6043 | + | GCCAGCUCGUUCAGGUGGGAUU | 22 | 14983 |
| HSV1-UL30-6044 | + | CGCCAGCUCGUUCAGGUGGGAUU | 23 | 14984 |
| HSV1-UL30-6045 | + | CCGCCAGCUCGUUCAGGUGGGAUU | 24 | 14985 |
| HSV1-UL30-6046 | + | CCGGGGGGUGCCACACUU | 18 | 14986 |
| HSV1-UL30-6047 | + | UCCGGGGGGUGCCACACUU | 19 | 14987 |
| HSV1-UL30-2344 | + | GUCCGGGGGGUGCCACACUU | 20 | 5357 |
| HSV1-UL30-6048 | + | CGUCCGGGGGGUGCCACACUU | 21 | 14988 |
| HSV1-UL30-6049 | + | UCGUCCGGGGGGUGCCACACUU | 22 | 14989 |
| HSV1-UL30-6050 | + | GUCGUCCGGGGGGUGCCACACUU | 23 | 14990 |
| HSV1-UL30-6051 | + | CGUCGUCCGGGGGGUGCCACACUU | 24 | 14991 |
| HSV1-UL30-6052 | + | CGGCCACCCGGUGGCCUU | 18 | 14992 |
| HSV1-UL30-6053 | + | ACGGCCACCCGGUGGCCUU | 19 | 14993 |
| HSV1-UL30-2580 | + | AACGGCCACCCGGUGGCCUU | 20 | 5585 |
| HSV1-UL30-6054 | + | GAACGGCCACCCGGUGGCCUU | 21 | 14994 |
| HSV1-UL30-6055 | + | UGAACGGCCACCCGGUGGCCUU | 22 | 14995 |
| HSV1-UL30-6056 | + | GUGAACGGCCACCCGGUGGCCUU | 23 | 14996 |
| HSV1-UL30-6057 | + | CGUGAACGGCCACCCGGUGGCCUU | 24 | 14997 |
| HSV1-UL30-6058 | + | GUCCUUCUUCUUGUCCUU | 18 | 14998 |
| HSV1-UL30-6059 | + | GGUCCUUCUUCUUGUCCUU | 19 | 14999 |
| HSV1-UL30-2501 | + | AGGUCCUUCUUCUUGUCCUU | 20 | 5507 |
| HSV1-UL30-6060 | + | CAGGUCCUUCUUCUUGUCCUU | 21 | 15000 |
| HSV1-UL30-6061 | + | UCAGGUCCUUCUUCUUGUCCUU | 22 | 15001 |
| HSV1-UL30-6062 | + | CUCAGGUCCUUCUUCUUGUCCUU | 23 | 15002 |
| HSV1-UL30-6063 | + | GCUCAGGUCCUUCUUCUUGUCCUU | 24 | 15003 |
| HSV1-UL30-6064 | + | CUCGGACACCAGCAGCUU | 18 | 15004 |
| HSV1-UL30-6065 | + | GCUCGGACACCAGCAGCUU | 19 | 15005 |
| HSV1-UL30-2357 | + | AGCUCGGACACCAGCAGCUU | 20 | 5369 |
| HSV1-UL30-6066 | + | CAGCUCGGACACCAGCAGCUU | 21 | 15006 |
| HSV1-UL30-6067 | + | CCAGCUCGGACACCAGCAGCUU | 22 | 15007 |
| HSV1-UL30-6068 | + | GCCAGCUCGGACACCAGCAGCUU | 23 | 15008 |
| HSV1-UL30-6069 | + | GGCCAGCUCGGACACCAGCAGCUU | 24 | 15009 |
| HSV1-UL30-6070 | + | CUUUAUCUUGCUGCGCUU | 18 | 15010 |
| HSV1-UL30-6071 | + | CCUUUAUCUUGCUGCGCUU | 19 | 15011 |
| HSV1-UL30-2505 | + | ACCUUUAUCUUGCUGCGCUU | 20 | 5511 |
| HSV1-UL30-6072 | + | CACCUUUAUCUUGCUGCGCUU | 21 | 15012 |
| HSV1-UL30-6073 | + | UCACCUUUAUCUUGCUGCGCUU | 22 | 15013 |
| HSV1-UL30-6074 | + | UUCACCUUUAUCUUGCUGCGCUU | 23 | 15014 |
| HSV1-UL30-6075 | + | GUUCACCUUUAUCUUGCUGCGCUU | 24 | 15015 |
| HSV1-UL30-6076 | + | CGUGCUGAAGCACAGGUU | 18 | 15016 |
| HSV1-UL30-6077 | + | GCGUGCUGAAGCACAGGUU | 19 | 15017 |
| HSV1-UL30-2470 | + | AGCGUGCUGAAGCACAGGUU | 20 | 5476 |
| HSV1-UL30-6078 | + | GAGCGUGCUGAAGCACAGGUU | 21 | 15018 |
| HSV1-UL30-6079 | + | AGAGCGUGCUGAAGCACAGGUU | 22 | 15019 |
| HSV1-UL30-6080 | + | GAGAGCGUGCUGAAGCACAGGUU | 23 | 15020 |
| HSV1-UL30-6081 | + | GGAGAGCGUGCUGAAGCACAGGUU | 24 | 15021 |
| HSV1-UL30-6082 | + | GAAGUAAUAGUCCGUGUU | 18 | 15022 |
| HSV1-UL30-6083 | + | AGAAGUAAUAGUCCGUGUU | 19 | 15023 |
| HSV1-UL30-2352 | + | GAGAAGUAAUAGUCCGUGUU | 20 | 5364 |
| HSV1-UL30-6084 | + | GGAGAAGUAAUAGUCCGUGUU | 21 | 15024 |
| HSV1-UL30-6085 | + | GGGAGAAGUAAUAGUCCGUGUU | 22 | 15025 |
| HSV1-UL30-6086 | + | UGGGAGAAGUAAUAGUCCGUGUU | 23 | 15026 |
| HSV1-UL30-6087 | + | GUGGGAGAAGUAAUAGUCCGUGUU | 24 | 15027 |
| HSV1-UL30-6088 | − | GGCUGGUACCGUCUCAAA | 18 | 15028 |
| HSV1-UL30-6089 | − | CGGCUGGUACCGUCUCAAA | 19 | 15029 |
| HSV1-UL30-1803 | − | UCGGCUGGUACCGUCUCAAA | 20 | 4853 |
| HSV1-UL30-6090 | − | UUCGGCUGGUACCGUCUCAAA | 21 | 15030 |
| HSV1-UL30-6091 | − | CUUCGGCUGGUACCGUCUCAAA | 22 | 15031 |
| HSV1-UL30-6092 | − | CCUUCGGCUGGUACCGUCUCAAA | 23 | 15032 |
| HSV1-UL30-6093 | − | ACCUUCGGCUGGUACCGUCUCAAA | 24 | 15033 |
| HSV1-UL30-6094 | − | UUUGUCCUCACCGCCGAA | 18 | 15034 |
| HSV1-UL30-6095 | − | CUUUGUCCUCACCGCCGAA | 19 | 15035 |
| HSV1-UL30-2009 | − | ACUUUGUCCUCACCGCCGAA | 20 | 5042 |
| HSV1-UL30-6096 | − | GACUUUGUCCUCACCGCCGAA | 21 | 15036 |
| HSV1-UL30-6097 | − | GGACUUUGUCCUCACCGCCGAA | 22 | 15037 |
| HSV1-UL30-6098 | − | AGGACUUUGUCCUCACCGCCGAA | 23 | 15038 |
| HSV1-UL30-6099 | − | CAGGACUUUGUCCUCACCGCCGAA | 24 | 15039 |
| HSV1-UL30-6100 | − | ACCGCGUCUACGUCCGAA | 18 | 15040 |
| HSV1-UL30-6101 | − | UACCGCGUCUACGUCCGAA | 19 | 15041 |
| HSV1-UL30-1795 | − | UUACCGCGUCUACGUCCGAA | 20 | 4845 |
| HSV1-UL30-6102 | − | UUUACCGCGUCUACGUCCGAA | 21 | 15042 |
| HSV1-UL30-6103 | − | UUUUACCGCGUCUACGUCCGAA | 22 | 15043 |
| HSV1-UL30-6104 | − | GUUUUACCGCGUCUACGUCCGAA | 23 | 15044 |
| HSV1-UL30-6105 | − | UGUUUUACCGCGUCUACGUCCGAA | 24 | 15045 |
| HSV1-UL30-6106 | − | AGUACUUUUACAUGAACA | 18 | 15046 |
| HSV1-UL30-6107 | − | CAGUACUUUUACAUGAACA | 19 | 15047 |
| HSV1-UL30-1780 | − | GCAGUACUUUUACAUGAACA | 20 | 4830 |
| HSV1-UL30-6108 | − | GGCAGUACUUUUACAUGAACA | 21 | 15048 |
| HSV1-UL30-6109 | − | CGGCAGUACUUUUACAUGAACA | 22 | 15049 |
| HSV1-UL30-6110 | − | GCGGCAGUACUUUUACAUGAACA | 23 | 15050 |
| HSV1-UL30-6111 | − | CGCGGCAGUACUUUUACAUGAACA | 24 | 15051 |
| HSV1-UL30-6112 | − | CAGGCACGUGGGGUACCA | 18 | 15052 |
| HSV1-UL30-6113 | − | GCAGGCACGUGGGGUACCA | 19 | 15053 |
| HSV1-UL30-1932 | − | GGCAGGCACGUGGGGUACCA | 20 | 4965 |
| HSV1-UL30-6114 | − | CGGCAGGCACGUGGGGUACCA | 21 | 15054 |
| HSV1-UL30-6115 | − | CCGGCAGGCACGUGGGGUACCA | 22 | 15055 |
| HSV1-UL30-6116 | − | GCCGGCAGGCACGUGGGGUACCA | 23 | 15056 |
| HSV1-UL30-6117 | − | CGCCGGCAGGCACGUGGGGUACCA | 24 | 15057 |
| HSV1-UL30-6118 | − | CUAGACGCCGCCGCCCCA | 18 | 15058 |
| HSV1-UL30-6119 | − | GCUAGACGCCGCCGCCCCA | 19 | 15059 |
| HSV1-UL30-2019 | − | AGCUAGACGCCGCCGCCCCA | 20 | 5052 |
| HSV1-UL30-6120 | − | GAGCUAGACGCCGCCGCCCCA | 21 | 15060 |
| HSV1-UL30-6121 | − | CGAGCUAGACGCCGCCGCCCCA | 22 | 15061 |
| HSV1-UL30-6122 | − | GCGAGCUAGACGCCGCCGCCCCA | 23 | 15062 |
| HSV1-UL30-6123 | − | CGCGAGCUAGACGCCGCCGCCCCA | 24 | 15063 |
| HSV1-UL30-6124 | − | GAGGACGAGGAGCGGCCA | 18 | 15064 |
| HSV1-UL30-6125 | − | GGAGGACGAGGAGCGGCCA | 19 | 15065 |
| HSV1-UL30-1898 | − | GGGAGGACGAGGAGCGGCCA | 20 | 4946 |
| HSV1-UL30-6126 | − | CGGGAGGACGAGGAGCGGCCA | 21 | 15066 |
| HSV1-UL30-6127 | − | CCGGGAGGACGAGGAGCGGCCA | 22 | 15067 |
| HSV1-UL30-6128 | − | CCCGGGAGGACGAGGAGCGGCCA | 23 | 15068 |
| HSV1-UL30-6129 | − | GCCCGGGAGGACGAGGAGCGGCCA | 24 | 15069 |
| HSV1-UL30-6130 | − | CGGCGGACAACCUGGCCA | 18 | 15070 |
| HSV1-UL30-6131 | − | ACGGCGGACAACCUGGCCA | 19 | 15071 |
| HSV1-UL30-1810 | − | UACGGCGGACAACCUGGCCA | 20 | 4860 |
| HSV1-UL30-6132 | − | GUACGGCGGACAACCUGGCCA | 21 | 15072 |
| HSV1-UL30-6133 | − | UGUACGGCGGACAACCUGGCCA | 22 | 15073 |
| HSV1-UL30-6134 | − | CUGUACGGCGGACAACCUGGCCA | 23 | 15074 |
| HSV1-UL30-6135 | − | ACUGUACGGCGGACAACCUGGCCA | 24 | 15075 |
| HSV1-UL30-6136 | − | AACUCGUCGAAUGUUGCA | 18 | 15076 |
| HSV1-UL30-6137 | − | AAACUCGUCGAAUGUUGCA | 19 | 15077 |
| HSV1-UL30-2052 | − | GAAACUCGUCGAAUGUUGCA | 20 | 5085 |
| HSV1-UL30-6138 | − | GGAAACUCGUCGAAUGUUGCA | 21 | 15078 |
| HSV1-UL30-6139 | − | AGGAAACUCGUCGAAUGUUGCA | 22 | 15079 |
| HSV1-UL30-6140 | − | GAGGAAACUCGUCGAAUGUUGCA | 23 | 15080 |
| HSV1-UL30-6141 | − | GGAGGAAACUCGUCGAAUGUUGCA | 24 | 15081 |
| HSV1-UL30-6142 | − | GGAAUAACGCCAAGAUCA | 18 | 15082 |
| HSV1-UL30-6143 | − | GGGAAUAACGCCAAGAUCA | 19 | 15083 |
| HSV1-UL30-2038 | − | UGGGAAUAACGCCAAGAUCA | 20 | 5071 |
| HSV1-UL30-6144 | − | UUGGGAAUAACGCCAAGAUCA | 21 | 15084 |
| HSV1-UL30-6145 | − | UUUGGGAAUAACGCCAAGAUCA | 22 | 15085 |
| HSV1-UL30-6146 | − | GUUUGGGAAUAACGCCAAGAUCA | 23 | 15086 |
| HSV1-UL30-6147 | − | UGUUUGGGAAUAACGCCAAGAUCA | 24 | 15087 |
| HSV1-UL30-6148 | − | ACUCGGUGUACGGGUUCA | 18 | 15088 |
| HSV1-UL30-6149 | − | AACUCGGUGUACGGGUUCA | 19 | 15089 |
| HSV1-UL30-1964 | − | UAACUCGGUGUACGGGUUCA | 20 | 4997 |
| HSV1-UL30-6150 | − | GUAACUCGGUGUACGGGUUCA | 21 | 15090 |
| HSV1-UL30-6151 | − | UGUAACUCGGUGUACGGGUUCA | 22 | 15091 |
| HSV1-UL30-6152 | − | GUGUAACUCGGUGUACGGGUUCA | 23 | 15092 |
| HSV1-UL30-6153 | − | UGUGUAACUCGGUGUACGGGUUCA | 24 | 15093 |
| HSV1-UL30-6154 | − | GCAAGGACUACCUGGAGA | 18 | 15094 |
| HSV1-UL30-6155 | − | GGCAAGGACUACCUGGAGA | 19 | 15095 |
| HSV1-UL30-1944 | − | GGGCAAGGACUACCUGGAGA | 20 | 4977 |
| HSV1-UL30-6156 | − | CGGGCAAGGACUACCUGGAGA | 21 | 15096 |
| HSV1-UL30-6157 | − | GCGGGCAAGGACUACCUGGAGA | 22 | 15097 |
| HSV1-UL30-6158 | − | GGCGGGCAAGGACUACCUGGAGA | 23 | 15098 |
| HSV1-UL30-6159 | − | AGGCGGGCAAGGACUACCUGGAGA | 24 | 15099 |
| HSV1-UL30-6160 | − | UGGACGCCAUCACACCGA | 18 | 15100 |
| HSV1-UL30-6161 | − | AUGGACGCCAUCACACCGA | 19 | 15101 |
| HSV1-UL30-1772 | − | UAUGGACGCCAUCACACCGA | 20 | 4822 |
| HSV1-UL30-6162 | − | UUAUGGACGCCAUCACACCGA | 21 | 15102 |
| HSV1-UL30-6163 | − | UUUAUGGACGCCAUCACACCGA | 22 | 15103 |
| HSV1-UL30-6164 | − | GUUUAUGGACGCCAUCACACCGA | 23 | 15104 |
| HSV1-UL30-6165 | − | GGUUUAUGGACGCCAUCACACCGA | 24 | 15105 |
| HSV1-UL30-6166 | − | CGAGGAGGGCGGGGGCGA | 18 | 15106 |
| HSV1-UL30-6167 | − | GCGAGGAGGGCGGGGGCGA | 19 | 15107 |
| HSV1-UL30-1919 | − | CGCGAGGAGGGCGGGGGCGA | 20 | 4958 |
| HSV1-UL30-6168 | − | ACGCGAGGAGGGCGGGGGCGA | 21 | 15108 |
| HSV1-UL30-6169 | − | AACGCGAGGAGGGCGGGGGCGA | 22 | 15109 |
| HSV1-UL30-6170 | − | GAACGCGAGGAGGGCGGGGGCGA | 23 | 15110 |
| HSV1-UL30-6171 | − | CGAACGCGAGGAGGGCGGGGGCGA | 24 | 15111 |
| HSV1-UL30-6172 | − | GUCAAGGCUCACGUGCGA | 18 | 15112 |
| HSV1-UL30-6173 | − | CGUCAAGGCUCACGUGCGA | 19 | 15113 |
| HSV1-UL30-1952 | − | UCGUCAAGGCUCACGUGCGA | 20 | 4985 |
| HSV1-UL30-6174 | − | UUCGUCAAGGCUCACGUGCGA | 21 | 15114 |
| HSV1-UL30-6175 | − | CUUCGUCAAGGCUCACGUGCGA | 22 | 15115 |
| HSV1-UL30-6176 | − | UCUUCGUCAAGGCUCACGUGCGA | 23 | 15116 |
| HSV1-UL30-6177 | − | UUCUUCGUCAAGGCUCACGUGCGA | 24 | 15117 |
| HSV1-UL30-6178 | − | GGACAACCUGGCCAUCGA | 18 | 15118 |
| HSV1-UL30-6179 | − | CGGACAACCUGGCCAUCGA | 19 | 15119 |
| HSV1-UL30-1813 | − | GCGGACAACCUGGCCAUCGA | 20 | 4863 |
| HSV1-UL30-6180 | − | GGCGGACAACCUGGCCAUCGA | 21 | 15120 |
| HSV1-UL30-6181 | − | CGGCGGACAACCUGGCCAUCGA | 22 | 15121 |
| HSV1-UL30-6182 | − | ACGGCGGACAACCUGGCCAUCGA | 23 | 15122 |
| HSV1-UL30-6183 | − | UACGGCGGACAACCUGGCCAUCGA | 24 | 15123 |
| HSV1-UL30-6184 | − | GGAGCGGCCAGAGGAGGA | 18 | 15124 |
| HSV1-UL30-6185 | − | AGGAGCGGCCAGAGGAGGA | 19 | 15125 |
| HSV1-UL30-574 | − | GAGGAGCGGCCAGAGGAGGA | 20 | 3512 |
| HSV1-UL30-6186 | − | CGAGGAGCGGCCAGAGGAGGA | 21 | 15126 |
| HSV1-UL30-6187 | − | ACGAGGAGCGGCCAGAGGAGGA | 22 | 15127 |
| HSV1-UL30-6188 | − | GACGAGGAGCGGCCAGAGGAGGA | 23 | 15128 |
| HSV1-UL30-6189 | − | GGACGAGGAGCGGCCAGAGGAGGA | 24 | 15129 |
| HSV1-UL30-6190 | − | GCGCAUCACCGACCCGGA | 18 | 15130 |
| HSV1-UL30-6191 | − | GGCGCAUCACCGACCCGGA | 19 | 15131 |
| HSV1-UL30-2005 | − | CGGCGCAUCACCGACCCGGA | 20 | 5038 |
| HSV1-UL30-6192 | − | UCGGCGCAUCACCGACCCGGA | 21 | 15132 |
| HSV1-UL30-6193 | − | AUCGGCGCAUCACCGACCCGGA | 22 | 15133 |
| HSV1-UL30-6194 | − | CAUCGGCGCAUCACCGACCCGGA | 23 | 15134 |
| HSV1-UL30-6195 | − | CCAUCGGCGCAUCACCGACCCGGA | 24 | 15135 |
| HSV1-UL30-6196 | − | UCCCCGAAUCCCACCUGA | 18 | 15136 |
| HSV1-UL30-6197 | − | CUCCCCGAAUCCCACCUGA | 19 | 15137 |
| HSV1-UL30-1835 | − | CCUCCCCGAAUCCCACCUGA | 20 | 4885 |
| HSV1-UL30-6198 | − | ACCUCCCCGAAUCCCACCUGA | 21 | 15138 |
| HSV1-UL30-6199 | − | GACCUCCCCGAAUCCCACCUGA | 22 | 15139 |
| HSV1-UL30-6200 | − | CGACCUCCCCGAAUCCCACCUGA | 23 | 15140 |
| HSV1-UL30-6201 | − | GCGACCUCCCCGAAUCCCACCUGA | 24 | 15141 |
| HSV1-UL30-6202 | − | UUCCAUGCGCAUCAUCUA | 18 | 15142 |
| HSV1-UL30-6203 | − | AUUCCAUGCGCAUCAUCUA | 19 | 15143 |
| HSV1-UL30-1975 | − | UAUUCCAUGCGCAUCAUCUA | 20 | 5008 |
| HSV1-UL30-6204 | − | CUAUUCCAUGCGCAUCAUCUA | 21 | 15144 |
| HSV1-UL30-6205 | − | CCUAUUCCAUGCGCAUCAUCUA | 22 | 15145 |
| HSV1-UL30-6206 | − | CCCUAUUCCAUGCGCAUCAUCUA | 23 | 15146 |
| HSV1-UL30-6207 | − | GCCCUAUUCCAUGCGCAUCAUCUA | 24 | 15147 |
| HSV1-UL30-6208 | − | GUACAUCGGCGUCAUCUA | 18 | 15148 |
| HSV1-UL30-6209 | − | AGUACAUCGGCGUCAUCUA | 19 | 15149 |
| HSV1-UL30-1985 | − | AAGUACAUCGGCGUCAUCUA | 20 | 5018 |
| HSV1-UL30-6210 | − | AAAGUACAUCGGCGUCAUCUA | 21 | 15150 |
| HSV1-UL30-6211 | − | AAAAGUACAUCGGCGUCAUCUA | 22 | 15151 |
| HSV1-UL30-6212 | − | AAAAAGUACAUCGGCGUCAUCUA | 23 | 15152 |
| HSV1-UL30-6213 | − | GAAAAAGUACAUCGGCGUCAUCUA | 24 | 15153 |
| HSV1-UL30-6214 | − | GCCCAGACCCGCGAGGUA | 18 | 15154 |
| HSV1-UL30-6215 | − | GGCCCAGACCCGCGAGGUA | 19 | 15155 |
| HSV1-UL30-2014 | − | UGGCCCAGACCCGCGAGGUA | 20 | 5047 |
| HSV1-UL30-6216 | − | GUGGCCCAGACCCGCGAGGUA | 21 | 15156 |
| HSV1-UL30-6217 | − | CGUGGCCCAGACCCGCGAGGUA | 22 | 15157 |
| HSV1-UL30-6218 | − | UCGUGGCCCAGACCCGCGAGGUA | 23 | 15158 |
| HSV1-UL30-6219 | − | AUCGUGGCCCAGACCCGCGAGGUA | 24 | 15159 |
| HSV1-UL30-6220 | − | CCGCCGGGCCCGCGCAAC | 18 | 15160 |
| HSV1-UL30-6221 | − | GCCGCCGGGCCCGCGCAAC | 19 | 15161 |
| HSV1-UL30-1868 | − | CGCCGCCGGGCCCGCGCAAC | 20 | 4918 |
| HSV1-UL30-6222 | − | ACGCCGCCGGGCCCGCGCAAC | 21 | 15162 |
| HSV1-UL30-6223 | − | UACGCCGCCGGGCCCGCGCAAC | 22 | 15163 |
| HSV1-UL30-6224 | − | CUACGCCGCCGGGCCCGCGCAAC | 23 | 15164 |
| HSV1-UL30-6225 | − | ACUACGCCGCCGGGCCCGCGCAAC | 24 | 15165 |
| HSV1-UL30-6226 | − | GGGAGGACGAGGACGAAC | 18 | 15166 |
| HSV1-UL30-6227 | − | GGGGAGGACGAGGACGAAC | 19 | 15167 |
| HSV1-UL30-1911 | − | GGGGGAGGACGAGGACGAAC | 20 | 4953 |
| HSV1-UL30-6228 | − | AGGGGGAGGACGAGGACGAAC | 21 | 15168 |
| HSV1-UL30-6229 | − | GAGGGGGAGGACGAGGACGAAC | 22 | 15169 |
| HSV1-UL30-6230 | − | GGAGGGGGAGGACGAGGACGAAC | 23 | 15170 |
| HSV1-UL30-6231 | − | AGGAGGGGGAGGACGAGGACGAAC | 24 | 15171 |
| HSV1-UL30-6232 | − | CAGUACUUUUACAUGAAC | 18 | 15172 |
| HSV1-UL30-6233 | − | GCAGUACUUUUACAUGAAC | 19 | 15173 |
| HSV1-UL30-1779 | − | GGCAGUACUUUUACAUGAAC | 20 | 4829 |
| HSV1-UL30-6234 | − | CGGCAGUACUUUUACAUGAAC | 21 | 15174 |
| HSV1-UL30-6235 | − | GCGGCAGUACUUUUACAUGAAC | 22 | 15175 |
| HSV1-UL30-6236 | − | CGCGGCAGUACUUUUACAUGAAC | 23 | 15176 |
| HSV1-UL30-6237 | − | ACGCGGCAGUACUUUUACAUGAAC | 24 | 15177 |
| HSV1-UL30-6238 | − | CACGGCGUCGCCCUGAAC | 18 | 15178 |
| HSV1-UL30-6239 | − | CCACGGCGUCGCCCUGAAC | 19 | 15179 |
| HSV1-UL30-2031 | − | CCCACGGCGUCGCCCUGAAC | 20 | 5064 |
| HSV1-UL30-6240 | − | GCCCACGGCGUCGCCCUGAAC | 21 | 15180 |
| HSV1-UL30-6241 | − | UGCCCACGGCGUCGCCCUGAAC | 22 | 15181 |
| HSV1-UL30-6242 | − | UUGCCCACGGCGUCGCCCUGAAC | 23 | 15182 |
| HSV1-UL30-6243 | − | AUUGCCCACGGCGUCGCCCUGAAC | 24 | 15183 |
| HSV1-UL30-6244 | − | GACCUCCCCGAAUCCCAC | 18 | 15184 |
| HSV1-UL30-6245 | − | CGACCUCCCCGAAUCCCAC | 19 | 15185 |
| HSV1-UL30-1834 | − | GCGACCUCCCCGAAUCCCAC | 20 | 4884 |
| HSV1-UL30-6246 | − | UGCGACCUCCCCGAAUCCCAC | 21 | 15186 |
| HSV1-UL30-6247 | − | CUGCGACCUCCCCGAAUCCCAC | 22 | 15187 |
| HSV1-UL30-6248 | − | CCUGCGACCUCCCCGAAUCCCAC | 23 | 15188 |
| HSV1-UL30-6249 | − | UCCUGCGACCUCCCCGAAUCCCAC | 24 | 15189 |
| HSV1-UL30-6250 | − | GCCGACGCAGUGGCGCAC | 18 | 15190 |
| HSV1-UL30-6251 | − | GGCCGACGCAGUGGCGCAC | 19 | 15191 |
| HSV1-UL30-1938 | − | GGGCCGACGCAGUGGCGCAC | 20 | 4971 |
| HSV1-UL30-6252 | − | AGGGCCGACGCAGUGGCGCAC | 21 | 15192 |
| HSV1-UL30-6253 | − | GAGGGCCGACGCAGUGGCGCAC | 22 | 15193 |
| HSV1-UL30-6254 | − | UGAGGGCCGACGCAGUGGCGCAC | 23 | 15194 |
| HSV1-UL30-6255 | − | CUGAGGGCCGACGCAGUGGCGCAC | 24 | 15195 |
| HSV1-UL30-6256 | − | GAGACCGCCGGCAGGCAC | 18 | 15196 |
| HSV1-UL30-6257 | − | GGAGACCGCCGGCAGGCAC | 19 | 15197 |
| HSV1-UL30-1928 | − | GGGAGACCGCCGGCAGGCAC | 20 | 4962 |
| HSV1-UL30-6258 | − | CGGGAGACCGCCGGCAGGCAC | 21 | 15198 |
| HSV1-UL30-6259 | − | GCGGGAGACCGCCGGCAGGCAC | 22 | 15199 |
| HSV1-UL30-6260 | − | CGCGGGAGACCGCCGGCAGGCAC | 23 | 15200 |
| HSV1-UL30-6261 | − | GCGCGGGAGACCGCCGGCAGGCAC | 24 | 15201 |
| HSV1-UL30-6262 | − | UUUCCGGUGGCCGGGCAC | 18 | 15202 |
| HSV1-UL30-6263 | − | CUUUCCGGUGGCCGGGCAC | 19 | 15203 |
| HSV1-UL30-1828 | − | CCUUUCCGGUGGCCGGGCAC | 20 | 4878 |
| HSV1-UL30-6264 | − | GCCUUUCCGGUGGCCGGGCAC | 21 | 15204 |
| HSV1-UL30-6265 | − | GGCCUUUCCGGUGGCCGGGCAC | 22 | 15205 |
| HSV1-UL30-6266 | − | UGGCCUUUCCGGUGGCCGGGCAC | 23 | 15206 |
| HSV1-UL30-6267 | − | CUGGCCUUUCCGGUGGCCGGGCAC | 24 | 15207 |
| HSV1-UL30-6268 | − | CCCACUUCCGGGUUUCAC | 18 | 15208 |
| HSV1-UL30-6269 | − | CCCCACUUCCGGGUUUCAC | 19 | 15209 |
| HSV1-UL30-1935 | − | ACCCCACUUCCGGGUUUCAC | 20 | 4968 |
| HSV1-UL30-6270 | − | GACCCCACUUCCGGGUUUCAC | 21 | 15210 |
| HSV1-UL30-6271 | − | UGACCCCACUUCCGGGUUUCAC | 22 | 15211 |
| HSV1-UL30-6272 | − | UUGACCCCACUUCCGGGUUUCAC | 23 | 15212 |
| HSV1-UL30-6273 | − | CUUGACCCCACUUCCGGGUUUCAC | 24 | 15213 |
| HSV1-UL30-6274 | − | GGACGCCAUCACACCGAC | 18 | 15214 |
| HSV1-UL30-6275 | − | UGGACGCCAUCACACCGAC | 19 | 15215 |
| HSV1-UL30-1773 | − | AUGGACGCCAUCACACCGAC | 20 | 4823 |
| HSV1-UL30-6276 | − | UAUGGACGCCAUCACACCGAC | 21 | 15216 |
| HSV1-UL30-6277 | − | UUAUGGACGCCAUCACACCGAC | 22 | 15217 |
| HSV1-UL30-6278 | − | UUUAUGGACGCCAUCACACCGAC | 23 | 15218 |
| HSV1-UL30-6279 | − | GUUUAUGGACGCCAUCACACCGAC | 24 | 15219 |
| HSV1-UL30-6280 | − | CAUCGGCGCAUCACCGAC | 18 | 15220 |
| HSV1-UL30-6281 | − | CCAUCGGCGCAUCACCGAC | 19 | 15221 |
| HSV1-UL30-2002 | − | CCCAUCGGCGCAUCACCGAC | 20 | 5035 |
| HSV1-UL30-6282 | − | GCCCAUCGGCGCAUCACCGAC | 21 | 15222 |
| HSV1-UL30-6283 | − | CGCCCAUCGGCGCAUCACCGAC | 22 | 15223 |
| HSV1-UL30-6284 | − | ACGCCCAUCGGCGCAUCACCGAC | 23 | 15224 |
| HSV1-UL30-6285 | − | GACGCCCAUCGGCGCAUCACCGAC | 24 | 15225 |
| HSV1-UL30-6286 | − | CUGCUGCGCCUGGCCGAC | 18 | 15226 |
| HSV1-UL30-6287 | − | CCUGCUGCGCCUGGCCGAC | 19 | 15227 |
| HSV1-UL30-1876 | − | GCCUGCUGCGCCUGGCCGAC | 20 | 4925 |
| HSV1-UL30-6288 | − | UGCCUGCUGCGCCUGGCCGAC | 21 | 15228 |
| HSV1-UL30-6289 | − | GUGCCUGCUGCGCCUGGCCGAC | 22 | 15229 |
| HSV1-UL30-6290 | − | CGUGCCUGCUGCGCCUGGCCGAC | 23 | 15230 |
| HSV1-UL30-6291 | − | ACGUGCCUGCUGCGCCUGGCCGAC | 24 | 15231 |
| HSV1-UL30-6292 | − | AAGGACAAGAAGAAGGAC | 18 | 15232 |
| HSV1-UL30-6293 | − | GAAGGACAAGAAGAAGGAC | 19 | 15233 |
| HSV1-UL30-1866 | − | UGAAGGACAAGAAGAAGGAC | 20 | 4916 |
| HSV1-UL30-6294 | − | CUGAAGGACAAGAAGAAGGAC | 21 | 15234 |
| HSV1-UL30-6295 | − | CCUGAAGGACAAGAAGAAGGAC | 22 | 15235 |
| HSV1-UL30-6296 | − | UCCUGAAGGACAAGAAGAAGGAC | 23 | 15236 |
| HSV1-UL30-6297 | − | GUCCUGAAGGACAAGAAGAAGGAC | 24 | 15237 |
| HSV1-UL30-6298 | − | GAAGCCGUCCUGAAGGAC | 18 | 15238 |
| HSV1-UL30-6299 | − | CGAAGCCGUCCUGAAGGAC | 19 | 15239 |
| HSV1-UL30-1863 | − | CCGAAGCCGUCCUGAAGGAC | 20 | 4913 |
| HSV1-UL30-6300 | − | GCCGAAGCCGUCCUGAAGGAC | 21 | 15240 |
| HSV1-UL30-6301 | − | GGCCGAAGCCGUCCUGAAGGAC | 22 | 15241 |
| HSV1-UL30-6302 | − | UGGCCGAAGCCGUCCUGAAGGAC | 23 | 15242 |
| HSV1-UL30-6303 | − | GUGGCCGAAGCCGUCCUGAAGGAC | 24 | 15243 |
| HSV1-UL30-6304 | − | GCCGCAGCCCGGGAGGAC | 18 | 15244 |
| HSV1-UL30-6305 | − | GGCCGCAGCCCGGGAGGAC | 19 | 15245 |
| HSV1-UL30-1895 | − | CGGCCGCAGCCCGGGAGGAC | 20 | 4944 |
| HSV1-UL30-6306 | − | CCGGCCGCAGCCCGGGAGGAC | 21 | 15246 |
| HSV1-UL30-6307 | − | UCCGGCCGCAGCCCGGGAGGAC | 22 | 15247 |
| HSV1-UL30-6308 | − | GUCCGGCCGCAGCCCGGGAGGAC | 23 | 15248 |
| HSV1-UL30-6309 | − | CGUCCGGCCGCAGCCCGGGAGGAC | 24 | 15249 |
| HSV1-UL30-6310 | − | GAGGAGGAGGGGGAGGAC | 18 | 15250 |
| HSV1-UL30-6311 | − | AGAGGAGGAGGGGGAGGAC | 19 | 15251 |
| HSV1-UL30-1909 | − | CAGAGGAGGAGGGGGAGGAC | 20 | 4951 |
| HSV1-UL30-6312 | − | CCAGAGGAGGAGGGGGAGGAC | 21 | 15252 |
| HSV1-UL30-6313 | − | GCCAGAGGAGGAGGGGGAGGAC | 22 | 15253 |
| HSV1-UL30-6314 | − | GGCCAGAGGAGGAGGGGGAGGAC | 23 | 15254 |
| HSV1-UL30-6315 | − | CGGCCAGAGGAGGAGGGGGAGGAC | 24 | 15255 |
| HSV1-UL30-6316 | − | CGCAUCAUCUACGGGGAC | 18 | 15256 |
| HSV1-UL30-6317 | − | GCGCAUCAUCUACGGGGAC | 19 | 15257 |
| HSV1-UL30-1977 | − | UGCGCAUCAUCUACGGGGAC | 20 | 5010 |
| HSV1-UL30-6318 | − | AUGCGCAUCAUCUACGGGGAC | 21 | 15258 |
| HSV1-UL30-6319 | − | CAUGCGCAUCAUCUACGGGGAC | 22 | 15259 |
| HSV1-UL30-6320 | − | CCAUGCGCAUCAUCUACGGGGAC | 23 | 15260 |
| HSV1-UL30-6321 | − | UCCAUGCGCAUCAUCUACGGGGAC | 24 | 15261 |
| HSV1-UL30-6322 | − | GAGGCGGGCAAGGACUAC | 18 | 15262 |
| HSV1-UL30-6323 | − | GGAGGCGGGCAAGGACUAC | 19 | 15263 |
| HSV1-UL30-1942 | − | UGGAGGCGGGCAAGGACUAC | 20 | 4975 |
| HSV1-UL30-6324 | − | CUGGAGGCGGGCAAGGACUAC | 21 | 15264 |
| HSV1-UL30-6325 | − | CCUGGAGGCGGGCAAGGACUAC | 22 | 15265 |
| HSV1-UL30-6326 | − | ACCUGGAGGCGGGCAAGGACUAC | 23 | 15266 |
| HSV1-UL30-6327 | − | CACCUGGAGGCGGGCAAGGACUAC | 24 | 15267 |
| HSV1-UL30-6328 | − | UCCAUGCGCAUCAUCUAC | 18 | 15268 |
| HSV1-UL30-6329 | − | UUCCAUGCGCAUCAUCUAC | 19 | 15269 |
| HSV1-UL30-1976 | − | AUUCCAUGCGCAUCAUCUAC | 20 | 5009 |
| HSV1-UL30-6330 | − | UAUUCCAUGCGCAUCAUCUAC | 21 | 15270 |
| HSV1-UL30-6331 | − | CUAUUCCAUGCGCAUCAUCUAC | 22 | 15271 |
| HSV1-UL30-6332 | − | CCUAUUCCAUGCGCAUCAUCUAC | 23 | 15272 |
| HSV1-UL30-6333 | − | CCCUAUUCCAUGCGCAUCAUCUAC | 24 | 15273 |
| HSV1-UL30-6334 | − | GGCAGGCACGUGGGGUAC | 18 | 15274 |
| HSV1-UL30-6335 | − | CGGCAGGCACGUGGGGUAC | 19 | 15275 |
| HSV1-UL30-1930 | − | CCGGCAGGCACGUGGGGUAC | 20 | 4963 |
| HSV1-UL30-6336 | − | GCCGGCAGGCACGUGGGGUAC | 21 | 15276 |
| HSV1-UL30-6337 | − | CGCCGGCAGGCACGUGGGGUAC | 22 | 15277 |
| HSV1-UL30-6338 | − | CCGCCGGCAGGCACGUGGGGUAC | 23 | 15278 |
| HSV1-UL30-6339 | − | ACCGCCGGCAGGCACGUGGGGUAC | 24 | 15279 |
| HSV1-UL30-6340 | − | ACGCGGCAGUACUUUUAC | 18 | 15280 |
| HSV1-UL30-6341 | − | CACGCGGCAGUACUUUUAC | 19 | 15281 |
| HSV1-UL30-1778 | − | GCACGCGGCAGUACUUUUAC | 20 | 4828 |
| HSV1-UL30-6342 | − | GGCACGCGGCAGUACUUUUAC | 21 | 15282 |
| HSV1-UL30-6343 | − | CGGCACGCGGCAGUACUUUUAC | 22 | 15283 |
| HSV1-UL30-6344 | − | ACGGCACGCGGCAGUACUUUUAC | 23 | 15284 |
| HSV1-UL30-6345 | − | UACGGCACGCGGCAGUACUUUUAC | 24 | 15285 |
| HSV1-UL30-6346 | − | UUUAUUCUGCCGGACACC | 18 | 15286 |
| HSV1-UL30-6347 | − | CUUUAUUCUGCCGGACACC | 19 | 15287 |
| HSV1-UL30-1879 | − | GCUUUAUUCUGCCGGACACC | 20 | 4928 |
| HSV1-UL30-6348 | − | GGCUUUAUUCUGCCGGACACC | 21 | 15288 |
| HSV1-UL30-6349 | − | GGGCUUUAUUCUGCCGGACACC | 22 | 15289 |
| HSV1-UL30-6350 | − | AGGGCUUUAUUCUGCCGGACACC | 23 | 15290 |
| HSV1-UL30-6351 | − | AAGGGCUUUAUUCUGCCGGACACC | 24 | 15291 |
| HSV1-UL30-6352 | − | CCGACGCAGUGGCGCACC | 18 | 15292 |
| HSV1-UL30-6353 | − | GCCGACGCAGUGGCGCACC | 19 | 15293 |
| HSV1-UL30-1939 | − | GGCCGACGCAGUGGCGCACC | 20 | 4972 |
| HSV1-UL30-6354 | − | GGGCCGACGCAGUGGCGCACC | 21 | 15294 |
| HSV1-UL30-6355 | − | AGGGCCGACGCAGUGGCGCACC | 22 | 15295 |
| HSV1-UL30-6356 | − | GAGGGCCGACGCAGUGGCGCACC | 23 | 15296 |
| HSV1-UL30-6357 | − | UGAGGGCCGACGCAGUGGCGCACC | 24 | 15297 |
| HSV1-UL30-6358 | − | UUCCGGUGGCCGGGCACC | 18 | 15298 |
| HSV1-UL30-6359 | − | UUUCCGGUGGCCGGGCACC | 19 | 15299 |
| HSV1-UL30-1829 | − | CUUUCCGGUGGCCGGGCACC | 20 | 4879 |
| HSV1-UL30-6360 | − | CCUUUCCGGUGGCCGGGCACC | 21 | 15300 |
| HSV1-UL30-6361 | − | GCCUUUCCGGUGGCCGGGCACC | 22 | 15301 |
| HSV1-UL30-6362 | − | GGCCUUUCCGGUGGCCGGGCACC | 23 | 15302 |
| HSV1-UL30-6363 | − | UGGCCUUUCCGGUGGCCGGGCACC | 24 | 15303 |
| HSV1-UL30-6364 | − | AUCGGCGCAUCACCGACC | 18 | 15304 |
| HSV1-UL30-6365 | − | CAUCGGCGCAUCACCGACC | 19 | 15305 |
| HSV1-UL30-2003 | − | CCAUCGGCGCAUCACCGACC | 20 | 5036 |
| HSV1-UL30-6366 | − | CCCAUCGGCGCAUCACCGACC | 21 | 15306 |
| HSV1-UL30-6367 | − | GCCCAUCGGCGCAUCACCGACC | 22 | 15307 |
| HSV1-UL30-6368 | − | CGCCCAUCGGCGCAUCACCGACC | 23 | 15308 |
| HSV1-UL30-6369 | − | ACGCCCAUCGGCGCAUCACCGACC | 24 | 15309 |
| HSV1-UL30-6370 | − | AGGCGGGCAAGGACUACC | 18 | 15310 |
| HSV1-UL30-6371 | − | GAGGCGGGCAAGGACUACC | 19 | 15311 |
| HSV1-UL30-1943 | − | GGAGGCGGGCAAGGACUACC | 20 | 4976 |
| HSV1-UL30-6372 | − | UGGAGGCGGGCAAGGACUACC | 21 | 15312 |
| HSV1-UL30-6373 | − | CUGGAGGCGGGCAAGGACUACC | 22 | 15313 |
| HSV1-UL30-6374 | − | CCUGGAGGCGGGCAAGGACUACC | 23 | 15314 |
| HSV1-UL30-6375 | − | ACCUGGAGGCGGGCAAGGACUACC | 24 | 15315 |
| HSV1-UL30-6376 | − | GCAGGCACGUGGGGUACC | 18 | 15316 |
| HSV1-UL30-6377 | − | GGCAGGCACGUGGGGUACC | 19 | 15317 |
| HSV1-UL30-1931 | − | CGGCAGGCACGUGGGGUACC | 20 | 4964 |
| HSV1-UL30-6378 | − | CCGGCAGGCACGUGGGGUACC | 21 | 15318 |
| HSV1-UL30-6379 | − | GCCGGCAGGCACGUGGGGUACC | 22 | 15319 |
| HSV1-UL30-6380 | − | CGCCGGCAGGCACGUGGGGUACC | 23 | 15320 |
| HSV1-UL30-6381 | − | CCGCCGGCAGGCACGUGGGGUACC | 24 | 15321 |
| HSV1-UL30-6382 | − | UUAUUCUGCCGGACACCC | 18 | 15322 |
| HSV1-UL30-6383 | − | UUUAUUCUGCCGGACACCC | 19 | 15323 |
| HSV1-UL30-1880 | − | CUUUAUUCUGCCGGACACCC | 20 | 4929 |
| HSV1-UL30-6384 | − | GCUUUAUUCUGCCGGACACCC | 21 | 15324 |
| HSV1-UL30-6385 | − | GGCUUUAUUCUGCCGGACACCC | 22 | 15325 |
| HSV1-UL30-6386 | − | GGGCUUUAUUCUGCCGGACACCC | 23 | 15326 |
| HSV1-UL30-6387 | − | AGGGCUUUAUUCUGCCGGACACCC | 24 | 15327 |
| HSV1-UL30-6388 | − | UGAUCGUGGCCCAGACCC | 18 | 15328 |
| HSV1-UL30-6389 | − | GUGAUCGUGGCCCAGACCC | 19 | 15329 |
| HSV1-UL30-2012 | − | CGUGAUCGUGGCCCAGACCC | 20 | 5045 |
| HSV1-UL30-6390 | − | ACGUGAUCGUGGCCCAGACCC | 21 | 15330 |
| HSV1-UL30-6391 | − | UACGUGAUCGUGGCCCAGACCC | 22 | 15331 |
| HSV1-UL30-6392 | − | GUACGUGAUCGUGGCCCAGACCC | 23 | 15332 |
| HSV1-UL30-6393 | − | CGUACGUGAUCGUGGCCCAGACCC | 24 | 15333 |
| HSV1-UL30-6394 | − | CCCGAAGUGUGGCACCCC | 18 | 15334 |
| HSV1-UL30-6395 | − | UCCCGAAGUGUGGCACCCC | 19 | 15335 |
| HSV1-UL30-2041 | − | UUCCCGAAGUGUGGCACCCC | 20 | 5074 |
| HSV1-UL30-6396 | − | AUUCCCGAAGUGUGGCACCCC | 21 | 15336 |
| HSV1-UL30-6397 | − | UAUUCCCGAAGUGUGGCACCCC | 22 | 15337 |
| HSV1-UL30-6398 | − | UUAUUCCCGAAGUGUGGCACCCC | 23 | 15338 |
| HSV1-UL30-6399 | − | UUUAUUCCCGAAGUGUGGCACCCC | 24 | 15339 |
| HSV1-UL30-6400 | − | CCGUCGCCUGCCGACCCC | 18 | 15340 |
| HSV1-UL30-6401 | − | GCCGUCGCCUGCCGACCCC | 19 | 15341 |
| HSV1-UL30-2024 | − | CGCCGUCGCCUGCCGACCCC | 20 | 5057 |
| HSV1-UL30-6402 | − | ACGCCGUCGCCUGCCGACCCC | 21 | 15342 |
| HSV1-UL30-6403 | − | GACGCCGUCGCCUGCCGACCCC | 22 | 15343 |
| HSV1-UL30-6404 | − | AGACGCCGUCGCCUGCCGACCCC | 23 | 15344 |
| HSV1-UL30-6405 | − | GAGACGCCGUCGCCUGCCGACCCC | 24 | 15345 |
| HSV1-UL30-6406 | − | CGUCGCCUGCCGACCCCC | 18 | 15346 |
| HSV1-UL30-6407 | − | CCGUCGCCUGCCGACCCCC | 19 | 15347 |
| HSV1-UL30-2025 | − | GCCGUCGCCUGCCGACCCCC | 20 | 5058 |
| HSV1-UL30-6408 | − | CGCCGUCGCCUGCCGACCCCC | 21 | 15348 |
| HSV1-UL30-6409 | − | ACGCCGUCGCCUGCCGACCCCC | 22 | 15349 |
| HSV1-UL30-6410 | − | GACGCCGUCGCCUGCCGACCCCC | 23 | 15350 |
| HSV1-UL30-6411 | − | AGACGCCGUCGCCUGCCGACCCCC | 24 | 15351 |
| HSV1-UL30-6412 | − | GUCGCCUGCCGACCCCCC | 18 | 15352 |
| HSV1-UL30-6413 | − | CGUCGCCUGCCGACCCCCC | 19 | 15353 |
| HSV1-UL30-2026 | − | CCGUCGCCUGCCGACCCCCC | 20 | 5059 |
| HSV1-UL30-6414 | − | GCCGUCGCCUGCCGACCCCCC | 21 | 15354 |
| HSV1-UL30-6415 | − | CGCCGUCGCCUGCCGACCCCCC | 22 | 15355 |
| HSV1-UL30-6416 | − | ACGCCGUCGCCUGCCGACCCCCC | 23 | 15356 |
| HSV1-UL30-6417 | − | GACGCCGUCGCCUGCCGACCCCCC | 24 | 15357 |
| HSV1-UL30-6418 | − | CCCCGGCCAAGCGCCCCC | 18 | 15358 |
| HSV1-UL30-6419 | − | UCCCCGGCCAAGCGCCCCC | 19 | 15359 |
| HSV1-UL30-2023 | − | CUCCCCGGCCAAGCGCCCCC | 20 | 5056 |
| HSV1-UL30-6420 | − | CCUCCCCGGCCAAGCGCCCCC | 21 | 15360 |
| HSV1-UL30-6421 | − | CCCUCCCCGGCCAAGCGCCCCC | 22 | 15361 |
| HSV1-UL30-6422 | − | GCCCUCCCCGGCCAAGCGCCCCC | 23 | 15362 |
| HSV1-UL30-6423 | − | UGCCCUCCCCGGCCAAGCGCCCCC | 24 | 15363 |
| HSV1-UL30-6424 | − | AUUCCCCAGAGCAGCCCC | 18 | 15364 |
| HSV1-UL30-6425 | − | GAUUCCCCAGAGCAGCCCC | 19 | 15365 |
| HSV1-UL30-1959 | − | GGAUUCCCCAGAGCAGCCCC | 20 | 4992 |
| HSV1-UL30-6426 | − | CGGAUUCCCCAGAGCAGCCCC | 21 | 15366 |
| HSV1-UL30-6427 | − | GCGGAUUCCCCAGAGCAGCCCC | 22 | 15367 |
| HSV1-UL30-6428 | − | CGCGGAUUCCCCAGAGCAGCCCC | 23 | 15368 |
| HSV1-UL30-6429 | − | UCGCGGAUUCCCCAGAGCAGCCCC | 24 | 15369 |
| HSV1-UL30-6430 | − | GCUAGACGCCGCCGCCCC | 18 | 15370 |
| HSV1-UL30-6431 | − | AGCUAGACGCCGCCGCCCC | 19 | 15371 |
| HSV1-UL30-2018 | − | GAGCUAGACGCCGCCGCCCC | 20 | 5051 |
| HSV1-UL30-6432 | − | CGAGCUAGACGCCGCCGCCCC | 21 | 15372 |
| HSV1-UL30-6433 | − | GCGAGCUAGACGCCGCCGCCCC | 22 | 15373 |
| HSV1-UL30-6434 | − | CGCGAGCUAGACGCCGCCGCCCC | 23 | 15374 |
| HSV1-UL30-6435 | − | CCGCGAGCUAGACGCCGCCGCCCC | 24 | 15375 |
| HSV1-UL30-6436 | − | UCCCCGGCCAAGCGCCCC | 18 | 15376 |
| HSV1-UL30-6437 | − | CUCCCCGGCCAAGCGCCCC | 19 | 15377 |
| HSV1-UL30-2022 | − | CCUCCCCGGCCAAGCGCCCC | 20 | 5055 |
| HSV1-UL30-6438 | − | CCCUCCCCGGCCAAGCGCCCC | 21 | 15378 |
| HSV1-UL30-6439 | − | GCCCUCCCCGGCCAAGCGCCCC | 22 | 15379 |
| HSV1-UL30-6440 | − | UGCCCUCCCCGGCCAAGCGCCCC | 23 | 15380 |
| HSV1-UL30-6441 | − | CUGCCCUCCCCGGCCAAGCGCCCC | 24 | 15381 |
| HSV1-UL30-6442 | − | GCGUUAGCCGAGCGCCCC | 18 | 15382 |
| HSV1-UL30-6443 | − | CGCGUUAGCCGAGCGCCCC | 19 | 15383 |
| HSV1-UL30-1993 | − | CCGCGUUAGCCGAGCGCCCC | 20 | 5026 |
| HSV1-UL30-6444 | − | GCCGCGUUAGCCGAGCGCCCC | 21 | 15384 |
| HSV1-UL30-6445 | − | CGCCGCGUUAGCCGAGCGCCCC | 22 | 15385 |
| HSV1-UL30-6446 | − | CCGCCGCGUUAGCCGAGCGCCCC | 23 | 15386 |
| HSV1-UL30-6447 | − | GCCGCCGCGUUAGCCGAGCGCCCC | 24 | 15387 |
| HSV1-UL30-6448 | − | CCUACAAUGCCGCGCCCC | 18 | 15388 |
| HSV1-UL30-6449 | − | ACCUACAAUGCCGCGCCCC | 19 | 15389 |
| HSV1-UL30-1783 | − | CACCUACAAUGCCGCGCCCC | 20 | 4833 |
| HSV1-UL30-6450 | − | GCACCUACAAUGCCGCGCCCC | 21 | 15390 |
| HSV1-UL30-6451 | − | GGCACCUACAAUGCCGCGCCCC | 22 | 15391 |
| HSV1-UL30-6452 | − | AGGCACCUACAAUGCCGCGCCCC | 23 | 15392 |
| HSV1-UL30-6453 | − | CAGGCACCUACAAUGCCGCGCCCC | 24 | 15393 |
| HSV1-UL30-6454 | − | GACAUUUACAAGGUCCCC | 18 | 15394 |
| HSV1-UL30-6455 | − | GGACAUUUACAAGGUCCCC | 19 | 15395 |
| HSV1-UL30-1846 | − | CGGACAUUUACAAGGUCCCC | 20 | 4896 |
| HSV1-UL30-6456 | − | ACGGACAUUUACAAGGUCCCC | 21 | 15396 |
| HSV1-UL30-6457 | − | GACGGACAUUUACAAGGUCCCC | 22 | 15397 |
| HSV1-UL30-6458 | − | UGACGGACAUUUACAAGGUCCCC | 23 | 15398 |
| HSV1-UL30-6459 | − | CUGACGGACAUUUACAAGGUCCCC | 24 | 15399 |
| HSV1-UL30-6460 | − | AGCGUCCGGCCGCAGCCC | 18 | 15400 |
| HSV1-UL30-6461 | − | AAGCGUCCGGCCGCAGCCC | 19 | 15401 |
| HSV1-UL30-1892 | − | CAAGCGUCCGGCCGCAGCCC | 20 | 4941 |
| HSV1-UL30-6462 | − | CCAAGCGUCCGGCCGCAGCCC | 21 | 15402 |
| HSV1-UL30-6463 | − | CCCAAGCGUCCGGCCGCAGCCC | 22 | 15403 |
| HSV1-UL30-6464 | − | GCCCAAGCGUCCGGCCGCAGCCC | 23 | 15404 |
| HSV1-UL30-6465 | − | CGCCCAAGCGUCCGGCCGCAGCCC | 24 | 15405 |
| HSV1-UL30-6466 | − | ACCUGUCCACCACCGCCC | 18 | 15406 |
| HSV1-UL30-6467 | − | GACCUGUCCACCACCGCCC | 19 | 15407 |
| HSV1-UL30-1832 | − | CGACCUGUCCACCACCGCCC | 20 | 4882 |
| HSV1-UL30-6468 | − | ACGACCUGUCCACCACCGCCC | 21 | 15408 |
| HSV1-UL30-6469 | − | UACGACCUGUCCACCACCGCCC | 22 | 15409 |
| HSV1-UL30-6470 | − | CUACGACCUGUCCACCACCGCCC | 23 | 15410 |
| HSV1-UL30-6471 | − | UCUACGACCUGUCCACCACCGCCC | 24 | 15411 |
| HSV1-UL30-6472 | − | AGCUAGACGCCGCCGCCC | 18 | 15412 |
| HSV1-UL30-6473 | − | GAGCUAGACGCCGCCGCCC | 19 | 15413 |
| HSV1-UL30-2017 | − | CGAGCUAGACGCCGCCGCCC | 20 | 5050 |
| HSV1-UL30-6474 | − | GCGAGCUAGACGCCGCCGCCC | 21 | 15414 |
| HSV1-UL30-6475 | − | CGCGAGCUAGACGCCGCCGCCC | 22 | 15415 |
| HSV1-UL30-6476 | − | CCGCGAGCUAGACGCCGCCGCCC | 23 | 15416 |
| HSV1-UL30-6477 | − | UCCGCGAGCUAGACGCCGCCGCCC | 24 | 15417 |
| HSV1-UL30-6478 | − | CUCCCCGGCCAAGCGCCC | 18 | 15418 |
| HSV1-UL30-6479 | − | CCUCCCCGGCCAAGCGCCC | 19 | 15419 |
| HSV1-UL30-2021 | − | CCCUCCCCGGCCAAGCGCCC | 20 | 5054 |
| HSV1-UL30-6480 | − | GCCCUCCCCGGCCAAGCGCCC | 21 | 15420 |
| HSV1-UL30-6481 | − | UGCCCUCCCCGGCCAAGCGCCC | 22 | 15421 |
| HSV1-UL30-6482 | − | CUGCCCUCCCCGGCCAAGCGCCC | 23 | 15422 |
| HSV1-UL30-6483 | − | CCUGCCCUCCCCGGCCAAGCGCCC | 24 | 15423 |
| HSV1-UL30-6484 | − | CGGCCGACAUGCGCGCCC | 18 | 15424 |
| HSV1-UL30-6485 | − | GCGGCCGACAUGCGCGCCC | 19 | 15425 |
| HSV1-UL30-1973 | − | GGCGGCCGACAUGCGCGCCC | 20 | 5006 |
| HSV1-UL30-6486 | − | AGGCGGCCGACAUGCGCGCCC | 21 | 15426 |
| HSV1-UL30-6487 | − | GAGGCGGCCGACAUGCGCGCCC | 22 | 15427 |
| HSV1-UL30-6488 | − | GGAGGCGGCCGACAUGCGCGCCC | 23 | 15428 |
| HSV1-UL30-6489 | − | CGGAGGCGGCCGACAUGCGCGCCC | 24 | 15429 |
| HSV1-UL30-6490 | − | CUGGCGCGACCCCUGCCC | 18 | 15430 |
| HSV1-UL30-6491 | − | GCUGGCGCGACCCCUGCCC | 19 | 15431 |
| HSV1-UL30-1998 | − | GGCUGGCGCGACCCCUGCCC | 20 | 5031 |
| HSV1-UL30-6492 | − | UGGCUGGCGCGACCCCUGCCC | 21 | 15432 |
| HSV1-UL30-6493 | − | GUGGCUGGCGCGACCCCUGCCC | 22 | 15433 |
| HSV1-UL30-6494 | − | AGUGGCUGGCGCGACCCCUGCCC | 23 | 15434 |
| HSV1-UL30-6495 | − | GAGUGGCUGGCGCGACCCCUGCCC | 24 | 15435 |
| HSV1-UL30-6496 | − | AUCCGCUCGCGGAUUCCC | 18 | 15436 |
| HSV1-UL30-6497 | − | GAUCCGCUCGCGGAUUCCC | 19 | 15437 |
| HSV1-UL30-1957 | − | AGAUCCGCUCGCGGAUUCCC | 20 | 4990 |
| HSV1-UL30-6498 | − | CAGAUCCGCUCGCGGAUUCCC | 21 | 15438 |
| HSV1-UL30-6499 | − | GCAGAUCCGCUCGCGGAUUCCC | 22 | 15439 |
| HSV1-UL30-6500 | − | AGCAGAUCCGCUCGCGGAUUCCC | 23 | 15440 |
| HSV1-UL30-6501 | − | AAGCAGAUCCGCUCGCGGAUUCCC | 24 | 15441 |
| HSV1-UL30-6502 | − | GGAUUCCCCAGAGCAGCC | 18 | 15442 |
| HSV1-UL30-6503 | − | CGGAUUCCCCAGAGCAGCC | 19 | 15443 |
| HSV1-UL30-1958 | − | GCGGAUUCCCCAGAGCAGCC | 20 | 4991 |
| HSV1-UL30-6504 | − | CGCGGAUUCCCCAGAGCAGCC | 21 | 15444 |
| HSV1-UL30-6505 | − | UCGCGGAUUCCCCAGAGCAGCC | 22 | 15445 |
| HSV1-UL30-6506 | − | CUCGCGGAUUCCCCAGAGCAGCC | 23 | 15446 |
| HSV1-UL30-6507 | − | GCUCGCGGAUUCCCCAGAGCAGCC | 24 | 15447 |
| HSV1-UL30-6508 | − | AAGCGUCCGGCCGCAGCC | 18 | 15448 |
| HSV1-UL30-6509 | − | CAAGCGUCCGGCCGCAGCC | 19 | 15449 |
| HSV1-UL30-1891 | − | CCAAGCGUCCGGCCGCAGCC | 20 | 4940 |
| HSV1-UL30-6510 | − | CCCAAGCGUCCGGCCGCAGCC | 21 | 15450 |
| HSV1-UL30-6511 | − | GCCCAAGCGUCCGGCCGCAGCC | 22 | 15451 |
| HSV1-UL30-6512 | − | CGCCCAAGCGUCCGGCCGCAGCC | 23 | 15452 |
| HSV1-UL30-6513 | − | GCGCCCAAGCGUCCGGCCGCAGCC | 24 | 15453 |
| HSV1-UL30-6514 | − | GACCUGUCCACCACCGCC | 18 | 15454 |
| HSV1-UL30-6515 | − | CGACCUGUCCACCACCGCC | 19 | 15455 |
| HSV1-UL30-1831 | − | ACGACCUGUCCACCACCGCC | 20 | 4881 |
| HSV1-UL30-6516 | − | UACGACCUGUCCACCACCGCC | 21 | 15456 |
| HSV1-UL30-6517 | − | CUACGACCUGUCCACCACCGCC | 22 | 15457 |
| HSV1-UL30-6518 | − | UCUACGACCUGUCCACCACCGCC | 23 | 15458 |
| HSV1-UL30-6519 | − | CUCUACGACCUGUCCACCACCGCC | 24 | 15459 |
| HSV1-UL30-6520 | − | GGGCGAUUUAGGGGCGCC | 18 | 15460 |
| HSV1-UL30-6521 | − | GGGGCGAUUUAGGGGCGCC | 19 | 15461 |
| HSV1-UL30-1885 | − | AGGGGCGAUUUAGGGGCGCC | 20 | 4934 |
| HSV1-UL30-6522 | − | CAGGGGCGAUUUAGGGGCGCC | 21 | 15462 |
| HSV1-UL30-6523 | − | CCAGGGGCGAUUUAGGGGCGCC | 22 | 15463 |
| HSV1-UL30-6524 | − | CCCAGGGGCGAUUUAGGGGCGCC | 23 | 15464 |
| HSV1-UL30-6525 | − | ACCCAGGGGCGAUUUAGGGGCGCC | 24 | 15465 |
| HSV1-UL30-6526 | − | AAGCUGCUGCUGAUCGCC | 18 | 15466 |
| HSV1-UL30-6527 | − | CAAGCUGCUGCUGAUCGCC | 19 | 15467 |
| HSV1-UL30-1983 | − | CCAAGCUGCUGCUGAUCGCC | 20 | 5016 |
| HSV1-UL30-6528 | − | ACCAAGCUGCUGCUGAUCGCC | 21 | 15468 |
| HSV1-UL30-6529 | − | CACCAAGCUGCUGCUGAUCGCC | 22 | 15469 |
| HSV1-UL30-6530 | − | UCACCAAGCUGCUGCUGAUCGCC | 23 | 15470 |
| HSV1-UL30-6531 | − | UUCACCAAGCUGCUGCUGAUCGCC | 24 | 15471 |
| HSV1-UL30-6532 | − | AUUGCCCACGGCGUCGCC | 18 | 15472 |
| HSV1-UL30-6533 | − | CAUUGCCCACGGCGUCGCC | 19 | 15473 |
| HSV1-UL30-2030 | − | CCAUUGCCCACGGCGUCGCC | 20 | 5063 |
| HSV1-UL30-6534 | − | GCCAUUGCCCACGGCGUCGCC | 21 | 15474 |
| HSV1-UL30-6535 | − | CGCCAUUGCCCACGGCGUCGCC | 22 | 15475 |
| HSV1-UL30-6536 | − | ACGCCAUUGCCCACGGCGUCGCC | 23 | 15476 |
| HSV1-UL30-6537 | − | UACGCCAUUGCCCACGGCGUCGCC | 24 | 15477 |
| HSV1-UL30-6538 | − | GCCGCCGGGCUGACGGCC | 18 | 15478 |
| HSV1-UL30-6539 | − | GGCCGCCGGGCUGACGGCC | 19 | 15479 |
| HSV1-UL30-1979 | − | CGGCCGCCGGGCUGACGGCC | 20 | 5012 |
| HSV1-UL30-6540 | − | ACGGCCGCCGGGCUGACGGCC | 21 | 15480 |
| HSV1-UL30-6541 | − | CACGGCCGCCGGGCUGACGGCC | 22 | 15481 |
| HSV1-UL30-6542 | − | UCACGGCCGCCGGGCUGACGGCC | 23 | 15482 |
| HSV1-UL30-6543 | − | CUCACGGCCGCCGGGCUGACGGCC | 24 | 15483 |
| HSV1-UL30-6544 | − | CUGAACGAGCUGGCGGCC | 18 | 15484 |
| HSV1-UL30-6545 | − | CCUGAACGAGCUGGCGGCC | 19 | 15485 |
| HSV1-UL30-1837 | − | ACCUGAACGAGCUGGCGGCC | 20 | 4887 |
| HSV1-UL30-6546 | − | CACCUGAACGAGCUGGCGGCC | 21 | 15486 |
| HSV1-UL30-6547 | − | CCACCUGAACGAGCUGGCGGCC | 22 | 15487 |
| HSV1-UL30-6548 | − | CCCACCUGAACGAGCUGGCGGCC | 23 | 15488 |
| HSV1-UL30-6549 | − | UCCCACCUGAACGAGCUGGCGGCC | 24 | 15489 |
| HSV1-UL30-6550 | − | CGGUGACGACCAUCGGCC | 18 | 15490 |
| HSV1-UL30-6551 | − | ACGGUGACGACCAUCGGCC | 19 | 15491 |
| HSV1-UL30-1967 | − | GACGGUGACGACCAUCGGCC | 20 | 5000 |
| HSV1-UL30-6552 | − | CGACGGUGACGACCAUCGGCC | 21 | 15492 |
| HSV1-UL30-6553 | − | GCGACGGUGACGACCAUCGGCC | 22 | 15493 |
| HSV1-UL30-6554 | − | CGCGACGGUGACGACCAUCGGCC | 23 | 15494 |
| HSV1-UL30-6555 | − | CCGCGACGGUGACGACCAUCGGCC | 24 | 15495 |
| HSV1-UL30-6556 | − | CGCGGCUGGCCGCCCUCC | 18 | 15496 |
| HSV1-UL30-6557 | − | GCGCGGCUGGCCGCCCUCC | 19 | 15497 |
| HSV1-UL30-2016 | − | CGCGCGGCUGGCCGCCCUCC | 20 | 5049 |
| HSV1-UL30-6558 | − | UCGCGCGGCUGGCCGCCCUCC | 21 | 15498 |
| HSV1-UL30-6559 | − | GUCGCGCGGCUGGCCGCCCUCC | 22 | 15499 |
| HSV1-UL30-6560 | − | GGUCGCGCGGCUGGCCGCCCUCC | 23 | 15500 |
| HSV1-UL30-6561 | − | CGGUCGCGCGGCUGGCCGCCCUCC | 24 | 15501 |
| HSV1-UL30-6562 | − | UCGUUCCGCGGCAUCUCC | 18 | 15502 |
| HSV1-UL30-6563 | − | GUCGUUCCGCGGCAUCUCC | 19 | 15503 |
| HSV1-UL30-1787 | − | CGUCGUUCCGCGGCAUCUCC | 20 | 4837 |
| HSV1-UL30-6564 | − | GCGUCGUUCCGCGGCAUCUCC | 21 | 15504 |
| HSV1-UL30-6565 | − | CGCGUCGUUCCGCGGCAUCUCC | 22 | 15505 |
| HSV1-UL30-6566 | − | GCGCGUCGUUCCGCGGCAUCUCC | 23 | 15506 |
| HSV1-UL30-6567 | − | GGCGCGUCGUUCCGCGGCAUCUCC | 24 | 15507 |
| HSV1-UL30-6568 | − | UGCUUCAGCACGCUCUCC | 18 | 15508 |
| HSV1-UL30-6569 | − | GUGCUUCAGCACGCUCUCC | 19 | 15509 |
| HSV1-UL30-1936 | − | UGUGCUUCAGCACGCUCUCC | 20 | 4969 |
| HSV1-UL30-6570 | − | CUGUGCUUCAGCACGCUCUCC | 21 | 15510 |
| HSV1-UL30-6571 | − | CCUGUGCUUCAGCACGCUCUCC | 22 | 15511 |
| HSV1-UL30-6572 | − | ACCUGUGCUUCAGCACGCUCUCC | 23 | 15512 |
| HSV1-UL30-6573 | − | AACCUGUGCUUCAGCACGCUCUCC | 24 | 15513 |
| HSV1-UL30-6574 | − | GCGGCCCUGCGCGAGUCC | 18 | 15514 |
| HSV1-UL30-6575 | − | CGCGGCCCUGCGCGAGUCC | 19 | 15515 |
| HSV1-UL30-1786 | − | CCGCGGCCCUGCGCGAGUCC | 20 | 4836 |
| HSV1-UL30-6576 | − | GCCGCGGCCCUGCGCGAGUCC | 21 | 15516 |
| HSV1-UL30-6577 | − | GGCCGCGGCCCUGCGCGAGUCC | 22 | 15517 |
| HSV1-UL30-6578 | − | UGGCCGCGGCCCUGCGCGAGUCC | 23 | 15518 |
| HSV1-UL30-6579 | − | AUGGCCGCGGCCCUGCGCGAGUCC | 24 | 15519 |
| HSV1-UL30-6580 | − | AGCUCCUGGCCGAUUUCC | 18 | 15520 |
| HSV1-UL30-6581 | − | CAGCUCCUGGCCGAUUUCC | 19 | 15521 |
| HSV1-UL30-1972 | − | ACAGCUCCUGGCCGAUUUCC | 20 | 5005 |
| HSV1-UL30-6582 | − | AACAGCUCCUGGCCGAUUUCC | 21 | 15522 |
| HSV1-UL30-6583 | − | GAACAGCUCCUGGCCGAUUUCC | 22 | 15523 |
| HSV1-UL30-6584 | − | CGAACAGCUCCUGGCCGAUUUCC | 23 | 15524 |
| HSV1-UL30-6585 | − | UCGAACAGCUCCUGGCCGAUUUCC | 24 | 15525 |
| HSV1-UL30-6586 | − | CAAGCGUCCGGCCGCAGC | 18 | 15526 |
| HSV1-UL30-6587 | − | CCAAGCGUCCGGCCGCAGC | 19 | 15527 |
| HSV1-UL30-1890 | − | CCCAAGCGUCCGGCCGCAGC | 20 | 4939 |
| HSV1-UL30-6588 | − | GCCCAAGCGUCCGGCCGCAGC | 21 | 15528 |
| HSV1-UL30-6589 | − | CGCCCAAGCGUCCGGCCGCAGC | 22 | 15529 |
| HSV1-UL30-6590 | − | GCGCCCAAGCGUCCGGCCGCAGC | 23 | 15530 |
| HSV1-UL30-6591 | − | GGCGCCCAAGCGUCCGGCCGCAGC | 24 | 15531 |
| HSV1-UL30-6592 | − | GGUUCACGGGAGUGCAGC | 18 | 15532 |
| HSV1-UL30-6593 | − | GGGUUCACGGGAGUGCAGC | 19 | 15533 |
| HSV1-UL30-1966 | − | CGGGUUCACGGGAGUGCAGC | 20 | 4999 |
| HSV1-UL30-6594 | − | ACGGGUUCACGGGAGUGCAGC | 21 | 15534 |
| HSV1-UL30-6595 | − | UACGGGUUCACGGGAGUGCAGC | 22 | 15535 |
| HSV1-UL30-6596 | − | GUACGGGUUCACGGGAGUGCAGC | 23 | 15536 |
| HSV1-UL30-6597 | − | UGUACGGGUUCACGGGAGUGCAGC | 24 | 15537 |
| HSV1-UL30-6598 | − | AGGAGGGCGGGGGCGAGC | 18 | 15538 |
| HSV1-UL30-6599 | − | GAGGAGGGCGGGGGCGAGC | 19 | 15539 |
| HSV1-UL30-587 | − | CGAGGAGGGCGGGGGCGAGC | 20 | 3525 |
| HSV1-UL30-6600 | − | GCGAGGAGGGCGGGGGCGAGC | 21 | 15540 |
| HSV1-UL30-6601 | − | CGCGAGGAGGGCGGGGGCGAGC | 22 | 15541 |
| HSV1-UL30-6602 | − | ACGCGAGGAGGGCGGGGGCGAGC | 23 | 15542 |
| HSV1-UL30-6603 | − | AACGCGAGGAGGGCGGGGGCGAGC | 24 | 15543 |
| HSV1-UL30-6604 | − | GCGGGGGCGAGCGGGAGC | 18 | 15544 |
| HSV1-UL30-6605 | − | GGCGGGGGCGAGCGGGAGC | 19 | 15545 |
| HSV1-UL30-588 | − | GGGCGGGGGCGAGCGGGAGC | 20 | 3526 |
| HSV1-UL30-6606 | − | AGGGCGGGGGCGAGCGGGAGC | 21 | 15546 |
| HSV1-UL30-6607 | − | GAGGGCGGGGGCGAGCGGGAGC | 22 | 15547 |
| HSV1-UL30-6608 | − | GGAGGGCGGGGGCGAGCGGGAGC | 23 | 15548 |
| HSV1-UL30-6609 | − | AGGAGGGCGGGGGCGAGCGGGAGC | 24 | 15549 |
| HSV1-UL30-6610 | − | GAGGACGAGGACGAACGC | 18 | 15550 |
| HSV1-UL30-6611 | − | GGAGGACGAGGACGAACGC | 19 | 15551 |
| HSV1-UL30-1912 | − | GGGAGGACGAGGACGAACGC | 20 | 4954 |
| HSV1-UL30-6612 | − | GGGGAGGACGAGGACGAACGC | 21 | 15552 |
| HSV1-UL30-6613 | − | GGGGGAGGACGAGGACGAACGC | 22 | 15553 |
| HSV1-UL30-6614 | − | AGGGGGAGGACGAGGACGAACGC | 23 | 15554 |
| HSV1-UL30-6615 | − | GAGGGGGAGGACGAGGACGAACGC | 24 | 15555 |
| HSV1-UL30-6616 | − | CUGGACGGGUACGGCCGC | 18 | 15556 |
| HSV1-UL30-6617 | − | CCUGGACGGGUACGGCCGC | 19 | 15557 |
| HSV1-UL30-1848 | − | CCCUGGACGGGUACGGCCGC | 20 | 4898 |
| HSV1-UL30-6618 | − | CCCCUGGACGGGUACGGCCGC | 21 | 15558 |
| HSV1-UL30-6619 | − | CCCCCUGGACGGGUACGGCCGC | 22 | 15559 |
| HSV1-UL30-6620 | − | UCCCCCUGGACGGGUACGGCCGC | 23 | 15560 |
| HSV1-UL30-6621 | − | GUCCCCCUGGACGGGUACGGCCGC | 24 | 15561 |
| HSV1-UL30-6622 | − | GGGAGCCGGAGGGCGCGC | 18 | 15562 |
| HSV1-UL30-6623 | − | CGGGAGCCGGAGGGCGCGC | 19 | 15563 |
| HSV1-UL30-592 | − | GCGGGAGCCGGAGGGCGCGC | 20 | 3530 |
| HSV1-UL30-6624 | − | AGCGGGAGCCGGAGGGCGCGC | 21 | 15564 |
| HSV1-UL30-6625 | − | GAGCGGGAGCCGGAGGGCGCGC | 22 | 15565 |
| HSV1-UL30-6626 | − | CGAGCGGGAGCCGGAGGGCGCGC | 23 | 15566 |
| HSV1-UL30-6627 | − | GCGAGCGGGAGCCGGAGGGCGCGC | 24 | 15567 |
| HSV1-UL30-6628 | − | GCGGGAGCCGGAGGGCGC | 18 | 15568 |
| HSV1-UL30-6629 | − | AGCGGGAGCCGGAGGGCGC | 19 | 15569 |
| HSV1-UL30-1925 | − | GAGCGGGAGCCGGAGGGCGC | 20 | 4961 |
| HSV1-UL30-6630 | − | CGAGCGGGAGCCGGAGGGCGC | 21 | 15570 |
| HSV1-UL30-6631 | − | GCGAGCGGGAGCCGGAGGGCGC | 22 | 15571 |
| HSV1-UL30-6632 | − | GGCGAGCGGGAGCCGGAGGGCGC | 23 | 15572 |
| HSV1-UL30-6633 | − | GGGCGAGCGGGAGCCGGAGGGCGC | 24 | 15573 |
| HSV1-UL30-6634 | − | GGGGCGAUUUAGGGGCGC | 18 | 15574 |
| HSV1-UL30-6635 | − | AGGGGCGAUUUAGGGGCGC | 19 | 15575 |
| HSV1-UL30-1884 | − | CAGGGGCGAUUUAGGGGCGC | 20 | 4933 |
| HSV1-UL30-6636 | − | CCAGGGGCGAUUUAGGGGCGC | 21 | 15576 |
| HSV1-UL30-6637 | − | CCCAGGGGCGAUUUAGGGGCGC | 22 | 15577 |
| HSV1-UL30-6638 | − | ACCCAGGGGCGAUUUAGGGGCGC | 23 | 15578 |
| HSV1-UL30-6639 | − | CACCCAGGGGCGAUUUAGGGGCGC | 24 | 15579 |
| HSV1-UL30-6640 | − | CGAUAUCGAAUGCAAGGC | 18 | 15580 |
| HSV1-UL30-6641 | − | UCGAUAUCGAAUGCAAGGC | 19 | 15581 |
| HSV1-UL30-1819 | − | UUCGAUAUCGAAUGCAAGGC | 20 | 4869 |
| HSV1-UL30-6642 | − | CUUCGAUAUCGAAUGCAAGGC | 21 | 15582 |
| HSV1-UL30-6643 | − | GCUUCGAUAUCGAAUGCAAGGC | 22 | 15583 |
| HSV1-UL30-6644 | − | UGCUUCGAUAUCGAAUGCAAGGC | 23 | 15584 |
| HSV1-UL30-6645 | − | GUGCUUCGAUAUCGAAUGCAAGGC | 24 | 15585 |
| HSV1-UL30-6646 | − | CGCGUGUGGGACAUAGGC | 18 | 15586 |
| HSV1-UL30-6647 | − | UCGCGUGUGGGACAUAGGC | 19 | 15587 |
| HSV1-UL30-1853 | − | UUCGCGUGUGGGACAUAGGC | 20 | 4903 |
| HSV1-UL30-6648 | − | UUUCGCGUGUGGGACAUAGGC | 21 | 15588 |
| HSV1-UL30-6649 | − | GUUUCGCGUGUGGGACAUAGGC | 22 | 15589 |
| HSV1-UL30-6650 | − | UGUUUCGCGUGUGGGACAUAGGC | 23 | 15590 |
| HSV1-UL30-6651 | − | GUGUUUCGCGUGUGGGACAUAGGC | 24 | 15591 |
| HSV1-UL30-6652 | − | UACGGCCGCAUGAACGGC | 18 | 15592 |
| HSV1-UL30-6653 | − | GUACGGCCGCAUGAACGGC | 19 | 15593 |
| HSV1-UL30-1850 | − | GGUACGGCCGCAUGAACGGC | 20 | 4900 |
| HSV1-UL30-6654 | − | GGGUACGGCCGCAUGAACGGC | 21 | 15594 |
| HSV1-UL30-6655 | − | CGGGUACGGCCGCAUGAACGGC | 22 | 15595 |
| HSV1-UL30-6656 | − | ACGGGUACGGCCGCAUGAACGGC | 23 | 15596 |
| HSV1-UL30-6657 | − | GACGGGUACGGCCGCAUGAACGGC | 24 | 15597 |
| HSV1-UL30-6658 | − | GGGAGGACGAGGAGCGGC | 18 | 15598 |
| HSV1-UL30-6659 | − | CGGGAGGACGAGGAGCGGC | 19 | 15599 |
| HSV1-UL30-1897 | − | CCGGGAGGACGAGGAGCGGC | 20 | 4945 |
| HSV1-UL30-6660 | − | CCCGGGAGGACGAGGAGCGGC | 21 | 15600 |
| HSV1-UL30-6661 | − | GCCCGGGAGGACGAGGAGCGGC | 22 | 15601 |
| HSV1-UL30-6662 | − | AGCCCGGGAGGACGAGGAGCGGC | 23 | 15602 |
| HSV1-UL30-6663 | − | CAGCCCGGGAGGACGAGGAGCGGC | 24 | 15603 |
| HSV1-UL30-6664 | − | CCUGAACGAGCUGGCGGC | 18 | 15604 |
| HSV1-UL30-6665 | − | ACCUGAACGAGCUGGCGGC | 19 | 15605 |
| HSV1-UL30-1836 | − | CACCUGAACGAGCUGGCGGC | 20 | 4886 |
| HSV1-UL30-6666 | − | CCACCUGAACGAGCUGGCGGC | 21 | 15606 |
| HSV1-UL30-6667 | − | CCCACCUGAACGAGCUGGCGGC | 22 | 15607 |
| HSV1-UL30-6668 | − | UCCCACCUGAACGAGCUGGCGGC | 23 | 15608 |
| HSV1-UL30-6669 | − | AUCCCACCUGAACGAGCUGGCGGC | 24 | 15609 |
| HSV1-UL30-6670 | − | GACGAACGCGAGGAGGGC | 18 | 15610 |
| HSV1-UL30-6671 | − | GGACGAACGCGAGGAGGGC | 19 | 15611 |
| HSV1-UL30-583 | − | AGGACGAACGCGAGGAGGGC | 20 | 3521 |
| HSV1-UL30-6672 | − | GAGGACGAACGCGAGGAGGGC | 21 | 15612 |
| HSV1-UL30-6673 | − | CGAGGACGAACGCGAGGAGGGC | 22 | 15613 |
| HSV1-UL30-6674 | − | ACGAGGACGAACGCGAGGAGGGC | 23 | 15614 |
| HSV1-UL30-6675 | − | GACGAGGACGAACGCGAGGAGGGC | 24 | 15615 |
| HSV1-UL30-6676 | − | UACCGUCUCAAACCGGGC | 18 | 15616 |
| HSV1-UL30-6677 | − | GUACCGUCUCAAACCGGGC | 19 | 15617 |
| HSV1-UL30-1805 | − | GGUACCGUCUCAAACCGGGC | 20 | 4855 |
| HSV1-UL30-6678 | − | UGGUACCGUCUCAAACCGGGC | 21 | 15618 |
| HSV1-UL30-6679 | − | CUGGUACCGUCUCAAACCGGGC | 22 | 15619 |
| HSV1-UL30-6680 | − | GCUGGUACCGUCUCAAACCGGGC | 23 | 15620 |
| HSV1-UL30-6681 | − | GGCUGGUACCGUCUCAAACCGGGC | 24 | 15621 |
| HSV1-UL30-6682 | − | GCGCACCUGGAGGCGGGC | 18 | 15622 |
| HSV1-UL30-6683 | − | GGCGCACCUGGAGGCGGGC | 19 | 15623 |
| HSV1-UL30-1941 | − | UGGCGCACCUGGAGGCGGGC | 20 | 4974 |
| HSV1-UL30-6684 | − | GUGGCGCACCUGGAGGCGGGC | 21 | 15624 |
| HSV1-UL30-6685 | − | AGUGGCGCACCUGGAGGCGGGC | 22 | 15625 |
| HSV1-UL30-6686 | − | CAGUGGCGCACCUGGAGGCGGGC | 23 | 15626 |
| HSV1-UL30-6687 | − | GCAGUGGCGCACCUGGAGGCGGGC | 24 | 15627 |
| HSV1-UL30-6688 | − | CUGGCCAUCGAGGGGGGC | 18 | 15628 |
| HSV1-UL30-6689 | − | CCUGGCCAUCGAGGGGGGC | 19 | 15629 |
| HSV1-UL30-1815 | − | ACCUGGCCAUCGAGGGGGGC | 20 | 4865 |
| HSV1-UL30-6690 | − | AACCUGGCCAUCGAGGGGGGC | 21 | 15630 |
| HSV1-UL30-6691 | − | CAACCUGGCCAUCGAGGGGGGC | 22 | 15631 |
| HSV1-UL30-6692 | − | ACAACCUGGCCAUCGAGGGGGGC | 23 | 15632 |
| HSV1-UL30-6693 | − | GACAACCUGGCCAUCGAGGGGGGC | 24 | 15633 |
| HSV1-UL30-6694 | − | GGCUGGCGCGACCCCUGC | 18 | 15634 |
| HSV1-UL30-6695 | − | UGGCUGGCGCGACCCCUGC | 19 | 15635 |
| HSV1-UL30-1997 | − | GUGGCUGGCGCGACCCCUGC | 20 | 5030 |
| HSV1-UL30-6696 | − | AGUGGCUGGCGCGACCCCUGC | 21 | 15636 |
| HSV1-UL30-6697 | − | GAGUGGCUGGCGCGACCCCUGC | 22 | 15637 |
| HSV1-UL30-6698 | − | GGAGUGGCUGGCGCGACCCCUGC | 23 | 15638 |
| HSV1-UL30-6699 | − | AGGAGUGGCUGGCGCGACCCCUGC | 24 | 15639 |
| HSV1-UL30-6700 | − | UCGUCAAGGCUCACGUGC | 18 | 15640 |
| HSV1-UL30-6701 | − | UUCGUCAAGGCUCACGUGC | 19 | 15641 |
| HSV1-UL30-1951 | − | CUUCGUCAAGGCUCACGUGC | 20 | 4984 |
| HSV1-UL30-6702 | − | UCUUCGUCAAGGCUCACGUGC | 21 | 15642 |
| HSV1-UL30-6703 | − | UUCUUCGUCAAGGCUCACGUGC | 22 | 15643 |
| HSV1-UL30-6704 | − | GUUCUUCGUCAAGGCUCACGUGC | 23 | 15644 |
| HSV1-UL30-6705 | − | UGUUCUUCGUCAAGGCUCACGUGC | 24 | 15645 |
| HSV1-UL30-6706 | − | GACCCGGAGAGGGACAUC | 18 | 15646 |
| HSV1-UL30-6707 | − | CGACCCGGAGAGGGACAUC | 19 | 15647 |
| HSV1-UL30-2007 | − | CCGACCCGGAGAGGGACAUC | 20 | 5040 |
| HSV1-UL30-6708 | − | ACCGACCCGGAGAGGGACAUC | 21 | 15648 |
| HSV1-UL30-6709 | − | CACCGACCCGGAGAGGGACAUC | 22 | 15649 |
| HSV1-UL30-6710 | − | UCACCGACCCGGAGAGGGACAUC | 23 | 15650 |
| HSV1-UL30-6711 | − | AUCACCGACCCGGAGAGGGACAUC | 24 | 15651 |
| HSV1-UL30-6712 | − | UUAAGUUUUUGCCCCAUC | 18 | 15652 |
| HSV1-UL30-6713 | − | UUUAAGUUUUUGCCCCAUC | 19 | 15653 |
| HSV1-UL30-1874 | − | UUUUAAGUUUUUGCCCCAUC | 20 | 4923 |
| HSV1-UL30-6714 | − | UUUUUAAGUUUUUGCCCCAUC | 21 | 15654 |
| HSV1-UL30-6715 | − | UUUUUUAAGUUUUUGCCCCAUC | 22 | 15655 |
| HSV1-UL30-6716 | − | GUUUUUUAAGUUUUUGCCCCAUC | 23 | 15656 |
| HSV1-UL30-6717 | − | UGUUUUUUAAGUUUUUGCCCCAUC | 24 | 15657 |
| HSV1-UL30-6718 | − | AACUUCUGCCCGGCCAUC | 18 | 15658 |
| HSV1-UL30-6719 | − | CAACUUCUGCCCGGCCAUC | 19 | 15659 |
| HSV1-UL30-1796 | − | ACAACUUCUGCCCGGCCAUC | 20 | 4846 |
| HSV1-UL30-6720 | − | GACAACUUCUGCCCGGCCAUC | 21 | 15660 |
| HSV1-UL30-6721 | − | CGACAACUUCUGCCCGGCCAUC | 22 | 15661 |
| HSV1-UL30-6722 | − | GCGACAACUUCUGCCCGGCCAUC | 23 | 15662 |
| HSV1-UL30-6723 | − | UGCGACAACUUCUGCCCGGCCAUC | 24 | 15663 |
| HSV1-UL30-6724 | − | GCGGACAACCUGGCCAUC | 18 | 15664 |
| HSV1-UL30-6725 | − | GGCGGACAACCUGGCCAUC | 19 | 15665 |
| HSV1-UL30-1811 | − | CGGCGGACAACCUGGCCAUC | 20 | 4861 |
| HSV1-UL30-6726 | − | ACGGCGGACAACCUGGCCAUC | 21 | 15666 |
| HSV1-UL30-6727 | − | UACGGCGGACAACCUGGCCAUC | 22 | 15667 |
| HSV1-UL30-6728 | − | GUACGGCGGACAACCUGGCCAUC | 23 | 15668 |
| HSV1-UL30-6729 | − | UGUACGGCGGACAACCUGGCCAUC | 24 | 15669 |
| HSV1-UL30-6730 | − | GCGCAGGUCCCGUCCAUC | 18 | 15670 |
| HSV1-UL30-6731 | − | CGCGCAGGUCCCGUCCAUC | 19 | 15671 |
| HSV1-UL30-2010 | − | GCGCGCAGGUCCCGUCCAUC | 20 | 5043 |
| HSV1-UL30-6732 | − | CGCGCGCAGGUCCCGUCCAUC | 21 | 15672 |
| HSV1-UL30-6733 | − | CCGCGCGCAGGUCCCGUCCAUC | 22 | 15673 |
| HSV1-UL30-6734 | − | GCCGCGCGCAGGUCCCGUCCAUC | 23 | 15674 |
| HSV1-UL30-6735 | − | CGCCGCGCGCAGGUCCCGUCCAUC | 24 | 15675 |
| HSV1-UL30-6736 | − | GGGGGUAAGAUGCUCAUC | 18 | 15676 |
| HSV1-UL30-6737 | − | CGGGGGUAAGAUGCUCAUC | 19 | 15677 |
| HSV1-UL30-1987 | − | ACGGGGGUAAGAUGCUCAUC | 20 | 5020 |
| HSV1-UL30-6738 | − | UACGGGGGUAAGAUGCUCAUC | 21 | 15678 |
| HSV1-UL30-6739 | − | CUACGGGGGUAAGAUGCUCAUC | 22 | 15679 |
| HSV1-UL30-6740 | − | UCUACGGGGGUAAGAUGCUCAUC | 23 | 15680 |
| HSV1-UL30-6741 | − | AUCUACGGGGGUAAGAUGCUCAUC | 24 | 15681 |
| HSV1-UL30-6742 | − | GCCACCACCCGGUUCAUC | 18 | 15682 |
| HSV1-UL30-6743 | − | CGCCACCACCCGGUUCAUC | 19 | 15683 |
| HSV1-UL30-1801 | − | ACGCCACCACCCGGUUCAUC | 20 | 4851 |
| HSV1-UL30-6744 | − | GACGCCACCACCCGGUUCAUC | 21 | 15684 |
| HSV1-UL30-6745 | − | CGACGCCACCACCCGGUUCAUC | 22 | 15685 |
| HSV1-UL30-6746 | − | UCGACGCCACCACCCGGUUCAUC | 23 | 15686 |
| HSV1-UL30-6747 | − | GUCGACGCCACCACCCGGUUCAUC | 24 | 15687 |
| HSV1-UL30-6748 | − | CGCUCCUGGGCCUGACUC | 18 | 15688 |
| HSV1-UL30-6749 | − | ACGCUCCUGGGCCUGACUC | 19 | 15689 |
| HSV1-UL30-1776 | − | CACGCUCCUGGGCCUGACUC | 20 | 4826 |
| HSV1-UL30-6750 | − | UCACGCUCCUGGGCCUGACUC | 21 | 15690 |
| HSV1-UL30-6751 | − | AUCACGCUCCUGGGCCUGACUC | 22 | 15691 |
| HSV1-UL30-6752 | − | CAUCACGCUCCUGGGCCUGACUC | 23 | 15692 |
| HSV1-UL30-6753 | − | UCAUCACGCUCCUGGGCCUGACUC | 24 | 15693 |
| HSV1-UL30-6754 | − | GUUUAUCAACCGCACCUC | 18 | 15694 |
| HSV1-UL30-6755 | − | CGUUUAUCAACCGCACCUC | 19 | 15695 |
| HSV1-UL30-1989 | − | GCGUUUAUCAACCGCACCUC | 20 | 5022 |
| HSV1-UL30-6756 | − | CGCGUUUAUCAACCGCACCUC | 21 | 15696 |
| HSV1-UL30-6757 | − | GCGCGUUUAUCAACCGCACCUC | 22 | 15697 |
| HSV1-UL30-6758 | − | UGCGCGUUUAUCAACCGCACCUC | 23 | 15698 |
| HSV1-UL30-6759 | − | CUGCGCGUUUAUCAACCGCACCUC | 24 | 15699 |
| HSV1-UL30-6760 | − | ACCGACAAGAUCAAGCUC | 18 | 15700 |
| HSV1-UL30-6761 | − | AACCGACAAGAUCAAGCUC | 19 | 15701 |
| HSV1-UL30-1859 | − | UAACCGACAAGAUCAAGCUC | 20 | 4909 |
| HSV1-UL30-6762 | − | AUAACCGACAAGAUCAAGCUC | 21 | 15702 |
| HSV1-UL30-6763 | − | UAUAACCGACAAGAUCAAGCUC | 22 | 15703 |
| HSV1-UL30-6764 | − | UUAUAACCGACAAGAUCAAGCUC | 23 | 15704 |
| HSV1-UL30-6765 | − | AUUAUAACCGACAAGAUCAAGCUC | 24 | 15705 |
| HSV1-UL30-6766 | − | GGGACCGUCAUCACGCUC | 18 | 15706 |
| HSV1-UL30-6767 | − | GGGGACCGUCAUCACGCUC | 19 | 15707 |
| HSV1-UL30-1774 | − | CGGGGACCGUCAUCACGCUC | 20 | 4824 |
| HSV1-UL30-6768 | − | ACGGGGACCGUCAUCACGCUC | 21 | 15708 |
| HSV1-UL30-6769 | − | GACGGGGACCGUCAUCACGCUC | 22 | 15709 |
| HSV1-UL30-6770 | − | CGACGGGGACCGUCAUCACGCUC | 23 | 15710 |
| HSV1-UL30-6771 | − | CCGACGGGGACCGUCAUCACGCUC | 24 | 15711 |
| HSV1-UL30-6772 | − | CCCGAGGAGGCCGUGCUC | 18 | 15712 |
| HSV1-UL30-6773 | − | CCCCGAGGAGGCCGUGCUC | 19 | 15713 |
| HSV1-UL30-1961 | − | GCCCCGAGGAGGCCGUGCUC | 20 | 4994 |
| HSV1-UL30-6774 | − | AGCCCCGAGGAGGCCGUGCUC | 21 | 15714 |
| HSV1-UL30-6775 | − | CAGCCCCGAGGAGGCCGUGCUC | 22 | 15715 |
| HSV1-UL30-6776 | − | GCAGCCCCGAGGAGGCCGUGCUC | 23 | 15716 |
| HSV1-UL30-6777 | − | AGCAGCCCCGAGGAGGCCGUGCUC | 24 | 15717 |
| HSV1-UL30-6778 | − | UUACGACGAUACCGUCUC | 18 | 15718 |
| HSV1-UL30-6779 | − | UUUACGACGAUACCGUCUC | 19 | 15719 |
| HSV1-UL30-1991 | − | UUUUACGACGAUACCGUCUC | 20 | 5024 |
| HSV1-UL30-6780 | − | GUUUUACGACGAUACCGUCUC | 21 | 15720 |
| HSV1-UL30-6781 | − | UGUUUUACGACGAUACCGUCUC | 22 | 15721 |
| HSV1-UL30-6782 | − | CUGUUUUACGACGAUACCGUCUC | 23 | 15722 |
| HSV1-UL30-6783 | − | GCUGUUUUACGACGAUACCGUCUC | 24 | 15723 |
| HSV1-UL30-6784 | − | GCCGUGGCCGAAGCCGUC | 18 | 15724 |
| HSV1-UL30-6785 | − | CGCCGUGGCCGAAGCCGUC | 19 | 15725 |
| HSV1-UL30-1861 | − | ACGCCGUGGCCGAAGCCGUC | 20 | 4911 |
| HSV1-UL30-6786 | − | AACGCCGUGGCCGAAGCCGUC | 21 | 15726 |
| HSV1-UL30-6787 | − | CAACGCCGUGGCCGAAGCCGUC | 22 | 15727 |
| HSV1-UL30-6788 | − | UCAACGCCGUGGCCGAAGCCGUC | 23 | 15728 |
| HSV1-UL30-6789 | − | CUCAACGCCGUGGCCGAAGCCGUC | 24 | 15729 |
| HSV1-UL30-6790 | − | UGUUAAAAAGGUUUAUUC | 18 | 15730 |
| HSV1-UL30-6791 | − | CUGUUAAAAAGGUUUAUUC | 19 | 15731 |
| HSV1-UL30-2040 | − | UCUGUUAAAAAGGUUUAUUC | 20 | 5073 |
| HSV1-UL30-6792 | − | GUCUGUUAAAAAGGUUUAUUC | 21 | 15732 |
| HSV1-UL30-6793 | − | AGUCUGUUAAAAAGGUUUAUUC | 22 | 15733 |
| HSV1-UL30-6794 | − | GAGUCUGUUAAAAAGGUUUAUUC | 23 | 15734 |
| HSV1-UL30-6795 | − | AGAGUCUGUUAAAAAGGUUUAUUC | 24 | 15735 |
| HSV1-UL30-6796 | − | AUAGGCCAGAGCCACUUC | 18 | 15736 |
| HSV1-UL30-6797 | − | CAUAGGCCAGAGCCACUUC | 19 | 15737 |
| HSV1-UL30-1854 | − | ACAUAGGCCAGAGCCACUUC | 20 | 4904 |
| HSV1-UL30-6798 | − | GACAUAGGCCAGAGCCACUUC | 21 | 15738 |
| HSV1-UL30-6799 | − | GGACAUAGGCCAGAGCCACUUC | 22 | 15739 |
| HSV1-UL30-6800 | − | GGGACAUAGGCCAGAGCCACUUC | 23 | 15740 |
| HSV1-UL30-6801 | − | UGGGACAUAGGCCAGAGCCACUUC | 24 | 15741 |
| HSV1-UL30-6802 | − | AACUCGGUGUACGGGUUC | 18 | 15742 |
| HSV1-UL30-6803 | − | UAACUCGGUGUACGGGUUC | 19 | 15743 |
| HSV1-UL30-1963 | − | GUAACUCGGUGUACGGGUUC | 20 | 4996 |
| HSV1-UL30-6804 | − | UGUAACUCGGUGUACGGGUUC | 21 | 15744 |
| HSV1-UL30-6805 | − | GUGUAACUCGGUGUACGGGUUC | 22 | 15745 |
| HSV1-UL30-6806 | − | UGUGUAACUCGGUGUACGGGUUC | 23 | 15746 |
| HSV1-UL30-6807 | − | GUGUGUAACUCGGUGUACGGGUUC | 24 | 15747 |
| HSV1-UL30-6808 | − | CAGCUCCUGGCCGAUUUC | 18 | 15748 |
| HSV1-UL30-6809 | − | ACAGCUCCUGGCCGAUUUC | 19 | 15749 |
| HSV1-UL30-1971 | − | AACAGCUCCUGGCCGAUUUC | 20 | 5004 |
| HSV1-UL30-6810 | − | GAACAGCUCCUGGCCGAUUUC | 21 | 15750 |
| HSV1-UL30-6811 | − | CGAACAGCUCCUGGCCGAUUUC | 22 | 15751 |
| HSV1-UL30-6812 | − | UCGAACAGCUCCUGGCCGAUUUC | 23 | 15752 |
| HSV1-UL30-6813 | − | UUCGAACAGCUCCUGGCCGAUUUC | 24 | 15753 |
| HSV1-UL30-6814 | − | AAGCGCAGCAAGAUAAAG | 18 | 15754 |
| HSV1-UL30-6815 | − | GAAGCGCAGCAAGAUAAAG | 19 | 15755 |
| HSV1-UL30-1855 | − | AGAAGCGCAGCAAGAUAAAG | 20 | 4905 |
| HSV1-UL30-6816 | − | CAGAAGCGCAGCAAGAUAAAG | 21 | 15756 |
| HSV1-UL30-6817 | − | CCAGAAGCGCAGCAAGAUAAAG | 22 | 15757 |
| HSV1-UL30-6818 | − | UCCAGAAGCGCAGCAAGAUAAAG | 23 | 15758 |
| HSV1-UL30-6819 | − | UUCCAGAAGCGCAGCAAGAUAAAG | 24 | 15759 |
| HSV1-UL30-6820 | − | UACUUUUACAUGAACAAG | 18 | 15760 |
| HSV1-UL30-6821 | − | GUACUUUUACAUGAACAAG | 19 | 15761 |
| HSV1-UL30-1781 | − | AGUACUUUUACAUGAACAAG | 20 | 4831 |
| HSV1-UL30-6822 | − | CAGUACUUUUACAUGAACAAG | 21 | 15762 |
| HSV1-UL30-6823 | − | GCAGUACUUUUACAUGAACAAG | 22 | 15763 |
| HSV1-UL30-6824 | − | GGCAGUACUUUUACAUGAACAAG | 23 | 15764 |
| HSV1-UL30-6825 | − | CGGCAGUACUUUUACAUGAACAAG | 24 | 15765 |
| HSV1-UL30-6826 | − | GCCGUCCUGAAGGACAAG | 18 | 15766 |
| HSV1-UL30-6827 | − | AGCCGUCCUGAAGGACAAG | 19 | 15767 |
| HSV1-UL30-1864 | − | AAGCCGUCCUGAAGGACAAG | 20 | 4914 |
| HSV1-UL30-6828 | − | GAAGCCGUCCUGAAGGACAAG | 21 | 15768 |
| HSV1-UL30-6829 | − | CGAAGCCGUCCUGAAGGACAAG | 22 | 15769 |
| HSV1-UL30-6830 | − | CCGAAGCCGUCCUGAAGGACAAG | 23 | 15770 |
| HSV1-UL30-6831 | − | GCCGAAGCCGUCCUGAAGGACAAG | 24 | 15771 |
| HSV1-UL30-6832 | − | UUCGAUAUCGAAUGCAAG | 18 | 15772 |
| HSV1-UL30-6833 | − | CUUCGAUAUCGAAUGCAAG | 19 | 15773 |
| HSV1-UL30-1817 | − | GCUUCGAUAUCGAAUGCAAG | 20 | 4867 |
| HSV1-UL30-6834 | − | UGCUUCGAUAUCGAAUGCAAG | 21 | 15774 |
| HSV1-UL30-6835 | − | GUGCUUCGAUAUCGAAUGCAAG | 22 | 15775 |
| HSV1-UL30-6836 | − | UGUGCUUCGAUAUCGAAUGCAAG | 23 | 15776 |
| HSV1-UL30-6837 | − | AUGUGCUUCGAUAUCGAAUGCAAG | 24 | 15777 |
| HSV1-UL30-6838 | − | GUCCUGAAGGACAAGAAG | 18 | 15778 |
| HSV1-UL30-6839 | − | CGUCCUGAAGGACAAGAAG | 19 | 15779 |
| HSV1-UL30-1865 | − | CCGUCCUGAAGGACAAGAAG | 20 | 4915 |
| HSV1-UL30-6840 | − | GCCGUCCUGAAGGACAAGAAG | 21 | 15780 |
| HSV1-UL30-6841 | − | AGCCGUCCUGAAGGACAAGAAG | 22 | 15781 |
| HSV1-UL30-6842 | − | AAGCCGUCCUGAAGGACAAGAAG | 23 | 15782 |
| HSV1-UL30-6843 | − | GAAGCCGUCCUGAAGGACAAGAAG | 24 | 15783 |
| HSV1-UL30-6844 | − | CUGCGCCUGGCCGACCAG | 18 | 15784 |
| HSV1-UL30-6845 | − | GCUGCGCCUGGCCGACCAG | 19 | 15785 |
| HSV1-UL30-1877 | − | UGCUGCGCCUGGCCGACCAG | 20 | 4926 |
| HSV1-UL30-6846 | − | CUGCUGCGCCUGGCCGACCAG | 21 | 15786 |
| HSV1-UL30-6847 | − | CCUGCUGCGCCUGGCCGACCAG | 22 | 15787 |
| HSV1-UL30-6848 | − | GCCUGCUGCGCCUGGCCGACCAG | 23 | 15788 |
| HSV1-UL30-6849 | − | UGCCUGCUGCGCCUGGCCGACCAG | 24 | 15789 |
| HSV1-UL30-6850 | − | AGGACGAGGAGCGGCCAG | 18 | 15790 |
| HSV1-UL30-6851 | − | GAGGACGAGGAGCGGCCAG | 19 | 15791 |
| HSV1-UL30-571 | − | GGAGGACGAGGAGCGGCCAG | 20 | 3509 |
| HSV1-UL30-6852 | − | GGGAGGACGAGGAGCGGCCAG | 21 | 15792 |
| HSV1-UL30-6853 | − | CGGGAGGACGAGGAGCGGCCAG | 22 | 15793 |
| HSV1-UL30-6854 | − | CCGGGAGGACGAGGAGCGGCCAG | 23 | 15794 |
| HSV1-UL30-6855 | − | CCCGGGAGGACGAGGAGCGGCCAG | 24 | 15795 |
| HSV1-UL30-6856 | − | GACGAGGAGCGGCCAGAG | 18 | 15796 |
| HSV1-UL30-6857 | − | GGACGAGGAGCGGCCAGAG | 19 | 15797 |
| HSV1-UL30-1900 | − | AGGACGAGGAGCGGCCAGAG | 20 | 4947 |
| HSV1-UL30-6858 | − | GAGGACGAGGAGCGGCCAGAG | 21 | 15798 |
| HSV1-UL30-6859 | − | GGAGGACGAGGAGCGGCCAGAG | 22 | 15799 |
| HSV1-UL30-6860 | − | GGGAGGACGAGGAGCGGCCAGAG | 23 | 15800 |
| HSV1-UL30-6861 | − | CGGGAGGACGAGGAGCGGCCAGAG | 24 | 15801 |
| HSV1-UL30-6862 | − | GACGAGGACGAACGCGAG | 18 | 15802 |
| HSV1-UL30-6863 | − | GGACGAGGACGAACGCGAG | 19 | 15803 |
| HSV1-UL30-1914 | − | AGGACGAGGACGAACGCGAG | 20 | 4955 |
| HSV1-UL30-6864 | − | GAGGACGAGGACGAACGCGAG | 21 | 15804 |
| HSV1-UL30-6865 | − | GGAGGACGAGGACGAACGCGAG | 22 | 15805 |
| HSV1-UL30-6866 | − | GGGAGGACGAGGACGAACGCGAG | 23 | 15806 |
| HSV1-UL30-6867 | − | GGGGAGGACGAGGACGAACGCGAG | 24 | 15807 |
| HSV1-UL30-6868 | − | GAGGAGGGCGGGGGCGAG | 18 | 15808 |
| HSV1-UL30-6869 | − | CGAGGAGGGCGGGGGCGAG | 19 | 15809 |
| HSV1-UL30-586 | − | GCGAGGAGGGCGGGGGCGAG | 20 | 3524 |
| HSV1-UL30-6870 | − | CGCGAGGAGGGCGGGGGCGAG | 21 | 15810 |
| HSV1-UL30-6871 | − | ACGCGAGGAGGGCGGGGGCGAG | 22 | 15811 |
| HSV1-UL30-6872 | − | AACGCGAGGAGGGCGGGGGCGAG | 23 | 15812 |
| HSV1-UL30-6873 | − | GAACGCGAGGAGGGCGGGGGCGAG | 24 | 15813 |
| HSV1-UL30-6874 | − | GACAACCUGGCCAUCGAG | 18 | 15814 |
| HSV1-UL30-6875 | − | GGACAACCUGGCCAUCGAG | 19 | 15815 |
| HSV1-UL30-1814 | − | CGGACAACCUGGCCAUCGAG | 20 | 4864 |
| HSV1-UL30-6876 | − | GCGGACAACCUGGCCAUCGAG | 21 | 15816 |
| HSV1-UL30-6877 | − | GGCGGACAACCUGGCCAUCGAG | 22 | 15817 |
| HSV1-UL30-6878 | − | CGGCGGACAACCUGGCCAUCGAG | 23 | 15818 |
| HSV1-UL30-6879 | − | ACGGCGGACAACCUGGCCAUCGAG | 24 | 15819 |
| HSV1-UL30-6880 | − | GACUACCUGGAGAUCGAG | 18 | 15820 |
| HSV1-UL30-6881 | − | GGACUACCUGGAGAUCGAG | 19 | 15821 |
| HSV1-UL30-1945 | − | AGGACUACCUGGAGAUCGAG | 20 | 4978 |
| HSV1-UL30-6882 | − | AAGGACUACCUGGAGAUCGAG | 21 | 15822 |
| HSV1-UL30-6883 | − | CAAGGACUACCUGGAGAUCGAG | 22 | 15823 |
| HSV1-UL30-6884 | − | GCAAGGACUACCUGGAGAUCGAG | 23 | 15824 |
| HSV1-UL30-6885 | − | GGCAAGGACUACCUGGAGAUCGAG | 24 | 15825 |
| HSV1-UL30-6886 | − | UCCGCGGACCACUUCGAG | 18 | 15826 |
| HSV1-UL30-6887 | − | CUCCGCGGACCACUUCGAG | 19 | 15827 |
| HSV1-UL30-1789 | − | UCUCCGCGGACCACUUCGAG | 20 | 4839 |
| HSV1-UL30-6888 | − | AUCUCCGCGGACCACUUCGAG | 21 | 15828 |
| HSV1-UL30-6889 | − | CAUCUCCGCGGACCACUUCGAG | 22 | 15829 |
| HSV1-UL30-6890 | − | GCAUCUCCGCGGACCACUUCGAG | 23 | 15830 |
| HSV1-UL30-6891 | − | GGCAUCUCCGCGGACCACUUCGAG | 24 | 15831 |
| HSV1-UL30-6892 | − | GAGGAGCGGCCAGAGGAG | 18 | 15832 |
| HSV1-UL30-6893 | − | CGAGGAGCGGCCAGAGGAG | 19 | 15833 |
| HSV1-UL30-1902 | − | ACGAGGAGCGGCCAGAGGAG | 20 | 4948 |
| HSV1-UL30-6894 | − | GACGAGGAGCGGCCAGAGGAG | 21 | 15834 |
| HSV1-UL30-6895 | − | GGACGAGGAGCGGCCAGAGGAG | 22 | 15835 |
| HSV1-UL30-6896 | − | AGGACGAGGAGCGGCCAGAGGAG | 23 | 15836 |
| HSV1-UL30-6897 | − | GAGGACGAGGAGCGGCCAGAGGAG | 24 | 15837 |
| HSV1-UL30-6898 | − | GAGCGGCCAGAGGAGGAG | 18 | 15838 |
| HSV1-UL30-6899 | − | GGAGCGGCCAGAGGAGGAG | 19 | 15839 |
| HSV1-UL30-575 | − | AGGAGCGGCCAGAGGAGGAG | 20 | 3513 |
| HSV1-UL30-6900 | − | GAGGAGCGGCCAGAGGAGGAG | 21 | 15840 |
| HSV1-UL30-6901 | − | CGAGGAGCGGCCAGAGGAGGAG | 22 | 15841 |
| HSV1-UL30-6902 | − | ACGAGGAGCGGCCAGAGGAGGAG | 23 | 15842 |
| HSV1-UL30-6903 | − | GACGAGGAGCGGCCAGAGGAGGAG | 24 | 15843 |
| HSV1-UL30-6904 | − | CGCAUCACCGACCCGGAG | 18 | 15844 |
| HSV1-UL30-6905 | − | GCGCAUCACCGACCCGGAG | 19 | 15845 |
| HSV1-UL30-2006 | − | GGCGCAUCACCGACCCGGAG | 20 | 5039 |
| HSV1-UL30-6906 | − | CGGCGCAUCACCGACCCGGAG | 21 | 15846 |
| HSV1-UL30-6907 | − | UCGGCGCAUCACCGACCCGGAG | 22 | 15847 |
| HSV1-UL30-6908 | − | AUCGGCGCAUCACCGACCCGGAG | 23 | 15848 |
| HSV1-UL30-6909 | − | CAUCGGCGCAUCACCGACCCGGAG | 24 | 15849 |
| HSV1-UL30-6910 | − | GGCGGGGGCGAGCGGGAG | 18 | 15850 |
| HSV1-UL30-6911 | − | GGGCGGGGGCGAGCGGGAG | 19 | 15851 |
| HSV1-UL30-1922 | − | AGGGCGGGGGCGAGCGGGAG | 20 | 4959 |
| HSV1-UL30-6912 | − | GAGGGCGGGGGCGAGCGGGAG | 21 | 15852 |
| HSV1-UL30-6913 | − | GGAGGGCGGGGGCGAGCGGGAG | 22 | 15853 |
| HSV1-UL30-6914 | − | AGGAGGGCGGGGGCGAGCGGGAG | 23 | 15854 |
| HSV1-UL30-6915 | − | GAGGAGGGCGGGGGCGAGCGGGAG | 24 | 15855 |
| HSV1-UL30-6916 | − | GCAGUGGCGCACCUGGAG | 18 | 15856 |
| HSV1-UL30-6917 | − | CGCAGUGGCGCACCUGGAG | 19 | 15857 |
| HSV1-UL30-1940 | − | ACGCAGUGGCGCACCUGGAG | 20 | 4973 |
| HSV1-UL30-6918 | − | GACGCAGUGGCGCACCUGGAG | 21 | 15858 |
| HSV1-UL30-6919 | − | CGACGCAGUGGCGCACCUGGAG | 22 | 15859 |
| HSV1-UL30-6920 | − | CCGACGCAGUGGCGCACCUGGAG | 23 | 15860 |
| HSV1-UL30-6921 | − | GCCGACGCAGUGGCGCACCUGGAG | 24 | 15861 |
| HSV1-UL30-6922 | − | CCCAGACCCGCGAGGUAG | 18 | 15862 |
| HSV1-UL30-6923 | − | GCCCAGACCCGCGAGGUAG | 19 | 15863 |
| HSV1-UL30-2015 | − | GGCCCAGACCCGCGAGGUAG | 20 | 5048 |
| HSV1-UL30-6924 | − | UGGCCCAGACCCGCGAGGUAG | 21 | 15864 |
| HSV1-UL30-6925 | − | GUGGCCCAGACCCGCGAGGUAG | 22 | 15865 |
| HSV1-UL30-6926 | − | CGUGGCCCAGACCCGCGAGGUAG | 23 | 15866 |
| HSV1-UL30-6927 | − | UCGUGGCCCAGACCCGCGAGGUAG | 24 | 15867 |
| HSV1-UL30-6928 | − | GAGCGGCCGCCGCGUUAG | 18 | 15868 |
| HSV1-UL30-6929 | − | GGAGCGGCCGCCGCGUUAG | 19 | 15869 |
| HSV1-UL30-1992 | − | CGGAGCGGCCGCCGCGUUAG | 20 | 5025 |
| HSV1-UL30-6930 | − | CCGGAGCGGCCGCCGCGUUAG | 21 | 15870 |
| HSV1-UL30-6931 | − | UCCGGAGCGGCCGCCGCGUUAG | 22 | 15871 |
| HSV1-UL30-6932 | − | CUCCGGAGCGGCCGCCGCGUUAG | 23 | 15872 |
| HSV1-UL30-6933 | − | UCUCCGGAGCGGCCGCCGCGUUAG | 24 | 15873 |
| HSV1-UL30-6934 | − | CCGCAGCCCGGGAGGACG | 18 | 15874 |
| HSV1-UL30-6935 | − | GCCGCAGCCCGGGAGGACG | 19 | 15875 |
| HSV1-UL30-569 | − | GGCCGCAGCCCGGGAGGACG | 20 | 3507 |
| HSV1-UL30-6936 | − | CGGCCGCAGCCCGGGAGGACG | 21 | 15876 |
| HSV1-UL30-6937 | − | CCGGCCGCAGCCCGGGAGGACG | 22 | 15877 |
| HSV1-UL30-6938 | − | UCCGGCCGCAGCCCGGGAGGACG | 23 | 15878 |
| HSV1-UL30-6939 | − | GUCCGGCCGCAGCCCGGGAGGACG | 24 | 15879 |
| HSV1-UL30-6940 | − | GUGGGUGCCGGCGCUACG | 18 | 15880 |
| HSV1-UL30-6941 | − | GGUGGGUGCCGGCGCUACG | 19 | 15881 |
| HSV1-UL30-2047 | − | CGGUGGGUGCCGGCGCUACG | 20 | 5080 |
| HSV1-UL30-6942 | − | GCGGUGGGUGCCGGCGCUACG | 21 | 15882 |
| HSV1-UL30-6943 | − | GGCGGUGGGUGCCGGCGCUACG | 22 | 15883 |
| HSV1-UL30-6944 | − | GGGCGGUGGGUGCCGGCGCUACG | 23 | 15884 |
| HSV1-UL30-6945 | − | GGGGCGGUGGGUGCCGGCGCUACG | 24 | 15885 |
| HSV1-UL30-6946 | − | GUCGAGUUUAACUGUACG | 18 | 15886 |
| HSV1-UL30-6947 | − | CGUCGAGUUUAACUGUACG | 19 | 15887 |
| HSV1-UL30-1809 | − | ACGUCGAGUUUAACUGUACG | 20 | 4859 |
| HSV1-UL30-6948 | − | GACGUCGAGUUUAACUGUACG | 21 | 15888 |
| HSV1-UL30-6949 | − | CGACGUCGAGUUUAACUGUACG | 22 | 15889 |
| HSV1-UL30-6950 | − | GCGACGUCGAGUUUAACUGUACG | 23 | 15890 |
| HSV1-UL30-6951 | − | AGCGACGUCGAGUUUAACUGUACG | 24 | 15891 |
| HSV1-UL30-6952 | − | AUGGACGCCAUCACACCG | 18 | 15892 |
| HSV1-UL30-6953 | − | UAUGGACGCCAUCACACCG | 19 | 15893 |
| HSV1-UL30-1771 | − | UUAUGGACGCCAUCACACCG | 20 | 4821 |
| HSV1-UL30-6954 | − | UUUAUGGACGCCAUCACACCG | 21 | 15894 |
| HSV1-UL30-6955 | − | GUUUAUGGACGCCAUCACACCG | 22 | 15895 |
| HSV1-UL30-6956 | − | GGUUUAUGGACGCCAUCACACCG | 23 | 15896 |
| HSV1-UL30-6957 | − | CGGUUUAUGGACGCCAUCACACCG | 24 | 15897 |
| HSV1-UL30-6958 | − | AGGACUUUGUCCUCACCG | 18 | 15898 |
| HSV1-UL30-6959 | − | CAGGACUUUGUCCUCACCG | 19 | 15899 |
| HSV1-UL30-2008 | − | CCAGGACUUUGUCCUCACCG | 20 | 5041 |
| HSV1-UL30-6960 | − | UCCAGGACUUUGUCCUCACCG | 21 | 15900 |
| HSV1-UL30-6961 | − | AUCCAGGACUUUGUCCUCACCG | 22 | 15901 |
| HSV1-UL30-6962 | − | CAUCCAGGACUUUGUCCUCACCG | 23 | 15902 |
| HSV1-UL30-6963 | − | ACAUCCAGGACUUUGUCCUCACCG | 24 | 15903 |
| HSV1-UL30-6964 | − | CCGGUGGCCGGGCACCCG | 18 | 15904 |
| HSV1-UL30-6965 | − | UCCGGUGGCCGGGCACCCG | 19 | 15905 |
| HSV1-UL30-1830 | − | UUCCGGUGGCCGGGCACCCG | 20 | 4880 |
| HSV1-UL30-6966 | − | UUUCCGGUGGCCGGGCACCCG | 21 | 15906 |
| HSV1-UL30-6967 | − | CUUUCCGGUGGCCGGGCACCCG | 22 | 15907 |
| HSV1-UL30-6968 | − | CCUUUCCGGUGGCCGGGCACCCG | 23 | 15908 |
| HSV1-UL30-6969 | − | GCCUUUCCGGUGGCCGGGCACCCG | 24 | 15909 |
| HSV1-UL30-6970 | − | CGGCGCAUCACCGACCCG | 18 | 15910 |
| HSV1-UL30-6971 | − | UCGGCGCAUCACCGACCCG | 19 | 15911 |
| HSV1-UL30-2004 | − | AUCGGCGCAUCACCGACCCG | 20 | 5037 |
| HSV1-UL30-6972 | − | CAUCGGCGCAUCACCGACCCG | 21 | 15912 |
| HSV1-UL30-6973 | − | CCAUCGGCGCAUCACCGACCCG | 22 | 15913 |
| HSV1-UL30-6974 | − | CCCAUCGGCGCAUCACCGACCCG | 23 | 15914 |
| HSV1-UL30-6975 | − | GCCCAUCGGCGCAUCACCGACCCG | 24 | 15915 |
| HSV1-UL30-6976 | − | UUCCCCAGAGCAGCCCCG | 18 | 15916 |
| HSV1-UL30-6977 | − | AUUCCCCAGAGCAGCCCCG | 19 | 15917 |
| HSV1-UL30-1960 | − | GAUUCCCCAGAGCAGCCCCG | 20 | 4993 |
| HSV1-UL30-6978 | − | GGAUUCCCCAGAGCAGCCCCG | 21 | 15918 |
| HSV1-UL30-6979 | − | CGGAUUCCCCAGAGCAGCCCCG | 22 | 15919 |
| HSV1-UL30-6980 | − | GCGGAUUCCCCAGAGCAGCCCCG | 23 | 15920 |
| HSV1-UL30-6981 | − | CGCGGAUUCCCCAGAGCAGCCCCG | 24 | 15921 |
| HSV1-UL30-6982 | − | CGUUAGCCGAGCGCCCCG | 18 | 15922 |
| HSV1-UL30-6983 | − | GCGUUAGCCGAGCGCCCCG | 19 | 15923 |
| HSV1-UL30-1994 | − | CGCGUUAGCCGAGCGCCCCG | 20 | 5027 |
| HSV1-UL30-6984 | − | CCGCGUUAGCCGAGCGCCCCG | 21 | 15924 |
| HSV1-UL30-6985 | − | GCCGCGUUAGCCGAGCGCCCCG | 22 | 15925 |
| HSV1-UL30-6986 | − | CGCCGCGUUAGCCGAGCGCCCCG | 23 | 15926 |
| HSV1-UL30-6987 | − | CCGCCGCGUUAGCCGAGCGCCCCG | 24 | 15927 |
| HSV1-UL30-6988 | − | UGGCGCGACCCCUGCCCG | 18 | 15928 |
| HSV1-UL30-6989 | − | CUGGCGCGACCCCUGCCCG | 19 | 15929 |
| HSV1-UL30-1999 | − | GCUGGCGCGACCCCUGCCCG | 20 | 5032 |
| HSV1-UL30-6990 | − | GGCUGGCGCGACCCCUGCCCG | 21 | 15930 |
| HSV1-UL30-6991 | − | UGGCUGGCGCGACCCCUGCCCG | 22 | 15931 |
| HSV1-UL30-6992 | − | GUGGCUGGCGCGACCCCUGCCCG | 23 | 15932 |
| HSV1-UL30-6993 | − | AGUGGCUGGCGCGACCCCUGCCCG | 24 | 15933 |
| HSV1-UL30-6994 | − | GGGGGCGAGCGGGAGCCG | 18 | 15934 |
| HSV1-UL30-6995 | − | CGGGGGCGAGCGGGAGCCG | 19 | 15935 |
| HSV1-UL30-1924 | − | GCGGGGGCGAGCGGGAGCCG | 20 | 4960 |
| HSV1-UL30-6996 | − | GGCGGGGGCGAGCGGGAGCCG | 21 | 15936 |
| HSV1-UL30-6997 | − | GGGCGGGGGCGAGCGGGAGCCG | 22 | 15937 |
| HSV1-UL30-6998 | − | AGGGCGGGGGCGAGCGGGAGCCG | 23 | 15938 |
| HSV1-UL30-6999 | − | GAGGGCGGGGGCGAGCGGGAGCCG | 24 | 15939 |
| HSV1-UL30-7000 | − | UCCCCGCCUACUACGCCG | 18 | 15940 |
| HSV1-UL30-7001 | − | AUCCCCGCCUACUACGCCG | 19 | 15941 |
| HSV1-UL30-1867 | − | CAUCCCCGCCUACUACGCCG | 20 | 4917 |
| HSV1-UL30-7002 | − | ACAUCCCCGCCUACUACGCCG | 21 | 15942 |
| HSV1-UL30-7003 | − | GACAUCCCCGCCUACUACGCCG | 22 | 15943 |
| HSV1-UL30-7004 | − | CGACAUCCCCGCCUACUACGCCG | 23 | 15944 |
| HSV1-UL30-7005 | − | GCGACAUCCCCGCCUACUACGCCG | 24 | 15945 |
| HSV1-UL30-7006 | − | GGCGAUUUAGGGGCGCCG | 18 | 15946 |
| HSV1-UL30-7007 | − | GGGCGAUUUAGGGGCGCCG | 19 | 15947 |
| HSV1-UL30-1886 | − | GGGGCGAUUUAGGGGCGCCG | 20 | 4935 |
| HSV1-UL30-7008 | − | AGGGGCGAUUUAGGGGCGCCG | 21 | 15948 |
| HSV1-UL30-7009 | − | CAGGGGCGAUUUAGGGGCGCCG | 22 | 15949 |
| HSV1-UL30-7010 | − | CCAGGGGCGAUUUAGGGGCGCCG | 23 | 15950 |
| HSV1-UL30-7011 | − | CCCAGGGGCGAUUUAGGGGCGCCG | 24 | 15951 |
| HSV1-UL30-7012 | − | GCCGCGGCCUCACGGCCG | 18 | 15952 |
| HSV1-UL30-7013 | − | UGCCGCGGCCUCACGGCCG | 19 | 15953 |
| HSV1-UL30-1978 | − | GUGCCGCGGCCUCACGGCCG | 20 | 5011 |
| HSV1-UL30-7014 | − | UGUGCCGCGGCCUCACGGCCG | 21 | 15954 |
| HSV1-UL30-7015 | − | CUGUGCCGCGGCCUCACGGCCG | 22 | 15955 |
| HSV1-UL30-7016 | − | GCUGUGCCGCGGCCUCACGGCCG | 23 | 15956 |
| HSV1-UL30-7017 | − | UGCUGUGCCGCGGCCUCACGGCCG | 24 | 15957 |
| HSV1-UL30-7018 | − | AGGACGAGGACGAACGCG | 18 | 15958 |
| HSV1-UL30-7019 | − | GAGGACGAGGACGAACGCG | 19 | 15959 |
| HSV1-UL30-579 | − | GGAGGACGAGGACGAACGCG | 20 | 3517 |
| HSV1-UL30-7020 | − | GGGAGGACGAGGACGAACGCG | 21 | 15960 |
| HSV1-UL30-7021 | − | GGGGAGGACGAGGACGAACGCG | 22 | 15961 |
| HSV1-UL30-7022 | − | GGGGGAGGACGAGGACGAACGCG | 23 | 15962 |
| HSV1-UL30-7023 | − | AGGGGGAGGACGAGGACGAACGCG | 24 | 15963 |
| HSV1-UL30-7024 | − | UUAGCCGAGCGCCCCGCG | 18 | 15964 |
| HSV1-UL30-7025 | − | GUUAGCCGAGCGCCCCGCG | 19 | 15965 |
| HSV1-UL30-1995 | − | CGUUAGCCGAGCGCCCCGCG | 20 | 5028 |
| HSV1-UL30-7026 | − | GCGUUAGCCGAGCGCCCCGCG | 21 | 15966 |
| HSV1-UL30-7027 | − | CGCGUUAGCCGAGCGCCCCGCG | 22 | 15967 |
| HSV1-UL30-7028 | − | CCGCGUUAGCCGAGCGCCCCGCG | 23 | 15968 |
| HSV1-UL30-7029 | − | GCCGCGUUAGCCGAGCGCCCCGCG | 24 | 15969 |
| HSV1-UL30-7030 | − | CGAGUACGUCCACGCGCG | 18 | 15970 |
| HSV1-UL30-7031 | − | GCGAGUACGUCCACGCGCG | 19 | 15971 |
| HSV1-UL30-1969 | − | CGCGAGUACGUCCACGCGCG | 20 | 5002 |
| HSV1-UL30-7032 | − | CCGCGAGUACGUCCACGCGCG | 21 | 15972 |
| HSV1-UL30-7033 | − | CCCGCGAGUACGUCCACGCGCG | 22 | 15973 |
| HSV1-UL30-7034 | − | ACCCGCGAGUACGUCCACGCGCG | 23 | 15974 |
| HSV1-UL30-7035 | − | GACCCGCGAGUACGUCCACGCGCG | 24 | 15975 |
| HSV1-UL30-7036 | − | CGGGAGCCGGAGGGCGCG | 18 | 15976 |
| HSV1-UL30-7037 | − | GCGGGAGCCGGAGGGCGCG | 19 | 15977 |
| HSV1-UL30-591 | − | AGCGGGAGCCGGAGGGCGCG | 20 | 3529 |
| HSV1-UL30-7038 | − | GAGCGGGAGCCGGAGGGCGCG | 21 | 15978 |
| HSV1-UL30-7039 | − | CGAGCGGGAGCCGGAGGGCGCG | 22 | 15979 |
| HSV1-UL30-7040 | − | GCGAGCGGGAGCCGGAGGGCGCG | 23 | 15980 |
| HSV1-UL30-7041 | − | GGCGAGCGGGAGCCGGAGGGCGCG | 24 | 15981 |
| HSV1-UL30-7042 | − | GAUAUCGAAUGCAAGGCG | 18 | 15982 |
| HSV1-UL30-7043 | − | CGAUAUCGAAUGCAAGGCG | 19 | 15983 |
| HSV1-UL30-1820 | − | UCGAUAUCGAAUGCAAGGCG | 20 | 4870 |
| HSV1-UL30-7044 | − | UUCGAUAUCGAAUGCAAGGCG | 21 | 15984 |
| HSV1-UL30-7045 | − | CUUCGAUAUCGAAUGCAAGGCG | 22 | 15985 |
| HSV1-UL30-7046 | − | GCUUCGAUAUCGAAUGCAAGGCG | 23 | 15986 |
| HSV1-UL30-7047 | − | UGCUUCGAUAUCGAAUGCAAGGCG | 24 | 15987 |
| HSV1-UL30-7048 | − | GGUGCCGGCGCUACGGCG | 18 | 15988 |
| HSV1-UL30-7049 | − | GGGUGCCGGCGCUACGGCG | 19 | 15989 |
| HSV1-UL30-2049 | − | UGGGUGCCGGCGCUACGGCG | 20 | 5082 |
| HSV1-UL30-7050 | − | GUGGGUGCCGGCGCUACGGCG | 21 | 15990 |
| HSV1-UL30-7051 | − | GGUGGGUGCCGGCGCUACGGCG | 22 | 15991 |
| HSV1-UL30-7052 | − | CGGUGGGUGCCGGCGCUACGGCG | 23 | 15992 |
| HSV1-UL30-7053 | − | GCGGUGGGUGCCGGCGCUACGGCG | 24 | 15993 |
| HSV1-UL30-7054 | − | AGGGGCGAUUUAGGGGCG | 18 | 15994 |
| HSV1-UL30-7055 | − | CAGGGGCGAUUUAGGGGCG | 19 | 15995 |
| HSV1-UL30-1883 | − | CCAGGGGCGAUUUAGGGGCG | 20 | 4932 |
| HSV1-UL30-7056 | − | CCCAGGGGCGAUUUAGGGGCG | 21 | 15996 |
| HSV1-UL30-7057 | − | ACCCAGGGGCGAUUUAGGGGCG | 22 | 15997 |
| HSV1-UL30-7058 | − | CACCCAGGGGCGAUUUAGGGGCG | 23 | 15998 |
| HSV1-UL30-7059 | − | ACACCCAGGGGCGAUUUAGGGGCG | 24 | 15999 |
| HSV1-UL30-7060 | − | CGGACAACCUGGCCAUCG | 18 | 16000 |
| HSV1-UL30-7061 | − | GCGGACAACCUGGCCAUCG | 19 | 16001 |
| HSV1-UL30-1812 | − | GGCGGACAACCUGGCCAUCG | 20 | 4862 |
| HSV1-UL30-7062 | − | CGGCGGACAACCUGGCCAUCG | 21 | 16002 |
| HSV1-UL30-7063 | − | ACGGCGGACAACCUGGCCAUCG | 22 | 16003 |
| HSV1-UL30-7064 | − | UACGGCGGACAACCUGGCCAUCG | 23 | 16004 |
| HSV1-UL30-7065 | − | GUACGGCGGACAACCUGGCCAUCG | 24 | 16005 |
| HSV1-UL30-7066 | − | ACUUUUACAUGAACAAGG | 18 | 16006 |
| HSV1-UL30-7067 | − | UACUUUUACAUGAACAAGG | 19 | 16007 |
| HSV1-UL30-1782 | − | GUACUUUUACAUGAACAAGG | 20 | 4832 |
| HSV1-UL30-7068 | − | AGUACUUUUACAUGAACAAGG | 21 | 16008 |
| HSV1-UL30-7069 | − | CAGUACUUUUACAUGAACAAGG | 22 | 16009 |
| HSV1-UL30-7070 | − | GCAGUACUUUUACAUGAACAAGG | 23 | 16010 |
| HSV1-UL30-7071 | − | GGCAGUACUUUUACAUGAACAAGG | 24 | 16011 |
| HSV1-UL30-7072 | − | UCGAUAUCGAAUGCAAGG | 18 | 16012 |
| HSV1-UL30-7073 | − | UUCGAUAUCGAAUGCAAGG | 19 | 16013 |
| HSV1-UL30-1818 | − | CUUCGAUAUCGAAUGCAAGG | 20 | 4868 |
| HSV1-UL30-7074 | − | GCUUCGAUAUCGAAUGCAAGG | 21 | 16014 |
| HSV1-UL30-7075 | − | UGCUUCGAUAUCGAAUGCAAGG | 22 | 16015 |
| HSV1-UL30-7076 | − | GUGCUUCGAUAUCGAAUGCAAGG | 23 | 16016 |
| HSV1-UL30-7077 | − | UGUGCUUCGAUAUCGAAUGCAAGG | 24 | 16017 |
| HSV1-UL30-7078 | − | ACGAGGAGCGGCCAGAGG | 18 | 16018 |
| HSV1-UL30-7079 | − | GACGAGGAGCGGCCAGAGG | 19 | 16019 |
| HSV1-UL30-572 | − | GGACGAGGAGCGGCCAGAGG | 20 | 3510 |
| HSV1-UL30-7080 | − | AGGACGAGGAGCGGCCAGAGG | 21 | 16020 |
| HSV1-UL30-7081 | − | GAGGACGAGGAGCGGCCAGAGG | 22 | 16021 |
| HSV1-UL30-7082 | − | GGAGGACGAGGAGCGGCCAGAGG | 23 | 16022 |
| HSV1-UL30-7083 | − | GGGAGGACGAGGAGCGGCCAGAGG | 24 | 16023 |
| HSV1-UL30-7084 | − | AGGAGGGGGAGGACGAGG | 18 | 16024 |
| HSV1-UL30-7085 | − | GAGGAGGGGGAGGACGAGG | 19 | 16025 |
| HSV1-UL30-1910 | − | GGAGGAGGGGGAGGACGAGG | 20 | 4952 |
| HSV1-UL30-7086 | − | AGGAGGAGGGGGAGGACGAGG | 21 | 16026 |
| HSV1-UL30-7087 | − | GAGGAGGAGGGGGAGGACGAGG | 22 | 16027 |
| HSV1-UL30-7088 | − | AGAGGAGGAGGGGGAGGACGAGG | 23 | 16028 |
| HSV1-UL30-7089 | − | CAGAGGAGGAGGGGGAGGACGAGG | 24 | 16029 |
| HSV1-UL30-7090 | − | CCAUCAAGAAGUACGAGG | 18 | 16030 |
| HSV1-UL30-7091 | − | GCCAUCAAGAAGUACGAGG | 19 | 16031 |
| HSV1-UL30-1799 | − | GGCCAUCAAGAAGUACGAGG | 20 | 4849 |
| HSV1-UL30-7092 | − | CGGCCAUCAAGAAGUACGAGG | 21 | 16032 |
| HSV1-UL30-7093 | − | CCGGCCAUCAAGAAGUACGAGG | 22 | 16033 |
| HSV1-UL30-7094 | − | CCCGGCCAUCAAGAAGUACGAGG | 23 | 16034 |
| HSV1-UL30-7095 | − | GCCCGGCCAUCAAGAAGUACGAGG | 24 | 16035 |
| HSV1-UL30-7096 | − | UGGCCCAGACCCGCGAGG | 18 | 16036 |
| HSV1-UL30-7097 | − | GUGGCCCAGACCCGCGAGG | 19 | 16037 |
| HSV1-UL30-2013 | − | CGUGGCCCAGACCCGCGAGG | 20 | 5046 |
| HSV1-UL30-7098 | − | UCGUGGCCCAGACCCGCGAGG | 21 | 16038 |
| HSV1-UL30-7099 | − | AUCGUGGCCCAGACCCGCGAGG | 22 | 16039 |
| HSV1-UL30-7100 | − | GAUCGUGGCCCAGACCCGCGAGG | 23 | 16040 |
| HSV1-UL30-7101 | − | UGAUCGUGGCCCAGACCCGCGAGG | 24 | 16041 |
| HSV1-UL30-7102 | − | ACUACCUGGAGAUCGAGG | 18 | 16042 |
| HSV1-UL30-7103 | − | GACUACCUGGAGAUCGAGG | 19 | 16043 |
| HSV1-UL30-1946 | − | GGACUACCUGGAGAUCGAGG | 20 | 4979 |
| HSV1-UL30-7104 | − | AGGACUACCUGGAGAUCGAGG | 21 | 16044 |
| HSV1-UL30-7105 | − | AAGGACUACCUGGAGAUCGAGG | 22 | 16045 |
| HSV1-UL30-7106 | − | CAAGGACUACCUGGAGAUCGAGG | 23 | 16046 |
| HSV1-UL30-7107 | − | GCAAGGACUACCUGGAGAUCGAGG | 24 | 16047 |
| HSV1-UL30-7108 | − | CCGCGGACCACUUCGAGG | 18 | 16048 |
| HSV1-UL30-7109 | − | UCCGCGGACCACUUCGAGG | 19 | 16049 |
| HSV1-UL30-1790 | − | CUCCGCGGACCACUUCGAGG | 20 | 4840 |
| HSV1-UL30-7110 | − | UCUCCGCGGACCACUUCGAGG | 21 | 16050 |
| HSV1-UL30-7111 | − | AUCUCCGCGGACCACUUCGAGG | 22 | 16051 |
| HSV1-UL30-7112 | − | CAUCUCCGCGGACCACUUCGAGG | 23 | 16052 |
| HSV1-UL30-7113 | − | GCAUCUCCGCGGACCACUUCGAGG | 24 | 16053 |
| HSV1-UL30-7114 | − | AGGAGCGGCCAGAGGAGG | 18 | 16054 |
| HSV1-UL30-7115 | − | GAGGAGCGGCCAGAGGAGG | 19 | 16055 |
| HSV1-UL30-573 | − | CGAGGAGCGGCCAGAGGAGG | 20 | 3511 |
| HSV1-UL30-7116 | − | ACGAGGAGCGGCCAGAGGAGG | 21 | 16056 |
| HSV1-UL30-7117 | − | GACGAGGAGCGGCCAGAGGAGG | 22 | 16057 |
| HSV1-UL30-7118 | − | GGACGAGGAGCGGCCAGAGGAGG | 23 | 16058 |
| HSV1-UL30-7119 | − | AGGACGAGGAGCGGCCAGAGGAGG | 24 | 16059 |
| HSV1-UL30-7120 | − | AGGACGAACGCGAGGAGG | 18 | 16060 |
| HSV1-UL30-7121 | − | GAGGACGAACGCGAGGAGG | 19 | 16061 |
| HSV1-UL30-1915 | − | CGAGGACGAACGCGAGGAGG | 20 | 4956 |
| HSV1-UL30-7122 | − | ACGAGGACGAACGCGAGGAGG | 21 | 16062 |
| HSV1-UL30-7123 | − | GACGAGGACGAACGCGAGGAGG | 22 | 16063 |
| HSV1-UL30-7124 | − | GGACGAGGACGAACGCGAGGAGG | 23 | 16064 |
| HSV1-UL30-7125 | − | AGGACGAGGACGAACGCGAGGAGG | 24 | 16065 |
| HSV1-UL30-7126 | − | AGCGGCCAGAGGAGGAGG | 18 | 16066 |
| HSV1-UL30-7127 | − | GAGCGGCCAGAGGAGGAGG | 19 | 16067 |
| HSV1-UL30-576 | − | GGAGCGGCCAGAGGAGGAGG | 20 | 3514 |
| HSV1-UL30-7128 | − | AGGAGCGGCCAGAGGAGGAGG | 21 | 16068 |
| HSV1-UL30-7129 | − | GAGGAGCGGCCAGAGGAGGAGG | 22 | 16069 |
| HSV1-UL30-7130 | − | CGAGGAGCGGCCAGAGGAGGAGG | 23 | 16070 |
| HSV1-UL30-7131 | − | ACGAGGAGCGGCCAGAGGAGGAGG | 24 | 16071 |
| HSV1-UL30-7132 | − | CGGCCGCAGCCCGGGAGG | 18 | 16072 |
| HSV1-UL30-7133 | − | CCGGCCGCAGCCCGGGAGG | 19 | 16073 |
| HSV1-UL30-1894 | − | UCCGGCCGCAGCCCGGGAGG | 20 | 4943 |
| HSV1-UL30-7134 | − | GUCCGGCCGCAGCCCGGGAGG | 21 | 16074 |
| HSV1-UL30-7135 | − | CGUCCGGCCGCAGCCCGGGAGG | 22 | 16075 |
| HSV1-UL30-7136 | − | GCGUCCGGCCGCAGCCCGGGAGG | 23 | 16076 |
| HSV1-UL30-7137 | − | AGCGUCCGGCCGCAGCCCGGGAGG | 24 | 16077 |
| HSV1-UL30-7138 | − | CAGAGGAGGAGGGGGAGG | 18 | 16078 |
| HSV1-UL30-7139 | − | CCAGAGGAGGAGGGGGAGG | 19 | 16079 |
| HSV1-UL30-1908 | − | GCCAGAGGAGGAGGGGGAGG | 20 | 4950 |
| HSV1-UL30-7140 | − | GGCCAGAGGAGGAGGGGGAGG | 21 | 16080 |
| HSV1-UL30-7141 | − | CGGCCAGAGGAGGAGGGGGAGG | 22 | 16081 |
| HSV1-UL30-7142 | − | GCGGCCAGAGGAGGAGGGGGAGG | 23 | 16082 |
| HSV1-UL30-7143 | − | AGCGGCCAGAGGAGGAGGGGGAGG | 24 | 16083 |
| HSV1-UL30-7144 | − | GCAAGGCGGGGGGGGAGG | 18 | 16084 |
| HSV1-UL30-7145 | − | UGCAAGGCGGGGGGGGAGG | 19 | 16085 |
| HSV1-UL30-1826 | − | AUGCAAGGCGGGGGGGGAGG | 20 | 4876 |
| HSV1-UL30-7146 | − | AAUGCAAGGCGGGGGGGGAGG | 21 | 16086 |
| HSV1-UL30-7147 | − | GAAUGCAAGGCGGGGGGGGAGG | 22 | 16087 |
| HSV1-UL30-7148 | − | CGAAUGCAAGGCGGGGGGGGAGG | 23 | 16088 |
| HSV1-UL30-7149 | − | UCGAAUGCAAGGCGGGGGGGGAGG | 24 | 16089 |
| HSV1-UL30-7150 | − | GUACGGCCGCAUGAACGG | 18 | 16090 |
| HSV1-UL30-7151 | − | GGUACGGCCGCAUGAACGG | 19 | 16091 |
| HSV1-UL30-1849 | − | GGGUACGGCCGCAUGAACGG | 20 | 4899 |
| HSV1-UL30-7152 | − | CGGGUACGGCCGCAUGAACGG | 21 | 16092 |
| HSV1-UL30-7153 | − | ACGGGUACGGCCGCAUGAACGG | 22 | 16093 |
| HSV1-UL30-7154 | − | GACGGGUACGGCCGCAUGAACGG | 23 | 16094 |
| HSV1-UL30-7155 | − | GGACGGGUACGGCCGCAUGAACGG | 24 | 16095 |
| HSV1-UL30-7156 | − | UGGGUGCCGGCGCUACGG | 18 | 16096 |
| HSV1-UL30-7157 | − | GUGGGUGCCGGCGCUACGG | 19 | 16097 |
| HSV1-UL30-2048 | − | GGUGGGUGCCGGCGCUACGG | 20 | 5081 |
| HSV1-UL30-7158 | − | CGGUGGGUGCCGGCGCUACGG | 21 | 16098 |
| HSV1-UL30-7159 | − | GCGGUGGGUGCCGGCGCUACGG | 22 | 16099 |
| HSV1-UL30-7160 | − | GGCGGUGGGUGCCGGCGCUACGG | 23 | 16100 |
| HSV1-UL30-7161 | − | GGGCGGUGGGUGCCGGCGCUACGG | 24 | 16101 |
| HSV1-UL30-7162 | − | CGUCCGGCCGCAGCCCGG | 18 | 16102 |
| HSV1-UL30-7163 | − | GCGUCCGGCCGCAGCCCGG | 19 | 16103 |
| HSV1-UL30-1893 | − | AGCGUCCGGCCGCAGCCCGG | 20 | 4942 |
| HSV1-UL30-7164 | − | AAGCGUCCGGCCGCAGCCCGG | 21 | 16104 |
| HSV1-UL30-7165 | − | CAAGCGUCCGGCCGCAGCCCGG | 22 | 16105 |
| HSV1-UL30-7166 | − | CCAAGCGUCCGGCCGCAGCCCGG | 23 | 16106 |
| HSV1-UL30-7167 | − | CCCAAGCGUCCGGCCGCAGCCCGG | 24 | 16107 |
| HSV1-UL30-7168 | − | GCGAUUUAGGGGCGCCGG | 18 | 16108 |
| HSV1-UL30-7169 | − | GGCGAUUUAGGGGCGCCGG | 19 | 16109 |
| HSV1-UL30-1887 | − | GGGCGAUUUAGGGGCGCCGG | 20 | 4936 |
| HSV1-UL30-7170 | − | GGGGCGAUUUAGGGGCGCCGG | 21 | 16110 |
| HSV1-UL30-7171 | − | AGGGGCGAUUUAGGGGCGCCGG | 22 | 16111 |
| HSV1-UL30-7172 | − | CAGGGGCGAUUUAGGGGCGCCGG | 23 | 16112 |
| HSV1-UL30-7173 | − | CCAGGGGCGAUUUAGGGGCGCCGG | 24 | 16113 |
| HSV1-UL30-7174 | − | AUAUCGAAUGCAAGGCGG | 18 | 16114 |
| HSV1-UL30-7175 | − | GAUAUCGAAUGCAAGGCGG | 19 | 16115 |
| HSV1-UL30-1821 | − | CGAUAUCGAAUGCAAGGCGG | 20 | 4871 |
| HSV1-UL30-7176 | − | UCGAUAUCGAAUGCAAGGCGG | 21 | 16116 |
| HSV1-UL30-7177 | − | UUCGAUAUCGAAUGCAAGGCGG | 22 | 16117 |
| HSV1-UL30-7178 | − | CUUCGAUAUCGAAUGCAAGGCGG | 23 | 16118 |
| HSV1-UL30-7179 | − | GCUUCGAUAUCGAAUGCAAGGCGG | 24 | 16119 |
| HSV1-UL30-7180 | − | GUGCCGGCGCUACGGCGG | 18 | 16120 |
| HSV1-UL30-7181 | − | GGUGCCGGCGCUACGGCGG | 19 | 16121 |
| HSV1-UL30-2050 | − | GGGUGCCGGCGCUACGGCGG | 20 | 5083 |
| HSV1-UL30-7182 | − | UGGGUGCCGGCGCUACGGCGG | 21 | 16122 |
| HSV1-UL30-7183 | − | GUGGGUGCCGGCGCUACGGCGG | 22 | 16123 |
| HSV1-UL30-7184 | − | GGUGGGUGCCGGCGCUACGGCGG | 23 | 16124 |
| HSV1-UL30-7185 | − | CGGUGGGUGCCGGCGCUACGGCGG | 24 | 16125 |
| HSV1-UL30-7186 | − | GGACGAACGCGAGGAGGG | 18 | 16126 |
| HSV1-UL30-7187 | − | AGGACGAACGCGAGGAGGG | 19 | 16127 |
| HSV1-UL30-582 | − | GAGGACGAACGCGAGGAGGG | 20 | 3520 |
| HSV1-UL30-7188 | − | CGAGGACGAACGCGAGGAGGG | 21 | 16128 |
| HSV1-UL30-7189 | − | ACGAGGACGAACGCGAGGAGGG | 22 | 16129 |
| HSV1-UL30-7190 | − | GACGAGGACGAACGCGAGGAGGG | 23 | 16130 |
| HSV1-UL30-7191 | − | GGACGAGGACGAACGCGAGGAGGG | 24 | 16131 |
| HSV1-UL30-7192 | − | GUACCGUCUCAAACCGGG | 18 | 16132 |
| HSV1-UL30-7193 | − | GGUACCGUCUCAAACCGGG | 19 | 16133 |
| HSV1-UL30-1804 | − | UGGUACCGUCUCAAACCGGG | 20 | 4854 |
| HSV1-UL30-7194 | − | CUGGUACCGUCUCAAACCGGG | 21 | 16134 |
| HSV1-UL30-7195 | − | GCUGGUACCGUCUCAAACCGGG | 22 | 16135 |
| HSV1-UL30-7196 | − | GGCUGGUACCGUCUCAAACCGGG | 23 | 16136 |
| HSV1-UL30-7197 | − | CGGCUGGUACCGUCUCAAACCGGG | 24 | 16137 |
| HSV1-UL30-7198 | − | CGAUUUAGGGGCGCCGGG | 18 | 16138 |
| HSV1-UL30-7199 | − | GCGAUUUAGGGGCGCCGGG | 19 | 16139 |
| HSV1-UL30-1888 | − | GGCGAUUUAGGGGCGCCGGG | 20 | 4937 |
| HSV1-UL30-7200 | − | GGGCGAUUUAGGGGCGCCGGG | 21 | 16140 |
| HSV1-UL30-7201 | − | GGGGCGAUUUAGGGGCGCCGGG | 22 | 16141 |
| HSV1-UL30-7202 | − | AGGGGCGAUUUAGGGGCGCCGGG | 23 | 16142 |
| HSV1-UL30-7203 | − | CAGGGGCGAUUUAGGGGCGCCGGG | 24 | 16143 |
| HSV1-UL30-7204 | − | UAUCGAAUGCAAGGCGGG | 18 | 16144 |
| HSV1-UL30-7205 | − | AUAUCGAAUGCAAGGCGGG | 19 | 16145 |
| HSV1-UL30-1822 | − | GAUAUCGAAUGCAAGGCGGG | 20 | 4872 |
| HSV1-UL30-7206 | − | CGAUAUCGAAUGCAAGGCGGG | 21 | 16146 |
| HSV1-UL30-7207 | − | UCGAUAUCGAAUGCAAGGCGGG | 22 | 16147 |
| HSV1-UL30-7208 | − | UUCGAUAUCGAAUGCAAGGCGGG | 23 | 16148 |
| HSV1-UL30-7209 | − | CUUCGAUAUCGAAUGCAAGGCGGG | 24 | 16149 |
| HSV1-UL30-7210 | − | ACGCCGCCGCCCCAGGGG | 18 | 16150 |
| HSV1-UL30-7211 | − | GACGCCGCCGCCCCAGGGG | 19 | 16151 |
| HSV1-UL30-2020 | − | AGACGCCGCCGCCCCAGGGG | 20 | 5053 |
| HSV1-UL30-7212 | − | UAGACGCCGCCGCCCCAGGGG | 21 | 16152 |
| HSV1-UL30-7213 | − | CUAGACGCCGCCGCCCCAGGGG | 22 | 16153 |
| HSV1-UL30-7214 | − | GCUAGACGCCGCCGCCCCAGGGG | 23 | 16154 |
| HSV1-UL30-7215 | − | AGCUAGACGCCGCCGCCCCAGGGG | 24 | 16155 |
| HSV1-UL30-7216 | − | CGGCCAGAGGAGGAGGGG | 18 | 16156 |
| HSV1-UL30-7217 | − | GCGGCCAGAGGAGGAGGGG | 19 | 16157 |
| HSV1-UL30-1907 | − | AGCGGCCAGAGGAGGAGGGG | 20 | 4949 |
| HSV1-UL30-7218 | − | GAGCGGCCAGAGGAGGAGGGG | 21 | 16158 |
| HSV1-UL30-7219 | − | GGAGCGGCCAGAGGAGGAGGGG | 22 | 16159 |
| HSV1-UL30-7220 | − | AGGAGCGGCCAGAGGAGGAGGGG | 23 | 16160 |
| HSV1-UL30-7221 | − | GAGGAGCGGCCAGAGGAGGAGGGG | 24 | 16161 |
| HSV1-UL30-7222 | − | GAUUUAGGGGCGCCGGGG | 18 | 16162 |
| HSV1-UL30-7223 | − | CGAUUUAGGGGCGCCGGGG | 19 | 16163 |
| HSV1-UL30-1889 | − | GCGAUUUAGGGGCGCCGGGG | 20 | 4938 |
| HSV1-UL30-7224 | − | GGCGAUUUAGGGGCGCCGGGG | 21 | 16164 |
| HSV1-UL30-7225 | − | GGGCGAUUUAGGGGCGCCGGGG | 22 | 16165 |
| HSV1-UL30-7226 | − | GGGGCGAUUUAGGGGCGCCGGGG | 23 | 16166 |
| HSV1-UL30-7227 | − | AGGGGCGAUUUAGGGGCGCCGGGG | 24 | 16167 |
| HSV1-UL30-7228 | − | AUCGAAUGCAAGGCGGGG | 18 | 16168 |
| HSV1-UL30-7229 | − | UAUCGAAUGCAAGGCGGGG | 19 | 16169 |
| HSV1-UL30-1823 | − | AUAUCGAAUGCAAGGCGGGG | 20 | 4873 |
| HSV1-UL30-7230 | − | GAUAUCGAAUGCAAGGCGGGG | 21 | 16170 |
| HSV1-UL30-7231 | − | CGAUAUCGAAUGCAAGGCGGGG | 22 | 16171 |
| HSV1-UL30-7232 | − | UCGAUAUCGAAUGCAAGGCGGGG | 23 | 16172 |
| HSV1-UL30-7233 | − | UUCGAUAUCGAAUGCAAGGCGGGG | 24 | 16173 |
| HSV1-UL30-7234 | − | AACGCGAGGAGGGCGGGG | 18 | 16174 |
| HSV1-UL30-7235 | − | GAACGCGAGGAGGGCGGGG | 19 | 16175 |
| HSV1-UL30-1918 | − | CGAACGCGAGGAGGGCGGGG | 20 | 4957 |
| HSV1-UL30-7236 | − | ACGAACGCGAGGAGGGCGGGG | 21 | 16176 |
| HSV1-UL30-7237 | − | GACGAACGCGAGGAGGGCGGGG | 22 | 16177 |
| HSV1-UL30-7238 | − | GGACGAACGCGAGGAGGGCGGGG | 23 | 16178 |
| HSV1-UL30-7239 | − | AGGACGAACGCGAGGAGGGCGGGG | 24 | 16179 |
| HSV1-UL30-7240 | − | UCGAAUGCAAGGCGGGGG | 18 | 16180 |
| HSV1-UL30-7241 | − | AUCGAAUGCAAGGCGGGGG | 19 | 16181 |
| HSV1-UL30-1824 | − | UAUCGAAUGCAAGGCGGGGG | 20 | 4874 |
| HSV1-UL30-7242 | − | AUAUCGAAUGCAAGGCGGGGG | 21 | 16182 |
| HSV1-UL30-7243 | − | GAUAUCGAAUGCAAGGCGGGGG | 22 | 16183 |
| HSV1-UL30-7244 | − | CGAUAUCGAAUGCAAGGCGGGGG | 23 | 16184 |
| HSV1-UL30-7245 | − | UCGAUAUCGAAUGCAAGGCGGGGG | 24 | 16185 |
| HSV1-UL30-7246 | − | GAAUGCAAGGCGGGGGGG | 18 | 16186 |
| HSV1-UL30-7247 | − | CGAAUGCAAGGCGGGGGGG | 19 | 16187 |
| HSV1-UL30-1825 | − | UCGAAUGCAAGGCGGGGGGG | 20 | 4875 |
| HSV1-UL30-7248 | − | AUCGAAUGCAAGGCGGGGGGG | 21 | 16188 |
| HSV1-UL30-7249 | − | UAUCGAAUGCAAGGCGGGGGGG | 22 | 16189 |
| HSV1-UL30-7250 | − | AUAUCGAAUGCAAGGCGGGGGGG | 23 | 16190 |
| HSV1-UL30-7251 | − | GAUAUCGAAUGCAAGGCGGGGGGG | 24 | 16191 |
| HSV1-UL30-7252 | − | UGCUGGUGUCCGAGCUGG | 18 | 16192 |
| HSV1-UL30-7253 | − | CUGCUGGUGUCCGAGCUGG | 19 | 16193 |
| HSV1-UL30-2028 | − | GCUGCUGGUGUCCGAGCUGG | 20 | 5061 |
| HSV1-UL30-7254 | − | AGCUGCUGGUGUCCGAGCUGG | 21 | 16194 |
| HSV1-UL30-7255 | − | AAGCUGCUGGUGUCCGAGCUGG | 22 | 16195 |
| HSV1-UL30-7256 | − | CAAGCUGCUGGUGUCCGAGCUGG | 23 | 16196 |
| HSV1-UL30-7257 | − | GCAAGCUGCUGGUGUCCGAGCUGG | 24 | 16197 |
| HSV1-UL30-7258 | − | ACAAGCUCAACGCCGUGG | 18 | 16198 |
| HSV1-UL30-7259 | − | UACAAGCUCAACGCCGUGG | 19 | 16199 |
| HSV1-UL30-1860 | − | CUACAAGCUCAACGCCGUGG | 20 | 4910 |
| HSV1-UL30-7260 | − | GCUACAAGCUCAACGCCGUGG | 21 | 16200 |
| HSV1-UL30-7261 | − | AGCUACAAGCUCAACGCCGUGG | 22 | 16201 |
| HSV1-UL30-7262 | − | GAGCUACAAGCUCAACGCCGUGG | 23 | 16202 |
| HSV1-UL30-7263 | − | CGAGCUACAAGCUCAACGCCGUGG | 24 | 16203 |
| HSV1-UL30-7264 | − | ACCUGGAGAUCGAGGUGG | 18 | 16204 |
| HSV1-UL30-7265 | − | UACCUGGAGAUCGAGGUGG | 19 | 16205 |
| HSV1-UL30-1949 | − | CUACCUGGAGAUCGAGGUGG | 20 | 4982 |
| HSV1-UL30-7266 | − | ACUACCUGGAGAUCGAGGUGG | 21 | 16206 |
| HSV1-UL30-7267 | − | GACUACCUGGAGAUCGAGGUGG | 22 | 16207 |
| HSV1-UL30-7268 | − | GGACUACCUGGAGAUCGAGGUGG | 23 | 16208 |
| HSV1-UL30-7269 | − | AGGACUACCUGGAGAUCGAGGUGG | 24 | 16209 |
| HSV1-UL30-7270 | − | ACUUCGAGGCGGAGGUGG | 18 | 16210 |
| HSV1-UL30-7271 | − | CACUUCGAGGCGGAGGUGG | 19 | 16211 |
| HSV1-UL30-1792 | − | CCACUUCGAGGCGGAGGUGG | 20 | 4842 |
| HSV1-UL30-7272 | − | ACCACUUCGAGGCGGAGGUGG | 21 | 16212 |
| HSV1-UL30-7273 | − | GACCACUUCGAGGCGGAGGUGG | 22 | 16213 |
| HSV1-UL30-7274 | − | GGACCACUUCGAGGCGGAGGUGG | 23 | 16214 |
| HSV1-UL30-7275 | − | CGGACCACUUCGAGGCGGAGGUGG | 24 | 16215 |
| HSV1-UL30-7276 | − | AGCUGGCCUUUCCGGUGG | 18 | 16216 |
| HSV1-UL30-7277 | − | GAGCUGGCCUUUCCGGUGG | 19 | 16217 |
| HSV1-UL30-1827 | − | CGAGCUGGCCUUUCCGGUGG | 20 | 4877 |
| HSV1-UL30-7278 | − | ACGAGCUGGCCUUUCCGGUGG | 21 | 16218 |
| HSV1-UL30-7279 | − | GACGAGCUGGCCUUUCCGGUGG | 22 | 16219 |
| HSV1-UL30-7280 | − | GGACGAGCUGGCCUUUCCGGUGG | 23 | 16220 |
| HSV1-UL30-7281 | − | AGGACGAGCUGGCCUUUCCGGUGG | 24 | 16221 |
| HSV1-UL30-7282 | − | AUAAAGGUGAACGGCAUG | 18 | 16222 |
| HSV1-UL30-7283 | − | GAUAAAGGUGAACGGCAUG | 19 | 16223 |
| HSV1-UL30-1856 | − | AGAUAAAGGUGAACGGCAUG | 20 | 4906 |
| HSV1-UL30-7284 | − | AAGAUAAAGGUGAACGGCAUG | 21 | 16224 |
| HSV1-UL30-7285 | − | CAAGAUAAAGGUGAACGGCAUG | 22 | 16225 |
| HSV1-UL30-7286 | − | GCAAGAUAAAGGUGAACGGCAUG | 23 | 16226 |
| HSV1-UL30-7287 | − | AGCAAGAUAAAGGUGAACGGCAUG | 24 | 16227 |
| HSV1-UL30-7288 | − | GCCGUGGGCGACAAGAUG | 18 | 16228 |
| HSV1-UL30-7289 | − | GGCCGUGGGCGACAAGAUG | 19 | 16229 |
| HSV1-UL30-1980 | − | CGGCCGUGGGCGACAAGAUG | 20 | 5013 |
| HSV1-UL30-7290 | − | ACGGCCGUGGGCGACAAGAUG | 21 | 16230 |
| HSV1-UL30-7291 | − | GACGGCCGUGGGCGACAAGAUG | 22 | 16231 |
| HSV1-UL30-7292 | − | UGACGGCCGUGGGCGACAAGAUG | 23 | 16232 |
| HSV1-UL30-7293 | − | CUGACGGCCGUGGGCGACAAGAUG | 24 | 16233 |
| HSV1-UL30-7294 | − | UAUUACUUCUCCCACCUG | 18 | 16234 |
| HSV1-UL30-7295 | − | CUAUUACUUCUCCCACCUG | 19 | 16235 |
| HSV1-UL30-2032 | − | ACUAUUACUUCUCCCACCUG | 20 | 5065 |
| HSV1-UL30-7296 | − | GACUAUUACUUCUCCCACCUG | 21 | 16236 |
| HSV1-UL30-7297 | − | GGACUAUUACUUCUCCCACCUG | 22 | 16237 |
| HSV1-UL30-7298 | − | CGGACUAUUACUUCUCCCACCUG | 23 | 16238 |
| HSV1-UL30-7299 | − | ACGGACUAUUACUUCUCCCACCUG | 24 | 16239 |
| HSV1-UL30-7300 | − | CUCCUCAGCAUCCUCCUG | 18 | 16240 |
| HSV1-UL30-7301 | − | CCUCCUCAGCAUCCUCCUG | 19 | 16241 |
| HSV1-UL30-1954 | − | GCCUCCUCAGCAUCCUCCUG | 20 | 4987 |
| HSV1-UL30-7302 | − | AGCCUCCUCAGCAUCCUCCUG | 21 | 16242 |
| HSV1-UL30-7303 | − | GAGCCUCCUCAGCAUCCUCCUG | 22 | 16243 |
| HSV1-UL30-7304 | − | AGAGCCUCCUCAGCAUCCUCCUG | 23 | 16244 |
| HSV1-UL30-7305 | − | GAGAGCCUCCUCAGCAUCCUCCUG | 24 | 16245 |
| HSV1-UL30-7306 | − | GUGGCCGAAGCCGUCCUG | 18 | 16246 |
| HSV1-UL30-7307 | − | CGUGGCCGAAGCCGUCCUG | 19 | 16247 |
| HSV1-UL30-1862 | − | CCGUGGCCGAAGCCGUCCUG | 20 | 4912 |
| HSV1-UL30-7308 | − | GCCGUGGCCGAAGCCGUCCUG | 21 | 16248 |
| HSV1-UL30-7309 | − | CGCCGUGGCCGAAGCCGUCCUG | 22 | 16249 |
| HSV1-UL30-7310 | − | ACGCCGUGGCCGAAGCCGUCCUG | 23 | 16250 |
| HSV1-UL30-7311 | − | AACGCCGUGGCCGAAGCCGUCCUG | 24 | 16251 |
| HSV1-UL30-7312 | − | UUCUUGCUGGCCAAGCUG | 18 | 16252 |
| HSV1-UL30-7313 | − | CUUCUUGCUGGCCAAGCUG | 19 | 16253 |
| HSV1-UL30-1845 | − | CCUUCUUGCUGGCCAAGCUG | 20 | 4895 |
| HSV1-UL30-7314 | − | CCCUUCUUGCUGGCCAAGCUG | 21 | 16254 |
| HSV1-UL30-7315 | − | GCCCUUCUUGCUGGCCAAGCUG | 22 | 16255 |
| HSV1-UL30-7316 | − | GGCCCUUCUUGCUGGCCAAGCUG | 23 | 16256 |
| HSV1-UL30-7317 | − | UGGCCCUUCUUGCUGGCCAAGCUG | 24 | 16257 |
| HSV1-UL30-7318 | − | AUACAGGAUUCCCUGCUG | 18 | 16258 |
| HSV1-UL30-7319 | − | CAUACAGGAUUCCCUGCUG | 19 | 16259 |
| HSV1-UL30-1872 | − | GCAUACAGGAUUCCCUGCUG | 20 | 4921 |
| HSV1-UL30-7320 | − | UGCAUACAGGAUUCCCUGCUG | 21 | 16260 |
| HSV1-UL30-7321 | − | CUGCAUACAGGAUUCCCUGCUG | 22 | 16261 |
| HSV1-UL30-7322 | − | ACUGCAUACAGGAUUCCCUGCUG | 23 | 16262 |
| HSV1-UL30-7323 | − | UACUGCAUACAGGAUUCCCUGCUG | 24 | 16263 |
| HSV1-UL30-7324 | − | CAGAAGGGCUUUAUUCUG | 18 | 16264 |
| HSV1-UL30-7325 | − | CCAGAAGGGCUUUAUUCUG | 19 | 16265 |
| HSV1-UL30-1878 | − | ACCAGAAGGGCUUUAUUCUG | 20 | 4927 |
| HSV1-UL30-7326 | − | GACCAGAAGGGCUUUAUUCUG | 21 | 16266 |
| HSV1-UL30-7327 | − | CGACCAGAAGGGCUUUAUUCUG | 22 | 16267 |
| HSV1-UL30-7328 | − | CCGACCAGAAGGGCUUUAUUCUG | 23 | 16268 |
| HSV1-UL30-7329 | − | GCCGACCAGAAGGGCUUUAUUCUG | 24 | 16269 |
| HSV1-UL30-7330 | − | CGGGGCGUGUUUCGCGUG | 18 | 16270 |
| HSV1-UL30-7331 | − | CCGGGGCGUGUUUCGCGUG | 19 | 16271 |
| HSV1-UL30-1852 | − | GCCGGGGCGUGUUUCGCGUG | 20 | 4902 |
| HSV1-UL30-7332 | − | GGCCGGGGCGUGUUUCGCGUG | 21 | 16272 |
| HSV1-UL30-7333 | − | CGGCCGGGGCGUGUUUCGCGUG | 22 | 16273 |
| HSV1-UL30-7334 | − | ACGGCCGGGGCGUGUUUCGCGUG | 23 | 16274 |
| HSV1-UL30-7335 | − | AACGGCCGGGGCGUGUUUCGCGUG | 24 | 16275 |
| HSV1-UL30-7336 | − | UACCUGGAGAUCGAGGUG | 18 | 16276 |
| HSV1-UL30-7337 | − | CUACCUGGAGAUCGAGGUG | 19 | 16277 |
| HSV1-UL30-1948 | − | ACUACCUGGAGAUCGAGGUG | 20 | 4981 |
| HSV1-UL30-7338 | − | GACUACCUGGAGAUCGAGGUG | 21 | 16278 |
| HSV1-UL30-7339 | − | GGACUACCUGGAGAUCGAGGUG | 22 | 16279 |
| HSV1-UL30-7340 | − | AGGACUACCUGGAGAUCGAGGUG | 23 | 16280 |
| HSV1-UL30-7341 | − | AAGGACUACCUGGAGAUCGAGGUG | 24 | 16281 |
| HSV1-UL30-7342 | − | CACUUCGAGGCGGAGGUG | 18 | 16282 |
| HSV1-UL30-7343 | − | CCACUUCGAGGCGGAGGUG | 19 | 16283 |
| HSV1-UL30-1791 | − | ACCACUUCGAGGCGGAGGUG | 20 | 4841 |
| HSV1-UL30-7344 | − | GACCACUUCGAGGCGGAGGUG | 21 | 16284 |
| HSV1-UL30-7345 | − | GGACCACUUCGAGGCGGAGGUG | 22 | 16285 |
| HSV1-UL30-7346 | − | CGGACCACUUCGAGGCGGAGGUG | 23 | 16286 |
| HSV1-UL30-7347 | − | GCGGACCACUUCGAGGCGGAGGUG | 24 | 16287 |
| HSV1-UL30-7348 | − | UGGAAUUCGACAGCGAAU | 18 | 16288 |
| HSV1-UL30-7349 | − | CUGGAAUUCGACAGCGAAU | 19 | 16289 |
| HSV1-UL30-1841 | − | UCUGGAAUUCGACAGCGAAU | 20 | 4891 |
| HSV1-UL30-7350 | − | UUCUGGAAUUCGACAGCGAAU | 21 | 16290 |
| HSV1-UL30-7351 | − | GUUCUGGAAUUCGACAGCGAAU | 22 | 16291 |
| HSV1-UL30-7352 | − | GGUUCUGGAAUUCGACAGCGAAU | 23 | 16292 |
| HSV1-UL30-7353 | − | UGGUUCUGGAAUUCGACAGCGAAU | 24 | 16293 |
| HSV1-UL30-7354 | − | UUUAAGUUUUUGCCCCAU | 18 | 16294 |
| HSV1-UL30-7355 | − | UUUUAAGUUUUUGCCCCAU | 19 | 16295 |
| HSV1-UL30-1873 | − | UUUUUAAGUUUUUGCCCCAU | 20 | 4922 |
| HSV1-UL30-7356 | − | UUUUUUAAGUUUUUGCCCCAU | 21 | 16296 |
| HSV1-UL30-7357 | − | GUUUUUUAAGUUUUUGCCCCAU | 22 | 16297 |
| HSV1-UL30-7358 | − | UGUUUUUUAAGUUUUUGCCCCAU | 23 | 16298 |
| HSV1-UL30-7359 | − | CUGUUUUUUAAGUUUUUGCCCCAU | 24 | 16299 |
| HSV1-UL30-7360 | − | GCGGGACUGGCUCGCCAU | 18 | 16300 |
| HSV1-UL30-7361 | − | UGCGGGACUGGCUCGCCAU | 19 | 16301 |
| HSV1-UL30-1955 | − | CUGCGGGACUGGCUCGCCAU | 20 | 4988 |
| HSV1-UL30-7362 | − | CCUGCGGGACUGGCUCGCCAU | 21 | 16302 |
| HSV1-UL30-7363 | − | UCCUGCGGGACUGGCUCGCCAU | 22 | 16303 |
| HSV1-UL30-7364 | − | CUCCUGCGGGACUGGCUCGCCAU | 23 | 16304 |
| HSV1-UL30-7365 | − | CCUCCUGCGGGACUGGCUCGCCAU | 24 | 16305 |
| HSV1-UL30-7366 | − | GCAUCUCCGCGGACCACU | 18 | 16306 |
| HSV1-UL30-7367 | − | GGCAUCUCCGCGGACCACU | 19 | 16307 |
| HSV1-UL30-1788 | − | CGGCAUCUCCGCGGACCACU | 20 | 4838 |
| HSV1-UL30-7368 | − | GCGGCAUCUCCGCGGACCACU | 21 | 16308 |
| HSV1-UL30-7369 | − | CGCGGCAUCUCCGCGGACCACU | 22 | 16309 |
| HSV1-UL30-7370 | − | CCGCGGCAUCUCCGCGGACCACU | 23 | 16310 |
| HSV1-UL30-7371 | − | UCCGCGGCAUCUCCGCGGACCACU | 24 | 16311 |
| HSV1-UL30-7372 | − | ACGCUCCUGGGCCUGACU | 18 | 16312 |
| HSV1-UL30-7373 | − | CACGCUCCUGGGCCUGACU | 19 | 16313 |
| HSV1-UL30-1775 | − | UCACGCUCCUGGGCCUGACU | 20 | 4825 |
| HSV1-UL30-7374 | − | AUCACGCUCCUGGGCCUGACU | 21 | 16314 |
| HSV1-UL30-7375 | − | CAUCACGCUCCUGGGCCUGACU | 22 | 16315 |
| HSV1-UL30-7376 | − | UCAUCACGCUCCUGGGCCUGACU | 23 | 16316 |
| HSV1-UL30-7377 | − | GUCAUCACGCUCCUGGGCCUGACU | 24 | 16317 |
| HSV1-UL30-7378 | − | GCACCGACGUGUACUACU | 18 | 16318 |
| HSV1-UL30-7379 | − | CGCACCGACGUGUACUACU | 19 | 16319 |
| HSV1-UL30-1793 | − | GCGCACCGACGUGUACUACU | 20 | 4843 |
| HSV1-UL30-7380 | − | AGCGCACCGACGUGUACUACU | 21 | 16320 |
| HSV1-UL30-7381 | − | GAGCGCACCGACGUGUACUACU | 22 | 16321 |
| HSV1-UL30-7382 | − | GGAGCGCACCGACGUGUACUACU | 23 | 16322 |
| HSV1-UL30-7383 | − | UGGAGCGCACCGACGUGUACUACU | 24 | 16323 |
| HSV1-UL30-7384 | − | CUUCAGCACGCUCUCCCU | 18 | 16324 |
| HSV1-UL30-7385 | − | GCUUCAGCACGCUCUCCCU | 19 | 16325 |
| HSV1-UL30-1937 | − | UGCUUCAGCACGCUCUCCCU | 20 | 4970 |
| HSV1-UL30-7386 | − | GUGCUUCAGCACGCUCUCCCU | 21 | 16326 |
| HSV1-UL30-7387 | − | UGUGCUUCAGCACGCUCUCCCU | 22 | 16327 |
| HSV1-UL30-7388 | − | CUGUGCUUCAGCACGCUCUCCCU | 23 | 16328 |
| HSV1-UL30-7389 | − | CCUGUGCUUCAGCACGCUCUCCCU | 24 | 16329 |
| HSV1-UL30-7390 | − | ACGCGCGCUGGGCGGCCU | 18 | 16330 |
| HSV1-UL30-7391 | − | CACGCGCGCUGGGCGGCCU | 19 | 16331 |
| HSV1-UL30-1970 | − | CCACGCGCGCUGGGCGGCCU | 20 | 5003 |
| HSV1-UL30-7392 | − | UCCACGCGCGCUGGGCGGCCU | 21 | 16332 |
| HSV1-UL30-7393 | − | GUCCACGCGCGCUGGGCGGCCU | 22 | 16333 |
| HSV1-UL30-7394 | − | CGUCCACGCGCGCUGGGCGGCCU | 23 | 16334 |
| HSV1-UL30-7395 | − | ACGUCCACGCGCGCUGGGCGGCCU | 24 | 16335 |
| HSV1-UL30-7396 | − | CGGCGGCCCCGAUGGCCU | 18 | 16336 |
| HSV1-UL30-7397 | − | CCGGCGGCCCCGAUGGCCU | 19 | 16337 |
| HSV1-UL30-1806 | − | GCCGGCGGCCCCGAUGGCCU | 20 | 4856 |
| HSV1-UL30-7398 | − | AGCCGGCGGCCCCGAUGGCCU | 21 | 16338 |
| HSV1-UL30-7399 | − | CAGCCGGCGGCCCCGAUGGCCU | 22 | 16339 |
| HSV1-UL30-7400 | − | CCAGCCGGCGGCCCCGAUGGCCU | 23 | 16340 |
| HSV1-UL30-7401 | − | CCCAGCCGGCGGCCCCGAUGGCCU | 24 | 16341 |
| HSV1-UL30-7402 | − | CCUCCUCAGCAUCCUCCU | 18 | 16342 |
| HSV1-UL30-7403 | − | GCCUCCUCAGCAUCCUCCU | 19 | 16343 |
| HSV1-UL30-1953 | − | AGCCUCCUCAGCAUCCUCCU | 20 | 4986 |
| HSV1-UL30-7404 | − | GAGCCUCCUCAGCAUCCUCCU | 21 | 16344 |
| HSV1-UL30-7405 | − | AGAGCCUCCUCAGCAUCCUCCU | 22 | 16345 |
| HSV1-UL30-7406 | − | GAGAGCCUCCUCAGCAUCCUCCU | 23 | 16346 |
| HSV1-UL30-7407 | − | AGAGAGCCUCCUCAGCAUCCUCCU | 24 | 16347 |
| HSV1-UL30-7408 | − | CGACGUGGCCGCGCGGCU | 18 | 16348 |
| HSV1-UL30-7409 | − | ACGACGUGGCCGCGCGGCU | 19 | 16349 |
| HSV1-UL30-2042 | − | GACGACGUGGCCGCGCGGCU | 20 | 5075 |
| HSV1-UL30-7410 | − | GGACGACGUGGCCGCGCGGCU | 21 | 16350 |
| HSV1-UL30-7411 | − | CGGACGACGUGGCCGCGCGGCU | 22 | 16351 |
| HSV1-UL30-7412 | − | CCGGACGACGUGGCCGCGCGGCU | 23 | 16352 |
| HSV1-UL30-7413 | − | CCCGGACGACGUGGCCGCGCGGCU | 24 | 16353 |
| HSV1-UL30-7414 | − | AUUCCAUGCGCAUCAUCU | 18 | 16354 |
| HSV1-UL30-7415 | − | UAUUCCAUGCGCAUCAUCU | 19 | 16355 |
| HSV1-UL30-1974 | − | CUAUUCCAUGCGCAUCAUCU | 20 | 5007 |
| HSV1-UL30-7416 | − | CCUAUUCCAUGCGCAUCAUCU | 21 | 16356 |
| HSV1-UL30-7417 | − | CCCUAUUCCAUGCGCAUCAUCU | 22 | 16357 |
| HSV1-UL30-7418 | − | GCCCUAUUCCAUGCGCAUCAUCU | 23 | 16358 |
| HSV1-UL30-7419 | − | GGCCCUAUUCCAUGCGCAUCAUCU | 24 | 16359 |
| HSV1-UL30-7420 | − | AGUACAUCGGCGUCAUCU | 18 | 16360 |
| HSV1-UL30-7421 | − | AAGUACAUCGGCGUCAUCU | 19 | 16361 |
| HSV1-UL30-1984 | − | AAAGUACAUCGGCGUCAUCU | 20 | 5017 |
| HSV1-UL30-7422 | − | AAAAGUACAUCGGCGUCAUCU | 21 | 16362 |
| HSV1-UL30-7423 | − | AAAAAGUACAUCGGCGUCAUCU | 22 | 16363 |
| HSV1-UL30-7424 | − | GAAAAAGUACAUCGGCGUCAUCU | 23 | 16364 |
| HSV1-UL30-7425 | − | AGAAAAAGUACAUCGGCGUCAUCU | 24 | 16365 |
| HSV1-UL30-7426 | − | GCGCCCCACGAGAUCUCU | 18 | 16366 |
| HSV1-UL30-7427 | − | CGCGCCCCACGAGAUCUCU | 19 | 16367 |
| HSV1-UL30-1784 | − | CCGCGCCCCACGAGAUCUCU | 20 | 4834 |
| HSV1-UL30-7428 | − | GCCGCGCCCCACGAGAUCUCU | 21 | 16368 |
| HSV1-UL30-7429 | − | UGCCGCGCCCCACGAGAUCUCU | 22 | 16369 |
| HSV1-UL30-7430 | − | AUGCCGCGCCCCACGAGAUCUCU | 23 | 16370 |
| HSV1-UL30-7431 | − | AAUGCCGCGCCCCACGAGAUCUCU | 24 | 16371 |
| HSV1-UL30-7432 | − | UUUACGACGAUACCGUCU | 18 | 16372 |
| HSV1-UL30-7433 | − | UUUUACGACGAUACCGUCU | 19 | 16373 |
| HSV1-UL30-1990 | − | GUUUUACGACGAUACCGUCU | 20 | 5023 |
| HSV1-UL30-7434 | − | UGUUUUACGACGAUACCGUCU | 21 | 16374 |
| HSV1-UL30-7435 | − | CUGUUUUACGACGAUACCGUCU | 22 | 16375 |
| HSV1-UL30-7436 | − | GCUGUUUUACGACGAUACCGUCU | 23 | 16376 |
| HSV1-UL30-7437 | − | UGCUGUUUUACGACGAUACCGUCU | 24 | 16377 |
| HSV1-UL30-7438 | − | GCCCGGCCAUCAAGAAGU | 18 | 16378 |
| HSV1-UL30-7439 | − | UGCCCGGCCAUCAAGAAGU | 19 | 16379 |
| HSV1-UL30-1797 | − | CUGCCCGGCCAUCAAGAAGU | 20 | 4847 |
| HSV1-UL30-7440 | − | UCUGCCCGGCCAUCAAGAAGU | 21 | 16380 |
| HSV1-UL30-7441 | − | UUCUGCCCGGCCAUCAAGAAGU | 22 | 16381 |
| HSV1-UL30-7442 | − | CUUCUGCCCGGCCAUCAAGAAGU | 23 | 16382 |
| HSV1-UL30-7443 | − | ACUUCUGCCCGGCCAUCAAGAAGU | 24 | 16383 |
| HSV1-UL30-7444 | − | CCCCCAUCAAACUCGAGU | 18 | 16384 |
| HSV1-UL30-7445 | − | CCCCCCAUCAAACUCGAGU | 19 | 16385 |
| HSV1-UL30-1982 | − | GCCCCCCAUCAAACUCGAGU | 20 | 5015 |
| HSV1-UL30-7446 | − | UGCCCCCCAUCAAACUCGAGU | 21 | 16386 |
| HSV1-UL30-7447 | − | CUGCCCCCCAUCAAACUCGAGU | 22 | 16387 |
| HSV1-UL30-7448 | − | UCUGCCCCCCAUCAAACUCGAGU | 23 | 16388 |
| HSV1-UL30-7449 | − | UUCUGCCCCCCAUCAAACUCGAGU | 24 | 16389 |
| HSV1-UL30-7450 | − | CUUCGUCAAGGCUCACGU | 18 | 16390 |
| HSV1-UL30-7451 | − | UCUUCGUCAAGGCUCACGU | 19 | 16391 |
| HSV1-UL30-1950 | − | UUCUUCGUCAAGGCUCACGU | 20 | 4983 |
| HSV1-UL30-7452 | − | GUUCUUCGUCAAGGCUCACGU | 21 | 16392 |
| HSV1-UL30-7453 | − | UGUUCUUCGUCAAGGCUCACGU | 22 | 16393 |
| HSV1-UL30-7454 | − | CUGUUCUUCGUCAAGGCUCACGU | 23 | 16394 |
| HSV1-UL30-7455 | − | GCUGUUCUUCGUCAAGGCUCACGU | 24 | 16395 |
| HSV1-UL30-7456 | − | GUUUUACCGCGUCUACGU | 18 | 16396 |
| HSV1-UL30-7457 | − | UGUUUUACCGCGUCUACGU | 19 | 16397 |
| HSV1-UL30-1794 | − | CUGUUUUACCGCGUCUACGU | 20 | 4844 |
| HSV1-UL30-7458 | − | UCUGUUUUACCGCGUCUACGU | 21 | 16398 |
| HSV1-UL30-7459 | − | CUCUGUUUUACCGCGUCUACGU | 22 | 16399 |
| HSV1-UL30-7460 | − | GCUCUGUUUUACCGCGUCUACGU | 23 | 16400 |
| HSV1-UL30-7461 | − | CGCUCUGUUUUACCGCGUCUACGU | 24 | 16401 |
| HSV1-UL30-7462 | − | CCGGGGCGUGUUUCGCGU | 18 | 16402 |
| HSV1-UL30-7463 | − | GCCGGGGCGUGUUUCGCGU | 19 | 16403 |
| HSV1-UL30-1851 | − | GGCCGGGGCGUGUUUCGCGU | 20 | 4901 |
| HSV1-UL30-7464 | − | CGGCCGGGGCGUGUUUCGCGU | 21 | 16404 |
| HSV1-UL30-7465 | − | ACGGCCGGGGCGUGUUUCGCGU | 22 | 16405 |
| HSV1-UL30-7466 | − | AACGGCCGGGGCGUGUUUCGCGU | 23 | 16406 |
| HSV1-UL30-7467 | − | GAACGGCCGGGGCGUGUUUCGCGU | 24 | 16407 |
| HSV1-UL30-7468 | − | CCGAGGGACUGCAGGCGU | 18 | 16408 |
| HSV1-UL30-7469 | − | CCCGAGGGACUGCAGGCGU | 19 | 16409 |
| HSV1-UL30-2000 | − | GCCCGAGGGACUGCAGGCGU | 20 | 5033 |
| HSV1-UL30-7470 | − | UGCCCGAGGGACUGCAGGCGU | 21 | 16410 |
| HSV1-UL30-7471 | − | CUGCCCGAGGGACUGCAGGCGU | 22 | 16411 |
| HSV1-UL30-7472 | − | CCUGCCCGAGGGACUGCAGGCGU | 23 | 16412 |
| HSV1-UL30-7473 | − | CCCUGCCCGAGGGACUGCAGGCGU | 24 | 16413 |
| HSV1-UL30-7474 | − | CUACCUGGAGAUCGAGGU | 18 | 16414 |
| HSV1-UL30-7475 | − | ACUACCUGGAGAUCGAGGU | 19 | 16415 |
| HSV1-UL30-1947 | − | GACUACCUGGAGAUCGAGGU | 20 | 4980 |
| HSV1-UL30-7476 | − | GGACUACCUGGAGAUCGAGGU | 21 | 16416 |
| HSV1-UL30-7477 | − | AGGACUACCUGGAGAUCGAGGU | 22 | 16417 |
| HSV1-UL30-7478 | − | AAGGACUACCUGGAGAUCGAGGU | 23 | 16418 |
| HSV1-UL30-7479 | − | CAAGGACUACCUGGAGAUCGAGGU | 24 | 16419 |
| HSV1-UL30-7480 | − | GGCUCCGGACCGCAGGGU | 18 | 16420 |
| HSV1-UL30-7481 | − | CGGCUCCGGACCGCAGGGU | 19 | 16421 |
| HSV1-UL30-2044 | − | GCGGCUCCGGACCGCAGGGU | 20 | 5077 |
| HSV1-UL30-7482 | − | CGCGGCUCCGGACCGCAGGGU | 21 | 16422 |
| HSV1-UL30-7483 | − | GCGCGGCUCCGGACCGCAGGGU | 22 | 16423 |
| HSV1-UL30-7484 | − | CGCGCGGCUCCGGACCGCAGGGU | 23 | 16424 |
| HSV1-UL30-7485 | − | CCGCGCGGCUCCGGACCGCAGGGU | 24 | 16425 |
| HSV1-UL30-7486 | − | UGGUGAACAUCGACAUGU | 18 | 16426 |
| HSV1-UL30-7487 | − | AUGGUGAACAUCGACAUGU | 19 | 16427 |
| HSV1-UL30-1857 | − | CAUGGUGAACAUCGACAUGU | 20 | 4907 |
| HSV1-UL30-7488 | − | GCAUGGUGAACAUCGACAUGU | 21 | 16428 |
| HSV1-UL30-7489 | − | GGCAUGGUGAACAUCGACAUGU | 22 | 16429 |
| HSV1-UL30-7490 | − | CGGCAUGGUGAACAUCGACAUGU | 23 | 16430 |
| HSV1-UL30-7491 | − | ACGGCAUGGUGAACAUCGACAUGU | 24 | 16431 |
| HSV1-UL30-7492 | − | AUUACUUCUCCCACCUGU | 18 | 16432 |
| HSV1-UL30-7493 | − | UAUUACUUCUCCCACCUGU | 19 | 16433 |
| HSV1-UL30-2033 | − | CUAUUACUUCUCCCACCUGU | 20 | 5066 |
| HSV1-UL30-7494 | − | ACUAUUACUUCUCCCACCUGU | 21 | 16434 |
| HSV1-UL30-7495 | − | GACUAUUACUUCUCCCACCUGU | 22 | 16435 |
| HSV1-UL30-7496 | − | GGACUAUUACUUCUCCCACCUGU | 23 | 16436 |
| HSV1-UL30-7497 | − | CGGACUAUUACUUCUCCCACCUGU | 24 | 16437 |
| HSV1-UL30-7498 | − | UGACAUUCAAGGCCCUGU | 18 | 16438 |
| HSV1-UL30-7499 | − | GUGACAUUCAAGGCCCUGU | 19 | 16439 |
| HSV1-UL30-2035 | − | CGUGACAUUCAAGGCCCUGU | 20 | 5068 |
| HSV1-UL30-7500 | − | GCGUGACAUUCAAGGCCCUGU | 21 | 16440 |
| HSV1-UL30-7501 | − | UGCGUGACAUUCAAGGCCCUGU | 22 | 16441 |
| HSV1-UL30-7502 | − | GUGCGUGACAUUCAAGGCCCUGU | 23 | 16442 |
| HSV1-UL30-7503 | − | CGUGCGUGACAUUCAAGGCCCUGU | 24 | 16443 |
| HSV1-UL30-7504 | − | CCCGCAAGCUGCUGGUGU | 18 | 16444 |
| HSV1-UL30-7505 | − | CCCCGCAAGCUGCUGGUGU | 19 | 16445 |
| HSV1-UL30-2027 | − | GCCCCGCAAGCUGCUGGUGU | 20 | 5060 |
| HSV1-UL30-7506 | − | AGCCCCGCAAGCUGCUGGUGU | 21 | 16446 |
| HSV1-UL30-7507 | − | AAGCCCCGCAAGCUGCUGGUGU | 22 | 16447 |
| HSV1-UL30-7508 | − | CAAGCCCCGCAAGCUGCUGGUGU | 23 | 16448 |
| HSV1-UL30-7509 | − | CCAAGCCCCGCAAGCUGCUGGUGU | 24 | 16449 |
| HSV1-UL30-7510 | − | GGACACCCAGGGGCGAUU | 18 | 16450 |
| HSV1-UL30-7511 | − | CGGACACCCAGGGGCGAUU | 19 | 16451 |
| HSV1-UL30-1881 | − | CCGGACACCCAGGGGCGAUU | 20 | 4930 |
| HSV1-UL30-7512 | − | GCCGGACACCCAGGGGCGAUU | 21 | 16452 |
| HSV1-UL30-7513 | − | UGCCGGACACCCAGGGGCGAUU | 22 | 16453 |
| HSV1-UL30-7514 | − | CUGCCGGACACCCAGGGGCGAUU | 23 | 16454 |
| HSV1-UL30-7515 | − | UCUGCCGGACACCCAGGGGCGAUU | 24 | 16455 |
| HSV1-UL30-7516 | − | UUGGCCUUCAUGACCCUU | 18 | 16456 |
| HSV1-UL30-7517 | − | GUUGGCCUUCAUGACCCUU | 19 | 16457 |
| HSV1-UL30-1842 | − | UGUUGGCCUUCAUGACCCUU | 20 | 4892 |
| HSV1-UL30-7518 | − | CUGUUGGCCUUCAUGACCCUU | 21 | 16458 |
| HSV1-UL30-7519 | − | GCUGUUGGCCUUCAUGACCCUU | 22 | 16459 |
| HSV1-UL30-7520 | − | UGCUGUUGGCCUUCAUGACCCUU | 23 | 16460 |
| HSV1-UL30-7521 | − | AUGCUGUUGGCCUUCAUGACCCUU | 24 | 16461 |
| HSV1-UL30-7522 | − | GGCGGCCCCGAUGGCCUU | 18 | 16462 |
| HSV1-UL30-7523 | − | CGGCGGCCCCGAUGGCCUU | 19 | 16463 |
| HSV1-UL30-1807 | − | CCGGCGGCCCCGAUGGCCUU | 20 | 4857 |
| HSV1-UL30-7524 | − | GCCGGCGGCCCCGAUGGCCUU | 21 | 16464 |
| HSV1-UL30-7525 | − | AGCCGGCGGCCCCGAUGGCCUU | 22 | 16465 |
| HSV1-UL30-7526 | − | CAGCCGGCGGCCCCGAUGGCCUU | 23 | 16466 |
| HSV1-UL30-7527 | − | CCAGCCGGCGGCCCCGAUGGCCUU | 24 | 16467 |
| HSV1-UL30-7528 | − | CGAGGGACUGCAGGCGUU | 18 | 16468 |
| HSV1-UL30-7529 | − | CCGAGGGACUGCAGGCGUU | 19 | 16469 |
| HSV1-UL30-2001 | − | CCCGAGGGACUGCAGGCGUU | 20 | 5034 |
| HSV1-UL30-7530 | − | GCCCGAGGGACUGCAGGCGUU | 21 | 16470 |
| HSV1-UL30-7531 | − | UGCCCGAGGGACUGCAGGCGUU | 22 | 16471 |
| HSV1-UL30-7532 | − | CUGCCCGAGGGACUGCAGGCGUU | 23 | 16472 |
| HSV1-UL30-7533 | − | CCUGCCCGAGGGACUGCAGGCGUU | 24 | 16473 |
| HSV1-UL30-7534 | − | GCUCCGGACCGCAGGGUU | 18 | 16474 |
| HSV1-UL30-7535 | − | GGCUCCGGACCGCAGGGUU | 19 | 16475 |
| HSV1-UL30-2045 | − | CGGCUCCGGACCGCAGGGUU | 20 | 5078 |
| HSV1-UL30-7536 | − | GCGGCUCCGGACCGCAGGGUU | 21 | 16476 |
| HSV1-UL30-7537 | − | CGCGGCUCCGGACCGCAGGGUU | 22 | 16477 |
| HSV1-UL30-7538 | − | GCGCGGCUCCGGACCGCAGGGUU | 23 | 16478 |
| HSV1-UL30-7539 | − | CGCGCGGCUCCGGACCGCAGGGUU | 24 | 16479 |
| HSV1-UL30-7540 | − | CUGCCCACGCCCGUGGUU | 18 | 16480 |
| HSV1-UL30-7541 | − | CCUGCCCACGCCCGUGGUU | 19 | 16481 |
| HSV1-UL30-1838 | − | GCCUGCCCACGCCCGUGGUU | 20 | 4888 |
| HSV1-UL30-7542 | − | GGCCUGCCCACGCCCGUGGUU | 21 | 16482 |
| HSV1-UL30-7543 | − | GGGCCUGCCCACGCCCGUGGUU | 22 | 16483 |
| HSV1-UL30-7544 | − | GGGGCCUGCCCACGCCCGUGGUU | 23 | 16484 |
| HSV1-UL30-7545 | − | AGGGGCCUGCCCACGCCCGUGGUU | 24 | 16485 |
| HSV1-UL30-7546 | − | UUACUUCUCCCACCUGUU | 18 | 16486 |
| HSV1-UL30-7547 | − | AUUACUUCUCCCACCUGUU | 19 | 16487 |
| HSV1-UL30-2034 | − | UAUUACUUCUCCCACCUGUU | 20 | 5067 |
| HSV1-UL30-7548 | − | CUAUUACUUCUCCCACCUGUU | 21 | 16488 |
| HSV1-UL30-7549 | − | ACUAUUACUUCUCCCACCUGUU | 22 | 16489 |
| HSV1-UL30-7550 | − | GACUAUUACUUCUCCCACCUGUU | 23 | 16490 |
| HSV1-UL30-7551 | − | GGACUAUUACUUCUCCCACCUGUU | 24 | 16491 |
| HSV1-UL30-7552 | − | GACAUUCAAGGCCCUGUU | 18 | 16492 |
| HSV1-UL30-7553 | − | UGACAUUCAAGGCCCUGUU | 19 | 16493 |
| HSV1-UL30-2036 | − | GUGACAUUCAAGGCCCUGUU | 20 | 5069 |
| HSV1-UL30-7554 | − | CGUGACAUUCAAGGCCCUGUU | 21 | 16494 |
| HSV1-UL30-7555 | − | GCGUGACAUUCAAGGCCCUGUU | 22 | 16495 |
| HSV1-UL30-7556 | − | UGCGUGACAUUCAAGGCCCUGUU | 23 | 16496 |
| HSV1-UL30-7557 | − | GUGCGUGACAUUCAAGGCCCUGUU | 24 | 16497 |
| HSV1-UL30-7558 | − | GACACCCAGGGGCGAUUU | 18 | 16498 |
| HSV1-UL30-7559 | − | GGACACCCAGGGGCGAUUU | 19 | 16499 |
| HSV1-UL30-1882 | − | CGGACACCCAGGGGCGAUUU | 20 | 4931 |
| HSV1-UL30-7560 | − | CCGGACACCCAGGGGCGAUUU | 21 | 16500 |
| HSV1-UL30-7561 | − | GCCGGACACCCAGGGGCGAUUU | 22 | 16501 |
| HSV1-UL30-7562 | − | UGCCGGACACCCAGGGGCGAUUU | 23 | 16502 |
| HSV1-UL30-7563 | − | CUGCCGGACACCCAGGGGCGAUUU | 24 | 16503 |
| HSV1-UL30-4371 | − | CAGUUCCACGCGCGGUUU | 18 | 13311 |
| HSV1-UL30-4372 | − | CCAGUUCCACGCGCGGUUU | 19 | 13312 |
| HSV1-UL30-4373 | − | CCCAGUUCCACGCGCGGUUU | 20 | 13313 |
| HSV1-UL30-4374 | − | GCCCAGUUCCACGCGCGGUUU | 21 | 13314 |
| HSV1-UL30-4375 | − | GGCCCAGUUCCACGCGCGGUUU | 22 | 13315 |
| HSV1-UL30-4376 | − | CGGCCCAGUUCCACGCGCGGUUU | 23 | 13316 |
| HSV1-UL30-4377 | − | GCGGCCCAGUUCCACGCGCGGUUU | 24 | 13317 |

[0782] Table 10A provides exemplary targeting domains for knocking out the UL30 gene selected according to the first tier parameters. The targeting domains bind within the first 500 bp of the coding sequence (e.g., within 500 bp downstream from the start codon), have a high level of orthogonality, and start with a 5′G. It is contemplated herein that in an embodiment the targeting domain hybridizes to the target domain through complementary base pairing. Any of the targeting domains in the table can be used with a N. meningitidis Cas9 molecule that generates a double stranded break (Cas9 nuclease) or a single-stranded break (Cas9 nickase).

TABLE 10A

| | | | Target | Seq |
|---|---|---|---|---|
| 1st Tier | DNA | | Site | ID |
| gRNA Name | Strand | Targeting Domain | Length | NO: |
| HSV1-UL30- | + | GACCGUCGUGCACCCCG | 17 | 16504 |
| 7564 | | | | |
| HSV1-UL30- | + | GGCGCUGGGUUGGCCCG | 17 | 16505 |
| 7565 | | | | |
| HSV1-UL30- | + | GGUGACCGUCGUGCACCCCG | 20 | 16506 |
| 7566 | | | | |

[0783] Table 10B provides exemplary targeting domains for knocking out the UL30 gene selected according to the second tier parameters. The targeting domains bind within the first 500 bp of the coding sequence (e.g., within 500 bp downstream from the start codon) and have a high level of orthogonality. It is contemplated herein that in an embodiment the targeting domain hybridizes to the target domain through complementary base pairing. Any of the targeting domains in the table can be used with a N. meningitidis Cas9 molecule that generates a double stranded break (Cas9 nuclease) or a single-stranded break (Cas9 nickase).

TABLE 10B

| | | | Target | Seq |
|---|---|---|---|---|
| 2nd Tier | DNA | | Site | ID |
| gRNA Name | Strand | Targeting Domain | Length | NO: |
| HSV1-UL30- | − | AUAGCGAAUGCGAUGAA | 17 | 5829 |
| 420 | | | | |
| HSV1-UL30- | − | UCCUCCGCGUCGGGUCG | 17 | 16507 |
| 7567 | | | | |
| HSV1-UL30- | + | CGCAGUACACCUUGGGG | 17 | 16508 |
| 7568 | | | | |
| HSV1-UL30- | − | ACUAUAGCGAAUGCGAUGAA | 20 | 5828 |
| 419 | | | | |
| HSV1-UL30- | + | UAUGGCGCUGGGUUGGCCCG | 20 | 16509 |
| 7569 | | | | |
| HSV1-UL30- | − | ACGUCCUCCGCGUCGGGUCG | 20 | 16510 |
| 7570 | | | | |
| HSV1-UL30- | + | CCCCGCAGUACACCUUGGGG | 20 | 16511 |
| 7571 | | | | |

[0784] Table 10C provides exemplary targeting domains for knocking out the UL30 gene selected according to the fifth tier parameters. The targeting domains fall in the coding sequence of the gene, downstream of the first 500 bp of coding sequence (e.g., anywhere from +500 (relative to the start codon) to the stop codon of the gene). It is contemplated herein that in an embodiment the targeting domain hybridizes to the target domain through complementary base pairing. Any of the targeting domains in the table can be used with a N. meningitidis Cas9 molecule that generates a double stranded break (Cas9 nuclease) or a single-stranded break (Cas9 nickase).

TABLE 10C
5th Tier

| | | | Target | |
|---|---|---|---|---|
| | DNA | | Site | Seq ID |
| gRNA Name | Strand | Targeting Domain | Length | NO: |
| HSV1-UL30-7572 | - | UCAUCCAGGCCCACAAC | 17 | 16512 |
| HSV1-UL30-7573 | + | CAGGUACGACAGCACAC | 17 | 16513 |
| HSV1-UL30-2796 | + | AUUCGAUAUCGAAGCAC | 17 | 5793 |
| HSV1-UL30-7574 | + | CGGCCAGCUCGGACACC | 17 | 16514 |
| HSV1-UL30-7575 | + | CGACCUUGAUGGCGGCC | 17 | 16515 |
| HSV1-UL30-7576 | + | CCUCCCGGGCUGCGGCC | 17 | 16516 |
| HSV1-UL30-2642 | + | CCUGCGCGCGGCGGGCC | 17 | 5641 |
| HSV1-UL30-3018 | + | ACACCGUCAGGUGGGCC | 17 | 11958 |
| HSV1-UL30-7577 | + | GGACCUUGUAAAUGUCC | 17 | 16517 |
| HSV1-UL30-7578 | + | UUUUCUUGGCGAUCAGC | 17 | 16518 |
| HSV1-UL30-7579 | - | UACCGGCAUACAAGCUC | 17 | 16519 |
| HSV1-UL30-2753 | + | CGUUGAGCUUGUAGCUC | 17 | 5751 |
| HSV1-UL30-7580 | - | UGGAGCUCUCGGCCGUC | 17 | 16520 |
| HSV1-UL30-2159 | - | UGCGCCUGGCCGACCAG | 17 | 5191 |
| HSV1-UL30-2840 | - | UUCUGCCGGACACCCAG | 17 | 5835 |
| HSV1-UL30-7581 | + | UUCUUCUUGUCCUUCAG | 17 | 16521 |
| HSV1-UL30-2774 | + | GCCGCCAGCUCGUUCAG | 17 | 5772 |
| HSV1-UL30-2751 | + | CGGCUUCGGCCACGGCG | 17 | 5749 |
| HSV1-UL30-3202 | + | GCGACGGCGUCUCCCGG | 17 | 12142 |
| HSV1-UL30-7582 | + | GGGGAAUCCGCGAGCGG | 17 | 16522 |
| HSV1-UL30-2607 | + | CGGACACCAGCAGCUUG | 17 | 5611 |
| HSV1-UL30-7583 | + | CGUUCACCUUUAUCUUG | 17 | 16523 |
| HSV1-UL30-2839 | - | AUCGGCGAGUACUGCAU | 17 | 5834 |
| HSV1-UL30-2842 | - | GCCUUCGAACAGCUCCU | 17 | 5837 |
| HSV1-UL30-2841 | - | GCGAAAGCAGAUCCGCU | 17 | 5836 |
| HSV1-UL30-2139 | - | GGUGAACAUCGACAUGU | 17 | 5172 |
| HSV1-UL30-7584 | - | GCAUCAUCCAGGCCCACAAC | 20 | 16524 |
| HSV1-UL30-7585 | + | GCACAGGUACGACAGCACAC | 20 | 16525 |
| HSV1-UL30-2547 | + | UGCAUUCGAUAUCGAAGCAC | 20 | 5552 |
| HSV1-UL30-7586 | + | CCUCGGCCAGCUCGGACACC | 20 | 16526 |
| HSV1-UL30-7587 | + | ACACGACCUUGAUGGCGGCC | 20 | 16527 |
| HSV1-UL30-7588 | + | CGUCCUCCCGGGCUGCGGCC | 20 | 16528 |
| HSV1-UL30-2393 | + | GGACCUGCGCGCGGCGGGCC | 20 | 5400 |
| HSV1-UL30-3484 | + | AAUACACCGUCAGGUGGGCC | 20 | 12424 |
| HSV1-UL30-7589 | + | GGGGGACCUUGUAAAUGUCC | 20 | 16529 |
| HSV1-UL30-7590 | + | ACUUUUUCUUGGCGAUCAGC | 20 | 16530 |
| HSV1-UL30-7591 | - | ACCUACCGGCAUACAAGCUC | 20 | 16531 |
| HSV1-UL30-2504 | + | CGGCGUUGAGCUUGUAGCUC | 20 | 5510 |
| HSV1-UL30-7592 | - | AUCUGGAGCUCUCGGCCGUC | 20 | 16532 |
| HSV1-UL30-1877 | - | UGCUGCGCCUGGCCGACCAG | 20 | 4926 |
| HSV1-UL30-2835 | - | UUAUUCUGCCGGACACCCAG | 20 | 5831 |
| HSV1-UL30-7593 | + | UCCUUCUUCUUGUCCUUCAG | 20 | 16533 |
| HSV1-UL30-2525 | + | CUGGCCGCCAGCUCGUUCAG | 20 | 5531 |
| HSV1-UL30-2502 | + | GGACGGCUUCGGCCACGGCG | 20 | 5508 |
| HSV1-UL30-3671 | + | CAGGCGACGGCGUCUCCCGG | 20 | 12611 |
| HSV1-UL30-7594 | + | UCUGGGGAAUCCGCGAGCGG | 20 | 16534 |
| HSV1-UL30-2358 | + | GCUCGGACACCAGCAGCUUG | 20 | 5370 |
| HSV1-UL30-7595 | + | UGCCGUUCACCUUUAUCUUG | 20 | 16535 |
| HSV1-UL30-2834 | - | GUGAUCGGCGAGUACUGCAU | 20 | 5830 |
| HSV1-UL30-2837 | - | GCGGCCUUCGAACAGCUCCU | 20 | 5833 |
| HSV1-UL30-2836 | - | CAUGCGAAAGCAGAUCCGCU | 20 | 5832 |
| HSV1-UL30-1857 | - | CAUGGUGAACAUCGACAUGU | 20 | 4907 |

[0785] Table 11A provides exemplary targeting domains for knocking out the UL48 gene selected according to the first tier parameters. The targeting domains bind within the first 500 bp of the coding sequence (e.g., within 500 bp downstream from the start codon), have a high level of orthogonality, and start with a 5′G. It is contemplated herein that in an embodiment the targeting domain hybridizes to the target domain through complementary base pairing. Any of the targeting domains in the table can be used with a S. pyogenes Cas9 molecule that generates a double stranded break (Cas9 nuclease) or a single-stranded break (Cas9 nickase).

TABLE 11A
1st Tier

| | | | Target | |
|---|---|---|---|---|
| | DNA | | Site | Seq ID |
| gRNA Name | Strand | Targeting Domain | Length | NO: |
| HSV1-UL48-120 | - | GCCGACAUGAACGCGGA | 17 | 5975 |
| HSV1-UL48-167 | + | GGGUGGCCGGAAGCGUA | 17 | 6035 |
| HSV1-UL48-214 | + | GCCCCGUUGCGUACAGC | 17 | 6062 |
| HSV1-UL48-119 | - | GUUUGCCGACAUGAACG | 17 | 5974 |
| HSV1-UL48-186 | + | GAGCAUGGUACAUAGCG | 17 | 5920 |
| HSV1-UL48-188 | + | GCAUGGUACAUAGCGCG | 17 | 5922 |
| HSV1-UL48-160 | + | GCGCCCGUAGCUCGGCG | 17 | 6031 |
| HSV1-UL48-152 | - | GCCACCCGCGACGGCCU | 17 | 5884 |
| HSV1-UL48-170 | + | GAAGGCCACGUCGCCGU | 17 | 5903 |
| HSV1-UL48-235 | + | GCCGUCCGCGUUCAUGU | 17 | 6073 |
| HSV1-UL48-1127 | - | GAGCUAUCGAACCGUGU | 17 | 16536 |
| HSV1-UL48-171 | + | GGGCGCGAAUGUCGAUU | 17 | 5904 |
| HSV1-UL48-173 | + | GUCGAUUUGGGUGCGUU | 17 | 6037 |
| HSV1-UL48-172 | + | GGCGCGAAUGUCGAUUU | 17 | 5905 |
| HSV1-UL48-223 | + | GCCGCCGGGGUGUUUUU | 17 | 5953 |
| HSV1-UL48-10 | - | GGCCCCCCCGCUGUACGCAA | 20 | 5840 |
| HSV1-UL48-50 | + | GGUGGCCGGAAGCGUAGGGA | 20 | 5993 |
| HSV1-UL48-36 | - | GUUUCUUCCACGCCGAGCUA | 20 | 5877 |
| HSV1-UL48-11 | - | GCCCCCCCGCUGUACGCAAC | 20 | 5841 |
| HSV1-UL48-62 | + | GGAAUUUACACUCCCGGUAC | 20 | 6000 |
| HSV1-UL48-96 | + | GGCGCCCCGUUGCGUACAGC | 20 | 6019 |
| HSV1-UL48-101 | + | GCGUACAGCGGGGGGGCCGC | 20 | 6020 |
| HSV1-UL48-45 | + | GUAGAGCCCGAGGCCGUCGC | 20 | 5892 |
| HSV1-UL48-107 | + | GUGUUUUUGGGACCCCCGGC | 20 | 5954 |
| HSV1-UL48-1 | - | GCUGUUUGCCGACAUGAACG | 20 | 5960 |
| HSV1-UL48-97 | + | GCGCCCCGUUGCGUACAGCG | 20 | 5938 |
| HSV1-UL48-78 | + | GACGGUUAAAGAGGGCGGCG | 20 | 5930 |
| HSV1-UL48-9 | - | GGGUCCCAAAAACACCCCGG | 20 | 5839 |
| HSV1-UL48-76 | + | GAGACGGUUAAAGAGGGCGG | 20 | 5928 |
| HSV1-UL48-99 | + | GCCCCGUUGCGUACAGCGGG | 20 | 5940 |
| HSV1-UL48-26 | - | GCCCAGCGAUGUGGUGGAAU | 20 | 5968 |
| HSV1-UL48-1128 | + | GACCAAGAGGUCCAUUGGGU | 20 | 16537 |
| HSV1-UL48-1129 | - | GGAGAGCUAUCGAACCGUGU | 20 | 16538 |
| HSV1-UL48-54 | + | GUGGGCGCGAAUGUCGAUUU | 20 | 5901 |
| HSV1-UL48-104 | + | GGGGGCCGCCGGGGUGUUUU | 20 | 5948 |
| HSV1-UL48-105 | + | GGGGCCGCCGGGGUGUUUUU | 20 | 5949 |

[0786] Table 11B provides exemplary targeting domains for knocking out the UL48 gene selected according to the second tier parameters. The targeting domains bind within the first 500 bp of the coding sequence (e.g., within 500 bp downstream from the start codon) and have a high level of orthogonality. It is contemplated herein that in an embodiment the targeting domain hybridizes to the target domain through complementary base pairing. Any of the targeting domains in the table can be used with a S. pyogenes Cas9 molecule that generates a double stranded break (Cas9 nuclease) or a single-stranded break (Cas9 nickase).

TABLE 11B
2nd Tier

| | | | Target | |
|---|---|---|---|---|
| | DNA | | Site | Seq ID |
| gRNA Name | Strand | Targeting Domain | Length | NO: |
| HSV1-UL48-128 | - | CCCCCCGCUGUACGCAA | 17 | 5850 |
| HSV1-UL48-148 | - | AUCGACAUUCGCGCCCA | 17 | 5986 |
| HSV1-UL48-190 | + | CCAAGUCGUCGAGGAGA | 17 | 6045 |
| HSV1-UL48-129 | - | CCCCCGCUGUACGCAAC | 17 | 5851 |
| HSV1-UL48-155 | - | CUUCCACGCCGAGCUAC | 17 | 5887 |
| HSV1-UL48-139 | - | CCAACGCCGACCUGUAC | 17 | 5867 |
| HSV1-UL48-140 | - | CAACGCCGACCUGUACC | 17 | 5868 |
| HSV1-UL48-187 | + | AGCAUGGUACAUAGCGC | 17 | 5921 |
| HSV1-UL48-195 | + | CGGUUAAAGAGGGCGGC | 17 | 5934 |
| HSV1-UL48-174 | + | UCGAUUUGGGUGCGUUC | 17 | 6038 |
| HSV1-UL48-191 | + | CGAGGAGACGGUUAAAG | 17 | 5926 |
| HSV1-UL48-236 | + | ACAGCUCGUCGACCAAG | 17 | 5959 |
| HSV1-UL48-213 | + | CGCCCCGUUGCGUACAG | 17 | 6061 |
| HSV1-UL48-130 | - | CCCCGCUGUACGCAACG | 17 | 5852 |
| HSV1-UL48-161 | + | CUUCGUAGUAGAGCCCG | 17 | 5894 |
| HSV1-UL48-215 | + | CCCCGUUGCGUACAGCG | 17 | 5942 |
| HSV1-UL48-134 | - | CGACUUGGGCUUUAGCG | 17 | 5856 |
| HSV1-UL48-156 | - | ACGCCGAGCUACGGGCG | 17 | 5888 |
| HSV1-UL48-162 | + | AGAGCCCGAGGCCGUCG | 17 | 6032 |
| HSV1-UL48-189 | + | UAAAGCCCAAGUCGUCG | 17 | 5923 |
| HSV1-UL48-175 | + | CGAUUUGGGUGCGUUCG | 17 | 6039 |
| HSV1-UL48-216 | + | CCCGUUGCGUACAGCGG | 17 | 5943 |
| HSV1-UL48-194 | + | ACGGUUAAAGAGGGCGG | 17 | 5933 |
| HSV1-UL48-217 | + | CCGUUGCGUACAGCGGG | 17 | 5944 |
| HSV1-UL48-158 | - | CGAGCUACGGGCGCGGG | 17 | 5987 |
| HSV1-UL48-218 | + | CGUUGCGUACAGCGGGG | 17 | 5945 |
| HSV1-UL48-1130 | + | UCGACCAAGAGGUCCAU | 17 | 16539 |
| HSV1-UL48-132 | - | CCGUCUCCUCGACGACU | 17 | 5854 |
| HSV1-UL48-159 | + | CUCCCGCGCCCGUAGCU | 17 | 5893 |
| HSV1-UL48-182 | + | CCGGUACAGGUCGGCGU | 17 | 5916 |
| HSV1-UL48-183 | + | UACAGGUCGGCGUUGGU | 17 | 5917 |
| HSV1-UL48-1131 | + | CGACCAAGAGGUCCAUU | 17 | 16540 |
| HSV1-UL48-133 | - | CGUCUCCUCGACGACUU | 17 | 5855 |
| HSV1-UL48-1132 | - | CCCGUAUCAACCCCACCCAA | 20 | 16541 |
| HSV1-UL48-30 | - | CAAAUCGACAUUCGCGCCCA | 20 | 5972 |
| HSV1-UL48-67 | + | CUCGUUCCAGGUAUCGAGCA | 20 | 5911 |
| HSV1-UL48-72 | + | AGCCCAAGUCGUCGAGGAGA | 20 | 6002 |
| HSV1-UL48-33 | - | ACGCUUCCGGCCACCCGCGA | 20 | 5874 |
| HSV1-UL48-2 | - | UUUGCCGACAUGAACGCGGA | 20 | 5961 |
| HSV1-UL48-1133 | + | UCCAUUGGGUGGGGUUGAUA | 20 | 16542 |
| HSV1-UL48-49 | + | CGCGGGUGGCCGGAAGCGUA | 20 | 5992 |
| HSV1-UL48-37 | - | UUUCUUCCACGCCGAGCUAC | 20 | 5878 |
| HSV1-UL48-21 | - | CGACCAACGCCGACCUGUAC | 20 | 5860 |
| HSV1-UL48-8 | - | CGGGGGUCCCAAAAACACCC | 20 | 5838 |
| HSV1-UL48-102 | + | CGUACAGCGGGGGGGCCGCC | 20 | 5946 |
| HSV1-UL48-108 | + | UGUUUUUGGGACCCCCGGCC | 20 | 5956 |
| HSV1-UL48-66 | + | CGAAAACAGAUCCUCGUUCC | 20 | 5910 |
| HSV1-UL48-69 | + | UCGAGCAUGGUACAUAGCGC | 20 | 5913 |
| HSV1-UL48-39 | - | CCACGCCGAGCUACGGGCGC | 20 | 5880 |
| HSV1-UL48-58 | + | CCCCCAUUCCACCACAUCGC | 20 | 5906 |
| HSV1-UL48-77 | + | AGACGGUUAAAGAGGGCGGC | 20 | 5929 |
| HSV1-UL48-110 | + | UUUGGGACCCCCGGCCGGGC | 20 | 6023 |
| HSV1-UL48-47 | + | CCGAGGCCGUCGCGGGUGGC | 20 | 5991 |
| HSV1-UL48-35 | - | CGGCCACCCGCGACGGCCUC | 20 | 5876 |
| HSV1-UL48-32 | - | CGUGGCCUUCCCUACGCUUC | 20 | 5873 |
| HSV1-UL48-56 | + | AUGUCGAUUUGGGUGCGUUC | 20 | 5995 |
| HSV1-UL48-73 | + | CGUCGAGGAGACGGUUAAAG | 20 | 5924 |
| HSV1-UL48-118 | + | CAAACAGCUCGUCGACCAAG | 20 | 5958 |
| HSV1-UL48-95 | + | AGGCGCCCCGUUGCGUACAG | 20 | 6018 |
| HSV1-UL48-12 | - | CCCCCCCGCUGUACGCAACG | 20 | 5842 |
| HSV1-UL48-19 | - | CAUGCUCGAUACCUGGAACG | 20 | 5858 |
| HSV1-UL48-31 | - | CAUUCGCGCCCACGGCGACG | 20 | 5872 |
| HSV1-UL48-51 | + | UAGGGAAGGCCACGUCGCCG | 20 | 5898 |
| HSV1-UL48-68 | + | AUCGAGCAUGGUACAUAGCG | 20 | 5912 |
| HSV1-UL48-16 | - | CGACGACUUGGGCUUUAGCG | 20 | 5846 |
| HSV1-UL48-70 | + | CGAGCAUGGUACAUAGCGCG | 20 | 5914 |
| HSV1-UL48-42 | + | CCCGCGCCCGUAGCUCGGCG | 20 | 5988 |
| HSV1-UL48-38 | - | UCCACGCCGAGCUACGGGCG | 20 | 5879 |
| HSV1-UL48-44 | + | AGUAGAGCCCGAGGCCGUCG | 20 | 5989 |
| HSV1-UL48-71 | + | CGCUAAAGCCCAAGUCGUCG | 20 | 5915 |
| HSV1-UL48-57 | + | UGUCGAUUUGGGUGCGUUCG | 20 | 5996 |
| HSV1-UL48-79 | + | ACGGUUAAAGAGGGCGGCGG | 20 | 5931 |
| HSV1-UL48-40 | - | CGCCGAGCUACGGGCGCGGG | 20 | 5973 |
| HSV1-UL48-80 | + | CGGUUAAAGAGGGCGGCGGG | 20 | 5932 |
| HSV1-UL48-100 | + | CCCCGUUGCGUACAGCGGGG | 20 | 5941 |
| HSV1-UL48-1134 | + | CGACCAAGAGGUCCAUUGGG | 20 | 16543 |
| HSV1-UL48-28 | - | CCAGCGAUGUGGUGGAAUGG | 20 | 5970 |
| HSV1-UL48-24 | - | AACGCUGCCCAGCGAUGUGG | 20 | 5863 |
| HSV1-UL48-23 | - | AUCAACGCUGCCCAGCGAUG | 20 | 5862 |
| HSV1-UL48-1135 | + | ACCAAGAGGUCCAUUGGGUG | 20 | 16544 |
| HSV1-UL48-1136 | + | UCGUCGACCAAGAGGUCCAU | 20 | 16545 |
| HSV1-UL48-1137 | - | ACCCCACCCAAUGGACCUCU | 20 | 16546 |
| HSV1-UL48-48 | + | UCGCGGGUGGCCGGAAGCGU | 20 | 5896 |
| HSV1-UL48-64 | + | CUCCCGGUACAGGUCGGCGU | 20 | 5908 |
| HSV1-UL48-63 | + | UUUACACUCCCGGUACAGGU | 20 | 6001 |
| HSV1-UL48-65 | + | CGGUACAGGUCGGCGUUGGU | 20 | 5909 |
| HSV1-UL48-117 | + | AGCGCCGUCCGCGUUCAUGU | 20 | 6030 |
| HSV1-UL48-1138 | + | CGUCGACCAAGAGGUCCAUU | 20 | 16547 |
| HSV1-UL48-53 | + | CGUGGGCGCGAAUGUCGAUU | 20 | 5900 |
| HSV1-UL48-15 | - | AACCGUCUCCUCGACGACUU | 20 | 5845 |
| HSV1-UL48-55 | + | AAUGUCGAUUUGGGUGCGUU | 20 | 5994 |
| HSV1-UL48-20 | - | CUGGAACGAGGAUCUGUUUU | 20 | 5859 |

[0787] Table 11C provides exemplary targeting domains for knocking out the UL48 gene selected according to the third tier parameters. The targeting domains bind within the first 500 bp of the coding sequence (e.g., within 500 bp downstream from the start codon) and start with a 5′G. It is contemplated herein that in an embodiment the targeting domain hybridizes to the target domain through complementary base pairing. Any of the targeting domains in the table can be used with a S. pyogenes Cas9 molecule that generates a double stranded break (Cas9 nuclease) or a single-stranded break (Cas9 nickase).

TABLE 11C
3rd Tier

| | | | Target | |
|---|---|---|---|---|
| | DNA | | Site | Seq ID |
| gRNA Name | Strand | Targeting Domain | Length | NO: |
| HSV1-UL48-1139 | - | GUAUCAACCCCACCCAA | 17 | 16548 |
| HSV1-UL48-607 | + | GCAGAAGUUGGCCAACA | 17 | 6445 |
| HSV1-UL48-185 | + | GUUCCAGGUAUCGAGCA | 17 | 5919 |
| HSV1-UL48-202 | + | GGCGGGGGGGACGGGCA | 17 | 6050 |
| HSV1-UL48-192 | + | GAGGAGACGGUUAAAGA | 17 | 5927 |
| HSV1-UL48-168 | + | GGCCGGAAGCGUAGGGA | 17 | 6036 |
| HSV1-UL48-200 | + | GAGGGCGGCGGGGGGGA | 17 | 6048 |
| HSV1-UL48-136 | - | GUACCAUGCUCGAUACC | 17 | 5981 |
| HSV1-UL48-126 | - | GGGUCCCAAAAACACCC | 17 | 5848 |
| HSV1-UL48-224 | + | GGUGUUUUUGGGACCCC | 17 | 6064 |
| HSV1-UL48-121 | - | GCCACCGCCCCCCCGCC | 17 | 5976 |
| HSV1-UL48-209 | + | GUGGGGAGGGCAUGAGC | 17 | 6057 |
| HSV1-UL48-135 | - | GACUUGGGCUUUAGCGC | 17 | 5857 |
| HSV1-UL48-163 | + | GAGCCCGAGGCCGUCGC | 17 | 5895 |
| HSV1-UL48-228 | + | GGGACCCCCGGCCGGGC | 17 | 6066 |
| HSV1-UL48-150 | - | GGCCUUCCCUACGCUUC | 17 | 5882 |
| HSV1-UL48-137 | - | GCUCGAUACCUGGAACG | 17 | 5865 |
| HSV1-UL48-169 | + | GGAAGGCCACGUCGCCG | 17 | 5902 |
| HSV1-UL48-124 | - | GCCCCCCCGCCCGGCCG | 17 | 5979 |
| HSV1-UL48-196 | + | GGUUAAAGAGGGCGGCG | 17 | 5935 |
| HSV1-UL48-229 | + | GGACCCCCGGCCGGGCG | 17 | 6067 |
| HSV1-UL48-197 | + | GUUAAAGAGGGCGGCGG | 17 | 5936 |
| HSV1-UL48-230 | + | GACCCCCGGCCGGGCGG | 17 | 6068 |
| HSV1-UL48-234 | + | GCCGGGCGGGGGGGCGG | 17 | 6072 |
| HSV1-UL48-193 | + | GAGACGGUUAAAGAGGG | 17 | 6046 |
| HSV1-UL48-207 | + | GACGGGCAUGGGUGGGG | 17 | 6055 |
| HSV1-UL48-204 | + | GGGGGGACGGGCAUGGG | 17 | 6052 |
| HSV1-UL48-146 | - | GCGAUGUGGUGGAAUGG | 17 | 5984 |
| HSV1-UL48-142 | - | GCUGCCCAGCGAUGUGG | 17 | 5870 |
| HSV1-UL48-206 | + | GGGGACGGGCAUGGGUG | 17 | 6054 |
| HSV1-UL48-203 | + | GCGGGGGGGACGGGCAU | 17 | 6051 |
| HSV1-UL48-205 | + | GGGGGACGGGCAUGGGU | 17 | 6053 |
| HSV1-UL48-138 | - | GAACGAGGAUCUGUUUU | 17 | 5866 |
| HSV1-UL48-222 | + | GGCCGCCGGGGUGUUUU | 17 | 5952 |
| HSV1-UL48-84 | + | GGCGGCGGGGGGGACGGGCA | 20 | 6007 |
| HSV1-UL48-74 | + | GUCGAGGAGACGGUUAAAGA | 20 | 5925 |
| HSV1-UL48-90 | + | GGGACGGGCAUGGGUGGGGA | 20 | 6013 |
| HSV1-UL48-22 | - | GACCAACGCCGACCUGUACC | 20 | 5861 |
| HSV1-UL48-93 | + | GGGAGGGCAUGAGCUGGGCC | 20 | 6016 |
| HSV1-UL48-17 | - | GACGACUUGGGCUUUAGCGC | 20 | 5847 |
| HSV1-UL48-94 | + | GCAUGAGCUGGGCCUGGCUC | 20 | 6017 |
| HSV1-UL48-43 | + | GCGCUUCGUAGUAGAGCCCG | 20 | 5891 |
| HSV1-UL48-103 | + | GUACAGCGGGGGGGCCGCCG | 20 | 5947 |
| HSV1-UL48-75 | + | GAGGAGACGGUUAAAGAGGG | 20 | 6003 |
| HSV1-UL48-46 | + | GAGCCCGAGGCCGUCGCGGG | 20 | 5990 |
| HSV1-UL48-113 | + | GGGACCCCCGGCCGGGCGGG | 20 | 6026 |
| HSV1-UL48-81 | + | GGUUAAAGAGGGCGGCGGGG | 20 | 6004 |
| HSV1-UL48-114 | + | GGACCCCCGGCCGGGCGGGG | 20 | 6027 |
| HSV1-UL48-89 | + | GGGGACGGGCAUGGGUGGGG | 20 | 6012 |
| HSV1-UL48-86 | + | GCGGGGGGGACGGGCAUGGG | 20 | 6009 |
| HSV1-UL48-88 | + | GGGGGGGACGGGCAUGGGUG | 20 | 6011 |
| HSV1-UL48-85 | + | GCGGCGGGGGGGACGGGCAU | 20 | 6008 |
| HSV1-UL48-92 | + | GGGUGGGGAGGGCAUGAGCU | 20 | 6015 |

[0788] Table 11D provides exemplary targeting domains for knocking out the UL48 gene selected according to the fourth tier parameters. The targeting domains bind within the first 500 bp of the coding sequence (e.g., within 500 bp downstream from the start codon). It is contemplated herein that in an embodiment the targeting domain hybridizes to the target domain through complementary base pairing. Any of the targeting domains in the table can be used with a S. pyogenes Cas9 molecule that generates a double stranded break (Cas9 nuclease) or a single-stranded break (Cas9 nickase).

TABLE 11D
4th Tier

| | | | Target | |
|---|---|---|---|---|
| | DNA | | Site | Seq ID |
| gRNA Name | Strand | Targeting Domain | Length | NO: |
| HSV1-UL48-143 | - | CCAGCGAUGUGGUGGAA | 17 | 5871 |
| HSV1-UL48-151 | - | CUUCCGGCCACCCGCGA | 17 | 5883 |
| HSV1-UL48-208 | + | ACGGGCAUGGGUGGGGA | 17 | 6056 |
| HSV1-UL48-1140 | + | AUUGGGUGGGGUUGAUA | 17 | 16549 |
| HSV1-UL48-154 | - | UCUUCCACGCCGAGCUA | 17 | 5886 |
| HSV1-UL48-201 | + | AGGGCGGCGGGGGGGAC | 17 | 6049 |
| HSV1-UL48-1141 | + | UUGGGUGGGGUUGAUAC | 17 | 16550 |
| HSV1-UL48-180 | + | AUUUACACUCCCGGUAC | 17 | 6043 |
| HSV1-UL48-131 | - | AACGGGGCGCCUGAGCC | 17 | 5853 |
| HSV1-UL48-220 | + | ACAGCGGGGGGGCCGCC | 17 | 5950 |
| HSV1-UL48-226 | + | UUUUGGGACCCCCGGCC | 17 | 5957 |
| HSV1-UL48-123 | - | CGCCCCCCCGCCCGGCC | 17 | 5978 |
| HSV1-UL48-211 | + | AGGGCAUGAGCUGGGCC | 17 | 6059 |
| HSV1-UL48-179 | + | AUAGGAAUUUACACUCC | 17 | 6042 |
| HSV1-UL48-184 | + | AAACAGAUCCUCGUUCC | 17 | 5918 |
| HSV1-UL48-219 | + | UACAGCGGGGGGGCCGC | 17 | 6063 |
| HSV1-UL48-157 | - | CGCCGAGCUACGGGCGC | 17 | 5889 |
| HSV1-UL48-176 | + | CCAUUCCACCACAUCGC | 17 | 5907 |
| HSV1-UL48-225 | + | UUUUUGGGACCCCCGGC | 17 | 5955 |
| HSV1-UL48-122 | - | CCGCCCCCCCGCCCGGC | 17 | 5977 |
| HSV1-UL48-165 | + | AGGCCGUCGCGGGUGGC | 17 | 6034 |
| HSV1-UL48-153 | - | CCACCCGCGACGGCCUC | 17 | 5885 |
| HSV1-UL48-212 | + | UGAGCUGGGCCUGGCUC | 17 | 6060 |
| HSV1-UL48-149 | - | UCGCGCCCACGGCGACG | 17 | 5881 |
| HSV1-UL48-221 | + | CAGCGGGGGGGCCGCCG | 17 | 5951 |
| HSV1-UL48-127 | - | UCCCAAAAACACCCCGG | 17 | 5849 |
| HSV1-UL48-125 | - | CCCCCCCGCCCGGCCGG | 17 | 5980 |
| HSV1-UL48-227 | + | UGGGACCCCCGGCCGGG | 17 | 6065 |
| HSV1-UL48-164 | + | CCCGAGGCCGUCGCGGG | 17 | 6033 |
| HSV1-UL48-198 | + | UUAAAGAGGGCGGCGGG | 17 | 5937 |
| HSV1-UL48-231 | + | ACCCCCGGCCGGGCGGG | 17 | 6069 |
| HSV1-UL48-199 | + | UAAAGAGGGCGGCGGGG | 17 | 6047 |
| HSV1-UL48-232 | + | CCCCCGGCCGGGCGGGG | 17 | 6070 |
| HSV1-UL48-233 | + | CCGGCCGGGCGGGGGGG | 17 | 6071 |
| HSV1-UL48-147 | - | CGAUGUGGUGGAAUGGG | 17 | 5985 |
| HSV1-UL48-1142 | + | CCAAGAGGUCCAUUGGG | 17 | 16551 |
| HSV1-UL48-145 | - | AGCGAUGUGGUGGAAUG | 17 | 5983 |
| HSV1-UL48-141 | - | AACGCUGCCCAGCGAUG | 17 | 5869 |
| HSV1-UL48-1143 | + | AAGAGGUCCAUUGGGUG | 17 | 16552 |
| HSV1-UL48-144 | - | CAGCGAUGUGGUGGAAU | 17 | 5982 |
| HSV1-UL48-178 | + | CGCUGGGCAGCGUUGAU | 17 | 6041 |
| HSV1-UL48-210 | + | UGGGGAGGGCAUGAGCU | 17 | 6058 |
| HSV1-UL48-177 | + | CAUUCCACCACAUCGCU | 17 | 6040 |
| HSV1-UL48-1144 | - | CCACCCAAUGGACCUCU | 17 | 16553 |
| HSV1-UL48-166 | + | CGGGUGGCCGGAAGCGU | 17 | 5897 |
| HSV1-UL48-181 | + | ACACUCCCGGUACAGGU | 17 | 6044 |
| HSV1-UL48-1145 | + | CAAGAGGUCCAUUGGGU | 17 | 16554 |
| HSV1-UL48-25 | | UGCCCAGCGAUGUGGUGGAA | 20 | 5864 |
| HSV1-UL48-82 | + | AAAGAGGGCGGCGGGGGGGA | 20 | 6005 |
| HSV1-UL48-83 | + | AAGAGGGCGGCGGGGGGGAC | 20 | 6006 |
| HSV1-UL48-1146 | + | CCAUUGGGUGGGGUUGAUAC | 20 | 16555 |
| HSV1-UL48-18 | - | UAUGUACCAUGCUCGAUACC | 20 | 5967 |
| HSV1-UL48-106 | + | CGGGGUGUUUUUGGGACCCC | 20 | 6021 |
| HSV1-UL48-13 | - | CGCAACGGGGCGCCUGAGCC | 20 | 5843 |
| HSV1-UL48-3 | - | UUCGCCACCGCCCCCCCGCC | 20 | 5962 |
| HSV1-UL48-5 | - | CACCGCCCCCCCGCCCGGCC | 20 | 5964 |
| HSV1-UL48-61 | + | UUGAUAGGAAUUUACACUCC | 20 | 5999 |
| HSV1-UL48-91 | + | UGGGUGGGGAGGGCAUGAGC | 20 | 6014 |
| HSV1-UL48-4 | - | CCACCGCCCCCCCGCCCGGC | 20 | 5963 |
| HSV1-UL48-6 | - | ACCGCCCCCCCGCCCGGCCG | 20 | 5965 |
| HSV1-UL48-111 | + | UUGGGACCCCCGGCCGGGCG | 20 | 6024 |
| HSV1-UL48-7 | - | CCGCCCCCCCGCCCGGCCGG | 20 | 5966 |
| HSV1-UL48-98 | + | CGCCCCGUUGCGUACAGCGG | 20 | 5939 |
| HSV1-UL48-112 | + | UGGGACCCCCGGCCGGGCGG | 20 | 6025 |
| HSV1-UL48-116 | + | CCGGCCGGGCGGGGGGGCGG | 20 | 6029 |
| HSV1-UL48-109 | + | UUUUGGGACCCCCGGCCGGG | 20 | 6022 |
| HSV1-UL48-115 | + | CCCCCGGCCGGGCGGGGGGG | 20 | 6028 |
| HSV1-UL48-29 | - | CAGCGAUGUGGUGGAAUGGG | 20 | 5971 |
| HSV1-UL48-27 | - | CCCAGCGAUGUGGUGGAAUG | 20 | 5969 |
| HSV1-UL48-60 | + | CAUCGCUGGGCAGCGUUGAU | 20 | 5998 |
| HSV1-UL48-14 | - | UAACCGUCUCCUCGACGACU | 20 | 5844 |
| HSV1-UL48-34 | - | CCGGCCACCCGCGACGGCCU | 20 | 15875 |
| HSV1-UL48-41 | + | CUCCUCCCGCGCCCGUAGCU | 20 | 5890 |
| HSV1-UL48-59 | + | CCCCAUUCCACCACAUCGCU | 20 | 5997 |
| HSV1-UL48-52 | + | AGGGAAGGCCACGUCGCCGU | 20 | 5899 |
| HSV1-UL48-87 | + | CGGGGGGGACGGGCAUGGGU | 20 | 6010 |

[0789] Table 11E provides exemplary targeting domains for knocking out the UL48 gene selected according to the fifth tier parameters. The targeting domains fall in the coding sequence of the gene, downstream of the first 500 bp of coding sequence (e.g., anywhere from +500 (relative to the start codon) to the stop codon of the gene). It is contemplated herein that in an embodiment the targeting domain hybridizes to the target domain through complementary base pairing. Any of the targeting domains in the table can be used with a S. pyogenes Cas9 molecule that generates a double stranded break (Cas9 nuclease) or a single-stranded break (Cas9 nickase).

TABLE 11E
5th Tier

| | | | Target | |
|---|---|---|---|---|
| | DNA | | Site | Seq ID |
| gRNA Name | Strand | Targeting Domain | Length | NO: |
| HSV1-UL48-510 | + | GUACUCGUCAAUUCCAA | 17 | 6348 |
| HSV1-UL48-568 | + | GUGGGAGGGGUCGUCAA | 17 | 6406 |
| HSV1-UL48-440 | - | CCCUUCAUGUUCGUCAA | 17 | 6278 |
| HSV1-UL48-540 | + | GUGUCCCGCGGGGAGAA | 17 | 6378 |
| HSV1-UL48-582 | + | CCGUUGACGAACAUGAA | 17 | 6420 |
| HSV1-UL48-607 | + | GCAGAAGUUGGCCAACA | 17 | 6445 |
| HSV1-UL48-605 | + | GCGCAGGUACCGGUACA | 17 | 6443 |
| HSV1-UL48-453 | - | CGGCUACGGAGGAGCCA | 17 | 6291 |
| HSV1-UL48-509 | + | CGUACUCGUCAAUUCCA | 17 | 6347 |
| HSV1-UL48-562 | + | GGCCUGGUUGCCAUGCA | 17 | 6400 |
| HSV1-UL48-455 | - | ACCCCUCCCACCCUGCA | 17 | 6293 |
| HSV1-UL48-485 | - | GACGAGCUCCACUUAGA | 17 | 6323 |
| HSV1-UL48-488 | - | CGGCGAGGACGUGGCGA | 17 | 6326 |
| HSV1-UL48-470 | - | UACGGGUCUACCAUCGA | 17 | 6308 |
| HSV1-UL48-550 | + | AUCGAGCAGGCCCUCGA | 17 | 6388 |
| HSV1-UL48-480 | - | CACGCGCAGACUGUCGA | 17 | 6318 |
| HSV1-UL48-580 | + | GAUUGGCACUCCCCGGA | 17 | 6418 |
| HSV1-UL48-554 | + | CGCAUGACCGCCUCGGA | 17 | 6392 |
| HSV1-UL48-494 | - | CUGGACAUGUUGGGGGA | 17 | 6332 |
| HSV1-UL48-566 | + | UGCCAUGCAGGGUGGGA | 17 | 6404 |
| HSV1-UL48-581 | + | UCCGUUGACGAACAUGA | 17 | 6419 |
| HSV1-UL48-504 | - | CUACGGCGCUCUGGAUA | 17 | 6342 |
| HSV1-UL48-502 | - | CACGACUCCGCCCCCUA | 17 | 6340 |
| HSV1-UL48-432 | - | UGACCCGCGAGAUCCUA | 17 | 6270 |
| HSV1-UL48-450 | - | GGUGCGCAGCGCGGCUA | 17 | 6288 |
| HSV1-UL48-506 | - | CUUGGAAUUGACGAGUA | 17 | 6344 |
| HSV1-UL48-514 | + | AUAUCCAGAGCGCCGUA | 17 | 6352 |
| HSV1-UL48-1147 | - | GACGAGUACGGUGGGUA | 17 | 16556 |
| HSV1-UL48-467 | - | CGUACGAAAAACAAUUA | 17 | 6305 |
| HSV1-UL48-573 | + | GCACCAGCGGGAGGUUA | 17 | 6411 |
| HSV1-UL48-459 | - | CGCCUCUGGGUACUUUA | 17 | 6297 |
| HSV1-UL48-586 | + | AACAGAGGCAGUCAAAC | 17 | 6424 |
| HSV1-UL48-1148 | - | UGGGUAGGGGGCGCGAC | 17 | 16557 |
| HSV1-UL48-541 | + | CCGCGGGGAGAAAGGAC | 17 | 6379 |
| HSV1-UL48-430 | - | GCGCCACGAUCGCGGAC | 17 | 6268 |
| HSV1-UL48-495 | - | UGGACAUGUUGGGGGAC | 17 | 6333 |
| HSV1-UL48-603 | + | CGCUGGCGCGCAGGUAC | 17 | 6441 |
| HSV1-UL48-604 | + | CGCGCAGGUACCGGUAC | 17 | 6442 |
| HSV1-UL48-423 | - | UCUGCUCGGCCCUGUAC | 17 | 6261 |
| HSV1-UL48-468 | - | GUACGAAAAACAAUUAC | 17 | 6306 |
| HSV1-UL48-456 | - | CACCCUGCAUGGCAACC | 17 | 6294 |
| HSV1-UL48-427 | - | CGGACGCGAUCGCGACC | 17 | 6265 |
| HSV1-UL48-435 | - | CUGCCUCUGUUGCGACC | 17 | 6273 |
| HSV1-UL48-529 | + | AGUGGAGCUCGUCCCCC | 17 | 6367 |
| HSV1-UL48-569 | + | GUCGUCAACGGCGCCCC | 17 | 6407 |
| HSV1-UL48-525 | + | GGGUAAAUCCCGGCCCC | 17 | 6363 |
| HSV1-UL48-498 | - | GGGGACGGGGAUUCCCC | 17 | 6336 |
| HSV1-UL48-524 | + | GGGGUAAAUCCCGGCCC | 17 | 6362 |
| HSV1-UL48-579 | + | CCUCGAUUGGCACUCCC | 17 | 6417 |
| HSV1-UL48-597 | + | CGCGCAGCAUUUCUCCC | 17 | 6435 |
| HSV1-UL48-497 | - | GGGGGACGGGGAUUCCC | 17 | 6335 |
| HSV1-UL48-481 | - | CCCGACCGAUGUCAGCC | 17 | 6319 |
| HSV1-UL48-452 | - | GCGGCUACGGAGGAGCC | 17 | 6290 |
| HSV1-UL48-425 | - | CCGGCAGCUGCACCGCC | 17 | 6263 |
| HSV1-UL48-598 | + | GUCCGCGCAUGUGCGCC | 17 | 6436 |
| HSV1-UL48-560 | + | ACCCAGAGGCGCGGGCC | 17 | 6398 |
| HSV1-UL48-501 | - | GGGGAUUCCCCGGGGCC | 17 | 6339 |
| HSV1-UL48-523 | + | UCGUGGGGGGUAAAUCC | 17 | 6361 |
| HSV1-UL48-471 | - | GGGCCUGCUCGAUCUCC | 17 | 6309 |
| HSV1-UL48-584 | + | ACUGACGCCAGCUCUCC | 17 | 6422 |
| HSV1-UL48-442 | - | CGGAGCGCUCACCGUCC | 17 | 6280 |
| HSV1-UL48-548 | + | CGGGGGCGUCGUCGUCC | 17 | 6386 |
| HSV1-UL48-556 | + | GGGCGAGGUCGUGAAGC | 17 | 6394 |
| HSV1-UL48-571 | + | CCGCGCUGCGCACCAGC | 17 | 6409 |
| HSV1-UL48-575 | + | GGUUUAGCUCCCGCAGC | 17 | 6413 |
| HSV1-UL48-436 | - | GUUGCGACCUGGAGAGC | 17 | 6274 |
| HSV1-UL48-549 | + | CGUCCGGGAGAUCGAGC | 17 | 6387 |
| HSV1-UL48-601 | + | GUGCAGCUGCCGGACGC | 17 | 6439 |
| HSV1-UL48-479 | - | CUGUCCUUUCUCCCCGC | 17 | 6317 |
| HSV1-UL48-445 | - | UGCCAAUCGAGGCCCGC | 17 | 6283 |
| HSV1-UL48-448 | - | GCACCUUAACCUCCCGC | 17 | 6286 |
| HSV1-UL48-538 | + | CUGCGCGUGUGUCCCGC | 17 | 6376 |
| HSV1-UL48-602 | + | GCCGGACGCUGGCGCGC | 17 | 6440 |
| HSV1-UL48-559 | + | AAAGUACCCAGAGGCGC | 17 | 6397 |
| HSV1-UL48-157 | - | CGCCGAGCUACGGGCGC | 17 | 5889 |
| HSV1-UL48-593 | + | GGCCCAUAGGAUCUCGC | 17 | 6431 |
| HSV1-UL48-474 | - | GACGCCCCCGAAGAGGC | 17 | 6312 |
| HSV1-UL48-577 | + | UAGCUCCCGCAGCCGGC | 17 | 6415 |
| HSV1-UL48-583 | + | UGACGAACAUGAAGGGC | 17 | 6421 |
| HSV1-UL48-500 | - | CGGGGAUUCCCCGGGGC | 17 | 6338 |
| HSV1-UL48-476 | - | CCCCGAAGAGGCGGGGC | 17 | 6314 |
| HSV1-UL48-439 | - | AGCUGGCGUCAGUUGGC | 17 | 6277 |
| HSV1-UL48-561 | + | GGGCCUGGUUGCCAUGC | 17 | 6399 |
| HSV1-UL48-466 | - | CUCCGAGGCGGUCAUGC | 17 | 6304 |
| HSV1-UL48-600 | + | CCUGGCGGUGCAGCUGC | 17 | 6438 |
| HSV1-UL48-447 | - | CGAGGCCCGCCGGCUGC | 17 | 6285 |
| HSV1-UL48-489 | - | GCUAGACGAUUUCGAUC | 17 | 6327 |
| HSV1-UL48-457 | - | AACCAGGCCCGCGCCUC | 17 | 6295 |
| HSV1-UL48-503 | - | CGCCCCCUACGGCGCUC | 17 | 6341 |
| HSV1-UL48-441 | - | ACGGAGCGCUCACCGUC | 17 | 6279 |
| HSV1-UL48-424 | - | ACCUGCGCGCCAGCGUC | 17 | 6262 |
| HSV1-UL48-431 | - | CCGAGAGACCGCUCGUC | 17 | 6269 |
| HSV1-UL48-547 | + | UCGGGGGCGUCGUCGUC | 17 | 6385 |
| HSV1-UL48-588 | + | AGGCAGUCAAACAGGUC | 17 | 6426 |
| HSV1-UL48-532 | + | CCAGGCUGACAUCGGUC | 17 | 6370 |
| HSV1-UL48-1149 | + | GACGGGGGAUGCGGGUC | 17 | 16558 |
| HSV1-UL48-461 | - | CUUUAUGGUGUUGAUUC | 17 | 6299 |
| HSV1-UL48-544 | + | GCCAGCCCCGCCUCUUC | 17 | 6382 |
| HSV1-UL48-472 | - | CGACGACGCCCCCGAAG | 17 | 6310 |
| HSV1-UL48-528 | + | CGUCCUCGCCGUCUAAG | 17 | 6366 |
| HSV1-UL48-585 | + | UCUCCAGGUCGCAACAG | 17 | 6423 |
| HSV1-UL48-570 | + | GCCGCGCUGCGCACCAG | 17 | 6408 |
| HSV1-UL48-557 | + | CACCAUAAAGUACCCAG | 17 | 6395 |
| HSV1-UL48-454 | - | GGCUACGGAGGAGCCAG | 17 | 6292 |
| HSV1-UL48-594 | + | AACACGCGCCAGACGAG | 17 | 6432 |
| HSV1-UL48-567 | + | GCCAUGCAGGGUGGGAG | 17 | 6405 |
| HSV1-UL48-515 | + | UAUCCAGAGCGCCGUAG | 17 | 6353 |
| HSV1-UL48-1150 | - | ACGAGUACGGUGGGUAG | 17 | 16559 |
| HSV1-UL48-487 | - | CUUAGACGGCGAGGACG | 17 | 6325 |
| HSV1-UL48-496 | - | GGACAUGUUGGGGGACG | 17 | 6334 |
| HSV1-UL48-590 | + | CAUCUGCUCGGCGUACG | 17 | 6428 |
| HSV1-UL48-526 | + | GGUAAAUCCCGGCCCCG | 17 | 6364 |
| HSV1-UL48-478 | - | CCUGUCCUUUCUCCCCG | 17 | 6316 |
| HSV1-UL48-499 | - | GGGACGGGGAUUCCCCG | 17 | 6337 |
| HSV1-UL48-537 | + | UCUGCGCGUGUGUCCCG | 17 | 6375 |
| HSV1-UL48-463 | - | CACGACCUCGCCCUCCG | 17 | 6301 |
| HSV1-UL48-443 | - | GGAGCGCUCACCGUCCG | 17 | 6281 |
| HSV1-UL48-449 | - | CCCGCUGGUGCGCAGCG | 17 | 6287 |
| HSV1-UL48-539 | + | UGCGCGUGUGUCCCGCG | 17 | 6377 |
| HSV1-UL48-551 | + | UGUUUUUCGUACGCGCG | 17 | 6389 |
| HSV1-UL48-542 | + | GGGAGAAAGGACAGGCG | 17 | 6380 |
| HSV1-UL48-475 | - | ACGCCCCCGAAGAGGCG | 17 | 6313 |
| HSV1-UL48-558 | + | UAAAGUACCCAGAGGCG | 17 | 6396 |
| HSV1-UL48-486 | - | GCUCCACUUAGACGGCG | 17 | 6324 |
| HSV1-UL48-160 | + | GCGCCCGUAGCUCGGCG | 17 | 6031 |
| HSV1-UL48-555 | + | GACCGCCUCGGAGGGCG | 17 | 6393 |
| HSV1-UL48-156 | - | ACGCCGAGCUACGGGCG | 17 | 5888 |
| HSV1-UL48-426 | - | CGCCAGGCGCACAUGCG | 17 | 6264 |
| HSV1-UL48-444 | - | CCGGGGAGUGCCAAUCG | 17 | 6282 |
| HSV1-UL48-469 | - | UUACGGGUCUACCAUCG | 17 | 6307 |
| HSV1-UL48-429 | - | GCUGCGCGCCACGAUCG | 17 | 6267 |
| HSV1-UL48-596 | + | GUACCUGUCCGCGAUCG | 17 | 6434 |
| HSV1-UL48-592 | + | CGGCCCAUAGGAUCUCG | 17 | 6430 |
| HSV1-UL48-518 | + | CGUAGGGGGCGGAGUCG | 17 | 6356 |
| HSV1-UL48-533 | + | CAGGCUGACAUCGGUCG | 17 | 6371 |
| HSV1-UL48-545 | + | CCAGCCCCGCCUCUUCG | 17 | 6383 |
| HSV1-UL48-473 | - | CGACGCCCCCGAAGAGG | 17 | 6311 |
| HSV1-UL48-464 | - | GACCUCGCCCUCCGAGG | 17 | 6302 |
| HSV1-UL48-516 | + | AUCCAGAGCGCCGUAGG | 17 | 6354 |
| HSV1-UL48-1151 | - | CGAGUACGGUGGGUAGG | 17 | 16560 |
| HSV1-UL48-451 | - | GCGCAGCGCGGCUACGG | 17 | 6289 |
| HSV1-UL48-507 | - | GGAAUUGACGAGUACGG | 17 | 6345 |
| HSV1-UL48-576 | + | UUAGCUCCCGCAGCCGG | 17 | 6414 |
| HSV1-UL48-553 | + | CCGCAUGACCGCCUCGG | 17 | 6391 |
| HSV1-UL48-534 | + | AGGCUGACAUCGGUCGG | 17 | 6372 |
| HSV1-UL48-546 | + | CAGCCCCGCCUCUUCGG | 17 | 6384 |
| HSV1-UL48-563 | + | CUGGUUGCCAUGCAGGG | 17 | 6401 |
| HSV1-UL48-572 | + | CGCUGCGCACCAGCGGG | 17 | 6410 |
| HSV1-UL48-158 | - | CGAGCUACGGGCGCGGG | 17 | 5987 |
| HSV1-UL48-535 | + | GGCUGACAUCGGUCGGG | 17 | 6373 |
| HSV1-UL48-536 | + | GCUGACAUCGGUCGGGG | 17 | 6374 |
| HSV1-UL48-517 | + | CAGAGCGCCGUAGGGGG | 17 | 6355 |
| HSV1-UL48-522 | + | GGGGGCGGAGUCGUGGG | 17 | 6360 |
| HSV1-UL48-565 | + | UUGCCAUGCAGGGUGGG | 17 | 6403 |
| HSV1-UL48-484 | - | GACCGAUGUCAGCCUGG | 17 | 6322 |
| HSV1-UL48-599 | + | CGCGCAUGUGCGCCUGG | 17 | 6437 |
| HSV1-UL48-477 | - | CGAAGAGGCGGGGCUGG | 17 | 6315 |
| HSV1-UL48-521 | + | AGGGGGCGGAGUCGUGG | 17 | 6359 |
| HSV1-UL48-438 | - | GAGCUGGCGUCAGUUGG | 17 | 6276 |
| HSV1-UL48-493 | - | CGAUCUGGACAUGUUGG | 17 | 6331 |
| HSV1-UL48-574 | + | UAAGGUGCUCGCGAAUG | 17 | 6412 |
| HSV1-UL48-465 | - | CCUCCGAGGCGGUCAUG | 17 | 6303 |
| HSV1-UL48-434 | - | ACGCCGAGCAGAUGAUG | 17 | 6272 |
| HSV1-UL48-483 | - | CGACCGAUGUCAGCCUG | 17 | 6321 |
| HSV1-UL48-446 | - | UCGAGGCCCGCCGGCUG | 17 | 6284 |
| HSV1-UL48-520 | + | UAGGGGGCGGAGUCGUG | 17 | 6358 |
| HSV1-UL48-492 | - | UCGAUCUGGACAUGUUG | 17 | 6330 |
| HSV1-UL48-530 | + | GUCCCCCAGGCUGACAU | 17 | 6368 |
| HSV1-UL48-591 | + | CGGCGUACGCGGCCCAU | 17 | 6429 |
| HSV1-UL48-511 | + | GUCAAUUCCAAGGGCAU | 17 | 6349 |
| HSV1-UL48-578 | + | AGCCGGCGGGCCUCGAU | 17 | 6416 |
| HSV1-UL48-433 | - | GACCCGCGAGAUCCUAU | 17 | 6271 |
| HSV1-UL48-428 | - | GGACGCGAUCGCGACCU | 17 | 6266 |
| HSV1-UL48-505 | - | AUGUUUACCGAUGCCCU | 17 | 6343 |
| HSV1-UL48-482 | - | CCGACCGAUGUCAGCCU | 17 | 6320 |
| HSV1-UL48-552 | + | UUCCCGCAUGACCGCCU | 17 | 6390 |
| HSV1-UL48-159 | + | CUCCCGCGCCCGUAGCU | 17 | 5893 |
| HSV1-UL48-589 | + | GGGCCGCAUCAUCUGCU | 17 | 6427 |
| HSV1-UL48-422 | - | GUUGGCCAACUUCUGCU | 17 | 6260 |
| HSV1-UL48-458 | - | ACCAGGCCCGCGCCUCU | 17 | 6296 |
| HSV1-UL48-595 | + | CCAGACGAGCGGUCUCU | 17 | 6433 |
| HSV1-UL48-606 | + | CAGGGCCGAGCAGAAGU | 17 | 6444 |
| HSV1-UL48-462 | - | GUUGAUUCGGGCGAAGU | 17 | 6300 |
| HSV1-UL48-512 | + | CUGCUCAAACUCGAAGU | 17 | 6350 |
| HSV1-UL48-437 | - | GGAGAGCUGGCGUCAGU | 17 | 6275 |
| HSV1-UL48-513 | + | CAUAUCCAGAGCGCCGU | 17 | 6351 |
| HSV1-UL48-527 | + | GAAAUCGUCUAGCGCGU | 17 | 6365 |
| HSV1-UL48-519 | + | GUAGGGGGCGGAGUCGU | 17 | 6357 |
| HSV1-UL48-587 | + | GAGGCAGUCAAACAGGU | 17 | 6425 |
| HSV1-UL48-508 | - | GAAUUGACGAGUACGGU | 17 | 6346 |
| HSV1-UL48-531 | + | CCCAGGCUGACAUCGGU | 17 | 6369 |
| HSV1-UL48-564 | + | UGGUUGCCAUGCAGGGU | 17 | 6402 |
| HSV1-UL48-1152 | - | UGACGAGUACGGUGGGU | 17 | 16561 |
| HSV1-UL48-490 | - | UUUCGAUCUGGACAUGU | 17 | 6328 |
| HSV1-UL48-1127 | - | GAGCUAUCGAACCGUGU | 17 | 16536 |
| HSV1-UL48-460 | - | ACUUUAUGGUGUUGAUU | 17 | 6298 |
| HSV1-UL48-543 | + | CGCCAGCCCCGCCUCUU | 17 | 6381 |
| HSV1-UL48-491 | - | UUCGAUCUGGACAUGUU | 17 | 6329 |
| HSV1-UL48-324 | + | ACCGUACUCGUCAAUUCCAA | 20 | 6162 |
| HSV1-UL48-382 | + | AGGGUGGGAGGGGUCGUCAA | 20 | 6220 |
| HSV1-UL48-254 | - | CAGCCCUUCAUGUUCGUCAA | 20 | 6092 |
| HSV1-UL48-354 | + | CGUGUGUCCCGCGGGGAGAA | 20 | 6192 |
| HSV1-UL48-396 | + | GCUCCGUUGACGAACAUGAA | 20 | 6234 |
| HSV1-UL48-421 | + | CGAGCAGAAGUUGGCCAACA | 20 | 6259 |
| HSV1-UL48-419 | + | GGCGCGCAGGUACCGGUACA | 20 | 6257 |
| HSV1-UL48-267 | - | GCGCGGCUACGGAGGAGCCA | 20 | 6105 |
| HSV1-UL48-323 | + | CACCGUACUCGUCAAUUCCA | 20 | 6161 |
| HSV1-UL48-376 | + | GCGGGCCUGGUUGCCAUGCA | 20 | 6214 |
| HSV1-UL48-269 | - | ACGACCCCUCCCACCCUGCA | 20 | 6107 |
| HSV1-UL48-299 | - | GGGGACGAGCUCCACUUAGA | 20 | 6137 |
| HSV1-UL48-302 | - | AGACGGCGAGGACGUGGCGA | 20 | 6140 |
| HSV1-UL48-284 | - | AAUUACGGGUCUACCAUCGA | 20 | 6122 |
| HSV1-UL48-364 | + | GAGAUCGAGCAGGCCCUCGA | 20 | 6202 |
| HSV1-UL48-294 | - | ACACACGCGCAGACUGUCGA | 20 | 6132 |
| HSV1-UL48-394 | + | CUCGAUUGGCACUCCCCGGA | 20 | 6232 |
| HSV1-UL48-368 | + | UCCCGCAUGACCGCCUCGGA | 20 | 6206 |
| HSV1-UL48-308 | - | GAUCUGGACAUGUUGGGGGA | 20 | 6146 |
| HSV1-UL48-380 | + | GGUUGCCAUGCAGGGUGGGA | 20 | 6218 |
| HSV1-UL48-395 | + | CGCUCCGUUGACGAACAUGA | 20 | 6233 |
| HSV1-UL48-318 | - | CCCCUACGGCGCUCUGGAUA | 20 | 6156 |
| HSV1-UL48-316 | - | CCCCACGACUCCGCCCCCUA | 20 | 6154 |
| HSV1-UL48-246 | - | UUUUGACCCGCGAGAUCCUA | 20 | 6084 |
| HSV1-UL48-264 | - | GCUGGUGCGCAGCGCGGCUA | 20 | 6102 |
| HSV1-UL48-320 | - | GCCCUUGGAAUUGACGAGUA | 20 | 6158 |
| HSV1-UL48-328 | + | GCCAUAUCCAGAGCGCCGUA | 20 | 6166 |
| HSV1-UL48-1153 | - | AUUGACGAGUACGGUGGGUA | 20 | 16562 |
| HSV1-UL48-281 | - | GCGCGUACGAAAAACAAUUA | 20 | 6119 |
| HSV1-UL48-387 | + | UGCGCACCAGCGGGAGGUUA | 20 | 6225 |
| HSV1-UL48-273 | - | CCGCGCCUCUGGGUACUUUA | 20 | 6111 |
| HSV1-UL48-400 | + | CGCAACAGAGGCAGUCAAAC | 20 | 6238 |
| HSV1-UL48-1154 | - | CGGUGGGUAGGGGGCGCGAC | 20 | 16563 |
| HSV1-UL48-355 | + | GUCCCGCGGGGAGAAAGGAC | 20 | 6193 |
| HSV1-UL48-244 | - | UGCGCGCCACGAUCGCGGAC | 20 | 6082 |
| HSV1-UL48-309 | - | AUCUGGACAUGUUGGGGGAC | 20 | 6147 |
| HSV1-UL48-417 | + | GGACGCUGGCGCGCAGGUAC | 20 | 6255 |
| HSV1-UL48-418 | + | UGGCGCGCAGGUACCGGUAC | 20 | 6256 |
| HSV1-UL48-237 | - | ACUUCUGCUCGGCCCUGUAC | 20 | 6075 |
| HSV1-UL48-282 | - | CGCGUACGAAAAACAAUUAC | 20 | 6120 |
| HSV1-UL48-270 | - | UCCCACCCUGCAUGGCAACC | 20 | 6108 |
| HSV1-UL48-241 | - | GCGCGGACGCGAUCGCGACC | 20 | 6079 |
| HSV1-UL48-249 | - | UGACUGCCUCUGUUGCGACC | 20 | 6087 |
| HSV1-UL48-343 | + | CUAAGUGGAGCUCGUCCCCC | 20 | 6181 |
| HSV1-UL48-383 | + | GGGGUCGUCAACGGCGCCCC | 20 | 6221 |
| HSV1-UL48-339 | + | GGGGGGUAAAUCCCGGCCCC | 20 | 6177 |
| HSV1-UL48-312 | - | UUGGGGGACGGGGAUUCCCC | 20 | 6150 |
| HSV1-UL48-338 | + | UGGGGGGUAAAUCCCGGCCC | 20 | 6176 |
| HSV1-UL48-393 | + | GGGCCUCGAUUGGCACUCCC | 20 | 6231 |
| HSV1-UL48-411 | + | UGGCGCGCAGCAUUUCUCCC | 20 | 6249 |
| HSV1-UL48-311 | - | GUUGGGGGACGGGGAUUCCC | 20 | 6149 |
| HSV1-UL48-295 | - | CCCCCCGACCGAUGUCAGCC | 20 | 6133 |
| HSV1-UL48-266 | - | AGCGCGGCUACGGAGGAGCC | 20 | 6104 |
| HSV1-UL48-239 | - | CGUCCGGCAGCUGCACCGCC | 20 | 6077 |
| HSV1-UL48-412 | + | CGCGUCCGCGCAUGUGCGCC | 20 | 6250 |
| HSV1-UL48-374 | + | AGUACCCAGAGGCGCGGGCC | 20 | 6212 |
| HSV1-UL48-315 | - | GACGGGGAUUCCCCGGGGCC | 20 | 6153 |
| HSV1-UL48-337 | + | GAGUCGUGGGGGGUAAAUCC | 20 | 6175 |
| HSV1-UL48-285 | - | CGAGGGCCUGCUCGAUCUCC | 20 | 6123 |
| HSV1-UL48-398 | + | CCAACUGACGCCAGCUCUCC | 20 | 6236 |
| HSV1-UL48-256 | - | CAACGGAGCGCUCACCGUCC | 20 | 6094 |
| HSV1-UL48-362 | + | CUUCGGGGGCGUCGUCGUCC | 20 | 6200 |
| HSV1-UL48-370 | + | GGAGGGCGAGGUCGUGAAGC | 20 | 6208 |
| HSV1-UL48-385 | + | UAGCCGCGCUGCGCACCAGC | 20 | 6223 |
| HSV1-UL48-389 | + | UGUGGUUUAGCUCCCGCAGC | 20 | 6227 |
| HSV1-UL48-250 | - | UCUGUUGCGACCUGGAGAGC | 20 | 6088 |
| HSV1-UL48-363 | + | CGUCGUCCGGGAGAUCGAGC | 20 | 6201 |
| HSV1-UL48-415 | + | GCGGUGCAGCUGCCGGACGC | 20 | 6253 |
| HSV1-UL48-293 | - | CGCCUGUCCUUUCUCCCCGC | 20 | 6131 |
| HSV1-UL48-259 | - | GAGUGCCAAUCGAGGCCCGC | 20 | 6097 |
| HSV1-UL48-262 | - | CGAGCACCUUAACCUCCCGC | 20 | 6100 |
| HSV1-UL48-352 | + | AGUCUGCGCGUGUGUCCCGC | 20 | 6190 |
| HSV1-UL48-416 | + | GCUGCCGGACGCUGGCGCGC | 20 | 6254 |
| HSV1-UL48-373 | + | CAUAAAGUACCCAGAGGCGC | 20 | 6211 |
| HSV1-UL48-39 | - | CCACGCCGAGCUACGGGCGC | 20 | 5880 |
| HSV1-UL48-407 | + | CGCGGCCCAUAGGAUCUCGC | 20 | 6245 |
| HSV1-UL48-288 | - | GACGACGCCCCCGAAGAGGC | 20 | 6126 |
| HSV1-UL48-391 | + | GUUUAGCUCCCGCAGCCGGC | 20 | 6229 |
| HSV1-UL48-397 | + | CGUUGACGAACAUGAAGGGC | 20 | 6235 |
| HSV1-UL48-314 | - | GGACGGGGAUUCCCCGGGGC | 20 | 6152 |
| HSV1-UL48-290 | - | CGCCCCCGAAGAGGCGGGGC | 20 | 6128 |
| HSV1-UL48-253 | - | GAGAGCUGGCGUCAGUUGGC | 20 | 6091 |
| HSV1-UL48-375 | + | CGCGGGCCUGGUUGCCAUGC | 20 | 6213 |
| HSV1-UL48-280 | - | GCCCUCCGAGGCGGUCAUGC | 20 | 6118 |
| HSV1-UL48-414 | + | GCGCCUGGCGGUGCAGCUGC | 20 | 6252 |
| HSV1-UL48-261 | - | AAUCGAGGCCCGCCGGCUGC | 20 | 6099 |
| HSV1-UL48-303 | - | CGCGCUAGACGAUUUCGAUC | 20 | 6141 |
| HSV1-UL48-271 | - | GGCAACCAGGCCCGCGCCUC | 20 | 6109 |
| HSV1-UL48-317 | - | CUCCGCCCCCUACGGCGCUC | 20 | 6155 |
| HSV1-UL48-255 | - | UCAACGGAGCGCUCACCGUC | 20 | 6093 |
| HSV1-UL48-238 | - | GGUACCUGCGCGCCAGCGUC | 20 | 6076 |
| HSV1-UL48-245 | - | CUACCGAGAGACCGCUCGUC | 20 | 6083 |
| HSV1-UL48-361 | + | UCUUCGGGGGCGUCGUCGUC | 20 | 6199 |
| HSV1-UL48-402 | + | CAGAGGCAGUCAAACAGGUC | 20 | 6240 |
| HSV1-UL48-346 | + | CCCCCAGGCUGACAUCGGUC | 20 | 6184 |
| HSV1-UL48-275 | - | GUACUUUAUGGUGUUGAUUC | 20 | 6113 |
| HSV1-UL48-358 | + | GCCGCCAGCCCCGCCUCUUC | 20 | 6196 |
| HSV1-UL48-286 | - | GGACGACGACGCCCCCGAAG | 20 | 6124 |
| HSV1-UL48-342 | + | CCACGUCCUCGCCGUCUAAG | 20 | 6180 |
| HSV1-UL48-399 | + | AGCUCUCCAGGUCGCAACAG | 20 | 6237 |
| HSV1-UL48-384 | + | GUAGCCGCGCUGCGCACCAG | 20 | 6222 |
| HSV1-UL48-371 | + | CAACACCAUAAAGUACCCAG | 20 | 6209 |
| HSV1-UL48-268 | - | CGCGGCUACGGAGGAGCCAG | 20 | 6106 |
| HSV1-UL48-408 | + | CAAAACACGCGCCAGACGAG | 20 | 6246 |
| HSV1-UL48-381 | + | GUUGCCAUGCAGGGUGGGAG | 20 | 6219 |
| HSV1-UL48-329 | + | CCAUAUCCAGAGCGCCGUAG | 20 | 6167 |
| HSV1-UL48-1155 | - | UUGACGAGUACGGUGGGUAG | 20 | 16564 |
| HSV1-UL48-301 | - | CCACUUAGACGGCGAGGACG | 20 | 6139 |
| HSV1-UL48-310 | - | UCUGGACAUGUUGGGGGACG | 20 | 6148 |
| HSV1-UL48-404 | + | CAUCAUCUGCUCGGCGUACG | 20 | 6242 |
| HSV1-UL48-340 | + | GGGGGUAAAUCCCGGCCCCG | 20 | 6178 |
| HSV1-UL48-292 | - | GCGCCUGUCCUUUCUCCCCG | 20 | 6130 |
| HSV1-UL48-313 | - | UGGGGGACGGGGAUUCCCCG | 20 | 6151 |
| HSV1-UL48-351 | + | CAGUCUGCGCGUGUGUCCCG | 20 | 6189 |
| HSV1-UL48-277 | - | CUUCACGACCUCGCCCUCCG | 20 | 6115 |
| HSV1-UL48-257 | - | AACGGAGCGCUCACCGUCCG | 20 | 6095 |
| HSV1-UL48-263 | - | CCUCCCGCUGGUGCGCAGCG | 20 | 6101 |
| HSV1-UL48-353 | + | GUCUGCGCGUGUGUCCCGCG | 20 | 6191 |
| HSV1-UL48-365 | + | AAUUGUUUUUCGUACGCGCG | 20 | 6203 |
| HSV1-UL48-356 | + | GCGGGGAGAAAGGACAGGCG | 20 | 6194 |
| HSV1-UL48-289 | - | ACGACGCCCCCGAAGAGGCG | 20 | 6127 |
| HSV1-UL48-372 | + | CCAUAAAGUACCCAGAGGCG | 20 | 6210 |
| HSV1-UL48-300 | - | CGAGCUCCACUUAGACGGCG | 20 | 6138 |
| HSV1-UL48-42 | + | CCCGCGCCCGUAGCUCGGCG | 20 | 5988 |
| HSV1-UL48-369 | + | CAUGACCGCCUCGGAGGGCG | 20 | 6207 |
| HSV1-UL48-240 | - | CACCGCCAGGCGCACAUGCG | 20 | 6078 |
| HSV1-UL48-258 | - | CGUCCGGGGAGUGCCAAUCG | 20 | 6096 |
| HSV1-UL48-283 | - | CAAUUACGGGUCUACCAUCG | 20 | 6121 |
| HSV1-UL48-243 | - | AAUGCUGCGCGCCACGAUCG | 20 | 6081 |
| HSV1-UL48-410 | + | GUAGUACCUGUCCGCGAUCG | 20 | 6248 |
| HSV1-UL48-406 | + | ACGCGGCCCAUAGGAUCUCG | 20 | 6244 |
| HSV1-UL48-332 | + | CGCCGUAGGGGGCGGAGUCG | 20 | 6170 |
| HSV1-UL48-347 | + | CCCCAGGCUGACAUCGGUCG | 20 | 6185 |
| HSV1-UL48-359 | + | CCGCCAGCCCCGCCUCUUCG | 20 | 6197 |
| HSV1-UL48-287 | - | CGACGACGCCCCCGAAGAGG | 20 | 6125 |
| HSV1-UL48-278 | - | CACGACCUCGCCCUCCGAGG | 20 | 6116 |
| HSV1-UL48-330 | + | CAUAUCCAGAGCGCCGUAGG | 20 | 6168 |
| HSV1-UL48-1156 | - | UGACGAGUACGGUGGGUAGG | 20 | 16565 |
| HSV1-UL48-265 | - | GGUGCGCAGCGCGGCUACGG | 20 | 6103 |
| HSV1-UL48-321 | - | CUUGGAAUUGACGAGUACGG | 20 | 6159 |
| HSV1-UL48-390 | + | GGUUUAGCUCCCGCAGCCGG | 20 | 6228 |
| HSV1-UL48-367 | + | UUCCCGCAUGACCGCCUCGG | 20 | 6205 |
| HSV1-UL48-348 | + | CCCAGGCUGACAUCGGUCGG | 20 | 6186 |
| HSV1-UL48-360 | + | CGCCAGCCCCGCCUCUUCGG | 20 | 6198 |
| HSV1-UL48-377 | + | GGCCUGGUUGCCAUGCAGGG | 20 | 6215 |
| HSV1-UL48-386 | + | CCGCGCUGCGCACCAGCGGG | 20 | 6224 |
| HSV1-UL48-40 | - | CGCCGAGCUACGGGCGCGGG | 20 | 5973 |
| HSV1-UL48-349 | + | CCAGGCUGACAUCGGUCGGG | 20 | 6187 |
| HSV1-UL48-350 | + | CAGGCUGACAUCGGUCGGGG | 20 | 6188 |
| HSV1-UL48-331 | + | AUCCAGAGCGCCGUAGGGGG | 20 | 6169 |
| HSV1-UL48-336 | + | GUAGGGGGCGGAGUCGUGGG | 20 | 6174 |
| HSV1-UL48-379 | + | UGGUUGCCAUGCAGGGUGGG | 20 | 6217 |
| HSV1-UL48-298 | - | CCCGACCGAUGUCAGCCUGG | 20 | 6136 |
| HSV1-UL48-413 | + | GUCCGCGCAUGUGCGCCUGG | 20 | 6251 |
| HSV1-UL48-291 | - | CCCCGAAGAGGCGGGGCUGG | 20 | 6129 |
| HSV1-UL48-335 | + | CGUAGGGGGCGGAGUCGUGG | 20 | 6173 |
| HSV1-UL48-252 | - | GGAGAGCUGGCGUCAGUUGG | 20 | 6090 |
| HSV1-UL48-307 | - | UUUCGAUCUGGACAUGUUGG | 20 | 6145 |
| HSV1-UL48-388 | + | GGUUAAGGUGCUCGCGAAUG | 20 | 6226 |
| HSV1-UL48-279 | - | CGCCCUCCGAGGCGGUCAUG | 20 | 6117 |
| HSV1-UL48-248 | - | CGUACGCCGAGCAGAUGAUG | 20 | 6086 |
| HSV1-UL48-297 | - | CCCCGACCGAUGUCAGCCUG | 20 | 6135 |
| HSV1-UL48-260 | - | CAAUCGAGGCCCGCCGGCUG | 20 | 6098 |
| HSV1-UL48-334 | + | CCGUAGGGGGCGGAGUCGUG | 20 | 6172 |
| HSV1-UL48-306 | - | AUUUCGAUCUGGACAUGUUG | 20 | 6144 |
| HSV1-UL48-344 | + | CUCGUCCCCCAGGCUGACAU | 20 | 6182 |
| HSV1-UL48-405 | + | GCUCGGCGUACGCGGCCCAU | 20 | 6243 |
| HSV1-UL48-325 | + | CUCGUCAAUUCCAAGGGCAU | 20 | 6163 |
| HSV1-UL48-392 | + | CGCAGCCGGCGGGCCUCGAU | 20 | 6230 |
| HSV1-UL48-247 | - | UUUGACCCGCGAGAUCCUAU | 20 | 6085 |
| HSV1-UL48-242 | - | CGCGGACGCGAUCGCGACCU | 20 | 6080 |
| HSV1-UL48-319 | - | CAGAUGUUUACCGAUGCCCU | 20 | 6157 |
| HSV1-UL48-296 | - | CCCCCGACCGAUGUCAGCCU | 20 | 6134 |
| HSV1-UL48-366 | + | GUGUUCCCGCAUGACCGCCU | 20 | 6204 |
| HSV1-UL48-41 | + | CUCCUCCCGCGCCCGUAGCU | 20 | 5890 |
| HSV1-UL48-403 | + | GUCGGGCCGCAUCAUCUGCU | 20 | 6241 |
| HSV1-UL48-1126 | - | CGUGUUGGCCAACUUCUGCU | 20 | 6074 |
| HSV1-UL48-272 | - | GCAACCAGGCCCGCGCCUCU | 20 | 6110 |
| HSV1-UL48-409 | + | GCGCCAGACGAGCGGUCUCU | 20 | 6247 |
| HSV1-UL48-420 | + | GUACAGGGCCGAGCAGAAGU | 20 | 6258 |
| HSV1-UL48-276 | - | GGUGUUGAUUCGGGCGAAGU | 20 | 6114 |
| HSV1-UL48-326 | + | CAUCUGCUCAAACUCGAAGU | 20 | 6164 |
| HSV1-UL48-251 | - | CCUGGAGAGCUGGCGUCAGU | 20 | 6089 |
| HSV1-UL48-327 | + | GGCCAUAUCCAGAGCGCCGU | 20 | 6165 |
| HSV1-UL48-341 | + | AUCGAAAUCGUCUAGCGCGU | 20 | 6179 |
| HSV1-UL48-333 | + | GCCGUAGGGGGCGGAGUCGU | 20 | 6171 |
| HSV1-UL48-401 | + | ACAGAGGCAGUCAAACAGGU | 20 | 6239 |
| HSV1-UL48-322 | - | UUGGAAUUGACGAGUACGGU | 20 | 6160 |
| HSV1-UL48-345 | + | UCCCCCAGGCUGACAUCGGU | 20 | 6183 |
| HSV1-UL48-378 | + | GCCUGGUUGCCAUGCAGGGU | 20 | 6216 |
| HSV1-UL48-1157 | - | AAUUGACGAGUACGGUGGGU | 20 | 16566 |
| HSV1-UL48-304 | - | CGAUUUCGAUCUGGACAUGU | 20 | 6142 |
| HSV1-UL48-1129 | - | GGAGAGCUAUCGAACCGUGU | 20 | 16538 |
| HSV1-UL48-274 | - | GGUACUUUAUGGUGUUGAUU | 20 | 6112 |
| HSV1-UL48-357 | + | AGCCGCCAGCCCCGCCUCUU | 20 | 6195 |
| HSV1-UL48-305 | - | GAUUUCGAUCUGGACAUGUU | 20 | 6143 |

[0790] Table 12A provides exemplary targeting domains for knocking out the UL48 gene selected according to the first tier parameters. The targeting domains bind within the first 500 bp of the coding sequence (e.g., within 500 bp downstream from the start codon), have a high level of orthogonality and start with a 5′G. The PAM is NNGRRT. It is contemplated herein that in an embodiment the targeting domain hybridizes to the target domain through complementary base pairing. Any of the targeting domains in the table can be used with a S. aureus Cas9 molecule that generates a double stranded break (Cas9 nuclease) or a single-stranded break (Cas9 nickase).

TABLE 12A
1st Tier

| | | | Target | |
|---|---|---|---|---|
| | DNA | | Site | Seq ID |
| gRNA Name | Strand | Targeting Domain | Length | NO: |
| HSV1-UL48-1158 | + | GCUCGUCGACCAAGAGGUCCA | 21 | 16567 |
| HSV1-UL48-1159 | + | GUACAGCGGGGGGGCCGC | 18 | 16568 |
| HSV1-UL48-101 | + | GCGUACAGCGGGGGGGCCGC | 20 | 6020 |
| HSV1-UL48-1160 | + | GUUGCGUACAGCGGGGGGGCCGC | 23 | 16569 |
| HSV1-UL48-1161 | + | GAGGGCGGCGGGGGGGACGGGC | 22 | 16570 |
| HSV1-UL48-1162 | + | GGCCACGUCGCCGUGGGC | 18 | 16571 |
| HSV1-UL48-1163 | + | GAAGGCCACGUCGCCGUGGGC | 21 | 16572 |
| HSV1-UL48-1164 | + | GGAAGGCCACGUCGCCGUGGGC | 22 | 16573 |
| HSV1-UL48-1165 | + | GGGAAGGCCACGUCGCCGUGGGC | 23 | 16574 |
| HSV1-UL48-1166 | + | GUAGAGCCCGAGGCCGUC | 18 | 16575 |
| HSV1-UL48-1167 | + | GUAGUAGAGCCCGAGGCCGUC | 21 | 16576 |
| HSV1-UL48-1168 | + | GACCAAGAGGUCCAUUGGG | 19 | 16577 |
| HSV1-UL48-1169 | + | GUCGACCAAGAGGUCCAUUGGG | 22 | 16578 |
| HSV1-UL48-1170 | + | GUGGGCGCGAAUGUCGAU | 18 | 16579 |
| HSV1-UL48-1171 | + | GCCGUGGGCGCGAAUGUCGAU | 21 | 16580 |
| HSV1-UL48-1172 | + | GUCGCCGUGGGCGCGAAUGUCGAU | 24 | 16581 |
| HSV1-UL48-1173 | - | GUACCAUGCUCGAUACCUGGAAC | 23 | 16582 |

[0791] Table 12B provides exemplary targeting domains for knocking out the UL48 gene selected according to the second tier parameters. The targeting domains bind within the first 500 bp of the coding sequence (e.g., within 500 bp downstream from the start codon), and have a high level of orthogonality. The PAM is NNGRRT. It is contemplated herein that in an embodiment the targeting domain hybridizes to the target domain through complementary base pairing. Any of the targeting domains in the table can be used with a S. aureus Cas9 molecule that generates a double stranded break (Cas9 nuclease) or a single-stranded break (Cas9 nickase).

TABLE 12B
2nd Tier

| | | | Target | |
|---|---|---|---|---|
| | DNA | | Site | Seq ID |
| gRNA Name | Strand | Targeting Domain | Length | NO: |
| HSV1-UL48-1174 | + | CGUCGACCAAGAGGUCCA | 18 | 16583 |
| HSV1-UL48-1175 | + | UCGUCGACCAAGAGGUCCA | 19 | 16584 |
| HSV1-UL48-1176 | + | CUCGUCGACCAAGAGGUCCA | 20 | 16585 |
| HSV1-UL48-1177 | + | AGCUCGUCGACCAAGAGGUCCA | 22 | 16586 |
| HSV1-UL48-1178 | + | CAGCUCGUCGACCAAGAGGUCCA | 23 | 16587 |
| HSV1-UL48-1179 | + | ACAGCUCGUCGACCAAGAGGUCCA | 24 | 16588 |
| HSV1-UL48-1180 | + | CGUACAGCGGGGGGGCCGC | 19 | 16589 |
| HSV1-UL48-1181 | + | UGCGUACAGCGGGGGGGCCGC | 21 | 16590 |
| HSV1-UL48-1182 | + | UUGCGUACAGCGGGGGGGCCGC | 22 | 16591 |
| HSV1-UL48-1183 | + | CGUUGCGUACAGCGGGGGGGCCGC | 24 | 16592 |
| HSV1-UL48-1184 | + | AGGGCGGCGGGGGGGACGGGC | 21 | 16593 |
| HSV1-UL48-1185 | + | AGAGGGCGGCGGGGGGGACGGGC | 23 | 16594 |
| HSV1-UL48-1186 | + | AAGAGGGCGGCGGGGGGGACGGGC | 24 | 16595 |
| HSV1-UL48-1187 | + | AGGCCACGUCGCCGUGGGC | 19 | 16596 |
| HSV1-UL48-726 | + | AAGGCCACGUCGCCGUGGGC | 20 | 6513 |
| HSV1-UL48-1188 | + | AGGGAAGGCCACGUCGCCGUGGGC | 24 | 16597 |
| HSV1-UL48-1189 | + | AGUAGAGCCCGAGGCCGUC | 19 | 16598 |
| HSV1-UL48-733 | + | UAGUAGAGCCCGAGGCCGUC | 20 | 6517 |
| HSV1-UL48-1190 | + | CGUAGUAGAGCCCGAGGCCGUC | 22 | 16599 |
| HSV1-UL48-1191 | + | UCGUAGUAGAGCCCGAGGCCGUC | 23 | 16600 |
| HSV1-UL48-1192 | + | UUCGUAGUAGAGCCCGAGGCCGUC | 24 | 16601 |
| HSV1-UL48-1193 | + | ACCAAGAGGUCCAUUGGG | 18 | 16602 |
| HSV1-UL48-1134 | + | CGACCAAGAGGUCCAUUGGG | 20 | 16543 |
| HSV1-UL48-1194 | + | UCGACCAAGAGGUCCAUUGGG | 21 | 16603 |
| HSV1-UL48-1195 | + | CGUCGACCAAGAGGUCCAUUGGG | 23 | 16604 |
| HSV1-UL48-1196 | + | UCGUCGACCAAGAGGUCCAUUGGG | 24 | 16605 |
| HSV1-UL48-1197 | + | CGUGGGCGCGAAUGUCGAU | 19 | 16606 |
| HSV1-UL48-725 | + | CCGUGGGCGCGAAUGUCGAU | 20 | 6512 |
| HSV1-UL48-1198 | + | CGCCGUGGGCGCGAAUGUCGAU | 22 | 16607 |
| HSV1-UL48-1199 | + | UCGCCGUGGGCGCGAAUGUCGAU | 23 | 16608 |
| HSV1-UL48-1200 | + | ACAUCGCUGGGCAGCGUUGAU | 21 | 16609 |
| HSV1-UL48-1201 | + | CACAUCGCUGGGCAGCGUUGAU | 22 | 16610 |
| HSV1-UL48-1202 | + | CCACAUCGCUGGGCAGCGUUGAU | 23 | 16611 |
| HSV1-UL48-1203 | + | ACCACAUCGCUGGGCAGCGUUGAU | 24 | 16612 |
| HSV1-UL48-1204 | - | AUGCUCGAUACCUGGAAC | 18 | 16613 |
| HSV1-UL48-1205 | - | CAUGCUCGAUACCUGGAAC | 19 | 16614 |
| HSV1-UL48-621 | - | CCAUGCUCGAUACCUGGAAC | 20 | 6455 |
| HSV1-UL48-1206 | - | ACCAUGCUCGAUACCUGGAAC | 21 | 16615 |
| HSV1-UL48-1207 | - | UACCAUGCUCGAUACCUGGAAC | 22 | 16616 |
| HSV1-UL48-1208 | - | UGUACCAUGCUCGAUACCUGGAAC | 24 | 16617 |
| HSV1-UL48-1209 | - | CGACCAACGCCGACCUGUACC | 21 | 16618 |
| HSV1-UL48-1210 | - | CCGACCAACGCCGACCUGUACC | 22 | 16619 |
| HSV1-UL48-1211 | - | ACCGACCAACGCCGACCUGUACC | 23 | 16620 |
| HSV1-UL48-1212 | - | UACCGACCAACGCCGACCUGUACC | 24 | 16621 |
| HSV1-UL48-1213 | - | CAACGCUGCCCAGCGAUGUGG | 21 | 16622 |
| HSV1-UL48-1214 | - | UCAACGCUGCCCAGCGAUGUGG | 22 | 16623 |
| HSV1-UL48-1215 | - | AUCAACGCUGCCCAGCGAUGUGG | 23 | 16624 |
| HSV1-UL48-1216 | - | UAUCAACGCUGCCCAGCGAUGUGG | 24 | 16625 |

[0792] Table 12C provides exemplary targeting domains for knocking out the UL48 gene selected according to the third tier parameters. The targeting domains bind within the first 500 bp of the coding sequence (e.g., within 500 bp downstream from the start codon). The PAM is NNGRRT. It is contemplated herein that in an embodiment the targeting domain hybridizes to the target domain through complementary base pairing. Any of the targeting domains in the table can be used with a S. aureus Cas9 molecule that generates a double stranded break (Cas9 nuclease) or a single-stranded break (Cas9 nickase).

TABLE 12C
3rd Tier

| | | | Target | |
|---|---|---|---|---|
| | DNA | | Site | Seq ID |
| gRNA Name | Strand | Targeting Domain | Length | NO: |
| HSV1-UL48-1217 | + | GCGGCGGGGGGGACGGGC | 18 | 16626 |
| HSV1-UL48-1218 | + | GGCGGCGGGGGGGACGGGC | 19 | 16627 |
| HSV1-UL48-702 | + | GGGCGGCGGGGGGGACGGGC | 20 | 6499 |
| HSV1-UL48-1219 | + | UCGCUGGGCAGCGUUGAU | 18 | 16628 |
| HSV1-UL48-1220 | + | AUCGCUGGGCAGCGUUGAU | 19 | 16629 |
| HSV1-UL48-60 | + | CAUCGCUGGGCAGCGUUGAU | 20 | 5998 |
| HSV1-UL48-1221 | - | CCAACGCCGACCUGUACC | 18 | 16630 |
| HSV1-UL48-1222 | - | ACCAACGCCGACCUGUACC | 19 | 16631 |
| HSV1-UL48-22 | - | GACCAACGCCGACCUGUACC | 20 | 5861 |
| HSV1-UL48-1223 | - | CCGCCCCCCCGCCCGGCC | 18 | 16632 |
| HSV1-UL48-1224 | - | ACCGCCCCCCCGCCCGGCC | 19 | 16633 |
| HSV1-UL48-5 | - | CACCGCCCCCCCGCCCGGCC | 20 | 5964 |
| HSV1-UL48-1225 | - | CCACCGCCCCCCCGCCCGGCC | 21 | 16634 |
| HSV1-UL48-1226 | - | GCCACCGCCCCCCCGCCCGGCC | 22 | 16635 |
| HSV1-UL48-1227 | - | CGCCACCGCCCCCCCGCCCGGCC | 23 | 16636 |
| HSV1-UL48-1228 | - | UCGCCACCGCCCCCCCGCCCGGCC | 24 | 16637 |
| HSV1-UL48-1229 | - | CGCUGCCCAGCGAUGUGG | 18 | 16638 |
| HSV1-UL48-1230 | - | ACGCUGCCCAGCGAUGUGG | 19 | 16639 |
| HSV1-UL48-24 | - | AACGCUGCCCAGCGAUGUGG | 20 | 5863 |

[0793] Table 12D provides exemplary targeting domains for knocking out the UL48 gene selected according to the fourth tier parameters. The targeting domains bind within the first 500 bp of the coding sequence (e.g., within 500 bp downstream from the start codon). The PAM is NNGRRV. It is contemplated herein that in an embodiment the targeting domain hybridizes to the target domain through complementary base pairing. Any of the targeting domains in the table can be used with a S. aureus Cas9 molecule that generates a double stranded break (Cas9 nuclease) or a single-stranded break (Cas9 nickase).

TABLE 12D
4th Tier

| | | | Target | |
|---|---|---|---|---|
| | DNA | | Site | Seq ID |
| gRNA Name | Strand | Targeting Domain | Length | NO: |
| HSV1-UL48-1231 | + | GUCGAGGAGACGGUUAAA | 18 | 16640 |
| HSV1-UL48-1232 | + | CGUCGAGGAGACGGUUAAA | 19 | 16641 |
| HSV1-UL48-710 | + | UCGUCGAGGAGACGGUUAAA | 20 | 6502 |
| HSV1-UL48-1233 | + | GUCGUCGAGGAGACGGUUAAA | 21 | 16642 |
| HSV1-UL48-1234 | + | AGUCGUCGAGGAGACGGUUAAA | 22 | 16643 |
| HSV1-UL48-1235 | + | AAGUCGUCGAGGAGACGGUUAAA | 23 | 16644 |
| HSV1-UL48-1236 | + | CAAGUCGUCGAGGAGACGGUUAAA | 24 | 16645 |
| HSV1-UL48-1237 | + | UAGCUCGGCGUGGAAGAA | 18 | 16646 |
| HSV1-UL48-1238 | + | GUAGCUCGGCGUGGAAGAA | 19 | 16647 |
| HSV1-UL48-738 | + | CGUAGCUCGGCGUGGAAGAA | 20 | 6522 |
| HSV1-UL48-1239 | + | CCGUAGCUCGGCGUGGAAGAA | 21 | 16648 |
| HSV1-UL48-1240 | + | CCCGUAGCUCGGCGUGGAAGAA | 22 | 16649 |
| HSV1-UL48-1241 | + | GCCCGUAGCUCGGCGUGGAAGAA | 23 | 16650 |
| HSV1-UL48-1242 | + | CGCCCGUAGCUCGGCGUGGAAGAA | 24 | 16651 |
| HSV1-UL48-1243 | + | GGCGCCCCGUUGCGUACA | 18 | 16652 |
| HSV1-UL48-1244 | + | AGGCGCCCCGUUGCGUACA | 19 | 16653 |
| HSV1-UL48-694 | + | CAGGCGCCCCGUUGCGUACA | 20 | 6494 |
| HSV1-UL48-1245 | + | UCAGGCGCCCCGUUGCGUACA | 21 | 16654 |
| HSV1-UL48-1246 | + | CUCAGGCGCCCCGUUGCGUACA | 22 | 16655 |
| HSV1-UL48-1247 | + | GCUCAGGCGCCCCGUUGCGUACA | 23 | 16656 |
| HSV1-UL48-1248 | + | GGCUCAGGCGCCCCGUUGCGUACA | 24 | 16657 |
| HSV1-UL48-1249 | + | UCGGCGUGGAAGAAACGA | 18 | 16658 |
| HSV1-UL48-1250 | + | CUCGGCGUGGAAGAAACGA | 19 | 16659 |
| HSV1-UL48-736 | + | GCUCGGCGUGGAAGAAACGA | 20 | 6520 |
| HSV1-UL48-1251 | + | AGCUCGGCGUGGAAGAAACGA | 21 | 16660 |
| HSV1-UL48-1252 | + | UAGCUCGGCGUGGAAGAAACGA | 22 | 16661 |
| HSV1-UL48-1253 | + | GUAGCUCGGCGUGGAAGAAACGA | 23 | 16662 |
| HSV1-UL48-1254 | + | CGUAGCUCGGCGUGGAAGAAACGA | 24 | 16663 |
| HSV1-UL48-1255 | + | AUCGCUGGGCAGCGUUGA | 18 | 16664 |
| HSV1-UL48-1256 | + | CAUCGCUGGGCAGCGUUGA | 19 | 16665 |
| HSV1-UL48-720 | + | ACAUCGCUGGGCAGCGUUGA | 20 | 6509 |
| HSV1-UL48-1257 | + | CACAUCGCUGGGCAGCGUUGA | 21 | 16666 |
| HSV1-UL48-1258 | + | CCACAUCGCUGGGCAGCGUUGA | 22 | 16667 |
| HSV1-UL48-1259 | + | ACCACAUCGCUGGGCAGCGUUGA | 23 | 16668 |
| HSV1-UL48-1260 | + | CACCACAUCGCUGGGCAGCGUUGA | 24 | 16669 |
| HSV1-UL48-1261 | + | CAUUGGGUGGGGUUGAUA | 18 | 16670 |
| HSV1-UL48-1262 | + | CCAUUGGGUGGGGUUGAUA | 19 | 16671 |
| HSV1-UL48-1133 | + | UCCAUUGGGUGGGGUUGAUA | 20 | 16542 |
| HSV1-UL48-1263 | + | GUCCAUUGGGUGGGGUUGAUA | 21 | 16672 |
| HSV1-UL48-1264 | + | GGUCCAUUGGGUGGGGUUGAUA | 22 | 16673 |
| HSV1-UL48-1265 | + | AGGUCCAUUGGGUGGGGUUGAUA | 23 | 16674 |
| HSV1-UL48-1266 | + | GAGGUCCAUUGGGUGGGGUUGAUA | 24 | 16675 |
| HSV1-UL48-1267 | + | CGGGUGGCCGGAAGCGUA | 18 | 16676 |
| HSV1-UL48-1268 | + | GCGGGUGGCCGGAAGCGUA | 19 | 16677 |
| HSV1-UL48-49 | + | CGCGGGUGGCCGGAAGCGUA | 20 | 5992 |
| HSV1-UL48-1269 | + | UCGCGGGUGGCCGGAAGCGUA | 21 | 16678 |
| HSV1-UL48-1270 | + | GUCGCGGGUGGCCGGAAGCGUA | 22 | 16679 |
| HSV1-UL48-1271 | + | CGUCGCGGGUGGCCGGAAGCGUA | 23 | 16680 |
| HSV1-UL48-1272 | + | CCGUCGCGGGUGGCCGGAAGCGUA | 24 | 16681 |
| HSV1-UL48-1273 | + | AGAUCCUCGUUCCAGGUA | 18 | 16682 |
| HSV1-UL48-1274 | + | CAGAUCCUCGUUCCAGGUA | 19 | 16683 |
| HSV1-UL48-717 | + | ACAGAUCCUCGUUCCAGGUA | 20 | 6507 |
| HSV1-UL48-1275 | + | AACAGAUCCUCGUUCCAGGUA | 21 | 16684 |
| HSV1-UL48-1276 | + | AAACAGAUCCUCGUUCCAGGUA | 22 | 16685 |
| HSV1-UL48-1277 | + | AAAACAGAUCCUCGUUCCAGGUA | 23 | 16686 |
| HSV1-UL48-1278 | + | GAAAACAGAUCCUCGUUCCAGGUA | 24 | 16687 |
| HSV1-UL48-1279 | + | UCGUCGAGGAGACGGUUA | 18 | 16688 |
| HSV1-UL48-1280 | + | GUCGUCGAGGAGACGGUUA | 19 | 16689 |
| HSV1-UL48-711 | + | AGUCGUCGAGGAGACGGUUA | 20 | 6503 |
| HSV1-UL48-1281 | + | AAGUCGUCGAGGAGACGGUUA | 21 | 16690 |
| HSV1-UL48-1282 | + | CAAGUCGUCGAGGAGACGGUUA | 22 | 16691 |
| HSV1-UL48-1283 | + | CCAAGUCGUCGAGGAGACGGUUA | 23 | 16692 |
| HSV1-UL48-1284 | + | CCCAAGUCGUCGAGGAGACGGUUA | 24 | 16693 |
| HSV1-UL48-1285 | + | GCUCGGCGUGGAAGAAAC | 18 | 16694 |
| HSV1-UL48-1286 | + | AGCUCGGCGUGGAAGAAAC | 19 | 16695 |
| HSV1-UL48-737 | + | UAGCUCGGCGUGGAAGAAAC | 20 | 6521 |
| HSV1-UL48-1287 | + | GUAGCUCGGCGUGGAAGAAAC | 21 | 16696 |
| HSV1-UL48-1288 | + | CGUAGCUCGGCGUGGAAGAAAC | 22 | 16697 |
| HSV1-UL48-1289 | + | CCGUAGCUCGGCGUGGAAGAAAC | 23 | 16698 |
| HSV1-UL48-1290 | + | CCCGUAGCUCGGCGUGGAAGAAAC | 24 | 16699 |
| HSV1-UL48-1291 | + | AUUGGGUGGGGUUGAUAC | 18 | 16700 |
| HSV1-UL48-1292 | + | CAUUGGGUGGGGUUGAUAC | 19 | 16701 |
| HSV1-UL48-1146 | + | CCAUUGGGUGGGGUUGAUAC | 20 | 16555 |
| HSV1-UL48-1293 | + | UCCAUUGGGUGGGGUUGAUAC | 21 | 16702 |
| HSV1-UL48-1294 | + | GUCCAUUGGGUGGGGUUGAUAC | 22 | 16703 |
| HSV1-UL48-1295 | + | GGUCCAUUGGGUGGGGUUGAUAC | 23 | 16704 |
| HSV1-UL48-1296 | + | AGGUCCAUUGGGUGGGGUUGAUAC | 24 | 16705 |
| HSV1-UL48-1297 | + | GCAAACAGCUCGUCGACC | 18 | 16706 |
| HSV1-UL48-1298 | + | GGCAAACAGCUCGUCGACC | 19 | 16707 |
| HSV1-UL48-678 | + | CGGCAAACAGCUCGUCGACC | 20 | 6488 |
| HSV1-UL48-1299 | + | UCGGCAAACAGCUCGUCGACC | 21 | 16708 |
| HSV1-UL48-1300 | + | GUCGGCAAACAGCUCGUCGACC | 22 | 16709 |
| HSV1-UL48-1301 | + | UGUCGGCAAACAGCUCGUCGACC | 23 | 16710 |
| HSV1-UL48-1302 | + | AUGUCGGCAAACAGCUCGUCGACC | 24 | 16711 |
| HSV1-UL48-1303 | + | AGGGAAGGCCACGUCGCC | 18 | 16712 |
| HSV1-UL48-1304 | + | UAGGGAAGGCCACGUCGCC | 19 | 16713 |
| HSV1-UL48-727 | + | GUAGGGAAGGCCACGUCGCC | 20 | 6514 |
| HSV1-UL48-1305 | + | CGUAGGGAAGGCCACGUCGCC | 21 | 16714 |
| HSV1-UL48-1306 | + | GCGUAGGGAAGGCCACGUCGCC | 22 | 16715 |
| HSV1-UL48-1307 | + | AGCGUAGGGAAGGCCACGUCGCC | 23 | 16716 |
| HSV1-UL48-1308 | + | AAGCGUAGGGAAGGCCACGUCGCC | 24 | 16717 |
| HSV1-UL48-1309 | + | CGCCCCGUUGCGUACAGC | 18 | 16718 |
| HSV1-UL48-1310 | + | GCGCCCCGUUGCGUACAGC | 19 | 16719 |
| HSV1-UL48-96 | + | GGCGCCCCGUUGCGUACAGC | 20 | 6019 |
| HSV1-UL48-1311 | + | AGGCGCCCCGUUGCGUACAGC | 21 | 16720 |
| HSV1-UL48-1312 | + | CAGGCGCCCCGUUGCGUACAGC | 22 | 16721 |
| HSV1-UL48-1313 | + | UCAGGCGCCCCGUUGCGUACAGC | 23 | 16722 |
| HSV1-UL48-1314 | + | CUCAGGCGCCCCGUUGCGUACAGC | 24 | 16723 |
| HSV1-UL48-1315 | + | AGCGCUUCGUAGUAGAGC | 18 | 16724 |
| HSV1-UL48-1316 | + | GAGCGCUUCGUAGUAGAGC | 19 | 16725 |
| HSV1-UL48-734 | + | AGAGCGCUUCGUAGUAGAGC | 20 | 6518 |
| HSV1-UL48-1317 | + | GAGAGCGCUUCGUAGUAGAGC | 21 | 16726 |
| HSV1-UL48-1318 | + | AGAGAGCGCUUCGUAGUAGAGC | 22 | 16727 |
| HSV1-UL48-1319 | + | GAGAGAGCGCUUCGUAGUAGAGC | 23 | 16728 |
| HSV1-UL48-1320 | + | CGAGAGAGCGCUUCGUAGUAGAGC | 24 | 16729 |
| HSV1-UL48-1321 | + | UCGAGCAUGGUACAUAGC | 18 | 16730 |
| HSV1-UL48-1322 | + | AUCGAGCAUGGUACAUAGC | 19 | 16731 |
| HSV1-UL48-716 | + | UAUCGAGCAUGGUACAUAGC | 20 | 6506 |
| HSV1-UL48-1323 | + | GUAUCGAGCAUGGUACAUAGC | 21 | 16732 |
| HSV1-UL48-1324 | + | GGUAUCGAGCAUGGUACAUAGC | 22 | 16733 |
| HSV1-UL48-1325 | + | AGGUAUCGAGCAUGGUACAUAGC | 23 | 16734 |
| HSV1-UL48-1326 | + | CAGGUAUCGAGCAUGGUACAUAGC | 24 | 16735 |
| HSV1-UL48-1327 | + | ACGGUUAAAGAGGGCGGC | 18 | 16736 |
| HSV1-UL48-1328 | + | GACGGUUAAAGAGGGCGGC | 19 | 16737 |
| HSV1-UL48-77 | + | AGACGGUUAAAGAGGGCGGC | 20 | 5929 |
| HSV1-UL48-1329 | + | GAGACGGUUAAAGAGGGCGGC | 21 | 16738 |
| HSV1-UL48-1330 | + | GGAGACGGUUAAAGAGGGCGGC | 22 | 16739 |
| HSV1-UL48-1331 | + | AGGAGACGGUUAAAGAGGGCGGC | 23 | 16740 |
| HSV1-UL48-1332 | + | GAGGAGACGGUUAAAGAGGGCGGC | 24 | 16741 |
| HSV1-UL48-1333 | + | CCGCGCCCGUAGCUCGGC | 18 | 16742 |
| HSV1-UL48-1334 | + | CCCGCGCCCGUAGCUCGGC | 19 | 16743 |
| HSV1-UL48-741 | + | UCCCGCGCCCGUAGCUCGGC | 20 | 6524 |
| HSV1-UL48-1335 | + | CUCCCGCGCCCGUAGCUCGGC | 21 | 16744 |
| HSV1-UL48-1336 | + | CCUCCCGCGCCCGUAGCUCGGC | 22 | 16745 |
| HSV1-UL48-1337 | + | UCCUCCCGCGCCCGUAGCUCGGC | 23 | 16746 |
| HSV1-UL48-1338 | + | CUCCUCCCGCGCCCGUAGCUCGGC | 24 | 16747 |
| HSV1-UL48-1339 | + | GGCAUGGGUGGGGAGGGC | 18 | 16748 |
| HSV1-UL48-1340 | + | GGGCAUGGGUGGGGAGGGC | 19 | 16749 |
| HSV1-UL48-696 | + | CGGGCAUGGGUGGGGAGGGC | 20 | 6496 |
| HSV1-UL48-1341 | + | ACGGGCAUGGGUGGGGAGGGC | 21 | 16750 |
| HSV1-UL48-1342 | + | GACGGGCAUGGGUGGGGAGGGC | 22 | 16751 |
| HSV1-UL48-1343 | + | GGACGGGCAUGGGUGGGGAGGGC | 23 | 16752 |
| HSV1-UL48-1344 | + | GGGACGGGCAUGGGUGGGGAGGGC | 24 | 16753 |
| HSV1-UL48-1345 | + | UGGGACCCCCGGCCGGGC | 18 | 16754 |
| HSV1-UL48-1346 | + | UUGGGACCCCCGGCCGGGC | 19 | 16755 |
| HSV1-UL48-110 | + | UUUGGGACCCCCGGCCGGGC | 20 | 6023 |
| HSV1-UL48-1347 | + | UUUUGGGACCCCCGGCCGGGC | 21 | 16756 |
| HSV1-UL48-1348 | + | UUUUUGGGACCCCCGGCCGGGC | 22 | 16757 |
| HSV1-UL48-1349 | + | GUUUUUGGGACCCCCGGCCGGGC | 23 | 16758 |
| HSV1-UL48-1350 | + | UGUUUUUGGGACCCCCGGCCGGGC | 24 | 16759 |
| HSV1-UL48-1351 | + | GAGGCCGUCGCGGGUGGC | 18 | 16760 |
| HSV1-UL48-1352 | + | CGAGGCCGUCGCGGGUGGC | 19 | 16761 |
| HSV1-UL48-47 | + | CCGAGGCCGUCGCGGGUGGC | 20 | 5991 |
| HSV1-UL48-1353 | + | CCCGAGGCCGUCGCGGGUGGC | 21 | 16762 |
| HSV1-UL48-1354 | + | GCCCGAGGCCGUCGCGGGUGGC | 22 | 16763 |
| HSV1-UL48-1355 | + | AGCCCGAGGCCGUCGCGGGUGGC | 23 | 16764 |
| HSV1-UL48-1356 | + | GAGCCCGAGGCCGUCGCGGGUGGC | 24 | 16765 |
| HSV1-UL48-1357 | + | GCUAAAGCCCAAGUCGUC | 18 | 16766 |
| HSV1-UL48-1358 | + | CGCUAAAGCCCAAGUCGUC | 19 | 16767 |
| HSV1-UL48-713 | + | GCGCUAAAGCCCAAGUCGUC | 20 | 6504 |
| HSV1-UL48-1359 | + | CGCGCUAAAGCCCAAGUCGUC | 21 | 16768 |
| HSV1-UL48-1360 | + | CCGCGCUAAAGCCCAAGUCGUC | 22 | 16769 |
| HSV1-UL48-1361 | + | CCCGCGCUAAAGCCCAAGUCGUC | 23 | 16770 |
| HSV1-UL48-1362 | + | GCCCGCGCUAAAGCCCAAGUCGUC | 24 | 16771 |
| HSV1-UL48-1363 | + | GUCGAUUUGGGUGCGUUC | 18 | 16772 |
| HSV1-UL48-1364 | + | UGUCGAUUUGGGUGCGUUC | 19 | 16773 |
| HSV1-UL48-56 | + | AUGUCGAUUUGGGUGCGUUC | 20 | 5995 |
| HSV1-UL48-1365 | + | AAUGUCGAUUUGGGUGCGUUC | 21 | 16774 |
| HSV1-UL48-1366 | + | GAAUGUCGAUUUGGGUGCGUUC | 22 | 16775 |
| HSV1-UL48-1367 | + | CGAAUGUCGAUUUGGGUGCGUUC | 23 | 16776 |
| HSV1-UL48-1368 | + | GCGAAUGUCGAUUUGGGUGCGUUC | 24 | 16777 |
| HSV1-UL48-1369 | + | GCGCCCCGUUGCGUACAG | 18 | 16778 |
| HSV1-UL48-1370 | + | GGCGCCCCGUUGCGUACAG | 19 | 16779 |
| HSV1-UL48-95 | + | AGGCGCCCCGUUGCGUACAG | 20 | 6018 |
| HSV1-UL48-1371 | + | CAGGCGCCCCGUUGCGUACAG | 21 | 16780 |
| HSV1-UL48-1372 | + | UCAGGCGCCCCGUUGCGUACAG | 22 | 16781 |
| HSV1-UL48-1373 | + | CUCAGGCGCCCCGUUGCGUACAG | 23 | 16782 |
| HSV1-UL48-1374 | + | GCUCAGGCGCCCCGUUGCGUACAG | 24 | 16783 |
| HSV1-UL48-1375 | + | GGGUGGGGAGGGCAUGAG | 18 | 16784 |
| HSV1-UL48-1376 | + | UGGGUGGGGAGGGCAUGAG | 19 | 16785 |
| HSV1-UL48-695 | + | AUGGGUGGGGAGGGCAUGAG | 20 | 6495 |
| HSV1-UL48-1377 | + | CAUGGGUGGGGAGGGCAUGAG | 21 | 16786 |
| HSV1-UL48-1378 | + | GCAUGGGUGGGGAGGGCAUGAG | 22 | 16787 |
| HSV1-UL48-1379 | + | GGCAUGGGUGGGGAGGGCAUGAG | 23 | 16788 |
| HSV1-UL48-1380 | + | GGGCAUGGGUGGGGAGGGCAUGAG | 24 | 16789 |
| HSV1-UL48-1381 | + | CGAGAGAGCGCUUCGUAG | 18 | 16790 |
| HSV1-UL48-1382 | + | ACGAGAGAGCGCUUCGUAG | 19 | 16791 |
| HSV1-UL48-735 | + | AACGAGAGAGCGCUUCGUAG | 20 | 6519 |
| HSV1-UL48-1383 | + | AAACGAGAGAGCGCUUCGUAG | 21 | 16792 |
| HSV1-UL48-1384 | + | GAAACGAGAGAGCGCUUCGUAG | 22 | 16793 |
| HSV1-UL48-1385 | + | AGAAACGAGAGAGCGCUUCGUAG | 23 | 16794 |
| HSV1-UL48-1386 | + | AAGAAACGAGAGAGCGCUUCGUAG | 24 | 16795 |
| HSV1-UL48-1387 | + | CGUACAGCGGGGGGGCCG | 18 | 16796 |
| HSV1-UL48-1388 | + | GCGUACAGCGGGGGGGCCG | 19 | 16797 |
| HSV1-UL48-689 | + | UGCGUACAGCGGGGGGGCCG | 20 | 6493 |
| HSV1-UL48-1389 | + | UUGCGUACAGCGGGGGGGCCG | 21 | 16798 |
| HSV1-UL48-1390 | + | GUUGCGUACAGCGGGGGGGCCG | 22 | 16799 |
| HSV1-UL48-1391 | + | CGUUGCGUACAGCGGGGGGGCCG | 23 | 16800 |
| HSV1-UL48-1392 | + | CCGUUGCGUACAGCGGGGGGGCCG | 24 | 16801 |
| HSV1-UL48-1393 | + | CGCGGGUGGCCGGAAGCG | 18 | 16802 |
| HSV1-UL48-1394 | + | UCGCGGGUGGCCGGAAGCG | 19 | 16803 |
| HSV1-UL48-730 | + | GUCGCGGGUGGCCGGAAGCG | 20 | 6515 |
| HSV1-UL48-1395 | + | CGUCGCGGGUGGCCGGAAGCG | 21 | 16804 |
| HSV1-UL48-1396 | + | CCGUCGCGGGUGGCCGGAAGCG | 22 | 16805 |
| HSV1-UL48-1397 | + | GCCGUCGCGGGUGGCCGGAAGCG | 23 | 16806 |
| HSV1-UL48-1398 | + | GGCCGUCGCGGGUGGCCGGAAGCG | 24 | 16807 |
| HSV1-UL48-1399 | + | GCCCCGUUGCGUACAGCG | 18 | 16808 |
| HSV1-UL48-1400 | + | CGCCCCGUUGCGUACAGCG | 19 | 16809 |
| HSV1-UL48-97 | + | GCGCCCCGUUGCGUACAGCG | 20 | 5938 |
| HSV1-UL48-1401 | + | GGCGCCCCGUUGCGUACAGCG | 21 | 16810 |
| HSV1-UL48-1402 | + | AGGCGCCCCGUUGCGUACAGCG | 22 | 16811 |
| HSV1-UL48-1403 | + | CAGGCGCCCCGUUGCGUACAGCG | 23 | 16812 |
| HSV1-UL48-1404 | + | UCAGGCGCCCCGUUGCGUACAGCG | 24 | 16813 |
| HSV1-UL48-1405 | + | CGAGCAUGGUACAUAGCG | 18 | 16814 |
| HSV1-UL48-1406 | + | UCGAGCAUGGUACAUAGCG | 19 | 16815 |
| HSV1-UL48-68 | + | AUCGAGCAUGGUACAUAGCG | 20 | 5912 |
| HSV1-UL48-1407 | + | UAUCGAGCAUGGUACAUAGCG | 21 | 16816 |
| HSV1-UL48-1408 | + | GUAUCGAGCAUGGUACAUAGCG | 22 | 16817 |
| HSV1-UL48-1409 | + | GGUAUCGAGCAUGGUACAUAGCG | 23 | 16818 |
| HSV1-UL48-1410 | + | AGGUAUCGAGCAUGGUACAUAGCG | 24 | 16819 |
| HSV1-UL48-1411 | + | CGGCGUUGGUCGGUAGCG | 18 | 16820 |
| HSV1-UL48-1412 | + | UCGGCGUUGGUCGGUAGCG | 19 | 16821 |
| HSV1-UL48-718 | + | GUCGGCGUUGGUCGGUAGCG | 20 | 6508 |
| HSV1-UL48-1413 | + | GGUCGGCGUUGGUCGGUAGCG | 21 | 16822 |
| HSV1-UL48-1414 | + | AGGUCGGCGUUGGUCGGUAGCG | 22 | 16823 |
| HSV1-UL48-1415 | + | CAGGUCGGCGUUGGUCGGUAGCG | 23 | 16824 |
| HSV1-UL48-1416 | + | ACAGGUCGGCGUUGGUCGGUAGCG | 24 | 16825 |
| HSV1-UL48-1417 | + | CGGUUAAAGAGGGCGGCG | 18 | 16826 |
| HSV1-UL48-1418 | + | ACGGUUAAAGAGGGCGGCG | 19 | 16827 |
| HSV1-UL48-78 | + | GACGGUUAAAGAGGGCGGCG | 20 | 5930 |
| HSV1-UL48-1419 | + | AGACGGUUAAAGAGGGCGGCG | 21 | 16828 |
| HSV1-UL48-1420 | + | GAGACGGUUAAAGAGGGCGGCG | 22 | 16829 |
| HSV1-UL48-1421 | + | GGAGACGGUUAAAGAGGGCGGCG | 23 | 16830 |
| HSV1-UL48-1422 | + | AGGAGACGGUUAAAGAGGGCGGCG | 24 | 16831 |
| HSV1-UL48-1423 | + | CGCGCCCGUAGCUCGGCG | 18 | 16832 |
| HSV1-UL48-1424 | + | CCGCGCCCGUAGCUCGGCG | 19 | 16833 |
| HSV1-UL48-42 | + | CCCGCGCCCGUAGCUCGGCG | 20 | 5988 |
| HSV1-UL48-1425 | + | UCCCGCGCCCGUAGCUCGGCG | 21 | 16834 |
| HSV1-UL48-1426 | + | CUCCCGCGCCCGUAGCUCGGCG | 22 | 16835 |
| HSV1-UL48-1427 | + | CCUCCCGCGCCCGUAGCUCGGCG | 23 | 16836 |
| HSV1-UL48-1428 | + | UCCUCCCGCGCCCGUAGCUCGGCG | 24 | 16837 |
| HSV1-UL48-1429 | + | AGACGGUUAAAGAGGGCG | 18 | 16838 |
| HSV1-UL48-1430 | + | GAGACGGUUAAAGAGGGCG | 19 | 16839 |
| HSV1-UL48-709 | + | GGAGACGGUUAAAGAGGGCG | 20 | 6501 |
| HSV1-UL48-1431 | + | AGGAGACGGUUAAAGAGGGCG | 21 | 16840 |
| HSV1-UL48-1432 | + | GAGGAGACGGUUAAAGAGGGCG | 22 | 16841 |
| HSV1-UL48-1433 | + | CGAGGAGACGGUUAAAGAGGGCG | 23 | 16842 |
| HSV1-UL48-1434 | + | UCGAGGAGACGGUUAAAGAGGGCG | 24 | 16843 |
| HSV1-UL48-1435 | + | GGGACCCCCGGCCGGGCG | 18 | 16844 |
| HSV1-UL48-1436 | + | UGGGACCCCCGGCCGGGCG | 19 | 16845 |
| HSV1-UL48-111 | + | UUGGGACCCCCGGCCGGGCG | 20 | 6024 |
| HSV1-UL48-1437 | + | UUUGGGACCCCCGGCCGGGCG | 21 | 16846 |
| HSV1-UL48-1438 | + | UUUUGGGACCCCCGGCCGGGCG | 22 | 16847 |
| HSV1-UL48-1439 | + | UUUUUGGGACCCCCGGCCGGGCG | 23 | 16848 |
| HSV1-UL48-1440 | + | GUUUUUGGGACCCCCGGCCGGGCG | 24 | 16849 |
| HSV1-UL48-1441 | + | CCCCAUUCCACCACAUCG | 18 | 16850 |
| HSV1-UL48-1442 | + | CCCCCAUUCCACCACAUCG | 19 | 16851 |
| HSV1-UL48-721 | + | CCCCCCAUUCCACCACAUCG | 20 | 6510 |
| HSV1-UL48-1443 | + | UCCCCCCAUUCCACCACAUCG | 21 | 16852 |
| HSV1-UL48-1444 | + | GUCCCCCCAUUCCACCACAUCG | 22 | 16853 |
| HSV1-UL48-1445 | + | CGUCCCCCCAUUCCACCACAUCG | 23 | 16854 |
| HSV1-UL48-1446 | + | GCGUCCCCCCAUUCCACCACAUCG | 24 | 16855 |
| HSV1-UL48-1447 | + | GCGCUAAAGCCCAAGUCG | 18 | 16856 |
| HSV1-UL48-1448 | + | CGCGCUAAAGCCCAAGUCG | 19 | 16857 |
| HSV1-UL48-714 | + | CCGCGCUAAAGCCCAAGUCG | 20 | 6505 |
| HSV1-UL48-1449 | + | CCCGCGCUAAAGCCCAAGUCG | 21 | 16858 |
| HSV1-UL48-1450 | + | GCCCGCGCUAAAGCCCAAGUCG | 22 | 16859 |
| HSV1-UL48-1451 | + | GGCCCGCGCUAAAGCCCAAGUCG | 23 | 16860 |
| HSV1-UL48-1452 | + | GGGCCCGCGCUAAAGCCCAAGUCG | 24 | 16861 |
| HSV1-UL48-1453 | + | CUAAAGCCCAAGUCGUCG | 18 | 16862 |
| HSV1-UL48-1454 | + | GCUAAAGCCCAAGUCGUCG | 19 | 16863 |
| HSV1-UL48-71 | + | CGCUAAAGCCCAAGUCGUCG | 20 | 5915 |
| HSV1-UL48-1455 | + | GCGCUAAAGCCCAAGUCGUCG | 21 | 16864 |
| HSV1-UL48-1456 | + | CGCGCUAAAGCCCAAGUCGUCG | 22 | 16865 |
| HSV1-UL48-1457 | + | CCGCGCUAAAGCCCAAGUCGUCG | 23 | 16866 |
| HSV1-UL48-1458 | + | CCCGCGCUAAAGCCCAAGUCGUCG | 24 | 16867 |
| HSV1-UL48-1459 | + | UGUUUUUGGGACCCCCGG | 18 | 16868 |
| HSV1-UL48-1460 | + | GUGUUUUUGGGACCCCCGG | 19 | 16869 |
| HSV1-UL48-685 | + | GGUGUUUUUGGGACCCCCGG | 20 | 6491 |
| HSV1-UL48-1461 | + | GGGUGUUUUUGGGACCCCCGG | 21 | 16870 |
| HSV1-UL48-1462 | + | GGGGUGUUUUUGGGACCCCCGG | 22 | 16871 |
| HSV1-UL48-1463 | + | CGGGGUGUUUUUGGGACCCCCGG | 23 | 16872 |
| HSV1-UL48-1464 | + | CCGGGGUGUUUUUGGGACCCCCGG | 24 | 16873 |
| HSV1-UL48-1465 | + | UUUGGGACCCCCGGCCGG | 18 | 16874 |
| HSV1-UL48-1466 | + | UUUUGGGACCCCCGGCCGG | 19 | 16875 |
| HSV1-UL48-684 | + | UUUUUGGGACCCCCGGCCGG | 20 | 6490 |
| HSV1-UL48-1467 | + | GUUUUUGGGACCCCCGGCCGG | 21 | 16876 |
| HSV1-UL48-1468 | + | UGUUUUUGGGACCCCCGGCCGG | 22 | 16877 |
| HSV1-UL48-1469 | + | GUGUUUUUGGGACCCCCGGCCGG | 23 | 16878 |
| HSV1-UL48-1470 | + | GGUGUUUUUGGGACCCCCGGCCGG | 24 | 16879 |
| HSV1-UL48-1471 | + | CCCCGUUGCGUACAGCGG | 18 | 16880 |
| HSV1-UL48-1472 | + | GCCCCGUUGCGUACAGCGG | 19 | 16881 |
| HSV1-UL48-98 | + | CGCCCCGUUGCGUACAGCGG | 20 | 5939 |
| HSV1-UL48-1473 | + | GCGCCCCGUUGCGUACAGCGG | 21 | 16882 |
| HSV1-UL48-1474 | + | GGCGCCCCGUUGCGUACAGCGG | 22 | 16883 |
| HSV1-UL48-1475 | + | AGGCGCCCCGUUGCGUACAGCGG | 23 | 16884 |
| HSV1-UL48-1476 | + | CAGGCGCCCCGUUGCGUACAGCGG | 24 | 16885 |
| HSV1-UL48-1477 | + | GGUUAAAGAGGGCGGCGG | 18 | 16886 |
| HSV1-UL48-1478 | + | CGGUUAAAGAGGGCGGCGG | 19 | 16887 |
| HSV1-UL48-79 | + | ACGGUUAAAGAGGGCGGCGG | 20 | 5931 |
| HSV1-UL48-1479 | + | GACGGUUAAAGAGGGCGGCGG | 21 | 16888 |
| HSV1-UL48-1480 | + | AGACGGUUAAAGAGGGCGGCGG | 22 | 16889 |
| HSV1-UL48-1481 | + | GAGACGGUUAAAGAGGGCGGCGG | 23 | 16890 |
| HSV1-UL48-1482 | + | GGAGACGGUUAAAGAGGGCGGCGG | 24 | 16891 |
| HSV1-UL48-1483 | + | GACGGUUAAAGAGGGCGG | 18 | 16892 |
| HSV1-UL48-1484 | + | AGACGGUUAAAGAGGGCGG | 19 | 16893 |
| HSV1-UL48-76 | + | GAGACGGUUAAAGAGGGCGG | 20 | 5928 |
| HSV1-UL48-1485 | + | GGAGACGGUUAAAGAGGGCGG | 21 | 16894 |
| HSV1-UL48-1486 | + | AGGAGACGGUUAAAGAGGGCGG | 22 | 16895 |
| HSV1-UL48-1487 | + | GAGGAGACGGUUAAAGAGGGCGG | 23 | 16896 |
| HSV1-UL48-1488 | + | CGAGGAGACGGUUAAAGAGGGCGG | 24 | 16897 |
| HSV1-UL48-1489 | + | GGACCCCCGGCCGGGCGG | 18 | 16898 |
| HSV1-UL48-1490 | + | GGGACCCCCGGCCGGGCGG | 19 | 16899 |
| HSV1-UL48-112 | + | UGGGACCCCCGGCCGGGCGG | 20 | 6025 |
| HSV1-UL48-1491 | + | UUGGGACCCCCGGCCGGGCGG | 21 | 16900 |
| HSV1-UL48-1492 | + | UUUGGGACCCCCGGCCGGGCGG | 22 | 16901 |
| HSV1-UL48-1493 | + | UUUUGGGACCCCCGGCCGGGCGG | 23 | 16902 |
| HSV1-UL48-1494 | + | UUUUUGGGACCCCCGGCCGGGCGG | 24 | 16903 |
| HSV1-UL48-1495 | + | UUGGGACCCCCGGCCGGG | 18 | 16904 |
| HSV1-UL48-1496 | + | UUUGGGACCCCCGGCCGGG | 19 | 16905 |
| HSV1-UL48-109 | + | UUUUGGGACCCCCGGCCGGG | 20 | 6022 |
| HSV1-UL48-1497 | + | UUUUUGGGACCCCCGGCCGGG | 21 | 16906 |
| HSV1-UL48-1498 | + | GUUUUUGGGACCCCCGGCCGGG | 22 | 16907 |
| HSV1-UL48-1499 | + | UGUUUUUGGGACCCCCGGCCGGG | 23 | 16908 |
| HSV1-UL48-1500 | + | GUGUUUUUGGGACCCCCGGCCGGG | 24 | 16909 |
| HSV1-UL48-1501 | + | GUUAAAGAGGGCGGCGGG | 18 | 16910 |
| HSV1-UL48-1502 | + | GGUUAAAGAGGGCGGCGGG | 19 | 16911 |
| HSV1-UL48-80 | + | CGGUUAAAGAGGGCGGCGGG | 20 | 5932 |
| HSV1-UL48-1503 | + | ACGGUUAAAGAGGGCGGCGGG | 21 | 16912 |
| HSV1-UL48-1504 | + | GACGGUUAAAGAGGGCGGCGGG | 22 | 16913 |
| HSV1-UL48-1505 | + | AGACGGUUAAAGAGGGCGGCGGG | 23 | 16914 |
| HSV1-UL48-1506 | + | GAGACGGUUAAAGAGGGCGGCGGG | 24 | 16915 |
| HSV1-UL48-1507 | + | AAGAGGGCGGCGGGGGGG | 18 | 16916 |
| HSV1-UL48-1508 | + | AAAGAGGGCGGCGGGGGGG | 19 | 16917 |
| HSV1-UL48-703 | + | UAAAGAGGGCGGCGGGGGGG | 20 | 6500 |
| HSV1-UL48-1509 | + | UUAAAGAGGGCGGCGGGGGGG | 21 | 16918 |
| HSV1-UL48-1510 | + | GUUAAAGAGGGCGGCGGGGGGG | 22 | 16919 |
| HSV1-UL48-1511 | + | GGUUAAAGAGGGCGGCGGGGGGG | 23 | 16920 |
| HSV1-UL48-1512 | + | CGGUUAAAGAGGGCGGCGGGGGGG | 24 | 16921 |
| HSV1-UL48-1513 | + | GGGGGGGACGGGCAUGGG | 18 | 16922 |
| HSV1-UL48-1514 | + | CGGGGGGGACGGGCAUGGG | 19 | 16923 |
| HSV1-UL48-86 | + | GCGGGGGGGACGGGCAUGGG | 20 | 6009 |
| HSV1-UL48-1515 | + | GGCGGGGGGGACGGGCAUGGG | 21 | 16924 |
| HSV1-UL48-1516 | + | CGGCGGGGGGGACGGGCAUGGG | 22 | 16925 |
| HSV1-UL48-1517 | + | GCGGCGGGGGGGACGGGCAUGGG | 23 | 16926 |
| HSV1-UL48-1518 | + | GGCGGCGGGGGGGACGGGCAUGGG | 24 | 16927 |
| HSV1-UL48-1519 | + | GGGACGGGCAUGGGUGGG | 18 | 16928 |
| HSV1-UL48-1520 | + | GGGGACGGGCAUGGGUGGG | 19 | 16929 |
| HSV1-UL48-697 | + | GGGGGACGGGCAUGGGUGGG | 20 | 6497 |
| HSV1-UL48-1521 | + | GGGGGGACGGGCAUGGGUGGG | 21 | 16930 |
| HSV1-UL48-1522 | + | GGGGGGGACGGGCAUGGGUGGG | 22 | 16931 |
| HSV1-UL48-1523 | + | CGGGGGGGACGGGCAUGGGUGGG | 23 | 16932 |
| HSV1-UL48-1524 | + | GCGGGGGGGACGGGCAUGGGUGGG | 24 | 16933 |
| HSV1-UL48-1525 | + | CGGGGGGGACGGGCAUGG | 18 | 16934 |
| HSV1-UL48-1526 | + | GCGGGGGGGACGGGCAUGG | 19 | 16935 |
| HSV1-UL48-701 | + | GGCGGGGGGGACGGGCAUGG | 20 | 6498 |
| HSV1-UL48-1527 | + | CGGCGGGGGGGACGGGCAUGG | 21 | 16936 |
| HSV1-UL48-1528 | + | GCGGCGGGGGGGACGGGCAUGG | 22 | 16937 |
| HSV1-UL48-1529 | + | GGCGGCGGGGGGGACGGGCAUGG | 23 | 16938 |
| HSV1-UL48-1530 | + | GGGCGGCGGGGGGGACGGGCAUGG | 24 | 16939 |
| HSV1-UL48-1531 | + | GCCCGUAGCUCGGCGUGG | 18 | 16940 |
| HSV1-UL48-1532 | + | CGCCCGUAGCUCGGCGUGG | 19 | 16941 |
| HSV1-UL48-739 | + | GCGCCCGUAGCUCGGCGUGG | 20 | 6523 |
| HSV1-UL48-1533 | + | CGCGCCCGUAGCUCGGCGUGG | 21 | 16942 |
| HSV1-UL48-1534 | + | CCGCGCCCGUAGCUCGGCGUGG | 22 | 16943 |
| HSV1-UL48-1535 | + | CCCGCGCCCGUAGCUCGGCGUGG | 23 | 16944 |
| HSV1-UL48-1536 | + | UCCCGCGCCCGUAGCUCGGCGUGG | 24 | 16945 |
| HSV1-UL48-1537 | + | CGAGGCCGUCGCGGGUGG | 18 | 16946 |
| HSV1-UL48-1538 | + | CCGAGGCCGUCGCGGGUGG | 19 | 16947 |
| HSV1-UL48-732 | + | CCCGAGGCCGUCGCGGGUGG | 20 | 6516 |
| HSV1-UL48-1539 | + | GCCCGAGGCCGUCGCGGGUGG | 21 | 16948 |
| HSV1-UL48-1540 | + | AGCCCGAGGCCGUCGCGGGUGG | 22 | 16949 |
| HSV1-UL48-1541 | + | GAGCCCGAGGCCGUCGCGGGUGG | 23 | 16950 |
| HSV1-UL48-1542 | + | AGAGCCCGAGGCCGUCGCGGGUGG | 24 | 16951 |
| HSV1-UL48-1543 | + | GACCAAGAGGUCCAUUGG | 18 | 16952 |
| HSV1-UL48-1544 | + | CGACCAAGAGGUCCAUUGG | 19 | 16953 |
| HSV1-UL48-1545 | + | UCGACCAAGAGGUCCAUUGG | 20 | 16954 |
| HSV1-UL48-1546 | + | GUCGACCAAGAGGUCCAUUGG | 21 | 16955 |
| HSV1-UL48-1547 | + | CGUCGACCAAGAGGUCCAUUGG | 22 | 16956 |
| HSV1-UL48-1548 | + | UCGUCGACCAAGAGGUCCAUUGG | 23 | 16957 |
| HSV1-UL48-1549 | + | CUCGUCGACCAAGAGGUCCAUUGG | 24 | 16958 |
| HSV1-UL48-1550 | + | CCGGGCGGGGGGGCGGUG | 18 | 16959 |
| HSV1-UL48-1551 | + | GCCGGGCGGGGGGGCGGUG | 19 | 16960 |
| HSV1-UL48-679 | + | GGCCGGGCGGGGGGGCGGUG | 20 | 6489 |
| HSV1-UL48-1552 | + | CGGCCGGGCGGGGGGGCGGUG | 21 | 16961 |
| HSV1-UL48-1553 | + | CCGGCCGGGCGGGGGGGCGGUG | 22 | 16962 |
| HSV1-UL48-1554 | + | CCCGGCCGGGCGGGGGGGCGGUG | 23 | 16963 |
| HSV1-UL48-1555 | + | CCCCGGCCGGGCGGGGGGGCGGUG | 24 | 16964 |
| HSV1-UL48-1556 | + | GGGGGACGGGCAUGGGUG | 18 | 16965 |
| HSV1-UL48-1557 | + | GGGGGGACGGGCAUGGGUG | 19 | 16966 |
| HSV1-UL48-88 | + | GGGGGGGACGGGCAUGGGUG | 20 | 6011 |
| HSV1-UL48-1558 | + | CGGGGGGGACGGGCAUGGGUG | 21 | 16967 |
| HSV1-UL48-1559 | + | GCGGGGGGGACGGGCAUGGGUG | 22 | 16968 |
| HSV1-UL48-1560 | + | GGCGGGGGGGACGGGCAUGGGUG | 23 | 16969 |
| HSV1-UL48-1561 | + | CGGCGGGGGGGACGGGCAUGGGUG | 24 | 16970 |
| HSV1-UL48-1562 | + | CCAUUGGGUGGGGUUGAU | 18 | 16971 |
| HSV1-UL48-1563 | + | UCCAUUGGGUGGGGUUGAU | 19 | 16972 |
| HSV1-UL48-1564 | + | GUCCAUUGGGUGGGGUUGAU | 20 | 16973 |
| HSV1-UL48-1565 | + | GGUCCAUUGGGUGGGGUUGAU | 21 | 16974 |
| HSV1-UL48-1566 | + | AGGUCCAUUGGGUGGGGUUGAU | 22 | 16975 |
| HSV1-UL48-1567 | + | GAGGUCCAUUGGGUGGGGUUGAU | 23 | 16976 |
| HSV1-UL48-1568 | + | AGAGGUCCAUUGGGUGGGGUUGAU | 24 | 16977 |
| HSV1-UL48-1569 | + | GCGGGUGGCCGGAAGCGU | 18 | 16978 |
| HSV1-UL48-1570 | + | CGCGGGUGGCCGGAAGCGU | 19 | 16979 |
| HSV1-UL48-48 | + | UCGCGGGUGGCCGGAAGCGU | 20 | 5896 |
| HSV1-UL48-1571 | + | GUCGCGGGUGGCCGGAAGCGU | 21 | 16980 |
| HSV1-UL48-1572 | + | CGUCGCGGGUGGCCGGAAGCGU | 22 | 16981 |
| HSV1-UL48-1573 | + | CCGUCGCGGGUGGCCGGAAGCGU | 23 | 16982 |
| HSV1-UL48-1574 | + | GCCGUCGCGGGUGGCCGGAAGCGU | 24 | 16983 |
| HSV1-UL48-1575 | + | AUGUCGAUUUGGGUGCGU | 18 | 16984 |
| HSV1-UL48-1576 | + | AAUGUCGAUUUGGGUGCGU | 19 | 16985 |
| HSV1-UL48-724 | + | GAAUGUCGAUUUGGGUGCGU | 20 | 6511 |
| HSV1-UL48-1577 | + | CGAAUGUCGAUUUGGGUGCGU | 21 | 16986 |
| HSV1-UL48-1578 | + | GCGAAUGUCGAUUUGGGUGCGU | 22 | 16987 |
| HSV1-UL48-1579 | + | CGCGAAUGUCGAUUUGGGUGCGU | 23 | 16988 |
| HSV1-UL48-1580 | + | GCGCGAAUGUCGAUUUGGGUGCGU | 24 | 16989 |
| HSV1-UL48-1581 | + | GGGGGGACGGGCAUGGGU | 18 | 16990 |
| HSV1-UL48-1582 | + | GGGGGGGACGGGCAUGGGU | 19 | 16991 |
| HSV1-UL48-87 | + | CGGGGGGGACGGGCAUGGGU | 20 | 6010 |
| HSV1-UL48-1583 | + | GCGGGGGGGACGGGCAUGGGU | 21 | 16992 |
| HSV1-UL48-1584 | + | GGCGGGGGGGACGGGCAUGGGU | 22 | 16993 |
| HSV1-UL48-1585 | + | CGGCGGGGGGGACGGGCAUGGGU | 23 | 16994 |
| HSV1-UL48-1586 | + | GCGGCGGGGGGGACGGGCAUGGGU | 24 | 16995 |
| HSV1-UL48-1587 | + | UGUCGAUUUGGGUGCGUU | 18 | 16996 |
| HSV1-UL48-1588 | + | AUGUCGAUUUGGGUGCGUU | 19 | 16997 |
| HSV1-UL48-55 | + | AAUGUCGAUUUGGGUGCGUU | 20 | 5994 |
| HSV1-UL48-1589 | + | GAAUGUCGAUUUGGGUGCGUU | 21 | 16998 |
| HSV1-UL48-1590 | + | CGAAUGUCGAUUUGGGUGCGUU | 22 | 16999 |
| HSV1-UL48-1591 | + | GCGAAUGUCGAUUUGGGUGCGUU | 23 | 17000 |
| HSV1-UL48-1592 | + | CGCGAAUGUCGAUUUGGGUGCGUU | 24 | 17001 |
| HSV1-UL48-1593 | + | GGGGCCGCCGGGGUGUUU | 18 | 17002 |
| HSV1-UL48-1594 | + | GGGGGCCGCCGGGGUGUUU | 19 | 17003 |
| HSV1-UL48-687 | + | GGGGGGCCGCCGGGGUGUUU | 20 | 6492 |
| HSV1-UL48-1595 | + | GGGGGGGCCGCCGGGGUGUUU | 21 | 17004 |
| HSV1-UL48-1596 | + | CGGGGGGGCCGCCGGGGUGUUU | 22 | 17005 |
| HSV1-UL48-1597 | + | GCGGGGGGGCCGCCGGGGUGUUU | 23 | 17006 |
| HSV1-UL48-1598 | + | AGCGGGGGGGCCGCCGGGGUGUUU | 24 | 17007 |
| HSV1-UL48-1599 | + | GGGCCGCCGGGGUGUUUU | 18 | 17008 |
| HSV1-UL48-1600 | + | GGGGCCGCCGGGGUGUUUU | 19 | 17009 |
| HSV1-UL48-104 | + | GGGGGCCGCCGGGGUGUUUU | 20 | 5948 |
| HSV1-UL48-1601 | + | GGGGGGCCGCCGGGGUGUUUU | 21 | 17010 |
| HSV1-UL48-1602 | + | GGGGGGGCCGCCGGGGUGUUUU | 22 | 17011 |
| HSV1-UL48-1603 | + | CGGGGGGGCCGCCGGGGUGUUUU | 23 | 17012 |
| HSV1-UL48-1604 | + | GCGGGGGGGCCGCCGGGGUGUUUU | 24 | 17013 |
| HSV1-UL48-1605 | - | CCCCCCCGCUGUACGCAA | 18 | 17014 |
| HSV1-UL48-1606 | - | GCCCCCCCGCUGUACGCAA | 19 | 17015 |
| HSV1-UL48-10 | - | GGCCCCCCCGCUGUACGCAA | 20 | 5840 |
| HSV1-UL48-1607 | - | CGGCCCCCCCGCUGUACGCAA | 21 | 17016 |
| HSV1-UL48-1608 | - | GCGGCCCCCCCGCUGUACGCAA | 22 | 17017 |
| HSV1-UL48-1609 | - | GGCGGCCCCCCCGCUGUACGCAA | 23 | 17018 |
| HSV1-UL48-1610 | - | CGGCGGCCCCCCCGCUGUACGCAA | 24 | 17019 |
| HSV1-UL48-1611 | - | CCCAGCGAUGUGGUGGAA | 18 | 17020 |
| HSV1-UL48-1612 | - | GCCCAGCGAUGUGGUGGAA | 19 | 17021 |
| HSV1-UL48-25 | - | UGCCCAGCGAUGUGGUGGAA | 20 | 5864 |
| HSV1-UL48-1613 | - | CUGCCCAGCGAUGUGGUGGAA | 21 | 17022 |
| HSV1-UL48-1614 | - | GCUGCCCAGCGAUGUGGUGGAA | 22 | 17023 |
| HSV1-UL48-1615 | - | CGCUGCCCAGCGAUGUGGUGGAA | 23 | 17024 |
| HSV1-UL48-1616 | - | ACGCUGCCCAGCGAUGUGGUGGAA | 24 | 17025 |
| HSV1-UL48-1617 | - | CCGUAUCAACCCCACCCA | 18 | 17026 |
| HSV1-UL48-1618 | - | CCCGUAUCAACCCCACCCA | 19 | 17027 |
| HSV1-UL48-1619 | - | UCCCGUAUCAACCCCACCCA | 20 | 17028 |
| HSV1-UL48-1620 | - | UUCCCGUAUCAACCCCACCCA | 21 | 17029 |
| HSV1-UL48-1621 | - | UUUCCCGUAUCAACCCCACCCA | 22 | 17030 |
| HSV1-UL48-1622 | - | CUUUCCCGUAUCAACCCCACCCA | 23 | 17031 |
| HSV1-UL48-1623 | - | UCUUUCCCGUAUCAACCCCACCCA | 24 | 17032 |
| HSV1-UL48-1624 | - | GCCCCCCCGCUGUACGCA | 18 | 17033 |
| HSV1-UL48-1625 | - | GGCCCCCCCGCUGUACGCA | 19 | 17034 |
| HSV1-UL48-613 | - | CGGCCCCCCCGCUGUACGCA | 20 | 6449 |
| HSV1-UL48-1626 | - | GCGGCCCCCCCGCUGUACGCA | 21 | 17035 |
| HSV1-UL48-1627 | - | GGCGGCCCCCCCGCUGUACGCA | 22 | 17036 |
| HSV1-UL48-1628 | - | CGGCGGCCCCCCCGCUGUACGCA | 23 | 17037 |
| HSV1-UL48-1629 | - | CCGGCGGCCCCCCCGCUGUACGCA | 24 | 17038 |
| HSV1-UL48-1630 | - | CCAUGCUCGAUACCUGGA | 18 | 17039 |
| HSV1-UL48-1631 | - | ACCAUGCUCGAUACCUGGA | 19 | 17040 |
| HSV1-UL48-620 | - | UACCAUGCUCGAUACCUGGA | 20 | 6454 |
| HSV1-UL48-1632 | - | GUACCAUGCUCGAUACCUGGA | 21 | 17041 |
| HSV1-UL48-1633 | - | UGUACCAUGCUCGAUACCUGGA | 22 | 17042 |
| HSV1-UL48-1634 | - | AUGUACCAUGCUCGAUACCUGGA | 23 | 17043 |
| HSV1-UL48-1635 | - | UAUGUACCAUGCUCGAUACCUGGA | 24 | 17044 |
| HSV1-UL48-1636 | - | GCCCAGCGAUGUGGUGGA | 18 | 17045 |
| HSV1-UL48-1637 | - | UGCCCAGCGAUGUGGUGGA | 19 | 17046 |
| HSV1-UL48-627 | - | CUGCCCAGCGAUGUGGUGGA | 20 | 6458 |
| HSV1-UL48-1638 | - | GCUGCCCAGCGAUGUGGUGGA | 21 | 17047 |
| HSV1-UL48-1639 | - | CGCUGCCCAGCGAUGUGGUGGA | 22 | 17048 |
| HSV1-UL48-1640 | - | ACGCUGCCCAGCGAUGUGGUGGA | 23 | 17049 |
| HSV1-UL48-1641 | - | AACGCUGCCCAGCGAUGUGGUGGA | 24 | 17050 |
| HSV1-UL48-1642 | - | GGCGCGGGAGGAGAGCUA | 18 | 17051 |
| HSV1-UL48-1643 | - | GGGCGCGGGAGGAGAGCUA | 19 | 17052 |
| HSV1-UL48-1644 | - | CGGGCGCGGGAGGAGAGCUA | 20 | 17053 |
| HSV1-UL48-1645 | - | ACGGGCGCGGGAGGAGAGCUA | 21 | 17054 |
| HSV1-UL48-1646 | - | UACGGGCGCGGGAGGAGAGCUA | 22 | 17055 |
| HSV1-UL48-1647 | - | CUACGGGCGCGGGAGGAGAGCUA | 23 | 17056 |
| HSV1-UL48-1648 | - | GCUACGGGCGCGGGAGGAGAGCUA | 24 | 17057 |
| HSV1-UL48-1649 | - | GACCAACGCCGACCUGUA | 18 | 17058 |
| HSV1-UL48-1650 | - | CGACCAACGCCGACCUGUA | 19 | 17059 |
| HSV1-UL48-622 | - | CCGACCAACGCCGACCUGUA | 20 | 6456 |
| HSV1-UL48-1651 | - | ACCGACCAACGCCGACCUGUA | 21 | 17060 |
| HSV1-UL48-1652 | - | UACCGACCAACGCCGACCUGUA | 22 | 17061 |
| HSV1-UL48-1653 | - | CUACCGACCAACGCCGACCUGUA | 23 | 17062 |
| HSV1-UL48-1654 | - | GCUACCGACCAACGCCGACCUGUA | 24 | 17063 |
| HSV1-UL48-1655 | - | CUGUUUGCCGACAUGAAC | 18 | 17064 |
| HSV1-UL48-1656 | - | GCUGUUUGCCGACAUGAAC | 19 | 17065 |
| HSV1-UL48-609 | - | AGCUGUUUGCCGACAUGAAC | 20 | 6447 |
| HSV1-UL48-1657 | - | GAGCUGUUUGCCGACAUGAAC | 21 | 17066 |
| HSV1-UL48-1658 | - | CGAGCUGUUUGCCGACAUGAAC | 22 | 17067 |
| HSV1-UL48-1659 | - | ACGAGCUGUUUGCCGACAUGAAC | 23 | 17068 |
| HSV1-UL48-1660 | - | GACGAGCUGUUUGCCGACAUGAAC | 24 | 17069 |
| HSV1-UL48-1661 | - | AACCGUCUCCUCGACGAC | 18 | 17070 |
| HSV1-UL48-1662 | - | UAACCGUCUCCUCGACGAC | 19 | 17071 |
| HSV1-UL48-616 | - | UUAACCGUCUCCUCGACGAC | 20 | 6451 |
| HSV1-UL48-1663 | - | UUUAACCGUCUCCUCGACGAC | 21 | 17072 |
| HSV1-UL48-1664 | - | CUUUAACCGUCUCCUCGACGAC | 22 | 17073 |
| HSV1-UL48-1665 | - | UCUUUAACCGUCUCCUCGACGAC | 23 | 17074 |
| HSV1-UL48-1666 | - | CUCUUUAACCGUCUCCUCGACGAC | 24 | 17075 |
| HSV1-UL48-1667 | - | GACGAGCUGUUUGCCGAC | 18 | 17076 |
| HSV1-UL48-1668 | - | CGACGAGCUGUUUGCCGAC | 19 | 17077 |
| HSV1-UL48-608 | - | UCGACGAGCUGUUUGCCGAC | 20 | 6446 |
| HSV1-UL48-1669 | - | GUCGACGAGCUGUUUGCCGAC | 21 | 17078 |
| HSV1-UL48-1670 | - | GGUCGACGAGCUGUUUGCCGAC | 22 | 17079 |
| HSV1-UL48-1671 | - | UGGUCGACGAGCUGUUUGCCGAC | 23 | 17080 |
| HSV1-UL48-1672 | - | UUGGUCGACGAGCUGUUUGCCGAC | 24 | 17081 |
| HSV1-UL48-1673 | - | AUGUACCAUGCUCGAUAC | 18 | 17082 |
| HSV1-UL48-1674 | - | UAUGUACCAUGCUCGAUAC | 19 | 17083 |
| HSV1-UL48-618 | - | CUAUGUACCAUGCUCGAUAC | 20 | 6453 |
| HSV1-UL48-1675 | - | GCUAUGUACCAUGCUCGAUAC | 21 | 17084 |
| HSV1-UL48-1676 | - | CGCUAUGUACCAUGCUCGAUAC | 22 | 17085 |
| HSV1-UL48-1677 | - | GCGCUAUGUACCAUGCUCGAUAC | 23 | 17086 |
| HSV1-UL48-1678 | - | CGCGCUAUGUACCAUGCUCGAUAC | 24 | 17087 |
| HSV1-UL48-1679 | - | ACCAACGCCGACCUGUAC | 18 | 17088 |
| HSV1-UL48-1680 | - | GACCAACGCCGACCUGUAC | 19 | 17089 |
| HSV1-UL48-21 | - | CGACCAACGCCGACCUGUAC | 20 | 5860 |
| HSV1-UL48-1681 | - | CCGACCAACGCCGACCUGUAC | 21 | 17090 |
| HSV1-UL48-1682 | - | ACCGACCAACGCCGACCUGUAC | 22 | 17091 |
| HSV1-UL48-1683 | - | UACCGACCAACGCCGACCUGUAC | 23 | 17092 |
| HSV1-UL48-1684 | - | CUACCGACCAACGCCGACCUGUAC | 24 | 17093 |
| HSV1-UL48-1685 | - | UGUACCAUGCUCGAUACC | 18 | 17094 |
| HSV1-UL48-1686 | - | AUGUACCAUGCUCGAUACC | 19 | 17095 |
| HSV1-UL48-18 | - | UAUGUACCAUGCUCGAUACC | 20 | 5967 |
| HSV1-UL48-1687 | - | CUAUGUACCAUGCUCGAUACC | 21 | 17096 |
| HSV1-UL48-1688 | - | GCUAUGUACCAUGCUCGAUACC | 22 | 17097 |
| HSV1-UL48-1689 | - | CGCUAUGUACCAUGCUCGAUACC | 23 | 17098 |
| HSV1-UL48-1690 | - | GCGCUAUGUACCAUGCUCGAUACC | 24 | 17099 |
| HSV1-UL48-1691 | - | CGGCCACCCGCGACGGCC | 18 | 17100 |
| HSV1-UL48-1692 | - | CCGGCCACCCGCGACGGCC | 19 | 17101 |
| HSV1-UL48-633 | - | UCCGGCCACCCGCGACGGCC | 20 | 6460 |
| HSV1-UL48-1693 | - | UUCCGGCCACCCGCGACGGCC | 21 | 17102 |
| HSV1-UL48-1694 | - | CUUCCGGCCACCCGCGACGGCC | 22 | 17103 |
| HSV1-UL48-1695 | - | GCUUCCGGCCACCCGCGACGGCC | 23 | 17104 |
| HSV1-UL48-1696 | - | CGCUUCCGGCCACCCGCGACGGCC | 24 | 17105 |
| HSV1-UL48-1697 | - | GGGGGGACGCGUACGUCC | 18 | 17106 |
| HSV1-UL48-1698 | - | UGGGGGGACGCGUACGUCC | 19 | 17107 |
| HSV1-UL48-632 | - | AUGGGGGGACGCGUACGUCC | 20 | 6459 |
| HSV1-UL48-1699 | - | AAUGGGGGGACGCGUACGUCC | 21 | 17108 |
| HSV1-UL48-1700 | - | GAAUGGGGGGACGCGUACGUCC | 22 | 17109 |
| HSV1-UL48-1701 | - | GGAAUGGGGGGACGCGUACGUCC | 23 | 17110 |
| HSV1-UL48-1702 | - | UGGAAUGGGGGGACGCGUACGUCC | 24 | 17111 |
| HSV1-UL48-1703 | - | GACGACUUGGGCUUUAGC | 18 | 17112 |
| HSV1-UL48-1704 | - | CGACGACUUGGGCUUUAGC | 19 | 17113 |
| HSV1-UL48-617 | - | UCGACGACUUGGGCUUUAGC | 20 | 6452 |
| HSV1-UL48-1705 | - | CUCGACGACUUGGGCUUUAGC | 21 | 17114 |
| HSV1-UL48-1706 | - | CCUCGACGACUUGGGCUUUAGC | 22 | 17115 |
| HSV1-UL48-1707 | - | UCCUCGACGACUUGGGCUUUAGC | 23 | 17116 |
| HSV1-UL48-1708 | - | CUCCUCGACGACUUGGGCUUUAGC | 24 | 17117 |
| HSV1-UL48-1709 | - | ACGCCGAGCUACGGGCGC | 18 | 17118 |
| HSV1-UL48-1710 | - | CACGCCGAGCUACGGGCGC | 19 | 17119 |
| HSV1-UL48-39 | - | CCACGCCGAGCUACGGGCGC | 20 | 5880 |
| HSV1-UL48-1711 | - | UCCACGCCGAGCUACGGGCGC | 21 | 17120 |
| HSV1-UL48-1712 | - | UUCCACGCCGAGCUACGGGCGC | 22 | 17121 |
| HSV1-UL48-1713 | - | CUUCCACGCCGAGCUACGGGCGC | 23 | 17122 |
| HSV1-UL48-1714 | - | UCUUCCACGCCGAGCUACGGGCGC | 24 | 17123 |
| HSV1-UL48-1715 | - | CUGUACGCAACGGGGCGC | 18 | 17124 |
| HSV1-UL48-1716 | - | GCUGUACGCAACGGGGCGC | 19 | 17125 |
| HSV1-UL48-615 | - | CGCUGUACGCAACGGGGCGC | 20 | 6450 |
| HSV1-UL48-1717 | - | CCGCUGUACGCAACGGGGCGC | 21 | 17126 |
| HSV1-UL48-1718 | - | CCCGCUGUACGCAACGGGGCGC | 22 | 17127 |
| HSV1-UL48-1719 | - | CCCCGCUGUACGCAACGGGGCGC | 23 | 17128 |
| HSV1-UL48-1720 | - | CCCCCGCUGUACGCAACGGGGCGC | 24 | 17129 |
| HSV1-UL48-1721 | - | ACCGCCCCCCCGCCCGGC | 18 | 17130 |
| HSV1-UL48-1722 | - | CACCGCCCCCCCGCCCGGC | 19 | 17131 |
| HSV1-UL48-4 | - | CCACCGCCCCCCCGCCCGGC | 20 | 5963 |
| HSV1-UL48-1723 | - | GCCACCGCCCCCCCGCCCGGC | 21 | 17132 |
| HSV1-UL48-1724 | - | CGCCACCGCCCCCCCGCCCGGC | 22 | 17133 |
| HSV1-UL48-1725 | - | UCGCCACCGCCCCCCCGCCCGGC | 23 | 17134 |
| HSV1-UL48-1726 | - | UUCGCCACCGCCCCCCCGCCCGGC | 24 | 17135 |
| HSV1-UL48-1727 | - | CCACGCCGAGCUACGGGC | 18 | 17136 |
| HSV1-UL48-1728 | - | UCCACGCCGAGCUACGGGC | 19 | 17137 |
| HSV1-UL48-637 | - | UUCCACGCCGAGCUACGGGC | 20 | 6464 |
| HSV1-UL48-1729 | - | CUUCCACGCCGAGCUACGGGC | 21 | 17138 |
| HSV1-UL48-1730 | - | UCUUCCACGCCGAGCUACGGGC | 22 | 17139 |
| HSV1-UL48-1731 | - | UUCUUCCACGCCGAGCUACGGGC | 23 | 17140 |
| HSV1-UL48-1732 | - | UUUCUUCCACGCCGAGCUACGGGC | 24 | 17141 |
| HSV1-UL48-1733 | - | GAGCUACGGGCGCGGGAG | 18 | 17142 |
| HSV1-UL48-1734 | - | CGAGCUACGGGCGCGGGAG | 19 | 17143 |
| HSV1-UL48-642 | - | CCGAGCUACGGGCGCGGGAG | 20 | 6466 |
| HSV1-UL48-1735 | - | GCCGAGCUACGGGCGCGGGAG | 21 | 17144 |
| HSV1-UL48-1736 | - | CGCCGAGCUACGGGCGCGGGAG | 22 | 17145 |
| HSV1-UL48-1737 | - | ACGCCGAGCUACGGGCGCGGGAG | 23 | 17146 |
| HSV1-UL48-1738 | - | CACGCCGAGCUACGGGCGCGGGAG | 24 | 17147 |
| HSV1-UL48-1739 | - | UCUCUCGUUUCUUCCACG | 18 | 17148 |
| HSV1-UL48-1740 | - | CUCUCUCGUUUCUUCCACG | 19 | 17149 |
| HSV1-UL48-635 | - | GCUCUCUCGUUUCUUCCACG | 20 | 6462 |
| HSV1-UL48-1741 | - | CGCUCUCUCGUUUCUUCCACG | 21 | 17150 |
| HSV1-UL48-1742 | - | GCGCUCUCUCGUUUCUUCCACG | 22 | 17151 |
| HSV1-UL48-1743 | - | AGCGCUCUCUCGUUUCUUCCACG | 23 | 17152 |
| HSV1-UL48-1744 | - | AAGCGCUCUCUCGUUUCUUCCACG | 24 | 17153 |
| HSV1-UL48-1745 | - | CACGCCGAGCUACGGGCG | 18 | 17154 |
| HSV1-UL48-1746 | - | CCACGCCGAGCUACGGGCG | 19 | 17155 |
| HSV1-UL48-38 | - | UCCACGCCGAGCUACGGGCG | 20 | 5879 |
| HSV1-UL48-1747 | - | UUCCACGCCGAGCUACGGGCG | 21 | 17156 |
| HSV1-UL48-1748 | - | CUUCCACGCCGAGCUACGGGCG | 22 | 17157 |
| HSV1-UL48-1749 | - | UCUUCCACGCCGAGCUACGGGCG | 23 | 17158 |
| HSV1-UL48-1750 | - | UUCUUCCACGCCGAGCUACGGGCG | 24 | 17159 |
| HSV1-UL48-1751 | - | CAAUGGACCUCUUGGUCG | 18 | 17160 |
| HSV1-UL48-1752 | - | CCAAUGGACCUCUUGGUCG | 19 | 17161 |
| HSV1-UL48-1753 | - | CCCAAUGGACCUCUUGGUCG | 20 | 17162 |
| HSV1-UL48-1754 | - | ACCCAAUGGACCUCUUGGUCG | 21 | 17163 |
| HSV1-UL48-1755 | - | CACCCAAUGGACCUCUUGGUCG | 22 | 17164 |
| HSV1-UL48-1756 | - | CCACCCAAUGGACCUCUUGGUCG | 23 | 17165 |
| HSV1-UL48-1757 | - | CCCACCCAAUGGACCUCUUGGUCG | 24 | 17166 |
| HSV1-UL48-1758 | - | CACCGCCCCCCCGCCCGG | 18 | 17167 |
| HSV1-UL48-1759 | - | CCACCGCCCCCCCGCCCGG | 19 | 17168 |
| HSV1-UL48-610 | - | GCCACCGCCCCCCCGCCCGG | 20 | 6448 |
| HSV1-UL48-1760 | - | CGCCACCGCCCCCCCGCCCGG | 21 | 17169 |
| HSV1-UL48-1761 | - | UCGCCACCGCCCCCCCGCCCGG | 22 | 17170 |
| HSV1-UL48-1762 | - | UUCGCCACCGCCCCCCCGCCCGG | 23 | 17171 |
| HSV1-UL48-1763 | - | CUUCGCCACCGCCCCCCCGCCCGG | 24 | 17172 |
| HSV1-UL48-1764 | - | GCCGAGCUACGGGCGCGG | 18 | 17173 |
| HSV1-UL48-1765 | - | CGCCGAGCUACGGGCGCGG | 19 | 17174 |
| HSV1-UL48-640 | - | ACGCCGAGCUACGGGCGCGG | 20 | 6465 |
| HSV1-UL48-1766 | - | CACGCCGAGCUACGGGCGCGG | 21 | 17175 |
| HSV1-UL48-1767 | - | CCACGCCGAGCUACGGGCGCGG | 22 | 17176 |
| HSV1-UL48-1768 | - | UCCACGCCGAGCUACGGGCGCGG | 23 | 17177 |
| HSV1-UL48-1769 | - | UUCCACGCCGAGCUACGGGCGCGG | 24 | 17178 |
| HSV1-UL48-1770 | - | CCGAGCUACGGGCGCGGG | 18 | 17179 |
| HSV1-UL48-1771 | - | GCCGAGCUACGGGCGCGGG | 19 | 17180 |
| HSV1-UL48-40 | - | CGCCGAGCUACGGGCGCGGG | 20 | 5973 |
| HSV1-UL48-1772 | - | ACGCCGAGCUACGGGCGCGGG | 21 | 17181 |
| HSV1-UL48-1773 | - | CACGCCGAGCUACGGGCGCGGG | 22 | 17182 |
| HSV1-UL48-1774 | - | CCACGCCGAGCUACGGGCGCGGG | 23 | 17183 |
| HSV1-UL48-1775 | - | UCCACGCCGAGCUACGGGCGCGGG | 24 | 17184 |
| HSV1-UL48-1776 | - | AGCGAUGUGGUGGAAUGG | 18 | 17185 |
| HSV1-UL48-1777 | - | CAGCGAUGUGGUGGAAUGG | 19 | 17186 |
| HSV1-UL48-28 | - | CCAGCGAUGUGGUGGAAUGG | 20 | 5970 |
| HSV1-UL48-1778 | - | CCCAGCGAUGUGGUGGAAUGG | 21 | 17187 |
| HSV1-UL48-1779 | - | GCCCAGCGAUGUGGUGGAAUGG | 22 | 17188 |
| HSV1-UL48-1780 | - | UGCCCAGCGAUGUGGUGGAAUGG | 23 | 17189 |
| HSV1-UL48-1781 | - | CUGCCCAGCGAUGUGGUGGAAUGG | 24 | 17190 |
| HSV1-UL48-1782 | - | CAGCGAUGUGGUGGAAUG | 18 | 17191 |
| HSV1-UL48-1783 | - | CCAGCGAUGUGGUGGAAUG | 19 | 17192 |
| HSV1-UL48-27 | - | CCCAGCGAUGUGGUGGAAUG | 20 | 5969 |
| HSV1-UL48-1784 | - | GCCCAGCGAUGUGGUGGAAUG | 21 | 17193 |
| HSV1-UL48-1785 | - | UGCCCAGCGAUGUGGUGGAAUG | 22 | 17194 |
| HSV1-UL48-1786 | - | CUGCCCAGCGAUGUGGUGGAAUG | 23 | 17195 |
| HSV1-UL48-1787 | - | GCUGCCCAGCGAUGUGGUGGAAUG | 24 | 17196 |
| HSV1-UL48-1788 | - | ACGCUGCCCAGCGAUGUG | 18 | 17197 |
| HSV1-UL48-1789 | - | AACGCUGCCCAGCGAUGUG | 19 | 17198 |
| HSV1-UL48-625 | - | CAACGCUGCCCAGCGAUGUG | 20 | 6457 |
| HSV1-UL48-1790 | - | UCAACGCUGCCCAGCGAUGUG | 21 | 17199 |
| HSV1-UL48-1791 | - | AUCAACGCUGCCCAGCGAUGUG | 22 | 17200 |
| HSV1-UL48-1792 | - | UAUCAACGCUGCCCAGCGAUGUG | 23 | 17201 |
| HSV1-UL48-1793 | - | CUAUCAACGCUGCCCAGCGAUGUG | 24 | 17202 |
| HSV1-UL48-1794 | - | CCAGCGAUGUGGUGGAAU | 18 | 17203 |
| HSV1-UL48-1795 | - | CCCAGCGAUGUGGUGGAAU | 19 | 17204 |
| HSV1-UL48-26 | - | GCCCAGCGAUGUGGUGGAAU | 20 | 5968 |
| HSV1-UL48-1796 | - | UGCCCAGCGAUGUGGUGGAAU | 21 | 17205 |
| HSV1-UL48-1797 | - | CUGCCCAGCGAUGUGGUGGAAU | 22 | 17206 |
| HSV1-UL48-1798 | - | GCUGCCCAGCGAUGUGGUGGAAU | 23 | 17207 |
| HSV1-UL48-1799 | - | CGCUGCCCAGCGAUGUGGUGGAAU | 24 | 17208 |
| HSV1-UL48-1800 | - | ACGGCCUCGGGCUCUACU | 18 | 17209 |
| HSV1-UL48-1801 | - | GACGGCCUCGGGCUCUACU | 19 | 17210 |
| HSV1-UL48-634 | - | CGACGGCCUCGGGCUCUACU | 20 | 6461 |
| HSV1-UL48-1802 | - | GCGACGGCCUCGGGCUCUACU | 21 | 17211 |
| HSV1-UL48-1803 | - | CGCGACGGCCUCGGGCUCUACU | 22 | 17212 |
| HSV1-UL48-1804 | - | CCGCGACGGCCUCGGGCUCUACU | 23 | 17213 |
| HSV1-UL48-1805 | - | CCCGCGACGGCCUCGGGCUCUACU | 24 | 17214 |
| HSV1-UL48-1806 | - | UUUCUUCCACGCCGAGCU | 18 | 17215 |
| HSV1-UL48-1807 | - | GUUUCUUCCACGCCGAGCU | 19 | 17216 |
| HSV1-UL48-636 | - | CGUUUCUUCCACGCCGAGCU | 20 | 6463 |
| HSV1-UL48-1808 | - | UCGUUUCUUCCACGCCGAGCU | 21 | 17217 |
| HSV1-UL48-1809 | - | CUCGUUUCUUCCACGCCGAGCU | 22 | 17218 |
| HSV1-UL48-1810 | - | UCUCGUUUCUUCCACGCCGAGCU | 23 | 17219 |
| HSV1-UL48-1811 | - | CUCUCGUUUCUUCCACGCCGAGCU | 24 | 17220 |

[0794] Table 12E provides exemplary targeting domains for knocking out the UL48 gene selected according to the fifth tier parameters. The targeting domains fall in the coding sequence of the gene, downstream of the first 500 bp of coding sequence (e.g., anywhere from +500 (relative to the start codon) to the stop codon of the gene), and start with a 5′G. The PAM is NNGRRT. It is contemplated herein that in an embodiment the targeting domain hybridizes to the target domain through complementary base pairing. Any of the targeting domains in the table can be used with a S. aureus Cas9 molecule that generates a double stranded break (Cas9 nuclease) or a single-stranded break (Cas9 nickase).

TABLE 12E
5th Tier

| | | | Target | |
|---|---|---|---|---|
| | DNA | | Site | Seq ID |
| gRNA Name | Strand | Targeting Domain | Length | NO: |
| HSV1-UL48-1812 | + | GCUCGGCGUACGCGGCCCA | 19 | 17221 |
| HSV1-UL48-1813 | + | GAGGGCGAGGUCGUGAAGC | 19 | 17222 |
| HSV1-UL48-370 | + | GGAGGGCGAGGUCGUGAAGC | 20 | 6208 |
| HSV1-UL48-989 | + | GAAUACGAGUCCAACUUCGC | 20 | 6685 |
| HSV1-UL48-1814 | + | GGAAUACGAGUCCAACUUCGC | 21 | 17223 |
| HSV1-UL48-1815 | + | GCUGGAAUACGAGUCCAACUUCGC | 24 | 17224 |
| HSV1-UL48-1816 | + | GCGGGAGGUUAAGGUGCUC | 19 | 17225 |
| HSV1-UL48-1817 | + | GUACGCGGCCCAUAGGAUCUC | 21 | 17226 |
| HSV1-UL48-1818 | + | GCGUACGCGGCCCAUAGGAUCUC | 23 | 17227 |
| HSV1-UL48-1819 | + | GGCGUACGCGGCCCAUAGGAUCUC | 24 | 17228 |
| HSV1-UL48-1820 | + | GGGUAAAUCCCGGCCCCG | 18 | 17229 |
| HSV1-UL48-1821 | + | GGGGUAAAUCCCGGCCCCG | 19 | 17230 |
| HSV1-UL48-340 | + | GGGGGUAAAUCCCGGCCCCG | 20 | 6178 |
| HSV1-UL48-1822 | + | GGGGGGUAAAUCCCGGCCCCG | 21 | 17231 |
| HSV1-UL48-1823 | + | GUGGGGGGUAAAUCCCGGCCCCG | 23 | 17232 |
| HSV1-UL48-1824 | + | GUUGCCAUGCAGGGUGGG | 18 | 17233 |
| HSV1-UL48-1825 | + | GGUUGCCAUGCAGGGUGGG | 19 | 17234 |
| HSV1-UL48-1826 | + | GCCUGGUUGCCAUGCAGGGUGGG | 23 | 17235 |
| HSV1-UL48-1827 | + | GGCCUGGUUGCCAUGCAGGGUGGG | 24 | 17236 |
| HSV1-UL48-1828 | + | GCGGGCCUGGUUGCCAUG | 18 | 17237 |
| HSV1-UL48-986 | + | GCGCGGGCCUGGUUGCCAUG | 20 | 6682 |
| HSV1-UL48-1829 | + | GGCGCGGGCCUGGUUGCCAUG | 21 | 17238 |
| HSV1-UL48-1830 | + | GAGGCGCGGGCCUGGUUGCCAUG | 23 | 17239 |
| HSV1-UL48-1831 | + | GUAGGGGGCGGAGUCGUG | 18 | 17240 |
| HSV1-UL48-1832 | + | GCCGUAGGGGGCGGAGUCGUG | 21 | 17241 |
| HSV1-UL48-1833 | + | GCGCCGUAGGGGGCGGAGUCGUG | 23 | 17242 |
| HSV1-UL48-1834 | + | GAGGUCGUGAAGCUGGAAU | 19 | 17243 |
| HSV1-UL48-1835 | + | GCGAGGUCGUGAAGCUGGAAU | 21 | 17244 |
| HSV1-UL48-1836 | + | GGCGAGGUCGUGAAGCUGGAAU | 22 | 17245 |
| HSV1-UL48-1837 | + | GGGCGAGGUCGUGAAGCUGGAAU | 23 | 17246 |
| HSV1-UL48-1838 | - | GAUCUGGACAUGUUGGGGGAC | 21 | 17247 |
| HSV1-UL48-1839 | - | GACGGGGAUUCCCCGGGGC | 19 | 17248 |
| HSV1-UL48-314 | - | GGACGGGGAUUCCCCGGGGC | 20 | 6152 |
| HSV1-UL48-1840 | - | GGGACGGGGAUUCCCCGGGGC | 21 | 17249 |
| HSV1-UL48-1841 | - | GGGGACGGGGAUUCCCCGGGGC | 22 | 17250 |
| HSV1-UL48-1842 | - | GGGGGACGGGGAUUCCCCGGGGC | 23 | 17251 |
| HSV1-UL48-1843 | - | GCCCUUGGAAUUGACGAGUACG | 22 | 17252 |
| HSV1-UL48-1844 | - | GUCAACGGAGCGCUCACCGUCCG | 23 | 17253 |
| HSV1-UL48-1845 | - | GUUUACCGAUGCCCUUGGAAUUG | 23 | 17254 |
| HSV1-UL48-1846 | - | GAGAGCUGGCGUCAGUUG | 18 | 17255 |
| HSV1-UL48-1847 | - | GGAGAGCUGGCGUCAGUUG | 19 | 17256 |
| HSV1-UL48-1848 | - | GACCUGGAGAGCUGGCGUCAGUUG | 24 | 17257 |
| HSV1-UL48-1849 | - | GCUCUGGAUAUGGCCGACU | 19 | 17258 |
| HSV1-UL48-1850 | - | GCGCUCUGGAUAUGGCCGACU | 21 | 17259 |
| HSV1-UL48-1851 | - | GGCGCUCUGGAUAUGGCCGACU | 22 | 17260 |
| HSV1-UL48-1852 | - | GAUGUUUACCGAUGCCCU | 18 | 17261 |
| HSV1-UL48-1853 | - | GCAGAUGUUUACCGAUGCCCU | 21 | 17262 |
| HSV1-UL48-1854 | - | GAGCAGAUGUUUACCGAUGCCCU | 23 | 17263 |
| HSV1-UL48-1855 | - | GCAACCAGGCCCGCGCCU | 18 | 17264 |
| HSV1-UL48-1856 | - | GGCAACCAGGCCCGCGCCU | 19 | 17265 |
| HSV1-UL48-1857 | - | GCAUGGCAACCAGGCCCGCGCCU | 23 | 17266 |
| HSV1-UL48-1858 | - | GACUCCGCCCCCUACGGCGCU | 21 | 17267 |
| HSV1-UL48-1859 | - | GCGCGUACGAAAAACAAUU | 19 | 17268 |
| HSV1-UL48-1860 | - | GCGCGCGUACGAAAAACAAUU | 21 | 17269 |
| HSV1-UL48-1861 | - | GCCGCGCGCGUACGAAAAACAAUU | 24 | 17270 |

[0795] Table 12F provides exemplary targeting domains for knocking out the UL48 gene selected according to the six tier parameters. The targeting domains fall in the coding sequence of the gene, downstream of the first 500 bp of coding sequence (e.g., anywhere from +500 (relative to the start codon) to the stop codon of the gene). The PAM is NNGRRT. It is contemplated herein that in an embodiment the targeting domain hybridizes to the target domain through complementary base pairing. Any of the targeting domains in the table can be used with a S. aureus Cas9 molecule that generates a double stranded break (Cas9 nuclease) or a single-stranded break (Cas9 nickase).

TABLE 12F
6th Tier

| | | | Target | |
|---|---|---|---|---|
| | DNA | | Site | Seq ID |
| gRNA Name | Strand | Targeting Domain | Length | NO: |
| HSV1-UL48-1862 | + | CUCGGCGUACGCGGCCCA | 18 | 17271 |
| HSV1-UL48-966 | + | UGCUCGGCGUACGCGGCCCA | 20 | 6668 |
| HSV1-UL48-1863 | + | CUGCUCGGCGUACGCGGCCCA | 21 | 17272 |
| HSV1-UL48-1864 | + | UCUGCUCGGCGUACGCGGCCCA | 22 | 17273 |
| HSV1-UL48-1865 | + | AUCUGCUCGGCGUACGCGGCCCA | 23 | 17274 |
| HSV1-UL48-1866 | + | CAUCUGCUCGGCGUACGCGGCCCA | 24 | 17275 |
| HSV1-UL48-1867 | + | AGGGCGAGGUCGUGAAGC | 18 | 17276 |
| HSV1-UL48-1868 | + | CGGAGGGCGAGGUCGUGAAGC | 21 | 17277 |
| HSV1-UL48-1869 | + | UCGGAGGGCGAGGUCGUGAAGC | 22 | 17278 |
| HSV1-UL48-1870 | + | CUCGGAGGGCGAGGUCGUGAAGC | 23 | 17279 |
| HSV1-UL48-1871 | + | CCUCGGAGGGCGAGGUCGUGAAGC | 24 | 17280 |
| HSV1-UL48-1872 | + | AUACGAGUCCAACUUCGC | 18 | 17281 |
| HSV1-UL48-1873 | + | AAUACGAGUCCAACUUCGC | 19 | 17282 |
| HSV1-UL48-1874 | + | UGGAAUACGAGUCCAACUUCGC | 22 | 17283 |
| HSV1-UL48-1875 | + | CUGGAAUACGAGUCCAACUUCGC | 23 | 17284 |
| HSV1-UL48-1876 | + | CGGGAGGUUAAGGUGCUC | 18 | 17285 |
| HSV1-UL48-977 | + | AGCGGGAGGUUAAGGUGCUC | 20 | 6678 |
| HSV1-UL48-1877 | + | CAGCGGGAGGUUAAGGUGCUC | 21 | 17286 |
| HSV1-UL48-1878 | + | CCAGCGGGAGGUUAAGGUGCUC | 22 | 17287 |
| HSV1-UL48-1879 | + | ACCAGCGGGAGGUUAAGGUGCUC | 23 | 17288 |
| HSV1-UL48-1880 | + | CACCAGCGGGAGGUUAAGGUGCUC | 24 | 17289 |
| HSV1-UL48-1881 | + | CGCGGCCCAUAGGAUCUC | 18 | 17290 |
| HSV1-UL48-1882 | + | ACGCGGCCCAUAGGAUCUC | 19 | 17291 |
| HSV1-UL48-965 | + | UACGCGGCCCAUAGGAUCUC | 20 | 6667 |
| HSV1-UL48-1883 | + | CGUACGCGGCCCAUAGGAUCUC | 22 | 17292 |
| HSV1-UL48-1884 | + | UGGGGGGUAAAUCCCGGCCCCG | 22 | 17293 |
| HSV1-UL48-1885 | + | CGUGGGGGGUAAAUCCCGGCCCCG | 24 | 17294 |
| HSV1-UL48-1886 | + | CCAGAGCGCCGUAGGGGG | 18 | 17295 |
| HSV1-UL48-1887 | + | UCCAGAGCGCCGUAGGGGG | 19 | 17296 |
| HSV1-UL48-331 | + | AUCCAGAGCGCCGUAGGGGG | 20 | 6169 |
| HSV1-UL48-1888 | + | UAUCCAGAGCGCCGUAGGGGG | 21 | 17297 |
| HSV1-UL48-1889 | + | AUAUCCAGAGCGCCGUAGGGGG | 22 | 17298 |
| HSV1-UL48-1890 | + | CAUAUCCAGAGCGCCGUAGGGGG | 23 | 17299 |
| HSV1-UL48-1891 | + | CCAUAUCCAGAGCGCCGUAGGGGG | 24 | 17300 |
| HSV1-UL48-379 | + | UGGUUGCCAUGCAGGGUGGG | 20 | 6217 |
| HSV1-UL48-1892 | + | CUGGUUGCCAUGCAGGGUGGG | 21 | 17301 |
| HSV1-UL48-1893 | + | CCUGGUUGCCAUGCAGGGUGGG | 22 | 17302 |
| HSV1-UL48-1894 | + | CGCGGGCCUGGUUGCCAUG | 19 | 17303 |
| HSV1-UL48-1895 | + | AGGCGCGGGCCUGGUUGCCAUG | 22 | 17304 |
| HSV1-UL48-1896 | + | AGAGGCGCGGGCCUGGUUGCCAUG | 24 | 17305 |
| HSV1-UL48-1897 | + | CGUAGGGGGCGGAGUCGUG | 19 | 17306 |
| HSV1-UL48-334 | + | CCGUAGGGGGCGGAGUCGUG | 20 | 6172 |
| HSV1-UL48-1898 | + | CGCCGUAGGGGGCGGAGUCGUG | 22 | 17307 |
| HSV1-UL48-1899 | + | AGCGCCGUAGGGGGCGGAGUCGUG | 24 | 17308 |
| HSV1-UL48-1900 | + | AGGUCGUGAAGCUGGAAU | 18 | 17309 |
| HSV1-UL48-990 | + | CGAGGUCGUGAAGCUGGAAU | 20 | 6686 |
| HSV1-UL48-1901 | + | AGGGCGAGGUCGUGAAGCUGGAAU | 24 | 17310 |
| HSV1-UL48-1902 | - | CUGGACAUGUUGGGGGAC | 18 | 17311 |
| HSV1-UL48-1903 | - | UCUGGACAUGUUGGGGGAC | 19 | 17312 |
| HSV1-UL48-309 | - | AUCUGGACAUGUUGGGGGAC | 20 | 6147 |
| HSV1-UL48-1904 | - | CGAUCUGGACAUGUUGGGGGAC | 22 | 17313 |
| HSV1-UL48-1905 | - | UCGAUCUGGACAUGUUGGGGGAC | 23 | 17314 |
| HSV1-UL48-1906 | - | UUCGAUCUGGACAUGUUGGGGGAC | 24 | 17315 |
| HSV1-UL48-1907 | - | ACGGGGAUUCCCCGGGGC | 18 | 17316 |
| HSV1-UL48-1908 | - | UGGGGGACGGGGAUUCCCCGGGGC | 24 | 17317 |
| HSV1-UL48-1909 | - | UUGGAAUUGACGAGUACG | 18 | 17318 |
| HSV1-UL48-1910 | - | CUUGGAAUUGACGAGUACG | 19 | 17319 |
| HSV1-UL48-882 | - | CCUUGGAAUUGACGAGUACG | 20 | 6611 |
| HSV1-UL48-1911 | - | CCCUUGGAAUUGACGAGUACG | 21 | 17320 |
| HSV1-UL48-1912 | - | UGCCCUUGGAAUUGACGAGUACG | 23 | 17321 |
| HSV1-UL48-1913 | - | AUGCCCUUGGAAUUGACGAGUACG | 24 | 17322 |
| HSV1-UL48-1914 | - | CGGAGCGCUCACCGUCCG | 18 | 17323 |
| HSV1-UL48-1915 | - | ACGGAGCGCUCACCGUCCG | 19 | 17324 |
| HSV1-UL48-257 | - | AACGGAGCGCUCACCGUCCG | 20 | 6095 |
| HSV1-UL48-1916 | - | CAACGGAGCGCUCACCGUCCG | 21 | 17325 |
| HSV1-UL48-1917 | - | UCAACGGAGCGCUCACCGUCCG | 22 | 17326 |
| HSV1-UL48-1918 | - | CGUCAACGGAGCGCUCACCGUCCG | 24 | 17327 |
| HSV1-UL48-1919 | - | CCGAUGCCCUUGGAAUUG | 18 | 17328 |
| HSV1-UL48-1920 | - | ACCGAUGCCCUUGGAAUUG | 19 | 17329 |
| HSV1-UL48-881 | - | UACCGAUGCCCUUGGAAUUG | 20 | 6610 |
| HSV1-UL48-1921 | - | UUACCGAUGCCCUUGGAAUUG | 21 | 17330 |
| HSV1-UL48-1922 | - | UUUACCGAUGCCCUUGGAAUUG | 22 | 17331 |
| HSV1-UL48-1923 | - | UGUUUACCGAUGCCCUUGGAAUUG | 24 | 17332 |
| HSV1-UL48-820 | - | UGGAGAGCUGGCGUCAGUUG | 20 | 6573 |
| HSV1-UL48-1924 | - | CUGGAGAGCUGGCGUCAGUUG | 21 | 17333 |
| HSV1-UL48-1925 | - | CCUGGAGAGCUGGCGUCAGUUG | 22 | 17334 |
| HSV1-UL48-1926 | - | ACCUGGAGAGCUGGCGUCAGUUG | 23 | 17335 |
| HSV1-UL48-1927 | - | CUCUGGAUAUGGCCGACU | 18 | 17336 |
| HSV1-UL48-877 | - | CGCUCUGGAUAUGGCCGACU | 20 | 6607 |
| HSV1-UL48-1928 | - | CGGCGCUCUGGAUAUGGCCGACU | 23 | 17337 |
| HSV1-UL48-1929 | - | ACGGCGCUCUGGAUAUGGCCGACU | 24 | 17338 |
| HSV1-UL48-1930 | - | AGAUGUUUACCGAUGCCCU | 19 | 17339 |
| HSV1-UL48-319 | - | CAGAUGUUUACCGAUGCCCU | 20 | 6157 |
| HSV1-UL48-1931 | - | AGCAGAUGUUUACCGAUGCCCU | 22 | 17340 |
| HSV1-UL48-1932 | - | UGAGCAGAUGUUUACCGAUGCCCU | 24 | 17341 |
| HSV1-UL48-838 | - | UGGCAACCAGGCCCGCGCCU | 20 | 6582 |
| HSV1-UL48-1933 | - | AUGGCAACCAGGCCCGCGCCU | 21 | 17342 |
| HSV1-UL48-1934 | - | CAUGGCAACCAGGCCCGCGCCU | 22 | 17343 |
| HSV1-UL48-1935 | - | UGCAUGGCAACCAGGCCCGCGCCU | 24 | 17344 |
| HSV1-UL48-1936 | - | UCCGCCCCCUACGGCGCU | 18 | 17345 |
| HSV1-UL48-1937 | - | CUCCGCCCCCUACGGCGCU | 19 | 17346 |
| HSV1-UL48-876 | - | ACUCCGCCCCCUACGGCGCU | 20 | 6606 |
| HSV1-UL48-1938 | - | CGACUCCGCCCCCUACGGCGCU | 22 | 17347 |
| HSV1-UL48-1939 | - | ACGACUCCGCCCCCUACGGCGCU | 23 | 17348 |
| HSV1-UL48-1940 | - | CACGACUCCGCCCCCUACGGCGCU | 24 | 17349 |
| HSV1-UL48-1941 | - | CGCGUACGAAAAACAAUU | 18 | 17350 |
| HSV1-UL48-847 | - | CGCGCGUACGAAAAACAAUU | 20 | 6589 |
| HSV1-UL48-1942 | - | CGCGCGCGUACGAAAAACAAUU | 22 | 17351 |
| HSV1-UL48-1943 | - | CCGCGCGCGUACGAAAAACAAUU | 23 | 17352 |

[0796] Table 12G provides exemplary targeting domains for knocking out the UL48 gene selected according to the seven tier parameters. The targeting domains fall in the coding sequence of the gene, downstream of the first 500 bp of coding sequence (e.g., anywhere from +500 (relative to the start codon) to the stop codon of the gene). The PAM is NNGRRV. It is contemplated herein that in an embodiment the targeting domain hybridizes to the target domain through complementary base pairing. Any of the targeting domains in the table can be used with a S. aureus Cas9 molecule that generates a double stranded break (Cas9 nuclease) or a single-stranded break (Cas9 nickase).

TABLE 12G
7th Tier

| | | | Target | |
|---|---|---|---|---|
| | DNA | | Site | Seq ID |
| gRNA Name | Strand | Targeting Domain | Length | NO: |
| HSV1-UL48-1944 | + | CAGCUCUCCAGGUCGCAA | 18 | 17353 |
| HSV1-UL48-1945 | + | CCAGCUCUCCAGGUCGCAA | 19 | 17354 |
| HSV1-UL48-968 | + | GCCAGCUCUCCAGGUCGCAA | 20 | 6670 |
| HSV1-UL48-1946 | + | CGCCAGCUCUCCAGGUCGCAA | 21 | 17355 |
| HSV1-UL48-1947 | + | ACGCCAGCUCUCCAGGUCGCAA | 22 | 17356 |
| HSV1-UL48-1948 | + | GACGCCAGCUCUCCAGGUCGCAA | 23 | 17357 |
| HSV1-UL48-1949 | + | UGACGCCAGCUCUCCAGGUCGCAA | 24 | 17358 |
| HSV1-UL48-1950 | + | CACGUCCUCGCCGUCUAA | 18 | 17359 |
| HSV1-UL48-1951 | + | CCACGUCCUCGCCGUCUAA | 19 | 17360 |
| HSV1-UL48-1019 | + | GCCACGUCCUCGCCGUCUAA | 20 | 6700 |
| HSV1-UL48-1952 | + | CGCCACGUCCUCGCCGUCUAA | 21 | 17361 |
| HSV1-UL48-1953 | + | UCGCCACGUCCUCGCCGUCUAA | 22 | 17362 |
| HSV1-UL48-1954 | + | AUCGCCACGUCCUCGCCGUCUAA | 23 | 17363 |
| HSV1-UL48-1955 | + | CAUCGCCACGUCCUCGCCGUCUAA | 24 | 17364 |
| HSV1-UL48-1956 | + | UAGCCGCGCUGCGCACCA | 18 | 17365 |
| HSV1-UL48-1957 | + | GUAGCCGCGCUGCGCACCA | 19 | 17366 |
| HSV1-UL48-980 | + | CGUAGCCGCGCUGCGCACCA | 20 | 6679 |
| HSV1-UL48-1958 | + | CCGUAGCCGCGCUGCGCACCA | 21 | 17367 |
| HSV1-UL48-1959 | + | UCCGUAGCCGCGCUGCGCACCA | 22 | 17368 |
| HSV1-UL48-1960 | + | CUCCGUAGCCGCGCUGCGCACCA | 23 | 17369 |
| HSV1-UL48-1961 | + | CCUCCGUAGCCGCGCUGCGCACCA | 24 | 17370 |
| HSV1-UL48-1962 | + | UCCCCCAACAUGUCCAGA | 18 | 17371 |
| HSV1-UL48-1963 | + | GUCCCCCAACAUGUCCAGA | 19 | 17372 |
| HSV1-UL48-1020 | + | CGUCCCCCAACAUGUCCAGA | 20 | 6701 |
| HSV1-UL48-1964 | + | CCGUCCCCCAACAUGUCCAGA | 21 | 17373 |
| HSV1-UL48-1965 | + | CCCGUCCCCCAACAUGUCCAGA | 22 | 17374 |
| HSV1-UL48-1966 | + | CCCCGUCCCCCAACAUGUCCAGA | 23 | 17375 |
| HSV1-UL48-1967 | + | UCCCCGUCCCCCAACAUGUCCAGA | 24 | 17376 |
| HSV1-UL48-1968 | + | GCGUCGUCGUCCGGGAGA | 18 | 17377 |
| HSV1-UL48-1969 | + | GGCGUCGUCGUCCGGGAGA | 19 | 17378 |
| HSV1-UL48-998 | + | GGGCGUCGUCGUCCGGGAGA | 20 | 6692 |
| HSV1-UL48-1970 | + | GGGGCGUCGUCGUCCGGGAGA | 21 | 17379 |
| HSV1-UL48-1971 | + | GGGGGCGUCGUCGUCCGGGAGA | 22 | 17380 |
| HSV1-UL48-1972 | + | CGGGGGCGUCGUCGUCCGGGAGA | 23 | 17381 |
| HSV1-UL48-1973 | + | UCGGGGGCGUCGUCGUCCGGGAGA | 24 | 17382 |
| HSV1-UL48-1974 | + | GUGUGUCCCGCGGGGAGA | 18 | 17383 |
| HSV1-UL48-1975 | + | CGUGUGUCCCGCGGGGAGA | 19 | 17384 |
| HSV1-UL48-1007 | + | GCGUGUGUCCCGCGGGGAGA | 20 | 6696 |
| HSV1-UL48-1976 | + | CGCGUGUGUCCCGCGGGGAGA | 21 | 17385 |
| HSV1-UL48-1977 | + | GCGCGUGUGUCCCGCGGGGAGA | 22 | 17386 |
| HSV1-UL48-1978 | + | UGCGCGUGUGUCCCGCGGGGAGA | 23 | 17387 |
| HSV1-UL48-1979 | + | CUGCGCGUGUGUCCCGCGGGGAGA | 24 | 17388 |
| HSV1-UL48-1980 | + | CAUAUCCAGAGCGCCGUA | 18 | 17389 |
| HSV1-UL48-1981 | + | CCAUAUCCAGAGCGCCGUA | 19 | 17390 |
| HSV1-UL48-328 | + | GCCAUAUCCAGAGCGCCGUA | 20 | 6166 |
| HSV1-UL48-1982 | + | GGCCAUAUCCAGAGCGCCGUA | 21 | 17391 |
| HSV1-UL48-1983 | + | CGGCCAUAUCCAGAGCGCCGUA | 22 | 17392 |
| HSV1-UL48-1984 | + | UCGGCCAUAUCCAGAGCGCCGUA | 23 | 17393 |
| HSV1-UL48-1985 | + | GUCGGCCAUAUCCAGAGCGCCGUA | 24 | 17394 |
| HSV1-UL48-1986 | + | GGCGCGCAGGUACCGGUA | 18 | 17395 |
| HSV1-UL48-1987 | + | UGGCGCGCAGGUACCGGUA | 19 | 17396 |
| HSV1-UL48-962 | + | CUGGCGCGCAGGUACCGGUA | 20 | 6664 |
| HSV1-UL48-1988 | + | GCUGGCGCGCAGGUACCGGUA | 21 | 17397 |
| HSV1-UL48-1989 | + | CGCUGGCGCGCAGGUACCGGUA | 22 | 17398 |
| HSV1-UL48-1990 | + | ACGCUGGCGCGCAGGUACCGGUA | 23 | 17399 |
| HSV1-UL48-1991 | + | GACGCUGGCGCGCAGGUACCGGUA | 24 | 17400 |
| HSV1-UL48-1992 | + | GUAAACAUCUGCUCAAAC | 18 | 17401 |
| HSV1-UL48-1993 | + | GGUAAACAUCUGCUCAAAC | 19 | 17402 |
| HSV1-UL48-1035 | + | CGGUAAACAUCUGCUCAAAC | 20 | 6707 |
| HSV1-UL48-1994 | + | UCGGUAAACAUCUGCUCAAAC | 21 | 17403 |
| HSV1-UL48-1995 | + | AUCGGUAAACAUCUGCUCAAAC | 22 | 17404 |
| HSV1-UL48-1996 | + | CAUCGGUAAACAUCUGCUCAAAC | 23 | 17405 |
| HSV1-UL48-1997 | + | GCAUCGGUAAACAUCUGCUCAAAC | 24 | 17406 |
| HSV1-UL48-1998 | + | AGCGCUCCGUUGACGAAC | 18 | 17407 |
| HSV1-UL48-1999 | + | GAGCGCUCCGUUGACGAAC | 19 | 17408 |
| HSV1-UL48-972 | + | UGAGCGCUCCGUUGACGAAC | 20 | 6673 |
| HSV1-UL48-2000 | + | GUGAGCGCUCCGUUGACGAAC | 21 | 17409 |
| HSV1-UL48-2001 | + | GGUGAGCGCUCCGUUGACGAAC | 22 | 17410 |
| HSV1-UL48-2002 | + | CGGUGAGCGCUCCGUUGACGAAC | 23 | 17411 |
| HSV1-UL48-2003 | + | ACGGUGAGCGCUCCGUUGACGAAC | 24 | 17412 |
| HSV1-UL48-2004 | + | UCAACACCAUAAAGUACC | 18 | 17413 |
| HSV1-UL48-2005 | + | AUCAACACCAUAAAGUACC | 19 | 17414 |
| HSV1-UL48-988 | + | AAUCAACACCAUAAAGUACC | 20 | 6684 |
| HSV1-UL48-2006 | + | GAAUCAACACCAUAAAGUACC | 21 | 17415 |
| HSV1-UL48-2007 | + | CGAAUCAACACCAUAAAGUACC | 22 | 17416 |
| HSV1-UL48-2008 | + | CCGAAUCAACACCAUAAAGUACC | 23 | 17417 |
| HSV1-UL48-2009 | + | CCCGAAUCAACACCAUAAAGUACC | 24 | 17418 |
| HSV1-UL48-2010 | + | GGGGUAAAUCCCGGCCCC | 18 | 17419 |
| HSV1-UL48-2011 | + | GGGGGUAAAUCCCGGCCCC | 19 | 17420 |
| HSV1-UL48-339 | + | GGGGGGUAAAUCCCGGCCCC | 20 | 6177 |
| HSV1-UL48-2012 | + | UGGGGGGUAAAUCCCGGCCCC | 21 | 17421 |
| HSV1-UL48-2013 | + | GUGGGGGGUAAAUCCCGGCCCC | 22 | 17422 |
| HSV1-UL48-2014 | + | CGUGGGGGGUAAAUCCCGGCCCC | 23 | 17423 |
| HSV1-UL48-2015 | + | UCGUGGGGGGUAAAUCCCGGCCCC | 24 | 17424 |
| HSV1-UL48-2016 | + | GGGGGUAAAUCCCGGCCC | 18 | 17425 |
| HSV1-UL48-2017 | + | GGGGGGUAAAUCCCGGCCC | 19 | 17426 |
| HSV1-UL48-338 | + | UGGGGGGUAAAUCCCGGCCC | 20 | 6176 |
| HSV1-UL48-2018 | + | GUGGGGGGUAAAUCCCGGCCC | 21 | 17427 |
| HSV1-UL48-2019 | + | CGUGGGGGGUAAAUCCCGGCCC | 22 | 17428 |
| HSV1-UL48-2020 | + | UCGUGGGGGGUAAAUCCCGGCCC | 23 | 17429 |
| HSV1-UL48-2021 | + | GUCGUGGGGGGUAAAUCCCGGCCC | 24 | 17430 |
| HSV1-UL48-2022 | + | AGUCUGCGCGUGUGUCCC | 18 | 17431 |
| HSV1-UL48-2023 | + | CAGUCUGCGCGUGUGUCCC | 19 | 17432 |
| HSV1-UL48-1012 | + | ACAGUCUGCGCGUGUGUCCC | 20 | 6698 |
| HSV1-UL48-2024 | + | GACAGUCUGCGCGUGUGUCCC | 21 | 17433 |
| HSV1-UL48-2025 | + | CGACAGUCUGCGCGUGUGUCCC | 22 | 17434 |
| HSV1-UL48-2026 | + | UCGACAGUCUGCGCGUGUGUCCC | 23 | 17435 |
| HSV1-UL48-2027 | + | GUCGACAGUCUGCGCGUGUGUCCC | 24 | 17436 |
| HSV1-UL48-2028 | + | UGUUCCCGCAUGACCGCC | 18 | 17437 |
| HSV1-UL48-2029 | + | GUGUUCCCGCAUGACCGCC | 19 | 17438 |
| HSV1-UL48-997 | + | CGUGUUCCCGCAUGACCGCC | 20 | 6691 |
| HSV1-UL48-2030 | + | GCGUGUUCCCGCAUGACCGCC | 21 | 17439 |
| HSV1-UL48-2031 | + | CGCGUGUUCCCGCAUGACCGCC | 22 | 17440 |
| HSV1-UL48-2032 | + | ACGCGUGUUCCCGCAUGACCGCC | 23 | 17441 |
| HSV1-UL48-2033 | + | UACGCGUGUUCCCGCAUGACCGCC | 24 | 17442 |
| HSV1-UL48-2034 | + | GGGGGGUAAAUCCCGGCC | 18 | 17443 |
| HSV1-UL48-2035 | + | UGGGGGGUAAAUCCCGGCC | 19 | 17444 |
| HSV1-UL48-1024 | + | GUGGGGGGUAAAUCCCGGCC | 20 | 6702 |
| HSV1-UL48-2036 | + | CGUGGGGGGUAAAUCCCGGCC | 21 | 17445 |
| HSV1-UL48-2037 | + | UCGUGGGGGGUAAAUCCCGGCC | 22 | 17446 |
| HSV1-UL48-2038 | + | GUCGUGGGGGGUAAAUCCCGGCC | 23 | 17447 |
| HSV1-UL48-2039 | + | AGUCGUGGGGGGUAAAUCCCGGCC | 24 | 17448 |
| HSV1-UL48-2040 | + | GGCCUCGAUUGGCACUCC | 18 | 17449 |
| HSV1-UL48-2041 | + | GGGCCUCGAUUGGCACUCC | 19 | 17450 |
| HSV1-UL48-975 | + | CGGGCCUCGAUUGGCACUCC | 20 | 6676 |
| HSV1-UL48-2042 | + | GCGGGCCUCGAUUGGCACUCC | 21 | 17451 |
| HSV1-UL48-2043 | + | GGCGGGCCUCGAUUGGCACUCC | 22 | 17452 |
| HSV1-UL48-2044 | + | CGGCGGGCCUCGAUUGGCACUCC | 23 | 17453 |
| HSV1-UL48-2045 | + | CCGGCGGGCCUCGAUUGGCACUCC | 24 | 17454 |
| HSV1-UL48-2046 | + | UCGGGGGCGUCGUCGUCC | 18 | 17455 |
| HSV1-UL48-2047 | + | UUCGGGGGCGUCGUCGUCC | 19 | 17456 |
| HSV1-UL48-362 | + | CUUCGGGGGCGUCGUCGUCC | 20 | 6200 |
| HSV1-UL48-2048 | + | UCUUCGGGGGCGUCGUCGUCC | 21 | 17457 |
| HSV1-UL48-2049 | + | CUCUUCGGGGGCGUCGUCGUCC | 22 | 17458 |
| HSV1-UL48-2050 | + | CCUCUUCGGGGGCGUCGUCGUCC | 23 | 17459 |
| HSV1-UL48-2051 | + | GCCUCUUCGGGGGCGUCGUCGUCC | 24 | 17460 |
| HSV1-UL48-2052 | + | ACCGUACUCGUCAAUUCC | 18 | 17461 |
| HSV1-UL48-2053 | + | CACCGUACUCGUCAAUUCC | 19 | 17462 |
| HSV1-UL48-1036 | + | CCACCGUACUCGUCAAUUCC | 20 | 6708 |
| HSV1-UL48-2054 | + | CCCACCGUACUCGUCAAUUCC | 21 | 17463 |
| HSV1-UL48-2055 | + | ACCCACCGUACUCGUCAAUUCC | 22 | 17464 |
| HSV1-UL48-2056 | + | UACCCACCGUACUCGUCAAUUCC | 23 | 17465 |
| HSV1-UL48-2057 | + | CUACCCACCGUACUCGUCAAUUCC | 24 | 17466 |
| HSV1-UL48-2058 | + | GCCGCGCUGCGCACCAGC | 18 | 17467 |
| HSV1-UL48-2059 | + | AGCCGCGCUGCGCACCAGC | 19 | 17468 |
| HSV1-UL48-385 | + | UAGCCGCGCUGCGCACCAGC | 20 | 6223 |
| HSV1-UL48-2060 | + | GUAGCCGCGCUGCGCACCAGC | 21 | 17469 |
| HSV1-UL48-2061 | + | CGUAGCCGCGCUGCGCACCAGC | 22 | 17470 |
| HSV1-UL48-2062 | + | CCGUAGCCGCGCUGCGCACCAGC | 23 | 17471 |
| HSV1-UL48-2063 | + | UCCGUAGCCGCGCUGCGCACCAGC | 24 | 17472 |
| HSV1-UL48-2064 | + | UCUGCGCGUGUGUCCCGC | 18 | 17473 |
| HSV1-UL48-2065 | + | GUCUGCGCGUGUGUCCCGC | 19 | 17474 |
| HSV1-UL48-352 | + | AGUCUGCGCGUGUGUCCCGC | 20 | 6190 |
| HSV1-UL48-2066 | + | CAGUCUGCGCGUGUGUCCCGC | 21 | 17475 |
| HSV1-UL48-2067 | + | ACAGUCUGCGCGUGUGUCCCGC | 22 | 17476 |
| HSV1-UL48-2068 | + | GACAGUCUGCGCGUGUGUCCCGC | 23 | 17477 |
| HSV1-UL48-2069 | + | CGACAGUCUGCGCGUGUGUCCCGC | 24 | 17478 |
| HSV1-UL48-2070 | + | CGGGGAGAAAGGACAGGC | 18 | 17479 |
| HSV1-UL48-2071 | + | GCGGGGAGAAAGGACAGGC | 19 | 17480 |
| HSV1-UL48-1006 | + | CGCGGGGAGAAAGGACAGGC | 20 | 6695 |
| HSV1-UL48-2072 | + | CCGCGGGGAGAAAGGACAGGC | 21 | 17481 |
| HSV1-UL48-2073 | + | CCCGCGGGGAGAAAGGACAGGC | 22 | 17482 |
| HSV1-UL48-2074 | + | UCCCGCGGGGAGAAAGGACAGGC | 23 | 17483 |
| HSV1-UL48-2075 | + | GUCCCGCGGGGAGAAAGGACAGGC | 24 | 17484 |
| HSV1-UL48-2076 | + | CAUAAAGUACCCAGAGGC | 18 | 17485 |
| HSV1-UL48-2077 | + | CCAUAAAGUACCCAGAGGC | 19 | 17486 |
| HSV1-UL48-987 | + | ACCAUAAAGUACCCAGAGGC | 20 | 6683 |
| HSV1-UL48-2078 | + | CACCAUAAAGUACCCAGAGGC | 21 | 17487 |
| HSV1-UL48-2079 | + | ACACCAUAAAGUACCCAGAGGC | 22 | 17488 |
| HSV1-UL48-2080 | + | AACACCAUAAAGUACCCAGAGGC | 23 | 17489 |
| HSV1-UL48-2081 | + | CAACACCAUAAAGUACCCAGAGGC | 24 | 17490 |
| HSV1-UL48-2082 | + | UUGACGAACAUGAAGGGC | 18 | 17491 |
| HSV1-UL48-2083 | + | GUUGACGAACAUGAAGGGC | 19 | 17492 |
| HSV1-UL48-397 | + | CGUUGACGAACAUGAAGGGC | 20 | 6235 |
| HSV1-UL48-2084 | + | CCGUUGACGAACAUGAAGGGC | 21 | 17493 |
| HSV1-UL48-2085 | + | UCCGUUGACGAACAUGAAGGGC | 22 | 17494 |
| HSV1-UL48-2086 | + | CUCCGUUGACGAACAUGAAGGGC | 23 | 17495 |
| HSV1-UL48-2087 | + | GCUCCGUUGACGAACAUGAAGGGC | 24 | 17496 |
| HSV1-UL48-2088 | + | CUCGAAGUCGGCCAUAUC | 18 | 17497 |
| HSV1-UL48-2089 | + | ACUCGAAGUCGGCCAUAUC | 19 | 17498 |
| HSV1-UL48-1034 | + | AACUCGAAGUCGGCCAUAUC | 20 | 6706 |
| HSV1-UL48-2090 | + | AAACUCGAAGUCGGCCAUAUC | 21 | 17499 |
| HSV1-UL48-2091 | + | CAAACUCGAAGUCGGCCAUAUC | 22 | 17500 |
| HSV1-UL48-2092 | + | UCAAACUCGAAGUCGGCCAUAUC | 23 | 17501 |
| HSV1-UL48-2093 | + | CUCAAACUCGAAGUCGGCCAUAUC | 24 | 17502 |
| HSV1-UL48-2094 | + | GCCGUAGGGGGCGGAGUC | 18 | 17503 |
| HSV1-UL48-2095 | + | CGCCGUAGGGGGCGGAGUC | 19 | 17504 |
| HSV1-UL48-1028 | + | GCGCCGUAGGGGGCGGAGUC | 20 | 6703 |
| HSV1-UL48-2096 | + | AGCGCCGUAGGGGGCGGAGUC | 21 | 17505 |
| HSV1-UL48-2097 | + | GAGCGCCGUAGGGGGCGGAGUC | 22 | 17506 |
| HSV1-UL48-2098 | + | AGAGCGCCGUAGGGGGCGGAGUC | 23 | 17507 |
| HSV1-UL48-2099 | + | CAGAGCGCCGUAGGGGGCGGAGUC | 24 | 17508 |
| HSV1-UL48-2100 | + | UUCGGGGGCGUCGUCGUC | 18 | 17509 |
| HSV1-UL48-2101 | + | CUUCGGGGGCGUCGUCGUC | 19 | 17510 |
| HSV1-UL48-361 | + | UCUUCGGGGGCGUCGUCGUC | 20 | 6199 |
| HSV1-UL48-2102 | + | CUCUUCGGGGGCGUCGUCGUC | 21 | 17511 |
| HSV1-UL48-2103 | + | CCUCUUCGGGGGCGUCGUCGUC | 22 | 17512 |
| HSV1-UL48-2104 | + | GCCUCUUCGGGGGCGUCGUCGUC | 23 | 17513 |
| HSV1-UL48-2105 | + | CGCCUCUUCGGGGGCGUCGUCGUC | 24 | 17514 |
| HSV1-UL48-2106 | + | GCCUCGGAGGGCGAGGUC | 18 | 17515 |
| HSV1-UL48-2107 | + | CGCCUCGGAGGGCGAGGUC | 19 | 17516 |
| HSV1-UL48-993 | + | CCGCCUCGGAGGGCGAGGUC | 20 | 6688 |
| HSV1-UL48-2108 | + | ACCGCCUCGGAGGGCGAGGUC | 21 | 17517 |
| HSV1-UL48-2109 | + | GACCGCCUCGGAGGGCGAGGUC | 22 | 17518 |
| HSV1-UL48-2110 | + | UGACCGCCUCGGAGGGCGAGGUC | 23 | 17519 |
| HSV1-UL48-2111 | + | AUGACCGCCUCGGAGGGCGAGGUC | 24 | 17520 |
| HSV1-UL48-2112 | + | CCCAGGCUGACAUCGGUC | 18 | 17521 |
| HSV1-UL48-2113 | + | CCCCAGGCUGACAUCGGUC | 19 | 17522 |
| HSV1-UL48-346 | + | CCCCCAGGCUGACAUCGGUC | 20 | 6184 |
| HSV1-UL48-2114 | + | UCCCCCAGGCUGACAUCGGUC | 21 | 17523 |
| HSV1-UL48-2115 | + | GUCCCCCAGGCUGACAUCGGUC | 22 | 17524 |
| HSV1-UL48-2116 | + | CGUCCCCCAGGCUGACAUCGGUC | 23 | 17525 |
| HSV1-UL48-2117 | + | UCGUCCCCCAGGCUGACAUCGGUC | 24 | 17526 |
| HSV1-UL48-2118 | + | CGCCAGCCCCGCCUCUUC | 18 | 17527 |
| HSV1-UL48-2119 | + | CCGCCAGCCCCGCCUCUUC | 19 | 17528 |
| HSV1-UL48-358 | + | GCCGCCAGCCCCGCCUCUUC | 20 | 6196 |
| HSV1-UL48-2120 | + | AGCCGCCAGCCCCGCCUCUUC | 21 | 17529 |
| HSV1-UL48-2121 | + | GAGCCGCCAGCCCCGCCUCUUC | 22 | 17530 |
| HSV1-UL48-2122 | + | GGAGCCGCCAGCCCCGCCUCUUC | 23 | 17531 |
| HSV1-UL48-2123 | + | CGGAGCCGCCAGCCCCGCCUCUUC | 24 | 17532 |
| HSV1-UL48-2124 | + | GAGGGCGAGGUCGUGAAG | 18 | 17533 |
| HSV1-UL48-2125 | + | GGAGGGCGAGGUCGUGAAG | 19 | 17534 |
| HSV1-UL48-992 | + | CGGAGGGCGAGGUCGUGAAG | 20 | 6687 |
| HSV1-UL48-2126 | + | UCGGAGGGCGAGGUCGUGAAG | 21 | 17535 |
| HSV1-UL48-2127 | + | CUCGGAGGGCGAGGUCGUGAAG | 22 | 17536 |
| HSV1-UL48-2128 | + | CCUCGGAGGGCGAGGUCGUGAAG | 23 | 17537 |
| HSV1-UL48-2129 | + | GCCUCGGAGGGCGAGGUCGUGAAG | 24 | 17538 |
| HSV1-UL48-2130 | + | ACGUCCUCGCCGUCUAAG | 18 | 17539 |
| HSV1-UL48-2131 | + | CACGUCCUCGCCGUCUAAG | 19 | 17540 |
| HSV1-UL48-342 | + | CCACGUCCUCGCCGUCUAAG | 20 | 6180 |
| HSV1-UL48-2132 | + | GCCACGUCCUCGCCGUCUAAG | 21 | 17541 |
| HSV1-UL48-2133 | + | CGCCACGUCCUCGCCGUCUAAG | 22 | 17542 |
| HSV1-UL48-2134 | + | UCGCCACGUCCUCGCCGUCUAAG | 23 | 17543 |
| HSV1-UL48-2135 | + | AUCGCCACGUCCUCGCCGUCUAAG | 24 | 17544 |
| HSV1-UL48-2136 | + | AGCCGCGCUGCGCACCAG | 18 | 17545 |
| HSV1-UL48-2137 | + | UAGCCGCGCUGCGCACCAG | 19 | 17546 |
| HSV1-UL48-384 | + | GUAGCCGCGCUGCGCACCAG | 20 | 6222 |
| HSV1-UL48-2138 | + | CGUAGCCGCGCUGCGCACCAG | 21 | 17547 |
| HSV1-UL48-2139 | + | CCGUAGCCGCGCUGCGCACCAG | 22 | 17548 |
| HSV1-UL48-2140 | + | UCCGUAGCCGCGCUGCGCACCAG | 23 | 17549 |
| HSV1-UL48-2141 | + | CUCCGUAGCCGCGCUGCGCACCAG | 24 | 17550 |
| HSV1-UL48-2142 | + | AAACAAAACACGCGCCAG | 18 | 17551 |
| HSV1-UL48-2143 | + | AAAACAAAACACGCGCCAG | 19 | 17552 |
| HSV1-UL48-964 | + | AAAAACAAAACACGCGCCAG | 20 | 6666 |
| HSV1-UL48-2144 | + | CAAAAACAAAACACGCGCCAG | 21 | 17553 |
| HSV1-UL48-2145 | + | GCAAAAACAAAACACGCGCCAG | 22 | 17554 |
| HSV1-UL48-2146 | + | UGCAAAAACAAAACACGCGCCAG | 23 | 17555 |
| HSV1-UL48-2147 | + | AUGCAAAAACAAAACACGCGCCAG | 24 | 17556 |
| HSV1-UL48-2148 | + | UACCGGUACAGGGCCGAG | 18 | 17557 |
| HSV1-UL48-2149 | + | GUACCGGUACAGGGCCGAG | 19 | 17558 |
| HSV1-UL48-960 | + | GGUACCGGUACAGGGCCGAG | 20 | 6662 |
| HSV1-UL48-2150 | + | AGGUACCGGUACAGGGCCGAG | 21 | 17559 |
| HSV1-UL48-2151 | + | CAGGUACCGGUACAGGGCCGAG | 22 | 17560 |
| HSV1-UL48-2152 | + | GCAGGUACCGGUACAGGGCCGAG | 23 | 17561 |
| HSV1-UL48-2153 | + | CGCAGGUACCGGUACAGGGCCGAG | 24 | 17562 |
| HSV1-UL48-2154 | + | AUUGGCACUCCCCGGACG | 18 | 17563 |
| HSV1-UL48-2155 | + | GAUUGGCACUCCCCGGACG | 19 | 17564 |
| HSV1-UL48-974 | + | CGAUUGGCACUCCCCGGACG | 20 | 6675 |
| HSV1-UL48-2156 | + | UCGAUUGGCACUCCCCGGACG | 21 | 17565 |
| HSV1-UL48-2157 | + | CUCGAUUGGCACUCCCCGGACG | 22 | 17566 |
| HSV1-UL48-2158 | + | CCUCGAUUGGCACUCCCCGGACG | 23 | 17567 |
| HSV1-UL48-2159 | + | GCCUCGAUUGGCACUCCCCGGACG | 24 | 17568 |
| HSV1-UL48-2160 | + | GUCUGCGCGUGUGUCCCG | 18 | 17569 |
| HSV1-UL48-2161 | + | AGUCUGCGCGUGUGUCCCG | 19 | 17570 |
| HSV1-UL48-351 | + | CAGUCUGCGCGUGUGUCCCG | 20 | 6189 |
| HSV1-UL48-2162 | + | ACAGUCUGCGCGUGUGUCCCG | 21 | 17571 |
| HSV1-UL48-2163 | + | GACAGUCUGCGCGUGUGUCCCG | 22 | 17572 |
| HSV1-UL48-2164 | + | CGACAGUCUGCGCGUGUGUCCCG | 23 | 17573 |
| HSV1-UL48-2165 | + | UCGACAGUCUGCGCGUGUGUCCCG | 24 | 17574 |
| HSV1-UL48-2166 | + | GUUUAGCUCCCGCAGCCG | 18 | 17575 |
| HSV1-UL48-2167 | + | GGUUUAGCUCCCGCAGCCG | 19 | 17576 |
| HSV1-UL48-976 | + | UGGUUUAGCUCCCGCAGCCG | 20 | 6677 |
| HSV1-UL48-2168 | + | GUGGUUUAGCUCCCGCAGCCG | 21 | 17577 |
| HSV1-UL48-2169 | + | UGUGGUUUAGCUCCCGCAGCCG | 22 | 17578 |
| HSV1-UL48-2170 | + | AUGUGGUUUAGCUCCCGCAGCCG | 23 | 17579 |
| HSV1-UL48-2171 | + | AAUGUGGUUUAGCUCCCGCAGCCG | 24 | 17580 |
| HSV1-UL48-2172 | + | GCCAUAUCCAGAGCGCCG | 18 | 17581 |
| HSV1-UL48-2173 | + | GGCCAUAUCCAGAGCGCCG | 19 | 17582 |
| HSV1-UL48-1033 | + | CGGCCAUAUCCAGAGCGCCG | 20 | 6705 |
| HSV1-UL48-2174 | + | UCGGCCAUAUCCAGAGCGCCG | 21 | 17583 |
| HSV1-UL48-2175 | + | GUCGGCCAUAUCCAGAGCGCCG | 22 | 17584 |
| HSV1-UL48-2176 | + | AGUCGGCCAUAUCCAGAGCGCCG | 23 | 17585 |
| HSV1-UL48-2177 | + | AAGUCGGCCAUAUCCAGAGCGCCG | 24 | 17586 |
| HSV1-UL48-2178 | + | CUGCGCGUGUGUCCCGCG | 18 | 17587 |
| HSV1-UL48-2179 | + | UCUGCGCGUGUGUCCCGCG | 19 | 17588 |
| HSV1-UL48-353 | + | GUCUGCGCGUGUGUCCCGCG | 20 | 6191 |
| HSV1-UL48-2180 | + | AGUCUGCGCGUGUGUCCCGCG | 21 | 17589 |
| HSV1-UL48-2181 | + | CAGUCUGCGCGUGUGUCCCGCG | 22 | 17590 |
| HSV1-UL48-2182 | + | ACAGUCUGCGCGUGUGUCCCGCG | 23 | 17591 |
| HSV1-UL48-2183 | + | GACAGUCUGCGCGUGUGUCCCGCG | 24 | 17592 |
| HSV1-UL48-2184 | + | GGGGAGAAAGGACAGGCG | 18 | 17593 |
| HSV1-UL48-2185 | + | CGGGGAGAAAGGACAGGCG | 19 | 17594 |
| HSV1-UL48-356 | + | GCGGGGAGAAAGGACAGGCG | 20 | 6194 |
| HSV1-UL48-2186 | + | CGCGGGGAGAAAGGACAGGCG | 21 | 17595 |
| HSV1-UL48-2187 | + | CCGCGGGGAGAAAGGACAGGCG | 22 | 17596 |
| HSV1-UL48-2188 | + | CCCGCGGGGAGAAAGGACAGGCG | 23 | 17597 |
| HSV1-UL48-2189 | + | UCCCGCGGGGAGAAAGGACAGGCG | 24 | 17598 |
| HSV1-UL48-2190 | + | UCCCGCAUGACCGCCUCG | 18 | 17599 |
| HSV1-UL48-2191 | + | UUCCCGCAUGACCGCCUCG | 19 | 17600 |
| HSV1-UL48-995 | + | GUUCCCGCAUGACCGCCUCG | 20 | 6690 |
| HSV1-UL48-2192 | + | UGUUCCCGCAUGACCGCCUCG | 21 | 17601 |
| HSV1-UL48-2193 | + | GUGUUCCCGCAUGACCGCCUCG | 22 | 17602 |
| HSV1-UL48-2194 | + | CGUGUUCCCGCAUGACCGCCUCG | 23 | 17603 |
| HSV1-UL48-2195 | + | GCGUGUUCCCGCAUGACCGCCUCG | 24 | 17604 |
| HSV1-UL48-2196 | + | CCGUAGGGGGCGGAGUCG | 18 | 17605 |
| HSV1-UL48-2197 | + | GCCGUAGGGGGCGGAGUCG | 19 | 17606 |
| HSV1-UL48-332 | + | CGCCGUAGGGGGCGGAGUCG | 20 | 6170 |
| HSV1-UL48-2198 | + | GCGCCGUAGGGGGCGGAGUCG | 21 | 17607 |
| HSV1-UL48-2199 | + | AGCGCCGUAGGGGGCGGAGUCG | 22 | 17608 |
| HSV1-UL48-2200 | + | GAGCGCCGUAGGGGGCGGAGUCG | 23 | 17609 |
| HSV1-UL48-2201 | + | AGAGCGCCGUAGGGGGCGGAGUCG | 24 | 17610 |
| HSV1-UL48-2202 | + | CCAGGCUGACAUCGGUCG | 18 | 17611 |
| HSV1-UL48-2203 | + | CCCAGGCUGACAUCGGUCG | 19 | 17612 |
| HSV1-UL48-347 | + | CCCCAGGCUGACAUCGGUCG | 20 | 6185 |
| HSV1-UL48-2204 | + | CCCCCAGGCUGACAUCGGUCG | 21 | 17613 |
| HSV1-UL48-2205 | + | UCCCCCAGGCUGACAUCGGUCG | 22 | 17614 |
| HSV1-UL48-2206 | + | GUCCCCCAGGCUGACAUCGGUCG | 23 | 17615 |
| HSV1-UL48-2207 | + | CGUCCCCCAGGCUGACAUCGGUCG | 24 | 17616 |
| HSV1-UL48-2208 | + | CAGAGGCAGUCAAACAGG | 18 | 17617 |
| HSV1-UL48-2209 | + | ACAGAGGCAGUCAAACAGG | 19 | 17618 |
| HSV1-UL48-967 | + | AACAGAGGCAGUCAAACAGG | 20 | 6669 |
| HSV1-UL48-2210 | + | CAACAGAGGCAGUCAAACAGG | 21 | 17619 |
| HSV1-UL48-2211 | + | GCAACAGAGGCAGUCAAACAGG | 22 | 17620 |
| HSV1-UL48-2212 | + | CGCAACAGAGGCAGUCAAACAGG | 23 | 17621 |
| HSV1-UL48-2213 | + | UCGCAACAGAGGCAGUCAAACAGG | 24 | 17622 |
| HSV1-UL48-2214 | + | GCCUGGUUGCCAUGCAGG | 18 | 17623 |
| HSV1-UL48-2215 | + | GGCCUGGUUGCCAUGCAGG | 19 | 17624 |
| HSV1-UL48-985 | + | GGGCCUGGUUGCCAUGCAGG | 20 | 6681 |
| HSV1-UL48-2216 | + | CGGGCCUGGUUGCCAUGCAGG | 21 | 17625 |
| HSV1-UL48-2217 | + | GCGGGCCUGGUUGCCAUGCAGG | 22 | 17626 |
| HSV1-UL48-2218 | + | CGCGGGCCUGGUUGCCAUGCAGG | 23 | 17627 |
| HSV1-UL48-2219 | + | GCGCGGGCCUGGUUGCCAUGCAGG | 24 | 17628 |
| HSV1-UL48-2220 | + | GCAUGACCGCCUCGGAGG | 18 | 17629 |
| HSV1-UL48-2221 | + | CGCAUGACCGCCUCGGAGG | 19 | 17630 |
| HSV1-UL48-994 | + | CCGCAUGACCGCCUCGGAGG | 20 | 6689 |
| HSV1-UL48-2222 | + | CCCGCAUGACCGCCUCGGAGG | 21 | 17631 |
| HSV1-UL48-2223 | + | UCCCGCAUGACCGCCUCGGAGG | 22 | 17632 |
| HSV1-UL48-2224 | + | UUCCCGCAUGACCGCCUCGGAGG | 23 | 17633 |
| HSV1-UL48-2225 | + | GUUCCCGCAUGACCGCCUCGGAGG | 24 | 17634 |
| HSV1-UL48-2226 | + | CCCCCAGGCUGACAUCGG | 18 | 17635 |
| HSV1-UL48-2227 | + | UCCCCCAGGCUGACAUCGG | 19 | 17636 |
| HSV1-UL48-1017 | + | GUCCCCCAGGCUGACAUCGG | 20 | 6699 |
| HSV1-UL48-2228 | + | CGUCCCCCAGGCUGACAUCGG | 21 | 17637 |
| HSV1-UL48-2229 | + | UCGUCCCCCAGGCUGACAUCGG | 22 | 17638 |
| HSV1-UL48-2230 | + | CUCGUCCCCCAGGCUGACAUCGG | 23 | 17639 |
| HSV1-UL48-2231 | + | GCUCGUCCCCCAGGCUGACAUCGG | 24 | 17640 |
| HSV1-UL48-2232 | + | CAGGCUGACAUCGGUCGG | 18 | 17641 |
| HSV1-UL48-2233 | + | CCAGGCUGACAUCGGUCGG | 19 | 17642 |
| HSV1-UL48-348 | + | CCCAGGCUGACAUCGGUCGG | 20 | 6186 |
| HSV1-UL48-2234 | + | CCCCAGGCUGACAUCGGUCGG | 21 | 17643 |
| HSV1-UL48-2235 | + | CCCCCAGGCUGACAUCGGUCGG | 22 | 17644 |
| HSV1-UL48-2236 | + | UCCCCCAGGCUGACAUCGGUCGG | 23 | 17645 |
| HSV1-UL48-2237 | + | GUCCCCCAGGCUGACAUCGGUCGG | 24 | 17646 |
| HSV1-UL48-2238 | + | GUUGACGAACAUGAAGGG | 18 | 17647 |
| HSV1-UL48-2239 | + | CGUUGACGAACAUGAAGGG | 19 | 17648 |
| HSV1-UL48-970 | + | CCGUUGACGAACAUGAAGGG | 20 | 6671 |
| HSV1-UL48-2240 | + | UCCGUUGACGAACAUGAAGGG | 21 | 17649 |
| HSV1-UL48-2241 | + | CUCCGUUGACGAACAUGAAGGG | 22 | 17650 |
| HSV1-UL48-2242 | + | GCUCCGUUGACGAACAUGAAGGG | 23 | 17651 |
| HSV1-UL48-2243 | + | CGCUCCGUUGACGAACAUGAAGGG | 24 | 17652 |
| HSV1-UL48-2244 | + | GCAGGUACCGGUACAGGG | 18 | 17653 |
| HSV1-UL48-2245 | + | CGCAGGUACCGGUACAGGG | 19 | 17654 |
| HSV1-UL48-961 | + | GCGCAGGUACCGGUACAGGG | 20 | 6663 |
| HSV1-UL48-2246 | + | CGCGCAGGUACCGGUACAGGG | 21 | 17655 |
| HSV1-UL48-2247 | + | GCGCGCAGGUACCGGUACAGGG | 22 | 17656 |
| HSV1-UL48-2248 | + | GGCGCGCAGGUACCGGUACAGGG | 23 | 17657 |
| HSV1-UL48-2249 | + | UGGCGCGCAGGUACCGGUACAGGG | 24 | 17658 |
| HSV1-UL48-2250 | + | CCUGGUUGCCAUGCAGGG | 18 | 17659 |
| HSV1-UL48-2251 | + | GCCUGGUUGCCAUGCAGGG | 19 | 17660 |
| HSV1-UL48-377 | + | GGCCUGGUUGCCAUGCAGGG | 20 | 6215 |
| HSV1-UL48-2252 | + | GGGCCUGGUUGCCAUGCAGGG | 21 | 17661 |
| HSV1-UL48-2253 | + | CGGGCCUGGUUGCCAUGCAGGG | 22 | 17662 |
| HSV1-UL48-2254 | + | GCGGGCCUGGUUGCCAUGCAGGG | 23 | 17663 |
| HSV1-UL48-2255 | + | CGCGGGCCUGGUUGCCAUGCAGGG | 24 | 17664 |
| HSV1-UL48-2256 | + | GCGCGUGUGUCCCGCGGG | 18 | 17665 |
| HSV1-UL48-2257 | + | UGCGCGUGUGUCCCGCGGG | 19 | 17666 |
| HSV1-UL48-1008 | + | CUGCGCGUGUGUCCCGCGGG | 20 | 6697 |
| HSV1-UL48-2258 | + | UCUGCGCGUGUGUCCCGCGGG | 21 | 17667 |
| HSV1-UL48-2259 | + | GUCUGCGCGUGUGUCCCGCGGG | 22 | 17668 |
| HSV1-UL48-2260 | + | AGUCUGCGCGUGUGUCCCGCGGG | 23 | 17669 |
| HSV1-UL48-2261 | + | CAGUCUGCGCGUGUGUCCCGCGGG | 24 | 17670 |
| HSV1-UL48-2262 | + | UCCAGAGCGCCGUAGGGG | 18 | 17671 |
| HSV1-UL48-2263 | + | AUCCAGAGCGCCGUAGGGG | 19 | 17672 |
| HSV1-UL48-1030 | + | UAUCCAGAGCGCCGUAGGGG | 20 | 6704 |
| HSV1-UL48-2264 | + | AUAUCCAGAGCGCCGUAGGGG | 21 | 17673 |
| HSV1-UL48-2265 | + | CAUAUCCAGAGCGCCGUAGGGG | 22 | 17674 |
| HSV1-UL48-2266 | + | CCAUAUCCAGAGCGCCGUAGGGG | 23 | 17675 |
| HSV1-UL48-2267 | + | GCCAUAUCCAGAGCGCCGUAGGGG | 24 | 17676 |
| HSV1-UL48-2268 | + | GGUUGCCAUGCAGGGUGG | 18 | 17677 |
| HSV1-UL48-2269 | + | UGGUUGCCAUGCAGGGUGG | 19 | 17678 |
| HSV1-UL48-982 | + | CUGGUUGCCAUGCAGGGUGG | 20 | 6680 |
| HSV1-UL48-2270 | + | CCUGGUUGCCAUGCAGGGUGG | 21 | 17679 |
| HSV1-UL48-2271 | + | GCCUGGUUGCCAUGCAGGGUGG | 22 | 17680 |
| HSV1-UL48-2272 | + | GGCCUGGUUGCCAUGCAGGGUGG | 23 | 17681 |
| HSV1-UL48-2273 | + | GGGCCUGGUUGCCAUGCAGGGUGG | 24 | 17682 |
| HSV1-UL48-2274 | + | GCUCCGUUGACGAACAUG | 18 | 17683 |
| HSV1-UL48-2275 | + | CGCUCCGUUGACGAACAUG | 19 | 17684 |
| HSV1-UL48-971 | + | GCGCUCCGUUGACGAACAUG | 20 | 6672 |
| HSV1-UL48-2276 | + | AGCGCUCCGUUGACGAACAUG | 21 | 17685 |
| HSV1-UL48-2277 | + | GAGCGCUCCGUUGACGAACAUG | 22 | 17686 |
| HSV1-UL48-2278 | + | UGAGCGCUCCGUUGACGAACAUG | 23 | 17687 |
| HSV1-UL48-2279 | + | GUGAGCGCUCCGUUGACGAACAUG | 24 | 17688 |
| HSV1-UL48-2280 | + | CGCCUGGCGGUGCAGCUG | 18 | 17689 |
| HSV1-UL48-2281 | + | GCGCCUGGCGGUGCAGCUG | 19 | 17690 |
| HSV1-UL48-963 | + | UGCGCCUGGCGGUGCAGCUG | 20 | 6665 |
| HSV1-UL48-2282 | + | GUGCGCCUGGCGGUGCAGCUG | 21 | 17691 |
| HSV1-UL48-2283 | + | UGUGCGCCUGGCGGUGCAGCUG | 22 | 17692 |
| HSV1-UL48-2284 | + | AUGUGCGCCUGGCGGUGCAGCUG | 23 | 17693 |
| HSV1-UL48-2285 | + | CAUGUGCGCCUGGCGGUGCAGCUG | 24 | 17694 |
| HSV1-UL48-2286 | + | ACGGUGAGCGCUCCGUUG | 18 | 17695 |
| HSV1-UL48-2287 | + | GACGGUGAGCGCUCCGUUG | 19 | 17696 |
| HSV1-UL48-973 | + | GGACGGUGAGCGCUCCGUUG | 20 | 6674 |
| HSV1-UL48-2288 | + | CGGACGGUGAGCGCUCCGUUG | 21 | 17697 |
| HSV1-UL48-2289 | + | CCGGACGGUGAGCGCUCCGUUG | 22 | 17698 |
| HSV1-UL48-2290 | + | CCCGGACGGUGAGCGCUCCGUUG | 23 | 17699 |
| HSV1-UL48-2291 | + | CCCCGGACGGUGAGCGCUCCGUUG | 24 | 17700 |
| HSV1-UL48-2292 | + | GUUCCCGCAUGACCGCCU | 18 | 17701 |
| HSV1-UL48-2293 | + | UGUUCCCGCAUGACCGCCU | 19 | 17702 |
| HSV1-UL48-366 | + | GUGUUCCCGCAUGACCGCCU | 20 | 6204 |
| HSV1-UL48-2294 | + | CGUGUUCCCGCAUGACCGCCU | 21 | 17703 |
| HSV1-UL48-2295 | + | GCGUGUUCCCGCAUGACCGCCU | 22 | 17704 |
| HSV1-UL48-2296 | + | CGCGUGUUCCCGCAUGACCGCCU | 23 | 17705 |
| HSV1-UL48-2297 | + | ACGCGUGUUCCCGCAUGACCGCCU | 24 | 17706 |
| HSV1-UL48-2298 | + | GCCGCCAGCCCCGCCUCU | 18 | 17707 |
| HSV1-UL48-2299 | + | AGCCGCCAGCCCCGCCUCU | 19 | 17708 |
| HSV1-UL48-1004 | + | GAGCCGCCAGCCCCGCCUCU | 20 | 6694 |
| HSV1-UL48-2300 | + | GGAGCCGCCAGCCCCGCCUCU | 21 | 17709 |
| HSV1-UL48-2301 | + | CGGAGCCGCCAGCCCCGCCUCU | 22 | 17710 |
| HSV1-UL48-2302 | + | GCGGAGCCGCCAGCCCCGCCUCU | 23 | 17711 |
| HSV1-UL48-2303 | + | CGCGGAGCCGCCAGCCCCGCCUCU | 24 | 17712 |
| HSV1-UL48-2304 | + | CCAUAUCCAGAGCGCCGU | 18 | 17713 |
| HSV1-UL48-2305 | + | GCCAUAUCCAGAGCGCCGU | 19 | 17714 |
| HSV1-UL48-327 | + | GGCCAUAUCCAGAGCGCCGU | 20 | 6165 |
| HSV1-UL48-2306 | + | CGGCCAUAUCCAGAGCGCCGU | 21 | 17715 |
| HSV1-UL48-2307 | + | UCGGCCAUAUCCAGAGCGCCGU | 22 | 17716 |
| HSV1-UL48-2308 | + | GUCGGCCAUAUCCAGAGCGCCGU | 23 | 17717 |
| HSV1-UL48-2309 | + | AGUCGGCCAUAUCCAGAGCGCCGU | 24 | 17718 |
| HSV1-UL48-2310 | + | CGUAGGGGGCGGAGUCGU | 18 | 17719 |
| HSV1-UL48-2311 | + | CCGUAGGGGGCGGAGUCGU | 19 | 17720 |
| HSV1-UL48-333 | + | GCCGUAGGGGGCGGAGUCGU | 20 | 6171 |
| HSV1-UL48-2312 | + | CGCCGUAGGGGGCGGAGUCGU | 21 | 17721 |
| HSV1-UL48-2313 | + | GCGCCGUAGGGGGCGGAGUCGU | 22 | 17722 |
| HSV1-UL48-2314 | + | AGCGCCGUAGGGGGCGGAGUCGU | 23 | 17723 |
| HSV1-UL48-2315 | + | GAGCGCCGUAGGGGGCGGAGUCGU | 24 | 17724 |
| HSV1-UL48-2316 | + | CUUCGGGGGCGUCGUCGU | 18 | 17725 |
| HSV1-UL48-2317 | + | UCUUCGGGGGCGUCGUCGU | 19 | 17726 |
| HSV1-UL48-1001 | + | CUCUUCGGGGGCGUCGUCGU | 20 | 6693 |
| HSV1-UL48-2318 | + | CCUCUUCGGGGGCGUCGUCGU | 21 | 17727 |
| HSV1-UL48-2319 | + | GCCUCUUCGGGGGCGUCGUCGU | 22 | 17728 |
| HSV1-UL48-2320 | + | CGCCUCUUCGGGGGCGUCGUCGU | 23 | 17729 |
| HSV1-UL48-2321 | + | CCGCCUCUUCGGGGGCGUCGUCGU | 24 | 17730 |
| HSV1-UL48-2322 | + | CCCCAGGCUGACAUCGGU | 18 | 17731 |
| HSV1-UL48-2323 | + | CCCCCAGGCUGACAUCGGU | 19 | 17732 |
| HSV1-UL48-345 | + | UCCCCCAGGCUGACAUCGGU | 20 | 6183 |
| HSV1-UL48-2324 | + | GUCCCCCAGGCUGACAUCGGU | 21 | 17733 |
| HSV1-UL48-2325 | + | CGUCCCCCAGGCUGACAUCGGU | 22 | 17734 |
| HSV1-UL48-2326 | + | UCGUCCCCCAGGCUGACAUCGGU | 23 | 17735 |
| HSV1-UL48-2327 | + | CUCGUCCCCCAGGCUGACAUCGGU | 24 | 17736 |
| HSV1-UL48-2328 | + | CUGGUUGCCAUGCAGGGU | 18 | 17737 |
| HSV1-UL48-2329 | + | CCUGGUUGCCAUGCAGGGU | 19 | 17738 |
| HSV1-UL48-378 | + | GCCUGGUUGCCAUGCAGGGU | 20 | 6216 |
| HSV1-UL48-2330 | + | GGCCUGGUUGCCAUGCAGGGU | 21 | 17739 |
| HSV1-UL48-2331 | + | GGGCCUGGUUGCCAUGCAGGGU | 22 | 17740 |
| HSV1-UL48-2332 | + | CGGGCCUGGUUGCCAUGCAGGGU | 23 | 17741 |
| HSV1-UL48-2333 | + | GCGGGCCUGGUUGCCAUGCAGGGU | 24 | 17742 |
| HSV1-UL48-2334 | + | CCGCCAGCCCCGCCUCUU | 18 | 17743 |
| HSV1-UL48-2335 | + | GCCGCCAGCCCCGCCUCUU | 19 | 17744 |
| HSV1-UL48-357 | + | AGCCGCCAGCCCCGCCUCUU | 20 | 6195 |
| HSV1-UL48-2336 | + | GAGCCGCCAGCCCCGCCUCUU | 21 | 17745 |
| HSV1-UL48-2337 | + | GGAGCCGCCAGCCCCGCCUCUU | 22 | 17746 |
| HSV1-UL48-2338 | + | CGGAGCCGCCAGCCCCGCCUCUU | 23 | 17747 |
| HSV1-UL48-2339 | + | GCGGAGCCGCCAGCCCCGCCUCUU | 24 | 17748 |
| HSV1-UL48-2340 | - | CCGUCCGGGGAGUGCCAA | 18 | 17749 |
| HSV1-UL48-2341 | - | ACCGUCCGGGGAGUGCCAA | 19 | 17750 |
| HSV1-UL48-827 | - | CACCGUCCGGGGAGUGCCAA | 20 | 6576 |
| HSV1-UL48-2342 | - | UCACCGUCCGGGGAGUGCCAA | 21 | 17751 |
| HSV1-UL48-2343 | - | CUCACCGUCCGGGGAGUGCCAA | 22 | 17752 |
| HSV1-UL48-2344 | - | GCUCACCGUCCGGGGAGUGCCAA | 23 | 17753 |
| HSV1-UL48-2345 | - | CGCUCACCGUCCGGGGAGUGCCAA | 24 | 17754 |
| HSV1-UL48-2346 | - | GCCCUUCAUGUUCGUCAA | 18 | 17755 |
| HSV1-UL48-2347 | - | AGCCCUUCAUGUUCGUCAA | 19 | 17756 |
| HSV1-UL48-254 | - | CAGCCCUUCAUGUUCGUCAA | 20 | 6092 |
| HSV1-UL48-2348 | - | CCAGCCCUUCAUGUUCGUCAA | 21 | 17757 |
| HSV1-UL48-2349 | - | UCCAGCCCUUCAUGUUCGUCAA | 22 | 17758 |
| HSV1-UL48-2350 | - | UUCCAGCCCUUCAUGUUCGUCAA | 23 | 17759 |
| HSV1-UL48-2351 | - | GUUCCAGCCCUUCAUGUUCGUCAA | 24 | 17760 |
| HSV1-UL48-2352 | - | ACAAUUACGGGUCUACCA | 18 | 17761 |
| HSV1-UL48-2353 | - | AACAAUUACGGGUCUACCA | 19 | 17762 |
| HSV1-UL48-848 | - | AAACAAUUACGGGUCUACCA | 20 | 6590 |
| HSV1-UL48-2354 | - | AAAACAAUUACGGGUCUACCA | 21 | 17763 |
| HSV1-UL48-2355 | - | AAAAACAAUUACGGGUCUACCA | 22 | 17764 |
| HSV1-UL48-2356 | - | GAAAAACAAUUACGGGUCUACCA | 23 | 17765 |
| HSV1-UL48-2357 | - | CGAAAAACAAUUACGGGUCUACCA | 24 | 17766 |
| HSV1-UL48-2358 | - | AGCCCUUCAUGUUCGUCA | 18 | 17767 |
| HSV1-UL48-2359 | - | CAGCCCUUCAUGUUCGUCA | 19 | 17768 |
| HSV1-UL48-821 | - | CCAGCCCUUCAUGUUCGUCA | 20 | 6574 |
| HSV1-UL48-2360 | - | UCCAGCCCUUCAUGUUCGUCA | 21 | 17769 |
| HSV1-UL48-2361 | - | UUCCAGCCCUUCAUGUUCGUCA | 22 | 17770 |
| HSV1-UL48-2362 | - | GUUCCAGCCCUUCAUGUUCGUCA | 23 | 17771 |
| HSV1-UL48-2363 | - | UGUUCCAGCCCUUCAUGUUCGUCA | 24 | 17772 |
| HSV1-UL48-2364 | - | GGUGGGUAGGGGGCGCGA | 18 | 17773 |
| HSV1-UL48-2365 | - | CGGUGGGUAGGGGGCGCGA | 19 | 17774 |
| HSV1-UL48-2366 | - | ACGGUGGGUAGGGGGCGCGA | 20 | 17775 |
| HSV1-UL48-2367 | - | UACGGUGGGUAGGGGGCGCGA | 21 | 17776 |
| HSV1-UL48-2368 | - | GUACGGUGGGUAGGGGGCGCGA | 22 | 17777 |
| HSV1-UL48-2369 | - | AGUACGGUGGGUAGGGGGCGCGA | 23 | 17778 |
| HSV1-UL48-2370 | - | GAGUACGGUGGGUAGGGGGCGCGA | 24 | 17779 |
| HSV1-UL48-2371 | - | UCUGGACAUGUUGGGGGA | 18 | 17780 |
| HSV1-UL48-2372 | - | AUCUGGACAUGUUGGGGGA | 19 | 17781 |
| HSV1-UL48-308 | - | GAUCUGGACAUGUUGGGGGA | 20 | 6146 |
| HSV1-UL48-2373 | - | CGAUCUGGACAUGUUGGGGGA | 21 | 17782 |
| HSV1-UL48-2374 | - | UCGAUCUGGACAUGUUGGGGGA | 22 | 17783 |
| HSV1-UL48-2375 | - | UUCGAUCUGGACAUGUUGGGGGA | 23 | 17784 |
| HSV1-UL48-2376 | - | UUUCGAUCUGGACAUGUUGGGGGA | 24 | 17785 |
| HSV1-UL48-2377 | - | GAUCGCGGACAGGUACUA | 18 | 17786 |
| HSV1-UL48-2378 | - | CGAUCGCGGACAGGUACUA | 19 | 17787 |
| HSV1-UL48-812 | - | ACGAUCGCGGACAGGUACUA | 20 | 6566 |
| HSV1-UL48-2379 | - | CACGAUCGCGGACAGGUACUA | 21 | 17788 |
| HSV1-UL48-2380 | - | CCACGAUCGCGGACAGGUACUA | 22 | 17789 |
| HSV1-UL48-2381 | - | GCCACGAUCGCGGACAGGUACUA | 23 | 17790 |
| HSV1-UL48-2382 | - | CGCCACGAUCGCGGACAGGUACUA | 24 | 17791 |
| HSV1-UL48-1642 | - | GGCGCGGGAGGAGAGCUA | 18 | 17051 |
| HSV1-UL48-1643 | - | GGGCGCGGGAGGAGAGCUA | 19 | 17052 |
| HSV1-UL48-1644 | - | CGGGCGCGGGAGGAGAGCUA | 20 | 17053 |
| HSV1-UL48-1645 | - | ACGGGCGCGGGAGGAGAGCUA | 21 | 17054 |
| HSV1-UL48-1646 | - | UACGGGCGCGGGAGGAGAGCUA | 22 | 17055 |
| HSV1-UL48-1647 | - | CUACGGGCGCGGGAGGAGAGCUA | 23 | 17056 |
| HSV1-UL48-1648 | - | GCUACGGGCGCGGGAGGAGAGCUA | 24 | 17057 |
| HSV1-UL48-2383 | - | UGGUGCGCAGCGCGGCUA | 18 | 17792 |
| HSV1-UL48-2384 | - | CUGGUGCGCAGCGCGGCUA | 19 | 17793 |
| HSV1-UL48-264 | - | GCUGGUGCGCAGCGCGGCUA | 20 | 6102 |
| HSV1-UL48-2385 | - | CGCUGGUGCGCAGCGCGGCUA | 21 | 17794 |
| HSV1-UL48-2386 | - | CCGCUGGUGCGCAGCGCGGCUA | 22 | 17795 |
| HSV1-UL48-2387 | - | CCCGCUGGUGCGCAGCGCGGCUA | 23 | 17796 |
| HSV1-UL48-2388 | - | UCCCGCUGGUGCGCAGCGCGGCUA | 24 | 17797 |
| HSV1-UL48-2389 | - | UGACGAGUACGGUGGGUA | 18 | 17798 |
| HSV1-UL48-2390 | - | UUGACGAGUACGGUGGGUA | 19 | 17799 |
| HSV1-UL48-1153 | - | AUUGACGAGUACGGUGGGUA | 20 | 16562 |
| HSV1-UL48-2391 | - | AAUUGACGAGUACGGUGGGUA | 21 | 17800 |
| HSV1-UL48-2392 | - | GAAUUGACGAGUACGGUGGGUA | 22 | 17801 |
| HSV1-UL48-2393 | - | GGAAUUGACGAGUACGGUGGGUA | 23 | 17802 |
| HSV1-UL48-2394 | - | UGGAAUUGACGAGUACGGUGGGUA | 24 | 17803 |
| HSV1-UL48-2395 | - | CGCGGACGCGAUCGCGAC | 18 | 17804 |
| HSV1-UL48-2396 | - | GCGCGGACGCGAUCGCGAC | 19 | 17805 |
| HSV1-UL48-807 | - | UGCGCGGACGCGAUCGCGAC | 20 | 6563 |
| HSV1-UL48-2397 | - | AUGCGCGGACGCGAUCGCGAC | 21 | 17806 |
| HSV1-UL48-2398 | - | CAUGCGCGGACGCGAUCGCGAC | 22 | 17807 |
| HSV1-UL48-2399 | - | ACAUGCGCGGACGCGAUCGCGAC | 23 | 17808 |
| HSV1-UL48-2400 | - | CACAUGCGCGGACGCGAUCGCGAC | 24 | 17809 |
| HSV1-UL48-2401 | - | GACUGCCUCUGUUGCGAC | 18 | 17810 |
| HSV1-UL48-2402 | - | UGACUGCCUCUGUUGCGAC | 19 | 17811 |
| HSV1-UL48-817 | - | UUGACUGCCUCUGUUGCGAC | 20 | 6571 |
| HSV1-UL48-2403 | - | UUUGACUGCCUCUGUUGCGAC | 21 | 17812 |
| HSV1-UL48-2404 | - | GUUUGACUGCCUCUGUUGCGAC | 22 | 17813 |
| HSV1-UL48-2405 | - | UGUUUGACUGCCUCUGUUGCGAC | 23 | 17814 |
| HSV1-UL48-2406 | - | CUGUUUGACUGCCUCUGUUGCGAC | 24 | 17815 |
| HSV1-UL48-2407 | - | GCGGACGCGAUCGCGACC | 18 | 17816 |
| HSV1-UL48-2408 | - | CGCGGACGCGAUCGCGACC | 19 | 17817 |
| HSV1-UL48-241 | - | GCGCGGACGCGAUCGCGACC | 20 | 6079 |
| HSV1-UL48-2409 | - | UGCGCGGACGCGAUCGCGACC | 21 | 17818 |
| HSV1-UL48-2410 | - | AUGCGCGGACGCGAUCGCGACC | 22 | 17819 |
| HSV1-UL48-2411 | - | CAUGCGCGGACGCGAUCGCGACC | 23 | 17820 |
| HSV1-UL48-2412 | - | ACAUGCGCGGACGCGAUCGCGACC | 24 | 17821 |
| HSV1-UL48-2413 | - | ACUGCCUCUGUUGCGACC | 18 | 17822 |
| HSV1-UL48-2414 | - | GACUGCCUCUGUUGCGACC | 19 | 17823 |
| HSV1-UL48-249 | - | UGACUGCCUCUGUUGCGACC | 20 | 6087 |
| HSV1-UL48-2415 | - | UUGACUGCCUCUGUUGCGACC | 21 | 17824 |
| HSV1-UL48-2416 | - | UUUGACUGCCUCUGUUGCGACC | 22 | 17825 |
| HSV1-UL48-2417 | - | GUUUGACUGCCUCUGUUGCGACC | 23 | 17826 |
| HSV1-UL48-2418 | - | UGUUUGACUGCCUCUGUUGCGACC | 24 | 17827 |
| HSV1-UL48-2419 | - | UCGCGGACAGGUACUACC | 18 | 17828 |
| HSV1-UL48-2420 | - | AUCGCGGACAGGUACUACC | 19 | 17829 |
| HSV1-UL48-813 | - | GAUCGCGGACAGGUACUACC | 20 | 6567 |
| HSV1-UL48-2421 | - | CGAUCGCGGACAGGUACUACC | 21 | 17830 |
| HSV1-UL48-2422 | - | ACGAUCGCGGACAGGUACUACC | 22 | 17831 |
| HSV1-UL48-2423 | - | CACGAUCGCGGACAGGUACUACC | 23 | 17832 |
| HSV1-UL48-2424 | - | CCACGAUCGCGGACAGGUACUACC | 24 | 17833 |
| HSV1-UL48-2425 | - | UGUAUCUAUUUUUGACCC | 18 | 17834 |
| HSV1-UL48-2426 | - | UUGUAUCUAUUUUUGACCC | 19 | 17835 |
| HSV1-UL48-814 | - | UUUGUAUCUAUUUUUGACCC | 20 | 6568 |
| HSV1-UL48-2427 | - | AUUUGUAUCUAUUUUUGACCC | 21 | 17836 |
| HSV1-UL48-2428 | - | CAUUUGUAUCUAUUUUUGACCC | 22 | 17837 |
| HSV1-UL48-2429 | - | GCAUUUGUAUCUAUUUUUGACCC | 23 | 17838 |
| HSV1-UL48-2430 | - | UGCAUUUGUAUCUAUUUUUGACCC | 24 | 17839 |
| HSV1-UL48-2431 | - | CGCCUGUCCUUUCUCCCC | 18 | 17840 |
| HSV1-UL48-2432 | - | GCGCCUGUCCUUUCUCCCC | 19 | 17841 |
| HSV1-UL48-855 | - | CGCGCCUGUCCUUUCUCCCC | 20 | 6596 |
| HSV1-UL48-2433 | - | CCGCGCCUGUCCUUUCUCCCC | 21 | 17842 |
| HSV1-UL48-2434 | - | UCCGCGCCUGUCCUUUCUCCCC | 22 | 17843 |
| HSV1-UL48-2435 | - | CUCCGCGCCUGUCCUUUCUCCCC | 23 | 17844 |
| HSV1-UL48-2436 | - | GCUCCGCGCCUGUCCUUUCUCCCC | 24 | 17845 |
| HSV1-UL48-2437 | - | UCCCGGACGACGACGCCC | 18 | 17846 |
| HSV1-UL48-2438 | - | CUCCCGGACGACGACGCCC | 19 | 17847 |
| HSV1-UL48-851 | - | UCUCCCGGACGACGACGCCC | 20 | 6593 |
| HSV1-UL48-2439 | - | AUCUCCCGGACGACGACGCCC | 21 | 17848 |
| HSV1-UL48-2440 | - | GAUCUCCCGGACGACGACGCCC | 22 | 17849 |
| HSV1-UL48-2441 | - | CGAUCUCCCGGACGACGACGCCC | 23 | 17850 |
| HSV1-UL48-2442 | - | UCGAUCUCCCGGACGACGACGCCC | 24 | 17851 |
| HSV1-UL48-2443 | - | AGAUGUUUACCGAUGCCC | 18 | 17852 |
| HSV1-UL48-2444 | - | CAGAUGUUUACCGAUGCCC | 19 | 17853 |
| HSV1-UL48-879 | - | GCAGAUGUUUACCGAUGCCC | 20 | 6609 |
| HSV1-UL48-2445 | - | AGCAGAUGUUUACCGAUGCCC | 21 | 17854 |
| HSV1-UL48-2446 | - | GAGCAGAUGUUUACCGAUGCCC | 22 | 17855 |
| HSV1-UL48-2447 | - | UGAGCAGAUGUUUACCGAUGCCC | 23 | 17856 |
| HSV1-UL48-2448 | - | UUGAGCAGAUGUUUACCGAUGCCC | 24 | 17857 |
| HSV1-UL48-2449 | - | UGGGGGACGGGGAUUCCC | 18 | 17858 |
| HSV1-UL48-2450 | - | UUGGGGGACGGGGAUUCCC | 19 | 17859 |
| HSV1-UL48-311 | - | GUUGGGGGACGGGGAUUCCC | 20 | 6149 |
| HSV1-UL48-2451 | - | UGUUGGGGGACGGGGAUUCCC | 21 | 17860 |
| HSV1-UL48-2452 | - | AUGUUGGGGGACGGGGAUUCCC | 22 | 17861 |
| HSV1-UL48-2453 | - | CAUGUUGGGGGACGGGGAUUCCC | 23 | 17862 |
| HSV1-UL48-2454 | - | ACAUGUUGGGGGACGGGGAUUCCC | 24 | 17863 |
| HSV1-UL48-2455 | - | CCCCGACCGAUGUCAGCC | 18 | 17864 |
| HSV1-UL48-2456 | - | CCCCCGACCGAUGUCAGCC | 19 | 17865 |
| HSV1-UL48-295 | - | CCCCCCGACCGAUGUCAGCC | 20 | 6133 |
| HSV1-UL48-2457 | - | CCCCCCCGACCGAUGUCAGCC | 21 | 17866 |
| HSV1-UL48-2458 | - | GCCCCCCCGACCGAUGUCAGCC | 22 | 17867 |
| HSV1-UL48-2459 | - | GGCCCCCCCGACCGAUGUCAGCC | 23 | 17868 |
| HSV1-UL48-2460 | - | CGGCCCCCCCGACCGAUGUCAGCC | 24 | 17869 |
| HSV1-UL48-2461 | - | CGCGGCUACGGAGGAGCC | 18 | 17870 |
| HSV1-UL48-2462 | - | GCGCGGCUACGGAGGAGCC | 19 | 17871 |
| HSV1-UL48-266 | - | AGCGCGGCUACGGAGGAGCC | 20 | 6104 |
| HSV1-UL48-2463 | - | CAGCGCGGCUACGGAGGAGCC | 21 | 17872 |
| HSV1-UL48-2464 | - | GCAGCGCGGCUACGGAGGAGCC | 22 | 17873 |
| HSV1-UL48-2465 | - | CGCAGCGCGGCUACGGAGGAGCC | 23 | 17874 |
| HSV1-UL48-2466 | - | GCGCAGCGCGGCUACGGAGGAGCC | 24 | 17875 |
| HSV1-UL48-2467 | - | ACGGAGCGCUCACCGUCC | 18 | 17876 |
| HSV1-UL48-2468 | - | AACGGAGCGCUCACCGUCC | 19 | 17877 |
| HSV1-UL48-256 | - | CAACGGAGCGCUCACCGUCC | 20 | 6094 |
| HSV1-UL48-2469 | - | UCAACGGAGCGCUCACCGUCC | 21 | 17878 |
| HSV1-UL48-2470 | - | GUCAACGGAGCGCUCACCGUCC | 22 | 17879 |
| HSV1-UL48-2471 | - | CGUCAACGGAGCGCUCACCGUCC | 23 | 17880 |
| HSV1-UL48-2472 | - | UCGUCAACGGAGCGCUCACCGUCC | 24 | 17881 |
| HSV1-UL48-2473 | - | UUGGGGGACGGGGAUUCC | 18 | 17882 |
| HSV1-UL48-2474 | - | GUUGGGGGACGGGGAUUCC | 19 | 17883 |
| HSV1-UL48-872 | - | UGUUGGGGGACGGGGAUUCC | 20 | 6604 |
| HSV1-UL48-2475 | - | AUGUUGGGGGACGGGGAUUCC | 21 | 17884 |
| HSV1-UL48-2476 | - | CAUGUUGGGGGACGGGGAUUCC | 22 | 17885 |
| HSV1-UL48-2477 | - | ACAUGUUGGGGGACGGGGAUUCC | 23 | 17886 |
| HSV1-UL48-2478 | - | GACAUGUUGGGGGACGGGGAUUCC | 24 | 17887 |
| HSV1-UL48-2479 | - | CCCCCGACCGAUGUCAGC | 18 | 17888 |
| HSV1-UL48-2480 | - | CCCCCCGACCGAUGUCAGC | 19 | 17889 |
| HSV1-UL48-857 | - | CCCCCCCGACCGAUGUCAGC | 20 | 6597 |
| HSV1-UL48-2481 | - | GCCCCCCCGACCGAUGUCAGC | 21 | 17890 |
| HSV1-UL48-2482 | - | GGCCCCCCCGACCGAUGUCAGC | 22 | 17891 |
| HSV1-UL48-2483 | - | CGGCCCCCCCGACCGAUGUCAGC | 23 | 17892 |
| HSV1-UL48-2484 | - | ACGGCCCCCCCGACCGAUGUCAGC | 24 | 17893 |
| HSV1-UL48-2485 | - | GCGCGGCUACGGAGGAGC | 18 | 17894 |
| HSV1-UL48-2486 | - | AGCGCGGCUACGGAGGAGC | 19 | 17895 |
| HSV1-UL48-836 | - | CAGCGCGGCUACGGAGGAGC | 20 | 6581 |
| HSV1-UL48-2487 | - | GCAGCGCGGCUACGGAGGAGC | 21 | 17896 |
| HSV1-UL48-2488 | - | CGCAGCGCGGCUACGGAGGAGC | 22 | 17897 |
| HSV1-UL48-2489 | - | GCGCAGCGCGGCUACGGAGGAGC | 23 | 17898 |
| HSV1-UL48-2490 | - | UGCGCAGCGCGGCUACGGAGGAGC | 24 | 17899 |
| HSV1-UL48-1709 | - | ACGCCGAGCUACGGGCGC | 18 | 17118 |
| HSV1-UL48-1710 | - | CACGCCGAGCUACGGGCGC | 19 | 17119 |
| HSV1-UL48-39 | - | CCACGCCGAGCUACGGGCGC | 20 | 5880 |
| HSV1-UL48-2491 | - | GAGCUCCACUUAGACGGC | 18 | 17900 |
| HSV1-UL48-2492 | - | CGAGCUCCACUUAGACGGC | 19 | 17901 |
| HSV1-UL48-863 | - | ACGAGCUCCACUUAGACGGC | 20 | 6600 |
| HSV1-UL48-2493 | - | GACGAGCUCCACUUAGACGGC | 21 | 17902 |
| HSV1-UL48-2494 | - | GGACGAGCUCCACUUAGACGGC | 22 | 17903 |
| HSV1-UL48-2495 | - | GGGACGAGCUCCACUUAGACGGC | 23 | 17904 |
| HSV1-UL48-2496 | - | GGGGACGAGCUCCACUUAGACGGC | 24 | 17905 |
| HSV1-UL48-2497 | - | ACCGCCAGGCGCACAUGC | 18 | 17906 |
| HSV1-UL48-2498 | - | CACCGCCAGGCGCACAUGC | 19 | 17907 |
| HSV1-UL48-806 | - | GCACCGCCAGGCGCACAUGC | 20 | 6562 |
| HSV1-UL48-2499 | - | UGCACCGCCAGGCGCACAUGC | 21 | 17908 |
| HSV1-UL48-2500 | - | CUGCACCGCCAGGCGCACAUGC | 22 | 17909 |
| HSV1-UL48-2501 | - | GCUGCACCGCCAGGCGCACAUGC | 23 | 17910 |
| HSV1-UL48-2502 | - | AGCUGCACCGCCAGGCGCACAUGC | 24 | 17911 |
| HSV1-UL48-2503 | - | CCUCCGAGGCGGUCAUGC | 18 | 17912 |
| HSV1-UL48-2504 | - | CCCUCCGAGGCGGUCAUGC | 19 | 17913 |
| HSV1-UL48-280 | - | GCCCUCCGAGGCGGUCAUGC | 20 | 6118 |
| HSV1-UL48-2505 | - | CGCCCUCCGAGGCGGUCAUGC | 21 | 17914 |
| HSV1-UL48-2506 | - | UCGCCCUCCGAGGCGGUCAUGC | 22 | 17915 |
| HSV1-UL48-2507 | - | CUCGCCCUCCGAGGCGGUCAUGC | 23 | 17916 |
| HSV1-UL48-2508 | - | CCUCGCCCUCCGAGGCGGUCAUGC | 24 | 17917 |
| HSV1-UL48-2509 | - | UCGAGGCCCGCCGGCUGC | 18 | 17918 |
| HSV1-UL48-2510 | - | AUCGAGGCCCGCCGGCUGC | 19 | 17919 |
| HSV1-UL48-261 | - | AAUCGAGGCCCGCCGGCUGC | 20 | 6099 |
| HSV1-UL48-2511 | - | CAAUCGAGGCCCGCCGGCUGC | 21 | 17920 |
| HSV1-UL48-2512 | - | CCAAUCGAGGCCCGCCGGCUGC | 22 | 17921 |
| HSV1-UL48-2513 | - | GCCAAUCGAGGCCCGCCGGCUGC | 23 | 17922 |
| HSV1-UL48-2514 | - | UGCCAAUCGAGGCCCGCCGGCUGC | 24 | 17923 |
| HSV1-UL48-2515 | - | AAUUACGGGUCUACCAUC | 18 | 17924 |
| HSV1-UL48-2516 | - | CAAUUACGGGUCUACCAUC | 19 | 17925 |
| HSV1-UL48-849 | - | ACAAUUACGGGUCUACCAUC | 20 | 6591 |
| HSV1-UL48-2517 | - | AACAAUUACGGGUCUACCAUC | 21 | 17926 |
| HSV1-UL48-2518 | - | AAACAAUUACGGGUCUACCAUC | 22 | 17927 |
| HSV1-UL48-2519 | - | AAAACAAUUACGGGUCUACCAUC | 23 | 17928 |
| HSV1-UL48-2520 | - | AAAAACAAUUACGGGUCUACCAUC | 24 | 17929 |
| HSV1-UL48-2521 | - | AUGCUGCGCGCCACGAUC | 18 | 17930 |
| HSV1-UL48-2522 | - | AAUGCUGCGCGCCACGAUC | 19 | 17931 |
| HSV1-UL48-811 | - | AAAUGCUGCGCGCCACGAUC | 20 | 6565 |
| HSV1-UL48-2523 | - | GAAAUGCUGCGCGCCACGAUC | 21 | 17932 |
| HSV1-UL48-2524 | - | AGAAAUGCUGCGCGCCACGAUC | 22 | 17933 |
| HSV1-UL48-2525 | - | GAGAAAUGCUGCGCGCCACGAUC | 23 | 17934 |
| HSV1-UL48-2526 | - | GGAGAAAUGCUGCGCGCCACGAUC | 24 | 17935 |
| HSV1-UL48-2527 | - | GAGGGCCUGCUCGAUCUC | 18 | 17936 |
| HSV1-UL48-2528 | - | CGAGGGCCUGCUCGAUCUC | 19 | 17937 |
| HSV1-UL48-850 | - | UCGAGGGCCUGCUCGAUCUC | 20 | 6592 |
| HSV1-UL48-2529 | - | AUCGAGGGCCUGCUCGAUCUC | 21 | 17938 |
| HSV1-UL48-2530 | - | CAUCGAGGGCCUGCUCGAUCUC | 22 | 17939 |
| HSV1-UL48-2531 | - | CCAUCGAGGGCCUGCUCGAUCUC | 23 | 17940 |
| HSV1-UL48-2532 | - | ACCAUCGAGGGCCUGCUCGAUCUC | 24 | 17941 |
| HSV1-UL48-2533 | - | AACGGAGCGCUCACCGUC | 18 | 17942 |
| HSV1-UL48-2534 | - | CAACGGAGCGCUCACCGUC | 19 | 17943 |
| HSV1-UL48-255 | - | UCAACGGAGCGCUCACCGUC | 20 | 6093 |
| HSV1-UL48-2535 | - | GUCAACGGAGCGCUCACCGUC | 21 | 17944 |
| HSV1-UL48-2536 | - | CGUCAACGGAGCGCUCACCGUC | 22 | 17945 |
| HSV1-UL48-2537 | - | UCGUCAACGGAGCGCUCACCGUC | 23 | 17946 |
| HSV1-UL48-2538 | - | UUCGUCAACGGAGCGCUCACCGUC | 24 | 17947 |
| HSV1-UL48-2539 | - | GGGAGCUAAACCACAUUC | 18 | 17948 |
| HSV1-UL48-2540 | - | CGGGAGCUAAACCACAUUC | 19 | 17949 |
| HSV1-UL48-831 | - | GCGGGAGCUAAACCACAUUC | 20 | 6578 |
| HSV1-UL48-2541 | - | UGCGGGAGCUAAACCACAUUC | 21 | 17950 |
| HSV1-UL48-2542 | - | CUGCGGGAGCUAAACCACAUUC | 22 | 17951 |
| HSV1-UL48-2543 | - | GCUGCGGGAGCUAAACCACAUUC | 23 | 17952 |
| HSV1-UL48-2544 | - | GGCUGCGGGAGCUAAACCACAUUC | 24 | 17953 |
| HSV1-UL48-2545 | - | GUGUUGAUUCGGGCGAAG | 18 | 17954 |
| HSV1-UL48-2546 | - | GGUGUUGAUUCGGGCGAAG | 19 | 17955 |
| HSV1-UL48-841 | - | UGGUGUUGAUUCGGGCGAAG | 20 | 6585 |
| HSV1-UL48-2547 | - | AUGGUGUUGAUUCGGGCGAAG | 21 | 17956 |
| HSV1-UL48-2548 | - | UAUGGUGUUGAUUCGGGCGAAG | 22 | 17957 |
| HSV1-UL48-2549 | - | UUAUGGUGUUGAUUCGGGCGAAG | 23 | 17958 |
| HSV1-UL48-2550 | - | UUUAUGGUGUUGAUUCGGGCGAAG | 24 | 17959 |
| HSV1-UL48-2551 | - | GACGACGCCCCCGAAGAG | 18 | 17960 |
| HSV1-UL48-2552 | - | CGACGACGCCCCCGAAGAG | 19 | 17961 |
| HSV1-UL48-853 | - | ACGACGACGCCCCCGAAGAG | 20 | 6595 |
| HSV1-UL48-2553 | - | GACGACGACGCCCCCGAAGAG | 21 | 17962 |
| HSV1-UL48-2554 | - | GGACGACGACGCCCCCGAAGAG | 22 | 17963 |
| HSV1-UL48-2555 | - | CGGACGACGACGCCCCCGAAGAG | 23 | 17964 |
| HSV1-UL48-2556 | - | CCGGACGACGACGCCCCCGAAGAG | 24 | 17965 |
| HSV1-UL48-1733 | - | GAGCUACGGGCGCGGGAG | 18 | 17142 |
| HSV1-UL48-1734 | - | CGAGCUACGGGCGCGGGAG | 19 | 17143 |
| HSV1-UL48-642 | - | CCGAGCUACGGGCGCGGGAG | 20 | 6466 |
| HSV1-UL48-1735 | - | GCCGAGCUACGGGCGCGGGAG | 21 | 17144 |
| HSV1-UL48-1736 | - | CGCCGAGCUACGGGCGCGGGAG | 22 | 17145 |
| HSV1-UL48-1737 | - | ACGCCGAGCUACGGGCGCGGGAG | 23 | 17146 |
| HSV1-UL48-1738 | - | CACGCCGAGCUACGGGCGCGGGAG | 24 | 17147 |
| HSV1-UL48-2557 | - | ACGAGCUCCACUUAGACG | 18 | 17966 |
| HSV1-UL48-2558 | - | GACGAGCUCCACUUAGACG | 19 | 17967 |
| HSV1-UL48-862 | - | GGACGAGCUCCACUUAGACG | 20 | 6599 |
| HSV1-UL48-2559 | - | GGGACGAGCUCCACUUAGACG | 21 | 17968 |
| HSV1-UL48-2560 | - | GGGGACGAGCUCCACUUAGACG | 22 | 17969 |
| HSV1-UL48-2561 | - | GGGGGACGAGCUCCACUUAGACG | 23 | 17970 |
| HSV1-UL48-2562 | - | UGGGGGACGAGCUCCACUUAGACG | 24 | 17971 |
| HSV1-UL48-2563 | - | GUGCGCAGCGCGGCUACG | 18 | 17972 |
| HSV1-UL48-2564 | - | GGUGCGCAGCGCGGCUACG | 19 | 17973 |
| HSV1-UL48-834 | - | UGGUGCGCAGCGCGGCUACG | 20 | 6580 |
| HSV1-UL48-2565 | - | CUGGUGCGCAGCGCGGCUACG | 21 | 17974 |
| HSV1-UL48-2566 | - | GCUGGUGCGCAGCGCGGCUACG | 22 | 17975 |
| HSV1-UL48-2567 | - | CGCUGGUGCGCAGCGCGGCUACG | 23 | 17976 |
| HSV1-UL48-2568 | - | CCGCUGGUGCGCAGCGCGGCUACG | 24 | 17977 |
| HSV1-UL48-2569 | - | UCCUAUGGGCCGCGUACG | 18 | 17978 |
| HSV1-UL48-2570 | - | AUCCUAUGGGCCGCGUACG | 19 | 17979 |
| HSV1-UL48-816 | - | GAUCCUAUGGGCCGCGUACG | 20 | 6570 |
| HSV1-UL48-2571 | - | AGAUCCUAUGGGCCGCGUACG | 21 | 17980 |
| HSV1-UL48-2572 | - | GAGAUCCUAUGGGCCGCGUACG | 22 | 17981 |
| HSV1-UL48-2573 | - | CGAGAUCCUAUGGGCCGCGUACG | 23 | 17982 |
| HSV1-UL48-2574 | - | GCGAGAUCCUAUGGGCCGCGUACG | 24 | 17983 |
| HSV1-UL48-2575 | - | CGGACGACGACGCCCCCG | 18 | 17984 |
| HSV1-UL48-2576 | - | CCGGACGACGACGCCCCCG | 19 | 17985 |
| HSV1-UL48-852 | - | CCCGGACGACGACGCCCCCG | 20 | 6594 |
| HSV1-UL48-2577 | - | UCCCGGACGACGACGCCCCCG | 21 | 17986 |
| HSV1-UL48-2578 | - | CUCCCGGACGACGACGCCCCCG | 22 | 17987 |
| HSV1-UL48-2579 | - | UCUCCCGGACGACGACGCCCCCG | 23 | 17988 |
| HSV1-UL48-2580 | - | AUCUCCCGGACGACGACGCCCCCG | 24 | 17989 |
| HSV1-UL48-2581 | - | GCCUGUCCUUUCUCCCCG | 18 | 17990 |
| HSV1-UL48-2582 | - | CGCCUGUCCUUUCUCCCCG | 19 | 17991 |
| HSV1-UL48-292 | - | GCGCCUGUCCUUUCUCCCCG | 20 | 6130 |
| HSV1-UL48-2583 | - | CGCGCCUGUCCUUUCUCCCCG | 21 | 17992 |
| HSV1-UL48-2584 | - | CCGCGCCUGUCCUUUCUCCCCG | 22 | 17993 |
| HSV1-UL48-2585 | - | UCCGCGCCUGUCCUUUCUCCCCG | 23 | 17994 |
| HSV1-UL48-2586 | - | CUCCGCGCCUGUCCUUUCUCCCCG | 24 | 17995 |
| HSV1-UL48-2587 | - | ACGACGCCCCCGAAGAGG | 18 | 17996 |
| HSV1-UL48-2588 | - | GACGACGCCCCCGAAGAGG | 19 | 17997 |
| HSV1-UL48-287 | - | CGACGACGCCCCCGAAGAGG | 20 | 6125 |
| HSV1-UL48-2589 | - | ACGACGACGCCCCCGAAGAGG | 21 | 17998 |
| HSV1-UL48-2590 | - | GACGACGACGCCCCCGAAGAGG | 22 | 17999 |
| HSV1-UL48-2591 | - | GGACGACGACGCCCCCGAAGAGG | 23 | 18000 |
| HSV1-UL48-2592 | - | CGGACGACGACGCCCCCGAAGAGG | 24 | 18001 |
| HSV1-UL48-2593 | - | UGCGCAGCGCGGCUACGG | 18 | 18002 |
| HSV1-UL48-2594 | - | GUGCGCAGCGCGGCUACGG | 19 | 18003 |
| HSV1-UL48-265 | - | GGUGCGCAGCGCGGCUACGG | 20 | 6103 |
| HSV1-UL48-2595 | - | UGGUGCGCAGCGCGGCUACGG | 21 | 18004 |
| HSV1-UL48-2596 | - | CUGGUGCGCAGCGCGGCUACGG | 22 | 18005 |
| HSV1-UL48-2597 | - | GCUGGUGCGCAGCGCGGCUACGG | 23 | 18006 |
| HSV1-UL48-2598 | - | CGCUGGUGCGCAGCGCGGCUACGG | 24 | 18007 |
| HSV1-UL48-1764 | - | GCCGAGCUACGGGCGCGG | 18 | 17173 |
| HSV1-UL48-1765 | - | CGCCGAGCUACGGGCGCGG | 19 | 17174 |
| HSV1-UL48-640 | - | ACGCCGAGCUACGGGCGCGG | 20 | 6465 |
| HSV1-UL48-2599 | - | UUUAUGGUGUUGAUUCGG | 18 | 18008 |
| HSV1-UL48-2600 | - | CUUUAUGGUGUUGAUUCGG | 19 | 18009 |
| HSV1-UL48-840 | - | ACUUUAUGGUGUUGAUUCGG | 20 | 6584 |
| HSV1-UL48-2601 | - | UACUUUAUGGUGUUGAUUCGG | 21 | 18010 |
| HSV1-UL48-2602 | - | GUACUUUAUGGUGUUGAUUCGG | 22 | 18011 |
| HSV1-UL48-2603 | - | GGUACUUUAUGGUGUUGAUUCGG | 23 | 18012 |
| HSV1-UL48-2604 | - | GGGUACUUUAUGGUGUUGAUUCGG | 24 | 18013 |
| HSV1-UL48-1770 | - | CCGAGCUACGGGCGCGGG | 18 | 17179 |
| HSV1-UL48-1771 | - | GCCGAGCUACGGGCGCGGG | 19 | 17180 |
| HSV1-UL48-40 | - | CGCCGAGCUACGGGCGCGGG | 20 | 5973 |
| HSV1-UL48-2605 | - | GACGGGGAUUCCCCGGGG | 18 | 18014 |
| HSV1-UL48-2606 | - | GGACGGGGAUUCCCCGGGG | 19 | 18015 |
| HSV1-UL48-874 | - | GGGACGGGGAUUCCCCGGGG | 20 | 6605 |
| HSV1-UL48-2607 | - | GGGGACGGGGAUUCCCCGGGG | 21 | 18016 |
| HSV1-UL48-2608 | - | GGGGGACGGGGAUUCCCCGGGG | 22 | 18017 |
| HSV1-UL48-2609 | - | UGGGGGACGGGGAUUCCCCGGGG | 23 | 18018 |
| HSV1-UL48-2610 | - | UUGGGGGACGGGGAUUCCCCGGGG | 24 | 18019 |
| HSV1-UL48-2611 | - | CCGAUGUCAGCCUGGGGG | 18 | 18020 |
| HSV1-UL48-2612 | - | ACCGAUGUCAGCCUGGGGG | 19 | 18021 |
| HSV1-UL48-861 | - | GACCGAUGUCAGCCUGGGGG | 20 | 6598 |
| HSV1-UL48-2613 | - | CGACCGAUGUCAGCCUGGGGG | 21 | 18022 |
| HSV1-UL48-2614 | - | CCGACCGAUGUCAGCCUGGGGG | 22 | 18023 |
| HSV1-UL48-2615 | - | CCCGACCGAUGUCAGCCUGGGGG | 23 | 18024 |
| HSV1-UL48-2616 | - | CCCCGACCGAUGUCAGCCUGGGGG | 24 | 18025 |
| HSV1-UL48-2617 | - | AUCUGGACAUGUUGGGGG | 18 | 18026 |
| HSV1-UL48-2618 | - | GAUCUGGACAUGUUGGGGG | 19 | 18027 |
| HSV1-UL48-869 | - | CGAUCUGGACAUGUUGGGGG | 20 | 6603 |
| HSV1-UL48-2619 | - | UCGAUCUGGACAUGUUGGGGG | 21 | 18028 |
| HSV1-UL48-2620 | - | UUCGAUCUGGACAUGUUGGGGG | 22 | 18029 |
| HSV1-UL48-2621 | - | UUUCGAUCUGGACAUGUUGGGGG | 23 | 18030 |
| HSV1-UL48-2622 | - | AUUUCGAUCUGGACAUGUUGGGGG | 24 | 18031 |
| HSV1-UL48-2623 | - | AUUGACGAGUACGGUGGG | 18 | 18032 |
| HSV1-UL48-2624 | - | AAUUGACGAGUACGGUGGG | 19 | 18033 |
| HSV1-UL48-2625 | - | GAAUUGACGAGUACGGUGGG | 20 | 18034 |
| HSV1-UL48-2626 | - | GGAAUUGACGAGUACGGUGGG | 21 | 18035 |
| HSV1-UL48-2627 | - | UGGAAUUGACGAGUACGGUGGG | 22 | 18036 |
| HSV1-UL48-2628 | - | UUGGAAUUGACGAGUACGGUGGG | 23 | 18037 |
| HSV1-UL48-2629 | - | CUUGGAAUUGACGAGUACGGUGGG | 24 | 18038 |
| HSV1-UL48-2630 | - | GACGCGAUCGCGACCUGG | 18 | 18039 |
| HSV1-UL48-2631 | - | GGACGCGAUCGCGACCUGG | 19 | 18040 |
| HSV1-UL48-810 | - | CGGACGCGAUCGCGACCUGG | 20 | 6564 |
| HSV1-UL48-2632 | - | GCGGACGCGAUCGCGACCUGG | 21 | 18041 |
| HSV1-UL48-2633 | - | CGCGGACGCGAUCGCGACCUGG | 22 | 18042 |
| HSV1-UL48-2634 | - | GCGCGGACGCGAUCGCGACCUGG | 23 | 18043 |
| HSV1-UL48-2635 | - | UGCGCGGACGCGAUCGCGACCUGG | 24 | 18044 |
| HSV1-UL48-2636 | - | GAUUUCGAUCUGGACAUG | 18 | 18045 |
| HSV1-UL48-2637 | - | CGAUUUCGAUCUGGACAUG | 19 | 18046 |
| HSV1-UL48-865 | - | ACGAUUUCGAUCUGGACAUG | 20 | 6602 |
| HSV1-UL48-2638 | - | GACGAUUUCGAUCUGGACAUG | 21 | 18047 |
| HSV1-UL48-2639 | - | AGACGAUUUCGAUCUGGACAUG | 22 | 18048 |
| HSV1-UL48-2640 | - | UAGACGAUUUCGAUCUGGACAUG | 23 | 18049 |
| HSV1-UL48-2641 | - | CUAGACGAUUUCGAUCUGGACAUG | 24 | 18050 |
| HSV1-UL48-2642 | - | CCCUCCGAGGCGGUCAUG | 18 | 18051 |
| HSV1-UL48-2643 | - | GCCCUCCGAGGCGGUCAUG | 19 | 18052 |
| HSV1-UL48-279 | - | CGCCCUCCGAGGCGGUCAUG | 20 | 6117 |
| HSV1-UL48-2644 | - | UCGCCCUCCGAGGCGGUCAUG | 21 | 18053 |
| HSV1-UL48-2645 | - | CUCGCCCUCCGAGGCGGUCAUG | 22 | 18054 |
| HSV1-UL48-2646 | - | CCUCGCCCUCCGAGGCGGUCAUG | 23 | 18055 |
| HSV1-UL48-2647 | - | ACCUCGCCCUCCGAGGCGGUCAUG | 24 | 18056 |
| HSV1-UL48-2648 | - | UGCCUCUGUUGCGACCUG | 18 | 18057 |
| HSV1-UL48-2649 | - | CUGCCUCUGUUGCGACCUG | 19 | 18058 |
| HSV1-UL48-819 | - | ACUGCCUCUGUUGCGACCUG | 20 | 6572 |
| HSV1-UL48-2650 | - | GACUGCCUCUGUUGCGACCUG | 21 | 18059 |
| HSV1-UL48-2651 | - | UGACUGCCUCUGUUGCGACCUG | 22 | 18060 |
| HSV1-UL48-2652 | - | UUGACUGCCUCUGUUGCGACCUG | 23 | 18061 |
| HSV1-UL48-2653 | - | UUUGACUGCCUCUGUUGCGACCUG | 24 | 18062 |
| HSV1-UL48-2654 | - | CCGACCGAUGUCAGCCUG | 18 | 18063 |
| HSV1-UL48-2655 | - | CCCGACCGAUGUCAGCCUG | 19 | 18064 |
| HSV1-UL48-297 | - | CCCCGACCGAUGUCAGCCUG | 20 | 6135 |
| HSV1-UL48-2656 | - | CCCCCGACCGAUGUCAGCCUG | 21 | 18065 |
| HSV1-UL48-2657 | - | CCCCCCGACCGAUGUCAGCCUG | 22 | 18066 |
| HSV1-UL48-2658 | - | CCCCCCCGACCGAUGUCAGCCUG | 23 | 18067 |
| HSV1-UL48-2659 | - | GCCCCCCCGACCGAUGUCAGCCUG | 24 | 18068 |
| HSV1-UL48-2660 | - | AUCGAGGCCCGCCGGCUG | 18 | 18069 |
| HSV1-UL48-2661 | - | AAUCGAGGCCCGCCGGCUG | 19 | 18070 |
| HSV1-UL48-260 | - | CAAUCGAGGCCCGCCGGCUG | 20 | 6098 |
| HSV1-UL48-2662 | - | CCAAUCGAGGCCCGCCGGCUG | 21 | 18071 |
| HSV1-UL48-2663 | - | GCCAAUCGAGGCCCGCCGGCUG | 22 | 18072 |
| HSV1-UL48-2664 | - | UGCCAAUCGAGGCCCGCCGGCUG | 23 | 18073 |
| HSV1-UL48-2665 | - | GUGCCAAUCGAGGCCCGCCGGCUG | 24 | 18074 |
| HSV1-UL48-2666 | - | UUCGAUCUGGACAUGUUG | 18 | 18075 |
| HSV1-UL48-2667 | - | UUUCGAUCUGGACAUGUUG | 19 | 18076 |
| HSV1-UL48-306 | - | AUUUCGAUCUGGACAUGUUG | 20 | 6144 |
| HSV1-UL48-2668 | - | GAUUUCGAUCUGGACAUGUUG | 21 | 18077 |
| HSV1-UL48-2669 | - | CGAUUUCGAUCUGGACAUGUUG | 22 | 18078 |
| HSV1-UL48-2670 | - | ACGAUUUCGAUCUGGACAUGUUG | 23 | 18079 |
| HSV1-UL48-2671 | - | GACGAUUUCGAUCUGGACAUGUUG | 24 | 18080 |
| HSV1-UL48-2672 | - | GCCCUCCGAGGCGGUCAU | 18 | 18081 |
| HSV1-UL48-2673 | - | CGCCCUCCGAGGCGGUCAU | 19 | 18082 |
| HSV1-UL48-843 | - | UCGCCCUCCGAGGCGGUCAU | 20 | 6587 |
| HSV1-UL48-2674 | - | CUCGCCCUCCGAGGCGGUCAU | 21 | 18083 |
| HSV1-UL48-2675 | - | CCUCGCCCUCCGAGGCGGUCAU | 22 | 18084 |
| HSV1-UL48-2676 | - | ACCUCGCCCUCCGAGGCGGUCAU | 23 | 18085 |
| HSV1-UL48-2677 | - | GACCUCGCCCUCCGAGGCGGUCAU | 24 | 18086 |
| HSV1-UL48-2678 | - | GCGCUAGACGAUUUCGAU | 18 | 18087 |
| HSV1-UL48-2679 | - | CGCGCUAGACGAUUUCGAU | 19 | 18088 |
| HSV1-UL48-864 | - | ACGCGCUAGACGAUUUCGAU | 20 | 6601 |
| HSV1-UL48-2680 | - | GACGCGCUAGACGAUUUCGAU | 21 | 18089 |
| HSV1-UL48-2681 | - | CGACGCGCUAGACGAUUUCGAU | 22 | 18090 |
| HSV1-UL48-2682 | - | CCGACGCGCUAGACGAUUUCGAU | 23 | 18091 |
| HSV1-UL48-2683 | - | GCCGACGCGCUAGACGAUUUCGAU | 24 | 18092 |
| HSV1-UL48-2684 | - | GUACUUUAUGGUGUUGAU | 18 | 18093 |
| HSV1-UL48-2685 | - | GGUACUUUAUGGUGUUGAU | 19 | 18094 |
| HSV1-UL48-839 | - | GGGUACUUUAUGGUGUUGAU | 20 | 6583 |
| HSV1-UL48-2686 | - | UGGGUACUUUAUGGUGUUGAU | 21 | 18095 |
| HSV1-UL48-2687 | - | CUGGGUACUUUAUGGUGUUGAU | 22 | 18096 |
| HSV1-UL48-2688 | - | UCUGGGUACUUUAUGGUGUUGAU | 23 | 18097 |
| HSV1-UL48-2689 | - | CUCUGGGUACUUUAUGGUGUUGAU | 24 | 18098 |
| HSV1-UL48-2690 | - | CGGACGCGAUCGCGACCU | 18 | 18099 |
| HSV1-UL48-2691 | - | GCGGACGCGAUCGCGACCU | 19 | 18100 |
| HSV1-UL48-242 | - | CGCGGACGCGAUCGCGACCU | 20 | 6080 |
| HSV1-UL48-2692 | - | GCGCGGACGCGAUCGCGACCU | 21 | 18101 |
| HSV1-UL48-2693 | - | UGCGCGGACGCGAUCGCGACCU | 22 | 18102 |
| HSV1-UL48-2694 | - | AUGCGCGGACGCGAUCGCGACCU | 23 | 18103 |
| HSV1-UL48-2695 | - | CAUGCGCGGACGCGAUCGCGACCU | 24 | 18104 |
| HSV1-UL48-2696 | - | GCUUCACGACCUCGCCCU | 18 | 18105 |
| HSV1-UL48-2697 | - | AGCUUCACGACCUCGCCCU | 19 | 18106 |
| HSV1-UL48-842 | - | CAGCUUCACGACCUCGCCCU | 20 | 6586 |
| HSV1-UL48-2698 | - | CCAGCUUCACGACCUCGCCCU | 21 | 18107 |
| HSV1-UL48-2699 | - | UCCAGCUUCACGACCUCGCCCU | 22 | 18108 |
| HSV1-UL48-2700 | - | UUCCAGCUUCACGACCUCGCCCU | 23 | 18109 |
| HSV1-UL48-2701 | - | AUUCCAGCUUCACGACCUCGCCCU | 24 | 18110 |
| HSV1-UL48-2702 | - | CCCGACCGAUGUCAGCCU | 18 | 18111 |
| HSV1-UL48-2703 | - | CCCCGACCGAUGUCAGCCU | 19 | 18112 |
| HSV1-UL48-296 | - | CCCCCGACCGAUGUCAGCCU | 20 | 6134 |
| HSV1-UL48-2704 | - | CCCCCCGACCGAUGUCAGCCU | 21 | 18113 |
| HSV1-UL48-2705 | - | CCCCCCCGACCGAUGUCAGCCU | 22 | 18114 |
| HSV1-UL48-2706 | - | GCCCCCCCGACCGAUGUCAGCCU | 23 | 18115 |
| HSV1-UL48-2707 | - | GGCCCCCCCGACCGAUGUCAGCCU | 24 | 18116 |
| HSV1-UL48-2708 | - | UUUGACCCGCGAGAUCCU | 18 | 18117 |
| HSV1-UL48-2709 | - | UUUUGACCCGCGAGAUCCU | 19 | 18118 |
| HSV1-UL48-815 | - | UUUUUGACCCGCGAGAUCCU | 20 | 6569 |
| HSV1-UL48-2710 | - | AUUUUUGACCCGCGAGAUCCU | 21 | 18119 |
| HSV1-UL48-2711 | - | UAUUUUUGACCCGCGAGAUCCU | 22 | 18120 |
| HSV1-UL48-2712 | - | CUAUUUUUGACCCGCGAGAUCCU | 23 | 18121 |
| HSV1-UL48-2713 | - | UCUAUUUUUGACCCGCGAGAUCCU | 24 | 18122 |
| HSV1-UL48-2714 | - | AAUCGAGGCCCGCCGGCU | 18 | 18123 |
| HSV1-UL48-2715 | - | CAAUCGAGGCCCGCCGGCU | 19 | 18124 |
| HSV1-UL48-828 | - | CCAAUCGAGGCCCGCCGGCU | 20 | 6577 |
| HSV1-UL48-2716 | - | GCCAAUCGAGGCCCGCCGGCU | 21 | 18125 |
| HSV1-UL48-2717 | - | UGCCAAUCGAGGCCCGCCGGCU | 22 | 18126 |
| HSV1-UL48-2718 | - | GUGCCAAUCGAGGCCCGCCGGCU | 23 | 18127 |
| HSV1-UL48-2719 | - | AGUGCCAAUCGAGGCCCGCCGGCU | 24 | 18128 |
| HSV1-UL48-2720 | - | CUGGUGCGCAGCGCGGCU | 18 | 18129 |
| HSV1-UL48-2721 | - | GCUGGUGCGCAGCGCGGCU | 19 | 18130 |
| HSV1-UL48-832 | - | CGCUGGUGCGCAGCGCGGCU | 20 | 6579 |
| HSV1-UL48-2722 | - | CCGCUGGUGCGCAGCGCGGCU | 21 | 18131 |
| HSV1-UL48-2723 | - | CCCGCUGGUGCGCAGCGCGGCU | 22 | 18132 |
| HSV1-UL48-2724 | - | UCCCGCUGGUGCGCAGCGCGGCU | 23 | 18133 |
| HSV1-UL48-2725 | - | CUCCCGCUGGUGCGCAGCGCGGCU | 24 | 18134 |
| HSV1-UL48-2726 | - | AUAUGGCCGACUUCGAGU | 18 | 18135 |
| HSV1-UL48-2727 | - | GAUAUGGCCGACUUCGAGU | 19 | 18136 |
| HSV1-UL48-878 | - | GGAUAUGGCCGACUUCGAGU | 20 | 6608 |
| HSV1-UL48-2728 | - | UGGAUAUGGCCGACUUCGAGU | 21 | 18137 |
| HSV1-UL48-2729 | - | CUGGAUAUGGCCGACUUCGAGU | 22 | 18138 |
| HSV1-UL48-2730 | - | UCUGGAUAUGGCCGACUUCGAGU | 23 | 18139 |
| HSV1-UL48-2731 | - | CUCUGGAUAUGGCCGACUUCGAGU | 24 | 18140 |
| HSV1-UL48-2732 | - | CAACGGAGCGCUCACCGU | 18 | 18141 |
| HSV1-UL48-2733 | - | UCAACGGAGCGCUCACCGU | 19 | 18142 |
| HSV1-UL48-823 | - | GUCAACGGAGCGCUCACCGU | 20 | 6575 |
| HSV1-UL48-2734 | - | CGUCAACGGAGCGCUCACCGU | 21 | 18143 |
| HSV1-UL48-2735 | - | UCGUCAACGGAGCGCUCACCGU | 22 | 18144 |
| HSV1-UL48-2736 | - | UUCGUCAACGGAGCGCUCACCGU | 23 | 18145 |
| HSV1-UL48-2737 | - | GUUCGUCAACGGAGCGCUCACCGU | 24 | 18146 |
| HSV1-UL48-2738 | - | GCGUACAGCCGCGCGCGU | 18 | 18147 |
| HSV1-UL48-2739 | - | CGCGUACAGCCGCGCGCGU | 19 | 18148 |
| HSV1-UL48-846 | - | ACGCGUACAGCCGCGCGCGU | 20 | 6588 |
| HSV1-UL48-2740 | - | CACGCGUACAGCCGCGCGCGU | 21 | 18149 |
| HSV1-UL48-2741 | - | ACACGCGUACAGCCGCGCGCGU | 22 | 18150 |
| HSV1-UL48-2742 | - | AACACGCGUACAGCCGCGCGCGU | 23 | 18151 |
| HSV1-UL48-2743 | - | GAACACGCGUACAGCCGCGCGCGU | 24 | 18152 |
| HSV1-UL48-2744 | - | UUGACGAGUACGGUGGGU | 18 | 18153 |
| HSV1-UL48-2745 | - | AUUGACGAGUACGGUGGGU | 19 | 18154 |
| HSV1-UL48-1157 | - | AAUUGACGAGUACGGUGGGU | 20 | 16566 |
| HSV1-UL48-2746 | - | GAAUUGACGAGUACGGUGGGU | 21 | 18155 |
| HSV1-UL48-2747 | - | GGAAUUGACGAGUACGGUGGGU | 22 | 18156 |
| HSV1-UL48-2748 | - | UGGAAUUGACGAGUACGGUGGGU | 23 | 18157 |
| HSV1-UL48-2749 | - | UUGGAAUUGACGAGUACGGUGGGU | 24 | 18158 |
| HSV1-UL48-2750 | - | AUUUCGAUCUGGACAUGU | 18 | 18159 |
| HSV1-UL48-2751 | - | GAUUUCGAUCUGGACAUGU | 19 | 18160 |
| HSV1-UL48-304 | - | CGAUUUCGAUCUGGACAUGU | 20 | 6142 |
| HSV1-UL48-2752 | - | ACGAUUUCGAUCUGGACAUGU | 21 | 18161 |
| HSV1-UL48-2753 | - | GACGAUUUCGAUCUGGACAUGU | 22 | 18162 |
| HSV1-UL48-2754 | - | AGACGAUUUCGAUCUGGACAUGU | 23 | 18163 |
| HSV1-UL48-2755 | - | UAGACGAUUUCGAUCUGGACAUGU | 24 | 18164 |
| HSV1-UL48-2756 | - | UUUCGAUCUGGACAUGUU | 18 | 18165 |
| HSV1-UL48-2757 | - | AUUUCGAUCUGGACAUGUU | 19 | 18166 |
| HSV1-UL48-305 | - | GAUUUCGAUCUGGACAUGUU | 20 | 6143 |
| HSV1-UL48-2758 | - | CGAUUUCGAUCUGGACAUGUU | 21 | 18167 |
| HSV1-UL48-2759 | - | ACGAUUUCGAUCUGGACAUGUU | 22 | 18168 |
| HSV1-UL48-2760 | - | GACGAUUUCGAUCUGGACAUGUU | 23 | 18169 |
| HSV1-UL48-2761 | - | AGACGAUUUCGAUCUGGACAUGUU | 24 | 18170 |

[0797] Table 13A provides exemplary targeting domains for knocking out the UL48 gene selected according to the first tier parameters. The targeting domains bind within the first 500 bp of the coding sequence (e.g., within 500 bp downstream from the start codon), have a high level of orthogonality, and start with a 5′G. It is contemplated herein that in an embodiment the targeting domain hybridizes to the target domain through complementary base pairing. Any of the targeting domains in the table can be used with a N. meningitidis Cas9 molecule that generates a double stranded break (Cas9 nuclease) or a single-stranded break (Cas9 nickase).

TABLE 13A
1st Tier

| | | | Target | |
|---|---|---|---|---|
| | DNA | Targeting | Site | Seq ID |
| gRNA Name | Strand | Domain | Length | NO: |
| HSV1-UL48-1115 | + | GUCGCCGUG | 17 | 6757 |
| | | GGCGCGAA | | |
| HSV1-UL48-2762 | + | GCGUGGAAG | 17 | 18171 |
| | | AAACGAGA | | |
| HSV1-UL48-120 | - | GCCGACAUG | 17 | 5975 |
| | | AACGCGGA | | |

[0798] Table 13B provides exemplary targeting domains for knocking out the UL48 gene selected according to the second tier parameters. The targeting domains bind within the first 500 bp of the coding sequence (e.g., within 500 bp downstream from the start codon) and have a high level of orthogonality. It is contemplated herein that in an embodiment the targeting domain hybridizes to the target domain through complementary base pairing. Any of the targeting domains in the table can be used with a N. meningitidis Cas9 molecule that generates a double stranded break (Cas9 nuclease) or a single-stranded break (Cas9 nickase).

TABLE 13B
2nd Tier

| | | | Target | |
|---|---|---|---|---|
| | DNA | Targeting | Site | Seq ID |
| gRNA Name | Strand | Domain | Length | NO: |
| HSV1-UL48-651 | - | ACCGUCUCC | 17 | 6472 |
| | | UCGACGAC | | |
| HSV1-UL48-2763 | - | CGGCGACGU | 17 | 18172 |
| | | GGCCUUCC | | |
| HSV1-UL48-2764 | + | UCGGCGUGG | 20 | 18173 |
| | | AAGAAACGA | | |
| | | GA | | |
| HSV1-UL48-2 | - | UUUGCCGAC | 20 | 5961 |
| | | AUGAACGCG | | |
| | | GA | | |
| HSV1-UL48-2765 | - | CCACGGCGA | 20 | 18174 |
| | | CGUGGCCUU | | |
| | | CC | | |

[0799] Table 13C provides exemplary targeting domains for knocking out the UL48 gene selected according to the fifth tier parameters. The targeting domains fall in the coding sequence of the gene, downstream of the first 500 bp of coding sequence (e.g., anywhere from +500 (relative to the start codon) to the stop codon of the gene). It is contemplated herein that in an embodiment the targeting domain hybridizes to the target domain through complementary base pairing. Any of the targeting domains in the table can be used with a N. meningitidis Cas9 molecule that generates a double stranded break (Cas9 nuclease) or a single-stranded break (Cas9 nickase).

TABLE 13C
5th Tier

| | | | Target | |
|---|---|---|---|---|
| | DNA | Targeting | Site | Seq ID |
| gRNA Name | Strand | Domain | Length | NO: |
| HSV1-UL48-494 | - | CUGGACAUG | 17 | 6332 |
| | | UUGGGGGA | | |
| HSV1-UL48-1125 | + | CUCCCGCAG | 17 | 6763 |
| | | CCGGCGGG | | |
| HSV1-UL48-951 | - | ACGGGGAUU | 17 | 6655 |
| | | CCCCGGGG | | |
| HSV1-UL48-1120 | - | CUCUGGGUA | 17 | 6760 |
| | | CUUUAUGG | | |
| HSV1-UL48-2766 | - | CGAAGUUGG | 17 | 18175 |
| | | ACUCGUAU | | |
| HSV1-UL48-1121 | - | GCGCAUGCC | 17 | 6761 |
| | | GACGCGCU | | |
| HSV1-UL48-308 | - | GAUCUGGAC | 20 | 6146 |
| | | AUGUUGGGG | | |
| | | GA | | |
| HSV1-UL48-1124 | + | UAGCUCCCG | 20 | 6762 |
| | | CAGCCGGCG | | |
| | | GG | | |
| HSV1-UL48-874 | - | GGGACGGGG | 20 | 6605 |
| | | AUUCCCCGG | | |
| | | GG | | |
| HSV1-UL48-1116 | - | CGCCUCUGG | 20 | 6758 |
| | | GUACUUUAU | | |
| | | GG | | |
| HSV1-UL48-2767 | - | GGGCGAAGU | 20 | 18176 |
| | | UGGACUCGU | | |
| | | AU | | |

[0800] Table 14A provides exemplary targeting domains for knocking out the UL54 gene selected according to the first tier parameters. The targeting domains bind within the first 500 bp of the coding sequence (e.g., within 500 bp downstream from the start codon), have a high level of orthogonality and start with a 5′G. It is contemplated herein that in an embodiment the targeting domain hybridizes to the target domain through complementary base pairing. Any of the targeting domains in the table can be used with a S. pyogenes Cas9 molecule that generates a double stranded break (Cas9 nuclease) or a single-stranded break (Cas9 nickase).

TABLE 14A
1st Tier

| | | | Target | |
|---|---|---|---|---|
| | DNA | | Site | Seq ID |
| gRNA Name | Strand | Targeting Domain | Length | NO: |
| HSV1-UL54-63 | + | GGAGCAAGACGGUCGCC | 17 | 6826 |
| HSV1-UL54-168 | - | GCUAAUUGACCUCGGCC | 17 | 6931 |
| HSV1-UL54-56 | - | GUUUGUCGGACCCCCGC | 17 | 6819 |
| HSV1-UL54-62 | + | GGGAGCAAGACGGUCGC | 17 | 6825 |
| HSV1-UL54-242 | + | GCGUCGAGUAUCGGCUC | 17 | 7005 |
| HSV1-UL54-236 | + | GGUACGCCGGGGUCUUC | 17 | 6999 |
| HSV1-UL54-175 | - | GUGUUCCUCGUCGGACG | 17 | 6938 |
| HSV1-UL54-59 | + | GCCCACGGCGUCCGCCG | 17 | 6822 |
| HSV1-UL54-64 | + | GGCGCGACCACACACUG | 17 | 6827 |
| HSV1-UL54-487 | - | GAACCAAUCGCAACCCU | 17 | 7250 |
| HSV1-UL54-65 | + | GCGCGACCACACACUGU | 17 | 6828 |
| HSV1-UL54-229 | + | GCUGGUUGAGGAUCGUU | 17 | 6992 |
| HSV1-UL54-118 | - | GGUGGUCCCGGGGCUGCCGA | 20 | 6881 |
| HSV1-UL54-117 | - | GUCGGGGUCGCGGUGGUCCC | 20 | 6880 |
| HSV1-UL54-6 | - | GAUACUCGACGCCGCUCGCC | 20 | 6769 |
| HSV1-UL54-23 | + | GGGGGAGCAAGACGGUCGCC | 20 | 6786 |
| HSV1-UL54-39 | + | GAUCGCUGUCGGAGAGGUCC | 20 | 6802 |
| HSV1-UL54-116 | - | GGUCGGGGUCGCGGUGGUCC | 20 | 6879 |
| HSV1-UL54-83 | - | GGACGAGGACCCCCCCGAGC | 20 | 6846 |
| HSV1-UL54-1188 | + | GAUUGGUUCUGGGGGCACGC | 20 | 18177 |
| HSV1-UL54-140 | + | GACCACACACUGUGGGGCGC | 20 | 6903 |
| HSV1-UL54-108 | - | GCGGACGCCGUGGGCGUCGC | 20 | 6871 |
| HSV1-UL54-123 | + | GGCGUCCGCCGCGGGCAGGC | 20 | 6886 |
| HSV1-UL54-1189 | + | GGUUCUGGGGGCACGCCGGC | 20 | 18178 |
| HSV1-UL54-9 | - | GCCUCGUCCGACGGAGCGGC | 20 | 6772 |
| HSV1-UL54-1 | - | GGACCUCUCCGACAGCGAUC | 20 | 6764 |
| HSV1-UL54-156 | + | GCGGCGUCGAGUAUCGGCUC | 20 | 6919 |
| HSV1-UL54-28 | + | GCUCCGUCGGACGAGGCGUC | 20 | 6791 |
| HSV1-UL54-110 | - | GGACGCCGUGGGCGUCGCAG | 20 | 6873 |
| HSV1-UL54-89 | - | GGAGUGUUCCUCGUCGGACG | 20 | 6852 |
| HSV1-UL54-19 | + | GACGCCCACGGCGUCCGCCG | 20 | 6782 |
| HSV1-UL54-1190 | + | GUUCUGGGGGCACGCCGGCG | 20 | 18179 |
| HSV1-UL54-30 | + | GGUCUUCUGGACGAGACGGG | 20 | 6793 |
| HSV1-UL54-144 | + | GCGCUGGUUGAGGAUCGUUG | 20 | 6907 |
| HSV1-UL54-17 | + | GCGGGGGUCCGACAAACCAU | 20 | 6780 |
| HSV1-UL54-31 | + | GGGCGAGCGGCGUCGAGUAU | 20 | 6794 |
| HSV1-UL54-124 | + | GCGUCCGCCGCGGGCAGGCU | 20 | 6887 |
| HSV1-UL54-162 | + | GCGGCGGCUCUCCGCCGGCU | 20 | 6925 |
| HSV1-UL54-146 | + | GGACGAGGCGUCUGGGUGCU | 20 | 6909 |
| HSV1-UL54-111 | - | GCCGUGGGCGUCGCAGGGGU | 20 | 6874 |
| HSV1-UL54-25 | + | GAGGCGCGACCACACACUGU | 20 | 6788 |
| HSV1-UL54-37 | + | GUCCUCGUCCAGAUCGCUGU | 20 | 6800 |
| HSV1-UL54-143 | + | GGCGCUGGUUGAGGAUCGUU | 20 | 6906 |

[0801] Table 14B provides exemplary targeting domains for knocking out the UL54 gene selected according to the second tier parameters. The targeting domains bind within the first 500 bp of the coding sequence (e.g., within 500 bp downstream from the start codon) and have a high level of orthogonality. It is contemplated herein that in an embodiment the targeting domain hybridizes to the target domain through complementary base pairing. Any of the targeting domains in the table can be used with a S. pyogenes Cas9 molecule that generates a double stranded break (Cas9 nuclease) or a single-stranded break (Cas9 nickase).

TABLE 14B
2nd Tier

| | | | Target | |
|---|---|---|---|---|
| | DNA | | Site | Seq ID |
| gRNA Name | Strand | Targeting Domain | Length | NO: |
| HSV1-UL54-45 | - | CUCGUCGGACGAGGACA | 17 | 6808 |
| HSV1-UL54-1191 | - | AGCCGACAGCCCGGUCA | 17 | 18180 |
| HSV1-UL54-46 | - | ACUCGACGCCGCUCGCC | 17 | 6809 |
| HSV1-UL54-79 | + | CGCUGUCGGAGAGGUCC | 17 | 6842 |
| HSV1-UL54-169 | - | CGAGGACCCCCCCGAGC | 17 | 6932 |
| HSV1-UL54-247 | + | UCGCGGCGGCUCUCCGC | 17 | 7010 |
| HSV1-UL54-1192 | + | UCUGGGGGCACGCCGGC | 17 | 18181 |
| HSV1-UL54-49 | - | UCGUCCGACGGAGCGGC | 17 | 6812 |
| HSV1-UL54-41 | - | CCUCUCCGACAGCGAUC | 17 | 6804 |
| HSV1-UL54-68 | + | CCGUCGGACGAGGCGUC | 17 | 6831 |
| HSV1-UL54-1185 | + | AGGGUUGCGAUUGGUUC | 17 | 7805 |
| HSV1-UL54-196 | - | CGCCGUGGGCGUCGCAG | 17 | 6959 |
| HSV1-UL54-181 | - | CGCCUCGUCCGACGGAG | 17 | 6944 |
| HSV1-UL54-78 | + | CCAGAUCGCUGUCGGAG | 17 | 6841 |
| HSV1-UL54-73 | + | CAUGUCCUCGUCCGACG | 17 | 6836 |
| HSV1-UL54-67 | + | UGCCGCUCCGUCGGACG | 17 | 6830 |
| HSV1-UL54-42 | - | CGACAGCGAUCUGGACG | 17 | 6805 |
| HSV1-UL54-243 | + | CCGGUCCGUCCUCUCCG | 17 | 7006 |
| HSV1-UL54-51 | - | UGUGUGGUCGCGCCUCG | 17 | 6814 |
| HSV1-UL54-74 | + | CCGAUUCCAGGUCGUCG | 17 | 6837 |
| HSV1-UL54-75 | + | AUUCCAGGUCGUCGCGG | 17 | 6838 |
| HSV1-UL54-70 | + | CUUCUGGACGAGACGGG | 17 | 6833 |
| HSV1-UL54-76 | + | CUCUCCGCCGGCUCGGG | 17 | 6839 |
| HSV1-UL54-43 | - | CCGCGACGACCUGGAAU | 17 | 6806 |
| HSV1-UL54-71 | + | CGAGCGGCGUCGAGUAU | 17 | 6834 |
| HSV1-UL54-184 | - | AGUGUGUGGUCGCGCCU | 17 | 6947 |
| HSV1-UL54-69 | + | CGUCGGACGAGGCGUCU | 17 | 6832 |
| HSV1-UL54-193 | - | CCCGCGGCGGACGCCGU | 17 | 6956 |
| HSV1-UL54-244 | + | CGGUCCGUCCUCUCCGU | 17 | 7007 |
| HSV1-UL54-228 | + | CGCUGGUUGAGGAUCGU | 17 | 6991 |
| HSV1-UL54-44 | - | CGGGGAGUGUUCCUCGU | 17 | 6807 |
| HSV1-UL54-77 | + | CUCGUCCAGAUCGCUGU | 17 | 6840 |
| HSV1-UL54-5 | - | UUCCUCGUCGGACGAGGACA | 20 | 6768 |
| HSV1-UL54-99 | - | UCUUGCUCCCCCGAGCAGCA | 20 | 6862 |
| HSV1-UL54-96 | - | CCUCGUCCGACGGAGCGGCA | 20 | 6859 |
| HSV1-UL54-151 | + | CCGGGGUCUUCUGGACGAGA | 20 | 6914 |
| HSV1-UL54-152 | + | CGGGGUCUUCUGGACGAGAC | 20 | 6915 |
| HSV1-UL54-1193 | + | UCAAUGUCAGUCGCCAUGAC | 20 | 18182 |
| HSV1-UL54-1194 | + | CAAUGUCAGUCGCCAUGACC | 20 | 18183 |
| HSV1-UL54-1195 | - | CCCAGAACCAAUCGCAACCC | 20 | 18184 |
| HSV1-UL54-18 | + | CGACAAACCAUCGGCAGCCC | 20 | 6781 |
| HSV1-UL54-1196 | - | CCCGACGGCAGCCGACAGCC | 20 | 18185 |
| HSV1-UL54-12 | - | UGUGGUCGCGCCUCGGGGCC | 20 | 6775 |
| HSV1-UL54-87 | - | ACCUGGAAUCGGACAGCAGC | 20 | 6850 |
| HSV1-UL54-16 | - | AUGGUUUGUCGGACCCCCGC | 20 | 6779 |
| HSV1-UL54-161 | + | UCGUCGCGGCGGCUCUCCGC | 20 | 6924 |
| HSV1-UL54-22 | + | CGGGGGAGCAAGACGGUCGC | 20 | 6785 |
| HSV1-UL54-1197 | + | CUGUCGGCUGCCGUCGGGGC | 20 | 18186 |
| HSV1-UL54-145 | + | CGGACGAGGCGUCUGGGUGC | 20 | 6908 |
| HSV1-UL54-10 | - | ACAGUGUGUGGUCGCGCCUC | 20 | 6773 |
| HSV1-UL54-136 | + | ACCUUGCCCCCGUGCUGCUC | 20 | 6899 |
| HSV1-UL54-1198 | + | CCGGGCUGUCGGCUGCCGUC | 20 | 18187 |
| HSV1-UL54-1199 | + | CCCAGGGUUGCGAUUGGUUC | 20 | 18188 |
| HSV1-UL54-155 | + | CGGGCGGACCGCCGGGCGAG | 20 | 6918 |
| HSV1-UL54-95 | - | AGACGCCUCGUCCGACGGAG | 20 | 6858 |
| HSV1-UL54-13 | - | UUGCUCCCCCGAGCAGCACG | 20 | 6776 |
| HSV1-UL54-33 | + | UUCCAUGUCCUCGUCCGACG | 20 | 6796 |
| HSV1-UL54-27 | + | CCCUGCCGCUCCGUCGGACG | 20 | 6790 |
| HSV1-UL54-2 | - | CUCCGACAGCGAUCUGGACG | 20 | 6765 |
| HSV1-UL54-138 | + | AAGACGGUCGCCGGGCCCCG | 20 | 6901 |
| HSV1-UL54-14 | - | UCGGGGUCGCGGUGGUCCCG | 20 | 6777 |
| HSV1-UL54-149 | + | UCUGGGUGCUGGGUACGCCG | 20 | 6912 |
| HSV1-UL54-40 | + | UGUCGGAGAGGUCCAGGCCG | 20 | 6803 |
| HSV1-UL54-88 | - | CCUGGAAUCGGACAGCAGCG | 20 | 6851 |
| HSV1-UL54-11 | - | CAGUGUGUGGUCGCGCCUCG | 20 | 6774 |
| HSV1-UL54-20 | + | CCUUGCCCCCGUGCUGCUCG | 20 | 6783 |
| HSV1-UL54-1200 | + | CGGGCUGUCGGCUGCCGUCG | 20 | 18189 |
| HSV1-UL54-34 | + | UGUCCGAUUCCAGGUCGUCG | 20 | 6797 |
| HSV1-UL54-103 | - | CGAGCAGCACGGGGGCAAGG | 20 | 6866 |
| HSV1-UL54-101 | - | UGCUCCCCCGAGCAGCACGG | 20 | 6864 |
| HSV1-UL54-7 | - | ACUCGACGCCGCUCGCCCGG | 20 | 6770 |
| HSV1-UL54-84 | - | CGAGGACCCCCCCGAGCCGG | 20 | 6847 |
| HSV1-UL54-1201 | + | UGGUUCUGGGGGCACGCCGG | 20 | 18190 |
| HSV1-UL54-105 | - | AAAGCCCAGCCUGCCCGCGG | 20 | 6868 |
| HSV1-UL54-35 | + | CCGAUUCCAGGUCGUCGCGG | 20 | 6798 |
| HSV1-UL54-1202 | + | UUCUGGGGGCACGCCGGCGG | 20 | 18191 |
| HSV1-UL54-21 | + | CUUGCCCCCGUGCUGCUCGG | 20 | 6784 |
| HSV1-UL54-36 | + | CGGCUCUCCGCCGGCUCGGG | 20 | 6799 |
| HSV1-UL54-1203 | + | AGGGUUGCGAUUGGUUCUGG | 20 | 18192 |
| HSV1-UL54-159 | + | CCGGUCCGUCCUCUCCGUGG | 20 | 6922 |
| HSV1-UL54-24 | + | CGAGGCGCGACCACACACUG | 20 | 6787 |
| HSV1-UL54-32 | + | UCCGGUCCGUCCUCUCCGUG | 20 | 6795 |
| HSV1-UL54-3 | - | CCGCCGCGACGACCUGGAAU | 20 | 6766 |
| HSV1-UL54-1204 | - | CCAGAACCAAUCGCAACCCU | 20 | 18193 |
| HSV1-UL54-98 | - | CACAGUGUGUGGUCGCGCCU | 20 | 6861 |
| HSV1-UL54-135 | + | CACCUUGCCCCCGUGCUGCU | 20 | 6898 |
| HSV1-UL54-29 | + | CUCCGUCGGACGAGGCGUCU | 20 | 6792 |
| HSV1-UL54-1205 | + | ACCGGGCUGUCGGCUGCCGU | 20 | 18194 |
| HSV1-UL54-26 | + | UUGGGGCCCUGCCGCUCCGU | 20 | 6789 |
| HSV1-UL54-158 | + | CUCCGGUCCGUCCUCUCCGU | 20 | 6921 |
| HSV1-UL54-4 | - | CAGCGGGGAGUGUUCCUCGU | 20 | 6767 |
| HSV1-UL54-1206 | + | AGUCGCCAUGACCGGGCUGU | 20 | 18195 |
| HSV1-UL54-15 | - | CGGGGCUGCCGAUGGUUUGU | 20 | 6778 |

[0802] Table 14C provides exemplary targeting domains for knocking out the UL54 gene selected according to the third tier parameters. The targeting domains bind within the first 500 bp of the coding sequence (e.g., within 500 bp downstream from the start codon) and start with a 5′G. It is contemplated herein that in an embodiment the targeting domain hybridizes to the target domain through complementary base pairing. Any of the targeting domains in the table can be used with a S. pyogenes Cas9 molecule that generates a double stranded break (Cas9 nuclease) or a single-stranded break (Cas9 nickase).

TABLE 14C
3rd Tier

| | | | Target | |
|---|---|---|---|---|
| | DNA | | Site | Seq ID |
| gRNA Name | Strand | Targeting Domain | Length | NO: |
| HSV1-UL54-176 | - | GACAUGGAAGACCCCCA | 17 | 6939 |
| HSV1-UL54-206 | + | GACCCCUGCGACGCCCA | 17 | 6969 |
| HSV1-UL54-237 | + | GGGUCUUCUGGACGAGA | 17 | 7000 |
| HSV1-UL54-204 | - | GGUCCCGGGGCUGCCGA | 17 | 6967 |
| HSV1-UL54-178 | - | GACCCCCACGGAGAGGA | 17 | 6941 |
| HSV1-UL54-186 | - | GCUCCCCCGAGCAGCAC | 17 | 6949 |
| HSV1-UL54-238 | + | GGUCUUCUGGACGAGAC | 17 | 7001 |
| HSV1-UL54-171 | - | GAGCCGCCGCGACGACC | 17 | 6934 |
| HSV1-UL54-203 | - | GGGGUCGCGGUGGUCCC | 17 | 6966 |
| HSV1-UL54-1207 | - | GACGGCAGCCGACAGCC | 17 | 18196 |
| HSV1-UL54-240 | + | GAGACGGGCGGACCGCC | 17 | 7003 |
| HSV1-UL54-52 | - | GGUCGCGCCUCGGGGCC | 17 | 6815 |
| HSV1-UL54-194 | - | GACGCCGUGGGCGUCGC | 17 | 6957 |
| HSV1-UL54-209 | + | GUCCGCCGCGGGCAGGC | 17 | 6972 |
| HSV1-UL54-50 | - | GUGUGUGGUCGCGCCUC | 17 | 6813 |
| HSV1-UL54-1208 | + | GGCUGUCGGCUGCCGUC | 17 | 18197 |
| HSV1-UL54-241 | + | GCGGACCGCCGGGCGAG | 17 | 7004 |
| HSV1-UL54-177 | - | GGAAGACCCCCACGGAG | 17 | 6940 |
| HSV1-UL54-54 | - | GGGUCGCGGUGGUCCCG | 17 | 6817 |
| HSV1-UL54-192 | - | GCCCGCGGCGGACGCCG | 17 | 6955 |
| HSV1-UL54-235 | + | GGGUGCUGGGUACGCCG | 17 | 6998 |
| HSV1-UL54-174 | - | GGAAUCGGACAGCAGCG | 17 | 6937 |
| HSV1-UL54-250 | + | GGCUCUCCGCCGGCUCG | 17 | 7013 |
| HSV1-UL54-1209 | + | GCUGUCGGCUGCCGUCG | 17 | 18198 |
| HSV1-UL54-199 | - | GGGCGUCGCAGGGGUCG | 17 | 6962 |
| HSV1-UL54-189 | - | GCAGCACGGGGGCAAGG | 17 | 6952 |
| HSV1-UL54-170 | - | GGACCCCCCCGAGCCGG | 17 | 6933 |
| HSV1-UL54-191 | - | GCCCAGCCUGCCCGCGG | 17 | 6954 |
| HSV1-UL54-251 | + | GCUCUCCGCCGGCUCGG | 17 | 7014 |
| HSV1-UL54-61 | + | GCCCCCGUGCUGCUCGG | 17 | 6824 |
| HSV1-UL54-213 | + | GGCUGGGCUUUGGUCGG | 17 | 6976 |
| HSV1-UL54-1210 | + | GUUGCGAUUGGUUCUGG | 17 | 18199 |
| HSV1-UL54-245 | + | GUCCGUCCUCUCCGUGG | 17 | 7008 |
| HSV1-UL54-1187 | + | GGUUGCGAUUGGUUCUG | 17 | 7807 |
| HSV1-UL54-72 | + | GGUCCGUCCUCUCCGUG | 17 | 6835 |
| HSV1-UL54-57 | + | GGGGUCCGACAAACCAU | 17 | 6820 |
| HSV1-UL54-167 | - | GAUAUGCUAAUUGACCU | 17 | 6930 |
| HSV1-UL54-248 | + | GCGGCUCUCCGCCGGCU | 17 | 7011 |
| HSV1-UL54-1186 | + | GGGUUGCGAUUGGUUCU | 17 | 7806 |
| HSV1-UL54-1211 | + | GGGCUGUCGGCUGCCGU | 17 | 18200 |
| HSV1-UL54-66 | + | GGGCCCUGCCGCUCCGU | 17 | 6829 |
| HSV1-UL54-214 | + | GCUGGGCUUUGGUCGGU | 17 | 6977 |
| HSV1-UL54-197 | - | GUGGGCGUCGCAGGGGU | 17 | 6960 |
| HSV1-UL54-212 | + | GCAGGCUGGGCUUUGGU | 17 | 6975 |
| HSV1-UL54-55 | - | GGCUGCCGAUGGUUUGU | 17 | 6818 |
| HSV1-UL54-211 | + | GCGGGCAGGCUGGGCUU | 17 | 6974 |
| HSV1-UL54-90 | - | GAGGACAUGGAAGACCCCCA | 20 | 6853 |
| HSV1-UL54-1212 | - | GGCAGCCGACAGCCCGGUCA | 20 | 18201 |
| HSV1-UL54-92 | - | GAAGACCCCCACGGAGAGGA | 20 | 6855 |
| HSV1-UL54-85 | - | GGAGAGCCGCCGCGACGACC | 20 | 6848 |
| HSV1-UL54-119 | + | GACAAACCAUCGGCAGCCCC | 20 | 6882 |
| HSV1-UL54-148 | + | GUCUGGGUGCUGGGUACGCC | 20 | 6911 |
| HSV1-UL54-154 | + | GACGAGACGGGCGGACCGCC | 20 | 6917 |
| HSV1-UL54-153 | + | GGACGAGACGGGCGGACCGC | 20 | 6916 |
| HSV1-UL54-134 | + | GGUCGGUGGGGGUUGGAGGC | 20 | 6897 |
| HSV1-UL54-86 | - | GACCUGGAAUCGGACAGCAG | 20 | 6849 |
| HSV1-UL54-157 | + | GCUCCGGUCCGUCCUCUCCG | 20 | 6920 |
| HSV1-UL54-164 | + | GGCGGCUCUCCGCCGGCUCG | 20 | 6927 |
| HSV1-UL54-165 | + | GCGGCUCUCCGCCGGCUCGG | 20 | 6928 |
| HSV1-UL54-127 | + | GCAGGCUGGGCUUUGGUCGG | 20 | 6890 |
| HSV1-UL54-166 | + | GGCUCUCCGCCGGCUCGGGG | 20 | 6929 |
| HSV1-UL54-130 | + | GGCUGGGCUUUGGUCGGUGG | 20 | 6893 |
| HSV1-UL54-485 | + | GGGUCCCCCAGGGUUGCGAU | 20 | 7248 |
| HSV1-UL54-142 | + | GGGCGCUGGUUGAGGAUCGU | 20 | 6905 |
| HSV1-UL54-131 | + | GGGCUUUGGUCGGUGGGGGU | 20 | 6894 |
| HSV1-UL54-125 | + | GCCGCGGGCAGGCUGGGCUU | 20 | 6888 |

[0803] Table 14D provides exemplary targeting domains for knocking out the UL54 gene selected according to the fourth tier parameters. The targeting domains bind within the first 500 bp of the coding sequence (e.g., within 500 bp downstream from the start codon). It is contemplated herein that in an embodiment the targeting domain hybridizes to the target domain through complementary base pairing. Any of the targeting domains in the table can be used with a S. pyogenes Cas9 molecule that generates a double stranded break (Cas9 nuclease) or a single-stranded break (Cas9 nickase).

TABLE 14D
4th Tier

| | | | Target | |
|---|---|---|---|---|
| | DNA | | Site | Seq ID |
| gRNA Name | Strand | Targeting Domain | Length | NO: |
| HSV1-UL54-185 | - | UGCUCCCCCGAGCAGCA | 17 | 6948 |
| HSV1-UL54-195 | - | ACGCCGUGGGCGUCGCA | 17 | 6958 |
| HSV1-UL54-182 | - | CGUCCGACGGAGCGGCA | 17 | 6945 |
| HSV1-UL54-188 | - | CGAGCAGCACGGGGGCA | 17 | 6951 |
| HSV1-UL54-223 | + | UGCUCGGGGGAGCAAGA | 17 | 6986 |
| HSV1-UL54-48 | - | CCAGACGCCUCGUCCGA | 17 | 6811 |
| HSV1-UL54-179 | - | CCACGGAGAGGACGGAC | 17 | 6942 |
| HSV1-UL54-1213 | + | AUGUCAGUCGCCAUGAC | 17 | 18202 |
| HSV1-UL54-1214 | + | UGUCAGUCGCCAUGACC | 17 | 18203 |
| HSV1-UL54-486 | - | AGAACCAAUCGCAACCC | 17 | 7249 |
| HSV1-UL54-180 | - | UCUCGUCCAGAAGACCC | 17 | 6943 |
| HSV1-UL54-205 | + | AAACCAUCGGCAGCCCC | 17 | 6968 |
| HSV1-UL54-58 | + | CAAACCAUCGGCAGCCC | 17 | 6821 |
| HSV1-UL54-234 | + | UGGGUGCUGGGUACGCC | 17 | 6997 |
| HSV1-UL54-202 | - | CGGGGUCGCGGUGGUCC | 17 | 6965 |
| HSV1-UL54-246 | + | CGCUGCUGUCCGAUUCC | 17 | 7009 |
| HSV1-UL54-173 | - | UGGAAUCGGACAGCAGC | 17 | 6936 |
| HSV1-UL54-1215 | + | UGGUUCUGGGGGCACGC | 17 | 18204 |
| HSV1-UL54-233 | + | CUGGGUGCUGGGUACGC | 17 | 6996 |
| HSV1-UL54-239 | + | CGAGACGGGCGGACCGC | 17 | 7002 |
| HSV1-UL54-207 | + | CCCACGGCGUCCGCCGC | 17 | 6970 |
| HSV1-UL54-226 | + | CACACACUGUGGGGCGC | 17 | 6989 |
| HSV1-UL54-220 | + | CGGUGGGGGUUGGAGGC | 17 | 6983 |
| HSV1-UL54-208 | + | CGGCGUCCGCCGCGGGC | 17 | 6971 |
| HSV1-UL54-1216 | + | UCGGCUGCCGUCGGGGC | 17 | 18205 |
| HSV1-UL54-231 | + | ACGAGGCGUCUGGGUGC | 17 | 6994 |
| HSV1-UL54-249 | + | CGGCUCUCCGCCGGCUC | 17 | 7012 |
| HSV1-UL54-222 | + | UUGCCCCCGUGCUGCUC | 17 | 6985 |
| HSV1-UL54-198 | - | UGGGCGUCGCAGGGGUC | 17 | 6961 |
| HSV1-UL54-172 | - | CUGGAAUCGGACAGCAG | 17 | 6935 |
| HSV1-UL54-53 | - | CUCCCCCGAGCAGCACG | 17 | 6816 |
| HSV1-UL54-224 | + | ACGGUCGCCGGGCCCCG | 17 | 6987 |
| HSV1-UL54-190 | - | AAAGCCCAGCCUGCCCG | 17 | 6953 |
| HSV1-UL54-80 | + | CGGAGAGGUCCAGGCCG | 17 | 6843 |
| HSV1-UL54-1217 | + | CUGGGGGCACGCCGGCG | 17 | 18206 |
| HSV1-UL54-60 | + | UGCCCCCGUGCUGCUCG | 17 | 6823 |
| HSV1-UL54-200 | - | CGCAGGGGUCGGGGUCG | 17 | 6963 |
| HSV1-UL54-219 | + | UCGGUGGGGGUUGGAGG | 17 | 6982 |
| HSV1-UL54-187 | - | UCCCCCGAGCAGCACGG | 17 | 6950 |
| HSV1-UL54-47 | - | CGACGCCGCUCGCCCGG | 17 | 6810 |
| HSV1-UL54-1218 | + | UUCUGGGGGCACGCCGG | 17 | 18207 |
| HSV1-UL54-201 | - | AGGGGUCGGGGUCGCGG | 17 | 6964 |
| HSV1-UL54-1219 | + | UGGGGGCACGCCGGCGG | 17 | 18208 |
| HSV1-UL54-252 | + | UCUCCGCCGGCUCGGGG | 17 | 7015 |
| HSV1-UL54-489 | - | ACCAAUCGCAACCCUGG | 17 | 7252 |
| HSV1-UL54-216 | + | UGGGCUUUGGUCGGUGG | 17 | 6979 |
| HSV1-UL54-218 | + | UGGUCGGUGGGGGUUGG | 17 | 6981 |
| HSV1-UL54-488 | - | AACCAAUCGCAACCCUG | 17 | 7251 |
| HSV1-UL54-215 | + | CUGGGCUUUGGUCGGUG | 17 | 6978 |
| HSV1-UL54-225 | + | CGCGACCACACACUGUG | 17 | 6988 |
| HSV1-UL54-183 | - | CAGCGCCCCACAGUGUG | 17 | 6946 |
| HSV1-UL54-230 | + | CUGGUUGAGGAUCGUUG | 17 | 6993 |
| HSV1-UL54-227 | + | CUGUGGGGCGCUGGUUG | 17 | 6990 |
| HSV1-UL54-721 | + | UCCCCCAGGGUUGCGAU | 17 | 7484 |
| HSV1-UL54-210 | + | UCCGCCGCGGGCAGGCU | 17 | 6973 |
| HSV1-UL54-221 | + | CUUGCCCCCGUGCUGCU | 17 | 6984 |
| HSV1-UL54-232 | + | CGAGGCGUCUGGGUGCU | 17 | 6995 |
| HSV1-UL54-217 | + | CUUUGGUCGGUGGGGGU | 17 | 6980 |
| HSV1-UL54-1220 | + | CGCCAUGACCGGGCUGU | 17 | 18209 |
| HSV1-UL54-120 | + | CCCGACCCCUGCGACGCCCA | 20 | 6883 |
| HSV1-UL54-109 | - | CGGACGCCGUGGGCGUCGCA | 20 | 6872 |
| HSV1-UL54-102 | - | CCCCGAGCAGCACGGGGGCA | 20 | 6865 |
| HSV1-UL54-137 | + | UGCUGCUCGGGGGAGCAAGA | 20 | 6900 |
| HSV1-UL54-8 | - | CACCCAGACGCCUCGUCCGA | 20 | 6771 |
| HSV1-UL54-100 | - | CUUGCUCCCCCGAGCAGCAC | 20 | 6863 |
| HSV1-UL54-93 | - | CCCCCACGGAGAGGACGGAC | 20 | 6856 |
| HSV1-UL54-94 | - | CCGUCUCGUCCAGAAGACCC | 20 | 6857 |
| HSV1-UL54-82 | - | UAUGCUAAUUGACCUCGGCC | 20 | 6845 |
| HSV1-UL54-160 | + | CCCCGCUGCUGUCCGAUUCC | 20 | 6923 |
| HSV1-UL54-147 | + | CGUCUGGGUGCUGGGUACGC | 20 | 6910 |
| HSV1-UL54-121 | + | ACGCCCACGGCGUCCGCCGC | 20 | 6884 |
| HSV1-UL54-122 | + | CCACGGCGUCCGCCGCGGGC | 20 | 6885 |
| HSV1-UL54-163 | + | CGGCGGCUCUCCGCCGGCUC | 20 | 6926 |
| HSV1-UL54-112 | - | CCGUGGGCGUCGCAGGGGUC | 20 | 6875 |
| HSV1-UL54-150 | + | CUGGGUACGCCGGGGUCUUC | 20 | 6913 |
| HSV1-UL54-91 | - | CAUGGAAGACCCCCACGGAG | 20 | 6854 |
| HSV1-UL54-38 | + | CGUCCAGAUCGCUGUCGGAG | 20 | 6801 |
| HSV1-UL54-104 | - | ACCAAAGCCCAGCCUGCCCG | 20 | 6867 |
| HSV1-UL54-106 | - | CCUGCCCGCGGCGGACGCCG | 20 | 6869 |
| HSV1-UL54-113 | - | CGUGGGCGUCGCAGGGGUCG | 20 | 6876 |
| HSV1-UL54-114 | - | CGUCGCAGGGGUCGGGGUCG | 20 | 6877 |
| HSV1-UL54-133 | + | UGGUCGGUGGGGGUUGGAGG | 20 | 6896 |
| HSV1-UL54-115 | - | CGCAGGGGUCGGGGUCGCGG | 20 | 6878 |
| HSV1-UL54-253 | - | AGAACCAAUCGCAACCCUGG | 20 | 7016 |
| HSV1-UL54-132 | + | CUUUGGUCGGUGGGGGUUGG | 20 | 6895 |
| HSV1-UL54-910 | - | CAGAACCAAUCGCAACCCUG | 20 | 7585 |
| HSV1-UL54-1045 | + | CAGGGUUGCGAUUGGUUCUG | 20 | 7697 |
| HSV1-UL54-129 | + | AGGCUGGGCUUUGGUCGGUG | 20 | 6892 |
| HSV1-UL54-139 | + | AGGCGCGACCACACACUGUG | 20 | 6902 |
| HSV1-UL54-97 | - | AACCAGCGCCCCACAGUGUG | 20 | 6860 |
| HSV1-UL54-141 | + | ACACUGUGGGGCGCUGGUUG | 20 | 6904 |
| HSV1-UL54-81 | - | AUUGAUAUGCUAAUUGACCU | 20 | 6844 |
| HSV1-UL54-1221 | + | CCAGGGUUGCGAUUGGUUCU | 20 | 18210 |
| HSV1-UL54-107 | - | CUGCCCGCGGCGGACGCCGU | 20 | 6870 |
| HSV1-UL54-128 | + | CAGGCUGGGCUUUGGUCGGU | 20 | 6891 |
| HSV1-UL54-126 | + | CGGGCAGGCUGGGCUUUGGU | 20 | 6889 |

[0804] Table 14E provides exemplary targeting domains for knocking out the UL54 gene selected according to the fifth tier parameters. The targeting domains fall in the coding sequence of the gene, downstream of the first 500 bp of coding sequence (e.g., anywhere from +500 (relative to the start codon) to the stop codon of the gene). It is contemplated herein that in an embodiment the targeting domain hybridizes to the target domain through complementary base pairing. Any of the targeting domains in the table can be used with a S. pyogenes Cas9 molecule that generates a double stranded break (Cas9 nuclease) or a single-stranded break (Cas9 nickase).

TABLE 14E
5th Tier

| | | | Target | |
|---|---|---|---|---|
| | DNA | | Site | Seq ID |
| gRNA Name | Strand | Targeting Domain | Length | NO: |
| HSV1-UL54-658 | + | AACGGCUGCCCCCCAAA | 17 | 7421 |
| HSV1-UL54-645 | + | CUGGUCUCGGCGUCAAA | 17 | 7408 |
| HSV1-UL54-609 | + | AGGUAGCACUGGAGAAA | 17 | 7372 |
| HSV1-UL54-656 | + | CUAUUCGCGGCGGGAAA | 17 | 7419 |
| HSV1-UL54-599 | + | UCCGACCCCGACACCAA | 17 | 7362 |
| HSV1-UL54-657 | + | AAACGGCUGCCCCCCAA | 17 | 7420 |
| HSV1-UL54-644 | + | UCUGGUCUCGGCGUCAA | 17 | 7407 |
| HSV1-UL54-608 | + | CAGGUAGCACUGGAGAA | 17 | 7371 |
| HSV1-UL54-514 | - | CCCGGCCCCGGAGCGAA | 17 | 7277 |
| HSV1-UL54-614 | + | CGCGGUCGUCCCGAUAA | 17 | 7377 |
| HSV1-UL54-1222 | + | UUAUUGUACCUAAAACA | 17 | 18211 |
| HSV1-UL54-507 | - | CCGGAGGCCAGCGGACA | 17 | 7270 |
| HSV1-UL54-598 | + | CUCCGACCCCGACACCA | 17 | 7361 |
| HSV1-UL54-640 | + | CGGGCCGUGGGCGACCA | 17 | 7403 |
| HSV1-UL54-500 | - | GGCCCCGGCGCCCCCCA | 17 | 7263 |
| HSV1-UL54-720 | + | CGGGGCGGGGUCCCCCA | 17 | 7483 |
| HSV1-UL54-540 | - | GAAACCUUGGUCGCCCA | 17 | 7303 |
| HSV1-UL54-651 | + | GCCAGCACCGGGGCCCA | 17 | 7414 |
| HSV1-UL54-544 | - | GGCCGCAUCGACCGCCA | 17 | 7307 |
| HSV1-UL54-705 | + | CGCGCCACGCCUCGCCA | 17 | 7468 |
| HSV1-UL54-532 | - | CCGGUGCUGGCGGGCCA | 17 | 7295 |
| HSV1-UL54-629 | + | CAGCACGCAGUCGCGCA | 17 | 7392 |
| HSV1-UL54-576 | - | CCUCCCCGGGGCCUGCA | 17 | 7339 |
| HSV1-UL54-581 | - | GCCCCCCCGUACGUGCA | 17 | 7344 |
| HSV1-UL54-535 | - | UUGACGCCGAGACCAGA | 17 | 7298 |
| HSV1-UL54-663 | + | CGCCGCGCGCUCGGAGA | 17 | 7426 |
| HSV1-UL54-603 | + | CAGAAUGACAAACACGA | 17 | 7366 |
| HSV1-UL54-667 | + | CCGCGUGGUGGCGUCGA | 17 | 7430 |
| HSV1-UL54-534 | - | UGCUGGCGGGCCAAGGA | 17 | 7297 |
| HSV1-UL54-498 | - | GGGGCGGGGUGGACGGA | 17 | 7261 |
| HSV1-UL54-497 | - | CCCCGGGGCGGGGUGGA | 17 | 7260 |
| HSV1-UL54-555 | - | UCUCCAGUGCUACCUGA | 17 | 7318 |
| HSV1-UL54-580 | - | UCGUGUCUGCGAGUUGA | 17 | 7343 |
| HSV1-UL54-582 | + | UAUUUGCCGUGCACGUA | 17 | 7345 |
| HSV1-UL54-563 | - | GCGUCUGGCGGACAUUA | 17 | 7326 |
| HSV1-UL54-1223 | + | UUUAUUGUACCUAAAAC | 17 | 18212 |
| HSV1-UL54-508 | - | CGGAGGCCAGCGGACAC | 17 | 7271 |
| HSV1-UL54-647 | + | CCUUGGCCCGCCAGCAC | 17 | 7410 |
| HSV1-UL54-607 | + | GCGCCUUCAGGUAGCAC | 17 | 7370 |
| HSV1-UL54-605 | + | GUUCGUCCAGGCCGCAC | 17 | 7368 |
| HSV1-UL54-520 | - | CUUUGGCCGCAGCGCAC | 17 | 7283 |
| HSV1-UL54-536 | - | UGACGCCGAGACCAGAC | 17 | 7299 |
| HSV1-UL54-588 | + | GGGGGCGACGAUGUGAC | 17 | 7351 |
| HSV1-UL54-583 | + | AUUUGCCGUGCACGUAC | 17 | 7346 |
| HSV1-UL54-504 | - | GAGCAGCCCGACCCACC | 17 | 7267 |
| HSV1-UL54-648 | + | CUUGGCCCGCCAGCACC | 17 | 7411 |
| HSV1-UL54-486 | - | AGAACCAAUCGCAACCC | 17 | 7249 |
| HSV1-UL54-549 | - | CCUGCCGCUGCGCCCCC | 17 | 7312 |
| HSV1-UL54-719 | + | CCGGGGCGGGGUCCCCC | 17 | 7482 |
| HSV1-UL54-526 | - | CCGCCGCGAAUAGCCCC | 17 | 7289 |
| HSV1-UL54-714 | + | UCCGUCCACCCCGCCCC | 17 | 7477 |
| HSV1-UL54-491 | - | CUGGGGGACCCCGCCCC | 17 | 7254 |
| HSV1-UL54-595 | + | CCCGCCAUGCAGGCCCC | 17 | 7358 |
| HSV1-UL54-574 | - | UGCAUUUCUACCUCCCC | 17 | 7337 |
| HSV1-UL54-713 | + | GUCCGUCCACCCCGCCC | 17 | 7476 |
| HSV1-UL54-490 | - | CCUGGGGGACCCCGCCC | 17 | 7253 |
| HSV1-UL54-512 | - | CGCGGACCCCCGCGCCC | 17 | 7275 |
| HSV1-UL54-594 | + | GCCCGCCAUGCAGGCCC | 17 | 7357 |
| HSV1-UL54-499 | - | GGGUGGACGGACGGCCC | 17 | 7262 |
| HSV1-UL54-513 | - | CCCCCGCGCCCCGGCCC | 17 | 7276 |
| HSV1-UL54-650 | + | CGCCAGCACCGGGGCCC | 17 | 7413 |
| HSV1-UL54-528 | - | GAAUAGCCCCUGGGCCC | 17 | 7291 |
| HSV1-UL54-573 | - | AUGCAUUUCUACCUCCC | 17 | 7336 |
| HSV1-UL54-641 | + | GGCGACCAAGGUUUCCC | 17 | 7404 |
| HSV1-UL54-602 | + | GACGCGGUUGGCGAGCC | 17 | 7365 |
| HSV1-UL54-579 | - | CCUAGACACGCACCGCC | 17 | 7342 |
| HSV1-UL54-711 | + | UCGCCAUGGGGGGCGCC | 17 | 7474 |
| HSV1-UL54-558 | - | GCGAGGCCUGUGCGGCC | 17 | 7321 |
| HSV1-UL54-676 | + | CCUUUCGCUCCGGGGCC | 17 | 7439 |
| HSV1-UL54-565 | - | UGUUUGUCAUUCUGGCC | 17 | 7328 |
| HSV1-UL54-589 | + | CACGACUCGAACACUCC | 17 | 7352 |
| HSV1-UL54-700 | + | CGUGUCCGCUGGCCUCC | 17 | 7463 |
| HSV1-UL54-673 | + | CGGGCGCCUUUCGCUCC | 17 | 7436 |
| HSV1-UL54-537 | - | AGACCAGACGGGUCUCC | 17 | 7300 |
| HSV1-UL54-604 | + | GCGAACACAGUUCGUCC | 17 | 7367 |
| HSV1-UL54-617 | + | UCCCGAUAAUGGGGUCC | 17 | 7380 |
| HSV1-UL54-691 | + | UCGCCAGCGUCAUUAGC | 17 | 7454 |
| HSV1-UL54-1215 | + | UGGUUCUGGGGGCACGC | 17 | 18204 |
| HSV1-UL54-547 | - | CUCCGCCGACGAGACGC | 17 | 7310 |
| HSV1-UL54-510 | - | CCCCCCGCUAAUGACGC | 17 | 7273 |
| HSV1-UL54-56 | - | GUUUGUCGGACCCCCGC | 17 | 6819 |
| HSV1-UL54-610 | + | ACUGGAGAAAGGGCCGC | 17 | 7373 |
| HSV1-UL54-683 | + | GGGGCGCGGGGGUCCGC | 17 | 7446 |
| HSV1-UL54-698 | + | GCACGCCCCGUGUCCGC | 17 | 7461 |
| HSV1-UL54-664 | + | GCUCGGAGAUGGAGCGC | 17 | 7427 |
| HSV1-UL54-546 | - | AAAUUUCAUCGAGGCGC | 17 | 7309 |
| HSV1-UL54-679 | + | CUCCGGGGCCGGGGCGC | 17 | 7442 |
| HSV1-UL54-710 | + | CUCGCCAUGGGGGGCGC | 17 | 7473 |
| HSV1-UL54-1192 | + | UCUGGGGGCACGCCGGC | 17 | 18181 |
| HSV1-UL54-622 | + | CCUGGGGGCGCAGCGGC | 17 | 7385 |
| HSV1-UL54-655 | + | CAGGGGCUAUUCGCGGC | 17 | 7418 |
| HSV1-UL54-671 | + | UCGAUGGUGUCGGCGGC | 17 | 7434 |
| HSV1-UL54-685 | + | CGCGGGGGUCCGCGGGC | 17 | 7448 |
| HSV1-UL54-717 | + | CCACCCCGCCCCGGGGC | 17 | 7480 |
| HSV1-UL54-494 | - | GGACCCCGCCCCGGGGC | 17 | 7257 |
| HSV1-UL54-675 | + | GCCUUUCGCUCCGGGGC | 17 | 7438 |
| HSV1-UL54-578 | - | CCCGGGGCCUGCAUGGC | 17 | 7341 |
| HSV1-UL54-531 | - | UGGGCCCCGGUGCUGGC | 17 | 7294 |
| HSV1-UL54-593 | + | GAUCAGGCCCGCCAUGC | 17 | 7356 |
| HSV1-UL54-529 | - | CCCCUGGGCCCCGGUGC | 17 | 7292 |
| HSV1-UL54-553 | - | GACGACCGCGGCUGUGC | 17 | 7316 |
| HSV1-UL54-634 | + | UGCGGCCCGAGGAUUGC | 17 | 7397 |
| HSV1-UL54-541 | - | CUCUAUCGCACUUUUGC | 17 | 7304 |
| HSV1-UL54-592 | + | UGUCUAGGAUUUCGAUC | 17 | 7355 |
| HSV1-UL54-551 | - | CCCAGGACCCCAUUAUC | 17 | 7314 |
| HSV1-UL54-699 | + | CCGUGUCCGCUGGCCUC | 17 | 7462 |
| HSV1-UL54-543 | - | UUUUGCCGGCAAUCCUC | 17 | 7306 |
| HSV1-UL54-672 | + | GCGGGCGCCUUUCGCUC | 17 | 7435 |
| HSV1-UL54-637 | + | AAGUGCGAUAGAGGCUC | 17 | 7400 |
| HSV1-UL54-642 | + | UUCCCAGGAGACCCGUC | 17 | 7405 |
| HSV1-UL54-561 | - | GUGUUCGCGGCGGCGUC | 17 | 7324 |
| HSV1-UL54-704 | + | UGGCCUCCGGGUGGGUC | 17 | 7467 |
| HSV1-UL54-570 | - | ACGCGACCCUUGGUGUC | 17 | 7333 |
| HSV1-UL54-564 | - | CUUCGUGUUUGUCAUUC | 17 | 7327 |
| HSV1-UL54-606 | + | ACAGGCCUCGCGCCUUC | 17 | 7369 |
| HSV1-UL54-1185 | + | AGGGUUGCGAUUGGUUC | 17 | 7805 |
| HSV1-UL54-659 | + | ACGGCUGCCCCCCAAAG | 17 | 7422 |
| HSV1-UL54-652 | + | CCAGCACCGGGGCCCAG | 17 | 7415 |
| HSV1-UL54-506 | - | ACCCACCCGGAGGCCAG | 17 | 7269 |
| HSV1-UL54-621 | + | GGGUCCUGGGGGCGCAG | 17 | 7384 |
| HSV1-UL54-635 | + | CGGCAAAAGUGCGAUAG | 17 | 7398 |
| HSV1-UL54-690 | + | AUCGCCAGCGUCAUUAG | 17 | 7453 |
| HSV1-UL54-509 | - | GGAGGCCAGCGGACACG | 17 | 7272 |
| HSV1-UL54-515 | - | CCAUCGACGCCACCACG | 17 | 7278 |
| HSV1-UL54-600 | + | CGACGCCACGCUCGACG | 17 | 7363 |
| HSV1-UL54-584 | + | UUUGCCGUGCACGUACG | 17 | 7347 |
| HSV1-UL54-649 | + | UUGGCCCGCCAGCACCG | 17 | 7412 |
| HSV1-UL54-552 | - | CAUUAUCGGGACGACCG | 17 | 7315 |
| HSV1-UL54-715 | + | CCGUCCACCCCGCCCCG | 17 | 7478 |
| HSV1-UL54-492 | - | UGGGGGACCCCGCCCCG | 17 | 7255 |
| HSV1-UL54-596 | + | CCGCCAUGCAGGCCCCG | 17 | 7359 |
| HSV1-UL54-575 | - | GCAUUUCUACCUCCCCG | 17 | 7338 |
| HSV1-UL54-511 | - | GAUUGCCCCCCCGCCCG | 17 | 7274 |
| HSV1-UL54-633 | + | GCGGUCGAUGCGGCCCG | 17 | 7396 |
| HSV1-UL54-613 | + | GUUAUCCAGCACAGCCG | 17 | 7376 |
| HSV1-UL54-712 | + | CGCCAUGGGGGGCGCCG | 17 | 7475 |
| HSV1-UL54-638 | + | GAUAGAGGCUCGGGCCG | 17 | 7401 |
| HSV1-UL54-677 | + | CUUUCGCUCCGGGGCCG | 17 | 7440 |
| HSV1-UL54-674 | + | GGGCGCCUUUCGCUCCG | 17 | 7437 |
| HSV1-UL54-682 | + | CGGGGCGCGGGGGUCCG | 17 | 7445 |
| HSV1-UL54-566 | - | GCCAACCGCGUCGAGCG | 17 | 7329 |
| HSV1-UL54-692 | + | CGCCAGCGUCAUUAGCG | 17 | 7455 |
| HSV1-UL54-665 | + | GCGCAGGACCAACCGCG | 17 | 7428 |
| HSV1-UL54-517 | - | CUCCAUCUCCGAGCGCG | 17 | 7280 |
| HSV1-UL54-556 | - | UGCUACCUGAAGGCGCG | 17 | 7319 |
| HSV1-UL54-611 | + | AAAGGGCCGCAGGCGCG | 17 | 7374 |
| HSV1-UL54-680 | + | UCCGGGGCCGGGGCGCG | 17 | 7443 |
| HSV1-UL54-502 | - | CCCCCCAUGGCGAGGCG | 17 | 7265 |
| HSV1-UL54-1217 | + | CUGGGGGCACGCCGGCG | 17 | 18206 |
| HSV1-UL54-686 | + | GCGGGGGUCCGCGGGCG | 17 | 7449 |
| HSV1-UL54-718 | + | CACCCCGCCCCGGGGCG | 17 | 7481 |
| HSV1-UL54-495 | - | GACCCCGCCCCGGGGCG | 17 | 7258 |
| HSV1-UL54-678 | + | GCUCCGGGGCCGGGGCG | 17 | 7441 |
| HSV1-UL54-501 | - | CGGCGCCCCCCAUGGCG | 17 | 7264 |
| HSV1-UL54-548 | - | CCGACGAGACGCUGGCG | 17 | 7311 |
| HSV1-UL54-612 | + | GCCGCAGGCGCGUGGCG | 17 | 7375 |
| HSV1-UL54-503 | - | CAUGGCGAGGCGUGGCG | 17 | 7266 |
| HSV1-UL54-545 | - | CCAAGAAAAUUUCAUCG | 17 | 7308 |
| HSV1-UL54-567 | - | CGUCGAGCGUGGCGUCG | 17 | 7330 |
| HSV1-UL54-571 | - | CGCGACCCUUGGUGUCG | 17 | 7334 |
| HSV1-UL54-653 | + | GGCCCAGGGGCUAUUCG | 17 | 7416 |
| HSV1-UL54-559 | - | UGGACGAACUGUGUUCG | 17 | 7322 |
| HSV1-UL54-533 | - | GUGCUGGCGGGCCAAGG | 17 | 7296 |
| HSV1-UL54-585 | + | UUGCCGUGCACGUACGG | 17 | 7348 |
| HSV1-UL54-505 | - | CAGCCCGACCCACCCGG | 17 | 7268 |
| HSV1-UL54-1218 | + | UUCUGGGGGCACGCCGG | 17 | 18207 |
| HSV1-UL54-693 | + | GCCAGCGUCAUUAGCGG | 17 | 7456 |
| HSV1-UL54-518 | - | CAUCUCCGAGCGCGCGG | 17 | 7281 |
| HSV1-UL54-681 | + | CCGGGGCCGGGGCGCGG | 17 | 7444 |
| HSV1-UL54-654 | + | CCAGGGGCUAUUCGCGG | 17 | 7417 |
| HSV1-UL54-560 | - | ACGAACUGUGUUCGCGG | 17 | 7323 |
| HSV1-UL54-1219 | + | UGGGGGCACGCCGGCGG | 17 | 18208 |
| HSV1-UL54-627 | + | CAGCGUCUCGUCGGCGG | 17 | 7390 |
| HSV1-UL54-670 | + | GUCGAUGGUGUCGGCGG | 17 | 7433 |
| HSV1-UL54-687 | + | CGGGGGUCCGCGGGCGG | 17 | 7450 |
| HSV1-UL54-626 | + | CGCCAGCGUCUCGUCGG | 17 | 7389 |
| HSV1-UL54-669 | + | GGCGUCGAUGGUGUCGG | 17 | 7432 |
| HSV1-UL54-586 | + | UGCCGUGCACGUACGGG | 17 | 7349 |
| HSV1-UL54-701 | + | GUCCGCUGGCCUCCGGG | 17 | 7464 |
| HSV1-UL54-694 | + | CCAGCGUCAUUAGCGGG | 17 | 7457 |
| HSV1-UL54-684 | + | GCGCGGGGGUCCGCGGG | 17 | 7447 |
| HSV1-UL54-688 | + | GGGGGUCCGCGGGCGGG | 17 | 7451 |
| HSV1-UL54-587 | + | GCCGUGCACGUACGGGG | 17 | 7350 |
| HSV1-UL54-716 | + | UCCACCCCGCCCCGGGG | 17 | 7479 |
| HSV1-UL54-493 | - | GGGACCCCGCCCCGGGG | 17 | 7256 |
| HSV1-UL54-597 | + | CCAUGCAGGCCCCGGGG | 17 | 7360 |
| HSV1-UL54-695 | + | CAGCGUCAUUAGCGGGG | 17 | 7458 |
| HSV1-UL54-689 | + | GGGGUCCGCGGGCGGGG | 17 | 7452 |
| HSV1-UL54-496 | - | CCCGCCCCGGGGCGGGG | 17 | 7259 |
| HSV1-UL54-696 | + | AGCGUCAUUAGCGGGGG | 17 | 7459 |
| HSV1-UL54-709 | + | CCACGCCUCGCCAUGGG | 17 | 7472 |
| HSV1-UL54-525 | - | UGCACGACCCCUUUGGG | 17 | 7288 |
| HSV1-UL54-708 | + | GCCACGCCUCGCCAUGG | 17 | 7471 |
| HSV1-UL54-577 | - | CCCCGGGGCCUGCAUGG | 17 | 7340 |
| HSV1-UL54-489 | - | ACCAAUCGCAACCCUGG | 17 | 7252 |
| HSV1-UL54-590 | + | GACUCGAACACUCCUGG | 17 | 7353 |
| HSV1-UL54-620 | + | CGAUAAUGGGGUCCUGG | 17 | 7383 |
| HSV1-UL54-530 | - | CUGGGCCCCGGUGCUGG | 17 | 7293 |
| HSV1-UL54-562 | - | UUCGCGGCGGCGUCUGG | 17 | 7325 |
| HSV1-UL54-1210 | + | GUUGCGAUUGGUUCUGG | 17 | 18199 |
| HSV1-UL54-666 | + | CAGGACCAACCGCGUGG | 17 | 7429 |
| HSV1-UL54-624 | + | GCAGCGGCAGGUUGUGG | 17 | 7387 |
| HSV1-UL54-631 | + | GUCGCGCAUGGCCUUGG | 17 | 7394 |
| HSV1-UL54-524 | - | AUGCACGACCCCUUUGG | 17 | 7287 |
| HSV1-UL54-616 | + | CGGUCGUCCCGAUAAUG | 17 | 7379 |
| HSV1-UL54-707 | + | CGCCACGCCUCGCCAUG | 17 | 7470 |
| HSV1-UL54-632 | + | GGCCUUGGCGGUCGAUG | 17 | 7395 |
| HSV1-UL54-661 | + | CAAAGCUCUCGCUGAUG | 17 | 7424 |
| HSV1-UL54-488 | - | AACCAAUCGCAACCCUG | 17 | 7251 |
| HSV1-UL54-554 | - | ACCUCGCCACGCGCCUG | 17 | 7317 |
| HSV1-UL54-619 | + | CCGAUAAUGGGGUCCUG | 17 | 7382 |
| HSV1-UL54-660 | + | GCAUGACCUGUGCGCUG | 17 | 7423 |
| HSV1-UL54-1187 | + | GGUUGCGAUUGGUUCUG | 17 | 7807 |
| HSV1-UL54-557 | - | AAGGCGCGAGGCCUGUG | 17 | 7320 |
| HSV1-UL54-623 | + | GGCGCAGCGGCAGGUUG | 17 | 7386 |
| HSV1-UL54-523 | - | CAUGCACGACCCCUUUG | 17 | 7286 |
| HSV1-UL54-615 | + | GCGGUCGUCCCGAUAAU | 17 | 7378 |
| HSV1-UL54-706 | + | GCGCCACGCCUCGCCAU | 17 | 7469 |
| HSV1-UL54-721 | + | UCCCCCAGGGUUGCGAU | 17 | 7484 |
| HSV1-UL54-550 | - | CCCCAGGACCCCAUUAU | 17 | 7313 |
| HSV1-UL54-539 | - | GGUCUCCUGGGAAACCU | 17 | 7302 |
| HSV1-UL54-487 | - | GAACCAAUCGCAACCCU | 17 | 7250 |
| HSV1-UL54-568 | - | AUCGACUACGCGACCCU | 17 | 7331 |
| HSV1-UL54-527 | - | CGCCGCGAAUAGCCCCU | 17 | 7290 |
| HSV1-UL54-630 | + | GCAGUCGCGCAUGGCCU | 17 | 7393 |
| HSV1-UL54-542 | - | CUUUUGCCGGCAAUCCU | 17 | 7305 |
| HSV1-UL54-646 | + | CGUCAAAGGGCCCUCCU | 17 | 7409 |
| HSV1-UL54-538 | - | GACCAGACGGGUCUCCU | 17 | 7301 |
| HSV1-UL54-618 | + | CCCGAUAAUGGGGUCCU | 17 | 7381 |
| HSV1-UL54-662 | + | GUCGACCGCCGCGCGCU | 17 | 7425 |
| HSV1-UL54-636 | + | AAAGUGCGAUAGAGGCU | 17 | 7399 |
| HSV1-UL54-697 | + | UUAGCGGGGGGGGUGCU | 17 | 7460 |
| HSV1-UL54-643 | + | GGAGACCCGUCUGGUCU | 17 | 7406 |
| HSV1-UL54-591 | + | CCUGGCGGUGCGUGUCU | 17 | 7354 |
| HSV1-UL54-1186 | + | GGGUUGCGAUUGGUUCU | 17 | 7806 |
| HSV1-UL54-628 | + | CCUCGAUGAAAUUUUCU | 17 | 7391 |
| HSV1-UL54-639 | + | AUAGAGGCUCGGGCCGU | 17 | 7402 |
| HSV1-UL54-625 | + | CCACGCCAGCGUCUCGU | 17 | 7388 |
| HSV1-UL54-516 | - | CGACGCCACCACGCGGU | 17 | 7279 |
| HSV1-UL54-601 | + | GCCACGCUCGACGCGGU | 17 | 7364 |
| HSV1-UL54-702 | + | UCCGCUGGCCUCCGGGU | 17 | 7465 |
| HSV1-UL54-572 | - | ACCCUUGGUGUCGGGGU | 17 | 7335 |
| HSV1-UL54-703 | + | CUGGCCUCCGGGUGGGU | 17 | 7466 |
| HSV1-UL54-668 | + | GGUGGCGUCGAUGGUGU | 17 | 7431 |
| HSV1-UL54-569 | - | UACGCGACCCUUGGUGU | 17 | 7332 |
| HSV1-UL54-521 | - | GUCAUGCACGACCCCUU | 17 | 7284 |
| HSV1-UL54-519 | - | CGCAUCAGCGAGAGCUU | 17 | 7282 |
| HSV1-UL54-522 | - | UCAUGCACGACCCCUUU | 17 | 7285 |
| HSV1-UL54-1224 | - | UUGCAACUCCCUGUUUU | 17 | 18213 |
| HSV1-UL54-422 | + | GGAAACGGCUGCCCCCCAAA | 20 | 7185 |
| HSV1-UL54-409 | + | CGUCUGGUCUCGGCGUCAAA | 20 | 7172 |
| HSV1-UL54-373 | + | UUCAGGUAGCACUGGAGAAA | 20 | 7136 |
| HSV1-UL54-420 | + | GGGCUAUUCGCGGCGGGAAA | 20 | 7183 |
| HSV1-UL54-363 | + | CUCUCCGACCCCGACACCAA | 20 | 7126 |
| HSV1-UL54-421 | + | GGGAAACGGCUGCCCCCCAA | 20 | 7184 |
| HSV1-UL54-408 | + | CCGUCUGGUCUCGGCGUCAA | 20 | 7171 |
| HSV1-UL54-372 | + | CUUCAGGUAGCACUGGAGAA | 20 | 7135 |
| HSV1-UL54-278 | - | CGCCCCGGCCCCGGAGCGAA | 20 | 7041 |
| HSV1-UL54-378 | + | AGCCGCGGUCGUCCCGAUAA | 20 | 7141 |
| HSV1-UL54-1225 | + | UUUUUAUUGUACCUAAAACA | 20 | 18214 |
| HSV1-UL54-271 | - | CACCCGGAGGCCAGCGGACA | 20 | 7034 |
| HSV1-UL54-362 | + | UCUCUCCGACCCCGACACCA | 20 | 7125 |
| HSV1-UL54-404 | + | GCUCGGGCCGUGGGCGACCA | 20 | 7167 |
| HSV1-UL54-264 | - | GACGGCCCCGGCGCCCCCCA | 20 | 7027 |
| HSV1-UL54-484 | + | CCCCGGGGCGGGGUCCCCCA | 20 | 7247 |
| HSV1-UL54-304 | - | UGGGAAACCUUGGUCGCCCA | 20 | 7067 |
| HSV1-UL54-415 | + | CCCGCCAGCACCGGGGCCCA | 20 | 7178 |
| HSV1-UL54-308 | - | UCGGGCCGCAUCGACCGCCA | 20 | 7071 |
| HSV1-UL54-469 | + | UGCCGCGCCACGCCUCGCCA | 20 | 7232 |
| HSV1-UL54-296 | - | GCCCCGGUGCUGGCGGGCCA | 20 | 7059 |
| HSV1-UL54-393 | + | GCGCAGCACGCAGUCGCGCA | 20 | 7156 |
| HSV1-UL54-340 | - | CUACCUCCCCGGGGCCUGCA | 20 | 7103 |
| HSV1-UL54-345 | - | GUCGCCCCCCCGUACGUGCA | 20 | 7108 |
| HSV1-UL54-299 | - | CCUUUGACGCCGAGACCAGA | 20 | 7062 |
| HSV1-UL54-427 | + | GACCGCCGCGCGCUCGGAGA | 20 | 7190 |
| HSV1-UL54-367 | + | GGCCAGAAUGACAAACACGA | 20 | 7130 |
| HSV1-UL54-431 | + | CAACCGCGUGGUGGCGUCGA | 20 | 7194 |
| HSV1-UL54-298 | - | CGGUGCUGGCGGGCCAAGGA | 20 | 7061 |
| HSV1-UL54-262 | - | CCCGGGGCGGGGUGGACGGA | 20 | 7025 |
| HSV1-UL54-261 | - | CCGCCCCGGGGCGGGGUGGA | 20 | 7024 |
| HSV1-UL54-319 | - | CUUUCUCCAGUGCUACCUGA | 20 | 7082 |
| HSV1-UL54-344 | - | GAGUCGUGUCUGCGAGUUGA | 20 | 7107 |
| HSV1-UL54-346 | + | AAAUAUUUGCCGUGCACGUA | 20 | 7109 |
| HSV1-UL54-327 | - | GCGGCGUCUGGCGGACAUUA | 20 | 7090 |
| HSV1-UL54-1226 | + | GUUUUUAUUGUACCUAAAAC | 20 | 18215 |
| HSV1-UL54-272 | - | ACCCGGAGGCCAGCGGACAC | 20 | 7035 |
| HSV1-UL54-411 | + | CCUCCUUGGCCCGCCAGCAC | 20 | 7174 |
| HSV1-UL54-371 | + | CUCGCGCCUUCAGGUAGCAC | 20 | 7134 |
| HSV1-UL54-369 | + | ACAGUUCGUCCAGGCCGCAC | 20 | 7132 |
| HSV1-UL54-284 | - | GAGCUUUGGCCGCAGCGCAC | 20 | 7047 |
| HSV1-UL54-300 | - | CUUUGACGCCGAGACCAGAC | 20 | 7063 |
| HSV1-UL54-352 | + | CGGGGGGGCGACGAUGUGAC | 20 | 7115 |
| HSV1-UL54-347 | + | AAUAUUUGCCGUGCACGUAC | 20 | 7110 |
| HSV1-UL54-268 | - | AGUGAGCAGCCCGACCCACC | 20 | 7031 |
| HSV1-UL54-412 | + | CUCCUUGGCCCGCCAGCACC | 20 | 7175 |
| HSV1-UL54-1195 | - | CCCAGAACCAAUCGCAACCC | 20 | 18184 |
| HSV1-UL54-313 | - | CAACCUGCCGCUGCGCCCCC | 20 | 7076 |
| HSV1-UL54-483 | + | GCCCCGGGGCGGGGUCCCCC | 20 | 7246 |
| HSV1-UL54-290 | - | UUCCCGCCGCGAAUAGCCCC | 20 | 7053 |
| HSV1-UL54-478 | + | CCGUCCGUCCACCCCGCCCC | 20 | 7241 |
| HSV1-UL54-255 | - | ACCCUGGGGGACCCCGCCCC | 20 | 7018 |
| HSV1-UL54-359 | + | AGGCCCGCCAUGCAGGCCCC | 20 | 7122 |
| HSV1-UL54-338 | - | AGAUGCAUUUCUACCUCCCC | 20 | 7101 |
| HSV1-UL54-477 | + | GCCGUCCGUCCACCCCGCCC | 20 | 7240 |
| HSV1-UL54-254 | - | AACCCUGGGGGACCCCGCCC | 20 | 7017 |
| HSV1-UL54-276 | - | GCCCGCGGACCCCCGCGCCC | 20 | 7039 |
| HSV1-UL54-358 | + | CAGGCCCGCCAUGCAGGCCC | 20 | 7121 |
| HSV1-UL54-263 | - | GCGGGGUGGACGGACGGCCC | 20 | 7026 |
| HSV1-UL54-277 | - | GGACCCCCGCGCCCCGGCCC | 20 | 7040 |
| HSV1-UL54-414 | + | GCCCGCCAGCACCGGGGCCC | 20 | 7177 |
| HSV1-UL54-292 | - | CGCGAAUAGCCCCUGGGCCC | 20 | 7055 |
| HSV1-UL54-337 | - | AAGAUGCAUUUCUACCUCCC | 20 | 7100 |
| HSV1-UL54-405 | + | GUGGGCGACCAAGGUUUCCC | 20 | 7168 |
| HSV1-UL54-366 | + | CUCGACGCGGUUGGCGAGCC | 20 | 7129 |
| HSV1-UL54-343 | - | AAUCCUAGACACGCACCGCC | 20 | 7106 |
| HSV1-UL54-475 | + | GCCUCGCCAUGGGGGGCGCC | 20 | 7238 |
| HSV1-UL54-322 | - | GGCGCGAGGCCUGUGCGGCC | 20 | 7085 |
| HSV1-UL54-440 | + | GCGCCUUUCGCUCCGGGGCC | 20 | 7203 |
| HSV1-UL54-329 | - | UCGUGUUUGUCAUUCUGGCC | 20 | 7092 |
| HSV1-UL54-353 | + | AGACACGACUCGAACACUCC | 20 | 7116 |
| HSV1-UL54-464 | + | CCCCGUGUCCGCUGGCCUCC | 20 | 7227 |
| HSV1-UL54-437 | + | CGGCGGGCGCCUUUCGCUCC | 20 | 7200 |
| HSV1-UL54-301 | - | CCGAGACCAGACGGGUCUCC | 20 | 7064 |
| HSV1-UL54-368 | + | GCCGCGAACACAGUUCGUCC | 20 | 7131 |
| HSV1-UL54-381 | + | UCGUCCCGAUAAUGGGGUCC | 20 | 7144 |
| HSV1-UL54-455 | + | CAAUCGCCAGCGUCAUUAGC | 20 | 7218 |
| HSV1-UL54-1188 | + | GAUUGGUUCUGGGGGCACGC | 20 | 18177 |
| HSV1-UL54-311 | - | GGCCUCCGCCGACGAGACGC | 20 | 7074 |
| HSV1-UL54-274 | - | ACCCCCCCCGCUAAUGACGC | 20 | 7037 |
| HSV1-UL54-374 | + | AGCACUGGAGAAAGGGCCGC | 20 | 7137 |
| HSV1-UL54-447 | + | GCCGGGGCGCGGGGGUCCGC | 20 | 7210 |
| HSV1-UL54-462 | + | GGCGCACGCCCCGUGUCCGC | 20 | 7225 |
| HSV1-UL54-428 | + | CGCGCUCGGAGAUGGAGCGC | 20 | 7191 |
| HSV1-UL54-310 | - | AGAAAAUUUCAUCGAGGCGC | 20 | 7073 |
| HSV1-UL54-443 | + | UCGCUCCGGGGCCGGGGCGC | 20 | 7206 |
| HSV1-UL54-474 | + | CGCCUCGCCAUGGGGGGCGC | 20 | 7237 |
| HSV1-UL54-1189 | + | GGUUCUGGGGGCACGCCGGC | 20 | 18178 |
| HSV1-UL54-386 | + | GGUCCUGGGGGCGCAGCGGC | 20 | 7149 |
| HSV1-UL54-419 | + | GCCCAGGGGCUAUUCGCGGC | 20 | 7182 |
| HSV1-UL54-435 | + | GCGUCGAUGGUGUCGGCGGC | 20 | 7198 |
| HSV1-UL54-449 | + | GGGCGCGGGGGUCCGCGGGC | 20 | 7212 |
| HSV1-UL54-481 | + | CGUCCACCCCGCCCCGGGGC | 20 | 7244 |
| HSV1-UL54-258 | - | GGGGGACCCCGCCCCGGGGC | 20 | 7021 |
| HSV1-UL54-439 | + | GGCGCCUUUCGCUCCGGGGC | 20 | 7202 |
| HSV1-UL54-342 | - | CUCCCCGGGGCCUGCAUGGC | 20 | 7105 |
| HSV1-UL54-295 | - | CCCUGGGCCCCGGUGCUGGC | 20 | 7058 |
| HSV1-UL54-357 | + | UUCGAUCAGGCCCGCCAUGC | 20 | 7120 |
| HSV1-UL54-293 | - | UAGCCCCUGGGCCCCGGUGC | 20 | 7056 |
| HSV1-UL54-317 | - | CGGGACGACCGCGGCUGUGC | 20 | 7080 |
| HSV1-UL54-398 | + | CGAUGCGGCCCGAGGAUUGC | 20 | 7161 |
| HSV1-UL54-305 | - | AGCCUCUAUCGCACUUUUGC | 20 | 7068 |
| HSV1-UL54-356 | + | GCGUGUCUAGGAUUUCGAUC | 20 | 7119 |
| HSV1-UL54-315 | - | GCCCCCAGGACCCCAUUAUC | 20 | 7078 |
| HSV1-UL54-463 | + | GCCCCGUGUCCGCUGGCCUC | 20 | 7226 |
| HSV1-UL54-307 | - | CACUUUUGCCGGCAAUCCUC | 20 | 7070 |
| HSV1-UL54-436 | + | GCGGCGGGCGCCUUUCGCUC | 20 | 7199 |
| HSV1-UL54-401 | + | CAAAAGUGCGAUAGAGGCUC | 20 | 7164 |
| HSV1-UL54-406 | + | GGUUUCCCAGGAGACCCGUC | 20 | 7169 |
| HSV1-UL54-325 | - | ACUGUGUUCGCGGCGGCGUC | 20 | 7088 |
| HSV1-UL54-468 | + | CGCUGGCCUCCGGGUGGGUC | 20 | 7231 |
| HSV1-UL54-334 | - | ACUACGCGACCCUUGGUGUC | 20 | 7097 |
| HSV1-UL54-328 | - | AUCCUUCGUGUUUGUCAUUC | 20 | 7091 |
| HSV1-UL54-370 | + | CGCACAGGCCUCGCGCCUUC | 20 | 7133 |
| HSV1-UL54-1199 | + | CCCAGGGUUGCGAUUGGUUC | 20 | 18188 |
| HSV1-UL54-423 | + | GAAACGGCUGCCCCCCAAAG | 20 | 7186 |
| HSV1-UL54-416 | + | CCGCCAGCACCGGGGCCCAG | 20 | 7179 |
| HSV1-UL54-270 | - | CCGACCCACCCGGAGGCCAG | 20 | 7033 |
| HSV1-UL54-385 | + | AUGGGGUCCUGGGGGCGCAG | 20 | 7148 |
| HSV1-UL54-399 | + | UGCCGGCAAAAGUGCGAUAG | 20 | 7162 |
| HSV1-UL54-454 | + | GCAAUCGCCAGCGUCAUUAG | 20 | 7217 |
| HSV1-UL54-273 | - | CCCGGAGGCCAGCGGACACG | 20 | 7036 |
| HSV1-UL54-279 | - | ACACCAUCGACGCCACCACG | 20 | 7042 |
| HSV1-UL54-364 | + | CCGCGACGCCACGCUCGACG | 20 | 7127 |
| HSV1-UL54-348 | + | AUAUUUGCCGUGCACGUACG | 20 | 7111 |
| HSV1-UL54-413 | + | UCCUUGGCCCGCCAGCACCG | 20 | 7176 |
| HSV1-UL54-316 | - | CCCCAUUAUCGGGACGACCG | 20 | 7079 |
| HSV1-UL54-479 | + | CGUCCGUCCACCCCGCCCCG | 20 | 7242 |
| HSV1-UL54-256 | - | CCCUGGGGGACCCCGCCCCG | 20 | 7019 |
| HSV1-UL54-360 | + | GGCCCGCCAUGCAGGCCCCG | 20 | 7123 |
| HSV1-UL54-339 | - | GAUGCAUUUCUACCUCCCCG | 20 | 7102 |
| HSV1-UL54-275 | - | GGCGAUUGCCCCCCCGCCCG | 20 | 7038 |
| HSV1-UL54-397 | + | UUGGCGGUCGAUGCGGCCCG | 20 | 7160 |
| HSV1-UL54-377 | + | GAGGUUAUCCAGCACAGCCG | 20 | 7140 |
| HSV1-UL54-476 | + | CCUCGCCAUGGGGGGCGCCG | 20 | 7239 |
| HSV1-UL54-402 | + | UGCGAUAGAGGCUCGGGCCG | 20 | 7165 |
| HSV1-UL54-441 | + | CGCCUUUCGCUCCGGGGCCG | 20 | 7204 |
| HSV1-UL54-438 | + | GGCGGGCGCCUUUCGCUCCG | 20 | 7201 |
| HSV1-UL54-446 | + | GGCCGGGGCGCGGGGGUCCG | 20 | 7209 |
| HSV1-UL54-330 | - | CUCGCCAACCGCGUCGAGCG | 20 | 7093 |
| HSV1-UL54-456 | + | AAUCGCCAGCGUCAUUAGCG | 20 | 7219 |
| HSV1-UL54-429 | + | GGAGCGCAGGACCAACCGCG | 20 | 7192 |
| HSV1-UL54-281 | - | GCGCUCCAUCUCCGAGCGCG | 20 | 7044 |
| HSV1-UL54-320 | - | CAGUGCUACCUGAAGGCGCG | 20 | 7083 |
| HSV1-UL54-375 | + | GAGAAAGGGCCGCAGGCGCG | 20 | 7138 |
| HSV1-UL54-444 | + | CGCUCCGGGGCCGGGGCGCG | 20 | 7207 |
| HSV1-UL54-266 | - | GCGCCCCCCAUGGCGAGGCG | 20 | 7029 |
| HSV1-UL54-1190 | + | GUUCUGGGGGCACGCCGGCG | 20 | 18179 |
| HSV1-UL54-450 | + | GGCGCGGGGGUCCGCGGGCG | 20 | 7213 |
| HSV1-UL54-482 | + | GUCCACCCCGCCCCGGGGCG | 20 | 7245 |
| HSV1-UL54-259 | - | GGGGACCCCGCCCCGGGGCG | 20 | 7022 |
| HSV1-UL54-442 | + | UUCGCUCCGGGGCCGGGGCG | 20 | 7205 |
| HSV1-UL54-265 | - | CCCCGGCGCCCCCCAUGGCG | 20 | 7028 |
| HSV1-UL54-312 | - | CCGCCGACGAGACGCUGGCG | 20 | 7075 |
| HSV1-UL54-376 | + | AGGGCCGCAGGCGCGUGGCG | 20 | 7139 |
| HSV1-UL54-267 | - | CCCCAUGGCGAGGCGUGGCG | 20 | 7030 |
| HSV1-UL54-309 | - | GCGCCAAGAAAAUUUCAUCG | 20 | 7072 |
| HSV1-UL54-331 | - | CCGCGUCGAGCGUGGCGUCG | 20 | 7094 |
| HSV1-UL54-335 | - | CUACGCGACCCUUGGUGUCG | 20 | 7098 |
| HSV1-UL54-417 | + | CGGGGCCCAGGGGCUAUUCG | 20 | 7180 |
| HSV1-UL54-323 | - | GCCUGGACGAACUGUGUUCG | 20 | 7086 |
| HSV1-UL54-297 | - | CCGGUGCUGGCGGGCCAAGG | 20 | 7060 |
| HSV1-UL54-349 | + | UAUUUGCCGUGCACGUACGG | 20 | 7112 |
| HSV1-UL54-269 | - | GAGCAGCCCGACCCACCCGG | 20 | 7032 |
| HSV1-UL54-1201 | + | UGGUUCUGGGGGCACGCCGG | 20 | 18190 |
| HSV1-UL54-457 | + | AUCGCCAGCGUCAUUAGCGG | 20 | 7220 |
| HSV1-UL54-282 | - | CUCCAUCUCCGAGCGCGCGG | 20 | 7045 |
| HSV1-UL54-445 | + | GCUCCGGGGCCGGGGCGCGG | 20 | 7208 |
| HSV1-UL54-418 | + | GGCCCAGGGGCUAUUCGCGG | 20 | 7181 |
| HSV1-UL54-324 | - | UGGACGAACUGUGUUCGCGG | 20 | 7087 |
| HSV1-UL54-1202 | + | UUCUGGGGGCACGCCGGCGG | 20 | 18191 |
| HSV1-UL54-391 | + | CGCCAGCGUCUCGUCGGCGG | 20 | 7154 |
| HSV1-UL54-434 | + | GGCGUCGAUGGUGUCGGCGG | 20 | 7197 |
| HSV1-UL54-451 | + | GCGCGGGGGUCCGCGGGCGG | 20 | 7214 |
| HSV1-UL54-390 | + | CCACGCCAGCGUCUCGUCGG | 20 | 7153 |
| HSV1-UL54-433 | + | GGUGGCGUCGAUGGUGUCGG | 20 | 7196 |
| HSV1-UL54-350 | + | AUUUGCCGUGCACGUACGGG | 20 | 7113 |
| HSV1-UL54-465 | + | CGUGUCCGCUGGCCUCCGGG | 20 | 7228 |
| HSV1-UL54-458 | + | UCGCCAGCGUCAUUAGCGGG | 20 | 7221 |
| HSV1-UL54-448 | + | GGGGCGCGGGGGUCCGCGGG | 20 | 7211 |
| HSV1-UL54-452 | + | CGCGGGGGUCCGCGGGCGGG | 20 | 7215 |
| HSV1-UL54-351 | + | UUUGCCGUGCACGUACGGGG | 20 | 7114 |
| HSV1-UL54-480 | + | CCGUCCACCCCGCCCCGGGG | 20 | 7243 |
| HSV1-UL54-257 | - | UGGGGGACCCCGCCCCGGGG | 20 | 7020 |
| HSV1-UL54-361 | + | CCGCCAUGCAGGCCCCGGGG | 20 | 7124 |
| HSV1-UL54-459 | + | CGCCAGCGUCAUUAGCGGGG | 20 | 7222 |
| HSV1-UL54-453 | + | GCGGGGGUCCGCGGGCGGGG | 20 | 7216 |
| HSV1-UL54-260 | - | GACCCCGCCCCGGGGCGGGG | 20 | 7023 |
| HSV1-UL54-460 | + | GCCAGCGUCAUUAGCGGGGG | 20 | 7223 |
| HSV1-UL54-473 | + | GCGCCACGCCUCGCCAUGGG | 20 | 7236 |
| HSV1-UL54-289 | - | UCAUGCACGACCCCUUUGGG | 20 | 7052 |
| HSV1-UL54-472 | + | CGCGCCACGCCUCGCCAUGG | 20 | 7235 |
| HSV1-UL54-341 | - | CCUCCCCGGGGCCUGCAUGG | 20 | 7104 |
| HSV1-UL54-253 | - | AGAACCAAUCGCAACCCUGG | 20 | 7016 |
| HSV1-UL54-354 | + | CACGACUCGAACACUCCUGG | 20 | 7117 |
| HSV1-UL54-384 | + | UCCCGAUAAUGGGGUCCUGG | 20 | 7147 |
| HSV1-UL54-294 | - | CCCCUGGGCCCCGGUGCUGG | 20 | 7057 |
| HSV1-UL54-326 | - | GUGUUCGCGGCGGCGUCUGG | 20 | 7089 |
| HSV1-UL54-1203 | + | AGGGUUGCGAUUGGUUCUGG | 20 | 18192 |
| HSV1-UL54-430 | + | GCGCAGGACCAACCGCGUGG | 20 | 7193 |
| HSV1-UL54-388 | + | GGCGCAGCGGCAGGUUGUGG | 20 | 7151 |
| HSV1-UL54-395 | + | GCAGUCGCGCAUGGCCUUGG | 20 | 7158 |
| HSV1-UL54-288 | - | GUCAUGCACGACCCCUUUGG | 20 | 7051 |
| HSV1-UL54-380 | + | CCGCGGUCGUCCCGAUAAUG | 20 | 7143 |
| HSV1-UL54-471 | + | CCGCGCCACGCCUCGCCAUG | 20 | 7234 |
| HSV1-UL54-396 | + | CAUGGCCUUGGCGGUCGAUG | 20 | 7159 |
| HSV1-UL54-425 | + | GGCCAAAGCUCUCGCUGAUG | 20 | 7188 |
| HSV1-UL54-910 | - | CAGAACCAAUCGCAACCCUG | 20 | 7585 |
| HSV1-UL54-318 | - | AUAACCUCGCCACGCGCCUG | 20 | 7081 |
| HSV1-UL54-383 | + | GUCCCGAUAAUGGGGUCCUG | 20 | 7146 |
| HSV1-UL54-424 | + | CGUGCAUGACCUGUGCGCUG | 20 | 7187 |
| HSV1-UL54-1045 | + | CAGGGUUGCGAUUGGUUCUG | 20 | 7697 |
| HSV1-UL54-321 | - | CUGAAGGCGCGAGGCCUGUG | 20 | 7084 |
| HSV1-UL54-387 | + | GGGGGCGCAGCGGCAGGUUG | 20 | 7150 |
| HSV1-UL54-287 | - | GGUCAUGCACGACCCCUUUG | 20 | 7050 |
| HSV1-UL54-379 | + | GCCGCGGUCGUCCCGAUAAU | 20 | 7142 |
| HSV1-UL54-470 | + | GCCGCGCCACGCCUCGCCAU | 20 | 7233 |
| HSV1-UL54-485 | + | GGGUCCCCCAGGGUUGCGAU | 20 | 7248 |
| HSV1-UL54-314 | - | CGCCCCCAGGACCCCAUUAU | 20 | 7077 |
| HSV1-UL54-303 | - | ACGGGUCUCCUGGGAAACCU | 20 | 7066 |
| HSV1-UL54-1204 | - | CCAGAACCAAUCGCAACCCU | 20 | 18193 |
| HSV1-UL54-332 | - | GAGAUCGACUACGCGACCCU | 20 | 7095 |
| HSV1-UL54-291 | - | UCCCGCCGCGAAUAGCCCCU | 20 | 7054 |
| HSV1-UL54-394 | + | CACGCAGUCGCGCAUGGCCU | 20 | 7157 |
| HSV1-UL54-306 | - | GCACUUUUGCCGGCAAUCCU | 20 | 7069 |
| HSV1-UL54-410 | + | CGGCGUCAAAGGGCCCUCCU | 20 | 7173 |
| HSV1-UL54-302 | - | CGAGACCAGACGGGUCUCCU | 20 | 7065 |
| HSV1-UL54-382 | + | CGUCCCGAUAAUGGGGUCCU | 20 | 7145 |
| HSV1-UL54-426 | + | GCGGUCGACCGCCGCGCGCU | 20 | 7189 |
| HSV1-UL54-400 | + | GCAAAAGUGCGAUAGAGGCU | 20 | 7163 |
| HSV1-UL54-461 | + | UCAUUAGCGGGGGGGGUGCU | 20 | 7224 |
| HSV1-UL54-407 | + | CCAGGAGACCCGUCUGGUCU | 20 | 7170 |
| HSV1-UL54-355 | + | ACUCCUGGCGGUGCGUGUCU | 20 | 7118 |
| HSV1-UL54-1221 | + | CCAGGGUUGCGAUUGGUUCU | 20 | 18210 |
| HSV1-UL54-392 | + | GCGCCUCGAUGAAAUUUUCU | 20 | 7155 |
| HSV1-UL54-403 | + | GCGAUAGAGGCUCGGGCCGU | 20 | 7166 |
| HSV1-UL54-389 | + | GCACCACGCCAGCGUCUCGU | 20 | 7152 |
| HSV1-UL54-280 | - | CAUCGACGCCACCACGCGGU | 20 | 7043 |
| HSV1-UL54-365 | + | GACGCCACGCUCGACGCGGU | 20 | 7128 |
| HSV1-UL54-466 | + | GUGUCCGCUGGCCUCCGGGU | 20 | 7229 |
| HSV1-UL54-336 | - | GCGACCCUUGGUGUCGGGGU | 20 | 7099 |
| HSV1-UL54-467 | + | CCGCUGGCCUCCGGGUGGGU | 20 | 7230 |
| HSV1-UL54-432 | + | CGUGGUGGCGUCGAUGGUGU | 20 | 7195 |
| HSV1-UL54-333 | - | GACUACGCGACCCUUGGUGU | 20 | 7096 |
| HSV1-UL54-285 | - | CAGGUCAUGCACGACCCCUU | 20 | 7048 |
| HSV1-UL54-283 | - | GACCGCAUCAGCGAGAGCUU | 20 | 7046 |
| HSV1-UL54-286 | - | AGGUCAUGCACGACCCCUUU | 20 | 7049 |
| HSV1-UL54-1227 | - | UUAUUGCAACUCCCUGUUUU | 20 | 18216 |

[0805] Table 15A provides exemplary targeting domains for knocking out the UL54 gene selected according to the first tier parameters. The targeting domains bind within the first 500 bp of the coding sequence (e.g., within 500 bp downstream from the start codon), have a high level of orthogonality, and start with a 5′G. The PAM is NNGRRT. It is contemplated herein that in an embodiment the targeting domain hybridizes to the target domain through complementary base pairing. Any of the targeting domains in the table can be used with a S. aureus Cas9 molecule that generates a double stranded break (Cas9 nuclease) or a single-stranded break (Cas9 nickase).

TABLE 15A
1st Tier

| | | | Target | |
|---|---|---|---|---|
| | DNA | | Site | Seq ID |
| gRNA Name | Strand | Targeting Domain | Length | NO: |
| HSV1-UL54-1228 | + | GCGUCUGGGUGCUGGGUACGC | 21 | 18217 |
| HSV1-UL54-1229 | + | GGCGUCUGGGUGCUGGGUACGC | 22 | 18218 |
| HSV1-UL54-1230 | + | GAGGCGUCUGGGUGCUGGGUACGC | 24 | 18219 |
| HSV1-UL54-1231 | + | GUUCUGGGGGCACGCCGGC | 19 | 18220 |
| HSV1-UL54-1189 | + | GGUUCUGGGGGCACGCCGGC | 20 | 18178 |
| HSV1-UL54-1232 | + | GAUUGGUUCUGGGGGCACGCCGGC | 24 | 18221 |
| HSV1-UL54-1233 | + | GACCGCCGGGCGAGCGGCG | 19 | 18222 |
| HSV1-UL54-1234 | + | GGACCGCCGGGCGAGCGGCG | 20 | 18223 |
| HSV1-UL54-1235 | + | GCGGACCGCCGGGCGAGCGGCG | 22 | 18224 |
| HSV1-UL54-1236 | + | GGCGGACCGCCGGGCGAGCGGCG | 23 | 18225 |
| HSV1-UL54-1237 | + | GGGCGGACCGCCGGGCGAGCGGCG | 24 | 18226 |
| HSV1-UL54-1238 | + | GGCUCUCCGCCGGCUCGG | 18 | 18227 |
| HSV1-UL54-165 | + | GCGGCUCUCCGCCGGCUCGG | 20 | 6928 |
| HSV1-UL54-1239 | + | GGCGGCUCUCCGCCGGCUCGG | 21 | 18228 |
| HSV1-UL54-1240 | + | GCGGCGGCUCUCCGCCGGCUCGG | 23 | 18229 |
| HSV1-UL54-1241 | + | GGACGAGGCGUCUGGGUG | 18 | 18230 |
| HSV1-UL54-1242 | + | GUCGGACGAGGCGUCUGGGUG | 21 | 18231 |
| HSV1-UL54-1243 | + | GCUCCGGUCCGUCCUCUCCGU | 21 | 18232 |
| HSV1-UL54-1244 | + | GGCUCCGGUCCGUCCUCUCCGU | 22 | 18233 |
| HSV1-UL54-1245 | + | GCUCCGUCGGACGAGGCGU | 19 | 18234 |
| HSV1-UL54-1246 | + | GCCGCUCCGUCGGACGAGGCGU | 22 | 18235 |
| HSV1-UL54-1247 | + | GGCUGGGCUUUGGUCGGU | 18 | 18236 |
| HSV1-UL54-1248 | + | GCAGGCUGGGCUUUGGUCGGU | 21 | 18237 |
| HSV1-UL54-1249 | + | GGCAGGCUGGGCUUUGGUCGGU | 22 | 18238 |
| HSV1-UL54-1250 | + | GGGCAGGCUGGGCUUUGGUCGGU | 23 | 18239 |
| HSV1-UL54-1251 | - | GGCGGACGCCGUGGGCGUCGC | 21 | 18240 |
| HSV1-UL54-1252 | - | GCGGCGGACGCCGUGGGCGUCGC | 23 | 18241 |
| HSV1-UL54-1253 | - | GACCUGGAAUCGGACAGCAGCG | 22 | 18242 |
| HSV1-UL54-1254 | - | GACGCCGUGGGCGUCGCAGGGGU | 23 | 18243 |
| HSV1-UL54-1255 | - | GGACGCCGUGGGCGUCGCAGGGGU | 24 | 18244 |

[0806] Table 15B provides exemplary targeting domains for knocking out the UL54 gene selected according to the second tier parameters. The targeting domains bind within the first 500 bp of the coding sequence (e.g., within 500 bp downstream from the start codon), and have a high level of orthogonality. The PAM is NNGRRT. It is contemplated herein that in an embodiment the targeting domain hybridizes to the target domain through complementary base pairing. Any of the targeting domains in the table can be used with a S. aureus Cas9 molecule that generates a double stranded break (Cas9 nuclease) or a single-stranded break (Cas9 nickase).

TABLE 15B
2nd Tier

| | | | Target | |
|---|---|---|---|---|
| | DNA | | Site | Seq ID |
| gRNA Name | Strand | Targeting Domain | Length | NO: |
| HSV1-UL54-1256 | + | AGGCGUCUGGGUGCUGGGUACGC | 23 | 18245 |
| HSV1-UL54-1257 | + | UUCUGGGGGCACGCCGGC | 18 | 18246 |
| HSV1-UL54-1258 | + | UGGUUCUGGGGGCACGCCGGC | 21 | 18247 |
| HSV1-UL54-1259 | + | UUGGUUCUGGGGGCACGCCGGC | 22 | 18248 |
| HSV1-UL54-1260 | + | AUUGGUUCUGGGGGCACGCCGGC | 23 | 18249 |
| HSV1-UL54-1261 | + | ACCGCCGGGCGAGCGGCG | 18 | 18250 |
| HSV1-UL54-1262 | + | CGGACCGCCGGGCGAGCGGCG | 21 | 18251 |
| HSV1-UL54-1263 | + | CGGCUCUCCGCCGGCUCGG | 19 | 18252 |
| HSV1-UL54-1264 | + | CGGCGGCUCUCCGCCGGCUCGG | 22 | 18253 |
| HSV1-UL54-1265 | + | CGCGGCGGCUCUCCGCCGGCUCGG | 24 | 18254 |
| HSV1-UL54-1266 | + | CGGACGAGGCGUCUGGGUG | 19 | 18255 |
| HSV1-UL54-788 | + | UCGGACGAGGCGUCUGGGUG | 20 | 7531 |
| HSV1-UL54-1267 | + | CGUCGGACGAGGCGUCUGGGUG | 22 | 18256 |
| HSV1-UL54-1268 | + | CCGUCGGACGAGGCGUCUGGGUG | 23 | 18257 |
| HSV1-UL54-1269 | + | UCCGUCGGACGAGGCGUCUGGGUG | 24 | 18258 |
| HSV1-UL54-1270 | + | CCGGUCCGUCCUCUCCGU | 18 | 18259 |
| HSV1-UL54-1271 | + | UCCGGUCCGUCCUCUCCGU | 19 | 18260 |
| HSV1-UL54-158 | + | CUCCGGUCCGUCCUCUCCGU | 20 | 6921 |
| HSV1-UL54-1272 | + | CGGCUCCGGUCCGUCCUCUCCGU | 23 | 18261 |
| HSV1-UL54-1273 | + | UCGGCUCCGGUCCGUCCUCUCCGU | 24 | 18262 |
| HSV1-UL54-1274 | + | CUCCGUCGGACGAGGCGU | 18 | 18263 |
| HSV1-UL54-1275 | + | CGCUCCGUCGGACGAGGCGU | 20 | 18264 |
| HSV1-UL54-1276 | + | CCGCUCCGUCGGACGAGGCGU | 21 | 18265 |
| HSV1-UL54-1277 | + | UGCCGCUCCGUCGGACGAGGCGU | 23 | 18266 |
| HSV1-UL54-1278 | + | CUGCCGCUCCGUCGGACGAGGCGU | 24 | 18267 |
| HSV1-UL54-1279 | + | AGGCUGGGCUUUGGUCGGU | 19 | 18268 |
| HSV1-UL54-128 | + | CAGGCUGGGCUUUGGUCGGU | 20 | 6891 |
| HSV1-UL54-1280 | + | CGGGCAGGCUGGGCUUUGGUCGGU | 24 | 18269 |
| HSV1-UL54-1281 | + | ACACACUGUGGGGCGCUGGUU | 21 | 18270 |
| HSV1-UL54-1282 | + | CACACACUGUGGGGCGCUGGUU | 22 | 18271 |
| HSV1-UL54-1283 | + | CCACACACUGUGGGGCGCUGGUU | 23 | 18272 |
| HSV1-UL54-1284 | + | ACCACACACUGUGGGGCGCUGGUU | 24 | 18273 |
| HSV1-UL54-1285 | - | CGGCGGACGCCGUGGGCGUCGC | 22 | 18274 |
| HSV1-UL54-1286 | - | CGCGGCGGACGCCGUGGGCGUCGC | 24 | 18275 |
| HSV1-UL54-1287 | - | UGGAAUCGGACAGCAGCG | 18 | 18276 |
| HSV1-UL54-1288 | - | CUGGAAUCGGACAGCAGCG | 19 | 18277 |
| HSV1-UL54-88 | - | CCUGGAAUCGGACAGCAGCG | 20 | 6851 |
| HSV1-UL54-1289 | - | ACCUGGAAUCGGACAGCAGCG | 21 | 18278 |
| HSV1-UL54-1290 | - | CGACCUGGAAUCGGACAGCAGCG | 23 | 18279 |
| HSV1-UL54-1291 | - | ACGACCUGGAAUCGGACAGCAGCG | 24 | 18280 |
| HSV1-UL54-1292 | - | CGCCGUGGGCGUCGCAGGGGU | 21 | 18281 |
| HSV1-UL54-1293 | - | ACGCCGUGGGCGUCGCAGGGGU | 22 | 18282 |

[0807] Table 15C provides exemplary targeting domains for knocking out the UL54 gene selected according to the third tier parameters. The targeting domains bind within the first 500 bp of the coding sequence (e.g., within 500 bp downstream from the start codon). The PAM is NNGRRT. It is contemplated herein that in an embodiment the targeting domain hybridizes to the target domain through complementary base pairing. Any of the targeting domains in the table can be used with a S. aureus Cas9 molecule that generates a double stranded break (Cas9 nuclease) or a single-stranded break (Cas9 nickase).

TABLE 15C
3rd Tier

| | | | Target | |
|---|---|---|---|---|
| | DNA | | Site | Seq ID |
| gRNA Name | Strand | Targeting Domain | Length | NO: |
| HSV1-UL54-1294 | + | UCUGGGUGCUGGGUACGC | 18 | 18283 |
| HSV1-UL54-1295 | + | GUCUGGGUGCUGGGUACGC | 19 | 18284 |
| HSV1-UL54-147 | + | CGUCUGGGUGCUGGGUACGC | 20 | 6910 |
| HSV1-UL54-1296 | + | CACUGUGGGGCGCUGGUU | 18 | 18285 |
| HSV1-UL54-1297 | + | ACACUGUGGGGCGCUGGUU | 19 | 18286 |
| HSV1-UL54-1298 | + | CACACUGUGGGGCGCUGGUU | 20 | 18287 |
| HSV1-UL54-1299 | - | AGAGCCGCCGCGACGACC | 18 | 18288 |
| HSV1-UL54-1300 | - | GAGAGCCGCCGCGACGACC | 19 | 18289 |
| HSV1-UL54-85 | - | GGAGAGCCGCCGCGACGACC | 20 | 6848 |
| HSV1-UL54-1301 | - | CGGAGAGCCGCCGCGACGACC | 21 | 18290 |
| HSV1-UL54-1302 | - | GCGGAGAGCCGCCGCGACGACC | 22 | 18291 |
| HSV1-UL54-1303 | - | GGCGGAGAGCCGCCGCGACGACC | 23 | 18292 |
| HSV1-UL54-1304 | - | CGGCGGAGAGCCGCCGCGACGACC | 24 | 18293 |
| HSV1-UL54-1305 | - | GGACGCCGUGGGCGUCGC | 18 | 18294 |
| HSV1-UL54-1306 | - | CGGACGCCGUGGGCGUCGC | 19 | 18295 |
| HSV1-UL54-108 | - | GCGGACGCCGUGGGCGUCGC | 20 | 6871 |
| HSV1-UL54-1307 | - | CGUGGGCGUCGCAGGGGU | 18 | 18296 |
| HSV1-UL54-1308 | - | CCGUGGGCGUCGCAGGGGU | 19 | 18297 |
| HSV1-UL54-111 | - | GCCGUGGGCGUCGCAGGGGU | 20 | 6874 |

[0808] Table 15D provides exemplary targeting domains for knocking out the UL54 gene selected according to the fourth tier parameters. The targeting domains bind within the first 500 bp of the coding sequence (e.g., within 500 bp downstream from the start codon). The PAM is NNGRRV. It is contemplated herein that in an embodiment the targeting domain hybridizes to the target domain through complementary base pairing. Any of the targeting domains in the table can be used with a S. aureus Cas9 molecule that generates a double stranded break (Cas9 nuclease) or a single-stranded break (Cas9 nickase).

TABLE 15D

| | | | Target | |
|---|---|---|---|---|
| 4th Tier | DNA | | Site | Seq ID |
| gRNA Name | Strand | Targeting Domain | Length | NO: |
| HSV1-UL54-1309 | + | CAAUGUCAGUCGCCAUGA | 18 | 18298 |
| HSV1-UL54-1310 | + | UCAAUGUCAGUCGCCAUGA | 19 | 18299 |
| HSV1-UL54-1311 | + | AUCAAUGUCAGUCGCCAUGA | 20 | 18300 |
| HSV1-UL54-1312 | + | UAUCAAUGUCAGUCGCCAUGA | 21 | 18301 |
| HSV1-UL54-1313 | + | AUAUCAAUGUCAGUCGCCAUGA | 22 | 18302 |
| HSV1-UL54-1314 | + | CAUAUCAAUGUCAGUCGCCAUGA | 23 | 18303 |
| HSV1-UL54-1315 | + | GCAUAUCAAUGUCAGUCGCCAUGA | 24 | 18304 |
| HSV1-UL54-1316 | + | UCCAUGUCCUCGUCCGAC | 18 | 18305 |
| HSV1-UL54-1317 | + | UUCCAUGUCCUCGUCCGAC | 19 | 18306 |
| HSV1-UL54-1318 | + | CUUCCAUGUCCUCGUCCGAC | 20 | 18307 |
| HSV1-UL54-1319 | + | UCUUCCAUGUCCUCGUCCGAC | 21 | 18308 |
| HSV1-UL54-1320 | + | GUCUUCCAUGUCCUCGUCCGAC | 22 | 18309 |
| HSV1-UL54-1321 | + | GGUCUUCCAUGUCCUCGUCCGAC | 23 | 18310 |
| HSV1-UL54-1322 | + | GGGUCUUCCAUGUCCUCGUCCGAC | 24 | 18311 |
| HSV1-UL54-1323 | + | ACAAACCAUCGGCAGCCC | 18 | 18312 |
| HSV1-UL54-1324 | + | GACAAACCAUCGGCAGCCC | 19 | 18313 |
| HSV1-UL54-18 | + | CGACAAACCAUCGGCAGCCC | 20 | 6781 |
| HSV1-UL54-1325 | + | CCGACAAACCAUCGGCAGCCC | 21 | 18314 |
| HSV1-UL54-1326 | + | UCCGACAAACCAUCGGCAGCCC | 22 | 18315 |
| HSV1-UL54-1327 | + | GUCCGACAAACCAUCGGCAGCCC | 23 | 18316 |
| HSV1-UL54-1328 | + | GGUCCGACAAACCAUCGGCAGCCC | 24 | 18317 |
| HSV1-UL54-1329 | + | GACAAACCAUCGGCAGCC | 18 | 18318 |
| HSV1-UL54-1330 | + | CGACAAACCAUCGGCAGCC | 19 | 18319 |
| HSV1-UL54-1331 | + | CCGACAAACCAUCGGCAGCC | 20 | 18320 |
| HSV1-UL54-1332 | + | UCCGACAAACCAUCGGCAGCC | 21 | 18321 |
| HSV1-UL54-1333 | + | GUCCGACAAACCAUCGGCAGCC | 22 | 18322 |
| HSV1-UL54-1334 | + | GGUCCGACAAACCAUCGGCAGCC | 23 | 18323 |
| HSV1-UL54-1335 | + | GGGUCCGACAAACCAUCGGCAGCC | 24 | 18324 |
| HSV1-UL54-1336 | + | ACGCCCACGGCGUCCGCC | 18 | 18325 |
| HSV1-UL54-1337 | + | GACGCCCACGGCGUCCGCC | 19 | 18326 |
| HSV1-UL54-780 | + | CGACGCCCACGGCGUCCGCC | 20 | 7525 |
| HSV1-UL54-1338 | + | GCGACGCCCACGGCGUCCGCC | 21 | 18327 |
| HSV1-UL54-1339 | + | UGCGACGCCCACGGCGUCCGCC | 22 | 18328 |
| HSV1-UL54-1340 | + | CUGCGACGCCCACGGCGUCCGCC | 23 | 18329 |
| HSV1-UL54-1341 | + | CCUGCGACGCCCACGGCGUCCGCC | 24 | 18330 |
| HSV1-UL54-1342 | + | CAAGACGGUCGCCGGGCC | 18 | 18331 |
| HSV1-UL54-1343 | + | GCAAGACGGUCGCCGGGCC | 19 | 18332 |
| HSV1-UL54-1344 | + | AGCAAGACGGUCGCCGGGCC | 20 | 18333 |
| HSV1-UL54-1345 | + | GAGCAAGACGGUCGCCGGGCC | 21 | 18334 |
| HSV1-UL54-1346 | + | GGAGCAAGACGGUCGCCGGGCC | 22 | 18335 |
| HSV1-UL54-1347 | + | GGGAGCAAGACGGUCGCCGGGCC | 23 | 18336 |
| HSV1-UL54-1348 | + | GGGGAGCAAGACGGUCGCCGGGCC | 24 | 18337 |
| HSV1-UL54-1349 | + | CUCCGGUCCGUCCUCUCC | 18 | 18338 |
| HSV1-UL54-1350 | + | GCUCCGGUCCGUCCUCUCC | 19 | 18339 |
| HSV1-UL54-1351 | + | GGCUCCGGUCCGUCCUCUCC | 20 | 18340 |
| HSV1-UL54-1352 | + | CGGCUCCGGUCCGUCCUCUCC | 21 | 18341 |
| HSV1-UL54-1353 | + | UCGGCUCCGGUCCGUCCUCUCC | 22 | 18342 |
| HSV1-UL54-1354 | + | AUCGGCUCCGGUCCGUCCUCUCC | 23 | 18343 |
| HSV1-UL54-1355 | + | UAUCGGCUCCGGUCCGUCCUCUCC | 24 | 18344 |
| HSV1-UL54-1356 | + | CGGCGGCUCUCCGCCGGC | 18 | 18345 |
| HSV1-UL54-1357 | + | GCGGCGGCUCUCCGCCGGC | 19 | 18346 |
| HSV1-UL54-1358 | + | CGCGGCGGCUCUCCGCCGGC | 20 | 18347 |
| HSV1-UL54-1359 | + | UCGCGGCGGCUCUCCGCCGGC | 21 | 18348 |
| HSV1-UL54-1360 | + | GUCGCGGCGGCUCUCCGCCGGC | 22 | 18349 |
| HSV1-UL54-1361 | + | CGUCGCGGCGGCUCUCCGCCGGC | 23 | 18350 |
| HSV1-UL54-1362 | + | UCGUCGCGGCGGCUCUCCGCCGGC | 24 | 18351 |
| HSV1-UL54-1363 | + | ACCUUGCCCCCGUGCUGC | 18 | 18352 |
| HSV1-UL54-1364 | + | CACCUUGCCCCCGUGCUGC | 19 | 18353 |
| HSV1-UL54-1365 | + | CCACCUUGCCCCCGUGCUGC | 20 | 18354 |
| HSV1-UL54-1366 | + | GCCACCUUGCCCCCGUGCUGC | 21 | 18355 |
| HSV1-UL54-1367 | + | GGCCACCUUGCCCCCGUGCUGC | 22 | 18356 |
| HSV1-UL54-1368 | + | GGGCCACCUUGCCCCCGUGCUGC | 23 | 18357 |
| HSV1-UL54-1369 | + | CGGGCCACCUUGCCCCCGUGCUGC | 24 | 18358 |
| HSV1-UL54-1370 | + | GCGGCUCUCCGCCGGCUC | 18 | 18359 |
| HSV1-UL54-1371 | + | GGCGGCUCUCCGCCGGCUC | 19 | 18360 |
| HSV1-UL54-163 | + | CGGCGGCUCUCCGCCGGCUC | 20 | 6926 |
| HSV1-UL54-1372 | + | GCGGCGGCUCUCCGCCGGCUC | 21 | 18361 |
| HSV1-UL54-1373 | + | CGCGGCGGCUCUCCGCCGGCUC | 22 | 18362 |
| HSV1-UL54-1374 | + | UCGCGGCGGCUCUCCGCCGGCUC | 23 | 18363 |
| HSV1-UL54-1375 | + | GUCGCGGCGGCUCUCCGCCGGCUC | 24 | 18364 |
| HSV1-UL54-1376 | + | CUUGCCCCCGUGCUGCUC | 18 | 18365 |
| HSV1-UL54-1377 | + | CCUUGCCCCCGUGCUGCUC | 19 | 18366 |
| HSV1-UL54-136 | + | ACCUUGCCCCCGUGCUGCUC | 20 | 6899 |
| HSV1-UL54-1378 | + | CACCUUGCCCCCGUGCUGCUC | 21 | 18367 |
| HSV1-UL54-1379 | + | CCACCUUGCCCCCGUGCUGCUC | 22 | 18368 |
| HSV1-UL54-1380 | + | GCCACCUUGCCCCCGUGCUGCUC | 23 | 18369 |
| HSV1-UL54-1381 | + | GGCCACCUUGCCCCCGUGCUGCUC | 24 | 18370 |
| HSV1-UL54-1382 | + | CAGGGUUGCGAUUGGUUC | 18 | 18371 |
| HSV1-UL54-1383 | + | CCAGGGUUGCGAUUGGUUC | 19 | 18372 |
| HSV1-UL54-1199 | + | CCCAGGGUUGCGAUUGGUUC | 20 | 18188 |
| HSV1-UL54-1384 | + | CCCCAGGGUUGCGAUUGGUUC | 21 | 18373 |
| HSV1-UL54-1385 | + | CCCCCAGGGUUGCGAUUGGUUC | 22 | 18374 |
| HSV1-UL54-1386 | + | UCCCCCAGGGUUGCGAUUGGUUC | 23 | 18375 |
| HSV1-UL54-1387 | + | GUCCCCCAGGGUUGCGAUUGGUUC | 24 | 18376 |
| HSV1-UL54-1388 | + | CGGGGUCUUCUGGACGAG | 18 | 18377 |
| HSV1-UL54-1389 | + | CCGGGGUCUUCUGGACGAG | 19 | 18378 |
| HSV1-UL54-1390 | + | GCCGGGGUCUUCUGGACGAG | 20 | 18379 |
| HSV1-UL54-1391 | + | CGCCGGGGUCUUCUGGACGAG | 21 | 18380 |
| HSV1-UL54-1392 | + | ACGCCGGGGUCUUCUGGACGAG | 22 | 18381 |
| HSV1-UL54-1393 | + | UACGCCGGGGUCUUCUGGACGAG | 23 | 18382 |
| HSV1-UL54-1394 | + | GUACGCCGGGGUCUUCUGGACGAG | 24 | 18383 |
| HSV1-UL54-1395 | + | GGUCGGUGGGGGUUGGAG | 18 | 18384 |
| HSV1-UL54-1396 | + | UGGUCGGUGGGGGUUGGAG | 19 | 18385 |
| HSV1-UL54-1397 | + | UUGGUCGGUGGGGGUUGGAG | 20 | 18386 |
| HSV1-UL54-1398 | + | UUUGGUCGGUGGGGGUUGGAG | 21 | 18387 |
| HSV1-UL54-1399 | + | CUUUGGUCGGUGGGGGUUGGAG | 22 | 18388 |
| HSV1-UL54-1400 | + | GCUUUGGUCGGUGGGGGUUGGAG | 23 | 18389 |
| HSV1-UL54-1401 | + | GGCUUUGGUCGGUGGGGGUUGGAG | 24 | 18390 |
| HSV1-UL54-1402 | + | CCAUGUCCUCGUCCGACG | 18 | 18391 |
| HSV1-UL54-1403 | + | UCCAUGUCCUCGUCCGACG | 19 | 18392 |
| HSV1-UL54-33 | + | UUCCAUGUCCUCGUCCGACG | 20 | 6796 |
| HSV1-UL54-1404 | + | CUUCCAUGUCCUCGUCCGACG | 21 | 18393 |
| HSV1-UL54-1405 | + | UCUUCCAUGUCCUCGUCCGACG | 22 | 18394 |
| HSV1-UL54-1406 | + | GUCUUCCAUGUCCUCGUCCGACG | 23 | 18395 |
| HSV1-UL54-1407 | + | GGUCUUCCAUGUCCUCGUCCGACG | 24 | 18396 |
| HSV1-UL54-1408 | + | GUCUGGGUGCUGGGUACG | 18 | 18397 |
| HSV1-UL54-1409 | + | CGUCUGGGUGCUGGGUACG | 19 | 18398 |
| HSV1-UL54-1410 | + | GCGUCUGGGUGCUGGGUACG | 20 | 18399 |
| HSV1-UL54-1411 | + | GGCGUCUGGGUGCUGGGUACG | 21 | 18400 |
| HSV1-UL54-1412 | + | AGGCGUCUGGGUGCUGGGUACG | 22 | 18401 |
| HSV1-UL54-1413 | + | GAGGCGUCUGGGUGCUGGGUACG | 23 | 18402 |
| HSV1-UL54-1414 | + | CGAGGCGUCUGGGUGCUGGGUACG | 24 | 18403 |
| HSV1-UL54-1415 | + | GACGAGACGGGCGGACCG | 18 | 18404 |
| HSV1-UL54-1416 | + | GGACGAGACGGGCGGACCG | 19 | 18405 |
| HSV1-UL54-1417 | + | UGGACGAGACGGGCGGACCG | 20 | 18406 |
| HSV1-UL54-1418 | + | CUGGACGAGACGGGCGGACCG | 21 | 18407 |
| HSV1-UL54-1419 | + | UCUGGACGAGACGGGCGGACCG | 22 | 18408 |
| HSV1-UL54-1420 | + | UUCUGGACGAGACGGGCGGACCG | 23 | 18409 |
| HSV1-UL54-1421 | + | CUUCUGGACGAGACGGGCGGACCG | 24 | 18410 |
| HSV1-UL54-1422 | + | GGUUCUGGGGGCACGCCG | 18 | 18411 |
| HSV1-UL54-1423 | + | UGGUUCUGGGGGCACGCCG | 19 | 18412 |
| HSV1-UL54-1424 | + | UUGGUUCUGGGGGCACGCCG | 20 | 18413 |
| HSV1-UL54-1425 | + | AUUGGUUCUGGGGGCACGCCG | 21 | 18414 |
| HSV1-UL54-1426 | + | GAUUGGUUCUGGGGGCACGCCG | 22 | 18415 |
| HSV1-UL54-1427 | + | CGAUUGGUUCUGGGGGCACGCCG | 23 | 18416 |
| HSV1-UL54-1428 | + | GCGAUUGGUUCUGGGGGCACGCCG | 24 | 18417 |
| HSV1-UL54-1429 | + | CCGGGCUGUCGGCUGCCG | 18 | 18418 |
| HSV1-UL54-1430 | + | ACCGGGCUGUCGGCUGCCG | 19 | 18419 |
| HSV1-UL54-1431 | + | GACCGGGCUGUCGGCUGCCG | 20 | 18420 |
| HSV1-UL54-1432 | + | UGACCGGGCUGUCGGCUGCCG | 21 | 18421 |
| HSV1-UL54-1433 | + | AUGACCGGGCUGUCGGCUGCCG | 22 | 18422 |
| HSV1-UL54-1434 | + | CAUGACCGGGCUGUCGGCUGCCG | 23 | 18423 |
| HSV1-UL54-1435 | + | CCAUGACCGGGCUGUCGGCUGCCG | 24 | 18424 |
| HSV1-UL54-1436 | + | UGGGGCCCUGCCGCUCCG | 18 | 18425 |
| HSV1-UL54-1437 | + | UUGGGGCCCUGCCGCUCCG | 19 | 18426 |
| HSV1-UL54-1438 | + | GUUGGGGCCCUGCCGCUCCG | 20 | 18427 |
| HSV1-UL54-1439 | + | CGUUGGGGCCCUGCCGCUCCG | 21 | 18428 |
| HSV1-UL54-1440 | + | UCGUUGGGGCCCUGCCGCUCCG | 22 | 18429 |
| HSV1-UL54-1441 | + | AUCGUUGGGGCCCUGCCGCUCCG | 23 | 18430 |
| HSV1-UL54-1442 | + | GAUCGUUGGGGCCCUGCCGCUCCG | 24 | 18431 |
| HSV1-UL54-1443 | + | UCCGGUCCGUCCUCUCCG | 18 | 18432 |
| HSV1-UL54-1444 | + | CUCCGGUCCGUCCUCUCCG | 19 | 18433 |
| HSV1-UL54-157 | + | GCUCCGGUCCGUCCUCUCCG | 20 | 6920 |
| HSV1-UL54-1445 | + | GGCUCCGGUCCGUCCUCUCCG | 21 | 18434 |
| HSV1-UL54-1446 | + | CGGCUCCGGUCCGUCCUCUCCG | 22 | 18435 |
| HSV1-UL54-1447 | + | UCGGCUCCGGUCCGUCCUCUCCG | 23 | 18436 |
| HSV1-UL54-1448 | + | AUCGGCUCCGGUCCGUCCUCUCCG | 24 | 18437 |
| HSV1-UL54-1449 | + | CUUCCAUGUCCUCGUCCG | 18 | 18438 |
| HSV1-UL54-1450 | + | UCUUCCAUGUCCUCGUCCG | 19 | 18439 |
| HSV1-UL54-1451 | + | GUCUUCCAUGUCCUCGUCCG | 20 | 18440 |
| HSV1-UL54-1452 | + | GGUCUUCCAUGUCCUCGUCCG | 21 | 18441 |
| HSV1-UL54-1453 | + | GGGUCUUCCAUGUCCUCGUCCG | 22 | 18442 |
| HSV1-UL54-1454 | + | GGGGUCUUCCAUGUCCUCGUCCG | 23 | 18443 |
| HSV1-UL54-1455 | + | GGGGGUCUUCCAUGUCCUCGUCCG | 24 | 18444 |
| HSV1-UL54-1456 | + | GGCGCUGGUUGAGGAUCG | 18 | 18445 |
| HSV1-UL54-1457 | + | GGGCGCUGGUUGAGGAUCG | 19 | 18446 |
| HSV1-UL54-1458 | + | GGGGCGCUGGUUGAGGAUCG | 20 | 18447 |
| HSV1-UL54-1459 | + | UGGGGCGCUGGUUGAGGAUCG | 21 | 18448 |
| HSV1-UL54-1460 | + | GUGGGGCGCUGGUUGAGGAUCG | 22 | 18449 |
| HSV1-UL54-1461 | + | UGUGGGGCGCUGGUUGAGGAUCG | 23 | 18450 |
| HSV1-UL54-1462 | + | CUGUGGGGCGCUGGUUGAGGAUCG | 24 | 18451 |
| HSV1-UL54-1463 | + | CGGCUCUCCGCCGGCUCG | 18 | 18452 |
| HSV1-UL54-1464 | + | GCGGCUCUCCGCCGGCUCG | 19 | 18453 |
| HSV1-UL54-164 | + | GGCGGCUCUCCGCCGGCUCG | 20 | 6927 |
| HSV1-UL54-1465 | + | CGGCGGCUCUCCGCCGGCUCG | 21 | 18454 |
| HSV1-UL54-1466 | + | GCGGCGGCUCUCCGCCGGCUCG | 22 | 18455 |
| HSV1-UL54-1467 | + | CGCGGCGGCUCUCCGCCGGCUCG | 23 | 18456 |
| HSV1-UL54-1468 | + | UCGCGGCGGCUCUCCGCCGGCUCG | 24 | 18457 |
| HSV1-UL54-1469 | + | UUGCCCCCGUGCUGCUCG | 18 | 18458 |
| HSV1-UL54-1470 | + | CUUGCCCCCGUGCUGCUCG | 19 | 18459 |
| HSV1-UL54-20 | + | CCUUGCCCCCGUGCUGCUCG | 20 | 6783 |
| HSV1-UL54-1471 | + | ACCUUGCCCCCGUGCUGCUCG | 21 | 18460 |
| HSV1-UL54-1472 | + | CACCUUGCCCCCGUGCUGCUCG | 22 | 18461 |
| HSV1-UL54-1473 | + | CCACCUUGCCCCCGUGCUGCUCG | 23 | 18462 |
| HSV1-UL54-1474 | + | GCCACCUUGCCCCCGUGCUGCUCG | 24 | 18463 |
| HSV1-UL54-1475 | + | GGGGGAGCAAGACGGUCG | 18 | 18464 |
| HSV1-UL54-1476 | + | CGGGGGAGCAAGACGGUCG | 19 | 18465 |
| HSV1-UL54-1477 | + | UCGGGGGAGCAAGACGGUCG | 20 | 18466 |
| HSV1-UL54-1478 | + | CUCGGGGGAGCAAGACGGUCG | 21 | 18467 |
| HSV1-UL54-1479 | + | GCUCGGGGGAGCAAGACGGUCG | 22 | 18468 |
| HSV1-UL54-1480 | + | UGCUCGGGGGAGCAAGACGGUCG | 23 | 18469 |
| HSV1-UL54-1481 | + | CUGCUCGGGGGAGCAAGACGGUCG | 24 | 18470 |
| HSV1-UL54-1482 | + | CAGGCUGGGCUUUGGUCG | 18 | 18471 |
| HSV1-UL54-1483 | + | GCAGGCUGGGCUUUGGUCG | 19 | 18472 |
| HSV1-UL54-1484 | + | GGCAGGCUGGGCUUUGGUCG | 20 | 18473 |
| HSV1-UL54-1485 | + | GGGCAGGCUGGGCUUUGGUCG | 21 | 18474 |
| HSV1-UL54-1486 | + | CGGGCAGGCUGGGCUUUGGUCG | 22 | 18475 |
| HSV1-UL54-1487 | + | GCGGGCAGGCUGGGCUUUGGUCG | 23 | 18476 |
| HSV1-UL54-1488 | + | CGCGGGCAGGCUGGGCUUUGGUCG | 24 | 18477 |
| HSV1-UL54-1489 | + | UCGUCCAGAUCGCUGUCG | 18 | 18478 |
| HSV1-UL54-1490 | + | CUCGUCCAGAUCGCUGUCG | 19 | 18479 |
| HSV1-UL54-1491 | + | CCUCGUCCAGAUCGCUGUCG | 20 | 18480 |
| HSV1-UL54-1492 | + | UCCUCGUCCAGAUCGCUGUCG | 21 | 18481 |
| HSV1-UL54-1493 | + | GUCCUCGUCCAGAUCGCUGUCG | 22 | 18482 |
| HSV1-UL54-1494 | + | GGUCCUCGUCCAGAUCGCUGUCG | 23 | 18483 |
| HSV1-UL54-1495 | + | GGGUCCUCGUCCAGAUCGCUGUCG | 24 | 18484 |
| HSV1-UL54-1496 | + | CUGUCGGAGAGGUCCAGG | 18 | 18485 |
| HSV1-UL54-1497 | + | GCUGUCGGAGAGGUCCAGG | 19 | 18486 |
| HSV1-UL54-1498 | + | CGCUGUCGGAGAGGUCCAGG | 20 | 18487 |
| HSV1-UL54-1499 | + | UCGCUGUCGGAGAGGUCCAGG | 21 | 18488 |
| HSV1-UL54-1500 | + | AUCGCUGUCGGAGAGGUCCAGG | 22 | 18489 |
| HSV1-UL54-1501 | + | GAUCGCUGUCGGAGAGGUCCAGG | 23 | 18490 |
| HSV1-UL54-1502 | + | AGAUCGCUGUCGGAGAGGUCCAGG | 24 | 18491 |
| HSV1-UL54-1503 | + | GCGUCCGCCGCGGGCAGG | 18 | 18492 |
| HSV1-UL54-1504 | + | GGCGUCCGCCGCGGGCAGG | 19 | 18493 |
| HSV1-UL54-1505 | + | CGGCGUCCGCCGCGGGCAGG | 20 | 18494 |
| HSV1-UL54-1506 | + | ACGGCGUCCGCCGCGGGCAGG | 21 | 18495 |
| HSV1-UL54-1507 | + | CACGGCGUCCGCCGCGGGCAGG | 22 | 18496 |
| HSV1-UL54-1508 | + | CCACGGCGUCCGCCGCGGGCAGG | 23 | 18497 |
| HSV1-UL54-1509 | + | CCCACGGCGUCCGCCGCGGGCAGG | 24 | 18498 |
| HSV1-UL54-1510 | + | GUCUUCUGGACGAGACGG | 18 | 18499 |
| HSV1-UL54-1511 | + | GGUCUUCUGGACGAGACGG | 19 | 18500 |
| HSV1-UL54-1512 | + | GGGUCUUCUGGACGAGACGG | 20 | 18501 |
| HSV1-UL54-1513 | + | GGGGUCUUCUGGACGAGACGG | 21 | 18502 |
| HSV1-UL54-1514 | + | CGGGGUCUUCUGGACGAGACGG | 22 | 18503 |
| HSV1-UL54-1515 | + | CCGGGGUCUUCUGGACGAGACGG | 23 | 18504 |
| HSV1-UL54-1516 | + | GCCGGGGUCUUCUGGACGAGACGG | 24 | 18505 |
| HSV1-UL54-1517 | + | GUUCUGGGGGCACGCCGG | 18 | 18506 |
| HSV1-UL54-1518 | + | GGUUCUGGGGGCACGCCGG | 19 | 18507 |
| HSV1-UL54-1201 | + | UGGUUCUGGGGGCACGCCGG | 20 | 18190 |
| HSV1-UL54-1519 | + | UUGGUUCUGGGGGCACGCCGG | 21 | 18508 |
| HSV1-UL54-1520 | + | AUUGGUUCUGGGGGCACGCCGG | 22 | 18509 |
| HSV1-UL54-1521 | + | GAUUGGUUCUGGGGGCACGCCGG | 23 | 18510 |
| HSV1-UL54-1522 | + | CGAUUGGUUCUGGGGGCACGCCGG | 24 | 18511 |
| HSV1-UL54-1523 | + | AGACGGGCGGACCGCCGG | 18 | 18512 |
| HSV1-UL54-1524 | + | GAGACGGGCGGACCGCCGG | 19 | 18513 |
| HSV1-UL54-1525 | + | CGAGACGGGCGGACCGCCGG | 20 | 18514 |
| HSV1-UL54-1526 | + | ACGAGACGGGCGGACCGCCGG | 21 | 18515 |
| HSV1-UL54-1527 | + | GACGAGACGGGCGGACCGCCGG | 22 | 18516 |
| HSV1-UL54-1528 | + | GGACGAGACGGGCGGACCGCCGG | 23 | 18517 |
| HSV1-UL54-1529 | + | UGGACGAGACGGGCGGACCGCCGG | 24 | 18518 |
| HSV1-UL54-1530 | + | UGCCCCCGUGCUGCUCGG | 18 | 18519 |
| HSV1-UL54-1531 | + | UUGCCCCCGUGCUGCUCGG | 19 | 18520 |
| HSV1-UL54-21 | + | CUUGCCCCCGUGCUGCUCGG | 20 | 6784 |
| HSV1-UL54-1532 | + | CCUUGCCCCCGUGCUGCUCGG | 21 | 18521 |
| HSV1-UL54-1533 | + | ACCUUGCCCCCGUGCUGCUCGG | 22 | 18522 |
| HSV1-UL54-1534 | + | CACCUUGCCCCCGUGCUGCUCGG | 23 | 18523 |
| HSV1-UL54-1535 | + | CCACCUUGCCCCCGUGCUGCUCGG | 24 | 18524 |
| HSV1-UL54-1536 | + | GCCCUGCCGCUCCGUCGG | 18 | 18525 |
| HSV1-UL54-1537 | + | GGCCCUGCCGCUCCGUCGG | 19 | 18526 |
| HSV1-UL54-1538 | + | GGGCCCUGCCGCUCCGUCGG | 20 | 18527 |
| HSV1-UL54-1539 | + | GGGGCCCUGCCGCUCCGUCGG | 21 | 18528 |
| HSV1-UL54-1540 | + | UGGGGCCCUGCCGCUCCGUCGG | 22 | 18529 |
| HSV1-UL54-1541 | + | UUGGGGCCCUGCCGCUCCGUCGG | 23 | 18530 |
| HSV1-UL54-1542 | + | GUUGGGGCCCUGCCGCUCCGUCGG | 24 | 18531 |
| HSV1-UL54-1543 | + | AGGCUGGGCUUUGGUCGG | 18 | 18532 |
| HSV1-UL54-1544 | + | CAGGCUGGGCUUUGGUCGG | 19 | 18533 |
| HSV1-UL54-127 | + | GCAGGCUGGGCUUUGGUCGG | 20 | 6890 |
| HSV1-UL54-1545 | + | GGCAGGCUGGGCUUUGGUCGG | 21 | 18534 |
| HSV1-UL54-1546 | + | GGGCAGGCUGGGCUUUGGUCGG | 22 | 18535 |
| HSV1-UL54-1547 | + | CGGGCAGGCUGGGCUUUGGUCGG | 23 | 18536 |
| HSV1-UL54-1548 | + | GCGGGCAGGCUGGGCUUUGGUCGG | 24 | 18537 |
| HSV1-UL54-1549 | + | GGCUUUGGUCGGUGGGGG | 18 | 18538 |
| HSV1-UL54-1550 | + | GGGCUUUGGUCGGUGGGGG | 19 | 18539 |
| HSV1-UL54-1551 | + | UGGGCUUUGGUCGGUGGGGG | 20 | 18540 |
| HSV1-UL54-1552 | + | CUGGGCUUUGGUCGGUGGGGG | 21 | 18541 |
| HSV1-UL54-1553 | + | GCUGGGCUUUGGUCGGUGGGGG | 22 | 18542 |
| HSV1-UL54-1554 | + | GGCUGGGCUUUGGUCGGUGGGGG | 23 | 18543 |
| HSV1-UL54-1555 | + | AGGCUGGGCUUUGGUCGGUGGGGG | 24 | 18544 |
| HSV1-UL54-1556 | + | CACACUGUGGGGCGCUGG | 18 | 18545 |
| HSV1-UL54-1557 | + | ACACACUGUGGGGCGCUGG | 19 | 18546 |
| HSV1-UL54-1558 | + | CACACACUGUGGGGCGCUGG | 20 | 18547 |
| HSV1-UL54-1559 | + | CCACACACUGUGGGGCGCUGG | 21 | 18548 |
| HSV1-UL54-1560 | + | ACCACACACUGUGGGGCGCUGG | 22 | 18549 |
| HSV1-UL54-1561 | + | GACCACACACUGUGGGGCGCUGG | 23 | 18550 |
| HSV1-UL54-1562 | + | CGACCACACACUGUGGGGCGCUGG | 24 | 18551 |
| HSV1-UL54-1563 | + | UACGCCGGGGUCUUCUGG | 18 | 18552 |
| HSV1-UL54-1564 | + | GUACGCCGGGGUCUUCUGG | 19 | 18553 |
| HSV1-UL54-1565 | + | GGUACGCCGGGGUCUUCUGG | 20 | 18554 |
| HSV1-UL54-1566 | + | GGGUACGCCGGGGUCUUCUGG | 21 | 18555 |
| HSV1-UL54-1567 | + | UGGGUACGCCGGGGUCUUCUGG | 22 | 18556 |
| HSV1-UL54-1568 | + | CUGGGUACGCCGGGGUCUUCUGG | 23 | 18557 |
| HSV1-UL54-1569 | + | GCUGGGUACGCCGGGGUCUUCUGG | 24 | 18558 |
| HSV1-UL54-1570 | + | AGGCGCGACCACACACUG | 18 | 18559 |
| HSV1-UL54-1571 | + | GAGGCGCGACCACACACUG | 19 | 18560 |
| HSV1-UL54-24 | + | CGAGGCGCGACCACACACUG | 20 | 6787 |
| HSV1-UL54-1572 | + | CCGAGGCGCGACCACACACUG | 21 | 18561 |
| HSV1-UL54-1573 | + | CCCGAGGCGCGACCACACACUG | 22 | 18562 |
| HSV1-UL54-1574 | + | CCCCGAGGCGCGACCACACACUG | 23 | 18563 |
| HSV1-UL54-1575 | + | GCCCCGAGGCGCGACCACACACUG | 24 | 18564 |
| HSV1-UL54-1576 | + | UCCUCGUCCAGAUCGCUG | 18 | 18565 |
| HSV1-UL54-1577 | + | GUCCUCGUCCAGAUCGCUG | 19 | 18566 |
| HSV1-UL54-1578 | + | GGUCCUCGUCCAGAUCGCUG | 20 | 18567 |
| HSV1-UL54-1579 | + | GGGUCCUCGUCCAGAUCGCUG | 21 | 18568 |
| HSV1-UL54-1580 | + | GGGGUCCUCGUCCAGAUCGCUG | 22 | 18569 |
| HSV1-UL54-1581 | + | GGGGGUCCUCGUCCAGAUCGCUG | 23 | 18570 |
| HSV1-UL54-1582 | + | GGGGGGUCCUCGUCCAGAUCGCUG | 24 | 18571 |
| HSV1-UL54-1583 | + | GAGGCGCGACCACACACU | 18 | 18572 |
| HSV1-UL54-1584 | + | CGAGGCGCGACCACACACU | 19 | 18573 |
| HSV1-UL54-1585 | + | CCGAGGCGCGACCACACACU | 20 | 18574 |
| HSV1-UL54-1586 | + | CCCGAGGCGCGACCACACACU | 21 | 18575 |
| HSV1-UL54-1587 | + | CCCCGAGGCGCGACCACACACU | 22 | 18576 |
| HSV1-UL54-1588 | + | GCCCCGAGGCGCGACCACACACU | 23 | 18577 |
| HSV1-UL54-1589 | + | GGCCCCGAGGCGCGACCACACACU | 24 | 18578 |
| HSV1-UL54-1590 | + | GGCGGCUCUCCGCCGGCU | 18 | 18579 |
| HSV1-UL54-1591 | + | CGGCGGCUCUCCGCCGGCU | 19 | 18580 |
| HSV1-UL54-162 | + | GCGGCGGCUCUCCGCCGGCU | 20 | 6925 |
| HSV1-UL54-1592 | + | CGCGGCGGCUCUCCGCCGGCU | 21 | 18581 |
| HSV1-UL54-1593 | + | UCGCGGCGGCUCUCCGCCGGCU | 22 | 18582 |
| HSV1-UL54-1594 | + | GUCGCGGCGGCUCUCCGCCGGCU | 23 | 18583 |
| HSV1-UL54-1595 | + | CGUCGCGGCGGCUCUCCGCCGGCU | 24 | 18584 |
| HSV1-UL54-1596 | + | CCUUGCCCCCGUGCUGCU | 18 | 18585 |
| HSV1-UL54-1597 | + | ACCUUGCCCCCGUGCUGCU | 19 | 18586 |
| HSV1-UL54-135 | + | CACCUUGCCCCCGUGCUGCU | 20 | 6898 |
| HSV1-UL54-1598 | + | CCACCUUGCCCCCGUGCUGCU | 21 | 18587 |
| HSV1-UL54-1599 | + | GCCACCUUGCCCCCGUGCUGCU | 22 | 18588 |
| HSV1-UL54-1600 | + | GGCCACCUUGCCCCCGUGCUGCU | 23 | 18589 |
| HSV1-UL54-1601 | + | GGGCCACCUUGCCCCCGUGCUGCU | 24 | 18590 |
| HSV1-UL54-1602 | + | AGGGUUGCGAUUGGUUCU | 18 | 18591 |
| HSV1-UL54-1603 | + | CAGGGUUGCGAUUGGUUCU | 19 | 18592 |
| HSV1-UL54-1221 | + | CCAGGGUUGCGAUUGGUUCU | 20 | 18210 |
| HSV1-UL54-1604 | + | CCCAGGGUUGCGAUUGGUUCU | 21 | 18593 |
| HSV1-UL54-1605 | + | CCCCAGGGUUGCGAUUGGUUCU | 22 | 18594 |
| HSV1-UL54-1606 | + | CCCCCAGGGUUGCGAUUGGUUCU | 23 | 18595 |
| HSV1-UL54-1607 | + | UCCCCCAGGGUUGCGAUUGGUUCU | 24 | 18596 |
| HSV1-UL54-1608 | + | CGGGCUGUCGGCUGCCGU | 18 | 18597 |
| HSV1-UL54-1609 | + | CCGGGCUGUCGGCUGCCGU | 19 | 18598 |
| HSV1-UL54-1205 | + | ACCGGGCUGUCGGCUGCCGU | 20 | 18194 |
| HSV1-UL54-1610 | + | GACCGGGCUGUCGGCUGCCGU | 21 | 18599 |
| HSV1-UL54-1611 | + | UGACCGGGCUGUCGGCUGCCGU | 22 | 18600 |
| HSV1-UL54-1612 | + | AUGACCGGGCUGUCGGCUGCCGU | 23 | 18601 |
| HSV1-UL54-1613 | + | CAUGACCGGGCUGUCGGCUGCCGU | 24 | 18602 |
| HSV1-UL54-1614 | + | GCGCUGGUUGAGGAUCGU | 18 | 18603 |
| HSV1-UL54-1615 | + | GGCGCUGGUUGAGGAUCGU | 19 | 18604 |
| HSV1-UL54-142 | + | GGGCGCUGGUUGAGGAUCGU | 20 | 6905 |
| HSV1-UL54-1616 | + | GGGGCGCUGGUUGAGGAUCGU | 21 | 18605 |
| HSV1-UL54-1617 | + | UGGGGCGCUGGUUGAGGAUCGU | 22 | 18606 |
| HSV1-UL54-1618 | + | GUGGGGCGCUGGUUGAGGAUCGU | 23 | 18607 |
| HSV1-UL54-1619 | + | UGUGGGGCGCUGGUUGAGGAUCGU | 24 | 18608 |
| HSV1-UL54-1620 | + | GCUUUGGUCGGUGGGGGU | 18 | 18609 |
| HSV1-UL54-1621 | + | GGCUUUGGUCGGUGGGGGU | 19 | 18610 |
| HSV1-UL54-131 | + | GGGCUUUGGUCGGUGGGGGU | 20 | 6894 |
| HSV1-UL54-1622 | + | UGGGCUUUGGUCGGUGGGGGU | 21 | 18611 |
| HSV1-UL54-1623 | + | CUGGGCUUUGGUCGGUGGGGGU | 22 | 18612 |
| HSV1-UL54-1624 | + | GCUGGGCUUUGGUCGGUGGGGGU | 23 | 18613 |
| HSV1-UL54-1625 | + | GGCUGGGCUUUGGUCGGUGGGGGU | 24 | 18614 |
| HSV1-UL54-1626 | + | CCUCGUCCAGAUCGCUGU | 18 | 18615 |
| HSV1-UL54-1627 | + | UCCUCGUCCAGAUCGCUGU | 19 | 18616 |
| HSV1-UL54-37 | + | GUCCUCGUCCAGAUCGCUGU | 20 | 6800 |
| HSV1-UL54-1628 | + | GGUCCUCGUCCAGAUCGCUGU | 21 | 18617 |
| HSV1-UL54-1629 | + | GGGUCCUCGUCCAGAUCGCUGU | 22 | 18618 |
| HSV1-UL54-1630 | + | GGGGUCCUCGUCCAGAUCGCUGU | 23 | 18619 |
| HSV1-UL54-1631 | + | GGGGGUCCUCGUCCAGAUCGCUGU | 24 | 18620 |
| HSV1-UL54-1632 | + | UGGGUACGCCGGGGUCUU | 18 | 18621 |
| HSV1-UL54-1633 | + | CUGGGUACGCCGGGGUCUU | 19 | 18622 |
| HSV1-UL54-1634 | + | GCUGGGUACGCCGGGGUCUU | 20 | 18623 |
| HSV1-UL54-1635 | + | UGCUGGGUACGCCGGGGUCUU | 21 | 18624 |
| HSV1-UL54-1636 | + | GUGCUGGGUACGCCGGGGUCUU | 22 | 18625 |
| HSV1-UL54-1637 | + | GGUGCUGGGUACGCCGGGGUCUU | 23 | 18626 |
| HSV1-UL54-1638 | + | GGGUGCUGGGUACGCCGGGGUCUU | 24 | 18627 |
| HSV1-UL54-1639 | + | CCAGGGUUGCGAUUGGUU | 18 | 18628 |
| HSV1-UL54-1640 | + | CCCAGGGUUGCGAUUGGUU | 19 | 18629 |
| HSV1-UL54-1641 | + | CCCCAGGGUUGCGAUUGGUU | 20 | 18630 |
| HSV1-UL54-1642 | + | CCCCCAGGGUUGCGAUUGGUU | 21 | 18631 |
| HSV1-UL54-1643 | + | UCCCCCAGGGUUGCGAUUGGUU | 22 | 18632 |
| HSV1-UL54-1644 | + | GUCCCCCAGGGUUGCGAUUGGUU | 23 | 18633 |
| HSV1-UL54-1645 | + | GGUCCCCCAGGGUUGCGAUUGGUU | 24 | 18634 |
| HSV1-UL54-1646 | - | CGCCGCGACGACCUGGAA | 18 | 18635 |
| HSV1-UL54-1647 | - | CCGCCGCGACGACCUGGAA | 19 | 18636 |
| HSV1-UL54-740 | - | GCCGCCGCGACGACCUGGAA | 20 | 7498 |
| HSV1-UL54-1648 | - | AGCCGCCGCGACGACCUGGAA | 21 | 18637 |
| HSV1-UL54-1649 | - | GAGCCGCCGCGACGACCUGGAA | 22 | 18638 |
| HSV1-UL54-1650 | - | AGAGCCGCCGCGACGACCUGGAA | 23 | 18639 |
| HSV1-UL54-1651 | - | GAGAGCCGCCGCGACGACCUGGAA | 24 | 18640 |
| HSV1-UL54-1652 | - | CCUCGUCGGACGAGGACA | 18 | 18641 |
| HSV1-UL54-1653 | - | UCCUCGUCGGACGAGGACA | 19 | 18642 |
| HSV1-UL54-5 | - | UUCCUCGUCGGACGAGGACA | 20 | 6768 |
| HSV1-UL54-1654 | - | GUUCCUCGUCGGACGAGGACA | 21 | 18643 |
| HSV1-UL54-1655 | - | UGUUCCUCGUCGGACGAGGACA | 22 | 18644 |
| HSV1-UL54-1656 | - | GUGUUCCUCGUCGGACGAGGACA | 23 | 18645 |
| HSV1-UL54-1657 | - | AGUGUUCCUCGUCGGACGAGGACA | 24 | 18646 |
| HSV1-UL54-1658 | - | GGACAUGGAAGACCCCCA | 18 | 18647 |
| HSV1-UL54-1659 | - | AGGACAUGGAAGACCCCCA | 19 | 18648 |
| HSV1-UL54-90 | - | GAGGACAUGGAAGACCCCCA | 20 | 6853 |
| HSV1-UL54-1660 | - | CGAGGACAUGGAAGACCCCCA | 21 | 18649 |
| HSV1-UL54-1661 | - | ACGAGGACAUGGAAGACCCCCA | 22 | 18650 |
| HSV1-UL54-1662 | - | GACGAGGACAUGGAAGACCCCCA | 23 | 18651 |
| HSV1-UL54-1663 | - | GGACGAGGACAUGGAAGACCCCCA | 24 | 18652 |
| HSV1-UL54-1664 | - | ACCUGGAAUCGGACAGCA | 18 | 18653 |
| HSV1-UL54-1665 | - | GACCUGGAAUCGGACAGCA | 19 | 18654 |
| HSV1-UL54-741 | - | CGACCUGGAAUCGGACAGCA | 20 | 7499 |
| HSV1-UL54-1666 | - | ACGACCUGGAAUCGGACAGCA | 21 | 18655 |
| HSV1-UL54-1667 | - | GACGACCUGGAAUCGGACAGCA | 22 | 18656 |
| HSV1-UL54-1668 | - | CGACGACCUGGAAUCGGACAGCA | 23 | 18657 |
| HSV1-UL54-1669 | - | GCGACGACCUGGAAUCGGACAGCA | 24 | 18658 |
| HSV1-UL54-1670 | - | UUGCUCCCCCGAGCAGCA | 18 | 18659 |
| HSV1-UL54-1671 | - | CUUGCUCCCCCGAGCAGCA | 19 | 18660 |
| HSV1-UL54-99 | - | UCUUGCUCCCCCGAGCAGCA | 20 | 6862 |
| HSV1-UL54-1672 | - | GUCUUGCUCCCCCGAGCAGCA | 21 | 18661 |
| HSV1-UL54-1673 | - | CGUCUUGCUCCCCCGAGCAGCA | 22 | 18662 |
| HSV1-UL54-1674 | - | CCGUCUUGCUCCCCCGAGCAGCA | 23 | 18663 |
| HSV1-UL54-1675 | - | ACCGUCUUGCUCCCCCGAGCAGCA | 24 | 18664 |
| HSV1-UL54-1676 | - | CCCAGACGCCUCGUCCGA | 18 | 18665 |
| HSV1-UL54-1677 | - | ACCCAGACGCCUCGUCCGA | 19 | 18666 |
| HSV1-UL54-8 | - | CACCCAGACGCCUCGUCCGA | 20 | 6771 |
| HSV1-UL54-1678 | - | GCACCCAGACGCCUCGUCCGA | 21 | 18667 |
| HSV1-UL54-1679 | - | AGCACCCAGACGCCUCGUCCGA | 22 | 18668 |
| HSV1-UL54-1680 | - | CAGCACCCAGACGCCUCGUCCGA | 23 | 18669 |
| HSV1-UL54-1681 | - | CCAGCACCCAGACGCCUCGUCCGA | 24 | 18670 |
| HSV1-UL54-1682 | - | AUGGAAGACCCCCACGGA | 18 | 18671 |
| HSV1-UL54-1683 | - | CAUGGAAGACCCCCACGGA | 19 | 18672 |
| HSV1-UL54-750 | - | ACAUGGAAGACCCCCACGGA | 20 | 7504 |
| HSV1-UL54-1684 | - | GACAUGGAAGACCCCCACGGA | 21 | 18673 |
| HSV1-UL54-1685 | - | GGACAUGGAAGACCCCCACGGA | 22 | 18674 |
| HSV1-UL54-1686 | - | AGGACAUGGAAGACCCCCACGGA | 23 | 18675 |
| HSV1-UL54-1687 | - | GAGGACAUGGAAGACCCCCACGGA | 24 | 18676 |
| HSV1-UL54-1688 | - | CCCCACGGAGAGGACGGA | 18 | 18677 |
| HSV1-UL54-1689 | - | CCCCCACGGAGAGGACGGA | 19 | 18678 |
| HSV1-UL54-751 | - | ACCCCCACGGAGAGGACGGA | 20 | 7505 |
| HSV1-UL54-1690 | - | GACCCCCACGGAGAGGACGGA | 21 | 18679 |
| HSV1-UL54-1691 | - | AGACCCCCACGGAGAGGACGGA | 22 | 18680 |
| HSV1-UL54-1692 | - | AAGACCCCCACGGAGAGGACGGA | 23 | 18681 |
| HSV1-UL54-1693 | - | GAAGACCCCCACGGAGAGGACGGA | 24 | 18682 |
| HSV1-UL54-1694 | - | UGCUCCCCCGAGCAGCAC | 18 | 18683 |
| HSV1-UL54-1695 | - | UUGCUCCCCCGAGCAGCAC | 19 | 18684 |
| HSV1-UL54-100 | - | CUUGCUCCCCCGAGCAGCAC | 20 | 6863 |
| HSV1-UL54-1696 | - | UCUUGCUCCCCCGAGCAGCAC | 21 | 18685 |
| HSV1-UL54-1697 | - | GUCUUGCUCCCCCGAGCAGCAC | 22 | 18686 |
| HSV1-UL54-1698 | - | CGUCUUGCUCCCCCGAGCAGCAC | 23 | 18687 |
| HSV1-UL54-1699 | - | CCGUCUUGCUCCCCCGAGCAGCAC | 24 | 18688 |
| HSV1-UL54-1700 | - | GAGAGCCGCCGCGACGAC | 18 | 18689 |
| HSV1-UL54-1701 | - | GGAGAGCCGCCGCGACGAC | 19 | 18690 |
| HSV1-UL54-738 | - | CGGAGAGCCGCCGCGACGAC | 20 | 7497 |
| HSV1-UL54-1702 | - | GCGGAGAGCCGCCGCGACGAC | 21 | 18691 |
| HSV1-UL54-1703 | - | GGCGGAGAGCCGCCGCGACGAC | 22 | 18692 |
| HSV1-UL54-1704 | - | CGGCGGAGAGCCGCCGCGACGAC | 23 | 18693 |
| HSV1-UL54-1705 | - | CCGGCGGAGAGCCGCCGCGACGAC | 24 | 18694 |
| HSV1-UL54-1706 | - | UCCUCGUCGGACGAGGAC | 18 | 18695 |
| HSV1-UL54-1707 | - | UUCCUCGUCGGACGAGGAC | 19 | 18696 |
| HSV1-UL54-747 | - | GUUCCUCGUCGGACGAGGAC | 20 | 7502 |
| HSV1-UL54-1708 | - | UGUUCCUCGUCGGACGAGGAC | 21 | 18697 |
| HSV1-UL54-1709 | - | GUGUUCCUCGUCGGACGAGGAC | 22 | 18698 |
| HSV1-UL54-1710 | - | AGUGUUCCUCGUCGGACGAGGAC | 23 | 18699 |
| HSV1-UL54-1711 | - | GAGUGUUCCUCGUCGGACGAGGAC | 24 | 18700 |
| HSV1-UL54-1712 | - | CCCACGGAGAGGACGGAC | 18 | 18701 |
| HSV1-UL54-1713 | - | CCCCACGGAGAGGACGGAC | 19 | 18702 |
| HSV1-UL54-93 | - | CCCCCACGGAGAGGACGGAC | 20 | 6856 |
| HSV1-UL54-1714 | - | ACCCCCACGGAGAGGACGGAC | 21 | 18703 |
| HSV1-UL54-1715 | - | GACCCCCACGGAGAGGACGGAC | 22 | 18704 |
| HSV1-UL54-1716 | - | AGACCCCCACGGAGAGGACGGAC | 23 | 18705 |
| HSV1-UL54-1717 | - | AAGACCCCCACGGAGAGGACGGAC | 24 | 18706 |
| HSV1-UL54-1718 | - | GAGUGUUCCUCGUCGGAC | 18 | 18707 |
| HSV1-UL54-1719 | - | GGAGUGUUCCUCGUCGGAC | 19 | 18708 |
| HSV1-UL54-746 | - | GGGAGUGUUCCUCGUCGGAC | 20 | 7501 |
| HSV1-UL54-1720 | - | GGGGAGUGUUCCUCGUCGGAC | 21 | 18709 |
| HSV1-UL54-1721 | - | CGGGGAGUGUUCCUCGUCGGAC | 22 | 18710 |
| HSV1-UL54-1722 | - | GCGGGGAGUGUUCCUCGUCGGAC | 23 | 18711 |
| HSV1-UL54-1723 | - | AGCGGGGAGUGUUCCUCGUCGGAC | 24 | 18712 |
| HSV1-UL54-1724 | - | UCCGACAGCGAUCUGGAC | 18 | 18713 |
| HSV1-UL54-1725 | - | CUCCGACAGCGAUCUGGAC | 19 | 18714 |
| HSV1-UL54-735 | - | UCUCCGACAGCGAUCUGGAC | 20 | 7495 |
| HSV1-UL54-1726 | - | CUCUCCGACAGCGAUCUGGAC | 21 | 18715 |
| HSV1-UL54-1727 | - | CCUCUCCGACAGCGAUCUGGAC | 22 | 18716 |
| HSV1-UL54-1728 | - | ACCUCUCCGACAGCGAUCUGGAC | 23 | 18717 |
| HSV1-UL54-1729 | - | GACCUCUCCGACAGCGAUCUGGAC | 24 | 18718 |
| HSV1-UL54-1730 | - | CCAGAACCAAUCGCAACC | 18 | 18719 |
| HSV1-UL54-1731 | - | CCCAGAACCAAUCGCAACC | 19 | 18720 |
| HSV1-UL54-1732 | - | CCCCAGAACCAAUCGCAACC | 20 | 18721 |
| HSV1-UL54-1733 | - | CCCCCAGAACCAAUCGCAACC | 21 | 18722 |
| HSV1-UL54-1734 | - | GCCCCCAGAACCAAUCGCAACC | 22 | 18723 |
| HSV1-UL54-1735 | - | UGCCCCCAGAACCAAUCGCAACC | 23 | 18724 |
| HSV1-UL54-1736 | - | GUGCCCCCAGAACCAAUCGCAACC | 24 | 18725 |
| HSV1-UL54-1737 | - | CAGAACCAAUCGCAACCC | 18 | 18726 |
| HSV1-UL54-1738 | - | CCAGAACCAAUCGCAACCC | 19 | 18727 |
| HSV1-UL54-1195 | - | CCCAGAACCAAUCGCAACCC | 20 | 18184 |
| HSV1-UL54-1739 | - | CCCCAGAACCAAUCGCAACCC | 21 | 18728 |
| HSV1-UL54-1740 | - | CCCCCAGAACCAAUCGCAACCC | 22 | 18729 |
| HSV1-UL54-1741 | - | GCCCCCAGAACCAAUCGCAACCC | 23 | 18730 |
| HSV1-UL54-1742 | - | UGCCCCCAGAACCAAUCGCAACCC | 24 | 18731 |
| HSV1-UL54-1743 | - | AGGACAUGGAAGACCCCC | 18 | 18732 |
| HSV1-UL54-1744 | - | GAGGACAUGGAAGACCCCC | 19 | 18733 |
| HSV1-UL54-748 | - | CGAGGACAUGGAAGACCCCC | 20 | 7503 |
| HSV1-UL54-1745 | - | ACGAGGACAUGGAAGACCCCC | 21 | 18734 |
| HSV1-UL54-1746 | - | GACGAGGACAUGGAAGACCCCC | 22 | 18735 |
| HSV1-UL54-1747 | - | GGACGAGGACAUGGAAGACCCCC | 23 | 18736 |
| HSV1-UL54-1748 | - | CGGACGAGGACAUGGAAGACCCCC | 24 | 18737 |
| HSV1-UL54-1749 | - | AUCUGGACGAGGACCCCC | 18 | 18738 |
| HSV1-UL54-1750 | - | GAUCUGGACGAGGACCCCC | 19 | 18739 |
| HSV1-UL54-736 | - | CGAUCUGGACGAGGACCCCC | 20 | 7496 |
| HSV1-UL54-1751 | - | GCGAUCUGGACGAGGACCCCC | 21 | 18740 |
| HSV1-UL54-1752 | - | AGCGAUCUGGACGAGGACCCCC | 22 | 18741 |
| HSV1-UL54-1753 | - | CAGCGAUCUGGACGAGGACCCCC | 23 | 18742 |
| HSV1-UL54-1754 | - | ACAGCGAUCUGGACGAGGACCCCC | 24 | 18743 |
| HSV1-UL54-1755 | - | CCCCCGCCGGCGUGCCCC | 18 | 18744 |
| HSV1-UL54-1756 | - | ACCCCCGCCGGCGUGCCCC | 19 | 18745 |
| HSV1-UL54-1757 | - | GACCCCCGCCGGCGUGCCCC | 20 | 18746 |
| HSV1-UL54-1758 | - | GGACCCCCGCCGGCGUGCCCC | 21 | 18747 |
| HSV1-UL54-1759 | - | CGGACCCCCGCCGGCGUGCCCC | 22 | 18748 |
| HSV1-UL54-1760 | - | UCGGACCCCCGCCGGCGUGCCCC | 23 | 18749 |
| HSV1-UL54-1761 | - | GUCGGACCCCCGCCGGCGUGCCCC | 24 | 18750 |
| HSV1-UL54-1762 | - | GGCGACCGUCUUGCUCCC | 18 | 18751 |
| HSV1-UL54-1763 | - | CGGCGACCGUCUUGCUCCC | 19 | 18752 |
| HSV1-UL54-759 | - | CCGGCGACCGUCUUGCUCCC | 20 | 7510 |
| HSV1-UL54-1764 | - | CCCGGCGACCGUCUUGCUCCC | 21 | 18753 |
| HSV1-UL54-1765 | - | GCCCGGCGACCGUCUUGCUCCC | 22 | 18754 |
| HSV1-UL54-1766 | - | GGCCCGGCGACCGUCUUGCUCCC | 23 | 18755 |
| HSV1-UL54-1767 | - | GGGCCCGGCGACCGUCUUGCUCCC | 24 | 18756 |
| HSV1-UL54-1768 | - | CUGCCCGCGGCGGACGCC | 18 | 18757 |
| HSV1-UL54-1769 | - | CCUGCCCGCGGCGGACGCC | 19 | 18758 |
| HSV1-UL54-764 | - | GCCUGCCCGCGGCGGACGCC | 20 | 7513 |
| HSV1-UL54-1770 | - | AGCCUGCCCGCGGCGGACGCC | 21 | 18759 |
| HSV1-UL54-1771 | - | CAGCCUGCCCGCGGCGGACGCC | 22 | 18760 |
| HSV1-UL54-1772 | - | CCAGCCUGCCCGCGGCGGACGCC | 23 | 18761 |
| HSV1-UL54-1773 | - | CCCAGCCUGCCCGCGGCGGACGCC | 24 | 18762 |
| HSV1-UL54-1774 | - | ACAGUGUGUGGUCGCGCC | 18 | 18763 |
| HSV1-UL54-1775 | - | CACAGUGUGUGGUCGCGCC | 19 | 18764 |
| HSV1-UL54-757 | - | CCACAGUGUGUGGUCGCGCC | 20 | 7509 |
| HSV1-UL54-1776 | - | CCCACAGUGUGUGGUCGCGCC | 21 | 18765 |
| HSV1-UL54-1777 | - | CCCCACAGUGUGUGGUCGCGCC | 22 | 18766 |
| HSV1-UL54-1778 | - | GCCCCACAGUGUGUGGUCGCGCC | 23 | 18767 |
| HSV1-UL54-1779 | - | CGCCCCACAGUGUGUGGUCGCGCC | 24 | 18768 |
| HSV1-UL54-1780 | - | UCGGGGUCGCGGUGGUCC | 18 | 18769 |
| HSV1-UL54-1781 | - | GUCGGGGUCGCGGUGGUCC | 19 | 18770 |
| HSV1-UL54-116 | - | GGUCGGGGUCGCGGUGGUCC | 20 | 6879 |
| HSV1-UL54-1782 | - | GGGUCGGGGUCGCGGUGGUCC | 21 | 18771 |
| HSV1-UL54-1783 | - | GGGGUCGGGGUCGCGGUGGUCC | 22 | 18772 |
| HSV1-UL54-1784 | - | AGGGGUCGGGGUCGCGGUGGUCC | 23 | 18773 |
| HSV1-UL54-1785 | - | CAGGGGUCGGGGUCGCGGUGGUCC | 24 | 18774 |
| HSV1-UL54-1786 | - | CUGGAAUCGGACAGCAGC | 18 | 18775 |
| HSV1-UL54-1787 | - | CCUGGAAUCGGACAGCAGC | 19 | 18776 |
| HSV1-UL54-87 | - | ACCUGGAAUCGGACAGCAGC | 20 | 6850 |
| HSV1-UL54-1788 | - | GACCUGGAAUCGGACAGCAGC | 21 | 18777 |
| HSV1-UL54-1789 | - | CGACCUGGAAUCGGACAGCAGC | 22 | 18778 |
| HSV1-UL54-1790 | - | ACGACCUGGAAUCGGACAGCAGC | 23 | 18779 |
| HSV1-UL54-1791 | - | GACGACCUGGAAUCGGACAGCAGC | 24 | 18780 |
| HSV1-UL54-1792 | - | CUUGCUCCCCCGAGCAGC | 18 | 18781 |
| HSV1-UL54-1793 | - | UCUUGCUCCCCCGAGCAGC | 19 | 18782 |
| HSV1-UL54-760 | - | GUCUUGCUCCCCCGAGCAGC | 20 | 7511 |
| HSV1-UL54-1794 | - | CGUCUUGCUCCCCCGAGCAGC | 21 | 18783 |
| HSV1-UL54-1795 | - | CCGUCUUGCUCCCCCGAGCAGC | 22 | 18784 |
| HSV1-UL54-1796 | - | ACCGUCUUGCUCCCCCGAGCAGC | 23 | 18785 |
| HSV1-UL54-1797 | - | GACCGUCUUGCUCCCCCGAGCAGC | 24 | 18786 |
| HSV1-UL54-1798 | - | AUGCUAAUUGACCUCGGC | 18 | 18787 |
| HSV1-UL54-1799 | - | UAUGCUAAUUGACCUCGGC | 19 | 18788 |
| HSV1-UL54-733 | - | AUAUGCUAAUUGACCUCGGC | 20 | 7493 |
| HSV1-UL54-1800 | - | GAUAUGCUAAUUGACCUCGGC | 21 | 18789 |
| HSV1-UL54-1801 | - | UGAUAUGCUAAUUGACCUCGGC | 22 | 18790 |
| HSV1-UL54-1802 | - | UUGAUAUGCUAAUUGACCUCGGC | 23 | 18791 |
| HSV1-UL54-1803 | - | AUUGAUAUGCUAAUUGACCUCGGC | 24 | 18792 |
| HSV1-UL54-1804 | - | CGGUCCGCCCGUCUCGUC | 18 | 18793 |
| HSV1-UL54-1805 | - | GCGGUCCGCCCGUCUCGUC | 19 | 18794 |
| HSV1-UL54-753 | - | GGCGGUCCGCCCGUCUCGUC | 20 | 7506 |
| HSV1-UL54-1806 | - | CGGCGGUCCGCCCGUCUCGUC | 21 | 18795 |
| HSV1-UL54-1807 | - | CCGGCGGUCCGCCCGUCUCGUC | 22 | 18796 |
| HSV1-UL54-1808 | - | CCCGGCGGUCCGCCCGUCUCGUC | 23 | 18797 |
| HSV1-UL54-1809 | - | GCCCGGCGGUCCGCCCGUCUCGUC | 24 | 18798 |
| HSV1-UL54-1810 | - | GUCGGGGUCGCGGUGGUC | 18 | 18799 |
| HSV1-UL54-1811 | - | GGUCGGGGUCGCGGUGGUC | 19 | 18800 |
| HSV1-UL54-769 | - | GGGUCGGGGUCGCGGUGGUC | 20 | 7516 |
| HSV1-UL54-1812 | - | GGGGUCGGGGUCGCGGUGGUC | 21 | 18801 |
| HSV1-UL54-1813 | - | AGGGGUCGGGGUCGCGGUGGUC | 22 | 18802 |
| HSV1-UL54-1814 | - | CAGGGGUCGGGGUCGCGGUGGUC | 23 | 18803 |
| HSV1-UL54-1815 | - | GCAGGGGUCGGGGUCGCGGUGGUC | 24 | 18804 |
| HSV1-UL54-1816 | - | CCUGGAAUCGGACAGCAG | 18 | 18805 |
| HSV1-UL54-1817 | - | ACCUGGAAUCGGACAGCAG | 19 | 18806 |
| HSV1-UL54-86 | - | GACCUGGAAUCGGACAGCAG | 20 | 6849 |
| HSV1-UL54-1818 | - | CGACCUGGAAUCGGACAGCAG | 21 | 18807 |
| HSV1-UL54-1819 | - | ACGACCUGGAAUCGGACAGCAG | 22 | 18808 |
| HSV1-UL54-1820 | - | GACGACCUGGAAUCGGACAGCAG | 23 | 18809 |
| HSV1-UL54-1821 | - | CGACGACCUGGAAUCGGACAGCAG | 24 | 18810 |
| HSV1-UL54-1822 | - | ACAUGGAAGACCCCCACG | 18 | 18811 |
| HSV1-UL54-1823 | - | GACAUGGAAGACCCCCACG | 19 | 18812 |
| HSV1-UL54-727 | - | GGACAUGGAAGACCCCCACG | 20 | 7488 |
| HSV1-UL54-1824 | - | AGGACAUGGAAGACCCCCACG | 21 | 18813 |
| HSV1-UL54-1825 | - | GAGGACAUGGAAGACCCCCACG | 22 | 18814 |
| HSV1-UL54-1826 | - | CGAGGACAUGGAAGACCCCCACG | 23 | 18815 |
| HSV1-UL54-1827 | - | ACGAGGACAUGGAAGACCCCCACG | 24 | 18816 |
| HSV1-UL54-1828 | - | GAGGACCCCCCCGAGCCG | 18 | 18817 |
| HSV1-UL54-1829 | - | CGAGGACCCCCCCGAGCCG | 19 | 18818 |
| HSV1-UL54-729 | - | ACGAGGACCCCCCCGAGCCG | 20 | 7490 |
| HSV1-UL54-1830 | - | GACGAGGACCCCCCCGAGCCG | 21 | 18819 |
| HSV1-UL54-1831 | - | GGACGAGGACCCCCCCGAGCCG | 22 | 18820 |
| HSV1-UL54-1832 | - | UGGACGAGGACCCCCCCGAGCCG | 23 | 18821 |
| HSV1-UL54-1833 | - | CUGGACGAGGACCCCCCCGAGCCG | 24 | 18822 |
| HSV1-UL54-1834 | - | ACCCAGACGCCUCGUCCG | 18 | 18823 |
| HSV1-UL54-1835 | - | CACCCAGACGCCUCGUCCG | 19 | 18824 |
| HSV1-UL54-754 | - | GCACCCAGACGCCUCGUCCG | 20 | 7507 |
| HSV1-UL54-1836 | - | AGCACCCAGACGCCUCGUCCG | 21 | 18825 |
| HSV1-UL54-1837 | - | CAGCACCCAGACGCCUCGUCCG | 22 | 18826 |
| HSV1-UL54-1838 | - | CCAGCACCCAGACGCCUCGUCCG | 23 | 18827 |
| HSV1-UL54-1839 | - | CCCAGCACCCAGACGCCUCGUCCG | 24 | 18828 |
| HSV1-UL54-1840 | - | AAGCCCAGCCUGCCCGCG | 18 | 18829 |
| HSV1-UL54-1841 | - | AAAGCCCAGCCUGCCCGCG | 19 | 18830 |
| HSV1-UL54-763 | - | CAAAGCCCAGCCUGCCCGCG | 20 | 7512 |
| HSV1-UL54-1842 | - | CCAAAGCCCAGCCUGCCCGCG | 21 | 18831 |
| HSV1-UL54-1843 | - | ACCAAAGCCCAGCCUGCCCGCG | 22 | 18832 |
| HSV1-UL54-1844 | - | GACCAAAGCCCAGCCUGCCCGCG | 23 | 18833 |
| HSV1-UL54-1845 | - | CGACCAAAGCCCAGCCUGCCCGCG | 24 | 18834 |
| HSV1-UL54-1846 | - | GACCCCCCCGAGCCGGCG | 18 | 18835 |
| HSV1-UL54-1847 | - | GGACCCCCCCGAGCCGGCG | 19 | 18836 |
| HSV1-UL54-730 | - | AGGACCCCCCCGAGCCGGCG | 20 | 7491 |
| HSV1-UL54-1848 | - | GAGGACCCCCCCGAGCCGGCG | 21 | 18837 |
| HSV1-UL54-1849 | - | CGAGGACCCCCCCGAGCCGGCG | 22 | 18838 |
| HSV1-UL54-1850 | - | ACGAGGACCCCCCCGAGCCGGCG | 23 | 18839 |
| HSV1-UL54-1851 | - | GACGAGGACCCCCCCGAGCCGGCG | 24 | 18840 |
| HSV1-UL54-1852 | - | AGCGGGGAGUGUUCCUCG | 18 | 18841 |
| HSV1-UL54-1853 | - | CAGCGGGGAGUGUUCCUCG | 19 | 18842 |
| HSV1-UL54-745 | - | GCAGCGGGGAGUGUUCCUCG | 20 | 7500 |
| HSV1-UL54-1854 | - | AGCAGCGGGGAGUGUUCCUCG | 21 | 18843 |
| HSV1-UL54-1855 | - | CAGCAGCGGGGAGUGUUCCUCG | 22 | 18844 |
| HSV1-UL54-1856 | - | ACAGCAGCGGGGAGUGUUCCUCG | 23 | 18845 |
| HSV1-UL54-1857 | - | GACAGCAGCGGGGAGUGUUCCUCG | 24 | 18846 |
| HSV1-UL54-1858 | - | CGGACGCCGUGGGCGUCG | 18 | 18847 |
| HSV1-UL54-1859 | - | GCGGACGCCGUGGGCGUCG | 19 | 18848 |
| HSV1-UL54-765 | - | GGCGGACGCCGUGGGCGUCG | 20 | 7514 |
| HSV1-UL54-1860 | - | CGGCGGACGCCGUGGGCGUCG | 21 | 18849 |
| HSV1-UL54-1861 | - | GCGGCGGACGCCGUGGGCGUCG | 22 | 18850 |
| HSV1-UL54-1862 | - | CGCGGCGGACGCCGUGGGCGUCG | 23 | 18851 |
| HSV1-UL54-1863 | - | CCGCGGCGGACGCCGUGGGCGUCG | 24 | 18852 |
| HSV1-UL54-1864 | - | AAGACCCCCACGGAGAGG | 18 | 18853 |
| HSV1-UL54-1865 | - | GAAGACCCCCACGGAGAGG | 19 | 18854 |
| HSV1-UL54-728 | - | GGAAGACCCCCACGGAGAGG | 20 | 7489 |
| HSV1-UL54-1866 | - | UGGAAGACCCCCACGGAGAGG | 21 | 18855 |
| HSV1-UL54-1867 | - | AUGGAAGACCCCCACGGAGAGG | 22 | 18856 |
| HSV1-UL54-1868 | - | CAUGGAAGACCCCCACGGAGAGG | 23 | 18857 |
| HSV1-UL54-1869 | - | ACAUGGAAGACCCCCACGGAGAGG | 24 | 18858 |
| HSV1-UL54-1870 | - | AGGACCCCCCCGAGCCGG | 18 | 18859 |
| HSV1-UL54-1871 | - | GAGGACCCCCCCGAGCCGG | 19 | 18860 |
| HSV1-UL54-84 | - | CGAGGACCCCCCCGAGCCGG | 20 | 6847 |
| HSV1-UL54-1872 | - | ACGAGGACCCCCCCGAGCCGG | 21 | 18861 |
| HSV1-UL54-1873 | - | GACGAGGACCCCCCCGAGCCGG | 22 | 18862 |
| HSV1-UL54-1874 | - | GGACGAGGACCCCCCCGAGCCGG | 23 | 18863 |
| HSV1-UL54-1875 | - | UGGACGAGGACCCCCCCGAGCCGG | 24 | 18864 |
| HSV1-UL54-1876 | - | CCUCGUCCGACGGAGCGG | 18 | 18865 |
| HSV1-UL54-1877 | - | GCCUCGUCCGACGGAGCGG | 19 | 18866 |
| HSV1-UL54-756 | - | CGCCUCGUCCGACGGAGCGG | 20 | 7508 |
| HSV1-UL54-1878 | - | ACGCCUCGUCCGACGGAGCGG | 21 | 18867 |
| HSV1-UL54-1879 | - | GACGCCUCGUCCGACGGAGCGG | 22 | 18868 |
| HSV1-UL54-1880 | - | AGACGCCUCGUCCGACGGAGCGG | 23 | 18869 |
| HSV1-UL54-1881 | - | CAGACGCCUCGUCCGACGGAGCGG | 24 | 18870 |
| HSV1-UL54-1882 | - | GGGAGUGUUCCUCGUCGG | 18 | 18871 |
| HSV1-UL54-1883 | - | GGGGAGUGUUCCUCGUCGG | 19 | 18872 |
| HSV1-UL54-731 | - | CGGGGAGUGUUCCUCGUCGG | 20 | 7492 |
| HSV1-UL54-1884 | - | GCGGGGAGUGUUCCUCGUCGG | 21 | 18873 |
| HSV1-UL54-1885 | - | AGCGGGGAGUGUUCCUCGUCGG | 22 | 18874 |
| HSV1-UL54-1886 | - | CAGCGGGGAGUGUUCCUCGUCGG | 23 | 18875 |
| HSV1-UL54-1887 | - | GCAGCGGGGAGUGUUCCUCGUCGG | 24 | 18876 |
| HSV1-UL54-1888 | - | CCGUGGGCGUCGCAGGGG | 18 | 18877 |
| HSV1-UL54-1889 | - | GCCGUGGGCGUCGCAGGGG | 19 | 18878 |
| HSV1-UL54-767 | - | CGCCGUGGGCGUCGCAGGGG | 20 | 7515 |
| HSV1-UL54-1890 | - | ACGCCGUGGGCGUCGCAGGGG | 21 | 18879 |
| HSV1-UL54-1891 | - | GACGCCGUGGGCGUCGCAGGGG | 22 | 18880 |
| HSV1-UL54-1892 | - | GGACGCCGUGGGCGUCGCAGGGG | 23 | 18881 |
| HSV1-UL54-1893 | - | CGGACGCCGUGGGCGUCGCAGGGG | 24 | 18882 |
| HSV1-UL54-1894 | - | UCUCCGACAGCGAUCUGG | 18 | 18883 |
| HSV1-UL54-1895 | - | CUCUCCGACAGCGAUCUGG | 19 | 18884 |
| HSV1-UL54-726 | - | CCUCUCCGACAGCGAUCUGG | 20 | 7487 |
| HSV1-UL54-1896 | - | ACCUCUCCGACAGCGAUCUGG | 21 | 18885 |
| HSV1-UL54-1897 | - | GACCUCUCCGACAGCGAUCUGG | 22 | 18886 |
| HSV1-UL54-1898 | - | GGACCUCUCCGACAGCGAUCUGG | 23 | 18887 |
| HSV1-UL54-1899 | - | UGGACCUCUCCGACAGCGAUCUGG | 24 | 18888 |
| HSV1-UL54-1900 | - | GAACCAAUCGCAACCCUG | 18 | 18889 |
| HSV1-UL54-1901 | - | AGAACCAAUCGCAACCCUG | 19 | 18890 |
| HSV1-UL54-910 | - | CAGAACCAAUCGCAACCCUG | 20 | 7585 |
| HSV1-UL54-1902 | - | CCAGAACCAAUCGCAACCCUG | 21 | 18891 |
| HSV1-UL54-1903 | - | CCCAGAACCAAUCGCAACCCUG | 22 | 18892 |
| HSV1-UL54-1904 | - | CCCCAGAACCAAUCGCAACCCUG | 23 | 18893 |
| HSV1-UL54-1905 | - | CCCCCAGAACCAAUCGCAACCCUG | 24 | 18894 |
| HSV1-UL54-1906 | - | GGGGCUGCCGAUGGUUUG | 18 | 18895 |
| HSV1-UL54-1907 | - | CGGGGCUGCCGAUGGUUUG | 19 | 18896 |
| HSV1-UL54-771 | - | CCGGGGCUGCCGAUGGUUUG | 20 | 7517 |
| HSV1-UL54-1908 | - | CCCGGGGCUGCCGAUGGUUUG | 21 | 18897 |
| HSV1-UL54-1909 | - | UCCCGGGGCUGCCGAUGGUUUG | 22 | 18898 |
| HSV1-UL54-1910 | - | GUCCCGGGGCUGCCGAUGGUUUG | 23 | 18899 |
| HSV1-UL54-1911 | - | GGUCCCGGGGCUGCCGAUGGUUUG | 24 | 18900 |
| HSV1-UL54-1912 | - | GACCUCUCCGACAGCGAU | 18 | 18901 |
| HSV1-UL54-1913 | - | GGACCUCUCCGACAGCGAU | 19 | 18902 |
| HSV1-UL54-734 | - | UGGACCUCUCCGACAGCGAU | 20 | 7494 |
| HSV1-UL54-1914 | - | CUGGACCUCUCCGACAGCGAU | 21 | 18903 |
| HSV1-UL54-1915 | - | CCUGGACCUCUCCGACAGCGAU | 22 | 18904 |
| HSV1-UL54-1916 | - | GCCUGGACCUCUCCGACAGCGAU | 23 | 18905 |
| HSV1-UL54-1917 | - | GGCCUGGACCUCUCCGACAGCGAU | 24 | 18906 |
| HSV1-UL54-1918 | - | AGAACCAAUCGCAACCCU | 18 | 18907 |
| HSV1-UL54-1919 | - | CAGAACCAAUCGCAACCCU | 19 | 18908 |
| HSV1-UL54-1204 | - | CCAGAACCAAUCGCAACCCU | 20 | 18193 |
| HSV1-UL54-1920 | - | CCCAGAACCAAUCGCAACCCU | 21 | 18909 |
| HSV1-UL54-1921 | - | CCCCAGAACCAAUCGCAACCCU | 22 | 18910 |
| HSV1-UL54-1922 | - | CCCCCAGAACCAAUCGCAACCCU | 23 | 18911 |
| HSV1-UL54-1923 | - | GCCCCCAGAACCAAUCGCAACCCU | 24 | 18912 |
| HSV1-UL54-1924 | - | CAGUGUGUGGUCGCGCCU | 18 | 18913 |
| HSV1-UL54-1925 | - | ACAGUGUGUGGUCGCGCCU | 19 | 18914 |
| HSV1-UL54-98 | - | CACAGUGUGUGGUCGCGCCU | 20 | 6861 |
| HSV1-UL54-1926 | - | CCACAGUGUGUGGUCGCGCCU | 21 | 18915 |
| HSV1-UL54-1927 | - | CCCACAGUGUGUGGUCGCGCCU | 22 | 18916 |
| HSV1-UL54-1928 | - | CCCCACAGUGUGUGGUCGCGCCU | 23 | 18917 |
| HSV1-UL54-1929 | - | GCCCCACAGUGUGUGGUCGCGCCU | 24 | 18918 |

[0809] Table 15E provides exemplary targeting domains for knocking out the UL54 gene selected according to the fifth tier parameters. The targeting domains fall in the coding sequence of the gene, downstream of the first 500 bp of coding sequence (e.g., anywhere from +500 (relative to the start codon) to the stop codon of the gene), and start with a 5′ G. The PAM is NNGRRT. It is contemplated herein that in an embodiment the targeting domain hybridizes to the target domain through complementary base pairing. Any of the targeting domains in the table can be used with a S. aureus Cas9 molecule that generates a double stranded break (Cas9 nuclease) or a single-stranded break (Cas9 nickase).

TABLE 15E

| | | | Target | |
|---|---|---|---|---|
| 5th Tier | DNA | | Site | Seq ID |
| gRNA Name | Strand | Targeting Domain | Length | NO: |
| HSV1-UL54-1930 | + | GAAACGGCUGCCCCCCAA | 18 | 18919 |
| HSV1-UL54-1931 | + | GGAAACGGCUGCCCCCCAA | 19 | 18920 |
| HSV1-UL54-421 | + | GGGAAACGGCUGCCCCCCAA | 20 | 7184 |
| HSV1-UL54-1932 | + | GCGGGAAACGGCUGCCCCCCAA | 22 | 18921 |
| HSV1-UL54-1933 | + | GGCGGGAAACGGCUGCCCCCCAA | 23 | 18922 |
| HSV1-UL54-1934 | + | GCCGCGGUCGUCCCGAUAA | 19 | 18923 |
| HSV1-UL54-1935 | + | GCACAGCCGCGGUCGUCCCGAUAA | 24 | 18924 |
| HSV1-UL54-1936 | + | GUUUUUAUUGUACCUAAAACA | 21 | 18925 |
| HSV1-UL54-1937 | + | GCCCCGGGGCGGGGUCCCC | 19 | 18926 |
| HSV1-UL54-1938 | + | GCCUUGGCGGUCGAUGCGGCCC | 22 | 18927 |
| HSV1-UL54-1939 | + | GGCCUUGGCGGUCGAUGCGGCCC | 23 | 18928 |
| HSV1-UL54-1940 | + | GCUCCGGGGCCGGGGCGC | 18 | 18929 |
| HSV1-UL54-1231 | + | GUUCUGGGGGCACGCCGGC | 19 | 18220 |
| HSV1-UL54-1189 | + | GGUUCUGGGGGCACGCCGGC | 20 | 18178 |
| HSV1-UL54-1232 | + | GAUUGGUUCUGGGGGCACGCCGGC | 24 | 18221 |
| HSV1-UL54-1941 | + | GCGGUUGGCGAGCCUGGC | 18 | 18930 |
| HSV1-UL54-1942 | + | GACGCGGUUGGCGAGCCUGGC | 21 | 18931 |
| HSV1-UL54-1943 | + | GAACACUCCUGGCGGUGCGUGUC | 23 | 18932 |
| HSV1-UL54-1944 | + | GCCAGAAUGACAAACACG | 18 | 18933 |
| HSV1-UL54-1945 | + | GGCCAGAAUGACAAACACG | 19 | 18934 |
| HSV1-UL54-1946 | + | GCCUGGCCAGAAUGACAAACACG | 23 | 18935 |
| HSV1-UL54-1947 | + | GUGUCCGCUGGCCUCCGG | 18 | 18936 |
| HSV1-UL54-1948 | + | GCCCCGUGUCCGCUGGCCUCCGG | 23 | 18937 |
| HSV1-UL54-1949 | + | GCCAGCGUCAUUAGCGGG | 18 | 18938 |
| HSV1-UL54-1950 | + | GCAAUCGCCAGCGUCAUUAGCGGG | 24 | 18939 |
| HSV1-UL54-1951 | + | GUCCACCCCGCCCCGGGG | 18 | 18940 |
| HSV1-UL54-1952 | + | GUCCGUCCACCCCGCCCCGGGG | 22 | 18941 |
| HSV1-UL54-1953 | + | GCGCAGCGGCAGGUUGUG | 18 | 18942 |
| HSV1-UL54-1954 | + | GGCGCAGCGGCAGGUUGUG | 19 | 18943 |
| HSV1-UL54-1955 | + | GGGCGCAGCGGCAGGUUGUG | 20 | 18944 |
| HSV1-UL54-1956 | + | GGGGCGCAGCGGCAGGUUGUG | 21 | 18945 |
| HSV1-UL54-1957 | + | GGGGGCGCAGCGGCAGGUUGUG | 22 | 18946 |
| HSV1-UL54-1958 | + | GCCCCGUGUCCGCUGGCCU | 19 | 18947 |
| HSV1-UL54-1959 | + | GCACGCCCCGUGUCCGCUGGCCU | 23 | 18948 |
| HSV1-UL54-1960 | - | GAAAUCCUAGACACGCACCGCC | 22 | 18949 |
| HSV1-UL54-1961 | - | GGGCAGCCGUUUCCCGCC | 18 | 18950 |
| HSV1-UL54-1962 | - | GGGGCAGCCGUUUCCCGCC | 19 | 18951 |
| HSV1-UL54-935 | - | GGGGGCAGCCGUUUCCCGCC | 20 | 7602 |
| HSV1-UL54-1963 | - | GGGGGGCAGCCGUUUCCCGCC | 21 | 18952 |
| HSV1-UL54-1964 | - | GCCCUUUGACGCCGAGACCAG | 21 | 18953 |
| HSV1-UL54-1965 | - | GGCCCUUUGACGCCGAGACCAG | 22 | 18954 |
| HSV1-UL54-1966 | - | GGGCCCUUUGACGCCGAGACCAG | 23 | 18955 |
| HSV1-UL54-1967 | - | GGGGACCCCGCCCCGGGG | 18 | 18956 |
| HSV1-UL54-1968 | - | GGGGGACCCCGCCCCGGGG | 19 | 18957 |
| HSV1-UL54-1969 | - | GGGACGACCGCGGCUGUG | 18 | 18958 |
| HSV1-UL54-1970 | - | GAGUGUUCGAGUCGUGUCU | 19 | 18959 |
| HSV1-UL54-977 | - | GGAGUGUUCGAGUCGUGUCU | 20 | 7635 |
| HSV1-UL54-1971 | - | GCCAGGAGUGUUCGAGUCGUGUCU | 24 | 18960 |
| HSV1-UL54-1972 | - | GACACGCACCGCCAGGAGUGU | 21 | 18961 |
| HSV1-UL54-333 | - | GACUACGCGACCCUUGGUGU | 20 | 7096 |
| HSV1-UL54-1973 | - | GAUCGACUACGCGACCCUUGGUGU | 24 | 18962 |

[0810] Table 15F provides exemplary targeting domains for knocking out the UL54 gene selected according to the six tier parameters. The targeting domains fall in the coding sequence of the gene, downstream of the first 500 bp of coding sequence (e.g., anywhere from +500 (relative to the start codon) to the stop codon of the gene). The PAM is NNGRRT. It is contemplated herein that in an embodiment the targeting domain hybridizes to the target domain through complementary base pairing. Any of the targeting domains in the table can be used with a S. aureus Cas9 molecule that generates a double stranded break (Cas9 nuclease) or a single-stranded break (Cas9 nickase).

TABLE 15F

| | | | Target | |
|---|---|---|---|---|
| 6th Tier | DNA | | Site | Seq ID |
| gRNA Name | Strand | Targeting Domain | Length | NO: |
| HSV1-UL54-1974 | + | CGGGAAACGGCUGCCCCCCAA | 21 | 18963 |
| HSV1-UL54-1975 | + | CGGCGGGAAACGGCUGCCCCCCAA | 24 | 18964 |
| HSV1-UL54-1976 | + | CCGCGGUCGUCCCGAUAA | 18 | 18965 |
| HSV1-UL54-378 | + | AGCCGCGGUCGUCCCGAUAA | 20 | 7141 |
| HSV1-UL54-1977 | + | CAGCCGCGGUCGUCCCGAUAA | 21 | 18966 |
| HSV1-UL54-1978 | + | ACAGCCGCGGUCGUCCCGAUAA | 22 | 18967 |
| HSV1-UL54-1979 | + | CACAGCCGCGGUCGUCCCGAUAA | 23 | 18968 |
| HSV1-UL54-1980 | + | UUUAUUGUACCUAAAACA | 18 | 18969 |
| HSV1-UL54-1981 | + | UUUUAUUGUACCUAAAACA | 19 | 18970 |
| HSV1-UL54-1225 | + | UUUUUAUUGUACCUAAAACA | 20 | 18214 |
| HSV1-UL54-1982 | + | UGUUUUUAUUGUACCUAAAACA | 22 | 18971 |
| HSV1-UL54-1983 | + | UUGUUUUUAUUGUACCUAAAACA | 23 | 18972 |
| HSV1-UL54-1984 | + | UUUGUUUUUAUUGUACCUAAAACA | 24 | 18973 |
| HSV1-UL54-1985 | + | CUCUCCGACCCCGACACC | 18 | 18974 |
| HSV1-UL54-1986 | + | UCUCUCCGACCCCGACACC | 19 | 18975 |
| HSV1-UL54-1987 | + | UUCUCUCCGACCCCGACACC | 20 | 18976 |
| HSV1-UL54-1988 | + | CUUCUCUCCGACCCCGACACC | 21 | 18977 |
| HSV1-UL54-1989 | + | UCUUCUCUCCGACCCCGACACC | 22 | 18978 |
| HSV1-UL54-1990 | + | AUCUUCUCUCCGACCCCGACACC | 23 | 18979 |
| HSV1-UL54-1991 | + | CAUCUUCUCUCCGACCCCGACACC | 24 | 18980 |
| HSV1-UL54-1992 | + | CCCCGGGGCGGGGUCCCC | 18 | 18981 |
| HSV1-UL54-1993 | + | CGCCCCGGGGCGGGGUCCCC | 20 | 18982 |
| HSV1-UL54-1994 | + | CCGCCCCGGGGCGGGGUCCCC | 21 | 18983 |
| HSV1-UL54-1995 | + | CCCGCCCCGGGGCGGGGUCCCC | 22 | 18984 |
| HSV1-UL54-1996 | + | CCCCGCCCCGGGGCGGGGUCCCC | 23 | 18985 |
| HSV1-UL54-1997 | + | ACCCCGCCCCGGGGCGGGGUCCCC | 24 | 18986 |
| HSV1-UL54-1998 | + | UGGCGGUCGAUGCGGCCC | 18 | 18987 |
| HSV1-UL54-1999 | + | UUGGCGGUCGAUGCGGCCC | 19 | 18988 |
| HSV1-UL54-2000 | + | CUUGGCGGUCGAUGCGGCCC | 20 | 18989 |
| HSV1-UL54-2001 | + | CCUUGGCGGUCGAUGCGGCCC | 21 | 18990 |
| HSV1-UL54-2002 | + | UGGCCUUGGCGGUCGAUGCGGCCC | 24 | 18991 |
| HSV1-UL54-2003 | + | CGCUCCGGGGCCGGGGCGC | 19 | 18992 |
| HSV1-UL54-443 | + | UCGCUCCGGGGCCGGGGCGC | 20 | 7206 |
| HSV1-UL54-2004 | + | UUCGCUCCGGGGCCGGGGCGC | 21 | 18993 |
| HSV1-UL54-2005 | + | UUUCGCUCCGGGGCCGGGGCGC | 22 | 18994 |
| HSV1-UL54-2006 | + | CUUUCGCUCCGGGGCCGGGGCGC | 23 | 18995 |
| HSV1-UL54-2007 | + | CCUUUCGCUCCGGGGCCGGGGCGC | 24 | 18996 |
| HSV1-UL54-1257 | + | UUCUGGGGGCACGCCGGC | 18 | 18246 |
| HSV1-UL54-1258 | + | UGGUUCUGGGGGCACGCCGGC | 21 | 18247 |
| HSV1-UL54-1259 | + | UUGGUUCUGGGGGCACGCCGGC | 22 | 18248 |
| HSV1-UL54-1260 | + | AUUGGUUCUGGGGGCACGCCGGC | 23 | 18249 |
| HSV1-UL54-2008 | + | CGCGGUUGGCGAGCCUGGC | 19 | 18997 |
| HSV1-UL54-2009 | + | ACGCGGUUGGCGAGCCUGGC | 20 | 18998 |
| HSV1-UL54-2010 | + | CGACGCGGUUGGCGAGCCUGGC | 22 | 18999 |
| HSV1-UL54-2011 | + | UCGACGCGGUUGGCGAGCCUGGC | 23 | 19000 |
| HSV1-UL54-2012 | + | CUCGACGCGGUUGGCGAGCCUGGC | 24 | 19001 |
| HSV1-UL54-2013 | + | CUCCUGGCGGUGCGUGUC | 18 | 19002 |
| HSV1-UL54-2014 | + | ACUCCUGGCGGUGCGUGUC | 19 | 19003 |
| HSV1-UL54-2015 | + | CACUCCUGGCGGUGCGUGUC | 20 | 19004 |
| HSV1-UL54-2016 | + | ACACUCCUGGCGGUGCGUGUC | 21 | 19005 |
| HSV1-UL54-2017 | + | AACACUCCUGGCGGUGCGUGUC | 22 | 19006 |
| HSV1-UL54-2018 | + | CGAACACUCCUGGCGGUGCGUGUC | 24 | 19007 |
| HSV1-UL54-2019 | + | UGGCCAGAAUGACAAACACG | 20 | 19008 |
| HSV1-UL54-2020 | + | CUGGCCAGAAUGACAAACACG | 21 | 19009 |
| HSV1-UL54-2021 | + | CCUGGCCAGAAUGACAAACACG | 22 | 19010 |
| HSV1-UL54-2022 | + | AGCCUGGCCAGAAUGACAAACACG | 24 | 19011 |
| HSV1-UL54-2023 | + | CGUGUCCGCUGGCCUCCGG | 19 | 19012 |
| HSV1-UL54-2024 | + | CCGUGUCCGCUGGCCUCCGG | 20 | 19013 |
| HSV1-UL54-2025 | + | CCCGUGUCCGCUGGCCUCCGG | 21 | 19014 |
| HSV1-UL54-2026 | + | CCCCGUGUCCGCUGGCCUCCGG | 22 | 19015 |
| HSV1-UL54-2027 | + | CGCCCCGUGUCCGCUGGCCUCCGG | 24 | 19016 |
| HSV1-UL54-2028 | + | CGCCAGCGUCAUUAGCGGG | 19 | 19017 |
| HSV1-UL54-458 | + | UCGCCAGCGUCAUUAGCGGG | 20 | 7221 |
| HSV1-UL54-2029 | + | AUCGCCAGCGUCAUUAGCGGG | 21 | 19018 |
| HSV1-UL54-2030 | + | AAUCGCCAGCGUCAUUAGCGGG | 22 | 19019 |
| HSV1-UL54-2031 | + | CAAUCGCCAGCGUCAUUAGCGGG | 23 | 19020 |
| HSV1-UL54-2032 | + | CGUCCACCCCGCCCCGGGG | 19 | 19021 |
| HSV1-UL54-480 | + | CCGUCCACCCCGCCCCGGGG | 20 | 7243 |
| HSV1-UL54-2033 | + | UCCGUCCACCCCGCCCCGGGG | 21 | 19022 |
| HSV1-UL54-2034 | + | CGUCCGUCCACCCCGCCCCGGGG | 23 | 19023 |
| HSV1-UL54-2035 | + | CCGUCCGUCCACCCCGCCCCGGGG | 24 | 19024 |
| HSV1-UL54-2036 | + | UGGGGGCGCAGCGGCAGGUUGUG | 23 | 19025 |
| HSV1-UL54-2037 | + | CUGGGGGCGCAGCGGCAGGUUGUG | 24 | 19026 |
| HSV1-UL54-2038 | + | CCCCGUGUCCGCUGGCCU | 18 | 19027 |
| HSV1-UL54-2039 | + | CGCCCCGUGUCCGCUGGCCU | 20 | 19028 |
| HSV1-UL54-2040 | + | ACGCCCCGUGUCCGCUGGCCU | 21 | 19029 |
| HSV1-UL54-2041 | + | CACGCCCCGUGUCCGCUGGCCU | 22 | 19030 |
| HSV1-UL54-2042 | + | CGCACGCCCCGUGUCCGCUGGCCU | 24 | 19031 |
| HSV1-UL54-2043 | - | UCCUAGACACGCACCGCC | 18 | 19032 |
| HSV1-UL54-2044 | - | AUCCUAGACACGCACCGCC | 19 | 19033 |
| HSV1-UL54-343 | - | AAUCCUAGACACGCACCGCC | 20 | 7106 |
| HSV1-UL54-2045 | - | AAAUCCUAGACACGCACCGCC | 21 | 19034 |
| HSV1-UL54-2046 | - | CGAAAUCCUAGACACGCACCGCC | 23 | 19035 |
| HSV1-UL54-2047 | - | UCGAAAUCCUAGACACGCACCGCC | 24 | 19036 |
| HSV1-UL54-2048 | - | UGGGGGGCAGCCGUUUCCCGCC | 22 | 19037 |
| HSV1-UL54-2049 | - | UUGGGGGGCAGCCGUUUCCCGCC | 23 | 19038 |
| HSV1-UL54-2050 | - | UUUGGGGGGCAGCCGUUUCCCGCC | 24 | 19039 |
| HSV1-UL54-2051 | - | CUUUGACGCCGAGACCAG | 18 | 19040 |
| HSV1-UL54-2052 | - | CCUUUGACGCCGAGACCAG | 19 | 19041 |
| HSV1-UL54-942 | - | CCCUUUGACGCCGAGACCAG | 20 | 7608 |
| HSV1-UL54-2053 | - | AGGGCCCUUUGACGCCGAGACCAG | 24 | 19042 |
| HSV1-UL54-257 | - | UGGGGGACCCCGCCCCGGGG | 20 | 7020 |
| HSV1-UL54-2054 | - | CUGGGGGACCCCGCCCCGGGG | 21 | 19043 |
| HSV1-UL54-2055 | - | CCUGGGGGACCCCGCCCCGGGG | 22 | 19044 |
| HSV1-UL54-2056 | - | CCCUGGGGGACCCCGCCCCGGGG | 23 | 19045 |
| HSV1-UL54-2057 | - | ACCCUGGGGGACCCCGCCCCGGGG | 24 | 19046 |
| HSV1-UL54-2058 | - | CGGGACGACCGCGGCUGUG | 19 | 19047 |
| HSV1-UL54-954 | - | UCGGGACGACCGCGGCUGUG | 20 | 7617 |
| HSV1-UL54-2059 | - | AUCGGGACGACCGCGGCUGUG | 21 | 19048 |
| HSV1-UL54-2060 | - | UAUCGGGACGACCGCGGCUGUG | 22 | 19049 |
| HSV1-UL54-2061 | - | UUAUCGGGACGACCGCGGCUGUG | 23 | 19050 |
| HSV1-UL54-2062 | - | AUUAUCGGGACGACCGCGGCUGUG | 24 | 19051 |
| HSV1-UL54-2063 | - | AGUGUUCGAGUCGUGUCU | 18 | 19052 |
| HSV1-UL54-2064 | - | AGGAGUGUUCGAGUCGUGUCU | 21 | 19053 |
| HSV1-UL54-2065 | - | CAGGAGUGUUCGAGUCGUGUCU | 22 | 19054 |
| HSV1-UL54-2066 | - | CCAGGAGUGUUCGAGUCGUGUCU | 23 | 19055 |
| HSV1-UL54-2067 | - | ACGCACCGCCAGGAGUGU | 18 | 19056 |
| HSV1-UL54-2068 | - | CACGCACCGCCAGGAGUGU | 19 | 19057 |
| HSV1-UL54-976 | - | ACACGCACCGCCAGGAGUGU | 20 | 7634 |
| HSV1-UL54-2069 | - | AGACACGCACCGCCAGGAGUGU | 22 | 19058 |
| HSV1-UL54-2070 | - | UAGACACGCACCGCCAGGAGUGU | 23 | 19059 |
| HSV1-UL54-2071 | - | CUAGACACGCACCGCCAGGAGUGU | 24 | 19060 |
| HSV1-UL54-2072 | - | CUACGCGACCCUUGGUGU | 18 | 19061 |
| HSV1-UL54-2073 | - | ACUACGCGACCCUUGGUGU | 19 | 19062 |
| HSV1-UL54-2074 | - | CGACUACGCGACCCUUGGUGU | 21 | 19063 |
| HSV1-UL54-2075 | - | UCGACUACGCGACCCUUGGUGU | 22 | 19064 |
| HSV1-UL54-2076 | - | AUCGACUACGCGACCCUUGGUGU | 23 | 19065 |

[0811] Table 15G provides exemplary targeting domains for knocking out the UL54 gene selected according to the seven tier parameters. The targeting domains fall in the coding sequence of the gene, downstream of the first 500 bp of coding sequence (e.g., anywhere from +500 (relative to the start codon) to the stop codon of the gene). The PAM is NNGRRV. It is contemplated herein that in an embodiment the targeting domain hybridizes to the target domain through complementary base pairing. Any of the targeting domains in the table can be used with a S. aureus Cas9 molecule that generates a double stranded break (Cas9 nuclease) or a single-stranded break (Cas9 nickase).

TABLE 15G

| | | | Target | |
|---|---|---|---|---|
| 7th Tier | DNA | | Site | Seq ID |
| gRNA Name | Strand | Targeting Domain | Length | NO: |
| HSV1-UL54-2077 | + | UUUUUAUUGUACCUAAAA | 18 | 19066 |
| HSV1-UL54-2078 | + | GUUUUUAUUGUACCUAAAA | 19 | 19067 |
| HSV1-UL54-2079 | + | UGUUUUUAUUGUACCUAAAA | 20 | 19068 |
| HSV1-UL54-2080 | + | UUGUUUUUAUUGUACCUAAAA | 21 | 19069 |
| HSV1-UL54-2081 | + | UUUGUUUUUAUUGUACCUAAAA | 22 | 19070 |
| HSV1-UL54-2082 | + | UUUUGUUUUUAUUGUACCUAAAA | 23 | 19071 |
| HSV1-UL54-2083 | + | GUUUUGUUUUUAUUGUACCUAAAA | 24 | 19072 |
| HSV1-UL54-2084 | + | GGAAACGGCUGCCCCCCA | 18 | 19073 |
| HSV1-UL54-2085 | + | GGGAAACGGCUGCCCCCCA | 19 | 19074 |
| HSV1-UL54-2086 | + | CGGGAAACGGCUGCCCCCCA | 20 | 19075 |
| HSV1-UL54-2087 | + | GCGGGAAACGGCUGCCCCCCA | 21 | 19076 |
| HSV1-UL54-2088 | + | GGCGGGAAACGGCUGCCCCCCA | 22 | 19077 |
| HSV1-UL54-2089 | + | CGGCGGGAAACGGCUGCCCCCCA | 23 | 19078 |
| HSV1-UL54-2090 | + | GCGGCGGGAAACGGCUGCCCCCCA | 24 | 19079 |
| HSV1-UL54-2091 | + | CCGCGCCACGCCUCGCCA | 18 | 19080 |
| HSV1-UL54-2092 | + | GCCGCGCCACGCCUCGCCA | 19 | 19081 |
| HSV1-UL54-469 | + | UGCCGCGCCACGCCUCGCCA | 20 | 7232 |
| HSV1-UL54-2093 | + | CUGCCGCGCCACGCCUCGCCA | 21 | 19082 |
| HSV1-UL54-2094 | + | ACUGCCGCGCCACGCCUCGCCA | 22 | 19083 |
| HSV1-UL54-2095 | + | CACUGCCGCGCCACGCCUCGCCA | 23 | 19084 |
| HSV1-UL54-2096 | + | UCACUGCCGCGCCACGCCUCGCCA | 24 | 19085 |
| HSV1-UL54-2097 | + | CUCCUUGGCCCGCCAGCA | 18 | 19086 |
| HSV1-UL54-2098 | + | CCUCCUUGGCCCGCCAGCA | 19 | 19087 |
| HSV1-UL54-2099 | + | CCCUCCUUGGCCCGCCAGCA | 20 | 19088 |
| HSV1-UL54-2100 | + | GCCCUCCUUGGCCCGCCAGCA | 21 | 19089 |
| HSV1-UL54-2101 | + | GGCCCUCCUUGGCCCGCCAGCA | 22 | 19090 |
| HSV1-UL54-2102 | + | GGGCCCUCCUUGGCCCGCCAGCA | 23 | 19091 |
| HSV1-UL54-2103 | + | AGGGCCCUCCUUGGCCCGCCAGCA | 24 | 19092 |
| HSV1-UL54-2104 | + | UCGCGCCUUCAGGUAGCA | 18 | 19093 |
| HSV1-UL54-2105 | + | CUCGCGCCUUCAGGUAGCA | 19 | 19094 |
| HSV1-UL54-2106 | + | CCUCGCGCCUUCAGGUAGCA | 20 | 19095 |
| HSV1-UL54-2107 | + | GCCUCGCGCCUUCAGGUAGCA | 21 | 19096 |
| HSV1-UL54-2108 | + | GGCCUCGCGCCUUCAGGUAGCA | 22 | 19097 |
| HSV1-UL54-2109 | + | AGGCCUCGCGCCUUCAGGUAGCA | 23 | 19098 |
| HSV1-UL54-2110 | + | CAGGCCUCGCGCCUUCAGGUAGCA | 24 | 19099 |
| HSV1-UL54-2111 | + | CGUCUGGUCUCGGCGUCA | 18 | 19100 |
| HSV1-UL54-2112 | + | CCGUCUGGUCUCGGCGUCA | 19 | 19101 |
| HSV1-UL54-2113 | + | CCCGUCUGGUCUCGGCGUCA | 20 | 19102 |
| HSV1-UL54-2114 | + | ACCCGUCUGGUCUCGGCGUCA | 21 | 19103 |
| HSV1-UL54-2115 | + | GACCCGUCUGGUCUCGGCGUCA | 22 | 19104 |
| HSV1-UL54-2116 | + | AGACCCGUCUGGUCUCGGCGUCA | 23 | 19105 |
| HSV1-UL54-2117 | + | GAGACCCGUCUGGUCUCGGCGUCA | 24 | 19106 |
| HSV1-UL54-2118 | + | CCGCCGCGCGCUCGGAGA | 18 | 19107 |
| HSV1-UL54-2119 | + | ACCGCCGCGCGCUCGGAGA | 19 | 19108 |
| HSV1-UL54-427 | + | GACCGCCGCGCGCUCGGAGA | 20 | 7190 |
| HSV1-UL54-2120 | + | CGACCGCCGCGCGCUCGGAGA | 21 | 19109 |
| HSV1-UL54-2121 | + | UCGACCGCCGCGCGCUCGGAGA | 22 | 19110 |
| HSV1-UL54-2122 | + | GUCGACCGCCGCGCGCUCGGAGA | 23 | 19111 |
| HSV1-UL54-2123 | + | GGUCGACCGCCGCGCGCUCGGAGA | 24 | 19112 |
| HSV1-UL54-2124 | + | UUCAGGUAGCACUGGAGA | 18 | 19113 |
| HSV1-UL54-2125 | + | CUUCAGGUAGCACUGGAGA | 19 | 19114 |
| HSV1-UL54-2126 | + | CCUUCAGGUAGCACUGGAGA | 20 | 19115 |
| HSV1-UL54-2127 | + | GCCUUCAGGUAGCACUGGAGA | 21 | 19116 |
| HSV1-UL54-2128 | + | CGCCUUCAGGUAGCACUGGAGA | 22 | 19117 |
| HSV1-UL54-2129 | + | GCGCCUUCAGGUAGCACUGGAGA | 23 | 19118 |
| HSV1-UL54-2130 | + | CGCGCCUUCAGGUAGCACUGGAGA | 24 | 19119 |
| HSV1-UL54-2131 | + | UUGCCGGCAAAAGUGCGA | 18 | 19120 |
| HSV1-UL54-2132 | + | AUUGCCGGCAAAAGUGCGA | 19 | 19121 |
| HSV1-UL54-2133 | + | GAUUGCCGGCAAAAGUGCGA | 20 | 19122 |
| HSV1-UL54-2134 | + | GGAUUGCCGGCAAAAGUGCGA | 21 | 19123 |
| HSV1-UL54-2135 | + | AGGAUUGCCGGCAAAAGUGCGA | 22 | 19124 |
| HSV1-UL54-2136 | + | GAGGAUUGCCGGCAAAAGUGCGA | 23 | 19125 |
| HSV1-UL54-2137 | + | CGAGGAUUGCCGGCAAAAGUGCGA | 24 | 19126 |
| HSV1-UL54-2138 | + | GCCGCGGUCGUCCCGAUA | 18 | 19127 |
| HSV1-UL54-2139 | + | AGCCGCGGUCGUCCCGAUA | 19 | 19128 |
| HSV1-UL54-2140 | + | CAGCCGCGGUCGUCCCGAUA | 20 | 19129 |
| HSV1-UL54-2141 | + | ACAGCCGCGGUCGUCCCGAUA | 21 | 19130 |
| HSV1-UL54-2142 | + | CACAGCCGCGGUCGUCCCGAUA | 22 | 19131 |
| HSV1-UL54-2143 | + | GCACAGCCGCGGUCGUCCCGAUA | 23 | 19132 |
| HSV1-UL54-2144 | + | AGCACAGCCGCGGUCGUCCCGAUA | 24 | 19133 |
| HSV1-UL54-2145 | + | AUAUUUGCCGUGCACGUA | 18 | 19134 |
| HSV1-UL54-2146 | + | AAUAUUUGCCGUGCACGUA | 19 | 19135 |
| HSV1-UL54-346 | + | AAAUAUUUGCCGUGCACGUA | 20 | 7109 |
| HSV1-UL54-2147 | + | AAAAUAUUUGCCGUGCACGUA | 21 | 19136 |
| HSV1-UL54-2148 | + | AAAAAUAUUUGCCGUGCACGUA | 22 | 19137 |
| HSV1-UL54-2149 | + | UAAAAAUAUUUGCCGUGCACGUA | 23 | 19138 |
| HSV1-UL54-2150 | + | AUAAAAAUAUUUGCCGUGCACGUA | 24 | 19139 |
| HSV1-UL54-2151 | + | CAAUCGCCAGCGUCAUUA | 18 | 19140 |
| HSV1-UL54-2152 | + | GCAAUCGCCAGCGUCAUUA | 19 | 19141 |
| HSV1-UL54-2153 | + | GGCAAUCGCCAGCGUCAUUA | 20 | 19142 |
| HSV1-UL54-2154 | + | GGGCAAUCGCCAGCGUCAUUA | 21 | 19143 |
| HSV1-UL54-2155 | + | GGGGCAAUCGCCAGCGUCAUUA | 22 | 19144 |
| HSV1-UL54-2156 | + | GGGGGCAAUCGCCAGCGUCAUUA | 23 | 19145 |
| HSV1-UL54-2157 | + | GGGGGGCAAUCGCCAGCGUCAUUA | 24 | 19146 |
| HSV1-UL54-2158 | + | UUUUAUUGUACCUAAAAC | 18 | 19147 |
| HSV1-UL54-2159 | + | UUUUUAUUGUACCUAAAAC | 19 | 19148 |
| HSV1-UL54-1226 | + | GUUUUUAUUGUACCUAAAAC | 20 | 18215 |
| HSV1-UL54-2160 | + | UGUUUUUAUUGUACCUAAAAC | 21 | 19149 |
| HSV1-UL54-2161 | + | UUGUUUUUAUUGUACCUAAAAC | 22 | 19150 |
| HSV1-UL54-2162 | + | UUUGUUUUUAUUGUACCUAAAAC | 23 | 19151 |
| HSV1-UL54-2163 | + | UUUUGUUUUUAUUGUACCUAAAAC | 24 | 19152 |
| HSV1-UL54-2164 | + | CUGGCCAGAAUGACAAAC | 18 | 19153 |
| HSV1-UL54-2165 | + | CCUGGCCAGAAUGACAAAC | 19 | 19154 |
| HSV1-UL54-2166 | + | GCCUGGCCAGAAUGACAAAC | 20 | 19155 |
| HSV1-UL54-2167 | + | AGCCUGGCCAGAAUGACAAAC | 21 | 19156 |
| HSV1-UL54-2168 | + | GAGCCUGGCCAGAAUGACAAAC | 22 | 19157 |
| HSV1-UL54-2169 | + | CGAGCCUGGCCAGAAUGACAAAC | 23 | 19158 |
| HSV1-UL54-2170 | + | GCGAGCCUGGCCAGAAUGACAAAC | 24 | 19159 |
| HSV1-UL54-2171 | + | UCCUUGGCCCGCCAGCAC | 18 | 19160 |
| HSV1-UL54-2172 | + | CUCCUUGGCCCGCCAGCAC | 19 | 19161 |
| HSV1-UL54-411 | + | CCUCCUUGGCCCGCCAGCAC | 20 | 7174 |
| HSV1-UL54-2173 | + | CCCUCCUUGGCCCGCCAGCAC | 21 | 19162 |
| HSV1-UL54-2174 | + | GCCCUCCUUGGCCCGCCAGCAC | 22 | 19163 |
| HSV1-UL54-2175 | + | GGCCCUCCUUGGCCCGCCAGCAC | 23 | 19164 |
| HSV1-UL54-2176 | + | GGGCCCUCCUUGGCCCGCCAGCAC | 24 | 19165 |
| HSV1-UL54-2177 | + | CGCGCCUUCAGGUAGCAC | 18 | 19166 |
| HSV1-UL54-2178 | + | UCGCGCCUUCAGGUAGCAC | 19 | 19167 |
| HSV1-UL54-371 | + | CUCGCGCCUUCAGGUAGCAC | 20 | 7134 |
| HSV1-UL54-2179 | + | CCUCGCGCCUUCAGGUAGCAC | 21 | 19168 |
| HSV1-UL54-2180 | + | GCCUCGCGCCUUCAGGUAGCAC | 22 | 19169 |
| HSV1-UL54-2181 | + | GGCCUCGCGCCUUCAGGUAGCAC | 23 | 19170 |
| HSV1-UL54-2182 | + | AGGCCUCGCGCCUUCAGGUAGCAC | 24 | 19171 |
| HSV1-UL54-2183 | + | UCAACUCGCAGACACGAC | 18 | 19172 |
| HSV1-UL54-2184 | + | GUCAACUCGCAGACACGAC | 19 | 19173 |
| HSV1-UL54-2185 | + | CGUCAACUCGCAGACACGAC | 20 | 19174 |
| HSV1-UL54-2186 | + | CCGUCAACUCGCAGACACGAC | 21 | 19175 |
| HSV1-UL54-2187 | + | GCCGUCAACUCGCAGACACGAC | 22 | 19176 |
| HSV1-UL54-2188 | + | GGCCGUCAACUCGCAGACACGAC | 23 | 19177 |
| HSV1-UL54-2189 | + | UGGCCGUCAACUCGCAGACACGAC | 24 | 19178 |
| HSV1-UL54-2190 | + | UAUUUGCCGUGCACGUAC | 18 | 19179 |
| HSV1-UL54-2191 | + | AUAUUUGCCGUGCACGUAC | 19 | 19180 |
| HSV1-UL54-347 | + | AAUAUUUGCCGUGCACGUAC | 20 | 7110 |
| HSV1-UL54-2192 | + | AAAUAUUUGCCGUGCACGUAC | 21 | 19181 |
| HSV1-UL54-2193 | + | AAAAUAUUUGCCGUGCACGUAC | 22 | 19182 |
| HSV1-UL54-2194 | + | AAAAAUAUUUGCCGUGCACGUAC | 23 | 19183 |
| HSV1-UL54-2195 | + | UAAAAAUAUUUGCCGUGCACGUAC | 24 | 19184 |
| HSV1-UL54-2196 | + | GCCCGCCAUGCAGGCCCC | 18 | 19185 |
| HSV1-UL54-2197 | + | GGCCCGCCAUGCAGGCCCC | 19 | 19186 |
| HSV1-UL54-359 | + | AGGCCCGCCAUGCAGGCCCC | 20 | 7122 |
| HSV1-UL54-2198 | + | CAGGCCCGCCAUGCAGGCCCC | 21 | 19187 |
| HSV1-UL54-2199 | + | UCAGGCCCGCCAUGCAGGCCCC | 22 | 19188 |
| HSV1-UL54-2200 | + | AUCAGGCCCGCCAUGCAGGCCCC | 23 | 19189 |
| HSV1-UL54-2201 | + | GAUCAGGCCCGCCAUGCAGGCCCC | 24 | 19190 |
| HSV1-UL54-2202 | + | CGUCCGUCCACCCCGCCC | 18 | 19191 |
| HSV1-UL54-2203 | + | CCGUCCGUCCACCCCGCCC | 19 | 19192 |
| HSV1-UL54-477 | + | GCCGUCCGUCCACCCCGCCC | 20 | 7240 |
| HSV1-UL54-2204 | + | GGCCGUCCGUCCACCCCGCCC | 21 | 19193 |
| HSV1-UL54-2205 | + | GGGCCGUCCGUCCACCCCGCCC | 22 | 19194 |
| HSV1-UL54-2206 | + | GGGGCCGUCCGUCCACCCCGCCC | 23 | 19195 |
| HSV1-UL54-2207 | + | CGGGGCCGUCCGUCCACCCCGCCC | 24 | 19196 |
| HSV1-UL54-2208 | + | GGCCCGCCAUGCAGGCCC | 18 | 19197 |
| HSV1-UL54-2209 | + | AGGCCCGCCAUGCAGGCCC | 19 | 19198 |
| HSV1-UL54-358 | + | CAGGCCCGCCAUGCAGGCCC | 20 | 7121 |
| HSV1-UL54-2210 | + | UCAGGCCCGCCAUGCAGGCCC | 21 | 19199 |
| HSV1-UL54-2211 | + | AUCAGGCCCGCCAUGCAGGCCC | 22 | 19200 |
| HSV1-UL54-2212 | + | GAUCAGGCCCGCCAUGCAGGCCC | 23 | 19201 |
| HSV1-UL54-2213 | + | CGAUCAGGCCCGCCAUGCAGGCCC | 24 | 19202 |
| HSV1-UL54-2214 | + | CCGCCAGCACCGGGGCCC | 18 | 19203 |
| HSV1-UL54-2215 | + | CCCGCCAGCACCGGGGCCC | 19 | 19204 |
| HSV1-UL54-414 | + | GCCCGCCAGCACCGGGGCCC | 20 | 7177 |
| HSV1-UL54-2216 | + | GGCCCGCCAGCACCGGGGCCC | 21 | 19205 |
| HSV1-UL54-2217 | + | UGGCCCGCCAGCACCGGGGCCC | 22 | 19206 |
| HSV1-UL54-2218 | + | UUGGCCCGCCAGCACCGGGGCCC | 23 | 19207 |
| HSV1-UL54-2219 | + | CUUGGCCCGCCAGCACCGGGGCCC | 24 | 19208 |
| HSV1-UL54-2220 | + | GGGCGACCAAGGUUUCCC | 18 | 19209 |
| HSV1-UL54-2221 | + | UGGGCGACCAAGGUUUCCC | 19 | 19210 |
| HSV1-UL54-405 | + | GUGGGCGACCAAGGUUUCCC | 20 | 7168 |
| HSV1-UL54-2222 | + | CGUGGGCGACCAAGGUUUCCC | 21 | 19211 |
| HSV1-UL54-2223 | + | CCGUGGGCGACCAAGGUUUCCC | 22 | 19212 |
| HSV1-UL54-2224 | + | GCCGUGGGCGACCAAGGUUUCCC | 23 | 19213 |
| HSV1-UL54-2225 | + | GGCCGUGGGCGACCAAGGUUUCCC | 24 | 19214 |
| HSV1-UL54-2226 | + | CCGUCCGUCCACCCCGCC | 18 | 19215 |
| HSV1-UL54-2227 | + | GCCGUCCGUCCACCCCGCC | 19 | 19216 |
| HSV1-UL54-2228 | + | GGCCGUCCGUCCACCCCGCC | 20 | 19217 |
| HSV1-UL54-2229 | + | GGGCCGUCCGUCCACCCCGCC | 21 | 19218 |
| HSV1-UL54-2230 | + | GGGGCCGUCCGUCCACCCCGCC | 22 | 19219 |
| HSV1-UL54-2231 | + | CGGGGCCGUCCGUCCACCCCGCC | 23 | 19220 |
| HSV1-UL54-2232 | + | CCGGGGCCGUCCGUCCACCCCGCC | 24 | 19221 |
| HSV1-UL54-2233 | + | UGUCCGCCAGACGCCGCC | 18 | 19222 |
| HSV1-UL54-2234 | + | AUGUCCGCCAGACGCCGCC | 19 | 19223 |
| HSV1-UL54-995 | + | AAUGUCCGCCAGACGCCGCC | 20 | 7651 |
| HSV1-UL54-2235 | + | UAAUGUCCGCCAGACGCCGCC | 21 | 19224 |
| HSV1-UL54-2236 | + | UUAAUGUCCGCCAGACGCCGCC | 22 | 19225 |
| HSV1-UL54-2237 | + | CUUAAUGUCCGCCAGACGCCGCC | 23 | 19226 |
| HSV1-UL54-2238 | + | CCUUAAUGUCCGCCAGACGCCGCC | 24 | 19227 |
| HSV1-UL54-2239 | + | GCCGCGCCACGCCUCGCC | 18 | 19228 |
| HSV1-UL54-2240 | + | UGCCGCGCCACGCCUCGCC | 19 | 19229 |
| HSV1-UL54-2241 | + | CUGCCGCGCCACGCCUCGCC | 20 | 19230 |
| HSV1-UL54-2242 | + | ACUGCCGCGCCACGCCUCGCC | 21 | 19231 |
| HSV1-UL54-2243 | + | CACUGCCGCGCCACGCCUCGCC | 22 | 19232 |
| HSV1-UL54-2244 | + | UCACUGCCGCGCCACGCCUCGCC | 23 | 19233 |
| HSV1-UL54-2245 | + | CUCACUGCCGCGCCACGCCUCGCC | 24 | 19234 |
| HSV1-UL54-2246 | + | AGGCCCGCCAUGCAGGCC | 18 | 19235 |
| HSV1-UL54-2247 | + | CAGGCCCGCCAUGCAGGCC | 19 | 19236 |
| HSV1-UL54-984 | + | UCAGGCCCGCCAUGCAGGCC | 20 | 7641 |
| HSV1-UL54-2248 | + | AUCAGGCCCGCCAUGCAGGCC | 21 | 19237 |
| HSV1-UL54-2249 | + | GAUCAGGCCCGCCAUGCAGGCC | 22 | 19238 |
| HSV1-UL54-2250 | + | CGAUCAGGCCCGCCAUGCAGGCC | 23 | 19239 |
| HSV1-UL54-2251 | + | UCGAUCAGGCCCGCCAUGCAGGCC | 24 | 19240 |
| HSV1-UL54-2252 | + | GCGAUAGAGGCUCGGGCC | 18 | 19241 |
| HSV1-UL54-2253 | + | UGCGAUAGAGGCUCGGGCC | 19 | 19242 |
| HSV1-UL54-2254 | + | GUGCGAUAGAGGCUCGGGCC | 20 | 19243 |
| HSV1-UL54-2255 | + | AGUGCGAUAGAGGCUCGGGCC | 21 | 19244 |
| HSV1-UL54-2256 | + | AAGUGCGAUAGAGGCUCGGGCC | 22 | 19245 |
| HSV1-UL54-2257 | + | AAAGUGCGAUAGAGGCUCGGGCC | 23 | 19246 |
| HSV1-UL54-2258 | + | AAAAGUGCGAUAGAGGCUCGGGCC | 24 | 19247 |
| HSV1-UL54-2259 | + | CCCGCCAGCACCGGGGCC | 18 | 19248 |
| HSV1-UL54-2260 | + | GCCCGCCAGCACCGGGGCC | 19 | 19249 |
| HSV1-UL54-1017 | + | GGCCCGCCAGCACCGGGGCC | 20 | 7673 |
| HSV1-UL54-2261 | + | UGGCCCGCCAGCACCGGGGCC | 21 | 19250 |
| HSV1-UL54-2262 | + | UUGGCCCGCCAGCACCGGGGCC | 22 | 19251 |
| HSV1-UL54-2263 | + | CUUGGCCCGCCAGCACCGGGGCC | 23 | 19252 |
| HSV1-UL54-2264 | + | CCUUGGCCCGCCAGCACCGGGGCC | 24 | 19253 |
| HSV1-UL54-2265 | + | GCCGGGGCGCGGGGGUCC | 18 | 19254 |
| HSV1-UL54-2266 | + | GGCCGGGGCGCGGGGGUCC | 19 | 19255 |
| HSV1-UL54-1029 | + | GGGCCGGGGCGCGGGGGUCC | 20 | 7684 |
| HSV1-UL54-2267 | + | GGGGCCGGGGCGCGGGGGUCC | 21 | 19256 |
| HSV1-UL54-2268 | + | CGGGGCCGGGGCGCGGGGGUCC | 22 | 19257 |
| HSV1-UL54-2269 | + | CCGGGGCCGGGGCGCGGGGGUCC | 23 | 19258 |
| HSV1-UL54-2270 | + | UCCGGGGCCGGGGCGCGGGGGUCC | 24 | 19259 |
| HSV1-UL54-2271 | + | GUCCCGAUAAUGGGGUCC | 18 | 19260 |
| HSV1-UL54-2272 | + | CGUCCCGAUAAUGGGGUCC | 19 | 19261 |
| HSV1-UL54-381 | + | UCGUCCCGAUAAUGGGGUCC | 20 | 7144 |
| HSV1-UL54-2273 | + | GUCGUCCCGAUAAUGGGGUCC | 21 | 19262 |
| HSV1-UL54-2274 | + | GGUCGUCCCGAUAAUGGGGUCC | 22 | 19263 |
| HSV1-UL54-2275 | + | CGGUCGUCCCGAUAAUGGGGUCC | 23 | 19264 |
| HSV1-UL54-2276 | + | GCGGUCGUCCCGAUAAUGGGGUCC | 24 | 19265 |
| HSV1-UL54-2277 | + | UGGGCGACCAAGGUUUCC | 18 | 19266 |
| HSV1-UL54-2278 | + | GUGGGCGACCAAGGUUUCC | 19 | 19267 |
| HSV1-UL54-2279 | + | CGUGGGCGACCAAGGUUUCC | 20 | 19268 |
| HSV1-UL54-2280 | + | CCGUGGGCGACCAAGGUUUCC | 21 | 19269 |
| HSV1-UL54-2281 | + | GCCGUGGGCGACCAAGGUUUCC | 22 | 19270 |
| HSV1-UL54-2282 | + | GGCCGUGGGCGACCAAGGUUUCC | 23 | 19271 |
| HSV1-UL54-2283 | + | GGGCCGUGGGCGACCAAGGUUUCC | 24 | 19272 |
| HSV1-UL54-2284 | + | AUCGCCAGCGUCAUUAGC | 18 | 19273 |
| HSV1-UL54-2285 | + | AAUCGCCAGCGUCAUUAGC | 19 | 19274 |
| HSV1-UL54-455 | + | CAAUCGCCAGCGUCAUUAGC | 20 | 7218 |
| HSV1-UL54-2286 | + | GCAAUCGCCAGCGUCAUUAGC | 21 | 19275 |
| HSV1-UL54-2287 | + | GGCAAUCGCCAGCGUCAUUAGC | 22 | 19276 |
| HSV1-UL54-2288 | + | GGGCAAUCGCCAGCGUCAUUAGC | 23 | 19277 |
| HSV1-UL54-2289 | + | GGGGCAAUCGCCAGCGUCAUUAGC | 24 | 19278 |
| HSV1-UL54-2290 | + | CGGUCGACCGCCGCGCGC | 18 | 19279 |
| HSV1-UL54-2291 | + | GCGGUCGACCGCCGCGCGC | 19 | 19280 |
| HSV1-UL54-2292 | + | UGCGGUCGACCGCCGCGCGC | 20 | 19281 |
| HSV1-UL54-2293 | + | AUGCGGUCGACCGCCGCGCGC | 21 | 19282 |
| HSV1-UL54-2294 | + | GAUGCGGUCGACCGCCGCGCGC | 22 | 19283 |
| HSV1-UL54-2295 | + | UGAUGCGGUCGACCGCCGCGCGC | 23 | 19284 |
| HSV1-UL54-2296 | + | CUGAUGCGGUCGACCGCCGCGCGC | 24 | 19285 |
| HSV1-UL54-2297 | + | CCUCGCCAUGGGGGGCGC | 18 | 19286 |
| HSV1-UL54-2298 | + | GCCUCGCCAUGGGGGGCGC | 19 | 19287 |
| HSV1-UL54-474 | + | CGCCUCGCCAUGGGGGGCGC | 20 | 7237 |
| HSV1-UL54-2299 | + | ACGCCUCGCCAUGGGGGGCGC | 21 | 19288 |
| HSV1-UL54-2300 | + | CACGCCUCGCCAUGGGGGGCGC | 22 | 19289 |
| HSV1-UL54-2301 | + | CCACGCCUCGCCAUGGGGGGCGC | 23 | 19290 |
| HSV1-UL54-2302 | + | GCCACGCCUCGCCAUGGGGGGCGC | 24 | 19291 |
| HSV1-UL54-2303 | + | CAAAAGUGCGAUAGAGGC | 18 | 19292 |
| HSV1-UL54-2304 | + | GCAAAAGUGCGAUAGAGGC | 19 | 19293 |
| HSV1-UL54-2305 | + | GGCAAAAGUGCGAUAGAGGC | 20 | 19294 |
| HSV1-UL54-2306 | + | CGGCAAAAGUGCGAUAGAGGC | 21 | 19295 |
| HSV1-UL54-2307 | + | CCGGCAAAAGUGCGAUAGAGGC | 22 | 19296 |
| HSV1-UL54-2308 | + | GCCGGCAAAAGUGCGAUAGAGGC | 23 | 19297 |
| HSV1-UL54-2309 | + | UGCCGGCAAAAGUGCGAUAGAGGC | 24 | 19298 |
| HSV1-UL54-2310 | + | CCAGGGGCUAUUCGCGGC | 18 | 19299 |
| HSV1-UL54-2311 | + | CCCAGGGGCUAUUCGCGGC | 19 | 19300 |
| HSV1-UL54-419 | + | GCCCAGGGGCUAUUCGCGGC | 20 | 7182 |
| HSV1-UL54-2312 | + | GGCCCAGGGGCUAUUCGCGGC | 21 | 19301 |
| HSV1-UL54-2313 | + | GGGCCCAGGGGCUAUUCGCGGC | 22 | 19302 |
| HSV1-UL54-2314 | + | GGGGCCCAGGGGCUAUUCGCGGC | 23 | 19303 |
| HSV1-UL54-2315 | + | CGGGGCCCAGGGGCUAUUCGCGGC | 24 | 19304 |
| HSV1-UL54-2316 | + | CUUGGCGGUCGAUGCGGC | 18 | 19305 |
| HSV1-UL54-2317 | + | CCUUGGCGGUCGAUGCGGC | 19 | 19306 |
| HSV1-UL54-2318 | + | GCCUUGGCGGUCGAUGCGGC | 20 | 19307 |
| HSV1-UL54-2319 | + | GGCCUUGGCGGUCGAUGCGGC | 21 | 19308 |
| HSV1-UL54-2320 | + | UGGCCUUGGCGGUCGAUGCGGC | 22 | 19309 |
| HSV1-UL54-2321 | + | AUGGCCUUGGCGGUCGAUGCGGC | 23 | 19310 |
| HSV1-UL54-2322 | + | CAUGGCCUUGGCGGUCGAUGCGGC | 24 | 19311 |
| HSV1-UL54-2323 | + | GCGCGGGGGUCCGCGGGC | 18 | 19312 |
| HSV1-UL54-2324 | + | GGCGCGGGGGUCCGCGGGC | 19 | 19313 |
| HSV1-UL54-449 | + | GGGCGCGGGGGUCCGCGGGC | 20 | 7212 |
| HSV1-UL54-2325 | + | GGGGCGCGGGGGUCCGCGGGC | 21 | 19314 |
| HSV1-UL54-2326 | + | CGGGGCGCGGGGGUCCGCGGGC | 22 | 19315 |
| HSV1-UL54-2327 | + | CCGGGGCGCGGGGGUCCGCGGGC | 23 | 19316 |
| HSV1-UL54-2328 | + | GCCGGGGCGCGGGGGUCCGCGGGC | 24 | 19317 |
| HSV1-UL54-2329 | + | UCGCUCCGGGGCCGGGGC | 18 | 19318 |
| HSV1-UL54-2330 | + | UUCGCUCCGGGGCCGGGGC | 19 | 19319 |
| HSV1-UL54-2331 | + | UUUCGCUCCGGGGCCGGGGC | 20 | 19320 |
| HSV1-UL54-2332 | + | CUUUCGCUCCGGGGCCGGGGC | 21 | 19321 |
| HSV1-UL54-2333 | + | CCUUUCGCUCCGGGGCCGGGGC | 22 | 19322 |
| HSV1-UL54-2334 | + | GCCUUUCGCUCCGGGGCCGGGGC | 23 | 19323 |
| HSV1-UL54-2335 | + | CGCCUUUCGCUCCGGGGCCGGGGC | 24 | 19324 |
| HSV1-UL54-2336 | + | CGCCUUUCGCUCCGGGGC | 18 | 19325 |
| HSV1-UL54-2337 | + | GCGCCUUUCGCUCCGGGGC | 19 | 19326 |
| HSV1-UL54-439 | + | GGCGCCUUUCGCUCCGGGGC | 20 | 7202 |
| HSV1-UL54-2338 | + | GGGCGCCUUUCGCUCCGGGGC | 21 | 19327 |
| HSV1-UL54-2339 | + | CGGGCGCCUUUCGCUCCGGGGC | 22 | 19328 |
| HSV1-UL54-2340 | + | GCGGGCGCCUUUCGCUCCGGGGC | 23 | 19329 |
| HSV1-UL54-2341 | + | GGCGGGCGCCUUUCGCUCCGGGGC | 24 | 19330 |
| HSV1-UL54-2342 | + | GGCGGGCGCCUUUCGCUC | 18 | 19331 |
| HSV1-UL54-2343 | + | CGGCGGGCGCCUUUCGCUC | 19 | 19332 |
| HSV1-UL54-436 | + | GCGGCGGGCGCCUUUCGCUC | 20 | 7199 |
| HSV1-UL54-2344 | + | GGCGGCGGGCGCCUUUCGCUC | 21 | 19333 |
| HSV1-UL54-2345 | + | CGGCGGCGGGCGCCUUUCGCUC | 22 | 19334 |
| HSV1-UL54-2346 | + | UCGGCGGCGGGCGCCUUUCGCUC | 23 | 19335 |
| HSV1-UL54-2347 | + | GUCGGCGGCGGGCGCCUUUCGCUC | 24 | 19336 |
| HSV1-UL54-2348 | + | CGUCCCGAUAAUGGGGUC | 18 | 19337 |
| HSV1-UL54-2349 | + | UCGUCCCGAUAAUGGGGUC | 19 | 19338 |
| HSV1-UL54-2350 | + | GUCGUCCCGAUAAUGGGGUC | 20 | 19339 |
| HSV1-UL54-2351 | + | GGUCGUCCCGAUAAUGGGGUC | 21 | 19340 |
| HSV1-UL54-2352 | + | CGGUCGUCCCGAUAAUGGGGUC | 22 | 19341 |
| HSV1-UL54-2353 | + | GCGGUCGUCCCGAUAAUGGGGUC | 23 | 19342 |
| HSV1-UL54-2354 | + | CGCGGUCGUCCCGAUAAUGGGGUC | 24 | 19343 |
| HSV1-UL54-1382 | + | CAGGGUUGCGAUUGGUUC | 18 | 18371 |
| HSV1-UL54-1383 | + | CCAGGGUUGCGAUUGGUUC | 19 | 18372 |
| HSV1-UL54-1199 | + | CCCAGGGUUGCGAUUGGUUC | 20 | 18188 |
| HSV1-UL54-1384 | + | CCCCAGGGUUGCGAUUGGUUC | 21 | 18373 |
| HSV1-UL54-1385 | + | CCCCCAGGGUUGCGAUUGGUUC | 22 | 18374 |
| HSV1-UL54-1386 | + | UCCCCCAGGGUUGCGAUUGGUUC | 23 | 18375 |
| HSV1-UL54-1387 | + | GUCCCCCAGGGUUGCGAUUGGUUC | 24 | 18376 |
| HSV1-UL54-2355 | + | ACCGCCGCGCGCUCGGAG | 18 | 19344 |
| HSV1-UL54-2356 | + | GACCGCCGCGCGCUCGGAG | 19 | 19345 |
| HSV1-UL54-2357 | + | CGACCGCCGCGCGCUCGGAG | 20 | 19346 |
| HSV1-UL54-2358 | + | UCGACCGCCGCGCGCUCGGAG | 21 | 19347 |
| HSV1-UL54-2359 | + | GUCGACCGCCGCGCGCUCGGAG | 22 | 19348 |
| HSV1-UL54-2360 | + | GGUCGACCGCCGCGCGCUCGGAG | 23 | 19349 |
| HSV1-UL54-2361 | + | CGGUCGACCGCCGCGCGCUCGGAG | 24 | 19350 |
| HSV1-UL54-2362 | + | AAUCGCCAGCGUCAUUAG | 18 | 19351 |
| HSV1-UL54-2363 | + | CAAUCGCCAGCGUCAUUAG | 19 | 19352 |
| HSV1-UL54-454 | + | GCAAUCGCCAGCGUCAUUAG | 20 | 7217 |
| HSV1-UL54-2364 | + | GGCAAUCGCCAGCGUCAUUAG | 21 | 19353 |
| HSV1-UL54-2365 | + | GGGCAAUCGCCAGCGUCAUUAG | 22 | 19354 |
| HSV1-UL54-2366 | + | GGGGCAAUCGCCAGCGUCAUUAG | 23 | 19355 |
| HSV1-UL54-2367 | + | GGGGGCAAUCGCCAGCGUCAUUAG | 24 | 19356 |
| HSV1-UL54-2368 | + | AUUUGCCGUGCACGUACG | 18 | 19357 |
| HSV1-UL54-2369 | + | UAUUUGCCGUGCACGUACG | 19 | 19358 |
| HSV1-UL54-348 | + | AUAUUUGCCGUGCACGUACG | 20 | 7111 |
| HSV1-UL54-2370 | + | AAUAUUUGCCGUGCACGUACG | 21 | 19359 |
| HSV1-UL54-2371 | + | AAAUAUUUGCCGUGCACGUACG | 22 | 19360 |
| HSV1-UL54-2372 | + | AAAAUAUUUGCCGUGCACGUACG | 23 | 19361 |
| HSV1-UL54-2373 | + | AAAAAUAUUUGCCGUGCACGUACG | 24 | 19362 |
| HSV1-UL54-2374 | + | CCCGCCAUGCAGGCCCCG | 18 | 19363 |
| HSV1-UL54-2375 | + | GCCCGCCAUGCAGGCCCCG | 19 | 19364 |
| HSV1-UL54-360 | + | GGCCCGCCAUGCAGGCCCCG | 20 | 7123 |
| HSV1-UL54-2376 | + | AGGCCCGCCAUGCAGGCCCCG | 21 | 19365 |
| HSV1-UL54-2377 | + | CAGGCCCGCCAUGCAGGCCCCG | 22 | 19366 |
| HSV1-UL54-2378 | + | UCAGGCCCGCCAUGCAGGCCCCG | 23 | 19367 |
| HSV1-UL54-2379 | + | AUCAGGCCCGCCAUGCAGGCCCCG | 24 | 19368 |
| HSV1-UL54-1422 | + | GGUUCUGGGGGCACGCCG | 18 | 18411 |
| HSV1-UL54-1423 | + | UGGUUCUGGGGGCACGCCG | 19 | 18412 |
| HSV1-UL54-1424 | + | UUGGUUCUGGGGGCACGCCG | 20 | 18413 |
| HSV1-UL54-1425 | + | AUUGGUUCUGGGGGCACGCCG | 21 | 18414 |
| HSV1-UL54-1426 | + | GAUUGGUUCUGGGGGCACGCCG | 22 | 18415 |
| HSV1-UL54-1427 | + | CGAUUGGUUCUGGGGGCACGCCG | 23 | 18416 |
| HSV1-UL54-1428 | + | GCGAUUGGUUCUGGGGGCACGCCG | 24 | 18417 |
| HSV1-UL54-2380 | + | GCGCUCGGAGAUGGAGCG | 18 | 19369 |
| HSV1-UL54-2381 | + | CGCGCUCGGAGAUGGAGCG | 19 | 19370 |
| HSV1-UL54-2382 | + | GCGCGCUCGGAGAUGGAGCG | 20 | 19371 |
| HSV1-UL54-2383 | + | CGCGCGCUCGGAGAUGGAGCG | 21 | 19372 |
| HSV1-UL54-2384 | + | CCGCGCGCUCGGAGAUGGAGCG | 22 | 19373 |
| HSV1-UL54-2385 | + | GCCGCGCGCUCGGAGAUGGAGCG | 23 | 19374 |
| HSV1-UL54-2386 | + | CGCCGCGCGCUCGGAGAUGGAGCG | 24 | 19375 |
| HSV1-UL54-2387 | + | UCGCCAGCGUCAUUAGCG | 18 | 19376 |
| HSV1-UL54-2388 | + | AUCGCCAGCGUCAUUAGCG | 19 | 19377 |
| HSV1-UL54-456 | + | AAUCGCCAGCGUCAUUAGCG | 20 | 7219 |
| HSV1-UL54-2389 | + | CAAUCGCCAGCGUCAUUAGCG | 21 | 19378 |
| HSV1-UL54-2390 | + | GCAAUCGCCAGCGUCAUUAGCG | 22 | 19379 |
| HSV1-UL54-2391 | + | GGCAAUCGCCAGCGUCAUUAGCG | 23 | 19380 |
| HSV1-UL54-2392 | + | GGGCAAUCGCCAGCGUCAUUAGCG | 24 | 19381 |
| HSV1-UL54-2393 | + | GCCCAGGGGCUAUUCGCG | 18 | 19382 |
| HSV1-UL54-2394 | + | GGCCCAGGGGCUAUUCGCG | 19 | 19383 |
| HSV1-UL54-2395 | + | GGGCCCAGGGGCUAUUCGCG | 20 | 19384 |
| HSV1-UL54-2396 | + | GGGGCCCAGGGGCUAUUCGCG | 21 | 19385 |
| HSV1-UL54-2397 | + | CGGGGCCCAGGGGCUAUUCGCG | 22 | 19386 |
| HSV1-UL54-2398 | + | CCGGGGCCCAGGGGCUAUUCGCG | 23 | 19387 |
| HSV1-UL54-2399 | + | ACCGGGGCCCAGGGGCUAUUCGCG | 24 | 19388 |
| HSV1-UL54-2400 | + | GCGUCGAUGGUGUCGGCG | 18 | 19389 |
| HSV1-UL54-2401 | + | GGCGUCGAUGGUGUCGGCG | 19 | 19390 |
| HSV1-UL54-2402 | + | UGGCGUCGAUGGUGUCGGCG | 20 | 19391 |
| HSV1-UL54-2403 | + | GUGGCGUCGAUGGUGUCGGCG | 21 | 19392 |
| HSV1-UL54-2404 | + | GGUGGCGUCGAUGGUGUCGGCG | 22 | 19393 |
| HSV1-UL54-2405 | + | UGGUGGCGUCGAUGGUGUCGGCG | 23 | 19394 |
| HSV1-UL54-2406 | + | GUGGUGGCGUCGAUGGUGUCGGCG | 24 | 19395 |
| HSV1-UL54-2407 | + | CGCGGGGGUCCGCGGGCG | 18 | 19396 |
| HSV1-UL54-2408 | + | GCGCGGGGGUCCGCGGGCG | 19 | 19397 |
| HSV1-UL54-450 | + | GGCGCGGGGGUCCGCGGGCG | 20 | 7213 |
| HSV1-UL54-2409 | + | GGGCGCGGGGGUCCGCGGGCG | 21 | 19398 |
| HSV1-UL54-2410 | + | GGGGCGCGGGGGUCCGCGGGCG | 22 | 19399 |
| HSV1-UL54-2411 | + | CGGGGCGCGGGGGUCCGCGGGCG | 23 | 19400 |
| HSV1-UL54-2412 | + | CCGGGGCGCGGGGGUCCGCGGGCG | 24 | 19401 |
| HSV1-UL54-2413 | + | CGCUCCGGGGCCGGGGCG | 18 | 19402 |
| HSV1-UL54-2414 | + | UCGCUCCGGGGCCGGGGCG | 19 | 19403 |
| HSV1-UL54-442 | + | UUCGCUCCGGGGCCGGGGCG | 20 | 7205 |
| HSV1-UL54-2415 | + | UUUCGCUCCGGGGCCGGGGCG | 21 | 19404 |
| HSV1-UL54-2416 | + | CUUUCGCUCCGGGGCCGGGGCG | 22 | 19405 |
| HSV1-UL54-2417 | + | CCUUUCGCUCCGGGGCCGGGGCG | 23 | 19406 |
| HSV1-UL54-2418 | + | GCCUUUCGCUCCGGGGCCGGGGCG | 24 | 19407 |
| HSV1-UL54-2419 | + | GCCUCGCCAUGGGGGGCG | 18 | 19408 |
| HSV1-UL54-2420 | + | CGCCUCGCCAUGGGGGGCG | 19 | 19409 |
| HSV1-UL54-2421 | + | ACGCCUCGCCAUGGGGGGCG | 20 | 19410 |
| HSV1-UL54-2422 | + | CACGCCUCGCCAUGGGGGGCG | 21 | 19411 |
| HSV1-UL54-2423 | + | CCACGCCUCGCCAUGGGGGGCG | 22 | 19412 |
| HSV1-UL54-2424 | + | GCCACGCCUCGCCAUGGGGGGCG | 23 | 19413 |
| HSV1-UL54-2425 | + | CGCCACGCCUCGCCAUGGGGGGCG | 24 | 19414 |
| HSV1-UL54-2426 | + | GCGGAGGCCAGCGCCUCG | 18 | 19415 |
| HSV1-UL54-2427 | + | GGCGGAGGCCAGCGCCUCG | 19 | 19416 |
| HSV1-UL54-1005 | + | CGGCGGAGGCCAGCGCCUCG | 20 | 7661 |
| HSV1-UL54-2428 | + | UCGGCGGAGGCCAGCGCCUCG | 21 | 19417 |
| HSV1-UL54-2429 | + | GUCGGCGGAGGCCAGCGCCUCG | 22 | 19418 |
| HSV1-UL54-2430 | + | CGUCGGCGGAGGCCAGCGCCUCG | 23 | 19419 |
| HSV1-UL54-2431 | + | UCGUCGGCGGAGGCCAGCGCCUCG | 24 | 19420 |
| HSV1-UL54-2432 | + | CACGCCAGCGUCUCGUCG | 18 | 19421 |
| HSV1-UL54-2433 | + | CCACGCCAGCGUCUCGUCG | 19 | 19422 |
| HSV1-UL54-2434 | + | ACCACGCCAGCGUCUCGUCG | 20 | 19423 |
| HSV1-UL54-2435 | + | CACCACGCCAGCGUCUCGUCG | 21 | 19424 |
| HSV1-UL54-2436 | + | GCACCACGCCAGCGUCUCGUCG | 22 | 19425 |
| HSV1-UL54-2437 | + | UGCACCACGCCAGCGUCUCGUCG | 23 | 19426 |
| HSV1-UL54-2438 | + | UUGCACCACGCCAGCGUCUCGUCG | 24 | 19427 |
| HSV1-UL54-2439 | + | AUGCAGGCCCCGGGGAGG | 18 | 19428 |
| HSV1-UL54-2440 | + | CAUGCAGGCCCCGGGGAGG | 19 | 19429 |
| HSV1-UL54-2441 | + | CCAUGCAGGCCCCGGGGAGG | 20 | 19430 |
| HSV1-UL54-2442 | + | GCCAUGCAGGCCCCGGGGAGG | 21 | 19431 |
| HSV1-UL54-2443 | + | CGCCAUGCAGGCCCCGGGGAGG | 22 | 19432 |
| HSV1-UL54-2444 | + | CCGCCAUGCAGGCCCCGGGGAGG | 23 | 19433 |
| HSV1-UL54-2445 | + | CCCGCCAUGCAGGCCCCGGGGAGG | 24 | 19434 |
| HSV1-UL54-2446 | + | UUUGCCGUGCACGUACGG | 18 | 19435 |
| HSV1-UL54-2447 | + | AUUUGCCGUGCACGUACGG | 19 | 19436 |
| HSV1-UL54-349 | + | UAUUUGCCGUGCACGUACGG | 20 | 7112 |
| HSV1-UL54-2448 | + | AUAUUUGCCGUGCACGUACGG | 21 | 19437 |
| HSV1-UL54-2449 | + | AAUAUUUGCCGUGCACGUACGG | 22 | 19438 |
| HSV1-UL54-2450 | + | AAAUAUUUGCCGUGCACGUACGG | 23 | 19439 |
| HSV1-UL54-2451 | + | AAAAUAUUUGCCGUGCACGUACGG | 24 | 19440 |
| HSV1-UL54-1517 | + | GUUCUGGGGGCACGCCGG | 18 | 18506 |
| HSV1-UL54-1518 | + | GGUUCUGGGGGCACGCCGG | 19 | 18507 |
| HSV1-UL54-1201 | + | UGGUUCUGGGGGCACGCCGG | 20 | 18190 |
| HSV1-UL54-1519 | + | UUGGUUCUGGGGGCACGCCGG | 21 | 18508 |
| HSV1-UL54-1520 | + | AUUGGUUCUGGGGGCACGCCGG | 22 | 18509 |
| HSV1-UL54-1521 | + | GAUUGGUUCUGGGGGCACGCCGG | 23 | 18510 |
| HSV1-UL54-1522 | + | CGAUUGGUUCUGGGGGCACGCCGG | 24 | 18511 |
| HSV1-UL54-2452 | + | CGCCAGCGUCAUUAGCGG | 18 | 19441 |
| HSV1-UL54-2453 | + | UCGCCAGCGUCAUUAGCGG | 19 | 19442 |
| HSV1-UL54-457 | + | AUCGCCAGCGUCAUUAGCGG | 20 | 7220 |
| HSV1-UL54-2454 | + | AAUCGCCAGCGUCAUUAGCGG | 21 | 19443 |
| HSV1-UL54-2455 | + | CAAUCGCCAGCGUCAUUAGCGG | 22 | 19444 |
| HSV1-UL54-2456 | + | GCAAUCGCCAGCGUCAUUAGCGG | 23 | 19445 |
| HSV1-UL54-2457 | + | GGCAAUCGCCAGCGUCAUUAGCGG | 24 | 19446 |
| HSV1-UL54-2458 | + | GGGCGCGGGGGUCCGCGG | 18 | 19447 |
| HSV1-UL54-2459 | + | GGGGCGCGGGGGUCCGCGG | 19 | 19448 |
| HSV1-UL54-2460 | + | CGGGGCGCGGGGGUCCGCGG | 20 | 19449 |
| HSV1-UL54-2461 | + | CCGGGGCGCGGGGGUCCGCGG | 21 | 19450 |
| HSV1-UL54-2462 | + | GCCGGGGCGCGGGGGUCCGCGG | 22 | 19451 |
| HSV1-UL54-2463 | + | GGCCGGGGCGCGGGGGUCCGCGG | 23 | 19452 |
| HSV1-UL54-2464 | + | GGGCCGGGGCGCGGGGGUCCGCGG | 24 | 19453 |
| HSV1-UL54-2465 | + | CCCAGGGGCUAUUCGCGG | 18 | 19454 |
| HSV1-UL54-2466 | + | GCCCAGGGGCUAUUCGCGG | 19 | 19455 |
| HSV1-UL54-418 | + | GGCCCAGGGGCUAUUCGCGG | 20 | 7181 |
| HSV1-UL54-2467 | + | GGGCCCAGGGGCUAUUCGCGG | 21 | 19456 |
| HSV1-UL54-2468 | + | GGGGCCCAGGGGCUAUUCGCGG | 22 | 19457 |
| HSV1-UL54-2469 | + | CGGGGCCCAGGGGCUAUUCGCGG | 23 | 19458 |
| HSV1-UL54-2470 | + | CCGGGGCCCAGGGGCUAUUCGCGG | 24 | 19459 |
| HSV1-UL54-2471 | + | GCGGGGGUCCGCGGGCGG | 18 | 19460 |
| HSV1-UL54-2472 | + | CGCGGGGGUCCGCGGGCGG | 19 | 19461 |
| HSV1-UL54-451 | + | GCGCGGGGGUCCGCGGGCGG | 20 | 7214 |
| HSV1-UL54-2473 | + | GGCGCGGGGGUCCGCGGGCGG | 21 | 19462 |
| HSV1-UL54-2474 | + | GGGCGCGGGGGUCCGCGGGCGG | 22 | 19463 |
| HSV1-UL54-2475 | + | GGGGCGCGGGGGUCCGCGGGCGG | 23 | 19464 |
| HSV1-UL54-2476 | + | CGGGGCGCGGGGGUCCGCGGGCGG | 24 | 19465 |
| HSV1-UL54-2477 | + | ACGCCAGCGUCUCGUCGG | 18 | 19466 |
| HSV1-UL54-2478 | + | CACGCCAGCGUCUCGUCGG | 19 | 19467 |
| HSV1-UL54-390 | + | CCACGCCAGCGUCUCGUCGG | 20 | 7153 |
| HSV1-UL54-2479 | + | ACCACGCCAGCGUCUCGUCGG | 21 | 19468 |
| HSV1-UL54-2480 | + | CACCACGCCAGCGUCUCGUCGG | 22 | 19469 |
| HSV1-UL54-2481 | + | GCACCACGCCAGCGUCUCGUCGG | 23 | 19470 |
| HSV1-UL54-2482 | + | UGCACCACGCCAGCGUCUCGUCGG | 24 | 19471 |
| HSV1-UL54-2483 | + | CGUCCACCCCGCCCCGGG | 18 | 19472 |
| HSV1-UL54-2484 | + | CCGUCCACCCCGCCCCGGG | 19 | 19473 |
| HSV1-UL54-2485 | + | UCCGUCCACCCCGCCCCGGG | 20 | 19474 |
| HSV1-UL54-2486 | + | GUCCGUCCACCCCGCCCCGGG | 21 | 19475 |
| HSV1-UL54-2487 | + | CGUCCGUCCACCCCGCCCCGGG | 22 | 19476 |
| HSV1-UL54-2488 | + | CCGUCCGUCCACCCCGCCCCGGG | 23 | 19477 |
| HSV1-UL54-2489 | + | GCCGUCCGUCCACCCCGCCCCGGG | 24 | 19478 |
| HSV1-UL54-2490 | + | GGCGCGGGGGUCCGCGGG | 18 | 19479 |
| HSV1-UL54-2491 | + | GGGCGCGGGGGUCCGCGGG | 19 | 19480 |
| HSV1-UL54-448 | + | GGGGCGCGGGGGUCCGCGGG | 20 | 7211 |
| HSV1-UL54-2492 | + | CGGGGCGCGGGGGUCCGCGGG | 21 | 19481 |
| HSV1-UL54-2493 | + | CCGGGGCGCGGGGGUCCGCGGG | 22 | 19482 |
| HSV1-UL54-2494 | + | GCCGGGGCGCGGGGGUCCGCGGG | 23 | 19483 |
| HSV1-UL54-2495 | + | GGCCGGGGCGCGGGGGUCCGCGGG | 24 | 19484 |
| HSV1-UL54-2496 | + | GCGCCUUUCGCUCCGGGG | 18 | 19485 |
| HSV1-UL54-2497 | + | GGCGCCUUUCGCUCCGGGG | 19 | 19486 |
| HSV1-UL54-2498 | + | GGGCGCCUUUCGCUCCGGGG | 20 | 19487 |
| HSV1-UL54-2499 | + | CGGGCGCCUUUCGCUCCGGGG | 21 | 19488 |
| HSV1-UL54-2500 | + | GCGGGCGCCUUUCGCUCCGGGG | 22 | 19489 |
| HSV1-UL54-2501 | + | GGCGGGCGCCUUUCGCUCCGGGG | 23 | 19490 |
| HSV1-UL54-2502 | + | CGGCGGGCGCCUUUCGCUCCGGGG | 24 | 19491 |
| HSV1-UL54-2503 | + | CGCUGGCCUCCGGGUGGG | 18 | 19492 |
| HSV1-UL54-2504 | + | CCGCUGGCCUCCGGGUGGG | 19 | 19493 |
| HSV1-UL54-2505 | + | UCCGCUGGCCUCCGGGUGGG | 20 | 19494 |
| HSV1-UL54-2506 | + | GUCCGCUGGCCUCCGGGUGGG | 21 | 19495 |
| HSV1-UL54-2507 | + | UGUCCGCUGGCCUCCGGGUGGG | 22 | 19496 |
| HSV1-UL54-2508 | + | GUGUCCGCUGGCCUCCGGGUGGG | 23 | 19497 |
| HSV1-UL54-2509 | + | CGUGUCCGCUGGCCUCCGGGUGGG | 24 | 19498 |
| HSV1-UL54-2510 | + | GCGCCACGCCUCGCCAUG | 18 | 19499 |
| HSV1-UL54-2511 | + | CGCGCCACGCCUCGCCAUG | 19 | 19500 |
| HSV1-UL54-471 | + | CCGCGCCACGCCUCGCCAUG | 20 | 7234 |
| HSV1-UL54-2512 | + | GCCGCGCCACGCCUCGCCAUG | 21 | 19501 |
| HSV1-UL54-2513 | + | UGCCGCGCCACGCCUCGCCAUG | 22 | 19502 |
| HSV1-UL54-2514 | + | CUGCCGCGCCACGCCUCGCCAUG | 23 | 19503 |
| HSV1-UL54-2515 | + | ACUGCCGCGCCACGCCUCGCCAUG | 24 | 19504 |
| HSV1-UL54-2516 | + | CGCCUUCAGGUAGCACUG | 18 | 19505 |
| HSV1-UL54-2517 | + | GCGCCUUCAGGUAGCACUG | 19 | 19506 |
| HSV1-UL54-2518 | + | CGCGCCUUCAGGUAGCACUG | 20 | 19507 |
| HSV1-UL54-2519 | + | UCGCGCCUUCAGGUAGCACUG | 21 | 19508 |
| HSV1-UL54-2520 | + | CUCGCGCCUUCAGGUAGCACUG | 22 | 19509 |
| HSV1-UL54-2521 | + | CCUCGCGCCUUCAGGUAGCACUG | 23 | 19510 |
| HSV1-UL54-2522 | + | GCCUCGCGCCUUCAGGUAGCACUG | 24 | 19511 |
| HSV1-UL54-2523 | + | AAGGGCCGCAGGCGCGUG | 18 | 19512 |
| HSV1-UL54-2524 | + | AAAGGGCCGCAGGCGCGUG | 19 | 19513 |
| HSV1-UL54-2525 | + | GAAAGGGCCGCAGGCGCGUG | 20 | 19514 |
| HSV1-UL54-2526 | + | AGAAAGGGCCGCAGGCGCGUG | 21 | 19515 |
| HSV1-UL54-2527 | + | GAGAAAGGGCCGCAGGCGCGUG | 22 | 19516 |
| HSV1-UL54-2528 | + | GGAGAAAGGGCCGCAGGCGCGUG | 23 | 19517 |
| HSV1-UL54-2529 | + | UGGAGAAAGGGCCGCAGGCGCGUG | 24 | 19518 |
| HSV1-UL54-2530 | + | CCACGCUCGACGCGGUUG | 18 | 19519 |
| HSV1-UL54-2531 | + | GCCACGCUCGACGCGGUUG | 19 | 19520 |
| HSV1-UL54-2532 | + | CGCCACGCUCGACGCGGUUG | 20 | 19521 |
| HSV1-UL54-2533 | + | ACGCCACGCUCGACGCGGUUG | 21 | 19522 |
| HSV1-UL54-2534 | + | GACGCCACGCUCGACGCGGUUG | 22 | 19523 |
| HSV1-UL54-2535 | + | CGACGCCACGCUCGACGCGGUUG | 23 | 19524 |
| HSV1-UL54-2536 | + | GCGACGCCACGCUCGACGCGGUUG | 24 | 19525 |
| HSV1-UL54-2537 | + | CGCGCCACGCCUCGCCAU | 18 | 19526 |
| HSV1-UL54-2538 | + | CCGCGCCACGCCUCGCCAU | 19 | 19527 |
| HSV1-UL54-470 | + | GCCGCGCCACGCCUCGCCAU | 20 | 7233 |
| HSV1-UL54-2539 | + | UGCCGCGCCACGCCUCGCCAU | 21 | 19528 |
| HSV1-UL54-2540 | + | CUGCCGCGCCACGCCUCGCCAU | 22 | 19529 |
| HSV1-UL54-2541 | + | ACUGCCGCGCCACGCCUCGCCAU | 23 | 19530 |
| HSV1-UL54-2542 | + | CACUGCCGCGCCACGCCUCGCCAU | 24 | 19531 |
| HSV1-UL54-2543 | + | UCCCGAUAAUGGGGUCCU | 18 | 19532 |
| HSV1-UL54-2544 | + | GUCCCGAUAAUGGGGUCCU | 19 | 19533 |
| HSV1-UL54-382 | + | CGUCCCGAUAAUGGGGUCCU | 20 | 7145 |
| HSV1-UL54-2545 | + | UCGUCCCGAUAAUGGGGUCCU | 21 | 19534 |
| HSV1-UL54-2546 | + | GUCGUCCCGAUAAUGGGGUCCU | 22 | 19535 |
| HSV1-UL54-2547 | + | GGUCGUCCCGAUAAUGGGGUCCU | 23 | 19536 |
| HSV1-UL54-2548 | + | CGGUCGUCCCGAUAAUGGGGUCCU | 24 | 19537 |
| HSV1-UL54-2549 | + | GGUCGACCGCCGCGCGCU | 18 | 19538 |
| HSV1-UL54-2550 | + | CGGUCGACCGCCGCGCGCU | 19 | 19539 |
| HSV1-UL54-426 | + | GCGGUCGACCGCCGCGCGCU | 20 | 7189 |
| HSV1-UL54-2551 | + | UGCGGUCGACCGCCGCGCGCU | 21 | 19540 |
| HSV1-UL54-2552 | + | AUGCGGUCGACCGCCGCGCGCU | 22 | 19541 |
| HSV1-UL54-2553 | + | GAUGCGGUCGACCGCCGCGCGCU | 23 | 19542 |
| HSV1-UL54-2554 | + | UGAUGCGGUCGACCGCCGCGCGCU | 24 | 19543 |
| HSV1-UL54-2555 | + | CGGCGGGCGCCUUUCGCU | 18 | 19544 |
| HSV1-UL54-2556 | + | GCGGCGGGCGCCUUUCGCU | 19 | 19545 |
| HSV1-UL54-2557 | + | GGCGGCGGGCGCCUUUCGCU | 20 | 19546 |
| HSV1-UL54-2558 | + | CGGCGGCGGGCGCCUUUCGCU | 21 | 19547 |
| HSV1-UL54-2559 | + | UCGGCGGCGGGCGCCUUUCGCU | 22 | 19548 |
| HSV1-UL54-2560 | + | GUCGGCGGCGGGCGCCUUUCGCU | 23 | 19549 |
| HSV1-UL54-2561 | + | UGUCGGCGGCGGGCGCCUUUCGCU | 24 | 19550 |
| HSV1-UL54-1602 | + | AGGGUUGCGAUUGGUUCU | 18 | 18591 |
| HSV1-UL54-1603 | + | CAGGGUUGCGAUUGGUUCU | 19 | 18592 |
| HSV1-UL54-1221 | + | CCAGGGUUGCGAUUGGUUCU | 20 | 18210 |
| HSV1-UL54-1604 | + | CCCAGGGUUGCGAUUGGUUCU | 21 | 18593 |
| HSV1-UL54-1605 | + | CCCCAGGGUUGCGAUUGGUUCU | 22 | 18594 |
| HSV1-UL54-1606 | + | CCCCCAGGGUUGCGAUUGGUUCU | 23 | 18595 |
| HSV1-UL54-1607 | + | UCCCCCAGGGUUGCGAUUGGUUCU | 24 | 18596 |
| HSV1-UL54-2562 | + | AAUAUUUGCCGUGCACGU | 18 | 19551 |
| HSV1-UL54-2563 | + | AAAUAUUUGCCGUGCACGU | 19 | 19552 |
| HSV1-UL54-2564 | + | AAAAUAUUUGCCGUGCACGU | 20 | 19553 |
| HSV1-UL54-2565 | + | AAAAAUAUUUGCCGUGCACGU | 21 | 19554 |
| HSV1-UL54-2566 | + | UAAAAAUAUUUGCCGUGCACGU | 22 | 19555 |
| HSV1-UL54-2567 | + | AUAAAAAUAUUUGCCGUGCACGU | 23 | 19556 |
| HSV1-UL54-2568 | + | AAUAAAAAUAUUUGCCGUGCACGU | 24 | 19557 |
| HSV1-UL54-1639 | + | CCAGGGUUGCGAUUGGUU | 18 | 18628 |
| HSV1-UL54-1640 | + | CCCAGGGUUGCGAUUGGUU | 19 | 18629 |
| HSV1-UL54-1641 | + | CCCCAGGGUUGCGAUUGGUU | 20 | 18630 |
| HSV1-UL54-1642 | + | CCCCCAGGGUUGCGAUUGGUU | 21 | 18631 |
| HSV1-UL54-1643 | + | UCCCCCAGGGUUGCGAUUGGUU | 22 | 18632 |
| HSV1-UL54-1644 | + | GUCCCCCAGGGUUGCGAUUGGUU | 23 | 18633 |
| HSV1-UL54-1645 | + | GGUCCCCCAGGGUUGCGAUUGGUU | 24 | 18634 |
| HSV1-UL54-2569 | - | CCCGGAGGCCAGCGGACA | 18 | 19558 |
| HSV1-UL54-2570 | - | ACCCGGAGGCCAGCGGACA | 19 | 19559 |
| HSV1-UL54-271 | - | CACCCGGAGGCCAGCGGACA | 20 | 7034 |
| HSV1-UL54-2571 | - | CCACCCGGAGGCCAGCGGACA | 21 | 19560 |
| HSV1-UL54-2572 | - | CCCACCCGGAGGCCAGCGGACA | 22 | 19561 |
| HSV1-UL54-2573 | - | ACCCACCCGGAGGCCAGCGGACA | 23 | 19562 |
| HSV1-UL54-2574 | - | GACCCACCCGGAGGCCAGCGGACA | 24 | 19563 |
| HSV1-UL54-2575 | - | CGACCCACCCGGAGGCCA | 18 | 19564 |
| HSV1-UL54-2576 | - | CCGACCCACCCGGAGGCCA | 19 | 19565 |
| HSV1-UL54-922 | - | CCCGACCCACCCGGAGGCCA | 20 | 7594 |
| HSV1-UL54-2577 | - | GCCCGACCCACCCGGAGGCCA | 21 | 19566 |
| HSV1-UL54-2578 | - | AGCCCGACCCACCCGGAGGCCA | 22 | 19567 |
| HSV1-UL54-2579 | - | CAGCCCGACCCACCCGGAGGCCA | 23 | 19568 |
| HSV1-UL54-2580 | - | GCAGCCCGACCCACCCGGAGGCCA | 24 | 19569 |
| HSV1-UL54-2581 | - | CCCGGUGCUGGCGGGCCA | 18 | 19570 |
| HSV1-UL54-2582 | - | CCCCGGUGCUGGCGGGCCA | 19 | 19571 |
| HSV1-UL54-296 | - | GCCCCGGUGCUGGCGGGCCA | 20 | 7059 |
| HSV1-UL54-2583 | - | GGCCCCGGUGCUGGCGGGCCA | 21 | 19572 |
| HSV1-UL54-2584 | - | GGGCCCCGGUGCUGGCGGGCCA | 22 | 19573 |
| HSV1-UL54-2585 | - | UGGGCCCCGGUGCUGGCGGGCCA | 23 | 19574 |
| HSV1-UL54-2586 | - | CUGGGCCCCGGUGCUGGCGGGCCA | 24 | 19575 |
| HSV1-UL54-2587 | - | GCGAGGCGUGGCGCGGCA | 18 | 19576 |
| HSV1-UL54-2588 | - | GGCGAGGCGUGGCGCGGCA | 19 | 19577 |
| HSV1-UL54-919 | - | UGGCGAGGCGUGGCGCGGCA | 20 | 7592 |
| HSV1-UL54-2589 | - | AUGGCGAGGCGUGGCGCGGCA | 21 | 19578 |
| HSV1-UL54-2590 | - | CAUGGCGAGGCGUGGCGCGGCA | 22 | 19579 |
| HSV1-UL54-2591 | - | CCAUGGCGAGGCGUGGCGCGGCA | 23 | 19580 |
| HSV1-UL54-2592 | - | CCCAUGGCGAGGCGUGGCGCGGCA | 24 | 19581 |
| HSV1-UL54-2593 | - | CGGCGGUCGACCGCAUCA | 18 | 19582 |
| HSV1-UL54-2594 | - | GCGGCGGUCGACCGCAUCA | 19 | 19583 |
| HSV1-UL54-929 | - | CGCGGCGGUCGACCGCAUCA | 20 | 7599 |
| HSV1-UL54-2595 | - | GCGCGGCGGUCGACCGCAUCA | 21 | 19584 |
| HSV1-UL54-2596 | - | CGCGCGGCGGUCGACCGCAUCA | 22 | 19585 |
| HSV1-UL54-2597 | - | GCGCGCGGCGGUCGACCGCAUCA | 23 | 19586 |
| HSV1-UL54-2598 | - | AGCGCGCGGCGGUCGACCGCAUCA | 24 | 19587 |
| HSV1-UL54-2599 | - | UGCGCCAAGAAAAUUUCA | 18 | 19588 |
| HSV1-UL54-2600 | - | CUGCGCCAAGAAAAUUUCA | 19 | 19589 |
| HSV1-UL54-949 | - | GCUGCGCCAAGAAAAUUUCA | 20 | 7613 |
| HSV1-UL54-2601 | - | UGCUGCGCCAAGAAAAUUUCA | 21 | 19590 |
| HSV1-UL54-2602 | - | GUGCUGCGCCAAGAAAAUUUCA | 22 | 19591 |
| HSV1-UL54-2603 | - | CGUGCUGCGCCAAGAAAAUUUCA | 23 | 19592 |
| HSV1-UL54-2604 | - | GCGUGCUGCGCCAAGAAAAUUUCA | 24 | 19593 |
| HSV1-UL54-2605 | - | CCGCGCCCCGGCCCCGGA | 18 | 19594 |
| HSV1-UL54-2606 | - | CCCGCGCCCCGGCCCCGGA | 19 | 19595 |
| HSV1-UL54-927 | - | CCCCGCGCCCCGGCCCCGGA | 20 | 7597 |
| HSV1-UL54-2607 | - | CCCCCGCGCCCCGGCCCCGGA | 21 | 19596 |
| HSV1-UL54-2608 | - | ACCCCCGCGCCCCGGCCCCGGA | 22 | 19597 |
| HSV1-UL54-2609 | - | GACCCCCGCGCCCCGGCCCCGGA | 23 | 19598 |
| HSV1-UL54-2610 | - | GGACCCCCGCGCCCCGGCCCCGGA | 24 | 19599 |
| HSV1-UL54-2611 | - | CUUGGUGUCGGGGUCGGA | 18 | 19600 |
| HSV1-UL54-2612 | - | CCUUGGUGUCGGGGUCGGA | 19 | 19601 |
| HSV1-UL54-969 | - | CCCUUGGUGUCGGGGUCGGA | 20 | 7629 |
| HSV1-UL54-2613 | - | ACCCUUGGUGUCGGGGUCGGA | 21 | 19602 |
| HSV1-UL54-2614 | - | GACCCUUGGUGUCGGGGUCGGA | 22 | 19603 |
| HSV1-UL54-2615 | - | CGACCCUUGGUGUCGGGGUCGGA | 23 | 19604 |
| HSV1-UL54-2616 | - | GCGACCCUUGGUGUCGGGGUCGGA | 24 | 19605 |
| HSV1-UL54-2617 | - | CCUGCAUGGCGGGCCUGA | 18 | 19606 |
| HSV1-UL54-2618 | - | GCCUGCAUGGCGGGCCUGA | 19 | 19607 |
| HSV1-UL54-973 | - | GGCCUGCAUGGCGGGCCUGA | 20 | 7632 |
| HSV1-UL54-2619 | - | GGGCCUGCAUGGCGGGCCUGA | 21 | 19608 |
| HSV1-UL54-2620 | - | GGGGCCUGCAUGGCGGGCCUGA | 22 | 19609 |
| HSV1-UL54-2621 | - | CGGGGCCUGCAUGGCGGGCCUGA | 23 | 19610 |
| HSV1-UL54-2622 | - | CCGGGGCCUGCAUGGCGGGCCUGA | 24 | 19611 |
| HSV1-UL54-2623 | - | GCCCCCAGGACCCCAUUA | 18 | 19612 |
| HSV1-UL54-2624 | - | CGCCCCCAGGACCCCAUUA | 19 | 19613 |
| HSV1-UL54-952 | - | GCGCCCCCAGGACCCCAUUA | 20 | 7616 |
| HSV1-UL54-2625 | - | UGCGCCCCCAGGACCCCAUUA | 21 | 19614 |
| HSV1-UL54-2626 | - | CUGCGCCCCCAGGACCCCAUUA | 22 | 19615 |
| HSV1-UL54-2627 | - | GCUGCGCCCCCAGGACCCCAUUA | 23 | 19616 |
| HSV1-UL54-2628 | - | CGCUGCGCCCCCAGGACCCCAUUA | 24 | 19617 |
| HSV1-UL54-2629 | - | GUGAGCAGCCCGACCCAC | 18 | 19618 |
| HSV1-UL54-2630 | - | AGUGAGCAGCCCGACCCAC | 19 | 19619 |
| HSV1-UL54-920 | - | CAGUGAGCAGCCCGACCCAC | 20 | 7593 |
| HSV1-UL54-2631 | - | GCAGUGAGCAGCCCGACCCAC | 21 | 19620 |
| HSV1-UL54-2632 | - | GGCAGUGAGCAGCCCGACCCAC | 22 | 19621 |
| HSV1-UL54-2633 | - | CGGCAGUGAGCAGCCCGACCCAC | 23 | 19622 |
| HSV1-UL54-2634 | - | GCGGCAGUGAGCAGCCCGACCCAC | 24 | 19623 |
| HSV1-UL54-2635 | - | ACCCGGAGGCCAGCGGAC | 18 | 19624 |
| HSV1-UL54-2636 | - | CACCCGGAGGCCAGCGGAC | 19 | 19625 |
| HSV1-UL54-911 | - | CCACCCGGAGGCCAGCGGAC | 20 | 7586 |
| HSV1-UL54-2637 | - | CCCACCCGGAGGCCAGCGGAC | 21 | 19626 |
| HSV1-UL54-2638 | - | ACCCACCCGGAGGCCAGCGGAC | 22 | 19627 |
| HSV1-UL54-2639 | - | GACCCACCCGGAGGCCAGCGGAC | 23 | 19628 |
| HSV1-UL54-2640 | - | CGACCCACCCGGAGGCCAGCGGAC | 24 | 19629 |
| HSV1-UL54-2641 | - | CCCUUUCUCCAGUGCUAC | 18 | 19630 |
| HSV1-UL54-2642 | - | GCCCUUUCUCCAGUGCUAC | 19 | 19631 |
| HSV1-UL54-955 | - | GGCCCUUUCUCCAGUGCUAC | 20 | 7618 |
| HSV1-UL54-2643 | - | CGGCCCUUUCUCCAGUGCUAC | 21 | 19632 |
| HSV1-UL54-2644 | - | GCGGCCCUUUCUCCAGUGCUAC | 22 | 19633 |
| HSV1-UL54-2645 | - | UGCGGCCCUUUCUCCAGUGCUAC | 23 | 19634 |
| HSV1-UL54-2646 | - | CUGCGGCCCUUUCUCCAGUGCUAC | 24 | 19635 |
| HSV1-UL54-1730 | - | CCAGAACCAAUCGCAACC | 18 | 18719 |
| HSV1-UL54-1731 | - | CCCAGAACCAAUCGCAACC | 19 | 18720 |
| HSV1-UL54-1732 | - | CCCCAGAACCAAUCGCAACC | 20 | 18721 |
| HSV1-UL54-1733 | - | CCCCCAGAACCAAUCGCAACC | 21 | 18722 |
| HSV1-UL54-1734 | - | GCCCCCAGAACCAAUCGCAACC | 22 | 18723 |
| HSV1-UL54-1735 | - | UGCCCCCAGAACCAAUCGCAACC | 23 | 18724 |
| HSV1-UL54-1736 | - | GUGCCCCCAGAACCAAUCGCAACC | 24 | 18725 |
| HSV1-UL54-2647 | - | UGAGCAGCCCGACCCACC | 18 | 19636 |
| HSV1-UL54-2648 | - | GUGAGCAGCCCGACCCACC | 19 | 19637 |
| HSV1-UL54-268 | - | AGUGAGCAGCCCGACCCACC | 20 | 7031 |
| HSV1-UL54-2649 | - | CAGUGAGCAGCCCGACCCACC | 21 | 19638 |
| HSV1-UL54-2650 | - | GCAGUGAGCAGCCCGACCCACC | 22 | 19639 |
| HSV1-UL54-2651 | - | GGCAGUGAGCAGCCCGACCCACC | 23 | 19640 |
| HSV1-UL54-2652 | - | CGGCAGUGAGCAGCCCGACCCACC | 24 | 19641 |
| HSV1-UL54-1737 | - | CAGAACCAAUCGCAACCC | 18 | 18726 |
| HSV1-UL54-1738 | - | CCAGAACCAAUCGCAACCC | 19 | 18727 |
| HSV1-UL54-1195 | - | CCCAGAACCAAUCGCAACCC | 20 | 18184 |
| HSV1-UL54-1739 | - | CCCCAGAACCAAUCGCAACCC | 21 | 18728 |
| HSV1-UL54-1740 | - | CCCCCAGAACCAAUCGCAACCC | 22 | 18729 |
| HSV1-UL54-1741 | - | GCCCCCAGAACCAAUCGCAACCC | 23 | 18730 |
| HSV1-UL54-1742 | - | UGCCCCCAGAACCAAUCGCAACCC | 24 | 18731 |
| HSV1-UL54-2653 | - | AACCUGCCGCUGCGCCCC | 18 | 19642 |
| HSV1-UL54-2654 | - | CAACCUGCCGCUGCGCCCC | 19 | 19643 |
| HSV1-UL54-951 | - | ACAACCUGCCGCUGCGCCCC | 20 | 7615 |
| HSV1-UL54-2655 | - | CACAACCUGCCGCUGCGCCCC | 21 | 19644 |
| HSV1-UL54-2656 | - | CCACAACCUGCCGCUGCGCCCC | 22 | 19645 |
| HSV1-UL54-2657 | - | ACCACAACCUGCCGCUGCGCCCC | 23 | 19646 |
| HSV1-UL54-2658 | - | CACCACAACCUGCCGCUGCGCCCC | 24 | 19647 |
| HSV1-UL54-1755 | - | CCCCCGCCGGCGUGCCCC | 18 | 18744 |
| HSV1-UL54-1756 | - | ACCCCCGCCGGCGUGCCCC | 19 | 18745 |
| HSV1-UL54-1757 | - | GACCCCCGCCGGCGUGCCCC | 20 | 18746 |
| HSV1-UL54-1758 | - | GGACCCCCGCCGGCGUGCCCC | 21 | 18747 |
| HSV1-UL54-1759 | - | CGGACCCCCGCCGGCGUGCCCC | 22 | 18748 |
| HSV1-UL54-1760 | - | UCGGACCCCCGCCGGCGUGCCCC | 23 | 18749 |
| HSV1-UL54-1761 | - | GUCGGACCCCCGCCGGCGUGCCCC | 24 | 18750 |
| HSV1-UL54-2659 | - | UCCCGCCGCGAAUAGCCC | 18 | 19648 |
| HSV1-UL54-2660 | - | UUCCCGCCGCGAAUAGCCC | 19 | 19649 |
| HSV1-UL54-936 | - | UUUCCCGCCGCGAAUAGCCC | 20 | 7603 |
| HSV1-UL54-2661 | - | GUUUCCCGCCGCGAAUAGCCC | 21 | 19650 |
| HSV1-UL54-2662 | - | CGUUUCCCGCCGCGAAUAGCCC | 22 | 19651 |
| HSV1-UL54-2663 | - | CCGUUUCCCGCCGCGAAUAGCCC | 23 | 19652 |
| HSV1-UL54-2664 | - | GCCGUUUCCCGCCGCGAAUAGCCC | 24 | 19653 |
| HSV1-UL54-2665 | - | CCCUGGGGGACCCCGCCC | 18 | 19654 |
| HSV1-UL54-2666 | - | ACCCUGGGGGACCCCGCCC | 19 | 19655 |
| HSV1-UL54-254 | - | AACCCUGGGGGACCCCGCCC | 20 | 7017 |
| HSV1-UL54-2667 | - | CAACCCUGGGGGACCCCGCCC | 21 | 19656 |
| HSV1-UL54-2668 | - | GCAACCCUGGGGGACCCCGCCC | 22 | 19657 |
| HSV1-UL54-2669 | - | CGCAACCCUGGGGGACCCCGCCC | 23 | 19658 |
| HSV1-UL54-2670 | - | UCGCAACCCUGGGGGACCCCGCCC | 24 | 19659 |
| HSV1-UL54-2671 | - | GCGAUUGCCCCCCCGCCC | 18 | 19660 |
| HSV1-UL54-2672 | - | GGCGAUUGCCCCCCCGCCC | 19 | 19661 |
| HSV1-UL54-924 | - | UGGCGAUUGCCCCCCCGCCC | 20 | 7595 |
| HSV1-UL54-2673 | - | CUGGCGAUUGCCCCCCCGCCC | 21 | 19662 |
| HSV1-UL54-2674 | - | GCUGGCGAUUGCCCCCCCGCCC | 22 | 19663 |
| HSV1-UL54-2675 | - | CGCUGGCGAUUGCCCCCCCGCCC | 23 | 19664 |
| HSV1-UL54-2676 | - | ACGCUGGCGAUUGCCCCCCCGCCC | 24 | 19665 |
| HSV1-UL54-2677 | - | ACCCCCGCGCCCCGGCCC | 18 | 19666 |
| HSV1-UL54-2678 | - | GACCCCCGCGCCCCGGCCC | 19 | 19667 |
| HSV1-UL54-277 | - | GGACCCCCGCGCCCCGGCCC | 20 | 7040 |
| HSV1-UL54-2679 | - | CGGACCCCCGCGCCCCGGCCC | 21 | 19668 |
| HSV1-UL54-2680 | - | GCGGACCCCCGCGCCCCGGCCC | 22 | 19669 |
| HSV1-UL54-2681 | - | CGCGGACCCCCGCGCCCCGGCCC | 23 | 19670 |
| HSV1-UL54-2682 | - | CCGCGGACCCCCGCGCCCCGGCCC | 24 | 19671 |
| HSV1-UL54-2683 | - | GAUGCAUUUCUACCUCCC | 18 | 19672 |
| HSV1-UL54-2684 | - | AGAUGCAUUUCUACCUCCC | 19 | 19673 |
| HSV1-UL54-337 | - | AAGAUGCAUUUCUACCUCCC | 20 | 7100 |
| HSV1-UL54-2685 | - | GAAGAUGCAUUUCUACCUCCC | 21 | 19674 |
| HSV1-UL54-2686 | - | AGAAGAUGCAUUUCUACCUCCC | 22 | 19675 |
| HSV1-UL54-2687 | - | GAGAAGAUGCAUUUCUACCUCCC | 23 | 19676 |
| HSV1-UL54-2688 | - | AGAGAAGAUGCAUUUCUACCUCCC | 24 | 19677 |
| HSV1-UL54-2689 | - | ACCCUGGGGGACCCCGCC | 18 | 19678 |
| HSV1-UL54-2690 | - | AACCCUGGGGGACCCCGCC | 19 | 19679 |
| HSV1-UL54-912 | - | CAACCCUGGGGGACCCCGCC | 20 | 7587 |
| HSV1-UL54-2691 | - | GCAACCCUGGGGGACCCCGCC | 21 | 19680 |
| HSV1-UL54-2692 | - | CGCAACCCUGGGGGACCCCGCC | 22 | 19681 |
| HSV1-UL54-2693 | - | UCGCAACCCUGGGGGACCCCGCC | 23 | 19682 |
| HSV1-UL54-2694 | - | AUCGCAACCCUGGGGGACCCCGCC | 24 | 19683 |
| HSV1-UL54-2695 | - | GCGACUGCGUGCUGCGCC | 18 | 19684 |
| HSV1-UL54-2696 | - | CGCGACUGCGUGCUGCGCC | 19 | 19685 |
| HSV1-UL54-948 | - | GCGCGACUGCGUGCUGCGCC | 20 | 7612 |
| HSV1-UL54-2697 | - | UGCGCGACUGCGUGCUGCGCC | 21 | 19686 |
| HSV1-UL54-2698 | - | AUGCGCGACUGCGUGCUGCGCC | 22 | 19687 |
| HSV1-UL54-2699 | - | CAUGCGCGACUGCGUGCUGCGCC | 23 | 19688 |
| HSV1-UL54-2700 | - | CCAUGCGCGACUGCGUGCUGCGCC | 24 | 19689 |
| HSV1-UL54-2701 | - | GACCCCCGCGCCCCGGCC | 18 | 19690 |
| HSV1-UL54-2702 | - | GGACCCCCGCGCCCCGGCC | 19 | 19691 |
| HSV1-UL54-925 | - | CGGACCCCCGCGCCCCGGCC | 20 | 7596 |
| HSV1-UL54-2703 | - | GCGGACCCCCGCGCCCCGGCC | 21 | 19692 |
| HSV1-UL54-2704 | - | CGCGGACCCCCGCGCCCCGGCC | 22 | 19693 |
| HSV1-UL54-2705 | - | CCGCGGACCCCCGCGCCCCGGCC | 23 | 19694 |
| HSV1-UL54-2706 | - | CCCGCGGACCCCCGCGCCCCGGCC | 24 | 19695 |
| HSV1-UL54-2707 | - | CCCCGGUGCUGGCGGGCC | 18 | 19696 |
| HSV1-UL54-2708 | - | GCCCCGGUGCUGGCGGGCC | 19 | 19697 |
| HSV1-UL54-938 | - | GGCCCCGGUGCUGGCGGGCC | 20 | 7605 |
| HSV1-UL54-2709 | - | GGGCCCCGGUGCUGGCGGGCC | 21 | 19698 |
| HSV1-UL54-2710 | - | UGGGCCCCGGUGCUGGCGGGCC | 22 | 19699 |
| HSV1-UL54-2711 | - | CUGGGCCCCGGUGCUGGCGGGCC | 23 | 19700 |
| HSV1-UL54-2712 | - | CCUGGGCCCCGGUGCUGGCGGGCC | 24 | 19701 |
| HSV1-UL54-2713 | - | CACUUUUGCCGGCAAUCC | 18 | 19702 |
| HSV1-UL54-2714 | - | GCACUUUUGCCGGCAAUCC | 19 | 19703 |
| HSV1-UL54-947 | - | CGCACUUUUGCCGGCAAUCC | 20 | 7611 |
| HSV1-UL54-2715 | - | UCGCACUUUUGCCGGCAAUCC | 21 | 19704 |
| HSV1-UL54-2716 | - | AUCGCACUUUUGCCGGCAAUCC | 22 | 19705 |
| HSV1-UL54-2717 | - | UAUCGCACUUUUGCCGGCAAUCC | 23 | 19706 |
| HSV1-UL54-2718 | - | CUAUCGCACUUUUGCCGGCAAUCC | 24 | 19707 |
| HSV1-UL54-2719 | - | AGAUGCAUUUCUACCUCC | 18 | 19708 |
| HSV1-UL54-2720 | - | AAGAUGCAUUUCUACCUCC | 19 | 19709 |
| HSV1-UL54-970 | - | GAAGAUGCAUUUCUACCUCC | 20 | 7630 |
| HSV1-UL54-2721 | - | AGAAGAUGCAUUUCUACCUCC | 21 | 19710 |
| HSV1-UL54-2722 | - | GAGAAGAUGCAUUUCUACCUCC | 22 | 19711 |
| HSV1-UL54-2723 | - | AGAGAAGAUGCAUUUCUACCUCC | 23 | 19712 |
| HSV1-UL54-2724 | - | GAGAGAAGAUGCAUUUCUACCUCC | 24 | 19713 |
| HSV1-UL54-2725 | - | GAGACCAGACGGGUCUCC | 18 | 19714 |
| HSV1-UL54-2726 | - | CGAGACCAGACGGGUCUCC | 19 | 19715 |
| HSV1-UL54-301 | - | CCGAGACCAGACGGGUCUCC | 20 | 7064 |
| HSV1-UL54-2727 | - | GCCGAGACCAGACGGGUCUCC | 21 | 19716 |
| HSV1-UL54-2728 | - | CGCCGAGACCAGACGGGUCUCC | 22 | 19717 |
| HSV1-UL54-2729 | - | ACGCCGAGACCAGACGGGUCUCC | 23 | 19718 |
| HSV1-UL54-2730 | - | GACGCCGAGACCAGACGGGUCUCC | 24 | 19719 |
| HSV1-UL54-2731 | - | GCGGUCGACCGCAUCAGC | 18 | 19720 |
| HSV1-UL54-2732 | - | GGCGGUCGACCGCAUCAGC | 19 | 19721 |
| HSV1-UL54-930 | - | CGGCGGUCGACCGCAUCAGC | 20 | 7600 |
| HSV1-UL54-2733 | - | GCGGCGGUCGACCGCAUCAGC | 21 | 19722 |
| HSV1-UL54-2734 | - | CGCGGCGGUCGACCGCAUCAGC | 22 | 19723 |
| HSV1-UL54-2735 | - | GCGCGGCGGUCGACCGCAUCAGC | 23 | 19724 |
| HSV1-UL54-2736 | - | CGCGCGGCGGUCGACCGCAUCAGC | 24 | 19725 |
| HSV1-UL54-2737 | - | AUCCUAGACACGCACCGC | 18 | 19726 |
| HSV1-UL54-2738 | - | AAUCCUAGACACGCACCGC | 19 | 19727 |
| HSV1-UL54-974 | - | AAAUCCUAGACACGCACCGC | 20 | 7633 |
| HSV1-UL54-2739 | - | GAAAUCCUAGACACGCACCGC | 21 | 19728 |
| HSV1-UL54-2740 | - | CGAAAUCCUAGACACGCACCGC | 22 | 19729 |
| HSV1-UL54-2741 | - | UCGAAAUCCUAGACACGCACCGC | 23 | 19730 |
| HSV1-UL54-2742 | - | AUCGAAAUCCUAGACACGCACCGC | 24 | 19731 |
| HSV1-UL54-2743 | - | CCAGUGCUACCUGAAGGC | 18 | 19732 |
| HSV1-UL54-2744 | - | UCCAGUGCUACCUGAAGGC | 19 | 19733 |
| HSV1-UL54-956 | - | CUCCAGUGCUACCUGAAGGC | 20 | 7619 |
| HSV1-UL54-2745 | - | UCUCCAGUGCUACCUGAAGGC | 21 | 19734 |
| HSV1-UL54-2746 | - | UUCUCCAGUGCUACCUGAAGGC | 22 | 19735 |
| HSV1-UL54-2747 | - | UUUCUCCAGUGCUACCUGAAGGC | 23 | 19736 |
| HSV1-UL54-2748 | - | CUUUCUCCAGUGCUACCUGAAGGC | 24 | 19737 |
| HSV1-UL54-2749 | - | ACCUUGGUCGCCCACGGC | 18 | 19738 |
| HSV1-UL54-2750 | - | AACCUUGGUCGCCCACGGC | 19 | 19739 |
| HSV1-UL54-946 | - | AAACCUUGGUCGCCCACGGC | 20 | 7610 |
| HSV1-UL54-2751 | - | GAAACCUUGGUCGCCCACGGC | 21 | 19740 |
| HSV1-UL54-2752 | - | GGAAACCUUGGUCGCCCACGGC | 22 | 19741 |
| HSV1-UL54-2753 | - | GGGAAACCUUGGUCGCCCACGGC | 23 | 19742 |
| HSV1-UL54-2754 | - | UGGGAAACCUUGGUCGCCCACGGC | 24 | 19743 |
| HSV1-UL54-2755 | - | GCGCGAGGCCUGUGCGGC | 18 | 19744 |
| HSV1-UL54-2756 | - | GGCGCGAGGCCUGUGCGGC | 19 | 19745 |
| HSV1-UL54-957 | - | AGGCGCGAGGCCUGUGCGGC | 20 | 7620 |
| HSV1-UL54-2757 | - | AAGGCGCGAGGCCUGUGCGGC | 21 | 19746 |
| HSV1-UL54-2758 | - | GAAGGCGCGAGGCCUGUGCGGC | 22 | 19747 |
| HSV1-UL54-2759 | - | UGAAGGCGCGAGGCCUGUGCGGC | 23 | 19748 |
| HSV1-UL54-2760 | - | CUGAAGGCGCGAGGCCUGUGCGGC | 24 | 19749 |
| HSV1-UL54-2761 | - | CGAGACCAGACGGGUCUC | 18 | 19750 |
| HSV1-UL54-2762 | - | CCGAGACCAGACGGGUCUC | 19 | 19751 |
| HSV1-UL54-943 | - | GCCGAGACCAGACGGGUCUC | 20 | 7609 |
| HSV1-UL54-2763 | - | CGCCGAGACCAGACGGGUCUC | 21 | 19752 |
| HSV1-UL54-2764 | - | ACGCCGAGACCAGACGGGUCUC | 22 | 19753 |
| HSV1-UL54-2765 | - | GACGCCGAGACCAGACGGGUCUC | 23 | 19754 |
| HSV1-UL54-2766 | - | UGACGCCGAGACCAGACGGGUCUC | 24 | 19755 |
| HSV1-UL54-2767 | - | CGCGUCGAGCGUGGCGUC | 18 | 19756 |
| HSV1-UL54-2768 | - | CCGCGUCGAGCGUGGCGUC | 19 | 19757 |
| HSV1-UL54-962 | - | ACCGCGUCGAGCGUGGCGUC | 20 | 7625 |
| HSV1-UL54-2769 | - | AACCGCGUCGAGCGUGGCGUC | 21 | 19758 |
| HSV1-UL54-2770 | - | CAACCGCGUCGAGCGUGGCGUC | 22 | 19759 |
| HSV1-UL54-2771 | - | CCAACCGCGUCGAGCGUGGCGUC | 23 | 19760 |
| HSV1-UL54-2772 | - | GCCAACCGCGUCGAGCGUGGCGUC | 24 | 19761 |
| HSV1-UL54-2773 | - | CGGUGCUGGCGGGCCAAG | 18 | 19762 |
| HSV1-UL54-2774 | - | CCGGUGCUGGCGGGCCAAG | 19 | 19763 |
| HSV1-UL54-940 | - | CCCGGUGCUGGCGGGCCAAG | 20 | 7606 |
| HSV1-UL54-2775 | - | CCCCGGUGCUGGCGGGCCAAG | 21 | 19764 |
| HSV1-UL54-2776 | - | GCCCCGGUGCUGGCGGGCCAAG | 22 | 19765 |
| HSV1-UL54-2777 | - | GGCCCCGGUGCUGGCGGGCCAAG | 23 | 19766 |
| HSV1-UL54-2778 | - | GGGCCCCGGUGCUGGCGGGCCAAG | 24 | 19767 |
| HSV1-UL54-2779 | - | AAGGAGGGCCCUUUGACG | 18 | 19768 |
| HSV1-UL54-2780 | - | CAAGGAGGGCCCUUUGACG | 19 | 19769 |
| HSV1-UL54-941 | - | CCAAGGAGGGCCCUUUGACG | 20 | 7607 |
| HSV1-UL54-2781 | - | GCCAAGGAGGGCCCUUUGACG | 21 | 19770 |
| HSV1-UL54-2782 | - | GGCCAAGGAGGGCCCUUUGACG | 22 | 19771 |
| HSV1-UL54-2783 | - | GGGCCAAGGAGGGCCCUUUGACG | 23 | 19772 |
| HSV1-UL54-2784 | - | CGGGCCAAGGAGGGCCCUUUGACG | 24 | 19773 |
| HSV1-UL54-2785 | - | AGGCGCUGGCCUCCGCCG | 18 | 19774 |
| HSV1-UL54-2786 | - | GAGGCGCUGGCCUCCGCCG | 19 | 19775 |
| HSV1-UL54-950 | - | CGAGGCGCUGGCCUCCGCCG | 20 | 7614 |
| HSV1-UL54-2787 | - | UCGAGGCGCUGGCCUCCGCCG | 21 | 19776 |
| HSV1-UL54-2788 | - | AUCGAGGCGCUGGCCUCCGCCG | 22 | 19777 |
| HSV1-UL54-2789 | - | CAUCGAGGCGCUGGCCUCCGCCG | 23 | 19778 |
| HSV1-UL54-2790 | - | UCAUCGAGGCGCUGGCCUCCGCCG | 24 | 19779 |
| HSV1-UL54-2791 | - | CCAGGCUCGCCAACCGCG | 18 | 19780 |
| HSV1-UL54-2792 | - | GCCAGGCUCGCCAACCGCG | 19 | 19781 |
| HSV1-UL54-961 | - | GGCCAGGCUCGCCAACCGCG | 20 | 7624 |
| HSV1-UL54-2793 | - | UGGCCAGGCUCGCCAACCGCG | 21 | 19782 |
| HSV1-UL54-2794 | - | CUGGCCAGGCUCGCCAACCGCG | 22 | 19783 |
| HSV1-UL54-2795 | - | UCUGGCCAGGCUCGCCAACCGCG | 23 | 19784 |
| HSV1-UL54-2796 | - | UUCUGGCCAGGCUCGCCAACCGCG | 24 | 19785 |
| HSV1-UL54-2797 | - | GCGUCGAGCGUGGCGUCG | 18 | 19786 |
| HSV1-UL54-2798 | - | CGCGUCGAGCGUGGCGUCG | 19 | 19787 |
| HSV1-UL54-331 | - | CCGCGUCGAGCGUGGCGUCG | 20 | 7094 |
| HSV1-UL54-2799 | - | ACCGCGUCGAGCGUGGCGUCG | 21 | 19788 |
| HSV1-UL54-2800 | - | AACCGCGUCGAGCGUGGCGUCG | 22 | 19789 |
| HSV1-UL54-2801 | - | CAACCGCGUCGAGCGUGGCGUCG | 23 | 19790 |
| HSV1-UL54-2802 | - | CCAACCGCGUCGAGCGUGGCGUCG | 24 | 19791 |
| HSV1-UL54-2803 | - | CCCUUGGUGUCGGGGUCG | 18 | 19792 |
| HSV1-UL54-2804 | - | ACCCUUGGUGUCGGGGUCG | 19 | 19793 |
| HSV1-UL54-968 | - | GACCCUUGGUGUCGGGGUCG | 20 | 7628 |
| HSV1-UL54-2805 | - | CGACCCUUGGUGUCGGGGUCG | 21 | 19794 |
| HSV1-UL54-2806 | - | GCGACCCUUGGUGUCGGGGUCG | 22 | 19795 |
| HSV1-UL54-2807 | - | CGCGACCCUUGGUGUCGGGGUCG | 23 | 19796 |
| HSV1-UL54-2808 | - | ACGCGACCCUUGGUGUCGGGGUCG | 24 | 19797 |
| HSV1-UL54-2809 | - | GGGGGACCCCGCCCCGGG | 18 | 19798 |
| HSV1-UL54-2810 | - | UGGGGGACCCCGCCCCGGG | 19 | 19799 |
| HSV1-UL54-914 | - | CUGGGGGACCCCGCCCCGGG | 20 | 7588 |
| HSV1-UL54-2811 | - | CCUGGGGGACCCCGCCCCGGG | 21 | 19800 |
| HSV1-UL54-2812 | - | CCCUGGGGGACCCCGCCCCGGG | 22 | 19801 |
| HSV1-UL54-2813 | - | ACCCUGGGGGACCCCGCCCCGGG | 23 | 19802 |
| HSV1-UL54-2814 | - | AACCCUGGGGGACCCCGCCCCGGG | 24 | 19803 |
| HSV1-UL54-2815 | - | ACCCCGCCCCGGGGCGGG | 18 | 19804 |
| HSV1-UL54-2816 | - | GACCCCGCCCCGGGGCGGG | 19 | 19805 |
| HSV1-UL54-916 | - | GGACCCCGCCCCGGGGCGGG | 20 | 7589 |
| HSV1-UL54-2817 | - | GGGACCCCGCCCCGGGGCGGG | 21 | 19806 |
| HSV1-UL54-2818 | - | GGGGACCCCGCCCCGGGGCGGG | 22 | 19807 |
| HSV1-UL54-2819 | - | GGGGGACCCCGCCCCGGGGCGGG | 23 | 19808 |
| HSV1-UL54-2820 | - | UGGGGGACCCCGCCCCGGGGCGGG | 24 | 19809 |
| HSV1-UL54-2821 | - | CGACCCUUGGUGUCGGGG | 18 | 19810 |
| HSV1-UL54-2822 | - | GCGACCCUUGGUGUCGGGG | 19 | 19811 |
| HSV1-UL54-966 | - | CGCGACCCUUGGUGUCGGGG | 20 | 7627 |
| HSV1-UL54-2823 | - | ACGCGACCCUUGGUGUCGGGG | 21 | 19812 |
| HSV1-UL54-2824 | - | UACGCGACCCUUGGUGUCGGGG | 22 | 19813 |
| HSV1-UL54-2825 | - | CUACGCGACCCUUGGUGUCGGGG | 23 | 19814 |
| HSV1-UL54-2826 | - | ACUACGCGACCCUUGGUGUCGGGG | 24 | 19815 |
| HSV1-UL54-2827 | - | GAGGCCUGUGCGGCCUGG | 18 | 19816 |
| HSV1-UL54-2828 | - | CGAGGCCUGUGCGGCCUGG | 19 | 19817 |
| HSV1-UL54-958 | - | GCGAGGCCUGUGCGGCCUGG | 20 | 7621 |
| HSV1-UL54-2829 | - | CGCGAGGCCUGUGCGGCCUGG | 21 | 19818 |
| HSV1-UL54-2830 | - | GCGCGAGGCCUGUGCGGCCUGG | 22 | 19819 |
| HSV1-UL54-2831 | - | GGCGCGAGGCCUGUGCGGCCUGG | 23 | 19820 |
| HSV1-UL54-2832 | - | AGGCGCGAGGCCUGUGCGGCCUGG | 24 | 19821 |
| HSV1-UL54-2833 | - | CGCCCCGGGGCGGGGUGG | 18 | 19822 |
| HSV1-UL54-2834 | - | CCGCCCCGGGGCGGGGUGG | 19 | 19823 |
| HSV1-UL54-917 | - | CCCGCCCCGGGGCGGGGUGG | 20 | 7590 |
| HSV1-UL54-2835 | - | CCCCGCCCCGGGGCGGGGUGG | 21 | 19824 |
| HSV1-UL54-2836 | - | ACCCCGCCCCGGGGCGGGGUGG | 22 | 19825 |
| HSV1-UL54-2837 | - | GACCCCGCCCCGGGGCGGGGUGG | 23 | 19826 |
| HSV1-UL54-2838 | - | GGACCCCGCCCCGGGGCGGGGUGG | 24 | 19827 |
| HSV1-UL54-2839 | - | GCCCCGGCGCCCCCCAUG | 18 | 19828 |
| HSV1-UL54-2840 | - | GGCCCCGGCGCCCCCCAUG | 19 | 19829 |
| HSV1-UL54-918 | - | CGGCCCCGGCGCCCCCCAUG | 20 | 7591 |
| HSV1-UL54-2841 | - | ACGGCCCCGGCGCCCCCCAUG | 21 | 19830 |
| HSV1-UL54-2842 | - | GACGGCCCCGGCGCCCCCCAUG | 22 | 19831 |
| HSV1-UL54-2843 | - | GGACGGCCCCGGCGCCCCCCAUG | 23 | 19832 |
| HSV1-UL54-2844 | - | CGGACGGCCCCGGCGCCCCCCAUG | 24 | 19833 |
| HSV1-UL54-2845 | - | CUCCCCGGGGCCUGCAUG | 18 | 19834 |
| HSV1-UL54-2846 | - | CCUCCCCGGGGCCUGCAUG | 19 | 19835 |
| HSV1-UL54-972 | - | ACCUCCCCGGGGCCUGCAUG | 20 | 7631 |
| HSV1-UL54-2847 | - | UACCUCCCCGGGGCCUGCAUG | 21 | 19836 |
| HSV1-UL54-2848 | - | CUACCUCCCCGGGGCCUGCAUG | 22 | 19837 |
| HSV1-UL54-2849 | - | UCUACCUCCCCGGGGCCUGCAUG | 23 | 19838 |
| HSV1-UL54-2850 | - | UUCUACCUCCCCGGGGCCUGCAUG | 24 | 19839 |
| HSV1-UL54-1900 | - | GAACCAAUCGCAACCCUG | 18 | 18889 |
| HSV1-UL54-1901 | - | AGAACCAAUCGCAACCCUG | 19 | 18890 |
| HSV1-UL54-910 | - | CAGAACCAAUCGCAACCCUG | 20 | 7585 |
| HSV1-UL54-1902 | - | CCAGAACCAAUCGCAACCCUG | 21 | 18891 |
| HSV1-UL54-1903 | - | CCCAGAACCAAUCGCAACCCUG | 22 | 18892 |
| HSV1-UL54-1904 | - | CCCCAGAACCAAUCGCAACCCUG | 23 | 18893 |
| HSV1-UL54-1905 | - | CCCCCAGAACCAAUCGCAACCCUG | 24 | 18894 |
| HSV1-UL54-2851 | - | CCCUGGGCCCCGGUGCUG | 18 | 19840 |
| HSV1-UL54-2852 | - | CCCCUGGGCCCCGGUGCUG | 19 | 19841 |
| HSV1-UL54-937 | - | GCCCCUGGGCCCCGGUGCUG | 20 | 7604 |
| HSV1-UL54-2853 | - | AGCCCCUGGGCCCCGGUGCUG | 21 | 19842 |
| HSV1-UL54-2854 | - | UAGCCCCUGGGCCCCGGUGCUG | 22 | 19843 |
| HSV1-UL54-2855 | - | AUAGCCCCUGGGCCCCGGUGCUG | 23 | 19844 |
| HSV1-UL54-2856 | - | AAUAGCCCCUGGGCCCCGGUGCUG | 24 | 19845 |
| HSV1-UL54-2857 | - | UGUUCGCGGCGGCGUCUG | 18 | 19846 |
| HSV1-UL54-2858 | - | GUGUUCGCGGCGGCGUCUG | 19 | 19847 |
| HSV1-UL54-959 | - | UGUGUUCGCGGCGGCGUCUG | 20 | 7622 |
| HSV1-UL54-2859 | - | CUGUGUUCGCGGCGGCGUCUG | 21 | 19848 |
| HSV1-UL54-2860 | - | ACUGUGUUCGCGGCGGCGUCUG | 22 | 19849 |
| HSV1-UL54-2861 | - | AACUGUGUUCGCGGCGGCGUCUG | 23 | 19850 |
| HSV1-UL54-2862 | - | GAACUGUGUUCGCGGCGGCGUCUG | 24 | 19851 |
| HSV1-UL54-2863 | - | ACUACGCGACCCUUGGUG | 18 | 19852 |
| HSV1-UL54-2864 | - | GACUACGCGACCCUUGGUG | 19 | 19853 |
| HSV1-UL54-964 | - | CGACUACGCGACCCUUGGUG | 20 | 7626 |
| HSV1-UL54-2865 | - | UCGACUACGCGACCCUUGGUG | 21 | 19854 |
| HSV1-UL54-2866 | - | AUCGACUACGCGACCCUUGGUG | 22 | 19855 |
| HSV1-UL54-2867 | - | GAUCGACUACGCGACCCUUGGUG | 23 | 19856 |
| HSV1-UL54-2868 | - | AGAUCGACUACGCGACCCUUGGUG | 24 | 19857 |
| HSV1-UL54-2869 | - | UCAUGCACGACCCCUUUG | 18 | 19858 |
| HSV1-UL54-2870 | - | GUCAUGCACGACCCCUUUG | 19 | 19859 |
| HSV1-UL54-287 | - | GGUCAUGCACGACCCCUUUG | 20 | 7050 |
| HSV1-UL54-2871 | - | AGGUCAUGCACGACCCCUUUG | 21 | 19860 |
| HSV1-UL54-2872 | - | CAGGUCAUGCACGACCCCUUUG | 22 | 19861 |
| HSV1-UL54-2873 | - | ACAGGUCAUGCACGACCCCUUUG | 23 | 19862 |
| HSV1-UL54-2874 | - | CACAGGUCAUGCACGACCCCUUUG | 24 | 19863 |
| HSV1-UL54-2875 | - | CCCCCAGGACCCCAUUAU | 18 | 19864 |
| HSV1-UL54-2876 | - | GCCCCCAGGACCCCAUUAU | 19 | 19865 |
| HSV1-UL54-314 | - | CGCCCCCAGGACCCCAUUAU | 20 | 7077 |
| HSV1-UL54-2877 | - | GCGCCCCCAGGACCCCAUUAU | 21 | 19866 |
| HSV1-UL54-2878 | - | UGCGCCCCCAGGACCCCAUUAU | 22 | 19867 |
| HSV1-UL54-2879 | - | CUGCGCCCCCAGGACCCCAUUAU | 23 | 19868 |
| HSV1-UL54-2880 | - | GCUGCGCCCCCAGGACCCCAUUAU | 24 | 19869 |
| HSV1-UL54-1918 | - | AGAACCAAUCGCAACCCU | 18 | 18907 |
| HSV1-UL54-1919 | - | CAGAACCAAUCGCAACCCU | 19 | 18908 |
| HSV1-UL54-1204 | - | CCAGAACCAAUCGCAACCCU | 20 | 18193 |
| HSV1-UL54-1920 | - | CCCAGAACCAAUCGCAACCCU | 21 | 18909 |
| HSV1-UL54-1921 | - | CCCCAGAACCAAUCGCAACCCU | 22 | 18910 |
| HSV1-UL54-1922 | - | CCCCCAGAACCAAUCGCAACCCU | 23 | 18911 |
| HSV1-UL54-1923 | - | GCCCCCAGAACCAAUCGCAACCCU | 24 | 18912 |
| HSV1-UL54-2881 | - | AGGUCAUGCACGACCCCU | 18 | 19870 |
| HSV1-UL54-2882 | - | CAGGUCAUGCACGACCCCU | 19 | 19871 |
| HSV1-UL54-931 | - | ACAGGUCAUGCACGACCCCU | 20 | 7601 |
| HSV1-UL54-2883 | - | CACAGGUCAUGCACGACCCCU | 21 | 19872 |
| HSV1-UL54-2884 | - | GCACAGGUCAUGCACGACCCCU | 22 | 19873 |
| HSV1-UL54-2885 | - | CGCACAGGUCAUGCACGACCCCU | 23 | 19874 |
| HSV1-UL54-2886 | - | GCGCACAGGUCAUGCACGACCCCU | 24 | 19875 |
| HSV1-UL54-2887 | - | AGACCAGACGGGUCUCCU | 18 | 19876 |
| HSV1-UL54-2888 | - | GAGACCAGACGGGUCUCCU | 19 | 19877 |
| HSV1-UL54-302 | - | CGAGACCAGACGGGUCUCCU | 20 | 7065 |
| HSV1-UL54-2889 | - | CCGAGACCAGACGGGUCUCCU | 21 | 19878 |
| HSV1-UL54-2890 | - | GCCGAGACCAGACGGGUCUCCU | 22 | 19879 |
| HSV1-UL54-2891 | - | CGCCGAGACCAGACGGGUCUCCU | 23 | 19880 |
| HSV1-UL54-2892 | - | ACGCCGAGACCAGACGGGUCUCCU | 24 | 19881 |
| HSV1-UL54-2893 | - | UGGUCCUGCGCUCCAUCU | 18 | 19882 |
| HSV1-UL54-2894 | - | UUGGUCCUGCGCUCCAUCU | 19 | 19883 |
| HSV1-UL54-928 | - | GUUGGUCCUGCGCUCCAUCU | 20 | 7598 |
| HSV1-UL54-2895 | - | GGUUGGUCCUGCGCUCCAUCU | 21 | 19884 |
| HSV1-UL54-2896 | - | CGGUUGGUCCUGCGCUCCAUCU | 22 | 19885 |
| HSV1-UL54-2897 | - | GCGGUUGGUCCUGCGCUCCAUCU | 23 | 19886 |
| HSV1-UL54-2898 | - | CGCGGUUGGUCCUGCGCUCCAUCU | 24 | 19887 |
| HSV1-UL54-2899 | - | GACCCUUGGUGUCGGGGU | 18 | 19888 |
| HSV1-UL54-2900 | - | CGACCCUUGGUGUCGGGGU | 19 | 19889 |
| HSV1-UL54-336 | - | GCGACCCUUGGUGUCGGGGU | 20 | 7099 |
| HSV1-UL54-2901 | - | CGCGACCCUUGGUGUCGGGGU | 21 | 19890 |
| HSV1-UL54-2902 | - | ACGCGACCCUUGGUGUCGGGGU | 22 | 19891 |
| HSV1-UL54-2903 | - | UACGCGACCCUUGGUGUCGGGGU | 23 | 19892 |
| HSV1-UL54-2904 | - | CUACGCGACCCUUGGUGUCGGGGU | 24 | 19893 |
| HSV1-UL54-2905 | - | CGGCGUCUGGCGGACAUU | 18 | 19894 |
| HSV1-UL54-2906 | - | GCGGCGUCUGGCGGACAUU | 19 | 19895 |
| HSV1-UL54-960 | - | GGCGGCGUCUGGCGGACAUU | 20 | 7623 |
| HSV1-UL54-2907 | - | CGGCGGCGUCUGGCGGACAUU | 21 | 19896 |
| HSV1-UL54-2908 | - | GCGGCGGCGUCUGGCGGACAUU | 22 | 19897 |
| HSV1-UL54-2909 | - | CGCGGCGGCGUCUGGCGGACAUU | 23 | 19898 |
| HSV1-UL54-2910 | - | UCGCGGCGGCGUCUGGCGGACAUU | 24 | 19899 |
| HSV1-UL54-2911 | - | GGUCAUGCACGACCCCUU | 18 | 19900 |
| HSV1-UL54-2912 | - | AGGUCAUGCACGACCCCUU | 19 | 19901 |
| HSV1-UL54-285 | - | CAGGUCAUGCACGACCCCUU | 20 | 7048 |
| HSV1-UL54-2913 | - | ACAGGUCAUGCACGACCCCUU | 21 | 19902 |
| HSV1-UL54-2914 | - | CACAGGUCAUGCACGACCCCUU | 22 | 19903 |
| HSV1-UL54-2915 | - | GCACAGGUCAUGCACGACCCCUU | 23 | 19904 |
| HSV1-UL54-2916 | - | CGCACAGGUCAUGCACGACCCCUU | 24 | 19905 |
| HSV1-UL54-2917 | - | GUCAUGCACGACCCCUUU | 18 | 19906 |
| HSV1-UL54-2918 | - | GGUCAUGCACGACCCCUUU | 19 | 19907 |
| HSV1-UL54-286 | - | AGGUCAUGCACGACCCCUUU | 20 | 7049 |
| HSV1-UL54-2919 | - | CAGGUCAUGCACGACCCCUUU | 21 | 19908 |
| HSV1-UL54-2920 | - | ACAGGUCAUGCACGACCCCUUU | 22 | 19909 |
| HSV1-UL54-2921 | - | CACAGGUCAUGCACGACCCCUUU | 23 | 19910 |
| HSV1-UL54-2922 | - | GCACAGGUCAUGCACGACCCCUUU | 24 | 19911 |

[0812] Table 16A provides exemplary targeting domains for knocking out the UL54 gene selected according to the first tier parameters. The targeting domains bind within the first 500 bp of the coding sequence (e.g., within 500 bp downstream from the start codon), have a high level of orthogonality and start with a 5′G. It is contemplated herein that in an embodiment the targeting domain hybridizes to the target domain through complementary base pairing. Any of the targeting domains in the table can be used with a N. meningitidis Cas9 molecule that generates a double stranded break (Cas9 nuclease) or a single-stranded break (Cas9 nickase).

TABLE 16A

| 1st Tier | DNA | | Target Site | Seq ID |
|---|---|---|---|---|
| gRNA Name | Strand | Targeting Domain | Length | NO: |
| HSV1-UL54-2923 | + | GAACACUCCCCGCUGCU | 17 | 19912 |
| HSV1-UL54-2924 | + | GAGGAACACUCCCCGCUGCU | 20 | 19913 |

[0813] Table 16B provides exemplary targeting domains for knocking out the UL54 gene selected according to the second tier parameters. The targeting domains bind within the first 500 bp of the coding sequence (e.g., within 500 bp downstream from the start codon) and have a high level of orthogonality. It is contemplated herein that in an embodiment the targeting domain hybridizes to the target domain through complementary base pairing. Any of the targeting domains in the table can be used with a N. meningitidis Cas9 molecule that generates a double stranded break (Cas9 nuclease) or a single-stranded break (Cas9 nickase).

TABLE 16B

| 2nd Tier | | | | |
|---|---|---|---|---|
| gRNA Name | | | Target Site | Seq ID |
| Strand | DNA | Targeting Domain | Length | NO: |
| HSV1-UL54-2925 | + | CGUCCGCCGCGGGCAGG | 17 | 19914 |
| HSV1-UL54-1505 | + | CGGCGUCCGCCGCGGGCAGG | 20 | 18494 |

[0814] Table 16C provides exemplary targeting domains for knocking out the UL54 gene selected according to the fifth tier parameters. The targeting domains fall in the coding sequence of the gene, downstream of the first 500 bp of coding sequence (e.g., anywhere from +500 (relative to the start codon) to the stop codon of the gene). It is contemplated herein that in an embodiment the targeting domain hybridizes to the target domain through complementary base pairing. Any of the targeting domains in the table can be used with a N. meningitidis Cas9 molecule that generates a double stranded break (Cas9 nuclease) or a single-stranded break (Cas9 nickase).

TABLE 16C

| 5th Tier | DNA | | Target Site | Seq ID |
|---|---|---|---|---|
| gRNA Name | Strand | Targeting Domain | Length | NO: |
| HSV1-UL54-2926 | + | UGGCGGUCGAUGCGGCC | 17 | 19915 |
| HSV1-UL54-1069 | - | CGGUCGACCGCAUCAGC | 17 | 7712 |
| HSV1-UL54-510 | - | CCCCCCGCUAAUGACGC | 17 | 7273 |
| HSV1-UL54-1183 | + | GGCGGGGUCCCCCAGGG | 17 | 7803 |
| HSV1-UL54-696 | + | AGCGUCAUUAGCGGGGG | 17 | 7459 |
| HSV1-UL54-2927 | + | CUCCUGGCGGUGCGUGU | 17 | 19916 |
| HSV1-UL54-2928 | + | CCUUGGCGGUCGAUGCGGCC | 20 | 19917 |
| HSV1-UL54-274 | - | ACCCCCCCCGCUAAUGACGC | 20 | 7037 |
| HSV1-UL54-2929 | + | CGGGGCGGGGUCCCCCAGGG | 20 | 19918 |
| HSV1-UL54-460 | + | GCCAGCGUCAUUAGCGGGGG | 20 | 7223 |
| HSV1-UL54-978 | + | ACACUCCUGGCGGUGCGUGU | 20 | 7636 |

### III. Cas9 Molecules

[0815] Cas9 molecules of a variety of species can be used in the methods and compositions described herein. While the S. pyogenes, S. aureus and S. thermophilus Cas9 molecules are the subject of much of the disclosure herein, Cas9 molecules of, derived from, or based on the Cas9 proteins of other species listed herein can be used as well. In other words, while the much of the description herein uses S. pyogenes and S. thermophilus Cas9 molecules, Cas9 molecules from the other species can replace them, e.g., Staphylococcus aureus and Neisseria meningitidis Cas9 molecules. Additional Cas9 species include: Acidovorax avenae, Actinobacillus pleuropneumonias, Actinobacillus succinogenes, Actinobacillus suis, Actinomyces sp., cycliphilus denitrificans, Aminomonas paucivorans, Bacillus cereus, Bacillus smithii, Bacillus thuringiensis, Bacteroides sp., Blastopirellula marina, Bradyrhizobium sp., Brevibacillus laterosporus, Campylobacter coli, Campylobacter jejuni, Campylobacter lari, Candidatus Puniceispirillum, Clostridium cellulolyticum, Clostridium perfringens, Corynebacterium accolens, Corynebacterium diphtheria, Corynebacterium matruchotii, Dinoroseobacter shibae, Eubacterium dolichum, gamma proteobacterium, Gluconacetobacter diazotrophicus, Haemophilus parainfluenzae, Haemophilus sputorum, Helicobacter canadensis, Helicobacter cinaedi, Helicobacter mustelae, Ilyobacter polytropus, Kingella kingae, Lactobacillus crispatus, Listeria ivanovii, Listeria monocytogenes, Listeriaceae bacterium, Methylocystis sp., Methylosinus trichosporium, Mobiluncus mulieris, Neisseria bacilliformis, Neisseria cinerea, Neisseria flavescens, Neisseria lactamica, Neisseria meningitidis, Neisseria sp., Neisseria wadsworthii, Nitrosomonas sp., Parvibaculum lavamentivorans, Pasteurella multocida, Phascolarctobacterium succinatutens, Ralstonia syzygii, Rhodopseudomonas palustris, Rhodovulum sp., Simonsiella muelleri, Sphingomonas sp., Sporolactobacillus vineae, Staphylococcus lugdunensis, Streptococcus sp., Subdoligranulum sp., Tistrella mobilis, Treponema sp., or Verminephrobacter eiseniae.

[0816] A Cas9 molecule, or Cas9 polypeptide as that term is used herein, refers to a molecule or polypeptide that can interact with a guide RNA (gRNA) molecule and, in concert with the gRNA molecule, home or localizes to a site which comprises a target domain and PAM sequence. Cas9 molecule and Cas9 polypeptide, as those terms are used herein, refer to naturally occurring Cas9 molecules and to engineered, altered, or modified Cas9 molecules or Cas9 polypeptides that differ, e.g., by at least one amino acid residue, from a reference sequence, e.g., the most similar naturally occurring Cas9 molecule or a sequence of Table 17 or 18.

[0817] Cas9 Domains

[0818] Crystal structures have been determined for two different naturally occurring bacterial Cas9 molecules (Jinek et al., Science, 343(6176):1247997, 2014) and for S. pyogenes Cas9 with a guide RNA (e.g., a synthetic fusion of crRNA and tracrRNA) (Nishimasu et al., Cell, 156:935-949, 2014; and Anders et al., Nature, 2014, doi: 10.1038/nature13579).

[0819] A naturally occurring Cas9 molecule comprises two lobes: a recognition (REC) lobe and a nuclease (NUC) lobe; each of which further comprises domains described herein. FIGS. 9A-9B provide a schematic of the organization of important Cas9 domains in the primary structure. The domain nomenclature and the numbering of the amino acid residues encompassed by each domain used throughout this disclosure is as described in Nishimasu et al. The numbering of the amino acid residues is with reference to Cas9 from S. pyogenes.

[0820] The REC lobe comprises the arginine-rich bridge helix (BH), the REC1 domain, and the REC2 domain. The REC lobe does not share structural similarity with other known proteins, indicating that it is a Cas9-specific functional domain. The BH domain is a long a helix and arginine rich region and comprises amino acids 60-93 of the sequence of S. pyogenes Cas9. The REC1 domain is important for recognition of the repeat:anti-repeat duplex, e.g., of a gRNA or a tracrRNA, and is therefore critical for Cas9 activity by recognizing the target sequence. The REC1 domain comprises two REC1 motifs at amino acids 94 to 179 and 308 to 717 of the sequence of S. pyogenes Cas9. These two REC1 domains, though separated by the REC2 domain in the linear primary structure, assemble in the tertiary structure to form the REC1 domain. The REC2 domain, or parts thereof, may also play a role in the recognition of the repeat:anti-repeat duplex. The REC2 domain comprises amino acids 180-307 of the sequence of S. pyogenes Cas9.

[0821] The NUC lobe comprises the RuvC domain (also referred to herein as RuvC-like domain), the HNH domain (also referred to herein as HNH-like domain), and the PAM-interacting (PI) domain. The RuvC domain shares structural similarity to retroviral integrase superfamily members and cleaves a single strand, e.g., the non-complementary strand of the target nucleic acid molecule. The RuvC domain is assembled from the three split RuvC motifs (RuvC I, RuvCII, and RuvCIII, which are often commonly referred to in the art as RuvCI domain, or N-terminal RuvC domain, RuvCII domain, and RuvCIII domain) at amino acids 1-59, 718-769, and 909-1098, respectively, of the sequence of S. pyogenes Cas9. Similar to the REC1 domain, the three RuvC motifs are linearly separated by other domains in the primary structure, however in the tertiary structure, the three RuvC motifs assemble and form the RuvC domain. The HNH domain shares structural similarity with HNH endonucleases, and cleaves a single strand, e.g., the complementary strand of the target nucleic acid molecule. The HNH domain lies between the RuvC II-III motifs and comprises amino acids 775-908 of the sequence of S. pyogenes Cas9. The PI domain interacts with the PAM of the target nucleic acid molecule, and comprises amino acids 1099-1368 of the sequence of S. pyogenes Cas9.

[0822] A RuvC-Like Domain and an HNH-Like Domain

[0823] In an embodiment, a Cas9 molecule or Cas9 polypeptide comprises an HNH-like domain and a RuvC-like domain. In an embodiment, cleavage activity is dependent on a RuvC-like domain and an HNH-like domain. A Cas9 molecule or Cas9 polypeptide, e.g., an eaCas9 molecule or eaCas9 polypeptide, can comprise one or more of the following domains: a RuvC-like domain and an HNH-like domain. In an embodiment, a Cas9 molecule or Cas9 polypeptide is an eaCas9 molecule or eaCas9 polypeptide and the eaCas9 molecule or eaCas9 polypeptide comprises a RuvC-like domain, e.g., a RuvC-like domain described below, and/or an HNH-like domain, e.g., an HNH-like domain described below.

[0824] RuvC-Like Domains

[0825] In an embodiment, a RuvC-like domain cleaves, a single strand, e.g., the non-complementary strand of the target nucleic acid molecule. The Cas9 molecule or Cas9 polypeptide can include more than one RuvC-like domain (e.g., one, two, three or more RuvC-like domains). In an embodiment, a RuvC-like domain is at least 5, 6, 7, 8 amino acids in length but not more than 20, 19, 18, 17, 16 or 15 amino acids in length. In an embodiment, the Cas9 molecule or Cas9 polypeptide comprises an N-terminal RuvC-like domain of about 10 to 20 amino acids, e.g., about 15 amino acids in length.

[0826] N-Terminal RuvC-Like Domains

[0827] Some naturally occurring Cas9 molecules comprise more than one RuvC-like domain with cleavage being dependent on the N-terminal RuvC-like domain. Accordingly, Cas9 molecules or Cas9 polypeptide can comprise an N-terminal RuvC-like domain. Exemplary N-terminal RuvC-like domains are described below.

[0828] In an embodiment, an eaCas9 molecule or eaCas9 polypeptide comprises an N-terminal RuvC-like domain comprising an amino acid sequence of formula I:

(SEQ ID NO: 8)
D-X1-G-X2-X3-X4-X5-G-X6-X7-X8-X9,

[0829] wherein,

[0830] X1 is selected from I, V, M, L and T (e.g., selected from I, V, and L);

[0831] X2 is selected from T, I, V, S, N, Y, E and L (e.g., selected from T, V, and I);

[0832] X3 is selected from N, S, G, A, D, T, R, M and F (e.g., A or N);

[0833] X4 is selected from S, Y, N and F (e.g., S);

[0834] X5 is selected from V, I, L, C, T and F (e.g., selected from V, I and L);

[0835] X6 is selected from W, F, V, Y, S and L (e.g., W);

[0836] X7 is selected from A, S, C, V and G (e.g., selected from A and S);

[0837] X8 is selected from V, I, L, A, M and H (e.g., selected from V, I, M and L); and

[0838] X9 is selected from any amino acid or is absent (e.g., selected from T, V, I, L, A, F, S, A, Y, M and R, or, e.g., selected from T, V, I, L and Δ).

[0839] In an embodiment, the N-terminal RuvC-like domain differs from a sequence of SEQ ID NO:8, by as many as 1 but no more than 2, 3, 4, or 5 residues.

[0840] In embodiment, the N-terminal RuvC-like domain is cleavage competent.

[0841] In embodiment, the N-terminal RuvC-like domain is cleavage incompetent.

[0842] In an embodiment, a eaCas9 molecule or eaCas9 polypeptide comprises an N-terminal RuvC-like domain comprising an amino acid sequence of formula II:

(SEQ ID NO: 9)
D-X1-G-X2-X3-S-X5-G-X6-X7-X8-X9,,

[0843] wherein

[0844] X1 is selected from I, V, M, L and T (e.g., selected from I, V, and L);

[0845] X2 is selected from T, I, V, S, N, Y, E and L (e.g., selected from T, V, and I);

[0846] X3 is selected from N, S, G, A, D, T, R, M and F (e.g., A or N);

[0847] X5 is selected from V, I, L, C, T and F (e.g., selected from V, I and L);

[0848] X6 is selected from W, F, V, Y, S and L (e.g., W);

[0849] X7 is selected from A, S, C, V and G (e.g., selected from A and S);

[0850] X8 is selected from V, I, L, A, M and H (e.g., selected from V, I, M and L); and

[0851] X9 is selected from any amino acid or is absent (e.g., selected from T, V, I, L, A, F, S, A, Y, M and R or selected from e.g., T, V, I, L and Δ).

[0852] In an embodiment, the N-terminal RuvC-like domain differs from a sequence of SEQ ID NO:9 by as many as 1 but no more than 2, 3, 4, or 5 residues.

[0853] In an embodiment, the N-terminal RuvC-like domain comprises an amino acid sequence of formula III:

(SEQ ID NO: 10)
D-I-G-X2-X3-S-V-G-W-A-X8-X9,

[0854] wherein

[0855] X2 is selected from T, I, V, S, N, Y, E and L (e.g., selected from T, V, and I);

[0856] X3 is selected from N, S, G, A, D, T, R, M and F (e.g., A or N);

[0857] X8 is selected from V, I, L, A, M and H (e.g., selected from V, I, M and L); and

[0858] X9 is selected from any amino acid or is absent (e.g., selected from T, V, I, L, A, F, S, A, Y, M and R or selected from e.g., T, V, I, L and Δ).

[0859] In an embodiment, the N-terminal RuvC-like domain differs from a sequence of SEQ ID NO:10 by as many as 1 but no more than, 2, 3, 4, or 5 residues.

[0860] In an embodiment, the N-terminal RuvC-like domain comprises an amino acid sequence of formula III:

(SEQ ID NO: 11)
D-I-G-T-N-S-V-G-W-A-V-X,

[0861] wherein

[0862] X is a non-polar alkyl amino acid or a hydroxyl amino acid, e.g., X is selected from V, I, L and T (e.g., the eaCas9 molecule can comprise an N-terminal RuvC-like domain shown in FIGS. 2A-2G (is depicted as Y)).

[0863] In an embodiment, the N-terminal RuvC-like domain differs from a sequence of SEQ ID NO:11 by as many as 1 but no more than, 2, 3, 4, or 5 residues.

[0864] In an embodiment, the N-terminal RuvC-like domain differs from a sequence of an N-terminal RuvC like domain disclosed herein, e.g., in FIGS. 3A-3B or FIGS. 7A-7B, as many as 1 but no more than 2, 3, 4, or 5 residues. In an embodiment, 1, 2, 3 or all of the highly conserved residues identified in FIGS. 3A-3B or FIGS. 7A-7B are present.

[0865] In an embodiment, the N-terminal RuvC-like domain differs from a sequence of an N-terminal RuvC-like domain disclosed herein, e.g., in FIGS. 4A-4B or FIGS. 7A-7B, as many as 1 but no more than 2, 3, 4, or 5 residues. In an embodiment, 1, 2, or all of the highly conserved residues identified in FIGS. 4A-4B or FIGS. 7A-7B are present.

[0866] Additional RuvC-Like Domains

[0867] In addition to the N-terminal RuvC-like domain, the Cas9 molecule or Cas9 polypeptide, e.g., an eaCas9 molecule or eaCas9 polypeptide, can comprise one or more additional RuvC-like domains. In an embodiment, the Cas9 molecule or Cas9 polypeptide can comprise two additional RuvC-like domains. Preferably, the additional RuvC-like domain is at least 5 amino acids in length and, e.g., less than 15 amino acids in length, e.g., 5 to 10 amino acids in length, e.g., 8 amino acids in length.

[0868] An additional RuvC-like domain can comprise an amino acid sequence:

(SEQ ID NO: 12)
I-X1-X2-E-X3-A-R-E,

wherein

[0869] X1 is V or H,

[0870] X2 is I, L or V (e.g., I or V); and

[0871] X3 is M or T.

[0872] In an embodiment, the additional RuvC-like domain comprises the amino acid sequence:

(SEQ ID NO: 13)
I-V-X2-E-M-A-R-E,

wherein

[0873] X2 is I, L or V (e.g., I or V) (e.g., the eaCas9 molecule or eaCas9 polypeptide can comprise an additional RuvC-like domain shown in FIG. 2A-2G or FIGS. 7A-7B (depicted as B)).

[0874] An additional RuvC-like domain can comprise an amino acid sequence:

(SEQ ID NO: 14)
H-H-A-X1-D-A-X2-X3,

wherein

[0875] X1 is H or L;

[0876] X2 is R or V; and

[0877] X3 is E or V.

[0878] In an embodiment, the additional RuvC-like domain comprises the amino acid sequence: H-H-A-H-D-A-Y-L (SEQ ID NO:15).

[0879] In an embodiment, the additional RuvC-like domain differs from a sequence of SEQ ID NO: 12, 13, 14 or 15 by as many as 1 but no more than 2, 3, 4, or 5 residues.

[0880] In some embodiments, the sequence flanking the N-terminal RuvC-like domain is a sequences of formula V:

(SEQ ID NO: 16)
K-X1′-Y-X2′-X3′-X4′-Z-T-D-X9′-Y,.

[0881] wherein

[0882] X1′ is selected from K and P,

[0883] X2′ is selected from V, L, I, and F (e.g., V, I and L);

[0884] X3′ is selected from G, A and S (e.g., G),

[0885] X4′ is selected from L, I, V and F (e.g., L);

[0886] X9′ is selected from D, E, N and Q; and

[0887] Z is an N-terminal RuvC-like domain, e.g., as described above.

[0888] HNH-Like Domains

[0889] In an embodiment, an HNH-like domain cleaves a single stranded complementary domain, e.g., a complementary strand of a double stranded nucleic acid molecule. In an embodiment, an HNH-like domain is at least 15, 20, 25 amino acids in length but not more than 40, 35 or 30 amino acids in length, e.g., 20 to 35 amino acids in length, e.g., 25 to 30 amino acids in length. Exemplary HNH-like domains are described below.

[0890] In an embodiment, an eaCas9 molecule or eaCas9 polypeptide comprises an HNH-like domain having an amino acid sequence of formula VI:

(SEQ ID NO: 17)
X1-X2-X3-H-X4-X5-P-X6-X7-X8-X9-X10-X11-X12-X13-
X14-X15-N-X16-X17-X18-X19-X20-X21-X22-X23-N,

wherein

[0891] X1 is selected from D, E, Q and N (e.g., D and E);

[0892] X2 is selected from L, I, R, Q, V, M and K;

[0893] X3 is selected from D and E;

[0894] X4 is selected from I, V, T, A and L (e.g., A, I and V);

[0895] X5 is selected from V, Y, I, L, F and W (e.g., V, I and L);

[0896] X6 is selected from Q, H, R, K, Y, I, L, F and W;

[0897] X7 is selected from S, A, D, T and K (e.g., S and A);

[0898] X8 is selected from F, L, V, K, Y, M, I, R, A, E, D and Q (e.g., F);

[0899] X9 is selected from L, R, T, I, V, S, C, Y, K, F and G;

[0900] X10 is selected from K, Q, Y, T, F, L, W, M, A, E, G, and S;

[0901] X11 is selected from D, S, N, R, L and T (e.g., D);

[0902] X12 is selected from D, N and S;

[0903] X13 is selected from S, A, T, G and R (e.g., S);

[0904] X14 is selected from I, L, F, S, R, Y, Q, W, D, K and H (e.g., I, L and F);

[0905] X15 is selected from D, S, I, N, E, A, H, F, L, Q, M, G, Y and V;

[0906] X16 is selected from K, L, R, M, T and F (e.g., L, R and K);

[0907] X17 is selected from V, L, I, A and T;

[0908] X18 is selected from L, I, V and A (e.g., L and I);

[0909] X19 is selected from T, V, C, E, S and A (e.g., T and V);

[0910] X20 is selected from R, F, T, W, E, L, N, C, K, V, S, Q, I, Y, H and A;

[0911] X21 is selected from S, P, R, K, N, A, H, Q, G and L;

[0912] X22 is selected from D, G, T, N, S, K, A, I, E, L, Q, R and Y; and

[0913] X23 is selected from K, V, A, E, Y, I, C, L, S, T, G, K, M, D and F.

[0914] In an embodiment, a HNH-like domain differs from a sequence of SEQ ID NO: 17 by at least one but no more than, 2, 3, 4, or 5 residues.

[0915] In an embodiment, the HNH-like domain is cleavage competent.

[0916] In an embodiment, the HNH-like domain is cleavage incompetent.

[0917] In an embodiment, an eaCas9 molecule or eaCas9 polypeptide comprises an HNH-like domain comprising an amino acid sequence of formula VII:

(SEQ ID NO: 18)
X1-X2-X3-H-X4-X5-P-X6-S-X8-X9-X10-D-D-S-X14-X15-
N-K-V-L-X19-X20-X21-X22-X23-N,

[0918] wherein

[0919] X1 is selected from D and E;

[0920] X2 is selected from L, I, R, Q, V, M and K;

[0921] X3 is selected from D and E;

[0922] X4 is selected from I, V, T, A and L (e.g., A, I and V);

[0923] X5 is selected from V, Y, I, L, F and W (e.g., V, I and L);

[0924] X6 is selected from Q, H, R, K, Y, I, L, F and W;

[0925] X8 is selected from F, L, V, K, Y, M, I, R, A, E, D and Q (e.g., F);

[0926] X9 is selected from L, R, T, I, V, S, C, Y, K, F and G;

[0927] X10 is selected from K, Q, Y, T, F, L, W, M, A, E, G, and S;

[0928] X14 is selected from I, L, F, S, R, Y, Q, W, D, K and H (e.g., I, L and F);

[0929] X15 is selected from D, S, I, N, E, A, H, F, L, Q, M, G, Y and V;

[0930] X19 is selected from T, V, C, E, S and A (e.g., T and V);

[0931] X20 is selected from R, F, T, W, E, L, N, C, K, V, S, Q, I, Y, H and A;

[0932] X21 is selected from S, P, R, K, N, A, H, Q, G and L;

[0933] X22 is selected from D, G, T, N, S, K, A, I, E, L, Q, R and Y; and

[0934] X23 is selected from K, V, A, E, Y, I, C, L, S, T, G, K, M, D and F.

[0935] In an embodiment, the HNH-like domain differs from a sequence of SEQ ID NO: 18 by 1, 2, 3, 4, or 5 residues.

[0936] In an embodiment, an eaCas9 molecule or eaCas9 polypeptide comprises an HNH-like domain comprising an amino acid sequence of formula VII:

(SEQ ID NO: 19)
X1-V-X3-H-I-V-P-X6-S-X8-X9-X10-D-D-S-X14-X15-N-K-
V-L-T-X20-X21-X22-X23-N,

[0937] wherein

[0938] X1 is selected from D and E;

[0939] X3 is selected from D and E;

[0940] X6 is selected from Q, H, R, K, Y, I, L and W;

[0941] X8 is selected from F, L, V, K, Y, M, I, R, A, E, D and Q (e.g., F);

[0942] X9 is selected from L, R, T, I, V, S, C, Y, K, F and G;

[0943] X10 is selected from K, Q, Y, T, F, L, W, M, A, E, G, and S;

[0944] X14 is selected from I, L, F, S, R, Y, Q, W, D, K and H (e.g., I, L and F);

[0945] X15 is selected from D, S, I, N, E, A, H, F, L, Q, M, G, Y and V;

[0946] X20 is selected from R, F, T, W, E, L, N, C, K, V, S, Q, I, Y, H and A;

[0947] X21 is selected from S, P, R, K, N, A, H, Q, G and L;

[0948] X22 is selected from D, G, T, N, S, K, A, I, E, L, Q, R and Y; and

[0949] X23 is selected from K, V, A, E, Y, I, C, L, S, T, G, K, M, D and F.

[0950] In an embodiment, the HNH-like domain differs from a sequence of SEQ ID NO: 19 by 1, 2, 3, 4, or 5 residues.

[0951] In an embodiment, an eaCas9 molecule or eaCas9 polypeptide comprises an HNH-like domain having an amino acid sequence of formula VIII:

(SEQ ID NO: 20)
D-X2-D-H-I-X5-P-Q-X7-F-X9-X10-D-X12-S-I-D-N-X16-V-
L-X19-X20-S-X22-X23-N,

[0952] wherein

[0953] X2 is selected from I and V;

[0954] X5 is selected from I and V;

[0955] X7 is selected from A and S;

[0956] X9 is selected from I and L;

[0957] X10 is selected from K and T;

[0958] X12 is selected from D and N;

[0959] X16 is selected from R, K and L; X19 is selected from T and V;

[0960] X20 is selected from S and R;

[0961] X22 is selected from K, D and A; and

[0962] X23 is selected from E, K, G and N (e.g., the eaCas9 molecule or eaCas9 polypeptide can comprise an HNH-like domain as described herein).

[0963] In an embodiment, the HNH-like domain differs from a sequence of SEQ ID NO: 20 by as many as 1 but no more than 2, 3, 4, or 5 residues.

[0964] In an embodiment, an eaCas9 molecule or eaCas9 polypeptide comprises the amino acid sequence of formula IX:

(SEQ ID NO: 21)
L-Y-Y-L-Q-N-G-X1′-D-M-Y-X2′-X3′-X4′-X5′-L-D-I-
X6′-X7′-L-S-X8′-Y-Z-N-R-X9′-K-X10′-D-X11′-V-P,

[0965] wherein

[0966] X1′ is selected from K and R;

[0967] X2′ is selected from V and T;

[0968] X3′ is selected from G and D;

[0969] X4′ is selected from E, Q and D;

[0970] X5′ is selected from E and D;

[0971] X6′ is selected from D, N and H;

[0972] X7′ is selected from Y, R and N;

[0973] X8′ is selected from Q, D and N; X9′ is selected from G and E;

[0974] X10′ is selected from S and G;

[0975] X11′ is selected from D and N; and

[0976] Z is an HNH-like domain, e.g., as described above.

[0977] In an embodiment, the eaCas9 molecule or eaCas9 polypeptide comprises an amino acid sequence that differs from a sequence of SEQ ID NO:21 by as many as 1 but no more than 2, 3, 4, or 5 residues.

[0978] In an embodiment, the HNH-like domain differs from a sequence of an HNH-like domain disclosed herein, e.g., in FIGS. 5A-5C or FIGS. 7A-7B, as many as 1 but no more than 2, 3, 4, or 5 residues. In an embodiment, 1 or both of the highly conserved residues identified in FIGS. 5A-5C or FIGS. 7A-7B are present.

[0979] In an embodiment, the HNH-like domain differs from a sequence of an HNH-like domain disclosed herein, e.g., in FIGS. 6A-6B or FIGS. 7A-7B, as many as 1 but no more than 2, 3, 4, or 5 residues. In an embodiment, 1, 2, all 3 of the highly conserved residues identified in FIGS. 6A-6B or FIGS. 7A-7B are present.

[0980] Cas9 Activities

[0981] Nuclease and Helicase Activities

[0982] In an embodiment, the Cas9 molecule or Cas9 polypeptide is capable of cleaving a target nucleic acid molecule. Typically wild type Cas9 molecules cleave both strands of a target nucleic acid molecule. Cas9 molecules and Cas9 polypeptides can be engineered to alter nuclease cleavage (or other properties), e.g., to provide a Cas9 molecule or Cas9 polypeptide which is a nickase, or which lacks the ability to cleave target nucleic acid. A Cas9 molecule or Cas9 polypeptide that is capable of cleaving a target nucleic acid molecule is referred to herein as an eaCas9 (an enzymatically active Cas9) molecule or eaCas9 polypeptide. In an embodiment, an eaCas9 molecule or eaCas9 polypeptide, comprises one or more of the following activities:

[0983] a nickase activity, i.e., the ability to cleave a single strand, e.g., the non-complementary strand or the complementary strand, of a nucleic acid molecule;

[0984] a double stranded nuclease activity, i.e., the ability to cleave both strands of a double stranded nucleic acid and create a double stranded break, which in an embodiment is the presence of two nickase activities;

[0985] an endonuclease activity;

[0986] an exonuclease activity; and

[0987] a helicase activity, i.e., the ability to unwind the helical structure of a double stranded nucleic acid.

[0988] In an embodiment, an enzymatically active Cas9 or an eaCas9 molecule or an eaCas9 polypeptide cleaves both DNA strands and results in a double stranded break. In an embodiment, an eaCas9 molecule or eaCas9 polypeptide cleaves only one strand, e.g., the strand to which the gRNA hybridizes to, or the strand complementary to the strand the gRNA hybridizes with. In an embodiment, an eaCas9 molecule or eaCas9 polypeptide comprises cleavage activity associated with an HNH-like domain. In an embodiment, an eaCas9 molecule or eaCas9 polypeptide comprises cleavage activity associated with an N-terminal RuvC-like domain. In an embodiment, an eaCas9 molecule or eaCas9 polypeptide comprises cleavage activity associated with an HNH-like domain and cleavage activity associated with an N-terminal RuvC-like domain. In an embodiment, an eaCas9 molecule or eaCas9 polypeptide comprises an active, or cleavage competent, HNH-like domain and an inactive, or cleavage incompetent, N-terminal RuvC-like domain. In an embodiment, an eaCas9 molecule or eaCas9 polypeptide comprises an inactive, or cleavage incompetent, HNH-like domain and an active, or cleavage competent, N-terminal RuvC-like domain.

[0989] Some Cas9 molecules or Cas9 polypeptides have the ability to interact with a gRNA molecule, and in conjunction with the gRNA molecule localize to a core target domain, but are incapable of cleaving the target nucleic acid, or incapable of cleaving at efficient rates. Cas9 molecules having no, or no substantial, cleavage activity are referred to herein as an eiCas9 molecule or eiCas9 polypeptide. For example, an eiCas9 molecule or eiCas9 polypeptide can lack cleavage activity or have substantially less, e.g., less than 20, 10, 5, 1 or 0.1% of the cleavage activity of a reference Cas9 molecule or eiCas9 polypeptide, as measured by an assay described herein.

[0990] Targeting and PAMs

[0991] A Cas9 molecule or Cas9 polypeptide, is a polypeptide that can interact with a guide RNA (gRNA) molecule and, in concert with the gRNA molecule, localizes to a site which comprises a target domain and PAM sequence.

[0992] In an embodiment, the ability of an eaCas9 molecule or eaCas9 polypeptide to interact with and cleave a target nucleic acid is PAM sequence dependent. A PAM sequence is a sequence in the target nucleic acid. In an embodiment, cleavage of the target nucleic acid occurs upstream from the PAM sequence. EaCas9 molecules from different bacterial species can recognize different sequence motifs (e.g., PAM sequences). In an embodiment, an eaCas9 molecule of S. pyogenes recognizes the sequence motif NGG and directs cleavage of a target nucleic acid sequence 1 to 10, e.g., 3 to 5, base pairs upstream from that sequence. See, e.g., Mali et al., SCIENCE 2013; 339(6121): 823-826. In an embodiment, an eaCas9 molecule of S. thermophilus recognizes the sequence motif NGGNG and NNAGAAW (W=A or T) and directs cleavage of a core target nucleic acid sequence 1 to 10, e.g., 3 to 5, base pairs upstream from these sequences. See, e.g., Horvath et al., SCIENCE 2010; 327(5962):167-170, and Deveau et al., J BACTERIOL 2008; 190(4): 1390-1400. In an embodiment, an eaCas9 molecule of S. mutans recognizes the sequence motif NGG and/or NAAR (R=A or G) and directs cleavage of a core target nucleic acid sequence 1 to 10, e.g., 3 to 5 base pairs, upstream from this sequence. See, e.g., Deveau et al., J BACTERIOL 2008; 190(4): 1390-1400. In an embodiment, an eaCas9 molecule of S. aureus recognizes the sequence motif NNGRR (R=A or G) and directs cleavage of a target nucleic acid sequence 1 to 10, e.g., 3 to 5, base pairs upstream from that sequence. In an embodiment, an eaCas9 molecule of S. aureus recognizes the sequence motif NNGRRN (R=A or G) and directs cleavage of a target nucleic acid sequence 1 to 10, e.g., 3 to 5, base pairs upstream from that sequence. In an embodiment, an eaCas9 molecule of S. aureus recognizes the sequence motif NNGRRT (R=A or G) and directs cleavage of a target nucleic acid sequence 1 to 10, e.g., 3 to 5, base pairs upstream from that sequence. In an embodiment, an eaCas9 molecule of S. aureus recognizes the sequence motif NNGRRV (R=A or G, V=A, G or C) and directs cleavage of a target nucleic acid sequence 1 to 10, e.g., 3 to 5, base pairs upstream from that sequence. In an embodiment, an eaCas9 molecule of Neisseria meningitidis recognizes the sequence motif NNNNGATT or NNNGCTT and directs cleavage of a target nucleic acid sequence 1 to 10, e.g., 3 to 5, base pairs upstream from that sequence. See, e.g., Hou et al., PNAS Early Edition 2013, 1-6. The ability of a Cas9 molecule to recognize a PAM sequence can be determined, e.g., using a transformation assay described in Jinek et al., SCIENCE 2012 337:816. In the aforementioned embodiments, N can be any nucleotide residue, e.g., any of A, G, C or T.

[0993] As is discussed herein, Cas9 molecules can be engineered to alter the PAM specificity of the Cas9 molecule.

[0994] Exemplary naturally occurring Cas9 molecules are described in Chylinski et al., RNA BIOLOGY 2013 10:5, 727-737. Such Cas9 molecules include Cas9 molecules of a cluster 1 bacterial family, cluster 2 bacterial family, cluster 3 bacterial family, cluster 4 bacterial family, cluster 5 bacterial family, cluster 6 bacterial family, a cluster 7 bacterial family, a cluster 8 bacterial family, a cluster 9 bacterial family, a cluster 10 bacterial family, a cluster 11 bacterial family, a cluster 12 bacterial family, a cluster 13 bacterial family, a cluster 14 bacterial family, a cluster 15 bacterial family, a cluster 16 bacterial family, a cluster 17 bacterial family, a cluster 18 bacterial family, a cluster 19 bacterial family, a cluster 20 bacterial family, a cluster 21 bacterial family, a cluster 22 bacterial family, a cluster 23 bacterial family, a cluster 24 bacterial family, a cluster 25 bacterial family, a cluster 26 bacterial family, a cluster 27 bacterial family, a cluster 28 bacterial family, a cluster 29 bacterial family, a cluster 30 bacterial family, a cluster 31 bacterial family, a cluster 32 bacterial family, a cluster 33 bacterial family, a cluster 34 bacterial family, a cluster 35 bacterial family, a cluster 36 bacterial family, a cluster 37 bacterial family, a cluster 38 bacterial family, a cluster 39 bacterial family, a cluster 40 bacterial family, a cluster 41 bacterial family, a cluster 42 bacterial family, a cluster 43 bacterial family, a cluster 44 bacterial family, a cluster 45 bacterial family, a cluster 46 bacterial family, a cluster 47 bacterial family, a cluster 48 bacterial family, a cluster 49 bacterial family, a cluster 50 bacterial family, a cluster 51 bacterial family, a cluster 52 bacterial family, a cluster 53 bacterial family, a cluster 54 bacterial family, a cluster 55 bacterial family, a cluster 56 bacterial family, a cluster 57 bacterial family, a cluster 58 bacterial family, a cluster 59 bacterial family, a cluster 60 bacterial family, a cluster 61 bacterial family, a cluster 62 bacterial family, a cluster 63 bacterial family, a cluster 64 bacterial family, a cluster 65 bacterial family, a cluster 66 bacterial family, a cluster 67 bacterial family, a cluster 68 bacterial family, a cluster 69 bacterial family, a cluster 70 bacterial family, a cluster 71 bacterial family, a cluster 72 bacterial family, a cluster 73 bacterial family, a cluster 74 bacterial family, a cluster 75 bacterial family, a cluster 76 bacterial family, a cluster 77 bacterial family, or a cluster 78 bacterial family.

[0995] Exemplary naturally occurring Cas9 molecules include a Cas9 molecule of a cluster 1 bacterial family. Examples include a Cas9 molecule of: S. pyogenes (e.g., strain SF370, MGAS10270, MGAS10750, MGAS2096, MGAS315, MGAS5005, MGAS6180, MGAS9429, NZ131 and SSI-1), S. thermophilus (e.g., strain LMD-9), S. pseudoporcinus (e.g., strain SPIN 20026), S. mutans (e.g., strain UA159, NN2025), S. macacae (e.g., strain NCTC11558), S. gallolyticus (e.g., strain UCN34, ATCC BAA-2069), S. equines (e.g., strain ATCC 9812, MGCS 124), S. dysdalactiae (e.g., strain GGS 124), S. bovis (e.g., strain ATCC 700338), S. anginosus (e.g., strain F0211), S. agalactiae (e.g., strain NEM316, A909), Listeria monocytogenes (e.g., strain F6854), Listeria innocua (L. innocua, e.g., strain CLip11262), Enterococcus italicus (e.g., strain DSM 15952), or Enterococcus faecium (e.g., strain 1,231,408). Additional exemplary Cas9 molecules are a Cas9 molecule of Neisseria meningitidis (Hou et al., PNAS Early Edition 2013, 1-6 and a S. aureus cas9 molecule.

[0996] In an embodiment, a Cas9 molecule or Cas9 polypeptide, e.g., an eaCas9 molecule or eaCas9 polypeptide, comprises an amino acid sequence:

[0997] having 60%, 65%, 70%, 75%, 80%, 85%, 90%, 95%, 96%, 97%, 98% or 99% homology with;

[0998] differs at no more than, 2, 5, 10, 15, 20, 30, or 40% of the amino acid residues when compared with;

[0999] differs by at least 1, 2, 5, 10 or 20 amino acids, but by no more than 100, 80, 70, 60, 50, 40 or 30 amino acids from; or

[1000] is identical to any Cas9 molecule sequence described herein, or a naturally occurring Cas9 molecule sequence, e.g., a Cas9 molecule from a species listed herein or described in Chylinski et al., RNA BIOLOGY 2013 10:5, 727-737; Hou et al., PNAS Early Edition 2013, 1-6; SEQ ID NO:1-4. In an embodiment, the Cas9 molecule or Cas9 polypeptide comprises one or more of the following activities: a nickase activity; a double stranded cleavage activity (e.g., an endonuclease and/or exonuclease activity); a helicase activity; or the ability, together with a gRNA molecule, to localize to a target nucleic acid.

[1001] In an embodiment, a Cas9 molecule or Cas9 polypeptide comprises any of the amino acid sequence of the consensus sequence of FIGS. 2A-2G, wherein “*” indicates any amino acid found in the corresponding position in the amino acid sequence of a Cas9 molecule or Cas9 polypeptide of S. pyogenes, S. thermophilus, S. mutans and L. innocua, and “-” indicates any amino acid. In an embodiment, a Cas9 molecule differs from the sequence of the consensus sequence of FIGS. 2A-2G by at least 1, but no more than 2, 3, 4, 5, 6, 7, 8, 9, or 10 amino acid residues. In an embodiment, a Cas9 molecule or Cas9 polypeptide comprises the amino acid sequence of SEQ ID NO:7 of FIGS. 7A-7B, wherein “*” indicates any amino acid found in the corresponding position in the amino acid sequence of a Cas9 molecule or Cas9 polypeptide of S. pyogenes, or N. meningitidis, “-” indicates any amino acid, and “-” indicates any amino acid or absent. In an embodiment, a Cas9 molecule or Cas9 polypeptide differs from the sequence of SEQ ID NO:6 or 7 disclosed in FIGS. 7A-7B by at least 1, but no more than 2, 3, 4, 5, 6, 7, 8, 9, or 10 amino acid residues.

[1002] A comparison of the sequence of a number of Cas9 molecules indicate that certain regions are conserved. These are identified below as:

[1003] region 1 (residues 1 to 180, or in the case of region 1′ residues 120 to 180)

[1004] region 2 (residues 360 to 480);

[1005] region 3 (residues 660 to 720);

[1006] region 4 (residues 817 to 900); and

[1007] region 5 (residues 900 to 960);

[1008] In an embodiment, a Cas9 molecule or Cas9 polypeptide comprises regions 1-5, together with sufficient additional Cas9 molecule sequence to provide a biologically active molecule, e.g., a Cas9 molecule having at least one activity described herein. In an embodiment, each of regions 1-5, independently, have 50%, 60%, 70%, 80%, 85%, 90%, 95%, 96%, 97%, 98% or 99% homology with the corresponding residues of a Cas9 molecule or Cas9 polypeptide described herein, e.g., a sequence from FIGS. 2A-2G or from FIGS. 7A-7B.

[1009] In an embodiment, a Cas9 molecule or Cas9 polypeptide, e.g., an eaCas9 molecule or eaCas9 polypeptide, comprises an amino acid sequence referred to as region 1:

[1010] having 50%, 60%, 70%, 80%, 85%, 90%, 95%, 96%, 97%, 98% or 99% homology with amino acids 1-180 (the numbering is according to the motif sequence in FIGS. 2A-2G; 52% of residues in the four Cas9 sequences in FIGS. 2A-2G are conserved) of the amino acid sequence of Cas9 of S. pyogenes;

[1011] differs by at least 1, 2, 5, 10 or 20 amino acids but by no more than 90, 80, 70, 60, 50, 40 or 30 amino acids from amino acids 1-180 of the amino acid sequence of Cas9 of S. pyogenes, S. thermophilus, S. mutans or Listeria innocua; or

[1012] is identical to 1-180 of the amino acid sequence of Cas9 of S. pyogenes, S. thermophilus, S. mutans or L. innocua.

[1013] In an embodiment, a Cas9 molecule or Cas9 polypeptide, e.g., an eaCas9 molecule or eaCas9 polypeptide, comprises an amino acid sequence referred to as region 1′:

[1014] having 55%, 60%, 65%, 70%, 75%, 80%, 85%, 90%, 95%, 96%, 97%, 98% or 99% homology with amino acids 120-180 (55% of residues in the four Cas9 sequences in FIGS. 2A-2G are conserved) of the amino acid sequence of Cas9 of S. pyogenes, S. thermophilus, S. mutans or L. innocua;

[1015] differs by at least 1, 2, or 5 amino acids but by no more than 35, 30, 25, 20 or 10 amino acids from amino acids 120-180 of the amino acid sequence of Cas9 of S. pyogenes, S. thermophilus, S. mutans or L. innocua; or

[1016] is identical to 120-180 of the amino acid sequence of Cas9 of S. pyogenes, S. thermophilus, S. mutans or L. innocua.

[1017] In an embodiment, a Cas9 molecule or Cas9 polypeptide, e.g., an eaCas9 molecule or eaCas9 polypeptide, comprises an amino acid sequence referred to as region 2: having 50%, 55%, 60%, 65%, 70%, 75%, 80%, 85%, 90%, 95%, 96%, 97%, 98% or 99% homology with amino acids 360-480 (52% of residues in the four Cas9 sequences in FIGS. 2A-2G are conserved) of the amino acid sequence of Cas9 of S. pyogenes, S. thermophilus, S. mutans or L. innocua;

[1018] differs by at least 1, 2, or 5 amino acids but by no more than 35, 30, 25, 20 or 10 amino acids from amino acids 360-480 of the amino acid sequence of Cas9 of S. pyogenes, S. thermophilus, S. mutans or L. innocua; or

[1019] is identical to 360-480 of the amino acid sequence of Cas9 of S. pyogenes, S. thermophilus, S. mutans or L. innocua.

[1020] In an embodiment, a Cas9 molecule or Cas9 polypeptide, e.g., an eaCas9 molecule or eaCas9 polypeptide, comprises an amino acid sequence referred to as region 3:

[1021] having 55%, 60%, 65%, 70%, 75%, 80%, 85%, 90%, 95%, 96%, 97%, 98%, or 99% homology with amino acids 660-720 (56% of residues in the four Cas9 sequences in FIGS. 2A-2G are conserved) of the amino acid sequence of Cas9 of S. pyogenes, S. thermophilus, S. mutans or L. innocua;

[1022] differs by at least 1, 2, or 5 amino acids but by no more than 35, 30, 25, 20 or 10 amino acids from amino acids 660-720 of the amino acid sequence of Cas9 of S. pyogenes, S. thermophilus, S. mutans or L. innocua; or

[1023] is identical to 660-720 of the amino acid sequence of Cas9 of S. pyogenes, S. thermophilus, S. mutans or L. innocua.

[1024] In an embodiment, a Cas9 molecule or Cas9 polypeptide, e.g., an eaCas9 molecule or eaCas9 polypeptide, comprises an amino acid sequence referred to as region 4:

[1025] having 50%, 55%, 60%, 65%, 70%, 75%, 80%, 85%, 90%, 95%, 96%, 97%, 98%, or 99% homology with amino acids 817-900 (55% of residues in the four Cas9 sequences in FIGS. 2A-2G are conserved) of the amino acid sequence of Cas9 of S. pyogenes, S. thermophilus, S. mutans or L. innocua;

[1026] differs by at least 1, 2, or 5 amino acids but by no more than 35, 30, 25, 20 or 10 amino acids from amino acids 817-900 of the amino acid sequence of Cas9 of S. pyogenes, S. thermophilus, S. mutans or L. innocua; or

[1027] is identical to 817-900 of the amino acid sequence of Cas9 of S. pyogenes, S. thermophilus, S. mutans or L. innocua.

[1028] In an embodiment, a Cas9 molecule or Cas9 polypeptide, e.g., an eaCas9 molecule or eaCas9 polypeptide, comprises an amino acid sequence referred to as region 5: having 50%, 55%, 60%, 65%, 70%, 75%, 80%, 85%, 90%, 95%, 96%, 97%, 98%, or 99% homology with amino acids 900-960 (60% of residues in the four Cas9 sequences in FIGS. 2A-2G are conserved) of the amino acid sequence of Cas9 of S. pyogenes, S. thermophilus, S. mutans or L. innocua;

[1029] differs by at least 1, 2, or 5 amino acids but by no more than 35, 30, 25, 20 or 10 amino acids from amino acids 900-960 of the amino acid sequence of Cas9 of S. pyogenes, S. thermophilus, S. mutans or L. innocua; or

[1030] is identical to 900-960 of the amino acid sequence of Cas9 of S. pyogenes, S. thermophilus, S. mutans or L. innocua.

[1031] Engineered or Altered Cas9 Molecules and Cas9 Polypeptides

[1032] Cas9 molecules and Cas9 polypeptides described herein, e.g., naturally occurring Cas9 molecules can possess any of a number of properties, including: nickase activity, nuclease activity (e.g., endonuclease and/or exonuclease activity); helicase activity; the ability to associate functionally with a gRNA molecule; and the ability to target (or localize to) a site on a nucleic acid (e.g., PAM recognition and specificity). In an embodiment, a Cas9 molecule or Cas9 polypeptide can include all or a subset of these properties. In typical embodiments, a Cas9 molecule or Cas9 polypeptide have the ability to interact with a gRNA molecule and, in concert with the gRNA molecule, localize to a site in a nucleic acid. Other activities, e.g., PAM specificity, cleavage activity, or helicase activity can vary more widely in Cas9 molecules and Cas9 polypeptides.

[1033] Cas9 molecules include engineered Cas9 molecules and engineered Cas9 polypeptides (engineered, as used in this context, means merely that the Cas9 molecule or Cas9 polypeptide differs from a reference sequences, and implies no process or origin limitation). An engineered Cas9 molecule or Cas9 polypeptide can comprise altered enzymatic properties, e.g., altered nuclease activity, (as compared with a naturally occurring or other reference Cas9 molecule) or altered helicase activity. As discussed herein, an engineered Cas9 molecule or Cas9 polypeptide can have nickase activity (as opposed to double strand nuclease activity). In an embodiment an engineered Cas9 molecule or Cas9 polypeptide can have an alteration that alters its size, e.g., a deletion of amino acid sequence that reduces its size, e.g., without significant effect on one or more, or any Cas9 activity. In an embodiment, an engineered Cas9 molecule or Cas9 polypeptide can comprise an alteration that affects PAM recognition. E.g., an engineered Cas9 molecule can be altered to recognize a PAM sequence other than that recognized by the endogenous wild-type PI domain. In an embodiment, a Cas9 molecule or Cas9 polypeptide can differ in sequence from a naturally occurring Cas9 molecule but not have significant alteration in one or more Cas9 activities.

[1034] Cas9 molecules or Cas9 polypeptides with desired properties can be made in a number of ways, e.g., by alteration of a parental, e.g., naturally occurring Cas9 molecules or Cas9 polypeptides to provide an altered Cas9 molecule or Cas9 polypeptide having a desired property. For example, one or more mutations or differences relative to a parental Cas9 molecule, e.g., a naturally occurring or engineered Cas9 molecule, can be introduced. Such mutations and differences comprise: substitutions (e.g., conservative substitutions or substitutions of non-essential amino acids); insertions; or deletions. In an embodiment, a Cas9 molecule or Cas9 polypeptide can comprises one or more mutations or differences, e.g., at least 1, 2, 3, 4, 5, 10, 15, 20, 30, 40 or 50 mutations, but less than 200, 100, or 80 mutations relative to a reference, e.g., a parental, Cas9 molecule.

[1035] In an embodiment, a mutation or mutations do not have a substantial effect on a Cas9 activity, e.g. a Cas9 activity described herein. In an embodiment, a mutation or mutations have a substantial effect on a Cas9 activity, e.g. a Cas9 activity described herein.

[1036] Non-Cleaving and Modified-Cleavage Cas9 Molecules and Cas9 Polypeptides

[1037] In an embodiment, a Cas9 molecule or Cas9 polypeptide comprises a cleavage property that differs from naturally occurring Cas9 molecules, e.g., that differs from the naturally occurring Cas9 molecule having the closest homology. For example, a Cas9 molecule or Cas9 polypeptide can differ from naturally occurring Cas9 molecules, e.g., a Cas9 molecule of S. pyogenes, as follows: its ability to modulate, e.g., decreased or increased, cleavage of a double stranded nucleic acid (endonuclease and/or exonuclease activity), e.g., as compared to a naturally occurring Cas9 molecule (e.g., a Cas9 molecule of S. pyogenes); its ability to modulate, e.g., decreased or increased, cleavage of a single strand of a nucleic acid, e.g., a non-complementary strand of a nucleic acid molecule or a complementary strand of a nucleic acid molecule (nickase activity), e.g., as compared to a naturally occurring Cas9 molecule (e.g., a Cas9 molecule of S. pyogenes); or the ability to cleave a nucleic acid molecule, e.g., a double stranded or single stranded nucleic acid molecule, can be eliminated.

[1038] Modified Cleavage eaCas9 Molecules and eaCas9 Polypeptides

[1039] In an embodiment, an eaCas9 molecule or eaCas9 polypeptide comprises one or more of the following activities: cleavage activity associated with an N-terminal RuvC-like domain; cleavage activity associated with an HNH-like domain; cleavage activity associated with an HNH-like domain and cleavage activity associated with an N-terminal RuvC-like domain.

[1040] In an embodiment, an eaCas9 molecule or eaCas9 polypeptide comprises an active, or cleavage competent, HNH-like domain (e.g., an HNH-like domain described herein, e.g., SEQ ID NO: 17, SEQ ID NO: 18, SEQ ID NO: 19, SEQ ID NO: 20 or SEQ ID NO: 21) and an inactive, or cleavage incompetent, N-terminal RuvC-like domain. An exemplary inactive, or cleavage incompetent N-terminal RuvC-like domain can have a mutation of an aspartic acid in an N-terminal RuvC-like domain, e.g., an aspartic acid at position 9 of the consensus sequence disclosed in FIGS. 2A-2G or an aspartic acid at position 10 of SEQ ID NO: 7, e.g., can be substituted with an alanine. In an embodiment, the eaCas9 molecule or eaCas9 polypeptide differs from wild type in the N-terminal RuvC-like domain and does not cleave the target nucleic acid, or cleaves with significantly less efficiency, e.g., less than 20, 10, 5, 1 or 0.1% of the cleavage activity of a reference Cas9 molecule, e.g., as measured by an assay described herein. The reference Cas9 molecule can by a naturally occurring unmodified Cas9 molecule, e.g., a naturally occurring Cas9 molecule such as a Cas9 molecule of S. pyogenes, or S. thermophilus. In an embodiment, the reference Cas9 molecule is the naturally occurring Cas9 molecule having the closest sequence identity or homology.

[1041] In an embodiment, an eaCas9 molecule or eaCas9 polypeptide comprises an inactive, or cleavage incompetent, HNH domain and an active, or cleavage competent, N-terminal RuvC-like domain (e.g., a RuvC-like domain described herein, e.g., SEQ ID NO: 8, SEQ ID NO: 9, SEQ ID NO: 10, SEQ ID NO: 11, SEQ ID NO: 12, SEQ ID NO: 13, SEQ ID NO: 14, SEQ ID NO: 15, or SEQ ID NO: 16). Exemplary inactive, or cleavage incompetent HNH-like domains can have a mutation at one or more of: a histidine in an HNH-like domain, e.g., a histidine shown at position 856 of the consensus sequence disclosed in FIGS. 2A-2G, e.g., can be substituted with an alanine; and one or more asparagines in an HNH-like domain, e.g., an asparagine shown at position 870 of the consensus sequence disclosed in FIGS. 2A-2G and/or at position 879 of the consensus sequence disclosed in FIGS. 2A-2G, e.g., can be substituted with an alanine. In an embodiment, the eaCas9 differs from wild type in the HNH-like domain and does not cleave the target nucleic acid, or cleaves with significantly less efficiency, e.g., less than 20, 10, 5, 1 or 0.1% of the cleavage activity of a reference Cas9 molecule, e.g., as measured by an assay described herein. The reference Cas9 molecule can by a naturally occurring unmodified Cas9 molecule, e.g., a naturally occurring Cas9 molecule such as a Cas9 molecule of S. pyogenes, or S. thermophilus. In an embodiment, the reference Cas9 molecule is the naturally occurring Cas9 molecule having the closest sequence identity or homology.

[1042] Alterations in the Ability to Cleave One or Both Strands of a Target Nucleic Acid

[1043] In an embodiment, exemplary Cas9 activities comprise one or more of PAM specificity, cleavage activity, and helicase activity. A mutation(s) can be present, e.g., in one or more RuvC-like domain, e.g., an N-terminal RuvC-like domain; an HNH-like domain; a region outside the RuvC-like domains and the HNH-like domain. In some embodiments, a mutation(s) is present in a RuvC-like domain, e.g., an N-terminal RuvC-like domain. In some embodiments, a mutation(s) is present in an HNH-like domain. In some embodiments, mutations are present in both a RuvC-like domain, e.g., an N-terminal RuvC-like domain and an HNH-like domain.

[1044] Exemplary mutations that may be made in the RuvC domain or HNH domain with reference to the S. pyogenes sequence include: D10A, E762A, H840A, N854A, N863A and/or D986A.

[1045] In an embodiment, a Cas9 molecule or Cas9 polypeptide is an eiCas9 molecule or eiCas9 polypeptide comprising one or more differences in a RuvC domain and/or in an HNH domain as compared to a reference Cas9 molecule, and the eiCas9 molecule or eiCas9 polypeptide does not cleave a nucleic acid, or cleaves with significantly less efficiency than does wildype, e.g., when compared with wild type in a cleavage assay, e.g., as described herein, cuts with less than 50, 25, 10, or 1% of a reference Cas9 molecule, as measured by an assay described herein.

[1046] Whether or not a particular sequence, e.g., a substitution, may affect one or more activity, such as targeting activity, cleavage activity, etc., can be evaluated or predicted, e.g., by evaluating whether the mutation is conservative or by the method described in Section IV. In an embodiment, a “non-essential” amino acid residue, as used in the context of a Cas9 molecule, is a residue that can be altered from the wild-type sequence of a Cas9 molecule, e.g., a naturally occurring Cas9 molecule, e.g., an eaCas9 molecule, without abolishing or more preferably, without substantially altering a Cas9 activity (e.g., cleavage activity), whereas changing an “essential” amino acid residue results in a substantial loss of activity (e.g., cleavage activity).

[1047] In an embodiment, a Cas9 molecule or Cas9 polypeptide comprises a cleavage property that differs from naturally occurring Cas9 molecules, e.g., that differs from the naturally occurring Cas9 molecule having the closest homology. For example, a Cas9 molecule or Cas9 polypeptide can differ from naturally occurring Cas9 molecules, e.g., a Cas9 molecule of S aureus, S. pyogenes, or C. jejuni as follows: its ability to modulate, e.g., decreased or increased, cleavage of a double stranded break (endonuclease and/or exonuclease activity), e.g., as compared to a naturally occurring Cas9 molecule (e.g., a Cas9 molecule of S aureus, S. pyogenes, or C. jejuni); its ability to modulate, e.g., decreased or increased, cleavage of a single strand of a nucleic acid, e.g., a non-complimentary strand of a nucleic acid molecule or a complementary strand of a nucleic acid molecule (nickase activity), e.g., as compared to a naturally occurring Cas9 molecule (e.g., a Cas9 molecule of S aureus, S. pyogenes, or C. jejuni); or the ability to cleave a nucleic acid molecule, e.g., a double stranded or single stranded nucleic acid molecule, can be eliminated.

[1048] In an embodiment, the altered Cas9 molecule or Cas9 polypeptide is an eaCas9 molecule or eaCas9 polypeptide comprising one or more of the following activities: cleavage activity associated with a RuvC domain; cleavage activity associated with an HNH domain; cleavage activity associated with an HNH domain and cleavage activity associated with a RuvC domain.

[1049] In an embodiment, the altered Cas9 molecule or Cas9 polypeptide is an eiCas9 molecule or eiCas9 polypeptide which does not cleave a nucleic acid molecule (either double stranded or single stranded nucleic acid molecules) or cleaves a nucleic acid molecule with significantly less efficiency, e.g., less than 20, 10, 5, 1 or 0.1% of the cleavage activity of a reference Cas9 molecule, e.g., as measured by an assay described herein. The reference Cas9 molecule can be a naturally occurring unmodified Cas9 molecule, e.g., a naturally occurring Cas9 molecule such as a Cas9 molecule of S. pyogenes, S. thermophilus, S. aureus, C. jejuni or N. meningitidis. In an embodiment, the reference Cas9 molecule is the naturally occurring Cas9 molecule having the closest sequence identity or homology. In an embodiment, the eiCas9 molecule or eiCas9 polypeptide lacks substantial cleavage activity associated with a RuvC domain and cleavage activity associated with an HNH domain.

[1050] In an embodiment, the altered Cas9 molecule or Cas9 polypeptide is an eaCas9 molecule or eaCas9 polypeptide comprising the fixed amino acid residues of S. pyogenes shown in the consensus sequence disclosed in FIGS. 2A-2G, and has one or more amino acids that differ from the amino acid sequence of S. pyogenes (e.g., has a substitution) at one or more residue (e.g., 2, 3, 5, 10, 15, 20, 30, 50, 70, 80, 90, 100, 200 amino acid residues) represented by an “-” in the consensus sequence disclosed in FIGS. 2A-2G or SEQ ID NO:7.

[1051] In an embodiment, the altered Cas9 molecule or Cas9 polypeptide comprises a sequence in which:

[1052] the sequence corresponding to the fixed sequence of the consensus sequence disclosed in FIGS. 2A-2G differs at no more than 1, 2, 3, 4, 5, 10, 15, or 20% of the fixed residues in the consensus sequence disclosed in FIGS. 2A-2G;

[1053] the sequence corresponding to the residues identified by “*” in the consensus sequence disclosed in FIGS. 2A-2G differ at no more than 1, 2, 3, 4, 5, 10, 15, 20, 25, 30, 35, or 40% of the “*” residues from the corresponding sequence of naturally occurring Cas9 molecule, e.g., an S. pyogenes Cas9 molecule; and,

[1054] the sequence corresponding to the residues identified by “-” in the consensus sequence disclosed in FIGS. 2A-2G differ at no more than 5, 10, 15, 20, 25, 30, 35, 40, 45, 55, or 60% of the “-” residues from the corresponding sequence of naturally occurring Cas9 molecule, e.g., an S. pyogenes Cas9 molecule.

[1055] In an embodiment, the altered Cas9 molecule or Cas9 polypeptide is an eaCas9 molecule or eaCas9 polypeptide comprising the fixed amino acid residues of S. thermophilus shown in the consensus sequence disclosed in FIGS. 2A-2G, and has one or more amino acids that differ from the amino acid sequence of S. thermophilus (e.g., has a substitution) at one or more residue (e.g., 2, 3, 5, 10, 15, 20, 30, 50, 70, 80, 90, 100, 200 amino acid residues) represented by an “-” in the consensus sequence disclosed in FIGS. 2A-2G.

[1056] In an embodiment, the altered Cas9 molecule or Cas9 polypeptide comprises a sequence in which:

[1057] the sequence corresponding to the fixed sequence of the consensus sequence disclosed in FIGS. 2A-2G differs at no more than 1, 2, 3, 4, 5, 10, 15, or 20% of the fixed residues in the consensus sequence disclosed in FIGS. 2A-2G;

[1058] the sequence corresponding to the residues identified by “*” in the consensus sequence disclosed in FIGS. 2A-2G differ at no more than 1, 2, 3, 4, 5, 10, 15, 20, 25, 30, 35, or 40% of the “*” residues from the corresponding sequence of naturally occurring Cas9 molecule, e.g., an S. thermophilus Cas9 molecule; and,

[1059] the sequence corresponding to the residues identified by “-” in the consensus sequence disclosed in FIGS. 2A-2G differ at no more than 5, 10, 15, 20, 25, 30, 35, 40, 45, 55, or 60% of the “-” residues from the corresponding sequence of naturally occurring Cas9 molecule, e.g., an S. thermophilus Cas9 molecule.

[1060] In an embodiment, the altered Cas9 molecule or Cas9 polypeptide is an eaCas9 molecule or eaCas9 polypeptide comprising the fixed amino acid residues of S. mutans shown in the consensus sequence disclosed in FIGS. 2A-2G, and has one or more amino acids that differ from the amino acid sequence of S. mutans (e.g., has a substitution) at one or more residue (e.g., 2, 3, 5, 10, 15, 20, 30, 50, 70, 80, 90, 100, 200 amino acid residues) represented by an “-” in the consensus sequence disclosed in FIGS. 2A-2G.

[1061] In an embodiment, the altered Cas9 molecule or Cas9 polypeptide comprises a sequence in which:

[1062] the sequence corresponding to the fixed sequence of the consensus sequence disclosed in FIGS. 2A-2G differs at no more than 1, 2, 3, 4, 5, 10, 15, or 20% of the fixed residues in the consensus sequence disclosed in FIGS. 2A-2G;

[1063] the sequence corresponding to the residues identified by “*” in the consensus sequence disclosed in FIGS. 2A-2G differ at no more than 1, 2, 3, 4, 5, 10, 15, 20, 25, 30, 35, or 40% of the “*” residues from the corresponding sequence of naturally occurring Cas9 molecule, e.g., an S. mutans Cas9 molecule; and,

[1064] the sequence corresponding to the residues identified by “-” in the consensus sequence disclosed in FIGS. 2A-2G differ at no more than 5, 10, 15, 20, 25, 30, 35, 40, 45, 55, or 60% of the “-” residues from the corresponding sequence of naturally occurring Cas9 molecule, e.g., an S. mutans Cas9 molecule.

[1065] In an embodiment, the altered Cas9 molecule or Cas9 polypeptide is an eaCas9 molecule or eaCas9 polypeptide comprising the fixed amino acid residues of L. innocula shown in the consensus sequence disclosed in FIGS. 2A-2G, and has one or more amino acids that differ from the amino acid sequence of L. innocula (e.g., has a substitution) at one or more residue (e.g., 2, 3, 5, 10, 15, 20, 30, 50, 70, 80, 90, 100, 200 amino acid residues) represented by an “-” in the consensus sequence disclosed in FIGS. 2A-2G.

[1066] In an embodiment, the altered Cas9 molecule or Cas9 polypeptide comprises a sequence in which:

[1067] the sequence corresponding to the fixed sequence of the consensus sequence disclosed in FIGS. 2A-2G differs at no more than 1, 2, 3, 4, 5, 10, 15, or 20% of the fixed residues in the consensus sequence disclosed in FIGS. 2A-2G;

[1068] the sequence corresponding to the residues identified by “*” in the consensus sequence disclosed in FIGS. 2A-2G differ at no more than 1, 2, 3, 4, 5, 10, 15, 20, 25, 30, 35, or 40% of the “*” residues from the corresponding sequence of naturally occurring Cas9 molecule, e.g., an L. innocula Cas9 molecule; and,

[1069] the sequence corresponding to the residues identified by “-” in the consensus sequence disclosed in FIGS. 2A-2G differ at no more than 5, 10, 15, 20, 25, 30, 35, 40, 45, 55, or 60% of the “-” residues from the corresponding sequence of naturally occurring Cas9 molecule, e.g., an L. innocula Cas9 molecule.

[1070] In an embodiment, the altered Cas9 molecule or Cas9 polypeptide, e.g., an eaCas9 molecule or eaCas9 polypeptide, can be a fusion, e.g., of two of more different Cas9 molecules, e.g., of two or more naturally occurring Cas9 molecules of different species. For example, a fragment of a naturally occurring Cas9 molecule of one species can be fused to a fragment of a Cas9 molecule of a second species. As an example, a fragment of a Cas9 molecule of S. pyogenes comprising an N-terminal RuvC-like domain can be fused to a fragment of a Cas9 molecule of a species other than S. pyogenes (e.g., S. thermophiles) comprising an HNH-like domain.

[1071] Cas9 Molecules and Cas9 Polypeptides with Altered PAM Recognition or No PAM Recognition

[1072] Naturally occurring Cas9 molecules can recognize specific PAM sequences, for example, the PAM recognition sequences described above for S. pyogenes, S. thermophiles, S. mutans, S. aureus and N. meningitidis.

[1073] In an embodiment, a Cas9 molecule or Cas9 polypeptide has the same PAM specificities as a naturally occurring Cas9 molecule. In another embodiment, a Cas9 molecule or Cas9 polypeptide has a PAM specificity not associated with a naturally occurring Cas9 molecule, or a PAM specificity not associated with the naturally occurring Cas9 molecule to which it has the closest sequence homology. For example, a naturally occurring Cas9 molecule or Cas9 polypeptide can be altered, e.g., to alter PAM recognition, e.g., to alter the PAM sequence that the Cas9 molecule recognizes to decrease off target sites and/or improve specificity; or eliminate a PAM recognition requirement. In an embodiment, a Cas9 molecule or Cas9 polypeptide can be altered, e.g., to increase length of PAM recognition sequence and/or improve Cas9 specificity to high level of identity (e.g., 98%, 99% or 100% match between gRNA and a PAM sequence), e.g., to decrease off target sites and increase specificity. In an embodiment, the length of the PAM recognition sequence is at least 4, 5, 6, 7, 8, 9, 10 or 15 amino acids in length. In an embodiment, the Cas9 specificity requires at least 90%, 95%, 96%, 97%, 98%, 99% or more homology between the gRNA and the PAM sequence. Cas9 molecules or Cas9 polypeptides that recognize different PAM sequences and/or have reduced off-target activity can be generated using directed evolution. Exemplary methods and systems that can be used for directed evolution of Cas9 molecules are described, e.g., in Esvelt et al. NATURE 2011, 472(7344): 499-503. Candidate Cas9 molecules can be evaluated, e.g., by methods described in Section IV.

[1074] Alterations of the PI domain, which mediates PAM recognition, are discussed below.

[1075] Synthetic Cas9 Molecules and Cas9 Polypeptides with Altered PI Domains

[1076] Current genome-editing methods are limited in the diversity of target sequences that can be targeted by the PAM sequence that is recognized by the Cas9 molecule utilized. A synthetic Cas9 molecule (or Syn-Cas9 molecule), or synthetic Cas9 polypeptide (or Syn-Cas9 polypeptide), as that term is used herein, refers to a Cas9 molecule or Cas9 polypeptide that comprises a Cas9 core domain from one bacterial species and a functional altered PI domain, i.e., a PI domain other than that naturally associated with the Cas9 core domain, e.g., from a different bacterial species.

[1077] In an embodiment, the altered PI domain recognizes a PAM sequence that is different from the PAM sequence recognized by the naturally-occurring Cas9 from which the Cas9 core domain is derived. In an embodiment, the altered PI domain recognizes the same PAM sequence recognized by the naturally-occurring Cas9 from which the Cas9 core domain is derived, but with different affinity or specificity. A Syn-Cas9 molecule or Syn-Cas9 polypeptide can be, respectively, a Syn-eaCas9 molecule or Syn-eaCas9 polypeptide or a Syn-eiCas9 molecule Syn-eiCas9 polypeptide.

[1078] An exemplary Syn-Cas9 molecule or Syn-Cas9 polypeptide comprises:

[1079] a) a Cas9 core domain, e.g., a Cas9 core domain from Table 17 or 18, e.g., a S. aureus, S. pyogenes, or C. jejuni Cas9 core domain; and

[1080] b) an altered PI domain from a species X Cas9 sequence selected from Tables 20 and 21.

[1081] In an embodiment, the RKR motif (the PAM binding motif) of said altered PI domain comprises: differences at 1, 2, or 3 amino acid residues; a difference in amino acid sequence at the first, second, or third position; differences in amino acid sequence at the first and second positions, the first and third positions, or the second and third positions; as compared with the sequence of the RKR motif of the native or endogenous PI domain associated with the Cas9 core domain.

[1082] In an embodiment, the Cas9 core domain comprises the Cas9 core domain from a species X Cas9 from Table 17 and said altered PI domain comprises a PI domain from a species Y Cas9 from Table 17.

[1083] In an embodiment, the RKR motif of the species X Cas9 is other than the RKR motif of the species Y Cas9.

[1084] In an embodiment, the RKR motif of the altered PI domain is selected from XXY, XNG, and XNQ.

[1085] In an embodiment, the altered PI domain has at least 60, 70, 80, 90, 95, or 100% homology with the amino acid sequence of a naturally occurring PI domain of said species Y from Table 17.

[1086] In an embodiment, the altered PI domain differs by no more than 50, 40, 30, 25, 20, 15, 10, 5, 4, 3, 2, or 1 amino acid residue from the amino acid sequence of a naturally occurring PI domain of said second species from Table 17.

[1087] In an embodiment, the Cas9 core domain comprises a S. aureus core domain and altered PI domain comprises: an A. denitrificans PI domain; a C. jejuni PI domain; a H. mustelae PI domain; or an altered PI domain of species X PI domain, wherein species X is selected from Table 21.

[1088] In an embodiment, the Cas9 core domain comprises a S. pyogenes core domain and the altered PI domain comprises: an A. denitrificans PI domain; a C. jejuni PI domain; a H. mustelae PI domain; or an altered PI domain of species X PI domain, wherein species X is selected from Table 21.

[1089] In an embodiment, the Cas9 core domain comprises a C. jejuni core domain and the altered PI domain comprises: an A. denitrificans PI domain; a H. mustelae PI domain; or an altered PI domain of species X PI domain, wherein species X is selected from Table 21.

[1090] In an embodiment, the Cas9 molecule or Cas9 polypeptide further comprises a linker disposed between said Cas9 core domain and said altered PI domain.

[1091] In an embodiment, the linker comprises: a linker described elsewhere herein disposed between the Cas9 core domain and the heterologous PI domain. Suitable linkers are further described in Section V.

[1092] Exemplary altered PI domains for use in Syn-Cas9 molecules are described in Tables 20 and 21. The sequences for the 83 Cas9 orthologs referenced in Tables 20 and 21 are provided in Table 17. Table 19 provides the Cas9 orthologs with known PAM sequences and the corresponding RKR motif.

[1093] In an embodiment, a Syn-Cas9 molecule or Syn-Cas9 polypeptide may also be size-optimized, e.g., the Syn-Cas9 molecule or Syn-Cas9 polypeptide comprises one or more deletions, and optionally one or more linkers disposed between the amino acid residues flanking the deletions. In an embodiment, a Syn-Cas9 molecule or Syn-Cas9 polypeptide comprises a REC deletion.

[1094] Size-Optimized Cas9 Molecules and Cas9 Polypeptides

[1095] Engineered Cas9 molecules and engineered Cas9 polypeptides described herein include a Cas9 molecule or Cas9 polypeptide comprising a deletion that reduces the size of the molecule while still retaining desired Cas9 properties, e.g., essentially native conformation, Cas9 nuclease activity, and/or target nucleic acid molecule recognition. Provided herein are Cas9 molecules or Cas9 polypeptides comprising one or more deletions and optionally one or more linkers, wherein a linker is disposed between the amino acid residues that flank the deletion. Methods for identifying suitable deletions in a reference Cas9 molecule, methods for generating Cas9 molecules with a deletion and a linker, and methods for using such Cas9 molecules will be apparent to one of ordinary skill in the art upon review of this document.

[1096] A Cas9 molecule, e.g., a S. aureus, S. pyogenes, or C. jejuni, Cas9 molecule, having a deletion is smaller, e.g., has reduced number of amino acids, than the corresponding naturally-occurring Cas9 molecule. The smaller size of the Cas9 molecules allows increased flexibility for delivery methods, and thereby increases utility for genome-editing. A Cas9 molecule or Cas9 polypeptide can comprise one or more deletions that do not substantially affect or decrease the activity of the resultant Cas9 molecules or Cas9 polypeptides described herein. Activities that are retained in the Cas9 molecules or Cas9 polypeptides comprising a deletion as described herein include one or more of the following:

[1097] a nickase activity, i.e., the ability to cleave a single strand, e.g., the non-complementary strand or the complementary strand, of a nucleic acid molecule; a double stranded nuclease activity, i.e., the ability to cleave both strands of a double stranded nucleic acid and create a double stranded break, which in an embodiment is the presence of two nickase activities;

[1098] an endonuclease activity;

[1099] an exonuclease activity;

[1100] a helicase activity, i.e., the ability to unwind the helical structure of a double stranded nucleic acid;

[1101] and recognition activity of a nucleic acid molecule, e.g., a target nucleic acid or a gRNA.

[1102] Activity of the Cas9 molecules or Cas9 polypeptides described herein can be assessed using the activity assays described herein or in the art.

### Identifying Regions Suitable for Deletion

[1103] Suitable regions of Cas9 molecules for deletion can be identified by a variety of methods. Naturally-occurring orthologous Cas9 molecules from various bacterial species, e.g., any one of those listed in Table 17, can be modeled onto the crystal structure of S. pyogenes Cas9 (Nishimasu et al., Cell, 156:935-949, 2014) to examine the level of conservation across the selected Cas9 orthologs with respect to the three-dimensional conformation of the protein. Less conserved or unconserved regions that are spatially located distant from regions involved in Cas9 activity, e.g., interface with the target nucleic acid molecule and/or gRNA, represent regions or domains are candidates for deletion without substantially affecting or decreasing Cas9 activity.

[1104] REC-Optimized Cas9 Molecules and Cas9 Polypeptides

[1105] A REC-optimized Cas9 molecule, or a REC-optimized Cas9 polypeptide, as that term is used herein, refers to a Cas9 molecule or Cas9 polypeptide that comprises a deletion in one or both of the REC2 domain and the RE1_{CT} domain (collectively a REC deletion), wherein the deletion comprises at least 10% of the amino acid residues in the cognate domain. A REC-optimized Cas9 molecule or Cas9 polypeptide can be an eaCas9 molecule or eaCas9 polypeptide, or an eiCas9 molecule or eiCas9 polypeptide. An exemplary REC-optimized Cas9 molecule or REC-optimized Cas9 polypeptide comprises:

[1106] a) a deletion selected from:
[1107] i) a REC2 deletion;
[1108] ii) a REC1_{CT} deletion; or
[1109] iii) a REC1_{SUB} deletion.

[1110] Optionally, a linker is disposed between the amino acid residues that flank the deletion. In an embodiment, a Cas9 molecule or Cas9 polypeptide includes only one deletion, or only two deletions. A Cas9 molecule or Cas9 polypeptide can comprise a REC2 deletion and a REC1_{CT} deletion. A Cas9 molecule or Cas9 polypeptide can comprise a REC2 deletion and a REC1_{SUB} deletion.

[1111] Generally, the deletion will contain at least 10% of the amino acids in the cognate domain, e.g., a REC2 deletion will include at least 10% of the amino acids in the REC2 domain. A deletion can comprise: at least 10, 20, 30, 40, 50, 60, 70, 80, or 90% of the amino acid residues of its cognate domain; all of the amino acid residues of its cognate domain; an amino acid residue outside its cognate domain; a plurality of amino acid residues outside its cognate domain; the amino acid residue immediately N terminal to its cognate domain; the amino acid residue immediately C terminal to its cognate domain; the amino acid residue immediately N terminal to its cognate and the amino acid residue immediately C terminal to its cognate domain; a plurality of, e.g., up to 5, 10, 15, or 20, amino acid residues N terminal to its cognate domain; a plurality of, e.g., up to 5, 10, 15, or 20, amino acid residues C terminal to its cognate domain; a plurality of, e.g., up to 5, 10, 15, or 20, amino acid residues N terminal to to its cognate domain and a plurality of e.g., up to 5, 10, 15, or 20, amino acid residues C terminal to its cognate domain.

[1112] In an embodiment, a deletion does not extend beyond: its cognate domain; the N terminal amino acid residue of its cognate domain; the C terminal amino acid residue of its cognate domain.

[1113] A REC-optimized Cas9 molecule or REC-optimized Cas9 polypeptide can include a linker disposed between the amino acid residues that flank the deletion. Any linkers known in the art that maintain the conformation or native fold of the Cas9 molecule (thereby retaining Cas9 activity) can be used between the amino acid resides that flank a REC deletion in a REC-optimized Cas9 molecule or REC-optimized Cas9 polypeptide. Linkers for use in generating recombinant proteins, e.g., multi-domain proteins, are known in the art (Chen et al., Adv Drug Delivery Rev, 65:1357-69, 2013).

[1114] In an embodiment, a REC-optimized Cas9 molecule or REC-optimized Cas9 polypeptide comprises an amino acid sequence that, other than any REC deletion and associated linker, has at least 50, 55, 60, 65, 70, 75, 80, 85, 90, 95, 99, or 100% homology with the amino acid sequence of a naturally occurring Cas 9, e.g., a Cas9 molecule described in Table 17, e.g., a S. aureus Cas9 molecule, a S. pyogenes Cas9 molecule, or a C. jejuni Cas9 molecule.

[1115] In an embodiment, a a REC-optimized Cas9 molecule or REC-optimized Cas9 polypeptide comprises an amino acid sequence that, other than any REC deletion and associated linker, differs by no more than 1, 2, 3, 4, 5, 6, 7, 8, 9, 10, 15, 20, or 25, amino acid residues from the amino acid sequence of a naturally occurring Cas 9, e.g., a Cas9 molecule described in Table 17, e.g., a S. aureus Cas9 molecule, a S. pyogenes Cas9 molecule, or a C. jejuni Cas9 molecule.

[1116] In an embodiment, a REC-optimized Cas9 molecule or REC-optimized Cas9 polypeptide comprises an amino acid sequence that, other than any REC deletion and associate linker, differs by no more than 1, 2, 3, 4, 5, 6, 7, 8, 9, 10, 15, 20, or 25% of the, amino acid residues from the amino acid sequence of a naturally occurring Cas 9, e.g., a Cas9 molecule described in Table 17, e.g., a S. aureus Cas9 molecule, a S. pyogenes Cas9 molecule, or a C. jejuni Cas9 molecule.

[1117] For sequence comparison, typically one sequence acts as a reference sequence, to which test sequences are compared. When using a sequence comparison algorithm, test and reference sequences are entered into a computer, subsequence coordinates are designated, if necessary, and sequence algorithm program parameters are designated. Default program parameters can be used, or alternative parameters can be designated. The sequence comparison algorithm then calculates the percent sequence identities for the test sequences relative to the reference sequence, based on the program parameters. Methods of alignment of sequences for comparison are well known in the art. Optimal alignment of sequences for comparison can be conducted, e.g., by the local homology algorithm of Smith and Waterman, (1970) Adv. Appl. Math. 2:482c, by the homology alignment algorithm of Needleman and Wunsch, (1970) J. Mol. Biol. 48:443, by the search for similarity method of Pearson and Lipman, (1988) Proc. Nat'l. Acad. Sci. USA 85:2444, by computerized implementations of these algorithms (GAP, BESTFIT, FASTA, and TFASTA in the Wisconsin Genetics Software Package, Genetics Computer Group, 575 Science Dr., Madison, Wis.), or by manual alignment and visual inspection (see, e.g., Brent et al., (2003) Current Protocols in Molecular Biology).

[1118] Two examples of algorithms that are suitable for determining percent sequence identity and sequence similarity are the BLAST and BLAST 2.0 algorithms, which are described in Altschul et al., (1977) Nuc. Acids Res. 25:3389-3402; and Altschul et al., (1990) J. Mol. Biol. 215:403-410, respectively. Software for performing BLAST analyses is publicly available through the National Center for Biotechnology Information.

[1119] The percent identity between two amino acid sequences can also be determined using the algorithm of E. Meyers and W. Miller, (1988) Comput. Appl. Biosci. 4:11-17) which has been incorporated into the ALIGN program (version 2.0), using a PAM120 weight residue table, a gap length penalty of 12 and a gap penalty of 4. In addition, the percent identity between two amino acid sequences can be determined using the Needleman and Wunsch (1970) J. Mol. Biol. 48:444-453) algorithm which has been incorporated into the GAP program in the GCG software package (available at www.gcg.com), using either a Blossom 62 matrix or a PAM250 matrix, and a gap weight of 16, 14, 12, 10, 8, 6, or 4 and a length weight of 1, 2, 3, 4, 5, or 6.

[1120] Sequence information for exemplary REC deletions are provided for 83 naturally-occurring Cas9 orthologs in Table 17.

[1121] The amino acid sequences of exemplary Cas9 molecules from different bacterial species are shown below.

TABLE 17
Amino Acid Sequence of Cas9 Orthologs

| | | REC2 | | | REC1_{CT} | | | Rec_{sub} | | |
|---|---|---|---|---|---|---|---|---|---|---|
| | | start | stop | # AA | start | stop | # AA | start | stop | # AA |
| | Amino acid | (AA | (AA | deleted | (AA | (AA | deleted | (AA | (AA | deleted |
| Species/Composite ID | sequence | pos) | pos) | (n) | pos) | pos) | (n) | pos) | pos) | (n) |
| Staphylococcus Aureus | SEQ ID NO: | 126 | 166 | 41 | 296 | 352 | 57 | 296 | 352 | 57 |
| tr\|J7RUA5\|J7RUA5_STAAU | 304 | | | | | | | | | |
| Streptococcus Pyogenes | SEQ ID NO: | 176 | 314 | 139 | 511 | 592 | 82 | 511 | 592 | 82 |
| sp\|Q99ZW2\|CAS9_STRP1 | 305 | | | | | | | | | |
| Campylobacter jejuni NCTC | SEQ ID NO: | 137 | 181 | 45 | 316 | 360 | 45 | 316 | 360 | 45 |
| 11168 | 306 | | | | | | | | | |
| gi\|218563121\|ref\|YP_002344900.1 | | | | | | | | | | |
| Bacteroides fragilis NCTC | SEQ ID NO: | 148 | 339 | 192 | 524 | 617 | 84 | 524 | 617 | 84 |
| 9343 | 307 | | | | | | | | | |
| gi\|60683389\|ref\|YP_213533.1\| | | | | | | | | | | |
| Bifidobacterium bifidum S17 | SEQ ID NO: | 173 | 335 | 163 | 516 | 607 | 87 | 516 | 607 | 87 |
| gi\|310286728\|ref\|YP_003937986. | 308 | | | | | | | | | |
| Veillonella atypica ACS-134- | SEQ ID NO: | 185 | 339 | 155 | 574 | 663 | 79 | 574 | 663 | 79 |
| V-Col7a | 309 | | | | | | | | | |
| gi\|303229466\|ref\|ZP_07316256.1 | | | | | | | | | | |
| Lactobacillus rhamnosus GG | SEQ ID NO: | 169 | 320 | 152 | 559 | 645 | 78 | 559 | 645 | 78 |
| gi\|258509199\|ref\|YP_003171950.1 | 310 | | | | | | | | | |
| Filifactor alocis ATCC 35896 | SEQ ID NO: | 166 | 314 | 149 | 508 | 592 | 76 | 508 | 592 | 76 |
| gi\|374307738\|ref\|YP_005054169.1 | 311 | | | | | | | | | |
| Oenococcus kitaharae DSM | SEQ ID NO: | 169 | 317 | 149 | 555 | 639 | 80 | 555 | 639 | 80 |
| 17330 | 312 | | | | | | | | | |
| gi\|366983953\|gb\|EHN59352.1\| | | | | | | | | | | |
| Fructobacillus fructosus KCTC | SEQ ID NO: | 168 | 314 | 147 | 488 | 571 | 76 | 488 | 571 | 76 |
| 3544 | 313 | | | | | | | | | |
| gi\|339625081\|ref\|ZP_08660870.1 | | | | | | | | | | |
| Catenibacterium mitsuokai | SEQ ID NO: | 173 | 318 | 146 | 511 | 594 | 78 | 511 | 594 | 78 |
| DSM 15897 | 314 | | | | | | | | | |
| gi\|224543312\|ref\|ZP_03683851.1 | | | | | | | | | | |
| Finegoldia magna ATCC 29328 | SEQ ID NO: | 168 | 313 | 146 | 452 | 534 | 77 | 452 | 534 | 77 |
| gi\|169823755\|ref\|YP_001691366.1 | 315 | | | | | | | | | |
| Coriobacteriumglomerans PW2 | SEQ ID NO: | 175 | 318 | 144 | 511 | 592 | 82 | 511 | 592 | 82 |
| gi\|328956315\|ref\|YP_004373648.1 | 316 | | | | | | | | | |
| Eubacterium yurii ATCC 43715 | SEQ ID NO: | 169 | 310 | 142 | 552 | 633 | 76 | 552 | 633 | 76 |
| gi\|306821691\|ref\|ZP_07455288.1 | 317 | | | | | | | | | |
| Peptoniphilus duerdenii ATCC | SEQ ID NO: | 171 | 311 | 141 | 535 | 615 | 76 | 535 | 615 | 76 |
| BAA-1640 | 318 | | | | | | | | | |
| gi\|304438954\|ref\|ZP_07398877.1 | | | | | | | | | | |
| Acidaminococcus sp. D21 | SEQ ID NO: | 167 | 306 | 140 | 511 | 591 | 75 | 511 | 591 | 75 |
| gi\|227824983\|ref\|ZP_03989815.1 | 319 | | | | | | | | | |
| Lactobacillus farciminis KCTC | SEQ ID NO: | 171 | 310 | 140 | 542 | 621 | 85 | 542 | 621 | 85 |
| 3681 | 320 | | | | | | | | | |
| gi\|336394882\|ref\|ZP_08576281.1 | | | | | | | | | | |
| Streptococcus sanguinis SK49 | SEQ ID NO: | 185 | 324 | 140 | 411 | 490 | 85 | 411 | 490 | 85 |
| gi\|422884106\|ref\|ZP_16930555.1 | 321 | | | | | | | | | |
| Coprococcus catus GD-7 | SEQ ID NO: | 172 | 310 | 139 | 556 | 634 | 76 | 556 | 634 | 76 |
| gi\|291520705\|emb\|CBK78998.1\| | 322 | | | | | | | | | |
| Streptococcus mutans UA159 | SEQ ID NO: | 176 | 314 | 139 | 392 | 470 | 84 | 392 | 470 | 84 |
| gi\|24379809\|ref\|NP_721764.1\| | 323 | | | | | | | | | |
| Streptococcus pyogenes M1 | SEQ ID NO: | 176 | 314 | 139 | 523 | 600 | 82 | 523 | 600 | 82 |
| GAS | 324 | | | | | | | | | |
| gi\|13622193\|gb\|AAK33936.1\| | | | | | | | | | | |
| Streptococcus thermophilus | SEQ ID NO: | 176 | 314 | 139 | 481 | 558 | 81 | 481 | 558 | 81 |
| LMD-9 | 325 | | | | | | | | | |
| gi\|116628213\|ref\|YP_820832.1\| | | | | | | | | | | |
| Fusobacteriumnucleatum | SEQ ID NO: | 171 | 308 | 138 | 537 | 614 | 76 | 537 | 614 | 76 |
| ATCC49256 | 326 | | | | | | | | | |
| gi\|34762592\|ref\|ZP_00143587.1\| | | | | | | | | | | |
| Planococcus antarcticus DSM | SEQ ID NO: | 162 | 299 | 138 | 538 | 614 | 94 | 538 | 614 | 94 |
| 14505 | 327 | | | | | | | | | |
| gi\|389815359\|ref\|ZP_10206685.1 | | | | | | | | | | |
| Treponema denticola ATCC | SEQ ID NO: | 169 | 305 | 137 | 524 | 600 | 81 | 524 | 600 | 81 |
| 35405 | 328 | | | | | | | | | |
| gi\|42525843\|ref\|NP_970941.1\| | | | | | | | | | | |
| Solobacterium moorei F0204 | SEQ ID NO: | 179 | 314 | 136 | 544 | 619 | 77 | 544 | 619 | 77 |
| gi\|320528778\|ref\|ZP_08029929.1 | 329 | | | | | | | | | |
| Staphylococcus | SEQ ID NO: | 164 | 299 | 136 | 531 | 606 | 92 | 531 | 606 | 92 |
| pseudintermedius ED99 | 330 | | | | | | | | | |
| gi\|323463801\|gb\|ADX75954.1\| | | | | | | | | | | |
| Flavobacterium branchiophilum | SEQ ID NO: | 162 | 286 | 125 | 538 | 613 | 63 | 538 | 613 | 63 |
| FL-15 | 331 | | | | | | | | | |
| gi\|347536497\|ref\|YP_004843922.1 | | | | | | | | | | |
| Ignavibacterium album JCM | SEQ ID NO: | 223 | 329 | 107 | 357 | 432 | 90 | 357 | 432 | 90 |
| 16511 | 332 | | | | | | | | | |
| gi\|385811609\|ref\|YP_005848005.1 | | | | | | | | | | |
| Bergeyella zoohelcum ATCC | SEQ ID NO: | 165 | 261 | 97 | 529 | 604 | 56 | 529 | 604 | 56 |
| 43767 | 333 | | | | | | | | | |
| gi\|423317190\|ref\|ZP_17295095.1 | | | | | | | | | | |
| Nitrobacter hamburgensis X14 | SEQ ID NO: | 169 | 253 | 85 | 536 | 611 | 48 | 536 | 611 | 48 |
| gi\|92109262\|ref\|YP_571550.1\| | 334 | | | | | | | | | |
| Odoribacter laneus YIT 12061 | SEQ ID NO: | 164 | 242 | 79 | 535 | 610 | 63 | 535 | 610 | 63 |
| gi\|374384763\|ref\|ZP_09642280.1 | 335 | | | | | | | | | |
| Legionella pneumophila str. | SEQ ID NO: | 164 | 239 | 76 | 402 | 476 | 67 | 402 | 476 | 67 |
| Paris | 336 | | | | | | | | | |
| gi\|54296138\|ref\|YP_122507.1\| | | | | | | | | | | |
| Bacteroides sp. 20 3 | SEQ ID NO: | 198 | 269 | 72 | 530 | 604 | 83 | 530 | 604 | 83 |
| gi\|301311869\|ref\|ZP_07217791.1 | 337 | | | | | | | | | |
| Akkermansia muciniphila | SEQ ID NO: | 136 | 202 | 67 | 348 | 418 | 62 | 348 | 418 | 62 |
| ATCC BAA-835 | 338 | | | | | | | | | |
| gi\|187736489\|ref\|YP_001878601. | | | | | | | | | | |
| Prevotella sp. C561 | SEQ ID NO: | 184 | 250 | 67 | 357 | 425 | 78 | 357 | 425 | 78 |
| gi\|345885718\|ref\|ZP_08837074.1 | 339 | | | | | | | | | |
| Wolinella succinogenes DSM | SEQ ID NO: | 157 | 218 | 36 | 401 | 468 | 60 | 401 | 468 | 60 |
| 1740 | 340 | | | | | | | | | |
| gi\|34557932\|ref\|NP_907747.1\| | | | | | | | | | | |
| Alicyclobacillus hesperidum | SEQ ID NO: | 142 | 196 | 55 | 416 | 482 | 61 | 416 | 482 | 61 |
| URH17-3-68 | 341 | | | | | | | | | |
| gi\|403744858\|ref\|ZP_10953934.1 | | | | | | | | | | |
| Caenispirillum salinarum AK4 | SEQ ID NO: | 161 | 214 | 54 | 330 | 393 | 68 | 330 | 393 | 68 |
| gi\|427429481\|ref\|ZP_18919511.1 | 342 | | | | | | | | | |
| Eubacterium rectale ATCC | SEQ ID NO: | 133 | 185 | 53 | 322 | 384 | 60 | 322 | 384 | 60 |
| 33656 | 343 | | | | | | | | | |
| gi\|238924075\|ref\|YP_002937591.1 | | | | | | | | | | |
| Mycoplasma synoviae 53 | SEQ ID NO: | 187 | 239 | 53 | 319 | 381 | 80 | 319 | 381 | 80 |
| gi\|71894592\|ref\|YP_278700.1\| | 344 | | | | | | | | | |
| Porphyromonas sp. oral taxon | SEQ ID NO: | 150 | 202 | 53 | 309 | 371 | 60 | 309 | 371 | 60 |
| 279 str. F0450 | 345 | | | | | | | | | |
| gi\|402847315\|ref\|ZP_10895610.1 | | | | | | | | | | |
| Streptococcus thermophilus | SEQ ID NO: | 127 | 178 | 139 | 424 | 486 | 81 | 424 | 486 | 81 |
| LMD-9 | 346 | | | | | | | | | |
| gi\|116627542\|ref\|YP_820161.1\| | | | | | | | | | | |
| Roseburia inulinivorans DSM | SEQ ID NO: | 154 | 204 | 51 | 318 | 380 | 69 | 318 | 380 | 69 |
| 16841 | 347 | | | | | | | | | |
| gi\|225377804\|ref\|ZP_03755025.1 | | | | | | | | | | |
| Methylosinus trichosporium | SEQ ID NO: | 144 | 193 | 50 | 426 | 488 | 64 | 426 | 488 | 64 |
| OB3b | 348 | | | | | | | | | |
| gi\|296446027\|ref\|ZP_06887976.1 | | | | | | | | | | |
| Ruminococcus albus 8 | SEQ ID NO: | 139 | 187 | 49 | 351 | 412 | 55 | 351 | 412 | 55 |
| gi\|325677756\|ref\|ZP_08157403.1 | 349 | | | | | | | | | |
| Bifidobacterium longum | SEQ ID NO: | 183 | 230 | 48 | 370 | 431 | 44 | 370 | 431 | 44 |
| DJO10A | 350 | | | | | | | | | |
| gi\|189440764\|ref\|YP_001955845. | | | | | | | | | | |
| Enterococcus faecalis TX0012 | SEQ ID NO: | 123 | 170 | 48 | 327 | 387 | 60 | 327 | 387 | 60 |
| gi\|315149830\|gb\|EFT93846.1\| | 351 | | | | | | | | | |
| Mycoplasma mobile 163K | SEQ ID NO: | 179 | 226 | 48 | 314 | 374 | 79 | 314 | 374 | 79 |
| gi\|47458868\|ref\|YP_015730.1\| | 352 | | | | | | | | | |
| Actinomyces coleocanis DSM | SEQ ID NO: | 147 | 193 | 47 | 358 | 418 | 40 | 358 | 418 | 40 |
| 15436 | 353 | | | | | | | | | |
| gi\|227494853\|ref\|ZP_03925169.1 | | | | | | | | | | |
| Dinoroseobacter shibae DFL 12 | SEQ ID NO: | 138 | 184 | 47 | 338 | 398 | 48 | 338 | 398 | 48 |
| gi\|159042956\|ref\|YP_001531750.1 | 354 | | | | | | | | | |
| Actinomyces sp. oral taxon 180 | SEQ ID NO: | 183 | 228 | 46 | 349 | 409 | 40 | 349 | 409 | 40 |
| str. F0310 | 355 | | | | | | | | | |
| gi\|315605738\|ref\|ZP_07880770.1 | | | | | | | | | | |
| Alcanivorax sp. W11-5 | SEQ ID NO: | 139 | 183 | 45 | 344 | 404 | 61 | 344 | 404 | 61 |
| gi\|407803669\|ref\|ZP_11150502.1 | 356 | | | | | | | | | |
| Aminomonas paucivorans DSM | SEQ ID NO: | 134 | 178 | 45 | 341 | 401 | 63 | 341 | 401 | 63 |
| 12260 | 357 | | | | | | | | | |
| gi\|312879015\|ref\|ZP_07738815.1 | | | | | | | | | | |
| Mycoplasma canis PG 14 | SEQ ID NO: | 139 | 183 | 45 | 319 | 379 | 76 | 319 | 379 | 76 |
| gi\|384393286\|gb\|EIE39736.1\| | 358 | | | | | | | | | |
| Lactobacillus coryniformis | SEQ ID NO: | 141 | 184 | 44 | 328 | 387 | 61 | 328 | 387 | 61 |
| KCTC 3535 | 359 | | | | | | | | | |
| gi\|336393381\|ref\|ZP_08574780.1 | | | | | | | | | | |
| Elusimicrobium minutum | SEQ ID NO: | 177 | 219 | 43 | 322 | 381 | 47 | 322 | 381 | 47 |
| Pei191 | 360 | | | | | | | | | |
| gi\|187250660\|ref\|YP_001875142.1 | | | | | | | | | | |
| Neisseria meningitidis Z2491 | SEQ ID NO: | 147 | 189 | 43 | 360 | 419 | 61 | 360 | 419 | 61 |
| gi\|218767588\|ref\|YP_002342100.1 | 361 | | | | | | | | | |
| Pasteurella multocida str. Pm70 | SEQ ID NO: | 139 | 181 | 43 | 319 | 378 | 61 | 319 | 378 | 61 |
| gi\|15602992\|ref\|NP_246064.1\| | 362 | | | | | | | | | |
| Rhodovulum sp. PH10 | SEQ ID NO: | 141 | 183 | 43 | 319 | 378 | 48 | 319 | 378 | 48 |
| gi\|402849997\|ref\|ZP_10898214.1 | 363 | | | | | | | | | |
| Eubacterium dolichum DSM | SEQ ID NO: | 131 | 172 | 42 | 303 | 361 | 59 | 303 | 361 | 59 |
| 3991 | 364 | | | | | | | | | |
| gi\|160915782\|ref\|ZP_02077990.1 | | | | | | | | | | |
| Nitratifractor salsuginis DSM | SEQ ID NO: | 143 | 184 | 42 | 347 | 404 | 61 | 347 | 404 | 61 |
| 16511 | 365 | | | | | | | | | |
| gi\|319957206\|ref\|YP_004168469.1 | | | | | | | | | | |
| Rhodospirillum rubrum ATCC | SEQ ID NO: | 139 | 180 | 42 | 314 | 371 | 55 | 314 | 371 | 55 |
| 11170 | 366 | | | | | | | | | |
| gi\|83591793\|ref\|YP_425545.1\| | | | | | | | | | | |
| Clostridium cellulolyticum H10 | SEQ ID NO: | 137 | 176 | 40 | 320 | 376 | 61 | 320 | 376 | 61 |
| gi\|220930482\|ref\|YP_002507391.1 | 367 | | | | | | | | | |
| Helicobacter mustelae 12198 | SEQ ID NO: | 148 | 187 | 40 | 298 | 354 | 48 | 298 | 354 | 48 |
| gi\|291276265\|ref\|YP_003516037.1 | 368 | | | | | | | | | |
| Ilyobacter polytropus DSM | SEQ ID NO: | 134 | 173 | 40 | 462 | 517 | 63 | 462 | 517 | 63 |
| 2926 | 369 | | | | | | | | | |
| gi\|310780384\|ref\|YP_003968716.1 | | | | | | | | | | |
| Sphaerochaeta globus str. | SEQ ID NO: | 163 | 202 | 40 | 335 | 389 | 45 | 335 | 389 | 45 |
| Buddy | 370 | | | | | | | | | |
| gi\|325972003\|ref\|YP_004248194.1 | | | | | | | | | | |
| Staphylococcus lugdunensis | SEQ ID NO: | 128 | 167 | 40 | 337 | 391 | 57 | 337 | 391 | 57 |
| M23590 | 371 | | | | | | | | | |
| gi\|315659848\|ref\|ZP_07912707.1 | | | | | | | | | | |
| Treponema sp. JC4 | SEQ ID NO: | 144 | 183 | 40 | 328 | 382 | 63 | 328 | 382 | 63 |
| gi\|384109266\|ref\|ZP_10010146.1 | 372 | | | | | | | | | |
| uncultured delta. | SEQ ID NO: | 154 | 193 | 40 | 313 | 365 | 55 | 313 | 365 | 55 |
| proteobacterium HF007007E19 | 373 | | | | | | | | | |
| gi\|297182908\|gb\|ADI19058.1\| | | | | | | | | | | |
| Alicycliphilus denitrificans | SEQ ID NO: | 140 | 178 | 39 | 317 | 366 | 48 | 317 | 366 | 48 |
| K601 | 374 | | | | | | | | | |
| gi\|330822845\|ref\|YP_004386148.1 | | | | | | | | | | |
| Azospirillum sp. B510 | SEQ ID NO: | 205 | 243 | 39 | 342 | 389 | 46 | 342 | 389 | 46 |
| gi\|288957741\|ref\|YP_003448082.1 | 375 | | | | | | | | | |
| Bradyrhizobium sp. BTAi1 | SEQ ID NO: | 143 | 181 | 39 | 323 | 370 | 48 | 323 | 370 | 48 |
| gi\|148255343\|ref\|YP_001239928.1 | 376 | | | | | | | | | |
| Parvibaculum lavamentivorans | SEQ ID NO: | 138 | 176 | 39 | 327 | 374 | 58 | 327 | 374 | 58 |
| DS-1 | 377 | | | | | | | | | |
| gi\|154250555\|ref\|YP_001411379.1 | | | | | | | | | | |
| Prevotella timonensis CRIS 5C- | SEQ ID NO: | 170 | 208 | 39 | 328 | 375 | 61 | 328 | 375 | 61 |
| B1 | 378 | | | | | | | | | |
| gi\|282880052\|ref\|ZP_06288774.1 | | | | | | | | | | |
| Bacillus smithii 7 3 47FAA | SEQ ID NO: | 134 | 171 | 38 | 401 | 448 | 63 | 401 | 448 | 63 |
| gi\|365156657\|ref\|ZP_09352959.1 | 379 | | | | | | | | | |
| Cand. Puniceispirillum | SEQ ID NO: | 135 | 172 | 38 | 344 | 391 | 53 | 344 | 391 | 53 |
| marinum IMCC1322 | 380 | | | | | | | | | |
| gi\|294086111\|ref\|YP_003552871.1 | | | | | | | | | | |
| Barnesiella intestinihominis | SEQ ID NO: | 140 | 176 | 37 | 371 | 417 | 60 | 371 | 417 | 60 |
| YIT 11860 | 381 | | | | | | | | | |
| gi\|404487228\|ref\|ZP_11022414.1 | | | | | | | | | | |
| Ralstonia syzygii R24 | SEQ ID NO: | 140 | 176 | 37 | 395 | 440 | 50 | 395 | 440 | 50 |
| gi\|344171927\|emb\|CCA84553.1\| | 382 | | | | | | | | | |
| Wolinella succinogenes DSM | SEQ ID NO: | 145 | 180 | 36 | 348 | 392 | 60 | 348 | 392 | 60 |
| 1740 | 383 | | | | | | | | | |
| gi\|34557790\|ref\|NP_907605.1\| | | | | | | | | | | |
| Mycoplasma gallisepticum str.F | SEQ ID NO: | 144 | 177 | 34 | 373 | 416 | 71 | 373 | 416 | 71 |
| gi\|284931710\|gb\|ADC31648.1\| | 384 | | | | | | | | | |
| Acidothermus cellulolyticus | SEQ ID NO: | 150 | 182 | 33 | 341 | 380 | 58 | 341 | 380 | 58 |
| 11B | 385 | | | | | | | | | |
| gi\|117929158\|ref\|YP_873709.1\| | | | | | | | | | | |
| Mycoplasma ovipneumoniae | SEQ ID NO: | 156 | 184 | 29 | 381 | 420 | 62 | 381 | 420 | 62 |
| SC01 | 386 | | | | | | | | | |
| gi\|363542550\|ref\|ZP_09312133.1 | | | | | | | | | | |

TABLE 18
Amino Acid Sequence of Cas9 Core Domains

| | |
|---|---|
| Cas9 Start | Cas9 Stop |
| (AA pos) | (AA pos) |

| | |
|---|---|
| | Start and Stop numbers |
| | refer to the sequence in |
| Strain Name | Table 17 |

| | | |
|---|---|---|
| Staphylococcus Aureus | 1 | 772 |
| Streptococcus Pyogenes | 1 | 1099 |
| Campulobacter Jejuni | 1 | 741 |

TABLE 19
Identified PAM sequences and corresponding RKR motifs.

| | PAM sequence | RKR motif |
|---|---|---|
| Strain Name | (NA) | (AA) |
| Streptococcus pyogenes | NGG | RKR |
| Streptococcus mutans | NGG | RKR |
| Streptococcus thermophilus A | NGGNG | RYR |
| Treponema denticola | NAAAAN | VAK |
| Streptococcus thermophilus B | NNAAAAW | IYK |
| Campylobacter jejuni | NNNNACA | NLK |
| Pasteurella multocida | GNNNCNNA | KDG |
| Neisseria meningitidis | NNNNGATT or | IGK |
| Staphylococcus aureus | NNGRRV (R = A or G; | NDK |
| | V = A, G or C) | |
| | NNGRRT (R = A or G) | |

PI domains are provided in Tables 20 and 21.

TABLE 20
Altered PI Domains

| | PI Start | PI Stop | | |
|---|---|---|---|---|
| | (AA pos) | (AA pos) | | |
| | Start and Stop numbers | | Length | RKR |
| | refer to the sequences in | | of PI | motif |
| Strain Name | Table 17 | | (AA) | (AA) |
| Alicycliphilus | 837 | 1029 | 193 | --Y |
| denitrificans K601 | | | | |
| Campylobacter | 741 | 984 | 244 | -NG |
| jejuni NCTC 11168 | | | | |
| Helicobacter | 771 | 1024 | 254 | -NQ |
| mustelae 12198 | | | | |

TABLE 21
Other Altered PI Domains

| | |
|---|---|
| PI Start | PI Stop |

| | (AA pos) | (AA pos) | | |
|---|---|---|---|---|
| | Start and Stop numbers | | | |
| | refer to the sequences | | Length of PI | RKR motif |
| Strain Name | in Table 17 | | (AA) | (AA) |
| Akkermansia muciniphila ATCC BAA-835 | 871 | 1101 | 231 | ALK |
| Ralstonia syzygii R24 | 821 | 1062 | 242 | APY |
| Cand. Puniceispirillum marinum IMCC1322 | 815 | 1035 | 221 | AYK |
| Fructobacillus fructosus KCTC 3544 | 1074 | 1323 | 250 | DGN |
| Eubacterium yurii ATCC 43715 | 1107 | 1391 | 285 | DGY |
| Eubacterium dolichum DSM 3991 | 779 | 1096 | 318 | DKK |
| Dinoroseobacter shibae DFL 12 | 851 | 1079 | 229 | DPI |
| Clostridium cellulolyticum H10 | 767 | 1021 | 255 | EGK |
| Pasteurella multocida str. Pm70 | 815 | 1056 | 242 | ENN |
| Mycoplasma canis PG 14 | 907 | 1233 | 327 | EPK |
| Porphyromonas sp. oral taxon 279 str. F0450 | 935 | 1197 | 263 | EPT |
| Filifactor alocis ATCC 35896 | 1094 | 1365 | 272 | EVD |
| Aminomonas paucivorans DSM 12260 | 801 | 1052 | 252 | EVY |
| Wolinella succinogenes DSM 1740 | 1034 | 1409 | 376 | EYK |
| Oenococcus kitaharae DSM 17330 | 1119 | 1389 | 271 | GAL |
| Coriobacterium glomeransPW2 | 1126 | 1384 | 259 | GDR |
| Peptoniphilus duerdenii ATCC BAA-1640 | 1091 | 1364 | 274 | GDS |
| Bifidobacterium bifidum S17 | 1138 | 1420 | 283 | GGL |
| Alicyclobacillus hesperidum URH17-3-68 | 876 | 1146 | 271 | GGR |
| Roseburia inulinivorans DSM 16841 | 895 | 1152 | 258 | GGT |
| Actinomyces coleocanis DSM 15436 | 843 | 1105 | 263 | GKK |
| Odoribacter laneus YIT 12061 | 1103 | 1498 | 396 | GKV |
| Coprococcus catus GD-7 | 1063 | 1338 | 276 | GNQ |
| Enterococcus faecalis TX0012 | 829 | 1150 | 322 | GRK |
| Bacillus smithii 7 3 47FAA | 809 | 1088 | 280 | GSK |
| Legionella pneumophila str. Paris | 1021 | 1372 | 352 | GTM |
| Bacteroides fragilis NCTC 9343 | 1140 | 1436 | 297 | IPV |
| Mycoplasma ovipneumoniae SC01 | 923 | 1265 | 343 | IRI |
| Actinomyces sp. oral taxon 180 str. F0310 | 895 | 1181 | 287 | KEK |
| Treponema sp. JC4 | 832 | 1062 | 231 | KIS |
| Fusobacterium nucleatum ATCC49256 | 1073 | 1374 | 302 | KKV |
| Lactobacillus farciminis KCTC 3681 | 1101 | 1356 | 256 | KKV |
| Nitratifractor salsuginis DSM 16511 | 840 | 1132 | 293 | KMR |
| Lactobacillus colyniformis KCTC 3535 | 850 | 1119 | 270 | KNK |
| Mycoplasma mobile 163K | 916 | 1236 | 321 | KNY |
| Flavobacterium branchiophilum FL-15 | 1182 | 1473 | 292 | KQK |
| Prevotella timonensis CRIS 5C-B1 | 957 | 1218 | 262 | KQQ |
| Methylosinus trichosporium OB3b | 830 | 1082 | 253 | KRP |
| Prevotella sp. C561 | 1099 | 1424 | 326 | KRY |
| Mycoplasma gallisepticum str. F | 911 | 1269 | 359 | KTA |
| Lactobacillus rhamnosus GG | 1077 | 1363 | 287 | KYG |
| Wolinella succinogenes DSM 1740 | 811 | 1059 | 249 | LPN |
| Streptococcus thermophilus LMD-9 | 1099 | 1388 | 290 | MLA |
| Treponema denticola ATCC 35405 | 1092 | 1395 | 304 | NDS |
| Bergeyella zoohelcum ATCC 43767 | 1098 | 1415 | 318 | NEK |
| Veillonella atypica ACS-134-V-Col7a | 1107 | 1398 | 292 | NGF |
| Neisseria meningitidis Z2491 | 835 | 1082 | 248 | NHN |
| Ignavibacterium album JCM 16511 | 1296 | 1688 | 393 | NKK |
| Ruminococcus albus 8 | 853 | 1156 | 304 | NNF |
| Streptococcus thermophilus LMD-9 | 811 | 1121 | 311 | NNK |
| Bamesiella intestinihominis YIT 11860 | 871 | 1153 | 283 | NPV |
| Azospirillum sp. B510 | 911 | 1168 | 258 | PFH |
| Rhodospirillum rubrum ATCC 11170 | 863 | 1173 | 311 | PRG |
| Planococcus antarcticus DSM 14505 | 1087 | 1333 | 247 | PYY |
| Staphylococcus pseudintermedius ED99 | 1073 | 1334 | 262 | QIV |
| Alcanivorax sp. W11-5 | 843 | 1113 | 271 | RIE |
| Bradyrhizobium sp. BTAi1 | 811 | 1064 | 254 | RIY |
| Streptococcus pyogenes M1 GAS | 1099 | 1368 | 270 | RKR |
| Streptococcus mutans UA159 | 1078 | 1345 | 268 | RKR |
| Streptococcus Pyogenes | 1099 | 1368 | 270 | RKR |
| Bacteroides sp. 203 | 1147 | 1517 | 371 | RNI |
| S. aureus | 772 | 1053 | 282 | RNK |
| Solobacterium moorei F0204 | 1062 | 1327 | 266 | RSG |
| Finegoldia magna ATCC 29328 | 1081 | 1348 | 268 | RTE |
| uncultured delta proteobacterium HF0070 07E19 | 770 | 1011 | 242 | SGG |
| Acidaminococcus sp. D21 | 1064 | 1358 | 295 | SIG |
| Eubacterium rectale ATCC 33656 | 824 | 1114 | 291 | SKK |
| Caenispirillum salinarum AK4 | 1048 | 1442 | 395 | SLV |
| Acidothermus cellulolyticus 11B | 830 | 1138 | 309 | SPS |
| Catenibacterium mitsuokai DSM 15897 | 1068 | 1329 | 262 | SPT |
| Parvibaculum lavamentivorans DS-1 | 827 | 1037 | 211 | TGN |
| Staphylococcus lugdunensis M23590 | 772 | 1054 | 283 | TKK |
| Streptococcus sanguinis SK49 | 1123 | 1421 | 299 | TRM |
| Elusimicrobium minutum Pei191 | 910 | 1195 | 286 | TTG |
| Nitrobacter hamburgensis X14 | 914 | 1166 | 253 | VAY |
| Mycoplasma synoviae 53 | 991 | 1314 | 324 | VGF |
| Sphaerochaeta globus str. Buddy | 877 | 1179 | 303 | VKG |
| Ilyobacter polytropus DSM 2926 | 837 | 1092 | 256 | VNG |
| Rhodovulum sp. PH10 | 821 | 1059 | 239 | VPY |
| Bifidobacterium longum DJO10A | 904 | 1187 | 284 | VRK |

Amino acid sequences described in Table 17:

SEQ ID NO: 304
MKRNYILGLDIGITSVGYGIIDYETRDVIDAGVRLFKEANVENNEGRRS
KRGARRLKRRRRHRIQRVKKLLFDYNLLTDHSELSGINPYEARVKGLSQ
KLSEEEFSAALLHLAKRRGVHNVNEVEEDTGNELSTKEQISRNSKALEE
KYVAELQLERLKKDGEVRGSINRFKTSDYVKEAKQLLKVQKAYHQLDQS
FIDTYIDLLETRRTYYEGPGEGSPFGWKDIKEWYEMLMGHOTYFPEELR
SVKYAYNADLYNALNDLNNLVITRDENEKLEYYEKFQIIENVFKQKKKP
TLKQIAKEILVNEEDIKGYRVTSTGKPEFTNLKVYHDIKDITARKEIIE
NAELLDQIAKILTIYQSSEDIQEELTNLNSELTQEEIEQISNLKGYTGT
HNLSLKAINLILDELWHINDNQIAIFNRLKLVPKKVDLSQQKEIPTTLV
DDFILSPVVKRSFIQSIKVINAIIKKYGLPNDIIIELAREKNSKDAQKM
INEMQKRNRQTNERIEEIIRTTGKENAKYLIEKIKLHDMQEGKCLYSLE
AIPLEDLLNNPFNYEVDHIIPRSVSFDNSFNNKVLVKQEENSKKGNRTP
FQYLSSSDSKISYETFKKHILNLAKGKGRISKTKKEYLLEERDINRFSV
QKDFINRNLVDTRYATRGLMNLLRSYFRVNNLDVKVKSINGGFTSFLRR
KWKFKKERNKGYKHHAEDALIIANADFIFKEWKKLDKAKKVMENQMFEE
KQAESMPEIETEQEYKEIFITPHQIKHIKDFKDYKYSHRVDKKPNRELI
NDTLYSTRKDDKGNTLIVNNLNGLYDKDNDKLKKLINKSPEKLLMYHHD
PQTYQKLKLIMEQYGDEKNPLYKYYEETGNYLTKYSKKDNGPVIKKIKY
YGNKLNAHLDITDDYPNSRNKVVKLSLKPYRFDVYLDNGVYKFVTVKNL
DVIKKENYYEVNSKCYEEAKKLKKISNQAEFIASFYNNDLIKINGELYR
VIGVNNDLLNRIEVNMIDITYREYLENMNDKRPPRIIKTIASKTQSIKK
YSTDILGNLYEVKSKKHPQIIKKG
SEQ ID NO: 305
[sequence omitted]
SEQ ID NO: 306
MARILAFDIGISSIGWAFSENDELKDCGVRIFTKVENPKTGESLALPRR
LARSARKRLARRKARLNHLKHLIANEFKLNYEDYQSFDESLAKAYKGSL
ISPYELRFRALNELLSKQDFARVILHIAKRRGYDDIKNSDDKEKGAILK
AIKQNEEKLANYQSVGEYLYKEYFQKFKENSKEFTNVRNKKESYERCIA
QSFLKDELKLIFKKQREFGFSFSKKFEEEVLSVAFYKRALKDFSHLVGN
CSFFTDEKRAPKNSPLAFMFVALTRIINLLNNLKNTEGILYTKDDLNAL
LNEVLKNGTLTYKQTKKLLGLSDDYEFKGEKGTYFIEFKKYKEFIKALG
EHNLSQDDLNEIAKDITLIKDEIKLKKALAKYDLNQNQIDSLSKLEFKD
HLNISFKALKLVTPLMLEGKKYDEACNELNLKVAINEDKKDFLPAFNET
YYKDEVTNPVVLRAIKEYRKVLNALLKKYGKVHKINIELAREVGKNHSQ
RAKIEKEQNENYKAKKDAELECEKLGLKINSKNILKLRLFKEQKEFCAY
SGEKIKISDLQDEKMLEIDHIYPYSRSFDDSYMNKVLVFTKQNQEKLNQ
TPFEAFGNDSAKWQKIEVLAKNLPTKKQKRILDKNYKDKEQKNFKDRNL
NDTRYIARLVLNYTKDYLDFLPLSDDENTKLNDTQKGSKVHVEAKSGML
TSALRHTWGFSAKDRNNHLHHAIDAVIIAYANNSIVKAFSDFKKEQESN
SAELYAKKISELDYKNKRKFFEPFSGFRQKVLDKIDEIFVSKPERKKPS
GALHEETFRKEEEFYQSYGGKEGVLKALELGKIRKVNGKIVKNGDMFRV
DIFKHKKINKFYAVPIYTMDFALKVLPNKAVARSKKGEIKDWILMDENY
EFCFSLYKDSLILIQTKDMQEPEFVYYNAFTSSTVSLIVSKHDNKFETL
SKNQKILFKNANEKEVIAKSIGIQNLKVFEKYIVSALGEVTKAEFRQRE
DFKK
SEQ ID NO: 307
MKRILGLDLGTNSIGWALVNEAENKDERSSIVKLGVRVNPLTVDELTNF
EKGKSITTNADRTLKRGMRRNLQRYKLRRETLTEVLKEHKLITEDTILS
ENGNRTTFETYRLRAKAVTEEISLEEFARVLLMINKKRGYKSSRKAKGV
EEGTLIDGMDIARELYNNNLTPGELCLQLLDAGKKFLPDFYRSDLQNEL
DRIWEKQKEYYPEILTDVLKEELRGKKRDAVWAICAKYFVWKENYTEWN
KEKGKTEQQEREHKLEGIYSKRKRDEAKRENLQWRVNGLKEKLSLEQLV
IVFQEMNTQINNSSGYLGAISDRSKELYFNKQTVGQYQMEMLDKNPNAS
LRNMVFYRQDYLDEFNMLWEKQAVYHKELTEELKKEIRDIIIFYQRRLK
SQKGLIGFCEFESRQIEVDIDGKKKIKTVGNRVISRSSPLFQEFKIWQI
LNNIEVTVVGKKRKRRKLKENYSALFEELNDAEQLELNGSRRLCQEEKE
LLAQELFIRDKMTKSEVLKLLFDNPQELDLNFKTIDGNKTGYALFQAYS
KMIEMSGHEPVDFKKPVEKVVEYIKAVFDLLNWNTDILGFNSNEELDNQ
PYYKLWHLLYSFEGDNIPTGNGRLIQKMTELYGFEKEYATILANVSFQD
DYGSLSAKAIHKILPHLKEGNRYDVACVYAGYRHSESSLTREEIANKVL
KDRLMLLPKNSLHNPVVEKILNQMVNVINVIIDIYGKPDEIRVELAREL
KKNAKEREELIKSIAQTTKAHEEYKILLQTEFGLINVSRTDILRYKLYK
ELESCGYKTLYSNTYISREKLFSKEFDIEHIIPQARLFDDSFSNKTLEA
RSVNIEKGNKTAYDFVKEKFGESGADNSLEHYLNNIEDLFKSGKISKTK
YNKLKMAEQDIPDGFIERDLRNTQYIAKKALSMLNEISHRVVATSGSVT
DKLREDWQLIDVMKELNWEKYKALGLVEYFEDRDGRQIGRIKDWTKRND
HRHHAMDALTVAFTKDVFIQYFNNKNASLDPNANEHAIKNKYFQNGRAI
APMPLREFRAEAKKHLENTLISIKAKNKVITGNINKTRKKGGVNKNMQQ
TPRGQLHLETIYGSGKQYLTKEEKVNASFDMRKIGTVSKSAYRDALLKR
LYENDNDPKKAFAGKNSLDKQPIWLDKEQMRKVPEKVKIVTLEAIYTIR
KEISPDLKVDKVIDVGVRKILIDRLNEYGNDAKKAFSNLDKNPIWLNKE
KGISIKRVTISGISNAQSLHVKKDKDGKPILDENGRNIPVDFVNTGNNH
HVAVYYRPVIDKRGQLVVDEAGNPKYELEEVVVSFFEAVTRANLGLPII
DKDYKTTEGWQFLFSMKQNEYFVFPNEKTGFNPKEIDLLDVENYGLISP
NLFRVQKFSLKNYVFRHHLETTIKDTSSILRGITWIDFRSSKGLDTIVK
VRVNHIGQIVSVGEY
SEQ ID NO: 308
MSRKNYVDDYAISLDIGNASVGWSAFTPNYRLVRAKGHELIGVRLFDPA
DTAESRRMARTTRRRYSRRRWRLRLLDALFDQALSEIDPSFLARRKYSW
VHFDDENNADCWYGSVLFDSNEQDKRFYEKYPTIYHLRKALMEDDSQHD
IREIYLAIHHMVKYRGNFLVEGTLESSNAFKEDELLKLLGRITRYEMSE
GEQNSDIEQDDENKLVAPANGQLADALCATRGSRSMRVDNALEALSAVN
DLSREQRAIVKAIFAGLEGNKLDLAKIFVSKEFSSENKKILGIYFNKSD
YEEKCVQIVDSGLLDDEEREFLDRMQGQYNAIALKQLLGRSTSVSDSKC
ASYDAHRANWNLIKLQLRTKENEKDINENYGILVGWKIDSGQRKSVRGE
SAYENMRKKANVFFKKMIETSDLSETDKNRLIHDIEEDKLFPIQRDSDN
GVIPHQLHQNELKQIIKKQGKYYPFLLDAFEKDGKQINKIEGLLTFRVP
YFVGPLVVPEDLQKSDNSENHWMVRKKKGEITPWNFDEMVDKDASGRKF
IERLVGTDSYLLGEPTLPKNSLLYQEYEVLNELNNVRLSVRTGNHWNDK
RRMRLGREEKTLLCQRLFMKGQTVTKRTAENLLRKEYGRTYELSGLSDE
SKFTSSLSTYGKMCRIFGEKYVNEHRDLMEKIVELQTVFEDKETLLHQL
RQLEGISEADCALLVNTHYTGWGRLSRKLLTTKAGECKISDDFAPRKHS
IIEIMRAEDRNLMEITDKQLGFSDWIEQENLGAENGSSLMEVVDDLRVS
PKVKRGIIQSIRLIDDISKAVGKRPSRIFLELADDIQPSGRTISRKSRL
QDLYRNANLGKEFKGIADELNACSDKDLQDDRLFLYYTQLGKDMYTGEE
LDLDRLSSAYDIDHIIPQAVTQNDSIDNRVLVARAENARKTDSFTYMPQ
IADRMRNFWQILLDNGLISRVKFERLTRQNEFSEREKERFVQRSLVETR
QIMKNVATLMRQRYGNSAAVIGLNAELTKEMHRYLGFSHKNRDINDYHH
AQDALCVGIAGQFAANRGFFADGEVSDGAQNSYNQYLRDYLRGYREKLS
AEDRKQGRAFGFIVGSMRSQDEQKRVNPRTGEVVWSEEDKDYLRKVMNY
RKMLVTQKVGDDFGALYDETRYAATDPKGIKGIPFDGAKQDTSLYGGFS
SAKPAYAVLIESKGKTRLVNVTMQEYSLLGDRPSDDELRKVLAKKKSEY
AKANILLRHVPKMQLIRYGGGLMVIKSAGELNNAQQLWLPYEEYCYFDD
LSQGKGSLEKDDLKKLLDSILGSVQCLYPWHRFTEEELADLHVAFDKLP
EDEKKNVITGIVSALHADAKTANLSIVGMTGSWRRMNNKSGYTFSDEDE
FIFQSPSGLFEKRVTVGELKRKAKKEVNSKYRTNEKRLPTLSGASQP
SEQ ID NO: 309
METQTSNQLITSHLKDYPKQDYFVGLDIGTNSVGWAVTNTSYELLKFHS
HKMWGSRLFEEGESAVTRRGFRSMRRRLERRKLRLKLLEELFADAMAQV
DSTFFIRLHESKYHYEDKTTGHSSKHILFIDEDYTDQDYFTEYPTIYHL
RKDLMENGTDDIRKLFLAVHHILKYRGNFLYEGATFNSNAFTFEDVLKQ
ALVNITFNCFDTNSAISSISNILMESGKTKSDKAKAIERLVDTYTVFDE
VNTPDKPQKEQVKEDKKTLKAFANLVLGLSANLIDLFGSVEDIDDDLKK
LQIVGDTYDEKRDELAKVWGDEIHIIDDCKSVYDAIILMSIKEPGLTIS
QSKVKAFDKHKEDLVILKSLLKLDRNVYNEMFKSDKKGLHNYVHYIKQG
RTEETSCSREDFYKYTKKIVEGLADSKDKEYILNEIELQTLLPLQRIKD
NGVIPYQLHLEELKVILDKCGPKFPFLHTVSDGFSVTEKLIKMLEFRIP
YYVGPLNTHHNIDNGGFSWAVRKQAGRVTPWNFEEKIDREKSAAAFIKN
LTNKCTYLFGEDVLPKSSLLYSEFMLLNELNNVRIDGKALAQGVKQHLI
DSIFKQDHKKMTKNRIELFLKDNNYITKKHKPEITGLDGEIKNDLTSYR
DMVRILGNNFDVSMAEDIITDITIFGESKKMLRQTLRNKFGSQLNDETI
KKLSKLRYRDWGRLSKKLLKGIDGCDKAGNGAPKTIIELMRNDSYNLME
ILGDKFSFMECIEEENAKLAQGQVVNPHDIIDELALSPAVKRAVWQALR
IVDEVAHIKKALPSRIFVEVARTNKSEKKKKDSRQKRLSDLYSAIKKDD
VLQSGLQDKEFGALKSGLANYDDAALRSKKLYLYYTQMGRCAYTGNIID
LNQLNTDNYDIDHIYPRSLTKDDSFDNLVLCERTANAKKSDIYPIDNRI
QTKQKPFWAFLKHQGLISERKYERLTRIAPLTADDLSGFIARQLVETNQ
SVKATTTLLRRLYPDIDVVFVKAENVSDFRHNNNFIKVRSLNHHHHAKD
AYLNIVVGNVYHEKFTRNFRLFFKKNGANRTYNLAKMFNYDVICTNAQD
GKAWDVKTSMNTVKKMMASNDVRVTRRLLEQSGALADATIYKASVAAKA
KDGAYIGMKTKYSVFADVTKYGGMTKIKNAYSIIVQYTGKKGEEIKEIV
PLPIYLINRNATDIELIDYVKSVIPKAKDISIKYRKLCINQLVKVNGFY
YYLGGKTNDKIYIDNAIELVVPHDIATYIKLLDKYDLLRKENKTLKASS
ITTSIYNINTSTVVSLNKVGIDVFDYFMSKLRTPLYMKMKGNKVDELSS
TGRSKFIKMTLEEQSIYLLEVLNLLTNSKTTFDVKPLGITGSRSTIGVK
IHNLDEFKIINESITGLYSNEVTIV
SEQ ID NO: 310
MTKLNQPYGIGLDIGSNSIGFAVVDANSHLLRLKGETAIGARLFREGQS
AADRRGSRTTRRRLSRTRWRLSFLRDFFAPHITKIDPDFFLRQKYSEIS
PKDKDRFKYEKRLFNDRTDAEFYEDYPSMYHLRLHLMTHTHKADPREIF
LAIHHILKSRGHFLTPGAAKDFNTDKVDLEDIFPALTEAYAQVYPDLEL
TFDLAKADDFKAKLLDEQATPSDTQKALVNLLLSSDGEKEIVKKRKQVL
TEFAKAITGLKTKFNLALGTEVDEADASNWQFSMGQLDDKWSNIETSMT
DQGTEIFEQIQELYRARLLNGIVPAGMSLSQAKVADYGQHKEDLELFKT
YLKKLNDHELAKTIRGLYDRYINGDDAKPFLREDFVKALTKEVTAHPNE
VSEQLLNRMGQANFMLKQRTKANGAIPIQLQQRELDQIIANQSKYYDWL
AAPNPVEAHRWKMPYQLDELLNFHIPYYVGPLITPKQQAESGENVFAWM
VRKDPSGNITPYNFDEKVDREASANTFIQRMKTTDTYLIGEDVLPKQSL
LYQKYEVLNELNNVRINNECLGTDQKQRLIREVFERHSSVTIKQVADNL
VAHGDFARRPEIRGLADEKRFLSSLSTYHQLKEILHEAIDDPTKLLDIE
NIITWSTVFEDHTIFETKLAEIEWLDPKKINELSGIRYRGWGQFSRKLL
DGLKLGNGHTVIQELMLSNHNLMQILADETLKETMTELNQDKLKTDDIE
DVINDAYTSPSNKKALRQVLRVVEDIKHAANGQDPSWLFIETADGTGTA
GKRTQSRQKQIQTVYANAAQELIDSAVRGELEDKIADKASFTDRLVLYF
MQGGRDIYTGAPLNIDQLSHYDIDHILPQSLIKDDSLDNRVLVNATINR
EKNNVFASTLFAGKMKATWRKWHEAGLISGRKLRNLMLRPDEIDKFAKG
FVARQLVETRQIIKLTEQIAAAQYPNTKIIAVKAGLSHQLREELDFPKN
RDVNHYHHAFDAFLAARIGTYLLKRYPKLAPFFTYGEFAKVDVKKFREF
NFIGALTHAKKNIIAKDTGEIVWDKERDIRELDRIYNFKRMLITHEVYF
ETADLFKQTIYAAKDSKERGGSKQLIPKKQGYPTQVYGGYTQESGSYNA
LVRVAEADTTAYQVIKISAQNASKIASANLKSREKGKQLLNEIVVKQLA
KRRKNWKPSANSFKIVIPRFGMGTLFQNAKYGLFMVNSDTYYRNYQELW
LSRENQKLLKKLFSIKYEKTQMNHDALQVYKAIIDQVEKFFKLYDINQF
RAKLSDAIERFEKLPINTDGNKIGKTETLRQILIGLQANGTRSNVKNLG
IKTDLGLLQVGSGIKLDKDTQIVYQSPSGLFKRRIPLADL
SEQ ID NO: 311
MTKEYYLGLDVGTNSVGWAVTDSQYNLCKFKKKDMWGIRLFESANTAKD
RRLQRGNRRRLERKKQRIDLLQEIFSPEICKIDPTFFIRLNESRLHLED
KSNDFKYPLFIEKDYSDIEYYKEFFTIFHLRKHLIESEEKQDIRLIYLA
LHNIIKTRGHFLIDGDLQSAKQLRPILDTFLLSLQEEQNLSVSLSENQK
DEYEEILKNRSIAKSEKVKKLKNLFEISDELEKEEKKAQSAVIENFCKF
IVGNKGDVCKFLRVSKEELEIDSFSFSEGKYEDDIVKNLEEKVPEKVYL
FEQMKAMYDWNILVDILETEEYISFAKVKQYEKHKTNLRLLRDIILKYC
TKDEYNRMFNDEKEAGSYTAYVGKLKKNNKKYWIEKKRNPEEFYKSLGK
LLDKIEPLKEDLEVLTMMIEECKNHTLLPIQKNKDNGVIPHQVHEVELK
KILENAKKYYSFLTETDKDGYSVVQKIESIFRFRIPYYVGPLSTRHQEK
GSNVWMVRKPGREDRIYPWNMEEIIDFEKSNENFITRMTNKCTYLIGED
VLPKHSLLYSKYMVLNELNNVKVRGKKLPTSLKQKVFEDLFENKSKVTG
KNLLEYLQIQDKDIQIDDLSGFDKDFKTSLKSYLDFKKQIFGEEIEKES
IQNMIEDIIKWITIYGNDKEMLKRVIRANYSNQLTEEQMKKITGFQYSG
WGNFSKMFLKGISGSDVSTGETFDIITAMWETDNNLMQILSKKFTFMDN
VEDFNSGKVGKIDKITYDSTVKEMFLSPENKRAVWQTIQVAEEIKKVMG
CEPKKIFIEMARGGEKVKKRTKSRKAQLLELYAACEEDCRELIKEIEDR
DERDFNSMKLFLYYTQFGKCMYSGDDIDINELIRGNSKWDRDHIYPQSK
IKDDSIDNLVLVNKTYNAKKSNELLSEDIQKKMHSFWLSLLNKKLITKS
KYDRLTRKGDFTDEELSGFIARQLVETRQSTKAIADIFKQIYSSEVVYV
KSSLVSDFRKKPLNYLKSRRVNDYHHAKDAYLNIVVGNVYNKKFTSNPI
QWMKKNRDTNYSLNKVFEHDVVINGEVIWEKCTYHEDTNTYDGGTLDRI
RKIVERDNILYTEYAYCEKGELFNATIQNKNGNSTVSLKKGLDVKKYGG
YFSANTSYFSLIEFEDKKGDRARHIIGVPIYIANMLEHSPSAFLEYCEQ
KGYQNVRILVEKIKKNSLLIINGYPLRIRGENEVDTSFKRAIQLKLDQK
NYELVRNIEKFLEKYVEKKGNYPIDENRDHITHEKMNQLYEVLLSKMKK
FNKKGMADPSDRIEKSKPKFIKLEDLIDKINVINKMLNLLRCDNDTKAD
LSLIELPKNAGSFVVKKNTIGKSKIILVNQSVTGLYENRREL
SEQ ID NO: 312
MARDYSVGLDIGTSSVGWAAIDNKYHLIRAKSKNLIGVRLFDSAVTAEK
RRGYRTTRRRLSRRHWRLRLLNDIFAGPLTDFGDENFLARLKYSWVHPQ
DQSNQAHFAAGLLFDSKEQDKDFYRKYPTIYHLRLALMNDDQKHDLREV
YLAIHHLVKYRGHFLIEGDVKADSAFDVHTFADAIQRYAESNNSDENLL
GKIDEKKLSAALTDKHGSKSQRAETAETAFDILDLQSKKQIQAILKSVV
GNQANLMAIFGLDSSAISKDEQKNYKFSFDDADIDEKIADSEALLSDTE
FEFLCDLKAAFDGLTLKMLLGDDKTVSAAMVRRFNEHQKDWEYIKSHIR
NAKNAGNGLYEKSKKFDGINAAYLALQSDNEDDRKKAKKIFQDEISSAD
IPDDVKADFLKKIDDDQFLPIQRTKNNGTIPHQLHRNELEQIIEKQGIY
YPFLKDTYQENSHELNKITALINFRVPYYVGPLVEEEQKIADDGKNIPD
PTNHWMVRKSNDTITPWNLSQVVDLDKSGRRFIERLTGTDTYLIGEPTL
PKNSLLYQKFDVLQELNNIRVSGRRLDIRAKQDAFEHLFKVQKTVSATN
LKDFLVQAGYISEDTQIEGLADVNGKNFNNALTTYNYLVSVLGREFVEN
PSNEELLEEITELQTVFEDKKVLRRQLDQLDGLSDHNREKLSRKHYTGW
GRISKKLLTTKIVQNADKIDNQTFDVPRMNQSIIDTLYNTKMNLMEIIN
NAEDDFGVRAWIDKQNTTDGDEQDVYSLIDELAGPKEIKRGIVQSFRIL
DDITKAVGYAPKRVYLEFARKTQESHLTNSRKNQLSTLLKNAGLSELVT
QVSQYDAAALQNDRLYLYFLQQGKDMYSGEKLNLDNLSNYDIDHIIPQA
YTKDNSLDNRVLVSNITNRRKSDSSNYLPALIDKMRPFWSVLSKQGLLS
KHKFANLTRTRDFDDMEKERFIARSLVETRQIIKNVASLIDSHFGGETK
AVAIRSSLTADMRRYVDIPKNRDINDYHHAFDALLFSTVGQYTENSGLM
KKGQLSDSAGNQYNRYIKEWIHAARLNAQSQRVNPFGFVVGSMRNAAPG
KLNPETGEITPEENADWSIADLDYLHKVMNFRKITVIRRLKDQKGQLYD
ESRYPSVLHDAKSKASINFDKHKPVDLYGGFSSAKPAYAALIKFKNKFR
LVNVLRQWTYSDKNSEDYILEQIRGKYPKAEMVLSHIPYGQLVKKDGAL
VTISSATELHNFEQLWLPLADYKLINTLLKTKEDNLVDILHNRLDLPEM
TIESAFYKAFDSILSFAFNRYALHQNALVKLQAHRDDFNALNYEDKQQT
LERILDALHASPASSDLKKINLSSGFGRLFSPSHFTLADTDEFIFQSVT
GLFSTQKTVAQLYQETK
SEQ ID NO: 313
MVYDVGLDIGTGSVGWVALDENGKLARAKGKNLVGVRLFDTAQTAADRR
GFRTTRRRLSRRKWRLRLLDELFSAEINEIDSSFFQRLKYSYVHPKDEE
NKAHYYGGYLFPTEEETKKFHRSYPTIYHLRQELMAQPNKRFDIREIYL
AIHHLVKYRGHFLSSQEKITIGSTYNPEDLANAIEVYADEKGLSWELNN
PEQLTEIISGEAGYGLNKSMKADEALKLFEFDNNQDKVAIKTLLAGLTG
NQIDFAKLFGKDISDKDEAKLWKLKLDDEALEEKSQTILSQLTDEEIEL
FHAVVQAYDGFVLIGLLNGADSVSAAMVQLYDQHREDRKLLKSLAQKAG
LKHKRFSEIYEQLALATDEATIKNGISTARELVEESNLSKEVKEDTLRR
LDENEFLPKQRTKANSVIPHQLHLAELQKILQNQGQYYPFLLDTFEKED
GQDNKIEELLRFRIPYYVGPLVTKKDVEHAGGDADNHWVERNEGFEKSR
VTPWNFDKVFNRDKAARDFIERLIGNDTYLIGEKTLPQNSLRYQLFTVL
NELNNVRVNGKKFDSKTKADLINDLFKARKTVSLSALKDYLKAQGKGDV
TITGLADESKFNSSLSSYNDLKKTFDAEYLENEDNQETLEKIIEIQTVF
EDSKIASRELSKLPLDDDQVKKLSQTHYTGWGRLSEKLLDSKIIDERGQ
KVSILDKLKSTSQNFMSIINNDKYGVQAWITEQNTGSSKLTFDEKVNEL
TTSPANKRGIKQSFAVLNDIKKAMKEEPRRVYLEFAREDQTSVRSVPRY
NQLKEKYQSKSLSEEAKVLKKTLDGNKNKMSDDRYFLYFQQQGKDMYTG
RPINFERLSQDYDIDHIIPQAFTKDDSLDNRVLVSRPENARKSDSFAYT
DEVQKQDGSLWTSLLKSGFINRKKYERLTKAGKYLDGQKTGFIARQLVE
TRQIIKNVASLIEGEYENSKAVAIRSEITADMRLLVGIKKHREINSFHH
AFDALLITAAGQYMQNRYPDRDSTNVYNEFDRYTNDYLKNLRQLSSRDE
VRRLKSFGFVVGTMRKGNEDWSEENTSYLRKVMMFKNILTTKKTEKDRG
PLNKETIFSPKSGKKLIPLNSKRSDTALYGGYSNVYSAYMTLVRANGKN
LLIKIPISIANQIEVGNLKINDYIVNNPAIKKFEKILISKLPLGQLVNE
DGNLIYLASNEYRHNAKQLWLSTTDADKIASISENSSDEELLEAYDILT
SENVKNRFPFFKKDIDKLSQVRDEFLDSDKRIAVIQTILRGLQIDAAYQ
APVKIISKKVSDWHKLQQSGGIKLSDNSEMIYQSATGIFETRVKISDLL
SEQ ID NO: 314
IVDYCIGLDLGTGSVGWAVVDMNHRLMKRNGKHLWGSRLFSNAETAANR
RASRSIRRRYNKRRERIRLLRAILQDMVLEKDPIFFIRLEHTSFLDEED
KAKYLGTDYKDNYNLFIDEDFNDYTYYHKYPTIYHLRKALCESTEKADP
RLIYLALHHIVKYRGNFLYEGQKFNMDASNIEDKLSDIFTQFTSFNNIP
YEDDEKKNLEILEILKKPLSKKAKVDEVMTLIAPEKDYKSAFKELVTGI
AGNKMNVTKMILCEPIKQGDSEIKLKFSDSNYDDQFSEVEKDLGEYVEF
VDALHNVYSWVELQTIMGATHTDNASISEAMVSRYNKHHDDLKLLKDCI
KNNVPNKYFDMFRNDSEKSKGYYNYINRPSKAPVDEFYKYVKKCIEKVD
TPEAKQILNDIELENFLLKQNSRTNGSVPYQMQLDEMIKIIDNQAEYYP
ILKEKREQLLSILTFRIPYYFGPLNETSEHAWIKRLEGKENQRILPWNY
QDIVDVDATAEGFIKRMRSYCTYFPDEEVLPKNSLIVSKYEVYNELNKI
RVDDKLLEVDVKNDIYNELFMKNKTVTEKKLKNWLVNNQCCSKDAEIKG
FQKENQFSTSLTPWIDFTNIFGKIDQSNFDLIENIIYDLTVFEDKKIMK
RRLKKKYALPDDKVKQILKLKYKDWSRLSKKLLDGIVADNRFGSSVTVL
DVLEMSRLNLMEIINDKDLGYAQMIEEATSCPEDGKFTYEEVERLAGSP
ALKRGIWQSLQIVEEITKVMKCRPKYIYIEFERSEEAKERTESKIKKLE
NVYKDLDEQTKKEYKSVLEELKGFDNTKKISSDSLFLYFTQLGKCMYSG
KKLDIDSLDKYQIDHIVPQSLVKDDSFDNRVLVVPSENQRKLDDLVVPF
DIRDKMYRFWKLLFDHELISPKKFYSLIKTEYTERDEERFINRQLVETR
QITKNVTQIIEDHYSTTKVAAIRANLSHEFRVKNHIYKNRDINDYHHAH
DAYIVALIGGFMRDRYPNMHDSKAVYSEYMKMFRKNKNDQKRWKDGFVI
NSMNYPYEVDGKLIWNPDLINEIKKCFYYKDCYCITKLDQKSGQLFNLT
VLSNDAHADKGVTKAVVPVNKNRSDVHKYGGFSGLQYTIVAIEGQKKKG
KKTELVKKISGVPLHLKAASINEKINYIEEKEGLSDVRIIKDNIPVNQM
IEMDGGEYLLTSPTEYVNARQLVLNEKQCALIADIYNAIYKQDYDNLDD
ILMIQLYIELTNKMKVLYPAYRGIAEKFESMNENYVVISKEEKANIIKQ
MLIVMHRGPQNGNIVYDDFKISDRIGRLKTKNHNLNNIVFISQSPTGIY
TKKYKL
SEQ ID NO: 315
MKSEKKYYIGLDVGTNSVGWAVTDEFYNILRAKGKDLWGVRLFEKADTA
ANTRIFRSGRRRNDRKGMRLQILREIFEDEIKKVDKDFYDRLDESKFWA
EDKKVSGKYSLFNDKNFSDKQYFEKFPTIFHLRKYLMEEHGKVDIRYYF
LAINQMMKRRGHFLIDGQISHVTDDKPLKEQLILLINDLLKIELEEELM
DSIFEILADVNEKRTDKKNNLKELIKGQDFNKQEGNILNSIFESIVTGK
AKIKNIISDEDILEKIKEDNKEDFVLTGDSYEENLQYFEEVLQENITLF
NTLKSTYDFLILQSILKGKSTLSDAQVERYDEHKKDLEILKKVIKKYDE
DGKLFKQVFKEDNGNGYVSYIGYYLNKNKKITAKKKISNIEFTKYVKGI
LEKQCDCEDEDVKYLLGKIEQENFLLKQISSINSVIPHQIHLFELDKIL
ENLAKNYPSFNNKKEEFTKIEKIRKTFTFRIPYYVGPLNDYHKNNGGNA
WIFRNKGEKIRPWNFEKIVDLHKSEEEFIKRMLNQCTYLPEETVLPKSS
ILYSEYMVLNELNNLRINGKPLDTDVKLKLIEELFKKKTKVTLKSIRDY
MVRNNFADKEDFDNSEKNLEIASNMKSYIDFNNILEDKFDVEMVEDLIE
KITIHTGNKKLLKKYIEETYPDLSSSQIQKIINLKYKDWGRLSRKLLDG
IKGTKKETEKTDTVINFLRNSSDNLMQIIGSQNYSFNEYIDKLRKKYIP
QEISYEVVENLYVSPSVKKMIWQVIRVTEEITKVMGYDPDKIFIEMAKS
EEEKKTTISRKNKLLDLYKAIKKDERDSQYEKLLTGLNKLDDSDLRSRK
LYLYYTQMGRDMYTGEKIDLDKLFDSTHYDKDHIIPQSMKKDDSIINNL
VLVNKNANQTTKGNIYPVPSSIRNNPKIYNYWKYLMEKEFISKEKYNRL
IRNTPLTNEELGGFINRQLVETRQSTKAIKELFEKFYQKSKIIPVKASL
ASDLRKDMNTLKSREVNDLHHAHDAFLNIVAGDVWNREFTSNPINYVKE
NREGDKVKYSLSKDFTRPRKSKGKVIWTPEKGRKLIVDTLNKPSVLISN
ESHVKKGELFNATIAGKKDYKKGKIYLPLKKDDRLQDVSKYGGYKAING
AFFFLVEHTKSKKRIRSIELFPLHLLSKFYEDKNTVLDYAINVLQLQDP
KIIIDKINYRTEIIIDNFSYLISTKSNDGSITVKPNEQMYWRVDEISNL
KKIENKYKKDAILTEEDRKIMESYIDKIYQQFKAGKYKNRRTTDTIIEK
YEIIDLDTLDNKQLYQLLVAFISLSYKTSNNAVDFTVIGLGTECGKPRI
TNLPDNTYLVYKSITGIYEKRIRIK
SEQ ID NO: 316
MKLRGIEDDYSIGLDMGTSSVGWAVTDERGTLAHFKRKFTWGSRLFREA
QTAAVARMPRGQRRRYVRRRWRLDLLQKLFEQQMEQADPDFFIRLRQSR
LLRDDRAEEHADYRWPLFNDCKFTERDYYQRFPTIYHVRSWLMETDEQA
DIRLIYLALHNIVKHRGNFLREGQSLSAKSARPDEALNHLRETLRVWSS
ERGFECSIADNGSILAMLTHPDLSPSDRRKKIAPLFDVKSDDAAADKKL
GIALAGAVIGLKTEFKNIFGDFPCEDSSIYLSNDEAVDAVRSACPDDCA
ELFDRLCEVYSAYVLQGLLSYAPGQTISANMVEKYRRYGEDLALLKKLV
KIYAPDQYRMFFSGATYPGTGIYDAAQARGYTKYNLGPKKSEYKPSESM
QYDDFRKAVEKLFAKTDARADERYRMMMDRFDKQQFLRRLKTSDNGSIY
HQLHLEELKAIVENQGRFYPFLKRDADKLVSLVSFRIPYYVGPLSTRNA
RTDQHGENRFAWSERKPGMQDEPIFPWNWESIIDRSKSAEKFILRMTGM
CTYLQQEPVLPKSSLLYEEFCVLNELNGAHWSIDGDDEHRFDAADREGI
IEELFRRKRTVSYGDVAGWMERERNQIGAHVCGGQGEKGFESKLGSYIF
FCKDVFKVERLEQSDYPMIERIILWNTLFEDRKILSQRLKEEYGSRLSA
EQIKTICKKRFTGWGRLSEKFLTGITVQVDEDSVSIMDVLREGCPVSGK
RGRAMVMMEILRDEELGFQKKVDDFNRAFFAENAQALGVNELPGSPAVR
RSLNQSIRIVDEIASIAGKAPANIFIEVTRDEDPKKKGRRTKRRYNDLK
DALEAFKKEDPELWRELCETAPNDMDERLSLYFMQRGKCLYSGRAIDIH
QLSNAGIYEVDHIIPRTYVKDDSLENKALVYREENQRKTDMLLIDPEIR
RRMSGYWRMLHEAKLIGDKKFRNLLRSRIDDKALKGFIARQLVETGQMV
KLVRSLLEARYPETNIISVKASISHDLRTAAELVKCREANDFHHAHDAF
LACRVGLFIQKRHPCVYENPIGLSQVVRNYVRQQADIFKRCRTIPGSSG
FIVNSFMTSGFDKETGEIFKDDWDAEAEVEGIRRSLNFRQCFISRMPFE
DHGVFWDATIYSPRAKKTAALPLKQGLNPSRYGSFSREQFAYFFIYKAR
NPRKEQTLFEFAQVPVRLSAQIRQDENALERYARELAKDQGLEFIRIER
SKILKNQLIEIDGDRLCITGKEEVRNACELAFAQDEMRVIRMLVSEKPV
SRECVISLFNRILLHGDQASRRLSKQLKLALLSEAFSEASDNVQRNVVL
GLIAIFNGSTNMVNLSDIGGSKFAGNVRIKYKKELASPKVNVHLIDQSV
TGMFERRTKIGL
SEQ ID NO: 317
MENKQYYIGLDVGTNSVGWAVTDTSYNLLRAKGKDMWGARLFEKANTAA
ERRTKRTSRRRSEREKARKAMLKELFADEINRVDPSFFIRLEESKFFLD
DRSENNRQRYTLFNDATFTDKDYYEKYKTIFHLRSALINSDEKFDVRLV
FLAILNLFSHRGHFLNASLKGDGDIQGMDVFYNDLVESCEYFEIELPRI
TNIDNFEKILSQKGKSRTKILEELSEELSISKKDKSKYNLIKLISGLEA
SVVELYNIEDIQDENKKIKIGFRESDYEESSLKVKEIIGDEYFDLVERA
KSVHDMGLLSNIIGNSKYLCEARVEAYENHHKDLLKIKELLKKYDKKAY
NDMFRKMTDKNYSAYVGSVNSNIAKERRSVDKRKIEDLYKYIEDTALKN
IPDDNKDKIEILEKIKLGEFLKKQLTASNGVIPNQLQSRELRAILKKAE
NYLPFLKEKGEKNLTVSEMIIQLFEFQIPYYVGPLDKNPKKDNKANSWA
KIKQGGRILPWNFEDKVDVKGSRKEFIEKMVRKCTYISDEHTLPKQSLL
YEKFMVLNEINNIKIDGEKISVEAKQKIYNDLFVKGKKVSQKDIKKELI
SLNIMDKDSVLSGTDTVCNAYLSSIGKFTGVFKEEINKQSIVDMIEDII
FLKTVYGDEKRFVKEEIVEKYGDEIDKDKIKRILGFKFSNWGNLSKSFL
ELEGADVGTGEVRSIIQSLWETNFNLMELLSSRFTYMDELEKRVKKLEK
PLSEWTIEDLDDMYLSSPVKRMIWQSMKIVDEIQTVIGYAPKRIFVEMT
RSEGEKVRTKSRKDRLKELYNGIKEDSKQWVKELDSKDESYFRSKKMYL
YYLQKGRCMYSGEVIELDKLMDDNLYDIDHIYPRSFVKDDSLDNLVLVK
KEINNRKQNDPITPQIQASCQGFWKILHDQGFMSNEKYSRLTRKTQEFS
DEEKLSFINRQIVETGQATKCMAQILQKSMGEDVDVVFSKARLVSEFRH
KFELFKSRLINDFHHANDAYLNIVVGNSYFVKFTRNPANFIKDARKNPD
NPVYKYHMDRFFERDVKSKSEVAWIGQSEGNSGTIVIVKKTMAKNSPLI
TKKVEEGHGSITKETIVGVKEIKFGRNKVEKADKTPKKPNLQAYRPIKT
SDERLCNILRYGGRTSISISGYCLVEYVKKRKTIRSLEAIPVYLGRKDS
LSEEKLLNYFRYNLNDGGKDSVSDIRLCLPFISTNSLVKIDGYLYYLGG
KNDDRIQLYNAYQLKMKKEEVEYIRKIEKAVSMSKFDEIDREKNPVLTE
EKNIELYNKIQDKFENTVFSKRMSLVKYNKKDLSFGDFLKNKKSKFEEI
DLEKQCKVLYNIIFNLSNLKEVDLSDIGGSKSTGKCRCKKNITNYKEFK
LIQQSITGLYSCEKDLMTI
SEQ ID NO: 318
MKNLKEYYIGLDIGTASVGWAVTDESYNIPKFNGKKMWGVRLFDDAKTA
EERRTQRGSRRRLNRRKERINLLQDLFATEISKVDPNFFLRLDNSDLYR
EDKDEKLKSKYTLFNDKDFKDRDYHKKYPTIHHLIMDLIEDEGKKDIRL
LYLACHYLLKNRGHFIFEGQKFDTKNSFDKSINDLKIHLRDEYNIDLEF
NNEDLIEIITDTTLNKTNKKKELKNIVGDTKFLKAISAIMIGSSQKLVD
LFEDGEFEETTVKSVDFSTTAFDDKYSEYEEALGDTISLLNILKSIYDS
SILENLLKDADKSKDGNKYISKAFVKKFNKHGKDLKTLKRIIKKYLPSE
YANIFRNKSINDNYVAYTKSNITSNKRTKASKFTKQEDFYKFIKKHLDT
IKETKLNSSENEDLKLIDEMLTDIEFKTFIPKLKSSDNGVIPYQLKLME
LKKILDNQSKYYDFLNESDEYGTVKDKVESIMEFRIPYYVGPLNPDSKY
AWIKRENTKITPWNFKDIVDLDSSREEFIDRLIGRCTYLKEEKVLPKAS
LIYNEFMVLNELNNLKLNEFLITEEMKKAIFEELFKIKKKVTLKAVSNL
LKKEFNLTGDILLSGTDGDFKQGLNSYIDFKNIIGDKVDRDDYRIKIEE
IIKLIVLYEDDKTYLKKKIKSAYKNDFTDDEIKKIAALNYKDWGRLSKR
FLTGIEGVDKTTGEKGSIIYFMREYNLNLMELMSGHYTFTEEVEKLNPV
ENRELCYEMVDELYLSPSVKRMLWQSLRVVDEIKRIIGKDPKKIFIEMA
RAKEAKNSRKESRKNKLLEFYKFGKKAFINEIGEERYNYLLNEINSEEE
SKFRWDNLYLYYTQLGRCMYSLEPIDLADLKSNNIYDQDHIYPKSKIYD
DSLENRVLVKKNLNHEKGNQYPIPEKVLNKNAYGFWKILFDKGLIGQKK
YTRLTRRTPFEERELAEFIERQIVETRQATKETANLLKNICQDSEIVYS
KAENASRFRQEFDIIKCRTVNDLHHMHDAYLNIVVGNVYNTKFTKNPLN
FIKDKDNVRSYNLENMFKYDVVRGSYTAWIADDSEGNVKAATIKKVKRE
LEGKNYRFTRMSYIGTGGLYDQNLMRKGKGQIPQKENTNKSNIEKYGGY
NKASSAYFALIESDGKAGRERTLETIPIMVYNQEKYGNTEAVDKYLKDN
LELQDPKILKDKIKINSLIKLDGFLYNIKGKTGDSLSIAGSVQLIVNKE
EQKLIKKMDKFLVKKKDNKDIKVTSFDNIKEEELIKLYKTLSDKLNNGI
YSNKRNNQAKNISEALDKFKEISIEEKIDVLNQIILLFQSYNNGCNLKS
IGLSAKTGVVFIPKKLNYKECKLINQSITGLFENEVDLLNL
SEQ ID NO: 319
MGKMYYLGLDIGTNSVGYAVTDPSYHLLKFKGEPMWGAHVFAAGNQSAE
RRSFRTSRRRLDRRQQRVKLVQEIFAPVISPIDPRFFIRLHESALWRDD
VAETDKHIFFNDPTYTDKEYYSDYPTIHHLIVDLMESSEKHDPRLVYLA
VAWLVAHRGHFLNEVDKDNIGDVLSFDAFYPEFLAFLSDNGVSPWVCES
KALQATLLSRNSVNDKYKALKSLIFGSQKPEDNFDANISEDGLIQLLAG
KKVKVNKLFPQESNDASFTLNDKEDAIEEILGTLTPDECEWIAHIRRLF
DWAIMKHALKDGRTISESKVKLYEQHHHDLTQLKYFVKTYLAKEYDDIF
RNVDSETTKNYVAYSYHVKEVKGTLPKNKATQEEFCKYVLGKVKNIECS
EADKVDFDEMIQRLTDNSFMPKQVSGENRVIPYQLYYYELKTILNKAAS
YLPFLTQCGKDAISNQDKLLSIMTFRIPYFVGPLRKDNSEHAWLERKAG
KIYPWNFNDKVDLDKSEEAFIRRMTNTCTYYPGEDVLPLDSLIYEKFMI
LNEINNIRIDGYPISVDVKQQVFGLFEKKRRVTVKDIQNLLLSLGALDK
HGKLTGIDTTIHSNYNTYHHFKSLMERGVLTRDDVERIVERMTYSDDTK
RVRLWLNNNYGTLTADDVKHISRLRKHDFGRLSKMFLTGLKGVHKETGE
RASILDFMWNINDNLMQLLSECYTFSDEITKLQEAYYAKAQLSLNDFLD
SMYISNAVKRPIYRTLAVVNDIRKACGTAPKRIFIEMARDGESKKKRSV
IRREQIKNLYRSIRKDFQQEVDFLEKILENKSDGQLQSDALYLYFAQLG
RDMYTGDPIKLEHIKDQSFYNIDHIYPQSMVKDDSLDNKVLVQSEINGE
KSSRYPLDAAIRNKMKPLWDAYYNHGLISLKKYQRLTRSTPFTDDEKWD
FINRQLVETRQSTKALAILLKRKFPDTEIVYSKAGLSSDFRHEFGLVKS
RNINDLHHAKDAFLAIVTGNVYHERFNRRWFMVNQPYSVKTKTLFTHSI
KNGNFVAWNGEEDLGRIVKMLKQNKNTIHFTRFSFDRKEGLFDIQPLKA
STGLVPRKAGLDVVKYGGYDKSTAAYYLLVRFTLEDKKTQHKLMMIPVE
GLYKARIDHDKEFLTDYAQTTISEILQKDKQKVINIMFPMGTRHIKLNS
MISIDGFYLSIGGKSSKGKSVLCHAMVPLIVPHKIECYIKAMESFARKF
KENNKLRIVEKFDKITVEDNLNLYELFLQKLQHNPYNKFFSTQFDVLTN
GRSTFTKLSPEEQVQTLLNILSIFKTCRSSGCDLKSINGSAQAARIMIS
ADLTGLSKKYSDIRLVEQSASGLFVSKSQNLLEYL
SEQ ID NO: 320
MTKKEQPYNIGLDIGTSSVGWAVTNDNYDLLNIKKKNLWGVRLFEEAQT
AKETRLNRSTRRRYRRRKNRINWLNEIFSEELAKTDPSFLIRLQNSWVS
KKDPDRKRDKYNLFIDGPYTDKEYYREFPTIFHLRKELILNKDKADIRL
IYLALHNILKYRGNFTYEHQKFNISNLNNNLSKELIELNQQLIKYDISF
PDDCDWNHISDILIGRGNATQKSSNILKDFTLDKETKKLLKEVINLILG
NVAHLNTIFKTSLTKDEEKLNFSGKDIESKLDDLDSILDDDQFTVLDAA
NRIYSTITLNEILNGESYFSMAKVNQYENHAIDLCKLRDMWHTTKNEEA
VEQSRQAYDDYINKPKYGTKELYTSLKKFLKVALPTNLAKEAEEKISKG
TYLVKPRNSENGVVPYQLNKIEMEKIIDNQSQYYPFLKENKEKLLSILS
FRIPYYVGPLQSAEKNPFAWMERKSNGHARPWNFDEIVDREKSSNKFIR
RMTVTDSYLVGEPVLPKNSLIYQRYEVLNELNNIRITENLKTNPIGSRL
TVETKQRIYNELFKKYKKVTVKKLTKWLIAQGYYKNPILIGLSQKDEFN
STLTTYLDMKKIFGSSFMEDNKNYDQIEELIEWLTIFEDKQILNEKLHS
SKYSYTPDQIKKISNMRYKGWGRLSKKILMDITTETNTPQLLQLSNYSI
LDLMWATNNNFISIMSNDKYDFKNYIENHNLNKNEDQNISDLVNDIHVS
PALKRGITQSIKIVQEIVKFMGHAPKHIFIEVTRETKKSEITTSREKRI
KRLQSKLLNKANDFKPQLREYLVPNKKIQEELKKHKNDLSSERIMLYFL
QNGKSLYSEESLNINKLSDYQVDHILPRTYIPDDSLENKALVLAKENQR
KADDLLLNSNVIDRNLERWTYMLNNNMIGLKKFKNLTRRVITDKDKLGF
IHRQLVQTSQMVKGVANILDNMYKNQGTICIQARANLSTAFRKALSGQD
DIYHFKHPELVKNRNVNDFHHAQDAYLASFLGTYRLRRFPTNEMLLMNG
EYNKFYGQVKELYSKKKKLPDSRKNGFIISPLVNGTTQYDRNTGEIIWN
VGFRDKILKIFNYHQCNVTRKTEIKTGQFYDQTIYSPKNPKYKKLIAQK
KDMDPNIYGGFSGDNKSSITIVKIDNNKIKPVAIPIRLINDLKDKKTLQ
NWLEENVKHKKSIQIIKNNVPIGQIIYSKKVGLLSLNSDREVANRQQLI
LPPEHSALLRLLQIPDEDLDQILAFYDKNILVEILQELITKMKKFYPFY
KGEREFLIANIENFNQATTSEKVNSLEELITLLHANSTSAHLIFNNIEK
KAFGRKTHGLTLNNTDFIYQSVTGLYETRIHIE
SEQ ID NO: 321
MTKFNKNYSIGLDIGVSSVGYAVVTEDYRVPAFKFKVLGNTEKEKIKKN
LIGSTTFVSAQPAKGTRVFRVNRRRIDRRNHRITYLRDIFQKEIEKVDK
NFYRRLDESFRVLGDKSEDLQIKQPFFGDKELETAYHKKYPTIYHLRKH
LADADKNSPVADIREVYMAISHILKYRGHFLTLDKINPNNINMQNSWID
FIESCQEVFDLEISDESKNIADIFKSSENRQEKVKKILPYFQQELLKKD
KSIFKQLLQLLFGLKTKFKDCFELEEEPDLNFSKENYDENLENFLGSLE
EDFSDVFAKLKVLRDTILLSGMLTYTGATHARFSATMVERYEEHRKDLQ
RFKFFIKQNLSEQDYLDIFGRKTQNGFDVDKETKGYVGYITNKMVLTNP
QKQKTIQQNFYDYISGKITGIEGAEYFLNKISDGTFLRKLRTSDNGAIP
NQIHAYELEKIIERQGKDYPFLLENKDKLLSILTFKIPYYVGPLAKGSN
SRFAWIKRATSSDILDDNDEDTRNGKIRPWNYQKLINMDETRDAFITNL
IGNDIILLNEKVLPKRSLIYEEVMLQNELTRVKYKDKYGKAHFFDSELR
QNIINGLFKNNSKRVNAKSLIKYLSDNHKDLNAIEIVSGVEKGKSFNST
LKTYNDLKTIFSEELLDSEIYQKELEEIIKVITVFDDKKSIKNYLTKFF
GHLEILDEEKINQLSKLRYSGWGRYSAKLLLDIRDEDTGFNLLQFLRND
EENRNLTKLISDNTLSFEPKIKDIQSKSTIEDDIFDEIKKLAGSPAIKR
GILNSIKIVDELVQIIGYPPHNIVIEMARENMTTEEGQKKAKTRKTKLE
SALKNIENSLLENGKVPHSDEQLQSEKLYLYYLQNGKDMYTLDKTGSPA
PLYLDQLDQYEVDHIIPYSFLPIDSIDNKVLTHRENNQQKLNNIPDKET
VANMKPFWEKLYNAKLISQTKYQRLTTSERTPDGVLTESMKAGFIERQL
VETRQIIKHVARILDNRFSDTKIITLKSQLITNFRNTFHIAKIRELNDY
HHAHDAYLAVVVGQTLLKVYPKLAPELIYGHHAHFNRHEENKATLRKHL
YSNIMRFFNNPDSKVSKDIWDCNRDLPIIKDVIYNSQINFVKRTMIKKG
AFYNQNPVGKFNKQLAANNRYPLKTKALCLDTSIYGGYGPMNSALSIII
IAERFNEKKGKIETVKEFHDIFIIDYEKFNNNPFQFLNDTSENGFLKKN
NINRVLGFYRIPKYSLMQKIDGIRMLFESKSNLHKATQFKLIKTQNELF
FHMKRLLTKSNLMDLKSKSAIKESQNFILKHKEEFDNISNQLSAFSQKM
LGNTTSLKNLIKGYNERKIKEIDIRDETIKYFYDNFIKMFSFVKSGAPK
DINDFFDNKCTVARMRPKPDKKLLNATLIHQSITGLYETRIDLSKLGED
SEQ ID NO: 322
MKQEYFLGLDMGTGSLGWAVTDSTYQVMRKHGKALWGTRLFESASTAEE
RRMFRTARRRLDRRNWRIQVLQEIFSEEISKVDPGFFLRMKESKYYPED
KRDAEGNCPELPYALFVDDNYTDKNYHKDYPTIYHLRKMLMETTEIPDI
RLVYLVLHHMMKHRGHFLLSGDISQIKEFKSTFEQLIQNIQDEELEWHI
SLDDAAIQFVEHVLKDRNLTRSTKKSRLIKQLNAKSACEKAILNLLSGG
TVKLSDIFNNKELDESERPKVSFADSGYDDYIGIVEAELAEQYYIIASA
KAVYDWSVLVEILGNSVSISEAKIKVYQKHQADLKTLKKIVRQYMTKED
YKRVFVDTEEKLNNYSAYIGMTKKNGKKVDLKSKQCTQADFYDFLKKNV
IKVIDHKEITQEIESEIEKENFLPKQVTKDNGVIPYQVHDYELKKILDN
LGTRMPFIKENAEKIQQLFEFRIPYYVGPLNRVDDGKDGKFTWSVRKSD
ARIYPWNFTEVIDVEASAEKFIRRMTNKCTYLVGEDVLPKDSLVYSKFM
VLNELNNLRLNGEKISVELKQRIYEELFCKYRKVIRKKLERYLVIEGIA
KKGVEITGIDGDFKASLTAYHDFKERLTDVQLSQRAKEAIVLNVVLFGD
DKKLLKQRLSKMYPNLTTGQLKGICSLSYQGWGRLSKTFLEEITVPAPG
TGEVWNIMTALWQTNDNLMQLLSRNYGFTNEVEEFNTLKKETDLSYKTV
DELYVSPAVKRQIWQTLKVVKEIQKVMGNAPKRVFVEMAREKQEGKRSD
SRKKQLVELYRACKNEERDWITELNAQSDQQLRSDKLFLYYIQKGRCMY
SGETIQLDELWDNTKYDIDHIYPQSKTMDDSLNNRVLVKKNYNAIKSDT
YPLSLDIQKKMMSFWKMLQQQGFITKEKYVRLVRSDELSADELAGFIER
QIVETRQSTKAVATILKEALPDTEIVYVKAGNVSNFRQTYELLKVREMN
DLHHAKDAYLNIVVGNAYFVKFTKNAAWFIRNNPGRSYNLKRMFEFDIE
RSGEIAWKAGNKGSIVTVKKVMQKNNILVTRKAYEVKGGLFDQQIMKKG
KGQVPIKGNDERLADIEKYGGYNKAAGTYFMLVKSLDKKGKEIRTIEFV
PLYLKNQIEINHESAIQYLAQERGLNSPEILLSKIKIDTLFKVDGFKMW
LSGRTGNQLIFKGANQLILSHQEAAILKGVVKYVNRKNENKDAKLSERD
GMTEEKLLQLYDTFLDKLSNTVYSIRLSAQIKTLTEKRAKFIGLSNEDQ
CIVLNEILHMFQCQSGSANLKLIGGPGSAGILVMNNNITACKQISVINQ
SPTGIYEKEIDLIKL
SEQ ID NO: 323
MKKPYSIGLDIGTNSVGWAVVTDDYKVPAKKMKVLGNTDKSHIEKNLLG
ALLFDSGNTAEDRRLKRTARRRYTRRRNRILYLQEIFSEEMGKVDDSFF
HRLEDSFLVTEDKRGERHPIFGNLEEEVKYHENFPTIYHLRQYLADNPE
KVDLRLVYLALAHIIKFRGHFLIEGKFDTRNNDVQRLFQEFLAVYDNTF
ENSSLQEQNVQVEEILTDKISKSAKKDRVLKLFPNEKSNGRFAEFLKLI
VGNQADFKKHFELEEKAPLQFSKDTYEEELEVLLAQIGDNYAELFLSAK
KLYDSILLSGILTVTDVGTKAPLSASMIQRYNEHQMDLAQLKQFIRQKL
SDKYNEVFSDVSKDGYAGYIDGKINQEAFYKYLKGLLNKIEGSGYFLDK
IEREDFLRKQRTFDNGSIPHQIHLQEMRAIIRRQAEFYPFLADNQDRIE
KLLTFRIPYYVGPLARGKSDFAWLSRKSADKITPWNFDEIVDKESSAEA
FINRMTNYDLYLPNQKVLPKHSLLYEKFTVYNELTKVKYKTEQGKTAFF
DANMKQEIFDGVFKVYRKVTKDKLMDFLEKEFDEFRIVDLTGLDKENKV
FNASYGTYHDLCKILDKDFLDNSKNEKILEDIVLTLTLFEDREMIRKRL
ENYSDLLTKEQVKKLERRHYTGWGRLSAELIHGIRNKESRKTILDYLID
DGNSNRNFMQLINDDALSFKEEIAKAQVIGETDNLNQVVSDIAGSPAIK
KGILQSLKIVDELVKIMGHQPENIVVEMARENQFTNQGRRNSQQRLKGL
TDSIKEFGSQILKEHPVENSQLQNDRLFLYYLQNGRDMYTGEELDIDYL
SQYDIDHIIPQAFIKDNSIDNRVLTSSKENRGKSDDVPSKDVVRKMKSY
WSKLLSAKLITQRKFDNLTKAERGGLTDDDKAGFIKRQLVETRQITKHV
ARILDERFNTETDENNKKIRQVKIVTLKSNLVSNFRKEFELYKVREIND
YHHAHDAYLNAVIGKALLGVYPQLEPEFVYGDYPHFHGHKENKATAKKF
FYSNIMNFFKKDDVRTDKNGEIIWKKDEHISNIKKVLSYPQVNIVKKVE
EQTGGFSKESILPKGNSDKLIPRKTKKFYWDTKKYGGFDSPIVAYSILV
IADIEKGKSKKLKTVKALVGVTIMEKMTFERDPVAFLERKGYRNVQEEN
IIKLPKYSLFKLENGRKRLLASARELQKGNEIVLPNHLGTLLYHAKNIH
KVDEPKHLDYVDKHKDEFKELLDVVSNFSKKYTLAEGNLEKIKELYAQN
NGEDLKELASSFINLLTFTAIGAPATFKFFDKNIDRKRYTSTTEILNAT
LIHQSITGLYETRIDLNKLGGD
SEQ ID NO: 324
[sequence omitted]
SEQ ID NO: 325
MTKPYSIGLDIGTNSVGWAVTTDNYKVPSKKMKVLGNTSKKYIKKNLLG
VLLFDSGITAEGRRLKRTARRRYTRRRNRILYLQEIFSTEMATLDDAFF
QRLDDSFLVPDDKRDSKYPIFGNLVEEKAYHDEFPTIYHLRKYLADSTK
KADLRLVYLALAHMIKYRGHFLIEGEFNSKNNDIQKNFQDFLDTYNAIF
ESDLSLENSKQLEEIVKDKISKLEKKDRILKLFPGEKNSGIFSEFLKLI
VGNQADFRKCFNLDEKASLHFSKESYDEDLETLLGYIGDDYSDVFLKAK
KLYDAILLSGFLTVTDNETEAPLSSAMIKRYNEHKEDLALLKEYIRNIS
LKTYNEVFKDDTKNGYAGYIDGKTNQEDFYVYLKKLLAEFEGADYFLEK
IDREDFLRKQRTFDNGSIPYQIHLQEMRAILDKQAKFYPFLAKNKERIE
KILTFRIPYYVGPLARGNSDFAWSIRKRNEKITPWNFEDVIDKESSAEA
FINRMTSFDLYLPEEKVLPKHSLLYETFNVYNELTKVRFIAESMRDYQF
LDSKQKKDIVRLYFKDKRKVTDKDIIEYLHAIYGYDGIELKGIEKQFNS
SLSTYHDLLNIINDKEFLDDSSNEAIIEEIIHTLTIFEDREMIKQRLSK
FENIFDKSVLKKLSRRHYTGWGKLSAKLINGIRDEKSGNTILDYLIDDG
ISNRNFMQLIHDDALSFKKKIQKAQIIGDEDKGNIKEVVKSLPGSPAIK
KGILQSIKIVDELVKVMGGRKPESIVVEMARENQYTNQGKSNSQQRLKR
LEKSLKELGSKILKENIPAKLSKIDNNALQNDRLYLYYLQNGKDMYTGD
DLDIDRLSNYDIDHIIPQAFLKDNSIDNKVLVSSASNRGKSDDVPSLEV
VKKRKTFWYQLLKSKLISQRKFDNLTKAERGGLSPEDKAGFIQRQLVET
RQITKHVARLLDEKFNNKKDENNRAVRTVKIITLKSTLVSQFRKDFELY
KVREINDFHHAHDAYLNAVVASALLKKYPKLEPEFVYGDYPKYNSFRER
KSATEKVYFYSNIMNIFKKSISLADGRVIERPLIEVNEETGESVWNKES
DLATVRRVLSYPQVNVVKKVEEQNHGLDRGKPKGLFNANLSSKPKPNSN
ENLVGAKEYLDPKKYGGYAGISNSFTVLVKGTIEKGAKKKITNVLEFQG
ISILDRINYRKDKLNFLLEKGYKDIELIIELPKYSLFELSDGSRRMLAS
ILSTNNKRGEIHKGNQIFLSQKFVKLLYHAKRISNTINENHRKYVENHK
KEFEELFYYILEFNENYVGAKKNGKLLNSAFQSWQNHSIDELCSSFIGP
TGSERKGLFELTSRGSAADFEFLGVKIPRYRDYTPSSLLKDATLIHQSV
TGLYETRIDLAKLGEG
SEQ ID NO: 326
MKKQKFSDYYLGFDIGTNSVGWCVTDLDYNVLRFNKKDMWGSRLFDEAK
TAAERRVQRNSRRRLKRRKWRLNLLEEIFSDEIMKIDSNFFRRLKESSL
WLEDKNSKEKFTLFNDDNYKDYDFYKQYPTIFHLRDELIKNPEKKDIRL
IYLALHSIFKSRGHFLFEGQNLKEIKNFETLYNNLISFLEDNGINKSID
KDNIEKLEKIICDSGKGLKDKEKEFKGIFNSDKQLVAIFKLSVGSSVSL
NDLFDTDEYKKEEVEKEKISFREQIYEDDKPIYYSILGEKIELLDIAKS
FYDFMVLNNILSDSNYISEAKVKLYEEHKKDLKNLKYIIRKYNKENYDK
LFKDKNENNYPAYIGLNKEKDKKEVVEKSRLKIDDLIKVIKGYLPKPER
IEEKDKTIFNEILNKIELKTILPKQRISDNGTLPYQIHEVELEKILENQ
SKYYDFLNYEENGVSTKDKLLKTFKFRIPYYVGPLNSYHKDKGGNSWIV
RKEEGKILPWNFEQKVDIEKSAEEFIKRMTNKCTYLNGEDVIPKDSFLY
SEYIILNELNKVQVNDEFLNEENKRKIIDELFKENKKVSEKKFKEYLLV
NQIANRTVELKGIKDSFNSNYVSYIKFKDIFGEKLNLDIYKEISEKSIL
WKCLYGDDKKIFEKKIKNEYGDILNKDEIKKINSFKFNTWGRLSEKLLT
GIEFINLETGECYSSVMEALRRTNYNLMELLSSKFTLQESIDNENKEMN
EVSYRDLIEESYVSPSLKRAILQTLKIYEEIKKITGRVPKKVFIEMARG
GDESMKNKKIPARQEQLKKLYDSCGNDIANFSIDIKEMKNSLSSYDNNS
LRQKKLYLYYLQFGKCMYTGREIDLDRLLQNNDTYDIDHIYPRSKVIKD
DSFDNLVLVLKNENAEKSNEYPVKKEIQEKMKSFWRFLKEKNFISDEKY
KRLTGKDDFELRGFMARQLVNVRQTTKEVGKILQQIEPEIKIVYSKAEI
ASSFREMFDFIKVRELNDTHHAKDAYLNIVAGNVYNTKFTEKPYRYLQE
IKENYDVKKIYNYDIKNAWDKENSLEIVKKNMEKNTVNITRFIKEEKGE
LFNLNPIKKGETSNEIISIKPKLYDGKDNKLNEKYGYYTSLKAAYFIYV
EHEKKNKKVKTFERITRIDSTLIKNEKNLIKYLVSQKKLLNPKIIKKIY
KEQTLIIDSYPYTFTGVDSNKKVELKNKKQLYLEKKYEQILKNALKFVE
DNQGETEENYKFIYLKKRNNNEKNETIDAVKERYNIEFNEMYDKFLEKL
SSKDYKNYINNKLYTNFLNSKEKFKKLKLWEKSLILREFLKIFNKNTYG
KYEIKDSQTKEKLFSFPEDTGRIRLGQSSLGNNKELLEESVTGLFVKKI
KL
SEQ ID NO: 327
MKNYTIGLDIGVASVGWVCIDENYKILNYNNRHAFGVHEFESAESAAGR
RLKRGMRRRYNRRKKRLQLLQSLFDSYITDSGFFSKTDSQHFWKNNNEF
ENRSLTEVLSSLRISSRKYPTIYHLRSDLIESNKKMDLRLVYLALHNLV
KYRGHFLQEGNWSEAASAEGMDDQLLELVTRYAELENLSPLDLSESQWK
AAETLLLNRNLTKTDQSKELTAMFGKEYEPFCKLVAGLGVSLHQLFPSS
EQALAYKETKTKVQLSNENVEEVMELLLEEESALLEAVQPFYQQVVLYE
LLKGETYVAKAKVSAFKQYQKDMASLKNLLDKTFGEKVYRSYFISDKNS
QREYQKSHKVEVLCKLDQFNKEAKFAETFYKDLKKLLEDKSKTSIGTTE
KDEMLRIIKAIDSNQFLQKQKGIQNAAIPHQNSLYEAEKILRNQQAHYP
FITTEWIEKVKQILAFRIPYYIGPLVKDTTQSPFSWVERKGDAPITPWN
FDEQIDKAASAEAFISRMRKTCTYLKGQEVLPKSSLTYERFEVLNELNG
IQLRTTGAESDFRHRLSYEMKCWIIDNVFKQYKTVSTKRLLQELKKSPY
ADELYDEHTGEIKEVFGTQKENAFATSLSGYISMKSILGAVVDDNPAMT
EELIYWIAVFEDREILHLKIQEKYPSITDVQRQKLALVKLPGWGRFSRL
LIDGLPLDEQGQSVLDHMEQYSSVFMEVLKNKGFGLEKKIQKMNQHQVD
GTKKIRYEDIEELAGSPALKRGIWRSVKIVEELVSIFGEPANIVLEVAR
EDGEKKRTKSRKDQWEELTKTTLKNDPDLKSFIGEIKSQGDQRFNEQRF
WLYVTQQGKCLYTGKALDIQNLSMYEVDHILPQNFVKDDSLDNLALVMP
EANQRKNQVGQNKMPLEIIEANQQYAMRTLWERLHELKLISSGKLGRLK
KPSFDEVDKDKFIARQLVETRQIIKHVRDLLDERFSKSDIHLVKAGIVS
KFRRFSEIPKIRDYNNKHHAMDALFAAALIQSILGKYGKNFLAFDLSKK
DRQKQWRSVKGSNKEFFLFKNFGNLRLQSPVTGEEVSGVEYMKHVYFEL
PWQTTKMTQTGDGMFYKESIFSPKVKQAKYVSPKTEKFVHDEVKNHSIC
LVEFTFMKKEKEVQETKFIDLKVIEHHQFLKEPESQLAKFLAEKETNSP
IIHARIIRTIPKYQKIWIEHFPYYFISTRELHNARQFEISYELMEKVKQ
LSERSSVEELKIVFGLLIDQMNDNYPIYTKSSIQDRVQKFVDTQLYDFK
SFEIGFEELKKAVAANAQRSDTFGSRISKKPKPEEVAIGYESITGLKYR
KPRSVVGTKR
SEQ ID NO: 328
MKKEIKDYFLGLDVGTGSVGWAVTDTDYKLLKANRKDLWGMRCFETAET
AEVRRLHRGARRRIERRKKRIKLLQELFSQEIAKTDEGFFQRMKESPFY
AEDKTILQENTLFNDKDFADKTYHKAYPTINHLIKAWIENKVKPDPRLL
YLACHNIIKKRGHFLFEGDFDSENQFDTSIQALFEYLREDMEVDIDADS
QKVKEILKDSSLKNSEKQSRLNKILGLKPSDKQKKAITNLISGNKINFA
DLYDNPDLKDAEKNSISFSKDDFDALSDDLASILGDSFELLLKAKAVYN
CSVLSKVIGDEQYLSFAKVKIYEKHKTDLTKLKNVIKKHFPKDYKKVFG
YNKNEKNNNNYSGYVGVCKTKSKKLIINNSVNQEDFYKFLKTILSAKSE
IKEVNDILTEIETGTFLPKQISKSNAEIPYQLRKMELEKILSNAEKHFS
FLKQKDEKGLSHSEKIIMLLTFKIPYYIGPINDNHKKFFPDRCWVVKKE
KSPSGKTTPWNFFDHIDKEKTAEAFITSRTNFCTYLVGESVLPKSSLLY
SEYTVLNEINNLQIIIDGKNICDIKLKQKIYEDLFKKYKKITQKQISTF
IKHEGICNKTDEVIILGIDKECTSSLKSYIELKNIFGKQVDEISTKNML
EEIIRWATIYDEGEGKTILKTKIKAEYGKYCSDEQIKKILNLKFSGWGR
LSRKFLETVTSEMPGFSEPVNIITAMRETQNNLMELLSSEFTFTENIKK
INSGFEDAEKQFSYDGLVKPLFLSPSVKKMLWQTLKLVKEISHITQAPP
KKIFIEMAKGAELEPARTKTRLKILQDLYNNCKNDADAFSSEIKDLSGK
IENEDNLRLRSDKLYLYYTQLGKCMYCGKPIEIGHVFDTSNYDIDHIYP
QSKIKDDSISNRVLVCSSCNKNKEDKYPLKSEIQSKQRGFWNFLQRNNF
ISLEKLNRLTRATPISDDETAKFIARQLVETRQATKVAAKVLEKMFPET
KIVYSKAETVSMFRNKFDIVKCREINDFHHAHDAYLNIVVGNVYNTKFT
NNPWNFIKEKRDNPKIADTYNYYKVFDYDVKRNNITAWEKGKTIITVKD
MLKRNTPIYTRQAACKKGELFNQTIMKKGLGQHPLKKEGPFSNISKYGG
YNKVSAAYYTLIEYEEKGNKIRSLETIPLYLVKDIQKDQDVLKSYLTDL
LGKKEFKILVPKIKINSLLKINGFPCHITGKTNDSFLLRPAVQFCCSNN
EVLYFKKIIRFSEIRSQREKIGKTISPYEDLSFRSYIKENLWKKTKNDE
IGEKEFYDLLQKKNLEIYDMLLTKHKDTIYKKRPNSATIDILVKGKEKF
KSLIIENQFEVILEILKLFSATRNVSDLQHIGGSKYSGVAKIGNKISSL
DNCILIYQSITGIFEKRIDLLKV
SEQ ID NO: 329
MEGQMKNNGNNLQQGNYYLGLDVGTSSVGWAVTDTDYNVLKFRGKSMWG
ARLFDEASTAEERRTHRGNRRRLARRKYRLLLLEQLFEKEIRKIDDNFF
VRLHESNLWADDKSKPSKFLLFNDTNFTDKDYLKKYPTIYHLRSDLIHN
STEHDIRLVFLALHHLIKYRGHFIYDNSANGDVKTLDEAVSDFEEYLNE
NDIEFNIENKKEFINVLSDKHLTKKEKKISLKKLYGDITDSENINISVL
IEMLSGSSISLSNLFKDIEFDGKQNLSLDSDIEETLNDVVDILGDNIDL
LIHAKEVYDIAVLTSSLGKHKYLCDAKVELFEKNKKDLMILKKYIKKNH
PEDYKKIFSSPTEKKNYAAYSQTNSKNVCSQEEFCLFIKPYIRDMVKSE
NEDEVRIAKEVEDKSFLTKLKGTNNSVVPYQIHERELNQILKNIVAYLP
FMNDEQEDISVVDKIKLIFKFKIPYYVGPLNIKSTRSWVYRSDEKIYPW
NFSNVIDLDKTAHEFMNRLIGRCTYINDPVLPMDSLLYSKYNVLNEINP
IKVNGKAIPVEVKQAIYTDLFENSKKKVTRKSIYIYLLKNGYIEKEDIV
SGIDIEIKSKLKSHHDFTQIVQENKCTPEEIERIIKGILVYSDDKSMLR
RWLKNNIKGLSENDVKYLAKLNYKEWGRLSKTLLTDIYTINPEDGEACS
ILDIMWNTNATLMEILSNEKYQFKQNIENYKAENYDEKQNLHEELDDMY
ISPAARRSIWQALRIVDEIVDIKKSAPKKIFIEMAREKKSAMKKKRTES
RKDTLLELYKSCKSQADGFYDEELFEKLSNESNSRLRRDQLYLYYTQMG
RSMYTGKRIDFDKLINDKNTYDIDHIYPRSKIKDDSITNRVLVEKDING
EKTDIYPISEDIRQKMQPFWKILKEKGLINEEKYKRLTRNYELTDEELS
SFVARQLVETQQSTKALATLLKKEYPSAKIVYSKAGNVSEFRNRKDKEL
PKFREINDLHHAKDAYLNIVVGNVYDTKFTEKFFNNIRNENYSLKRVFD
FSVPGAWDAKGSTFNTIKKYMAKNNPIIAFAPYEVKGELFDQQIVPKGK
GQFPIKQGKDIEKYGGYNKLSSAFLFAVEYKGKKARERSLETVYIKDVE
LYLQDPIKYCESVLGLKEPQIIKPKILMGSLFSINNKKLVVTGRSGKQY
VCHHIYQLSINDEDSQYLKNIAKYLQEEPDGNIERQNILNITSVNNIKL
FDVLCTKFNSNTYEIILNSLKNDVNEGREKFSELDILEQCNILLQLLKA
FKCNRESSNLEKLNNKKQAGVIVIPHLFTKCSVFKVIHQSITGLFEKEM
DLLK
SEQ ID NO: 330
MGRKPYILSLDIGTGSVGYACMDKGFNVLKYHDKDALGVYLFDGALTAQ
ERRQFRTSRRRKNRRIKRLGLLQELLAPLVQNPNFYQFQRQFAWKNDNM
DFKNKSLSEVLSFLGYESKKYPTIYHLQEALLLKDEKFDPELIYMALYH
LVKYRGHFLFDHLKIENLTNNDNMHDFVELIETYENLNNIKLNLDYEKT
KVIYEILKDNEMTKNDRAKRVKNMEKKLEQFSIMLLGLKFNEGKLFNHA
DNAEELKGANQSHTFADNYEENLTPFLTVEQSEFIERANKIYLSLTLQD
ILKGKKSMAMSKVAAYDKFRNELKQVKDIVYKADSTRTQFKKIFVSSKK
SLKQYDATPNDQTFSSLCLFDQYLIRPKKQYSLLIKELKKIIPQDSELY
FEAENDTLLKVLNTTDNASIPMQINLYEAETILRNQQKYHAEITDEMIE
KVLSLIQFRIPYYVGPLVNDHTASKFGWMERKSNESIKPWNFDEVVDRS
KSATQFIRRMTNKCSYLINEDVLPKNSLLYQEMEVLNELNATQIRLQTD
PKNRKYRMMPQIKLFAVEHIFKKYKTVSHSKFLEIMLNSNHRENFMNHG
EKLSIFGTQDDKKFASKLSSYQDMTKIFGDIEGKRAQIEEIIQWITIFE
DKKILVQKLKECYPELTSKQINQLKKLNYSGWGRLSEKLLTHAYQGHSI
IELLRHSDENFMEILTNDVYGFQNFIKEENQVQSNKIQHQDIANLTTSP
ALKKGIWSTIKLVRELTSIFGEPEKIIMEFATEDQQKGKKQKSRKQLWD
DNIKKNKLKSVDEYKYIIDVANKLNNEQLQQEKLWLYLSQNGKCMYSGQ
SIDLDALLSPNATKHYEVDHIFPRSFIKDDSIDNKVLVIKKMNQTKGDQ
VPLQFIQQPYERIAYWKSLNKAGLISDSKLHKLMKPEFTAMDKEGFIQR
QLVETRQISVHVRDFLKEEYPNTKVIPMKAKMVSEFRKKFDIPKIRQMN
DAHHAIDAYLNGVVYHGAQLAYPNVDLFDFNFKWEKVREKWKALGEFNT
KQKSRELFFFKKLEKMEVSQGERLISKIKLDMNHFKINYSRKLANIPQQ
FYNQTAVSPKTAELKYESNKSNEVVYKGLTPYQTYVVAIKSVNKKGKEK
MEYQMIDHYVFDFYKFQNGNEKELALYLAQRENKDEVLDAQIVYSLNKG
DLLYINNHPCYFVSRKEVINAKQFELTVEQQLSLYNVMNNKETNVEKLL
IEYDFIAEKVINEYHHYLNSKLKEKRVRTFFSESNQTHEDFIKALDELF
KVVTASATRSDKIGSRKNSMTHRAFLGKGKDVKIAYTSISGLKTTKPKS
LFKLAESRNEL
SEQ ID NO: 331
MAKILGLDLGTNSIGWAVVERENIDFSLIDKGVRIFSEGVKSEKGIESS
RAAERTGYRSARKIKYRRKLRKYETLKVLSLNRMCPLSIEEVEEWKKSG
FKDYPLNPEFLKWLSTDEESNVNPYFFRDRASKHKVSLFELGRAFYHIA
QRRGFLSNRLDQSAEGILEEHCPKIEAIVEDLISIDEISTNITDYFFET
GILDSNEKNGYAKDLDEGDKKLVSLYKSLLAILKKNESDFENCKSEIIE
RLNKKDVLGKVKGKIKDISQAMLDGNYKTLGQYFYSLYSKEKIRNQYTS
REEHYLSEFITICKVQGIDQINEEEKINEKKFDGLAKDLYKAIFFQRPL
KSQKGLIGKCSFEKSKSRCAISHPDFEEYRMWTYLNTIKIGTQSDKKLR
FLTQDEKLKLVPKFYRKNDFNFDVLAKELIEKGSSFGFYKSSKKNDFFY
WFNYKPTDTVAACQVAASLKNAIGEDWKTKSFKYQTINSNKEQVSRTVD
YKDLWHLLTVATSDVYLYEFAIDKLGLDEKNAKAFSKTKLKKDFASLSL
SAINKILPYLKEGLLYSHAVFVANIENIVDENIWKDEKQRDYIKTQISE
IIENYTLEKSRFEIINGLLKEYKSENEDGKRVYYSKEAEQSFENDLKKK
LVLFYKSNEIENKEQQETIFNELLPIFIQQLKDYEFIKIQRLDQKVLIF
LKGKNETGQIFCTEEKGTAEEKEKKIKNRLKKLYHPSDIEKFKKKIIKD
EFGNEKIVLGSPLTPSIKNPMAMRALHQLRKVLNALILEGQIDEKTIIH
IEMARELNDANKRKGIQDYQNDNKKFREDAIKEIKKLYFEDCKKEVEPT
EDDILRYQLWMEQNRSEIYEEGKNISICDIIGSNPAYDIEHTIPRSRSQ
DNSQMNKTLCSQRFNREVKKQSMPIELNNHLEILPRIAHWKEEADNLTR
EIEIISRSIKAAATKEIKDKKIRRRHYLTLKRDYLQGKYDRFIWEEPKV
GFKNSQIPDTGIITKYAQAYLKSYFKKVESVKGGMVAEFRKIWGIQESF
IDENGMKHYKVKDRSKHTHHTIDAITIACMTKEKYDVLAHAWTLEDQQN
KKEARSIIEASKPWKTFKEDLLKIEEEILVSHYTPDNVKKQAKKIVRVR
GKKQFVAEVERDVNGKAVPKKAASGKTIYKLDGEGKKLPRLQQGDTIRG
SLHQDSIYGAIKNPLNTDEIKYVIRKDLESIKGSDVESIVDEVVKEKIK
EAIANKVLLLSSNAQQKNKLVGTVWMNEEKRIAINKVRIYANSVKNPLH
IKEHSLLSKSKHVHKQKVYGQNDENYAMAIYELDGKRDFELINIFNLAK
LIKQGQGFYPLHKKKEIKGKIVFVPIEKRNKRDVVLKRGQQVVFYDKEV
ENPKDISEIVDFKGRIYIIEGLSIQRIVRPSGKVDEYGVIMLRYFKEAR
KADDIKQDNFKPDGVFKLGENKPTRKMNHQFTAFVEGIDFKVLPSGKFE
KI
SEQ ID NO: 332
MEFKKVLGLDIGINSIGCALLSLPKSIQDYGKGGRLEWLTSRVIPLDAD
YMKAFIDGKNGLPQVITPAGKRRQKRGSRRLKHRYKLRRSRLIRVFKTL
NWLPEDFPLDNPKRIKETISTEGKFSFRISDYVPISDESYREFYREFGY
PENEIEQVIEEINFRRKTKGKNKNPMIKLLPEDWVVYYLRKKALIKPTT
KEELIRIIYLFNQRRGFKSSRKDLTETAILDYDEFAKRLAEKEKYSAEN
YETKFVSITKVKEVVELKTDGRKGKKRFKVILEDSRIEPYEIERKEKPD
WEGKEYTFLVTQKLEKGKFKQNKPDLPKEEDWALCTTALDNRMGSKHPG
EFFFDELLKAFKEKRGYKIRQYPVNRWRYKKELEFIWTKQCQLNPELNN
LNINKEILRKLATVLYPSQSKFFGPKIKEFENSDVLHIISEDIIYYQRD
LKSQKSLISECRYEKRKGIDGEIYGLKCIPKSSPLYQEFRIWQDIHNIK
VIRKESEVNGKKKINIDETQLYINENIKEKLFELFNSKDSLSEKDILEL
ISLNIINSGIKISKKEEETTHRINLFANRKELKGNETKSRYRKVFKKLG
FDGEYILNHPSKLNRLWHSDYSNDYADKEKTEKSILSSLGWKNRNGKWE
KSKNYDVFNLPLEVAKAIANLPPLKKEYGSYSALAIRKMLVVMRDGKYW
QHPDQIAKDQENTSLMLFDKNLIQLTNNQRKVLNKYLLTLAEVQKRSTL
IKQKLNEIEHNPYKLELVSDQDLEKQVLKSFLEKKNESDYLKGLKTYQA
GYLIYGKHSEKDVPIVNSPDELGEYIRKKLPNNSLRNPIVEQVIRETIF
IVRDVWKSFGIIDEIHIELGRELKNNSEERKKTSESQEKNFQEKERARK
LLKELLNSSNFEHYDENGNKIFSSFTVNPNPDSPLDIEKFRIWKNQSGL
TDEELNKKLKDEKIPTEIEVKKYILWLTQKCRSPYTGKIIPLSKLFDSN
VYEIEHIIPRSKMKNDSTNNLVICELGVNKAKGDRLAANFISESNGKCK
FGEVEYILLKYGDYLQYCKDTFKYQKAKYKNLLATEPPEDFIERQINDT
RYIGRKLAELLTPVVKDSKNIIFTIGSITSELKITWGLNGVWKDILRPR
FKRLESIINKKLIFQDEDDPNKYHFDLSINPQLDKEGLKRLDHRHHALD
ATIIAATTREHVRYLNSLNAADNDEEKREYFLSLCNHKIRDFKLPWENF
TSEVKSKLLSCVVSYKESKPILSDPFNKYLKWEYKNGKWQKVFAIQIKN
DRWKAVRRSMFKEPIGTVWIKKIKEVSLKEAIKIQAIWEEVKNDPVRKK
KEKYIYDDYAQKVIAKIVQELGLSSSMRKQDDEKLNKFINEAKVSAGVN
KNLNTINKTIYNLEGRFYEKIKVAEYVLYKAKRMPLNKKEYIEKLSLQK
MFNDLPNFILEKSILDNYPEILKELESDNKYIIEPHKKNNPVNRLLLEH
ILEYHNNPKEAFSTEGLEKLNKKAINKIGKPIKYITRLDGDINEEEIFR
GAVFETDKGSNVYFVMYENNQTKDREFLKPNPSISVLKAIEHKNKIDFF
APNRLGFSRIILSPGDLVYVPINDQYVLIKDNSSNETIINWDDNEFISN
RIYQVKKFTGNSCYFLKNDIASLILSYSASNGVGEFGSQNISEYSVDDP
PIRIKDVCIKIRVDRLGNVRPL
SEQ ID NO: 333
MKHILGLDLGTNSIGWALIERNIEEKYGKIIGMGSRIVPMGAELSKFEQ
GQAQTKNADRRTNRGARRLNKRYKQRRNKLIYILQKLDMLPSQIKLKED
FSDPNKIDKITILPISKKQEQLTAFDLVSLRVKALTEKVGLEDLGKIIY
KYNQLRGYAGGSLEPEKEDIFDEEQSKDKKNKSFIAFSKIVFLGEPQEE
IFKNKKLNRRAIIVETEEGNFEGSTFLENIKVGDSLELLINISASKSGD
TITIKLPNKTNWRKKMENIENQLKEKSKEMGREFYISEFLLELLKENRW
AKIRNNTILRARYESEFEAIWNEQVKHYPFLENLDKKTLIEIVSFIFPG
EKESQKKYRELGLEKGLKYIIKNQVVFYQRELKDQSHLISDCRYEPNEK
AIAKSHPVFQEYKVWEQINKLIVNTKIEAGTNRKGEKKYKYIDRPIPTA
LKEWIFEELQNKKEITFSAIFKKLKAEFDLREGIDFLNGMSPKDKLKGN
ETKLQLQKSLGELWDVLGLDSINRQIELWNILYNEKGNEYDLTSDRTSK
VLEFINKYGNNIVDDNAEETAIRISKIKFARAYSSLSLKAVERILPLVR
AGKYFNNDFSQQLQSKILKLLNENVEDPFAKAAQTYLDNNQSVLSEGGV
GNSIATILVYDKHTAKEYSHDELYKSYKEINLLKQGDLRNPLVEQIINE
ALVLIRDIWKNYGIKPNEIRVELARDLKNSAKERATIHKRNKDNQTINN
KIKETLVKNKKELSLANIEKVKLWEAQRHLSPYTGQPIPLSDLFDKEKY
DVDHIIPISRYFDDSFTNKVISEKSVNQEKANRTAMEYFEVGSLKYSIF
TKEQFIAHVNEYFSGVKRKNLLATSIPEDPVQRQIKDTQYIAIRVKEEL
NKIVGNENVKTTTGSITDYLRNHWGLTDKFKLLLKERYEALLESEKFLE
AEYDNYKKDFDSRKKEYEEKEVLFEEQELTREEFIKEYKENYIRYKKNK
LIIKGWSKRIDHRHHAIDALIVACTEPAHIKRLNDLNKVLQDWLVEHKS
EFMPNFEGSNSELLEEILSLPENERTEIFTQIEKFRAIEMPWKGFPEQV
EQKLKEIIISHKPKDKLLLQYNKAGDRQIKLRGQLHEGTLYGISQGKEA
YRIPLTKFGGSKFATEKNIQKIVSPFLSGFIANHLKEYNNKKEEAFSAE
GIMDLNNKLAQYRNEKGELKPHTPISTVKIYYKDPSKNKKKKDEEDLSL
QKLDREKAFNEKLYVKTGDNYLFAVLEGEIKTKKTSQIKRLYDIISFFD
ATNFLKEEFRNAPDKKTFDKDLLFRQYFEERNKAKLLFTLKQGDFVYLP
NENEEVILDKESPLYNQYWGDLKERGKNIYVVQKFSKKQIYFIKHTIAD
IIKKDVEFGSQNCYETVEGRSIKENCFKLEIDRLGNIVKVIKR
SEQ ID NO: 334
MHVEIDFPHFSRGDSHLAMNKNEILRGSSVLYRLGLDLGSNSLGWFVTH
LEKRGDRHEPVALGPGGVRIFPDGRDPQSGTSNAVDRRMARGARKRRDR
FVERRKELIAALIKYNLLPDDARERRALEVLDPYALRKTALTDTLPAHH
VGRALFHLNQRRGFQSNRKTDSKQSEDGAIKQAASRLATDKGNETLGVF
FADMHLRKSYEDRQTAIRAELVRLGKDHLTGNARKKIWAKVRKRLFGDE
VLPRADAPHGVRARATITGTKASYDYYPTRDMLRDEFNAIWAGQSAHHA
TITDEARTEIEHIIFYQRPLKPAIVGKCTLDPATRPFKEDPEGYRAPWS
HPLAQRFRILSEARNLEIRDTGKGSRRLTKEQSDLVVAALLANREVKFD
KLRTLLKLPAEARFNLESDRRAALDGDQTAARLSDKKGFNKAWRGFPPE
RQIAIVARLEETEDENELIAWLEKECALDGAAAARVANTTLPDGHCRLG
LRAIKKIVPIMQDGLDEDGVAGAGYHIAAKRAGYDHAKLPTGEQLGRLP
YYGQWLQDAVVGSGDARDQKEKQYGQFPNPTVHIGLGQLRRVVNDLIDK
YGPPTEISIEFTRALKLSEQQKAERQREQRRNQDKNKARAEELAKFGRP
ANPRNLLKMRLWEELAHDPLDRKCVYTGEQISIERLLSDEVDIDHILPV
AMTLDDSPANKIICMRYANRHKRKQTPSEAFGSSPTLQGHRYNWDDIAA
RATGLPRNKRWRFDANAREEFDKRGGFLARQLNETGWLARLAKQYLGAV
TDPNQIWVVPGRLTSMLRGKWGLNGLLPSDNYAGVQDKAEEFLASTDDM
EFSGVKNRADHRHHAIDGLVTALTDRSLLWKMANAYDEEHEKFVIEPPW
PTMRDDLKAALEKMVVSHKPDHGIEGKLHEDSAYGFVKPLDATGLKEEE
AGNLVYRKAIESLNENEVDRIRDIQLRTIVRDHVNVEKTKGVALADALR
QLQAPSDDYPQFKHGLRHVRILKKEKGDYLVPIANRASGVAYKAYSAGE
NFCVEVFETAGGKWDGEAVRRFDANKKNAGPKIAHAPQWRDANEGAKLV
MRIHKGDLIRLDHEGRARIMVVHRLDAAAGRFKLADHNETGNLDKRHAT
NNDIDPFRWLMASYNTLKKLAAVPVRVDELGRVWRVMPN
SEQ ID NO: 335
METTLGIDLGTNSIGLALVDQEEHQILYSGVRIFFEGINKDTIGLGEKE
ESRNATRRAKRQMRRQYFRKKLRKAKLLELLIAYDMCPLKPEDVRRWKN
WDKQQKSTVRQFPDTPAFREWLKQNPYELRKQAVTEDVTRPELGRILYQ
MIQRRGFLSSRKGKEEGKIFTGKDRMVGIDETRKNLQKQTLGAYLYDIA
PKNGEKYRFRTERVRARYTLRDMYIREFEIIWQRQAGHLGLAHEQATRK
KNIFLEGSATNVRNSKLITHLQAKYGRGHVLIEDTRITVTFQLPLKEVL
GGKIEIEEEQLKFKSNESVLFWQRPLRSQKSLLSKCVFEGRNFYDPVHQ
KWIIAGPTPAPLSHPEFEEFRAYQFINNIIYGKNEHLTAIQREAVFELM
CTESKDFNFEKIPKHLKLFEKFNFDDTTKVPACTTISQLRKLFPHPVWE
EKREEIWHCFYFYDDNILLFEKLQKDYALQINDLEKIKKIRLSESYGNV
SLKAIRRINPYLKKGYAYSTAVLLGGIRNSFGKRFEYFKEYEPEIEKAV
CRILKEKNAEGEVIRKIKDYLVHNRFGFAKNDRAFQKLYHHSQAITTQA
QKERLPETGNLRNPIVQQGLNELRRTVNKLLATCREKYGPSFKFDHIHV
EMGRELRSSKTEREKQSRQIRENEKKNEAAKVKLAEYGLKAYRDNIQKY
LLYKEIEEKGGTVCCPYTGKTLNISHTLGSDNSVQIEHIIPYSISLDDS
LANKTLCDATFNREKGELTPYDFYQKDPSPEKWGASSWEEIEDRAFRLL
PYAKAQRFIRRKPQESNEFISRQLNDTRYISKKAVEYLSAICSDVKAFP
GQLTAELRHLWGLNNILQSAPDITFPLPVSATENHREYYVITNEQNEVI
RLFPKQGETPRTEKGELLLTGEVERKVFRCKGMQEFQTDVSDGKYWRRI
KLSSSVTWSPLFAPKPISADGQIVLKGRIEKGVFVCNQLKQKLKTGLPD
GSYWISLPVISQTFKEGESVNNSKLTSQQVQLFGRVREGIFRCHNYQCP
ASGADGNFWCTLDTDTAQPAFTPIKNAPPGVGGGQIILTGDVDDKGIFH
ADDDLHYELPASLPKGKYYGIFTVESCDPTLIPIELSAPKTSKGENLIE
GNIWVDEHTGEVRFDPKKNREDQRHHAIDAIVIALSSQSLFQRLSTYNA
RRENKKRGLDSTEHFPSPWPGFAQDVRQSVVPLLVSYKQNPKTLCKISK
TLYKDGKKIHSCGNAVRGQLHKETVYGQRTAPGATEKSYHIRKDIRELK
TSKHIGKVVDITIRQMLLKHLQENYHIDITQEFNIPSNAFFKEGVYRIF
LPNKHGEPVPIKKIRMKEELGNAERLKDNINQYVNPRNNHHVMIYQDAD
GNLKEEIVSFWSVIERQNQGQPIYQLPREGRNIVSILQINDTFLIGLKE
EEPEVYRNDLSTLSKHLYRVQKLSGMYYTFRHHLASTLNNEREEFRIQS
LEAWKRANPVKVQIDEIGRITFLNGPLC
SEQ ID NO: 336
MESSQILSPIGIDLGGKFTGVCLSHLEAFAELPNHANTKYSVILIDHNN
FQLSQAQRRATRHRVRNKKRNQFVKRVALQLFQHILSRDLNAKEETALC
HYLNNRGYTYVDTDLDEYIKDETTINLLKELLPSESEHNFIDWFLQKMQ
SSEFRKILVSKVEEKKDDKELKNAVKNIKNFITGFEKNSVEGHRHRKVY
FENIKSDITKDNQLDSIKKKIPSVCLSNLLGHLSNLQWKNLHRYLAKNP
KQFDEQTFGNEFLRMLKNFRHLKGSQESLAVRNLIQQLEQSQDYISILE
KTPPEITIPPYEARTNTGMEKDQSLLLNPEKLNNLYPNWRNLIPGIIDA
HPFLEKDLEHTKLRDRKRIISPSKQDEKRDSYILQRYLDLNKKIDKFKI
KKQLSFLGQGKQLPANLIETQKEMETHFNSSLVSVLIQIASAYNKERED
AAQGIWFDNAFSLCELSNINPPRKQKILPLLVGAILSEDFINNKDKWAK
FKIFWNTHKIGRTSLKSKCKEIEEARKNSGNAFKIDYEEALNHPEHSNN
KALIKIIQTIPDIIQAIQSHLGHNDSQALIYHNPFSLSQLYTILETKRD
GFHKNCVAVTCENYWRSQKTEIDPEISYASRLPADSVRPFDGVLARMMQ
RLAYEIAMAKWEQIKHIPDNSSLLIPIYLEQNRFEFEESFKKIKGSSSD
KTLEQAIEKQNIQWEEKFQRIINASMNICPYKGASIGGQGEIDHIYPRS
LSKKHFGVIFNSEVNLIYCSSQGNREKKEEHYLLEHLSPLYLKHQFGTD
NVSDIKNFISQNVANIKKYISFHLLTPEQQKAARHALFLDYDDEAFKTI
TKFLMSQQKARVNGTQKFLGKQIMEFLSTLADSKQLQLEFSIKQITAEE
VHDHRELLSKQEPKLVKSRQQSFPSHAIDATLTMSIGLKEFPQFSQELD
NSWFINHLMPDEVHLNPVRSKEKYNKPNISSTPLFKDSLYAERFIPVWV
KGETFAIGFSEKDLFEIKPSNKEKLFTLLKTYSTKNPGESLQELQAKSK
AKWLYFPINKTLALEFLHHYFHKEIVTPDDTTVCHFINSLRYYTKKESI
TVKILKEPMPVLSVKFESSKKNVLGSFKHTIALPATKDWERLFNHPNFL
ALKANPAPNPKEFNEFIRKYFLSDNNPNSDIPNNGHNIKPQKHKAVRKV
FSLPVIPGNAGTMMRIRRKDNKGQPLYQLQTIDDTPSMGIQINEDRLVK
QEVLMDAYKTRNLSTIDGINNSEGQAYATFDNWLTLPVSTFKPEIIKLE
MKPHSKTRRYIRITQSLADFIKTIDEALMIKPSDSIDDPLNMPNEIVCK
NKLFGNELKPRDGKMKIVSTGKIVTYEFESDSTPQWIQTLYVTQLKKQP
SEQ ID NO: 337
MKKIVGLDLGTNSIGWALINAYINKEHLYGIEACGSRIIPMDAAILGNF
DKGNSISQTADRTSYRGIRRLRERHLLRRERLHRILDLLGFLPKHYSDS
LNRYGKFLNDIECKLPWVKDETGSYKFIFQESFKEMLANFTEHHPILIA
NNKKVPYDWTIYYLRKKALTQKISKEELAWILLNFNQKRGYYQLRGEEE
ETPNKLVEYYSLKVEKVEDSGERKGKDTWYNVHLENGMIYRRTSNIPLD
WEGKTKEFIVTTDLEADGSPKKDKEGNIKRSFRAPKDDDWTLIKKKTEA
DIDKIKMTVGAYIYDTLLQKPDQKIRGKLVRTIERKYYKNELYQILKTQ
SEFHEELRDKQLYIACLNELYPNNEPRRNSISTRDFCHLFIEDIIFYQR
PLKSKKSLIDNCPYEENRYIDKESGEIKHASIKCIAKSHPLYQEFRLWQ
FIVNLRIYRKETDVDVTQELLPTEADYVTLFEWLNEKKEIDQKAFFKYP
PFGFKKTTSNYRWNYVEDKPYPCNETHAQIIARLGKAHIPKAFLSKEKE
ETLWHILYSIEDKQEIEKALHSFANKNNLSEEFIEQFKNFPPFKKEYGS
YSAKAIKKLLPLMRMGKYWSIENIDNGTRIRINKIIDGEYDENIRERVR
QKAINLTDITHFRALPLWLACYLVYDRHSEVKDIVKWKTPKDIDLYLKS
FKQHSLRNPIVEQVITETLRTVRDIWQQVGHIDEIHIELGREMKNPADK
RARMSQQMIKNENTNLRIKALLTEFLNPEFGIENVRPYSPSQQDLLRIY
EEGVLNSILELPEDIGIILGKFNQTDTLKRPTRSEILRYKLWLEQKYRS
PYTGEMIPLSKLFTPAYEIEHIIPQSRYFDDSLSNKVICESEINKLKDR
SLGYEFIKNHHGEKVELAFDKPVEVLSVEAYEKLVHESYSHNRSKMKKL
LMEDIPDQFIERQLNDSRYISKVVKSLLSNIVREENEQEAISKNVIPCT
GGITDRLKKDWGINDVWNKIVLPRFIRLNELTESTRFTSINTNNTMIPS
MPLELQKGFNKKRIDHRHHAMDAIIIACANRNIVNYLNNVSASKNTKIT
RRDLQTLLCHKDKTDNNGNYKWVIDKPWETFTQDTLTALQKITVSFKQN
LRVINKTTNHYQHYENGKKIVSNQSKGDSWAIRKSMHKETVHGEVNLRM
IKTVSFNEALKKPQAIVEMDLKKKILAMLELGYDTKRIKNYFEENKDTW
QDINPSKIKVYYFTKETKDRYFAVRKPIDTSFDKKKIKESITDTGIQQI
MLRHLETKDNDPTLAFSPDGIDEMNRNILILNKGKKHQPIYKVRVYEKA
EKFTVGQKGNKRTKFVEAAKGTNLFFAIYETEEIDKDTKKVIRKRSYST
IPLNVVIERQKQGLSSAPEDENGNLPKYILSPNDLVYVPTQEEINKGEV
VMPIDRDRIYKMVDSSGITANFIPASTANLIFALPKATAEIYCNGENCI
QNEYGIGSPQSKNQKAITGEMVKEICFPIKVDRLGNIIQVGSCILTN
SEQ ID NO: 338
MSRSLTFSFDIGYASIGWAVIASASHDDADPSVCGCGTVLFPKDDCQAF
KRREYRRLRRNIRSRRVRIERIGRLLVQAQIITPEMKETSGHPAPFYLA
SEALKGHRTLAPIELWHVLRWYAHNRGYDNNASWSNSLSEDGGNGEDTE
RVKHAQDLMDKHGTATMAETICRELKLEEGKADAPMEVSTPAYKNLNTA
FPRLIVEKEVRRILELSAPLIPGLTAEIIELIAQHHPLTTEQRGVLLQH
GIKLARRYRGSLLFGQLIPRFDNRIISRCPVTWAQVYEAELKKGNSEQS
ARERAEKLSKVPTANCPEFYEYRMARILCNIRADGEPLSAEIRRELMNQ
ARQEGKLTKASLEKAISSRLGKETETNVSNYFTLHPDSEEALYLNPAVE
VLQRSGIGQILSPSVYRIAANRLRRGKSVTPNYLLNLLKSRGESGEALE
KKIEKESKKKEADYADTPLKPKYATGRAPYARTVLKKVVEEILDGEDPT
RPARGEAHPDGELKAHDGCLYCLLDTDSSVNQHQKERRLDTMTNNHLVR
HRMLILDRLLKDLIQDFADGQKDRISRVCVEVGKELTTFSAMDSKKIQR
ELTLRQKSHTDAVNRLKRKLPGKALSANLIRKCRIAMDMNWTCPFTGAT
YGDHELENLELEHIVPHSFRQSNALSSLVLTWPGVNRMKGQRTGYDFVE
QEQENPVPDKPNLHICSLNNYRELVEKLDDKKGHEDDRRRKKKRKALLM
VRGLSHKHQSQNHEAMKEIGMTEGMMTQSSHLMKLACKSIKTSLPDAHI
DMIPGAVTAEVRKAWDVFGVFKELCPEAADPDSGKILKENLRSLTHLHH
ALDACVLGLIPYIIPAHHNGLLRRVLAMRRIPEKLIPQVRPVANQRHYV
LNDDGRMMLRDLSASLKENIREQLMEQRVIQHVPADMGGALLKETMQRV
LSVDGSGEDAMVSLSKKKDGKKEKNQVKASKLVGVFPEGPSKLKALKAA
IEIDGNYGVALDPKPVVIRHIKVFKRIMALKEQNGGKPVRILKKGMLIH
LTSSKDPKHAGVWRIESIQDSKGGVKLDLQRAHCAVPKNKTHECNWREV
DLISLLKKYQMKRYPTSYTGTPR
SEQ ID NO: 339
MTQKVLGLDLGTNSIGSAVRNLDLSDDLQWQLEFFSSDIFRSSVNKESN
GREYSLAAQRSAHRRSRGLNEVRRRRLWATLNLLIKHGFCPMSSESLMR
WCTYDKRKGLFREYPIDDKDFNAWILLDFNGDGRPDYSSPYQLRRELVT
RQFDFEQPIERYKLGRALYHIAQHRGFKSSKGETLSQQETNSKPSSTDE
IPDVAGAMKASEEKLSKGLSTYMKEHNLLTVGAAFAQLEDEGVRVRNNN
DYRAIRSQFQHEIETIFKFQQGLSVESELYERLISEKKNVGTIFYKRPL
RSQRGNVGKCTLERSKPRCAIGHPLFEKFRAWTLINNIKVRMSVDTLDE
QLPMKLRLDLYNECFLAFVRTEFKFEDIRNPDIGAIKNPTVLRVLNTLR
RRVNQLLDDGVISPDETRVVVETARELNDANRKWALDTYNRIRHDENEK
IKKILEEFYPKRDGISTDDIDKARYVIDQREVDYFTGSKTYNKDIKKYK
FWLEQGGQCMYTGRTINLSNLFDPNAFDIEHTIPESLSFDSSDMNLTLC
DAHYNRFIKKNHIPTDMPNYDKAITIDGKEYPAITSQLQRWVERVERLN
RNVEYWKGQARRAQNKDRKDQCMREMHLWKMELEYWKKKLERFTVTEVT
DGFKNSQLVDTRVITRHAVLYLKSIFPHVDVQRGDVTAKFRKILGIQSV
DEKKDRSLHSHHAIDATTLTIIPVSAKRDRMLELFAKIEEINKMLSFSG
SEDRTGLIQELEGLKNKLQMEVKVCRIGHNVSEIGTFINDNIIVNHHIK
NQALTPVRRRLRKKGYIVGGVDNPRWQTGDALRGEIHKASYYGAITQFA
KDDEGKVLMKEGRPQVNPTIKFVIRRELKYKKSAADSGFASWDDLGKAI
VDKELFALMKGQFPAETSFKDACEQGIYMIKKGKNGMPDIKLHHIRHVR
CEAPQSGLKIKEQTYKSEKEYKRYFYAAVGDLYAMCCYTNGKIREFRIY
SLYDVSCHRKSDIEDIPEFITDKKGNRLMLDYKLRTGDMILLYKDNPAE
LYDLDNVNLSRRLYKINRFESQSNLVLMTHHLSTSKERGRSLGKTVDYQ
NLPESIRSSVKSLNFLIMGENRDFVIKNGKIIFNHR
SEQ ID NO: 340
MLVSPISVDLGGKNTGFFSFTDSLDNSQSGTVIYDESFVLSQVGRRSKR
HSKRNNLRNKLVKRLFLLILQEHHGLSIDVLPDEIRGLFNKRGYTYAGF
ELDEKKKDALESDTLKEFLSEKLQSIDRDSDVEDFLNQIASNAESFKDY
KKGFEAVFASATHSPNKKLELKDELKSEYGENAKELLAGLRVTKEILDE
FDKQENQGNLPRAKYFEELGEYIATNEKVKSFFDSNSLKLTDMTKLIGN
ISNYQLKELRRYFNDKEMEKGDIWIPNKLHKITERFVRSWHPKNDADRQ
RRAELMKDLKSKEIMELLTTTEPVMTIPPYDDMNNRGAVKCQTLRLNEE
YLDKHLPNWRDIAKRLNHGKFNDDLADSTVKGYSEDSTLLHRLLDTSKE
IDIYELRGKKPNELLVKTLGQSDANRLYGFAQNYYELIRQKVRAGIWVP
VKNKDDSLNLEDNSNMLKRCNHNPPHKKNQIHNLVAGILGVKLDEAKFA
EFEKELWSAKVGNKKLSAYCKNIEELRKTHGNTFKIDIEELRKKDPAEL
SKEEKAKLRLTDDVILNEWSQKIANFFDIDDKHRQRFNNLFSMAQLHTV
IDTPRSGFSSTCKRCTAENRFRSETAFYNDETGEFHKKATATCQRLPAD
TQRPFSGKIERYIDKLGYELAKIKAKELEGMEAKEIKVPIILEQNAFEY
EESLRKSKTGSNDRVINSKKDRDGKKLAKAKENAEDRLKDKDKRIKAFS
SGICPYCGDTIGDDGEIDHILPRSHTLKIYGTVFNPEGNLIYVHQKCNQ
AKADSIYKLSDIKAGVSAQWIEEQVANIKGYKTFSVLSAEQQKAFRYAL
FLQNDNEAYKKVVDWLRTDQSARVNGTQKYLAKKIQEKLTKMLPNKHLS
FEFILADATEVSELRRQYARQNPLLAKAEKQAPSSHAIDAVMAFVARYQ
KVFKDGTPPNADEVAKLAMLDSWNPASNEPLTKGLSTNQKIEKMIKSGD
YGQKNMREVFGKSIFGENAIGERYKPIVVQEGGYYIGYPATVKKGYELK
NCKVVTSKNDIAKLEKIIKNQDLISLKENQYIKIFSINKQTISELSNRY
FNMNYKNLVERDKEIVGLLEFIVENCRYYTKKVDVKFAPKYIHETKYPF
YDDWRRFDEAWRYLQENQNKTSSKDRFVIDKSSLNEYYQPDKNEYKLDV
DTQPIWDDFCRWYFLDRYKTANDKKSIRIKARKTFSLLAESGVQGKVFR
AKRKIPTGYAYQALPMDNNVIAGDYANILLEANSKTLSLVPKSGISIEK
QLDKKLDVIKKTDVRGLAIDNNSFFNADFDTHGIRLIVENTSVKVGNFP
ISAIDKSAKRMIFRALFEKEKGKRKKKTTISFKESGPVQDYLKVFLKKI
VKIQLRTDGSISNIVVRKNAADFTLSFRSEHIQKLLK
SEQ ID NO: 341
MAYRLGLDIGITSVGWAVVALEKDESGLKPVRIQDLGVRIFDKAEDSKT
GASLALPRREARSARRRTRRRRHRLWRVKRLLEQHGILSMEQIEALYAQ
RTSSPDVYALRVAGLDRCLIAEEIARVLIHIAHRRGFQSNRKSEIKDSD
AGKLLKAVQENENLMQSKGYRTVAEMLVSEATKTDAEGKLVHGKKHGYV
SNVRNKAGEYRHTVSRQAIVDEVRKIFAAQRALGNDVMSEELEDSYLKI
LCSQRNFDDGPGGDSPYGHGSVSPDGVRQSIYERMVGSCTFETGEKRAP
RSSYSFERFQLLTKVVNLRIYRQQEDGGRYPCELTQTERARVIDCAYEQ
TKITYGKLRKLLDMKDTESFAGLTYGLNRSRNKTEDTVFVEMKFYHEVR
KALQRAGVFIQDLSIETLDQIGWILSVWKSDDNRRKKLSTLGLSDNVIE
ELLPLNGSKFGHLSLKAIRKILPFLEDGYSYDVACELAGYQFQGKTEYV
KQRLLPPLGEGEVTNPVVRRALSQAIKVVNAVIRKHGSPESIHIELARE
LSKNLDERRKIEKAQKENQKNNEQIKDEIREILGSAHVTGRDIVKYKLF
KQQQEFCMYSGEKLDVTRLFEPGYAEVDHIIPYGISFDDSYDNKVLVKT
EQNRQKGNRTPLEYLRDKPEQKAKFIALVESIPLSQKKKNHLLMDKRAI
DLEQEGFRERNLSDTRYITRALMNHIQAWLLFDETASTRSKRVVCVNGA
VTAYMRARWGLTKDRDAGDKHHAADAVVVACIGDSLIQRVTKYDKFKRN
ALADRNRYVQQVSKSEGITQYVDKETGEVFTWESFDERKFLPNEPLEPW
PFFRDELLARLSDDPSKNIRAIGLLTYSETEQIDPIFVSRMPTRKVTGA
AHKETIRSPRIVKVDDNKGTEIQVVVSKVALTELKLTKDGEIKDYFRPE
DDPRLYNTLRERLVQFGGDAKAAFKEPVYKISKDGSVRTPVRKVKIQEK
LTLGVPVHGGRGIAENGGMVRIDVFAKGGKYYFVPIYVADVLKRELPNR
LATAHKPYSEWRVVDDSYQFKFSLYPNDAVMIKPSREVDITYKDRKEPV
GCRIMYFVSANIASASISLRTHDNSGELEGLGIQGLEVFEKYVVGPLGD
THPVYKERRMPFRVERKMN
SEQ ID NO: 342
MPVLSPLSPNAAQGRRRWSLALDIGEGSIGWAVAEVDAEGRVLQLTGTG
VTLFPSAWSNENGTYVAHGAADRAVRGQQQRHDSRRRRLAGLARLCAPV
LERSPEDLKDLTRIPPKADPRAIFFLRADAARRPLDGPELFRVLHHMAA
HRGIRLAELQEVDPPPESDADDAAPAATEDEDGTRRAAADERAFRRLMA
EHMHRHGTQPTCGEIMAGRLRETPAGAQPVTRARDGLRVGGGVAVPTRA
LIEQEFDAIRAIQAPRHPDLPWDSLRRLVLDQAPIAVPPATPCLFLEEL
RRRGETFQGRTITREAIDRGLTVDPLIQALRIRETVGNLRLHERITEPD
GRQRYVPRAMPELGLSHGELTAPERDTLVRALMHDPDGLAAKDGRIPYT
RLRKLIGYDNSPVCFAQERDTSGGGITVNPTDPLMARWIDGWVDLPLKA
RSLYVRDVVARGADSAALARLLAEGAHGVPPVAAAAVPAATAAILESDI
MQPGRYSVCPWAAEAILDAWANAPTEGFYDVTRGLFGFAPGEIVLEDLR
RARGALLAHLPRTMAAARTPNRAAQQRGPLPAYESVIPSQLITSLRRAH
KGRAADWSAADPEERNPFLRTWTGNAATDHILNQVRKTANEVITKYGNR
RGWDPLPSRITVELAREAKHGVIRRNEIAKENRENEGRRKKESAALDTF
CQDNTVSWQAGGLPKERAALRLRLAQRQEFFCPYCAERPKLRATDLFSP
AETEIDHVIERRMGGDGPDNLVLAHKDCNNAKGKKTPHEHAGDLLDSPA
LAALWQGWRKENADRLKGKGHKARTPREDKDFMDRVGWRFEEDARAKAE
ENQERRGRRMLHDTARATRLARLYLAAAVMPEDPAEIGAPPVETPPSPE
DPTGYTAIYRTISRVQPVNGSVTHMLRQRLLQRDKNRDYQTHHAEDACL
LLLAGPAVVQAFNTEAAQHGADAPDDRPVDLMPTSDAYHQQRRARALGR
VPLATVDAALADIVMPESDRQDPETGRVHWRLTRAGRGLKRRIDDLTRN
CVILSRPRRPSETGTPGALHNATHYGRREITVDGRTDTVVTQRMNARDL
VALLDNAKIVPAARLDAAAPGDTILKEICTEIADRHDRVVDPEGTHARR
WISARLAALVPAHAEAVARDIAELADLDALADADRTPEQEARRSALRQS
PYLGRAISAKKADGRARAREQEILTRALLDPHWGPRGLRHLIMREARAP
SLVRIRANKTDAFGRPVPDAAVWVKTDGNAVSQLWRLTSVVTDDGRRIP
LPKPIEKRIEISNLEYARLNGLDEGAGVTGNNAPPRPLRQDIDRLTPLW
RDHGTAPGGYLGTAVGELEDKARSALRGKAMRQTLTDAGITAEAGWRLD
SEGAVCDLEVAKGDTVKKDGKTYKVGVITQGIFGMPVDAAGSAPRTPED
CEKFEEQYGIKPWKAKGIPLA
SEQ ID NO: 343
MNYTEKEKLFMKYILALDIGIASVGWAILDKESETVIEAGSNIFPEASA
ADNQLRRDMRGAKRNNRRLKTRINDFIKLWENNNLSIPQFKSTEIVGLK
VRAITEEITLDELYLILYSYLKHRGISYLEDALDDTVSGSSAYANGLKL
NAKELETHYPCEIQQERLNTIGKYRGQSQIINENGEVLDLSNVFTIGAY
RKEIQRVFEIQKKYHPELTDEFCDGYMLIFNRKRKYYEGPGNEKSRTDY
GRFTTKLDANGNYITEDNIFEKLIGKCSVYPDELRAAAASYTAQEYNVL
NDLNNLTINGRKLEENEKHEIVERIKSSNTINMRKIISDCMGENIDDFA
GARIDKSGKEIFHKFEVYNKMRKALLEIGIDISNYSREELDEIGYIMTI
NTDKEAMMEAFQKSWIDLSDDVKQCLINMRKTNGALFNKWQSFSLKIMN
ELIPEMYAQPKEQMTLLTEMGVTKGTQEEFAGLKYIPVDVVSEDIFNPV
VRRSVRISFKILNAVLKKYKALDTIVIEMPRDRNSEEQKKRINDSQKLN
EKEMEYIEKKLAVTYGIKLSPSDFSSQKQLSLKLKLWNEQDGICLYSGK
TIDPNDIINNPQLFEIDHIIPRSISFDDARSNKVLVYRSENQKKGNQTP
YYYLTHSHSEWSFEQYKATVMNLSKKKEYAISRKKIQNLLYSEDITKMD
VLKGFINRNINDTSYASRLVLNTIQNFFMANEADTKVKVIKGSYTHQMR
CNLKLDKNRDESYSHHAVDAMLIGYSELGYEAYHKLQGEFIDFETGEIL
RKDMWDENMSDEVYADYLYGKKWANIRNEVVKAEKNVKYWHYVMRKSNR
GLCNQTIRGTREYDGKQYKINKLDIRTKEGIKVFAKLAFSKKDSDRERL
LVYLNDRRTFDDLCKIYEDYSDAANPFVQYEKETGDIIRKYSKKHNGPR
IDKLKYKDGEVGACIDISHKYGFEKGSKKVILESLVPYRMDVYYKEENH
SYYLVGVKQSDIKFEKGRNVIDEEAYARILVNEKMIQPGQSRADLENLG
FKFKLSFYKNDIIEYEKDGKIYTERLVSRTMPKQRNYIETKPIDKAKFE
KQNLVGLGKTKFIKKYRYDILGNKYSCSEEKFTSFC
SEQ ID NO: 344
MLRLYCANNLVLNNVQNLWKYLLLLIFDKKIIFLFKIKVILIRRYMENN
NKEKIVIGFDLGVASVGWSIVNAETKEVIDLGVRLFSEPEKADYRRAKR
TTRRLLRRKKFKREKFHKLILKNAEIFGLQSRNEILNVYKDQSSKYRNI
LKLKINALKEEIKPSELVWILRDYLQNRGYFYKNEKLTDEFVSNSFPSK
KLHEHYEKYGFFRGSVKLDNKLDNKKDKAKEKDEEEESDAKKESEELIF
SNKQWINEIVKVFENQSYLTESFKEEYLKLFNYVRPFNKGPGSKNSRTA
YGVFSTDIDPETNKFKDYSNIWDKTIGKCSLFEEEIRAPKNLPSALIFN
LQNEICTIKNEFTEFKNWWLNAEQKSEILKFVFTELFNWKDKKYSDKKF
NKNLQDKIKKYLLNFALENFNLNEEILKNRDLENDTVLGLKGVKYYEKS
NATADAALEFSSLKPLYVFIKFLKEKKLDLNYLLGLENTEILYFLDSIY
LAISYSSDLKERNEWFKKLLKELYPKIKNNNLEIIENVEDIFEITDQEK
FESFSKTHSLSREAFNHIIPLLLSNNEGKNYESLKHSNEELKKRTEKAE
LKAQQNQKYLKDNFLKEALVPLSVKTSVLQAIKIFNQIIKNFGKKYEIS
QVVIEMARELTKPNLEKLLNNATNSNIKILKEKLDQTEKFDDFTKKKFI
DKIENSVVFRNKLFLWFEQDRKDPYTQLDIKINEIEDETEIDHVIPYSK
SADDSWFNKLLVKKSTNQLKKNKTVWEYYQNESDPEAKWNKFVAWAKRI
YLVQKSDKESKDNSEKNSIFKNKKPNLKFKNITKKLFDPYKDLGFLARN
LNDTRYATKVFRDQLNNYSKHHSKDDENKLFKVVCMNGSITSFLRKSMW
RKNEEQVYRFNFWKKDRDQFFHHAVDASIIAIFSLLTKTLYNKLRVYES
YDVQRREDGVYLINKETGEVKKADKDYWKDQHNFLKIRENAIEIKNVLN
NVDFQNQVRYSRKANTKLNTQLFNETLYGVKEFENNFYKLEKVNLFSRK
DLRKFILEDLNEESEKNKKNENGSRKRILTEKYIVDEILQILENEEFKD
SKSDINALNKYMDSLPSKFSEFFSQDFINKCKKENSLILTFDAIKHNDP
KKVIKIKNLKFFREDATLKNKQAVHKDSKNQIKSFYESYKCVGFIWLKN
KNDLEESIFVPINSRVIHFGDKDKDIFDFDSYNKEKLLNEINLKRPENK
KFNSINEIEFVKFVKPGALLLNFENQQIYYISTLESSSLRAKIKLLNKM
DKGKAVSMKKITNPDEYKIIEHVNPLGINLNWTKKLENNN
SEQ ID NO: 345
MLMSKHVLGLDLGVGSIGWCLIALDAQGDPAEILGMGSRVVPLNNATKA
IEAFNAGAAFTASQERTARRTMRRGFARYQLRRYRLRRELEKVGMLPDA
ALIQLPLLELWELRERAATAGRRLTLPELGRVLCHINQKRGYRHVKSDA
AAIVGDEGEKKKDSNSAYLAGIRANDEKLQAEHKTVGQYFAEQLRQNQS
ESPTGGISYRIKDQIFSRQCYIDEYDQIMAVQRVHYPDILTDEFIRMLR
DEVIFMQRPLKSCKHLVSLCEFEKQERVMRVQQDDGKGGWQLVERRVKF
GPKVAPKSSPLFQLCCIYEAVNNIRLTRPNGSPCDITPEERAKIVAHLQ
SSASLSFAALKKLLKEKALIADQLTSKSGLKGNSTRVALASALQPYPQY
HHLLDMELETRMMTVQLTDEETGEVTEREVAVVTDSYVRKPLYRLWHIL
YSIEEREAMRRALITQLGMKEEDLDGGLLDQLYRLDFVKPGYGNKSAKF
ICKLLPQLQQGLGYSEACAAVGYRHSNSPTSEEITERTLLEKIPLLQRN
ELRQPLVEKILNQMINLVNALKAEYGIDEVRVELARELKMSREERERMA
RNNKDREERNKGVAAKIRECGLYPTKPRIQKYMLWKEAGRQCLYCGRSI
EEEQCLREGGMEVEHIIPKSVLYDDSYGNKTCACRRCNKEKGNRTALEY
IRAKGREAEYMKRINDLLKEKKISYSKHQRLRWLKEDIPSDFLERQLRL
TQYISRQAMAILQQGIRRVSASEGGVTARLRSLWGYGKILHTLNLDRYD
SMGETERVSREGEATEELHITNWSKRMDHRHHAIDALVVACTRQSYIQR
LNRLSSEFGREDKKKEDQEAQEQQATETGRLSNLERWLTQRPHFSVRTV
SDKVAEILISYRPGQRVVIRGRNIYRKKMADGREVSCVQRGVLVPRGEL
MEASFYGKILSQGRVRIVKRYPLHDLKGEVVDPHLRELITTYNQELKSR
EKGAPIPPLCLDKDKKQEVRSVRCYAKTLSLDKAIPMCFDEKGEPTAFV
KSASNHHLALYRTPKGKLVESIVTFWDAVDRARYGIPLVITHPREVMEQ
VLQRGDIPEQVLSLLPPSDWVFVDSLQQDEMVVIGLSDEELQRALEAQN
YRKISEHLYRVQKMSSSYYVFRYHLETSVADDKNTSGRIPKFHRVQSLK
AYEERNIRKVRVDLLGRISLL
SEQ ID NO: 346
MSDLVLGLDIGIGSVGVGILNKVTGEIIHKNSRIFPAAQAENNLVRRTN
RQGRRLARRKKHRRVRLNRLFEESGLITDFTKISINLNPYQLRVKGLTD
ELSNEELFIALKNMVKHRGISYLDDASDDGNSSVGDYAQIVKENSKQLE
TKTPGQIQLERYQTYGQLRGDFTVEKDGKKHRLINVFPTSAYRSEALRI
LQTQQEFNPQITDEFINRYLEILTGKRKYYHGPGNEKSRTDYGRYRTSG
ETLDNIFGILIGKCITYPDEFRAAKASYTAQEFNLLNDLNNLTVPTETK
KLSKEQKNQIINYVKNEKAMGPAKLFKYIAKLLSCDVADIKGYRIDKSG
KAEIHTFEAYRKMKTLETLDIEQMDRETLDKLAYVLTLNTEREGIQEAL
EHEFADGSFSQKQVDELVQFRKANSSIFGKGWHNFSVKLMMELIPELYE
TSEEQMTILTRLGKQKTTSSSNKTKYIDEKLLTEEIYNPVVAKSVRQAI
KIVNAAIKEYGDFDNIVIEMARETNEDDEKKAIQKIQKANKDEKDAAML
KAANQYNGKAELPHSVFHGHKQLATKIRLWHQQGERCLYTGKTISIHDL
INNSNQFEVDHILPLSITFDDSLANKVLVYATANQEKGQRTPYQALDSM
DDAWSFRELKAFVRESKTLSNKKKEYLLTEEDISKFDVRKKFIERNLVD
TRYASRVVLNALQEHFRAHKIDTKVSVVRGQFTSQLRRHWGIEKTRDTY
HHHAVDALIIAASSQLNLWKKQKNTLVSYSEDQLLDIETGELISDDEYK
ESVFKAPYQHFVDTLKSKEFEDSILFSYQVDSKFNRKISDATIYATRQA
KVGKDKADETYVLGKIKDIYTQDGYDAFMKIYKKDKSKFLMYRHDPQTF
EKVIEPILENYPNKQINEKGKEVPCNPFLKYKEEHGYIRKYSKKGNGPE
IKSLKYYDSKLGNHIDITPKDSNNKVVLQSVSPWRADVYFNKTTGKYEI
LGLKYADLQFEKGTGTYKISQEKYNDIKKKEGVDSDSEFKFTLYKNDLL
LVKDTETKEQQLFRFLSRTMPKQKHYVELKPYDKQKFEGGEALIKVLGN
VANSGQCKKGLGKSNISIYKVRTDVLGNQHIIKNEGDKPKLDF
SEQ ID NO: 347
MNAEHGKEGLLIMEENFQYRIGLDIGITSVGWAVLQNNSQDEPVRITDL
GVRIFDVAENPKNGDALAAPRRDARTTRRRLRRRRHRLERIKFLLQENG
LIEMDSFMERYYKGNLPDVYQLRYEGLDRKLKDEELAQVLIHIAKHRGF
RSTRKAETKEKEGGAVLKATTENQKIMQEKGYRTVGEMLYLDEAFHTEC
LWNEKGYVLTPRNRPDDYKHTILRSMLVEEVHAIFAAQRAHGNQKATEG
LEEAYVEIMTSQRSFDMGPGLQPDGKPSPYAMEGFGDRVGKCTFEKDEY
RAPKATYTAELFVALQKINHTKLIDEFGTGRFFSEEERKTIIGLLLSSK
ELKYGTIRKKLNIDPSLKFNSLNYSAKKEGETEEERVLDTEKAKFASMF
WTYEYSKCLKDRTEEMPVGEKADLFDRIGEILTAYKNDDSRSSRLKELG
LSGEEIDGLLDLSPAKYQRVSLKAMRKMQPYLEDGLIYDKACEAAGYDF
RALNDGNKKHLLKGEEINAIVNDITNPVVKRSVSQTIKVINAIIQKYGS
PQAVNIELAREMSKNFQDRTNLEKEMKKRQQENERAKQQIIELGKQNPT
GQDILKYRLWNDQGGYCLYSGKKIPLEELFDGGYDIDHILPYSITFDDS
YRNKVLVTAQENRQKGNRTPYEYFGADEKRWEDYEASVRLLVRDYKKQQ
KLLKKNFTEEERKEFKERNLNDTKYITRVVYNMIRQNLELEPFNHPEKK
KQVWAVNGAVTSYLRKRWGLMQKDRSTDRHHAMDAVVIACCTDGMIHKI
SRYMQGRELAYSRNFKFPDEETGEILNRDNFTREQWDEKFGVKVPLPWN
SFRDELDIRLLNEDPKNFLLTHADVQRELDYPGWMYGEEESPIEEGRYI
NYIRPLFVSRMPNHKVTGSAHDATIRSARDYETRGVVITKVPLTDLKLN
KDNEIEGYYDKDSDRLLYQALVRQLLLHGNDGKKAFAEDFHKPKADGTE
GPVVRKVKIEKKQTSGVMVRGGTGIAANGEMVRIDVFRENGKYYFVPVY
TADVVRKVLPNRAATHTKPYSEWRVMDDANFVFSLYSRDLIHVKSKKDI
KTNLVNGGLLLQKEIFAYYTGADIATASIAGFANDSNFKFRGLGIQSLE
IFEKCQVDILGNISVVRHENRQEFH
SEQ ID NO: 348
MRVLGLDAGIASLGWALIEIEESNRGELSQGTIIGAGTWMFDAPEEKTQ
AGAKLKSEQRRTFRGQRRVVRRRRQRMNEVRRILHSHGLLPSSDRDALK
QPGLDPWRIRAEALDRLLGPVELAVALGHIARHRGFKSNSKGAKTNDPA
DDTSKMKRAVNETREKLARFGSAAKMLVEDESFVLRQTPTKNGASEIVR
RFRNREGDYSRSLLRDDLAAEMRALFTAQARFQSAIATADLQTAFTKAA
FFQRPLQDSEKLVGPCPFEVDEKRAPKRGYSFELFRFLSRLNHVTLRDG
KQERTLTRDELALAAADFGAAAKVSFTALRKKLKLPETTVFVGVKADEE
SKLDVVARSGKAAEGTARLRSVIVDALGELAWGALLCSPEKLDKIAEVI
SFRSDIGRISEGLAQAGCNAPLVDALTAAASDGRFDPFTGAGHISSKAA
RNILSGLRQGMTYDKACCAADYDHTASRERGAFDVGGHGREALKRILQE
ERISRELVGSPTARKALIESIKQVKAIVERYGVPDRIHVELARDVGKSI
EEREEITRGIEKRNRQKDKLRGLFEKEVGRPPQDGARGKEELLRFELWS
EQMGRCLYTDDYISPSQLVATDDAVQVDHILPWSRFADDSYANKTLCMA
KANQDKKGRTPYEWFKAEKTDTEWDAFIVRVEALADMKGFKKRNYKLRN
AEEAAAKFRNRNLNDTRWACRLLAEALKQLYPKGEKDKDGKERRRVFSR
PGALTDRLRRAWGLQWMKKSTKGDRIPDDRHHALDAIVIAATTESLLQR
ATREVQEIEDKGLHYDLVKNVTPPWPGFREQAVEAVEKVFVARAERRRA
RGKAHDATIRHIAVREGEQRVYERRKVAELKLADLDRVKDAERNARLIE
KLRNWIEAGSPKDDPPLSPKGDPIFKVRLVTKSKVNIALDTGNPKRPGT
VDRGEMARVDVFRKASKKGKYEYYLVPIYPHDIATMKTPPIRAVQAYKP
EDEWPEMDSSYEFCWSLVPMTYLQVISSKGEIFEGYYRGMNRSVGAIQL
SAHSNSSDVVQGIGARTLTEFKKFNVDRFGRKHEVERELRTWRGETWRG
KAYI
SEQ ID NO: 349
MGNYYLGLDVGIGSIGWAVINIEKKRIEDFNVRIFKSGEIQEKNRNSRA
SQQCRRSRGLRRLYRRKSHRKLRLKNYLSIIGLTTSEKIDYYYETADNN
VIQLRNKGLSEKLTPEEIAACLIHICNNRGYKDFYEVNVEDIEDPDERN
EYKEEHDSIVLISNLMNEGGYCTPAEMICNCREFDEPNSVYRKFHNSAA
SKNHYLITRHMLVKEVDLILENQSKYYGILDDKTIAKIKDIIFAQRDFE
IGPGKNERFRRFTGYLDSIGKCQFFKDQERGSRFTVIADIYAFVNVLSQ
YTYTNNRGESVFDTSFANDLINSALKNGSMDKRELKAIAKSYHIDISDK
NSDTSLTKCFKYIKVVKPLFEKYGYDWDKLIENYTDIDNNVLNRIGIVL
SQAQTPKRRREKLKALNIGLDDGLINELTKLKLSGTANVSYKYMQGSIE
AFCEGDLYGKYQAKFNKEIPDIDENAKPQKLPPFKNEDDCEFFKNPVVF
RSINETRKLINAIIDKYGYPAAVNIETADELNKTFEDRAIDTKRNNDNQ
KENDRIVKEIIECIKCDEVHARHLIEKYKLWEAQEGKCLYSGETITKED
MLRDKDKLFEVDHIVPYSLILDNTINNKALVYAEENQKKGQRTPLMYMN
EAQAADYRVRVNTMFKSKKCSKKKYQYLMLPDLNDQELLGGWRSRNLND
TRYICKYLVNYLRKNLRFDRSYESSDEDDLKIRDHYRVFPVKSRFTSMF
RRWWLNEKTWGRYDKAELKKLTYLDHAADAIIIANCRPEYVVLAGEKLK
LNKMYHQAGKRITPEYEQSKKACIDNLYKLFRMDRRTAEKLLSGHGRLT
PIIPNLSEEVDKRLWDKNIYEQFWKDDKDKKSCEELYRENVASLYKGDP
KFASSLSMPVISLKPDHKYRGTITGEEAIRVKEIDGKLIKLKRKSISEI
TAESINSIYTDDKILIDSLKTIFEQADYKDVGDYLKKTNQHFFTTSSGK
RVNKVTVIEKVPSRWLRKEIDDNNFSLLNDSSYYCIELYKDSKGDNNLQ
GIAMSDIVHDRKTKKLYLKPDFNYPDDYYTHVMYIFPGDYLRIKSTSKK
SGEQLKFEGYFISVKNVNENSFRFISDNKPCAKDKRVSITKKDIVIKLA
VDLMGKVQGENNGKGISCGEPLSLLKEKN
SEQ ID NO: 350
MLSRQLLGASHLARPVSYSYNVQDNDVHCSYGERCFMRGKRYRIGIDVG
LNSVGLAAVEVSDENSPVRLLNAQSVIHDGGVDPQKNKEAITRKNMSGV
ARRTRRMRRRKRERLHKLDMLLGKFGYPVIEPESLDKPFEEWHVRAELA
TRYIEDDELRRESISIALRHMARHRGWRNPYRQVDSLISDNPYSKQYGE
LKEKAKAYNDDATAAEEESTPAQLVVAMLDAGYAEAPRLRWRIGSKKPD
AEGYLPVRLMQEDNANELKQIFRVQRVPADEWKPLFRSVFYAVSPKGSA
EQRVGQDPLAPEQARALKASLAFQEYRIANVITNLRIKDASAELRKLTV
DEKQSIYDQLVSPSSEDITWSDLCDFLGFKRSQLKGVGSLTEDGEERIS
SRPPRLTSVQRIYESDNKIRKPLVAWWKSASDNEHEAMIRLLSNTVDID
KVREDVAYASAIEFIDGLDDDALTKLDSVDLPSGRAAYSVETLQKLTRQ
MLTTDDDLHEARKTLFNVTDSWRPPADPIGEPLGNPSVDRVLKNVNRYL
MNCQQRWGNPVSVNIEHVRSSFSSVAFARKDKREYEKNNEKRSIFRSSL
SEQLRADEQMEKVRESDLRRLEAIQRQNGQCLYCGRTITFRTCEMDHIV
PRKGVGSTNTRTNFAAVCAECNRMKSNTPFAIWARSEDAQTRGVSLAEA
KKRVIMFTFNPKSYAPREVKAFKQAVIARLQQTEDDAAIDNRSIESVAW
MADELHRRIDWYFNAKQYVNSASIDDAEAETMKTTVSVFQGRVTASARR
AAGIEGKIHFIGQQSKTRLDRRHHAVDASVIAMMNTAAAQTLMERESLR
ESQRLIGLMFGERSWKEYPYEGTSRYESFHLWLDNMDVLLELLNDALDN
DRIAVMQSQRYVLGNSIAHDATIHPLEKVPLGSAMSADLIRRASTPALW
CALTRLPDYDEKEGLPEDSHREIRVHDTRYSADDEMGFFASQAAQIAVQ
EGSADIGSAIHHARVYRCWKTNAKGVRKYFYGMIRVFQTDLLRACHDDL
FTVPLPPQSISMRYGEPRVVQALQSGNAQYLGSLVVGDEIEMDFSSLDV
DGQIGEYLQFFSQFSGGNLAWKHWVVDGFFNQTQLRIRPRYLAAEGLAK
AFSDDVVPDGVQKIVTKQGWLPPVNTASKTAVRIVRRNAFGEPRLSSAH
HMPCSWQWRHE
SEQ ID NO: 351
MYSIGLDLGISSVGWSVIDERTGNVIDLGVRLFSAKNSEKNLERRTNRG
GRRLIRRKTNRLKDAKKILAAVGFYEDKSLKNSCPYQLRVKGLTEPLSR
GEIYKVTLHILKKRGISYLDEVDTEAAKESQDYKEQVRKNAQLLTKYTP
GQIQLQRLKENNRVKTGINAQGNYQLNVFKVSAYANELATILKTQQAFY
PNELTDDWIALFVQPGIAEEAGLIYRKRPYYHGPGNEANNSPYGRWSDF
QKTGEPATNIFDKLIGKDFQGELRASGLSLSAQQYNLLNDLTNLKIDGE
VPLSSEQKEYILTELMTKEFTRFGVNDVVKLLGVKKERLSGWRLDKKGK
PEIHTLKGYRNWRKIFAEAGIDLATLPTETIDCLAKVLTLNTEREGIEN
TLAFELPELSESVKLLVLDRYKELSQSISTQSWHRFSLKTLHLLIPELM
NATSEQNTLLEQFQLKSDVRKRYSEYKKLPTKDVLAEIYNPTVNKTVSQ
AFKVIDALLVKYGKEQIRYITIEMPRDDNEEDEKKRIKELHAKNSQRKN
DSQSYFMQKSGWSQEKFQTTIQKNRRFLAKLLYYYEQDGICAYTGLPIS
PELLVSDSTEIDHIIPISISLDDSINNKVLVLSKANQVKGQQTPYDAWM
DGSFKKINGKFSNWDDYQKWVESRHFSHKKENNLLETRNIFDSEQVEKF
LARNLNDTRYASRLVLNTLQSFFTNQETKVRVVNGSFTHTLRKKWGADL
DKTRETHHHHAVDATLCAVTSFVKVSRYHYAVKEETGEKVMREIDFETG
EIVNEMSYWEFKKSKKYERKTYQVKWPNFREQLKPVNLHPRIKFSHQVD
RKANRKLSDATIYSVREKTEVKILKSGKQKITTDEYTIGKIKDIYTLDG
WEAFKKKQDKLLMKDLDEKTYERLLSIAETTPDFQEVEEKNGKVKRVKR
SPFAVYCEENDIPAIQKYAKKNNGPLIRSLKYYDGKLNKHINITKDSQG
RPVEKTKNGRKVTLQSLKPYRYDIYQDLETKAYYTVQLYYSDLRFVEGK
YGITEKEYMKKVAEQTKGQVVRFCFSLQKNDGLEIEWKDSQRYDVRFYN
FQSANSINFKGLEQEMMPAENQFKQKPYNNGAINLNIAKYGKEGKKLRK
FNTDILGKKHYLFYEKEPKNIIK
SEQ ID NO: 352
MYFYKNKENKLNKKVVLGLDLGIASVGWCLTDISQKEDNKFPIILHGVR
LFETVDDSDDKLLNETRRKKRGQRRRNRRLFTRKRDFIKYLIDNNIIEL
EFDKNPKILVRNFIEKYINPFSKNLELKYKSVINLPIGFHNLRKAAINE
KYKLDKSELIVLLYFYLSLRGAFFDNPEDTKSKEMNKNEIEIFDKNESI
KNAEFFIDKIIEFYKISGKIRSTINLKFGHQDYLKEIKQVFEKQNIDFM
NYEKFAMEEKSFFSRIRNYSEGPGNEKSFSKYGLYANENGNPELIINEK
GQKIYTKIFKTLWESKIGKCSYDKKLYRAPKNSFSAKVFDITNKLTDWK
HKNEYISERLKRKILLSRFLNKDSKSAVEKILKEENIKFENLSEIAYNK
DDNKINLPIINAYHSLTTIFKKHLINFENYLISNENDLSKLMSFYKQQS
EKLFVFNEKGSYEINQNNNVLHIFDAISNILNKFSTIQDRIRILEGYFE
FSNLKKDVKSSEIYSEIAKLREFSGTSSLSFGAYYKFIPNLISEGSKNY
STISYEEKALQNQKNNFSHSNLFEKTWVEDLIASPTVKRSLRQTMNLLK
EIFKYSEKNNLEIEKIVVEVTRSSNNKHERKKIEGINKYRKEKYEELKK
VYDLPNENTTLLKKLWLLRQQQGYDAYSLRKIEANDVINKPWNYDIDHI
VPRSISFDDSFSNLVIVNKLDNAKKSNDLSAKQFIEKIYGIEKLKEAKE
NWGNWYLRNANGKAFNDKGKFIKLYTIDNLDEFDNSDFINRNLSDTSYI
TNALVNHLTFSNSKYKYSVVSVNGKQTSNLRNQIAFVGIKNNKETEREW
KRPEGFKSINSNDFLIREEGKNDVKDDVLIKDRSFNGHHAEDAYFITII
SQYFRSFKRIERLNVNYRKETRELDDLEKNNIKFKEKASFDNFLLINAL
DELNEKLNQMRFSRMVITKKNTQLFNETLYSGKYDKGKNTIKKVEKLNL
LDNRTDKIKKIEEFFDEDKLKENELTKLHIFNHDKNLYETLKIIWNEVK
IEIKNKNLNEKNYFKYFVNKKLQEGKISFNEWVPILDNDFKIIRKIRYI
KFSSEEKETDEIIFSQSNFLKIDQRQNFSFHNTLYWVQIWVYKNQKDQY
CFISIDARNSKFEKDEIKINYEKLKTQKEKLQIINEEPILKINKGDLFE
NEEKELFYIVGRDEKPQKLEIKYILGKKIKDQKQIQKPVKKYFPNWKKV
NLTYMGEIFKK
SEQ ID NO: 353
MDNKNYRIGIDVGLNSIGFCAVEVDQHDTPLGFLNLSVYRHDAGIDPNG
KKTNTTRLAMSGVARRTRRLFRKRKRRLAALDRFIEAQGWTLPDHADYK
DPYTPWLVRAELAQTPIRDENDLHEKLAIAVRHIARHRGWRSPWVPVRS
LHVEQPPSDQYLALKERVEAKTLLQMPEGATPAEMVVALDLSVDVNLRP
KNREKTDTRPENKKPGFLGGKLMQSDNANELRKIAKIQGLDDALLRELI
ELVFAADSPKGASGELVGYDVLPGQHGKRRAEKAHPAFQRYRIASIVSN
LRIRHLGSGADERLDVETQKRVFEYLLNAKPTADITWSDVAEEIGVERN
LLMGTATQTADGERASAKPPVDVTNVAFATCKIKPLKEWWLNADYEARC
VMVSALSHAEKLTEGTAAEVEVAEFLQNLSDEDNEKLDSFSLPIGRAAY
SVDSLERLTKRMIENGEDLFEARVNEFGVSEDWRPPAEPIGARVGNPAV
DRVLKAVNRYLMAAEAEWGAPLSVNIEHVREGFISKRQAVEIDRENQKR
YQRNQAVRSQIADHINATSGVRGSDVTRYLAIQRQNGECLYCGTAITFV
NSEMDHIVPRAGLGSTNTRDNLVATCERCNKSKSNKPFAVWAAECGIPG
VSVAEALKRVDFWIADGFASSKEHRELQKGVKDRLKRKVSDPEIDNRSM
ESVAWMARELAHRVQYYFDEKHIGTKVRVFRGSLTSAARKASGFESRVN
FIGGNGKTRLDRRHHAMDAATVAMLRNSVAKTLVLRGNIRASERAIGAA
ETWKSFRGENVADRQIFESWSENMRVLVEKFNLALYNDEVSIFSSLRLQ
LGNGKAHDDTITKLQMHKVGDAWSLTEIDRASTPALWCALTRQPDFTWK
DGLPANEDRTIIVNGTHYGPLDKVGIFGKAAASLLVRGGSVDIGSAIHH
ARIYRIAGKKPTYGMVRVFAPDLLRYRNEDLFNVELPPQSVSMRYAEPK
VREAIREGKAEYLGWLVVGDELLLDLSSETSGQIAELQQDFPGTTHWTV
AGFFSPSRLRLRPVYLAQEGLGEDVSEGSKSIIAGQGWRPAVNKVFGSA
MPEVIRRDGLGRKRRFSYSGLPVSWQG
SEQ ID NO: 354
MRLGLDIGTSSIGWWLYETDGAGSDARITGVVDGGVRIFSDGRDPKSGA
SLAVDRRAARAMRRRRDRYLRRRATLMKVLAETGLMPADPAEAKALEAL
DPFALRAAGLDEPLPLPHLGRALFHLNQRRGFKSNRKTDRGDNESGKIK
DATARLDMEMMANGARTYGEFLHKRRQKATDPRHVPSVRTRLSIANRGG
PDGKEEAGYDFYPDRRHLEEEFHKLWAAQGAHHPELTETLRDLLFEKIF
FQRPLKEPEVGLCLFSGHHGVPPKDPRLPKAHPLTQRRVLYETVNQLRV
TADGREARPLTREERDQVIHALDNKKPTKSLSSMVLKLPALAKVLKLRD
GERFTLETGVRDAIACDPLRASPAHPDRFGPRWSILDADAQWEVISRIR
RVQSDAEHAALVDWLTEAHGLDRAHAEATAHAPLPDGYGRLGLTATTRI
LYQLTADVVTYADAVKACGWHHSDGRTGECFDRLPYYGEVLERHVIPGS
YHPDDDDITRFGRITNPTVHIGLNQLRRLVNRIIETHGKPHQIVVELAR
DLKKSEEQKRADIKRIRDTTEAAKKRSEKLEELEIEDNGRNRMLLRLWE
DLNPDDAMRRFCPYTGTRISAAMIFDGSCDVDHILPYSRTLDDSFPNRT
LCLREANRQKRNQTPWQAWGDTPHWHAIAANLKNLPENKRWRFAPDAMT
RFEGENGFLDRALKDTQYLARISRSYLDTLFTKGGHVWVVPGRFTEMLR
RHWGLNSLLSDAGRGAVKAKNRTDHRHHAIDAAVIAATDPGLLNRISRA
AGQGEAAGQSAELIARDTPPPWEGFRDDLRVRLDRIIVSHRADHGRIDH
AARKQGRDSTAGQLHQETAYSIVDDIHVASRTDLLSLKPAQLLDEPGRS
GQVRDPQLRKALRVATGGKTGKDFENALRYFASKPGPYQAIRRVRIIKP
LQAQARVPVPAQDPIKAYQGGSNHLFEIWRLPDGEIEAQVITSFEAHTL
EGEKRPHPAAKRLLRVHKGDMVALERDGRRVVGHVQKMDIANGLFIVPH
NEANADTRNNDKSDPFKWIQIGARPAIASGIRRVSVDEIGRLRDGGTRP
I
SEQ ID NO: 355
MLHCIAVIRVPPSEEPGFFETHADSCALCHHGCMTYAANDKAIRYRVGI
DVGLRSIGFCAVEVDDEDHPIRILNSVVHVHDAGTGGPGETESLRKRSG
VAARARRRGRAEKQRLKKLDVLLEELGWGVSSNELLDSHAPWHIRKRLV
SEYIEDETERRQCLSVAMAHIARHRGWRNSFSKVDTLLLEQAPSDRMQG
LKERVEDRTGLQFSEEVTQGELVATLLEHDGDVTIRGFVRKGGKATKVH
GVLEGKYMQSDLVAELRQICRTQRVSETTFEKLVLSIFHSKEPAPSAAR
QRERVGLDELQLALDPAAKQPRAERAHPAFQKFKVVATLANMRIREQSA
GERSLTSEELNRVARYLLNHTESESPTWDDVARKLEVPRHRLRGSSRAS
LETGGGLTYPPVDDTTVRVMSAEVDWLADWWDCANDESRGHMIDAISNG
CGSEPDDVEDEEVNELISSATAEDMLKLELLAKKLPSGRVAYSLKTLRE
VTAAILETGDDLSQAITRLYGVDPGWVPTPAPIEAPVGNPSVDRVLKQV
ARWLKFASKRWGVPQTVNIEHTREGLKSASLLEEERERWERFEARREIR
QKEMYKRLGISGPFRRSDQVRYEILDLQDCACLYCGNEINFQTFEVDHI
IPRVDASSDSRRTNLAAVCHSCNSAKGGLAFGQWVKRGDCPSGVSLENA
IKRVRSWSKDRLGLTEKAMGKRKSEVISRLKTEMPYEEFDGRSMESVAW
MAIELKKRIEGYFNSDRPEGCAAVQVNAYSGRLTACARRAAHVDKRVRL
IRLKGDDGHHKNRFDRRNHAMDALVIALMTPAIARTIAVREDRREAQQL
TRAFESWKNFLGSEERMQDRWESWIGDVEYACDRLNELIDADKIPVTEN
LRLRNSGKLHADQPESLKKARRGSKRPRPQRYVLGDALPADVINRVTDP
GLWTALVRAPGFDSQLGLPADLNRGLKLRGKRISADFPIDYFPTDSPAL
AVQGGYVGLEFHHARLYRIIGPKEKVKYALLRVCAIDLCGIDCDDLFEV
ELKPSSISMRTADAKLKEAMGNGSAKQIGWLVLGDEIQIDPTKFPKQSI
GKFLKECGPVSSWRVSALDTPSKITLKPRLLSNEPLLKTSRVGGHESDL
VVAECVEKIMKKTGWVVEINALCQSGLIRVIRRNALGEVRTSPKSGLPI
SLNLR
SEQ ID NO: 356
MRYRVGLDLGTASVGAAVFSMDEQGNPMELIWHYERLFSEPLVPDMGQL
KPKKAARRLARQQRRQIDRRASRLRRIAIVSRRLGIAPGRNDSGVHGND
VPTLRAMAVNERIELGQLRAVLLRMGKKRGYGGTFKAVRKVGEAGEVAS
GASRLEEEMVALASVQNKDSVTVGEYLAARVEHGLPSKLKVAANNEYYA
PEYALFRQYLGLPAIKGRPDCLPNMYALRHQIEHEFERIWATQSQFHDV
MKDHGVKEEIRNAIFFQRPLKSPADKVGRCSLQTNLPRAPRAQIAAQNF
RIEKQMADLRWGMGRRAEMLNDHQKAVIRELLNQQKELSFRKIYKELER
AGCPGPEGKGLNMDRAALGGRDDLSGNTTLAAWRKLGLEDRWQELDEVT
QIQVINFLADLGSPEQLDTDDWSCRFMGKNGRPRNFSDEFVAFMNELRM
IDGFDRLSKMGFEGGRSSYSIKALKALTEWMIAPHWRETPETHRVDEEA
AIRECYPESLATPAQGGRQSKLEPPPLTGNEVVDVALRQVRHTINMMID
DLGSVPAQIVVEMAREMKGGVIRRNDIEKQNKRFASERKKAAQSIEENG
KTPTPARILRYQLWIEQGHQCPYCESNISLEQALSGAYTNFEHILPRTL
TQIGRKRSELVLAHRECNDEKGNRTPYQAFGHDDRRWRIVEQRANALPK
KSSRKTRLLLLKDFEGEALTDESIDEFADRQLHESSWLAKVTTQWLSSL
GSDVYVSRGSLTAELRRRWGLDTVIPQVRFESGMPVVDEEGAEITPEEF
EKFRLQWEGHRVTREMRTDRRPDKRIDHRHHLVDAIVTALTSRSLYQQY
AKAWKVADEKQRHGRVDVKVELPMPILTIRDIALEAVRSVRISHKPDRY
PDGRFFEATAYGIAQRLDERSGEKVDWLVSRKSLTDLAPEKKSIDVDKV
RANISRIVGEAIRLHISNIFEKRVSKGMTPQQALREPIEFQGNILRKVR
CFYSKADDCVRIEHSSRRGHHYKMLLNDGFAYMEVPCKEGILYGVPNLV
RPSEAVGIKRAPESGDFIRFYKGDTVKNIKTGRVYTIKQILGDGGGKLI
LTPVTETKPADLLSAKWGRLKVGGRNIHLLRLCAE
SEQ ID NO: 357
MIGEHVRGGCLFDDHWTPNWGAFRLPNTVRTFTKAENPKDGSSLAEPRR
QARGLRRRLRRKTQRLEDLRRLLAKEGVLSLSDLETLFRETPAKDPYQL
RAEGLDRPLSFPEWVRVLYHITKHRGFQSNRRNPVEDGQERSRQEEEGK
LLSGVGENERLLREGGYRTAGEMLARDPKFQDHRRNRAGDYSHTLSRSL
LLEEARRLFQSQRTLGNPHASSNLEEAFLHLVAFQNPFASGEDIRNKAG
HCSLEPDQIRAPRRSASAETFMLLQKTGNLRLIHRRTGEERPLTDKERE
QIHLLAWKQEKVTHKTLRRHLEIPEEWLFTGLPYHRSGDKAEEKLFVHL
AGIHEIRKALDKGPDPAVWDTLRSRRDLLDSIADTLTFYKNEDEILPRL
ESLGLSPENARALAPLSFSGTAHLSLSALGKLLPHLEEGKSYTQARADA
GYAAPPPDRHPKLPPLEEADWRNPVVFRALTQTRKVVNALVRRYGPPWC
IHLETARELSQPAKVRRRIETEQQANEKKKQQAEREFLDIVGTAPGPGD
LLKMRLWREQGGFCPYCEEYLNPTRLAEPGYAEMDHILPYSRSLDNGWH
NRVLVHGKDNRDKGNRTPFEAFGGDTARWDRLVAWVQASHLSAPKKRNL
LREDFGEEAERELKDRNLTDTRFITKTAATLLRDRLTFHPEAPKDPVMT
LNGRLTAFLRKQWGLHKNRKNGDLHHALDAAVLAVASRSFVYRLSSHNA
AWGELPRGREAENGFSLPYPAFRSEVLARLCPTREEILLRLDQGGVGYD
EAFRNGLRPVFVSRAPSRRLRGKAHMETLRSPKWKDHPEGPRTASRIPL
KDLNLEKLERMVGKDRDRKLYEALRERLAAFGGNGKKAFVAPFRKPCRS
GEGPLVRSLRIFDSGYSGVELRDGGEVYAVADHESMVRVDVYAKKNRFY
LVPVYVADVARGIVKNRAIVAHKSEEEWDLVDGSFDFRFSLFPGDLVEI
EKKDGAYLGYYKSCHRGDGRLLLDRHDRMPRESDCGTFYVSTRKDVLSM
SKYQVDPLGEIRLVGSEKPPFVL
SEQ ID NO: 358
MEKKRKVTLGFDLGIASVGWAIVDSETNQVYKLGSRLFDAPDTNLERRT
QRGTRRLLRRRKYRNQKFYNLVKRTEVFGLSSREAIENRFRELSIKYPN
IIELKTKALSQEVCPDEIAWILHDYLKNRGYFYDEKETKEDFDQQTVES
MPSYKLNEFYKKYGYFKGALSQPTESEMKDNKDLKEAFFFDFSNKEWLK
EINYFFNVQKNILSETFIEEFKKIFSFTRDISKGPGSDNMPSPYGIFGE
FGDNGQGGRYEHIWDKNIGKCSIFTNEQRAPKYLPSALIFNFLNELANI
RLYSTDKKNIQPLWKLSSVDKLNILLNLFNLPISEKKKKLTSTNINDIV
KKESIKSIMISVEDIDMIKDEWAGKEPNVYGVGLSGLNIEESAKENKFK
FQDLKILNVLINLLDNVGIKFEFKDRNDIIKNLELLDNLYLFLIYQKES
NNKDSSIDLFIAKNESLNIENLKLKLKEFLLGAGNEFENHNSKTHSLSK
KAIDEILPKLLDNNEGWNLEAIKNYDEEIKSQIEDNSSLMAKQDKKYLN
DNFLKDAILPPNVKVTFQQAILIFNKIIQKFSKDFEIDKVVIELAREMT
QDQENDALKGIAKAQKSKKSLVEERLEANNIDKSVFNDKYEKLIYKIFL
WISQDFKDPYTGAQISVNEIVNNKVEIDHIIPYSLCFDDSSANKVLVHK
QSNQEKSNSLPYEYIKQGHSGWNWDEFTKYVKRVFVNNVDSILSKKERL
KKSENLLTASYDGYDKLGFLARNLNDTRYATILFRDQLNNYAEHHLIDN
KKMFKVIAMNGAVISFIRKNMSYDNKLRLKDRSDFSHHAYDAAIIALFS
NKTKTLYNLIDPSLNGIISKRSEGYWVIEDRYTGEIKELKKEDWTSIKN
NVQARKIAKEIEEYLIDLDDEVFFSRKTKRKTNRQLYNETIYGIATKTD
EDGITNYYKKEKFSILDDKDIYLRLLREREKFVINQSNPEVIDQIIEII
ESYGKENNIPSRDEAINIKYTKNKINYNLYLKQYMRSLTKSLDQFSEEF
INQMIANKTFVLYNPTKNTTRKIKFLRLVNDVKINDIRKNQVINKFNGK
NNEPKAFYENINSLGAIVFKNSANNFKILSINTQIAIFGDKNWDIEDFK
TYNMEKIEKYKEIYGIDKTYNFHSFIFPGTILLDKQNKEFYYISSIQTV
RDIIEIKFLNKIEFKDENKNQDTSKTPKRLMFGIKSIMNNYEQVDISPF
GINKKIFE
SEQ ID NO: 359
MGYRIGLDVGITSTGYAVLKTDKNGLPYKILTLDSVIYPRAENPQTGAS
LAEPRRIKRGLRRRTRRTKFRKQRTQQLFIHSGLLSKPEIEQILATPQA
KYSVYELRVAGLDRRLTNSELFRVLYFFIGHRGFKSNRKAELNPENEAD
KKQMGQLLNSIEEIRKAIAEKGYRTVGELYLKDPKYNDHKRNKGYIDGY
LSTPNRQMLVDEIKQILDKQRELGNEKLTDEFYATYLLGDENRAGIFQA
QRDFDEGPGAGPYAGDQIKKMVGKDIFEPTEDRAAKATYTFQYFNLLQK
MTSLNYQNTTGDTWHTLNGLDRQAIIDAVFAKAEKPIKTYKPTDFGELR
KLLKLPDDARFNLVNYGSLQTQKEIETVEKKTRFVDFKAYHDLVKVLPE
EMWQSRQLLDHIGTALTLYSSDKRRRRYFAEELNLPAELIEKLLPLNFS
KFGHLSIKSMQNIIPYLEMGQVYSEATTNTGYDFRKKQISKDTIREEIT
NPVVRRAVTKTIKIVEQIIRRYGKPDGINIELARELGRNFKERGDIQKR
QDKNRQTNDKIAAELTELGIPVNGQNIIRYKLHKEQNGVDPYTGDQIPF
ERAFSEGYEVDHIIPYSISWDDSYTNKVLTSAKCNREKGNRIPMVYLAN
NEQRLNALTNIADNIIRNSRKRQKLLKQKLSDEELKDWKQRNINDTRFI
TRVLYNYFRQAIEFNPELEKKQRVLPLNGEVTSKIRSRWGFLKVREDGD
LHHAIDATVIAAITPKFIQQVTKYSQHQEVKNNQALWHDAEIKDAEYAA
EAQRMDADLFNKIFNGFPLPWPEFLDELLARISDNPVEMMKSRSWNTYT
PIEIAKLKPVFVVRLANHKISGPAHLDTIRSAKLFDEKGIVLSRVSITK
LKINKKGQVATGDGIYDPENSNNGDKVVYSAIRQALEAHNGSGELAFPD
GYLEYVDHGTKKLVRKVRVAKKVSLPVRLKNKAAADNGSMVRIDVFNIG
KKFVFVPIYIKDTVEQVLPNKAIARGKSLWYQITESDQFCFSLYPGDMV
HIESKTGIKPKYSNKENNTSVVPIKNFYGYFDGADIATASILVRAHDSS
YTARSIGIAGLLKFEKYQVDYFGRYHKVHEKKRQLFVKRDE
SEQ ID NO: 360
MQKNINTKQNHIYIKQAQKIKEKLGDKPYRIGLDLGVGSIGFAIVSMEE
NDGNVLLPKEIIMVGSRIFKASAGAADRKLSRGQRNNHRHTRERMRYLW
KVLAEQKLALPVPADLDRKENSSEGETSAKRFLGDVLQKDIYELRVKSL
DERLSLQELGYVLYHIAGHRGSSAIRTFENDSEEAQKENTENKKIAGNI
KRLMAKKNYRTYGEYLYKEFFENKEKHKREKISNAANNHKFSPTRDLVI
KEAEAILKKQAGKDGFHKELTEEYIEKLTKAIGYESEKLIPESGFCPYL
KDEKRLPASHKLNEERRLWETLNNARYSDPIVDIVTGEITGYYEKQFTK
EQKQKLFDYLLTGSELTPAQTKKLLGLKNINFEDIILQGRDKKAQKIKG
YKLIKLESMPFWARLSEAQQDSFLYDWNSCPDEKLLTEKLSNEYHLTEE
EIDNAFNEIVLSSSYAPLGKSAMLIILEKIKNDLSYTEAVEEALKEGKL
TKEKQAIKDRLPYYGAVLQESTQKIIAKGFSPQFKDKGYKTPHTNKYEL
EYGRIANPVVHQTLNELRKLVNEIIDILGKKPCEIGLETARELKKSAED
RSKLSREQNDNESNRNRIYEIYIRPQQQVIITRRENPRNYILKFELLEE
QKSQCPFCGGQISPNDIINNQADIEHLFPIAESEDNGRNNLVISHSACN
ADKAKRSPWAAFASAAKDSKYDYNRILSNVKENIPHKAWRFNQGAFEKF
IENKPMAARFKTDNSYISKVAHKYLACLFEKPNIICVKGSLTAQLRMAW
GLQGLMIPFAKQLITEKESESFNKDVNSNKKIRLDNRHHALDAIVIAYA
SRGYGNLLNKMAGKDYKINYSERNWLSKILLPPNNIVWENIDADLESFE
SSVKTALKNAFISVKHDHSDNGELVKGTMYKIFYSERGYTLTTYKKLSA
LKLTDPQKKKTPKDFLETALLKFKGRESEMKNEKIKSAIENNKRLFDVI
QDNLEKAKKLLEEENEKSKAEGKKEKNINDASIYQKAISLSGDKYVQLS
KKEPGKFFAISKPTPTTTGYGYDTGDSLCVDLYYDNKGKLCGEIIRKID
AQQKNPLKYKEQGFTLFERIYGGDILEVDFDIHSDKNSFRNNTGSAPEN
RVFIKVGTFTEITNNNIQIWFGNIIKSTGGQDDSFTINSMQQYNPRKLI
LSSCGFIKYRSPILKNKEG
SEQ ID NO: 361
MAAFKPNPINYILGLDIGIASVGWAMVEIDEDENPICLIDLGVRVFERA
EVPKTGDSLAMARRLARSVRRLTRRRAHRLLRARRLLKREGVLQAADFD
ENGLIKSLPNTPWQLRAAALDRKLTPLEWSAVLLHLIKHRGYLSQRKNE
GETADKELGALLKGVADNAHALQTGDFRTPAELALNKFEKESGHIRNQR
GDYSHTFSRKDLQAELILLFEKQKEFGNPHVSGGLKEGIETLLMTQRPA
LSGDAVQKMLGHCTFEPAEPKAAKNTYTAERFIWLTKLNNLRILEQGSE
RPLTDTERATLMDEPYRKSKLTYAQARKLLGLEDTAFFKGLRYGKDNAE
ASTLMEMKAYHAISRALEKEGLKDKKSPLNLSPELQDEIGTAFSLFKTD
EDITGRLKDRIQPEILEALLKHISFDKFVQISLKALRRIVPLMEQGKRY
DEACAEIYGDHYGKKNTEEKIYLPPIPADEIRNPVVLRALSQARKVING
VVRRYGSPARIHIETAREVGKSFKDRKEIEKRQEENRKDREKAAAKFRE
YFPNFVGEPKSKDILKLRLYEQQHGKCLYSGKEINLGRLNEKGYVEIDH
ALPFSRTWDDSFNNKVLVLGSENQNKGNQTPYEYFNGKDNSREWQEFKA
RVETSRFPRSKKQRILLQKFDEDGFKERNLNDTRYVNRFLCQFVADRMR
LTGKGKKRVFASNGQITNLLRGFWGLRKVRAENDRHHALDAVVVACSTV
AMQQKITRFVRYKEMNAFDGKTIDKETGEVLHQKTHFPQPWEFFAQEVM
IRVFGKPDGKPEFEEADTPEKLRTLLAEKLSSRPEAVHEYVTPLFVSRA
PNRKMSGQGHMETVKSAKRLDEGVSVLRVPLTQLKLKDLEKMVNREREP
KLYEALKARLEAHKDDPAKAFAEPFYKYDKAGNRTQQVKAVRVEQVQKT
GVWVRNHNGIADNATMVRVDVFEKGDKYYLVPIYSWQVAKGILPDRAVV
QGKDEEDWQLIDDSFNFKFSLHPNDLVEVITKKARMFGYFASCHRGTGN
INIRIHDLDHKIGKNGILEGIGVKTALSFQKYQIDELGKEIRPCRLKKR
PPVR
SEQ ID NO: 362
MQTTNLSYILGLDLGIASVGWAVVEINENEDPIGLIDVGVRIFERAEVP
KTGESLALSRRLARSTRRLIRRRAHRLLLAKRFLKREGILSTIDLEKGL
PNQAWELRVAGLERRLSAIEWGAVLLHLIKHRGYLSKRKNESQTNNKEL
GALLSGVAQNHQLLQSDDYRTPAELALKKFAKEEGHIRNQRGAYTHTFN
RLDLLAELNLLFAQQHQFGNPHCKEHIQQYMTELLMWQKPALSGEAILK
MLGKCTHEKNEFKAAKHTYSAERFVWLTKLNNLRILEDGAERALNEEER
QLLINHPYEKSKLTYAQVRKLLGLSEQAIFKHLRYSKENAESATFMELK
AWHAIRKALENQGLKDTWQDLAKKPDLLDEIGTAFSLYKTDEDIQQYLT
NKVPNSVINALLVSLNFDKFIELSLKSLRKILPLMEQGKRYDQACREIY
GHHYGEANQKTSQLLPAIPAQEIRNPVVLRTLSQARKVINAIIRQYGSP
ARVHIETGRELGKSFKERREIQKQQEDNRTKRESAVQKFKELFSDFSSE
PKSKDILKFRLYEQQHGKCLYSGKEINIHRLNEKGYVEIDHALPFSRTW
DDSFNNKVLVLASENQNKGNQTPYEWLQGKINSERWKNFVALVLGSQCS
AAKKQRLLTQVIDDNKFIDRNLNDTRYIARFLSNYIQENLLLVGKNKKN
VFTPNGQITALLRSRWGLIKARENNNRHHALDAIVVACATPSMQQKITR
FIRFKEVHPYKIENRYEMVDQESGEIISPHFPEPWAYFRQEVNIRVFDN
HPDTVLKEMLPDRPQANHQFVQPLFVSRAPTRKMSGQGHMETIKSAKRL
AEGISVLRIPLTQLKPNLLENMVNKEREPALYAGLKARLAEFNQDPAKA
FATPFYKQGGQQVKAIRVEQVQKSGVLVRENNGVADNASIVRTDVFIKN
NKFFLVPIYTWQVAKGILPNKAIVAHKNEDEWEEMDEGAKFKFSLFPND
LVELKTKKEYFFGYYIGLDRATGNISLKEHDGEISKGKDGVYRVGVKLA
LSFEKYQVDELGKNRQICRPQQRQPVR
SEQ ID NO: 363
MGIRFAFDLGTNSIGWAVWRTGPGVFGEDTAASLDGSGVLIFKDGRNPK
DGQSLATMRRVPRQSRKRRDRFVLRRRDLLAALRKAGLFPVDVEEGRRL
AATDPYHLRAKALDESLTPHEMGRVIFHLNQRRGFRSNRKADRQDREKG
KIAEGSKRLAETLAATNCRTLGEFLWSRHRGTPRTRSPTRIRMEGEGAK
ALYAFYPTREMVRAEFERLWTAQSRFAPDLLTPERHEEIAGILFRQRDL
APPKIGCCTFEPSERRLPRALPSVEARGIYERLAHLRITTGPVSDRGLT
RPERDVLASALLAGKSLTFKAVRKTLKILPHALVNFEEAGEKGLDGALT
AKLLSKPDHYGAAWHGLSFAEKDTFVGKLLDEADEERLIRRLVTENRLS
EDAARRCASIPLADGYGRLGRTANTEILAALVEETDETGTVVTYAEAVR
RAGERTGRNWHHSDERDGVILDRLPYYGEILQRHVVPGSGEPEEKNEAA
RWGRLANPTVHIGLNQLRKVVNRLIAAHGRPDQIVVELARELKLNREQK
ERLDRENRKNREENERRTAILAEHGQRDTAENKIRLRLFEEQARANAGI
ALCPYTGRAIGIAELFTSEVEIDHILPVSLTLDDSLANRVLCRREANRE
KRRQTPFQAFGATPAWNDIVARAAKLPPNKRWRFDPAALERFEREGGFL
GRQLNETKYLSRLAKIYLGKICDPDRVYVTPGTLTGLLRARWGLNSILS
DSNFKNRSDHRHHAVDAVVIGVLTRGMIQRIAHDAARAEDQDLDRVFRD
VPVPFEDFRDHVRERVSTITVAVKPEHGKGGALHEDTSYGLVPDTDPNA
ALGNLVVRKPIRSLTAGEVDRVRDRALRARLGALAAPFRDESGRVRDAK
GLAQALEAFGAENGIRRVRILKPDASVVTIADRRTGVPYRAVAPGENHH
VDIVQMRDGSWRGFAASVFEVNRPGWRPEWEVKKLGGKLVMRLHKGDMV
ELSDKDGQRRVKVVQQIEISANRVRLSPHNDGGKLQDRHADADDPFRWD
LATIPLLKDRGCVAVRVDPIGVVTLRRSNV
SEQ ID NO: 364
MMEVFMGRLVLGLDIGITSVGFGIIDLDESEIVDYGVRLFKEGTAAENE
TRRTKRGGRRLKRRRVTRREDMLHLLKQAGIISTSFHPLNNPYDVRVKG
LNERLNGEELATALLHLCKHRGSSVETIEDDEAKAKEAGETKKVLSMND
QLLKSGKYVCEIQKERLRINGHIRGHENNFKTRAYVDEAFQILSHQDLS
NELKSAIITIISRKRMYYDGPGGPLSPTPYGRYTYFGQKEPIDLIEKMR
GKCSLFPNEPRAPKLAYSAELFNLLNDLNNLSIEGEKLTSEQKAMILKI
VHEKGKITPKQLAKEVGVSLEQIRGFRIDTKGSPLLSELTGYKMIREVL
EKSNDEHLEDHVFYDEIAEILTKTKDIEGRKKQISELSSDLNEESVHQL
AGLIKFTAYHSLSFKALRLINEEMLKTELNQMQSITLFGLKQNNELSVK
GMKNIQADDTAILSPVAKRAQRETFKVVNRLREIYGEFDSIVVEMAREK
NSEEQRKAIRERQKFFEMRNKQVADIIGDDRKINAKLREKLVLYQEQDG
KTAYSLEPIDLKLLIDDPNAYEVDHIIPISISLDDSITNKVLVTHRENQ
EKGNLTPISAFVKGRFTKGSLAQYKAYCLKLKEKNIKTNKGYRKKVEQY
LLNENDIYKYDIQKEFINRNLVDTSYASRVVLNTLTTYFKQNEIPTKVF
TVKGSLTNAFRRKINLKKDRDEDYGHHAIDALIIASMPKMRLLSTIFSR
YKIEDIYDESTGEVFSSGDDSMYYDDRYFAFIASLKAIKVRKFSHKIDT
KPNRSVADETIYSTRVIDGKEKVVKKYKDIYDPKFTALAEDILNNAYQE
KYLMALHDPQTFDQIVKVVNYYFEEMSKSEKYFTKDKKGRIKISGMNPL
SLYRDEHGMLKKYSKKGDGPAITQMKYFDGVLGNHIDISAHYQVRDKKV
VLQQISPYRTDFYYSKENGYKFVTIRYKDVRWSEKKKKYVIDQQDYAMK
KAEKKIDDIYEFQFSMHRDELIGITKAEGEALIYPDETWHNFNFFFHAG
ETPEILKFTATNNDKSNKIEVKPIHCYCKMRLMPTISKKIVRIDKYATD
VVGNLYKVKKNTLKFEFD
SEQ ID NO: 365
MKKILGVDLGITSFGYAILQETGKDLYRCLDNSVVMRNNPYDEKSGESS
QSIRSTQKSMRRLIEKRKKRIRCVAQTMERYGILDYSETMKINDPKNNP
IKNRWQLRAVDAWKRPLSPQELFAIFAHMAKHRGYKSIATEDLIYELEL
ELGLNDPEKESEKKADERRQVYNALRHLEELRKKYGGETIAQTIHRAVE
AGDLRSYRNHDDYEKMIRREDIEEEIEKVLLRQAELGALGLPEEQVSEL
IDELKACITDQEMPTIDESLFGKCIFYKDELAAPAYSYLYDLYRLYKKL
ADLNIDGYEVTQEDREKVIEWVEKKIAQGKNLKKITHKDLRKILGLAPE
QKIFGVEDERIVKGKKEPRTFVPFFFLADIAKFKELFASIQKHPDALQI
FRELAEILQRSKTPQEALDRLRALMAGKGIDTDDRELLELFKNKRSGTR
ELSHRYILEALPLFLEGYDEKEVQRILGFDDREDYSRYPKSLRHLHLRE
GNLFEKEENPINNHAVKSLASWALGLIADLSWRYGPFDEIILETTRDAL
PEKIRKEIDKAMREREKALDKIIGKYKKEFFSIDKRLARKIQLWERQKG
LDLYSGKVINLSQLLDGSADIEHIVPQSLGGLSTDYNTIVTLKSVNAAK
GNRLPGDWLAGNPDYRERIGMLSEKGLIDWKKRKNLLAQSLDEIYTENT
HSKGIRATSYLEALVAQVLKRYYPFPDPELRKNGIGVRMIPGKVTSKTR
SLLGIKSKSRETNFHHAEDALILSTLTRGWQNRLHRMLRDNYGKSEAEL
KELWKKYMPHIEGLTLADYIDEAFRRFMSKGEESLFYRDMFDTIRSISY
WVDKKPLSASSHKETVYSSRHEVPTLRKNILEAFDSLNVIKDRHKLTTE
EFMKRYDKEIRQKLWLHRIGNTNDESYRAVEERATQIAQILTRYQLMDA
QNDKEIDEKFQQALKELITSPIEVTGKLLRKMRFVYDKLNAMQIDRGLV
ETDKNMLGIHISKGPNEKLIFRRMDVNNAHELQKERSGILCYLNEMLFI
FNKKGLIHYGCLRSYLEKGQGSKYIALFNPRFPANPKAQPSKFTSDSKI
KQVGIGSATGIIKAHLDLDGHVRSYEVFGTLPEGSIEWFKEESGYGRVE
DDPHH
SEQ ID NO: 366
MRPIEPWILGLDIGTDSLGWAVFSCEEKGPPTAKELLGGGVRLFDSGRD
AKDHTSRQAERGAFRRARRQTRTWPWRRDRLIALFQAAGLTPPAAETRQ
IALALRREAVSRPLAPDALWAALLHLAHHRGFRSNRIDKRERAAAKALA
KAKPAKATAKATAPAKEADDEAGFWEGAEAALRQRMAASGAPTVGALLA
DDLDRGQPVRMRYNQSDRDGVVAPTRALIAEELAEIVARQSSAYPGLDW
PAVTRLVLDQRPLRSKGAGPCAFLPGEDRALRALPTVQDFIIRQTLANL
RLPSTSADEPRPLTDEEHAKALALLSTARFVEWPALRRALGLKRGVKFT
AETERNGAKQAARGTAGNLTEAILAPLIPGWSGWDLDRKDRVFSDLWAA
RQDRSALLALIGDPRGPTRVTEDETAEAVADAIQIVLPTGRASLSAKAA
RAIAQAMAPGIGYDEAVTLALGLHHSHRPRQERLARLPYYAAALPDVGL
DGDPVGPPPAEDDGAAAEAYYGRIGNISVHIALNETRKIVNALLHRHGP
ILRLVMVETTRELKAGADERKRMIAEQAERERENAEIDVELRKSDRWMA
NARERRQRVRLARRQNNLCPYTSTPIGHADLLGDAYDIDHVIPLARGGR
DSLDNMVLCQSDANKTKGDKTPWEAFHDKPGWIAQRDDFLARLDPQTAK
ALAWRFADDAGERVARKSAEDEDQGFLPRQLTDTGYIARVALRYLSLVT
NEPNAVVATNGRLTGLLRLAWDITPGPAPRDLLPTPRDALRDDTAARRF
LDGLTPPPLAKAVEGAVQARLAALGRSRVADAGLADALGLTLASLGGGG
KNRADHRHHFIDAAMIAVTTRGLINQINQASGAGRILDLRKWPRINFEP
PYPTFRAEVMKQWDHIHPSIRPAHRDGGSLHAATVFGVRNRPDARVLVQ
RKPVEKLFLDANAKPLPADKIAEIIDGFASPRMAKRFKALLARYQAAHP
EVPPALAALAVARDPAFGPRGMTANTVIAGRSDGDGEDAGLITPFRANP
KAAVRTMGNAVYEVWEIQVKGRPRWTHRVLTRFDRTQPAPPPPPENARL
VMRLRRGDLVYWPLESGDRLFLVKKHAVDGRLALWPARLATGKATALYA
QLSCPNINLNGDQGYCVQSAEGIRKEKIRTTSCTALGRLRLSKKAT
SEQ ID NO: 367
MKYTLGLDVGIASVGWAVIDKDNNKIIDLGVRCFDKAEESKTGESLATA
RRIARGMRRRISRRSQRLRLVKKLFVQYEIIKDSSEFNRIFDTSRDGWK
DPWELRYNALSRILKPYELVQVLTHITKRRGFKSNRKEDLSTTKEGVVI
TSIKNNSEMLRTKNYRTIGEMIFMETPENSNKRNKVDEYIHTIAREDLL
NEIKYIFSIQRKLGSPFVTEKLEHDFLNIWEFQRPFASGDSILSKVGKC
TLLKEELRAPTSCYTSEYFGLLQSINNLVLVEDNNTLTLNNDQRAKIIE
YAHFKNEIKYSEIRKLLDIEPEILFKAHNLTHKNPSGNNESKKFYEMKS
YHKLKSTLPTDIWGKLHSNKESLDNLFYCLTVYKNDNEIKDYLQANNLD
YLIEYIAKLPTFNKFKHLSLVAMKRIIPFMEKGYKYSDACNMAELDFTG
SSKLEKCNKLTVEPIIENVTNPVVIRALTQARKVINAIIQKYGLPYMVN
IELAREAGMTRQDRDNLKKEHENNRKAREKISDLIRQNGRVASGLDILK
WRLWEDQGGRCAYSGKPIPVCDLLNDSLTQIDHIYPYSRSMDDSYMNKV
LVLTDENQNKRSYTPYEVWGSTEKWEDFEARIYSMHLPQSKEKRLLNRN
FITKDLDSFISRNLNDTRYISRFLKNYIESYLQFSNDSPKSCVVCVNGQ
CTAQLRSRWGLNKNREESDLHHALDAAVIACADRKIIKEITNYYNEREN
HNYKVKYPLPWHSFRQDLMETLAGVFISRAPRRKITGPAHDETIRSPKH
FNKGLTSVKIPLTTVTLEKLETMVKNTKGGISDKAVYNVLKNRLIEHNN
KPLKAFAEKIYKPLKNGTNGAIIRSIRVETPSYTGVFRNEGKGISDNSL
MVRVDVFKKKDKYYLVPIYVAHMIKKELPSKAIVPLKPESQWELIDSTH
EFLFSLYQNDYLVIKTKKGITEGYYRSCHRGTGSLSLMPHFANNKNVKI
DIGVRTAISIEKYNVDILGNKSIVKGEPRRGMEKYNSFKSN
SEQ ID NO: 368
MIRTLGIDIGIASIGWAVIEGEYTDKGLENKEIVASGVRVFTKAENPKN
KESLALPRTLARSARRRNARKKGRIQQVKHYLSKALGLDLECFVQGEKL
ATLFQTSKDFLSPWELRERALYRVLDKEELARVILHIAKRRGYDDITYG
VEDNDSGKIKKAIAENSKRIKEEQCKTIGEMMYKLYFQKSLNVRNKKES
YNRCVGRSELREELKTIFQIQQELKSPWVNEELIYKLLGNPDAQSKQER
EGLIFYQRPLKGFGDKIGKCSHIKKGENSPYRACKHAPSAEEFVALTKS
INFLKNLTNRHGLCFSQEDMCVYLGKILQEAQKNEKGLTYSKLKLLLDL
PSDFEFLGLDYSGKNPEKAVFLSLPSTFKLNKITQDRKTQDKIANILGA
NKDWEAILKELESLQLSKEQIQTIKDAKLNFSKHINLSLEALYHLLPLM
REGKRYDEGVEILQERGIFSKPQPKNRQLLPPLSELAKEESYFDIPNPV
LRRALSEFRKVVNALLEKYGGFHYFHIELTRDVCKAKSARMQLEKINKK
NKSENDAASQLLEVLGLPNTYNNRLKCKLWKQQEEYCLYSGEKITIDHL
KDQRALQIDHAFPLSRSLDDSQSNKVLCLTSSNQEKSNKTPYEWLGSDE
KKWDMYVGRVYSSNFSPSKKRKLTQKNFKERNEEDFLARNLVDTGYIGR
VTKEYIKHSLSFLPLPDGKKEHIRIISGSMTSTMRSFWGVQEKNRDHHL
HHAQDAIIIACIEPSMIQKYTTYLKDKETHRLKSHQKAQILREGDHKLS
LRWPMSNFKDKIQESIQNIIPSHHVSHKVTGELHQETVRTKEFYYQAFG
GEEGVKKALKFGKIREINQGIVDNGAMVRVDIFKSKDKGKFYAVPIYTY
DFAIGKLPNKAIVQGKKNGIIKDWLEMDENYEFCFSLFKNDCIKIQTKE
MQEAVLAIYKSTNSAKATIELEHLSKYALKNEDEEKMFTDTDKEKNKTM
TRESCGIQGLKVFQKVKLSVLGEVLEHKPRNRQNIALKTTPKHV
SEQ ID NO: 369
MKYSIGLDIGIASVGWSVINKDKERIEDMGVRIFQKAENPKDGSSLASS
RREKRGSRRRNRRKKHRLDRIKNILCESGLVKKNEIEKIYKNAYLKSPW
ELRAKSLEAKISNKEIAQILLHIAKRRGFKSFRKTDRNADDIGKLLSGI
QENKKIMEEKGYLTIGDMVAKDPKFNTHVRNKAGSYLFSFSRKLLEDEV
RKIQAKQKELGNTHFTDDVLEKYIEVFNSQRNFDEGPSKPSPYYSEIGQ
IAKMIGNCTFESSEKRTAKNTWSGERFVFLQKLNNFRIVGLSGKRPLTE
EERDIVEKEVYLKKEVRYEKLRKILYLKEEERFGDLNYSKDEKQDKKTE
KTKFISLIGNYTIKKLNLSEKLKSEIEEDKSKLDKIIEILTFNKSDKTI
ESNLKKLELSREDIEILLSEEFSGTLNLSLKAIKKILPYLEKGLSYNEA
CEKADYDYKNNGIKFKRGELLPVVDKDLIANPVVLRAISQTRKVVNAII
RKYGTPHTIHVEVARDLAKSYDDRQTIIKENKKRELENEKTKKFISEEF
GIKNVKGKLLLKYRLYQEQEGRCAYSRKELSLSEVILDESMTDIDHIIP
YSRSMDDSYSNKVLVLSGENRKKSNLLPKEYFDRQGRDWDTFVLNVKAM
KIHPRKKSNLLKEKFTREDNKDWKSRALNDTRYISRFVANYLENALEYR
DDSPKKRVFMIPGQLTAQLRARWRLNKVRENGDLHHALDAAVVAVTDQK
AINNISNISRYKELKNCKDVIPSIEYHADEETGEVYFEEVKDTRFPMPW
SGFDLELQKRLESENPREEFYNLLSDKRYLGWFNYEEGFIEKLRFVFVS
RMPNRGVKGQAHQETIRSSKKISNQIAVSKKPLNSIKLKDLEKMQGRDT
DRKLYEALKNRLEEYDDKPEKAFAEPFYKPINSGKRGPLVRGIKVEEKQ
NVGVYVNGGQASNGSMVRIDVFRKNGKFYTVPIYVHQTLLKELPNRAIN
GKPYKDWDLIDGSFEFLYSFYPNDLIEIEFGKSKSIKNDNKLTKTEIPE
VNLSEVLGYYRGMDTSTGAATIDTQDGKIQMRIGIKTVKNIKKYQVDVL
GNVYKVKREKRQTF
SEQ ID NO: 370
MSKKVSRRYEEQAQEICQRLGSRPYSIGLDLGVGSIGVAVAAYDPIKKQ
PSDLVFVSSRIFIPSTGAAERRQKRGQRNSLRHRANRLKFLWKLLAERN
LMLSYSEQDVPDPARLRFEDAVVRANPYELRLKGLNEQLTLSELGYALY
HIANHRGSSSVRTFLDEEKSSDDKKLEEQQAMTEQLAKEKGISTFIEVL
TAFNTNGLIGYRNSESVKSKGVPVPTRDIISNEIDVLLQTQKQFYQEIL
SDEYCDRIVSAILFENEKIVPEAGCCPYFPDEKKLPRCHFLNEERRLWE
AINNARIKMPMQEGAAKRYQSASFSDEQRHILFHIARSGTDITPKLVQK
EFPALKTSIIVLQGKEKAIQKIAGFRFRRLEEKSFWKRLSEEQKDDFFS
AWINTPDDKRLSKYLMKHLLLTENEVVDALKTVSLIGDYGPIGKTATQL
LMKHLEDGLTYTEALERGMETGEFQELSVWEQQSLLPYYGQILTGSTQA
LMGKYWHSAFKEKRDSEGFFKPNTNSDEEKYGRIANPVVHQTLNELRKL
MNELITILGAKPQEITVELARELKVGAEKREDIIKQQTKQEKEAVLAYS
KYCEPNNLDKRYIERFRLLEDQAFVCPYCLEHISVADIAAGRADVDHIF
PRDDTADNSYGNKVVAHRQCNDIKGKRTPYAAFSNTSAWGPIMHYLDET
PGMWRKRRKFETNEEEYAKYLQSKGFVSRFESDNSYIAKAAKEYLRCLF
NPNNVTAVGSLKGMETSILRKAWNLQGIDDLLGSRHWSKDADTSPTMRK
NRDDNRHHGLDAIVALYCSRSLVQMINTMSEQGKRAVEIEAMIPIPGYA
SEPNLSFEAQRELFRKKILEFMDLHAFVSMKTDNDANGALLKDTVYSIL
GADTQGEDLVFVVKKKIKDIGVKIGDYEEVASAIRGRITDKQPKWYPME
MKDKIEQLQSKNEAALQKYKESLVQAAAVLEESNRKLIESGKKPIQLSE
KTISKKALELVGGYYYLISNNKRTKTFVVKEPSNEVKGFAFDTGSNLCL
DFYHDAQGKLCGEIIRKIQAMNPSYKPAYMKQGYSLYVRLYQGDVCELR
ASDLTEAESNLAKTTHVRLPNAKPGRTFVIIITFTEMGSGYQIYFSNLA
KSKKGQDTSFTLTTIKNYDVRKVQLSSAGLVRYVSPLLVDKIEKDEVAL
CGE
SEQ ID NO: 371
MNQKFILGLDIGITSVGYGLIDYETKNIIDAGVRLFPEANVENNEGRRS
KRGSRRLKRRRIHRLERVKKLLEDYNLLDQSQIPQSTNPYAIRVKGLSE
ALSKDELVIALLHIAKRRGIHKIDVIDSNDDVGNELSTKEQLNKNSKLL
KDKFVCQIQLERMNEGQVRGEKNRFKTADIIKEIIQLLNVQKNFHQLDE
NFINKYIELVEMRREYFEGPGKGSPYGWEGDPKAWYETLMGHCTYFPDE
LRSVKYAYSADLFNALNDLNNLVIQRDGLSKLEYHEKYHIIENVFKQKK
KPTLKQIANEINVNPEDIKGYRITKSGKPQFTEFKLYHDLKSVLFDQSI
LENEDVLDQIAEILTIYQDKDSIKSKLTELDILLNEEDKENIAQLTGYT
GTHRLSLKCIRLVLEEQWYSSRNQMEIFTHLNIKPKKINLTAANKIPKA
MIDEFILSPVVKRTFGQAINLINKIIEKYGVPEDIIIELARENNSKDKQ
KFINEMQKKNENTRKRINEIIGKYGNQNAKRLVEKIRLHDEQEGKCLYS
LESIPLEDLLNNPNHYEVDHIIPRSVSFDNSYHNKVLVKQSENSKKSNL
TPYQYFNSGKSKLSYNQFKQHILNLSKSQDRISKKKKEYLLEERDINKF
EVQKEFINRNLVDTRYATRELTNYLKAYFSANNMNVKVKTINGSFTDYL
RKVWKFKKERNHGYKHHAEDALIIANADFLFKENKKLKAVNSVLEKPEI
ESKQLDIQVDSEDNYSEMFIIPKQVQDIKDFRNFKYSHRVDKKPNRQLI
NDTLYSTRKKDNSTYIVQTIKDIYAKDNTTLKKQFDKSPEKFLMYQHDP
RTFEKLEVIMKQYANEKNPLAKYHEETGEYLTKYSKKNNGPIVKSLKYI
GNKLGSHLDVTHQFKSSTKKLVKLSIKPYRFDVYLTDKGYKFITISYLD
VLKKDNYYYIPEQKYDKLKLGKAIDKNAKFIASFYKNDLIKLDGEIYKI
IGVNSDTRNMIELDLPDIRYKEYCELNNIKGEPRIKKTIGKKVNSIEKL
TTDVLGNVFTNTQYTKPQLLFKRGN
SEQ ID NO: 372
MIMKLEKWRLGLDLGTNSIGWSVFSLDKDNSVQDLIDMGVRIFSDGRDP
KTKEPLAVARRTARSQRKLIYRRKLRRKQVFKFLQEQGLFPKTKEECMT
LKSLNPYELRIKALDEKLEPYELGRALFNLAVRRGFKSNRKDGSREEVS
EKKSPDEIKTQADMQTHLEKAIKENGCRTITEFLYKNQGENGGIRFAPG
RMTYYPTRKMYEEEFNLIRSKQEKYYPQVDWDDIYKAIFYQRPLKPQQR
GYCIYENDKERTFKAMPCSQKLRILQDIGNLAYYEGGSKKRVELNDNQD
KVLYELLNSKDKVTFDQMRKALCLADSNSFNLEENRDFLIGNPTAVKMR
SKNRFGKLWDEIPLEEQDLIIETIITADEDDAVYEVIKKYDLTQEQRDF
IVKNTILQSGTSMLCKEVSEKLVKRLEEIADLKYHEAVESLGYKFADQT
VEKYDLLPYYGKVLPGSTMEIDLSAPETNPEKHYGKISNPTVHVALNQT
RVVVNALIKEYGKPSQIAIELSRDLKNNVEKKAEIARKQNQRAKENIAI
NDTISALYHTAFPGKSFYPNRNDRMKYRLWSELGLGNKCIYCGKGISGA
ELFTKEIEIEHILPFSRTLLDAESNLTVAHSSCNAFKAERSPFEAFGTN
PSGYSWQEIIQRANQLKNTSKKNKFSPNAMDSFEKDSSFIARQLSDNQY
IAKAALRYLKCLVENPSDVWTTNGSMTKLLRDKWEMDSILCRKFTEKEV
ALLGLKPEQIGNYKKNRFDHRHHAIDAVVIGLTDRSMVQKLATKNSHKG
NRIEIPEFFILRSDLIEKVKNIVVSFKPDHGAEGKLSKETLLGKIKLHG
KETFVCRENIVSLSEKNLDDIVDEIKSKVKDYVAKHKGQKIEAVLSDFS
KENGIKKVRCVNRVQTPIEITSGKISRYLSPEDYFAAVIWEIPGEKKTF
KAQYIRRNEVEKNSKGLNVVKPAVLENGKPHPAAKQVCLLHKDDYLEFS
DKGKMYFCRIAGYAATNNKLDIRPVYAVSYCADWINSTNETMLIGYWKP
TPTQNWVSVNVLFDKQKARLVTVSP
IGRVFRK
SEQ ID NO: 373
MSSKAIDSLEQLDLFKPQEYTLGLDLGIKSIGWAILSGERIANAGVYLF
ETAEELNSTGNKLISKAAERGRKRRIRRMLDRKARRGRHIRYLLEREGL
PTDELEEVVVHQSNRTLWDVRAEAVERKLTKQELAAVLFHLVRHRGYFP
NIKKLPPDDESDSADEEQGKINRATSRLREELKASDCKTIGQFLAQNRD
RQRNREGDYSNLMARKLVFEEALQILAFQRKQGHELSKDFEKTYLDVLM
GQRSGRSPKLGNCSLIPSELRAPSSAPSTEWFKFLQNLGNLQISNAYRE
EWSIDAPRRAQIIDACSQRSTSSYWQIRRDFQIPDEYRFNLVNYERRDP
DVDLQEYLQQQERKTLANFRNWKQLEKIIGIGHPIQTLDEAARLITLIK
DDEKLSDQLADLLPEASDKAITQLCELDFTTAAKISLEAMYRILPHMNQ
GMGFFDACQQESLPEIGVPPAGDRVPPFDEMYNPVVNRVLSQSRKLINA
VIDEYGMPAKIRVELARDLGKGRELRERIKLDQLDKSKQNDQRAEDFRA
EFQQAPRGDQSLRYRLWKEQNCTCPYSGRMIPVNSVLSEDTQIDHILPI
SQSFDNSLSNKVLCFTEENAQKSNRTPFEYLDAADFQRLEAISGNWPEA
KRNKLLHKSFGKVAEEWKSRALNDTRYLTSALADHLRHHLPDSKIQTVN
GRITGYLRKQWGLEKDRDKHTHHAVDAIVVACTTPAIVQQVTLYHQDIR
RYKKLGEKRPTPWPETFRQDVLDVEEEIFITRQPKKVSGGIQTKDTLRK
HRSKPDRQRVALTKVKLADLERLVEKDASNRNLYEHLKQCLEESGDQPT
KAFKAPFYMPSGPEAKQRPILSKVTLLREKPEPPKQLTELSGGRRYDSM
AQGRLDIYRYKPGGKRKDEYRVVLQRMIDLMRGEENVHVFQKGVPYDQG
PEIEQNYTFLFSLYFDDLVEFQRSADSEVIRGYYRTFNIANGQLKISTY
LEGRQDFDFFGANRLAHFAKVQVNLLGKVIK
SEQ ID NO: 374
MRSLRYRLALDLGSTSLGWALFRLDACNRPTAVIKAGVRIFSDGRNPKD
GSSLAVTRRAARAMRRRRDRLLKRKTRMQAKLVEHGFFPADAGKRKALE
QLNPYALRAKGLQEALLPGEFARALFHINQRRGFKSNRKTDKKDNDSGV
LKKAIGQLRQQMAEQGSRTVGEYLWTRLQQGQGVRARYREKPYTTEEGK
KRIDKSYDLYIDRAMIEQEFDALWAAQAAFNPTLFHEAARADLKDTLLH
QRPLRPVKPGRCTLLPEEERAPLALPSTQRFRIHQEVNHLRLLDENLRE
VALTLAQRDAVVTALETKAKLSFEQIRKLLKLSGSVQFNLEDAKRTELK
GNATSAALARKELFGAAWSGFDEALQDEIVWQLVTEEGEGALIAWLQTH
TGVDEARAQAIVDVSLPEGYGNLSRKALARIVPALRAAVITYDKAVQAA
GFDHHSQLGFEYDASVEDLVHPETGEIRSVFKQLPYYGKALQRHVAFGS
GKPEDPDEKRYGKIANPTVHIGLNQVRMVVNALIRRYGRPTEVVIELAR
DLKQSREQKVEAQRRQADNQRRNARIRRSIAEVLGIGEERVRGSDIQKW
ICWEELSFDAADRRCPYSGVQISAAMLLSDEVEVEHILPFSKTLDDSLN
NRTVAMRQANRIKRNRTPWDARAEFEAQGWSYEDILQRAERMPLRKRYR
FAPDGYERWLGDDKDFLARALNDTRYLSRVAAEYLRLVCPGTRVIPGQL
TALLRGKFGLNDVLGLDGEKNRNDHRHHAVDACVIGVTDQGLMQRFATA
SAQARGDGLTRLVDGMPMPWPTYRDHVERAVRHIWVSHRPDHGFEGAMM
EETSYGIRKDGSIKQRRKADGSAGREISNLIRIHEATQPLRHGVSADGQ
PLAYKGYVGGSNYCIEITVNDKGKWEGEVISTFRAYGVVRAGGMGRLRN
PHEGQNGRKLIMRLVIGDSVRLEVDGAERTMRIVKISGSNGQIFMAPIH
EANVDARNTDKQDAFTYTSKYAGSLQKAKTRRVTISPIGEVRDPGFKG
SEQ ID NO: 375
MARPAFRAPRREHVNGWTPDPHRISKPFFILVSWHLLSRVVIDSSSGCF
PGTSRDHTDKFAEWECAVQPYRLSFDLGTNSIGWGLLNLDRQGKPREIR
ALGSRIFSDGRDPQDKASLAVARRLARQMRRRRDRYLTRRTRLMGALVR
FGLMPADPAARKRLEVAVDPYLARERATRERLEPFEIGRALFHLNQRRG
YKPVRTATKPDEEAGKVKEAVERLEAAIAAAGAPTLGAWFAWRKTRGET
LRARLAGKGKEAAYPFYPARRMLEAEFDTLWAEQARHHPDLLTAEAREI
LRHRIFHQRPLKPPPVGRCTLYPDDGRAPRALPSAQRLRLFQELASLRV
IHLDLSERPLTPAERDRIVAFVQGRPPKAGRKPGKVQKSVPFEKLRGLL
ELPPGTGFSLESDKRPELLGDETGARIAPAFGPGWTALPLEEQDALVEL
LLTEAEPERAIAALTARWALDEATAAKLAGATLPDFHGRYGRRAVAELL
PVLERETRGDPDGRVRPIRLDEAVKLLRGGKDHSDFSREGALLDALPYY
GAVLERHVAFGTGNPADPEEKRVGRVANPTVHIALNQLRHLVNAILARH
GRPEEIVIELARDLKRSAEDRRREDKRQADNQKRNEERKRLILSLGERP
TPRNLLKLRLWEEQGPVENRRCPYSGETISMRMLLSEQVDIDHILPFSV
SLDDSAANKVVCLREANRIKRNRSPWEAFGHDSERWAGILARAEALPKN
KRWRFAPDALEKLEGEGGLRARHLNDTRHLSRLAVEYLRCVCPKVRVSP
GRLTALLRRRWGIDAILAEADGPPPEVPAETLDPSPAEKNRADHRHHAL
DAVVIGCIDRSMVQRVQLAAASAEREAAAREDNIRRVLEGFKEEPWDGF
RAELERRARTIVVSHRPEHGIGGALHKETAYGPVDPPEEGFNLVVRKPI
DGLSKDEINSVRDPRLRRALIDRLAIRRRDANDPATALAKAAEDLAAQP
ASRGIRRVRVLKKESNPIRVEHGGNPSGPRSGGPFHKLLLAGEVHHVDV
ALRADGRRWVGHWVTLFEAHGGRGADGAAAPPRLGDGERFLMRLHKGDC
LKLEHKGRVRVMQVVKLEPSSNSVVVVEPHQVKTDRSKHVKISCDQLRA
RGARRVTVDPLGRVRVHAPGARVGIGGDAGRTAMEPAEDIS
SEQ ID NO: 376
MKRTSLRAYRLGVDLGANSLGWFVVWLDDHGQPEGLGPGGVRIFPDGRN
PQSKQSNAAGRRLARSARRRRDRYLQRRGKLMGLLVKHGLMPADEPARK
RLECLDPYGLRAKALDEVLPLHHVGRALFHLNQRRGLFANRAIEQGDKD
ASAIKAAAGRLQTSMQACGARTLGEFLNRRHQLRATVRARSPVGGDVQA
RYEFYPTRAMVDAEFEAIWAAQAPHHPTMTAEAHDTIREAIFSQRAMKR
PSIGKCSLDPATSQDDVDGFRCAWSHPLAQRFRIWQDVRNLAVVETGPT
SSRLGKEDQDKVARALLQTDQLSFDEIRGLLGLPSDARFNLESDRRDHL
KGDATGAILSARRHFGPAWHDRSLDRQIDIVALLESALDEAAIIASLGT
THSLDEAAAQRALSALLPDGYCRLGLRAIKRVLPLMEAGRTYAEAASAA
GYDHALLPGGKLSPTGYLPYYGQWLQNDVVGSDDERDTNERRWGRLPNP
TVHIGIGQLRRVVNELIRWHGPPAEITVELTRDLKLSPRRLAELEREQA
ENQRKNDKRTSLLRKLGLPASTHNLLKLRLWDEQGDVASECPYTGEAIG
LERLVSDDVDIDHLIPFSISWDDSAANKVVCMRYANREKGNRTPFEAFG
HRQGRPYDWADIAERAARLPRGKRWRFGPGARAQFEELGDFQARLLNET
SWLARVAKQYLAAVTHPHRIHVLPGRLTALLRATWELNDLLPGSDDRAA
KSRKDHRHHAIDALVAALTDQALLRRMANAHDDTRRKIEVLLPWPTFRI
DLETRLKAMLVSHKPDHGLQARLHEDTAYGTVEHPETEDGANLVYRKTF
VDISEKEIDRIRDRRLRDLVRAHVAGERQQGKTLKAAVLSFAQRRDIAG
HPNGIRHVRLIKSIKPDYLVPIRDKAGRIYKSYNAGENAFVDILQAESG
RWIARATTVFQANQANESHDAPAAQPIMRVFKGDMLRIDHAGAEKFVKI
VRLSPSNNLLYLVEHHQAGVFQTRHDDPEDSFRWLFASFDKLREWNAEL
VRIDTLGQPWRRKRGLETGSEDATRIGWTRPKKWP
SEQ ID NO: 377
MERIFGFDIGTTSIGFSVIDYSSTQSAGNIQRLGVRIFPEARDPDGTPL
NQQRRQKRMMRRQLRRRRIRRKALNETLHEAGFLPAYGSADWPVVMADE
PYELRRRGLEEGLSAYEFGRAIYHLAQHRHFKGRELEESDTPDPDVDDE
KEAANERAATLKALKNEQTTLGAWLARRPPSDRKRGIHAHRNVVAEEFE
RLWEVQSKFHPALKSEEMRARISDTIFAQRPVFWRKNTLGECRFMPGEP
LCPKGSWLSQQRRMLEKLNNLAIAGGNARPLDAEERDAILSKLQQQASM
SWPGVRSALKALYKQRGEPGAEKSLKFNLELGGESKLLGNALEAKLADM
FGPDWPAHPRKQEIRHAVHERLWAADYGETPDKKRVIILSEKDRKAHRE
AAANSFVADFGITGEQAAQLQALKLPTGWEPYSIPALNLFLAELEKGER
FGALVNGPDWEGWRRTNFPHRNQPTGEILDKLPSPASKEERERISQLRN
PTVVRTQNELRKVVNNLIGLYGKPDRIRIEVGRDVGKSKREREEIQSGI
RRNEKQRKKATEDLIKNGIANPSRDDVEKWILWKEGQERCPYTGDQIGF
NALFREGRYEVEHIWPRSRSFDNSPRNKTLCRKDVNIEKGNRMPFEAFG
HDEDRWSAIQIRLQGMVSAKGGTGMSPGKVKRFLAKTMPEDFAARQLND
TRYAAKQILAQLKRLWPDMGPEAPVKVEAVTGQVTAQLRKLWTLNNILA
DDGEKTRADHRHHAIDALTVACTHPGMTNKLSRYWQLRDDPRAEKPALT
PPWDTIRADAEKAVSEIVVSHRVRKKVSGPLHKETTYGDTGTDIKTKSG
TYRQFVTRKKIESLSKGELDEIRDPRIKEIVAAHVAGRGGDPKKAFPPY
PCVSPGGPEIRKVRLTSKQQLNLMAQTGNGYADLGSNHHIAIYRLPDGK
ADFEIVSLFDASRRLAQRNPIVQRTRADGASFVMSLAAGEAIMIPEGSK
KGIWIVQGVWASGQVVLERDTDADHSTTTRPMPNPILKDDAKKVSIDPI
GRVRPSND
SEQ ID NO: 378
MNKRILGLDTGINSLGWAVVDWDEHAQSYELIKYGDVIFQEGVKIEKGI
ESSKAAERSGYKAIRKQYFRRRLRKIQVLKVLVKYHLCPYLSDDDLRQW
HLQKQYPKSDELMLWQRTSDEEGKNPYYDRHRCLHEKLDLTVEADRYTL
GRALYHLTQRRGFLSNRLDTSADNKEDGVVKSGISQLSTEMEEAGCEYL
GDYFYKLYDAQGNKVRIRQRYTDRNKHYQHEFDAICEKQELSSELIEDL
QRAIFFQLPLKSQRHGVGRCTFERGKPRCADSHPDYEEFRMLCFVNNIQ
VKGPHDLELRPLTYEEREKIEPLFFRKSKPNFDFEDIAKALAGKKNYAW
IHDKEERAYKFNYRMTQGVPGCPTIAQLKSIFGDDWKTGIAETYTLIQK
KNGSKSLQEMVDDVWNVLYSFSSVEKLKEFAHHKLQLDEESAEKFAKIK
LSHSFAALSLKAIRKFLPFLRKGMYYTHASFFANIPTIVGKEIWNKEQN
RKYIMENVGELVFNYQPKHREVQGTIEMLIKDFLANNFELPAGATDKLY
HPSMIETYPNAQRNEFGILQLGSPRTNAIRNPMAMRSLHILRRVVNQLL
KESIIDENTEVHVEYARELNDANKRRAIADRQKEQDKQHKKYGDEIRKL
YKEETGKDIEPTQTDVLKFQLWEEQNHHCLYTGEQIGITDFIGSNPKFD
IEHTIPQSVGGDSTQMNLTLCDNRFNREVKKAKLPTELANHEEILTRIE
PWKNKYEQLVKERDKQRTFAGMDKAVKDIRIQKRHKLQMEIDYWRGKYE
RFTMTEVPEGFSRRQGTGIGLISRYAGLYLKSLFHQADSRNKSNVYVVK
GVATAEFRKMWGLQSEYEKKCRDNHSHHCMDAITIACIGKREYDLMAEY
YRMEETFKQGRGSKPKFSKPWATFTEDVLNIYKNLLVVHDTPNNMPKHT
KKYVQTSIGKVLAQGDTARGSLHLDTYYGAIERDGEIRYVVRRPLSSFT
KPEELENIVDETVKRTIKEAIADKNFKQAIAEPIYMNEEKGILIKKVRC
FAKSVKQPINIRQHRDLSKKEYKQQYHVMNENNYLLAIYEGLVKNKVVR
EFEIVSYIEAAKYYKRSQDRNIFSSIVPTHSTKYGLPLKTKLLMGQLVL
MFEENPDEIQVDNTKDLVKRLYKVVGIEKDGRIKFKYHQEARKEGLPIF
STPYKNNDDYAPIFRQSINNINILVDGIDFTIDILGKVTLKE
SEQ ID NO: 379
MNYKMGLDIGIASVGWAVINLDLKRIEDLGVRIFDKAEHPQNGESLALP
RRIARSARRRLRRRKHRLERIRRLLVSENVLTKEEMNLLFKQKKQIDVW
QLRVDALERKLNNDELARVLLHLAKRRGFKSNRKSERNSKESSEFLKNI
EENQSILAQYRSVGEMIVKDSKFAYHKRNKLDSYSNMIARDDLEREIKL
IFEKQREFNNPVCTERLEEKYLNIWSSQRPFASKEDIEKKVGFCTFEPK
EKRAPKATYTFQSFIVWEHINKLRLVSPDETRALTEIERNLLYKQAFSK
NKMTYYDIRKLLNLSDDIHFKGLLYDPKSSLKQIENIRFLELDSYHKIR
KCIENVYGKDGIRMFNETDIDTFGYALTIFKDDEDIVAYLQNEYITKNG
KRVSNLANKVYDKSLIDELLNLSFSKFAHLSMKAIRNILPYMEQGEIYS
KACELAGYNFTGPKKKEKALLLPVIPNIANPVVMRALTQSRKVVNAIIK
KYGSPVSIHIELARDLSHSFDERKKIQKDQTENRKKNETAIKQLIEYEL
TKNPTGLDIVKFKLWSEQQGRCMYSLKPIELERLLEPGYVEVDHILPYS
RSLDDSYANKVLVLTKENREKGNHTPVEYLGLGSERWKKFEKFVLANKQ
FSKKKKQNLLRLRYEETEEKEFKERNLNDTRYISKFFANFIKEHLKFAD
GDGGQKVYTINGKITAHLRSRWDFNKNREESDLHHAVDAVIVACATQGM
IKKITEFYKAREQNKESAKKKEPIFPQPWPHFADELKARLSKFPQESIE
AFALGNYDRKKLESLRPVFVSRMPKRSVTGAAHQETLRRCVGIDEQSGK
IQTAVKTKLSDIKLDKDGHFPMYQKESDPRTYEAIRQRLLEHNNDPKKA
FQEPLYKPKKNGEPGPVIRTVKIIDTKNKVVHLDGSKTVAYNSNIVRTD
VFEKDGKYYCVPVYTMDIMKGTLPNKAIEANKPYSEWKEMTEEYTFQFS
LFPNDLVRIVLPREKTIKTSTNEEIIIKDIFAYYKTIDSATGGLELISH
DRNFSLRGVGSKTLKRFEKYQVDVLGNIHKVKGEKRVGLAAPTNQKKGK
TVDSLQSVSD
SEQ ID NO: 380
MRRLGLDLGINSIGWCLLDLGDDGEPVSIFRTGARIFSDGRDPKSLGSL
KATRREARLTRRRRDRFIQRQKNLINALVKYGLMPADEIQRQALAYKDP
YPIRKKALDEAIDPYEMGRAIFHINQRRGFKSNRKSADNEAGVVKQSIA
DLEMKLGEAGARTIGEFLADRQATNDTVRARRLSGTNALYEFYPDRYML
EQEFDTLWAKQAAFNPSLYIEAARERLKEIVFFQRKLKPQEVGRCIFLS
DEDRISKALPSFQRFRIYQELSNLAWIDHDGVAHRITASLALRDHLFDE
LEHKKKLIFKAMRAILRKQGVVDYPVGFNLESDNRDHLIGNLTSCIMRD
AKKMIGSAWDRLDEEEQDSFILMLQDDQKGDDEVRSILTQQYGLSDDVA
EDCLDVRLPDGHGSLSKKAIDRILPVLRDQGLIYYDAVKEAGLGEANLY
DPYAALSDKLDYYGKALAGHVMGASGKFEDSDEKRYGTISNPTVHIALN
QVRAVVNELIRLHGKPDEVVIEIGRDLPMGADGKRELERFQKEGRAKNE
RARDELKKLGHIDSRESRQKFQLWEQLAKEPVDRCCPFTGKMMSISDLF
SDKVEIEHLLPFSLTLDDSMANKTVCFRQANRDKGNRAPFDAFGNSPAG
YDWQEILGRSQNLPYAKRWRFLPDAMKRFEADGGFLERQLNDTRYISRY
TTEYISTIIPKNKIWVVTGRLTSLLRGFWGLNSILRGHNTDDGTPAKKS
RDDHRHHAIDAIVVGMTSRGLLQKVSKAARRSEDLDLTRLFEGRIDPWD
GFRDEVKKHIDAIIVSHRPRKKSQGALHNDTAYGIVEHAENGASTVVHR
VPITSLGKQSDIEKVRDPLIKSALLNETAGLSGKSFENAVQKWCADNSI
KSLRIVETVSIIPITDKEGVAYKGYKGDGNAYMDIYQDPTSSKWKGEIV
SRFDANQKGFIPSWQSQFPTARLIMRLRINDLLKLQDGEIEEIYRVQRL
SGSKILMAPHTEANVDARDRDKNDTFKLTSKSPGKLQSASARKVHISPT
GLIREG
SEQ ID NO: 381
MKNILGLDLGLSSIGWSVIRENSEEQELVAMGSRVVSLTAAELSSFTQG
NGVSINSQRTQKRTQRKGYDRYQLRRTLLRNKLDTLGMLPDDSLSYLPK
LQLWGLRAKAVTQRIELNELGRVLLHLNQKRGYKSIKSDFSGDKKITDY
VKTVKTRYDELKEMRLTIGELFFRRLTENAFFRCKEQVYPRQAYVEEFD
CIMNCQRKFYPDILTDETIRCIRDEIIYYQRPLKSCKYLVSRCEFEKRF
YLNAAGKKTEAGPKVSPRTSPLFQVCRLWESINNIVVKDRRNEIVFISA
EQRAALFDFLNTHEKLKGSDLLKLLGLSKTYGYRLGEQFKTGIQGNKTR
VEIERALGNYPDKKRLLQFNLQEESSSMVNTETGEIIPMISLSFEQEPL
YRLWHVLYSIDDREQLQSVLRQKFGIDDDEVLERLSAIDLVKAGFGNKS
SKAIRRILPFLQLGMNYAEACEAAGYNHSNNYTKAENEARALLDRLPAI
KKNELRQPVVEKILNQMVNVVNALMEKYGRFDEIRVELARELKQSKEER
SNTYKSINKNQRENEQIAKRIVEYGVPTRSRIQKYKMWEESKHCCIYCG
QPVDVGDFLRGFDVEVEHIIPKSLYFDDSFANKVCSCRSCNKEKNNRTA
YDYMKSKGEKALSDYVERVNTMYTNNQISKTKWQNLLTPVDKISIDFID
RQLRESQYIARKAKEILTSICYNVTATSGSVISFLRHVWGWDTVLHDLN
FDRYKKVGLTEVIEVNHRGSVIRREQIKDWSKRFDHRHHAIDALTIACT
KQAYIQRLNNLRAEEGPDFNKMSLERYIQSQPHFSVAQVREAVDRILVS
FRAGKRAVTPGKRYIRKNRKRISVQSVLIPRGALSEESVYGVIHVWEKD
EQGHVIQKQRAVMKYPITSINREMLDKEKVVDKRIHRILSGRLAQYNDN
PKEAFAKPVYIDKECRIPIRTVRCFAKPAINTLVPLKKDDKGNPVAWVN
PGNNHHVAIYRDEDGKYKERTVTFWEAVDRCRVGIPAIVTQPDTIWDNI
LQRNDISENVLESLPDVKWQFVLSLQQNEMFILGMNEEDYRYAMDQQDY
ALLNKYLYRVQKLSKSDYSFRYHTETSVEDKYDGKPNLKLSMQMGKLKR
VSIKSLLGLNPHKVHISVLGEIKEIS
SEQ ID NO: 382
MAEKQHRWGLDIGTNSIGWAVIALIEGRPAGLVATGSRIFSDGRNPKDG
SSLAVERRGPRQMRRRRDRYLRRRDRFMQALINVGLMPGDAAARKALVT
ENPYVLRQRGLDQALTLPEFGRALFHLNQRRGFQSNRKTDRATAKESGK
VKNAIAAFRAGMGNARTVGEALARRLEDGRPVRARMVGQGKDEHYELYI
AREWIAQEFDALWASQQRFHAEVLADAARDRLRAILLFQRKLLPVPVGK
CFLEPNQPRVAAALPSAQRFRLMQELNHLRVMTLADKRERPLSFQERND
LLAQLVARPKCGFDMLRKIVFGANKEAYRFTIESERRKELKGCDTAAKL
AKVNALGTRWQALSLDEQDRLVCLLLDGENDAVLADALREHYGLTDAQI
DTLLGLSFEDGHMRLGRSALLRVLDALESGRDEQGLPLSYDKAVVAAGY
PAHTADLENGERDALPYYGELLWRYTQDAPTAKNDAERKFGKIANPTVH
IGLNQLRKLVNALIQRYGKPAQIVVELARNLKAGLEEKERIKKQQTANL
ERNERIRQKLQDAGVPDNRENRLRMRLFEELGQGNGLGTPCIYSGRQIS
LQRLFSNDVQVDHILPFSKTLDDSFANKVLAQHDANRYKGNRGPFEAFG
ANRDGYAWDDIRARAAVLPRNKRNRFAETAMQDWLHNETDFLARQLTDT
AYLSRVARQYLTAICSKDDVYVSPGRLTAMLRAKWGLNRVLDGVMEEQG
RPAVKNRDDHRHHAIDAVVIGATDRAMLQQVATLAARAREQDAERLIGD
MPTPWPNFLEDVRAAVARCVVSHKPDHGPEGGLHNDTAYGIVAGPFEDG
RYRVRHRVSLFDLKPGDLSNVRCDAPLQAELEPIFEQDDARAREVALTA
LAERYRQRKVWLEELMSVLPIRPRGEDGKTLPDSAPYKAYKGDSNYCYE
LFINERGRWDGELISTFRANQAAYRRFRNDPARFRRYTAGGRPLLMRLC
INDYIAVGTAAERTIFRVVKMSENKITLAEHFEGGTLKQRDADKDDPFK
YLTKSPGALRDLGARRIFVDLIGRVLDPGIKGD
SEQ ID NO: 383
MIERILGVDLGISSLGWAIVEYDKDDEAANRIIDCGVRLFTAAETPKKK
ESPNKARREARGIRRVLNRRRVRMNMIKKLFLRAGLIQDVDLDGEGGMF
YSKANRADVWELRHDGLYRLLKGDELARVLIHIAKHRGYKFIGDDEADE
ESGKVKKAGVVLRQNFEAAGCRTVGEWLWRERGANGKKRNKHGDYEISI
HRDLLVEEVEAIFVAQQEMRSTIATDALKAAYREIAFFVRPMQRIEKMV
GHCTYFPEERRAPKSAPTAEKFIAISKFFSTVIIDNEGWEQKIIERKTL
EELLDFAVSREKVEFRHLRKFLDLSDNEIFKGLHYKGKPKTAKKREATL
FDPNEPTELEFDKVEAEKKAWISLRGAAKLREALGNEFYGRFVALGKHA
DEATKILTYYKDEGQKRRELTKLPLEAEMVERLVKIGFSDFLKLSLKAI
RDILPAMESGARYDEAVLMLGVPHKEKSAILPPLNKTDIDILNPTVIRA
FAQFRKVANALVRKYGAFDRVHFELAREINTKGEIEDIKESQRKNEKER
KEAADWIAETSFQVPLTRKNILKKRLYIQQDGRCAYTGDVIELERLFDE
GYCEIDHILPRSRSADDSFANKVLCLARANQQKTDRTPYEWFGHDAARW
NAFETRTSAPSNRVRTGKGKIDRLLKKNFDENSEMAFKDRNLNDTRYMA
RAIKTYCEQYWVFKNSHTKAPVQVRSGKLTSVLRYQWGLESKDRESHTH
HAVDAIIIAFSTQGMVQKLSEYYRFKETHREKERPKLAVPLANFRDAVE
EATRIENTETVKEGVEVKRLLISRPPRARVTGQAHEQTAKPYPRIKQVK
NKKKWRLAPIDEEKFESFKADRVASANQKNFYETSTIPRVDVYHKKGKF
HLVPIYLHEMVLNELPNLSLGTNPEAMDENFFKFSIFKDDLISIQTQGT
PKKPAKIIMGYFKNMHGANMVLSSINNSPCEGFTCTPVSMDKKHKDKCK
LCPEENRIAGRCLQGFLDYWSQEGLRPPRKEFECDQGVKFALDVKKYQI
DPLGYYYEVKQEKRLGTIPQMRSAKKLVKK
SEQ ID NO: 384
MNNSIKSKPEVTIGLDLGVGSVGWAIVDNETNIIHHLGSRLFSQAKTAE
DRRSFRGVRRLIRRRKYKLKRFVNLIWKYNSYFGFKNKEDILNNYQEQQ
KLHNTVLNLKSEALNAKIDPKALSWILHDYLKNRGHFYEDNRDFNVYPT
KELAKYFDKYGYYKGIIDSKEDNDNKLEEELTKYKFSNKHWLEEVKKVL
SNQTGLPEKFKEEYESLFSYVRNYSEGPGSINSVSPYGIYHLDEKEGKV
VQKYNNIWDKTIGKCNIFPDEYRAPKNSPIAMIFNEINELSTIRSYSIY
LTGWFINQEFKKAYLNKLLDLLIKTNGEKPIDARQFKKLREETIAESIG
KETLKDVENEEKLEKEDHKWKLKGLKLNTNGKIQYNDLSSLAKFVHKLK
QHLKLDFLLEDQYATLDKINFLQSLFVYLGKHLRYSNRVDSANLKEFSD
SNKLFERILQKQKDGLFKLFEQTDKDDEKILAQTHSLSTKAMLLAITRM
TNLDNDEDNQKNNDKGWNFEAIKNFDQKFIDITKKNNNLSLKQNKRYLD
DRFINDAILSPGVKRILREATKVFNAILKQFSEEYDVTKVVIELARELS
EEKELENTKNYKKLIKKNGDKISEGLKALGISEDEIKDILKSPTKSYKF
LLWLQQDHIDPYSLKEIAFDDIFTKTEKFEIDHIIPYSISFDDSSSNKL
LVLAESNQAKSNQTPYEFISSGNAGIKWEDYEAYCRKFKDGDSSLLDST
QRSKKFAKMMKTDTSSKYDIGFLARNLNDTRYATIVFRDALEDYANNHL
VEDKPMFKVVCINGSVTSFLRKNFDDSSYAKKDRDKNIHHAVDASIISI
FSNETKTLFNQLTQFADYKLFKNTDGSWKKIDPKTGVVTEVTDENWKQI
RVRNQVSEIAKVIEKYIQDSNIERKARYSRKIENKTNISLFNDTVYSAK
KVGYEDQIKRKNLKTLDIHESAKENKNSKVKRQFVYRKLVNVSLLNNDK
LADLFAEKEDILMYRANPWVINLAEQIFNEYTENKKIKSQNVFEKYMLD
LTKEFFEKFSEFLVKSMLRNKTAIIYDDKKNIVHRIKRLKMLSSELKEN
KLSNVIIRSKNQSGTKLSYQDTINSLALMIMRSIDPTAKKQYIRVPLNT
LNLHLGDHDFDLHNMDAYLKKPKFVKYLKANEIGDEYKPWRVLTSGTLL
IHKKDKKLMYISSFQNLNDVIEIKNLIETEYKENDDSDSKKKKKANRFL
MTLSTILNDYILLDAKDNFDILGLSKNRIDEILNSKLGLDKIVK
SEQ ID NO: 385
MGGSEVGTVPVTWRLGVDVGERSIGLAAVSYEEDKPKEILAAVSWIHDG
GVGDERSGASRLALRGMARRARRLRRFRRARLRDLDMLLSELGWTPLPD
KNVSPVDAWLARKRLAEEYVVDETERRRLLGYAVSHMARHRGWRNPWTT
IKDLKNLPQPSDSWERTRESLEARYSVSLEPGTVGQWAGYLLQRAPGIR
LNPTQQSAGRRAELSNATAFETRLRQEDVLWELRCIADVQGLPEDVVSN
VIDAVFCQKRPSVPAERIGRDPLDPSQLRASRACLEFQEYRIVAAVANL
RIRDGSGSRPLSLEERNAVIEALLAQTERSLTWSDIALEILKLPNESDL
TSVPEEDGPSSLAYSQFAPFDETSARIAEFIAKNRRKIPTFAQWWQEQD
RTSRSDLVAALADNSIAGEEEQELLVHLPDAELEALEGLALPSGRVAYS
RLTLSGLTRVMRDDGVDVHNARKTCFGVDDNWRPPLPALHEATGHPVVD
RNLAILRKFLSSATMRWGPPQSIVVELARGASESRERQAEEEAARRAHR
KANDRIRAELRASGLSDPSPADLVRARLLELYDCHCMYCGAPISWENSE
LDHIVPRTDGGSNRHENLAITCGACNKEKGRRPFASWAETSNRVQLRDV
IDRVQKLKYSGNMYWIRDEFSRYKKSVVARLKRRTSDPEVIQSIESTGY
AAVALRDRLLSYGEKNGVAQVAVFRGGVTAEARRWLDISIERLFSRVAI
FAQSTSTKRLDRRHHAVDAVVLTTLTPGVAKTLADARSRRVSAEFWRRP
SDVNRHSTEEPQSPAYRQWKESCSGLGDLLISTAARDSIAVAAPLRLRP
TGALHEETLRAFSEHTVGAAWKGAELRRIVEPEVYAAFLALTDPGGRFL
KVSPSEDVLPADENRHIVLSDRVLGPRDRVKLFPDDRGSIRVRGGAAYI
ASFHHARVFRWGSSHSPSFALLRVSLADLAVAGLLRDGVDVFTAELPPW
TPAWRYASIALVKAVESGDAKQVGWLVPGDELDFGPEGVITAAGDLSMF
LKYFPERHWVVTGFEDDKRINLKPAFLSAEQAEVLRTERSDRPDTLTEA
GEILAQFFPRCWRATVAKVLCHPGLTVIRRTALGQPRWRRGHLPYSWRP
WSADPWSGGTP
SEQ ID NO: 386
MHNKKNITIGFDLGIASIGWAIIDSTTSKILDWGTRTFEERKTANERRA
FRSTRRNIRRKAYRNQRFINLILKYKDLFELKNISDIQRANKKDTENYE
KIISFFTEIYKKCAAKHSNILEVKVKALDSKIEKLDLIWILHDYLENRG
FFYDLEEENVADKYEGIEHPSILLYDFFKKNGFFKSNSSIPKDLGGYSF
SNLQWVNEIKKLFEVQEINPEFSEKFLNLFTSVRDYAKGPGSEHSASEY
GIFQKDEKGKVFKKYDNIWDKTIGKCSFFVEENRSPVNYPSYEIFNLLN
QLINLSTDLKTTNKKIWQLSSNDRNELLDELLKVKEKAKIISISLKKNE
IKKIILKDFGFEKSDIDDQDTIEGRKIIKEEPTTKLEVTKHLLATIYSH
SSDSNWININNILEFLPYLDAICIILDREKSRGQDEVLKKLTEKNIFEV
LKIDREKQLDFVKSIFSNTKFNFKKIGNFSLKAIREFLPKMFEQNKNSE
YLKWKDEEIRRKWEEQKSKLGKTDKKTKYLNPRIFQDEIISPGTKNTFE
QAVLVLNQIIKKYSKENIIDAIIIESPREKNDKKTIEEIKKRNKKGKGK
TLEKLFQILNLENKGYKLSDLETKPAKLLDRLRFYHQQDGIDLYTLDKI
NIDQLINGSQKYEIEHIIPYSMSYDNSQANKILTEKAENLKKGKLIASE
YIKRNGDEFYNKYYEKAKELFINKYKKNKKLDSYVDLDEDSAKNRFRFL
TLQDYDEFQVEFLARNLNDTRYSTKLFYHALVEHFENNEFFTYIDENSS
KHKVKISTIKGHVTKYFRAKPVQKNNGPNENLNNNKPEKIEKNRENNEH
HAVDAAIVAIIGNKNPQIANLLTLADNKTDKKFLLHDENYKENIETGEL
VKIPKFEVDKLAKVEDLKKIIQEKYEEAKKHTAIKFSRKTRTILNGGLS
DETLYGFKYDEKEDKYFKIIKKKLVTSKNEELKKYFENPFGKKADGKSE
YTVLMAQSHLSEFNKLKEIFEKYNGFSNKTGNAFVEYMNDLALKEPTLK
AEIESAKSVEKLLYYNFKPSDQFTYHDNINNKSFKRFYKNIRIIEYKSI
PIKFKILSKHDGGKSFKDTLFSLYSLVYKVYENGKESYKSIPVTSQMRN
FGIDEFDFLDENLYNKEKLDIYKSDFAKPIPVNCKPVFVLKKGSILKKK
SLDIDDFKETKETEEGNYYFISTISKRFNRDTAYGLKPLKLSVVKPVAE
PSTNPIFKEYIPIHLDELGNEYPVKIKEHTDDEKLMCTIK

[1122] Nucleic Acids Encoding Cas9 Molecules

[1123] Nucleic acids encoding the Cas9 molecules or Cas9 polypeptides, e.g., an eaCas9 molecule or eaCas9 polypeptide are provided herein.

[1124] Exemplary nucleic acids encoding Cas9 molecules or Cas9 polypeptides are described in Cong et al., SCIENCE 2013, 399(6121):819-823; Wang et al., CELL 2013, 153(4):910-918; Mali et al., SCIENCE 2013, 399(6121):823-826; Jinek et al., SCIENCE 2012, 337(6096):816-821. Another exemplary nucleic acid encoding a Cas9 molecule or Cas9 polypeptide is shown in FIG. 8.

[1125] In an embodiment, a nucleic acid encoding a Cas9 molecule or Cas9 polypeptide can be a synthetic nucleic acid sequence. For example, the synthetic nucleic acid molecule can be chemically modified, e.g., as described in Section VIII. In an embodiment, the Cas9 mRNA has one or more (e.g., all of the following properties: it is capped, polyadenylated, substituted with 5-methylcytidine and/or pseudouridine.

[1126] In addition, or alternatively, the synthetic nucleic acid sequence can be codon optimized, e.g., at least one non-common codon or less-common codon has been replaced by a common codon. For example, the synthetic nucleic acid can direct the synthesis of an optimized messenger mRNA, e.g., optimized for expression in a mammalian expression system, e.g., described herein.

[1127] In addition, or alternatively, a nucleic acid encoding a Cas9 molecule or Cas9 polypeptide may comprise a nuclear localization sequence (NLS). Nuclear localization sequences are known in the art.

[1128] Provided below is an exemplary codon optimized nucleic acid sequence encoding a Cas9 molecule of S. pyogenes.

(SEQ ID NO: 22)

ATGGATAAAA AGTACAGCAT CGGGCTGGAC ATCGGTACAA
ACTCAGTGGG GTGGGCCGTG ATTACGGACG AGTACAAGGT
ACCCTCCAAA AAATTTAAAG TGCTGGGTAA CACGGACAGA
CACTCTATAA AGAAAAATCT TATTGGAGCC TTGCTGTTCG
ACTCAGGCGA GACAGCCGAA GCCACAAGGT TGAAGCGGAC
CGCCAGGAGG CGGTATACCA GGAGAAAGAA CCGCATATGC
TACCTGCAAG AAATCTTCAG TAACGAGATG GCAAAGGTTG
ACGATAGCTT TTTCCATCGC CTGGAAGAAT CCTTTCTTGT
TGAGGAAGAC AAGAAGCACG AACGGCACCC CATCTTTGGC
AATATTGTCG ACGAAGTGGC ATATCACGAA AAGTACCCGA
CTATCTACCA CCTCAGGAAG AAGCTGGTGG ACTCTACCGA
TAAGGCGGAC CTCAGACTTA TTTATTTGGC ACTCGCCCAC
ATGATTAAAT TTAGAGGACA TTTCTTGATC GAGGGCGACC
TGAACCCGGA CAACAGTGAC GTCGATAAGC TGTTCATCCA
ACTTGTGCAG ACCTACAATC AACTGTTCGA AGAAAACCCT
ATAAATGCTT CAGGAGTCGA CGCTAAAGCA ATCCTGTCCG
CGCGCCTCTC AAAATCTAGA AGACTTGAGA ATCTGATTGC
TCAGTTGCCC GGGGAAAAGA AAAATGGATT GTTTGGCAAC
CTGATCGCCC TCAGTCTCGG ACTGACCCCA AATTTCAAAA
GTAACTTCGA CCTGGCCGAA GACGCTAAGC TCCAGCTGTC
CAAGGACACA TACGATGACG ACCTCGACAA TCTGCTGGCC
CAGATTGGGG ATCAGTACGC CGATCTCTTT TTGGCAGCAA
AGAACCTGTC CGACGCCATC CTGTTGAGCG ATATCTTGAG
AGTGAACACC GAAATTACTA AAGCACCCCT TAGCGCATCT
ATGATCAAGC GGTACGACGA GCATCATCAG GATCTGACCC
TGCTGAAGGC TCTTGTGAGG CAACAGCTCC CCGAAAAATA
CAAGGAAATC TTCTTTGACC AGAGCAAAAA CGGCTACGCT
GGCTATATAG ATGGTGGGGC CAGTCAGGAG GAATTCTATA
AATTCATCAA GCCCATTCTC GAGAAAATGG ACGGCACAGA
GGAGTTGCTG GTCAAACTTA ACAGGGAGGA CCTGCTGCGG
AAGCAGCGGA CCTTTGACAA CGGGTCTATC CCCCACCAGA
TTCATCTGGG CGAACTGCAC GCAATCCTGA GGAGGCAGGA
GGATTTTTAT CCTTTTCTTA AAGATAACCG CGAGAAAATA
GAAAAGATTC TTACATTCAG GATCCCGTAC TACGTGGGAC
CTCTCGCCCG GGGCAATTCA CGGTTTGCCT GGATGACAAG
GAAGTCAGAG GAGACTATTA CACCTTGGAA CTTCGAAGAA
GTGGTGGACA AGGGTGCATC TGCCCAGTCT TTCATCGAGC
GGATGACAAA TTTTGACAAG AACCTCCCTA ATGAGAAGGT
GCTGCCCAAA CATTCTCTGC TCTACGAGTA CTTTACCGTC
TACAATGAAC TGACTAAAGT CAAGTACGTC ACCGAGGGAA
TGAGGAAGCC GGCATTCCTT AGTGGAGAAC AGAAGAAGGC
GATTGTAGAC CTGTTGTTCA AGACCAACAG GAAGGTGACT
GTGAAGCAAC TTAAAGAAGA CTACTTTAAG AAGATCGAAT
GTTTTGACAG TGTGGAAATT TCAGGGGTTG AAGACCGCTT
CAATGCGTCA TTGGGGACTT ACCATGATCT TCTCAAGATC
ATAAAGGACA AAGACTTCCT GGACAACGAA GAAAATGAGG
ATATTCTCGA AGACATCGTC CTCACCCTGA CCCTGTTCGA
AGACAGGGAA ATGATAGAAG AGCGCTTGAA AACCTATGCC
CACCTCTTCG ACGATAAAGT TATGAAGCAG CTGAAGCGCA
GGAGATACAC AGGATGGGGA AGATTGTCAA GGAAGCTGAT
CAATGGAATT AGGGATAAAC AGAGTGGCAA GACCATACTG
GATTTCCTCA AATCTGATGG CTTCGCCAAT AGGAACTTCA
TGCAACTGAT TCACGATGAC TCTCTTACCT TCAAGGAGGA
CATTCAAAAG GCTCAGGTGA GCGGGCAGGG AGACTCCCTT
CATGAACACA TCGCGAATTT GGCAGGTTCC CCCGCTATTA
AAAAGGGCAT CCTTCAAACT GTCAAGGTGG TGGATGAATT
GGTCAAGGTA ATGGGCAGAC ATAAGCCAGA AAATATTGTG
ATCGAGATGG CCCGCGAAAA CCAGACCACA CAGAAGGGCC
AGAAAAATAG TAGAGAGCGG ATGAAGAGGA TCGAGGAGGG
CATCAAAGAG CTGGGATCTC AGATTCTCAA AGAACACCCC
GTAGAAAACA CACAGCTGCA GAACGAAAAA TTGTACTTGT
ACTATCTGCA GAACGGCAGA GACATGTACG TCGACCAAGA
ACTTGATATT AATAGACTGT CCGACTATGA CGTAGACCAT
ATCGTGCCCC AGTCCTTCCT GAAGGACGAC TCCATTGATA
ACAAAGTCTT GACAAGAAGC GACAAGAACA GGGGTAAAAG
TGATAATGTG CCTAGCGAGG AGGTGGTGAA AAAAATGAAG
AACTACTGGC GACAGCTGCT TAATGCAAAG CTCATTACAC
AACGGAAGTT CGATAATCTG ACGAAAGCAG AGAGAGGTGG
CTTGTCTGAG TTGGACAAGG CAGGGTTTAT TAAGCGGCAG
CTGGTGGAAA CTAGGCAGAT CACAAAGCAC GTGGCGCAGA
TTTTGGACAG CCGGATGAAC ACAAAATACG ACGAAAATGA
TAAACTGATA CGAGAGGTCA AAGTTATCAC GCTGAAAAGC
AAGCTGGTGT CCGATTTTCG GAAAGACTTC CAGTTCTACA
AAGTTCGCGA GATTAATAAC TACCATCATG CTCACGATGC
GTACCTGAAC GCTGTTGTCG GGACCGCCTT GATAAAGAAG
TACCCAAAGC TGGAATCCGA GTTCGTATAC GGGGATTACA
AAGTGTACGA TGTGAGGAAA ATGATAGCCA AGTCCGAGCA
GGAGATTGGA AAGGCCACAG CTAAGTACTT CTTTTATTCT
AACATCATGA ATTTTTTTAA GACGGAAATT ACCCTGGCCA
ACGGAGAGAT CAGAAAGCGG CCCCTTATAG AGACAAATGG
TGAAACAGGT GAAATCGTCT GGGATAAGGG CAGGGATTTC
GCTACTGTGA GGAAGGTGCT GAGTATGCCA CAGGTAAATA
TCGTGAAAAA AACCGAAGTA CAGACCGGAG GATTTTCCAA
GGAAAGCATT TTGCCTAAAA GAAACTCAGA CAAGCTCATC
GCCCGCAAGA AAGATTGGGA CCCTAAGAAA TACGGGGGAT
TTGACTCACC CACCGTAGCC TATTCTGTGC TGGTGGTAGC
TAAGGTGGAA AAAGGAAAGT CTAAGAAGCT GAAGTCCGTG
AAGGAACTCT TGGGAATCAC TATCATGGAA AGATCATCCT
TTGAAAAGAA CCCTATCGAT TTCCTGGAGG CTAAGGGTTA
CAAGGAGGTC AAGAAAGACC TCATCATTAA ACTGCCAAAA
TACTCTCTCT TCGAGCTGGA AAATGGCAGG AAGAGAATGT
TGGCCAGCGC CGGAGAGCTG CAAAAGGGAA ACGAGCTTGC
TCTGCCCTCC AAATATGTTA ATTTTCTCTA TCTCGCTTCC
CACTATGAAA AGCTGAAAGG GTCTCCCGAA GATAACGAGC
AGAAGCAGCT GTTCGTCGAA CAGCACAAGC ACTATCTGGA
TGAAATAATC GAACAAATAA GCGAGTTCAG CAAAAGGGTT
ATCCTGGCGG ATGCTAATTT GGACAAAGTA CTGTCTGCTT
ATAACAAGCA CCGGGATAAG CCTATTAGGG AACAAGCCGA
GAATATAATT CACCTCTTTA CACTCACGAA TCTCGGAGCC
CCCGCCGCCT TCAAATACTT TGATACGACT ATCGACCGGA
AACGGTATAC CAGTACCAAA GAGGTCCTCG ATGCCACCCT
CATCCACCAG TCAATTACTG GCCTGTACGA AACACGGATC
GACCTCTCTC AACTGGGCGG CGACTAG

[1129] Provided below is the corresponding amino acid sequence of a S. pyogenes Cas9 molecule.

(SEQ ID NO: 23)

[sequence omitted]

[1130] Provided below is an exemplary codon optimized nucleic acid sequence encoding a Cas9 molecule of N. meningitidis.

(SEQ ID NO: 24)

ATGGCCGCCTTCAAGCCCAACCCCATCAACTACATCCTGGGCCTGGACAT
CGGCATCGCCAGCGTGGGCTGGGCCATGGTGGAGATCGACGAGGACGAGA
ACCCCATCTGCCTGATCGACCTGGGTGTGCGCGTGTTCGAGCGCGCTGAG
GTGCCCAAGACTGGTGACAGTCTGGCTATGGCTCGCCGGCTTGCTCGCTC
TGTTCGGCGCCTTACTCGCCGGCGCGCTCACCGCCTTCTGCGCGCTCGCC
GCCTGCTGAAGCGCGAGGGTGTGCTGCAGGCTGCCGACTTCGACGAGAAC
GGCCTGATCAAGAGCCTGCCCAACACTCCTTGGCAGCTGCGCGCTGCCGC
TCTGGACCGCAAGCTGACTCCTCTGGAGTGGAGCGCCGTGCTGCTGCACC
TGATCAAGCACCGCGGCTACCTGAGCCAGCGCAAGAACGAGGGCGAGACC
GCCGACAAGGAGCTGGGTGCTCTGCTGAAGGGCGTGGCCGACAACGCCCA
CGCCCTGCAGACTGGTGACTTCCGCACTCCTGCTGAGCTGGCCCTGAACA
AGTTCGAGAAGGAGAGCGGCCACATCCGCAACCAGCGCGGCGACTACAGC
CACACCTTCAGCCGCAAGGACCTGCAGGCCGAGCTGATCCTGCTGTTCGA
GAAGCAGAAGGAGTTCGGCAACCCCCACGTGAGCGGCGGCCTGAAGGAGG
GCATCGAGACCCTGCTGATGACCCAGCGCCCCGCCCTGAGCGGCGACGCC
GTGCAGAAGATGCTGGGCCACTGCACCTTCGAGCCAGCCGAGCCCAAGGC
CGCCAAGAACACCTACACCGCCGAGCGCTTCATCTGGCTGACCAAGCTGA
ACAACCTGCGCATCCTGGAGCAGGGCAGCGAGCGCCCCCTGACCGACACC
GAGCGCGCCACCCTGATGGACGAGCCCTACCGCAAGAGCAAGCTGACCTA
CGCCCAGGCCCGCAAGCTGCTGGGTCTGGAGGACACCGCCTTCTTCAAGG
GCCTGCGCTACGGCAAGGACAACGCCGAGGCCAGCACCCTGATGGAGATG
AAGGCCTACCACGCCATCAGCCGCGCCCTGGAGAAGGAGGGCCTGAAGGA
CAAGAAGAGTCCTCTGAACCTGAGCCCCGAGCTGCAGGACGAGATCGGCA
CCGCCTTCAGCCTGTTCAAGACCGACGAGGACATCACCGGCCGCCTGAAG
GACCGCATCCAGCCCGAGATCCTGGAGGCCCTGCTGAAGCACATCAGCTT
CGACAAGTTCGTGCAGATCAGCCTGAAGGCCCTGCGCCGCATCGTGCCCC
TGATGGAGCAGGGCAAGCGCTACGACGAGGCCTGCGCCGAGATCTACGGC
GACCACTACGGCAAGAAGAACACCGAGGAGAAGATCTACCTGCCTCCTAT
CCCCGCCGACGAGATCCGCAACCCCGTGGTGCTGCGCGCCCTGAGCCAGG
CCCGCAAGGTGATCAACGGCGTGGTGCGCCGCTACGGCAGCCCCGCCCGC
ATCCACATCGAGACCGCCCGCGAGGTGGGCAAGAGCTTCAAGGACCGCAA
GGAGATCGAGAAGCGCCAGGAGGAGAACCGCAAGGACCGCGAGAAGGCCG
CCGCCAAGTTCCGCGAGTACTTCCCCAACTTCGTGGGCGAGCCCAAGAGC
AAGGACATCCTGAAGCTGCGCCTGTACGAGCAGCAGCACGGCAAGTGCCT
GTACAGCGGCAAGGAGATCAACCTGGGCCGCCTGAACGAGAAGGGCTACG
TGGAGATCGACCACGCCCTGCCCTTCAGCCGCACCTGGGACGACAGCTTC
AACAACAAGGTGCTGGTGCTGGGCAGCGAGAACCAGAACAAGGGCAACCA
GACCCCCTACGAGTACTTCAACGGCAAGGACAACAGCCGCGAGTGGCAGG
AGTTCAAGGCCCGCGTGGAGACCAGCCGCTTCCCCCGCAGCAAGAAGCAG
CGCATCCTGCTGCAGAAGTTCGACGAGGACGGCTTCAAGGAGCGCAACCT
GAACGACACCCGCTACGTGAACCGCTTCCTGTGCCAGTTCGTGGCCGACC
GCATGCGCCTGACCGGCAAGGGCAAGAAGCGCGTGTTCGCCAGCAACGGC
CAGATCACCAACCTGCTGCGCGGCTTCTGGGGCCTGCGCAAGGTGCGCGC
CGAGAACGACCGCCACCACGCCCTGGACGCCGTGGTGGTGGCCTGCAGCA
CCGTGGCCATGCAGCAGAAGATCACCCGCTTCGTGCGCTACAAGGAGATG
AACGCCTTCGACGGTAAAACCATCGACAAGGAGACCGGCGAGGTGCTGCA
CCAGAAGACCCACTTCCCCCAGCCCTGGGAGTTCTTCGCCCAGGAGGTGA
TGATCCGCGTGTTCGGCAAGCCCGACGGCAAGCCCGAGTTCGAGGAGGCC
GACACCCCCGAGAAGCTGCGCACCCTGCTGGCCGAGAAGCTGAGCAGCCG
CCCTGAGGCCGTGCACGAGTACGTGACTCCTCTGTTCGTGAGCCGCGCCC
CCAACCGCAAGATGAGCGGTCAGGGTCACATGGAGACCGTGAAGAGCGCC
AAGCGCCTGGACGAGGGCGTGAGCGTGCTGCGCGTGCCCCTGACCCAGCT
GAAGCTGAAGGACCTGGAGAAGATGGTGAACCGCGAGCGCGAGCCCAAGC
TGTACGAGGCCCTGAAGGCCCGCCTGGAGGCCCACAAGGACGACCCCGCC
AAGGCCTTCGCCGAGCCCTTCTACAAGTACGACAAGGCCGGCAACCGCAC
CCAGCAGGTGAAGGCCGTGCGCGTGGAGCAGGTGCAGAAGACCGGCGTGT
GGGTGCGCAACCACAACGGCATCGCCGACAACGCCACCATGGTGCGCGTG
GACGTGTTCGAGAAGGGCGACAAGTACTACCTGGTGCCCATCTACAGCTG
GCAGGTGGCCAAGGGCATCCTGCCCGACCGCGCCGTGGTGCAGGGCAAGG
ACGAGGAGGACTGGCAGCTGATCGACGACAGCTTCAACTTCAAGTTCAGC
CTGCACCCCAACGACCTGGTGGAGGTGATCACCAAGAAGGCCCGCATGTT
CGGCTACTTCGCCAGCTGCCACCGCGGCACCGGCAACATCAACATCCGCA
TCCACGACCTGGACCACAAGATCGGCAAGAACGGCATCCTGGAGGGCATC
GGCGTGAAGACCGCCCTGAGCTTCCAGAAGTACCAGATCGACGAGCTGGG
CAAGGAGATCCGCCCCTGCCGCCTGAAGAAGCGCCCTCCTGTGCGCTAA

[1131] Provided below is the corresponding amino acid sequence of a N. meningitidis Cas9 molecule.

(SEQ ID NO: 25)

MAAFKPNPINYILGLDIGIASVGWAMVEIDEDENPICLIDLGVRVFERAE
VPKTGDSLAMARRLARSVRRLTRRRAHRLLRARRLLKREGVLQAADFDEN
GLIKSLPNTPWQLRAAALDRKLTPLEWSAVLLHLIKHRGYLSQRKNEGET
ADKELGALLKGVADNAHALQTGDFRTPAELALNKFEKESGHIRNQRGDYS
HTFSRKDLQAELILLFEKQKEFGNPHVSGGLKEGIETLLMTQRPALSGDA
VQKMLGHCTFEPAEPKAAKNTYTAERFIWLTKLNNLRILEQGSERPLTDT
ERATLMDEPYRKSKLTYAQARKLLGLEDTAFFKGLRYGKDNAEASTLMEM
KAYHAISRALEKEGLKDKKSPLNLSPELQDEIGTAFSLFKTDEDITGRLK
DRIQPEILEALLKHISFDKFVQISLKALRRIVPLMEQGKRYDEACAEIYG
DHYGKKNTEEKIYLPPIPADEIRNPVVLRALSQARKVINGVVRRYGSPAR
IHIETAREVGKSFKDRKEIEKRQEENRKDREKAAAKFREYFPNFVGEPKS
KDILKLRLYEQQHGKCLYSGKEINLGRLNEKGYVEIDHALPFSRTWDDSF
NNKVLVLGSENQNKGNQTPYEYFNGKDNSREWQEFKARVETSRFPRSKKQ
RILLQKFDEDGFKERNLNDTRYVNRFLCQFVADRMRLTGKGKKRVFASNG
QITNLLRGFWGLRKVRAENDRHHALDAVVVACSTVAMQQKITRFVRYKEM
NAFDGKTIDKETGEVLHQKTHFPQPWEFFAQEVMIRVFGKPDGKPEFEEA
DTPEKLRTLLAEKLSSRPEAVHEYVTPLFVSRAPNRKMSGQGHMETVKSA
KRLDEGVSVLRVPLTQLKLKDLEKMVNREREPKLYEALKARLEAHKDDPA
KAFAEPFYKYDKAGNRTQQVKAVRVEQVQKTGVWVRNHNGIADNATMVRV
DVFEKGDKYYLVPIYSWQVAKGILPDRAVVQGKDEEDWQLIDDSFNFKFS
LHPNDLVEVITKKARMFGYFASCHRGTGNINIRIHDLDHKIGKNGILEGI
GVKTALSFQKYQIDELGKEIRPCRLKKRPPVR*

[1132] Provided below is an amino acid sequence of a S. aureus Cas9 molecule.

(SEQ ID NO: 26)

MKRNYILGLDIGITSVGYGIIDYETRDVIDAGVRLFKEANVENNEGRRSK
RGARRLKRRRRHRIQRVKKLLFDYNLLTDHSELSGINPYEARVKGLSQKL
SEEEFSAALLHLAKRRGVHNVNEVEEDTGNELSTKEQISRNSKALEEKYV
AELQLERLKKDGEVRGSINRFKTSDYVKEAKQLLKVQKAYHQLDQSFIDT
YIDLLETRRTYYEGPGEGSPFGWKDIKEWYEMLMGHCTYFPEELRSVKYA
YNADLYNALNDLNNLVITRDENEKLEYYEKFQIIENVFKQKKKPTLKQIA
KEILVNEEDIKGYRVTSTGKPEFTNLKVYHDIKDITARKEIIENAELLDQ
IAKILTIYQSSEDIQEELTNLNSELTQEEIEQISNLKGYTGTHNLSLKAI
NLILDELWHTNDNQIAIFNRLKLVPKKVDLSQQKEIPTTLVDDFILSPVV
KRSFIQSIKVINAIIKKYGLPNDIIIELAREKNSKDAQKMINEMQKRNRQ
TNERIEEIIRTTGKENAKYLIEKIKLHDMQEGKCLYSLEAIPLEDLLNNP
FNYEVDHIIPRSVSFDNSFNNKVLVKQEENSKKGNRTPFQYLSSSDSKIS
YETFKKHILNLAKGKGRISKTKKEYLLEERDINRFSVQKDFINRNLVDTR
YATRGLMNLLRSYFRVNNLDVKVKSINGGFTSFLRRKWKFKKERNKGYKH
HAEDALIIANADFIFKEWKKLDKAKKVMENQMFEEKQAESMPEIETEQEY
KEIFITPHQIKHIKDFKDYKYSHRVDKKPNRELINDTLYSTRKDDKGNTL
IVNNLNGLYDKDNDKLKKLINKSPEKLLMYHHDPQTYQKLKLIMEQYGDE
KNPLYKYYEETGNYLTKYSKKDNGPVIKKIKYYGNKLNAHLDITDDYPNS
RNKVVKLSLKPYRFDVYLDNGVYKFVTVKNLDVIKKENYYEVNSKCYEEA
KKLKKISNQAEFIASFYNNDLIKINGELYRVIGVNNDLLNRIEVNMIDIT
YREYLENMNDKRPPRIIKTIASKTQSIKKYSTDILGNLYEVKSKKHPQII
KKG*

[1133] Provided below is an exemplary codon optimized nucleic acid sequence encoding a Cas9 molecule of S. aureus Cas9.

(SEQ ID NO: 39)

ATGAAAAGGAACTACATTCTGGGGCTGGACATCGGGATTACAAGCGTGGG
GTATGGGATTATTGACTATGAAACAAGGGACGTGATCGACGCAGGCGTCA
GACTGTTCAAGGAGGCCAACGTGGAAAACAATGAGGGACGGAGAAGCAAG
AGGGGAGCCAGGCGCCTGAAACGACGGAGAAGGCACAGAATCCAGAGGGT
GAAGAAACTGCTGTTCGATTACAACCTGCTGACCGACCATTCTGAGCTGA
GTGGAATTAATCCTTATGAAGCCAGGGTGAAAGGCCTGAGTCAGAAGCTG
TCAGAGGAAGAGTTTTCCGCAGCTCTGCTGCACCTGGCTAAGCGCCGAGG
AGTGCATAACGTCAATGAGGTGGAAGAGGACACCGGCAACGAGCTGTCTA
CAAAGGAACAGATCTCACGCAATAGCAAAGCTCTGGAAGAGAAGTATGTC
GCAGAGCTGCAGCTGGAACGGCTGAAGAAAGATGGCGAGGTGAGAGGGTC
AATTAATAGGTTCAAGACAAGCGACTACGTCAAAGAAGCCAAGCAGCTGC
TGAAAGTGCAGAAGGCTTACCACCAGCTGGATCAGAGCTTCATCGATACT
TATATCGACCTGCTGGAGACTCGGAGAACCTACTATGAGGGACCAGGAGA
AGGGAGCCCCTTCGGATGGAAAGACATCAAGGAATGGTACGAGATGCTGA
TGGGACATTGCACCTATTTTCCAGAAGAGCTGAGAAGCGTCAAGTACGCT
TATAACGCAGATCTGTACAACGCCCTGAATGACCTGAACAACCTGGTCAT
CACCAGGGATGAAAACGAGAAACTGGAATACTATGAGAAGTTCCAGATCA
TCGAAAACGTGTTTAAGCAGAAGAAAAAGCCTACACTGAAACAGATTGCT
AAGGAGATCCTGGTCAACGAAGAGGACATCAAGGGCTACCGGGTGACAAG
CACTGGAAAACCAGAGTTCACCAATCTGAAAGTGTATCACGATATTAAGG
ACATCACAGCACGGAAAGAAATCATTGAGAACGCCGAACTGCTGGATCAG
ATTGCTAAGATCCTGACTATCTACCAGAGCTCCGAGGACATCCAGGAAGA
GCTGACTAACCTGAACAGCGAGCTGACCCAGGAAGAGATCGAACAGATTA
GTAATCTGAAGGGGTACACCGGAACACACAACCTGTCCCTGAAAGCTATC
AATCTGATTCTGGATGAGCTGTGGCATACAAACGACAATCAGATTGCAAT
CTTTAACCGGCTGAAGCTGGTCCCAAAAAAGGTGGACCTGAGTCAGCAGA
AAGAGATCCCAACCACACTGGTGGACGATTTCATTCTGTCACCCGTGGTC
AAGCGGAGCTTCATCCAGAGCATCAAAGTGATCAACGCCATCATCAAGAA
GTACGGCCTGCCCAATGATATCATTATCGAGCTGGCTAGGGAGAAGAACA
GCAAGGACGCACAGAAGATGATCAATGAGATGCAGAAACGAAACCGGCAG
ACCAATGAACGCATTGAAGAGATTATCCGAACTACCGGGAAAGAGAACGC
AAAGTACCTGATTGAAAAAATCAAGCTGCACGATATGCAGGAGGGAAAGT
GTCTGTATTCTCTGGAGGCCATCCCCCTGGAGGACCTGCTGAACAATCCA
TTCAACTACGAGGTCGATCATATTATCCCCAGAAGCGTGTCCTTCGACAA
TTCCTTTAACAACAAGGTGCTGGTCAAGCAGGAAGAGAACTCTAAAAAGG
GCAATAGGACTCCTTTCCAGTACCTGTCTAGTTCAGATTCCAAGATCTCT
TACGAAACCTTTAAAAAGCACATTCTGAATCTGGCCAAAGGAAAGGGCCG
CATCAGCAAGACCAAAAAGGAGTACCTGCTGGAAGAGCGGGACATCAACA
GATTCTCCGTCCAGAAGGATTTTATTAACCGGAATCTGGTGGACACAAGA
TACGCTACTCGCGGCCTGATGAATCTGCTGCGATCCTATTTCCGGGTGAA
CAATCTGGATGTGAAAGTCAAGTCCATCAACGGCGGGTTCACATCTTTTC
TGAGGCGCAAATGGAAGTTTAAAAAGGAGCGCAACAAAGGGTACAAGCAC
CATGCCGAAGATGCTCTGATTATCGCAAATGCCGACTTCATCTTTAAGGA
GTGGAAAAAGCTGGACAAAGCCAAGAAAGTGATGGAGAACCAGATGTTCG
AAGAGAAGCAGGCCGAATCTATGCCCGAAATCGAGACAGAACAGGAGTAC
AAGGAGATTTTCATCACTCCTCACCAGATCAAGCATATCAAGGATTTCAA
GGACTACAAGTACTCTCACCGGGTGGATAAAAAGCCCAACAGAGAGCTGA
TCAATGACACCCTGTATAGTACAAGAAAAGACGATAAGGGGAATACCCTG
ATTGTGAACAATCTGAACGGACTGTACGACAAAGATAATGACAAGCTGAA
AAAGCTGATCAACAAAAGTCCCGAGAAGCTGCTGATGTACCACCATGATC
CTCAGACATATCAGAAACTGAAGCTGATTATGGAGCAGTACGGCGACGAG
AAGAACCCACTGTATAAGTACTATGAAGAGACTGGGAACTACCTGACCAA
GTATAGCAAAAAGGATAATGGCCCCGTGATCAAGAAGATCAAGTACTATG
GGAACAAGCTGAATGCCCATCTGGACATCACAGACGATTACCCTAACAGT
CGCAACAAGGTGGTCAAGCTGTCACTGAAGCCATACAGATTCGATGTCTA
TCTGGACAACGGCGTGTATAAATTTGTGACTGTCAAGAATCTGGATGTCA
TCAAAAAGGAGAACTACTATGAAGTGAATAGCAAGTGCTACGAAGAGGCT
AAAAAGCTGAAAAAGATTAGCAACCAGGCAGAGTTCATCGCCTCCTTTTA
CAACAACGACCTGATTAAGATCAATGGCGAACTGTATAGGGTCATCGGGG
TGAACAATGATCTGCTGAACCGCATTGAAGTGAATATGATTGACATCACT
TACCGAGAGTATCTGGAAAACATGAATGATAAGCGCCCCCCTCGAATTAT
CAAAACAATTGCCTCTAAGACTCAGAGTATCAAAAAGTACTCAACCGACA
TTCTGGGAAACCTGTATGAGGTGAAGAGCAAAAAGCACCCTCAGATTATC
AAAAAGGGC

[1134] If any of the above Cas9 sequences are fused with a peptide or polypeptide at the C-terminus, it is understood that the stop codon will be removed.

[1135] Other Cas Molecules and Cas9 Polypeptides

[1136] Various types of Cas molecules or Cas9 polypeptides can be used to practice the inventions disclosed herein. In some embodiments, Cas molecules of Type II Cas systems are used. In other embodiments, Cas molecules of other Cas systems are used. For example, Type I or Type III Cas molecules may be used. Exemplary Cas molecules (and Cas systems) are described, e.g., in Haft et al., PLOS COMPUTATIONAL BIOLOGY 2005, 1(6): e60 and Makarova et al., NATURE REVIEW MICROBIOLOGY 2011, 9:467-477, the contents of both references are incorporated herein by reference in their entirety. Exemplary Cas molecules (and Cas systems) are also shown in Table 22.

TABLE 22
Cas Systems

| | | | Structure of | Families (and | |
|---|---|---|---|---|---|
| | | | encoded | superfamily) of | |
| Gene | System type | Name from | protein (PDB | encoded | |
| name^{‡} | or subtype | Haft et al.^{§} | accessions)^{¶} | protein^{#}** | Representatives |
| cas1 | Type I | cas1 | 3GOD, 3LFX | COG1518 | SERP2463, SPy1047 |
| | Type II | | and 2YZS | | and ygbT |
| | Type III | | | | |
| cas2 | Type I | cas2 | 2IVY, 2I8E and | COG1343 and | SERP2462, SPy1048, |
| | Type II | | 3EXC | COG3512 | SPy1723 (N-terminal |
| | Type III | | | | domain) and ygbF |
| cas3′ | Type I^{‡‡} | cas3 | NA | COG1203 | APE1232 and ygcB |
| cas3″ | Subtype I-A | NA | NA | COG2254 | APE1231 and |
| | Subtype I-B | | | | BH0336 |
| cas4 | Subtype I-A | cas4 and csa1 | NA | COG1468 | APE1239 and |
| | Subtype I-B | | | | BH0340 |
| | Subtype I-C | | | | |
| | Subtype I-D | | | | |
| | Subtype II-B | | | | |
| cas5 | Subtype I-A | cas5a, cas5d, | 3KG4 | COG1688 | APE1234, BH0337, |
| | Subtype I-B | cas5e, cas5h, | | (RAMP) | devS and ygcI |
| | Subtype I-C | cas5p, cas5t | | | |
| | Subtype I-E | and cmx5 | | | |
| cas6 | Subtype I-A | cas6 and cmx6 | 3I4H | COG1583 and | PF1131 and slr7014 |
| | Subtype I-B | | | COG5551 | |
| | Subtype I-D | | | (RAMP) | |
| | Subtype III-A | | | | |
| | Subtype III-B | | | | |
| cas6e | Subtype I-E | cse3 | 1WJ9 | (RAMP) | ygcH |
| cas6f | Subtype I-F | csy4 | 2XLJ | (RAMP) | y1727 |
| cas7 | Subtype I-A | csa2, csd2, | NA | COG1857 and | devR and ygcJ |
| | Subtype I-B | cse4, csh2, | | COG3649 | |
| | Subtype I-C | csp1 and cst2 | | (RAMP) | |
| | Subtype I-E | | | | |
| cas8a1 | Subtype I-A^{‡‡} | cmx1, cst1, | NA | BH0338-like | LA3191^{§§} and |
| | | csx8, csx13 | | | PG2018^{§§} |
| | | and CXXC- | | | |
| | | CXXC | | | |
| cas8a2 | Subtype I-A^{‡‡} | csa4 and csx9 | NA | PH0918 | AF0070, AF1873, |
| | | | | | MJ0385, PF0637, |
| | | | | | PH0918 and |
| | | | | | SSO1401 |
| cas8b | Subtype I-B^{‡‡} | csh1 and | NA | BH0338-like | MTH1090 and |
| | | TM1802 | | | TM1802 |
| cas8c | Subtype I-C^{‡‡} | csd1 and csp2 | NA | BH0338-like | BH0338 |
| cas9 | Type II^{‡‡} | csn1 and csx12 | NA | COG3513 | FTN_0757 and |
| | | | | | SPy1046 |
| cas10 | Type III^{‡‡} | cmr2, csm1 | NA | COG1353 | MTH326, Rv2823c^{§§} |
| | | and csx11 | | | and TM1794^{§§} |
| cas10d | Subtype I-D^{‡‡} | csc3 | NA | COG1353 | slr7011 |
| csy1 | Subtype I-F^{‡‡} | csy1 | NA | y1724-like | y1724 |
| csy2 | Subtype I-F | csy2 | NA | (RAMP) | y1725 |
| csy3 | Subtype I-F | csy3 | NA | (RAMP) | y1726 |
| cse1 | Subtype I-E^{‡‡} | cse1 | NA | YgcL-like | ygcL |
| cse2 | Subtype I-E | cse2 | 2ZCA | YgcK-like | ygcK |
| csc1 | Subtype I-D | csc1 | NA | alr1563-like | alr1563 |
| | | | | (RAMP) | |
| csc2 | Subtype I-D | csc1 and csc2 | NA | COG1337 | slr7012 |
| | | | | (RAMP) | |
| csa5 | Subtype I-A | csa5 | NA | AF1870 | AF1870, MJ0380, |
| | | | | | PF0643 and |
| | | | | | SSO1398 |
| csn2 | Subtype II-A | csn2 | NA | SPy1049-like | SPy1049 |
| csm2 | Subtype III-A^{‡‡} | csm2 | NA | COG1421 | MTH1081 and |
| | | | | | SERP2460 |
| csm3 | Subtype III-A | csc2 and csm3 | NA | COG1337 | MTH1080 and |
| | | | | (RAMP) | SERP2459 |
| csm4 | Subtype III-A | csm4 | NA | COG1567 | MTH1079 and |
| | | | | (RAMP) | SERP2458 |
| csm5 | Subtype III-A | csm5 | NA | COG1332 | MTH1078 and |
| | | | | (RAMP) | SERP2457 |
| csm6 | Subtype III-A | APE2256 and | 2WTE | COG1517 | APE2256 and |
| | | csm6 | | | SSO1445 |
| cmr1 | Subtype III-B | cmr1 | NA | COG1367 | PF1130 |
| | | | | (RAMP) | |
| cmr3 | Subtype III-B | cmr3 | NA | COG1769 | PF1128 |
| | | | | (RAMP) | |
| cmr4 | Subtype III-B | cmr4 | NA | COG1336 | PF1126 |
| | | | | (RAMP) | |
| cmr5 | Subtype III-B^{‡‡} | cmr5 | 2ZOP and | COG3337 | MTH324 and PF1125 |
| | | | 2OEB | | |
| cmr6 | Subtype III-B | cmr6 | NA | COG1604 | PF1124 |
| | | | | (RAMP) | |
| csb1 | Subtype I-U | GSU0053 | NA | (RAMP) | Balac_1306 and |
| | | | | | GSU0053 |
| csb2 | Subtype I-U^{§§} | NA | NA | (RAMP) | Balac_1305 and |
| | | | | | GSU0054 |
| csb3 | Subtype I-U | NA | NA | (RAMP) | Balac_1303^{§§} |
| csx17 | Subtype I-U | NA | NA | NA | Btus_2683 |
| csx14 | Subtype I-U | NA | NA | NA | GSU0052 |
| csx10 | Subtype I-U | csx10 | NA | (RAMP) | Caur_2274 |
| csx16 | Subtype III-U | VVA1548 | NA | NA | VVA1548 |
| csaX | Subtype III-U | csaX | NA | NA | SSO1438 |
| csx3 | Subtype III-U | csx3 | NA | NA | AF1864 |
| csx1 | Subtype III-U | csa3, csx1, | 1XMX and 2I71 | COG1517 and | MJ1666, NE0113, |
| | | csx2, DXTHG, | | COG4006 | PF1127 and TM1812 |
| | | NE0113 and | | | |
| | | TIGR02710 | | | |
| csx15 | Unknown | NA | NA | TTE2665 | TTE2665 |
| csf1 | Type U | csf1 | NA | NA | AFE_1038 |
| csf2 | Type U | csf2 | NA | (RAMP) | AFE_1039 |
| csf3 | Type U | csf3 | NA | (RAMP) | AFE_1040 |
| csf4 | Type U | csf4 | NA | NA | AFE_1037 |

### IV. Functional Analysis of Candidate Molecules

[1137] Candidate Cas9 molecules, candidate gRNA molecules, candidate Cas9 molecule/gRNA molecule complexes, can be evaluated by art-known methods or as described herein. For example, exemplary methods for evaluating the endonuclease activity of Cas9 molecule are described, e.g., in Jinek et al., SCIENCE 2012, 337(6096):816-821.

[1138] Binding and Cleavage Assay: Testing the Endonuclease Activity of Cas9 Molecule

[1139] The ability of a Cas9 molecule/gRNA molecule complex to bind to and cleave a target nucleic acid can be evaluated in a plasmid cleavage assay. In this assay, synthetic or in vitro-transcribed gRNA molecule is pre-annealed prior to the reaction by heating to 95° C. and slowly cooling down to room temperature. Native or restriction digest-linearized plasmid DNA (300 ng (˜8 nM)) is incubated for 60 min at 37° C. with purified Cas9 protein molecule (50-500 nM) and gRNA (50-500 nM, 1:1) in a Cas9 plasmid cleavage buffer (20 mM HEPES pH 7.5, 150 mM KCl, 0.5 mM DTT, 0.1 mM EDTA) with or without 10 mM MgCl₂. The reactions are stopped with 5×DNA loading buffer (30% glycerol, 1.2% SDS, 250 mM EDTA), resolved by a 0.8 or 1% agarose gel electrophoresis and visualized by ethidium bromide staining. The resulting cleavage products indicate whether the Cas9 molecule cleaves both DNA strands, or only one of the two strands. For example, linear DNA products indicate the cleavage of both DNA strands. Nicked open circular products indicate that only one of the two strands is cleaved.

[1140] Alternatively, the ability of a Cas9 molecule/gRNA molecule complex to bind to and cleave a target nucleic acid can be evaluated in an oligonucleotide DNA cleavage assay. In this assay, DNA oligonucleotides (10 pmol) are radiolabeled by incubating with 5 units T4 polynucleotide kinase and ˜3-6 pmol (˜20-40 mCi) [γ-32P]-ATP in 1× T4 polynucleotide kinase reaction buffer at 37° C. for 30 min, in a 50 μL reaction. After heat inactivation (65° C. for 20 min), reactions are purified through a column to remove unincorporated label. Duplex substrates (100 nM) are generated by annealing labeled oligonucleotides with equimolar amounts of unlabeled complementary oligonucleotide at 95° C. for 3 min, followed by slow cooling to room temperature. For cleavage assays, gRNA molecules are annealed by heating to 95° C. for 30 s, followed by slow cooling to room temperature. Cas9 (500 nM final concentration) is pre-incubated with the annealed gRNA molecules (500 nM) in cleavage assay buffer (20 mM HEPES pH 7.5, 100 mM KCl, 5 mM MgCl2, 1 mM DTT, 5% glycerol) in a total volume of 9 μl. Reactions are initiated by the addition of 1 μl target DNA (10 nM) and incubated for 1 h at 37° C. Reactions are quenched by the addition of 20 μl of loading dye (5 mM EDTA, 0.025% SDS, 5% glycerol in formamide) and heated to 95° C. for 5 min. Cleavage products are resolved on 12% denaturing polyacrylamide gels containing 7 M urea and visualized by phosphorimaging. The resulting cleavage products indicate that whether the complementary strand, the non-complementary strand, or both, are cleaved.

[1141] One or both of these assays can be used to evaluate the suitability of a candidate gRNA molecule or candidate Cas9 molecule.

[1142] Binding Assay: Testing the Binding of Cas9 Molecule to Target DNA

[1143] Exemplary methods for evaluating the binding of Cas9 molecule to target DNA are described, e.g., in Jinek et al., SCIENCE 2012; 337(6096):816-821.

[1144] For example, in an electrophoretic mobility shift assay, target DNA duplexes are formed by mixing of each strand (10 nmol) in deionized water, heating to 95° C. for 3 min and slow cooling to room temperature. All DNAs are purified on 8% native gels containing 1×TBE. DNA bands are visualized by UV shadowing, excised, and eluted by soaking gel pieces in DEPC-treated H₂O. Eluted DNA is ethanol precipitated and dissolved in DEPC-treated H₂O. DNA samples are 5′ end labeled with [γ-32P]-ATP using T4 polynucleotide kinase for 30 min at 37° C. Polynucleotide kinase is heat denatured at 65° C. for 20 min, and unincorporated radiolabel is removed using a column. Binding assays are performed in buffer containing 20 mM HEPES pH 7.5, 100 mM KCl, 5 mM MgCl₂, 1 mM DTT and 10% glycerol in a total volume of 10 μl. Cas9 protein molecule is programmed with equimolar amounts of pre-annealed gRNA molecule and titrated from 100 pM to 1 μM. Radiolabeled DNA is added to a final concentration of 20 pM. Samples are incubated for 1 h at 37° C. and resolved at 4° C. on an 8% native polyacrylamide gel containing 1×TBE and 5 mM MgCl₂. Gels are dried and DNA visualized by phosphorimaging.

[1145] Differential Scanning Flourimetry (DSF)

[1146] The thermostability of Cas9-gRNA ribonucleoprotein (RNP) complexes can be measured via DSF. This technique measures the thermostability of a protein, which can increase under favorable conditions such as the addition of a binding RNA molecule, e.g., a gRNA.

[1147] The assay is performed using two different protocols, one to test the best stoichiometric ratio of gRNA:Cas9 protein and another to determine the best solution conditions for RNP formation.

[1148] To determine the best solution to form RNP complexes, a 2 uM solution of Cas9 in water+10× SYPRO Orange® (Life Techonologies cat#S-6650) and dispensed into a 384 well plate. An equimolar amount of gRNA diluted in solutions with varied pH and salt is then added. After incubating at room temperature for 10′ and brief centrifugation to remove any bubbles, a Bio-Rad CFX384™ Real-Time System C1000 Touch™ Thermal Cycler with the Bio-Rad CFX Manager software is used to run a gradient from 20° C. to 90° C. with a 1° increase in temperature every 10 seconds.

[1149] The second assay consists of mixing various concentrations of gRNA with 2 uM Cas9 in optimal buffer from assay 1 above and incubating at RT for 10′ in a 384 well plate. An equal volume of optimal buffer+10× SYPRO Orange® (Life Techonologies cat#S-6650) is added and the plate sealed with Microseal® B adhesive (MSB-1001). Following brief centrifugation to remove any bubbles, a Bio-Rad CFX384™ Real-Time System C1000 Touch™ Thermal Cycler with the Bio-Rad CFX Manager software is used to run a gradient from 20° C. to 90° C. with a 1° increase in temperature every 10 seconds.

### V. Genome Editing Approaches

[1150] Described herein are methods for targeted knockout of one or more copies (e.g., 1, 2, 3, 4, 5, 6, 7, 8, 9, 10 or more copies) of the UL19, UL30, UL48 and/or UL54 gene, e.g., using one or more of the approaches or pathways described herein, e.g., using NHEJ.

[1151] V.1 NHEJ Approaches for Gene Targeting

[1152] As described herein, nuclease-induced non-homologous end-joining (NHEJ) can be used to target gene-specific knockouts. Nuclease-induced NHEJ can also be used to remove (e.g., delete) sequence (e.g., coding sequence, non-coding sequence, or sequence insertions) in a gene of interest.

[1153] While not wishing to be bound by theory, it is believed that, in an embodiment, the genomic alterations associated with the methods described herein rely on nuclease-induced NHEJ and the error-prone nature of the NHEJ repair pathway. NHEJ repairs a double-strand break in the DNA by joining together the two ends; however, generally, the original sequence is restored only if two compatible ends, exactly as they were formed by the double-strand break, are perfectly ligated. The DNA ends of the double-strand break are frequently the subject of enzymatic processing, resulting in the addition or removal of nucleotides, at one or both strands, prior to rejoining of the ends. This results in the presence of insertion and/or deletion (indel) mutations in the DNA sequence at the site of the NHEJ repair. Two-thirds of these mutations typically alter the reading frame and, therefore, produce a non-functional protein. Additionally, mutations that maintain the reading frame, but which insert or delete a significant amount of sequence, can destroy functionality of the protein. This is locus dependent as mutations in critical functional domains are likely less tolerable than mutations in non-critical regions of the protein.

[1154] The indel mutations generated by NHEJ are unpredictable in nature; however, at a given break site certain indel sequences are favored and are over represented in the population, likely due to small regions of microhomology. The lengths of deletions can vary widely; most commonly in the 1-50 bp range, but they can easily reach greater than 100-200 bp. Insertions tend to be shorter and often include short duplications of the sequence immediately surrounding the break site. However, it is possible to obtain large insertions, and in these cases, the inserted sequence has often been traced to other regions of the genome or to plasmid DNA present in the cells.

[1155] Because NHEJ is a mutagenic process, it can also be used to delete small sequence motifs as long as the generation of a specific final sequence is not required. If a double-strand break is targeted near to a short target sequence, the deletion mutations caused by the NHEJ repair often span, and therefore remove, the unwanted nucleotides. For the deletion of larger DNA segments, introducing two double-strand breaks, one on each side of the sequence, can result in NHEJ between the ends with removal of the entire intervening sequence. Both of these approaches can be used to delete specific DNA sequences; however, the error-prone nature of NHEJ may still produce indel mutations at the site of repair.

[1156] Both double strand cleaving eaCas9 molecules and single strand, or nickase, eaCas9 molecules can be used in the methods and compositions described herein to generate NHEJ-mediated indels. NHEJ-mediated indels targeted to the the gene, e.g., a coding region, e.g., an early coding region of a gene, of interest can be used to knockout (i.e., eliminate expression of) a gene of interest. For example, early coding region of a gene of interest includes sequence immediately following a transcription start site, within a first exon of the coding sequence, or within 500 bp of the transcription start site (e.g., less than 500, 450, 400, 350, 300, 250, 200, 150, 100 or 50 bp).

[1157] In some embodiments, NHEJ-mediated indels are introduced into more than one HSV-1 target gene. In an embodiment, in which Cas9 double-stranded nuclease or Cas9 single-stranded nickase is used to introduce mutations into two HSV-1 genes, e.g., UL19 and UL30, UL19 and UL48, UL19 and UL54, UL30 and UL48, UL30 and UL54, or UL48 and UL54, individual gRNAs or gRNA pairs targeting both genes are provided together with Cas9 double-stranded nuclease or single-stranded nickase. In an embodiment, in which Cas9 double-stranded nuclease or Cas9 single-stranded nickase is used to introduce mutations into three HSV-1 genes, e.g., UL19 and UL30 and UL48, or UL19 and UL30 and UL54, UL19 and UL48 and UL54, or UL30 and UL48 and UL54, individual gRNAs or gRNA pairs targeting all three genes are provided together with Cas9 double-stranded nuclease or single-stranded nickase. In an embodiment, in which Cas9 double-stranded nuclease or Cas9 single-stranded nickase is used to introduce mutations into four HSV-1 genes, e.g., UL19 and UL30 and UL48 and UL54, individual gRNAs or gRNA pairs targeting all four genes are provided together with Cas9 double-stranded nuclease or single-stranded nickase.

[1158] Placement of Double Strand or Single Strand Breaks Relative to the Target Position

[1159] In an embodiment, in which a gRNA and Cas9 nuclease generate a double strand break for the purpose of inducing NHEJ-mediated indels, a gRNA, e.g., a unimolecular (or chimeric) or modular gRNA molecule, is configured to position one double-strand break in close proximity to a nucleotide of the target position, e.g., a HSV-1 target UL19 position, a HSV-1 target UL30 position, a HSV-1 target UL48 position or a HSV-1 target UL54 position. In an embodiment, the cleavage site is between 0-30 bp away from the target position (e.g., less than 30, 25, 20, 15, 10, 9, 8, 7, 6, 5, 4, 3, 2 or 1 bp from the target position).

[1160] In an embodiment, in which two gRNAs complexing with Cas9 nickases induce two single strand breaks for the purpose of inducing NHEJ-mediated indels, two gRNAs, e.g., independently, unimolecular (or chimeric) or modular gRNA, are configured to position two single-strand breaks to provide for NHEJ repair a nucleotide of the target position. In an embodiment, the gRNAs are configured to position cuts at the same position, or within a few nucleotides of one another, on different strands, essentially mimicking a double strand break. In an embodiment, the closer nick is between 0-30 bp away from the target position (e.g., less than 30, 25, 20, 15, 10, 9, 8, 7, 6, 5, 4, 3, 2 or 1 bp from the target position), and the two nicks are within 25-55 bp of each other (e.g., between 25 to 50, 25 to 45, 25 to 40, 25 to 35, 25 to 30, 50 to 55, 45 to 55, 40 to 55, 35 to 55, 30 to 55, 30 to 50, 35 to 50, 40 to 50, 45 to 50, 35 to 45, or 40 to 45 bp) and no more than 100 bp away from each other (e.g., no more than 90, 80, 70, 60, 50, 40, 30, 20 or 10 bp). In an embodiment, the gRNAs are configured to place a single strand break on either side of a nucleotide of the target position.

[1161] Both double strand cleaving eaCas9 molecules and single strand, or nickase, eaCas9 molecules can be used in the methods and compositions described herein to generate breaks both sides of a target position. Double strand or paired single strand breaks may be generated on both sides of a target position to remove the nucleic acid sequence between the two cuts (e.g., the region between the two breaks in deleted). In one embodiment, two gRNAs, e.g., independently, unimolecular (or chimeric) or modular gRNA, are configured to position a double-strand break on both sides of a target position. In an alternate embodiment, three gRNAs, e.g., independently, unimolecular (or chimeric) or modular gRNA, are configured to position a double strand break (i.e., one gRNA complexes with a cas9 nuclease) and two single strand breaks or paired single stranded breaks (i.e., two gRNAs complex with Cas9 nickases) on either side of the target position. In another embodiment, four gRNAs, e.g., independently, unimolecular (or chimeric) or modular gRNA, are configured to generate two pairs of single stranded breaks (i.e., two pairs of two gRNAs complex with Cas9 nickases) on either side of the target position. The double strand break(s) or the closer of the two single strand nicks in a pair will ideally be within 0-500 bp of the target position (e.g., no more than 450, 400, 350, 300, 250, 200, 150, 100, 50 or 25 bp from the target position). When nickases are used, the two nicks in a pair are within 25-55 bp of each other (e.g., between 25 to 50, 25 to 45, 25 to 40, 25 to 35, 25 to 30, 50 to 55, 45 to 55, 40 to 55, 35 to 55, 30 to 55, 30 to 50, 35 to 50, 40 to 50, 45 to 50, 35 to 45, or 40 to 45 bp) and no more than 100 bp away from each other (e.g., no more than 90, 80, 70, 60, 50, 40, 30, 20 or 10 bp).

[1162] V.2 Single-Strand Annealing

[1163] Single strand annealing (SSA) is another DNA repair process that repairs a double-strand break between two repeat sequences present in a target nucleic acid. Repeat sequences utilized by the SSA pathway are generally greater than 30 nucleotides in length. Resection at the break ends occurs to reveal repeat sequences on both strands of the target nucleic acid. After resection, single strand overhangs containing the repeat sequences are coated with RPA protein to prevent the repeats sequences from inappropriate annealing, e.g., to themselves. RAD52 binds to and each of the repeat sequences on the overhangs and aligns the sequences to enable the annealing of the complementary repeat sequences. After annealing, the single-strand flaps of the overhangs are cleaved. New DNA synthesis fills in any gaps, and ligation restores the DNA duplex. As a result of the processing, the DNA sequence between the two repeats is deleted. The length of the deletion can depend on many factors including the location of the two repeats utilized, and the pathway or processivity of the resection.

[1164] In contrast to HDR pathways, SSA does not require a template nucleic acid to alter or correct a target nucleic acid sequence. Instead, the complementary repeat sequence is utilized.

[1165] V. 3 Other DNA Repair Pathways

[1166] SSBR (Single Strand Break Repair)

[1167] Single-stranded breaks (SSB) in the genome are repaired by the SSBR pathway, which is a distinct mechanism from the DSB repair mechanisms discussed above. The SSBR pathway has four major stages: SSB detection, DNA end processing, DNA gap filling, and DNA ligation. A more detailed explanation is given in Caldecott, Nature Reviews Genetics 9, 619-631 (August 2008), and a summary is given here.

[1168] In the first stage, when a SSB forms, PARP1 and/or PARP2 recognize the break and recruit repair machinery. The binding and activity of PARP1 at DNA breaks is transient and it seems to accelerate SSBr by promoting the focal accumulation or stability of SSBr protein complexes at the lesion. Arguably the most important of these SSBr proteins is XRCC1, which functions as a molecular scaffold that interacts with, stabilizes, and stimulates multiple enzymatic components of the SSBr process including the protein responsible for cleaning the DNA 3′ and 5′ ends. For instance, XRCC1 interacts with several proteins (DNA polymerase beta, PNK, and three nucleases, APE1, APTX, and APLF) that promote end processing. APE1 has endonuclease activity. APLF exhibits endonuclease and 3′ to 5′ exonuclease activities. APTX has endonuclease and 3′ to 5′ exonuclease activity.

[1169] This end processing is an important stage of SSBR since the 3′- and/or 5′-termini of most, if not all, SSBs are ‘damaged’. End processing generally involves restoring a damaged 3′-end to a hydroxylated state and and/or a damaged 5′ end to a phosphate moiety, so that the ends become ligation-competent. Enzymes that can process damaged 3′ termini include PNKP, APE1, and TDP1. Enzymes that can process damaged 5′ termini include PNKP, DNA polymerase beta, and APTX. LIG3 (DNA ligase III) can also participate in end processing. Once the ends are cleaned, gap filling can occur.

[1170] At the DNA gap filling stage, the proteins typically present are PARP1, DNA polymerase beta, XRCC1, FEN1 (flap endonculease 1), DNA polymerase delta/epsilon, PCNA, and LIG1. There are two ways of gap filling, the short patch repair and the long patch repair. Short patch repair involves the insertion of a single nucleotide that is missing. At some SSBs, “gap filling” might continue displacing two or more nucleotides (displacement of up to 12 bases have been reported). FEN1 is an endonuclease that removes the displaced 5′-residues. Multiple DNA polymerases, including Pol β, are involved in the repair of SSBs, with the choice of DNA polymerase influenced by the source and type of SSB.

[1171] In the fourth stage, a DNA ligase such as LIG1 (Ligase I) or LIG3 (Ligase III) catalyzes joining of the ends. Short patch repair uses Ligase III and long patch repair uses Ligase I.

[1172] Sometimes, SSBR is replication-coupled. This pathway can involve one or more of CtIP, MRN, ERCC1, and FEN1. Additional factors that may promote SSBR include: aPARP, PARP1, PARP2, PARG, XRCC1, DNA polymerase b, DNA polymerase d, DNA polymerase e, PCNA, LIG1, PNK, PNKP, APE1, APTX, APLF, TDP1, LIG3, FEN1, CtIP, MRN, and ERCC1.

[1173] MMR (Mismatch Repair)

[1174] Cells contain three excision repair pathways: MMR, BER, and NER. The excision repair pathways hace a common feature in that they typically recognize a lesion on one strand of the DNA, then exo/endonucleaseases remove the lesion and leave a 1-30 nucleotide gap that is sub-sequentially filled in by DNA polymerase and finally sealed with ligase. A more complete picture is given in Li, Cell Research (2008) 18:85-98, and a summary is provided here.

[1175] Mismatch repair (MMR) operates on mispaired DNA bases.

[1176] The MSH2/6 or MSH2/3 complexes both have ATPases activity that plays an important role in mismatch recognition and the initiation of repair. MSH2/6 preferentially recognizes base-base mismatches and identifies mispairs of 1 or 2 nucleotides, while MSH2/3 preferentially recognizes larger ID mispairs.

[1177] hMLH1 heterodimerizes with hPMS2 to form hMutL a which possesses an ATPase activity and is important for multiple steps of MMR. It possesses a PCNA/replication factor C (RFC)-dependent endonuclease activity which plays an important role in 3′ nick-directed MMR involving EXO1. (EXO1 is a participant in both HR and MMR.) It regulates termination of mismatch-provoked excision. Ligase I is the relevant ligase for this pathway. Additional factors that may promote MMR include: EXO1, MSH2, MSH3, MSH6, MLH1, PMS2, MLH3, DNA Pol d, RPA, HMGB1, RFC, and DNA ligase I.

[1178] Base Excision Repair (BER)

[1179] The base excision repair (BER) pathway is active throughout the cell cycle; it is responsible primarily for removing small, non-helix-distorting base lesions from the genome. In contrast, the related Nucleotide Excision Repair pathway (discussed in the next section) repairs bulky helix-distorting lesions. A more detailed explanation is given in Caldecott, Nature Reviews Genetics 9, 619-631 (August 2008), and a summary is given here.

[1180] Upon DNA base damage, base excision repair (BER) is initiated and the process can be simplified into five major steps: (a) removal of the damaged DNA base; (b) incision of the subsequent a basic site; (c) clean-up of the DNA ends; (d) insertion of the correct nucleotide into the repair gap; and (e) ligation of the remaining nick in the DNA backbone. These last steps are similar to the SSBR.

[1181] In the first step, a damage-specific DNA glycosylase excises the damaged base through cleavage of the N-glycosidic bond linking the base to the sugar phosphate backbone. Then AP endonuclease-1 (APE1) or bifunctional DNA glycosylases with an associated lyase activity incised the phosphodiester backbone to create a DNA single strand break (SSB). The third step of BER involves cleaning-up of the DNA ends. The fourth step in BER is conducted by Pol β that adds a new complementary nucleotide into the repair gap and in the final step XRCC1/Ligase III seals the remaining nick in the DNA backbone. This completes the short-patch BER pathway in which the majority (˜80%) of damaged DNA bases are repaired. However, if the 5′-ends in step 3 are resistant to end processing activity, following one nucleotide insertion by Pol β there is then a polymerase switch to the replicative DNA polymerases, Pol δ/ε, which then add ˜2-8 more nucleotides into the DNA repair gap. This creates a 5′-flap structure, which is recognized and excised by flap endonuclease-1 (FEN-1) in association with the processivity factor proliferating cell nuclear antigen (PCNA). DNA ligase I then seals the remaining nick in the DNA backbone and completes long-patch BER. Additional factors that may promote the BER pathway include: DNA glycosylase, APE1, Polb, Pold, Pole, XRCC1, Ligase III, FEN-1, PCNA, RECQL4, WRN, MYH, PNKP, and APTX.

[1182] Nucleotide Excision Repair (NER)

[1183] Nucleotide excision repair (NER) is an important excision mechanism that removes bulky helix-distorting lesions from DNA. Additional details about NER are given in Marteijn et al., Nature Reviews Molecular Cell Biology 15, 465-481 (2014), and a summary is given here. NER a broad pathway encompassing two smaller pathways: global genomic NER (GG-NER) and transcription coupled repair NER (TC-NER). GG-NER and TC-NER use different factors for recognizing DNA damage. However, they utilize the same machinery for lesion incision, repair, and ligation.

[1184] Once damage is recognized, the cell removes a short single-stranded DNA segment that contains the lesion. Endonucleases XPF/ERCC1 and XPG (encoded by ERCC5) remove the lesion by cutting the damaged strand on either side of the lesion, resulting in a single-strand gap of 22-30 nucleotides. Next, the cell performs DNA gap filling synthesis and ligation. Involved in this process are: PCNA, RFC, DNA Pol δ, DNA Pol ε or DNA Pol and DNA ligase I or XRCC1/Ligase III. Replicating cells tend to use DNA pol c and DNA ligase I, while non-replicating cells tend to use DNA Pol δ, DNA Pol κ, and the XRCC1/Ligase III complex to perform the ligation step.

[1185] NER can involve the following factors: XPA-G, POLH, XPF, ERCC1, XPA-G, and LIG1. Transcription-coupled NER (TC-NER) can involve the following factors: CSA, CSB, XPB, XPD, XPG, ERCC1, and TTDA. Additional factors that may promote the NER repair pathway include XPA-G, POLH, XPF, ERCC1, XPA-G, LIG1, CSA, CSB, XPA, XPB, XPC, XPD, XPF, XPG, TTDA, UVSSA, USP7, CETN2, RAD23B, UV-DDB, CAK subcomplex, RPA, and PCNA.

[1186] Interstrand Crosslink (ICL)

[1187] A dedicated pathway called the ICL repair pathway repairs interstrand crosslinks. Interstrand crosslinks, or covalent crosslinks between bases in different DNA strand, can occur during replication or transcription. ICL repair involves the coordination of multiple repair processes, in particular, nucleolytic activity, translesion synthesis (TLS), and HDR. Nucleases are recruited to excise the ICL on either side of the crosslinked bases, while TLS and HDR are coordinated to repair the cut strands. ICL repair can involve the following factors: endonucleases, e.g., XPF and RAD51C, endonucleases such as RAD51, translesion polymerases, e.g., DNA polymerase zeta and Rev1), and the Fanconi anemia (FA) proteins, e.g., FancJ.

[1188] Other Pathways

[1189] Several other DNA repair pathways exist in mammals.

[1190] Translesion synthesis (TLS) is a pathway for repairing a single stranded break left after a defective replication event and involves translesion polymerases, e.g., DNA pol□ and Rev1.

[1191] Error-free postreplication repair (PRR) is another pathway for repairing a single stranded break left after a defective replication event.

[1192] V.4 Examples of gRNAs in Genome Editing Methods

[1193] gRNA molecules as described herein can be used with Cas9 molecules that generate a double strand break or a single strand break to alter the sequence of a target nucleic acid, e.g., a target position or target genetic signature. gRNA molecules useful in these methods are described below.

[1194] In an embodiment, the gRNA, e.g., a chimeric gRNA, is configured such that it comprises one or more of the following properties;

[1195] a) it can position, e.g., when targeting a Cas9 molecule that makes double strand breaks, a double strand break (i) within 50, 100, 150, 200, 250, 300, 350, 400, 450, or 500 nucleotides of a target position, or (ii) sufficiently close that the target position is within the region of end resection;

[1196] b) it has a targeting domain of at least 16 nucleotides, e.g., a targeting domain of (i) 16, (ii), 17, (iii) 18, (iv) 19, (v) 20, (vi) 21, (vii) 22, (viii) 23, (ix) 24, (x) 25, or (xi) 26 nucleotides; and

[1197] c)
[1198] (i) the proximal and tail domain, when taken together, comprise at least 15, 18, 20, 25, 30, 31, 35, 40, 45, 49, 50, or 53 nucleotides, e.g., at least 15, 18, 20, 25, 30, 31, 35, 40, 45, 49, 50, or 53 nucleotides from a naturally occurring S. pyogenes, S. thermophilus, S. aureus, or N. meningitidis tail and proximal domain, or a sequence that differs by no more than 1, 2, 3, 4, 5; 6, 7, 8, 9 or 10 nucleotides therefrom;
[1199] (ii) there are at least 15, 18, 20, 25, 30, 31, 35, 40, 45, 49, 50, or 53 nucleotides 3′ to the last nucleotide of the second complementarity domain, e.g., at least 15, 18, 20, 25, 30, 31, 35, 40, 45, 49, 50, or 53 nucleotides from the corresponding sequence of a naturally occurring S. pyogenes, S. thermophilus, S. aureus, or N. meningitidis gRNA, or a sequence that differs by no more than 1, 2, 3, 4, 5; 6, 7, 8, 9 or 10 nucleotides therefrom;
[1200] (iii) there are at least 16, 19, 21, 26, 31, 32, 36, 41, 46, 50, 51, or 54 nucleotides 3′ to the last nucleotide of the second complementarity domain that is complementary to its corresponding nucleotide of the first complementarity domain, e.g., at least 16, 19, 21, 26, 31, 32, 36, 41, 46, 50, 51, or 54 nucleotides from the corresponding sequence of a naturally occurring S. pyogenes, S. thermophilus, S. aureus, or N. meningitidis gRNA, or a sequence that differs by no more than 1, 2, 3, 4, 5; 6, 7, 8, 9 or 10 nucleotides therefrom;
[1201] (iv) the tail domain is at least 10, 15, 20, 25, 30, 35 or 40 nucleotides in length, e.g., it comprises at least 10, 15, 20, 25, 30, 35 or 40 nucleotides from a naturally occurring S. pyogenes, S. thermophilus, S. aureus, or N. meningitidis tail domain, or a sequence that differs by no more than 1, 2, 3, 4, 5; 6, 7, 8, 9 or 10 nucleotides therefrom; or
[1202] (v) the tail domain comprises 15, 20, 25, 30, 35, 40 nucleotides or all of the corresponding portions of a naturally occurring tail domain, e.g., a naturally occurring S. pyogenes, S. thermophilus, S. aureus, or N. meningitidis tail domain.

[1203] In an embodiment, the gRNA is configured such that it comprises properties: a and b(i).

[1204] In an embodiment, the gRNA is configured such that it comprises properties: a and b(ii).

[1205] In an embodiment, the gRNA is configured such that it comprises properties: a and b(iii).

[1206] In an embodiment, the gRNA is configured such that it comprises properties: a and b(iv).

[1207] In an embodiment, the gRNA is configured such that it comprises properties: a and b(v).

[1208] In an embodiment, the gRNA is configured such that it comprises properties: a and b(vi).

[1209] In an embodiment, the gRNA is configured such that it comprises properties: a and b(vii).

[1210] In an embodiment, the gRNA is configured such that it comprises properties: a and b(viii).

[1211] In an embodiment, the gRNA is configured such that it comprises properties: a and b(ix).

[1212] In an embodiment, the gRNA is configured such that it comprises properties: a and b(x).

[1213] In an embodiment, the gRNA is configured such that it comprises properties: a and b(xi).

[1214] In an embodiment, the gRNA is configured such that it comprises properties: a and c.

[1215] In an embodiment, the gRNA is configured such that in comprises properties: a, b, and c.

[1216] In an embodiment, the gRNA is configured such that in comprises properties: a(i), b(i), and c(i).

[1217] In an embodiment, the gRNA is configured such that in comprises properties: a(i), b(i), and c(ii).

[1218] In an embodiment, the gRNA is configured such that in comprises properties: a(i), b(ii), and c(i).

[1219] In an embodiment, the gRNA is configured such that in comprises properties: a(i), b(ii), and c(ii).

[1220] In an embodiment, the gRNA is configured such that in comprises properties: a(i), b(iii), and c(i).

[1221] In an embodiment, the gRNA is configured such that in comprises properties: a(i), b(iii), and c(ii).

[1222] In an embodiment, the gRNA is configured such that in comprises properties: a(i), b(iv), and c(i).

[1223] In an embodiment, the gRNA is configured such that in comprises properties: a(i), b(iv), and c(ii).

[1224] In an embodiment, the gRNA is configured such that in comprises properties: a(i), b(v), and c(i).

[1225] In an embodiment, the gRNA is configured such that in comprises properties: a(i), b(v), and c(ii).

[1226] In an embodiment, the gRNA is configured such that in comprises properties: a(i), b(vi), and c(i).

[1227] In an embodiment, the gRNA is configured such that in comprises properties: a(i), b(vi), and c(ii).

[1228] In an embodiment, the gRNA is configured such that in comprises properties: a(i), b(vii), and c(i).

[1229] In an embodiment, the gRNA is configured such that in comprises properties: a(i), b(vii), and c(ii).

[1230] In an embodiment, the gRNA is configured such that in comprises properties: a(i), b(viii), and c(i).

[1231] In an embodiment, the gRNA is configured such that in comprises properties: a(i), b(viii), and c(ii).

[1232] In an embodiment, the gRNA is configured such that in comprises properties: a(i), b(ix), and c(i).

[1233] In an embodiment, the gRNA is configured such that in comprises properties: a(i), b(ix), and c(ii).

[1234] In an embodiment, the gRNA is configured such that in comprises properties: a(i), b(x), and c(i).

[1235] In an embodiment, the gRNA is configured such that in comprises properties: a(i), b(x), and c(ii).

[1236] In an embodiment, the gRNA is configured such that in comprises properties: a(i), b(xi), and c(i).

[1237] In an embodiment, the gRNA is configured such that in comprises properties: a(i), b(xi), and c(ii).

[1238] In an embodiment, the gRNA, e.g., a chimeric gRNA, is configured such that it comprises one or more of the following properties;

[1239] a) one or both of the gRNAs can position, e.g., when targeting a Cas9 molecule that makes single strand breaks, a single strand break within (i) 50, 100, 150, 200, 250, 300, 350, 400, 450, or 500 nucleotides of a target position, or (ii) sufficiently close that the target position is within the region of end resection;

[1240] b) one or both have a targeting domain of at least 16 nucleotides, e.g., a targeting domain of (i) 16, (ii), 17, (iii) 18, (iv) 19, (v) 20, (vi) 21, (vii) 22, (viii) 23, (ix) 24, (x) 25, or (xi) 26 nucleotides; and

[1241] c)
[1242] (i) the proximal and tail domain, when taken together, comprise at least 15, 18, 20, 25, 30, 31, 35, 40, 45, 49, 50, or 53 nucleotides, e.g., at least 15, 18, 20, 25, 30, 31, 35, 40, 45, 49, 50, or 53 nucleotides from a naturally occurring S. pyogenes, S. thermophilus, S. aureus, or N. meningitidis tail and proximal domain, or a sequence that differs by no more than 1, 2, 3, 4, 5; 6, 7, 8, 9 or 10 nucleotides therefrom;
[1243] (ii) there are at least 15, 18, 20, 25, 30, 31, 35, 40, 45, 49, 50, or 53 nucleotides 3′ to the last nucleotide of the second complementarity domain, e.g., at least 15, 18, 20, 25, 30, 31, 35, 40, 45, 49, 50, or 53 nucleotides from the corresponding sequence of a naturally occurring S. pyogenes, S. thermophilus, S. aureus, or N. meningitidis gRNA, or a sequence that differs by no more than 1, 2, 3, 4, 5; 6, 7, 8, 9 or 10 nucleotides therefrom;
[1244] (iii) there are at least 16, 19, 21, 26, 31, 32, 36, 41, 46, 50, 51, or 54 nucleotides 3′ to the last nucleotide of the second complementarity domain that is complementary to its corresponding nucleotide of the first complementarity domain, e.g., at least 16, 19, 21, 26, 31, 32, 36, 41, 46, 50, 51, or 54 nucleotides from the corresponding sequence of a naturally occurring S. pyogenes, S. thermophilus, S. aureus, or N. meningitidis gRNA, or a sequence that differs by no more than 1, 2, 3, 4, 5; 6, 7, 8, 9 or 10 nucleotides therefrom;
[1245] (iv) the tail domain is at least 10, 15, 20, 25, 30, 35 or 40 nucleotides in length, e.g., it comprises at least 10, 15, 20, 25, 30, 35 or 40 nucleotides from a naturally occurring S. pyogenes, S. thermophilus, S. aureus, or N. meningitidis tail domain, or a sequence that differs by no more than 1, 2, 3, 4, 5; 6, 7, 8, 9 or 10 nucleotides therefrom; or
[1246] (v) the tail domain comprises 15, 20, 25, 30, 35, 40 nucleotides or all of the corresponding portions of a naturally occurring tail domain, e.g., a naturally occurring S. pyogenes, S. thermophilus, S. aureus, or N. meningitidis tail domain.

[1247] In an embodiment, the gRNA is configured such that it comprises properties: a and b(i).

[1248] In an embodiment, the gRNA is configured such that it comprises properties: a and b(ii).

[1249] In an embodiment, the gRNA is configured such that it comprises properties: a and b(iii).

[1250] In an embodiment, the gRNA is configured such that it comprises properties: a and b(iv).

[1251] In an embodiment, the gRNA is configured such that it comprises properties: a and b(v).

[1252] In an embodiment, the gRNA is configured such that it comprises properties: a and b(vi).

[1253] In an embodiment, the gRNA is configured such that it comprises properties: a and b(vii).

[1254] In an embodiment, the gRNA is configured such that it comprises properties: a and b(viii).

[1255] In an embodiment, the gRNA is configured such that it comprises properties: a and b(ix).

[1256] In an embodiment, the gRNA is configured such that it comprises properties: a and b(x).

[1257] In an embodiment, the gRNA is configured such that it comprises properties: a and b(xi).

[1258] In an embodiment, the gRNA is configured such that it comprises properties: a and c.

[1259] In an embodiment, the gRNA is configured such that in comprises properties: a, b, and c.

[1260] In an embodiment, the gRNA is configured such that in comprises properties: a(i), b(i), and c(i).

[1261] In an embodiment, the gRNA is configured such that in comprises properties: a(i), b(i), and c(ii).

[1262] In an embodiment, the gRNA is configured such that in comprises properties: a(i), b(ii), and c(i).

[1263] In an embodiment, the gRNA is configured such that in comprises properties: a(i), b(ii), and c(ii).

[1264] In an embodiment, the gRNA is configured such that in comprises properties: a(i), b(iii), and c(i).

[1265] In an embodiment, the gRNA is configured such that in comprises properties: a(i), b(iii), and c(ii).

[1266] In an embodiment, the gRNA is configured such that in comprises properties: a(i), b(iv), and c(i).

[1267] In an embodiment, the gRNA is configured such that in comprises properties: a(i), b(iv), and c(ii).

[1268] In an embodiment, the gRNA is configured such that in comprises properties: a(i), b(v), and c(i).

[1269] In an embodiment, the gRNA is configured such that in comprises properties: a(i), b(v), and c(ii).

[1270] In an embodiment, the gRNA is configured such that in comprises properties: a(i), b(vi), and c(i).

[1271] In an embodiment, the gRNA is configured such that in comprises properties: a(i), b(vi), and c(ii).

[1272] In an embodiment, the gRNA is configured such that in comprises properties: a(i), b(vii), and c(i).

[1273] In an embodiment, the gRNA is configured such that in comprises properties: a(i), b(vii), and c(ii).

[1274] In an embodiment, the gRNA is configured such that in comprises properties: a(i), b(viii), and c(i).

[1275] In an embodiment, the gRNA is configured such that in comprises properties: a(i), b(viii), and c(ii).

[1276] In an embodiment, the gRNA is configured such that in comprises properties: a(i), b(ix), and c(i).

[1277] In an embodiment, the gRNA is configured such that in comprises properties: a(i), b(ix), and c(ii).

[1278] In an embodiment, the gRNA is configured such that in comprises properties: a(i), b(x), and c(i).

[1279] In an embodiment, the gRNA is configured such that in comprises properties: a(i), b(x), and c(ii).

[1280] In an embodiment, the gRNA is configured such that in comprises properties: a(i), b(xi), and c(i).

[1281] In an embodiment, the gRNA is configured such that in comprises properties: a(i), b(xi), and c(ii).

[1282] In an embodiment, the gRNA is used with a Cas9 nickase molecule having HNH activity, e.g., a Cas9 molecule having the RuvC activity inactivated, e.g., a Cas9 molecule having a mutation at D10, e.g., the D10A mutation.

[1283] In an embodiment, the gRNA is used with a Cas9 nickase molecule having RuvC activity, e.g., a Cas9 molecule having the HNH activity inactivated, e.g., a Cas9 molecule having a mutation at 840, e.g., the H840A.

[1284] In an embodiment, the gRNAs are used with a Cas9 nickase molecule having RuvC activity, e.g., a Cas9 molecule having the HNH activity inactivated, e.g., a Cas9 molecule having a mutation at N863, e.g., the N863A mutation.

[1285] In an embodiment, a pair of gRNAs, e.g., a pair of chimeric gRNAs, comprising a first and a second gRNA, is configured such that they comprises one or more of the following properties;

[1286] a) one or both of the gRNAs can position, e.g., when targeting a Cas9 molecule that makes single strand breaks, a single strand break within (i) 50, 100, 150, 200, 250, 300, 350, 400, 450, or 500 nucleotides of a target position, or (ii) sufficiently close that the target position is within the region of end resection;

[1287] b) one or both have a targeting domain of at least 16 nucleotides, e.g., a targeting domain of (i) 16, (ii), 17, (iii) 18, (iv) 19, (v) 20, (vi) 21, (vii) 22, (viii) 23, (ix) 24, (x) 25, or (xi) 26 nucleotides;

[1288] c) for one or both:
[1289] (i) the proximal and tail domain, when taken together, comprise at least 15, 18, 20, 25, 30, 31, 35, 40, 45, 49, 50, or 53 nucleotides, e.g., at least 15, 18, 20, 25, 30, 31, 35, 40, 45, 49, 50, or 53 nucleotides from a naturally occurring S. pyogenes, S. thermophilus, S. aureus, or N. meningitidis tail and proximal domain, or a sequence that differs by no more than 1, 2, 3, 4, 5; 6, 7, 8, 9 or 10 nucleotides therefrom;
[1290] (ii) there are at least 15, 18, 20, 25, 30, 31, 35, 40, 45, 49, 50, or 53 nucleotides 3′ to the last nucleotide of the second complementarity domain, e.g., at least 15, 18, 20, 25, 30, 31, 35, 40, 45, 49, 50, or 53 nucleotides from the corresponding sequence of a naturally occurring S. pyogenes, S. thermophilus, S. aureus, or N. meningitidis gRNA, or a sequence that differs by no more than 1, 2, 3, 4, 5; 6, 7, 8, 9 or 10 nucleotides therefrom;
[1291] (iii) there are at least 16, 19, 21, 26, 31, 32, 36, 41, 46, 50, 51, or 54 nucleotides 3′ to the last nucleotide of the second complementarity domain that is complementary to its corresponding nucleotide of the first complementarity domain, e.g., at least 16, 19, 21, 26, 31, 32, 36, 41, 46, 50, 51, or 54 nucleotides from the corresponding sequence of a naturally occurring S. pyogenes, S. thermophilus, S. aureus, or N. meningitidis gRNA, or a sequence that differs by no more than 1, 2, 3, 4, 5; 6, 7, 8, 9 or 10 nucleotides therefrom;
[1292] (iv) the tail domain is at least 10, 15, 20, 25, 30, 35 or 40 nucleotides in length, e.g., it comprises at least 10, 15, 20, 25, 30, 35 or 40 nucleotides from a naturally occurring S. pyogenes, S. thermophilus, S. aureus, or N. meningitidis tail domain; or, or a sequence that differs by no more than 1, 2, 3, 4, 5; 6, 7, 8, 9 or 10 nucleotides therefrom; or
[1293] (v) the tail domain comprises 15, 20, 25, 30, 35, 40 nucleotides or all of the corresponding portions of a naturally occurring tail domain, e.g., a naturally occurring S. pyogenes, S. thermophilus, S. aureus, or N. meningitidis tail domain;

[1294] d) the gRNAs are configured such that, when hybridized to target nucleic acid, they are separated by 0-50, 0-100, 0-200, at least 10, at least 20, at least 30 or at least 50 nucleotides;

[1295] e) the breaks made by the first gRNA and second gRNA are on different strands; and

[1296] f) the PAMs are facing outwards.

[1297] In an embodiment, one or both of the gRNAs is configured such that it comprises properties: a and b(i).

[1298] In an embodiment, one or both of the gRNAs is configured such that it comprises properties: a and b(ii).

[1299] In an embodiment, one or both of the gRNAs is configured such that it comprises properties: a and b(iii).

[1300] In an embodiment, one or both of the gRNAs is configured such that it comprises properties: a and b(iv).

[1301] In an embodiment, one or both of the gRNAs is configured such that it comprises properties: a and b(v).

[1302] In an embodiment, one or both of the gRNAs is configured such that it comprises properties: a and b(vi).

[1303] In an embodiment, one or both of the gRNAs is configured such that it comprises properties: a and b(vii).

[1304] In an embodiment, one or both of the gRNAs is configured such that it comprises properties: a and b(viii).

[1305] In an embodiment, one or both of the gRNAs is configured such that it comprises properties: a and b(ix).

[1306] In an embodiment, one or both of the gRNAs is configured such that it comprises properties: a and b(x).

[1307] In an embodiment, one or both of the gRNAs is configured such that it comprises properties: a and b(xi).

[1308] In an embodiment, one or both of the gRNAs configured such that it comprises properties: a and c.

[1309] In an embodiment, one or both of the gRNAs is configured such that it comprises properties: a, b, and c.

[1310] In an embodiment, one or both of the gRNAs is configured such that it comprises properties: a(i), b(i), and c(i).

[1311] In an embodiment, one or both of the gRNAs is configured such that it comprises properties: a(i), b(i), and c(ii).

[1312] In an embodiment, one or both of the gRNAs is configured such that it comprises properties: a(i), b(i), c, and d.

[1313] In an embodiment, one or both of the gRNAs is configured such that it comprises properties: a(i), b(i), c, and e.

[1314] In an embodiment, one or both of the gRNAs is configured such that it comprises properties: a(i), b(i), c, d, and e.

[1315] In an embodiment, one or both of the gRNAs is configured such that it comprises properties: a(i), b(ii), and c(i).

[1316] In an embodiment, one or both of the gRNAs is configured such that it comprises properties: a(i), b(ii), and c(ii).

[1317] In an embodiment, one or both of the gRNAs is configured such that it comprises properties: a(i), b(ii), c, and d.

[1318] In an embodiment, one or both of the gRNAs is configured such that it comprises properties: a(i), b(ii), c, and e.

[1319] In an embodiment, one or both of the gRNAs is configured such that it comprises properties: a(i), b(ii), c, d, and e.

[1320] In an embodiment, one or both of the gRNAs is configured such that it comprises properties: a(i), b(iii), and c(i).

[1321] In an embodiment, one or both of the gRNAs is configured such that it comprises properties: a(i), b(iii), and c(ii).

[1322] In an embodiment, one or both of the gRNAs is configured such that it comprises properties: a(i), b(iii), c, and d.

[1323] In an embodiment, one or both of the gRNAs is configured such that it comprises properties: a(i), b(iii), c, and e.

[1324] In an embodiment, one or both of the gRNAs is configured such that it comprises properties: a(i), b(iii), c, d, and e.

[1325] In an embodiment, one or both of the gRNAs is configured such that it comprises properties: a(i), b(iv), and c(i).

[1326] In an embodiment, one or both of the gRNAs is configured such that it comprises properties: a(i), b(iv), and c(ii).

[1327] In an embodiment, one or both of the gRNAs is configured such that it comprises properties: a(i), b(iv), c, and d.

[1328] In an embodiment, one or both of the gRNAs is configured such that it comprises properties: a(i), b(iv), c, and e.

[1329] In an embodiment, one or both of the gRNAs is configured such that it comprises properties: a(i), b(iv), c, d, and e.

[1330] In an embodiment, one or both of the gRNAs is configured such that it comprises properties: a(i), b(v), and c(i).

[1331] In an embodiment, one or both of the gRNAs is configured such that it comprises properties: a(i), b(v), and c(ii).

[1332] In an embodiment, one or both of the gRNAs is configured such that it comprises properties: a(i), b(v), c, and d.

[1333] In an embodiment, one or both of the gRNAs is configured such that it comprises properties: a(i), b(v), c, and e.

[1334] In an embodiment, one or both of the gRNAs is configured such that it comprises properties: a(i), b(v), c, d, and e.

[1335] In an embodiment, one or both of the gRNAs is configured such that it comprises properties: a(i), b(vi), and c(i).

[1336] In an embodiment, one or both of the gRNAs is configured such that it comprises properties: a(i), b(vi), and c(ii).

[1337] In an embodiment, one or both of the gRNAs is configured such that it comprises properties: a(i), b(vi), c, and d.

[1338] In an embodiment, one or both of the gRNAs is configured such that it comprises properties: a(i), b(vi), c, and e.

[1339] In an embodiment, one or both of the gRNAs is configured such that it comprises properties: a(i), b(vi), c, d, and e.

[1340] In an embodiment, one or both of the gRNAs is configured such that it comprises properties: a(i), b(vii), and c(i).

[1341] In an embodiment, one or both of the gRNAs is configured such that it comprises properties: a(i), b(vii), and c(ii).

[1342] In an embodiment, one or both of the gRNAs is configured such that it comprises properties: a(i), b(vii), c, and d.

[1343] In an embodiment, one or both of the gRNAs is configured such that it comprises properties: a(i), b(vii), c, and e.

[1344] In an embodiment, one or both of the gRNAs is configured such that it comprises properties: a(i), b(vii), c, d, and e.

[1345] In an embodiment, one or both of the gRNAs is configured such that it comprises properties: a(i), b(viii), and c(i).

[1346] In an embodiment, one or both of the gRNAs is configured such that it comprises properties: a(i), b(viii), and c(ii).

[1347] In an embodiment, one or both of the gRNAs is configured such that it comprises properties: a(i), b(viii), c, and d.

[1348] In an embodiment, one or both of the gRNAs is configured such that it comprises properties: a(i), b(viii), c, and e.

[1349] In an embodiment, one or both of the gRNAs is configured such that it comprises properties: a(i), b(viii), c, d, and e.

[1350] In an embodiment, one or both of the gRNAs is configured such that it comprises properties: a(i), b(ix), and c(i).

[1351] In an embodiment, one or both of the gRNAs is configured such that it comprises properties: a(i), b(ix), and c(ii).

[1352] In an embodiment, one or both of the gRNAs is configured such that it comprises properties: a(i), b(ix), c, and d.

[1353] In an embodiment, one or both of the gRNAs is configured such that it comprises properties: a(i), b(ix), c, and e.

[1354] In an embodiment, one or both of the gRNAs is configured such that it comprises properties: a(i), b(ix), c, d, and e.

[1355] In an embodiment, one or both of the gRNAs is configured such that it comprises properties: a(i), b(x), and c(i).

[1356] In an embodiment, one or both of the gRNAs is configured such that it comprises properties: a(i), b(x), and c(ii).

[1357] In an embodiment, one or both of the gRNAs is configured such that it comprises properties: a(i), b(x), c, and d.

[1358] In an embodiment, one or both of the gRNAs is configured such that it comprises properties: a(i), b(x), c, and e.

[1359] In an embodiment, one or both of the gRNAs is configured such that it comprises properties: a(i), b(x), c, d, and e.

[1360] In an embodiment, one or both of the gRNAs is configured such that it comprises properties: a(i), b(xi), and c(i).

[1361] In an embodiment, one or both of the gRNAs is configured such that it comprises properties: a(i), b(xi), and c(ii).

[1362] In an embodiment, one or both of the gRNAs is configured such that it comprises properties: a(i), b(xi), c, and d.

[1363] In an embodiment, one or both of the gRNAs is configured such that it comprises properties: a(i), b(xi), c, and e.

[1364] In an embodiment, one or both of the gRNAs is configured such that it comprises properties: a(i), b(xi), c, d, and e.

[1365] In an embodiment, the gRNAs are used with a Cas9 nickase molecule having HNH activity, e.g., a Cas9 molecule having the RuvC activity inactivated, e.g., a Cas9 molecule having a mutation at D10, e.g., the D10A mutation.

[1366] In an embodiment, the gRNAs are used with a Cas9 nickase molecule having RuvC activity, e.g., a Cas9 molecule having the HNH activity inactivated, e.g., a Cas9 molecule having a mutation at H840, e.g., the H840A mutation.

[1367] In an embodiment, the gRNAs are used with a Cas9 nickase molecule having RuvC activity, e.g., a Cas9 molecule having the HNH activity inactivated, e.g., a Cas9 molecule having a mutation at N863, e.g., the N863A mutation.

### VI. Target Cells

[1368] Cas9 molecules and gRNA molecules, e.g., a Cas9 molecule/gRNA molecule complex, can be used to manipulate a cell, e.g., to edit a target nucleic acid, in a wide variety of cells.

[1369] In an embodiment, a cell is manipulated by editing (e.g., introducing a mutation in) one or more target genes, e.g., HSV-1 target genes, e.g., target genes as described herein, e.g., the UL19, UL30, UL48 and/or UL54 gene. In an embodiment, the expression of one or more target genes (e.g., one or more target genes described herein) is modulated, e.g., in vivo.

[1370] The Cas9 and gRNA molecules described herein can be delivered to a target cell. In an embodiment, the target cell is an epithelial cell, e.g., an epithelial cell of the oropharynx (including, e.g., an epithelial cell of the nose, gums, lips, tongue or pharynx), an epithelial cell of the finger or fingernail bed, or an epithelial cell of the ano-genital area (including, e.g., an epithelial cell of the penis, scrotum, vulva, vagina, cervix, anus or thighs). In an embodiment, the target cell is a neuronal cell, e.g., a cranial ganglion neuron (e.g. a trigeminal ganglion neuron, e.g., an oculomotor nerve ganglion neuron, e.g., an abducens nerve ganglion neuron, e.g., a trochlear nerve ganglion neuron), e.g. a cervical ganglion neuron, e.g., a sacral ganglion neuron, a sensory ganglion neuron, a cortical neuron, a cerebellar neuron or a hippocampal neuron. In an embodiment, the target cell is an optic cell, e.g. an epithelial cell of the eye, e.g. an epithelial cell of the eyelid, e.g., a conjunctival cell, e.g., a conjunctival epithelial cell, e.g., a corneal keratocyte, e.g., a limbus cell, e.g., a corneal epithelial cell, e.g., a corneal stromal cell, e.g., a ciliary body cell, e.g., a scleral cell, e.g., a lens cell, e.g., a choroidal cell, e.g., a retinal cell, e.g., a rod photoreceptor cell, e.g., a cone photoreceptor cell, e.g., a retinal pigment epithelium cell, e.g., a horizontal cell, e.g., an amacrine cell, e.g., a ganglion cell.

### VII. Delivery, Formulations and Routes of Administration

[1371] The components, e.g., a Cas9 molecule and gRNA molecule can be delivered or formulated in a variety of forms, see, e.g., Tables 23-24. In an embodiment, one Cas9 molecule and two or more (e.g., 2, 3, 4, or more) different gRNA molecules are delivered, e.g., by an AAV vector. In an embodiment, the sequence encoding the Cas9 molecule and the sequence(s) encoding the two or more (e.g., 2, 3, 4, or more) different gRNA molecules are present on the same nucleic acid molecule, e.g., an AAV vector. When a Cas9 or gRNA component is encoded as DNA for delivery, the DNA will typically but not necessarily include a control region, e.g., comprising a promoter, to effect expression. Useful promoters for Cas9 molecule sequences include CMV, EFS, EF-1a, MSCV, PGK, CAG control promoters. In an embodiment, the promoter is a constitutive promoter. In another embodiment, the promoter is a tissue specific promoter. Useful promoters for gRNAs include H1, 7SK, tRNA, and U6 promoters. Promoters with similar or dissimilar strengths can be selected to tune the expression of components. Sequences encoding a Cas9 molecule can comprise a nuclear localization signal (NLS), e.g., an SV40 NLS. In an embodiment, the sequence encoding a Cas9 molecule comprises at least two nuclear localization signals. In an embodiment a promoter for a Cas9 molecule or a gRNA molecule can be, independently, inducible, tissue specific, or cell specific.

[1372] Table 23 provides examples of how the components can be formulated, delivered, or administered.

TABLE 23
Elements

| Cas9 | gRNA | |
|---|---|---|
| Mole- | mole- | |
| cule(s) | cule(s) | Comments |
| DNA | DNA | In this embodiment, a Cas9 molecule, typically |
| | | an eaCas9 molecule, and a gRNA are transcribed |
| | | from DNA. In this embodiment, they are |
| | | encoded on separate molecules. |
| DNA | | In this embodiment, a Cas9 molecule, typically |
| | | an eaCas9 molecule, and a gRNA are transcribed |
| | | from DNA, here from a single molecule. |
| DNA | RNA | In this embodiment, a Cas9 molecule, typically |
| | | an eaCas9 molecule, is transcribed from |
| | | DNA, and a gRNA is provided as in vitro |
| | | transcribed or synthesized RNA |
| mRNA | RNA | In this embodiment, a Cas9 molecule, typically |
| | | an eaCas9 molecule, is translated from in vitro |
| | | transcribed mRNA, and a gRNA is provided as |
| | | in vitro transcribed or synthesized RNA. |
| mRNA | DNA | In this embodiment, a Cas9 molecule, typically |
| | | an eaCas9 molecule, is translated from in vitro |
| | | transcribed mRNA, and a gRNA is transcribed |
| | | from DNA. |
| Protein | DNA | In this embodiment, a Cas9 molecule, typically |
| | | an eaCas9 molecule, is provided as a protein, |
| | | and a gRNA is transcribed from DNA. |
| Protein | RNA | In this embodiment, an eaCas9 molecule is |
| | | provided as a protein, and a gRNA is provided |
| | | as transcribed or synthesized RNA. |

[1373] Table 24 summarizes various delivery methods for the components of a Cas system, e.g., the Cas9 molecule component and the gRNA molecule component, as described herein.

TABLE 24

| | | Delivery | | | |
|---|---|---|---|---|---|
| | | into Non- | Duration | | Type of |
| | | Dividing | of | Genome | Molecule |
| Delivery Vector/Mode | | Cells | Expression | Integration | Delivered |
| Physical (eg, electroporation, | | YES | Transient | NO | Nucleic Acids |
| particle gun, Calcium | | | | | and Proteins |
| Phosphate transfection, cell | | | | | |
| compression or squeezing) | | | | | |
| Viral | Retrovirus | NO | Stable | YES | RNA |
| | Lentivirus | YES | Stable | YES/NO with | RNA |
| | | | | modifications | |
| | Adenovirus | YES | Transient | NO | DNA |
| | Adeno- | YES | Stable | NO | DNA |
| | Associated | | | | |
| | Virus (AAV) | | | | |
| | Vaccinia Virus | YES | Very | NO | DNA |
| | | | Transient | | |
| | Herpes Simplex | YES | Stable | NO | DNA |
| | Virus | | | | |
| Non-Viral | Cationic | YES | Transient | Depends on | Nucleic Acids |
| | Liposomes | | | what is | and Proteins |
| | | | | delivered | |
| | Polymeric | YES | Transient | Depends on | Nucleic Acids |
| | Nanoparticles | | | what is | and Proteins |
| | | | | delivered | |
| Biological | Attenuated | YES | Transient | NO | Nucleic Acids |
| Non-Viral | Bacteria | | | | |
| Delivery | Engineered | YES | Transient | NO | Nucleic Acids |
| Vehicles | Bacteriophages | | | | |
| | Mammalian | YES | Transient | NO | Nucleic Acids |
| | Virus-like | | | | |
| | Particles | | | | |
| | Biological | YES | Transient | NO | Nucleic Acids |
| | liposomes: | | | | |
| | Erythrocyte | | | | |
| | Ghosts and | | | | |
| | Exosomes | | | | |

DNA-Based Delivery of a Cas9 Molecule and/or One or More gRNA Molecule

[1374] Nucleic acids encoding Cas9 molecules (e.g., eaCas9 molecules) and/or gRNA molecules, can be administered to subjects or delivered into cells by art-known methods or as described herein. For example, Cas9-encoding and/or gRNA-encoding DNA can be delivered, e.g., by vectors (e.g., viral or non-viral vectors), non-vector based methods (e.g., using naked DNA or DNA complexes), or a combination thereof.

[1375] DNA encoding Cas9 molecules (e.g., eaCas9 molecules) and/or gRNA molecules can be conjugated to molecules promoting uptake by the target cells (e.g., the target cells described herein).

[1376] In some embodiments, the Cas9- and/or gRNA-encoding DNA is delivered by a vector (e.g., viral vector/virus or plasmid).

[1377] A vector can comprise a sequence that encodes a Cas9 molecule and/or a gRNA molecule. A vector can also comprise a sequence encoding a signal peptide (e.g., for nuclear localization, nucleolar localization, mitochondrial localization), fused, e.g., to a Cas9 molecule sequence. For example, ae vector can comprise a nuclear localization sequence (e.g., from SV40) fused to the sequence encoding the Cas9 molecule.

[1378] One or more regulatory/control elements, e.g., a promoter, an enhancer, an intron, a polyadenylation signal, a Kozak consensus sequence, internal ribosome entry sites (IRES), a 2A sequence, and splice acceptor or donor can be included in the vectors. In some embodiments, the promoter is recognized by RNA polymerase II (e.g., a CMV promoter). In other embodiments, the promoter is recognized by RNA polymerase III (e.g., a U6 promoter). In some embodiments, the promoter is a regulated promoter (e.g., inducible promoter). In other embodiments, the promoter is a constitutive promoter. In some embodiments, the promoter is a tissue specific promoter. In some embodiments, the promoter is a viral promoter. In other embodiments, the promoter is a non-viral promoter.

[1379] In some embodiments, the vector or delivery vehicle is a viral vector (e.g., for generation of recombinant viruses). In some embodiments, the virus is a DNA virus (e.g., dsDNA or ssDNA virus). In other embodiments, the virus is an RNA virus (e.g., an ssRNA virus). Exemplary viral vectors/viruses include, e.g., retroviruses, lentiviruses, adenovirus, adeno-associated virus (AAV), vaccinia viruses, poxviruses, and herpes simplex viruses.

[1380] In some embodiments, the virus infects dividing cells. In other embodiments, the virus infects non-dividing cells. In some embodiments, the virus infects both dividing and non-dividing cells. In some embodiments, the virus can integrate into the host genome. In some embodiments, the virus is engineered to have reduced immunity, e.g., in human. In some embodiments, the virus is replication-competent. In other embodiments, the virus is replication-defective, e.g., having one or more coding regions for the genes necessary for additional rounds of virion replication and/or packaging replaced with other genes or deleted. In some embodiments, the virus causes transient expression of the Cas9 molecule and/or the gRNA molecule. In other embodiments, the virus causes long-lasting, e.g., at least 1 week, 2 weeks, 1 month, 2 months, 3 months, 6 months, 9 months, 1 year, 2 years, or permanent expression, of the Cas9 molecule and/or the gRNA molecule. The packaging capacity of the viruses may vary, e.g., from at least about 4 kb to at least about 30 kb, e.g., at least about 5 kb, 10 kb, 15 kb, 20 kb, 25 kb, 30 kb, 35 kb, 40 kb, 45 kb, or 50 kb.

[1381] In an embodiment, the viral vector recognizes a specific cell type or tissue. For example, the viral vector can be pseudotyped with a different/alternative viral envelope glycoprotein; engineered with a cell type-specific receptor (e.g., genetic modification(s) of one or more viral envelope glycoproteins to incorporate a targeting ligand such as a peptide ligand, a single chain antibody, or a growth factor); and/or engineered to have a molecular bridge with dual specificities with one end recognizing a viral glycoprotein and the other end recognizing a moiety of the target cell surface (e.g., a ligand-receptor, monoclonal antibody, avidin-biotin and chemical conjugation).

[1382] Exemplary viral vectors/viruses include, e.g., retroviruses, lentiviruses, adenovirus, adeno-associated virus (AAV), vaccinia viruses, poxviruses, and herpes simplex viruses.

[1383] In some embodiments, the Cas9- and/or gRNA-encoding DNA is delivered by a recombinant retrovirus. In some embodiments, the retrovirus (e.g., Moloney murine leukemia virus) comprises a reverse transcriptase, e.g., that allows integration into the host genome. In some embodiments, the retrovirus is replication-competent. In other embodiments, the retrovirus is replication-defective, e.g., having one of more coding regions for the genes necessary for additional rounds of virion replication and packaging replaced with other genes, or deleted.

[1384] In some embodiments, the Cas9- and/or gRNA-encoding DNA is delivered by a recombinant lentivirus. For example, the lentivirus is replication-defective, e.g., does not comprise one or more genes required for viral replication.

[1385] In some embodiments, the Cas9- and/or gRNA-encoding DNA is delivered by a recombinant adenovirus. In some embodiments, the adenovirus is engineered to have reduced immunity in human.

[1386] In some embodiments, the Cas9- and/or gRNA-encoding DNA is delivered by a recombinant AAV. In some embodiments, the AAV does not incorporate its genome into that of a host cell, e.g., a target cell as describe herein. In some embodiments, the AAV can incorporate at least part of its genome into that of a host cell, e.g., a target cell as described herein. In some embodiments, the AAV is a self-complementary adeno-associated virus (scAAV), e.g., a scAAV that packages both strands which anneal together to form double stranded DNA. AAV serotypes that may be used in the disclosed methods, include AAV1, AAV2, modified AAV2 (e.g., modifications at Y444F, Y500F, Y730F and/or S662V), AAV3, modified AAV3 (e.g., modifications at Y705F, Y731F and/or T492V), AAV4, AAV5, AAV6, modified AAV6 (e.g., modifications at S663V and/or T492V), AAV8, AAV 8.2, AAV9, AAV rh 10, and pseudotyped AAV, such as AAV2/8, AAV2/5 and AAV2/6 can also be used in the disclosed methods. In an embodiment, an AAV capsid that can be used in the methods described herein is a capsid sequence from serotype AAV1, AAV2, AAV3, AAV4, AAV5, AAV6, AAV7, AAV8, AAV9, AAV.rh8, AAV.rh10, AAV.rh32/33, AAV.rh43, AAV.rh64R1, or AAV7m8.

[1387] In an embodiment, the Cas9- and/or gRNA-encoding DNA is delivered in a re-engineered AAV capsid, e.g., with 50% or greater, e.g., 60% or greater, 70% or greater, 80% or greater, 90% or greater, or 95% or greater, sequence homology with a capsid sequence from serotypes AAV1, AAV2, AAV3, AAV4, AAV5, AAV6, AAV7, AAV8, AAV9, AAV.rh8, AAV.rh10, AAV.rh32/33, AAV.rh43, or AAV.rh64R1.

[1388] In an embodiment, the Cas9- and/or gRNA-encoding DNA is delivered by a chimeric AAV capsid. Exemplary chimeric AAV capsids include, but are not limited to, AAV9i1, AAV2i8, AAV-DJ, AAV2G9, AAV2i8G9, or AAV8G9.

[1389] In an embodiment, the AAV is a self-complementary adeno-associated virus (scAAV), e.g., a scAAV that packages both strands which anneal together to form double stranded DNA.

[1390] In some embodiments, the Cas9- and/or gRNA-encoding DNA is delivered by a hybrid virus, e.g., a hybrid of one or more of the viruses described herein. In an embodiment, the hybrid virus is hybrid of an AAV (e.g., of any AAV serotype), with a Bocavirus, B19 virus, porcine AAV, goose AAV, feline AAV, canine AAV, or MVM.

[1391] A Packaging cell is used to form a virus particle that is capable of infecting a target cell. Such a cell includes a 293 cell, which can package adenovirus, and a ψ2 cell or a PA317 cell, which can package retrovirus. A viral vector used in gene therapy is usually generated by a producer cell line that packages a nucleic acid vector into a viral particle. The vector typically contains the minimal viral sequences required for packaging and subsequent integration into a host or target cell (if applicable), with other viral sequences being replaced by an expression cassette encoding the protein to be expressed, eg. Cas9. For example, an AAV vector used in gene therapy typically only possesses inverted terminal repeat (ITR) sequences from the AAV genome which are required for packaging and gene expression in the host or target cell. The missing viral functions can be supplied in trans by the packaging cell line and/or plasmid containing E2A, E4, and VA genes from adenovirus, and plasmid encoding Rep and Cap genes from AAV, as described in “Triple Transfection Protocol.” Henceforth, the viral DNA is packaged in a cell line, which contains a helper plasmid encoding the other AAV genes, namely rep and cap, but lacking ITR sequences. In embodiment, the viral DNA is packaged in a producer cell line, which contains E1A and/or E1B genes from adenovirus. The cell line is also infected with adenovirus as a helper. The helper virus (e.g., adenovirus or HSV) or helper plasmid promotes replication of the AAV vector and expression of AAV genes from the helper plasmid with ITRs. The helper plasmid is not packaged in significant amounts due to a lack of ITR sequences. Contamination with adenovirus can be reduced by, e.g., heat treatment to which adenovirus is more sensitive than AAV.

[1392] In an embodiment, the viral vector has the ability of cell type and/or tissue type recognition. For example, the viral vector can be pseudotyped with a different/alternative viral envelope glycoprotein; engineered with a cell type-specific receptor (e.g., geneticmodification of the viral envelope glycoproteins to incorporate targeting ligands such as a peptide ligand, a single chain antibodie, a growth factor); and/or engineered to have a molecular bridge with dual specificities with one end recognizing a viral glycoprotein and the other end recognizing a moiety of the target cell surface (e.g., ligand-receptor, monoclonal antibody, avidin-biotin and chemical conjugation).

[1393] In an embodiment, the viral vector achieves cell type specific expression. For example, a tissue-specific promoter can be constructed to restrict expression of the transgene (Cas 9 and gRNA) in only the target cell. The specificity of the vector can also be mediated by microRNA-dependent control of transgene expression. In an embodiment, the viral vector has increased efficiency of fusion of the viral vector and a target cell membrane. For example, a fusion protein such as fusion-competent hemagglutin (HA) can be incorporated to increase viral uptake into cells. In an embodiment, the viral vector has the ability of nuclear localization. For example, aviruse that requires the breakdown of the nuclear envelope (during cell division) and therefore will not infect a non-diving cell can be altered to incorporate a nuclear localization peptide in the matrix protein of the virus thereby enabling the transduction of non-proliferating cells.

[1394] In some embodiments, the Cas9- and/or gRNA-encoding DNA is delivered by a non-vector based method (e.g., using naked DNA or DNA complexes). For example, the DNA can be delivered, e.g., by organically modified silica or silicate (Ormosil), electroporation, gene gun, sonoporation, magnetofection, lipid-mediated transfection, dendrimers, inorganic nanoparticles, calcium phosphates, or a combination thereof.

[1395] In some embodiments, the Cas9- and/or gRNA-encoding DNA is delivered by a combination of a vector and a non-vector based method. For example, a virosome comprises a liposome combined with an inactivated virus (e.g., HIV or influenza virus), which can result in more efficient gene transfer, e.g., in a respiratory epithelial cell than either a viral or a liposomal method alone.

[1396] In an embodiment, the delivery vehicle is a non-viral vector. In an embodiment, the non-viral vector is an inorganic nanoparticle. Exemplary inorganic nanoparticles include, e.g., magnetic nanoparticles (e.g., Fe₃MnO₂) or silica. The outer surface of the nanoparticle can be conjugated with a positively charged polymer (e.g., polyethylenimine, polylysine, polyserine) which allows for attachment (e.g., conjugation or entrapment) of payload. In an embodiment, the non-viral vector is an organic nanoparticle (e.g., entrapment of the payload inside the nanoparticle). Exemplary organic nanoparticles include, e.g., SNALP liposomes that contain cationic lipids together with neutral helper lipids which are coated with polyethylene glycol (PEG) and protamine and nucleic acid complex coated with lipid coating.

[1397] Exemplary lipids for gene transfer are shown below in Table 25.

TABLE 25
Lipids Used for Gene Transfer

| Lipid | Abbreviation | Feature |
|---|---|---|
| 1,2-Dioleoyl-sn-glycero-3-phosphatidylcholine | DOPC | Helper |
| 1,2-Dioleoyl-sn-glycero-3-phosphatidylethanolamine | DOPE | Helper |
| Cholesterol | | Helper |
| N-[1-(2,3-Dioleyloxy)prophyl]N,N,N-trimethylammonium chloride | DOTMA | Cationic |
| 1,2-Dioleoyloxy-3-trimethylammonium-propane | DOTAP | Cationic |
| Dioctadecylamidoglycylspermine | DOGS | Cationic |
| N-(3-Aminopropyl)-N,N-dimethyl-2,3-bis(dodecyloxy)-1- | GAP-DLRIE | Cationic |
| propanaminium bromide | | |
| Cetyltrimethylammonium bromide | CTAB | Cationic |
| 6-Lauroxyhexyl ornithinate | LHON | Cationic |
| 1-(2,3-Dioleoyloxypropyl)-2,4,6-trimethylpyridinium | 2Oc | Cationic |
| 2,3-Dioleyloxy-N-[2(sperminecarboxamido-ethyl]-N,N-dimethyl-1- | DOSPA | Cationic |
| propanaminium trifluoroacetate | | |
| 1,2-Dioleyl-3-trimethylammonium-propane | DOPA | Cationic |
| N-(2-Hydroxyethyl)-N,N-dimethyl-2,3-bis(tetradecyloxy)-1- | MDRIE | Cationic |
| propanaminium bromide | | |
| Dimyristooxypropyl dimethyl hydroxyethyl ammonium bromide | DMRI | Cationic |
| 3β-[N-(N′,N′-Dimethylaminoethane)-carbamoyl]cholesterol | DC-Chol | Cationic |
| Bis-guanidium-tren-cholesterol | BGTC | Cationic |
| 1,3-Diodeoxy-2-(6-carboxy-spermyl)-propylamide | DOSPER | Cationic |
| Dimethyloctadecylammonium bromide | DDAB | Cationic |
| Dioctadecylamidoglicylspermidin | DSL | Cationic |
| rac-[(2,3-Dioctadecyloxypropyl)(2-hydroxyethyl)]-dimethylammonium | CLIP-1 | Cationic |
| chloride | | |
| rac-[2(2,3-Dihexadecyloxypropyl- | CLIP-6 | Cationic |
| oxymethyloxy)ethyl]trimethylammonium bromide | | |
| Ethyldimyristoylphosphatidylcholine | EDMPC | Cationic |
| 1,2-Distearyloxy-N,N-dimethyl-3-aminopropane | DSDMA | Cationic |
| 1,2-Dimyristoyl-trimethylammonium propane | DMTAP | Cationic |
| O,O′-Dimyristyl-N-lysyl aspartate | DMKE | Cationic |
| 1,2-Distearoyl-sn-glycero-3-ethylphosphocholine | DSEPC | Cationic |
| N-Palmitoyl D-erythro-sphingosyl carbamoyl-spermine | CCS | Cationic |
| N-t-Butyl-N0-tetradecyl-3-tetradecylaminopropionamidine | diC14-amidine | Cationic |
| Octadecenolyoxy[ethyl-2-heptadecenyl-3 hydroxyethyl] imidazolinium | DOTIM | Cationic |
| chloride | | |
| N1-Cholesteryloxycarbonyl-3,7-diazanonane-1,9-diamine | CDAN | Cationic |
| 2-(3-[Bis(3-amino-propyl)-amino]propylamino)-N- | RPR209120 | Cationic |
| ditetradecylcarbamoylme-ethyl-acetamide | | |
| 1,2-dilinoleyloxy-3-dimethylaminopropane | DLinDMA | Cationic |
| 2,2-dilinoleyl-4-dimethylaminoethyl-[1,3]-dioxolane | DLin-KC2-DMA | Cationic |
| dilinoleyl-methyl-4-dimethylaminobutyrate | DLin-MC3-DMA | Cationic |

[1398] Exemplary polymers for gene transfer are shown below in Table 26.

TABLE 26
Polymers Used for Gene Transfer

| Polymer | Abbreviation |
|---|---|
| Poly(ethylene)glycol | PEG |
| Polyethylenimine | PEI |
| Dithiobis(succinimidylpropionate) | DSP |
| Dimethyl-3,3′-dithiobispropionimidate | DTBP |
| Poly(ethylene imine) biscarbamate | PEIC |
| Poly(L-lysine) | PLL |
| Histidine modified PLL | |
| Poly(N-vinylpyrrolidone) | PVP |
| Poly(propylenimine) | PPI |
| Poly(amidoamine) | PAMAM |
| Poly(amido ethylenimine) | SS-PAEI |
| Triethylenetetramine | TETA |
| Poly(β-aminoester) | |
| Poly(4-hydroxy-L-proline ester) | PHP |
| Poly(allylamine) | |
| Poly(α-[4-aminobutyl]-L-glycolic acid) | PAGA |
| Poly(D,L-lactic-co-glycolic acid) | PLGA |
| Poly(N-ethyl-4-vinylpyridinium bromide) | |
| Poly(phosphazene)s | PPZ |
| Poly(phosphoester)s | PPE |
| Poly(phosphoramidate)s | PPA |
| Poly(N-2-hydroxypropylmethacrylamide) | pHPMA |
| Poly (2-(dimethylamino)ethyl methacrylate) | pDMAEMA |
| Poly(2-aminoethyl propylene phosphate) | PPE-EA |
| Chitosan | |
| Galactosylated chitosan | |
| N-Dodacylated chitosan | |
| Histone | |
| Collagen | |
| Dextran-spermine | D-SPM |

[1399] In an embodiment, the vehicle has targeting modifications to increase target cell update of nanoparticles and liposomes, e.g., cell specific antigens, monoclonal antibodies, single chain antibodies, aptamers, polymers, sugars, and cell penetrating peptides. In an embodiment, the vehicle uses fusogenic and endosome-destabilizing peptides/polymers. In an embodiment, the vehicle undergoes acid-triggered conformational changes (e.g., to accelerate endosomal escape of the cargo). In an embodiment, a stimuli-cleavable polymer is used, e.g., for release in a cellular compartment. For example, disulfide-based cationic polymers that are cleaved in the reducing cellular environment can be used.

[1400] In an embodiment, the delivery vehicle is a biological non-viral delivery vehicle. In an embodiment, the vehicle is an attenuated bacterium (e.g., naturally or artificially engineered to be invasive but attenuated to prevent pathogenesis and expressing the transgene (e.g., Listeria monocytogenes, certain Salmonella strains, Bifidobacterium longum, and modified Escherichia coli), bacteria having nutritional and tissue-specific tropism to target specific tissues, bacteria having modified surface proteins to alter target tissue specificity). In an embodiment, the vehicle is a genetically modified bacteriophage (e.g., engineered phages having large packaging capacity, less immunogenic, containing mammalian plasmid maintenance sequences and having incorporated targeting ligands). In an embodiment, the vehicle is a mammalian virus-like particle. For example, modified viral particles can be generated (e.g., by purification of the “empty” particles followed by ex vivo assembly of the virus with the desired cargo). The vehicle can also be engineered to incorporate targeting ligands to alter target tissue specificity. In an embodiment, the vehicle is a biological liposome. For example, the biological liposome is a phospholipid-based particle derived from human cells (e.g., erythrocyte ghosts, which are red blood cells broken down into spherical structures derived from the subject (e.g., tissue targeting can be achieved by attachment of various tissue or cell-specific ligands), or secretory exosomes-subject (i.e., patient) derived membrane-bound nanovescicle (30-100 nm) of endocytic origin (e.g., can be produced from various cell types and can therefore be taken up by cells without the need of for targeting ligands).

[1401] In an embodiment, one or more nucleic acid molecules (e.g., DNA molecules) other than the components of a Cas system, e.g., the Cas9 molecule component and/or the gRNA molecule component described herein, are delivered. In an embodiment, the nucleic acid molecule is delivered at the same time as one or more of the components of the Cas system are delivered. In an embodiment, the nucleic acid molecule is delivered before or after (e.g., less than about 30 minutes, 1 hour, 2 hours, 3 hours, 6 hours, 9 hours, 12 hours, 1 day, 2 days, 3 days, 1 week, 2 weeks, or 4 weeks) one or more of the components of the Cas system are delivered. In an embodiment, the nucleic acid molecule is delivered by a different means than one or more of the components of the Cas system, e.g., the Cas9 molecule component and/or the gRNA molecule component, are delivered. The nucleic acid molecule can be delivered by any of the delivery methods described herein. For example, the nucleic acid molecule can be delivered by a viral vector, e.g., an integration-deficient lentivirus, and the Cas9 molecule component and/or the gRNA molecule component can be delivered by electroporation, e.g., such that the toxicity caused by nucleic acids (e.g., DNAs) can be reduced. In an embodiment, the nucleic acid molecule encodes a therapeutic protein, e.g., a protein described herein. In an embodiment, the nucleic acid molecule encodes an RNA molecule, e.g., an RNA molecule described herein.

[1402] Delivery of RNA Encoding a Cas9 Molecule

[1403] RNA encoding Cas9 molecules (e.g., eaCas9 molecules or eiCas9 molecules) and/or gRNA molecules, can be delivered into cells, e.g., target cells described herein, by art-known methods or as described herein. For example, Cas9-encoding and/or gRNA-encoding RNA can be delivered, e.g., by microinjection, electroporation, lipid-mediated transfection, peptide-mediated delivery, or a combination thereof. Cas9-encoding and/or gRNA-encoding RNA can be conjugated to molecules promoting uptake by the target cells (e.g., target cells described herein).

[1404] Delivery Cas9 Molecule Protein

[1405] Cas9 molecules (e.g., eaCas9 molecules or eiCas9 molecules) can be delivered into cells by art-known methods or as described herein. For example, Cas9 protein molecules can be delivered, e.g., by microinjection, electroporation, lipid-mediated transfection, peptide-mediated delivery, or a combination thereof. Delivery can be accompanied by DNA encoding a gRNA or by a gRNA. Cas9 protein can be conjugated to molecules promoting uptake by the target cells (e.g., target cells described herein).

[1406] Multiplex Delivery of gRNAs

[1407] In some embodiments, the Cas9 molecule, e.g., double-stranded nuclease or single-stranded nickase, is delivered together with gRNAs or gRNA pairs targeting more than one HSV-1 target position. The gRNAs can be provided in different forms, e.g., the forms described in Table 23. The gRNAs can be delivered by different methods, e.g., the methods described in Table 24. It is contemplated herein that the Cas9 molecule, and gRNAs or gRNA pairs targeting more than one HSV-1 target position could be contained within a single or multiple delivery vector or formulation including, e.g., those described above.

[1408] Route of Administration

[1409] Systemic modes of administration include oral and parenteral routes. Parenteral routes include, by way of example, intravenous, intrarterial, intraosseous, intramuscular, intradermal, subcutaneous, intranasal and intraperitoneal routes. Components administered systemically may be modified or formulated to target the components to epithelial or neuronal cells.

[1410] Local modes of administration include, by way of example, topical, intrathecal, intraspinal, intra-cerebroventricular, intraparenchymal (e.g., into the parenchyma of the brain or spinal cord), and intraocular, including intravitreal, intracorneal, and intraretinal routes. In an embodiment, local modes of administration include intraocular, e.g., intrascleral, e.g., intracorneal, e.g., intravitreal, e.g., intraretinal, e.g. submacular, e.g., intra-lens. In an embodiment, components described herein are delivered subretinally, e.g., by subretinal injection. In an embodiment, components described herein are delivered by intravitreal injection.

[1411] In an embodiment, local modes of administration include topical, e.g., topical optic delivery, e.g., topical dermal delivery.

[1412] In an embodiment, local modes of administration include intra-parenchymal into the dorsal root ganglion at the level of the trigeminal nerve. In an embodiment, local modes of administration include intra-parenchymal into the dorsal root ganglion at the level of the sacral ganglia. In an embodiment, local modes of administration include intra-parenchymal into the dorsal root ganglion at the level of the lumbar ganglia. In an embodiment, local modes of administration include intra-parenchymal into the dorsal root ganglion at the level of the thoracic ganglia. In an embodiment, local modes of administration include intra-parenchymal into the dorsal root ganglion at the level of the cervical ganglia, e.g., superior cervical ganglion, e.g., middle cervical ganglion, e.g., inferior cervical ganglion.

[1413] In an embodiment, significantly smaller amounts of the components (compared with systemic approaches) may exert an effect when administered locally (for example, topically; for example intracorneally) compared to when administered systemically (for example, intravenously). Local modes of administration can reduce or eliminate the incidence of potentially toxic side effects that may occur when therapeutically effective amounts of a component are administered systemically.

[1414] In an embodiment, components described herein are delivered by topical administration to epithelial cells, e.g., epithelial cells of the oropharynx (including, e.g., epithelial cells of the nose, gums, lips, tongue or pharynx), epithelial cells of the finger or fingernail bed, or epithelial cells of the ano-genital area (including, e.g., epithelial cells of the penis, vulva, vagina or anus). In an embodiment, components described herein are delivered by topical administration to the eye (including, e.g., corneal epithelium, e.g., corneal stroma, e.g., epithelium of upper and lower eyelid, e.g., lens).

[1415] In an embodiment, nanoparticle or viral, e.g., AAV vector, delivery is via topical administration.

[1416] Administration may be provided as a periodic bolus or as continuous infusion from an internal reservoir or from an external reservoir (for example, from an intravenous bag). Components may be administered locally, for example, by continuous release from a sustained release drug delivery device.

[1417] Administration may be provided as continuous infusion from an internal reservoir (for example, from an implant disposed at an intra- or extra-ocular location (see, U.S. Pat. Nos. 5,443,505 and 5,766,242) or from an external reservoir (for example, from an intravenous bag). Components may be administered locally, for example, by continuous release from a sustained release drug delivery device immobilized to an inner wall of the eye or via targeted transscleral controlled release into the choroid (see, for example, PCT/US00/00207, PCT/US02/14279, Ambati et al. (2000) Invest. Ophthalmol. Vis. Sci. 41:1181-1185, and Ambati et al. (2000) Invest. Ophthalmol. Vis. Sci. 41:1186-1191). A variety of devices suitable for administering components locally to the inside of the eye are known in the art. See, for example, U.S. Pat. Nos. 6,251,090, 6,299,895, 6,416,777, 6,413,540, and PCT/US00/28187.

[1418] In addition, components may be formulated to permit release over a prolonged period of time. A release system can include a matrix of a biodegradable material or a material which releases the incorporated components by diffusion. The components can be homogeneously or heterogeneously distributed within the release system. A variety of release systems may be useful, however, the choice of the appropriate system will depend upon rate of release required by a particular application. Both non-degradable and degradable release systems can be used. Suitable release systems include polymers and polymeric matrices, non-polymeric matrices, or inorganic and organic excipients and diluents such as, but not limited to, calcium carbonate and sugar (for example, trehalose). Release systems may be natural or synthetic. However, synthetic release systems are preferred because generally they are more reliable, more reproducible and produce more defined release profiles. The release system material can be selected so that components having different molecular weights are released by diffusion through or degradation of the material.

[1419] Representative synthetic, biodegradable polymers include, for example: polyamides such as poly(amino acids) and poly(peptides); polyesters such as poly(lactic acid), poly(glycolic acid), poly(lactic-co-glycolic acid), and poly(caprolactone); poly(anhydrides); polyorthoesters; polycarbonates; and chemical derivatives thereof (substitutions, additions of chemical groups, for example, alkyl, alkylene, hydroxylations, oxidations, and other modifications routinely made by those skilled in the art), copolymers and mixtures thereof. Representative synthetic, non-degradable polymers include, for example: polyethers such as poly(ethylene oxide), poly(ethylene glycol), and poly(tetramethylene oxide); vinyl polymers-polyacrylates and polymethacrylates such as methyl, ethyl, other alkyl, hydroxyethyl methacrylate, acrylic and methacrylic acids, and others such as poly(vinyl alcohol), poly(vinyl pyrolidone), and poly(vinyl acetate); poly(urethanes); cellulose and its derivatives such as alkyl, hydroxyalkyl, ethers, esters, nitrocellulose, and various cellulose acetates; polysiloxanes; and any chemical derivatives thereof (substitutions, additions of chemical groups, for example, alkyl, alkylene, hydroxylations, oxidations, and other modifications routinely made by those skilled in the art), copolymers and mixtures thereof.

[1420] Poly(lactide-co-glycolide) microsphere can also be used for injection. Typically the microspheres are composed of a polymer of lactic acid and glycolic acid, which are structured to form hollow spheres. The spheres can be approximately 15-30 microns in diameter and can be loaded with components described herein.

[1421] Bi-Modal or Differential Delivery of Components

[1422] Separate delivery of the components of a Cas system, e.g., the Cas9 molecule component and the gRNA molecule component, and more particularly, delivery of the components by differing modes, can enhance performance, e.g., by improving tissue specificity and safety.

[1423] In an embodiment, the Cas9 molecule and the gRNA molecule are delivered by different modes, or as sometimes referred to herein as differential modes. Different or differential modes, as used herein, refer modes of delivery that confer different pharmacodynamic or pharmacokinetic properties on the subject component molecule, e.g., a Cas9 molecule, or gRNA molecule. For example, the modes of delivery can result in different tissue distribution, different half-life, or different temporal distribution, e.g., in a selected compartment, tissue, or organ.

[1424] Some modes of delivery, e.g., delivery by a nucleic acid vector that persists in a cell, or in progeny of a cell, e.g., by autonomous replication or insertion into cellular nucleic acid, result in more persistent expression of and presence of a component. Examples include viral, e.g., adeno-associated virus or lentivirus, delivery.

[1425] By way of example, the components, e.g., a Cas9 molecule and a gRNA molecule, can be delivered by modes that differ in terms of resulting half-life or persistent of the delivered component the body, or in a particular compartment, tissue or organ. In an embodiment, a gRNA molecule can be delivered by such modes. The Cas9 molecule component can be delivered by a mode which results in less persistence or less exposure to the body or a particular compartment or tissue or organ.

[1426] More generally, in an embodiment, a first mode of delivery is used to deliver a first component and a second mode of delivery is used to deliver a second component. The first mode of delivery confers a first pharmacodynamic or pharmacokinetic property. The first pharmacodynamic property can be, e.g., distribution, persistence, or exposure, of the component, or of a nucleic acid that encodes the component, in the body, a compartment, tissue or organ. The second mode of delivery confers a second pharmacodynamic or pharmacokinetic property. The second pharmacodynamic property can be, e.g., distribution, persistence, or exposure, of the component, or of a nucleic acid that encodes the component, in the body, a compartment, tissue or organ.

[1427] In an embodiment, the first pharmacodynamic or pharmacokinetic property, e.g., distribution, persistence or exposure, is more limited than the second pharmacodynamic or pharmacokinetic property.

[1428] In an embodiment, the first mode of delivery is selected to optimize, e.g., minimize, a pharmacodynamic or pharmacokinetic property, e.g., distribution, persistence or exposure.

[1429] In an embodiment, the second mode of delivery is selected to optimize, e.g., maximize, a pharmacodynamic or pharmcokinetic property, e.g., distribution, persistence or exposure.

[1430] In an embodiment, the first mode of delivery comprises the use of a relatively persistent element, e.g., a nucleic acid, e.g., a plasmid or viral vector, e.g., an AAV or lentivirus. As such vectors are relatively persistent product transcribed from them would be relatively persistent.

[1431] In an embodiment, the second mode of delivery comprises a relatively transient element, e.g., an RNA or protein.

[1432] In an embodiment, the first component comprises gRNA, and the delivery mode is relatively persistent, e.g., the gRNA is transcribed from a plasmid or viral vector, e.g., an AAV or lentivirus. Transcription of these genes would be of little physiological consequence because the genes do not encode for a protein product, and the gRNAs are incapable of acting in isolation. The second component, a Cas9 molecule, is delivered in a transient manner, for example as mRNA or as protein, ensuring that the full Cas9 molecule/gRNA molecule complex is only present and active for a short period of time.

[1433] Furthermore, the components can be delivered in different molecular form or with different delivery vectors that complement one another to enhance safety and tissue specificity.

[1434] Use of differential delivery modes can enhance performance, safety and efficacy. E.g., the likelihood of an eventual off-target modification can be reduced. Delivery of immunogenic components, e.g., Cas9 molecules, by less persistent modes can reduce immunogenicity, as peptides from the bacterially-derived Cas enzyme are displayed on the surface of the cell by MEW molecules. A two-part delivery system can alleviate these drawbacks.

[1435] Differential delivery modes can be used to deliver components to different, but overlapping target regions. The formation active complex is minimized outside the overlap of the target regions. Thus, in an embodiment, a first component, e.g., a gRNA molecule is delivered by a first delivery mode that results in a first spatial, e.g., tissue, distribution. A second component, e.g., a Cas9 molecule is delivered by a second delivery mode that results in a second spatial, e.g., tissue, distribution. In an embodiment, the first mode comprises a first element selected from a liposome, nanoparticle, e.g., polymeric nanoparticle, and a nucleic acid, e.g., viral vector. The second mode comprises a second element selected from the group. In an embodiment, the first mode of delivery comprises a first targeting element, e.g., a cell specific receptor or an antibody, and the second mode of delivery does not include that element. In embodiment, the second mode of delivery comprises a second targeting element, e.g., a second cell specific receptor or second antibody.

[1436] When the Cas9 molecule is delivered in a virus delivery vector, a liposome, or polymeric nanoparticle, there is the potential for delivery to and therapeutic activity in multiple tissues, when it may be desirable to only target a single tissue. A two-part delivery system can resolve this challenge and enhance tissue specificity. If the gRNA molecule and the Cas9 molecule are packaged in separated delivery vehicles with distinct but overlapping tissue tropism, the fully functional complex is only be formed in the tissue that is targeted by both vectors.

### Ex Vivo Delivery

[1437] In some embodiments, components described in Table 23 are introduced into cells which are then introduced into the subject, e.g., cells are removed from a subject, manipulated ex vivo and then introduced into the subject. Methods of introducing the components can include, e.g., any of the delivery methods described in Table 24.

### VIII. Modified Nucleosides, Nucleotides, and Nucleic Acids

[1438] Modified nucleosides and modified nucleotides can be present in nucleic acids, e.g., particularly gRNA, but also other forms of RNA, e.g., mRNA, RNAi, or siRNA. As described herein, “nucleoside” is defined as a compound containing a five-carbon sugar molecule (a pentose or ribose) or derivative thereof, and an organic base, purine or pyrimidine, or a derivative thereof. As described herein, “nucleotide” is defined as a nucleoside further comprising a phosphate group.

[1439] Modified nucleosides and nucleotides can include one or more of:

[1440] (i) alteration, e.g., replacement, of one or both of the non-linking phosphate oxygens and/or of one or more of the linking phosphate oxygens in the phosphodiester backbone linkage;

[1441] (ii) alteration, e.g., replacement, of a constituent of the ribose sugar, e.g., of the 2′ hydroxyl on the ribose sugar;

[1442] (iii) wholesale replacement of the phosphate moiety with “dephospho” linkers;

[1443] (iv) modification or replacement of a naturally occurring nucleobase;

[1444] (v) replacement or modification of the ribose-phosphate backbone;

[1445] (vi) modification of the 3′ end or 5′ end of the oligonucleotide, e.g., removal, modification or replacement of a terminal phosphate group or conjugation of a moiety; and

[1446] (vii) modification of the sugar.

[1447] The modifications listed above can be combined to provide modified nucleosides and nucleotides that can have two, three, four, or more modifications. For example, a modified nucleoside or nucleotide can have a modified sugar and a modified nucleobase. In an embodiment, every base of a gRNA is modified, e.g., all bases have a modified phosphate group, e.g., all are phosphorothioate groups. In an embodiment, all, or substantially all, of the phosphate groups of a unimolecular or modular gRNA molecule are replaced with phosphorothioate groups.

[1448] In an embodiment, modified nucleotides, e.g., nucleotides having modifications as described herein, can be incorporated into a nucleic acid, e.g., a “modified nucleic acid.” In some embodiments, the modified nucleic acids comprise one, two, three or more modified nucleotides. In some embodiments, at least 5% (e.g., at least about 5%, at least about 10%, at least about 15%, at least about 20%, at least about 25%, at least about 30%, at least about 35%, at least about 40%, at least about 45%, at least about 50%, at least about 55%, at least about 60%, at least about 65%, at least about 70%, at least about 75%, at least about 80%, at least about 85%, at least about 90%, at least about 95%, or about 100%) of the positions in a modified nucleic acid are a modified nucleotides.

[1449] Unmodified nucleic acids can be prone to degradation by, e.g., cellular nucleases. For example, nucleases can hydrolyze nucleic acid phosphodiester bonds. Accordingly, in one aspect the modified nucleic acids described herein can contain one or more modified nucleosides or nucleotides, e.g., to introduce stability toward nucleases.

[1450] In some embodiments, the modified nucleosides, modified nucleotides, and modified nucleic acids described herein can exhibit a reduced innate immune response when introduced into a population of cells, e.g., in vivo. The term “innate immune response” includes a cellular response to exogenous nucleic acids, including single stranded nucleic acids, generally of viral or bacterial origin, which involves the induction of cytokine expression and release, particularly the interferons, and cell death. In some embodiments, the modified nucleosides, modified nucleotides, and modified nucleic acids described herein can disrupt binding of a major groove interacting partner with the nucleic acid. In some embodiments, the modified nucleosides, modified nucleotides, and modified nucleic acids described herein can exhibit a reduced innate immune response when introduced into a population of cells, e.g., in vivo, and also disrupt binding of a major groove interacting partner with the nucleic acid.

[1451] Definitions of Chemical Groups

[1452] As used herein, “alkyl” is meant to refer to a saturated hydrocarbon group which is straight-chained or branched. Example alkyl groups include methyl (Me), ethyl (Et), propyl (e.g., n-propyl and isopropyl), butyl (e.g., n-butyl, isobutyl, t-butyl), pentyl (e.g., n-pentyl, isopentyl, neopentyl), and the like. An alkyl group can contain from 1 to about 20, from 2 to about 20, from 1 to about 12, from 1 to about 8, from 1 to about 6, from 1 to about 4, or from 1 to about 3 carbon atoms.

[1453] As used herein, “aryl” refers to monocyclic or polycyclic (e.g., having 2, 3 or 4 fused rings) aromatic hydrocarbons such as, for example, phenyl, naphthyl, anthracenyl, phenanthrenyl, indanyl, indenyl, and the like. In some embodiments, aryl groups have from 6 to about 20 carbon atoms.

[1454] As used herein, “alkenyl” refers to an aliphatic group containing at least one double bond.

[1455] As used herein, “alkynyl” refers to a straight or branched hydrocarbon chain containing 2-12 carbon atoms and characterized in having one or more triple bonds. Examples of alkynyl groups include, but are not limited to, ethynyl, propargyl, and 3-hexynyl.

[1456] As used herein, “arylalkyl” or “aralkyl” refers to an alkyl moiety in which an alkyl hydrogen atom is replaced by an aryl group. Aralkyl includes groups in which more than one hydrogen atom has been replaced by an aryl group. Examples of “arylalkyl” or “aralkyl” include benzyl, 2-phenylethyl, 3-phenylpropyl, 9-fluorenyl, benzhydryl, and trityl groups.

[1457] As used herein, “cycloalkyl” refers to a cyclic, bicyclic, tricyclic, or polycyclic non-aromatic hydrocarbon groups having 3 to 12 carbons. Examples of cycloalkyl moieties include, but are not limited to, cyclopropyl, cyclopentyl, and cyclohexyl.

[1458] As used herein, “heterocyclyl” refers to a monovalent radical of a heterocyclic ring system. Representative heterocyclyls include, without limitation, tetrahydrofuranyl, tetrahydrothienyl, pyrrolidinyl, pyrrolidonyl, piperidinyl, pyrrolinyl, piperazinyl, dioxanyl, dioxolanyl, diazepinyl, oxazepinyl, thiazepinyl, and morpholinyl.

[1459] As used herein, “heteroaryl” refers to a monovalent radical of a heteroaromatic ring system. Examples of heteroaryl moieties include, but are not limited to, imidazolyl, oxazolyl, thiazolyl, triazolyl, pyrrolyl, furanyl, indolyl, thiophenyl pyrazolyl, pyridinyl, pyrazinyl, pyridazinyl, pyrimidinyl, indolizinyl, purinyl, naphthyridinyl, quinolyl, and pteridinyl.

[1460] Phosphate Backbone Modifications

[1461] The Phosphate Group

[1462] In some embodiments, the phosphate group of a modified nucleotide can be modified by replacing one or more of the oxygens with a different substituent. Further, the modified nucleotide, e.g., modified nucleotide present in a modified nucleic acid, can include the wholesale replacement of an unmodified phosphate moiety with a modified phosphate as described herein. In some embodiments, the modification of the phosphate backbone can include alterations that result in either an uncharged linker or a charged linker with unsymmetrical charge distribution.

[1463] Examples of modified phosphate groups include, phosphorothioate, phosphoroselenates, borano phosphates, borano phosphate esters, hydrogen phosphonates, phosphoroamidates, alkyl or aryl phosphonates and phosphotriesters. In some embodiments, one of the non-bridging phosphate oxygen atoms in the phosphate backbone moiety can be replaced by any of the following groups: sulfur (S), selenium (Se), BR₃ (wherein R can be, e.g., hydrogen, alkyl, or aryl), C (e.g., an alkyl group, an aryl group, and the like), H, NR₂ (wherein R can be, e.g., hydrogen, alkyl, or aryl), or OR (wherein R can be, e.g., alkyl or aryl). The phosphorous atom in an unmodified phosphate group is achiral. However, replacement of one of the non-bridging oxygens with one of the above atoms or groups of atoms can render the phosphorous atom chiral; that is to say that a phosphorous atom in a phosphate group modified in this way is a stereogenic center. The stereogenic phosphorous atom can possess either the “R” configuration (herein Rp) or the “S” configuration (herein Sp).

[1464] Phosphorodithioates have both non-bridging oxygens replaced by sulfur. The phosphorus center in the phosphorodithioates is achiral which precludes the formation of oligoribonucleotide diastereomers. In some embodiments, modifications to one or both non-bridging oxygens can also include the replacement of the non-bridging oxygens with a group independently selected from S, Se, B, C, H, N, and OR (R can be, e.g., alkyl or aryl).

[1465] The phosphate linker can also be modified by replacement of a bridging oxygen, (i.e., the oxygen that links the phosphate to the nucleoside), with nitrogen (bridged phosphoroamidates), sulfur (bridged phosphorothioates) and carbon (bridged methylenephosphonates). The replacement can occur at either linking oxygen or at both of the linking oxygens.

[1466] Replacement of the Phosphate Group

[1467] The phosphate group can be replaced by non-phosphorus containing connectors. In some embodiments, the charge phosphate group can be replaced by a neutral moiety.

[1468] Examples of moieties which can replace the phosphate group can include, without limitation, e.g., methyl phosphonate, hydroxylamino, siloxane, carbonate, carboxymethyl, carbamate, amide, thioether, ethylene oxide linker, sulfonate, sulfonamide, thioformacetal, formacetal, oxime, methyleneimino, methylenemethylimino, methylenehydrazo, methylenedimethylhydrazo and methyleneoxymethylimino.

[1469] Replacement of the Ribophosphate Backbone

[1470] Scaffolds that can mimic nucleic acids can also be constructed wherein the phosphate linker and ribose sugar are replaced by nuclease resistant nucleoside or nucleotide surrogates. In some embodiments, the nucleobases can be tethered by a surrogate backbone. Examples can include, without limitation, the morpholino, cyclobutyl, pyrrolidine and peptide nucleic acid (PNA) nucleoside surrogates.

[1471] Sugar Modifications

[1472] The modified nucleosides and modified nucleotides can include one or more modifications to the sugar group. For example, the 2′ hydroxyl group (OH) can be modified or replaced with a number of different “oxy” or “deoxy” substituents. In some embodiments, modifications to the 2′ hydroxyl group can enhance the stability of the nucleic acid since the hydroxyl can no longer be deprotonated to form a 2′-alkoxide ion. The 2′-alkoxide can catalyze degradation by intramolecular nucleophilic attack on the linker phosphorus atom.

[1473] Examples of “oxy”-2′ hydroxyl group modifications can include alkoxy or aryloxy (OR, wherein “R” can be, e.g., alkyl, cycloalkyl, aryl, aralkyl, heteroaryl or a sugar); polyethyleneglycols (PEG), O(CH₂CH₂O)ₙCH₂CH₂OR wherein R can be, e.g., H or optionally substituted alkyl, and n can be an integer from 0 to 20 (e.g., from 0 to 4, from 0 to 8, from 0 to 10, from 0 to 16, from 1 to 4, from 1 to 8, from 1 to 10, from 1 to 16, from 1 to 20, from 2 to 4, from 2 to 8, from 2 to 10, from 2 to 16, from 2 to 20, from 4 to 8, from 4 to 10, from 4 to 16, and from 4 to 20). In some embodiments, the “oxy”-2′ hydroxyl group modification can include “locked” nucleic acids (LNA) in which the 2′ hydroxyl can be connected, e.g., by a C₁₋₆ alkylene or C₁₋₆ heteroalkylene bridge, to the 4′ carbon of the same ribose sugar, where exemplary bridges can include methylene, propylene, ether, or amino bridges; O-amino (wherein amino can be, e.g., NH₂; alkylamino, dialkylamino, heterocyclyl, arylamino, diarylamino, heteroarylamino, or diheteroarylamino, ethylenediamine, or polyamino) and aminoalkoxy, O(CH₂)ₙ-amino, (wherein amino can be, e.g., NH₂; alkylamino, dialkylamino, heterocyclyl, arylamino, diarylamino, heteroarylamino, or diheteroarylamino, ethylenediamine, or polyamino). In some embodiments, the “oxy”-2′ hydroxyl group modification can include the methoxyethyl group (MOE), (OCH₂CH₂OCH₃, e.g., a PEG derivative).

[1474] “Deoxy” modifications can include hydrogen (i.e. deoxyribose sugars, e.g., at the overhang portions of partially ds RNA); halo (e.g., bromo, chloro, fluoro, or iodo); amino (wherein amino can be, e.g., NH₂; alkylamino, dialkylamino, heterocyclyl, arylamino, diarylamino, heteroarylamino, diheteroarylamino, or amino acid); NH(CH₂CH₂NH)ₙCH₂CH₂-amino (wherein amino can be, e.g., as described herein), —NHC(O)R (wherein R can be, e.g., alkyl, cycloalkyl, aryl, aralkyl, heteroaryl or sugar), cyano; mercapto; alkyl-thio-alkyl; thioalkoxy; and alkyl, cycloalkyl, aryl, alkenyl and alkynyl, which may be optionally substituted with e.g., an amino as described herein.

[1475] The sugar group can also contain one or more carbons that possess the opposite stereochemical configuration than that of the corresponding carbon in ribose. Thus, a modified nucleic acid can include nucleotides containing e.g., arabinose, as the sugar. The nucleotide “monomer” can have an alpha linkage at the 1′ position on the sugar, e.g., alpha-nucleosides. The modified nucleic acids can also include “abasic” sugars, which lack a nucleobase at C-1′. These abasic sugars can also be further modified at one or more of the constituent sugar atoms. The modified nucleic acids can also include one or more sugars that are in the L form, e.g. L-nucleosides.

[1476] Generally, RNA includes the sugar group ribose, which is a 5-membered ring having an oxygen. Exemplary modified nucleosides and modified nucleotides can include, without limitation, replacement of the oxygen in ribose (e.g., with sulfur (S), selenium (Se), or alkylene, such as, e.g., methylene or ethylene); addition of a double bond (e.g., to replace ribose with cyclopentenyl or cyclohexenyl); ring contraction of ribose (e.g., to form a 4-membered ring of cyclobutane or oxetane); ring expansion of ribose (e.g., to form a 6- or 7-membered ring having an additional carbon or heteroatom, such as for example, anhydrohexitol, altritol, mannitol, cyclohexanyl, cyclohexenyl, and morpholino that also has a phosphoramidate backbone). In some embodiments, the modified nucleotides can include multicyclic forms (e.g., tricyclo; and “unlocked” forms, such as glycol nucleic acid (GNA) (e.g., R-GNA or S-GNA, where ribose is replaced by glycol units attached to phosphodiester bonds), threose nucleic acid (TNA, where ribose is replaced with α-L-threofuranosyl-(3→2′)).

[1477] Modifications on the Nucleobase

[1478] The modified nucleosides and modified nucleotides described herein, which can be incorporated into a modified nucleic acid, can include a modified nucleobase. Examples of nucleobases include, but are not limited to, adenine (A), guanine (G), cytosine (C), and uracil (U). These nucleobases can be modified or wholly replaced to provide modified nucleosides and modified nucleotides that can be incorporated into modified nucleic acids. The nucleobase of the nucleotide can be independently selected from a purine, a pyrimidine, a purine or pyrimidine analog. In some embodiments, the nucleobase can include, for example, naturally-occurring and synthetic derivatives of a base.

[1479] Uracil

[1480] In some embodiments, the modified nucleobase is a modified uracil. Exemplary nucleobases and nucleosides having a modified uracil include without limitation pseudouridine (ψ), pyridin-4-one ribonucleoside, 5-aza-uridine, 6-aza-uridine, 2-thio-5-aza-uridine, 2-thio-uridine (s2U), 4-thio-uridine (s4U), 4-thio-pseudouridine, 2-thio-pseudouridine, 5-hydroxy-uridine (ho⁵U), 5-aminoallyl-uridine, 5-halo-uridine (e.g., 5-iodo-uridine or 5-bromo-uridine), 3-methyl-uridine (m³U), 5-methoxy-uridine (mo⁵U), uridine 5-oxyacetic acid (cmo⁵U), uridine 5-oxyacetic acid methyl ester (mcmo⁵U), 5-carboxymethyl-uridine (cm⁵U), 1-carboxymethyl-pseudouridine, 5-carboxyhydroxymethyl-uridine (chm⁵U), 5-carboxyhydroxymethyl-uridine methyl ester (mchm⁵U), 5-methoxycarbonylmethyl-uridine (mcm⁵U), 5-methoxycarbonylmethyl-2-thio-uridine (mcm⁵s2U), 5-aminomethyl-2-thio-uridine (nm⁵s2U), 5-methylaminomethyl-uridine (mnm⁵U), 5-methylaminomethyl-2-thio-uridine (mnm⁵s2U), 5-methylaminomethyl-2-seleno-uridine (mnm⁵se²U), 5-carbamoylmethyl-uridine (ncm⁵U), 5-carboxymethylaminomethyl-uridine (cmnm⁵U), 5-carboxymethylaminomethyl-2-thio-uridine (cmnm⁵s2U), 5-propynyl-uridine, 1-propynyl-pseudouridine, 5-taurinomethyl-uridine (τcm⁵U), 1-taurinomethyl-pseudouridine, 5-taurinomethyl-2-thio-uridine(τm⁵s2U), 1-taurinomethyl-4-thio-pseudouridine, 5-methyl-uridine (m⁵U, i.e., having the nucleobase deoxythymine), 1-methyl-pseudouridine (m¹ψ), 5-methyl-2-thio-uridine (m⁵s2U), 1-methyl-4-thio-pseudouridine (m¹s⁴ψ), 4-thio-1-methyl-pseudouridine, 3-methyl-pseudouridine (m³ψ), 2-thio-1-methyl-pseudouridine, 1-methyl-1-deaza-pseudouridine, 2-thio-1-methyl-1-deaza-pseudouridine, dihydrouridine (D), dihydropseudouridine, 5,6-dihydrouridine, 5-methyl-dihydrouridine (m⁵D), 2-thio-dihydrouridine, 2-thio-dihydropseudouridine, 2-methoxy-uridine, 2-methoxy-4-thio-uridine, 4-methoxy-pseudouridine, 4-methoxy-2-thio-pseudouridine, N1-methyl-pseudouridine, 3-(3-amino-3-carboxypropyl)uridine (acp³U), 1-methyl-3-(3-amino-3-carboxypropyl)pseudouridine (acp³ψ), 5-(isopentenylaminomethyl)uridine (inm⁵U), 5-(isopentenylaminomethyl)-2-thio-uridine (inm⁵s2U), α-thio-uridine, 2′-O-methyl-uridine (Um), 5,2′-O-dimethyl-uridine (m⁵Um), 2′-O-methyl-pseudouridine (ψm), 2-thio-2′-O-methyl-uridine (s2Um), 5-methoxycarbonylmethyl-2′-O-methyl-uridine (mcm⁵Um), 5-carbamoylmethyl-2′-O-methyl-uridine (ncm⁵Um), 5-carboxymethylaminomethyl-2′-O-methyl-uridine (cmnm⁵Um), 3,2′-O-dimethyl-uridine (m³Um), 5-(isopentenylaminomethyl)-2′-O-methyl-uridine (inm⁵Um), 1-thio-uridine, deoxythymidine, 2′-F-ara-uridine, 2′-F-uridine, 2′-OH-ara-uridine, 5-(2-carbomethoxyvinyl) uridine, 5-[3-(1-E-propenylamino)uridine, pyrazolo[3,4-d]pyrimidines, xanthine, and hypoxanthine.

[1481] Cytosine

[1482] In some embodiments, the modified nucleobase is a modified cytosine. Exemplary nucleobases and nucleosides having a modified cytosine include without limitation 5-aza-cytidine, 6-aza-cytidine, pseudoisocytidine, 3-methyl-cytidine (m³C), N4-acetyl-cytidine (act), 5-formyl-cytidine (f⁵C), N4-methyl-cytidine (m⁴C), 5-methyl-cytidine (m⁵C), 5-halo-cytidine (e.g., 5-iodo-cytidine), 5-hydroxymethyl-cytidine (hm⁵C), 1-methyl-pseudoisocytidine, pyrrolo-cytidine, pyrrolo-pseudoisocytidine, 2-thio-cytidine (s2C), 2-thio-5-methyl-cytidine, 4-thio-pseudoisocytidine, 4-thio-1-methyl-pseudoisocytidine, 4-thio-1-methyl-1-deaza-pseudoisocytidine, 1-methyl-1-deaza-pseudoisocytidine, zebularine, 5-aza-zebularine, 5-methyl-zebularine, 5-aza-2-thio-zebularine, 2-thio-zebularine, 2-methoxy-cytidine, 2-methoxy-5-methyl-cytidine, 4-methoxy-pseudoisocytidine, 4-methoxy-1-methyl-pseudoisocytidine, lysidine (k²C), α-thio-cytidine, 2′-O-methyl-cytidine (Cm), 5,2′-O-dimethyl-cytidine (m⁵Cm), N4-acetyl-2′-O-methyl-cytidine (ac⁴Cm), N4,2′-O-dimethyl-cytidine (m⁴Cm), 5-formyl-2′-O-methyl-cytidine (f⁵Cm), N4,N4,2′-O-trimethyl-cytidine (m⁴₂Cm), 1-thio-cytidine, 2′-F-ara-cytidine, 2′-F-cytidine, and 2′-OH-ara-cytidine.

[1483] Adenine

[1484] In some embodiments, the modified nucleobase is a modified adenine. Exemplary nucleobases and nucleosides having a modified adenine include without limitation 2-amino-purine, 2,6-diaminopurine, 2-amino-6-halo-purine (e.g., 2-amino-6-chloro-purine), 6-halo-purine (e.g., 6-chloro-purine), 2-amino-6-methyl-purine, 8-azido-adenosine, 7-deaza-adenosine, 7-deaza-8-aza-adenosine, 7-deaza-2-amino-purine, 7-deaza-8-aza-2-amino-purine, 7-deaza-2,6-diaminopurine, 7-deaza-8-aza-2,6-diaminopurine, 1-methyl-adenosine (m¹A), 2-methyl-adenosine (m²A), N6-methyl-adenosine (m⁶A), 2-methylthio-N6-methyl-adenosine (ms2 m⁶A), N6-isopentenyl-adenosine (i⁶A), 2-methylthio-N6-isopentenyl-adenosine (ms²i⁶A), N6-(cis-hydroxyisopentenyl)adenosine (io⁶A), 2-methylthio-N6-(cis-hydroxyisopentenyl)adenosine (ms2io⁶A), N6-glycinylcarbamoyl-adenosine (g⁶A), N6-threonylcarbamoyl-adenosine (t⁶A), N6-methyl-N6-threonylcarbamoyl-adenosine (m⁶t⁶A), 2-methylthio-N6-threonylcarbamoyl-adenosine (ms²g⁶A), N6,N6-dimethyl-adenosine (m⁶₂A), N6-hydroxynorvalylcarbamoyl-adenosine (hn⁶A), 2-methylthio-N6-hydroxynorvalylcarbamoyl-adenosine (ms2hn⁶A), N6-acetyl-adenosine (ac⁶A), 7-methyl-adenosine, 2-methylthio-adenosine, 2-methoxy-adenosine, α-thio-adenosine, 2′-O-methyl-adenosine (Am), N⁶,2′-O-dimethyl-adenosine (m⁶Am), N⁶-Methyl-2′-deoxyadenosine, N6,N6,2′-O-trimethyl-adenosine (m⁶₂Am), 1,2′-O-dimethyl-adenosine (m¹Am), 2′-O-ribosyladenosine (phosphate) (Ar(p)), 2-amino-N6-methyl-purine, 1-thio-adenosine, 8-azido-adenosine, 2′-F-ara-adenosine, 2′-F-adenosine, 2′-OH-ara-adenosine, and N6-(19-amino-pentaoxanonadecyl)-adenosine.

[1485] Guanine

[1486] In some embodiments, the modified nucleobase is a modified guanine. Exemplary nucleobases and nucleosides having a modified guanine include without limitation inosine (I), 1-methyl-inosine (m¹I) wyosine (imG), methylwyosine (mimG), 4-demethyl-wyosine (imG-14), isowyosine (imG2), wybutosine (yW), peroxywybutosine (o₂yW), hydroxywybutosine (OHyW), undermodified hydroxywybutosine (OHyW*), 7-deaza-guanosine, queuosine (Q), epoxyqueuosine (oQ), galactosyl-queuosine (galQ), mannosyl-queuosine (manQ), 7-cyano-7-deaza-guanosine (preQ₀), 7-aminomethyl-7-deaza-guanosine (preQ₁), archaeosine (G⁺), 7-deaza-8-aza-guanosine, 6-thio-guanosine, 6-thio-7-deaza-guanosine, 6-thio-7-deaza-8-aza-guanosine, 7-methyl-guanosine (m⁷G), 6-thio-7-methyl-guanosine, 7-methyl-inosine, 6-methoxy-guanosine, 1-methyl-guanosine (m′G), N2-methyl-guanosine (m²G), N2,N2-dimethyl-guanosine (m²₂G), N2,7-dimethyl-guanosine (m²,7G), N2, N2,7-dimethyl-guanosine (m²,2,7G), 8-oxo-guanosine, 7-methyl-8-oxo-guanosine, 1-methyl-6-thio-guanosine, N2-methyl-6-thio-guanosine, N2,N2-dimethyl-6-thio-guanosine, α-thio-guanosine, 2′-O-methyl-guanosine (Gm), N2-methyl-2′-O-methyl-guanosine (m²Gm), N2,N2-dimethyl-2′-O-methyl-guanosine (m²₂Gm), 1-methyl-2′-O-methyl-guanosine (m′Gm), N2,7-dimethyl-2′-O-methyl-guanosine (m²,7Gm), 2′-O-methyl-inosine (Im), 1,2′-O-dimethyl-inosine (m′Im), O⁶-phenyl-2′-deoxyinosine, 2′-O-ribosylguanosine (phosphate) (Gr(p)), 1-thio-guanosine, O⁶-methyl-guanosine, O⁶-Methyl-2′-deoxyguanosine, 2′-F-ara-guanosine, and 2′-F-guanosine.

[1487] Exemplary Modified gRNAs

[1488] In some embodiments, the modified nucleic acids can be modified gRNAs. It is to be understood that any of the gRNAs described herein can be modified in accordance with this section, including any gRNA that comprises a targeting domain from any of Tables 1A-1G, Tables 2A-2G, Tables 3A-3G, Tables 4A-4F, Tables 5A-5E, Tables 6A-6G, Tables 7A-7D, Tables 8A-8E, Tables 9A-9G, Tables 10A-10C, Tables 11A-11E, Tables 12A-12G, Tables 13A-13C, Tables 14A-14E, Tables 15A-15G, Tables 16A-16C, or Table 27.

[1489] As discussed above, transiently expressed or delivered nucleic acids can be prone to degradation by, e.g., cellular nucleases. Accordingly, in one aspect the modified gRNAs described herein can contain one or more modified nucleosides or nucleotides which introduce stability toward nucleases. While not wishing to be bound by theory it is also believed that certain modified gRNAs described herein can exhibit a reduced innate immune response when introduced into a population of cells, particularly the cells of the present invention. As noted above, the term “innate immune response” includes a cellular response to exogenous nucleic acids, including single stranded nucleic acids, generally of viral or bacterial origin, which involves the induction of cytokine expression and release, particularly the interferons, and cell death.

[1490] While some of the exemplary modification discussed in this section may be included at any position within the gRNA sequence, in some embodiments, a gRNA comprises a modification at or near its 5′ end (e.g., within 1-10, 1-5, or 1-2 nucleotides of its 5′ end). In some embodiments, a gRNA comprises a modification at or near its 3′ end (e.g., within 1-10, 1-5, or 1-2 nucleotides of its 3′ end). In some embodiments, a gRNA comprises both a modification at or near its 5′ end and a modification at or near its 3′ end.

[1491] In an embodiment, the 5′ end of a gRNA is modified by the inclusion of a eukaryotic mRNA cap structure or cap analog (e.g., a G(5′)ppp(5′)G cap analog, a m7G(5′)ppp(5′)G cap analog, or a 3′-O-Me-m7G(5′)ppp(5′)G anti reverse cap analog (ARCA)). The cap or cap analog can be included during either chemical synthesis or in vitro transcription of the gRNA.

[1492] In an embodiment, an in vitro transcribed gRNA is modified by treatment with a phosphatase (e.g., calf intestinal alkaline phosphatase) to remove the 5′ triphosphate group.

[1493] In an embodiment, the 3′ end of a gRNA is modified by the addition of one or more (e.g., 25-200) adenine (A) residues. The polyA tract can be contained in the nucleic acid (e.g., plasmid, PCR product, viral genome) encoding the gRNA, or can be added to the gRNA during chemical synthesis, or following in vitro transcription using a polyadenosine polymerase (e.g., E. coli Poly(A)Polymerase).

[1494] In an embodiment, in vitro transcribed gRNA contains both a 5′ cap structure or cap analog and a 3′ polyA tract. In an embodiment, an in vitro transcribed gRNA is modified by treatment with a phosphatase (e.g., calf intestinal alkaline phosphatase) to remove the 5′ triphosphate group and comprises a 3′ polyA tract.

[1495] In some embodiments, gRNAs can be modified at a 3′ terminal U ribose. For example, the two terminal hydroxyl groups of the U ribose can be oxidized to aldehyde groups and a concomitant opening of the ribose ring to afford a modified nucleoside as shown below:

[chemical structure]

wherein “U” can be an unmodified or modified uridine.

[1496] In another embodiment, the 3′ terminal U can be modified with a 2′3′ cyclic phosphate as shown below:

[chemical structure]

wherein “U” can be an unmodified or modified uridine.

[1497] In some embodiments, the gRNA molecules may contain 3′ nucleotides which can be stabilized against degradation, e.g., by incorporating one or more of the modified nucleotides described herein. In this embodiment, e.g., uridines can be replaced with modified uridines, e.g., 5-(2-amino)propyl uridine, and 5-bromo uridine, or with any of the modified uridines described herein; adenosines and guanosines can be replaced with modified adenosines and guanosines, e.g., with modifications at the 8-position, e.g., 8-bromo guanosine, or with any of the modified adenosines or guanosines described herein.

[1498] In some embodiments, sugar-modified ribonucleotides can be incorporated into the gRNA, e.g., wherein the 2′ OH-group is replaced by a group selected from H, —OR, —R (wherein R can be, e.g., alkyl, cycloalkyl, aryl, aralkyl, heteroaryl or sugar), halo, —SH, —SR (wherein R can be, e.g., alkyl, cycloalkyl, aryl, aralkyl, heteroaryl or sugar), amino (wherein amino can be, e.g., NH₂; alkylamino, dialkylamino, heterocyclyl, arylamino, diarylamino, heteroarylamino, diheteroarylamino, or amino acid); or cyano (—CN). In some embodiments, the phosphate backbone can be modified as described herein, e.g., with a phosphothioate group. In some embodiments, one or more of the nucleotides of the gRNA can each independently be a modified or unmodified nucleotide including, but not limited to 2′-sugar modified, such as, 2′-O-methyl, 2′-O-methoxyethyl, or 2′-Fluoro modified including, e.g., 2′-F or 2′-O-methyl, adenosine (A), 2′-F or 2′-O-methyl, cytidine (C), 2′-F or 2′-O-methyl, uridine (U), 2′-F or 2′-O-methyl, thymidine (T), 2′-F or 2′-O-methyl, guanosine (G), 2′-O-methoxyethyl-5-methyluridine (Teo), 2′-O-methoxyethyladenosine (Aeo), 2′-O-methoxyethyl-5-methylcytidine (m5Ceo), and any combinations thereof.

[1499] In some embodiments, a gRNA can include “locked” nucleic acids (LNA) in which the 2′ OH-group can be connected, e.g., by a C1-6 alkylene or C1-6 heteroalkylene bridge, to the 4′ carbon of the same ribose sugar, where exemplary bridges can include methylene, propylene, ether, or amino bridges; O-amino (wherein amino can be, e.g., NH₂; alkylamino, dialkylamino, heterocyclyl, arylamino, diarylamino, heteroarylamino, or diheteroarylamino, ethylenediamine, or polyamino) and aminoalkoxy or O(CH₂)ₙ-amino (wherein amino can be, e.g., NH₂; alkylamino, dialkylamino, heterocyclyl, arylamino, diarylamino, heteroarylamino, or diheteroarylamino, ethylenediamine, or polyamino).

[1500] In some embodiments, a gRNA can include a modified nucleotide which is multicyclic (e.g., tricyclo; and “unlocked” forms, such as glycol nucleic acid (GNA) (e.g., R-GNA or S-GNA, where ribose is replaced by glycol units attached to phosphodiester bonds), or threose nucleic acid (TNA, where ribose is replaced with α-L-threofuranosyl-(3′→2′)).

[1501] Generally, gRNA molecules include the sugar group ribose, which is a 5-membered ring having an oxygen. Exemplary modified gRNAs can include, without limitation, replacement of the oxygen in ribose (e.g., with sulfur (S), selenium (Se), or alkylene, such as, e.g., methylene or ethylene); addition of a double bond (e.g., to replace ribose with cyclopentenyl or cyclohexenyl); ring contraction of ribose (e.g., to form a 4-membered ring of cyclobutane or oxetane); ring expansion of ribose (e.g., to form a 6- or 7-membered ring having an additional carbon or heteroatom, such as for example, anhydrohexitol, altritol, mannitol, cyclohexanyl, cyclohexenyl, and morpholino that also has a phosphoramidate backbone). Although the majority of sugar analog alterations are localized to the 2′ position, other sites are amenable to modification, including the 4′ position. In an embodiment, a gRNA comprises a 4′-S, 4′-Se or a 4′-C-aminomethyl-2′-O-Me modification.

[1502] In some embodiments, deaza nucleotides, e.g., 7-deaza-adenosine, can be incorporated into the gRNA. In some embodiments, O- and N-alkylated nucleotides, e.g., N6-methyl adenosine, can be incorporated into the gRNA. In some embodiments, one or more or all of the nucleotides in a gRNA molecule are deoxynucleotides.

[1503] miRNA Binding Sites

[1504] microrNAs (or miRNAs) are naturally occurring cellular 19-25 nucleotide long noncoding RNAs. They bind to nucleic acid molecules having an appropriate miRNA binding site, e.g., in the 3′ UTR of an mRNA, and down-regulate gene expression. While not wishing to be bound by theory it is believed that the down regulation is either by reducing nucleic acid molecule stability or by inhibiting translation. An RNA species disclosed herein, e.g., an mRNA encoding Cas9 can comprise an miRNA binding site, e.g., in its 3′UTR. The miRNA binding site can be selected to promote down regulation of expression is a selected cell type. By way of example, the incorporation of a binding site for miR-122, a microrNA abundant in liver, can inhibit the expression of the gene of interest in the liver.

### EXAMPLES

[1505] The following Examples are merely illustrative and are not intended to limit the scope or content of the invention in any way.

### Example 1

### Evaluation of Candidate Guide RNAs (gRNAs)

[1506] The suitability of candidate gRNAs can be evaluated as described in this example. Although described for a chimeric gRNA, the approach can also be used to evaluate modular gRNAs.

[1507] Cloning gRNAs into Vectors

[1508] For each gRNA, a pair of overlapping oligonucleotides is designed and obtained. Oligonucleotides are annealed and ligated into a digested vector backbone containing an upstream U6 promoter and the remaining sequence of a long chimeric gRNA. Plasmid is sequence-verified and prepped to generate sufficient amounts of transfection-quality DNA. Alternate promoters maybe used to drive in vivo transcription (e.g. H1 promoter) or for in vitro transcription (e.g., a T7 promoter).

[1509] Cloning gRNAs in Linear dsDNA Molecule (STITCHR)

[1510] For each gRNA, a single oligonucleotide is designed and obtained. The U6 promoter and the gRNA scaffold (e.g. including everything except the targeting domain, e.g., including sequences derived from the crRNA and tracrRNA, e.g., including a first complementarity domain; a linking domain; a second complementarity domain; a proximal domain; and a tail domain) are separately PCR amplified and purified as dsDNA molecules. The gRNA-specific oligonucleotide is used in a PCR reaction to stitch together the U6 and the gRNA scaffold, linked by the targeting domain specified in the oligonucleotide. Resulting dsDNA molecule (STITCHR product) is purified for transfection. Alternate promoters may be used to drive in vivo transcription (e.g., H1 promoter) or for in vitro transcription (e.g., T7 promoter). Any gRNA scaffold may be used to create gRNAs compatible with Cas9s from any bacterial species.

[1511] Initial gRNA Screen

[1512] Each gRNA to be tested is transfected, along with a plasmid expressing Cas9 and a small amount of a GFP-expressing plasmid into human cells. In preliminary experiments, these cells can be immortalized human cell lines such as 293T, K562 or U205. Alternatively, primary human cells may be used. In this case, cells may be relevant to the eventual therapeutic cell target (for example, an erythroid cell). The use of primary cells similar to the potential therapeutic target cell population may provide important information on gene targeting rates in the context of endogenous chromatin and gene expression.

[1513] Transfection may be performed using lipid transfection (such as Lipofectamine or Fugene) or by electroporation (such as Lonza Nucleofection). Following transfection, GFP expression can be determined either by fluorescence microscopy or by flow cytometry to confirm consistent and high levels of transfection. These preliminary transfections can comprise different gRNAs and different targeting approaches (17-mers, 20-mers, nuclease, dual-nickase, etc.) to determine which gRNAs/combinations of gRNAs give the greatest activity.

[1514] Efficiency of cleavage with each gRNA may be assessed by measuring NHEJ-induced indel formation at the target locus by a T7E1-type assay or by sequencing. Alternatively, other mismatch-sensitive enzymes, such as Cell/Surveyor nuclease, may also be used.

[1515] For the T7E1 assay, PCR amplicons are approximately 500-700 bp with the intended cut site placed asymmetrically in the amplicon. Following amplification, purification and size-verification of PCR products, DNA is denatured and re-hybridized by heating to 95° C. and then slowly cooling. Hybridized PCR products are then digested with T7 Endonuclease I (or other mismatch-sensitive enzyme) which recognizes and cleaves non-perfectly matched DNA. If indels are present in the original template DNA, when the amplicons are denatured and re-annealed, this results in the hybridization of DNA strands harboring different indels and therefore lead to double-stranded DNA that is not perfectly matched. Digestion products may be visualized by gel electrophoresis or by capillary electrophoresis. The fraction of DNA that is cleaved (density of cleavage products divided by the density of cleaved and uncleaved) may be used to estimate a percent NHEJ using the following equation: % NHEJ=(1-(1-fraction cleaved)^{1/2}). The T7E1 assay is sensitive down to about 2-5% NHEJ.

[1516] Sequencing may be used instead of, or in addition to, the T7E1 assay. For Sanger sequencing, purified PCR amplicons are cloned into a plasmid backbone, transformed, miniprepped and sequenced with a single primer. Sanger sequencing may be used for determining the exact nature of indels after determining the NHEJ rate by T7E1.

[1517] Sequencing may also be performed using next generation sequencing techniques. When using next generation sequencing, amplicons may be 300-500 bp with the intended cut site placed asymmetrically. Following PCR, next generation sequencing adapters and barcodes (for example Illumina multiplex adapters and indexes) may be added to the ends of the amplicon, e.g., for use in high throughput sequencing (for example on an Illumina MiSeq). This method allows for detection of very low NHEJ rates.

### Example 2

### Assessment of Gene Targeting by NHEJ

[1518] The gRNAs that induce the greatest levels of NHEJ in initial tests can be selected for further evaluation of gene targeting efficiency. In this case, cells are derived from disease subjects and, therefore, harbor the relevant mutation.

[1519] Following transfection (usually 2-3 days post-transfection,) genomic DNA may be isolated from a bulk population of transfected cells and PCR may be used to amplify the target region. Following PCR, gene targeting efficiency to generate the desired mutations (either knockout of a target gene or removal of a target sequence motif) may be determined by sequencing. For Sanger sequencing, PCR amplicons may be 500-700 bp long. For next generation sequencing, PCR amplicons may be 300-500 bp long. If the goal is to knockout gene function, sequencing may be used to assess what percent of viral copies have undergone NHEJ-induced indels that result in a frameshift or large deletion or insertion that would be expected to destroy gene function. If the goal is to remove a specific sequence motif, sequencing may be used to assess what percent of viral copies have undergone NHEJ-induced deletions that span this sequence.

### Example 3

### Assessment of Activity of Individual gRNAs Targeting a Synthetic HSV-1 Construct

[1520] A plasmid containing HSV-1 sequences was constructed as a reporter to measure Cas9-mediated cleavage of target DNA. This reporter plasmid, pAF025, encodes a Green Fluorescent Protein (GFP) driven by a CMV promoter. The target HSV-1 sequences were inserted in frame with the GFP, at its N-terminus, with a P2A self-cleaving peptide sequence between the GFP and the target HSV-1 sequence. FIG. 10A shows the plasmid map for pAF025.

[1521] gRNAs were identified using a custom guide RNA design software based on the public tool cas-offinder (Bae et al. Bioinformatics. 2014; 30(10): 1473-1475, incorporated herein by reference). Each gRNA to be tested was generated as a STITCHR product and co-transfected with a plasmid expressing the S. aureus Cas9 (pAF003) into HEK293FT cells. The pAF003 plasmid encodes the S. aureus Cas9, with N-terminal and C-terminal nuclear localization signals (NLS) and a C-terminal triple flag tag, driven by a CMV promoter. gRNA and Cas9-encoding DNA was introduced into cells along with target plasmid pAF025 by Minis TransIT-293 transfection reagent. Two days post-transfection, cells were removed from their growth plates by trypsinization, washed in PBS buffer, and analyzed with a BD Accuri Flow Cytometer.

[1522] The gRNAs used in the experiments is shown in Table 27 below.

TABLE 27

| gRNA # | Target sequence | Size | Species | SEQ ID NO: |
|---|---|---|---|---|
| HSV1-UL48-370 | GGAGGGCGAGGTCGTGAAGC | 20 | S. aureus | 6208 |
| HSV1-UL48-314 | GGACGGGGATTCCCCGGGGC | 20 | S. aureus | 6152 |
| HSV1-UL48-340 | GGGGGTAAATCCCGGCCCCG | 20 | S. aureus | 6178 |
| HSV1-UL48-331 | ATCCAGAGCGCCGTAGGGGG | 20 | S. aureus | 6169 |
| HSV1-UL48-877 | CGCTCTGGATATGGCCGACT | 20 | S. aureus | 6607 |
| HSV1-UL54-1960 | GAAATCCTAGACACGCACCGCC | 22 | S. aureus | 18949 |

[1523] As shown in FIG. 10B, there was a reduction in GFP expression as measured by mean fluorescence (or relative fluorescence units, RFU) in the transfected cell population due to Cas9-mediated cleavage of the HSV-1 target sequences in the plasmid pAF025.

### INCORPORATION BY REFERENCE

[1524] All publications, patents, and patent applications mentioned herein are hereby incorporated by reference in their entirety as if each individual publication, patent or patent application was specifically and individually indicated to be incorporated by reference. In case of conflict, the present application, including any definitions herein, will control.

### EQUIVALENTS

[1525] Those skilled in the art will recognize, or be able to ascertain using no more than routine experimentation, many equivalents to the specific embodiments of the invention described herein. Such equivalents are intended to be encompassed by the following claims.

What is claimed is:

1. A CRISPR/Cas system, comprising:
a gRNA molecule comprising a targeting domain which is complementary with a target sequence of a herpes simplex virus (HSV) viral gene selected from the group consisting of a UL19 gene, a UL30 gene, a UL48 gene, and a UL54 gene; and
a Cas9 molecule.

2. The system of claim 1, wherein said system is configured to form a double strand break or a single strand break within 500 bp, 450 bp, 400 bp, 350 bp, 300 bp, 250 bp, 200 bp, 150 bp, 100 bp, 50 bp, 25 bp, or 10 bp of a target position within said HSV viral gene, thereby altering said HSV viral gene.

3. The system of claim 1, wherein said Cas9 molecule is an enzymatically active Cas9 (eaCas9) molecule.

4. The system of claim 3, wherein said eaCas9 molecule comprises a nickase molecule.

5. The system of claim 3, wherein said eaCas9 molecule comprises HNH-like domain cleavage activity but has no, or no significant, N-terminal RuvC-like domain cleavage activity.

6. The system of claim 5, wherein said eaCas9 molecule is an HNH-like domain nickase.

7. The system of claim 5, wherein said eaCas9 molecule comprises a mutation at D10.

8. The system of claim 3, wherein said eaCas9 molecule comprises N-terminal RuvC-like domain cleavage activity but has no, or no significant, HNH-like domain cleavage activity.

9. The system of claim 8, wherein said eaCas9 molecule is an N-terminal RuvC-like domain nickase.

10. The system of claim 1, wherein said Cas9 molecule is an S. aureus Cas9 molecule, an S. pyogenes Cas9 molecule, or a N. meningitidis Cas9 molecule.

11. The system of claim 2, wherein said altering said HSV viral gene comprises knocking out said HSV viral gene.

12. The system of claim 1, wherein said targeting domain is configured to target a coding region or a non-coding region of said HSV viral gene, wherein said non-coding region comprises a promoter region, an enhancer region, an intron, the 3′ UTR, the 5′ UTR, or a polyadenylation signal region of said HSV viral gene; and said coding region comprises an exon of said HSV viral gene.

13. The system of claim 1, wherein said targeting domain comprises or consists of a nucleotide sequence that is the same as, or differs by no more than 3 nucleotides from, a targeting domain sequence selected from the targeting domain sequences disclosed in Tables 1A-1G, Tables 2A-2G, Tables 3A-3G, Tables 4A-4F, Tables 5A-5E, Tables 6A-6G, Tables 7A-7D, Tables 8A-8E, Tables 9A-9G, Tables 10A-10C, Tables 11A-11E, Tables 12A-12G, Tables 13A-13C, Tables 14A-14E, Tables 15A-15G, Tables 16A-16C and Table 27.

14. The system of claim 1, wherein said gRNA is a modular gRNA molecule or a chimeric gRNA molecule.

15. The system of claim 1, wherein said targeting domain has a length of 16, 17, 18, 19, 20, 21, 22, 23, 24, 25, or 26 nucleotides.

16. The system of claim 1, wherein said gRNA molecule comprises from 5′ to 3′:
a targeting domain;
a first complementarity domain;
a linking domain;
a second complementarity domain;
a proximal domain; and
a tail domain.

17. The system of claim 16, wherein said linking domain is no more than 25 nucleotides in length.

18. The system of claim 16, wherein said proximal and tail domain, taken together, are at least 20, at least 25, at least 30, or at least 40 nucleotides in length.

19. A cell transfected with the CRISPR/Cas system of claim 1.

20. A gRNA molecule comprising a targeting domain which is complementary with a target sequence of a HSV viral gene selected from the group consisting of a UL19 gene, a UL30 gene, a UL48 gene, and a UL54 gene.

21. The gRNA molecule of claim 20, wherein said targeting domain comprises or consists of a nucleotide sequence that is the same as, or differs by no more than 3 nucleotides from, a targeting domain sequence selected from the targeting domain sequences disclosed Tables 1A-1G, Tables 2A-2G, Tables 3A-3G, Tables 4A-4F, Tables 5A-5E, Tables 6A-6G, Tables 7A-7D, Tables 8A-8E, Tables 9A-9G, Tables 10A-10C, Tables 11A-11E, Tables 12A-12G, Tables 13A-13C, Tables 14A-14E, Tables 15A-15G, Tables 16A-16C and Table 27.

22. A composition comprising the gRNA molecule of claim 20.

23. The composition of claim 22, further comprising a Cas9 molecule.

24. A nucleic acid composition that comprises: (a) a first nucleotide sequence that encodes a gRNA molecule comprising a targeting domain that is complementary with a target sequence of a HSV viral gene selected from the group consisting of a UL19 gene, a UL30 gene, a UL48 gene, and a UL54 gene.

25. The nucleic acid composition of claim 24, further comprising: (b) a second nucleotide sequence that encodes a Cas9 molecule.

26. The nucleic acid of claim 25, wherein said Cas9 molecule is an eaCas9 molecule.

27. The nucleic acid of claim 25, wherein said Cas9 molecule is an S. aureus Cas9 molecule, an S. pyogenes Cas9 molecule, or a N. meningitidis Cas9 molecule.

28. The nucleic acid composition of claim 25, wherein (a) and (b) are present on one nucleic acid molecule; or (a) is present on a first nucleic acid molecule and (b) is present on a second nucleic acid molecule.

29. The nucleic acid composition of claim 24, further comprising: (c) a third nucleotide sequence that encodes a second gRNA molecule comprising a targeting domain that is complementary with a second target sequence of said HSV viral gene.

30. A cell transfected with the nucleic acid composition of claim 24.

31. A method of altering a HSV viral gene selected from the group consisting of a UL19 gene, a UL30 gene, a UL48 gene, and a UL54 gene in a cell, comprising administering to said cell:
(i) a CRISPR/Cas system comprising: (a) a gRNA molecule comprising a targeting domain which is complementary with a target domain sequence of said HSV viral gene and (b) a Cas9 molecule; or
(ii) a nucleic acid composition that comprises: (a) a first nucleotide sequence encoding a gRNA molecule comprising a targeting domain that is complementary with a target sequence of said HSV viral gene and (b) a second nucleotide sequence encoding a Cas9 molecule.

32. The method of claim 31, wherein said alteration comprises knockout of said HSV viral gene.

33. The method of claim 31, wherein said Cas9 molecule is an eaCas9 molecule.

34. The method of claim 31, wherein said alteration of said HSV viral gene results in reduction or elimination of expression of said HSV viral gene.

35. The method of claim 31, wherein said cell is from a subject suffering from or at risk for HSV infection.

36. The method of claim 31, wherein said cell is selected from the group consisting of an epithelial cell, a neuronal cell, and an optic cell.

The application's sequence listing, which the Patent Office published only in electronic form, follows.

SEQUENCE LISTING (19918 sequences)

SEQ ID NO: 1 - protein, 1344 aa, Streptococcus mutans
KKPYSIGLDIGTNSVGWAVVTDDYKVPAKKMKVLGNTDKSHIEKNLLGALLFDSGNTAEDRRLKRTARRRYTRRRNRILYLQEIFSEEMGKVDDSFFHRLEDSFLVTEDKRGERHPIFGNLEEEVKYHENFPTIYHLRQYLADNPEKVDLRLVYLALAHIIKFRGHFLIEGKFDTRNNDVQRLFQEFLAVYDNTFENSSLQEQNVQVEEILTDKISKSAKKDRVLKLFPNEKSNGRFAEFLKLIVGNQADFKKHFELEEKAPLQFSKDTYEEELEVLLAQIGDNYAELFLSAKKLYDSILLSGILTVTDVGTKAPLSASMIQRYNEHQMDLAQLKQFIRQKLSDKYNEVFSDVSKDGYAGYIDGKTNQEAFYKYLKGLLNKIEGSGYFLDKIEREDFLRKQRTFDNGSIPHQIHLQEMRAIIRRQAEFYPFLADNQDRIEKLLTFRIPYYVGPLARGKSDFAWLSRKSADKITPWNFDEIVDKESSAEAFINRMTNYDLYLPNQKVLPKHSLLYEKFTVYNELTKVKYKTEQGKTAFFDANMKQEIFDGVFKVYRKVTKDKLMDFLEKEFDEFRIVDLTGLDKENKVFNASYGTYHDLCKILDKDFLDNSKNEKILEDIVLTLTLFEDREMIRKRLENYSDLLTKEQVKKLERRHYTGWGRLSAELIHGIRNKESRKTILDYLIDDGNSNRNFMQLINDDALSFKEEIAKAQVIGETDNLNQVVSDIAGSPAIKKGILQSLKIVDELVKIMGHQPENIVVEMARENQFTNQGRRNSQQRLKGLTDSIKEFGSQILKEHPVENSQLQNDRLFLYYLQNGRDMYTGEELDIDYLSQYDIDHIIPQAFIKDNSIDNRVLTSSKENRGKSDDVPSKDVVRKMKSYWSKLLSAKLITQRKFDNLTKAERGGLTDDDKAGFIKRQLVETRQITKHVARILDERFNTETDENNKKIRQVKIVTLKSNLVSNFRKEFELYKVREINDYHHAHDAYLNAVIGKALLGVYPQLEPEFVYGDYPHFHGHKENKATAKKFFYSNIMNFFKKDDVRTDKNGEIIWKKDEHISNIKKVLSYPQVNIVKKVEEQTGGFSKESILPKGNSDKLIPRKTKKFYWDTKKYGGFDSPIVAYSILVIADIEKGKSKKLKTVKALVGVTIMEKMTFERDPVAFLERKGYRNVQEENIIKLPKYSLFKLENGRKRLLASARELQKGNEIVLPNHLGTLLYHAKNIHKVDEPKHLDYVDKHKDEFKELLDVVSNFSKKYTLAEGNLEKIKELYAQNNGEDLKELASSFINLLTFTAIGAPATFKFFDKNIDRKRYTSTTEILNATLIHQSITGLYETRIDLNKLGGD

SEQ ID NO: 2 - protein, 1367 aa, Streptococcus pyogenes
DKKYSIGLDIGTNSVGWAVITDEYKVPSKKFKVLGNTDRHSIKKNLIGALLFDSGETAEATRLKRTARRRYTRRKNRICYLQEIFSNEMAKVDDSFFHRLEESFLVEEDKKHERHPIFGNIVDEVAYHEKYPTIYHLRKKLVDSTDKADLRLIYLALAHMIKFRGHFLIEGDLNPDNSDVDKLFIQLVQTYNQLFEENPINASGVDAKAILSARLSKSRRLENLIAQLPGEKKNGLFGNLIALSLGLTPNFKSNFDLAEDAKLQLSKDTYDDDLDNLLAQIGDQYADLFLAAKNLSDAILLSDILRVNTEITKAPLSASMIKRYDEHHQDLTLLKALVRQQLPEKYKEIFFDQSKNGYAGYIDGGASQEEFYKFIKPILEKMDGTEELLVKLNREDLLRKQRTFDNGSIPHQIHLGELHAILRRQEDFYPFLKDNREKIEKILTFRIPYYVGPLARGNSRFAWMTRKSEETITPWNFEEVVDKGASAQSFIERMTNFDKNLPNEKVLPKHSLLYEYFTVYNELTKVKYVTEGMRKPAFLSGEQKKAIVDLLFKTNRKVTVKQLKEDYFKKIECFDSVEISGVEDRFNASLGTYHDLLKIIKDKDFLDNEENEDILEDIVLTLTLFEDREMIEERLKTYAHLFDDKVMKQLKRRRYTGWGRLSRKLINGIRDKQSGKTILDFLKSDGFANRNFMQLIHDDSLTFKEDIQKAQVSGQGDSLHEHIANLAGSPAIKKGILQTVKVVDELVKVMGRHKPENIVIEMARENQTTQKGQKNSRERMKRIEEGIKELGSQILKEHPVENTQLQNEKLYLYYLQNGRDMYVDQELDINRLSDYDVDHIVPQSFLKDDSIDNKVLTRSDKNRGKSDNVPSEEVVKKMKNYWRQLLNAKLITQRKFDNLTKAERGGLSELDKAGFIKRQLVETRQITKHVAQILDSRMNTKYDENDKLIREVKVITLKSKLVSDFRKDFQFYKVREINNYHHAHDAYLNAVVGTALIKKYPKLESEFVYGDYKVYDVRKMIAKSEQEIGKATAKYFFYSNIMNFFKTEITLANGEIRKRPLIETNGETGEIVWDKGRDFATVRKVLSMPQVNIVKKTEVQTGGFSKESILPKRNSDKLIARKKDWDPKKYGGFDSPTVAYSVLVVAKVEKGKSKKLKSVKELLGITIMERSSFEKNPIDFLEAKGYKEVKKDLIIKLPKYSLFELENGRKRMLASAGELQKGNELALPSKYVNFLYLASHYEKLKGSPEDNEQKQLFVEQHKHYLDEIIEQISEFSKRVILADANLDKVLSAYNKHRDKPIREQAENIIHLFTLTNLGAPAAFKYFDTTIDRKRYTSTKEVLDATLIHQSITGLYETRIDLSQLGGD

SEQ ID NO: 3 - protein, 1387 aa, Streptococcus thermophilus
TKPYSIGLDIGTNSVGWAVTTDNYKVPSKKMKVLGNTSKKYIKKNLLGVLLFDSGITAEGRRLKRTARRRYTRRRNRILYLQEIFSTEMATLDDAFFQRLDDSFLVPDDKRDSKYPIFGNLVEEKAYHDEFPTIYHLRKYLADSTKKADLRLVYLALAHMIKYRGHFLIEGEFNSKNNDIQKNFQDFLDTYNAIFESDLSLENSKQLEEIVKDKISKLEKKDRILKLFPGEKNSGIFSEFLKLIVGNQADFRKCFNLDEKASLHFSKESYDEDLETLLGYIGDDYSDVFLKAKKLYDAILLSGFLTVTDNETEAPLSSAMIKRYNEHKEDLALLKEYIRNISLKTYNEVFKDDTKNGYAGYIDGKTNQEDFYVYLKKLLAEFEGADYFLEKIDREDFLRKQRTFDNGSIPYQIHLQEMRAILDKQAKFYPFLAKNKERIEKILTFRIPYYVGPLARGNSDFAWSIRKRNEKITPWNFEDVIDKESSAEAFINRMTSFDLYLPEEKVLPKHSLLYETFNVYNELTKVRFIAESMRDYQFLDSKQKKDIVRLYFKDKRKVTDKDIIEYLHAIYGYDGIELKGIEKQFNSSLSTYHDLLNIINDKEFLDDSSNEAIIEEIIHTLTIFEDREMIKQRLSKFENIFDKSVLKKLSRRHYTGWGKLSAKLINGIRDEKSGNTILDYLIDDGISNRNFMQLIHDDALSFKKKIQKAQIIGDEDKGNIKEVVKSLPGSPAIKKGILQSIKIVDELVKVMGGRKPESIVVEMARENQYTNQGKSNSQQRLKRLEKSLKELGSKILKENIPAKLSKIDNNALQNDRLYLYYLQNGKDMYTGDDLDIDRLSNYDIDHIIPQAFLKDNSIDNKVLVSSASNRGKSDDVPSLEVVKKRKTFWYQLLKSKLISQRKFDNLTKAERGGLSPEDKAGFIQRQLVETRQITKHVARLLDEKFNNKKDENNRAVRTVKIITLKSTLVSQFRKDFELYKVREINDFHHAHDAYLNAVVASALLKKYPKLEPEFVYGDYPKYNSFRERKSATEKVYFYSNIMNIFKKSISLADGRVIERPLIEVNEETGESVWNKESDLATVRRVLSYPQVNVVKKVEEQNHGLDRGKPKGLFNANLSSKPKPNSNENLVGAKEYLDPKKYGGYAGISNSFTVLVKGTIEKGAKKKITNVLEFQGISILDRINYRKDKLNFLLEKGYKDIELIIELPKYSLFELSDGSRRMLASILSTNNKRGEIHKGNQIFLSQKFVKLLYHAKRISNTINENHRKYVENHKKEFEELFYYILEFNENYVGAKKNGKLLNSAFQSWQNHSIDELCSSFIGPTGSERKGLFELTSRGSAADFEFLGVKIPRYRDYTPSSLLKDATLIHQSVTGLYETRIDLAKLGEG

SEQ ID NO: 4 - protein, 1333 aa, Listeria innocua
KKPYTIGLDIGTNSVGWAVLTDQYDLVKRKMKIAGDSEKKQIKKNFWGVRLFDEGQTAADRRMARTARRRIERRRNRISYLQGIFAEEMSKTDANFFCRLSDSFYVDNEKRNSRHPFFATIEEEVEYHKNYPTIYHLREELVNSSEKADLRLVYLALAHIIKYRGNFLIEGALDTQNTSVDGIYKQFIQTYNQVFASGIEDGSLKKLEDNKDVAKILVEKVTRKEKLERILKLYPGEKSAGMFAQFISLIVGSKGNFQKPFDLIEKSDIECAKDSYEEDLESLLALIGDEYAELFVAAKNAYSAVVLSSIITVAETETNAKLSASMIERFDTHEEDLGELKAFIKLHLPKHYEEIFSNTEKHGYAGYIDGKTKQADFYKYMKMTLENIEGADYFIAKIEKENFLRKQRTFDNGAIPHQLHLEELEAILHQQAKYYPFLKENYDKIKSLVTFRIPYFVGPLANGQSEFAWLTRKADGEIRPWNIEEKVDFGKSAVDFIEKMTNKDTYLPKENVLPKHSLCYQKYLVYNELTKVRYINDQGKTSYFSGQEKEQIFNDLFKQKRKVKKKDLELFLRNMSHVESPTIEGLEDSFNSSYSTYHDLLKVGIKQEILDNPVNTEMLENIVKILTVFEDKRMIKEQLQQFSDVLDGVVLKKLERRHYTGWGRLSAKLLMGIRDKQSHLTILDYLMNDDGLNRNLMQLINDSNLSFKSIIEKEQVTTADKDIQSIVADLAGSPAIKKGILQSLKIVDELVSVMGYPPQTIVVEMARENQTTGKGKNNSRPRYKSLEKAIKEFGSQILKEHPTDNQELRNNRLYLYYLQNGKDMYTGQDLDIHNLSNYDIDHIVPQSFITDNSIDNLVLTSSAGNREKGDDVPPLEIVRKRKVFWEKLYQGNLMSKRKFDYLTKAERGGLTEADKARFIHRQLVETRQITKNVANILHQRFNYEKDDHGNTMKQVRIVTLKSALVSQFRKQFQLYKVRDVNDYHHAHDAYLNGVVANTLLKVYPQLEPEFVYGDYHQFDWFKANKATAKKQFYTNIMLFFAQKDRIIDENGEILWDKKYLDTVKKVMSYRQMNIVKKTEIQKGEFSKATIKPKGNSSKLIPRKTNWDPMKYGGLDSPNMAYAVVIEYAKGKNKLVFEKKIIRVTIMERKAFEKDEKAFLEEQGYRQPKVLAKLPKYTLYECEEGRRRMLASANEAQKGNQQVLPNHLVTLLHHAANCEVSDGKSLDYIESNREMFAELLAHVSEFAKRYTLAEANLNKINQLFEQNKEGDIKAIAQSFVDLMAFNAMGAPASFKFFETTIERKRYNNLKELLNSTIIYQSITGLYESRKRLDD

SEQ ID NO: 5 - RNA, 96 nt, Artificial Sequence
  Synthetic oligonucleotide
  misc_feature (1)..(20): a, c, u, g, unknown or other
nnnnnnnnnnnnnnnnnnnnguuuuagagcuagaaauagcaaguuaaaauaaggcuaguccguuaucaacuugaaaaaguggcaccgagucggugc

SEQ ID NO: 6 - protein, 1082 aa, Neisseria meningitidis
MAAFKPNSINYILGLDIGIASVGWAMVEIDEEENPIRLIDLGVRVFERAEVPKTGDSLAMARRLARSVRRLTRRRAHRLLRTRRLLKREGVLQAANFDENGLIKSLPNTPWQLRAAALDRKLTPLEWSAVLLHLIKHRGYLSQRKNEGETADKELGALLKGVAGNAHALQTGDFRTPAELALNKFEKESGHIRNQRSDYSHTFSRKDLQAELILLFEKQKEFGNPHVSGGLKEGIETLLMTQRPALSGDAVQKMLGHCTFEPAEPKAAKNTYTAERFIWLTKLNNLRILEQGSERPLTDTERATLMDEPYRKSKLTYAQARKLLGLEDTAFFKGLRYGKDNAEASTLMEMKAYHAISRALEKEGLKDKKSPLNLSPELQDEIGTAFSLFKTDEDITGRLKDRIQPEILEALLKHISFDKFVQISLKALRRIVPLMEQGKRYDEACAEIYGDHYGKKNTEEKIYLPPIPADEIRNPVVLRALSQARKVINGVVRRYGSPARIHIETAREVGKSFKDRKEIEKRQEENRKDREKAAAKFREYFPNFVGEPKSKDILKLRLYEQQHGKCLYSGKEINLGRLNEKGYVEIDHALPFSRTWDDSFNNKVLVLGSENQNKGNQTPYEYFNGKDNSREWQEFKARVETSRFPRSKKQRILLQKFDEDGFKERNLNDTRYVNRFLCQFVADRMRLTGKGKKRVFASNGQITNLLRGFWGLRKVRAENDRHHALDAVVVACSTVAMQQKITRFVRYKEMNAFDGKTIDKETGEVLHQKTHFPQPWEFFAQEVMIRVFGKPDGKPEFEEADTLEKLRTLLAEKLSSRPEAVHEYVTPLFVSRAPNRKMSGQGHMETVKSAKRLDEGVSVLRVPLTQLKLKDLEKMVNREREPKLYEALKARLEAHKDDPAKAFAEPFYKYDKAGNRTQQVKAVRVEQVQKTGVWVRNHNGIADNATMVRVDVFEKGDKYYLVPIYSWQVAKGILPDRAVVQGKDEEDWQLIDDSFNFKFSLHPNDLVEVITKKARMFGYFASCHRGTGNINIRIHDLDHKIGKNGILEGIGVKTALSFQKYQIDELGKEIRPCRLKKRPPVR

SEQ ID NO: 7 - protein, 1368 aa, Streptococcus pyogenes [sequence omitted]

SEQ ID NO: 8 - protein, 12 aa, Artificial Sequence
  Synthetic peptide
  VARIANT (2)..(2): Xaa is Ile or Val or Met or Leu or Thr
  VARIANT (4)..(4): Xaa is Thr or Ile or Val or Ser or Asn or Tyr or Glu or Leu
  VARIANT (5)..(5): Xaa is Asn or Ser or Gly or Ala or Asp or Thr or Arg or Met or Phe
  VARIANT (6)..(6): Xaa is Ser or Tyr or Asn or Phe
  VARIANT (7)..(7): Xaa is Val or Ile or Leu or Cys or Thr or Phe
  VARIANT (9)..(9): Xaa is Trp or Phe or Val or Tyr or Ser or Leu
  VARIANT (10)..(10): Xaa is Ala or Ser or Cys or Val or Gly
  VARIANT (11)..(11): Xaa is Val or Ile or Leu or Ala or Met or His
  VARIANT (12)..(12): Any amino acid or absent
DXGXXXXGXXXX

SEQ ID NO: 9 - protein, 12 aa, Artificial Sequence
  Synthetic peptide
  VARIANT (2)..(2): Xaa is Ile or Val or Met or Leu or Thr
  VARIANT (4)..(4): Xaa is Thr or Ile or Val or Ser or Asn or Tyr or Glu or Leu
  VARIANT (5)..(5): Xaa is Asn or Ser or Gly or Ala or Asp or Thr or Arg or Met or Phe
  VARIANT (7)..(7): Xaa is Val or Ile or Leu or Cys or Thr or Phe
  VARIANT (9)..(9): Xaa is Trp or Phe or Val or Tyr or Ser or Leu
  VARIANT (10)..(10): Xaa is Ala or Ser or Cys or Val or Gly
  VARIANT (11)..(11): Xaa is Val or Ile or Leu or Ala or Met or His
  VARIANT (12)..(12): Any amino acid or absent
DXGXXSXGXXXX

SEQ ID NO: 10 - protein, 12 aa, Artificial Sequence
  Synthetic peptide
  VARIANT (4)..(4): Xaa is Thr or Ile or Val or Ser or Asn or Tyr or Glu or Leu
  VARIANT (5)..(5): Xaa is Asn or Ser or Gly or Ala or Asp or Thr or Arg or Met or Phe
  VARIANT (11)..(11): Xaa is Val or Ile or Leu or Ala or Met or His
  VARIANT (12)..(12): Any amino acid or absent
DIGXXSVGWAXX

SEQ ID NO: 11 - protein, 12 aa, Artificial Sequence
  Synthetic peptide
  MOD_RES (12)..(12): Any non-polar alkyl amino acid or a hydroxyl amino acid
DIGTNSVGWAVX

SEQ ID NO: 12 - protein, 8 aa, Artificial Sequence
  Synthetic peptide
  VARIANT (2)..(2): Xaa is Val or His
  VARIANT (3)..(3): Xaa is Ile or Leu or Val
  VARIANT (5)..(5): Xaa is Met or Thr
IXXEXARE

SEQ ID NO: 13 - protein, 8 aa, Artificial Sequence
  Synthetic peptide
  VARIANT (3)..(3): Xaa is Ile or Leu or Val
IVXEMARE

SEQ ID NO: 14 - protein, 8 aa, Artificial Sequence
  Synthetic peptide
  VARIANT (4)..(4): Xaa is His or Leu
  VARIANT (7)..(7): Xaa is Arg or Val
  VARIANT (8)..(8): Xaa is Glu or Val
HHAXDAXX

SEQ ID NO: 15 - protein, 8 aa, Artificial Sequence
  Synthetic peptide
HHAHDAYL

SEQ ID NO: 16 - protein, 30 aa, Artificial Sequence
  Synthetic polypeptide
  VARIANT (2)..(2): Xaa is Lys or Pro
  VARIANT (4)..(4): Xaa is Val or Leu or Ile or Phe
  VARIANT (5)..(5): Xaa is Gly or Ala or Ser
  VARIANT (6)..(6): Xaa is Leu or Ile or Val or Phe
  MOD_RES (7)..(26): Any amino acid and this region may encompass 5-20 residues wherein some positions may be absent
  VARIANT (29)..(29): Xaa is Asp or Glu or Asn or Gln
KXYXXXXXXXXXXXXXXXXXXXXXXXTDXY

SEQ ID NO: 17 - protein, 27 aa, Artificial Sequence
  Synthetic peptide
  VARIANT (1)..(1): Xaa is Asp or Glu or Gln or Asn
  VARIANT (2)..(2): Xaa is Leu or Ile or Arg or Gln or Val or Met or Lys
  VARIANT (3)..(3): Xaa is Asp or Glu
  VARIANT (5)..(5): Xaa is Ile or Val or Thr or Ala or Leu
  VARIANT (6)..(6): Xaa is Val or Tyr or Ile or Leu or Phe or Trp
  VARIANT (8)..(8): Xaa is Gln or His or Arg or Lys or Tyr or Ile or Leu or Phe or Trp
  VARIANT (9)..(9): Xaa is Ser or Ala or Asp or Thr or Lys
  VARIANT (10)..(10): Xaa is Phe or Leu or Val or Lys or Tyr or Met or Ile or Arg or Ala or Glu or Asp or Gln
  VARIANT (11)..(11): Xaa is Leu or Arg or Thr or Ile or Val or Ser or Cys or Tyr or Lys or Phe or Gly
  VARIANT (12)..(12): Xaa is Lys or Gln or Tyr or Thr or Phe or Leu or Trp or Met or Ala or Glu or Gly or Ser
  VARIANT (13)..(13): Xaa is Asp or Ser or Asn or Arg or Leu or Thr
  VARIANT (14)..(14): Xaa is Asp or Asn or Ser
  VARIANT (15)..(15): Xaa is Ser or Ala or Thr or Gly or Arg
  VARIANT (16)..(16): Xaa is Ile or Leu or Phe or Ser or Arg or Tyr or Gln or Trp or Asp or Lys or His
  VARIANT (17)..(17): Xaa is Asp or Ser or Ile or Asn or Glu or Ala or His or Phe or Leu or Gln or Met or Gly or Tyr or Val
  VARIANT (19)..(19): Xaa is Lys or Leu or Arg or Met or Thr or Phe
  VARIANT (20)..(20): Xaa is Val or Leu or Ile or Ala or Thr
  VARIANT (21)..(21): Xaa is Leu or Ile or Val or Ala
  VARIANT (22)..(22): Xaa is Thr or Val or Cys or Glu or Ser or Ala
  VARIANT (23)..(23): Xaa is Arg or Phe or Thr or Trp or Glu or Leu or Asn or Cys or Lys or Val or Ser or Gln or Ile or Tyr or His or Ala
  VARIANT (24)..(24): Xaa is Ser or Pro or Arg or Lys or Asn or Ala or His or Gln or Gly or Leu
  VARIANT (25)..(25): Xaa is Asp or Gly or Thr or Asn or Ser or Lys or Ala or Ile or Glu or Leu or Gln or Arg or Tyr
  VARIANT (26)..(26): Xaa is Lys or Val or Ala or Glu or Tyr or Ile or Cys or Leu or Ser or Thr or Gly or Lys or Met or Asp or Phe
XXXHXXPXXXXXXXXXXNXXXXXXXXN

SEQ ID NO: 18 - protein, 27 aa, Artificial Sequence
  Synthetic peptide
  VARIANT (1)..(1): Xaa is Asp or Glu
  VARIANT (2)..(2): Xaa is Leu or Ile or Arg or Gln or Val or Met or Lys
  VARIANT (3)..(3): Xaa is Asp or Glu
  VARIANT (5)..(5): Xaa is Ile or Val or Thr or Ala or Leu
  VARIANT (6)..(6): Xaa is Val or Tyr or Ile or Leu or Phe or Trp
  VARIANT (8)..(8): Xaa is Gln or His or Arg or Lys or Tyr or Ile or Leu or Phe or Trp
  VARIANT (10)..(10): Xaa is Phe or Leu or Val or Lys or Tyr or Met or Ile or Arg or Ala or Glu or Asp or Gln
  VARIANT (11)..(11): Xaa is Leu or Arg or Thr or Ile or Val or Ser or Cys or Tyr or Lys or Phe or Gly
  VARIANT (12)..(12): Xaa is Lys or Gln or Tyr or Thr or Phe or Leu or Trp or Met or Ala or Glu or Gly or Ser
  VARIANT (16)..(16): Xaa is Ile or Leu or Phe or Ser or Arg or Tyr or Gln or Trp or Asp or Lys or His
  VARIANT (17)..(17): Xaa is Asp or Ser or Ile or Asn or Glu or Ala or His or Phe or Leu or Gln or Met or Gly or Tyr or Val
  VARIANT (22)..(22): Xaa is Thr or Val or Cys or Glu or Ser or Ala
  VARIANT (23)..(23): Xaa is Arg or Phe or Thr or Trp or Glu or Leu or Asn or Cys or Lys or Val or Ser or Gln or Ile or Tyr or His or Ala
  VARIANT (24)..(24): Xaa is Ser or Pro or Arg or Lys or Asn or Ala or His or Gln or Gly or Leu
  VARIANT (25)..(25): Xaa is Asp or Gly or Thr or Asn or Ser or Lys or Ala or Ile or Glu or Leu or Gln or Arg or Tyr
  VARIANT (26)..(26): Xaa is Lys or Val or Ala or Glu or Tyr or Ile or Cys or Leu or Ser or Thr or Gly or Lys Met or Asp or Phe
XXXHXXPXSXXXDDSXXNKVLXXXXXN

SEQ ID NO: 19 - protein, 27 aa, Artificial Sequence
  Synthetic peptide
  VARIANT (1)..(1): Xaa is Asp or Glu
  VARIANT (3)..(3): Xaa is Asp or Glu
  VARIANT (8)..(8): Xaa is Gln or His or Arg or Lys or Tyr or Ile or Leu or Trp
  VARIANT (10)..(10): Xaa is Phe or Leu or Val or Lys or Tyr or Met or Ile or Arg or Ala or Glu or Asp or Gln
  VARIANT (11)..(11): Xaa is Leu or Arg or Thr or Ile or Val or Ser or Cys or Tyr or Lys or Phe or Gly
  VARIANT (12)..(12): Xaa is Lys or Gln or Tyr or Thr or Phe or Leu or Trp or Met or Ala or Glu or Gly or Ser
  VARIANT (16)..(16): Xaa is Ile or Leu or Phe or Ser or Arg or Tyr or Gln or Trp or Asp or Lys or His
  VARIANT (17)..(17): Xaa is Asp or Ser or Ile or Asn or Glu or Ala or His or Phe or Leu or Gln or Met or Gly or Tyr or Val
  VARIANT (23)..(23): Xaa is Arg or Phe or Thr or Trp or Glu or Leu or Asn or Cys or Lys or Val or Ser or Gln or Ile or Tyr or His or Ala
  VARIANT (24)..(24): Xaa is Ser or Pro or Arg or Lys or Asn or Ala or His or Gln or Gly or Leu
  VARIANT (25)..(25): Xaa is Asp or Gly or Thr or Asn or Ser or Lys or Ala or Ile or Glu or Leu or Gln or Arg or Tyr
  VARIANT (26)..(26): Xaa is Lys or Val or Ala or Glu or Tyr or Ile or Cys or Leu or Ser or Thr or Gly or Lys or Met or Asp or Phe
XVXHIVPXSXXXDDSXXNKVLTXXXXN

SEQ ID NO: 20 - protein, 27 aa, Artificial Sequence
  Synthetic peptide
  VARIANT (2)..(2): Xaa is Ile or Val
  VARIANT (6)..(6): Xaa is Ile or Val
  VARIANT (9)..(9): Xaa is Ala or Ser
  VARIANT (11)..(11): Xaa is Ile or Leu
  VARIANT (12)..(12): Xaa is Lys or Thr
  VARIANT (14)..(14): Xaa is Asp or Asn
  VARIANT (19)..(19): Xaa is Arg or Lys or Leu
  VARIANT (22)..(22): Xaa is Thr or Val
  VARIANT (23)..(23): Xaa is Ser or Arg
  VARIANT (25)..(25): Xaa is Lys or Asp or Ala
  VARIANT (26)..(26): Xaa is Glu or Lys or Gly or Asn
DXDHIXPQXFXXDXSIDNXVLXXSXXN

SEQ ID NO: 21 - protein, 73 aa, Artificial Sequence
  Synthetic polypeptide
  VARIANT (8)..(8): Xaa is Lys or Arg
  VARIANT (12)..(12): Xaa is Val or Thr
  VARIANT (13)..(13): Xaa is Gly or Asp
  VARIANT (14)..(14): Xaa is Glu or Gln or Asp
  VARIANT (15)..(15): Xaa is Glu or Asp
  VARIANT (19)..(19): Xaa is Asp or Asn or His
  VARIANT (20)..(20): Xaa is Tyr or Arg or Asn
  VARIANT (23)..(23): Xaa is Gln or Asp or Asn
  MOD_RES (25)..(64): Any amino acid and this region may encompass 15-40 residues wherein some positions may be absent
  VARIANT (67)..(67): Xaa is Gly or Glu
  VARIANT (69)..(69): Xaa is Ser or Gly
  VARIANT (71)..(71): Xaa is Asp or Asn
LYYLQNGXDMYXXXXLDIXXLSXYXXXXXXXXXXXXXXXXXXXXXXXXXXXXXXXXXXXXXXXXNRXKXDXVP

SEQ ID NO: 22 - DNA, 4107 bp, Artificial Sequence
  Synthetic polynucleotide
atggataaaaagtacagcatcgggctggacatcggtacaaactcagtggggtgggccgtgattacggacgagtacaaggtaccctccaaaaaatttaaagtgctgggtaacacggacagacactctataaagaaaaatcttattggagccttgctgttcgactcaggcgagacagccgaagccacaaggttgaagcggaccgccaggaggcggtataccaggagaaagaaccgcatatgctacctgcaagaaatcttcagtaacgagatggcaaaggttgacgatagctttttccatcgcctggaagaatcctttcttgttgaggaagacaagaagcacgaacggcaccccatctttggcaatattgtcgacgaagtggcatatcacgaaaagtacccgactatctaccacctcaggaagaagctggtggactctaccgataaggcggacctcagacttatttatttggcactcgcccacatgattaaatttagaggacatttcttgatcgagggcgacctgaacccggacaacagtgacgtcgataagctgttcatccaacttgtgcagacctacaatcaactgttcgaagaaaaccctataaatgcttcaggagtcgacgctaaagcaatcctgtccgcgcgcctctcaaaatctagaagacttgagaatctgattgctcagttgcccggggaaaagaaaaatggattgtttggcaacctgatcgccctcagtctcggactgaccccaaatttcaaaagtaacttcgacctggccgaagacgctaagctccagctgtccaaggacacatacgatgacgacctcgacaatctgctggcccagattggggatcagtacgccgatctctttttggcagcaaagaacctgtccgacgccatcctgttgagcgatatcttgagagtgaacaccgaaattactaaagcaccccttagcgcatctatgatcaagcggtacgacgagcatcatcaggatctgaccctgctgaaggctcttgtgaggcaacagctccccgaaaaatacaaggaaatcttctttgaccagagcaaaaacggctacgctggctatatagatggtggggccagtcaggaggaattctataaattcatcaagcccattctcgagaaaatggacggcacagaggagttgctggtcaaacttaacagggaggacctgctgcggaagcagcggacctttgacaacgggtctatcccccaccagattcatctgggcgaactgcacgcaatcctgaggaggcaggaggatttttatccttttcttaaagataaccgcgagaaaatagaaaagattcttacattcaggatcccgtactacgtgggacctctcgcccggggcaattcacggtttgcctggatgacaaggaagtcagaggagactattacaccttggaacttcgaagaagtggtggacaagggtgcatctgcccagtctttcatcgagcggatgacaaattttgacaagaacctccctaatgagaaggtgctgcccaaacattctctgctctacgagtactttaccgtctacaatgaactgactaaagtcaagtacgtcaccgagggaatgaggaagccggcattccttagtggagaacagaagaaggcgattgtagacctgttgttcaagaccaacaggaaggtgactgtgaagcaacttaaagaagactactttaagaagatcgaatgttttgacagtgtggaaatttcaggggttgaagaccgcttcaatgcgtcattggggacttaccatgatcttctcaagatcataaaggacaaagacttcctggacaacgaagaaaatgaggatattctcgaagacatcgtcctcaccctgaccctgttcgaagacagggaaatgatagaagagcgcttgaaaacctatgcccacctcttcgacgataaagttatgaagcagctgaagcgcaggagatacacaggatggggaagattgtcaaggaagctgatcaatggaattagggataaacagagtggcaagaccatactggatttcctcaaatctgatggcttcgccaataggaacttcatgcaactgattcacgatgactctcttaccttcaaggaggacattcaaaaggctcaggtgagcgggcagggagactcccttcatgaacacatcgcgaatttggcaggttcccccgctattaaaaagggcatccttcaaactgtcaaggtggtggatgaattggtcaaggtaatgggcagacataagccagaaaatattgtgatcgagatggcccgcgaaaaccagaccacacagaagggccagaaaaatagtagagagcggatgaagaggatcgaggagggcatcaaagagctgggatctcagattctcaaagaacaccccgtagaaaacacacagctgcagaacgaaaaattgtacttgtactatctgcagaacggcagagacatgtacgtcgaccaagaacttgatattaatagactgtccgactatgacgtagaccatatcgtgccccagtccttcctgaaggacgactccattgataacaaagtcttgacaagaagcgacaagaacaggggtaaaagtgataatgtgcctagcgaggaggtggtgaaaaaaatgaagaactactggcgacagctgcttaatgcaaagctcattacacaacggaagttcgataatctgacgaaagcagagagaggtggcttgtctgagttggacaaggcagggtttattaagcggcagctggtggaaactaggcagatcacaaagcacgtggcgcagattttggacagccggatgaacacaaaatacgacgaaaatgataaactgatacgagaggtcaaagttatcacgctgaaaagcaagctggtgtccgattttcggaaagacttccagttctacaaagttcgcgagattaataactaccatcatgctcacgatgcgtacctgaacgctgttgtcgggaccgccttgataaagaagtacccaaagctggaatccgagttcgtatacggggattacaaagtgtacgatgtgaggaaaatgatagccaagtccgagcaggagattggaaaggccacagctaagtacttcttttattctaacatcatgaatttttttaagacggaaattaccctggccaacggagagatcagaaagcggccccttatagagacaaatggtgaaacaggtgaaatcgtctgggataagggcagggatttcgctactgtgaggaaggtgctgagtatgccacaggtaaatatcgtgaaaaaaaccgaagtacagaccggaggattttccaaggaaagcattttgcctaaaagaaactcagacaagctcatcgcccgcaagaaagattgggaccctaagaaatacgggggatttgactcacccaccgtagcctattctgtgctggtggtagctaaggtggaaaaaggaaagtctaagaagctgaagtccgtgaaggaactcttgggaatcactatcatggaaagatcatcctttgaaaagaaccctatcgatttcctggaggctaagggttacaaggaggtcaagaaagacctcatcattaaactgccaaaatactctctcttcgagctggaaaatggcaggaagagaatgttggccagcgccggagagctgcaaaagggaaacgagcttgctctgccctccaaatatgttaattttctctatctcgcttcccactatgaaaagctgaaagggtctcccgaagataacgagcagaagcagctgttcgtcgaacagcacaagcactatctggatgaaataatcgaacaaataagcgagttcagcaaaagggttatcctggcggatgctaatttggacaaagtactgtctgcttataacaagcaccgggataagcctattagggaacaagccgagaatataattcacctctttacactcacgaatctcggagcccccgccgccttcaaatactttgatacgactatcgaccggaaacggtataccagtaccaaagaggtcctcgatgccaccctcatccaccagtcaattactggcctgtacgaaacacggatcgacctctctcaactgggcggcgactag

SEQ ID NO: 23 - protein, 1368 aa, Streptococcus pyogenes [sequence omitted]

SEQ ID NO: 24 - DNA, 3249 bp, Artificial Sequence
  Synthetic polynucleotide
atggccgccttcaagcccaaccccatcaactacatcctgggcctggacatcggcatcgccagcgtgggctgggccatggtggagatcgacgaggacgagaaccccatctgcctgatcgacctgggtgtgcgcgtgttcgagcgcgctgaggtgcccaagactggtgacagtctggctatggctcgccggcttgctcgctctgttcggcgccttactcgccggcgcgctcaccgccttctgcgcgctcgccgcctgctgaagcgcgagggtgtgctgcaggctgccgacttcgacgagaacggcctgatcaagagcctgcccaacactccttggcagctgcgcgctgccgctctggaccgcaagctgactcctctggagtggagcgccgtgctgctgcacctgatcaagcaccgcggctacctgagccagcgcaagaacgagggcgagaccgccgacaaggagctgggtgctctgctgaagggcgtggccgacaacgcccacgccctgcagactggtgacttccgcactcctgctgagctggccctgaacaagttcgagaaggagagcggccacatccgcaaccagcgcggcgactacagccacaccttcagccgcaaggacctgcaggccgagctgatcctgctgttcgagaagcagaaggagttcggcaacccccacgtgagcggcggcctgaaggagggcatcgagaccctgctgatgacccagcgccccgccctgagcggcgacgccgtgcagaagatgctgggccactgcaccttcgagccagccgagcccaaggccgccaagaacacctacaccgccgagcgcttcatctggctgaccaagctgaacaacctgcgcatcctggagcagggcagcgagcgccccctgaccgacaccgagcgcgccaccctgatggacgagccctaccgcaagagcaagctgacctacgcccaggcccgcaagctgctgggtctggaggacaccgccttcttcaagggcctgcgctacggcaaggacaacgccgaggccagcaccctgatggagatgaaggcctaccacgccatcagccgcgccctggagaaggagggcctgaaggacaagaagagtcctctgaacctgagccccgagctgcaggacgagatcggcaccgccttcagcctgttcaagaccgacgaggacatcaccggccgcctgaaggaccgcatccagcccgagatcctggaggccctgctgaagcacatcagcttcgacaagttcgtgcagatcagcctgaaggccctgcgccgcatcgtgcccctgatggagcagggcaagcgctacgacgaggcctgcgccgagatctacggcgaccactacggcaagaagaacaccgaggagaagatctacctgcctcctatccccgccgacgagatccgcaaccccgtggtgctgcgcgccctgagccaggcccgcaaggtgatcaacggcgtggtgcgccgctacggcagccccgcccgcatccacatcgagaccgcccgcgaggtgggcaagagcttcaaggaccgcaaggagatcgagaagcgccaggaggagaaccgcaaggaccgcgagaaggccgccgccaagttccgcgagtacttccccaacttcgtgggcgagcccaagagcaaggacatcctgaagctgcgcctgtacgagcagcagcacggcaagtgcctgtacagcggcaaggagatcaacctgggccgcctgaacgagaagggctacgtggagatcgaccacgccctgcccttcagccgcacctgggacgacagcttcaacaacaaggtgctggtgctgggcagcgagaaccagaacaagggcaaccagaccccctacgagtacttcaacggcaaggacaacagccgcgagtggcaggagttcaaggcccgcgtggagaccagccgcttcccccgcagcaagaagcagcgcatcctgctgcagaagttcgacgaggacggcttcaaggagcgcaacctgaacgacacccgctacgtgaaccgcttcctgtgccagttcgtggccgaccgcatgcgcctgaccggcaagggcaagaagcgcgtgttcgccagcaacggccagatcaccaacctgctgcgcggcttctggggcctgcgcaaggtgcgcgccgagaacgaccgccaccacgccctggacgccgtggtggtggcctgcagcaccgtggccatgcagcagaagatcacccgcttcgtgcgctacaaggagatgaacgccttcgacggtaaaaccatcgacaaggagaccggcgaggtgctgcaccagaagacccacttcccccagccctgggagttcttcgcccaggaggtgatgatccgcgtgttcggcaagcccgacggcaagcccgagttcgaggaggccgacacccccgagaagctgcgcaccctgctggccgagaagctgagcagccgccctgaggccgtgcacgagtacgtgactcctctgttcgtgagccgcgcccccaaccgcaagatgagcggtcagggtcacatggagaccgtgaagagcgccaagcgcctggacgagggcgtgagcgtgctgcgcgtgcccctgacccagctgaagctgaaggacctggagaagatggtgaaccgcgagcgcgagcccaagctgtacgaggccctgaaggcccgcctggaggcccacaaggacgaccccgccaaggccttcgccgagcccttctacaagtacgacaaggccggcaaccgcacccagcaggtgaaggccgtgcgcgtggagcaggtgcagaagaccggcgtgtgggtgcgcaaccacaacggcatcgccgacaacgccaccatggtgcgcgtggacgtgttcgagaagggcgacaagtactacctggtgcccatctacagctggcaggtggccaagggcatcctgcccgaccgcgccgtggtgcagggcaaggacgaggaggactggcagctgatcgacgacagcttcaacttcaagttcagcctgcaccccaacgacctggtggaggtgatcaccaagaaggcccgcatgttcggctacttcgccagctgccaccgcggcaccggcaacatcaacatccgcatccacgacctggaccacaagatcggcaagaacggcatcctggagggcatcggcgtgaagaccgccctgagcttccagaagtaccagatcgacgagctgggcaaggagatccgcccctgccgcctgaagaagcgccctcctgtgcgctaa

SEQ ID NO: 25 - protein, 1082 aa, Neisseria meningitidis
MAAFKPNPINYILGLDIGIASVGWAMVEIDEDENPICLIDLGVRVFERAEVPKTGDSLAMARRLARSVRRLTRRRAHRLLRARRLLKREGVLQAADFDENGLIKSLPNTPWQLRAAALDRKLTPLEWSAVLLHLIKHRGYLSQRKNEGETADKELGALLKGVADNAHALQTGDFRTPAELALNKFEKESGHIRNQRGDYSHTFSRKDLQAELILLFEKQKEFGNPHVSGGLKEGIETLLMTQRPALSGDAVQKMLGHCTFEPAEPKAAKNTYTAERFIWLTKLNNLRILEQGSERPLTDTERATLMDEPYRKSKLTYAQARKLLGLEDTAFFKGLRYGKDNAEASTLMEMKAYHAISRALEKEGLKDKKSPLNLSPELQDEIGTAFSLFKTDEDITGRLKDRIQPEILEALLKHISFDKFVQISLKALRRIVPLMEQGKRYDEACAEIYGDHYGKKNTEEKIYLPPIPADEIRNPVVLRALSQARKVINGVVRRYGSPARIHIETAREVGKSFKDRKEIEKRQEENRKDREKAAAKFREYFPNFVGEPKSKDILKLRLYEQQHGKCLYSGKEINLGRLNEKGYVEIDHALPFSRTWDDSFNNKVLVLGSENQNKGNQTPYEYFNGKDNSREWQEFKARVETSRFPRSKKQRILLQKFDEDGFKERNLNDTRYVNRFLCQFVADRMRLTGKGKKRVFASNGQITNLLRGFWGLRKVRAENDRHHALDAVVVACSTVAMQQKITRFVRYKEMNAFDGKTIDKETGEVLHQKTHFPQPWEFFAQEVMIRVFGKPDGKPEFEEADTPEKLRTLLAEKLSSRPEAVHEYVTPLFVSRAPNRKMSGQGHMETVKSAKRLDEGVSVLRVPLTQLKLKDLEKMVNREREPKLYEALKARLEAHKDDPAKAFAEPFYKYDKAGNRTQQVKAVRVEQVQKTGVWVRNHNGIADNATMVRVDVFEKGDKYYLVPIYSWQVAKGILPDRAVVQGKDEEDWQLIDDSFNFKFSLHPNDLVEVITKKARMFGYFASCHRGTGNINIRIHDLDHKIGKNGILEGIGVKTALSFQKYQIDELGKEIRPCRLKKRPPVR

SEQ ID NO: 26 - protein, 1053 aa, Staphylococcus aureus
MKRNYILGLDIGITSVGYGIIDYETRDVIDAGVRLFKEANVENNEGRRSKRGARRLKRRRRHRIQRVKKLLFDYNLLTDHSELSGINPYEARVKGLSQKLSEEEFSAALLHLAKRRGVHNVNEVEEDTGNELSTKEQISRNSKALEEKYVAELQLERLKKDGEVRGSINRFKTSDYVKEAKQLLKVQKAYHQLDQSFIDTYIDLLETRRTYYEGPGEGSPFGWKDIKEWYEMLMGHCTYFPEELRSVKYAYNADLYNALNDLNNLVITRDENEKLEYYEKFQIIENVFKQKKKPTLKQIAKEILVNEEDIKGYRVTSTGKPEFTNLKVYHDIKDITARKEIIENAELLDQIAKILTIYQSSEDIQEELTNLNSELTQEEIEQISNLKGYTGTHNLSLKAINLILDELWHTNDNQIAIFNRLKLVPKKVDLSQQKEIPTTLVDDFILSPVVKRSFIQSIKVINAIIKKYGLPNDIIIELAREKNSKDAQKMINEMQKRNRQTNERIEEIIRTTGKENAKYLIEKIKLHDMQEGKCLYSLEAIPLEDLLNNPFNYEVDHIIPRSVSFDNSFNNKVLVKQEENSKKGNRTPFQYLSSSDSKISYETFKKHILNLAKGKGRISKTKKEYLLEERDINRFSVQKDFINRNLVDTRYATRGLMNLLRSYFRVNNLDVKVKSINGGFTSFLRRKWKFKKERNKGYKHHAEDALIIANADFIFKEWKKLDKAKKVMENQMFEEKQAESMPEIETEQEYKEIFITPHQIKHIKDFKDYKYSHRVDKKPNRELINDTLYSTRKDDKGNTLIVNNLNGLYDKDNDKLKKLINKSPEKLLMYHHDPQTYQKLKLIMEQYGDEKNPLYKYYEETGNYLTKYSKKDNGPVIKKIKYYGNKLNAHLDITDDYPNSRNKVVKLSLKPYRFDVYLDNGVYKFVTVKNLDVIKKENYYEVNSKCYEEAKKLKKISNQAEFIASFYNNDLIKINGELYRVIGVNNDLLNRIEVNMIDITYREYLENMNDKRPPRIIKTIASKTQSIKKYSTDILGNLYEVKSKKHPQIIKKG

SEQ ID NO: 27 - RNA, 104 nt, Artificial Sequence
  Synthetic polynucleotide
  misc_feature (1)..(20): a, c, u, g, unknown or other
nnnnnnnnnnnnnnnnnnnnguuuuagagcuaugcugaaaagcauagcaaguuaaaauaaggcuaguccguuaucaacuugaaaaaguggcaccgagucggugc

SEQ ID NO: 28 - RNA, 106 nt, Artificial Sequence
  Synthetic polynucleotide
  misc_feature (1)..(20): a, c, u, g, unknown or other
nnnnnnnnnnnnnnnnnnnnguuuuagagcuaugcuggaaacagcauagcaaguuaaaauaaggcuaguccguuaucaacuugaaaaaguggcaccgagucggugc

SEQ ID NO: 29 - RNA, 116 nt, Artificial Sequence
  Synthetic polynucleotide
  misc_feature (1)..(20): a, c, u, g, unknown or other
nnnnnnnnnnnnnnnnnnnnguuuuagagcuaugcuguuuuggaaacaaaacagcauagcaaguuaaaauaaggcuaguccguuaucaacuugaaaaaguggcaccgagucggugc

SEQ ID NO: 30 - RNA, 96 nt, Artificial Sequence
  Synthetic oligonucleotide
  misc_feature (1)..(20): a, c, u, g, unknown or other
nnnnnnnnnnnnnnnnnnnnguauuagagcuagaaauagcaaguuaauauaaggcuaguccguuaucaacuugaaaaaguggcaccgagucggugc

SEQ ID NO: 31 - RNA, 96 nt, Artificial Sequence
  Synthetic oligonucleotide
  misc_feature (1)..(20): a, c, u, g, unknown or other
nnnnnnnnnnnnnnnnnnnnguuuaagagcuagaaauagcaaguuuaaauaaggcuaguccguuaucaacuugaaaaaguggcaccgagucggugc

SEQ ID NO: 32 - RNA, 116 nt, Artificial Sequence
  Synthetic polynucleotide
  misc_feature (1)..(20): a, c, u, g, unknown or other
nnnnnnnnnnnnnnnnnnnnguauuagagcuaugcuguauuggaaacaauacagcauagcaaguuaauauaaggcuaguccguuaucaacuugaaaaaguggcaccgagucggugc

SEQ ID NO: 33 - RNA, 47 nt, Artificial Sequence
  Synthetic oligonucleotide
aaggcuaguccguuaucaacuugaaaaaguggcaccgagucggugcu

SEQ ID NO: 34 - RNA, 49 nt, Artificial Sequence
  Synthetic oligonucleotide
aaggcuaguccguuaucaacuugaaaaaguggcaccgagucgguggugc

SEQ ID NO: 35 - RNA, 51 nt, Artificial Sequence
  Synthetic oligonucleotide
aaggcuaguccguuaucaacuugaaaaaguggcaccgagucggugcggauc

SEQ ID NO: 36 - RNA, 31 nt, Artificial Sequence
  Synthetic oligonucleotide
aaggcuaguccguuaucaacuugaaaaagug

SEQ ID NO: 37 - RNA, 18 nt, Artificial Sequence
  Synthetic oligonucleotide
aaggcuaguccguuauca

SEQ ID NO: 38 - RNA, 12 nt, Artificial Sequence
  Synthetic oligonucleotide
aaggcuaguccg

SEQ ID NO: 39 - DNA, 3159 bp, Artificial Sequence
  Synthetic polynucleotide
atgaaaaggaactacattctggggctggacatcgggattacaagcgtggggtatgggattattgactatgaaacaagggacgtgatcgacgcaggcgtcagactgttcaaggaggccaacgtggaaaacaatgagggacggagaagcaagaggggagccaggcgcctgaaacgacggagaaggcacagaatccagagggtgaagaaactgctgttcgattacaacctgctgaccgaccattctgagctgagtggaattaatccttatgaagccagggtgaaaggcctgagtcagaagctgtcagaggaagagttttccgcagctctgctgcacctggctaagcgccgaggagtgcataacgtcaatgaggtggaagaggacaccggcaacgagctgtctacaaaggaacagatctcacgcaatagcaaagctctggaagagaagtatgtcgcagagctgcagctggaacggctgaagaaagatggcgaggtgagagggtcaattaataggttcaagacaagcgactacgtcaaagaagccaagcagctgctgaaagtgcagaaggcttaccaccagctggatcagagcttcatcgatacttatatcgacctgctggagactcggagaacctactatgagggaccaggagaagggagccccttcggatggaaagacatcaaggaatggtacgagatgctgatgggacattgcacctattttccagaagagctgagaagcgtcaagtacgcttataacgcagatctgtacaacgccctgaatgacctgaacaacctggtcatcaccagggatgaaaacgagaaactggaatactatgagaagttccagatcatcgaaaacgtgtttaagcagaagaaaaagcctacactgaaacagattgctaaggagatcctggtcaacgaagaggacatcaagggctaccgggtgacaagcactggaaaaccagagttcaccaatctgaaagtgtatcacgatattaaggacatcacagcacggaaagaaatcattgagaacgccgaactgctggatcagattgctaagatcctgactatctaccagagctccgaggacatccaggaagagctgactaacctgaacagcgagctgacccaggaagagatcgaacagattagtaatctgaaggggtacaccggaacacacaacctgtccctgaaagctatcaatctgattctggatgagctgtggcatacaaacgacaatcagattgcaatctttaaccggctgaagctggtcccaaaaaaggtggacctgagtcagcagaaagagatcccaaccacactggtggacgatttcattctgtcacccgtggtcaagcggagcttcatccagagcatcaaagtgatcaacgccatcatcaagaagtacggcctgcccaatgatatcattatcgagctggctagggagaagaacagcaaggacgcacagaagatgatcaatgagatgcagaaacgaaaccggcagaccaatgaacgcattgaagagattatccgaactaccgggaaagagaacgcaaagtacctgattgaaaaaatcaagctgcacgatatgcaggagggaaagtgtctgtattctctggaggccatccccctggaggacctgctgaacaatccattcaactacgaggtcgatcatattatccccagaagcgtgtccttcgacaattcctttaacaacaaggtgctggtcaagcaggaagagaactctaaaaagggcaataggactcctttccagtacctgtctagttcagattccaagatctcttacgaaacctttaaaaagcacattctgaatctggccaaaggaaagggccgcatcagcaagaccaaaaaggagtacctgctggaagagcgggacatcaacagattctccgtccagaaggattttattaaccggaatctggtggacacaagatacgctactcgcggcctgatgaatctgctgcgatcctatttccgggtgaacaatctggatgtgaaagtcaagtccatcaacggcgggttcacatcttttctgaggcgcaaatggaagtttaaaaaggagcgcaacaaagggtacaagcaccatgccgaagatgctctgattatcgcaaatgccgacttcatctttaaggagtggaaaaagctggacaaagccaagaaagtgatggagaaccagatgttcgaagagaagcaggccgaatctatgcccgaaatcgagacagaacaggagtacaaggagattttcatcactcctcaccagatcaagcatatcaaggatttcaaggactacaagtactctcaccgggtggataaaaagcccaacagagagctgatcaatgacaccctgtatagtacaagaaaagacgataaggggaataccctgattgtgaacaatctgaacggactgtacgacaaagataatgacaagctgaaaaagctgatcaacaaaagtcccgagaagctgctgatgtaccaccatgatcctcagacatatcagaaactgaagctgattatggagcagtacggcgacgagaagaacccactgtataagtactatgaagagactgggaactacctgaccaagtatagcaaaaaggataatggccccgtgatcaagaagatcaagtactatgggaacaagctgaatgcccatctggacatcacagacgattaccctaacagtcgcaacaaggtggtcaagctgtcactgaagccatacagattcgatgtctatctggacaacggcgtgtataaatttgtgactgtcaagaatctggatgtcatcaaaaaggagaactactatgaagtgaatagcaagtgctacgaagaggctaaaaagctgaaaaagattagcaaccaggcagagttcatcgcctccttttacaacaacgacctgattaagatcaatggcgaactgtatagggtcatcggggtgaacaatgatctgctgaaccgcattgaagtgaatatgattgacatcacttaccgagagtatctggaaaacatgaatgataagcgcccccctcgaattatcaaaacaattgcctctaagactcagagtatcaaaaagtactcaaccgacattctgggaaacctgtatgaggtgaagagcaaaaagcaccctcagattatcaaaaagggc

SEQ ID NO: 40 - RNA, 102 nt, Artificial Sequence
  Synthetic oligonucleotide
  misc_feature (1)..(20): n is a, c, g, or u
nnnnnnnnnnnnnnnnnnnnguuuuaguacucuggaaacagaaucuacuaaaacaaggcaaaaugccguguuuaucucgucaacuuguuggcgagauuuuuu

SEQ ID NO: 41 - skipped

SEQ ID NO: 42 - RNA, 42 nt, Streptococcus pyogenes
  misc_feature (1)..(20): a, c, u, g, unknown or other
nnnnnnnnnnnnnnnnnnnnguuuuagagcuaugcuguuuug

SEQ ID NO: 43 - RNA, 85 nt, Streptococcus pyogenes
ggaaccauucaaaacagcauagcaaguuaaaauaaggcuaguccguuaucaacuugaaaaaguggcaccgagucggugcuuuuuu

SEQ ID NO: 44 - RNA, 62 nt, Streptococcus pyogenes
  misc_feature (1)..(20): a, c, u, g, unknown or other
nnnnnnnnnnnnnnnnnnnnguuuuagagcuagaaauagcaaguuaaaauaaggcuaguccg

SEQ ID NO: 45 - RNA, 102 nt, Streptococcus pyogenes
  misc_feature (1)..(20): a, c, u, g, unknown or other
nnnnnnnnnnnnnnnnnnnnguuuuagagcuagaaauagcaaguuaaaauaaggcuaguccguuaucaacuugaaaaaguggcaccgagucggugcuuuuuu

SEQ ID NO: 46 - RNA, 75 nt, Streptococcus pyogenes
  misc_feature (1)..(20): a, c, u, g, unknown or other
nnnnnnnnnnnnnnnnnnnnguuuuagagcuaugcugaaaagcauagcaaguuaaaauaaggcuaguccguuauc

SEQ ID NO: 47 - RNA, 87 nt, Streptococcus pyogenes
  misc_feature (1)..(20): a, c, u, g, unknown or other
nnnnnnnnnnnnnnnnnnnnguuuuagagcuaugcuguuuuggaaacaaaacagcauagcaaguuaaaauaaggcuaguccguuauc

SEQ ID NO: 48 - RNA, 42 nt, Streptococcus thermophilus
  misc_feature (1)..(20): a, c, u, g, unknown or other
nnnnnnnnnnnnnnnnnnnnguuuuagagcuguguuguuucg

SEQ ID NO: 49 - RNA, 78 nt, Streptococcus thermophilus
gggcgaaacaacacagcgaguuaaaauaaggcuuaguccguacucaacuugaaaagguggcaccgauucgguguuuuu

SEQ ID NO: 50 - RNA, 42 nt, Streptococcus pyogenes; identical to SEQ ID NO: 42
  misc_feature (1)..(20): a, c, u, g, unknown or other

SEQ ID NO: 51 - RNA, 42 nt, Streptococcus thermophilus; identical to SEQ ID NO: 48
  misc_feature (1)..(20): a, c, u, g, unknown or other

SEQ ID NO: 52 - RNA, 85 nt, Streptococcus pyogenes
gaaccauucaaaacagcauagcaaguuaaaauaaggcuaguccguuaucaacuugaaaaaguggcaccgagucggugcuuuuuuu

SEQ ID NO: 53 - RNA, 78 nt, Streptococcus thermophilus; identical to SEQ ID NO: 49

SEQ ID NO: 54 - protein, 12 aa, Artificial Sequence
  Synthetic peptide
DIGTNSVGWAVT

SEQ ID NO: 55 - protein, 12 aa, Artificial Sequence
  Synthetic peptide
DIGTNSVGWAVT

SEQ ID NO: 56 - protein, 12 aa, Artificial Sequence
  Synthetic peptide
DVGTNSVGWAVT

SEQ ID NO: 57 - protein, 12 aa, Artificial Sequence
  Synthetic peptide
DVGTNSVGWAVT

SEQ ID NO: 58 - protein, 12 aa, Artificial Sequence
  Synthetic peptide
DMGTNSVGWAVT

SEQ ID NO: 59 - protein, 12 aa, Artificial Sequence
  Synthetic peptide
DVGTSSVGWAVT

SEQ ID NO: 60 - protein, 12 aa, Artificial Sequence
  Synthetic peptide
DIGTASVGWAVT

SEQ ID NO: 61 - protein, 12 aa, Artificial Sequence
  Synthetic peptide
DVGTGSVGWAVT

SEQ ID NO: 62 - protein, 12 aa, Artificial Sequence
  Synthetic peptide
DIGTNSVGWAVV

SEQ ID NO: 63 - protein, 12 aa, Artificial Sequence
  Synthetic peptide
DIGTNSVGWAVI

SEQ ID NO: 64 - protein, 12 aa, Artificial Sequence
  Synthetic peptide
DIGTNSVGWAVL

SEQ ID NO: 65 - protein, 12 aa, Artificial Sequence
  Synthetic peptide
DLGTNSIGWAVV

SEQ ID NO: 66 - protein, 11 aa, Artificial Sequence
  Synthetic peptide
DLGTNSIGWAI

SEQ ID NO: 67 - protein, 12 aa, Artificial Sequence
  Synthetic peptide
DLGTNSIGWALV

SEQ ID NO: 68 - protein, 12 aa, Artificial Sequence
  Synthetic peptide
DIGTNSVGWCVT

SEQ ID NO: 69 - protein, 12 aa, Artificial Sequence
  Synthetic peptide
DIGTNSVGYAVT

SEQ ID NO: 70 - protein, 12 aa, Artificial Sequence
  Synthetic peptide
DMGTGSLGWAVT

SEQ ID NO: 71 - protein, 12 aa, Artificial Sequence
  Synthetic peptide
DIGTSSVGWAAI

SEQ ID NO: 72 - protein, 12 aa, Artificial Sequence
  Synthetic peptide
DLGTGSVGWAVV

SEQ ID NO: 73 - protein, 12 aa, Artificial Sequence
  Synthetic peptide
DLGVGSVGWAIV

SEQ ID NO: 74 - protein, 12 aa, Artificial Sequence
  Synthetic peptide
DLGIASIGWAII

SEQ ID NO: 75 - protein, 12 aa, Artificial Sequence
  Synthetic peptide
DLGIASVGWAIV

SEQ ID NO: 76 - protein, 12 aa, Artificial Sequence
  Synthetic peptide
DLGVASVGWSIV

SEQ ID NO: 77 - protein, 12 aa, Artificial Sequence
  Synthetic peptide
DIGIASVGWAIL

SEQ ID NO: 78 - protein, 12 aa, Artificial Sequence
  Synthetic peptide
DLGISSVGWSVI

SEQ ID NO: 79 - protein, 12 aa, Artificial Sequence
  Synthetic peptide
DIGIASVGWSVI

SEQ ID NO: 80 - protein, 12 aa, Artificial Sequence
  Synthetic peptide
DVGIGSIGWAVI

SEQ ID NO: 81 - protein, 12 aa, Artificial Sequence
  Synthetic peptide
DLGVGSIGFAIV

SEQ ID NO: 82 - protein, 12 aa, Artificial Sequence
  Synthetic peptide
DIGYASIGWAVI

SEQ ID NO: 83 - protein, 12 aa, Artificial Sequence
  Synthetic peptide
DTGTNSLGWAIV

SEQ ID NO: 84 - protein, 12 aa, Artificial Sequence
  Synthetic peptide
DLGTNSIGWCLL

SEQ ID NO: 85 - protein, 12 aa, Artificial Sequence
  Synthetic peptide
DIGTDSLGWAVF

SEQ ID NO: 86 - protein, 12 aa, Artificial Sequence
  Synthetic peptide
DIGSNSIGFAVV

SEQ ID NO: 87 - protein, 12 aa, Artificial Sequence
  Synthetic peptide
DLGVGSIGVAVA

SEQ ID NO: 88 - protein, 12 aa, Artificial Sequence
  Synthetic peptide
DLGIASCGWGVV

SEQ ID NO: 89 - protein, 12 aa, Artificial Sequence
  Synthetic peptide
DLGIASVGWCLT

SEQ ID NO: 90 - protein, 12 aa, Artificial Sequence
  Synthetic peptide
DIGIGSVGVGIL

SEQ ID NO: 91 - protein, 12 aa, Artificial Sequence
  Synthetic peptide
DIGITSVGYGLI

SEQ ID NO: 92 - protein, 12 aa, Artificial Sequence
  Synthetic peptide
DIGITSVGFGII

SEQ ID NO: 93 - protein, 12 aa, Artificial Sequence
  Synthetic peptide
DVGITSTGYAVL

SEQ ID NO: 94 - protein, 12 aa, Artificial Sequence
  Synthetic peptide
DLGITSFGYAIL

SEQ ID NO: 95 - protein, 12 aa, Artificial Sequence
  Synthetic peptide
DIGNASVGWSAF

SEQ ID NO: 96 - protein, 12 aa, Artificial Sequence
  Synthetic peptide
DVGTNSCGWVAM

SEQ ID NO: 97 - protein, 12 aa, Artificial Sequence
  Synthetic peptide
DVGERSIGLAAV

SEQ ID NO: 98 - protein, 12 aa, Artificial Sequence
  Synthetic peptide
DVGLNSVGLAAV

SEQ ID NO: 99 - protein, 12 aa, Artificial Sequence
  Synthetic peptide
DVGLMSVGLAAI

SEQ ID NO: 100 - protein, 12 aa, Artificial Sequence
  Synthetic peptide
DVGTFSVGLAAI

SEQ ID NO: 101 - protein, 12 aa, Artificial Sequence
  Synthetic peptide
DIGTGSVGYACM

SEQ ID NO: 102 - protein, 12 aa, Artificial Sequence
  Synthetic peptide
DLGTTSIGFAHI

SEQ ID NO: 103 - protein, 12 aa, Artificial Sequence
  Synthetic peptide
DLGTNSIGSSVR

SEQ ID NO: 104 - protein, 12 aa, Artificial Sequence
  Synthetic peptide
DIGTNSVGWAVT

SEQ ID NO: 105 - protein, 12 aa, Artificial Sequence
  Synthetic peptide
DIGTNSVGWAVT

SEQ ID NO: 106 - protein, 12 aa, Artificial Sequence
  Synthetic peptide
DVGTNSVGWAVT

SEQ ID NO: 107 - protein, 12 aa, Artificial Sequence
  Synthetic peptide
DVGTNSVGWAVT

SEQ ID NO: 108 - protein, 12 aa, Artificial Sequence
  Synthetic peptide
DMGTNSVGWAVT

SEQ ID NO: 109 - protein, 12 aa, Artificial Sequence
  Synthetic peptide
DVGTSSVGWAVT

SEQ ID NO: 110 - protein, 12 aa, Artificial Sequence
  Synthetic peptide
DIGTASVGWAVT

SEQ ID NO: 111 - protein, 12 aa, Artificial Sequence
  Synthetic peptide
DVGTGSVGWAVT

SEQ ID NO: 112 - protein, 12 aa, Artificial Sequence
  Synthetic peptide
DIGTNSVGWAVV

SEQ ID NO: 113 - protein, 12 aa, Artificial Sequence
  Synthetic peptide
DIGTNSVGWAVI

SEQ ID NO: 114 - protein, 12 aa, Artificial Sequence
  Synthetic peptide
DIGTNSIGWAVI

SEQ ID NO: 115 - protein, 12 aa, Artificial Sequence
  Synthetic peptide
DIGTNSVGWAVL

SEQ ID NO: 116 - protein, 12 aa, Artificial Sequence
  Synthetic peptide
DLGTNSIGWAVV

SEQ ID NO: 117 - protein, 11 aa, Artificial Sequence
  Synthetic peptide
DLGTNSIGWAI

SEQ ID NO: 118 - protein, 12 aa, Artificial Sequence
  Synthetic peptide
DLGTNSIGWALV

SEQ ID NO: 119 - protein, 12 aa, Artificial Sequence
  Synthetic peptide
DIGTNSVGWCVT

SEQ ID NO: 120 - protein, 12 aa, Artificial Sequence
  Synthetic peptide
DIGTNSVGYAVT

SEQ ID NO: 121 - protein, 12 aa, Artificial Sequence
  Synthetic peptide
DMGTGSLGWAVT

SEQ ID NO: 122 - protein, 12 aa, Artificial Sequence
  Synthetic peptide
DIGTSSVGWAAI

SEQ ID NO: 123 - protein, 12 aa, Artificial Sequence
  Synthetic peptide
DLGTGSVGWAVV

SEQ ID NO: 124 - protein, 12 aa, Artificial Sequence
  Synthetic peptide
DLGVGSVGWAIV

SEQ ID NO: 125 - protein, 12 aa, Artificial Sequence
  Synthetic peptide
DLGIASIGWAII

SEQ ID NO: 126 - protein, 12 aa, Artificial Sequence
  Synthetic peptide
DLGIASVGWAIV

SEQ ID NO: 127 - protein, 12 aa, Artificial Sequence
  Synthetic peptide
DLGIASVGWAVV

SEQ ID NO: 128 - protein, 12 aa, Artificial Sequence
  Synthetic peptide
DLGVASVGWSIV

SEQ ID NO: 129 - protein, 12 aa, Artificial Sequence
  Synthetic peptide
DIGIASVGWAIL

SEQ ID NO: 130 - protein, 12 aa, Artificial Sequence
  Synthetic peptide
DIGIASVGWAVL

SEQ ID NO: 131 - protein, 12 aa, Artificial Sequence
  Synthetic peptide
DIGIASIGWAVI

SEQ ID NO: 132 - protein, 12 aa, Artificial Sequence
  Synthetic peptide
DIGIASVGWAII

SEQ ID NO: 133 - protein, 12 aa, Artificial Sequence
  Synthetic peptide
DVGIASVGWAVI

SEQ ID NO: 134 - protein, 11 aa, Artificial Sequence
  Synthetic peptide
DIGIASVGWAL

SEQ ID NO: 135 - protein, 12 aa, Artificial Sequence
  Synthetic peptide
DIGIASVGWAMV

SEQ ID NO: 136 - protein, 12 aa, Artificial Sequence
  Synthetic peptide
DIGIASVGWSVI

SEQ ID NO: 137 - protein, 12 aa, Artificial Sequence
  Synthetic peptide
DLGISSVGWSVI

SEQ ID NO: 138 - protein, 12 aa, Artificial Sequence
  Synthetic peptide
DIGITSVGWAVI

SEQ ID NO: 139 - protein, 12 aa, Artificial Sequence
  Synthetic peptide
DVGIGSIGWAVI

SEQ ID NO: 140 - protein, 12 aa, Artificial Sequence
  Synthetic peptide
DLGISSLGWAIV

SEQ ID NO: 141 - protein, 12 aa, Artificial Sequence
  Synthetic peptide
DLGVGSIGFAIV

SEQ ID NO: 142 - protein, 12 aa, Artificial Sequence
  Synthetic peptide
DIGYASIGWAVI

SEQ ID NO: 143 - protein, 12 aa, Artificial Sequence
  Synthetic peptide
DLGTNSIGWCLL

SEQ ID NO: 144 - protein, 12 aa, Artificial Sequence
  Synthetic peptide
DLGTNSIGWGLL

SEQ ID NO: 145 - protein, 12 aa, Artificial Sequence
  Synthetic peptide
DTGTNSLGWAIV

SEQ ID NO: 146 - protein, 12 aa, Artificial Sequence
  Synthetic peptide
DIGTDSLGWAVF

SEQ ID NO: 147 - protein, 12 aa, Artificial Sequence
  Synthetic peptide
DLGSTSLGWAIF

SEQ ID NO: 148 - protein, 12 aa, Artificial Sequence
  Synthetic peptide
DIGISSIGWAFS

SEQ ID NO: 149 - protein, 12 aa, Artificial Sequence
  Synthetic peptide
DLGIASVGWCLT

SEQ ID NO: 150 - protein, 12 aa, Artificial Sequence
  Synthetic peptide
DLGIASCGWGVV

SEQ ID NO: 151 - protein, 12 aa, Artificial Sequence
  Synthetic peptide
DIGSNSIGFAVV

SEQ ID NO: 152 - protein, 12 aa, Artificial Sequence
  Synthetic peptide
DIGTTSIGFSVI

SEQ ID NO: 153 - protein, 12 aa, Artificial Sequence
  Synthetic peptide
DIGITSVGYGLI

SEQ ID NO: 154 - protein, 12 aa, Artificial Sequence
  Synthetic peptide
DIGITSVGFGII

SEQ ID NO: 155 - protein, 12 aa, Artificial Sequence
  Synthetic peptide
DLGTTSIGFAHI

SEQ ID NO: 156 - protein, 12 aa, Artificial Sequence
  Synthetic peptide
DIGIGSVGVGIL

SEQ ID NO: 157 - protein, 12 aa, Artificial Sequence
  Synthetic peptide
DLGVGSIGVAVA

SEQ ID NO: 158 - protein, 12 aa, Artificial Sequence
  Synthetic peptide
DVGITSTGYAVL

SEQ ID NO: 159 - protein, 12 aa, Artificial Sequence
  Synthetic peptide
DLGITSFGYAIL

SEQ ID NO: 160 - protein, 12 aa, Artificial Sequence
  Synthetic peptide
DIGTSSIGWWLY

SEQ ID NO: 161 - protein, 12 aa, Artificial Sequence
  Synthetic peptide
DLGSNSLGWFVT

SEQ ID NO: 162 - protein, 12 aa, Artificial Sequence
  Synthetic peptide
DLGANSLGWFVV

SEQ ID NO: 163 - protein, 12 aa, Artificial Sequence
  Synthetic peptide
DIGNASVGWSAF

SEQ ID NO: 164 - protein, 12 aa, Artificial Sequence
  Synthetic peptide
DVGTNSCGWVAM

SEQ ID NO: 165 - protein, 12 aa, Artificial Sequence
  Synthetic peptide
DVGERSIGLAAV

SEQ ID NO: 166 - protein, 12 aa, Artificial Sequence
  Synthetic peptide
DVGLNSVGLAAV

SEQ ID NO: 167 - protein, 12 aa, Artificial Sequence
  Synthetic peptide
DVGLMSVGLAAI

SEQ ID NO: 168 - protein, 12 aa, Artificial Sequence
  Synthetic peptide
DVGTFSVGLAAI

SEQ ID NO: 169 - protein, 12 aa, Artificial Sequence
  Synthetic peptide
DIGTGSVGYACM

SEQ ID NO: 170 - protein, 12 aa, Artificial Sequence
  Synthetic peptide
DLGTNSIGSSVR

SEQ ID NO: 171 - protein, 15 aa, Artificial Sequence
  Synthetic peptide
DIGLRIGITSCGWSI

SEQ ID NO: 172 - protein, 12 aa, Artificial Sequence
  Synthetic peptide
DMGAKYTGVFYA

SEQ ID NO: 173 - protein, 12 aa, Artificial Sequence
  Synthetic peptide
DLGGKNTGFFSF

SEQ ID NO: 174 - protein, 12 aa, Artificial Sequence
  Synthetic peptide
DLGVKNTGVFSA

SEQ ID NO: 175 - protein, 12 aa, Artificial Sequence
  Synthetic peptide
DLGAKFTGVALY

SEQ ID NO: 176 - protein, 12 aa, Artificial Sequence
  Synthetic peptide
DLGGKFTGVCLS

SEQ ID NO: 177 - protein, 12 aa, Artificial Sequence
  Synthetic peptide
DLGGTYTGTFIT

SEQ ID NO: 178 - protein, 28 aa, Artificial Sequence
  Synthetic peptide
YDIDHIYPRSLTKDDSFDNLVLCERTAN

SEQ ID NO: 179 - protein, 28 aa, Artificial Sequence
  Synthetic peptide
DIDHIYPRSKVIKDDSFDNLVLVLKNEN

SEQ ID NO: 180 - protein, 27 aa, Artificial Sequence
  Synthetic peptide
DRDHIYPQSKIKDDSIDNLVLVNKTYN

SEQ ID NO: 181 - protein, 27 aa, Artificial Sequence
  Synthetic peptide
DIDHIYPRSKIKDDSITNRVLVEKDIN

SEQ ID NO: 182 - protein, 27 aa, Artificial Sequence
  Synthetic peptide
DIDHIYPQSKIKDDSISNRVLVCSSCN

SEQ ID NO: 183 - protein, 27 aa, Artificial Sequence
  Synthetic peptide
DIDHIYPQSKTMDDSLNNRVLVKKNYN

SEQ ID NO: 184 - protein, 27 aa, Artificial Sequence
  Synthetic peptide
DQDHIYPKSKIYDDSLENRVLVKKNLN

SEQ ID NO: 185 - protein, 27 aa, Artificial Sequence
  Synthetic peptide
QIDHIVPQSLVKDDSFDNRVLVVPSEN

SEQ ID NO: 186 - protein, 27 aa, Artificial Sequence
  Synthetic peptide
DIDHIIPQAFIKDNSIDNRVLTSSKEN

SEQ ID NO: 187 - protein, 27 aa, Artificial Sequence
  Synthetic peptide
DIDHIIPQAFLKDNSIDNKVLVSSASN

SEQ ID NO: 188 - protein, 27 aa, Artificial Sequence
  Synthetic peptide
DIDHIIPQAYTKDNSLDNRVLVSNITN

SEQ ID NO: 189 - protein, 27 aa, Artificial Sequence
  Synthetic peptide
DIDHIVPQSFITDNSIDNLVLTSSAGN

SEQ ID NO: 190 - protein, 27 aa, Artificial Sequence
  Synthetic peptide
DVDHIVPQSFLKDDSIDNKVLTRSDKN

SEQ ID NO: 191 - protein, 27 aa, Artificial Sequence
  Synthetic peptide
NIDHIYPQSMVKDDSLDNKVLVQSEIN

SEQ ID NO: 192 - protein, 27 aa, Artificial Sequence
  Synthetic peptide
DIDHILPQSLIKDDSLDNRVLVNATIN

SEQ ID NO: 193 - protein, 27 aa, Artificial Sequence
  Synthetic peptide
DIDHILPQSFIKDDSLENRVLVKKAVN

SEQ ID NO: 194 - protein, 27 aa, Artificial Sequence
  Synthetic peptide
EVDHIFPRSFIKDDSIDNKVLVIKKMN

SEQ ID NO: 195 - protein, 27 aa, Artificial Sequence
  Synthetic peptide
EVDHIIPRSYIKDDSFENKVLVYREEN

SEQ ID NO: 196 - protein, 27 aa, Artificial Sequence
  Synthetic peptide
DIDHIIPQAVTQNDSIDNRVLVARAEN

SEQ ID NO: 197 - protein, 27 aa, Artificial Sequence
  Synthetic peptide
EIDHIIPYSISFDDSSSNKLLVLAESN

SEQ ID NO: 198 - protein, 27 aa, Artificial Sequence
  Synthetic peptide
EIDHIIPYSLCFDDSSANKVLVHKQSN

SEQ ID NO: 199 - protein, 27 aa, Artificial Sequence
  Synthetic peptide
DIDHIIPYSRSMDDSYSNKVLVLSGEN

SEQ ID NO: 200 - protein, 27 aa, Artificial Sequence
  Synthetic peptide
DIDHIIPYSKSMDDSFNNKVLCLAEEN

SEQ ID NO: 201 - protein, 27 aa, Artificial Sequence
  Synthetic peptide
EIDHIYPYSRSFDDSYMNKVLVFTKQN

SEQ ID NO: 202 - protein, 27 aa, Artificial Sequence
  Synthetic peptide
QIDHIYPYSRSMDDSYMNKVLVLTDEN

SEQ ID NO: 203 - protein, 27 aa, Artificial Sequence
  Synthetic peptide
EIDHIIPFSRSFDDSLSNKILVLGSEN

SEQ ID NO: 204 - protein, 27 aa, Artificial Sequence
  Synthetic peptide
EIDHALPFSRTWDDSFNNKVLVLGSEN

SEQ ID NO: 205 - protein, 27 aa, Artificial Sequence
  Synthetic peptide
EIDHALPFSRTWDDSFNNKVLVLASEN

SEQ ID NO: 206 - protein, 27 aa, Artificial Sequence
  Synthetic peptide
EIDHIIPISISLDDSINNKVLVLSKAN

SEQ ID NO: 207 - protein, 27 aa, Artificial Sequence
  Synthetic peptide
EVDHIIPISISLDDSITNKVLVTHREN

SEQ ID NO: 208 - protein, 27 aa, Artificial Sequence
  Synthetic peptide
QVDHALPYSRSYDDSKNNKVLVLTHEN

SEQ ID NO: 209 - protein, 27 aa, Artificial Sequence
  Synthetic peptide
EVDHILPLSITFDDSLANKVLVYATAN

SEQ ID NO: 210 - protein, 27 aa, Artificial Sequence
  Synthetic peptide
EIDHIIPRSISFDDARSNKVLVYRSEN

SEQ ID NO: 211 - protein, 27 aa, Artificial Sequence
  Synthetic peptide
EVDHIIPRSVSFDNSYHNKVLVKQSEN

SEQ ID NO: 212 - protein, 27 aa, Artificial Sequence
  Synthetic peptide
DIDHILPYSITFDDSFRNKVLVTSQEN

SEQ ID NO: 213 - protein, 27 aa, Artificial Sequence
  Synthetic peptide
EIDHILPRSRSADDSFANKVLCLARAN

SEQ ID NO: 214 - protein, 27 aa, Artificial Sequence
  Synthetic peptide
EIEHLLPFSLTLDDSMANKTVCFRQAN

SEQ ID NO: 215 - protein, 27 aa, Artificial Sequence
  Synthetic peptide
DIDHILPFSVSLDDSAANKVVCLREAN

SEQ ID NO: 216 - protein, 27 aa, Artificial Sequence
  Synthetic peptide
DIDHLIPFSISWDDSAANKVVCMRYAN

SEQ ID NO: 217 - protein, 27 aa, Artificial Sequence
  Synthetic peptide
DIDHILPVAMTLDDSPANKIICMRYAN

SEQ ID NO: 218 - protein, 27 aa, Artificial Sequence
  Synthetic peptide
DVDHILPYSRTLDDSFPNRTLCLREAN

SEQ ID NO: 219 - protein, 27 aa, Artificial Sequence
  Synthetic peptide
EIEHILPFSRTLDDSLNNRTVAMRRAN

SEQ ID NO: 220 - protein, 27 aa, Artificial Sequence
  Synthetic peptide
EVDHIIPYSISWDDSYTNKVLTSAKCN

SEQ ID NO: 221 - protein, 27 aa, Artificial Sequence
  Synthetic peptide
QVDHILPWSRFGDDSYLNKTLCTARSN

SEQ ID NO: 222 - protein, 27 aa, Artificial Sequence
  Synthetic peptide
QVDHILPFSKTLDDSFANKVLAQHDAN

SEQ ID NO: 223 - protein, 27 aa, Artificial Sequence
  Synthetic peptide
QIDHAFPLSRSLDDSQSNKVLCLTSSN

SEQ ID NO: 224 - protein, 27 aa, Artificial Sequence
  Synthetic peptide
DIDHIVPRSISFDDSFSNLVIVNKLDN

SEQ ID NO: 225 - protein, 27 aa, Artificial Sequence
  Synthetic peptide
EIEHIIPYSMSYDNSQANKILTEKAEN

SEQ ID NO: 226 - protein, 27 aa, Artificial Sequence
  Synthetic peptide
EIDHVIPYSKSADDSWFNKLLVKKSTN

SEQ ID NO: 227 - protein, 27 aa, Artificial Sequence
  Synthetic peptide
EMDHILPYSRSLDNGWHNRVLVHGKDN

SEQ ID NO: 228 - protein, 27 aa, Artificial Sequence
  Synthetic peptide
EVDHIVPYSLILDNTINNKALVYAEEN

SEQ ID NO: 229 - protein, 27 aa, Artificial Sequence
  Synthetic peptide
EIEHVIPQSLYFDDSFSNKVICEAEVN

SEQ ID NO: 230 - protein, 27 aa, Artificial Sequence
  Synthetic peptide
DIEHIIPQARLFDDSFSNKTLEARSVN

SEQ ID NO: 231 - protein, 27 aa, Artificial Sequence
  Synthetic peptide
EIEHIVPKARVFDDSFSNKTLTFHRIN

SEQ ID NO: 232 - protein, 28 aa, Artificial Sequence
  Synthetic peptide
DKDHIIPQSMKKDDSIINNLVLVNKNAN

SEQ ID NO: 233 - protein, 27 aa, Artificial Sequence
  Synthetic peptide
EVEHIWPRSRSFDNSPRNKTLCRKDVN

SEQ ID NO: 234 - protein, 27 aa, Artificial Sequence
  Synthetic peptide
IVNHIIPYNRSFDDTYHNRVLTLTETK

SEQ ID NO: 235 - protein, 27 aa, Artificial Sequence
  Synthetic peptide
DMEHTIPKSISFDNSDQNLTLCESYYN

SEQ ID NO: 236 - protein, 27 aa, Artificial Sequence
  Synthetic peptide
DIEHTIPRSAGGDSTKMNLTLCSSRFN

SEQ ID NO: 237 - protein, 27 aa, Artificial Sequence
  Synthetic peptide
DIEHTIPRSISQDNSQMNKTLCSLKFN

SEQ ID NO: 238 - protein, 27 aa, Artificial Sequence
  Synthetic peptide
DIDHVIPLARGGRDSLDNMVLCQSDAN

SEQ ID NO: 239 - protein, 27 aa, Artificial Sequence
  Synthetic peptide
DIEHLFPIAESEDNGRNNLVISHSACN

SEQ ID NO: 240 - protein, 27 aa, Artificial Sequence
  Synthetic peptide
DVDHIFPRDDTADNSYGNKVVAHRQCN

SEQ ID NO: 241 - protein, 27 aa, Artificial Sequence
  Synthetic peptide
DIEHIVPQSLGGLSTDYNTIVTLKSVN

SEQ ID NO: 242 - protein, 27 aa, Artificial Sequence
  Synthetic peptide
ELDHIVPRTDGGSNRHENLAITCGACN

SEQ ID NO: 243 - protein, 28 aa, Artificial Sequence
  Synthetic peptide
EMDHIVPRKGVGSTNTRTNFAAVCAECN

SEQ ID NO: 244 - protein, 28 aa, Artificial Sequence
  Synthetic peptide
EMDHIVPRKGVGSTNTRVNLAAACAACN

SEQ ID NO: 245 - protein, 28 aa, Artificial Sequence
  Synthetic peptide
EMDHIVPRAGQGSTNTRENLVAVCHRCN

SEQ ID NO: 246 - protein, 33 aa, Artificial Sequence
  Synthetic polypeptide
EIDHILPRSLIKDARGIVFNAEPNLIYASSRGN

SEQ ID NO: 247 - protein, 33 aa, Artificial Sequence
  Synthetic polypeptide
EIDHIIPRSLTGRTKKTVFNSEANLIYCSSKGN

SEQ ID NO: 248 - protein, 33 aa, Artificial Sequence
  Synthetic polypeptide
EIDHIIPRSLTLKKSESIYNSEVNLIFVSAQGN

SEQ ID NO: 249 - protein, 33 aa, Artificial Sequence
  Synthetic polypeptide
EIDHIYPRSLSKKHFGVIFNSEVNLIYCSSQGN

SEQ ID NO: 250 - protein, 33 aa, Artificial Sequence
  Synthetic polypeptide
EIDHILPRSHTLKIYGTVFNPEGNLIYVHQKCN

SEQ ID NO: 251 - protein, 30 aa, Artificial Sequence
  Synthetic polypeptide
ELDHIIPRSHKKYGTLNDEANLICVTRGDN

SEQ ID NO: 252 - protein, 27 aa, Artificial Sequence
  Synthetic peptide
ELEHIVPHSFRQSNALSSLVLTWPGVN

SEQ ID NO: 253 - protein, 28 aa, Artificial Sequence
  Synthetic peptide
YDIDHIYPRSLTKDDSFDNLVLCERTAN

SEQ ID NO: 254 - protein, 28 aa, Artificial Sequence
  Synthetic peptide
DIDHIYPRSKVIKDDSFDNLVLVLKNEN

SEQ ID NO: 255 - protein, 27 aa, Artificial Sequence
  Synthetic peptide
DRDHIYPQSKIKDDSIDNLVLVNKTYN

SEQ ID NO: 256 - protein, 27 aa, Artificial Sequence
  Synthetic peptide
DIDHIYPRSKIKDDSITNRVLVEKDIN

SEQ ID NO: 257 - protein, 27 aa, Artificial Sequence
  Synthetic peptide
DIDHIYPQSKIKDDSISNRVLVCSSCN

SEQ ID NO: 258 - protein, 27 aa, Artificial Sequence
  Synthetic peptide
DIDHIYPQSKTMDDSLNNRVLVKKNYN

SEQ ID NO: 259 - protein, 27 aa, Artificial Sequence
  Synthetic peptide
DQDHIYPKSKIYDDSLENRVLVKKNLN

SEQ ID NO: 260 - protein, 27 aa, Artificial Sequence
  Synthetic peptide
QIDHIVPQSLVKDDSFDNRVLVVPSEN

SEQ ID NO: 261 - protein, 27 aa, Artificial Sequence
  Synthetic peptide
DIDHIIPQAFIKDNSIDNRVLTSSKEN

SEQ ID NO: 262 - protein, 27 aa, Artificial Sequence
  Synthetic peptide
DIDHIIPQAFLKDNSIDNKVLVSSASN

SEQ ID NO: 263 - protein, 27 aa, Artificial Sequence
  Synthetic peptide
DIDHIIPQAYTKDNSLDNRVLVSNITN

SEQ ID NO: 264 - protein, 27 aa, Artificial Sequence
  Synthetic peptide
DIDHIVPQSFITDNSIDNLVLTSSAGN

SEQ ID NO: 265 - protein, 27 aa, Artificial Sequence
  Synthetic peptide
DVDHIVPQSFLKDDSIDNKVLTRSDKN

SEQ ID NO: 266 - protein, 27 aa, Artificial Sequence
  Synthetic peptide
NIDHIYPQSMVKDDSLDNKVLVQSEIN

SEQ ID NO: 267 - protein, 27 aa, Artificial Sequence
  Synthetic peptide
DIDHILPQSLIKDDSLDNRVLVNATIN

SEQ ID NO: 268 - protein, 27 aa, Artificial Sequence
  Synthetic peptide
DIDHILPQSFIKDDSLENRVLVKKAVN

SEQ ID NO: 269 - protein, 27 aa, Artificial Sequence
  Synthetic peptide
EVDHIFPRSFIKDDSIDNKVLVIKKMN

SEQ ID NO: 270 - protein, 27 aa, Artificial Sequence
  Synthetic peptide
EVDHIIPRSYIKDDSFENKVLVYREEN

SEQ ID NO: 271 - protein, 27 aa, Artificial Sequence
  Synthetic peptide
DIDHIIPQAVTQNDSIDNRVLVARAEN

SEQ ID NO: 272 - protein, 27 aa, Artificial Sequence
  Synthetic peptide
DIDHIVPRSISFDDSFSNLVIVNKLDN

SEQ ID NO: 273 - protein, 27 aa, Artificial Sequence
  Synthetic peptide
EIDHIIPYSISFDDSSSNKLLVLAESN

SEQ ID NO: 274 - protein, 27 aa, Artificial Sequence
  Synthetic peptide
EIDHIIPYSLCFDDSSANKVLVHKQSN

SEQ ID NO: 275 - protein, 27 aa, Artificial Sequence
  Synthetic peptide
EIDHIIPISISLDDSINNKVLVLSKAN

SEQ ID NO: 276 - protein, 27 aa, Artificial Sequence
  Synthetic peptide
EVDHIIPISISLDDSITNKVLVTHREN

SEQ ID NO: 277 - protein, 27 aa, Artificial Sequence
  Synthetic peptide
EVDHILPLSITFDDSLANKVLVYATAN

SEQ ID NO: 278 - protein, 27 aa, Artificial Sequence
  Synthetic peptide
EIDHIIPRSISFDDARSNKVLVYRSEN

SEQ ID NO: 279 - protein, 27 aa, Artificial Sequence
  Synthetic peptide
EVDHIIPRSVSFDNSYHNKVLVKQSEN

SEQ ID NO: 280 - protein, 27 aa, Artificial Sequence
  Synthetic peptide
EVDHIIPYSISWDDSYTNKVLTSAKCN

SEQ ID NO: 281 - protein, 27 aa, Artificial Sequence
  Synthetic peptide
DIDHIIPYSRSMDDSYSNKVLVLSGEN

SEQ ID NO: 282 - protein, 27 aa, Artificial Sequence
  Synthetic peptide
EIEHIIPYSMSYDNSQANKILTEKAEN

SEQ ID NO: 283 - protein, 27 aa, Artificial Sequence
  Synthetic peptide
EVDHIVPYSLILDNTINNKALVYAEEN

SEQ ID NO: 284 - protein, 27 aa, Artificial Sequence
  Synthetic peptide
EIDHVIPYSKSADDSWFNKLLVKKSTN

SEQ ID NO: 285 - protein, 27 aa, Artificial Sequence
  Synthetic peptide
EMDHILPYSRSLDNGWHNRVLVHGKDN

SEQ ID NO: 286 - protein, 27 aa, Artificial Sequence
  Synthetic peptide
EIEHVIPQSLYFDDSFSNKVICEAEVN

SEQ ID NO: 287 - protein, 27 aa, Artificial Sequence
  Synthetic peptide
DIEHIIPQARLFDDSFSNKTLEARSVN

SEQ ID NO: 288 - protein, 27 aa, Artificial Sequence
  Synthetic peptide
EIEHIVPKARVFDDSFSNKTLTFHRIN

SEQ ID NO: 289 - protein, 28 aa, Artificial Sequence
  Synthetic peptide
DKDHIIPQSMKKDDSIINNLVLVNKNAN

SEQ ID NO: 290 - protein, 27 aa, Artificial Sequence
  Synthetic peptide
QVDHILPWSRFGDDSYLNKTLCTARSN

SEQ ID NO: 291 - protein, 27 aa, Artificial Sequence
  Synthetic peptide
DIDHVIPLARGGRDSLDNMVLCQSDAN

SEQ ID NO: 292 - protein, 27 aa, Artificial Sequence
  Synthetic peptide
DMEHTIPKSISFDNSDQNLTLCESYYN

SEQ ID NO: 293 - protein, 27 aa, Artificial Sequence
  Synthetic peptide
DIEHTIPRSAGGDSTKMNLTLCSSRFN

SEQ ID NO: 294 - protein, 27 aa, Artificial Sequence
  Synthetic peptide
DIEHTIPRSISQDNSQMNKTLCSLKFN

SEQ ID NO: 295 - protein, 27 aa, Artificial Sequence
  Synthetic peptide
DIEHLFPIAESEDNGRNNLVISHSACN

SEQ ID NO: 296 - protein, 27 aa, Artificial Sequence
  Synthetic peptide
DVDHIFPRDDTADNSYGNKVVAHRQCN

SEQ ID NO: 297 - protein, 27 aa, Artificial Sequence
  Synthetic peptide
DIEHIVPQSLGGLSTDYNTIVTLKSVN

SEQ ID NO: 298 - protein, 27 aa, Artificial Sequence
  Synthetic peptide
ELDHIVPRTDGGSNRHENLAITCGACN

SEQ ID NO: 299 - protein, 28 aa, Artificial Sequence
  Synthetic peptide
EMDHIVPRKGVGSTNTRTNFAAVCAECN

SEQ ID NO: 300 - protein, 28 aa, Artificial Sequence
  Synthetic peptide
EMDHIVPRKGVGSTNTRVNLAAACAACN

SEQ ID NO: 301 - protein, 28 aa, Artificial Sequence
  Synthetic peptide
EMDHIVPRAGQGSTNTRENLVAVCHRCN

SEQ ID NO: 302 - protein, 27 aa, Artificial Sequence
  Synthetic peptide
ELEHIVPHSFRQSNALSSLVLTWPGVN

SEQ ID NO: 303 - DNA, 3333 bp, Artificial Sequence
  Synthetic polynucleotide
atggtgcctaagaagaagagaaaggtggctgccttcaaacctaattcaatcaactacatcctcggcctcgatatcggcatcgcatccgtcggctgggcgatggtagaaattgacgaagaagaaaaccccatccgcctgattgatttgggcgtgcgcgtatttgagcgtgccgaagtaccgaaaacaggcgactcccttgccatggcaaggcgtttggcgcgcagtgttcgccgcctgacccgccgtcgcgcccaccgcctgcttcggacccgccgcctattgaaacgcgaaggcgtattacaagccgccaattttgacgaaaacggcttgattaaatccttaccgaatacaccatggcaacttcgcgcagccgcattagaccgcaaactgacgcctttagagtggtcggcagtcttgttgcatttaatcaaacatcgcggctatttatcgcaacggaaaaacgagggcgaaactgccgataaggagcttggcgctttgcttaaaggcgtagccggcaatgcccatgccttacagacaggcgatttccgcacaccggccgaattggctttaaataaatttgagaaagaaagcggccatatccgcaatcagcgcagcgattattcgcatacgttcagccgcaaagatttacaggcggagctgattttgctgtttgaaaaacaaaaagaatttggcaatccgcatgtttcaggcggccttaaagaaggtattgaaaccctactgatgacgcaacgccctgccctgtccggcgatgccgttcaaaaaatgttggggcattgcaccttcgaaccggcagagccgaaagccgctaaaaacacctacacagccgaacgtttcatctggctgaccaagctgaacaacctgcgtattttagagcaaggcagcgagcggccattgaccgataccgaacgcgccacgcttatggacgagccatacagaaaatccaaactgacttacgcacaagcccgtaagctgctgggtttagaagataccgcctttttcaaaggcttgcgctatggtaaagacaatgccgaagcctcaacattgatggaaatgaaggcctaccatgccatcagccgtgcactggaaaaagaaggattgaaagacaaaaaatccccattaaacctttctcccgaattacaagacgaaatcggcacggcattctccctgttcaaaaccgatgaagacattacaggccgtctgaaagaccgtatacagcccgaaatcttagaagcgctgttgaaacacatcagcttcgataagttcgtccaaatttccttgaaagcattgcgccgaattgtgcctctaatggaacaaggcaaacgttacgatgaagcctgcgccgaaatctacggagaccattacggcaagaagaatacggaagaaaagatttatctgccgccgattcccgccgacgaaatccgcaaccccgtcgtcttgcgcgccttatctcaagcacgtaaggtcattaacggcgtggtacgccgttacggctccccagctcgtatccatattgaaactgcaagggaagtaggtaaatcgtttaaagaccgcaaagaaattgagaaacgccaagaagaaaaccgcaaagaccgggaaaaagccgccgccaaattccgagagtatttccccaattttgtcggagaacccaaatccaaagatattctgaaactgcgcctgtacgagcaacaacacggcaaatgcctgtattcgggcaaagaaatcaacttaggccgtctgaacgaaaaaggctatgtcgaaatcgaccatgccctgccgttctcgcgcacatgggacgacagtttcaacaataaagtactggtattgggcagcgaaaaccaaaacaaaggcaatcaaaccccttacgaatacttcaacggcaaagacaacagccgcgaatggcaggaatttaaagcgcgtgtcgaaaccagccgtttcccgcgcagtaaaaaacaacggattctgctgcaaaaattcgatgaagacggctttaaagaacgcaatctgaacgacacgcgctacgtcaaccgtttcctgtgtcaatttgttgccgaccgtatgcggctgacaggtaaaggcaagaaacgtgtctttgcatccaacggacaaattaccaatctgttgcgcggcttttggggattgcgcaaagtgcgtgcggaaaacgaccgccatcacgccttggacgccgtcgtcgttgcctgctcgaccgttgccatgcagcagaaaattacccgttttgtacgctataaagagatgaacgcgtttgacggtaaaaccatagacaaagaaacaggagaagtgctgcatcaaaaaacacacttcccacaaccttgggaatttttcgcacaagaagtcatgattcgcgtcttcggcaaaccggacggcaaacccgaattcgaagaagccgataccctagaaaaactgcgcacgttgcttgccgaaaaattatcatctcgccccgaagccgtacacgaatacgttacgccactgtttgtttcacgcgcgcccaatcggaagatgagcgggcaagggcatatggagaccgtcaaatccgccaaacgactggacgaaggcgtcagcgtgttgcgcgtaccgctgacacagttaaaactgaaagacttggaaaaaatggtcaatcgggagcgcgaacctaagctatacgaagcactgaaagcacggctggaagcacataaagacgatcctgccaaagcctttgccgagccgttttacaaatacgataaagcaggcaaccgcacccaacaggtaaaagccgtacgcgtagagcaagtacagaaaaccggcgtatgggtgcgcaaccataacggtattgccgacaacgcaaccatggtgcgcgtagatgtgtttgagaaaggcgacaagtattatctggtaccgatttacagttggcaggtagcgaaagggattttgccggatagggctgttgtacaaggaaaagatgaagaagattggcaacttattgatgatagtttcaactttaaattctcattacaccctaatgatttagtcgaggttataacaaaaaaagctagaatgtttggttactttgccagctgccatcgaggcacaggtaatatcaatatacgcattcatgatcttgatcataaaattggcaaaaatggaatactggaaggtatcggcgtcaaaaccgccctttcattccaaaaataccaaattgacgaactgggcaaagaaatcagaccatgccgtctgaaaaaacgcccgcctgtccgttacccatacgatgttccagattacgctgcagctccagcagcgaagaaaaagaagctggattaa

SEQ ID NO: 304 - protein, 1053 aa, Staphylococcus aureus; identical to SEQ ID NO: 26

SEQ ID NO: 305 - protein, 1368 aa, Streptococcus pyogenes [sequence omitted]

SEQ ID NO: 306 - protein, 984 aa, Campylobacter jejuni
MARILAFDIGISSIGWAFSENDELKDCGVRIFTKVENPKTGESLALPRRLARSARKRLARRKARLNHLKHLIANEFKLNYEDYQSFDESLAKAYKGSLISPYELRFRALNELLSKQDFARVILHIAKRRGYDDIKNSDDKEKGAILKAIKQNEEKLANYQSVGEYLYKEYFQKFKENSKEFTNVRNKKESYERCIAQSFLKDELKLIFKKQREFGFSFSKKFEEEVLSVAFYKRALKDFSHLVGNCSFFTDEKRAPKNSPLAFMFVALTRIINLLNNLKNTEGILYTKDDLNALLNEVLKNGTLTYKQTKKLLGLSDDYEFKGEKGTYFIEFKKYKEFIKALGEHNLSQDDLNEIAKDITLIKDEIKLKKALAKYDLNQNQIDSLSKLEFKDHLNISFKALKLVTPLMLEGKKYDEACNELNLKVAINEDKKDFLPAFNETYYKDEVTNPVVLRAIKEYRKVLNALLKKYGKVHKINIELAREVGKNHSQRAKIEKEQNENYKAKKDAELECEKLGLKINSKNILKLRLFKEQKEFCAYSGEKIKISDLQDEKMLEIDHIYPYSRSFDDSYMNKVLVFTKQNQEKLNQTPFEAFGNDSAKWQKIEVLAKNLPTKKQKRILDKNYKDKEQKNFKDRNLNDTRYIARLVLNYTKDYLDFLPLSDDENTKLNDTQKGSKVHVEAKSGMLTSALRHTWGFSAKDRNNHLHHAIDAVIIAYANNSIVKAFSDFKKEQESNSAELYAKKISELDYKNKRKFFEPFSGFRQKVLDKIDEIFVSKPERKKPSGALHEETFRKEEEFYQSYGGKEGVLKALELGKIRKVNGKIVKNGDMFRVDIFKHKKTNKFYAVPIYTMDFALKVLPNKAVARSKKGEIKDWILMDENYEFCFSLYKDSLILIQTKDMQEPEFVYYNAFTSSTVSLIVSKHDNKFETLSKNQKILFKNANEKEVIAKSIGIQNLKVFEKYIVSALGEVTKAEFRQREDFKK

SEQ ID NO: 307 - protein, 1436 aa, Bacteroides fragilis
MKRILGLDLGTNSIGWALVNEAENKDERSSIVKLGVRVNPLTVDELTNFEKGKSITTNADRTLKRGMRRNLQRYKLRRETLTEVLKEHKLITEDTILSENGNRTTFETYRLRAKAVTEEISLEEFARVLLMINKKRGYKSSRKAKGVEEGTLIDGMDIARELYNNNLTPGELCLQLLDAGKKFLPDFYRSDLQNELDRIWEKQKEYYPEILTDVLKEELRGKKRDAVWAICAKYFVWKENYTEWNKEKGKTEQQEREHKLEGIYSKRKRDEAKRENLQWRVNGLKEKLSLEQLVIVFQEMNTQINNSSGYLGAISDRSKELYFNKQTVGQYQMEMLDKNPNASLRNMVFYRQDYLDEFNMLWEKQAVYHKELTEELKKEIRDIIIFYQRRLKSQKGLIGFCEFESRQIEVDIDGKKKIKTVGNRVISRSSPLFQEFKIWQILNNIEVTVVGKKRKRRKLKENYSALFEELNDAEQLELNGSRRLCQEEKELLAQELFIRDKMTKSEVLKLLFDNPQELDLNFKTIDGNKTGYALFQAYSKMIEMSGHEPVDFKKPVEKVVEYIKAVFDLLNWNTDILGFNSNEELDNQPYYKLWHLLYSFEGDNTPTGNGRLIQKMTELYGFEKEYATILANVSFQDDYGSLSAKAIHKILPHLKEGNRYDVACVYAGYRHSESSLTREEIANKVLKDRLMLLPKNSLHNPVVEKILNQMVNVINVIIDIYGKPDEIRVELARELKKNAKEREELTKSIAQTTKAHEEYKTLLQTEFGLTNVSRTDILRYKLYKELESCGYKTLYSNTYISREKLFSKEFDIEHIIPQARLFDDSFSNKTLEARSVNIEKGNKTAYDFVKEKFGESGADNSLEHYLNNIEDLFKSGKISKTKYNKLKMAEQDIPDGFIERDLRNTQYIAKKALSMLNEISHRVVATSGSVTDKLREDWQLIDVMKELNWEKYKALGLVEYFEDRDGRQIGRIKDWTKRNDHRHHAMDALTVAFTKDVFIQYFNNKNASLDPNANEHAIKNKYFQNGRAIAPMPLREFRAEAKKHLENTLISIKAKNKVITGNINKTRKKGGVNKNMQQTPRGQLHLETIYGSGKQYLTKEEKVNASFDMRKIGTVSKSAYRDALLKRLYENDNDPKKAFAGKNSLDKQPIWLDKEQMRKVPEKVKIVTLEAIYTIRKEISPDLKVDKVIDVGVRKILIDRLNEYGNDAKKAFSNLDKNPIWLNKEKGISIKRVTISGISNAQSLHVKKDKDGKPILDENGRNIPVDFVNTGNNHHVAVYYRPVIDKRGQLVVDEAGNPKYELEEVVVSFFEAVTRANLGLPIIDKDYKTTEGWQFLFSMKQNEYFVFPNEKTGFNPKEIDLLDVENYGLISPNLFRVQKFSLKNYVFRHHLETTIKDTSSILRGITWIDFRSSKGLDTIVKVRVNHIGQIVSVGEY

SEQ ID NO: 308 - protein, 1420 aa, Bifidobacterium bifidum
MSRKNYVDDYAISLDIGNASVGWSAFTPNYRLVRAKGHELIGVRLFDPADTAESRRMARTTRRRYSRRRWRLRLLDALFDQALSEIDPSFLARRKYSWVHPDDENNADCWYGSVLFDSNEQDKRFYEKYPTIYHLRKALMEDDSQHDIREIYLAIHHMVKYRGNFLVEGTLESSNAFKEDELLKLLGRITRYEMSEGEQNSDIEQDDENKLVAPANGQLADALCATRGSRSMRVDNALEALSAVNDLSREQRAIVKAIFAGLEGNKLDLAKIFVSKEFSSENKKILGIYFNKSDYEEKCVQIVDSGLLDDEEREFLDRMQGQYNAIALKQLLGRSTSVSDSKCASYDAHRANWNLIKLQLRTKENEKDINENYGILVGWKIDSGQRKSVRGESAYENMRKKANVFFKKMIETSDLSETDKNRLIHDIEEDKLFPIQRDSDNGVIPHQLHQNELKQIIKKQGKYYPFLLDAFEKDGKQINKIEGLLTFRVPYFVGPLVVPEDLQKSDNSENHWMVRKKKGEITPWNFDEMVDKDASGRKFIERLVGTDSYLLGEPTLPKNSLLYQEYEVLNELNNVRLSVRTGNHWNDKRRMRLGREEKTLLCQRLFMKGQTVTKRTAENLLRKEYGRTYELSGLSDESKFTSSLSTYGKMCRIFGEKYVNEHRDLMEKIVELQTVFEDKETLLHQLRQLEGISEADCALLVNTHYTGWGRLSRKLLTTKAGECKISDDFAPRKHSIIEIMRAEDRNLMEIITDKQLGFSDWIEQENLGAENGSSLMEVVDDLRVSPKVKRGIIQSIRLIDDISKAVGKRPSRIFLELADDIQPSGRTISRKSRLQDLYRNANLGKEFKGIADELNACSDKDLQDDRLFLYYTQLGKDMYTGEELDLDRLSSAYDIDHIIPQAVTQNDSIDNRVLVARAENARKTDSFTYMPQIADRMRNFWQILLDNGLISRVKFERLTRQNEFSEREKERFVQRSLVETRQIMKNVATLMRQRYGNSAAVIGLNAELTKEMHRYLGFSHKNRDINDYHHAQDALCVGIAGQFAANRGFFADGEVSDGAQNSYNQYLRDYLRGYREKLSAEDRKQGRAFGFIVGSMRSQDEQKRVNPRTGEVVWSEEDKDYLRKVMNYRKMLVTQKVGDDFGALYDETRYAATDPKGIKGIPFDGAKQDTSLYGGFSSAKPAYAVLIESKGKTRLVNVTMQEYSLLGDRPSDDELRKVLAKKKSEYAKANILLRHVPKMQLIRYGGGLMVIKSAGELNNAQQLWLPYEEYCYFDDLSQGKGSLEKDDLKKLLDSILGSVQCLYPWHRFTEEELADLHVAFDKLPEDEKKNVITGIVSALHADAKTANLSIVGMTGSWRRMNNKSGYTFSDEDEFIFQSPSGLFEKRVTVGELKRKAKKEVNSKYRTNEKRLPTLSGASQP

SEQ ID NO: 309 - protein, 1397 aa, Veillonella atypica
METQTSNQLITSHLKDYPKQDYFVGLDIGTNSVGWAVTNTSYELLKFHSHKMWGSRLFEEGESAVTRRGFRSMRRRLERRKLRLKLLEELFADAMAQVDSTFFIRLHESKYHYEDKTTGHSSKHILFIDEDYTDQDYFTEYPTIYHLRKDLMENGTDDIRKLFLAVHHILKYRGNFLYEGATFNSNAFTFEDVLKQALVNITFNCFDTNSAISSISNILMESGKTKSDKAKAIERLVDTYTVFDEVNTPDKPQKEQVKEDKKTLKAFANLVLGLSANLIDLFGSVEDIDDDLKKLQIVGDTYDEKRDELAKVWGDEIHIIDDCKSVYDAIILMSIKEPGLTISQSKVKAFDKHKEDLVILKSLLKLDRNVYNEMFKSDKKGLHNYVHYIKQGRTEETSCSREDFYKYTKKIVEGLADSKDKEYILNEIELQTLLPLQRIKDNGVIPYQLHLEELKVILDKCGPKFPFLHTVSDGFSVTEKLIKMLEFRIPYYVGPLNTHHNIDNGGFSWAVRKQAGRVTPWNFEEKIDREKSAAAFIKNLTNKCTYLFGEDVLPKSSLLYSEFMLLNELNNVRIDGKALAQGVKQHLIDSIFKQDHKKMTKNRIELFLKDNNYITKKHKPEITGLDGEIKNDLTSYRDMVRILGNNFDVSMAEDIITDITIFGESKKMLRQTLRNKFGSQLNDETIKKLSKLRYRDWGRLSKKLLKGIDGCDKAGNGAPKTIIELMRNDSYNLMEILGDKFSFMECIEEENAKLAQGQVVNPHDIIDELALSPAVKRAVWQALRIVDEVAHIKKALPSRIFVEVARTNKSEKKKKDSRQKRLSDLYSAIKKDDVLQSGLQDKEFGALKSGLANYDDAALRSKKLYLYYTQMGRCAYTGNIIDLNQLNTDNYDIDHIYPRSLTKDDSFDNLVLCERTANAKKSDIYPIDNRIQTKQKPFWAFLKHQGLISERKYERLTRIAPLTADDLSGFIARQLVETNQSVKATTTLLRRLYPDIDVVFVKAENVSDFRHNNNFIKVRSLNHHHHAKDAYLNIVVGNVYHEKFTRNFRLFFKKNGANRTYNLAKMFNYDVICTNAQDGKAWDVKTSMNTVKKMMASNDVRVTRRLLEQSGALADATIYKASVAAKAKDGAYIGMKTKYSVFADVTKYGGMTKIKNAYSIIVQYTGKKGEEIKEIVPLPIYLINRNATDIELIDYVKSVIPKAKDISIKYRKLCINQLVKVNGFYYYLGGKTNDKIYIDNAIELVVPHDIATYIKLLDKYDLLRKENKTLKASSITTSIYNINTSTVVSLNKVGIDVFDYFMSKLRTPLYMKMKGNKVDELSSTGRSKFIKMTLEEQSIYLLEVLNLLTNSKTTFDVKPLGITGSRSTIGVKIHNLDEFKIINESITGLYSNEVTIV

SEQ ID NO: 310 - protein, 1363 aa, Lactobacillus rhamnosus
MTKLNQPYGIGLDIGSNSIGFAVVDANSHLLRLKGETAIGARLFREGQSAADRRGSRTTRRRLSRTRWRLSFLRDFFAPHITKIDPDFFLRQKYSEISPKDKDRFKYEKRLFNDRTDAEFYEDYPSMYHLRLHLMTHTHKADPREIFLAIHHILKSRGHFLTPGAAKDFNTDKVDLEDIFPALTEAYAQVYPDLELTFDLAKADDFKAKLLDEQATPSDTQKALVNLLLSSDGEKEIVKKRKQVLTEFAKAITGLKTKFNLALGTEVDEADASNWQFSMGQLDDKWSNIETSMTDQGTEIFEQIQELYRARLLNGIVPAGMSLSQAKVADYGQHKEDLELFKTYLKKLNDHELAKTIRGLYDRYINGDDAKPFLREDFVKALTKEVTAHPNEVSEQLLNRMGQANFMLKQRTKANGAIPIQLQQRELDQIIANQSKYYDWLAAPNPVEAHRWKMPYQLDELLNFHIPYYVGPLITPKQQAESGENVFAWMVRKDPSGNITPYNFDEKVDREASANTFIQRMKTTDTYLIGEDVLPKQSLLYQKYEVLNELNNVRINNECLGTDQKQRLIREVFERHSSVTIKQVADNLVAHGDFARRPEIRGLADEKRFLSSLSTYHQLKEILHEAIDDPTKLLDIENIITWSTVFEDHTIFETKLAEIEWLDPKKINELSGIRYRGWGQFSRKLLDGLKLGNGHTVIQELMLSNHNLMQILADETLKETMTELNQDKLKTDDIEDVINDAYTSPSNKKALRQVLRVVEDIKHAANGQDPSWLFIETADGTGTAGKRTQSRQKQIQTVYANAAQELIDSAVRGELEDKIADKASFTDRLVLYFMQGGRDIYTGAPLNIDQLSHYDIDHILPQSLIKDDSLDNRVLVNATINREKNNVFASTLFAGKMKATWRKWHEAGLISGRKLRNLMLRPDEIDKFAKGFVARQLVETRQIIKLTEQIAAAQYPNTKIIAVKAGLSHQLREELDFPKNRDVNHYHHAFDAFLAARIGTYLLKRYPKLAPFFTYGEFAKVDVKKFREFNFIGALTHAKKNIIAKDTGEIVWDKERDIRELDRIYNFKRMLITHEVYFETADLFKQTIYAAKDSKERGGSKQLIPKKQGYPTQVYGGYTQESGSYNALVRVAEADTTAYQVIKISAQNASKIASANLKSREKGKQLLNEIVVKQLAKRRKNWKPSANSFKIVIPRFGMGTLFQNAKYGLFMVNSDTYYRNYQELWLSRENQKLLKKLFSIKYEKTQMNHDALQVYKAIIDQVEKFFKLYDINQFRAKLSDAIERFEKLPINTDGNKIGKTETLRQILIGLQANGTRSNVKNLGIKTDLGLLQVGSGIKLDKDTQIVYQSPSGLFKRRIPLADL

SEQ ID NO: 311 - protein, 1365 aa, Filifactor alocis
MTKEYYLGLDVGTNSVGWAVTDSQYNLCKFKKKDMWGIRLFESANTAKDRRLQRGNRRRLERKKQRIDLLQEIFSPEICKIDPTFFIRLNESRLHLEDKSNDFKYPLFIEKDYSDIEYYKEFPTIFHLRKHLIESEEKQDIRLIYLALHNIIKTRGHFLIDGDLQSAKQLRPILDTFLLSLQEEQNLSVSLSENQKDEYEEILKNRSIAKSEKVKKLKNLFEISDELEKEEKKAQSAVIENFCKFIVGNKGDVCKFLRVSKEELEIDSFSFSEGKYEDDIVKNLEEKVPEKVYLFEQMKAMYDWNILVDILETEEYISFAKVKQYEKHKTNLRLLRDIILKYCTKDEYNRMFNDEKEAGSYTAYVGKLKKNNKKYWIEKKRNPEEFYKSLGKLLDKIEPLKEDLEVLTMMIEECKNHTLLPIQKNKDNGVIPHQVHEVELKKILENAKKYYSFLTETDKDGYSVVQKIESIFRFRIPYYVGPLSTRHQEKGSNVWMVRKPGREDRIYPWNMEEIIDFEKSNENFITRMTNKCTYLIGEDVLPKHSLLYSKYMVLNELNNVKVRGKKLPTSLKQKVFEDLFENKSKVTGKNLLEYLQIQDKDIQIDDLSGFDKDFKTSLKSYLDFKKQIFGEEIEKESIQNMIEDIIKWITIYGNDKEMLKRVIRANYSNQLTEEQMKKITGFQYSGWGNFSKMFLKGISGSDVSTGETFDIITAMWETDNNLMQILSKKFTFMDNVEDFNSGKVGKIDKITYDSTVKEMFLSPENKRAVWQTIQVAEEIKKVMGCEPKKIFIEMARGGEKVKKRTKSRKAQLLELYAACEEDCRELIKEIEDRDERDFNSMKLFLYYTQFGKCMYSGDDIDINELIRGNSKWDRDHIYPQSKIKDDSIDNLVLVNKTYNAKKSNELLSEDIQKKMHSFWLSLLNKKLITKSKYDRLTRKGDFTDEELSGFIARQLVETRQSTKAIADIFKQIYSSEVVYVKSSLVSDFRKKPLNYLKSRRVNDYHHAKDAYLNIVVGNVYNKKFTSNPIQWMKKNRDTNYSLNKVFEHDVVINGEVIWEKCTYHEDTNTYDGGTLDRIRKIVERDNILYTEYAYCEKGELFNATIQNKNGNSTVSLKKGLDVKKYGGYFSANTSYFSLIEFEDKKGDRARHIIGVPIYIANMLEHSPSAFLEYCEQKGYQNVRILVEKIKKNSLLIINGYPLRIRGENEVDTSFKRAIQLKLDQKNYELVRNIEKFLEKYVEKKGNYPIDENRDHITHEKMNQLYEVLLSKMKKFNKKGMADPSDRIEKSKPKFIKLEDLIDKINVINKMLNLLRCDNDTKADLSLIELPKNAGSFVVKKNTIGKSKIILVNQSVTGLYENRREL

SEQ ID NO: 312 - protein, 1389 aa, Oenococcus kitaharae
MARDYSVGLDIGTSSVGWAAIDNKYHLIRAKSKNLIGVRLFDSAVTAEKRRGYRTTRRRLSRRHWRLRLLNDIFAGPLTDFGDENFLARLKYSWVHPQDQSNQAHFAAGLLFDSKEQDKDFYRKYPTIYHLRLALMNDDQKHDLREVYLAIHHLVKYRGHFLIEGDVKADSAFDVHTFADAIQRYAESNNSDENLLGKIDEKKLSAALTDKHGSKSQRAETAETAFDILDLQSKKQIQAILKSVVGNQANLMAIFGLDSSAISKDEQKNYKFSFDDADIDEKIADSEALLSDTEFEFLCDLKAAFDGLTLKMLLGDDKTVSAAMVRRFNEHQKDWEYIKSHIRNAKNAGNGLYEKSKKFDGINAAYLALQSDNEDDRKKAKKIFQDEISSADIPDDVKADFLKKIDDDQFLPIQRTKNNGTIPHQLHRNELEQIIEKQGIYYPFLKDTYQENSHELNKITALINFRVPYYVGPLVEEEQKIADDGKNIPDPTNHWMVRKSNDTITPWNLSQVVDLDKSGRRFIERLTGTDTYLIGEPTLPKNSLLYQKFDVLQELNNIRVSGRRLDIRAKQDAFEHLFKVQKTVSATNLKDFLVQAGYISEDTQIEGLADVNGKNFNNALTTYNYLVSVLGREFVENPSNEELLEEITELQTVFEDKKVLRRQLDQLDGLSDHNREKLSRKHYTGWGRISKKLLTTKIVQNADKIDNQTFDVPRMNQSIIDTLYNTKMNLMEIINNAEDDFGVRAWIDKQNTTDGDEQDVYSLIDELAGPKEIKRGIVQSFRILDDITKAVGYAPKRVYLEFARKTQESHLTNSRKNQLSTLLKNAGLSELVTQVSQYDAAALQNDRLYLYFLQQGKDMYSGEKLNLDNLSNYDIDHIIPQAYTKDNSLDNRVLVSNITNRRKSDSSNYLPALIDKMRPFWSVLSKQGLLSKHKFANLTRTRDFDDMEKERFIARSLVETRQIIKNVASLIDSHFGGETKAVAIRSSLTADMRRYVDIPKNRDINDYHHAFDALLFSTVGQYTENSGLMKKGQLSDSAGNQYNRYIKEWIHAARLNAQSQRVNPFGFVVGSMRNAAPGKLNPETGEITPEENADWSIADLDYLHKVMNFRKITVTRRLKDQKGQLYDESRYPSVLHDAKSKASINFDKHKPVDLYGGFSSAKPAYAALIKFKNKFRLVNVLRQWTYSDKNSEDYILEQIRGKYPKAEMVLSHIPYGQLVKKDGALVTISSATELHNFEQLWLPLADYKLINTLLKTKEDNLVDILHNRLDLPEMTIESAFYKAFDSILSFAFNRYALHQNALVKLQAHRDDFNALNYEDKQQTLERILDALHASPASSDLKKINLSSGFGRLFSPSHFTLADTDEFIFQSVTGLFSTQKTVAQLYQETK

SEQ ID NO: 313 - protein, 1323 aa, Fructobacillus fructosus
MVYDVGLDIGTGSVGWVALDENGKLARAKGKNLVGVRLFDTAQTAADRRGFRTTRRRLSRRKWRLRLLDELFSAEINEIDSSFFQRLKYSYVHPKDEENKAHYYGGYLFPTEEETKKFHRSYPTIYHLRQELMAQPNKRFDIREIYLAIHHLVKYRGHFLSSQEKITIGSTYNPEDLANAIEVYADEKGLSWELNNPEQLTEIISGEAGYGLNKSMKADEALKLFEFDNNQDKVAIKTLLAGLTGNQIDFAKLFGKDISDKDEAKLWKLKLDDEALEEKSQTILSQLTDEEIELFHAVVQAYDGFVLIGLLNGADSVSAAMVQLYDQHREDRKLLKSLAQKAGLKHKRFSEIYEQLALATDEATIKNGISTARELVEESNLSKEVKEDTLRRLDENEFLPKQRTKANSVIPHQLHLAELQKILQNQGQYYPFLLDTFEKEDGQDNKIEELLRFRIPYYVGPLVTKKDVEHAGGDADNHWVERNEGFEKSRVTPWNFDKVFNRDKAARDFIERLTGNDTYLIGEKTLPQNSLRYQLFTVLNELNNVRVNGKKFDSKTKADLINDLFKARKTVSLSALKDYLKAQGKGDVTITGLADESKFNSSLSSYNDLKKTFDAEYLENEDNQETLEKIIEIQTVFEDSKIASRELSKLPLDDDQVKKLSQTHYTGWGRLSEKLLDSKIIDERGQKVSILDKLKSTSQNFMSIINNDKYGVQAWITEQNTGSSKLTFDEKVNELTTSPANKRGIKQSFAVLNDIKKAMKEEPRRVYLEFAREDQTSVRSVPRYNQLKEKYQSKSLSEEAKVLKKTLDGNKNKMSDDRYFLYFQQQGKDMYTGRPINFERLSQDYDIDHIIPQAFTKDDSLDNRVLVSRPENARKSDSFAYTDEVQKQDGSLWTSLLKSGFINRKKYERLTKAGKYLDGQKTGFIARQLVETRQIIKNVASLIEGEYENSKAVAIRSEITADMRLLVGIKKHREINSFHHAFDALLITAAGQYMQNRYPDRDSTNVYNEFDRYTNDYLKNLRQLSSRDEVRRLKSFGFVVGTMRKGNEDWSEENTSYLRKVMMFKNILTTKKTEKDRGPLNKETIFSPKSGKKLIPLNSKRSDTALYGGYSNVYSAYMTLVRANGKNLLIKIPISIANQIEVGNLKINDYIVNNPAIKKFEKILISKLPLGQLVNEDGNLIYLASNEYRHNAKQLWLSTTDADKIASISENSSDEELLEAYDILTSENVKNRFPFFKKDIDKLSQVRDEFLDSDKRIAVIQTILRGLQIDAAYQAPVKIISKKVSDWHKLQQSGGIKLSDNSEMIYQSATGIFETRVKISDLL

SEQ ID NO: 314 - protein, 1329 aa, Catenibacterium mitsuokai
IVDYCIGLDLGTGSVGWAVVDMNHRLMKRNGKHLWGSRLFSNAETAANRRASRSIRRRYNKRRERIRLLRAILQDMVLEKDPTFFIRLEHTSFLDEEDKAKYLGTDYKDNYNLFIDEDFNDYTYYHKYPTIYHLRKALCESTEKADPRLIYLALHHIVKYRGNFLYEGQKFNMDASNIEDKLSDIFTQFTSFNNIPYEDDEKKNLEILEILKKPLSKKAKVDEVMTLIAPEKDYKSAFKELVTGIAGNKMNVTKMILCEPIKQGDSEIKLKFSDSNYDDQFSEVEKDLGEYVEFVDALHNVYSWVELQTIMGATHTDNASISEAMVSRYNKHHDDLKLLKDCIKNNVPNKYFDMFRNDSEKSKGYYNYINRPSKAPVDEFYKYVKKCIEKVDTPEAKQILNDIELENFLLKQNSRTNGSVPYQMQLDEMIKIIDNQAEYYPILKEKREQLLSILTFRIPYYFGPLNETSEHAWIKRLEGKENQRILPWNYQDIVDVDATAEGFIKRMRSYCTYFPDEEVLPKNSLIVSKYEVYNELNKIRVDDKLLEVDVKNDIYNELFMKNKTVTEKKLKNWLVNNQCCSKDAEIKGFQKENQFSTSLTPWIDFTNIFGKIDQSNFDLIENIIYDLTVFEDKKIMKRRLKKKYALPDDKVKQILKLKYKDWSRLSKKLLDGIVADNRFGSSVTVLDVLEMSRLNLMEIINDKDLGYAQMIEEATSCPEDGKFTYEEVERLAGSPALKRGIWQSLQIVEEITKVMKCRPKYIYIEFERSEEAKERTESKIKKLENVYKDLDEQTKKEYKSVLEELKGFDNTKKISSDSLFLYFTQLGKCMYSGKKLDIDSLDKYQIDHIVPQSLVKDDSFDNRVLVVPSENQRKLDDLVVPFDIRDKMYRFWKLLFDHELISPKKFYSLIKTEYTERDEERFINRQLVETRQITKNVTQIIEDHYSTTKVAAIRANLSHEFRVKNHIYKNRDINDYHHAHDAYIVALIGGFMRDRYPNMHDSKAVYSEYMKMFRKNKNDQKRWKDGFVINSMNYPYEVDGKLIWNPDLINEIKKCFYYKDCYCTTKLDQKSGQLFNLTVLSNDAHADKGVTKAVVPVNKNRSDVHKYGGFSGLQYTIVAIEGQKKKGKKTELVKKISGVPLHLKAASINEKINYIEEKEGLSDVRIIKDNIPVNQMIEMDGGEYLLTSPTEYVNARQLVLNEKQCALIADIYNAIYKQDYDNLDDILMIQLYIELTNKMKVLYPAYRGIAEKFESMNENYVVISKEEKANIIKQMLIVMHRGPQNGNIVYDDFKISDRIGRLKTKNHNLNNIVFISQSPTGIYTKKYKL

SEQ ID NO: 315 - protein, 1348 aa, Finegoldia magna
MKSEKKYYIGLDVGTNSVGWAVTDEFYNILRAKGKDLWGVRLFEKADTAANTRIFRSGRRRNDRKGMRLQILREIFEDEIKKVDKDFYDRLDESKFWAEDKKVSGKYSLFNDKNFSDKQYFEKFPTIFHLRKYLMEEHGKVDIRYYFLAINQMMKRRGHFLIDGQISHVTDDKPLKEQLILLINDLLKIELEEELMDSIFEILADVNEKRTDKKNNLKELIKGQDFNKQEGNILNSIFESIVTGKAKIKNIISDEDILEKIKEDNKEDFVLTGDSYEENLQYFEEVLQENITLFNTLKSTYDFLILQSILKGKSTLSDAQVERYDEHKKDLEILKKVIKKYDEDGKLFKQVFKEDNGNGYVSYIGYYLNKNKKITAKKKISNIEFTKYVKGILEKQCDCEDEDVKYLLGKIEQENFLLKQISSINSVIPHQIHLFELDKILENLAKNYPSFNNKKEEFTKIEKIRKTFTFRIPYYVGPLNDYHKNNGGNAWIFRNKGEKIRPWNFEKIVDLHKSEEEFIKRMLNQCTYLPEETVLPKSSILYSEYMVLNELNNLRINGKPLDTDVKLKLIEELFKKKTKVTLKSIRDYMVRNNFADKEDFDNSEKNLEIASNMKSYIDFNNILEDKFDVEMVEDLIEKITIHTGNKKLLKKYIEETYPDLSSSQIQKIINLKYKDWGRLSRKLLDGIKGTKKETEKTDTVINFLRNSSDNLMQIIGSQNYSFNEYIDKLRKKYIPQEISYEVVENLYVSPSVKKMIWQVIRVTEEITKVMGYDPDKIFIEMAKSEEEKKTTISRKNKLLDLYKAIKKDERDSQYEKLLTGLNKLDDSDLRSRKLYLYYTQMGRDMYTGEKIDLDKLFDSTHYDKDHIIPQSMKKDDSIINNLVLVNKNANQTTKGNIYPVPSSIRNNPKIYNYWKYLMEKEFISKEKYNRLIRNTPLTNEELGGFINRQLVETRQSTKAIKELFEKFYQKSKIIPVKASLASDLRKDMNTLKSREVNDLHHAHDAFLNIVAGDVWNREFTSNPINYVKENREGDKVKYSLSKDFTRPRKSKGKVIWTPEKGRKLIVDTLNKPSVLISNESHVKKGELFNATIAGKKDYKKGKIYLPLKKDDRLQDVSKYGGYKAINGAFFFLVEHTKSKKRIRSIELFPLHLLSKFYEDKNTVLDYAINVLQLQDPKIIIDKINYRTEIIIDNFSYLISTKSNDGSITVKPNEQMYWRVDEISNLKKIENKYKKDAILTEEDRKIMESYIDKIYQQFKAGKYKNRRTTDTIIEKYEIIDLDTLDNKQLYQLLVAFISLSYKTSNNAVDFTVIGLGTECGKPRITNLPDNTYLVYKSITGIYEKRIRIK

SEQ ID NO: 316 - protein, 1384 aa, Coriobacterium glomerans
MKLRGIEDDYSIGLDMGTSSVGWAVTDERGTLAHFKRKPTWGSRLFREAQTAAVARMPRGQRRRYVRRRWRLDLLQKLFEQQMEQADPDFFIRLRQSRLLRDDRAEEHADYRWPLFNDCKFTERDYYQRFPTIYHVRSWLMETDEQADIRLIYLALHNIVKHRGNFLREGQSLSAKSARPDEALNHLRETLRVWSSERGFECSIADNGSILAMLTHPDLSPSDRRKKIAPLFDVKSDDAAADKKLGIALAGAVIGLKTEFKNIFGDFPCEDSSIYLSNDEAVDAVRSACPDDCAELFDRLCEVYSAYVLQGLLSYAPGQTISANMVEKYRRYGEDLALLKKLVKIYAPDQYRMFFSGATYPGTGIYDAAQARGYTKYNLGPKKSEYKPSESMQYDDFRKAVEKLFAKTDARADERYRMMMDRFDKQQFLRRLKTSDNGSIYHQLHLEELKAIVENQGRFYPFLKRDADKLVSLVSFRIPYYVGPLSTRNARTDQHGENRFAWSERKPGMQDEPIFPWNWESIIDRSKSAEKFILRMTGMCTYLQQEPVLPKSSLLYEEFCVLNELNGAHWSIDGDDEHRFDAADREGIIEELFRRKRTVSYGDVAGWMERERNQIGAHVCGGQGEKGFESKLGSYIFFCKDVFKVERLEQSDYPMIERIILWNTLFEDRKILSQRLKEEYGSRLSAEQIKTICKKRFTGWGRLSEKFLTGITVQVDEDSVSIMDVLREGCPVSGKRGRAMVMMEILRDEELGFQKKVDDFNRAFFAENAQALGVNELPGSPAVRRSLNQSIRIVDEIASIAGKAPANIFIEVTRDEDPKKKGRRTKRRYNDLKDALEAFKKEDPELWRELCETAPNDMDERLSLYFMQRGKCLYSGRAIDIHQLSNAGIYEVDHIIPRTYVKDDSLENKALVYREENQRKTDMLLIDPEIRRRMSGYWRMLHEAKLIGDKKFRNLLRSRIDDKALKGFIARQLVETGQMVKLVRSLLEARYPETNIISVKASISHDLRTAAELVKCREANDFHHAHDAFLACRVGLFIQKRHPCVYENPIGLSQVVRNYVRQQADIFKRCRTIPGSSGFIVNSFMTSGFDKETGEIFKDDWDAEAEVEGIRRSLNFRQCFISRMPFEDHGVFWDATIYSPRAKKTAALPLKQGLNPSRYGSFSREQFAYFFIYKARNPRKEQTLFEFAQVPVRLSAQIRQDENALERYARELAKDQGLEFIRIERSKILKNQLIEIDGDRLCITGKEEVRNACELAFAQDEMRVIRMLVSEKPVSRECVISLFNRILLHGDQASRRLSKQLKLALLSEAFSEASDNVQRNVVLGLIAIFNGSTNMVNLSDIGGSKFAGNVRIKYKKELASPKVNVHLIDQSVTGMFERRTKIGL

SEQ ID NO: 317 - protein, 1391 aa, Eubacterium yurii
MENKQYYIGLDVGTNSVGWAVTDTSYNLLRAKGKDMWGARLFEKANTAAERRTKRTSRRRSEREKARKAMLKELFADEINRVDPSFFIRLEESKFFLDDRSENNRQRYTLFNDATFTDKDYYEKYKTIFHLRSALINSDEKFDVRLVFLAILNLFSHRGHFLNASLKGDGDIQGMDVFYNDLVESCEYFEIELPRITNIDNFEKILSQKGKSRTKILEELSEELSISKKDKSKYNLIKLISGLEASVVELYNIEDIQDENKKIKIGFRESDYEESSLKVKEIIGDEYFDLVERAKSVHDMGLLSNIIGNSKYLCEARVEAYENHHKDLLKIKELLKKYDKKAYNDMFRKMTDKNYSAYVGSVNSNIAKERRSVDKRKIEDLYKYIEDTALKNIPDDNKDKIEILEKIKLGEFLKKQLTASNGVIPNQLQSRELRAILKKAENYLPFLKEKGEKNLTVSEMIIQLFEFQIPYYVGPLDKNPKKDNKANSWAKIKQGGRILPWNFEDKVDVKGSRKEFIEKMVRKCTYISDEHTLPKQSLLYEKFMVLNEINNIKIDGEKISVEAKQKIYNDLFVKGKKVSQKDIKKELISLNIMDKDSVLSGTDTVCNAYLSSIGKFTGVFKEEINKQSIVDMIEDIIFLKTVYGDEKRFVKEEIVEKYGDEIDKDKIKRILGFKFSNWGNLSKSFLELEGADVGTGEVRSIIQSLWETNFNLMELLSSRFTYMDELEKRVKKLEKPLSEWTIEDLDDMYLSSPVKRMIWQSMKIVDEIQTVIGYAPKRIFVEMTRSEGEKVRTKSRKDRLKELYNGIKEDSKQWVKELDSKDESYFRSKKMYLYYLQKGRCMYSGEVIELDKLMDDNLYDIDHIYPRSFVKDDSLDNLVLVKKEINNRKQNDPITPQIQASCQGFWKILHDQGFMSNEKYSRLTRKTQEFSDEEKLSFINRQIVETGQATKCMAQILQKSMGEDVDVVFSKARLVSEFRHKFELFKSRLINDFHHANDAYLNIVVGNSYFVKFTRNPANFIKDARKNPDNPVYKYHMDRFFERDVKSKSEVAWIGQSEGNSGTIVIVKKTMAKNSPLITKKVEEGHGSITKETIVGVKEIKFGRNKVEKADKTPKKPNLQAYRPIKTSDERLCNILRYGGRTSISISGYCLVEYVKKRKTIRSLEAIPVYLGRKDSLSEEKLLNYFRYNLNDGGKDSVSDIRLCLPFISTNSLVKIDGYLYYLGGKNDDRIQLYNAYQLKMKKEEVEYIRKIEKAVSMSKFDEIDREKNPVLTEEKNIELYNKIQDKFENTVFSKRMSLVKYNKKDLSFGDFLKNKKSKFEEIDLEKQCKVLYNIIFNLSNLKEVDLSDIGGSKSTGKCRCKKNITNYKEFKLIQQSITGLYSCEKDLMTI

SEQ ID NO: 318 - protein, 1364 aa, Peptoniphilus duerdenii
MKNLKEYYIGLDIGTASVGWAVTDESYNIPKFNGKKMWGVRLFDDAKTAEERRTQRGSRRRLNRRKERINLLQDLFATEISKVDPNFFLRLDNSDLYREDKDEKLKSKYTLFNDKDFKDRDYHKKYPTIHHLIMDLIEDEGKKDIRLLYLACHYLLKNRGHFIFEGQKFDTKNSFDKSINDLKIHLRDEYNIDLEFNNEDLIEIITDTTLNKTNKKKELKNIVGDTKFLKAISAIMIGSSQKLVDLFEDGEFEETTVKSVDFSTTAFDDKYSEYEEALGDTISLLNILKSIYDSSILENLLKDADKSKDGNKYISKAFVKKFNKHGKDLKTLKRIIKKYLPSEYANIFRNKSINDNYVAYTKSNITSNKRTKASKFTKQEDFYKFIKKHLDTIKETKLNSSENEDLKLIDEMLTDIEFKTFIPKLKSSDNGVIPYQLKLMELKKILDNQSKYYDFLNESDEYGTVKDKVESIMEFRIPYYVGPLNPDSKYAWIKRENTKITPWNFKDIVDLDSSREEFIDRLIGRCTYLKEEKVLPKASLIYNEFMVLNELNNLKLNEFLITEEMKKAIFEELFKTKKKVTLKAVSNLLKKEFNLTGDILLSGTDGDFKQGLNSYIDFKNIIGDKVDRDDYRIKIEEIIKLIVLYEDDKTYLKKKIKSAYKNDFTDDEIKKIAALNYKDWGRLSKRFLTGIEGVDKTTGEKGSIIYFMREYNLNLMELMSGHYTFTEEVEKLNPVENRELCYEMVDELYLSPSVKRMLWQSLRVVDEIKRIIGKDPKKIFIEMARAKEAKNSRKESRKNKLLEFYKFGKKAFINEIGEERYNYLLNEINSEEESKFRWDNLYLYYTQLGRCMYSLEPIDLADLKSNNIYDQDHIYPKSKIYDDSLENRVLVKKNLNHEKGNQYPIPEKVLNKNAYGFWKILFDKGLIGQKKYTRLTRRTPFEERELAEFIERQIVETRQATKETANLLKNICQDSEIVYSKAENASRFRQEFDIIKCRTVNDLHHMHDAYLNIVVGNVYNTKFTKNPLNFIKDKDNVRSYNLENMFKYDVVRGSYTAWIADDSEGNVKAATIKKVKRELEGKNYRFTRMSYIGTGGLYDQNLMRKGKGQIPQKENTNKSNIEKYGGYNKASSAYFALIESDGKAGRERTLETIPIMVYNQEKYGNTEAVDKYLKDNLELQDPKILKDKIKINSLIKLDGFLYNIKGKTGDSLSIAGSVQLIVNKEEQKLIKKMDKFLVKKKDNKDIKVTSFDNIKEEELIKLYKTLSDKLNNGIYSNKRNNQAKNISEALDKFKEISIEEKIDVLNQIILLFQSYNNGCNLKSIGLSAKTGVVFIPKKLNYKECKLINQSITGLFENEVDLLNL

SEQ ID NO: 319 - protein, 1358 aa, Acidaminococcus sp.
MGKMYYLGLDIGTNSVGYAVTDPSYHLLKFKGEPMWGAHVFAAGNQSAERRSFRTSRRRLDRRQQRVKLVQEIFAPVISPIDPRFFIRLHESALWRDDVAETDKHIFFNDPTYTDKEYYSDYPTIHHLIVDLMESSEKHDPRLVYLAVAWLVAHRGHFLNEVDKDNIGDVLSFDAFYPEFLAFLSDNGVSPWVCESKALQATLLSRNSVNDKYKALKSLIFGSQKPEDNFDANISEDGLIQLLAGKKVKVNKLFPQESNDASFTLNDKEDAIEEILGTLTPDECEWIAHIRRLFDWAIMKHALKDGRTISESKVKLYEQHHHDLTQLKYFVKTYLAKEYDDIFRNVDSETTKNYVAYSYHVKEVKGTLPKNKATQEEFCKYVLGKVKNIECSEADKVDFDEMIQRLTDNSFMPKQVSGENRVIPYQLYYYELKTILNKAASYLPFLTQCGKDAISNQDKLLSIMTFRIPYFVGPLRKDNSEHAWLERKAGKIYPWNFNDKVDLDKSEEAFIRRMTNTCTYYPGEDVLPLDSLIYEKFMILNEINNIRIDGYPISVDVKQQVFGLFEKKRRVTVKDIQNLLLSLGALDKHGKLTGIDTTIHSNYNTYHHFKSLMERGVLTRDDVERIVERMTYSDDTKRVRLWLNNNYGTLTADDVKHISRLRKHDFGRLSKMFLTGLKGVHKETGERASILDFMWNTNDNLMQLLSECYTFSDEITKLQEAYYAKAQLSLNDFLDSMYISNAVKRPIYRTLAVVNDIRKACGTAPKRIFIEMARDGESKKKRSVTRREQIKNLYRSIRKDFQQEVDFLEKILENKSDGQLQSDALYLYFAQLGRDMYTGDPIKLEHIKDQSFYNIDHIYPQSMVKDDSLDNKVLVQSEINGEKSSRYPLDAAIRNKMKPLWDAYYNHGLISLKKYQRLTRSTPFTDDEKWDFINRQLVETRQSTKALAILLKRKFPDTEIVYSKAGLSSDFRHEFGLVKSRNINDLHHAKDAFLAIVTGNVYHERFNRRWFMVNQPYSVKTKTLFTHSIKNGNFVAWNGEEDLGRIVKMLKQNKNTIHFTRFSFDRKEGLFDIQPLKASTGLVPRKAGLDVVKYGGYDKSTAAYYLLVRFTLEDKKTQHKLMMIPVEGLYKARIDHDKEFLTDYAQTTISEILQKDKQKVINIMFPMGTRHIKLNSMISIDGFYLSIGGKSSKGKSVLCHAMVPLIVPHKIECYIKAMESFARKFKENNKLRIVEKFDKITVEDNLNLYELFLQKLQHNPYNKFFSTQFDVLTNGRSTFTKLSPEEQVQTLLNILSIFKTCRSSGCDLKSINGSAQAARIMISADLTGLSKKYSDIRLVEQSASGLFVSKSQNLLEYL

SEQ ID NO: 320 - protein, 1356 aa, Lactobacillus farciminis
MTKKEQPYNIGLDIGTSSVGWAVTNDNYDLLNIKKKNLWGVRLFEEAQTAKETRLNRSTRRRYRRRKNRINWLNEIFSEELAKTDPSFLIRLQNSWVSKKDPDRKRDKYNLFIDGPYTDKEYYREFPTIFHLRKELILNKDKADIRLIYLALHNILKYRGNFTYEHQKFNISNLNNNLSKELIELNQQLIKYDISFPDDCDWNHISDILIGRGNATQKSSNILKDFTLDKETKKLLKEVINLILGNVAHLNTIFKTSLTKDEEKLNFSGKDIESKLDDLDSILDDDQFTVLDAANRIYSTITLNEILNGESYFSMAKVNQYENHAIDLCKLRDMWHTTKNEEAVEQSRQAYDDYINKPKYGTKELYTSLKKFLKVALPTNLAKEAEEKISKGTYLVKPRNSENGVVPYQLNKIEMEKIIDNQSQYYPFLKENKEKLLSILSFRIPYYVGPLQSAEKNPFAWMERKSNGHARPWNFDEIVDREKSSNKFIRRMTVTDSYLVGEPVLPKNSLIYQRYEVLNELNNIRITENLKTNPIGSRLTVETKQRIYNELFKKYKKVTVKKLTKWLIAQGYYKNPILIGLSQKDEFNSTLTTYLDMKKIFGSSFMEDNKNYDQIEELIEWLTIFEDKQILNEKLHSSKYSYTPDQIKKISNMRYKGWGRLSKKILMDITTETNTPQLLQLSNYSILDLMWATNNNFISIMSNDKYDFKNYIENHNLNKNEDQNISDLVNDIHVSPALKRGITQSIKIVQEIVKFMGHAPKHIFIEVTRETKKSEITTSREKRIKRLQSKLLNKANDFKPQLREYLVPNKKIQEELKKHKNDLSSERIMLYFLQNGKSLYSEESLNINKLSDYQVDHILPRTYIPDDSLENKALVLAKENQRKADDLLLNSNVIDRNLERWTYMLNNNMIGLKKFKNLTRRVITDKDKLGFIHRQLVQTSQMVKGVANILDNMYKNQGTTCIQARANLSTAFRKALSGQDDTYHFKHPELVKNRNVNDFHHAQDAYLASFLGTYRLRRFPTNEMLLMNGEYNKFYGQVKELYSKKKKLPDSRKNGFIISPLVNGTTQYDRNTGEIIWNVGFRDKILKIFNYHQCNVTRKTEIKTGQFYDQTIYSPKNPKYKKLIAQKKDMDPNIYGGFSGDNKSSITIVKIDNNKIKPVAIPIRLINDLKDKKTLQNWLEENVKHKKSIQIIKNNVPIGQIIYSKKVGLLSLNSDREVANRQQLILPPEHSALLRLLQIPDEDLDQILAFYDKNILVEILQELITKMKKFYPFYKGEREFLIANIENFNQATTSEKVNSLEELITLLHANSTSAHLIFNNIEKKAFGRKTHGLTLNNTDFIYQSVTGLYETRIHIE

SEQ ID NO: 321 - protein, 1421 aa, Streptococcus sanguinis
MTKFNKNYSIGLDIGVSSVGYAVVTEDYRVPAFKFKVLGNTEKEKIKKNLIGSTTFVSAQPAKGTRVFRVNRRRIDRRNHRITYLRDIFQKEIEKVDKNFYRRLDESFRVLGDKSEDLQIKQPFFGDKELETAYHKKYPTIYHLRKHLADADKNSPVADIREVYMAISHILKYRGHFLTLDKINPNNINMQNSWIDFIESCQEVFDLEISDESKNIADIFKSSENRQEKVKKILPYFQQELLKKDKSIFKQLLQLLFGLKTKFKDCFELEEEPDLNFSKENYDENLENFLGSLEEDFSDVFAKLKVLRDTILLSGMLTYTGATHARFSATMVERYEEHRKDLQRFKFFIKQNLSEQDYLDIFGRKTQNGFDVDKETKGYVGYITNKMVLTNPQKQKTIQQNFYDYISGKITGIEGAEYFLNKISDGTFLRKLRTSDNGAIPNQIHAYELEKIIERQGKDYPFLLENKDKLLSILTFKIPYYVGPLAKGSNSRFAWIKRATSSDILDDNDEDTRNGKIRPWNYQKLINMDETRDAFITNLIGNDIILLNEKVLPKRSLIYEEVMLQNELTRVKYKDKYGKAHFFDSELRQNIINGLFKNNSKRVNAKSLIKYLSDNHKDLNAIEIVSGVEKGKSFNSTLKTYNDLKTIFSEELLDSEIYQKELEEIIKVITVFDDKKSIKNYLTKFFGHLEILDEEKINQLSKLRYSGWGRYSAKLLLDIRDEDTGFNLLQFLRNDEENRNLTKLISDNTLSFEPKIKDIQSKSTIEDDIFDEIKKLAGSPAIKRGILNSIKIVDELVQIIGYPPHNIVIEMARENMTTEEGQKKAKTRKTKLESALKNIENSLLENGKVPHSDEQLQSEKLYLYYLQNGKDMYTLDKTGSPAPLYLDQLDQYEVDHIIPYSFLPIDSIDNKVLTHRENNQQKLNNIPDKETVANMKPFWEKLYNAKLISQTKYQRLTTSERTPDGVLTESMKAGFIERQLVETRQIIKHVARILDNRFSDTKIITLKSQLITNFRNTFHIAKIRELNDYHHAHDAYLAVVVGQTLLKVYPKLAPELIYGHHAHFNRHEENKATLRKHLYSNIMRFFNNPDSKVSKDIWDCNRDLPIIKDVIYNSQINFVKRTMIKKGAFYNQNPVGKFNKQLAANNRYPLKTKALCLDTSIYGGYGPMNSALSIIIIAERFNEKKGKIETVKEFHDIFIIDYEKFNNNPFQFLNDTSENGFLKKNNINRVLGFYRIPKYSLMQKIDGTRMLFESKSNLHKATQFKLTKTQNELFFHMKRLLTKSNLMDLKSKSAIKESQNFILKHKEEFDNISNQLSAFSQKMLGNTTSLKNLIKGYNERKIKEIDIRDETIKYFYDNFIKMFSFVKSGAPKDINDFFDNKCTVARMRPKPDKKLLNATLIHQSITGLYETRIDLSKLGED

SEQ ID NO: 322 - protein, 1338 aa, Coprococcus catus
MKQEYFLGLDMGTGSLGWAVTDSTYQVMRKHGKALWGTRLFESASTAEERRMFRTARRRLDRRNWRIQVLQEIFSEEISKVDPGFFLRMKESKYYPEDKRDAEGNCPELPYALFVDDNYTDKNYHKDYPTIYHLRKMLMETTEIPDIRLVYLVLHHMMKHRGHFLLSGDISQIKEFKSTFEQLIQNIQDEELEWHISLDDAAIQFVEHVLKDRNLTRSTKKSRLIKQLNAKSACEKAILNLLSGGTVKLSDIFNNKELDESERPKVSFADSGYDDYIGIVEAELAEQYYIIASAKAVYDWSVLVEILGNSVSISEAKIKVYQKHQADLKTLKKIVRQYMTKEDYKRVFVDTEEKLNNYSAYIGMTKKNGKKVDLKSKQCTQADFYDFLKKNVIKVIDHKEITQEIESEIEKENFLPKQVTKDNGVIPYQVHDYELKKILDNLGTRMPFIKENAEKIQQLFEFRIPYYVGPLNRVDDGKDGKFTWSVRKSDARIYPWNFTEVIDVEASAEKFIRRMTNKCTYLVGEDVLPKDSLVYSKFMVLNELNNLRLNGEKISVELKQRIYEELFCKYRKVTRKKLERYLVIEGIAKKGVEITGIDGDFKASLTAYHDFKERLTDVQLSQRAKEAIVLNVVLFGDDKKLLKQRLSKMYPNLTTGQLKGICSLSYQGWGRLSKTFLEEITVPAPGTGEVWNIMTALWQTNDNLMQLLSRNYGFTNEVEEFNTLKKETDLSYKTVDELYVSPAVKRQIWQTLKVVKEIQKVMGNAPKRVFVEMAREKQEGKRSDSRKKQLVELYRACKNEERDWITELNAQSDQQLRSDKLFLYYIQKGRCMYSGETIQLDELWDNTKYDIDHIYPQSKTMDDSLNNRVLVKKNYNAIKSDTYPLSLDIQKKMMSFWKMLQQQGFITKEKYVRLVRSDELSADELAGFIERQIVETRQSTKAVATILKEALPDTEIVYVKAGNVSNFRQTYELLKVREMNDLHHAKDAYLNIVVGNAYFVKFTKNAAWFIRNNPGRSYNLKRMFEFDIERSGEIAWKAGNKGSIVTVKKVMQKNNILVTRKAYEVKGGLFDQQIMKKGKGQVPIKGNDERLADIEKYGGYNKAAGTYFMLVKSLDKKGKEIRTIEFVPLYLKNQIEINHESAIQYLAQERGLNSPEILLSKIKIDTLFKVDGFKMWLSGRTGNQLIFKGANQLILSHQEAAILKGVVKYVNRKNENKDAKLSERDGMTEEKLLQLYDTFLDKLSNTVYSIRLSAQIKTLTEKRAKFIGLSNEDQCIVLNEILHMFQCQSGSANLKLIGGPGSAGILVMNNNITACKQISVINQSPTGIYEKEIDLIKL

SEQ ID NO: 323 - protein, 1345 aa, Streptococcus mutans
MKKPYSIGLDIGTNSVGWAVVTDDYKVPAKKMKVLGNTDKSHIEKNLLGALLFDSGNTAEDRRLKRTARRRYTRRRNRILYLQEIFSEEMGKVDDSFFHRLEDSFLVTEDKRGERHPIFGNLEEEVKYHENFPTIYHLRQYLADNPEKVDLRLVYLALAHIIKFRGHFLIEGKFDTRNNDVQRLFQEFLAVYDNTFENSSLQEQNVQVEEILTDKISKSAKKDRVLKLFPNEKSNGRFAEFLKLIVGNQADFKKHFELEEKAPLQFSKDTYEEELEVLLAQIGDNYAELFLSAKKLYDSILLSGILTVTDVGTKAPLSASMIQRYNEHQMDLAQLKQFIRQKLSDKYNEVFSDVSKDGYAGYIDGKTNQEAFYKYLKGLLNKIEGSGYFLDKIEREDFLRKQRTFDNGSIPHQIHLQEMRAIIRRQAEFYPFLADNQDRIEKLLTFRIPYYVGPLARGKSDFAWLSRKSADKITPWNFDEIVDKESSAEAFINRMTNYDLYLPNQKVLPKHSLLYEKFTVYNELTKVKYKTEQGKTAFFDANMKQEIFDGVFKVYRKVTKDKLMDFLEKEFDEFRIVDLTGLDKENKVFNASYGTYHDLCKILDKDFLDNSKNEKILEDIVLTLTLFEDREMIRKRLENYSDLLTKEQVKKLERRHYTGWGRLSAELIHGIRNKESRKTILDYLIDDGNSNRNFMQLINDDALSFKEEIAKAQVIGETDNLNQVVSDIAGSPAIKKGILQSLKIVDELVKIMGHQPENIVVEMARENQFTNQGRRNSQQRLKGLTDSIKEFGSQILKEHPVENSQLQNDRLFLYYLQNGRDMYTGEELDIDYLSQYDIDHIIPQAFIKDNSIDNRVLTSSKENRGKSDDVPSKDVVRKMKSYWSKLLSAKLITQRKFDNLTKAERGGLTDDDKAGFIKRQLVETRQITKHVARILDERFNTETDENNKKIRQVKIVTLKSNLVSNFRKEFELYKVREINDYHHAHDAYLNAVIGKALLGVYPQLEPEFVYGDYPHFHGHKENKATAKKFFYSNIMNFFKKDDVRTDKNGEIIWKKDEHISNIKKVLSYPQVNIVKKVEEQTGGFSKESILPKGNSDKLIPRKTKKFYWDTKKYGGFDSPIVAYSILVIADIEKGKSKKLKTVKALVGVTIMEKMTFERDPVAFLERKGYRNVQEENIIKLPKYSLFKLENGRKRLLASARELQKGNEIVLPNHLGTLLYHAKNIHKVDEPKHLDYVDKHKDEFKELLDVVSNFSKKYTLAEGNLEKIKELYAQNNGEDLKELASSFINLLTFTAIGAPATFKFFDKNIDRKRYTSTTEILNATLIHQSITGLYETRIDLNKLGGD

SEQ ID NO: 324 - protein, 1368 aa, Streptococcus pyogenes [sequence omitted]

SEQ ID NO: 325 - protein, 1388 aa, Streptococcus thermophilus
MTKPYSIGLDIGTNSVGWAVTTDNYKVPSKKMKVLGNTSKKYIKKNLLGVLLFDSGITAEGRRLKRTARRRYTRRRNRILYLQEIFSTEMATLDDAFFQRLDDSFLVPDDKRDSKYPIFGNLVEEKAYHDEFPTIYHLRKYLADSTKKADLRLVYLALAHMIKYRGHFLIEGEFNSKNNDIQKNFQDFLDTYNAIFESDLSLENSKQLEEIVKDKISKLEKKDRILKLFPGEKNSGIFSEFLKLIVGNQADFRKCFNLDEKASLHFSKESYDEDLETLLGYIGDDYSDVFLKAKKLYDAILLSGFLTVTDNETEAPLSSAMIKRYNEHKEDLALLKEYIRNISLKTYNEVFKDDTKNGYAGYIDGKTNQEDFYVYLKKLLAEFEGADYFLEKIDREDFLRKQRTFDNGSIPYQIHLQEMRAILDKQAKFYPFLAKNKERIEKILTFRIPYYVGPLARGNSDFAWSIRKRNEKITPWNFEDVIDKESSAEAFINRMTSFDLYLPEEKVLPKHSLLYETFNVYNELTKVRFIAESMRDYQFLDSKQKKDIVRLYFKDKRKVTDKDIIEYLHAIYGYDGIELKGIEKQFNSSLSTYHDLLNIINDKEFLDDSSNEAIIEEIIHTLTIFEDREMIKQRLSKFENIFDKSVLKKLSRRHYTGWGKLSAKLINGIRDEKSGNTILDYLIDDGISNRNFMQLIHDDALSFKKKIQKAQIIGDEDKGNIKEVVKSLPGSPAIKKGILQSIKIVDELVKVMGGRKPESIVVEMARENQYTNQGKSNSQQRLKRLEKSLKELGSKILKENIPAKLSKIDNNALQNDRLYLYYLQNGKDMYTGDDLDIDRLSNYDIDHIIPQAFLKDNSIDNKVLVSSASNRGKSDDVPSLEVVKKRKTFWYQLLKSKLISQRKFDNLTKAERGGLSPEDKAGFIQRQLVETRQITKHVARLLDEKFNNKKDENNRAVRTVKIITLKSTLVSQFRKDFELYKVREINDFHHAHDAYLNAVVASALLKKYPKLEPEFVYGDYPKYNSFRERKSATEKVYFYSNIMNIFKKSISLADGRVIERPLIEVNEETGESVWNKESDLATVRRVLSYPQVNVVKKVEEQNHGLDRGKPKGLFNANLSSKPKPNSNENLVGAKEYLDPKKYGGYAGISNSFTVLVKGTIEKGAKKKITNVLEFQGISILDRINYRKDKLNFLLEKGYKDIELIIELPKYSLFELSDGSRRMLASILSTNNKRGEIHKGNQIFLSQKFVKLLYHAKRISNTINENHRKYVENHKKEFEELFYYILEFNENYVGAKKNGKLLNSAFQSWQNHSIDELCSSFIGPTGSERKGLFELTSRGSAADFEFLGVKIPRYRDYTPSSLLKDATLIHQSVTGLYETRIDLAKLGEG

SEQ ID NO: 326 - protein, 1374 aa, Fusobacterium nucleatum
MKKQKFSDYYLGFDIGTNSVGWCVTDLDYNVLRFNKKDMWGSRLFDEAKTAAERRVQRNSRRRLKRRKWRLNLLEEIFSDEIMKIDSNFFRRLKESSLWLEDKNSKEKFTLFNDDNYKDYDFYKQYPTIFHLRDELIKNPEKKDIRLIYLALHSIFKSRGHFLFEGQNLKEIKNFETLYNNLISFLEDNGINKSIDKDNIEKLEKIICDSGKGLKDKEKEFKGIFNSDKQLVAIFKLSVGSSVSLNDLFDTDEYKKEEVEKEKISFREQIYEDDKPIYYSILGEKIELLDIAKSFYDFMVLNNILSDSNYISEAKVKLYEEHKKDLKNLKYIIRKYNKENYDKLFKDKNENNYPAYIGLNKEKDKKEVVEKSRLKIDDLIKVIKGYLPKPERIEEKDKTIFNEILNKIELKTILPKQRISDNGTLPYQIHEVELEKILENQSKYYDFLNYEENGVSTKDKLLKTFKFRIPYYVGPLNSYHKDKGGNSWIVRKEEGKILPWNFEQKVDIEKSAEEFIKRMTNKCTYLNGEDVIPKDSFLYSEYIILNELNKVQVNDEFLNEENKRKIIDELFKENKKVSEKKFKEYLLVNQIANRTVELKGIKDSFNSNYVSYIKFKDIFGEKLNLDIYKEISEKSILWKCLYGDDKKIFEKKIKNEYGDILNKDEIKKINSFKFNTWGRLSEKLLTGIEFINLETGECYSSVMEALRRTNYNLMELLSSKFTLQESIDNENKEMNEVSYRDLIEESYVSPSLKRAILQTLKIYEEIKKITGRVPKKVFIEMARGGDESMKNKKIPARQEQLKKLYDSCGNDIANFSIDIKEMKNSLSSYDNNSLRQKKLYLYYLQFGKCMYTGREIDLDRLLQNNDTYDIDHIYPRSKVIKDDSFDNLVLVLKNENAEKSNEYPVKKEIQEKMKSFWRFLKEKNFISDEKYKRLTGKDDFELRGFMARQLVNVRQTTKEVGKILQQIEPEIKIVYSKAEIASSFREMFDFIKVRELNDTHHAKDAYLNIVAGNVYNTKFTEKPYRYLQEIKENYDVKKIYNYDIKNAWDKENSLEIVKKNMEKNTVNITRFIKEEKGELFNLNPIKKGETSNEIISIKPKLYDGKDNKLNEKYGYYTSLKAAYFIYVEHEKKNKKVKTFERITRIDSTLIKNEKNLIKYLVSQKKLLNPKIIKKIYKEQTLIIDSYPYTFTGVDSNKKVELKNKKQLYLEKKYEQILKNALKFVEDNQGETEENYKFIYLKKRNNNEKNETIDAVKERYNIEFNEMYDKFLEKLSSKDYKNYINNKLYTNFLNSKEKFKKLKLWEKSLILREFLKIFNKNTYGKYEIKDSQTKEKLFSFPEDTGRIRLGQSSLGNNKELLEESVTGLFVKKIKL

SEQ ID NO: 327 - protein, 1333 aa, Planococcus antarcticus
MKNYTIGLDIGVASVGWVCIDENYKILNYNNRHAFGVHEFESAESAAGRRLKRGMRRRYNRRKKRLQLLQSLFDSYITDSGFFSKTDSQHFWKNNNEFENRSLTEVLSSLRISSRKYPTIYHLRSDLIESNKKMDLRLVYLALHNLVKYRGHFLQEGNWSEAASAEGMDDQLLELVTRYAELENLSPLDLSESQWKAAETLLLNRNLTKTDQSKELTAMFGKEYEPFCKLVAGLGVSLHQLFPSSEQALAYKETKTKVQLSNENVEEVMELLLEEESALLEAVQPFYQQVVLYELLKGETYVAKAKVSAFKQYQKDMASLKNLLDKTFGEKVYRSYFISDKNSQREYQKSHKVEVLCKLDQFNKEAKFAETFYKDLKKLLEDKSKTSIGTTEKDEMLRIIKAIDSNQFLQKQKGIQNAAIPHQNSLYEAEKILRNQQAHYPFITTEWIEKVKQILAFRIPYYIGPLVKDTTQSPFSWVERKGDAPITPWNFDEQIDKAASAEAFISRMRKTCTYLKGQEVLPKSSLTYERFEVLNELNGIQLRTTGAESDFRHRLSYEMKCWIIDNVFKQYKTVSTKRLLQELKKSPYADELYDEHTGEIKEVFGTQKENAFATSLSGYISMKSILGAVVDDNPAMTEELIYWIAVFEDREILHLKIQEKYPSITDVQRQKLALVKLPGWGRFSRLLIDGLPLDEQGQSVLDHMEQYSSVFMEVLKNKGFGLEKKIQKMNQHQVDGTKKIRYEDIEELAGSPALKRGIWRSVKIVEELVSIFGEPANIVLEVAREDGEKKRTKSRKDQWEELTKTTLKNDPDLKSFIGEIKSQGDQRFNEQRFWLYVTQQGKCLYTGKALDIQNLSMYEVDHILPQNFVKDDSLDNLALVMPEANQRKNQVGQNKMPLEIIEANQQYAMRTLWERLHELKLISSGKLGRLKKPSFDEVDKDKFIARQLVETRQIIKHVRDLLDERFSKSDIHLVKAGIVSKFRRFSEIPKIRDYNNKHHAMDALFAAALIQSILGKYGKNFLAFDLSKKDRQKQWRSVKGSNKEFFLFKNFGNLRLQSPVTGEEVSGVEYMKHVYFELPWQTTKMTQTGDGMFYKESIFSPKVKQAKYVSPKTEKFVHDEVKNHSICLVEFTFMKKEKEVQETKFIDLKVIEHHQFLKEPESQLAKFLAEKETNSPIIHARIIRTIPKYQKIWIEHFPYYFISTRELHNARQFEISYELMEKVKQLSERSSVEELKIVFGLLIDQMNDNYPIYTKSSIQDRVQKFVDTQLYDFKSFEIGFEELKKAVAANAQRSDTFGSRISKKPKPEEVAIGYESITGLKYRKPRSVVGTKR

SEQ ID NO: 328 - protein, 1395 aa, Treponema denticola
MKKEIKDYFLGLDVGTGSVGWAVTDTDYKLLKANRKDLWGMRCFETAETAEVRRLHRGARRRIERRKKRIKLLQELFSQEIAKTDEGFFQRMKESPFYAEDKTILQENTLFNDKDFADKTYHKAYPTINHLIKAWIENKVKPDPRLLYLACHNIIKKRGHFLFEGDFDSENQFDTSIQALFEYLREDMEVDIDADSQKVKEILKDSSLKNSEKQSRLNKILGLKPSDKQKKAITNLISGNKINFADLYDNPDLKDAEKNSISFSKDDFDALSDDLASILGDSFELLLKAKAVYNCSVLSKVIGDEQYLSFAKVKIYEKHKTDLTKLKNVIKKHFPKDYKKVFGYNKNEKNNNNYSGYVGVCKTKSKKLIINNSVNQEDFYKFLKTILSAKSEIKEVNDILTEIETGTFLPKQISKSNAEIPYQLRKMELEKILSNAEKHFSFLKQKDEKGLSHSEKIIMLLTFKIPYYIGPINDNHKKFFPDRCWVVKKEKSPSGKTTPWNFFDHIDKEKTAEAFITSRTNFCTYLVGESVLPKSSLLYSEYTVLNEINNLQIIIDGKNICDIKLKQKIYEDLFKKYKKITQKQISTFIKHEGICNKTDEVIILGIDKECTSSLKSYIELKNIFGKQVDEISTKNMLEEIIRWATIYDEGEGKTILKTKIKAEYGKYCSDEQIKKILNLKFSGWGRLSRKFLETVTSEMPGFSEPVNIITAMRETQNNLMELLSSEFTFTENIKKINSGFEDAEKQFSYDGLVKPLFLSPSVKKMLWQTLKLVKEISHITQAPPKKIFIEMAKGAELEPARTKTRLKILQDLYNNCKNDADAFSSEIKDLSGKIENEDNLRLRSDKLYLYYTQLGKCMYCGKPIEIGHVFDTSNYDIDHIYPQSKIKDDSISNRVLVCSSCNKNKEDKYPLKSEIQSKQRGFWNFLQRNNFISLEKLNRLTRATPISDDETAKFIARQLVETRQATKVAAKVLEKMFPETKIVYSKAETVSMFRNKFDIVKCREINDFHHAHDAYLNIVVGNVYNTKFTNNPWNFIKEKRDNPKIADTYNYYKVFDYDVKRNNITAWEKGKTIITVKDMLKRNTPIYTRQAACKKGELFNQTIMKKGLGQHPLKKEGPFSNISKYGGYNKVSAAYYTLIEYEEKGNKIRSLETIPLYLVKDIQKDQDVLKSYLTDLLGKKEFKILVPKIKINSLLKINGFPCHITGKTNDSFLLRPAVQFCCSNNEVLYFKKIIRFSEIRSQREKIGKTISPYEDLSFRSYIKENLWKKTKNDEIGEKEFYDLLQKKNLEIYDMLLTKHKDTIYKKRPNSATIDILVKGKEKFKSLIIENQFEVILEILKLFSATRNVSDLQHIGGSKYSGVAKIGNKISSLDNCILIYQSITGIFEKRIDLLKV

SEQ ID NO: 329 - protein, 1327 aa, Solobacterium moorei
MEGQMKNNGNNLQQGNYYLGLDVGTSSVGWAVTDTDYNVLKFRGKSMWGARLFDEASTAEERRTHRGNRRRLARRKYRLLLLEQLFEKEIRKIDDNFFVRLHESNLWADDKSKPSKFLLFNDTNFTDKDYLKKYPTIYHLRSDLIHNSTEHDIRLVFLALHHLIKYRGHFIYDNSANGDVKTLDEAVSDFEEYLNENDIEFNIENKKEFINVLSDKHLTKKEKKISLKKLYGDITDSENINISVLIEMLSGSSISLSNLFKDIEFDGKQNLSLDSDIEETLNDVVDILGDNIDLLIHAKEVYDIAVLTSSLGKHKYLCDAKVELFEKNKKDLMILKKYIKKNHPEDYKKIFSSPTEKKNYAAYSQTNSKNVCSQEEFCLFIKPYIRDMVKSENEDEVRIAKEVEDKSFLTKLKGTNNSVVPYQIHERELNQILKNIVAYLPFMNDEQEDISVVDKIKLIFKFKIPYYVGPLNTKSTRSWVYRSDEKIYPWNFSNVIDLDKTAHEFMNRLIGRCTYTNDPVLPMDSLLYSKYNVLNEINPIKVNGKAIPVEVKQAIYTDLFENSKKKVTRKSIYIYLLKNGYIEKEDIVSGIDIEIKSKLKSHHDFTQIVQENKCTPEEIERIIKGILVYSDDKSMLRRWLKNNIKGLSENDVKYLAKLNYKEWGRLSKTLLTDIYTINPEDGEACSILDIMWNTNATLMEILSNEKYQFKQNIENYKAENYDEKQNLHEELDDMYISPAARRSIWQALRIVDEIVDIKKSAPKKIFIEMAREKKSAMKKKRTESRKDTLLELYKSCKSQADGFYDEELFEKLSNESNSRLRRDQLYLYYTQMGRSMYTGKRIDFDKLINDKNTYDIDHIYPRSKIKDDSITNRVLVEKDINGEKTDIYPISEDIRQKMQPFWKILKEKGLINEEKYKRLTRNYELTDEELSSFVARQLVETQQSTKALATLLKKEYPSAKIVYSKAGNVSEFRNRKDKELPKFREINDLHHAKDAYLNIVVGNVYDTKFTEKFFNNIRNENYSLKRVFDFSVPGAWDAKGSTFNTIKKYMAKNNPIIAFAPYEVKGELFDQQIVPKGKGQFPIKQGKDIEKYGGYNKLSSAFLFAVEYKGKKARERSLETVYIKDVELYLQDPIKYCESVLGLKEPQIIKPKILMGSLFSINNKKLVVTGRSGKQYVCHHIYQLSINDEDSQYLKNIAKYLQEEPDGNIERQNILNITSVNNIKLFDVLCTKFNSNTYEIILNSLKNDVNEGREKFSELDILEQCNILLQLLKAFKCNRESSNLEKLNNKKQAGVIVIPHLFTKCSVFKVIHQSITGLFEKEMDLLK

SEQ ID NO: 330 - protein, 1334 aa, Staphylococcus pseudintermedius
MGRKPYILSLDIGTGSVGYACMDKGFNVLKYHDKDALGVYLFDGALTAQERRQFRTSRRRKNRRIKRLGLLQELLAPLVQNPNFYQFQRQFAWKNDNMDFKNKSLSEVLSFLGYESKKYPTIYHLQEALLLKDEKFDPELIYMALYHLVKYRGHFLFDHLKIENLTNNDNMHDFVELIETYENLNNIKLNLDYEKTKVIYEILKDNEMTKNDRAKRVKNMEKKLEQFSIMLLGLKFNEGKLFNHADNAEELKGANQSHTFADNYEENLTPFLTVEQSEFIERANKIYLSLTLQDILKGKKSMAMSKVAAYDKFRNELKQVKDIVYKADSTRTQFKKIFVSSKKSLKQYDATPNDQTFSSLCLFDQYLIRPKKQYSLLIKELKKIIPQDSELYFEAENDTLLKVLNTTDNASIPMQINLYEAETILRNQQKYHAEITDEMIEKVLSLIQFRIPYYVGPLVNDHTASKFGWMERKSNESIKPWNFDEVVDRSKSATQFIRRMTNKCSYLINEDVLPKNSLLYQEMEVLNELNATQIRLQTDPKNRKYRMMPQIKLFAVEHIFKKYKTVSHSKFLEIMLNSNHRENFMNHGEKLSIFGTQDDKKFASKLSSYQDMTKIFGDIEGKRAQIEEIIQWITIFEDKKILVQKLKECYPELTSKQINQLKKLNYSGWGRLSEKLLTHAYQGHSIIELLRHSDENFMEILTNDVYGFQNFIKEENQVQSNKIQHQDIANLTTSPALKKGIWSTIKLVRELTSIFGEPEKIIMEFATEDQQKGKKQKSRKQLWDDNIKKNKLKSVDEYKYIIDVANKLNNEQLQQEKLWLYLSQNGKCMYSGQSIDLDALLSPNATKHYEVDHIFPRSFIKDDSIDNKVLVIKKMNQTKGDQVPLQFIQQPYERIAYWKSLNKAGLISDSKLHKLMKPEFTAMDKEGFIQRQLVETRQISVHVRDFLKEEYPNTKVIPMKAKMVSEFRKKFDIPKIRQMNDAHHAIDAYLNGVVYHGAQLAYPNVDLFDFNFKWEKVREKWKALGEFNTKQKSRELFFFKKLEKMEVSQGERLISKIKLDMNHFKINYSRKLANIPQQFYNQTAVSPKTAELKYESNKSNEVVYKGLTPYQTYVVAIKSVNKKGKEKMEYQMIDHYVFDFYKFQNGNEKELALYLAQRENKDEVLDAQIVYSLNKGDLLYINNHPCYFVSRKEVINAKQFELTVEQQLSLYNVMNNKETNVEKLLIEYDFIAEKVINEYHHYLNSKLKEKRVRTFFSESNQTHEDFIKALDELFKVVTASATRSDKIGSRKNSMTHRAFLGKGKDVKIAYTSISGLKTTKPKSLFKLAESRNEL

SEQ ID NO: 331 - protein, 1472 aa, Flavobacterium branchiophilum
MAKILGLDLGTNSIGWAVVERENIDFSLIDKGVRIFSEGVKSEKGIESSRAAERTGYRSARKIKYRRKLRKYETLKVLSLNRMCPLSIEEVEEWKKSGFKDYPLNPEFLKWLSTDEESNVNPYFFRDRASKHKVSLFELGRAFYHIAQRRGFLSNRLDQSAEGILEEHCPKIEAIVEDLISIDEISTNITDYFFETGILDSNEKNGYAKDLDEGDKKLVSLYKSLLAILKKNESDFENCKSEIIERLNKKDVLGKVKGKIKDISQAMLDGNYKTLGQYFYSLYSKEKIRNQYTSREEHYLSEFITICKVQGIDQINEEEKINEKKFDGLAKDLYKAIFFQRPLKSQKGLIGKCSFEKSKSRCAISHPDFEEYRMWTYLNTIKIGTQSDKKLRFLTQDEKLKLVPKFYRKNDFNFDVLAKELIEKGSSFGFYKSSKKNDFFYWFNYKPTDTVAACQVAASLKNAIGEDWKTKSFKYQTINSNKEQVSRTVDYKDLWHLLTVATSDVYLYEFAIDKLGLDEKNAKAFSKTKLKKDFASLSLSAINKILPYLKEGLLYSHAVFVANIENIVDENIWKDEKQRDYIKTQISEIIENYTLEKSRFEIINGLLKEYKSENEDGKRVYYSKEAEQSFENDLKKKLVLFYKSNEIENKEQQETIFNELLPIFIQQLKDYEFIKIQRLDQKVLIFLKGKNETGQIFCTEEKGTAEEKEKKIKNRLKKLYHPSDIEKFKKKIIKDEFGNEKIVLGSPLTPSIKNPMAMRALHQLRKVLNALILEGQIDEKTIIHIEMARELNDANKRKGIQDYQNDNKKFREDAIKEIKKLYFEDCKKEVEPTEDDILRYQLWMEQNRSEIYEEGKNISICDIIGSNPAYDIEHTIPRSRSQDNSQMNKTLCSQRFNREVKKQSMPIELNNHLEILPRIAHWKEEADNLTREIEIISRSIKAAATKEIKDKKIRRRHYLTLKRDYLQGKYDRFIWEEPKVGFKNSQIPDTGIITKYAQAYLKSYFKKVESVKGGMVAEFRKIWGIQESFIDENGMKHYKVKDRSKHTHHTIDAITIACMTKEKYDVLAHAWTLEDQQNKKEARSIIEASKPWKTFKEDLLKIEEEILVSHYTPDNVKKQAKKIVRVRGKKQFVAEVERDVNGKAVPKKAASGKTIYKLDGEGKKLPRLQQGDTIRGSLHQDSIYGAIKNPLNTDEIKYVIRKDLESIKGSDVESIVDEVVKEKIKEAIANKVLLLSSNAQQKNKLVGTVWMNEEKRIAINKVRIYANSVKNPLHIKEHSLLSKSKHVHKQKVYGQNDENYAMAIYELDGKRDFELINIFNLAKLIKQGQGFYPLHKKKEIKGKIVFVPIEKRNKRDVVLKRGQQVVFYDKEVENPKDISEIVDFKGRIYIIEGLSIQRIVRPSGKVDEYGVIMLRYFKEARKADDIKQDNFKPDGVFKLGENKPTRKMNHQFTAFVEGIDFKVLPSGKFEKI

SEQ ID NO: 332 - protein, 1688 aa, Ignavibacterium album
MEFKKVLGLDIGTNSIGCALLSLPKSIQDYGKGGRLEWLTSRVIPLDADYMKAFIDGKNGLPQVITPAGKRRQKRGSRRLKHRYKLRRSRLIRVFKTLNWLPEDFPLDNPKRIKETISTEGKFSFRISDYVPISDESYREFYREFGYPENEIEQVIEEINFRRKTKGKNKNPMIKLLPEDWVVYYLRKKALIKPTTKEELIRIIYLFNQRRGFKSSRKDLTETAILDYDEFAKRLAEKEKYSAENYETKFVSITKVKEVVELKTDGRKGKKRFKVILEDSRIEPYEIERKEKPDWEGKEYTFLVTQKLEKGKFKQNKPDLPKEEDWALCTTALDNRMGSKHPGEFFFDELLKAFKEKRGYKIRQYPVNRWRYKKELEFIWTKQCQLNPELNNLNINKEILRKLATVLYPSQSKFFGPKIKEFENSDVLHIISEDIIYYQRDLKSQKSLISECRYEKRKGIDGEIYGLKCIPKSSPLYQEFRIWQDIHNIKVIRKESEVNGKKKINIDETQLYINENIKEKLFELFNSKDSLSEKDILELISLNIINSGIKISKKEEETTHRINLFANRKELKGNETKSRYRKVFKKLGFDGEYILNHPSKLNRLWHSDYSNDYADKEKTEKSILSSLGWKNRNGKWEKSKNYDVFNLPLEVAKAIANLPPLKKEYGSYSALAIRKMLVVMRDGKYWQHPDQIAKDQENTSLMLFDKNLIQLTNNQRKVLNKYLLTLAEVQKRSTLIKQKLNEIEHNPYKLELVSDQDLEKQVLKSFLEKKNESDYLKGLKTYQAGYLIYGKHSEKDVPIVNSPDELGEYIRKKLPNNSLRNPIVEQVIRETIFIVRDVWKSFGIIDEIHIELGRELKNNSEERKKTSESQEKNFQEKERARKLLKELLNSSNFEHYDENGNKIFSSFTVNPNPDSPLDIEKFRIWKNQSGLTDEELNKKLKDEKIPTEIEVKKYILWLTQKCRSPYTGKIIPLSKLFDSNVYEIEHIIPRSKMKNDSTNNLVICELGVNKAKGDRLAANFISESNGKCKFGEVEYTLLKYGDYLQYCKDTFKYQKAKYKNLLATEPPEDFIERQINDTRYIGRKLAELLTPVVKDSKNIIFTIGSITSELKITWGLNGVWKDILRPRFKRLESIINKKLIFQDEDDPNKYHFDLSINPQLDKEGLKRLDHRHHALDATIIAATTREHVRYLNSLNAADNDEEKREYFLSLCNHKIRDFKLPWENFTSEVKSKLLSCVVSYKESKPILSDPFNKYLKWEYKNGKWQKVFAIQIKNDRWKAVRRSMFKEPIGTVWIKKIKEVSLKEAIKIQAIWEEVKNDPVRKKKEKYIYDDYAQKVIAKIVQELGLSSSMRKQDDEKLNKFINEAKVSAGVNKNLNTTNKTIYNLEGRFYEKIKVAEYVLYKAKRMPLNKKEYIEKLSLQKMFNDLPNFILEKSILDNYPEILKELESDNKYIIEPHKKNNPVNRLLLEHILEYHNNPKEAFSTEGLEKLNKKAINKIGKPIKYITRLDGDINEEEIFRGAVFETDKGSNVYFVMYENNQTKDREFLKPNPSISVLKAIEHKNKIDFFAPNRLGFSRIILSPGDLVYVPTNDQYVLIKDNSSNETIINWDDNEFISNRIYQVKKFTGNSCYFLKNDIASLILSYSASNGVGEFGSQNISEYSVDDPPIRIKDVCIKIRVDRLGNVRPL

SEQ ID NO: 333 - protein, 1415 aa, Bergeyella zoohelcum
MKHILGLDLGTNSIGWALIERNIEEKYGKIIGMGSRIVPMGAELSKFEQGQAQTKNADRRTNRGARRLNKRYKQRRNKLIYILQKLDMLPSQIKLKEDFSDPNKIDKITILPISKKQEQLTAFDLVSLRVKALTEKVGLEDLGKIIYKYNQLRGYAGGSLEPEKEDIFDEEQSKDKKNKSFIAFSKIVFLGEPQEEIFKNKKLNRRAIIVETEEGNFEGSTFLENIKVGDSLELLINISASKSGDTITIKLPNKTNWRKKMENIENQLKEKSKEMGREFYISEFLLELLKENRWAKIRNNTILRARYESEFEAIWNEQVKHYPFLENLDKKTLIEIVSFIFPGEKESQKKYRELGLEKGLKYIIKNQVVFYQRELKDQSHLISDCRYEPNEKAIAKSHPVFQEYKVWEQINKLIVNTKIEAGTNRKGEKKYKYIDRPIPTALKEWIFEELQNKKEITFSAIFKKLKAEFDLREGIDFLNGMSPKDKLKGNETKLQLQKSLGELWDVLGLDSINRQIELWNILYNEKGNEYDLTSDRTSKVLEFINKYGNNIVDDNAEETAIRISKIKFARAYSSLSLKAVERILPLVRAGKYFNNDFSQQLQSKILKLLNENVEDPFAKAAQTYLDNNQSVLSEGGVGNSIATILVYDKHTAKEYSHDELYKSYKEINLLKQGDLRNPLVEQIINEALVLIRDIWKNYGIKPNEIRVELARDLKNSAKERATIHKRNKDNQTINNKIKETLVKNKKELSLANIEKVKLWEAQRHLSPYTGQPIPLSDLFDKEKYDVDHIIPISRYFDDSFTNKVISEKSVNQEKANRTAMEYFEVGSLKYSIFTKEQFIAHVNEYFSGVKRKNLLATSIPEDPVQRQIKDTQYIAIRVKEELNKIVGNENVKTTTGSITDYLRNHWGLTDKFKLLLKERYEALLESEKFLEAEYDNYKKDFDSRKKEYEEKEVLFEEQELTREEFIKEYKENYIRYKKNKLIIKGWSKRIDHRHHAIDALIVACTEPAHIKRLNDLNKVLQDWLVEHKSEFMPNFEGSNSELLEEILSLPENERTEIFTQIEKFRAIEMPWKGFPEQVEQKLKEIIISHKPKDKLLLQYNKAGDRQIKLRGQLHEGTLYGISQGKEAYRIPLTKFGGSKFATEKNIQKIVSPFLSGFIANHLKEYNNKKEEAFSAEGIMDLNNKLAQYRNEKGELKPHTPISTVKIYYKDPSKNKKKKDEEDLSLQKLDREKAFNEKLYVKTGDNYLFAVLEGEIKTKKTSQIKRLYDIISFFDATNFLKEEFRNAPDKKTFDKDLLFRQYFEERNKAKLLFTLKQGDFVYLPNENEEVILDKESPLYNQYWGDLKERGKNIYVVQKFSKKQIYFIKHTIADIIKKDVEFGSQNCYETVEGRSIKENCFKLEIDRLGNIVKVIKR

SEQ ID NO: 334 - protein, 1166 aa, Nitrobacter hamburgensis
MHVEIDFPHFSRGDSHLAMNKNEILRGSSVLYRLGLDLGSNSLGWFVTHLEKRGDRHEPVALGPGGVRIFPDGRDPQSGTSNAVDRRMARGARKRRDRFVERRKELIAALIKYNLLPDDARERRALEVLDPYALRKTALTDTLPAHHVGRALFHLNQRRGFQSNRKTDSKQSEDGAIKQAASRLATDKGNETLGVFFADMHLRKSYEDRQTAIRAELVRLGKDHLTGNARKKIWAKVRKRLFGDEVLPRADAPHGVRARATITGTKASYDYYPTRDMLRDEFNAIWAGQSAHHATITDEARTEIEHIIFYQRPLKPAIVGKCTLDPATRPFKEDPEGYRAPWSHPLAQRFRILSEARNLEIRDTGKGSRRLTKEQSDLVVAALLANREVKFDKLRTLLKLPAEARFNLESDRRAALDGDQTAARLSDKKGFNKAWRGFPPERQIAIVARLEETEDENELIAWLEKECALDGAAAARVANTTLPDGHCRLGLRAIKKIVPIMQDGLDEDGVAGAGYHIAAKRAGYDHAKLPTGEQLGRLPYYGQWLQDAVVGSGDARDQKEKQYGQFPNPTVHIGLGQLRRVVNDLIDKYGPPTEISIEFTRALKLSEQQKAERQREQRRNQDKNKARAEELAKFGRPANPRNLLKMRLWEELAHDPLDRKCVYTGEQISIERLLSDEVDIDHILPVAMTLDDSPANKIICMRYANRHKRKQTPSEAFGSSPTLQGHRYNWDDIAARATGLPRNKRWRFDANAREEFDKRGGFLARQLNETGWLARLAKQYLGAVTDPNQIWVVPGRLTSMLRGKWGLNGLLPSDNYAGVQDKAEEFLASTDDMEFSGVKNRADHRHHAIDGLVTALTDRSLLWKMANAYDEEHEKFVIEPPWPTMRDDLKAALEKMVVSHKPDHGIEGKLHEDSAYGFVKPLDATGLKEEEAGNLVYRKAIESLNENEVDRIRDIQLRTIVRDHVNVEKTKGVALADALRQLQAPSDDYPQFKHGLRHVRILKKEKGDYLVPIANRASGVAYKAYSAGENFCVEVFETAGGKWDGEAVRRFDANKKNAGPKIAHAPQWRDANEGAKLVMRIHKGDLIRLDHEGRARIMVVHRLDAAAGRFKLADHNETGNLDKRHATNNDIDPFRWLMASYNTLKKLAAVPVRVDELGRVWRVMPN

SEQ ID NO: 335 - protein, 1498 aa, Odoribacter laneus
METTLGIDLGTNSIGLALVDQEEHQILYSGVRIFPEGINKDTIGLGEKEESRNATRRAKRQMRRQYFRKKLRKAKLLELLIAYDMCPLKPEDVRRWKNWDKQQKSTVRQFPDTPAFREWLKQNPYELRKQAVTEDVTRPELGRILYQMIQRRGFLSSRKGKEEGKIFTGKDRMVGIDETRKNLQKQTLGAYLYDIAPKNGEKYRFRTERVRARYTLRDMYIREFEIIWQRQAGHLGLAHEQATRKKNIFLEGSATNVRNSKLITHLQAKYGRGHVLIEDTRITVTFQLPLKEVLGGKIEIEEEQLKFKSNESVLFWQRPLRSQKSLLSKCVFEGRNFYDPVHQKWIIAGPTPAPLSHPEFEEFRAYQFINNIIYGKNEHLTAIQREAVFELMCTESKDFNFEKIPKHLKLFEKFNFDDTTKVPACTTISQLRKLFPHPVWEEKREEIWHCFYFYDDNTLLFEKLQKDYALQTNDLEKIKKIRLSESYGNVSLKAIRRINPYLKKGYAYSTAVLLGGIRNSFGKRFEYFKEYEPEIEKAVCRILKEKNAEGEVIRKIKDYLVHNRFGFAKNDRAFQKLYHHSQAITTQAQKERLPETGNLRNPIVQQGLNELRRTVNKLLATCREKYGPSFKFDHIHVEMGRELRSSKTEREKQSRQIRENEKKNEAAKVKLAEYGLKAYRDNIQKYLLYKEIEEKGGTVCCPYTGKTLNISHTLGSDNSVQIEHIIPYSISLDDSLANKTLCDATFNREKGELTPYDFYQKDPSPEKWGASSWEEIEDRAFRLLPYAKAQRFIRRKPQESNEFISRQLNDTRYISKKAVEYLSAICSDVKAFPGQLTAELRHLWGLNNILQSAPDITFPLPVSATENHREYYVITNEQNEVIRLFPKQGETPRTEKGELLLTGEVERKVFRCKGMQEFQTDVSDGKYWRRIKLSSSVTWSPLFAPKPISADGQIVLKGRIEKGVFVCNQLKQKLKTGLPDGSYWISLPVISQTFKEGESVNNSKLTSQQVQLFGRVREGIFRCHNYQCPASGADGNFWCTLDTDTAQPAFTPIKNAPPGVGGGQIILTGDVDDKGIFHADDDLHYELPASLPKGKYYGIFTVESCDPTLIPIELSAPKTSKGENLIEGNIWVDEHTGEVRFDPKKNREDQRHHAIDAIVIALSSQSLFQRLSTYNARRENKKRGLDSTEHFPSPWPGFAQDVRQSVVPLLVSYKQNPKTLCKISKTLYKDGKKIHSCGNAVRGQLHKETVYGQRTAPGATEKSYHIRKDIRELKTSKHIGKVVDITIRQMLLKHLQENYHIDITQEFNIPSNAFFKEGVYRIFLPNKHGEPVPIKKIRMKEELGNAERLKDNINQYVNPRNNHHVMIYQDADGNLKEEIVSFWSVIERQNQGQPIYQLPREGRNIVSILQINDTFLIGLKEEEPEVYRNDLSTLSKHLYRVQKLSGMYYTFRHHLASTLNNEREEFRIQSLEAWKRANPVKVQIDEIGRITFLNGPLC

SEQ ID NO: 336 - protein, 1372 aa, Legionella pneumophila
MESSQILSPIGIDLGGKFTGVCLSHLEAFAELPNHANTKYSVILIDHNNFQLSQAQRRATRHRVRNKKRNQFVKRVALQLFQHILSRDLNAKEETALCHYLNNRGYTYVDTDLDEYIKDETTINLLKELLPSESEHNFIDWFLQKMQSSEFRKILVSKVEEKKDDKELKNAVKNIKNFITGFEKNSVEGHRHRKVYFENIKSDITKDNQLDSIKKKIPSVCLSNLLGHLSNLQWKNLHRYLAKNPKQFDEQTFGNEFLRMLKNFRHLKGSQESLAVRNLIQQLEQSQDYISILEKTPPEITIPPYEARTNTGMEKDQSLLLNPEKLNNLYPNWRNLIPGIIDAHPFLEKDLEHTKLRDRKRIISPSKQDEKRDSYILQRYLDLNKKIDKFKIKKQLSFLGQGKQLPANLIETQKEMETHFNSSLVSVLIQIASAYNKEREDAAQGIWFDNAFSLCELSNINPPRKQKILPLLVGAILSEDFINNKDKWAKFKIFWNTHKIGRTSLKSKCKEIEEARKNSGNAFKIDYEEALNHPEHSNNKALIKIIQTIPDIIQAIQSHLGHNDSQALIYHNPFSLSQLYTILETKRDGFHKNCVAVTCENYWRSQKTEIDPEISYASRLPADSVRPFDGVLARMMQRLAYEIAMAKWEQIKHIPDNSSLLIPIYLEQNRFEFEESFKKIKGSSSDKTLEQAIEKQNIQWEEKFQRIINASMNICPYKGASIGGQGEIDHIYPRSLSKKHFGVIFNSEVNLIYCSSQGNREKKEEHYLLEHLSPLYLKHQFGTDNVSDIKNFISQNVANIKKYISFHLLTPEQQKAARHALFLDYDDEAFKTITKFLMSQQKARVNGTQKFLGKQIMEFLSTLADSKQLQLEFSIKQITAEEVHDHRELLSKQEPKLVKSRQQSFPSHAIDATLTMSIGLKEFPQFSQELDNSWFINHLMPDEVHLNPVRSKEKYNKPNISSTPLFKDSLYAERFIPVWVKGETFAIGFSEKDLFEIKPSNKEKLFTLLKTYSTKNPGESLQELQAKSKAKWLYFPINKTLALEFLHHYFHKEIVTPDDTTVCHFINSLRYYTKKESITVKILKEPMPVLSVKFESSKKNVLGSFKHTIALPATKDWERLFNHPNFLALKANPAPNPKEFNEFIRKYFLSDNNPNSDIPNNGHNIKPQKHKAVRKVFSLPVIPGNAGTMMRIRRKDNKGQPLYQLQTIDDTPSMGIQINEDRLVKQEVLMDAYKTRNLSTIDGINNSEGQAYATFDNWLTLPVSTFKPEIIKLEMKPHSKTRRYIRITQSLADFIKTIDEALMIKPSDSIDDPLNMPNEIVCKNKLFGNELKPRDGKMKIVSTGKIVTYEFESDSTPQWIQTLYVTQLKKQP

SEQ ID NO: 337 - protein, 1517 aa, Bacteroides sp.
MKKIVGLDLGTNSIGWALINAYINKEHLYGIEACGSRIIPMDAAILGNFDKGNSISQTADRTSYRGIRRLRERHLLRRERLHRILDLLGFLPKHYSDSLNRYGKFLNDIECKLPWVKDETGSYKFIFQESFKEMLANFTEHHPILIANNKKVPYDWTIYYLRKKALTQKISKEELAWILLNFNQKRGYYQLRGEEEETPNKLVEYYSLKVEKVEDSGERKGKDTWYNVHLENGMIYRRTSNIPLDWEGKTKEFIVTTDLEADGSPKKDKEGNIKRSFRAPKDDDWTLIKKKTEADIDKIKMTVGAYIYDTLLQKPDQKIRGKLVRTIERKYYKNELYQILKTQSEFHEELRDKQLYIACLNELYPNNEPRRNSISTRDFCHLFIEDIIFYQRPLKSKKSLIDNCPYEENRYIDKESGEIKHASIKCIAKSHPLYQEFRLWQFIVNLRIYRKETDVDVTQELLPTEADYVTLFEWLNEKKEIDQKAFFKYPPFGFKKTTSNYRWNYVEDKPYPCNETHAQIIARLGKAHIPKAFLSKEKEETLWHILYSIEDKQEIEKALHSFANKNNLSEEFIEQFKNFPPFKKEYGSYSAKAIKKLLPLMRMGKYWSIENIDNGTRIRINKIIDGEYDENIRERVRQKAINLTDITHFRALPLWLACYLVYDRHSEVKDIVKWKTPKDIDLYLKSFKQHSLRNPIVEQVITETLRTVRDIWQQVGHIDEIHIELGREMKNPADKRARMSQQMIKNENTNLRIKALLTEFLNPEFGIENVRPYSPSQQDLLRIYEEGVLNSILELPEDIGIILGKFNQTDTLKRPTRSEILRYKLWLEQKYRSPYTGEMIPLSKLFTPAYEIEHIIPQSRYFDDSLSNKVICESEINKLKDRSLGYEFIKNHHGEKVELAFDKPVEVLSVEAYEKLVHESYSHNRSKMKKLLMEDIPDQFIERQLNDSRYISKVVKSLLSNIVREENEQEAISKNVIPCTGGITDRLKKDWGINDVWNKIVLPRFIRLNELTESTRFTSINTNNTMIPSMPLELQKGFNKKRIDHRHHAMDAIIIACANRNIVNYLNNVSASKNTKITRRDLQTLLCHKDKTDNNGNYKWVIDKPWETFTQDTLTALQKITVSFKQNLRVINKTTNHYQHYENGKKIVSNQSKGDSWAIRKSMHKETVHGEVNLRMIKTVSFNEALKKPQAIVEMDLKKKILAMLELGYDTKRIKNYFEENKDTWQDINPSKIKVYYFTKETKDRYFAVRKPIDTSFDKKKIKESITDTGIQQIMLRHLETKDNDPTLAFSPDGIDEMNRNILILNKGKKHQPIYKVRVYEKAEKFTVGQKGNKRTKFVEAAKGTNLFFAIYETEEIDKDTKKVIRKRSYSTIPLNVVIERQKQGLSSAPEDENGNLPKYILSPNDLVYVPTQEEINKGEVVMPIDRDRIYKMVDSSGITANFIPASTANLIFALPKATAEIYCNGENCIQNEYGIGSPQSKNQKAITGEMVKEICFPIKVDRLGNIIQVGSCILTN

SEQ ID NO: 338 - protein, 1101 aa, Akkermansia muciniphila
MSRSLTFSFDIGYASIGWAVIASASHDDADPSVCGCGTVLFPKDDCQAFKRREYRRLRRNIRSRRVRIERIGRLLVQAQIITPEMKETSGHPAPFYLASEALKGHRTLAPIELWHVLRWYAHNRGYDNNASWSNSLSEDGGNGEDTERVKHAQDLMDKHGTATMAETICRELKLEEGKADAPMEVSTPAYKNLNTAFPRLIVEKEVRRILELSAPLIPGLTAEIIELIAQHHPLTTEQRGVLLQHGIKLARRYRGSLLFGQLIPRFDNRIISRCPVTWAQVYEAELKKGNSEQSARERAEKLSKVPTANCPEFYEYRMARILCNIRADGEPLSAEIRRELMNQARQEGKLTKASLEKAISSRLGKETETNVSNYFTLHPDSEEALYLNPAVEVLQRSGIGQILSPSVYRIAANRLRRGKSVTPNYLLNLLKSRGESGEALEKKIEKESKKKEADYADTPLKPKYATGRAPYARTVLKKVVEEILDGEDPTRPARGEAHPDGELKAHDGCLYCLLDTDSSVNQHQKERRLDTMTNNHLVRHRMLILDRLLKDLIQDFADGQKDRISRVCVEVGKELTTFSAMDSKKIQRELTLRQKSHTDAVNRLKRKLPGKALSANLIRKCRIAMDMNWTCPFTGATYGDHELENLELEHIVPHSFRQSNALSSLVLTWPGVNRMKGQRTGYDFVEQEQENPVPDKPNLHICSLNNYRELVEKLDDKKGHEDDRRRKKKRKALLMVRGLSHKHQSQNHEAMKEIGMTEGMMTQSSHLMKLACKSIKTSLPDAHIDMIPGAVTAEVRKAWDVFGVFKELCPEAADPDSGKILKENLRSLTHLHHALDACVLGLIPYIIPAHHNGLLRRVLAMRRIPEKLIPQVRPVANQRHYVLNDDGRMMLRDLSASLKENIREQLMEQRVIQHVPADMGGALLKETMQRVLSVDGSGEDAMVSLSKKKDGKKEKNQVKASKLVGVFPEGPSKLKALKAAIEIDGNYGVALDPKPVVIRHIKVFKRIMALKEQNGGKPVRILKKGMLIHLTSSKDPKHAGVWRIESIQDSKGGVKLDLQRAHCAVPKNKTHECNWREVDLISLLKKYQMKRYPTSYTGTPR

SEQ ID NO: 339 - protein, 1424 aa, Prevotella sp.
MTQKVLGLDLGTNSIGSAVRNLDLSDDLQWQLEFFSSDIFRSSVNKESNGREYSLAAQRSAHRRSRGLNEVRRRRLWATLNLLIKHGFCPMSSESLMRWCTYDKRKGLFREYPIDDKDFNAWILLDFNGDGRPDYSSPYQLRRELVTRQFDFEQPIERYKLGRALYHIAQHRGFKSSKGETLSQQETNSKPSSTDEIPDVAGAMKASEEKLSKGLSTYMKEHNLLTVGAAFAQLEDEGVRVRNNNDYRAIRSQFQHEIETIFKFQQGLSVESELYERLISEKKNVGTIFYKRPLRSQRGNVGKCTLERSKPRCAIGHPLFEKFRAWTLINNIKVRMSVDTLDEQLPMKLRLDLYNECFLAFVRTEFKFEDIRKYLEKRLGIHFSYNDKTINYKDSTSVAGCPITARFRKMLGEEWESFRVEGQKERQAHSKNNISFHRVSYSIEDIWHFCYDAEEPEAVLAFAQETLRLERKKAEELVRIWSAMPQGYAMLSQKAIRNINKILMLGLKYSDAVILAKVPELVDVSDEELLSIAKDYYLVEAQVNYDKRINSIVNGLIAKYKSVSEEYRFADHNYEYLLDESDEKDIIRQIENSLGARRWSLMDANEQTDILQKVRDRYQDFFRSHERKFVESPKLGESFENYLTKKFPMVEREQWKKLYHPSQITIYRPVSVGKDRSVLRLGNPDIGAIKNPTVLRVLNTLRRRVNQLLDDGVISPDETRVVVETARELNDANRKWALDTYNRIRHDENEKIKKILEEFYPKRDGISTDDIDKARYVIDQREVDYFTGSKTYNKDIKKYKFWLEQGGQCMYTGRTINLSNLFDPNAFDIEHTIPESLSFDSSDMNLTLCDAHYNRFIKKNHIPTDMPNYDKAITIDGKEYPAITSQLQRWVERVERLNRNVEYWKGQARRAQNKDRKDQCMREMHLWKMELEYWKKKLERFTVTEVTDGFKNSQLVDTRVITRHAVLYLKSIFPHVDVQRGDVTAKFRKILGIQSVDEKKDRSLHSHHAIDATTLTIIPVSAKRDRMLELFAKIEEINKMLSFSGSEDRTGLIQELEGLKNKLQMEVKVCRIGHNVSEIGTFINDNIIVNHHIKNQALTPVRRRLRKKGYIVGGVDNPRWQTGDALRGEIHKASYYGAITQFAKDDEGKVLMKEGRPQVNPTIKFVIRRELKYKKSAADSGFASWDDLGKAIVDKELFALMKGQFPAETSFKDACEQGIYMIKKGKNGMPDIKLHHIRHVRCEAPQSGLKIKEQTYKSEKEYKRYFYAAVGDLYAMCCYTNGKIREFRIYSLYDVSCHRKSDIEDIPEFITDKKGNRLMLDYKLRTGDMILLYKDNPAELYDLDNVNLSRRLYKINRFESQSNLVLMTHHLSTSKERGRSLGKTVDYQNLPESIRSSVKSLNFLIMGENRDFVIKNGKIIFNHR

SEQ ID NO: 340 - protein, 1409 aa, Wolinella succinogenes
MLVSPISVDLGGKNTGFFSFTDSLDNSQSGTVIYDESFVLSQVGRRSKRHSKRNNLRNKLVKRLFLLILQEHHGLSIDVLPDEIRGLFNKRGYTYAGFELDEKKKDALESDTLKEFLSEKLQSIDRDSDVEDFLNQIASNAESFKDYKKGFEAVFASATHSPNKKLELKDELKSEYGENAKELLAGLRVTKEILDEFDKQENQGNLPRAKYFEELGEYIATNEKVKSFFDSNSLKLTDMTKLIGNISNYQLKELRRYFNDKEMEKGDIWIPNKLHKITERFVRSWHPKNDADRQRRAELMKDLKSKEIMELLTTTEPVMTIPPYDDMNNRGAVKCQTLRLNEEYLDKHLPNWRDIAKRLNHGKFNDDLADSTVKGYSEDSTLLHRLLDTSKEIDIYELRGKKPNELLVKTLGQSDANRLYGFAQNYYELIRQKVRAGIWVPVKNKDDSLNLEDNSNMLKRCNHNPPHKKNQIHNLVAGILGVKLDEAKFAEFEKELWSAKVGNKKLSAYCKNIEELRKTHGNTFKIDIEELRKKDPAELSKEEKAKLRLTDDVILNEWSQKIANFFDIDDKHRQRFNNLFSMAQLHTVIDTPRSGFSSTCKRCTAENRFRSETAFYNDETGEFHKKATATCQRLPADTQRPFSGKIERYIDKLGYELAKIKAKELEGMEAKEIKVPIILEQNAFEYEESLRKSKTGSNDRVINSKKDRDGKKLAKAKENAEDRLKDKDKRIKAFSSGICPYCGDTIGDDGEIDHILPRSHTLKIYGTVFNPEGNLIYVHQKCNQAKADSIYKLSDIKAGVSAQWIEEQVANIKGYKTFSVLSAEQQKAFRYALFLQNDNEAYKKVVDWLRTDQSARVNGTQKYLAKKIQEKLTKMLPNKHLSFEFILADATEVSELRRQYARQNPLLAKAEKQAPSSHAIDAVMAFVARYQKVFKDGTPPNADEVAKLAMLDSWNPASNEPLTKGLSTNQKIEKMIKSGDYGQKNMREVFGKSIFGENAIGERYKPIVVQEGGYYIGYPATVKKGYELKNCKVVTSKNDIAKLEKIIKNQDLISLKENQYIKIFSINKQTISELSNRYFNMNYKNLVERDKEIVGLLEFIVENCRYYTKKVDVKFAPKYIHETKYPFYDDWRRFDEAWRYLQENQNKTSSKDRFVIDKSSLNEYYQPDKNEYKLDVDTQPIWDDFCRWYFLDRYKTANDKKSIRIKARKTFSLLAESGVQGKVFRAKRKIPTGYAYQALPMDNNVIAGDYANILLEANSKTLSLVPKSGISIEKQLDKKLDVIKKTDVRGLAIDNNSFFNADFDTHGIRLIVENTSVKVGNFPISAIDKSAKRMIFRALFEKEKGKRKKKTTISFKESGPVQDYLKVFLKKIVKIQLRTDGSISNIVVRKNAADFTLSFRSEHIQKLLK

SEQ ID NO: 341 - protein, 1146 aa, Alicyclobacillus hesperidum
MAYRLGLDIGITSVGWAVVALEKDESGLKPVRIQDLGVRIFDKAEDSKTGASLALPRREARSARRRTRRRRHRLWRVKRLLEQHGILSMEQIEALYAQRTSSPDVYALRVAGLDRCLIAEEIARVLIHIAHRRGFQSNRKSEIKDSDAGKLLKAVQENENLMQSKGYRTVAEMLVSEATKTDAEGKLVHGKKHGYVSNVRNKAGEYRHTVSRQAIVDEVRKIFAAQRALGNDVMSEELEDSYLKILCSQRNFDDGPGGDSPYGHGSVSPDGVRQSIYERMVGSCTFETGEKRAPRSSYSFERFQLLTKVVNLRIYRQQEDGGRYPCELTQTERARVIDCAYEQTKITYGKLRKLLDMKDTESFAGLTYGLNRSRNKTEDTVFVEMKFYHEVRKALQRAGVFIQDLSIETLDQIGWILSVWKSDDNRRKKLSTLGLSDNVIEELLPLNGSKFGHLSLKAIRKILPFLEDGYSYDVACELAGYQFQGKTEYVKQRLLPPLGEGEVTNPVVRRALSQAIKVVNAVIRKHGSPESIHIELARELSKNLDERRKIEKAQKENQKNNEQIKDEIREILGSAHVTGRDIVKYKLFKQQQEFCMYSGEKLDVTRLFEPGYAEVDHIIPYGISFDDSYDNKVLVKTEQNRQKGNRTPLEYLRDKPEQKAKFIALVESIPLSQKKKNHLLMDKRAIDLEQEGFRERNLSDTRYITRALMNHIQAWLLFDETASTRSKRVVCVNGAVTAYMRARWGLTKDRDAGDKHHAADAVVVACIGDSLIQRVTKYDKFKRNALADRNRYVQQVSKSEGITQYVDKETGEVFTWESFDERKFLPNEPLEPWPFFRDELLARLSDDPSKNIRAIGLLTYSETEQIDPIFVSRMPTRKVTGAAHKETIRSPRIVKVDDNKGTEIQVVVSKVALTELKLTKDGEIKDYFRPEDDPRLYNTLRERLVQFGGDAKAAFKEPVYKISKDGSVRTPVRKVKIQEKLTLGVPVHGGRGIAENGGMVRIDVFAKGGKYYFVPIYVADVLKRELPNRLATAHKPYSEWRVVDDSYQFKFSLYPNDAVMIKPSREVDITYKDRKEPVGCRIMYFVSANIASASISLRTHDNSGELEGLGIQGLEVFEKYVVGPLGDTHPVYKERRMPFRVERKMN

SEQ ID NO: 342 - protein, 1442 aa, Caenispirillum salinarum
MPVLSPLSPNAAQGRRRWSLALDIGEGSIGWAVAEVDAEGRVLQLTGTGVTLFPSAWSNENGTYVAHGAADRAVRGQQQRHDSRRRRLAGLARLCAPVLERSPEDLKDLTRTPPKADPRAIFFLRADAARRPLDGPELFRVLHHMAAHRGIRLAELQEVDPPPESDADDAAPAATEDEDGTRRAAADERAFRRLMAEHMHRHGTQPTCGEIMAGRLRETPAGAQPVTRARDGLRVGGGVAVPTRALIEQEFDAIRAIQAPRHPDLPWDSLRRLVLDQAPIAVPPATPCLFLEELRRRGETFQGRTITREAIDRGLTVDPLIQALRIRETVGNLRLHERITEPDGRQRYVPRAMPELGLSHGELTAPERDTLVRALMHDPDGLAAKDGRIPYTRLRKLIGYDNSPVCFAQERDTSGGGITVNPTDPLMARWIDGWVDLPLKARSLYVRDVVARGADSAALARLLAEGAHGVPPVAAAAVPAATAAILESDIMQPGRYSVCPWAAEAILDAWANAPTEGFYDVTRGLFGFAPGEIVLEDLRRARGALLAHLPRTMAAARTPNRAAQQRGPLPAYESVIPSQLITSLRRAHKGRAADWSAADPEERNPFLRTWTGNAATDHILNQVRKTANEVITKYGNRRGWDPLPSRITVELAREAKHGVIRRNEIAKENRENEGRRKKESAALDTFCQDNTVSWQAGGLPKERAALRLRLAQRQEFFCPYCAERPKLRATDLFSPAETEIDHVIERRMGGDGPDNLVLAHKDCNNAKGKKTPHEHAGDLLDSPALAALWQGWRKENADRLKGKGHKARTPREDKDFMDRVGWRFEEDARAKAEENQERRGRRMLHDTARATRLARLYLAAAVMPEDPAEIGAPPVETPPSPEDPTGYTAIYRTISRVQPVNGSVTHMLRQRLLQRDKNRDYQTHHAEDACLLLLAGPAVVQAFNTEAAQHGADAPDDRPVDLMPTSDAYHQQRRARALGRVPLATVDAALADIVMPESDRQDPETGRVHWRLTRAGRGLKRRIDDLTRNCVILSRPRRPSETGTPGALHNATHYGRREITVDGRTDTVVTQRMNARDLVALLDNAKIVPAARLDAAAPGDTILKEICTEIADRHDRVVDPEGTHARRWISARLAALVPAHAEAVARDIAELADLDALADADRTPEQEARRSALRQSPYLGRAISAKKADGRARAREQEILTRALLDPHWGPRGLRHLIMREARAPSLVRIRANKTDAFGRPVPDAAVWVKTDGNAVSQLWRLTSVVTDDGRRIPLPKPIEKRIEISNLEYARLNGLDEGAGVTGNNAPPRPLRQDIDRLTPLWRDHGTAPGGYLGTAVGELEDKARSALRGKAMRQTLTDAGITAEAGWRLDSEGAVCDLEVAKGDTVKKDGKTYKVGVITQGIFGMPVDAAGSAPRTPEDCEKFEEQYGIKPWKAKGIPLA

SEQ ID NO: 343 - protein, 1114 aa, Eubacterium rectale
MNYTEKEKLFMKYILALDIGIASVGWAILDKESETVIEAGSNIFPEASAADNQLRRDMRGAKRNNRRLKTRINDFIKLWENNNLSIPQFKSTEIVGLKVRAITEEITLDELYLILYSYLKHRGISYLEDALDDTVSGSSAYANGLKLNAKELETHYPCEIQQERLNTIGKYRGQSQIINENGEVLDLSNVFTIGAYRKEIQRVFEIQKKYHPELTDEFCDGYMLIFNRKRKYYEGPGNEKSRTDYGRFTTKLDANGNYITEDNIFEKLIGKCSVYPDELRAAAASYTAQEYNVLNDLNNLTINGRKLEENEKHEIVERIKSSNTINMRKIISDCMGENIDDFAGARIDKSGKEIFHKFEVYNKMRKALLEIGIDISNYSREELDEIGYIMTINTDKEAMMEAFQKSWIDLSDDVKQCLINMRKTNGALFNKWQSFSLKIMNELIPEMYAQPKEQMTLLTEMGVTKGTQEEFAGLKYIPVDVVSEDIFNPVVRRSVRISFKILNAVLKKYKALDTIVIEMPRDRNSEEQKKRINDSQKLNEKEMEYIEKKLAVTYGIKLSPSDFSSQKQLSLKLKLWNEQDGICLYSGKTIDPNDIINNPQLFEIDHIIPRSISFDDARSNKVLVYRSENQKKGNQTPYYYLTHSHSEWSFEQYKATVMNLSKKKEYAISRKKIQNLLYSEDITKMDVLKGFINRNINDTSYASRLVLNTIQNFFMANEADTKVKVIKGSYTHQMRCNLKLDKNRDESYSHHAVDAMLIGYSELGYEAYHKLQGEFIDFETGEILRKDMWDENMSDEVYADYLYGKKWANIRNEVVKAEKNVKYWHYVMRKSNRGLCNQTIRGTREYDGKQYKINKLDIRTKEGIKVFAKLAFSKKDSDRERLLVYLNDRRTFDDLCKIYEDYSDAANPFVQYEKETGDIIRKYSKKHNGPRIDKLKYKDGEVGACIDISHKYGFEKGSKKVILESLVPYRMDVYYKEENHSYYLVGVKQSDIKFEKGRNVIDEEAYARILVNEKMIQPGQSRADLENLGFKFKLSFYKNDIIEYEKDGKIYTERLVSRTMPKQRNYIETKPIDKAKFEKQNLVGLGKTKFIKKYRYDILGNKYSCSEEKFTSFC

SEQ ID NO: 344 - protein, 1314 aa, Mycoplasma synoviae
MLRLYCANNLVLNNVQNLWKYLLLLIFDKKIIFLFKIKVILIRRYMENNNKEKIVIGFDLGVASVGWSIVNAETKEVIDLGVRLFSEPEKADYRRAKRTTRRLLRRKKFKREKFHKLILKNAEIFGLQSRNEILNVYKDQSSKYRNILKLKINALKEEIKPSELVWILRDYLQNRGYFYKNEKLTDEFVSNSFPSKKLHEHYEKYGFFRGSVKLDNKLDNKKDKAKEKDEEEESDAKKESEELIFSNKQWINEIVKVFENQSYLTESFKEEYLKLFNYVRPFNKGPGSKNSRTAYGVFSTDIDPETNKFKDYSNIWDKTIGKCSLFEEEIRAPKNLPSALIFNLQNEICTIKNEFTEFKNWWLNAEQKSEILKFVFTELFNWKDKKYSDKKFNKNLQDKIKKYLLNFALENFNLNEEILKNRDLENDTVLGLKGVKYYEKSNATADAALEFSSLKPLYVFIKFLKEKKLDLNYLLGLENTEILYFLDSIYLAISYSSDLKERNEWFKKLLKELYPKIKNNNLEIIENVEDIFEITDQEKFESFSKTHSLSREAFNHIIPLLLSNNEGKNYESLKHSNEELKKRTEKAELKAQQNQKYLKDNFLKEALVPLSVKTSVLQAIKIFNQIIKNFGKKYEISQVVIEMARELTKPNLEKLLNNATNSNIKILKEKLDQTEKFDDFTKKKFIDKIENSVVFRNKLFLWFEQDRKDPYTQLDIKINEIEDETEIDHVIPYSKSADDSWFNKLLVKKSTNQLKKNKTVWEYYQNESDPEAKWNKFVAWAKRIYLVQKSDKESKDNSEKNSIFKNKKPNLKFKNITKKLFDPYKDLGFLARNLNDTRYATKVFRDQLNNYSKHHSKDDENKLFKVVCMNGSITSFLRKSMWRKNEEQVYRFNFWKKDRDQFFHHAVDASIIAIFSLLTKTLYNKLRVYESYDVQRREDGVYLINKETGEVKKADKDYWKDQHNFLKIRENAIEIKNVLNNVDFQNQVRYSRKANTKLNTQLFNETLYGVKEFENNFYKLEKVNLFSRKDLRKFILEDLNEESEKNKKNENGSRKRILTEKYIVDEILQILENEEFKDSKSDINALNKYMDSLPSKFSEFFSQDFINKCKKENSLILTFDAIKHNDPKKVIKIKNLKFFREDATLKNKQAVHKDSKNQIKSFYESYKCVGFIWLKNKNDLEESIFVPINSRVIHFGDKDKDIFDFDSYNKEKLLNEINLKRPENKKFNSINEIEFVKFVKPGALLLNFENQQIYYISTLESSSLRAKIKLLNKMDKGKAVSMKKITNPDEYKIIEHVNPLGINLNWTKKLENNN

SEQ ID NO: 345 - protein, 1197 aa, Porphyromonas sp.
MLMSKHVLGLDLGVGSIGWCLIALDAQGDPAEILGMGSRVVPLNNATKAIEAFNAGAAFTASQERTARRTMRRGFARYQLRRYRLRRELEKVGMLPDAALIQLPLLELWELRERAATAGRRLTLPELGRVLCHINQKRGYRHVKSDAAAIVGDEGEKKKDSNSAYLAGIRANDEKLQAEHKTVGQYFAEQLRQNQSESPTGGISYRIKDQIFSRQCYIDEYDQIMAVQRVHYPDILTDEFIRMLRDEVIFMQRPLKSCKHLVSLCEFEKQERVMRVQQDDGKGGWQLVERRVKFGPKVAPKSSPLFQLCCIYEAVNNIRLTRPNGSPCDITPEERAKIVAHLQSSASLSFAALKKLLKEKALIADQLTSKSGLKGNSTRVALASALQPYPQYHHLLDMELETRMMTVQLTDEETGEVTEREVAVVTDSYVRKPLYRLWHILYSIEEREAMRRALITQLGMKEEDLDGGLLDQLYRLDFVKPGYGNKSAKFICKLLPQLQQGLGYSEACAAVGYRHSNSPTSEEITERTLLEKIPLLQRNELRQPLVEKILNQMINLVNALKAEYGIDEVRVELARELKMSREERERMARNNKDREERNKGVAAKIRECGLYPTKPRIQKYMLWKEAGRQCLYCGRSIEEEQCLREGGMEVEHIIPKSVLYDDSYGNKTCACRRCNKEKGNRTALEYIRAKGREAEYMKRINDLLKEKKISYSKHQRLRWLKEDIPSDFLERQLRLTQYISRQAMAILQQGIRRVSASEGGVTARLRSLWGYGKILHTLNLDRYDSMGETERVSREGEATEELHITNWSKRMDHRHHAIDALVVACTRQSYIQRLNRLSSEFGREDKKKEDQEAQEQQATETGRLSNLERWLTQRPHFSVRTVSDKVAEILISYRPGQRVVTRGRNIYRKKMADGREVSCVQRGVLVPRGELMEASFYGKILSQGRVRIVKRYPLHDLKGEVVDPHLRELITTYNQELKSREKGAPIPPLCLDKDKKQEVRSVRCYAKTLSLDKAIPMCFDEKGEPTAFVKSASNHHLALYRTPKGKLVESIVTFWDAVDRARYGIPLVITHPREVMEQVLQRGDIPEQVLSLLPPSDWVFVDSLQQDEMVVIGLSDEELQRALEAQNYRKISEHLYRVQKMSSSYYVFRYHLETSVADDKNTSGRIPKFHRVQSLKAYEERNIRKVRVDLLGRISLL

SEQ ID NO: 346 - protein, 1121 aa, Streptococcus thermophilus
MSDLVLGLDIGIGSVGVGILNKVTGEIIHKNSRIFPAAQAENNLVRRTNRQGRRLARRKKHRRVRLNRLFEESGLITDFTKISINLNPYQLRVKGLTDELSNEELFIALKNMVKHRGISYLDDASDDGNSSVGDYAQIVKENSKQLETKTPGQIQLERYQTYGQLRGDFTVEKDGKKHRLINVFPTSAYRSEALRILQTQQEFNPQITDEFINRYLEILTGKRKYYHGPGNEKSRTDYGRYRTSGETLDNIFGILIGKCTFYPDEFRAAKASYTAQEFNLLNDLNNLTVPTETKKLSKEQKNQIINYVKNEKAMGPAKLFKYIAKLLSCDVADIKGYRIDKSGKAEIHTFEAYRKMKTLETLDIEQMDRETLDKLAYVLTLNTEREGIQEALEHEFADGSFSQKQVDELVQFRKANSSIFGKGWHNFSVKLMMELIPELYETSEEQMTILTRLGKQKTTSSSNKTKYIDEKLLTEEIYNPVVAKSVRQAIKIVNAAIKEYGDFDNIVIEMARETNEDDEKKAIQKIQKANKDEKDAAMLKAANQYNGKAELPHSVFHGHKQLATKIRLWHQQGERCLYTGKTISIHDLINNSNQFEVDHILPLSITFDDSLANKVLVYATANQEKGQRTPYQALDSMDDAWSFRELKAFVRESKTLSNKKKEYLLTEEDISKFDVRKKFIERNLVDTRYASRVVLNALQEHFRAHKIDTKVSVVRGQFTSQLRRHWGIEKTRDTYHHHAVDALIIAASSQLNLWKKQKNTLVSYSEDQLLDIETGELISDDEYKESVFKAPYQHFVDTLKSKEFEDSILFSYQVDSKFNRKISDATIYATRQAKVGKDKADETYVLGKIKDIYTQDGYDAFMKIYKKDKSKFLMYRHDPQTFEKVIEPILENYPNKQINEKGKEVPCNPFLKYKEEHGYIRKYSKKGNGPEIKSLKYYDSKLGNHIDITPKDSNNKVVLQSVSPWRADVYFNKTTGKYEILGLKYADLQFEKGTGTYKISQEKYNDIKKKEGVDSDSEFKFTLYKNDLLLVKDTETKEQQLFRFLSRTMPKQKHYVELKPYDKQKFEGGEALIKVLGNVANSGQCKKGLGKSNISIYKVRTDVLGNQHIIKNEGDKPKLDF

SEQ ID NO: 347 - protein, 1152 aa, Roseburia inulinivorans
MNAEHGKEGLLIMEENFQYRIGLDIGITSVGWAVLQNNSQDEPVRITDLGVRIFDVAENPKNGDALAAPRRDARTTRRRLRRRRHRLERIKFLLQENGLIEMDSFMERYYKGNLPDVYQLRYEGLDRKLKDEELAQVLIHIAKHRGFRSTRKAETKEKEGGAVLKATTENQKIMQEKGYRTVGEMLYLDEAFHTECLWNEKGYVLTPRNRPDDYKHTILRSMLVEEVHAIFAAQRAHGNQKATEGLEEAYVEIMTSQRSFDMGPGLQPDGKPSPYAMEGFGDRVGKCTFEKDEYRAPKATYTAELFVALQKINHTKLIDEFGTGRFFSEEERKTIIGLLLSSKELKYGTIRKKLNIDPSLKFNSLNYSAKKEGETEEERVLDTEKAKFASMFWTYEYSKCLKDRTEEMPVGEKADLFDRIGEILTAYKNDDSRSSRLKELGLSGEEIDGLLDLSPAKYQRVSLKAMRKMQPYLEDGLIYDKACEAAGYDFRALNDGNKKHLLKGEEINAIVNDITNPVVKRSVSQTIKVINAIIQKYGSPQAVNIELAREMSKNFQDRTNLEKEMKKRQQENERAKQQIIELGKQNPTGQDILKYRLWNDQGGYCLYSGKKIPLEELFDGGYDIDHILPYSITFDDSYRNKVLVTAQENRQKGNRTPYEYFGADEKRWEDYEASVRLLVRDYKKQQKLLKKNFTEEERKEFKERNLNDTKYITRVVYNMIRQNLELEPFNHPEKKKQVWAVNGAVTSYLRKRWGLMQKDRSTDRHHAMDAVVIACCTDGMIHKISRYMQGRELAYSRNFKFPDEETGEILNRDNFTREQWDEKFGVKVPLPWNSFRDELDIRLLNEDPKNFLLTHADVQRELDYPGWMYGEEESPIEEGRYINYIRPLFVSRMPNHKVTGSAHDATIRSARDYETRGVVITKVPLTDLKLNKDNEIEGYYDKDSDRLLYQALVRQLLLHGNDGKKAFAEDFHKPKADGTEGPVVRKVKIEKKQTSGVMVRGGTGIAANGEMVRIDVFRENGKYYFVPVYTADVVRKVLPNRAATHTKPYSEWRVMDDANFVFSLYSRDLIHVKSKKDIKTNLVNGGLLLQKEIFAYYTGADIATASIAGFANDSNFKFRGLGIQSLEIFEKCQVDILGNISVVRHENRQEFH

SEQ ID NO: 348 - protein, 1082 aa, Methylosinus trichosporium
MRVLGLDAGIASLGWALIEIEESNRGELSQGTIIGAGTWMFDAPEEKTQAGAKLKSEQRRTFRGQRRVVRRRRQRMNEVRRILHSHGLLPSSDRDALKQPGLDPWRIRAEALDRLLGPVELAVALGHIARHRGFKSNSKGAKTNDPADDTSKMKRAVNETREKLARFGSAAKMLVEDESFVLRQTPTKNGASEIVRRFRNREGDYSRSLLRDDLAAEMRALFTAQARFQSAIATADLQTAFTKAAFFQRPLQDSEKLVGPCPFEVDEKRAPKRGYSFELFRFLSRLNHVTLRDGKQERTLTRDELALAAADFGAAAKVSFTALRKKLKLPETTVFVGVKADEESKLDVVARSGKAAEGTARLRSVIVDALGELAWGALLCSPEKLDKIAEVISFRSDIGRISEGLAQAGCNAPLVDALTAAASDGRFDPFTGAGHISSKAARNILSGLRQGMTYDKACCAADYDHTASRERGAFDVGGHGREALKRILQEERISRELVGSPTARKALIESIKQVKAIVERYGVPDRIHVELARDVGKSIEEREEITRGIEKRNRQKDKLRGLFEKEVGRPPQDGARGKEELLRFELWSEQMGRCLYTDDYISPSQLVATDDAVQVDHILPWSRFADDSYANKTLCMAKANQDKKGRTPYEWFKAEKTDTEWDAFIVRVEALADMKGFKKRNYKLRNAEEAAAKFRNRNLNDTRWACRLLAEALKQLYPKGEKDKDGKERRRVFSRPGALTDRLRRAWGLQWMKKSTKGDRIPDDRHHALDAIVIAATTESLLQRATREVQEIEDKGLHYDLVKNVTPPWPGFREQAVEAVEKVFVARAERRRARGKAHDATIRHIAVREGEQRVYERRKVAELKLADLDRVKDAERNARLIEKLRNWIEAGSPKDDPPLSPKGDPIFKVRLVTKSKVNIALDTGNPKRPGTVDRGEMARVDVFRKASKKGKYEYYLVPIYPHDIATMKTPPIRAVQAYKPEDEWPEMDSSYEFCWSLVPMTYLQVISSKGEIFEGYYRGMNRSVGAIQLSAHSNSSDVVQGIGARTLTEFKKFNVDRFGRKHEVERELRTWRGETWRGKAYI

SEQ ID NO: 349 - protein, 1156 aa, Ruminococcus albus
MGNYYLGLDVGIGSIGWAVINIEKKRIEDFNVRIFKSGEIQEKNRNSRASQQCRRSRGLRRLYRRKSHRKLRLKNYLSIIGLTTSEKIDYYYETADNNVIQLRNKGLSEKLTPEEIAACLIHICNNRGYKDFYEVNVEDIEDPDERNEYKEEHDSIVLISNLMNEGGYCTPAEMICNCREFDEPNSVYRKFHNSAASKNHYLITRHMLVKEVDLILENQSKYYGILDDKTIAKIKDIIFAQRDFEIGPGKNERFRRFTGYLDSIGKCQFFKDQERGSRFTVIADIYAFVNVLSQYTYTNNRGESVFDTSFANDLINSALKNGSMDKRELKAIAKSYHIDISDKNSDTSLTKCFKYIKVVKPLFEKYGYDWDKLIENYTDTDNNVLNRIGIVLSQAQTPKRRREKLKALNIGLDDGLINELTKLKLSGTANVSYKYMQGSIEAFCEGDLYGKYQAKFNKEIPDIDENAKPQKLPPFKNEDDCEFFKNPVVFRSINETRKLINAIIDKYGYPAAVNIETADELNKTFEDRAIDTKRNNDNQKENDRIVKEIIECIKCDEVHARHLIEKYKLWEAQEGKCLYSGETITKEDMLRDKDKLFEVDHIVPYSLILDNTINNKALVYAEENQKKGQRTPLMYMNEAQAADYRVRVNTMFKSKKCSKKKYQYLMLPDLNDQELLGGWRSRNLNDTRYICKYLVNYLRKNLRFDRSYESSDEDDLKIRDHYRVFPVKSRFTSMFRRWWLNEKTWGRYDKAELKKLTYLDHAADAIIIANCRPEYVVLAGEKLKLNKMYHQAGKRITPEYEQSKKACIDNLYKLFRMDRRTAEKLLSGHGRLTPIIPNLSEEVDKRLWDKNIYEQFWKDDKDKKSCEELYRENVASLYKGDPKFASSLSMPVISLKPDHKYRGTITGEEAIRVKEIDGKLIKLKRKSISEITAESINSIYTDDKILIDSLKTIFEQADYKDVGDYLKKTNQHFFTTSSGKRVNKVTVIEKVPSRWLRKEIDDNNFSLLNDSSYYCIELYKDSKGDNNLQGIAMSDIVHDRKTKKLYLKPDFNYPDDYYTHVMYIFPGDYLRIKSTSKKSGEQLKFEGYFISVKNVNENSFRFISDNKPCAKDKRVSITKKDIVIKLAVDLMGKVQGENNGKGISCGEPLSLLKEKN

SEQ ID NO: 350 - protein, 1187 aa, Bifidobacterium longum
MLSRQLLGASHLARPVSYSYNVQDNDVHCSYGERCFMRGKRYRIGIDVGLNSVGLAAVEVSDENSPVRLLNAQSVIHDGGVDPQKNKEAITRKNMSGVARRTRRMRRRKRERLHKLDMLLGKFGYPVIEPESLDKPFEEWHVRAELATRYIEDDELRRESISIALRHMARHRGWRNPYRQVDSLISDNPYSKQYGELKEKAKAYNDDATAAEEESTPAQLVVAMLDAGYAEAPRLRWRTGSKKPDAEGYLPVRLMQEDNANELKQIFRVQRVPADEWKPLFRSVFYAVSPKGSAEQRVGQDPLAPEQARALKASLAFQEYRIANVITNLRIKDASAELRKLTVDEKQSIYDQLVSPSSEDITWSDLCDFLGFKRSQLKGVGSLTEDGEERISSRPPRLTSVQRIYESDNKIRKPLVAWWKSASDNEHEAMIRLLSNTVDIDKVREDVAYASAIEFIDGLDDDALTKLDSVDLPSGRAAYSVETLQKLTRQMLTTDDDLHEARKTLFNVTDSWRPPADPIGEPLGNPSVDRVLKNVNRYLMNCQQRWGNPVSVNIEHVRSSFSSVAFARKDKREYEKNNEKRSIFRSSLSEQLRADEQMEKVRESDLRRLEAIQRQNGQCLYCGRTITFRTCEMDHIVPRKGVGSTNTRTNFAAVCAECNRMKSNTPFAIWARSEDAQTRGVSLAEAKKRVTMFTFNPKSYAPREVKAFKQAVIARLQQTEDDAAIDNRSIESVAWMADELHRRIDWYFNAKQYVNSASIDDAEAETMKTTVSVFQGRVTASARRAAGIEGKIHFIGQQSKTRLDRRHHAVDASVIAMMNTAAAQTLMERESLRESQRLIGLMPGERSWKEYPYEGTSRYESFHLWLDNMDVLLELLNDALDNDRIAVMQSQRYVLGNSIAHDATIHPLEKVPLGSAMSADLIRRASTPALWCALTRLPDYDEKEGLPEDSHREIRVHDTRYSADDEMGFFASQAAQIAVQEGSADIGSAIHHARVYRCWKTNAKGVRKYFYGMIRVFQTDLLRACHDDLFTVPLPPQSISMRYGEPRVVQALQSGNAQYLGSLVVGDEIEMDFSSLDVDGQIGEYLQFFSQFSGGNLAWKHWVVDGFFNQTQLRIRPRYLAAEGLAKAFSDDVVPDGVQKIVTKQGWLPPVNTASKTAVRIVRRNAFGEPRLSSAHHMPCSWQWRHE

SEQ ID NO: 351 - protein, 1150 aa, Enterococcus faecalis
MYSIGLDLGISSVGWSVIDERTGNVIDLGVRLFSAKNSEKNLERRTNRGGRRLIRRKTNRLKDAKKILAAVGFYEDKSLKNSCPYQLRVKGLTEPLSRGEIYKVTLHILKKRGISYLDEVDTEAAKESQDYKEQVRKNAQLLTKYTPGQIQLQRLKENNRVKTGINAQGNYQLNVFKVSAYANELATILKTQQAFYPNELTDDWIALFVQPGIAEEAGLIYRKRPYYHGPGNEANNSPYGRWSDFQKTGEPATNIFDKLIGKDFQGELRASGLSLSAQQYNLLNDLTNLKIDGEVPLSSEQKEYILTELMTKEFTRFGVNDVVKLLGVKKERLSGWRLDKKGKPEIHTLKGYRNWRKIFAEAGIDLATLPTETIDCLAKVLTLNTEREGIENTLAFELPELSESVKLLVLDRYKELSQSISTQSWHRFSLKTLHLLIPELMNATSEQNTLLEQFQLKSDVRKRYSEYKKLPTKDVLAEIYNPTVNKTVSQAFKVIDALLVKYGKEQIRYITIEMPRDDNEEDEKKRIKELHAKNSQRKNDSQSYFMQKSGWSQEKFQTTIQKNRRFLAKLLYYYEQDGICAYTGLPISPELLVSDSTEIDHIIPISISLDDSINNKVLVLSKANQVKGQQTPYDAWMDGSFKKINGKFSNWDDYQKWVESRHFSHKKENNLLETRNIFDSEQVEKFLARNLNDTRYASRLVLNTLQSFFTNQETKVRVVNGSFTHTLRKKWGADLDKTRETHHHHAVDATLCAVTSFVKVSRYHYAVKEETGEKVMREIDFETGEIVNEMSYWEFKKSKKYERKTYQVKWPNFREQLKPVNLHPRIKFSHQVDRKANRKLSDATIYSVREKTEVKTLKSGKQKITTDEYTIGKIKDIYTLDGWEAFKKKQDKLLMKDLDEKTYERLLSIAETTPDFQEVEEKNGKVKRVKRSPFAVYCEENDIPAIQKYAKKNNGPLIRSLKYYDGKLNKHINITKDSQGRPVEKTKNGRKVTLQSLKPYRYDIYQDLETKAYYTVQLYYSDLRFVEGKYGITEKEYMKKVAEQTKGQVVRFCFSLQKNDGLEIEWKDSQRYDVRFYNFQSANSINFKGLEQEMMPAENQFKQKPYNNGAINLNIAKYGKEGKKLRKFNTDILGKKHYLFYEKEPKNIIK

SEQ ID NO: 352 - protein, 1236 aa, Mycoplasma mobile
MYFYKNKENKLNKKVVLGLDLGIASVGWCLTDISQKEDNKFPIILHGVRLFETVDDSDDKLLNETRRKKRGQRRRNRRLFTRKRDFIKYLIDNNIIELEFDKNPKILVRNFIEKYINPFSKNLELKYKSVTNLPIGFHNLRKAAINEKYKLDKSELIVLLYFYLSLRGAFFDNPEDTKSKEMNKNEIEIFDKNESIKNAEFPIDKIIEFYKISGKIRSTINLKFGHQDYLKEIKQVFEKQNIDFMNYEKFAMEEKSFFSRIRNYSEGPGNEKSFSKYGLYANENGNPELIINEKGQKIYTKIFKTLWESKIGKCSYDKKLYRAPKNSFSAKVFDITNKLTDWKHKNEYISERLKRKILLSRFLNKDSKSAVEKILKEENIKFENLSEIAYNKDDNKINLPIINAYHSLTTIFKKHLINFENYLISNENDLSKLMSFYKQQSEKLFVPNEKGSYEINQNNNVLHIFDAISNILNKFSTIQDRIRILEGYFEFSNLKKDVKSSEIYSEIAKLREFSGTSSLSFGAYYKFIPNLISEGSKNYSTISYEEKALQNQKNNFSHSNLFEKTWVEDLIASPTVKRSLRQTMNLLKEIFKYSEKNNLEIEKIVVEVTRSSNNKHERKKIEGINKYRKEKYEELKKVYDLPNENTTLLKKLWLLRQQQGYDAYSLRKIEANDVINKPWNYDIDHIVPRSISFDDSFSNLVIVNKLDNAKKSNDLSAKQFIEKIYGIEKLKEAKENWGNWYLRNANGKAFNDKGKFIKLYTIDNLDEFDNSDFINRNLSDTSYITNALVNHLTFSNSKYKYSVVSVNGKQTSNLRNQIAFVGIKNNKETEREWKRPEGFKSINSNDFLIREEGKNDVKDDVLIKDRSFNGHHAEDAYFITIISQYFRSFKRIERLNVNYRKETRELDDLEKNNIKFKEKASFDNFLLINALDELNEKLNQMRFSRMVITKKNTQLFNETLYSGKYDKGKNTIKKVEKLNLLDNRTDKIKKIEEFFDEDKLKENELTKLHIFNHDKNLYETLKIIWNEVKIEIKNKNLNEKNYFKYFVNKKLQEGKISFNEWVPILDNDFKIIRKIRYIKFSSEEKETDEIIFSQSNFLKIDQRQNFSFHNTLYWVQIWVYKNQKDQYCFISIDARNSKFEKDEIKINYEKLKTQKEKLQIINEEPILKINKGDLFENEEKELFYIVGRDEKPQKLEIKYILGKKIKDQKQIQKPVKKYFPNWKKVNLTYMGEIFKK

SEQ ID NO: 353 - protein, 1105 aa, Actinomyces coleocanis
MDNKNYRIGIDVGLNSIGFCAVEVDQHDTPLGFLNLSVYRHDAGIDPNGKKTNTTRLAMSGVARRTRRLFRKRKRRLAALDRFIEAQGWTLPDHADYKDPYTPWLVRAELAQTPIRDENDLHEKLAIAVRHIARHRGWRSPWVPVRSLHVEQPPSDQYLALKERVEAKTLLQMPEGATPAEMVVALDLSVDVNLRPKNREKTDTRPENKKPGFLGGKLMQSDNANELRKIAKIQGLDDALLRELIELVFAADSPKGASGELVGYDVLPGQHGKRRAEKAHPAFQRYRIASIVSNLRIRHLGSGADERLDVETQKRVFEYLLNAKPTADITWSDVAEEIGVERNLLMGTATQTADGERASAKPPVDVTNVAFATCKIKPLKEWWLNADYEARCVMVSALSHAEKLTEGTAAEVEVAEFLQNLSDEDNEKLDSFSLPIGRAAYSVDSLERLTKRMIENGEDLFEARVNEFGVSEDWRPPAEPIGARVGNPAVDRVLKAVNRYLMAAEAEWGAPLSVNIEHVREGFISKRQAVEIDRENQKRYQRNQAVRSQIADHINATSGVRGSDVTRYLAIQRQNGECLYCGTAITFVNSEMDHIVPRAGLGSTNTRDNLVATCERCNKSKSNKPFAVWAAECGIPGVSVAEALKRVDFWIADGFASSKEHRELQKGVKDRLKRKVSDPEIDNRSMESVAWMARELAHRVQYYFDEKHTGTKVRVFRGSLTSAARKASGFESRVNFIGGNGKTRLDRRHHAMDAATVAMLRNSVAKTLVLRGNIRASERAIGAAETWKSFRGENVADRQIFESWSENMRVLVEKFNLALYNDEVSIFSSLRLQLGNGKAHDDTITKLQMHKVGDAWSLTEIDRASTPALWCALTRQPDFTWKDGLPANEDRTIIVNGTHYGPLDKVGIFGKAAASLLVRGGSVDIGSAIHHARIYRIAGKKPTYGMVRVFAPDLLRYRNEDLFNVELPPQSVSMRYAEPKVREAIREGKAEYLGWLVVGDELLLDLSSETSGQIAELQQDFPGTTHWTVAGFFSPSRLRLRPVYLAQEGLGEDVSEGSKSIIAGQGWRPAVNKVFGSAMPEVIRRDGLGRKRRFSYSGLPVSWQG

SEQ ID NO: 354 - protein, 1079 aa, Dinoroseobacter shibae
MRLGLDIGTSSIGWWLYETDGAGSDARITGVVDGGVRIFSDGRDPKSGASLAVDRRAARAMRRRRDRYLRRRATLMKVLAETGLMPADPAEAKALEALDPFALRAAGLDEPLPLPHLGRALFHLNQRRGFKSNRKTDRGDNESGKIKDATARLDMEMMANGARTYGEFLHKRRQKATDPRHVPSVRTRLSIANRGGPDGKEEAGYDFYPDRRHLEEEFHKLWAAQGAHHPELTETLRDLLFEKIFFQRPLKEPEVGLCLFSGHHGVPPKDPRLPKAHPLTQRRVLYETVNQLRVTADGREARPLTREERDQVIHALDNKKPTKSLSSMVLKLPALAKVLKLRDGERFTLETGVRDAIACDPLRASPAHPDRFGPRWSILDADAQWEVISRIRRVQSDAEHAALVDWLTEAHGLDRAHAEATAHAPLPDGYGRLGLTATTRILYQLTADVVTYADAVKACGWHHSDGRTGECFDRLPYYGEVLERHVIPGSYHPDDDDITRFGRITNPTVHIGLNQLRRLVNRIIETHGKPHQIVVELARDLKKSEEQKRADIKRIRDTTEAAKKRSEKLEELEIEDNGRNRMLLRLWEDLNPDDAMRRFCPYTGTRISAAMIFDGSCDVDHILPYSRTLDDSFPNRTLCLREANRQKRNQTPWQAWGDTPHWHAIAANLKNLPENKRWRFAPDAMTRFEGENGFLDRALKDTQYLARISRSYLDTLFTKGGHVWVVPGRFTEMLRRHWGLNSLLSDAGRGAVKAKNRTDHRHHAIDAAVIAATDPGLLNRISRAAGQGEAAGQSAELIARDTPPPWEGFRDDLRVRLDRIIVSHRADHGRIDHAARKQGRDSTAGQLHQETAYSIVDDIHVASRTDLLSLKPAQLLDEPGRSGQVRDPQLRKALRVATGGKTGKDFENALRYFASKPGPYQAIRRVRIIKPLQAQARVPVPAQDPIKAYQGGSNHLFEIWRLPDGEIEAQVITSFEAHTLEGEKRPHPAAKRLLRVHKGDMVALERDGRRVVGHVQKMDIANGLFIVPHNEANADTRNNDKSDPFKWIQIGARPAIASGIRRVSVDEIGRLRDGGTRPI

SEQ ID NO: 355 - protein, 1181 aa, Actinomyces sp.
MLHCIAVIRVPPSEEPGFFETHADSCALCHHGCMTYAANDKAIRYRVGIDVGLRSIGFCAVEVDDEDHPIRILNSVVHVHDAGTGGPGETESLRKRSGVAARARRRGRAEKQRLKKLDVLLEELGWGVSSNELLDSHAPWHIRKRLVSEYIEDETERRQCLSVAMAHIARHRGWRNSFSKVDTLLLEQAPSDRMQGLKERVEDRTGLQFSEEVTQGELVATLLEHDGDVTIRGFVRKGGKATKVHGVLEGKYMQSDLVAELRQICRTQRVSETTFEKLVLSIFHSKEPAPSAARQRERVGLDELQLALDPAAKQPRAERAHPAFQKFKVVATLANMRIREQSAGERSLTSEELNRVARYLLNHTESESPTWDDVARKLEVPRHRLRGSSRASLETGGGLTYPPVDDTTVRVMSAEVDWLADWWDCANDESRGHMIDAISNGCGSEPDDVEDEEVNELISSATAEDMLKLELLAKKLPSGRVAYSLKTLREVTAAILETGDDLSQAITRLYGVDPGWVPTPAPIEAPVGNPSVDRVLKQVARWLKFASKRWGVPQTVNIEHTREGLKSASLLEEERERWERFEARREIRQKEMYKRLGISGPFRRSDQVRYEILDLQDCACLYCGNEINFQTFEVDHIIPRVDASSDSRRTNLAAVCHSCNSAKGGLAFGQWVKRGDCPSGVSLENAIKRVRSWSKDRLGLTEKAMGKRKSEVISRLKTEMPYEEFDGRSMESVAWMAIELKKRIEGYFNSDRPEGCAAVQVNAYSGRLTACARRAAHVDKRVRLIRLKGDDGHHKNRFDRRNHAMDALVIALMTPAIARTIAVREDRREAQQLTRAFESWKNFLGSEERMQDRWESWIGDVEYACDRLNELIDADKIPVTENLRLRNSGKLHADQPESLKKARRGSKRPRPQRYVLGDALPADVINRVTDPGLWTALVRAPGFDSQLGLPADLNRGLKLRGKRISADFPIDYFPTDSPALAVQGGYVGLEFHHARLYRIIGPKEKVKYALLRVCAIDLCGIDCDDLFEVELKPSSISMRTADAKLKEAMGNGSAKQIGWLVLGDEIQIDPTKFPKQSIGKFLKECGPVSSWRVSALDTPSKITLKPRLLSNEPLLKTSRVGGHESDLVVAECVEKIMKKTGWVVEINALCQSGLIRVIRRNALGEVRTSPKSGLPISLNLR

SEQ ID NO: 356 - protein, 1113 aa, Alcanivorax sp.
MRYRVGLDLGTASVGAAVFSMDEQGNPMELIWHYERLFSEPLVPDMGQLKPKKAARRLARQQRRQIDRRASRLRRIAIVSRRLGIAPGRNDSGVHGNDVPTLRAMAVNERIELGQLRAVLLRMGKKRGYGGTFKAVRKVGEAGEVASGASRLEEEMVALASVQNKDSVTVGEYLAARVEHGLPSKLKVAANNEYYAPEYALFRQYLGLPAIKGRPDCLPNMYALRHQIEHEFERIWATQSQFHDVMKDHGVKEEIRNAIFFQRPLKSPADKVGRCSLQTNLPRAPRAQIAAQNFRIEKQMADLRWGMGRRAEMLNDHQKAVIRELLNQQKELSFRKIYKELERAGCPGPEGKGLNMDRAALGGRDDLSGNTTLAAWRKLGLEDRWQELDEVTQIQVINFLADLGSPEQLDTDDWSCRFMGKNGRPRNFSDEFVAFMNELRMTDGFDRLSKMGFEGGRSSYSIKALKALTEWMIAPHWRETPETHRVDEEAAIRECYPESLATPAQGGRQSKLEPPPLTGNEVVDVALRQVRHTINMMIDDLGSVPAQIVVEMAREMKGGVTRRNDIEKQNKRFASERKKAAQSIEENGKTPTPARILRYQLWIEQGHQCPYCESNISLEQALSGAYTNFEHILPRTLTQIGRKRSELVLAHRECNDEKGNRTPYQAFGHDDRRWRIVEQRANALPKKSSRKTRLLLLKDFEGEALTDESIDEFADRQLHESSWLAKVTTQWLSSLGSDVYVSRGSLTAELRRRWGLDTVIPQVRFESGMPVVDEEGAEITPEEFEKFRLQWEGHRVTREMRTDRRPDKRIDHRHHLVDAIVTALTSRSLYQQYAKAWKVADEKQRHGRVDVKVELPMPILTIRDIALEAVRSVRISHKPDRYPDGRFFEATAYGIAQRLDERSGEKVDWLVSRKSLTDLAPEKKSIDVDKVRANISRIVGEAIRLHISNIFEKRVSKGMTPQQALREPIEFQGNILRKVRCFYSKADDCVRIEHSSRRGHHYKMLLNDGFAYMEVPCKEGILYGVPNLVRPSEAVGIKRAPESGDFIRFYKGDTVKNIKTGRVYTIKQILGDGGGKLILTPVTETKPADLLSAKWGRLKVGGRNIHLLRLCAE

SEQ ID NO: 357 - protein, 1052 aa, Aminomonas paucivorans
MIGEHVRGGCLFDDHWTPNWGAFRLPNTVRTFTKAENPKDGSSLAEPRRQARGLRRRLRRKTQRLEDLRRLLAKEGVLSLSDLETLFRETPAKDPYQLRAEGLDRPLSFPEWVRVLYHITKHRGFQSNRRNPVEDGQERSRQEEEGKLLSGVGENERLLREGGYRTAGEMLARDPKFQDHRRNRAGDYSHTLSRSLLLEEARRLFQSQRTLGNPHASSNLEEAFLHLVAFQNPFASGEDIRNKAGHCSLEPDQIRAPRRSASAETFMLLQKTGNLRLIHRRTGEERPLTDKEREQIHLLAWKQEKVTHKTLRRHLEIPEEWLFTGLPYHRSGDKAEEKLFVHLAGIHEIRKALDKGPDPAVWDTLRSRRDLLDSIADTLTFYKNEDEILPRLESLGLSPENARALAPLSFSGTAHLSLSALGKLLPHLEEGKSYTQARADAGYAAPPPDRHPKLPPLEEADWRNPVVFRALTQTRKVVNALVRRYGPPWCIHLETARELSQPAKVRRRIETEQQANEKKKQQAEREFLDIVGTAPGPGDLLKMRLWREQGGFCPYCEEYLNPTRLAEPGYAEMDHILPYSRSLDNGWHNRVLVHGKDNRDKGNRTPFEAFGGDTARWDRLVAWVQASHLSAPKKRNLLREDFGEEAERELKDRNLTDTRFITKTAATLLRDRLTFHPEAPKDPVMTLNGRLTAFLRKQWGLHKNRKNGDLHHALDAAVLAVASRSFVYRLSSHNAAWGELPRGREAENGFSLPYPAFRSEVLARLCPTREEILLRLDQGGVGYDEAFRNGLRPVFVSRAPSRRLRGKAHMETLRSPKWKDHPEGPRTASRIPLKDLNLEKLERMVGKDRDRKLYEALRERLAAFGGNGKKAFVAPFRKPCRSGEGPLVRSLRIFDSGYSGVELRDGGEVYAVADHESMVRVDVYAKKNRFYLVPVYVADVARGIVKNRAIVAHKSEEEWDLVDGSFDFRFSLFPGDLVEIEKKDGAYLGYYKSCHRGDGRLLLDRHDRMPRESDCGTFYVSTRKDVLSMSKYQVDPLGEIRLVGSEKPPFVL

SEQ ID NO: 358 - protein, 1233 aa, Mycoplasma canis
MEKKRKVTLGFDLGIASVGWAIVDSETNQVYKLGSRLFDAPDTNLERRTQRGTRRLLRRRKYRNQKFYNLVKRTEVFGLSSREAIENRFRELSIKYPNIIELKTKALSQEVCPDEIAWILHDYLKNRGYFYDEKETKEDFDQQTVESMPSYKLNEFYKKYGYFKGALSQPTESEMKDNKDLKEAFFFDFSNKEWLKEINYFFNVQKNILSETFIEEFKKIFSFTRDISKGPGSDNMPSPYGIFGEFGDNGQGGRYEHIWDKNIGKCSIFTNEQRAPKYLPSALIFNFLNELANIRLYSTDKKNIQPLWKLSSVDKLNILLNLFNLPISEKKKKLTSTNINDIVKKESIKSIMISVEDIDMIKDEWAGKEPNVYGVGLSGLNIEESAKENKFKFQDLKILNVLINLLDNVGIKFEFKDRNDIIKNLELLDNLYLFLIYQKESNNKDSSIDLFIAKNESLNIENLKLKLKEFLLGAGNEFENHNSKTHSLSKKAIDEILPKLLDNNEGWNLEAIKNYDEEIKSQIEDNSSLMAKQDKKYLNDNFLKDAILPPNVKVTFQQAILIFNKIIQKFSKDFEIDKVVIELAREMTQDQENDALKGIAKAQKSKKSLVEERLEANNIDKSVFNDKYEKLIYKIFLWISQDFKDPYTGAQISVNEIVNNKVEIDHIIPYSLCFDDSSANKVLVHKQSNQEKSNSLPYEYIKQGHSGWNWDEFTKYVKRVFVNNVDSILSKKERLKKSENLLTASYDGYDKLGFLARNLNDTRYATILFRDQLNNYAEHHLIDNKKMFKVIAMNGAVTSFIRKNMSYDNKLRLKDRSDFSHHAYDAAIIALFSNKTKTLYNLIDPSLNGIISKRSEGYWVIEDRYTGEIKELKKEDWTSIKNNVQARKIAKEIEEYLIDLDDEVFFSRKTKRKTNRQLYNETIYGIATKTDEDGITNYYKKEKFSILDDKDIYLRLLREREKFVINQSNPEVIDQIIEIIESYGKENNIPSRDEAINIKYTKNKINYNLYLKQYMRSLTKSLDQFSEEFINQMIANKTFVLYNPTKNTTRKIKFLRLVNDVKINDIRKNQVINKFNGKNNEPKAFYENINSLGAIVFKNSANNFKTLSINTQIAIFGDKNWDIEDFKTYNMEKIEKYKEIYGIDKTYNFHSFIFPGTILLDKQNKEFYYISSIQTVRDIIEIKFLNKIEFKDENKNQDTSKTPKRLMFGIKSIMNNYEQVDISPFGINKKIFE

SEQ ID NO: 359 - protein, 1119 aa, Lactobacillus coryniformis
MGYRIGLDVGITSTGYAVLKTDKNGLPYKILTLDSVIYPRAENPQTGASLAEPRRIKRGLRRRTRRTKFRKQRTQQLFIHSGLLSKPEIEQILATPQAKYSVYELRVAGLDRRLTNSELFRVLYFFIGHRGFKSNRKAELNPENEADKKQMGQLLNSIEEIRKAIAEKGYRTVGELYLKDPKYNDHKRNKGYIDGYLSTPNRQMLVDEIKQILDKQRELGNEKLTDEFYATYLLGDENRAGIFQAQRDFDEGPGAGPYAGDQIKKMVGKDIFEPTEDRAAKATYTFQYFNLLQKMTSLNYQNTTGDTWHTLNGLDRQAIIDAVFAKAEKPTKTYKPTDFGELRKLLKLPDDARFNLVNYGSLQTQKEIETVEKKTRFVDFKAYHDLVKVLPEEMWQSRQLLDHIGTALTLYSSDKRRRRYFAEELNLPAELIEKLLPLNFSKFGHLSIKSMQNIIPYLEMGQVYSEATTNTGYDFRKKQISKDTIREEITNPVVRRAVTKTIKIVEQIIRRYGKPDGINIELARELGRNFKERGDIQKRQDKNRQTNDKIAAELTELGIPVNGQNIIRYKLHKEQNGVDPYTGDQIPFERAFSEGYEVDHIIPYSISWDDSYTNKVLTSAKCNREKGNRIPMVYLANNEQRLNALTNIADNIIRNSRKRQKLLKQKLSDEELKDWKQRNINDTRFITRVLYNYFRQAIEFNPELEKKQRVLPLNGEVTSKIRSRWGFLKVREDGDLHHAIDATVIAAITPKFIQQVTKYSQHQEVKNNQALWHDAEIKDAEYAAEAQRMDADLFNKIFNGFPLPWPEFLDELLARISDNPVEMMKSRSWNTYTPIEIAKLKPVFVVRLANHKISGPAHLDTIRSAKLFDEKGIVLSRVSITKLKINKKGQVATGDGIYDPENSNNGDKVVYSAIRQALEAHNGSGELAFPDGYLEYVDHGTKKLVRKVRVAKKVSLPVRLKNKAAADNGSMVRIDVFNTGKKFVFVPIYIKDTVEQVLPNKAIARGKSLWYQITESDQFCFSLYPGDMVHIESKTGIKPKYSNKENNTSVVPIKNFYGYFDGADIATASILVRAHDSSYTARSIGIAGLLKFEKYQVDYFGRYHKVHEKKRQLFVKRDE

SEQ ID NO: 360 - protein, 1195 aa, Elusimicrobium minutum
MQKNINTKQNHIYIKQAQKIKEKLGDKPYRIGLDLGVGSIGFAIVSMEENDGNVLLPKEIIMVGSRIFKASAGAADRKLSRGQRNNHRHTRERMRYLWKVLAEQKLALPVPADLDRKENSSEGETSAKRFLGDVLQKDIYELRVKSLDERLSLQELGYVLYHIAGHRGSSAIRTFENDSEEAQKENTENKKIAGNIKRLMAKKNYRTYGEYLYKEFFENKEKHKREKISNAANNHKFSPTRDLVIKEAEAILKKQAGKDGFHKELTEEYIEKLTKAIGYESEKLIPESGFCPYLKDEKRLPASHKLNEERRLWETLNNARYSDPIVDIVTGEITGYYEKQFTKEQKQKLFDYLLTGSELTPAQTKKLLGLKNTNFEDIILQGRDKKAQKIKGYKLIKLESMPFWARLSEAQQDSFLYDWNSCPDEKLLTEKLSNEYHLTEEEIDNAFNEIVLSSSYAPLGKSAMLIILEKIKNDLSYTEAVEEALKEGKLTKEKQAIKDRLPYYGAVLQESTQKIIAKGFSPQFKDKGYKTPHTNKYELEYGRIANPVVHQTLNELRKLVNEIIDILGKKPCEIGLETARELKKSAEDRSKLSREQNDNESNRNRIYEIYIRPQQQVIITRRENPRNYILKFELLEEQKSQCPFCGGQISPNDIINNQADIEHLFPIAESEDNGRNNLVISHSACNADKAKRSPWAAFASAAKDSKYDYNRILSNVKENIPHKAWRFNQGAFEKFIENKPMAARFKTDNSYISKVAHKYLACLFEKPNIICVKGSLTAQLRMAWGLQGLMIPFAKQLITEKESESFNKDVNSNKKIRLDNRHHALDAIVIAYASRGYGNLLNKMAGKDYKINYSERNWLSKILLPPNNIVWENIDADLESFESSVKTALKNAFISVKHDHSDNGELVKGTMYKIFYSERGYTLTTYKKLSALKLTDPQKKKTPKDFLETALLKFKGRESEMKNEKIKSAIENNKRLFDVIQDNLEKAKKLLEEENEKSKAEGKKEKNINDASIYQKAISLSGDKYVQLSKKEPGKFFAISKPTPTTTGYGYDTGDSLCVDLYYDNKGKLCGEIIRKIDAQQKNPLKYKEQGFTLFERIYGGDILEVDFDIHSDKNSFRNNTGSAPENRVFIKVGTFTEITNNNIQIWFGNIIKSTGGQDDSFTINSMQQYNPRKLILSSCGFIKYRSPILKNKEG

SEQ ID NO: 361 - protein, 1082 aa, Neisseria meningitidis; identical to SEQ ID NO: 25

SEQ ID NO: 362 - protein, 1056 aa, Pasteurella multocida
MQTTNLSYILGLDLGIASVGWAVVEINENEDPIGLIDVGVRIFERAEVPKTGESLALSRRLARSTRRLIRRRAHRLLLAKRFLKREGILSTIDLEKGLPNQAWELRVAGLERRLSAIEWGAVLLHLIKHRGYLSKRKNESQTNNKELGALLSGVAQNHQLLQSDDYRTPAELALKKFAKEEGHIRNQRGAYTHTFNRLDLLAELNLLFAQQHQFGNPHCKEHIQQYMTELLMWQKPALSGEAILKMLGKCTHEKNEFKAAKHTYSAERFVWLTKLNNLRILEDGAERALNEEERQLLINHPYEKSKLTYAQVRKLLGLSEQAIFKHLRYSKENAESATFMELKAWHAIRKALENQGLKDTWQDLAKKPDLLDEIGTAFSLYKTDEDIQQYLTNKVPNSVINALLVSLNFDKFIELSLKSLRKILPLMEQGKRYDQACREIYGHHYGEANQKTSQLLPAIPAQEIRNPVVLRTLSQARKVINAIIRQYGSPARVHIETGRELGKSFKERREIQKQQEDNRTKRESAVQKFKELFSDFSSEPKSKDILKFRLYEQQHGKCLYSGKEINIHRLNEKGYVEIDHALPFSRTWDDSFNNKVLVLASENQNKGNQTPYEWLQGKINSERWKNFVALVLGSQCSAAKKQRLLTQVIDDNKFIDRNLNDTRYIARFLSNYIQENLLLVGKNKKNVFTPNGQITALLRSRWGLIKARENNNRHHALDAIVVACATPSMQQKITRFIRFKEVHPYKIENRYEMVDQESGEIISPHFPEPWAYFRQEVNIRVFDNHPDTVLKEMLPDRPQANHQFVQPLFVSRAPTRKMSGQGHMETIKSAKRLAEGISVLRIPLTQLKPNLLENMVNKEREPALYAGLKARLAEFNQDPAKAFATPFYKQGGQQVKAIRVEQVQKSGVLVRENNGVADNASIVRTDVFIKNNKFFLVPIYTWQVAKGILPNKAIVAHKNEDEWEEMDEGAKFKFSLFPNDLVELKTKKEYFFGYYIGLDRATGNISLKEHDGEISKGKDGVYRVGVKLALSFEKYQVDELGKNRQICRPQQRQPVR

SEQ ID NO: 363 - protein, 1059 aa, Rhodovulum sp.
MGIRFAFDLGTNSIGWAVWRTGPGVFGEDTAASLDGSGVLIFKDGRNPKDGQSLATMRRVPRQSRKRRDRFVLRRRDLLAALRKAGLFPVDVEEGRRLAATDPYHLRAKALDESLTPHEMGRVIFHLNQRRGFRSNRKADRQDREKGKIAEGSKRLAETLAATNCRTLGEFLWSRHRGTPRTRSPTRIRMEGEGAKALYAFYPTREMVRAEFERLWTAQSRFAPDLLTPERHEEIAGILFRQRDLAPPKIGCCTFEPSERRLPRALPSVEARGIYERLAHLRITTGPVSDRGLTRPERDVLASALLAGKSLTFKAVRKTLKILPHALVNFEEAGEKGLDGALTAKLLSKPDHYGAAWHGLSFAEKDTFVGKLLDEADEERLIRRLVTENRLSEDAARRCASIPLADGYGRLGRTANTEILAALVEETDETGTVVTYAEAVRRAGERTGRNWHHSDERDGVILDRLPYYGEILQRHVVPGSGEPEEKNEAARWGRLANPTVHIGLNQLRKVVNRLIAAHGRPDQIVVELARELKLNREQKERLDRENRKNREENERRTAILAEHGQRDTAENKIRLRLFEEQARANAGIALCPYTGRAIGIAELFTSEVEIDHILPVSLTLDDSLANRVLCRREANREKRRQTPFQAFGATPAWNDIVARAAKLPPNKRWRFDPAALERFEREGGFLGRQLNETKYLSRLAKIYLGKICDPDRVYVTPGTLTGLLRARWGLNSILSDSNFKNRSDHRHHAVDAVVIGVLTRGMIQRIAHDAARAEDQDLDRVFRDVPVPFEDFRDHVRERVSTITVAVKPEHGKGGALHEDTSYGLVPDTDPNAALGNLVVRKPIRSLTAGEVDRVRDRALRARLGALAAPFRDESGRVRDAKGLAQALEAFGAENGIRRVRILKPDASVVTIADRRTGVPYRAVAPGENHHVDIVQMRDGSWRGFAASVFEVNRPGWRPEWEVKKLGGKLVMRLHKGDMVELSDKDGQRRVKVVQQIEISANRVRLSPHNDGGKLQDRHADADDPFRWDLATIPLLKDRGCVAVRVDPIGVVTLRRSNV

SEQ ID NO: 364 - protein, 1096 aa, Eubacterium dolichum
MMEVFMGRLVLGLDIGITSVGFGIIDLDESEIVDYGVRLFKEGTAAENETRRTKRGGRRLKRRRVTRREDMLHLLKQAGIISTSFHPLNNPYDVRVKGLNERLNGEELATALLHLCKHRGSSVETIEDDEAKAKEAGETKKVLSMNDQLLKSGKYVCEIQKERLRTNGHIRGHENNFKTRAYVDEAFQILSHQDLSNELKSAIITIISRKRMYYDGPGGPLSPTPYGRYTYFGQKEPIDLIEKMRGKCSLFPNEPRAPKLAYSAELFNLLNDLNNLSIEGEKLTSEQKAMILKIVHEKGKITPKQLAKEVGVSLEQIRGFRIDTKGSPLLSELTGYKMIREVLEKSNDEHLEDHVFYDEIAEILTKTKDIEGRKKQISELSSDLNEESVHQLAGLTKFTAYHSLSFKALRLINEEMLKTELNQMQSITLFGLKQNNELSVKGMKNIQADDTAILSPVAKRAQRETFKVVNRLREIYGEFDSIVVEMAREKNSEEQRKAIRERQKFFEMRNKQVADIIGDDRKINAKLREKLVLYQEQDGKTAYSLEPIDLKLLIDDPNAYEVDHIIPISISLDDSITNKVLVTHRENQEKGNLTPISAFVKGRFTKGSLAQYKAYCLKLKEKNIKTNKGYRKKVEQYLLNENDIYKYDIQKEFINRNLVDTSYASRVVLNTLTTYFKQNEIPTKVFTVKGSLTNAFRRKINLKKDRDEDYGHHAIDALIIASMPKMRLLSTIFSRYKIEDIYDESTGEVFSSGDDSMYYDDRYFAFIASLKAIKVRKFSHKIDTKPNRSVADETIYSTRVIDGKEKVVKKYKDIYDPKFTALAEDILNNAYQEKYLMALHDPQTFDQIVKVVNYYFEEMSKSEKYFTKDKKGRIKISGMNPLSLYRDEHGMLKKYSKKGDGPAITQMKYFDGVLGNHIDISAHYQVRDKKVVLQQISPYRTDFYYSKENGYKFVTIRYKDVRWSEKKKKYVIDQQDYAMKKAEKKIDDTYEFQFSMHRDELIGITKAEGEALIYPDETWHNFNFFFHAGETPEILKFTATNNDKSNKIEVKPIHCYCKMRLMPTISKKIVRIDKYATDVVGNLYKVKKNTLKFEFD

SEQ ID NO: 365 - protein, 1132 aa, Nitratifractor salsuginis
MKKILGVDLGITSFGYAILQETGKDLYRCLDNSVVMRNNPYDEKSGESSQSIRSTQKSMRRLIEKRKKRIRCVAQTMERYGILDYSETMKINDPKNNPIKNRWQLRAVDAWKRPLSPQELFAIFAHMAKHRGYKSIATEDLIYELELELGLNDPEKESEKKADERRQVYNALRHLEELRKKYGGETIAQTIHRAVEAGDLRSYRNHDDYEKMIRREDIEEEIEKVLLRQAELGALGLPEEQVSELIDELKACITDQEMPTIDESLFGKCTFYKDELAAPAYSYLYDLYRLYKKLADLNIDGYEVTQEDREKVIEWVEKKIAQGKNLKKITHKDLRKILGLAPEQKIFGVEDERIVKGKKEPRTFVPFFFLADIAKFKELFASIQKHPDALQIFRELAEILQRSKTPQEALDRLRALMAGKGIDTDDRELLELFKNKRSGTRELSHRYILEALPLFLEGYDEKEVQRILGFDDREDYSRYPKSLRHLHLREGNLFEKEENPINNHAVKSLASWALGLIADLSWRYGPFDEIILETTRDALPEKIRKEIDKAMREREKALDKIIGKYKKEFPSIDKRLARKIQLWERQKGLDLYSGKVINLSQLLDGSADIEHIVPQSLGGLSTDYNTIVTLKSVNAAKGNRLPGDWLAGNPDYRERIGMLSEKGLIDWKKRKNLLAQSLDEIYTENTHSKGIRATSYLEALVAQVLKRYYPFPDPELRKNGIGVRMIPGKVTSKTRSLLGIKSKSRETNFHHAEDALILSTLTRGWQNRLHRMLRDNYGKSEAELKELWKKYMPHIEGLTLADYIDEAFRRFMSKGEESLFYRDMFDTIRSISYWVDKKPLSASSHKETVYSSRHEVPTLRKNILEAFDSLNVIKDRHKLTTEEFMKRYDKEIRQKLWLHRIGNTNDESYRAVEERATQIAQILTRYQLMDAQNDKEIDEKFQQALKELITSPIEVTGKLLRKMRFVYDKLNAMQIDRGLVETDKNMLGIHISKGPNEKLIFRRMDVNNAHELQKERSGILCYLNEMLFIFNKKGLIHYGCLRSYLEKGQGSKYIALFNPRFPANPKAQPSKFTSDSKIKQVGIGSATGIIKAHLDLDGHVRSYEVFGTLPEGSIEWFKEESGYGRVEDDPHH

SEQ ID NO: 366 - protein, 1173 aa, Rhodospirillum rubrum
MRPIEPWILGLDIGTDSLGWAVFSCEEKGPPTAKELLGGGVRLFDSGRDAKDHTSRQAERGAFRRARRQTRTWPWRRDRLIALFQAAGLTPPAAETRQIALALRREAVSRPLAPDALWAALLHLAHHRGFRSNRIDKRERAAAKALAKAKPAKATAKATAPAKEADDEAGFWEGAEAALRQRMAASGAPTVGALLADDLDRGQPVRMRYNQSDRDGVVAPTRALIAEELAEIVARQSSAYPGLDWPAVTRLVLDQRPLRSKGAGPCAFLPGEDRALRALPTVQDFIIRQTLANLRLPSTSADEPRPLTDEEHAKALALLSTARFVEWPALRRALGLKRGVKFTAETERNGAKQAARGTAGNLTEAILAPLIPGWSGWDLDRKDRVFSDLWAARQDRSALLALIGDPRGPTRVTEDETAEAVADAIQIVLPTGRASLSAKAARAIAQAMAPGIGYDEAVTLALGLHHSHRPRQERLARLPYYAAALPDVGLDGDPVGPPPAEDDGAAAEAYYGRIGNISVHIALNETRKIVNALLHRHGPILRLVMVETTRELKAGADERKRMIAEQAERERENAEIDVELRKSDRWMANARERRQRVRLARRQNNLCPYTSTPIGHADLLGDAYDIDHVIPLARGGRDSLDNMVLCQSDANKTKGDKTPWEAFHDKPGWIAQRDDFLARLDPQTAKALAWRFADDAGERVARKSAEDEDQGFLPRQLTDTGYIARVALRYLSLVTNEPNAVVATNGRLTGLLRLAWDITPGPAPRDLLPTPRDALRDDTAARRFLDGLTPPPLAKAVEGAVQARLAALGRSRVADAGLADALGLTLASLGGGGKNRADHRHHFIDAAMIAVTTRGLINQINQASGAGRILDLRKWPRTNFEPPYPTFRAEVMKQWDHIHPSIRPAHRDGGSLHAATVFGVRNRPDARVLVQRKPVEKLFLDANAKPLPADKIAEIIDGFASPRMAKRFKALLARYQAAHPEVPPALAALAVARDPAFGPRGMTANTVIAGRSDGDGEDAGLITPFRANPKAAVRTMGNAVYEVWEIQVKGRPRWTHRVLTRFDRTQPAPPPPPENARLVMRLRRGDLVYWPLESGDRLFLVKKMAVDGRLALWPARLATGKATALYAQLSCPNINLNGDQGYCVQSAEGIRKEKIRTTSCTALGRLRLSKKAT

SEQ ID NO: 367 - protein, 1021 aa, Clostridium cellulolyticum
MKYTLGLDVGIASVGWAVIDKDNNKIIDLGVRCFDKAEESKTGESLATARRIARGMRRRISRRSQRLRLVKKLFVQYEIIKDSSEFNRIFDTSRDGWKDPWELRYNALSRILKPYELVQVLTHITKRRGFKSNRKEDLSTTKEGVVITSIKNNSEMLRTKNYRTIGEMIFMETPENSNKRNKVDEYIHTIAREDLLNEIKYIFSIQRKLGSPFVTEKLEHDFLNIWEFQRPFASGDSILSKVGKCTLLKEELRAPTSCYTSEYFGLLQSINNLVLVEDNNTLTLNNDQRAKIIEYAHFKNEIKYSEIRKLLDIEPEILFKAHNLTHKNPSGNNESKKFYEMKSYHKLKSTLPTDIWGKLHSNKESLDNLFYCLTVYKNDNEIKDYLQANNLDYLIEYIAKLPTFNKFKHLSLVAMKRIIPFMEKGYKYSDACNMAELDFTGSSKLEKCNKLTVEPIIENVTNPVVIRALTQARKVINAIIQKYGLPYMVNIELAREAGMTRQDRDNLKKEHENNRKAREKISDLIRQNGRVASGLDILKWRLWEDQGGRCAYSGKPIPVCDLLNDSLTQIDHIYPYSRSMDDSYMNKVLVLTDENQNKRSYTPYEVWGSTEKWEDFEARIYSMHLPQSKEKRLLNRNFITKDLDSFISRNLNDTRYISRFLKNYIESYLQFSNDSPKSCVVCVNGQCTAQLRSRWGLNKNREESDLHHALDAAVIACADRKIIKEITNYYNERENHNYKVKYPLPWHSFRQDLMETLAGVFISRAPRRKITGPAHDETIRSPKHFNKGLTSVKIPLTTVTLEKLETMVKNTKGGISDKAVYNVLKNRLIEHNNKPLKAFAEKIYKPLKNGTNGAIIRSIRVETPSYTGVFRNEGKGISDNSLMVRVDVFKKKDKYYLVPIYVAHMIKKELPSKAIVPLKPESQWELIDSTHEFLFSLYQNDYLVIKTKKGITEGYYRSCHRGTGSLSLMPHFANNKNVKIDIGVRTAISIEKYNVDILGNKSIVKGEPRRGMEKYNSFKSN

SEQ ID NO: 368 - protein, 1024 aa, Helicobacter mustelae
MIRTLGIDIGIASIGWAVIEGEYTDKGLENKEIVASGVRVFTKAENPKNKESLALPRTLARSARRRNARKKGRIQQVKHYLSKALGLDLECFVQGEKLATLFQTSKDFLSPWELRERALYRVLDKEELARVILHIAKRRGYDDITYGVEDNDSGKIKKAIAENSKRIKEEQCKTIGEMMYKLYFQKSLNVRNKKESYNRCVGRSELREELKTIFQIQQELKSPWVNEELIYKLLGNPDAQSKQEREGLIFYQRPLKGFGDKIGKCSHIKKGENSPYRACKHAPSAEEFVALTKSINFLKNLTNRHGLCFSQEDMCVYLGKILQEAQKNEKGLTYSKLKLLLDLPSDFEFLGLDYSGKNPEKAVFLSLPSTFKLNKITQDRKTQDKIANILGANKDWEAILKELESLQLSKEQIQTIKDAKLNFSKHINLSLEALYHLLPLMREGKRYDEGVEILQERGIFSKPQPKNRQLLPPLSELAKEESYFDIPNPVLRRALSEFRKVVNALLEKYGGFHYFHIELTRDVCKAKSARMQLEKINKKNKSENDAASQLLEVLGLPNTYNNRLKCKLWKQQEEYCLYSGEKITIDHLKDQRALQIDHAFPLSRSLDDSQSNKVLCLTSSNQEKSNKTPYEWLGSDEKKWDMYVGRVYSSNFSPSKKRKLTQKNFKERNEEDFLARNLVDTGYIGRVTKEYIKHSLSFLPLPDGKKEHIRIISGSMTSTMRSFWGVQEKNRDHHLHHAQDAIIIACIEPSMIQKYTTYLKDKETHRLKSHQKAQILREGDHKLSLRWPMSNFKDKIQESIQNIIPSHHVSHKVTGELHQETVRTKEFYYQAFGGEEGVKKALKFGKIREINQGIVDNGAMVRVDIFKSKDKGKFYAVPIYTYDFAIGKLPNKAIVQGKKNGIIKDWLEMDENYEFCFSLFKNDCIKIQTKEMQEAVLAIYKSTNSAKATIELEHLSKYALKNEDEEKMFTDTDKEKNKTMTRESCGIQGLKVFQKVKLSVLGEVLEHKPRNRQNIALKTTPKHV

SEQ ID NO: 369 - protein, 1092 aa, Ilyobacter polytropus
MKYSIGLDIGIASVGWSVINKDKERIEDMGVRIFQKAENPKDGSSLASSRREKRGSRRRNRRKKHRLDRIKNILCESGLVKKNEIEKIYKNAYLKSPWELRAKSLEAKISNKEIAQILLHIAKRRGFKSFRKTDRNADDTGKLLSGIQENKKIMEEKGYLTIGDMVAKDPKFNTHVRNKAGSYLFSFSRKLLEDEVRKIQAKQKELGNTHFTDDVLEKYIEVFNSQRNFDEGPSKPSPYYSEIGQIAKMIGNCTFESSEKRTAKNTWSGERFVFLQKLNNFRIVGLSGKRPLTEEERDIVEKEVYLKKEVRYEKLRKILYLKEEERFGDLNYSKDEKQDKKTEKTKFISLIGNYTIKKLNLSEKLKSEIEEDKSKLDKIIEILTFNKSDKTIESNLKKLELSREDIEILLSEEFSGTLNLSLKAIKKILPYLEKGLSYNEACEKADYDYKNNGIKFKRGELLPVVDKDLIANPVVLRAISQTRKVVNAIIRKYGTPHTIHVEVARDLAKSYDDRQTIIKENKKRELENEKTKKFISEEFGIKNVKGKLLLKYRLYQEQEGRCAYSRKELSLSEVILDESMTDIDHIIPYSRSMDDSYSNKVLVLSGENRKKSNLLPKEYFDRQGRDWDTFVLNVKAMKIHPRKKSNLLKEKFTREDNKDWKSRALNDTRYISRFVANYLENALEYRDDSPKKRVFMIPGQLTAQLRARWRLNKVRENGDLHHALDAAVVAVTDQKAINNISNISRYKELKNCKDVIPSIEYHADEETGEVYFEEVKDTRFPMPWSGFDLELQKRLESENPREEFYNLLSDKRYLGWFNYEEGFIEKLRPVFVSRMPNRGVKGQAHQETIRSSKKISNQIAVSKKPLNSIKLKDLEKMQGRDTDRKLYEALKNRLEEYDDKPEKAFAEPFYKPTNSGKRGPLVRGIKVEEKQNVGVYVNGGQASNGSMVRIDVFRKNGKFYTVPIYVHQTLLKELPNRAINGKPYKDWDLIDGSFEFLYSFYPNDLIEIEFGKSKSIKNDNKLTKTEIPEVNLSEVLGYYRGMDTSTGAATIDTQDGKIQMRIGIKTVKNIKKYQVDVLGNVYKVKREKRQTF

SEQ ID NO: 370 - protein, 1179 aa, Sphaerochaeta globus
MSKKVSRRYEEQAQEICQRLGSRPYSIGLDLGVGSIGVAVAAYDPIKKQPSDLVFVSSRIFIPSTGAAERRQKRGQRNSLRHRANRLKFLWKLLAERNLMLSYSEQDVPDPARLRFEDAVVRANPYELRLKGLNEQLTLSELGYALYHIANHRGSSSVRTFLDEEKSSDDKKLEEQQAMTEQLAKEKGISTFIEVLTAFNTNGLIGYRNSESVKSKGVPVPTRDIISNEIDVLLQTQKQFYQEILSDEYCDRIVSAILFENEKIVPEAGCCPYFPDEKKLPRCHFLNEERRLWEAINNARIKMPMQEGAAKRYQSASFSDEQRHILFHIARSGTDITPKLVQKEFPALKTSIIVLQGKEKAIQKIAGFRFRRLEEKSFWKRLSEEQKDDFFSAWTNTPDDKRLSKYLMKHLLLTENEVVDALKTVSLIGDYGPIGKTATQLLMKHLEDGLTYTEALERGMETGEFQELSVWEQQSLLPYYGQILTGSTQALMGKYWHSAFKEKRDSEGFFKPNTNSDEEKYGRIANPVVHQTLNELRKLMNELITILGAKPQEITVELARELKVGAEKREDIIKQQTKQEKEAVLAYSKYCEPNNLDKRYIERFRLLEDQAFVCPYCLEHISVADIAAGRADVDHIFPRDDTADNSYGNKVVAHRQCNDIKGKRTPYAAFSNTSAWGPIMHYLDETPGMWRKRRKFETNEEEYAKYLQSKGFVSRFESDNSYIAKAAKEYLRCLFNPNNVTAVGSLKGMETSILRKAWNLQGIDDLLGSRHWSKDADTSPTMRKNRDDNRHHGLDAIVALYCSRSLVQMINTMSEQGKRAVEIEAMIPIPGYASEPNLSFEAQRELFRKKILEFMDLHAFVSMKTDNDANGALLKDTVYSILGADTQGEDLVFVVKKKIKDIGVKIGDYEEVASAIRGRITDKQPKWYPMEMKDKIEQLQSKNEAALQKYKESLVQAAAVLEESNRKLIESGKKPIQLSEKTISKKALELVGGYYYLISNNKRTKTFVVKEPSNEVKGFAFDTGSNLCLDFYHDAQGKLCGEIIRKIQAMNPSYKPAYMKQGYSLYVRLYQGDVCELRASDLTEAESNLAKTTHVRLPNAKPGRTFVIIITFTEMGSGYQIYFSNLAKSKKGQDTSFTLTTIKNYDVRKVQLSSAGLVRYVSPLLVDKIEKDEVALCGE

SEQ ID NO: 371 - protein, 1054 aa, Staphylococcus lugdunensis
MNQKFILGLDIGITSVGYGLIDYETKNIIDAGVRLFPEANVENNEGRRSKRGSRRLKRRRIHRLERVKKLLEDYNLLDQSQIPQSTNPYAIRVKGLSEALSKDELVIALLHIAKRRGIHKIDVIDSNDDVGNELSTKEQLNKNSKLLKDKFVCQIQLERMNEGQVRGEKNRFKTADIIKEIIQLLNVQKNFHQLDENFINKYIELVEMRREYFEGPGKGSPYGWEGDPKAWYETLMGHCTYFPDELRSVKYAYSADLFNALNDLNNLVIQRDGLSKLEYHEKYHIIENVFKQKKKPTLKQIANEINVNPEDIKGYRITKSGKPQFTEFKLYHDLKSVLFDQSILENEDVLDQIAEILTIYQDKDSIKSKLTELDILLNEEDKENIAQLTGYTGTHRLSLKCIRLVLEEQWYSSRNQMEIFTHLNIKPKKINLTAANKIPKAMIDEFILSPVVKRTFGQAINLINKIIEKYGVPEDIIIELARENNSKDKQKFINEMQKKNENTRKRINEIIGKYGNQNAKRLVEKIRLHDEQEGKCLYSLESIPLEDLLNNPNHYEVDHIIPRSVSFDNSYHNKVLVKQSENSKKSNLTPYQYFNSGKSKLSYNQFKQHILNLSKSQDRISKKKKEYLLEERDINKFEVQKEFINRNLVDTRYATRELTNYLKAYFSANNMNVKVKTINGSFTDYLRKVWKFKKERNHGYKHHAEDALIIANADFLFKENKKLKAVNSVLEKPEIESKQLDIQVDSEDNYSEMFIIPKQVQDIKDFRNFKYSHRVDKKPNRQLINDTLYSTRKKDNSTYIVQTIKDIYAKDNTTLKKQFDKSPEKFLMYQHDPRTFEKLEVIMKQYANEKNPLAKYHEETGEYLTKYSKKNNGPIVKSLKYIGNKLGSHLDVTHQFKSSTKKLVKLSIKPYRFDVYLTDKGYKFITISYLDVLKKDNYYYIPEQKYDKLKLGKAIDKNAKFIASFYKNDLIKLDGEIYKIIGVNSDTRNMIELDLPDIRYKEYCELNNIKGEPRIKKTIGKKVNSIEKLTTDVLGNVFTNTQYTKPQLLFKRGN

SEQ ID NO: 372 - protein, 1061 aa, Treponema sp.
MIMKLEKWRLGLDLGTNSIGWSVFSLDKDNSVQDLIDMGVRIFSDGRDPKTKEPLAVARRTARSQRKLIYRRKLRRKQVFKFLQEQGLFPKTKEECMTLKSLNPYELRIKALDEKLEPYELGRALFNLAVRRGFKSNRKDGSREEVSEKKSPDEIKTQADMQTHLEKAIKENGCRTITEFLYKNQGENGGIRFAPGRMTYYPTRKMYEEEFNLIRSKQEKYYPQVDWDDIYKAIFYQRPLKPQQRGYCIYENDKERTFKAMPCSQKLRILQDIGNLAYYEGGSKKRVELNDNQDKVLYELLNSKDKVTFDQMRKALCLADSNSFNLEENRDFLIGNPTAVKMRSKNRFGKLWDEIPLEEQDLIIETIITADEDDAVYEVIKKYDLTQEQRDFIVKNTILQSGTSMLCKEVSEKLVKRLEEIADLKYHEAVESLGYKFADQTVEKYDLLPYYGKVLPGSTMEIDLSAPETNPEKHYGKISNPTVHVALNQTRVVVNALIKEYGKPSQIAIELSRDLKNNVEKKAEIARKQNQRAKENIAINDTISALYHTAFPGKSFYPNRNDRMKYRLWSELGLGNKCIYCGKGISGAELFTKEIEIEHILPFSRTLLDAESNLTVAHSSCNAFKAERSPFEAFGTNPSGYSWQEIIQRANQLKNTSKKNKFSPNAMDSFEKDSSFIARQLSDNQYIAKAALRYLKCLVENPSDVWTTNGSMTKLLRDKWEMDSILCRKFTEKEVALLGLKPEQIGNYKKNRFDHRHHAIDAVVIGLTDRSMVQKLATKNSHKGNRIEIPEFPILRSDLIEKVKNIVVSFKPDHGAEGKLSKETLLGKIKLHGKETFVCRENIVSLSEKNLDDIVDEIKSKVKDYVAKHKGQKIEAVLSDFSKENGIKKVRCVNRVQTPIEITSGKISRYLSPEDYFAAVIWEIPGEKKTFKAQYIRRNEVEKNSKGLNVVKPAVLENGKPHPAAKQVCLLHKDDYLEFSDKGKMYFCRIAGYAATNNKLDIRPVYAVSYCADWINSTNETMLTGYWKPTPTQNWVSVNVLFDKQKARLVTVSPIGRVFRK

SEQ ID NO: 373 - protein, 1011 aa, Unknown
  Uncultured delta polypeptide
MSSKAIDSLEQLDLFKPQEYTLGLDLGIKSIGWAILSGERIANAGVYLFETAEELNSTGNKLISKAAERGRKRRIRRMLDRKARRGRHIRYLLEREGLPTDELEEVVVHQSNRTLWDVRAEAVERKLTKQELAAVLFHLVRHRGYFPNTKKLPPDDESDSADEEQGKINRATSRLREELKASDCKTIGQFLAQNRDRQRNREGDYSNLMARKLVFEEALQILAFQRKQGHELSKDFEKTYLDVLMGQRSGRSPKLGNCSLIPSELRAPSSAPSTEWFKFLQNLGNLQISNAYREEWSIDAPRRAQIIDACSQRSTSSYWQIRRDFQIPDEYRFNLVNYERRDPDVDLQEYLQQQERKTLANFRNWKQLEKIIGTGHPIQTLDEAARLITLIKDDEKLSDQLADLLPEASDKAITQLCELDFTTAAKISLEAMYRILPHMNQGMGFFDACQQESLPEIGVPPAGDRVPPFDEMYNPVVNRVLSQSRKLINAVIDEYGMPAKIRVELARDLGKGRELRERIKLDQLDKSKQNDQRAEDFRAEFQQAPRGDQSLRYRLWKEQNCTCPYSGRMIPVNSVLSEDTQIDHILPISQSFDNSLSNKVLCFTEENAQKSNRTPFEYLDAADFQRLEAISGNWPEAKRNKLLHKSFGKVAEEWKSRALNDTRYLTSALADHLRHHLPDSKIQTVNGRITGYLRKQWGLEKDRDKHTHHAVDAIVVACTTPAIVQQVTLYHQDIRRYKKLGEKRPTPWPETFRQDVLDVEEEIFITRQPKKVSGGIQTKDTLRKHRSKPDRQRVALTKVKLADLERLVEKDASNRNLYEHLKQCLEESGDQPTKAFKAPFYMPSGPEAKQRPILSKVTLLREKPEPPKQLTELSGGRRYDSMAQGRLDIYRYKPGGKRKDEYRVVLQRMIDLMRGEENVHVFQKGVPYDQGPEIEQNYTFLFSLYFDDLVEFQRSADSEVIRGYYRTFNIANGQLKISTYLEGRQDFDFFGANRLAHFAKVQVNLLGKVIK

SEQ ID NO: 374 - protein, 1029 aa, Alicycliphilus denitrificans
MRSLRYRLALDLGSTSLGWALFRLDACNRPTAVIKAGVRIFSDGRNPKDGSSLAVTRRAARAMRRRRDRLLKRKTRMQAKLVEHGFFPADAGKRKALEQLNPYALRAKGLQEALLPGEFARALFHINQRRGFKSNRKTDKKDNDSGVLKKAIGQLRQQMAEQGSRTVGEYLWTRLQQGQGVRARYREKPYTTEEGKKRIDKSYDLYIDRAMIEQEFDALWAAQAAFNPTLFHEAARADLKDTLLHQRPLRPVKPGRCTLLPEEERAPLALPSTQRFRIHQEVNHLRLLDENLREVALTLAQRDAVVTALETKAKLSFEQIRKLLKLSGSVQFNLEDAKRTELKGNATSAALARKELFGAAWSGFDEALQDEIVWQLVTEEGEGALIAWLQTHTGVDEARAQAIVDVSLPEGYGNLSRKALARIVPALRAAVITYDKAVQAAGFDHHSQLGFEYDASEVEDLVHPETGEIRSVFKQLPYYGKALQRHVAFGSGKPEDPDEKRYGKIANPTVHIGLNQVRMVVNALIRRYGRPTEVVIELARDLKQSREQKVEAQRRQADNQRRNARIRRSIAEVLGIGEERVRGSDIQKWICWEELSFDAADRRCPYSGVQISAAMLLSDEVEVEHILPFSKTLDDSLNNRTVAMRQANRIKRNRTPWDARAEFEAQGWSYEDILQRAERMPLRKRYRFAPDGYERWLGDDKDFLARALNDTRYLSRVAAEYLRLVCPGTRVIPGQLTALLRGKFGLNDVLGLDGEKNRNDHRHHAVDACVIGVTDQGLMQRFATASAQARGDGLTRLVDGMPMPWPTYRDHVERAVRHIWVSHRPDHGFEGAMMEETSYGIRKDGSIKQRRKADGSAGREISNLIRIHEATQPLRHGVSADGQPLAYKGYVGGSNYCIEITVNDKGKWEGEVISTFRAYGVVRAGGMGRLRNPHEGQNGRKLIMRLVIGDSVRLEVDGAERTMRIVKISGSNGQIFMAPIHEANVDARNTDKQDAFTYTSKYAGSLQKAKTRRVTISPIGEVRDPGFKG

SEQ ID NO: 375 - protein, 1168 aa, Azospirillum sp.
MARPAFRAPRREHVNGWTPDPHRISKPFFILVSWHLLSRVVIDSSSGCFPGTSRDHTDKFAEWECAVQPYRLSFDLGTNSIGWGLLNLDRQGKPREIRALGSRIFSDGRDPQDKASLAVARRLARQMRRRRDRYLTRRTRLMGALVRFGLMPADPAARKRLEVAVDPYLARERATRERLEPFEIGRALFHLNQRRGYKPVRTATKPDEEAGKVKEAVERLEAAIAAAGAPTLGAWFAWRKTRGETLRARLAGKGKEAAYPFYPARRMLEAEFDTLWAEQARHHPDLLTAEAREILRHRIFHQRPLKPPPVGRCTLYPDDGRAPRALPSAQRLRLFQELASLRVIHLDLSERPLTPAERDRIVAFVQGRPPKAGRKPGKVQKSVPFEKLRGLLELPPGTGFSLESDKRPELLGDETGARIAPAFGPGWTALPLEEQDALVELLLTEAEPERAIAALTARWALDEATAAKLAGATLPDFHGRYGRRAVAELLPVLERETRGDPDGRVRPIRLDEAVKLLRGGKDHSDFSREGALLDALPYYGAVLERHVAFGTGNPADPEEKRVGRVANPTVHIALNQLRHLVNAILARHGRPEEIVIELARDLKRSAEDRRREDKRQADNQKRNEERKRLILSLGERPTPRNLLKLRLWEEQGPVENRRCPYSGETISMRMLLSEQVDIDHILPFSVSLDDSAANKVVCLREANRIKRNRSPWEAFGHDSERWAGILARAEALPKNKRWRFAPDALEKLEGEGGLRARHLNDTRHLSRLAVEYLRCVCPKVRVSPGRLTALLRRRWGIDAILAEADGPPPEVPAETLDPSPAEKNRADHRHHALDAVVIGCIDRSMVQRVQLAAASAEREAAAREDNIRRVLEGFKEEPWDGFRAELERRARTIVVSHRPEHGIGGALHKETAYGPVDPPEEGFNLVVRKPIDGLSKDEINSVRDPRLRRALIDRLAIRRRDANDPATALAKAAEDLAAQPASRGIRRVRVLKKESNPIRVEHGGNPSGPRSGGPFHKLLLAGEVHHVDVALRADGRRWVGHWVTLFEAHGGRGADGAAAPPRLGDGERFLMRLHKGDCLKLEHKGRVRVMQVVKLEPSSNSVVVVEPHQVKTDRSKHVKISCDQLRARGARRVTVDPLGRVRVHAPGARVGIGGDAGRTAMEPAEDIS

SEQ ID NO: 376 - protein, 1064 aa, Bradyrhizobium sp.
MKRTSLRAYRLGVDLGANSLGWFVVWLDDHGQPEGLGPGGVRIFPDGRNPQSKQSNAAGRRLARSARRRRDRYLQRRGKLMGLLVKHGLMPADEPARKRLECLDPYGLRAKALDEVLPLHHVGRALFHLNQRRGLFANRAIEQGDKDASAIKAAAGRLQTSMQACGARTLGEFLNRRHQLRATVRARSPVGGDVQARYEFYPTRAMVDAEFEAIWAAQAPHHPTMTAEAHDTIREAIFSQRAMKRPSIGKCSLDPATSQDDVDGFRCAWSHPLAQRFRIWQDVRNLAVVETGPTSSRLGKEDQDKVARALLQTDQLSFDEIRGLLGLPSDARFNLESDRRDHLKGDATGAILSARRHFGPAWHDRSLDRQIDIVALLESALDEAAIIASLGTTHSLDEAAAQRALSALLPDGYCRLGLRAIKRVLPLMEAGRTYAEAASAAGYDHALLPGGKLSPTGYLPYYGQWLQNDVVGSDDERDTNERRWGRLPNPTVHIGIGQLRRVVNELIRWHGPPAEITVELTRDLKLSPRRLAELEREQAENQRKNDKRTSLLRKLGLPASTHNLLKLRLWDEQGDVASECPYTGEAIGLERLVSDDVDIDHLIPFSISWDDSAANKVVCMRYANREKGNRTPFEAFGHRQGRPYDWADIAERAARLPRGKRWRFGPGARAQFEELGDFQARLLNETSWLARVAKQYLAAVTHPHRIHVLPGRLTALLRATWELNDLLPGSDDRAAKSRKDHRHHAIDALVAALTDQALLRRMANAHDDTRRKIEVLLPWPTFRIDLETRLKAMLVSHKPDHGLQARLHEDTAYGTVEHPETEDGANLVYRKTFVDISEKEIDRIRDRRLRDLVRAHVAGERQQGKTLKAAVLSFAQRRDIAGHPNGIRHVRLTKSIKPDYLVPIRDKAGRIYKSYNAGENAFVDILQAESGRWIARATTVFQANQANESHDAPAAQPIMRVFKGDMLRIDHAGAEKFVKIVRLSPSNNLLYLVEHHQAGVFQTRHDDPEDSFRWLFASFDKLREWNAELVRIDTLGQPWRRKRGLETGSEDATRIGWTRPKKWP

SEQ ID NO: 377 - protein, 1037 aa, Parvibaculum lavamentivorans
MERIFGFDIGTTSIGFSVIDYSSTQSAGNIQRLGVRIFPEARDPDGTPLNQQRRQKRMMRRQLRRRRIRRKALNETLHEAGFLPAYGSADWPVVMADEPYELRRRGLEEGLSAYEFGRAIYHLAQHRHFKGRELEESDTPDPDVDDEKEAANERAATLKALKNEQTTLGAWLARRPPSDRKRGIHAHRNVVAEEFERLWEVQSKFHPALKSEEMRARISDTIFAQRPVFWRKNTLGECRFMPGEPLCPKGSWLSQQRRMLEKLNNLAIAGGNARPLDAEERDAILSKLQQQASMSWPGVRSALKALYKQRGEPGAEKSLKFNLELGGESKLLGNALEAKLADMFGPDWPAHPRKQEIRHAVHERLWAADYGETPDKKRVIILSEKDRKAHREAAANSFVADFGITGEQAAQLQALKLPTGWEPYSIPALNLFLAELEKGERFGALVNGPDWEGWRRTNFPHRNQPTGEILDKLPSPASKEERERISQLRNPTVVRTQNELRKVVNNLIGLYGKPDRIRIEVGRDVGKSKREREEIQSGIRRNEKQRKKATEDLIKNGIANPSRDDVEKWILWKEGQERCPYTGDQIGFNALFREGRYEVEHIWPRSRSFDNSPRNKTLCRKDVNIEKGNRMPFEAFGHDEDRWSAIQIRLQGMVSAKGGTGMSPGKVKRFLAKTMPEDFAARQLNDTRYAAKQILAQLKRLWPDMGPEAPVKVEAVTGQVTAQLRKLWTLNNILADDGEKTRADHRHHAIDALTVACTHPGMTNKLSRYWQLRDDPRAEKPALTPPWDTIRADAEKAVSEIVVSHRVRKKVSGPLHKETTYGDTGTDIKTKSGTYRQFVTRKKIESLSKGELDEIRDPRIKEIVAAHVAGRGGDPKKAFPPYPCVSPGGPEIRKVRLTSKQQLNLMAQTGNGYADLGSNHHIAIYRLPDGKADFEIVSLFDASRRLAQRNPIVQRTRADGASFVMSLAAGEAIMIPEGSKKGIWIVQGVWASGQVVLERDTDADHSTTTRPMPNPILKDDAKKVSIDPIGRVRPSND

SEQ ID NO: 378 - protein, 1218 aa, Prevotella timonensis
MNKRILGLDTGTNSLGWAVVDWDEHAQSYELIKYGDVIFQEGVKIEKGIESSKAAERSGYKAIRKQYFRRRLRKIQVLKVLVKYHLCPYLSDDDLRQWHLQKQYPKSDELMLWQRTSDEEGKNPYYDRHRCLHEKLDLTVEADRYTLGRALYHLTQRRGFLSNRLDTSADNKEDGVVKSGISQLSTEMEEAGCEYLGDYFYKLYDAQGNKVRIRQRYTDRNKHYQHEFDAICEKQELSSELIEDLQRAIFFQLPLKSQRHGVGRCTFERGKPRCADSHPDYEEFRMLCFVNNIQVKGPHDLELRPLTYEEREKIEPLFFRKSKPNFDFEDIAKALAGKKNYAWIHDKEERAYKFNYRMTQGVPGCPTIAQLKSIFGDDWKTGIAETYTLIQKKNGSKSLQEMVDDVWNVLYSFSSVEKLKEFAHHKLQLDEESAEKFAKIKLSHSFAALSLKAIRKFLPFLRKGMYYTHASFFANIPTIVGKEIWNKEQNRKYIMENVGELVFNYQPKHREVQGTIEMLIKDFLANNFELPAGATDKLYHPSMIETYPNAQRNEFGILQLGSPRTNAIRNPMAMRSLHILRRVVNQLLKESIIDENTEVHVEYARELNDANKRRAIADRQKEQDKQHKKYGDEIRKLYKEETGKDIEPTQTDVLKFQLWEEQNHHCLYTGEQIGITDFIGSNPKFDIEHTIPQSVGGDSTQMNLTLCDNRFNREVKKAKLPTELANHEEILTRIEPWKNKYEQLVKERDKQRTFAGMDKAVKDIRIQKRHKLQMEIDYWRGKYERFTMTEVPEGFSRRQGTGIGLISRYAGLYLKSLFHQADSRNKSNVYVVKGVATAEFRKMWGLQSEYEKKCRDNHSHHCMDAITIACIGKREYDLMAEYYRMEETFKQGRGSKPKFSKPWATFTEDVLNIYKNLLVVHDTPNNMPKHTKKYVQTSIGKVLAQGDTARGSLHLDTYYGAIERDGEIRYVVRRPLSSFTKPEELENIVDETVKRTIKEAIADKNFKQAIAEPIYMNEEKGILIKKVRCFAKSVKQPINIRQHRDLSKKEYKQQYHVMNENNYLLAIYEGLVKNKVVREFEIVSYIEAAKYYKRSQDRNIFSSIVPTHSTKYGLPLKTKLLMGQLVLMFEENPDEIQVDNTKDLVKRLYKVVGIEKDGRIKFKYHQEARKEGLPIFSTPYKNNDDYAPIFRQSINNINILVDGIDFTIDILGKVTLKE

SEQ ID NO: 379 - protein, 1088 aa, Bacillus smithii
MNYKMGLDIGIASVGWAVINLDLKRIEDLGVRIFDKAEHPQNGESLALPRRIARSARRRLRRRKHRLERIRRLLVSENVLTKEEMNLLFKQKKQIDVWQLRVDALERKLNNDELARVLLHLAKRRGFKSNRKSERNSKESSEFLKNIEENQSILAQYRSVGEMIVKDSKFAYHKRNKLDSYSNMIARDDLEREIKLIFEKQREFNNPVCTERLEEKYLNIWSSQRPFASKEDIEKKVGFCTFEPKEKRAPKATYTFQSFIVWEHINKLRLVSPDETRALTEIERNLLYKQAFSKNKMTYYDIRKLLNLSDDIHFKGLLYDPKSSLKQIENIRFLELDSYHKIRKCIENVYGKDGIRMFNETDIDTFGYALTIFKDDEDIVAYLQNEYITKNGKRVSNLANKVYDKSLIDELLNLSFSKFAHLSMKAIRNILPYMEQGEIYSKACELAGYNFTGPKKKEKALLLPVIPNIANPVVMRALTQSRKVVNAIIKKYGSPVSIHIELARDLSHSFDERKKIQKDQTENRKKNETAIKQLIEYELTKNPTGLDIVKFKLWSEQQGRCMYSLKPIELERLLEPGYVEVDHILPYSRSLDDSYANKVLVLTKENREKGNHTPVEYLGLGSERWKKFEKFVLANKQFSKKKKQNLLRLRYEETEEKEFKERNLNDTRYISKFFANFIKEHLKFADGDGGQKVYTINGKITAHLRSRWDFNKNREESDLHHAVDAVIVACATQGMIKKITEFYKAREQNKESAKKKEPIFPQPWPHFADELKARLSKFPQESIEAFALGNYDRKKLESLRPVFVSRMPKRSVTGAAHQETLRRCVGIDEQSGKIQTAVKTKLSDIKLDKDGHFPMYQKESDPRTYEAIRQRLLEHNNDPKKAFQEPLYKPKKNGEPGPVIRTVKIIDTKNKVVHLDGSKTVAYNSNIVRTDVFEKDGKYYCVPVYTMDIMKGTLPNKAIEANKPYSEWKEMTEEYTFQFSLFPNDLVRIVLPREKTIKTSTNEEIIIKDIFAYYKTIDSATGGLELISHDRNFSLRGVGSKTLKRFEKYQVDVLGNIHKVKGEKRVGLAAPTNQKKGKTVDSLQSVSD

SEQ ID NO: 380 - protein, 1035 aa, Puniceispirillum marinum
MRRLGLDLGTNSIGWCLLDLGDDGEPVSIFRTGARIFSDGRDPKSLGSLKATRREARLTRRRRDRFIQRQKNLINALVKYGLMPADEIQRQALAYKDPYPIRKKALDEAIDPYEMGRAIFHINQRRGFKSNRKSADNEAGVVKQSIADLEMKLGEAGARTIGEFLADRQATNDTVRARRLSGTNALYEFYPDRYMLEQEFDTLWAKQAAFNPSLYIEAARERLKEIVFFQRKLKPQEVGRCIFLSDEDRISKALPSFQRFRIYQELSNLAWIDHDGVAHRITASLALRDHLFDELEHKKKLTFKAMRAILRKQGVVDYPVGFNLESDNRDHLIGNLTSCIMRDAKKMIGSAWDRLDEEEQDSFILMLQDDQKGDDEVRSILTQQYGLSDDVAEDCLDVRLPDGHGSLSKKAIDRILPVLRDQGLIYYDAVKEAGLGEANLYDPYAALSDKLDYYGKALAGHVMGASGKFEDSDEKRYGTISNPTVHIALNQVRAVVNELIRLHGKPDEVVIEIGRDLPMGADGKRELERFQKEGRAKNERARDELKKLGHIDSRESRQKFQLWEQLAKEPVDRCCPFTGKMMSISDLFSDKVEIEHLLPFSLTLDDSMANKTVCFRQANRDKGNRAPFDAFGNSPAGYDWQEILGRSQNLPYAKRWRFLPDAMKRFEADGGFLERQLNDTRYISRYTTEYISTIIPKNKIWVVTGRLTSLLRGFWGLNSILRGHNTDDGTPAKKSRDDHRHHAIDAIVVGMTSRGLLQKVSKAARRSEDLDLTRLFEGRIDPWDGFRDEVKKHIDAIIVSHRPRKKSQGALHNDTAYGIVEHAENGASTVVHRVPITSLGKQSDIEKVRDPLIKSALLNETAGLSGKSFENAVQKWCADNSIKSLRIVETVSIIPITDKEGVAYKGYKGDGNAYMDIYQDPTSSKWKGEIVSRFDANQKGFIPSWQSQFPTARLIMRLRINDLLKLQDGEIEEIYRVQRLSGSKILMAPHTEANVDARDRDKNDTFKLTSKSPGKLQSASARKVHISPTGLIREG

SEQ ID NO: 381 - protein, 1153 aa, Barnesiella intestinihominis
MKNILGLDLGLSSIGWSVIRENSEEQELVAMGSRVVSLTAAELSSFTQGNGVSINSQRTQKRTQRKGYDRYQLRRTLLRNKLDTLGMLPDDSLSYLPKLQLWGLRAKAVTQRIELNELGRVLLHLNQKRGYKSIKSDFSGDKKITDYVKTVKTRYDELKEMRLTIGELFFRRLTENAFFRCKEQVYPRQAYVEEFDCIMNCQRKFYPDILTDETIRCIRDEIIYYQRPLKSCKYLVSRCEFEKRFYLNAAGKKTEAGPKVSPRTSPLFQVCRLWESINNIVVKDRRNEIVFISAEQRAALFDFLNTHEKLKGSDLLKLLGLSKTYGYRLGEQFKTGIQGNKTRVEIERALGNYPDKKRLLQFNLQEESSSMVNTETGEIIPMISLSFEQEPLYRLWHVLYSIDDREQLQSVLRQKFGIDDDEVLERLSAIDLVKAGFGNKSSKAIRRILPFLQLGMNYAEACEAAGYNHSNNYTKAENEARALLDRLPAIKKNELRQPVVEKILNQMVNVVNALMEKYGRFDEIRVELARELKQSKEERSNTYKSINKNQRENEQIAKRIVEYGVPTRSRIQKYKMWEESKHCCIYCGQPVDVGDFLRGFDVEVEHIIPKSLYFDDSFANKVCSCRSCNKEKNNRTAYDYMKSKGEKALSDYVERVNTMYTNNQISKTKWQNLLTPVDKISIDFIDRQLRESQYIARKAKEILTSICYNVTATSGSVTSFLRHVWGWDTVLHDLNFDRYKKVGLTEVIEVNHRGSVIRREQIKDWSKRFDHRHHAIDALTIACTKQAYIQRLNNLRAEEGPDFNKMSLERYIQSQPHFSVAQVREAVDRILVSFRAGKRAVTPGKRYIRKNRKRISVQSVLIPRGALSEESVYGVIHVWEKDEQGHVIQKQRAVMKYPITSINREMLDKEKVVDKRIHRILSGRLAQYNDNPKEAFAKPVYIDKECRIPIRTVRCFAKPAINTLVPLKKDDKGNPVAWVNPGNNHHVAIYRDEDGKYKERTVTFWEAVDRCRVGIPAIVTQPDTIWDNILQRNDISENVLESLPDVKWQFVLSLQQNEMFILGMNEEDYRYAMDQQDYALLNKYLYRVQKLSKSDYSFRYHTETSVEDKYDGKPNLKLSMQMGKLKRVSIKSLLGLNPHKVHISVLGEIKEIS

SEQ ID NO: 382 - protein, 1062 aa, Ralstonia syzygii
MAEKQHRWGLDIGTNSIGWAVIALIEGRPAGLVATGSRIFSDGRNPKDGSSLAVERRGPRQMRRRRDRYLRRRDRFMQALINVGLMPGDAAARKALVTENPYVLRQRGLDQALTLPEFGRALFHLNQRRGFQSNRKTDRATAKESGKVKNAIAAFRAGMGNARTVGEALARRLEDGRPVRARMVGQGKDEHYELYIAREWIAQEFDALWASQQRFHAEVLADAARDRLRAILLFQRKLLPVPVGKCFLEPNQPRVAAALPSAQRFRLMQELNHLRVMTLADKRERPLSFQERNDLLAQLVARPKCGFDMLRKIVFGANKEAYRFTIESERRKELKGCDTAAKLAKVNALGTRWQALSLDEQDRLVCLLLDGENDAVLADALREHYGLTDAQIDTLLGLSFEDGHMRLGRSALLRVLDALESGRDEQGLPLSYDKAVVAAGYPAHTADLENGERDALPYYGELLWRYTQDAPTAKNDAERKFGKIANPTVHIGLNQLRKLVNALIQRYGKPAQIVVELARNLKAGLEEKERIKKQQTANLERNERIRQKLQDAGVPDNRENRLRMRLFEELGQGNGLGTPCIYSGRQISLQRLFSNDVQVDHILPFSKTLDDSFANKVLAQHDANRYKGNRGPFEAFGANRDGYAWDDIRARAAVLPRNKRNRFAETAMQDWLHNETDFLARQLTDTAYLSRVARQYLTAICSKDDVYVSPGRLTAMLRAKWGLNRVLDGVMEEQGRPAVKNRDDHRHHAIDAVVIGATDRAMLQQVATLAARAREQDAERLIGDMPTPWPNFLEDVRAAVARCVVSHKPDHGPEGGLHNDTAYGIVAGPFEDGRYRVRHRVSLFDLKPGDLSNVRCDAPLQAELEPIFEQDDARAREVALTALAERYRQRKVWLEELMSVLPIRPRGEDGKTLPDSAPYKAYKGDSNYCYELFINERGRWDGELISTFRANQAAYRRFRNDPARFRRYTAGGRPLLMRLCINDYIAVGTAAERTIFRVVKMSENKITLAEHFEGGTLKQRDADKDDPFKYLTKSPGALRDLGARRIFVDLIGRVLDPGIKGD

SEQ ID NO: 383 - protein, 1059 aa, Wolinella succinogenes
MIERILGVDLGISSLGWAIVEYDKDDEAANRIIDCGVRLFTAAETPKKKESPNKARREARGIRRVLNRRRVRMNMIKKLFLRAGLIQDVDLDGEGGMFYSKANRADVWELRHDGLYRLLKGDELARVLIHIAKHRGYKFIGDDEADEESGKVKKAGVVLRQNFEAAGCRTVGEWLWRERGANGKKRNKHGDYEISIHRDLLVEEVEAIFVAQQEMRSTIATDALKAAYREIAFFVRPMQRIEKMVGHCTYFPEERRAPKSAPTAEKFIAISKFFSTVIIDNEGWEQKIIERKTLEELLDFAVSREKVEFRHLRKFLDLSDNEIFKGLHYKGKPKTAKKREATLFDPNEPTELEFDKVEAEKKAWISLRGAAKLREALGNEFYGRFVALGKHADEATKILTYYKDEGQKRRELTKLPLEAEMVERLVKIGFSDFLKLSLKAIRDILPAMESGARYDEAVLMLGVPHKEKSAILPPLNKTDIDILNPTVIRAFAQFRKVANALVRKYGAFDRVHFELAREINTKGEIEDIKESQRKNEKERKEAADWIAETSFQVPLTRKNILKKRLYIQQDGRCAYTGDVIELERLFDEGYCEIDHILPRSRSADDSFANKVLCLARANQQKTDRTPYEWFGHDAARWNAFETRTSAPSNRVRTGKGKIDRLLKKNFDENSEMAFKDRNLNDTRYMARAIKTYCEQYWVFKNSHTKAPVQVRSGKLTSVLRYQWGLESKDRESHTHHAVDAIIIAFSTQGMVQKLSEYYRFKETHREKERPKLAVPLANFRDAVEEATRIENTETVKEGVEVKRLLISRPPRARVTGQAHEQTAKPYPRIKQVKNKKKWRLAPIDEEKFESFKADRVASANQKNFYETSTIPRVDVYHKKGKFHLVPIYLHEMVLNELPNLSLGTNPEAMDENFFKFSIFKDDLISIQTQGTPKKPAKIIMGYFKNMHGANMVLSSINNSPCEGFTCTPVSMDKKHKDKCKLCPEENRIAGRCLQGFLDYWSQEGLRPPRKEFECDQGVKFALDVKKYQIDPLGYYYEVKQEKRLGTIPQMRSAKKLVKK

SEQ ID NO: 384 - protein, 1269 aa, Mycoplasma gallisepticum
MNNSIKSKPEVTIGLDLGVGSVGWAIVDNETNIIHHLGSRLFSQAKTAEDRRSFRGVRRLIRRRKYKLKRFVNLIWKYNSYFGFKNKEDILNNYQEQQKLHNTVLNLKSEALNAKIDPKALSWILHDYLKNRGHFYEDNRDFNVYPTKELAKYFDKYGYYKGIIDSKEDNDNKLEEELTKYKFSNKHWLEEVKKVLSNQTGLPEKFKEEYESLFSYVRNYSEGPGSINSVSPYGIYHLDEKEGKVVQKYNNIWDKTIGKCNIFPDEYRAPKNSPIAMIFNEINELSTIRSYSIYLTGWFINQEFKKAYLNKLLDLLIKTNGEKPIDARQFKKLREETIAESIGKETLKDVENEEKLEKEDHKWKLKGLKLNTNGKIQYNDLSSLAKFVHKLKQHLKLDFLLEDQYATLDKINFLQSLFVYLGKHLRYSNRVDSANLKEFSDSNKLFERILQKQKDGLFKLFEQTDKDDEKILAQTHSLSTKAMLLAITRMTNLDNDEDNQKNNDKGWNFEAIKNFDQKFIDITKKNNNLSLKQNKRYLDDRFINDAILSPGVKRILREATKVFNAILKQFSEEYDVTKVVIELARELSEEKELENTKNYKKLIKKNGDKISEGLKALGISEDEIKDILKSPTKSYKFLLWLQQDHIDPYSLKEIAFDDIFTKTEKFEIDHIIPYSISFDDSSSNKLLVLAESNQAKSNQTPYEFISSGNAGIKWEDYEAYCRKFKDGDSSLLDSTQRSKKFAKMMKTDTSSKYDIGFLARNLNDTRYATIVFRDALEDYANNHLVEDKPMFKVVCINGSVTSFLRKNFDDSSYAKKDRDKNIHHAVDASIISIFSNETKTLFNQLTQFADYKLFKNTDGSWKKIDPKTGVVTEVTDENWKQIRVRNQVSEIAKVIEKYIQDSNIERKARYSRKIENKTNISLFNDTVYSAKKVGYEDQIKRKNLKTLDIHESAKENKNSKVKRQFVYRKLVNVSLLNNDKLADLFAEKEDILMYRANPWVINLAEQIFNEYTENKKIKSQNVFEKYMLDLTKEFPEKFSEFLVKSMLRNKTAIIYDDKKNIVHRIKRLKMLSSELKENKLSNVIIRSKNQSGTKLSYQDTINSLALMIMRSIDPTAKKQYIRVPLNTLNLHLGDHDFDLHNMDAYLKKPKFVKYLKANEIGDEYKPWRVLTSGTLLIHKKDKKLMYISSFQNLNDVIEIKNLIETEYKENDDSDSKKKKKANRFLMTLSTILNDYILLDAKDNFDILGLSKNRIDEILNSKLGLDKIVK

SEQ ID NO: 385 - protein, 1138 aa, Acidothermus cellulolyticus
MGGSEVGTVPVTWRLGVDVGERSIGLAAVSYEEDKPKEILAAVSWIHDGGVGDERSGASRLALRGMARRARRLRRFRRARLRDLDMLLSELGWTPLPDKNVSPVDAWLARKRLAEEYVVDETERRRLLGYAVSHMARHRGWRNPWTTIKDLKNLPQPSDSWERTRESLEARYSVSLEPGTVGQWAGYLLQRAPGIRLNPTQQSAGRRAELSNATAFETRLRQEDVLWELRCIADVQGLPEDVVSNVIDAVFCQKRPSVPAERIGRDPLDPSQLRASRACLEFQEYRIVAAVANLRIRDGSGSRPLSLEERNAVIEALLAQTERSLTWSDIALEILKLPNESDLTSVPEEDGPSSLAYSQFAPFDETSARIAEFIAKNRRKIPTFAQWWQEQDRTSRSDLVAALADNSIAGEEEQELLVHLPDAELEALEGLALPSGRVAYSRLTLSGLTRVMRDDGVDVHNARKTCFGVDDNWRPPLPALHEATGHPVVDRNLAILRKFLSSATMRWGPPQSIVVELARGASESRERQAEEEAARRAHRKANDRIRAELRASGLSDPSPADLVRARLLELYDCHCMYCGAPISWENSELDHIVPRTDGGSNRHENLAITCGACNKEKGRRPFASWAETSNRVQLRDVIDRVQKLKYSGNMYWTRDEFSRYKKSVVARLKRRTSDPEVIQSIESTGYAAVALRDRLLSYGEKNGVAQVAVFRGGVTAEARRWLDISIERLFSRVAIFAQSTSTKRLDRRHHAVDAVVLTTLTPGVAKTLADARSRRVSAEFWRRPSDVNRHSTEEPQSPAYRQWKESCSGLGDLLISTAARDSIAVAAPLRLRPTGALHEETLRAFSEHTVGAAWKGAELRRIVEPEVYAAFLALTDPGGRFLKVSPSEDVLPADENRHIVLSDRVLGPRDRVKLFPDDRGSIRVRGGAAYIASFHHARVFRWGSSHSPSFALLRVSLADLAVAGLLRDGVDVFTAELPPWTPAWRYASIALVKAVESGDAKQVGWLVPGDELDFGPEGVTTAAGDLSMFLKYFPERHWVVTGFEDDKRINLKPAFLSAEQAEVLRTERSDRPDTLTEAGEILAQFFPRCWRATVAKVLCHPGLTVIRRTALGQPRWRRGHLPYSWRPWSADPWSGGTP

SEQ ID NO: 386 - protein, 1265 aa, Mycoplasma ovipneumoniae
MHNKKNITIGFDLGIASIGWAIIDSTTSKILDWGTRTFEERKTANERRAFRSTRRNIRRKAYRNQRFINLILKYKDLFELKNISDIQRANKKDTENYEKIISFFTEIYKKCAAKHSNILEVKVKALDSKIEKLDLIWILHDYLENRGFFYDLEEENVADKYEGIEHPSILLYDFFKKNGFFKSNSSIPKDLGGYSFSNLQWVNEIKKLFEVQEINPEFSEKFLNLFTSVRDYAKGPGSEHSASEYGIFQKDEKGKVFKKYDNIWDKTIGKCSFFVEENRSPVNYPSYEIFNLLNQLINLSTDLKTTNKKIWQLSSNDRNELLDELLKVKEKAKIISISLKKNEIKKIILKDFGFEKSDIDDQDTIEGRKIIKEEPTTKLEVTKHLLATIYSHSSDSNWININNILEFLPYLDAICIILDREKSRGQDEVLKKLTEKNIFEVLKIDREKQLDFVKSIFSNTKFNFKKIGNFSLKAIREFLPKMFEQNKNSEYLKWKDEEIRRKWEEQKSKLGKTDKKTKYLNPRIFQDEIISPGTKNTFEQAVLVLNQIIKKYSKENIIDAIIIESPREKNDKKTIEEIKKRNKKGKGKTLEKLFQILNLENKGYKLSDLETKPAKLLDRLRFYHQQDGIDLYTLDKINIDQLINGSQKYEIEHIIPYSMSYDNSQANKILTEKAENLKKGKLIASEYIKRNGDEFYNKYYEKAKELFINKYKKNKKLDSYVDLDEDSAKNRFRFLTLQDYDEFQVEFLARNLNDTRYSTKLFYHALVEHFENNEFFTYIDENSSKHKVKISTIKGHVTKYFRAKPVQKNNGPNENLNNNKPEKIEKNRENNEHHAVDAAIVAIIGNKNPQIANLLTLADNKTDKKFLLHDENYKENIETGELVKIPKFEVDKLAKVEDLKKIIQEKYEEAKKHTAIKFSRKTRTILNGGLSDETLYGFKYDEKEDKYFKIIKKKLVTSKNEELKKYFENPFGKKADGKSEYTVLMAQSHLSEFNKLKEIFEKYNGFSNKTGNAFVEYMNDLALKEPTLKAEIESAKSVEKLLYYNFKPSDQFTYHDNINNKSFKRFYKNIRIIEYKSIPIKFKILSKHDGGKSFKDTLFSLYSLVYKVYENGKESYKSIPVTSQMRNFGIDEFDFLDENLYNKEKLDIYKSDFAKPIPVNCKPVFVLKKGSILKKKSLDIDDFKETKETEEGNYYFISTISKRFNRDTAYGLKPLKLSVVKPVAEPSTNPIFKEYIPIHLDELGNEYPVKIKEHTDDEKLMCTIK

SEQ ID NO: 387 - RNA, 20 nt, Artificial Sequence
  Synthetic
accgcgacccuccgggauac

SEQ ID NO: 388 - RNA, 20 nt, Artificial Sequence
  Synthetic
uccgggauaccgguaugccg

SEQ ID NO: 389 - RNA, 20 nt, Artificial Sequence
  Synthetic
auaccgguaugccgcggcca

SEQ ID NO: 390 - RNA, 17 nt, Artificial Sequence
  Synthetic
gcgacccuccgggauac

SEQ ID NO: 391 - RNA, 17 nt, Artificial Sequence
  Synthetic
gggauaccgguaugccg

SEQ ID NO: 392 - RNA, 17 nt, Artificial Sequence
  Synthetic
ccgguaugccgcggcca

SEQ ID NO: 393 - RNA, 20 nt, Artificial Sequence
  Synthetic
gucgaguucgacgcccugcu

SEQ ID NO: 394 - RNA, 20 nt, Artificial Sequence
  Synthetic
ucgaguucgacgcccugcug

SEQ ID NO: 395 - RNA, 20 nt, Artificial Sequence
  Synthetic
ccugucgcucgugcgcuuuc

SEQ ID NO: 396 - RNA, 20 nt, Artificial Sequence
  Synthetic
cucgugcgcuuucuggagcu

SEQ ID NO: 397 - RNA, 20 nt, Artificial Sequence
  Synthetic
ucgugcgcuuucuggagcuc

SEQ ID NO: 398 - RNA, 17 nt, Artificial Sequence
  Synthetic
gaguucgacgcccugcu

SEQ ID NO: 399 - RNA, 17 nt, Artificial Sequence
  Synthetic
aguucgacgcccugcug

SEQ ID NO: 400 - RNA, 17 nt, Artificial Sequence
  Synthetic
gucgcucgugcgcuuuc

SEQ ID NO: 401 - RNA, 17 nt, Artificial Sequence
  Synthetic
gugcgcuuucuggagcu

SEQ ID NO: 402 - RNA, 17 nt, Artificial Sequence
  Synthetic
ugcgcuuucuggagcuc

SEQ ID NO: 403 - RNA, 20 nt, Artificial Sequence
  Synthetic
ucuggagcucggguugucgg

SEQ ID NO: 404 - RNA, 20 nt, Artificial Sequence
  Synthetic
gugcguguguaccaaguuuc

SEQ ID NO: 405 - RNA, 20 nt, Artificial Sequence
  Synthetic
guguaccaaguuuccggagc

SEQ ID NO: 406 - RNA, 17 nt, Artificial Sequence
  Synthetic
ggagcucggguugucgg

SEQ ID NO: 407 - RNA, 17 nt, Artificial Sequence
  Synthetic
cguguguaccaaguuuc

SEQ ID NO: 408 - RNA, 17 nt, Artificial Sequence
  Synthetic
uaccaaguuuccggagc

SEQ ID NO: 409 - RNA, 20 nt, Artificial Sequence
  Synthetic
cgaggggcgcguacaguucg

SEQ ID NO: 410 - RNA, 20 nt, Artificial Sequence
  Synthetic
cagccgcugauugcccgcga

SEQ ID NO: 411 - RNA, 20 nt, Artificial Sequence
  Synthetic
ugaccaagauuaucgaccgc

SEQ ID NO: 412 - RNA, 20 nt, Artificial Sequence
  Synthetic
gaccaagauuaucgaccgcc

SEQ ID NO: 413 - RNA, 17 nt, Artificial Sequence
  Synthetic
ggggcgcguacaguucg

SEQ ID NO: 414 - RNA, 17 nt, Artificial Sequence
  Synthetic
ccgcugauugcccgcga

SEQ ID NO: 415 - RNA, 17 nt, Artificial Sequence
  Synthetic
ccaagauuaucgaccgc

SEQ ID NO: 416 - RNA, 17 nt, Artificial Sequence
  Synthetic
caagauuaucgaccgcc

SEQ ID NO: 417 - RNA, 20 nt, Artificial Sequence
  Synthetic
aggccaucgcccugcucacg

SEQ ID NO: 418 - RNA, 17 nt, Artificial Sequence
  Synthetic
ccaucgcccugcucacg

SEQ ID NO: 419 - RNA, 20 nt, Artificial Sequence
  Synthetic
caucgcccugcucacggggg

SEQ ID NO: 420 - RNA, 17 nt, Artificial Sequence
  Synthetic
cgcccugcucacggggg

SEQ ID NO: 421 - RNA, 20 nt, Artificial Sequence
  Synthetic
gcuguuggauggcgcgcaac

SEQ ID NO: 422 - RNA, 17 nt, Artificial Sequence
  Synthetic
guuggauggcgcgcaac

SEQ ID NO: 423 - RNA, 20 nt, Artificial Sequence
  Synthetic
cgccgauacccgucccgucc

SEQ ID NO: 424 - RNA, 17 nt, Artificial Sequence
  Synthetic
cgauacccgucccgucc

SEQ ID NO: 425 - RNA, 20 nt, Artificial Sequence
  Synthetic
auuguguguggguugcucga

SEQ ID NO: 426 - RNA, 20 nt, Artificial Sequence
  Synthetic
uuguguguggguugcucgau

SEQ ID NO: 427 - RNA, 17 nt, Artificial Sequence
  Synthetic
guguguggguugcucga

SEQ ID NO: 428 - RNA, 17 nt, Artificial Sequence
  Synthetic
uguguggguugcucgau

SEQ ID NO: 429 - RNA, 20 nt, Artificial Sequence
  Synthetic
gauggggugcgggccgucgc

SEQ ID NO: 430 - RNA, 20 nt, Artificial Sequence
  Synthetic
gggccgucgcgggcaaucag

SEQ ID NO: 431 - RNA, 17 nt, Artificial Sequence
  Synthetic
ggggugcgggccgucgc

SEQ ID NO: 432 - RNA, 17 nt, Artificial Sequence
  Synthetic
ccgucgcgggcaaucag

SEQ ID NO: 433 - RNA, 20 nt, Artificial Sequence
  Synthetic
cgcgggcaaucagcggcugg

SEQ ID NO: 434 - RNA, 17 nt, Artificial Sequence
  Synthetic
gggcaaucagcggcugg

SEQ ID NO: 435 - RNA, 20 nt, Artificial Sequence
  Synthetic
ucguucauguaggccagcuc

SEQ ID NO: 436 - RNA, 20 nt, Artificial Sequence
  Synthetic
guaggccagcuccggaaacu

SEQ ID NO: 437 - RNA, 20 nt, Artificial Sequence
  Synthetic
ccagaaagcgcacgagcgac

SEQ ID NO: 438 - RNA, 20 nt, Artificial Sequence
  Synthetic
cagaaagcgcacgagcgaca

SEQ ID NO: 439 - RNA, 20 nt, Artificial Sequence
  Synthetic
uguugcaauacgaccccagc

SEQ ID NO: 440 - RNA, 20 nt, Artificial Sequence
  Synthetic
guugcaauacgaccccagca

SEQ ID NO: 441 - RNA, 20 nt, Artificial Sequence
  Synthetic
cgucgaacucgacgucguac

SEQ ID NO: 442 - RNA, 20 nt, Artificial Sequence
  Synthetic
gucguacaggcuguuugcau

SEQ ID NO: 443 - RNA, 17 nt, Artificial Sequence
  Synthetic
uucauguaggccagcuc

SEQ ID NO: 444 - RNA, 17 nt, Artificial Sequence
  Synthetic
ggccagcuccggaaacu

SEQ ID NO: 445 - RNA, 17 nt, Artificial Sequence
  Synthetic
gaaagcgcacgagcgac

SEQ ID NO: 446 - RNA, 17 nt, Artificial Sequence
  Synthetic
aaagcgcacgagcgaca

SEQ ID NO: 447 - RNA, 17 nt, Artificial Sequence
  Synthetic
ugcaauacgaccccagc

SEQ ID NO: 448 - RNA, 17 nt, Artificial Sequence
  Synthetic
gcaauacgaccccagca

SEQ ID NO: 449 - RNA, 17 nt, Artificial Sequence
  Synthetic
cgaacucgacgucguac

SEQ ID NO: 450 - RNA, 17 nt, Artificial Sequence
  Synthetic
guacaggcuguuugcau

SEQ ID NO: 451 - RNA, 20 nt, Artificial Sequence
  Synthetic
caccucgaucgugcuaagga

SEQ ID NO: 452 - RNA, 17 nt, Artificial Sequence
  Synthetic
cucgaucgugcuaagga

SEQ ID NO: 453 - RNA, 20 nt, Artificial Sequence
  Synthetic
gcaccauggccgcggcauac

SEQ ID NO: 454 - RNA, 17 nt, Artificial Sequence
  Synthetic
ccauggccgcggcauac

SEQ ID NO: 455 - RNA, 20 nt, Artificial Sequence
  Synthetic
accgguaucccggagggucg

SEQ ID NO: 456 - RNA, 20 nt, Artificial Sequence
  Synthetic
guaucccggagggucgcggu

SEQ ID NO: 457 - RNA, 20 nt, Artificial Sequence
  Synthetic
uaucccggagggucgcgguu

SEQ ID NO: 458 - RNA, 17 nt, Artificial Sequence
  Synthetic
gguaucccggagggucg

SEQ ID NO: 459 - RNA, 17 nt, Artificial Sequence
  Synthetic
ucccggagggucgcggu

SEQ ID NO: 460 - RNA, 17 nt, Artificial Sequence
  Synthetic
cccggagggucgcgguu

SEQ ID NO: 461 - RNA, 20 nt, Artificial Sequence
  Synthetic
cgcucccaaccgcgacccuc

SEQ ID NO: 462 - RNA, 20 nt, Artificial Sequence
  Synthetic
gcucccaaccgcgacccucc

SEQ ID NO: 463 - RNA, 20 nt, Artificial Sequence
  Synthetic
gccgcggccauggugccgac

SEQ ID NO: 464 - RNA, 20 nt, Artificial Sequence
  Synthetic
ccgcggccauggugccgacc

SEQ ID NO: 465 - RNA, 20 nt, Artificial Sequence
  Synthetic
gucccuccuuagcacgaucg

SEQ ID NO: 466 - RNA, 20 nt, Artificial Sequence
  Synthetic
ccuccuuagcacgaucgagg

SEQ ID NO: 467 - RNA, 20 nt, Artificial Sequence
  Synthetic
cgucgaguucgacgcccugc

SEQ ID NO: 468 - RNA, 20 nt, Artificial Sequence
  Synthetic
cuuucuggagcucggguugu

SEQ ID NO: 469 - RNA, 20 nt, Artificial Sequence
  Synthetic
ggagcuggccuacaugaacg

SEQ ID NO: 470 - RNA, 20 nt, Artificial Sequence
  Synthetic
gagcuggccuacaugaacga

SEQ ID NO: 471 - RNA, 20 nt, Artificial Sequence
  Synthetic
agcuggccuacaugaacgag

SEQ ID NO: 472 - RNA, 20 nt, Artificial Sequence
  Synthetic
ccugaacgccgccuucagcc

SEQ ID NO: 473 - RNA, 20 nt, Artificial Sequence
  Synthetic
cgccuucagccuggccaccg

SEQ ID NO: 474 - RNA, 20 nt, Artificial Sequence
  Synthetic
cgaggccaucgcccugcuca

SEQ ID NO: 475 - RNA, 20 nt, Artificial Sequence
  Synthetic
gaggccaucgcccugcucac

SEQ ID NO: 476 - RNA, 20 nt, Artificial Sequence
  Synthetic
ggccaucgcccugcucacgg

SEQ ID NO: 477 - RNA, 20 nt, Artificial Sequence
  Synthetic
ccugcucacgggggaggccc

SEQ ID NO: 478 - RNA, 20 nt, Artificial Sequence
  Synthetic
cucacgggggaggcccugga

SEQ ID NO: 479 - RNA, 20 nt, Artificial Sequence
  Synthetic
ucacgggggaggcccuggac

SEQ ID NO: 480 - RNA, 20 nt, Artificial Sequence
  Synthetic
gggggaggcccuggacggga

SEQ ID NO: 481 - RNA, 20 nt, Artificial Sequence
  Synthetic
ggggaggcccuggacgggac

SEQ ID NO: 482 - RNA, 20 nt, Artificial Sequence
  Synthetic
gcccuggacgggacggguau

SEQ ID NO: 483 - RNA, 20 nt, Artificial Sequence
  Synthetic
gccgauacccgucccgucca

SEQ ID NO: 484 - RNA, 20 nt, Artificial Sequence
  Synthetic
ccagggccucccccgugagc

SEQ ID NO: 485 - RNA, 20 nt, Artificial Sequence
  Synthetic
cagggccucccccgugagca

SEQ ID NO: 486 - RNA, 20 nt, Artificial Sequence
  Synthetic
cucccccgugagcagggcga

SEQ ID NO: 487 - RNA, 20 nt, Artificial Sequence
  Synthetic
cgugagcagggcgauggccu

SEQ ID NO: 488 - RNA, 20 nt, Artificial Sequence
  Synthetic
gagcagggcgauggccucgg

SEQ ID NO: 489 - RNA, 20 nt, Artificial Sequence
  Synthetic
gggcgauggccucgguggcc

SEQ ID NO: 490 - RNA, 20 nt, Artificial Sequence
  Synthetic
ggccucgguggccaggcuga

SEQ ID NO: 491 - RNA, 20 nt, Artificial Sequence
  Synthetic
cucgguggccaggcugaagg

SEQ ID NO: 492 - RNA, 20 nt, Artificial Sequence
  Synthetic
ccaggcugaaggcggcguuc

SEQ ID NO: 493 - RNA, 20 nt, Artificial Sequence
  Synthetic
caggcugaaggcggcguuca

SEQ ID NO: 494 - RNA, 20 nt, Artificial Sequence
  Synthetic
ugaaggcggcguucagggcc

SEQ ID NO: 495 - RNA, 20 nt, Artificial Sequence
  Synthetic
aggcggcguucagggcccgg

SEQ ID NO: 496 - RNA, 20 nt, Artificial Sequence
  Synthetic
ggcccggcggucgauaaucu

SEQ ID NO: 497 - RNA, 20 nt, Artificial Sequence
  Synthetic
cuuggucauguaauugugug

SEQ ID NO: 498 - RNA, 20 nt, Artificial Sequence
  Synthetic
uuggucauguaauugugugu

SEQ ID NO: 499 - RNA, 20 nt, Artificial Sequence
  Synthetic
uguguguggguugcucgaug

SEQ ID NO: 500 - RNA, 20 nt, Artificial Sequence
  Synthetic
guggguugcucgauggggug

SEQ ID NO: 501 - RNA, 20 nt, Artificial Sequence
  Synthetic
uggguugcucgauggggugc

SEQ ID NO: 502 - RNA, 20 nt, Artificial Sequence
  Synthetic
cgauggggugcgggccgucg

SEQ ID NO: 503 - RNA, 20 nt, Artificial Sequence
  Synthetic
cgucgcgggcaaucagcggc

SEQ ID NO: 504 - RNA, 20 nt, Artificial Sequence
  Synthetic
uacgcgccccucguucaugu

SEQ ID NO: 505 - RNA, 20 nt, Artificial Sequence
  Synthetic
uguuugcaucggagcgcacg

SEQ ID NO: 506 - RNA, 20 nt, Artificial Sequence
  Synthetic
guuugcaucggagcgcacgc

SEQ ID NO: 507 - RNA, 20 nt, Artificial Sequence
  Synthetic
cgcgggaaaaaaaaucaaac

SEQ ID NO: 508 - RNA, 20 nt, Artificial Sequence
  Synthetic
acgccaccucgaucgugcua

SEQ ID NO: 509 - RNA, 20 nt, Artificial Sequence
  Synthetic
ccaccucgaucgugcuaagg

SEQ ID NO: 510 - RNA, 20 nt, Artificial Sequence
  Synthetic
gaucgugcuaaggagggacc

SEQ ID NO: 511 - RNA, 20 nt, Artificial Sequence
  Synthetic
gugcuaaggagggacccggu

SEQ ID NO: 512 - RNA, 20 nt, Artificial Sequence
  Synthetic
gagggacccggucggcacca

SEQ ID NO: 513 - RNA, 20 nt, Artificial Sequence
  Synthetic
cccggucggcaccauggccg

SEQ ID NO: 514 - RNA, 20 nt, Artificial Sequence
  Synthetic
gccgcggcauaccgguaucc

SEQ ID NO: 515 - RNA, 20 nt, Artificial Sequence
  Synthetic
gcggcauaccgguaucccgg

SEQ ID NO: 516 - RNA, 20 nt, Artificial Sequence
  Synthetic
cggcauaccgguaucccgga

SEQ ID NO: 517 - RNA, 20 nt, Artificial Sequence
  Synthetic
cggagggucgcgguugggag

SEQ ID NO: 518 - RNA, 17 nt, Artificial Sequence
  Synthetic
ucccaaccgcgacccuc

SEQ ID NO: 519 - RNA, 17 nt, Artificial Sequence
  Synthetic
cccaaccgcgacccucc

SEQ ID NO: 520 - RNA, 17 nt, Artificial Sequence
  Synthetic
gcggccauggugccgac

SEQ ID NO: 521 - RNA, 17 nt, Artificial Sequence
  Synthetic
cggccauggugccgacc

SEQ ID NO: 522 - RNA, 17 nt, Artificial Sequence
  Synthetic
ccuccuuagcacgaucg

SEQ ID NO: 523 - RNA, 17 nt, Artificial Sequence
  Synthetic
ccuuagcacgaucgagg

SEQ ID NO: 524 - RNA, 17 nt, Artificial Sequence
  Synthetic
cgaguucgacgcccugc

SEQ ID NO: 525 - RNA, 17 nt, Artificial Sequence
  Synthetic
ucuggagcucggguugu

SEQ ID NO: 526 - RNA, 17 nt, Artificial Sequence
  Synthetic
gcuggccuacaugaacg

SEQ ID NO: 527 - RNA, 17 nt, Artificial Sequence
  Synthetic
cuggccuacaugaacga

SEQ ID NO: 528 - RNA, 17 nt, Artificial Sequence
  Synthetic
uggccuacaugaacgag

SEQ ID NO: 529 - RNA, 17 nt, Artificial Sequence
  Synthetic
gaacgccgccuucagcc

SEQ ID NO: 530 - RNA, 17 nt, Artificial Sequence
  Synthetic
cuucagccuggccaccg

SEQ ID NO: 531 - RNA, 17 nt, Artificial Sequence
  Synthetic
ggccaucgcccugcuca

SEQ ID NO: 532 - RNA, 17 nt, Artificial Sequence
  Synthetic
gccaucgcccugcucac

SEQ ID NO: 533 - RNA, 17 nt, Artificial Sequence
  Synthetic
caucgcccugcucacgg

SEQ ID NO: 534 - RNA, 17 nt, Artificial Sequence
  Synthetic
gcucacgggggaggccc

SEQ ID NO: 535 - RNA, 17 nt, Artificial Sequence
  Synthetic
acgggggaggcccugga

SEQ ID NO: 536 - RNA, 17 nt, Artificial Sequence
  Synthetic
cgggggaggcccuggac

SEQ ID NO: 537 - RNA, 17 nt, Artificial Sequence
  Synthetic
ggaggcccuggacggga

SEQ ID NO: 538 - RNA, 17 nt, Artificial Sequence
  Synthetic
gaggcccuggacgggac

SEQ ID NO: 539 - RNA, 17 nt, Artificial Sequence
  Synthetic
cuggacgggacggguau

SEQ ID NO: 540 - RNA, 17 nt, Artificial Sequence
  Synthetic
gauacccgucccgucca

SEQ ID NO: 541 - RNA, 17 nt, Artificial Sequence
  Synthetic
gggccucccccgugagc

SEQ ID NO: 542 - RNA, 17 nt, Artificial Sequence
  Synthetic
ggccucccccgugagca

SEQ ID NO: 543 - RNA, 17 nt, Artificial Sequence
  Synthetic
ccccgugagcagggcga

SEQ ID NO: 544 - RNA, 17 nt, Artificial Sequence
  Synthetic
gagcagggcgauggccu

SEQ ID NO: 545 - RNA, 17 nt, Artificial Sequence
  Synthetic
cagggcgauggccucgg

SEQ ID NO: 546 - RNA, 17 nt, Artificial Sequence
  Synthetic
cgauggccucgguggcc

SEQ ID NO: 547 - RNA, 17 nt, Artificial Sequence
  Synthetic
cucgguggccaggcuga

SEQ ID NO: 548 - RNA, 17 nt, Artificial Sequence
  Synthetic
gguggccaggcugaagg

SEQ ID NO: 549 - RNA, 17 nt, Artificial Sequence
  Synthetic
ggcugaaggcggcguuc

SEQ ID NO: 550 - RNA, 17 nt, Artificial Sequence
  Synthetic
gcugaaggcggcguuca

SEQ ID NO: 551 - RNA, 17 nt, Artificial Sequence
  Synthetic
aggcggcguucagggcc

SEQ ID NO: 552 - RNA, 17 nt, Artificial Sequence
  Synthetic
cggcguucagggcccgg

SEQ ID NO: 553 - RNA, 17 nt, Artificial Sequence
  Synthetic
ccggcggucgauaaucu

SEQ ID NO: 554 - RNA, 17 nt, Artificial Sequence
  Synthetic
ggucauguaauugugug

SEQ ID NO: 555 - RNA, 17 nt, Artificial Sequence
  Synthetic
gucauguaauugugugu

SEQ ID NO: 556 - RNA, 17 nt, Artificial Sequence
  Synthetic
guguggguugcucgaug

SEQ ID NO: 557 - RNA, 17 nt, Artificial Sequence
  Synthetic
gguugcucgauggggug

SEQ ID NO: 558 - RNA, 17 nt, Artificial Sequence
  Synthetic
guugcucgauggggugc

SEQ ID NO: 559 - RNA, 17 nt, Artificial Sequence
  Synthetic
uggggugcgggccgucg

SEQ ID NO: 560 - RNA, 17 nt, Artificial Sequence
  Synthetic
cgcgggcaaucagcggc

SEQ ID NO: 561 - RNA, 17 nt, Artificial Sequence
  Synthetic
gcgccccucguucaugu

SEQ ID NO: 562 - RNA, 17 nt, Artificial Sequence
  Synthetic
uugcaucggagcgcacg

SEQ ID NO: 563 - RNA, 17 nt, Artificial Sequence
  Synthetic
ugcaucggagcgcacgc

SEQ ID NO: 564 - RNA, 17 nt, Artificial Sequence
  Synthetic
gggaaaaaaaaucaaac

SEQ ID NO: 565 - RNA, 17 nt, Artificial Sequence
  Synthetic
ccaccucgaucgugcua

SEQ ID NO: 566 - RNA, 17 nt, Artificial Sequence
  Synthetic
ccucgaucgugcuaagg

SEQ ID NO: 567 - RNA, 17 nt, Artificial Sequence
  Synthetic
cgugcuaaggagggacc

SEQ ID NO: 568 - RNA, 17 nt, Artificial Sequence
  Synthetic
cuaaggagggacccggu

SEQ ID NO: 569 - RNA, 17 nt, Artificial Sequence
  Synthetic
ggacccggucggcacca

SEQ ID NO: 570 - RNA, 17 nt, Artificial Sequence
  Synthetic
ggucggcaccauggccg

SEQ ID NO: 571 - RNA, 17 nt, Artificial Sequence
  Synthetic
gcggcauaccgguaucc

SEQ ID NO: 572 - RNA, 17 nt, Artificial Sequence
  Synthetic
gcauaccgguaucccgg

SEQ ID NO: 573 - RNA, 17 nt, Artificial Sequence
  Synthetic
cauaccgguaucccgga

SEQ ID NO: 574 - RNA, 17 nt, Artificial Sequence
  Synthetic
agggucgcgguugggag

SEQ ID NO: 575 - RNA, 20 nt, Artificial Sequence
  Synthetic
cgcaacguccaggccguccu

SEQ ID NO: 576 - RNA, 20 nt, Artificial Sequence
  Synthetic
gcaacguccaggccguccuc

SEQ ID NO: 577 - RNA, 20 nt, Artificial Sequence
  Synthetic
caacguccaggccguccucg

SEQ ID NO: 578 - RNA, 20 nt, Artificial Sequence
  Synthetic
guccucggggcguuugagcg

SEQ ID NO: 579 - RNA, 20 nt, Artificial Sequence
  Synthetic
cggggcguuugagcgcggca

SEQ ID NO: 580 - RNA, 20 nt, Artificial Sequence
  Synthetic
ccagaugcugcacgugcugc

SEQ ID NO: 581 - RNA, 20 nt, Artificial Sequence
  Synthetic
gcugcacgugcugcuggaaa

SEQ ID NO: 582 - RNA, 20 nt, Artificial Sequence
  Synthetic
gcuggaaaaggcgccgcccc

SEQ ID NO: 583 - RNA, 20 nt, Artificial Sequence
  Synthetic
guugccgaugcaacgauacc

SEQ ID NO: 584 - RNA, 20 nt, Artificial Sequence
  Synthetic
augcaacgauaccuggacaa

SEQ ID NO: 585 - RNA, 20 nt, Artificial Sequence
  Synthetic
auaccuggacaacggccgcc

SEQ ID NO: 586 - RNA, 20 nt, Artificial Sequence
  Synthetic
acaacggccgccuggccacc

SEQ ID NO: 587 - RNA, 20 nt, Artificial Sequence
  Synthetic
caacggccgccuggccacca

SEQ ID NO: 588 - RNA, 20 nt, Artificial Sequence
  Synthetic
cggccgccuggccaccaggg

SEQ ID NO: 589 - RNA, 20 nt, Artificial Sequence
  Synthetic
gccuggccaccaggguggcc

SEQ ID NO: 590 - RNA, 20 nt, Artificial Sequence
  Synthetic
ccuggccaccaggguggccc

SEQ ID NO: 591 - RNA, 20 nt, Artificial Sequence
  Synthetic
caggguggcccgggcgaccc

SEQ ID NO: 592 - RNA, 20 nt, Artificial Sequence
  Synthetic
cugcgagacgagcuuuuucc

SEQ ID NO: 593 - RNA, 20 nt, Artificial Sequence
  Synthetic
ugcgagacgagcuuuuuccu

SEQ ID NO: 594 - RNA, 20 nt, Artificial Sequence
  Synthetic
gacgagcuuuuuccugggca

SEQ ID NO: 595 - RNA, 20 nt, Artificial Sequence
  Synthetic
gagcuuuuuccugggcaagg

SEQ ID NO: 596 - RNA, 20 nt, Artificial Sequence
  Synthetic
agcuuuuuccugggcaaggc

SEQ ID NO: 597 - RNA, 20 nt, Artificial Sequence
  Synthetic
ugggcaaggcgggccaccgc

SEQ ID NO: 598 - RNA, 20 nt, Artificial Sequence
  Synthetic
gggcaaggcgggccaccgcc

SEQ ID NO: 599 - RNA, 20 nt, Artificial Sequence
  Synthetic
caaggcgggccaccgccggg

SEQ ID NO: 600 - RNA, 20 nt, Artificial Sequence
  Synthetic
ccaccgccgggaggccgucg

SEQ ID NO: 601 - RNA, 20 nt, Artificial Sequence
  Synthetic
gccgggaggccgucgaggcc

SEQ ID NO: 602 - RNA, 20 nt, Artificial Sequence
  Synthetic
ggccgucgaggccuggcucg

SEQ ID NO: 603 - RNA, 20 nt, Artificial Sequence
  Synthetic
cuggcucguggaccucacca

SEQ ID NO: 604 - RNA, 20 nt, Artificial Sequence
  Synthetic
cacggccacgcagcccuccg

SEQ ID NO: 605 - RNA, 20 nt, Artificial Sequence
  Synthetic
cugacgcaugccgacacgcg

SEQ ID NO: 606 - RNA, 20 nt, Artificial Sequence
  Synthetic
ugacgcaugccgacacgcgc

SEQ ID NO: 607 - RNA, 20 nt, Artificial Sequence
  Synthetic
cgcaugccgacacgcgcggg

SEQ ID NO: 608 - RNA, 20 nt, Artificial Sequence
  Synthetic
ugccgacacgcgcgggcggc

SEQ ID NO: 609 - RNA, 20 nt, Artificial Sequence
  Synthetic
acgcgcgggcggccggucga

SEQ ID NO: 610 - RNA, 20 nt, Artificial Sequence
  Synthetic
cgcgcgggcggccggucgac

SEQ ID NO: 611 - RNA, 20 nt, Artificial Sequence
  Synthetic
gcgcgggcggccggucgacg

SEQ ID NO: 612 - RNA, 20 nt, Artificial Sequence
  Synthetic
ccugcaguccuuccugaaag

SEQ ID NO: 613 - RNA, 20 nt, Artificial Sequence
  Synthetic
gcaguccuuccugaaagugg

SEQ ID NO: 614 - RNA, 20 nt, Artificial Sequence
  Synthetic
ggacaccgaagccgacgugc

SEQ ID NO: 615 - RNA, 20 nt, Artificial Sequence
  Synthetic
gccgacgugccggugacgua

SEQ ID NO: 616 - RNA, 20 nt, Artificial Sequence
  Synthetic
gccggugacguacggcgaga

SEQ ID NO: 617 - RNA, 20 nt, Artificial Sequence
  Synthetic
uacggcgagaugguccugaa

SEQ ID NO: 618 - RNA, 20 nt, Artificial Sequence
  Synthetic
acggcgagaugguccugaac

SEQ ID NO: 619 - RNA, 20 nt, Artificial Sequence
  Synthetic
cggcgagaugguccugaacg

SEQ ID NO: 620 - RNA, 20 nt, Artificial Sequence
  Synthetic
gguccugaacggggccaacc

SEQ ID NO: 621 - RNA, 20 nt, Artificial Sequence
  Synthetic
gaacggggccaaccugguca

SEQ ID NO: 622 - RNA, 20 nt, Artificial Sequence
  Synthetic
ccuggucacggcgcucguga

SEQ ID NO: 623 - RNA, 20 nt, Artificial Sequence
  Synthetic
cuggucacggcgcucgugau

SEQ ID NO: 624 - RNA, 20 nt, Artificial Sequence
  Synthetic
cacggcgcucgugaugggca

SEQ ID NO: 625 - RNA, 20 nt, Artificial Sequence
  Synthetic
gggcaaggccgugcgaaguc

SEQ ID NO: 626 - RNA, 20 nt, Artificial Sequence
  Synthetic
cgugcgaagucuggacgacg

SEQ ID NO: 627 - RNA, 20 nt, Artificial Sequence
  Synthetic
gugcgaagucuggacgacgu

SEQ ID NO: 628 - RNA, 20 nt, Artificial Sequence
  Synthetic
cgacgugggccgccaccugc

SEQ ID NO: 629 - RNA, 20 nt, Artificial Sequence
  Synthetic
ccgccaccugcuggagaugc

SEQ ID NO: 630 - RNA, 20 nt, Artificial Sequence
  Synthetic
ccaccugcuggagaugcagg

SEQ ID NO: 631 - RNA, 20 nt, Artificial Sequence
  Synthetic
aggagcagcucgaccugaac

SEQ ID NO: 632 - RNA, 20 nt, Artificial Sequence
  Synthetic
cgaccugaaccggcagacgc

SEQ ID NO: 633 - RNA, 20 nt, Artificial Sequence
  Synthetic
ccagacgacgcgcgugcgcg

SEQ ID NO: 634 - RNA, 20 nt, Artificial Sequence
  Synthetic
gacgcgcgugcgcgcggauc

SEQ ID NO: 635 - RNA, 20 nt, Artificial Sequence
  Synthetic
cgcgcggaucugguguccau

SEQ ID NO: 636 - RNA, 20 nt, Artificial Sequence
  Synthetic
gguguccaucggcgagaagc

SEQ ID NO: 637 - RNA, 20 nt, Artificial Sequence
  Synthetic
cggcgagaagcuggucuuuc

SEQ ID NO: 638 - RNA, 20 nt, Artificial Sequence
  Synthetic
cgagaagcuggucuuucugg

SEQ ID NO: 639 - RNA, 20 nt, Artificial Sequence
  Synthetic
gcuggucuuucuggaggccc

SEQ ID NO: 640 - RNA, 20 nt, Artificial Sequence
  Synthetic
caccaacguucccuaccccc

SEQ ID NO: 641 - RNA, 20 nt, Artificial Sequence
  Synthetic
caacguucccuacccccugg

SEQ ID NO: 642 - RNA, 20 nt, Artificial Sequence
  Synthetic
aacguucccuacccccuggu

SEQ ID NO: 643 - RNA, 20 nt, Artificial Sequence
  Synthetic
cuacccccuggugggcgcca

SEQ ID NO: 644 - RNA, 20 nt, Artificial Sequence
  Synthetic
ccugacguucguccugcccc

SEQ ID NO: 645 - RNA, 20 nt, Artificial Sequence
  Synthetic
cugacguucguccugccccu

SEQ ID NO: 646 - RNA, 20 nt, Artificial Sequence
  Synthetic
gccccugggccuguucaauc

SEQ ID NO: 647 - RNA, 20 nt, Artificial Sequence
  Synthetic
gggccuguucaauccgguca

SEQ ID NO: 648 - RNA, 20 nt, Artificial Sequence
  Synthetic
uguucaauccggucauggaa

SEQ ID NO: 649 - RNA, 20 nt, Artificial Sequence
  Synthetic
gaacgguuugccgcgcacgc

SEQ ID NO: 650 - RNA, 20 nt, Artificial Sequence
  Synthetic
aacgguuugccgcgcacgcc

SEQ ID NO: 651 - RNA, 20 nt, Artificial Sequence
  Synthetic
acgguuugccgcgcacgccg

SEQ ID NO: 652 - RNA, 20 nt, Artificial Sequence
  Synthetic
ggggaccuaguccccgcccc

SEQ ID NO: 653 - RNA, 20 nt, Artificial Sequence
  Synthetic
aguccccgcccccggccacc

SEQ ID NO: 654 - RNA, 20 nt, Artificial Sequence
  Synthetic
cgccccgccagcuguuuuuu

SEQ ID NO: 655 - RNA, 20 nt, Artificial Sequence
  Synthetic
gccccgccagcuguuuuuuu

SEQ ID NO: 656 - RNA, 20 nt, Artificial Sequence
  Synthetic
ccccgccagcuguuuuuuug

SEQ ID NO: 657 - RNA, 20 nt, Artificial Sequence
  Synthetic
cccgccagcuguuuuuuugg

SEQ ID NO: 658 - RNA, 20 nt, Artificial Sequence
  Synthetic
ccagcuguuuuuuuggggga

SEQ ID NO: 659 - RNA, 20 nt, Artificial Sequence
  Synthetic
uuuuugggggaaggaccgcc

SEQ ID NO: 660 - RNA, 20 nt, Artificial Sequence
  Synthetic
ccaggugcugcgccugucuc

SEQ ID NO: 661 - RNA, 20 nt, Artificial Sequence
  Synthetic
cugucucuggaacacgcgau

SEQ ID NO: 662 - RNA, 20 nt, Artificial Sequence
  Synthetic
ugucucuggaacacgcgauc

SEQ ID NO: 663 - RNA, 20 nt, Artificial Sequence
  Synthetic
uucgcugaugaacguugacg

SEQ ID NO: 664 - RNA, 20 nt, Artificial Sequence
  Synthetic
gcugaugaacguugacgcgg

SEQ ID NO: 665 - RNA, 20 nt, Artificial Sequence
  Synthetic
augaacguugacgcggcggu

SEQ ID NO: 666 - RNA, 20 nt, Artificial Sequence
  Synthetic
ugaacguugacgcggcgguc

SEQ ID NO: 667 - RNA, 20 nt, Artificial Sequence
  Synthetic
gaacguugacgcggcggucg

SEQ ID NO: 668 - RNA, 20 nt, Artificial Sequence
  Synthetic
aacguugacgcggcggucgg

SEQ ID NO: 669 - RNA, 20 nt, Artificial Sequence
  Synthetic
gucgaagccgccaauccgua

SEQ ID NO: 670 - RNA, 20 nt, Artificial Sequence
  Synthetic
ucgaagccgccaauccguac

SEQ ID NO: 671 - RNA, 20 nt, Artificial Sequence
  Synthetic
cgaagccgccaauccguacg

SEQ ID NO: 672 - RNA, 20 nt, Artificial Sequence
  Synthetic
caauccguacggggcguacg

SEQ ID NO: 673 - RNA, 20 nt, Artificial Sequence
  Synthetic
uccguacggggcguacgugg

SEQ ID NO: 674 - RNA, 20 nt, Artificial Sequence
  Synthetic
cggggcguacguggcggccc

SEQ ID NO: 675 - RNA, 20 nt, Artificial Sequence
  Synthetic
gcguacguggcggccccggc

SEQ ID NO: 676 - RNA, 20 nt, Artificial Sequence
  Synthetic
agcagcuguuuuugaacgcc

SEQ ID NO: 677 - RNA, 20 nt, Artificial Sequence
  Synthetic
gcagcuguuuuugaacgccu

SEQ ID NO: 678 - RNA, 20 nt, Artificial Sequence
  Synthetic
cagcuguuuuugaacgccug

SEQ ID NO: 679 - RNA, 20 nt, Artificial Sequence
  Synthetic
agcuguuuuugaacgccugg

SEQ ID NO: 680 - RNA, 20 nt, Artificial Sequence
  Synthetic
gaacgccugggggcagcgcc

SEQ ID NO: 681 - RNA, 20 nt, Artificial Sequence
  Synthetic
ugggggcagcgccuggccca

SEQ ID NO: 682 - RNA, 20 nt, Artificial Sequence
  Synthetic
gggggcagcgccuggcccac

SEQ ID NO: 683 - RNA, 20 nt, Artificial Sequence
  Synthetic
ggcagcgccuggcccacggg

SEQ ID NO: 684 - RNA, 20 nt, Artificial Sequence
  Synthetic
gcagcgccuggcccacgggc

SEQ ID NO: 685 - RNA, 20 nt, Artificial Sequence
  Synthetic
uggcccacgggcggguccga

SEQ ID NO: 686 - RNA, 20 nt, Artificial Sequence
  Synthetic
ggcccacgggcggguccgau

SEQ ID NO: 687 - RNA, 20 nt, Artificial Sequence
  Synthetic
cgggcggguccgaugggucg

SEQ ID NO: 688 - RNA, 20 nt, Artificial Sequence
  Synthetic
cggguccgaugggucgcgga

SEQ ID NO: 689 - RNA, 20 nt, Artificial Sequence
  Synthetic
cgcggaaggccagaugaccc

SEQ ID NO: 690 - RNA, 20 nt, Artificial Sequence
  Synthetic
gcagcccgacaacgccaacc

SEQ ID NO: 691 - RNA, 20 nt, Artificial Sequence
  Synthetic
ccccgcguucgacuucuuug

SEQ ID NO: 692 - RNA, 20 nt, Artificial Sequence
  Synthetic
cccgcguucgacuucuuugu

SEQ ID NO: 693 - RNA, 20 nt, Artificial Sequence
  Synthetic
ccgcguucgacuucuuugug

SEQ ID NO: 694 - RNA, 20 nt, Artificial Sequence
  Synthetic
cgcguucgacuucuuugugg

SEQ ID NO: 695 - RNA, 20 nt, Artificial Sequence
  Synthetic
guucgacuucuuuguggggg

SEQ ID NO: 696 - RNA, 20 nt, Artificial Sequence
  Synthetic
cuuuguggggguggccgacg

SEQ ID NO: 697 - RNA, 20 nt, Artificial Sequence
  Synthetic
gguggccgacguggagcugc

SEQ ID NO: 698 - RNA, 20 nt, Artificial Sequence
  Synthetic
guggccgacguggagcugcc

SEQ ID NO: 699 - RNA, 20 nt, Artificial Sequence
  Synthetic
uggccgacguggagcugccg

SEQ ID NO: 700 - RNA, 20 nt, Artificial Sequence
  Synthetic
ggccgacguggagcugccgg

SEQ ID NO: 701 - RNA, 20 nt, Artificial Sequence
  Synthetic
gccgacguggagcugccggg

SEQ ID NO: 702 - RNA, 20 nt, Artificial Sequence
  Synthetic
ccgacguggagcugccgggg

SEQ ID NO: 703 - RNA, 20 nt, Artificial Sequence
  Synthetic
cgacguggagcugccggggg

SEQ ID NO: 704 - RNA, 20 nt, Artificial Sequence
  Synthetic
gccggggggggacguucccc

SEQ ID NO: 705 - RNA, 20 nt, Artificial Sequence
  Synthetic
gggggggacguucccccggc

SEQ ID NO: 706 - RNA, 20 nt, Artificial Sequence
  Synthetic
ggacguucccccggccggcc

SEQ ID NO: 707 - RNA, 20 nt, Artificial Sequence
  Synthetic
gacguucccccggccggccc

SEQ ID NO: 708 - RNA, 20 nt, Artificial Sequence
  Synthetic
acguucccccggccggcccg

SEQ ID NO: 709 - RNA, 20 nt, Artificial Sequence
  Synthetic
cguucccccggccggcccgg

SEQ ID NO: 710 - RNA, 20 nt, Artificial Sequence
  Synthetic
ggccggcccgggggagaucc

SEQ ID NO: 711 - RNA, 20 nt, Artificial Sequence
  Synthetic
cgggggagauccaggccacc

SEQ ID NO: 712 - RNA, 20 nt, Artificial Sequence
  Synthetic
gauccaggccaccuggcgcg

SEQ ID NO: 713 - RNA, 20 nt, Artificial Sequence
  Synthetic
gccaccuggcgcguggugaa

SEQ ID NO: 714 - RNA, 20 nt, Artificial Sequence
  Synthetic
ggugaacggcaacuugcccc

SEQ ID NO: 715 - RNA, 20 nt, Artificial Sequence
  Synthetic
cuugccccuggcgcuauguc

SEQ ID NO: 716 - RNA, 20 nt, Artificial Sequence
  Synthetic
gccccuggcgcuauguccgg

SEQ ID NO: 717 - RNA, 20 nt, Artificial Sequence
  Synthetic
cgcuauguccggcggcguuc

SEQ ID NO: 718 - RNA, 20 nt, Artificial Sequence
  Synthetic
gcuauguccggcggcguucc

SEQ ID NO: 719 - RNA, 20 nt, Artificial Sequence
  Synthetic
cggcggcguuccgggacgcc

SEQ ID NO: 720 - RNA, 20 nt, Artificial Sequence
  Synthetic
ggcggcguuccgggacgccc

SEQ ID NO: 721 - RNA, 20 nt, Artificial Sequence
  Synthetic
gcggcguuccgggacgcccg

SEQ ID NO: 722 - RNA, 20 nt, Artificial Sequence
  Synthetic
guuccgggacgcccggggcc

SEQ ID NO: 723 - RNA, 20 nt, Artificial Sequence
  Synthetic
ggacgcccggggccuggagc

SEQ ID NO: 724 - RNA, 20 nt, Artificial Sequence
  Synthetic
gacgcccggggccuggagcu

SEQ ID NO: 725 - RNA, 20 nt, Artificial Sequence
  Synthetic
acgcccggggccuggagcug

SEQ ID NO: 726 - RNA, 20 nt, Artificial Sequence
  Synthetic
cgcccggggccuggagcugg

SEQ ID NO: 727 - RNA, 20 nt, Artificial Sequence
  Synthetic
ccggggccuggagcuggggg

SEQ ID NO: 728 - RNA, 20 nt, Artificial Sequence
  Synthetic
cggggccuggagcugggggu

SEQ ID NO: 729 - RNA, 20 nt, Artificial Sequence
  Synthetic
gggggugggacgccacgcca

SEQ ID NO: 730 - RNA, 20 nt, Artificial Sequence
  Synthetic
gccaccaucgccgccguucg

SEQ ID NO: 731 - RNA, 20 nt, Artificial Sequence
  Synthetic
ccaccaucgccgccguucgc

SEQ ID NO: 732 - RNA, 20 nt, Artificial Sequence
  Synthetic
caccaucgccgccguucgcg

SEQ ID NO: 733 - RNA, 20 nt, Artificial Sequence
  Synthetic
guucgacgaccgcaacuacc

SEQ ID NO: 734 - RNA, 20 nt, Artificial Sequence
  Synthetic
cgacgaccgcaacuacccgg

SEQ ID NO: 735 - RNA, 20 nt, Artificial Sequence
  Synthetic
ggcgguguuuuaccugcugc

SEQ ID NO: 736 - RNA, 20 nt, Artificial Sequence
  Synthetic
cugcugcaggccgccauaca

SEQ ID NO: 737 - RNA, 20 nt, Artificial Sequence
  Synthetic
cgagcacgucuucugcgccc

SEQ ID NO: 738 - RNA, 20 nt, Artificial Sequence
  Synthetic
acgucuucugcgcccuggcc

SEQ ID NO: 739 - RNA, 20 nt, Artificial Sequence
  Synthetic
cugcgcccuggcccggcucg

SEQ ID NO: 740 - RNA, 20 nt, Artificial Sequence
  Synthetic
uccagugcaucaccagcuac

SEQ ID NO: 741 - RNA, 20 nt, Artificial Sequence
  Synthetic
ccagcuacuggaacaacacg

SEQ ID NO: 742 - RNA, 20 nt, Artificial Sequence
  Synthetic
cuggaacaacacgcggugcg

SEQ ID NO: 743 - RNA, 20 nt, Artificial Sequence
  Synthetic
guucgugaacgacuacucgc

SEQ ID NO: 744 - RNA, 20 nt, Artificial Sequence
  Synthetic
ucguacgucgugaccuaccu

SEQ ID NO: 745 - RNA, 20 nt, Artificial Sequence
  Synthetic
cguacgucgugaccuaccuc

SEQ ID NO: 746 - RNA, 20 nt, Artificial Sequence
  Synthetic
guacgucgugaccuaccucg

SEQ ID NO: 747 - RNA, 20 nt, Artificial Sequence
  Synthetic
uacgucgugaccuaccucgg

SEQ ID NO: 748 - RNA, 20 nt, Artificial Sequence
  Synthetic
ccucgggggagaccuucccg

SEQ ID NO: 749 - RNA, 20 nt, Artificial Sequence
  Synthetic
agaccuucccgaggagugca

SEQ ID NO: 750 - RNA, 20 nt, Artificial Sequence
  Synthetic
aggagugcauggccguguac

SEQ ID NO: 751 - RNA, 20 nt, Artificial Sequence
  Synthetic
ggagugcauggccguguacc

SEQ ID NO: 752 - RNA, 20 nt, Artificial Sequence
  Synthetic
cauggccguguaccgggacc

SEQ ID NO: 753 - RNA, 20 nt, Artificial Sequence
  Synthetic
ggccguguaccgggaccugg

SEQ ID NO: 754 - RNA, 20 nt, Artificial Sequence
  Synthetic
ggaccugguggcgcacgucg

SEQ ID NO: 755 - RNA, 20 nt, Artificial Sequence
  Synthetic
gguggcgcacgucgaggccc

SEQ ID NO: 756 - RNA, 20 nt, Artificial Sequence
  Synthetic
cgucgaggcccuggcccagc

SEQ ID NO: 757 - RNA, 20 nt, Artificial Sequence
  Synthetic
guugaugacuuuacccugac

SEQ ID NO: 758 - RNA, 20 nt, Artificial Sequence
  Synthetic
ugacuuuacccugaccggcc

SEQ ID NO: 759 - RNA, 20 nt, Artificial Sequence
  Synthetic
uacccugaccggcccggagc

SEQ ID NO: 760 - RNA, 20 nt, Artificial Sequence
  Synthetic
acccugaccggcccggagcu

SEQ ID NO: 761 - RNA, 20 nt, Artificial Sequence
  Synthetic
cugaccggcccggagcuggg

SEQ ID NO: 762 - RNA, 20 nt, Artificial Sequence
  Synthetic
ugaccggcccggagcugggc

SEQ ID NO: 763 - RNA, 20 nt, Artificial Sequence
  Synthetic
cggcccggagcugggcgggc

SEQ ID NO: 764 - RNA, 20 nt, Artificial Sequence
  Synthetic
gaaucaccuaaugcgagacc

SEQ ID NO: 765 - RNA, 20 nt, Artificial Sequence
  Synthetic
cgcugcugccaccccucgug

SEQ ID NO: 766 - RNA, 20 nt, Artificial Sequence
  Synthetic
gcugcugccaccccucgugu

SEQ ID NO: 767 - RNA, 20 nt, Artificial Sequence
  Synthetic
gggacugugacgcccugaug

SEQ ID NO: 768 - RNA, 20 nt, Artificial Sequence
  Synthetic
ugacgcccugaugcggcgcg

SEQ ID NO: 769 - RNA, 20 nt, Artificial Sequence
  Synthetic
ccugaugcggcgcgcggccc

SEQ ID NO: 770 - RNA, 20 nt, Artificial Sequence
  Synthetic
uggaccgccaucgcgacugc

SEQ ID NO: 771 - RNA, 20 nt, Artificial Sequence
  Synthetic
ggaccgccaucgcgacugcc

SEQ ID NO: 772 - RNA, 20 nt, Artificial Sequence
  Synthetic
ucgcgacugccggguuagcg

SEQ ID NO: 773 - RNA, 20 nt, Artificial Sequence
  Synthetic
cgcgacugccggguuagcgc

SEQ ID NO: 774 - RNA, 20 nt, Artificial Sequence
  Synthetic
gcgacugccggguuagcgcg

SEQ ID NO: 775 - RNA, 20 nt, Artificial Sequence
  Synthetic
cgacugccggguuagcgcgg

SEQ ID NO: 776 - RNA, 20 nt, Artificial Sequence
  Synthetic
gacugccggguuagcgcggg

SEQ ID NO: 777 - RNA, 20 nt, Artificial Sequence
  Synthetic
gggccacgaccccguguacg

SEQ ID NO: 778 - RNA, 20 nt, Artificial Sequence
  Synthetic
ccacgaccccguguacgcgg

SEQ ID NO: 779 - RNA, 20 nt, Artificial Sequence
  Synthetic
guacgcggcggcauguaacg

SEQ ID NO: 780 - RNA, 20 nt, Artificial Sequence
  Synthetic
ggcauguaacguggcgaccg

SEQ ID NO: 781 - RNA, 20 nt, Artificial Sequence
  Synthetic
gcggacuucaaccgcaacga

SEQ ID NO: 782 - RNA, 20 nt, Artificial Sequence
  Synthetic
ccagcugcugcacaacaccc

SEQ ID NO: 783 - RNA, 20 nt, Artificial Sequence
  Synthetic
caacacccaggcccgagccg

SEQ ID NO: 784 - RNA, 20 nt, Artificial Sequence
  Synthetic
ggcccgagccgcggacgccg

SEQ ID NO: 785 - RNA, 20 nt, Artificial Sequence
  Synthetic
ccgcggacgccgcggaugac

SEQ ID NO: 786 - RNA, 20 nt, Artificial Sequence
  Synthetic
ccgcggaugaccggccgcac

SEQ ID NO: 787 - RNA, 20 nt, Artificial Sequence
  Synthetic
cgcggaugaccggccgcacc

SEQ ID NO: 788 - RNA, 20 nt, Artificial Sequence
  Synthetic
gcggaugaccggccgcaccg

SEQ ID NO: 789 - RNA, 20 nt, Artificial Sequence
  Synthetic
cggaugaccggccgcaccgg

SEQ ID NO: 790 - RNA, 20 nt, Artificial Sequence
  Synthetic
ggaugaccggccgcaccggg

SEQ ID NO: 791 - RNA, 20 nt, Artificial Sequence
  Synthetic
ugaccggccgcaccgggggg

SEQ ID NO: 792 - RNA, 20 nt, Artificial Sequence
  Synthetic
ggccgcaccggggggcggac

SEQ ID NO: 793 - RNA, 20 nt, Artificial Sequence
  Synthetic
caagauuuacuacuacguga

SEQ ID NO: 794 - RNA, 20 nt, Artificial Sequence
  Synthetic
ugauggugcccgccuucucg

SEQ ID NO: 795 - RNA, 20 nt, Artificial Sequence
  Synthetic
gauggugcccgccuucucgc

SEQ ID NO: 796 - RNA, 20 nt, Artificial Sequence
  Synthetic
auggugcccgccuucucgcg

SEQ ID NO: 797 - RNA, 20 nt, Artificial Sequence
  Synthetic
gcggggccgcugcugcaccg

SEQ ID NO: 798 - RNA, 20 nt, Artificial Sequence
  Synthetic
cggggccgcugcugcaccgc

SEQ ID NO: 799 - RNA, 20 nt, Artificial Sequence
  Synthetic
ggggccgcugcugcaccgcg

SEQ ID NO: 800 - RNA, 20 nt, Artificial Sequence
  Synthetic
gggccgcugcugcaccgcgg

SEQ ID NO: 801 - RNA, 20 nt, Artificial Sequence
  Synthetic
auacgccacccugcagaaca

SEQ ID NO: 802 - RNA, 20 nt, Artificial Sequence
  Synthetic
cgccacccugcagaacaugg

SEQ ID NO: 803 - RNA, 20 nt, Artificial Sequence
  Synthetic
ccugcagaacaugguggucc

SEQ ID NO: 804 - RNA, 20 nt, Artificial Sequence
  Synthetic
guggucccggagaucgcccc

SEQ ID NO: 805 - RNA, 20 nt, Artificial Sequence
  Synthetic
cccggagaucgcccccggcg

SEQ ID NO: 806 - RNA, 20 nt, Artificial Sequence
  Synthetic
gugccccagcgaccccguga

SEQ ID NO: 807 - RNA, 20 nt, Artificial Sequence
  Synthetic
ccccgcgcacccccugcacc

SEQ ID NO: 808 - RNA, 20 nt, Artificial Sequence
  Synthetic
cccccugcacccggccaauc

SEQ ID NO: 809 - RNA, 20 nt, Artificial Sequence
  Synthetic
ccugcacccggccaaucugg

SEQ ID NO: 810 - RNA, 20 nt, Artificial Sequence
  Synthetic
ggccaaucugguggccaaca

SEQ ID NO: 811 - RNA, 20 nt, Artificial Sequence
  Synthetic
gucaacgccauguuucacaa

SEQ ID NO: 812 - RNA, 20 nt, Artificial Sequence
  Synthetic
ucaacgccauguuucacaac

SEQ ID NO: 813 - RNA, 20 nt, Artificial Sequence
  Synthetic
cauguuucacaacgggcgcg

SEQ ID NO: 814 - RNA, 20 nt, Artificial Sequence
  Synthetic
ucacaacgggcgcgugguag

SEQ ID NO: 815 - RNA, 20 nt, Artificial Sequence
  Synthetic
aacgggcgcgugguagugga

SEQ ID NO: 816 - RNA, 20 nt, Artificial Sequence
  Synthetic
acgggcgcgugguaguggac

SEQ ID NO: 817 - RNA, 20 nt, Artificial Sequence
  Synthetic
gcccgccaugcucacgcugc

SEQ ID NO: 818 - RNA, 20 nt, Artificial Sequence
  Synthetic
caugcucacgcugcaggugc

SEQ ID NO: 819 - RNA, 20 nt, Artificial Sequence
  Synthetic
gcaggugcuggcccacaaca

SEQ ID NO: 820 - RNA, 20 nt, Artificial Sequence
  Synthetic
caacauggccgaacgcacaa

SEQ ID NO: 821 - RNA, 20 nt, Artificial Sequence
  Synthetic
cacaacggcgcugcucugcu

SEQ ID NO: 822 - RNA, 20 nt, Artificial Sequence
  Synthetic
aacggcgcugcucugcucgg

SEQ ID NO: 823 - RNA, 20 nt, Artificial Sequence
  Synthetic
cugcucggcggcgcccgacg

SEQ ID NO: 824 - RNA, 20 nt, Artificial Sequence
  Synthetic
ugcucggcggcgcccgacgc

SEQ ID NO: 825 - RNA, 20 nt, Artificial Sequence
  Synthetic
accaacaugcgcauauucga

SEQ ID NO: 826 - RNA, 20 nt, Artificial Sequence
  Synthetic
ccaacaugcgcauauucgac

SEQ ID NO: 827 - RNA, 20 nt, Artificial Sequence
  Synthetic
caacaugcgcauauucgacg

SEQ ID NO: 828 - RNA, 20 nt, Artificial Sequence
  Synthetic
uucgacggggcguugcacgc

SEQ ID NO: 829 - RNA, 20 nt, Artificial Sequence
  Synthetic
gcacgccggaauccugcuga

SEQ ID NO: 830 - RNA, 20 nt, Artificial Sequence
  Synthetic
gcugauggccccccagcauc

SEQ ID NO: 831 - RNA, 20 nt, Artificial Sequence
  Synthetic
cuggaccauaccauccaaaa

SEQ ID NO: 832 - RNA, 20 nt, Artificial Sequence
  Synthetic
cccguccacgcgcuguucgc

SEQ ID NO: 833 - RNA, 20 nt, Artificial Sequence
  Synthetic
ccguccacgcgcuguucgcc

SEQ ID NO: 834 - RNA, 20 nt, Artificial Sequence
  Synthetic
cguccacgcgcuguucgccg

SEQ ID NO: 835 - RNA, 20 nt, Artificial Sequence
  Synthetic
guucgccggggccgaccacg

SEQ ID NO: 836 - RNA, 20 nt, Artificial Sequence
  Synthetic
gaacgcgcccaauuuccccc

SEQ ID NO: 837 - RNA, 20 nt, Artificial Sequence
  Synthetic
cggcccugcgcgaccugucg

SEQ ID NO: 838 - RNA, 20 nt, Artificial Sequence
  Synthetic
ccugcgcgaccugucgcggc

SEQ ID NO: 839 - RNA, 20 nt, Artificial Sequence
  Synthetic
ccugucgcggcagguccccc

SEQ ID NO: 840 - RNA, 20 nt, Artificial Sequence
  Synthetic
gcaggucccccugguccccc

SEQ ID NO: 841 - RNA, 20 nt, Artificial Sequence
  Synthetic
cccccugguccccccggcuc

SEQ ID NO: 842 - RNA, 20 nt, Artificial Sequence
  Synthetic
ccccugguccccccggcucu

SEQ ID NO: 843 - RNA, 20 nt, Artificial Sequence
  Synthetic
cccugguccccccggcucug

SEQ ID NO: 844 - RNA, 20 nt, Artificial Sequence
  Synthetic
ccugguccccccggcucugg

SEQ ID NO: 845 - RNA, 20 nt, Artificial Sequence
  Synthetic
gcagcacguccgcgagagcg

SEQ ID NO: 846 - RNA, 20 nt, Artificial Sequence
  Synthetic
cacguccgcgagagcgcggc

SEQ ID NO: 847 - RNA, 20 nt, Artificial Sequence
  Synthetic
acguccgcgagagcgcggcc

SEQ ID NO: 848 - RNA, 20 nt, Artificial Sequence
  Synthetic
cguccgcgagagcgcggccg

SEQ ID NO: 849 - RNA, 20 nt, Artificial Sequence
  Synthetic
cgcgcugaccuacgcgcuca

SEQ ID NO: 850 - RNA, 20 nt, Artificial Sequence
  Synthetic
gcugaccuacgcgcucaugg

SEQ ID NO: 851 - RNA, 20 nt, Artificial Sequence
  Synthetic
cugaccuacgcgcucauggc

SEQ ID NO: 852 - RNA, 20 nt, Artificial Sequence
  Synthetic
ugaccuacgcgcucauggcg

SEQ ID NO: 853 - RNA, 20 nt, Artificial Sequence
  Synthetic
guacuucaagaucagucccg

SEQ ID NO: 854 - RNA, 20 nt, Artificial Sequence
  Synthetic
cuugcaucaucagcucaaga

SEQ ID NO: 855 - RNA, 20 nt, Artificial Sequence
  Synthetic
uugcaucaucagcucaagac

SEQ ID NO: 856 - RNA, 20 nt, Artificial Sequence
  Synthetic
cucaagacgggccuccaucc

SEQ ID NO: 857 - RNA, 20 nt, Artificial Sequence
  Synthetic
ucaagacgggccuccauccc

SEQ ID NO: 858 - RNA, 20 nt, Artificial Sequence
  Synthetic
acgggccuccaucccggguu

SEQ ID NO: 859 - RNA, 20 nt, Artificial Sequence
  Synthetic
cgggccuccaucccggguuu

SEQ ID NO: 860 - RNA, 20 nt, Artificial Sequence
  Synthetic
uggguucaccgucguccgac

SEQ ID NO: 861 - RNA, 20 nt, Artificial Sequence
  Synthetic
gacugagaacgugcuguucu

SEQ ID NO: 862 - RNA, 20 nt, Artificial Sequence
  Synthetic
gcuguucucggagcgcgcgu

SEQ ID NO: 863 - RNA, 20 nt, Artificial Sequence
  Synthetic
guucucggagcgcgcgucgg

SEQ ID NO: 864 - RNA, 20 nt, Artificial Sequence
  Synthetic
cgcgucggaggcguacuucc

SEQ ID NO: 865 - RNA, 20 nt, Artificial Sequence
  Synthetic
gcgucggaggcguacuuccu

SEQ ID NO: 866 - RNA, 20 nt, Artificial Sequence
  Synthetic
guacuuccugggccagcucc

SEQ ID NO: 867 - RNA, 20 nt, Artificial Sequence
  Synthetic
cuuccugggccagcuccagg

SEQ ID NO: 868 - RNA, 20 nt, Artificial Sequence
  Synthetic
ugggccagcuccagguggcc

SEQ ID NO: 869 - RNA, 20 nt, Artificial Sequence
  Synthetic
cagguggcccggcacgaaac

SEQ ID NO: 870 - RNA, 20 nt, Artificial Sequence
  Synthetic
guggcccggcacgaaacugg

SEQ ID NO: 871 - RNA, 20 nt, Artificial Sequence
  Synthetic
uggcccggcacgaaacuggc

SEQ ID NO: 872 - RNA, 20 nt, Artificial Sequence
  Synthetic
ggcccggcacgaaacuggcg

SEQ ID NO: 873 - RNA, 20 nt, Artificial Sequence
  Synthetic
gcccggcacgaaacuggcgg

SEQ ID NO: 874 - RNA, 20 nt, Artificial Sequence
  Synthetic
cccggcacgaaacuggcggg

SEQ ID NO: 875 - RNA, 20 nt, Artificial Sequence
  Synthetic
ccggcacgaaacuggcgggg

SEQ ID NO: 876 - RNA, 20 nt, Artificial Sequence
  Synthetic
cacccagccgcgcgcgaacg

SEQ ID NO: 877 - RNA, 20 nt, Artificial Sequence
  Synthetic
gccgcgcgcgaacguggacc

SEQ ID NO: 878 - RNA, 20 nt, Artificial Sequence
  Synthetic
ccgcgcgcgaacguggaccu

SEQ ID NO: 879 - RNA, 20 nt, Artificial Sequence
  Synthetic
cgcgaacguggaccugggcg

SEQ ID NO: 880 - RNA, 20 nt, Artificial Sequence
  Synthetic
gcgaacguggaccugggcgu

SEQ ID NO: 881 - RNA, 20 nt, Artificial Sequence
  Synthetic
cgugggcuacaccgccgucg

SEQ ID NO: 882 - RNA, 20 nt, Artificial Sequence
  Synthetic
cuacaccgccgucguggcca

SEQ ID NO: 883 - RNA, 20 nt, Artificial Sequence
  Synthetic
ccgcaaccccgucaccgaca

SEQ ID NO: 884 - RNA, 20 nt, Artificial Sequence
  Synthetic
cgcaaccccgucaccgacau

SEQ ID NO: 885 - RNA, 20 nt, Artificial Sequence
  Synthetic
ccuuccccaaaacuuuuacc

SEQ ID NO: 886 - RNA, 20 nt, Artificial Sequence
  Synthetic
cuuccccaaaacuuuuaccu

SEQ ID NO: 887 - RNA, 20 nt, Artificial Sequence
  Synthetic
caaaacuuuuaccugggccg

SEQ ID NO: 888 - RNA, 20 nt, Artificial Sequence
  Synthetic
aaaacuuuuaccugggccgc

SEQ ID NO: 889 - RNA, 20 nt, Artificial Sequence
  Synthetic
aaacuuuuaccugggccgcg

SEQ ID NO: 890 - RNA, 20 nt, Artificial Sequence
  Synthetic
ccgcggggcucccccucucc

SEQ ID NO: 891 - RNA, 20 nt, Artificial Sequence
  Synthetic
ucccccucuccuggacaacg

SEQ ID NO: 892 - RNA, 20 nt, Artificial Sequence
  Synthetic
acgcggcagccguguaccug

SEQ ID NO: 893 - RNA, 20 nt, Artificial Sequence
  Synthetic
agccguguaccugcggaacg

SEQ ID NO: 894 - RNA, 20 nt, Artificial Sequence
  Synthetic
guaccugcggaacgcggucg

SEQ ID NO: 895 - RNA, 20 nt, Artificial Sequence
  Synthetic
ccugcggaacgcggucgugg

SEQ ID NO: 896 - RNA, 20 nt, Artificial Sequence
  Synthetic
cugcggaacgcggucguggc

SEQ ID NO: 897 - RNA, 20 nt, Artificial Sequence
  Synthetic
ggucguggcgggaaaccgcc

SEQ ID NO: 898 - RNA, 20 nt, Artificial Sequence
  Synthetic
gucguggcgggaaaccgccu

SEQ ID NO: 899 - RNA, 20 nt, Artificial Sequence
  Synthetic
ucguggcgggaaaccgccug

SEQ ID NO: 900 - RNA, 20 nt, Artificial Sequence
  Synthetic
ggcgggaaaccgccuggggc

SEQ ID NO: 901 - RNA, 20 nt, Artificial Sequence
  Synthetic
gcccagcccguccccguguu

SEQ ID NO: 902 - RNA, 20 nt, Artificial Sequence
  Synthetic
cccagcccguccccguguuc

SEQ ID NO: 903 - RNA, 20 nt, Artificial Sequence
  Synthetic
ccccguguucgggugcgccc

SEQ ID NO: 904 - RNA, 20 nt, Artificial Sequence
  Synthetic
ucgggugcgcccaggugccg

SEQ ID NO: 905 - RNA, 20 nt, Artificial Sequence
  Synthetic
gcccaggugccgcggcgcgc

SEQ ID NO: 906 - RNA, 20 nt, Artificial Sequence
  Synthetic
cccaggugccgcggcgcgca

SEQ ID NO: 907 - RNA, 20 nt, Artificial Sequence
  Synthetic
ggugccgcggcgcgcaggga

SEQ ID NO: 908 - RNA, 20 nt, Artificial Sequence
  Synthetic
cggcgcgcagggauggacca

SEQ ID NO: 909 - RNA, 20 nt, Artificial Sequence
  Synthetic
cgcagggauggaccacggcc

SEQ ID NO: 910 - RNA, 20 nt, Artificial Sequence
  Synthetic
ccgacgucaacuacuuccgc

SEQ ID NO: 911 - RNA, 20 nt, Artificial Sequence
  Synthetic
uccgccggcccugcaacccc

SEQ ID NO: 912 - RNA, 20 nt, Artificial Sequence
  Synthetic
ccgccggcccugcaaccccc

SEQ ID NO: 913 - RNA, 20 nt, Artificial Sequence
  Synthetic
cgccggcccugcaacccccg

SEQ ID NO: 914 - RNA, 20 nt, Artificial Sequence
  Synthetic
aacccccggggacgcgccgc

SEQ ID NO: 915 - RNA, 20 nt, Artificial Sequence
  Synthetic
acccccggggacgcgccgcc

SEQ ID NO: 916 - RNA, 20 nt, Artificial Sequence
  Synthetic
cccccggggacgcgccgccg

SEQ ID NO: 917 - RNA, 20 nt, Artificial Sequence
  Synthetic
ccccggggacgcgccgccgg

SEQ ID NO: 918 - RNA, 20 nt, Artificial Sequence
  Synthetic
cgccgccgggggcguuuacg

SEQ ID NO: 919 - RNA, 20 nt, Artificial Sequence
  Synthetic
gccgccgggggcguuuacgc

SEQ ID NO: 920 - RNA, 20 nt, Artificial Sequence
  Synthetic
ccgccgggggcguuuacgcg

SEQ ID NO: 921 - RNA, 20 nt, Artificial Sequence
  Synthetic
cgccgggggcguuuacgcgg

SEQ ID NO: 922 - RNA, 20 nt, Artificial Sequence
  Synthetic
gggcguuuacgcgggggaca

SEQ ID NO: 923 - RNA, 20 nt, Artificial Sequence
  Synthetic
cguuuacgcgggggacaagg

SEQ ID NO: 924 - RNA, 20 nt, Artificial Sequence
  Synthetic
guuuacgcgggggacaagga

SEQ ID NO: 925 - RNA, 20 nt, Artificial Sequence
  Synthetic
uuuacgcgggggacaaggag

SEQ ID NO: 926 - RNA, 20 nt, Artificial Sequence
  Synthetic
uuacgcgggggacaaggagg

SEQ ID NO: 927 - RNA, 20 nt, Artificial Sequence
  Synthetic
accgcccucauguacgacca

SEQ ID NO: 928 - RNA, 20 nt, Artificial Sequence
  Synthetic
acggccagagcgacccgucc

SEQ ID NO: 929 - RNA, 20 nt, Artificial Sequence
  Synthetic
cggccagagcgacccguccc

SEQ ID NO: 930 - RNA, 20 nt, Artificial Sequence
  Synthetic
cgacccgucccgggccuucg

SEQ ID NO: 931 - RNA, 20 nt, Artificial Sequence
  Synthetic
gucccgggccuucgcggcca

SEQ ID NO: 932 - RNA, 20 nt, Artificial Sequence
  Synthetic
ucgcggccacggccaacccg

SEQ ID NO: 933 - RNA, 20 nt, Artificial Sequence
  Synthetic
cgcggccacggccaacccgu

SEQ ID NO: 934 - RNA, 20 nt, Artificial Sequence
  Synthetic
gcgucgcagcgauuuucgua

SEQ ID NO: 935 - RNA, 20 nt, Artificial Sequence
  Synthetic
cgucgcagcgauuuucguac

SEQ ID NO: 936 - RNA, 20 nt, Artificial Sequence
  Synthetic
gucgcagcgauuuucguacg

SEQ ID NO: 937 - RNA, 20 nt, Artificial Sequence
  Synthetic
uacggggaccugcucuauaa

SEQ ID NO: 938 - RNA, 20 nt, Artificial Sequence
  Synthetic
acggggaccugcucuauaac

SEQ ID NO: 939 - RNA, 20 nt, Artificial Sequence
  Synthetic
cggggaccugcucuauaacg

SEQ ID NO: 940 - RNA, 20 nt, Artificial Sequence
  Synthetic
aacggggccuaccaccucaa

SEQ ID NO: 941 - RNA, 20 nt, Artificial Sequence
  Synthetic
acggggccuaccaccucaac

SEQ ID NO: 942 - RNA, 20 nt, Artificial Sequence
  Synthetic
cggggccuaccaccucaacg

SEQ ID NO: 943 - RNA, 20 nt, Artificial Sequence
  Synthetic
ccaccucaacggggccucgc

SEQ ID NO: 944 - RNA, 20 nt, Artificial Sequence
  Synthetic
cugcuuuaaguucuuuacgu

SEQ ID NO: 945 - RNA, 20 nt, Artificial Sequence
  Synthetic
cgccgccaaacaucgcugcc

SEQ ID NO: 946 - RNA, 20 nt, Artificial Sequence
  Synthetic
cugccuggagcgccugaucg

SEQ ID NO: 947 - RNA, 20 nt, Artificial Sequence
  Synthetic
ggagcgccugaucguggaga

SEQ ID NO: 948 - RNA, 20 nt, Artificial Sequence
  Synthetic
gagcgccugaucguggagac

SEQ ID NO: 949 - RNA, 20 nt, Artificial Sequence
  Synthetic
ccugaucguggagacggguu

SEQ ID NO: 950 - RNA, 20 nt, Artificial Sequence
  Synthetic
gaucguggagacggguucgg

SEQ ID NO: 951 - RNA, 20 nt, Artificial Sequence
  Synthetic
gacggguucggcggugucca

SEQ ID NO: 952 - RNA, 20 nt, Artificial Sequence
  Synthetic
cguacaguuuaagcgccccc

SEQ ID NO: 953 - RNA, 20 nt, Artificial Sequence
  Synthetic
guacaguuuaagcgcccccc

SEQ ID NO: 954 - RNA, 20 nt, Artificial Sequence
  Synthetic
uacaguuuaagcgccccccg

SEQ ID NO: 955 - RNA, 20 nt, Artificial Sequence
  Synthetic
cccggggugccgcgaacucg

SEQ ID NO: 956 - RNA, 20 nt, Artificial Sequence
  Synthetic
ggggugccgcgaacucgugg

SEQ ID NO: 957 - RNA, 20 nt, Artificial Sequence
  Synthetic
gaacucguggaggacccgug

SEQ ID NO: 958 - RNA, 20 nt, Artificial Sequence
  Synthetic
ggacccguguggccuguuuc

SEQ ID NO: 959 - RNA, 20 nt, Artificial Sequence
  Synthetic
cccguguggccuguuucagg

SEQ ID NO: 960 - RNA, 20 nt, Artificial Sequence
  Synthetic
cuccuccgcagugcccgcaa

SEQ ID NO: 961 - RNA, 20 nt, Artificial Sequence
  Synthetic
uccuccgcagugcccgcaac

SEQ ID NO: 962 - RNA, 20 nt, Artificial Sequence
  Synthetic
ccuccgcagugcccgcaacg

SEQ ID NO: 963 - RNA, 20 nt, Artificial Sequence
  Synthetic
gcaacggggaagcccacgcg

SEQ ID NO: 964 - RNA, 20 nt, Artificial Sequence
  Synthetic
caacggggaagcccacgcgc

SEQ ID NO: 965 - RNA, 20 nt, Artificial Sequence
  Synthetic
cuaugacgcauccccgcuca

SEQ ID NO: 966 - RNA, 20 nt, Artificial Sequence
  Synthetic
uaugacgcauccccgcucaa

SEQ ID NO: 967 - RNA, 20 nt, Artificial Sequence
  Synthetic
cgcauccccgcucaagggac

SEQ ID NO: 968 - RNA, 17 nt, Artificial Sequence
  Synthetic
aacguccaggccguccu

SEQ ID NO: 969 - RNA, 17 nt, Artificial Sequence
  Synthetic
acguccaggccguccuc

SEQ ID NO: 970 - RNA, 17 nt, Artificial Sequence
  Synthetic
cguccaggccguccucg

SEQ ID NO: 971 - RNA, 17 nt, Artificial Sequence
  Synthetic
cucggggcguuugagcg

SEQ ID NO: 972 - RNA, 17 nt, Artificial Sequence
  Synthetic
ggcguuugagcgcggca

SEQ ID NO: 973 - RNA, 17 nt, Artificial Sequence
  Synthetic
gaugcugcacgugcugc

SEQ ID NO: 974 - RNA, 17 nt, Artificial Sequence
  Synthetic
gcacgugcugcuggaaa

SEQ ID NO: 975 - RNA, 17 nt, Artificial Sequence
  Synthetic
ggaaaaggcgccgcccc

SEQ ID NO: 976 - RNA, 17 nt, Artificial Sequence
  Synthetic
gccgaugcaacgauacc

SEQ ID NO: 977 - RNA, 17 nt, Artificial Sequence
  Synthetic
caacgauaccuggacaa

SEQ ID NO: 978 - RNA, 17 nt, Artificial Sequence
  Synthetic
ccuggacaacggccgcc

SEQ ID NO: 979 - RNA, 17 nt, Artificial Sequence
  Synthetic
acggccgccuggccacc

SEQ ID NO: 980 - RNA, 17 nt, Artificial Sequence
  Synthetic
cggccgccuggccacca

SEQ ID NO: 981 - RNA, 17 nt, Artificial Sequence
  Synthetic
ccgccuggccaccaggg

SEQ ID NO: 982 - RNA, 17 nt, Artificial Sequence
  Synthetic
uggccaccaggguggcc

SEQ ID NO: 983 - RNA, 17 nt, Artificial Sequence
  Synthetic
ggccaccaggguggccc

SEQ ID NO: 984 - RNA, 17 nt, Artificial Sequence
  Synthetic
gguggcccgggcgaccc

SEQ ID NO: 985 - RNA, 17 nt, Artificial Sequence
  Synthetic
cgagacgagcuuuuucc

SEQ ID NO: 986 - RNA, 17 nt, Artificial Sequence
  Synthetic
gagacgagcuuuuuccu

SEQ ID NO: 987 - RNA, 17 nt, Artificial Sequence
  Synthetic
gagcuuuuuccugggca

SEQ ID NO: 988 - RNA, 17 nt, Artificial Sequence
  Synthetic
cuuuuuccugggcaagg

SEQ ID NO: 989 - RNA, 17 nt, Artificial Sequence
  Synthetic
uuuuuccugggcaaggc

SEQ ID NO: 990 - RNA, 17 nt, Artificial Sequence
  Synthetic
gcaaggcgggccaccgc

SEQ ID NO: 991 - RNA, 17 nt, Artificial Sequence
  Synthetic
caaggcgggccaccgcc

SEQ ID NO: 992 - RNA, 17 nt, Artificial Sequence
  Synthetic
ggcgggccaccgccggg

SEQ ID NO: 993 - RNA, 17 nt, Artificial Sequence
  Synthetic
ccgccgggaggccgucg

SEQ ID NO: 994 - RNA, 17 nt, Artificial Sequence
  Synthetic
gggaggccgucgaggcc

SEQ ID NO: 995 - RNA, 17 nt, Artificial Sequence
  Synthetic
cgucgaggccuggcucg

SEQ ID NO: 996 - RNA, 17 nt, Artificial Sequence
  Synthetic
gcucguggaccucacca

SEQ ID NO: 997 - RNA, 17 nt, Artificial Sequence
  Synthetic
ggccacgcagcccuccg

SEQ ID NO: 998 - RNA, 17 nt, Artificial Sequence
  Synthetic
acgcaugccgacacgcg

SEQ ID NO: 999 - RNA, 17 nt, Artificial Sequence
  Synthetic
cgcaugccgacacgcgc

SEQ ID NO: 1000 - RNA, 17 nt, Artificial Sequence
  Synthetic
augccgacacgcgcggg

SEQ ID NO: 1001 - RNA, 17 nt, Artificial Sequence
  Synthetic
cgacacgcgcgggcggc

SEQ ID NO: 1002 - RNA, 17 nt, Artificial Sequence
  Synthetic
cgcgggcggccggucga

SEQ ID NO: 1003 - RNA, 17 nt, Artificial Sequence
  Synthetic
gcgggcggccggucgac

SEQ ID NO: 1004 - RNA, 17 nt, Artificial Sequence
  Synthetic
cgggcggccggucgacg

SEQ ID NO: 1005 - RNA, 17 nt, Artificial Sequence
  Synthetic
gcaguccuuccugaaag

SEQ ID NO: 1006 - RNA, 17 nt, Artificial Sequence
  Synthetic
guccuuccugaaagugg

SEQ ID NO: 1007 - RNA, 17 nt, Artificial Sequence
  Synthetic
caccgaagccgacgugc

SEQ ID NO: 1008 - RNA, 17 nt, Artificial Sequence
  Synthetic
gacgugccggugacgua

SEQ ID NO: 1009 - RNA, 17 nt, Artificial Sequence
  Synthetic
ggugacguacggcgaga

SEQ ID NO: 1010 - RNA, 17 nt, Artificial Sequence
  Synthetic
ggcgagaugguccugaa

SEQ ID NO: 1011 - RNA, 17 nt, Artificial Sequence
  Synthetic
gcgagaugguccugaac

SEQ ID NO: 1012 - RNA, 17 nt, Artificial Sequence
  Synthetic
cgagaugguccugaacg

SEQ ID NO: 1013 - RNA, 17 nt, Artificial Sequence
  Synthetic
ccugaacggggccaacc

SEQ ID NO: 1014 - RNA, 17 nt, Artificial Sequence
  Synthetic
cggggccaaccugguca

SEQ ID NO: 1015 - RNA, 17 nt, Artificial Sequence
  Synthetic
ggucacggcgcucguga

SEQ ID NO: 1016 - RNA, 17 nt, Artificial Sequence
  Synthetic
gucacggcgcucgugau

SEQ ID NO: 1017 - RNA, 17 nt, Artificial Sequence
  Synthetic
ggcgcucgugaugggca

SEQ ID NO: 1018 - RNA, 17 nt, Artificial Sequence
  Synthetic
caaggccgugcgaaguc

SEQ ID NO: 1019 - RNA, 17 nt, Artificial Sequence
  Synthetic
gcgaagucuggacgacg

SEQ ID NO: 1020 - RNA, 17 nt, Artificial Sequence
  Synthetic
cgaagucuggacgacgu

SEQ ID NO: 1021 - RNA, 17 nt, Artificial Sequence
  Synthetic
cgugggccgccaccugc

SEQ ID NO: 1022 - RNA, 17 nt, Artificial Sequence
  Synthetic
ccaccugcuggagaugc

SEQ ID NO: 1023 - RNA, 17 nt, Artificial Sequence
  Synthetic
ccugcuggagaugcagg

SEQ ID NO: 1024 - RNA, 17 nt, Artificial Sequence
  Synthetic
agcagcucgaccugaac

SEQ ID NO: 1025 - RNA, 17 nt, Artificial Sequence
  Synthetic
ccugaaccggcagacgc

SEQ ID NO: 1026 - RNA, 17 nt, Artificial Sequence
  Synthetic
gacgacgcgcgugcgcg

SEQ ID NO: 1027 - RNA, 17 nt, Artificial Sequence
  Synthetic
gcgcgugcgcgcggauc

SEQ ID NO: 1028 - RNA, 17 nt, Artificial Sequence
  Synthetic
gcggaucugguguccau

SEQ ID NO: 1029 - RNA, 17 nt, Artificial Sequence
  Synthetic
guccaucggcgagaagc

SEQ ID NO: 1030 - RNA, 17 nt, Artificial Sequence
  Synthetic
cgagaagcuggucuuuc

SEQ ID NO: 1031 - RNA, 17 nt, Artificial Sequence
  Synthetic
gaagcuggucuuucugg

SEQ ID NO: 1032 - RNA, 17 nt, Artificial Sequence
  Synthetic
ggucuuucuggaggccc

SEQ ID NO: 1033 - RNA, 17 nt, Artificial Sequence
  Synthetic
caacguucccuaccccc

SEQ ID NO: 1034 - RNA, 17 nt, Artificial Sequence
  Synthetic
cguucccuacccccugg

SEQ ID NO: 1035 - RNA, 17 nt, Artificial Sequence
  Synthetic
guucccuacccccuggu

SEQ ID NO: 1036 - RNA, 17 nt, Artificial Sequence
  Synthetic
cccccuggugggcgcca

SEQ ID NO: 1037 - RNA, 17 nt, Artificial Sequence
  Synthetic
gacguucguccugcccc

SEQ ID NO: 1038 - RNA, 17 nt, Artificial Sequence
  Synthetic
acguucguccugccccu

SEQ ID NO: 1039 - RNA, 17 nt, Artificial Sequence
  Synthetic
ccugggccuguucaauc

SEQ ID NO: 1040 - RNA, 17 nt, Artificial Sequence
  Synthetic
ccuguucaauccgguca

SEQ ID NO: 1041 - RNA, 17 nt, Artificial Sequence
  Synthetic
ucaauccggucauggaa

SEQ ID NO: 1042 - RNA, 17 nt, Artificial Sequence
  Synthetic
cgguuugccgcgcacgc

SEQ ID NO: 1043 - RNA, 17 nt, Artificial Sequence
  Synthetic
gguuugccgcgcacgcc

SEQ ID NO: 1044 - RNA, 17 nt, Artificial Sequence
  Synthetic
guuugccgcgcacgccg

SEQ ID NO: 1045 - RNA, 17 nt, Artificial Sequence
  Synthetic
gaccuaguccccgcccc

SEQ ID NO: 1046 - RNA, 17 nt, Artificial Sequence
  Synthetic
ccccgcccccggccacc

SEQ ID NO: 1047 - RNA, 17 nt, Artificial Sequence
  Synthetic
cccgccagcuguuuuuu

SEQ ID NO: 1048 - RNA, 17 nt, Artificial Sequence
  Synthetic
ccgccagcuguuuuuuu

SEQ ID NO: 1049 - RNA, 17 nt, Artificial Sequence
  Synthetic
cgccagcuguuuuuuug

SEQ ID NO: 1050 - RNA, 17 nt, Artificial Sequence
  Synthetic
gccagcuguuuuuuugg

SEQ ID NO: 1051 - RNA, 17 nt, Artificial Sequence
  Synthetic
gcuguuuuuuuggggga

SEQ ID NO: 1052 - RNA, 17 nt, Artificial Sequence
  Synthetic
uugggggaaggaccgcc

SEQ ID NO: 1053 - RNA, 17 nt, Artificial Sequence
  Synthetic
ggugcugcgccugucuc

SEQ ID NO: 1054 - RNA, 17 nt, Artificial Sequence
  Synthetic
ucucuggaacacgcgau

SEQ ID NO: 1055 - RNA, 17 nt, Artificial Sequence
  Synthetic
cucuggaacacgcgauc

SEQ ID NO: 1056 - RNA, 17 nt, Artificial Sequence
  Synthetic
gcugaugaacguugacg

SEQ ID NO: 1057 - RNA, 17 nt, Artificial Sequence
  Synthetic
gaugaacguugacgcgg

SEQ ID NO: 1058 - RNA, 17 nt, Artificial Sequence
  Synthetic
aacguugacgcggcggu

SEQ ID NO: 1059 - RNA, 17 nt, Artificial Sequence
  Synthetic
acguugacgcggcgguc

SEQ ID NO: 1060 - RNA, 17 nt, Artificial Sequence
  Synthetic
cguugacgcggcggucg

SEQ ID NO: 1061 - RNA, 17 nt, Artificial Sequence
  Synthetic
guugacgcggcggucgg

SEQ ID NO: 1062 - RNA, 17 nt, Artificial Sequence
  Synthetic
gaagccgccaauccgua

SEQ ID NO: 1063 - RNA, 17 nt, Artificial Sequence
  Synthetic
aagccgccaauccguac

SEQ ID NO: 1064 - RNA, 17 nt, Artificial Sequence
  Synthetic
agccgccaauccguacg

SEQ ID NO: 1065 - RNA, 17 nt, Artificial Sequence
  Synthetic
uccguacggggcguacg

SEQ ID NO: 1066 - RNA, 17 nt, Artificial Sequence
  Synthetic
guacggggcguacgugg

SEQ ID NO: 1067 - RNA, 17 nt, Artificial Sequence
  Synthetic
ggcguacguggcggccc

SEQ ID NO: 1068 - RNA, 17 nt, Artificial Sequence
  Synthetic
uacguggcggccccggc

SEQ ID NO: 1069 - RNA, 17 nt, Artificial Sequence
  Synthetic
agcuguuuuugaacgcc

SEQ ID NO: 1070 - RNA, 17 nt, Artificial Sequence
  Synthetic
gcuguuuuugaacgccu

SEQ ID NO: 1071 - RNA, 17 nt, Artificial Sequence
  Synthetic
cuguuuuugaacgccug

SEQ ID NO: 1072 - RNA, 17 nt, Artificial Sequence
  Synthetic
uguuuuugaacgccugg

SEQ ID NO: 1073 - RNA, 17 nt, Artificial Sequence
  Synthetic
cgccugggggcagcgcc

SEQ ID NO: 1074 - RNA, 17 nt, Artificial Sequence
  Synthetic
gggcagcgccuggccca

SEQ ID NO: 1075 - RNA, 17 nt, Artificial Sequence
  Synthetic
ggcagcgccuggcccac

SEQ ID NO: 1076 - RNA, 17 nt, Artificial Sequence
  Synthetic
agcgccuggcccacggg

SEQ ID NO: 1077 - RNA, 17 nt, Artificial Sequence
  Synthetic
gcgccuggcccacgggc

SEQ ID NO: 1078 - RNA, 17 nt, Artificial Sequence
  Synthetic
cccacgggcggguccga

SEQ ID NO: 1079 - RNA, 17 nt, Artificial Sequence
  Synthetic
ccacgggcggguccgau

SEQ ID NO: 1080 - RNA, 17 nt, Artificial Sequence
  Synthetic
gcggguccgaugggucg

SEQ ID NO: 1081 - RNA, 17 nt, Artificial Sequence
  Synthetic
guccgaugggucgcgga

SEQ ID NO: 1082 - RNA, 17 nt, Artificial Sequence
  Synthetic
ggaaggccagaugaccc

SEQ ID NO: 1083 - RNA, 17 nt, Artificial Sequence
  Synthetic
gcccgacaacgccaacc

SEQ ID NO: 1084 - RNA, 17 nt, Artificial Sequence
  Synthetic
cgcguucgacuucuuug

SEQ ID NO: 1085 - RNA, 17 nt, Artificial Sequence
  Synthetic
gcguucgacuucuuugu

SEQ ID NO: 1086 - RNA, 17 nt, Artificial Sequence
  Synthetic
cguucgacuucuuugug

SEQ ID NO: 1087 - RNA, 17 nt, Artificial Sequence
  Synthetic
guucgacuucuuugugg

SEQ ID NO: 1088 - RNA, 17 nt, Artificial Sequence
  Synthetic
cgacuucuuuguggggg

SEQ ID NO: 1089 - RNA, 17 nt, Artificial Sequence
  Synthetic
uguggggguggccgacg

SEQ ID NO: 1090 - RNA, 17 nt, Artificial Sequence
  Synthetic
ggccgacguggagcugc

SEQ ID NO: 1091 - RNA, 17 nt, Artificial Sequence
  Synthetic
gccgacguggagcugcc

SEQ ID NO: 1092 - RNA, 17 nt, Artificial Sequence
  Synthetic
ccgacguggagcugccg

SEQ ID NO: 1093 - RNA, 17 nt, Artificial Sequence
  Synthetic
cgacguggagcugccgg

SEQ ID NO: 1094 - RNA, 17 nt, Artificial Sequence
  Synthetic
gacguggagcugccggg

SEQ ID NO: 1095 - RNA, 17 nt, Artificial Sequence
  Synthetic
acguggagcugccgggg

SEQ ID NO: 1096 - RNA, 17 nt, Artificial Sequence
  Synthetic
cguggagcugccggggg

SEQ ID NO: 1097 - RNA, 17 nt, Artificial Sequence
  Synthetic
ggggggggacguucccc

SEQ ID NO: 1098 - RNA, 17 nt, Artificial Sequence
  Synthetic
ggggacguucccccggc

SEQ ID NO: 1099 - RNA, 17 nt, Artificial Sequence
  Synthetic
cguucccccggccggcc

SEQ ID NO: 1100 - RNA, 17 nt, Artificial Sequence
  Synthetic
guucccccggccggccc

SEQ ID NO: 1101 - RNA, 17 nt, Artificial Sequence
  Synthetic
uucccccggccggcccg

SEQ ID NO: 1102 - RNA, 17 nt, Artificial Sequence
  Synthetic
ucccccggccggcccgg

SEQ ID NO: 1103 - RNA, 17 nt, Artificial Sequence
  Synthetic
cggcccgggggagaucc

SEQ ID NO: 1104 - RNA, 17 nt, Artificial Sequence
  Synthetic
gggagauccaggccacc

SEQ ID NO: 1105 - RNA, 17 nt, Artificial Sequence
  Synthetic
ccaggccaccuggcgcg

SEQ ID NO: 1106 - RNA, 17 nt, Artificial Sequence
  Synthetic
accuggcgcguggugaa

SEQ ID NO: 1107 - RNA, 17 nt, Artificial Sequence
  Synthetic
gaacggcaacuugcccc

SEQ ID NO: 1108 - RNA, 17 nt, Artificial Sequence
  Synthetic
gccccuggcgcuauguc

SEQ ID NO: 1109 - RNA, 17 nt, Artificial Sequence
  Synthetic
ccuggcgcuauguccgg

SEQ ID NO: 1110 - RNA, 17 nt, Artificial Sequence
  Synthetic
uauguccggcggcguuc

SEQ ID NO: 1111 - RNA, 17 nt, Artificial Sequence
  Synthetic
auguccggcggcguucc

SEQ ID NO: 1112 - RNA, 17 nt, Artificial Sequence
  Synthetic
cggcguuccgggacgcc

SEQ ID NO: 1113 - RNA, 17 nt, Artificial Sequence
  Synthetic
ggcguuccgggacgccc

SEQ ID NO: 1114 - RNA, 17 nt, Artificial Sequence
  Synthetic
gcguuccgggacgcccg

SEQ ID NO: 1115 - RNA, 17 nt, Artificial Sequence
  Synthetic
ccgggacgcccggggcc

SEQ ID NO: 1116 - RNA, 17 nt, Artificial Sequence
  Synthetic
cgcccggggccuggagc

SEQ ID NO: 1117 - RNA, 17 nt, Artificial Sequence
  Synthetic
gcccggggccuggagcu

SEQ ID NO: 1118 - RNA, 17 nt, Artificial Sequence
  Synthetic
cccggggccuggagcug

SEQ ID NO: 1119 - RNA, 17 nt, Artificial Sequence
  Synthetic
ccggggccuggagcugg

SEQ ID NO: 1120 - RNA, 17 nt, Artificial Sequence
  Synthetic
gggccuggagcuggggg

SEQ ID NO: 1121 - RNA, 17 nt, Artificial Sequence
  Synthetic
ggccuggagcugggggu

SEQ ID NO: 1122 - RNA, 17 nt, Artificial Sequence
  Synthetic
ggugggacgccacgcca

SEQ ID NO: 1123 - RNA, 17 nt, Artificial Sequence
  Synthetic
accaucgccgccguucg

SEQ ID NO: 1124 - RNA, 17 nt, Artificial Sequence
  Synthetic
ccaucgccgccguucgc

SEQ ID NO: 1125 - RNA, 17 nt, Artificial Sequence
  Synthetic
caucgccgccguucgcg

SEQ ID NO: 1126 - RNA, 17 nt, Artificial Sequence
  Synthetic
cgacgaccgcaacuacc

SEQ ID NO: 1127 - RNA, 17 nt, Artificial Sequence
  Synthetic
cgaccgcaacuacccgg

SEQ ID NO: 1128 - RNA, 17 nt, Artificial Sequence
  Synthetic
gguguuuuaccugcugc

SEQ ID NO: 1129 - RNA, 17 nt, Artificial Sequence
  Synthetic
cugcaggccgccauaca

SEQ ID NO: 1130 - RNA, 17 nt, Artificial Sequence
  Synthetic
gcacgucuucugcgccc

SEQ ID NO: 1131 - RNA, 17 nt, Artificial Sequence
  Synthetic
ucuucugcgcccuggcc

SEQ ID NO: 1132 - RNA, 17 nt, Artificial Sequence
  Synthetic
cgcccuggcccggcucg

SEQ ID NO: 1133 - RNA, 17 nt, Artificial Sequence
  Synthetic
agugcaucaccagcuac

SEQ ID NO: 1134 - RNA, 17 nt, Artificial Sequence
  Synthetic
gcuacuggaacaacacg

SEQ ID NO: 1135 - RNA, 17 nt, Artificial Sequence
  Synthetic
gaacaacacgcggugcg

SEQ ID NO: 1136 - RNA, 17 nt, Artificial Sequence
  Synthetic
cgugaacgacuacucgc

SEQ ID NO: 1137 - RNA, 17 nt, Artificial Sequence
  Synthetic
uacgucgugaccuaccu

SEQ ID NO: 1138 - RNA, 17 nt, Artificial Sequence
  Synthetic
acgucgugaccuaccuc

SEQ ID NO: 1139 - RNA, 17 nt, Artificial Sequence
  Synthetic
cgucgugaccuaccucg

SEQ ID NO: 1140 - RNA, 17 nt, Artificial Sequence
  Synthetic
gucgugaccuaccucgg

SEQ ID NO: 1141 - RNA, 17 nt, Artificial Sequence
  Synthetic
cgggggagaccuucccg

SEQ ID NO: 1142 - RNA, 17 nt, Artificial Sequence
  Synthetic
ccuucccgaggagugca

SEQ ID NO: 1143 - RNA, 17 nt, Artificial Sequence
  Synthetic
agugcauggccguguac

SEQ ID NO: 1144 - RNA, 17 nt, Artificial Sequence
  Synthetic
gugcauggccguguacc

SEQ ID NO: 1145 - RNA, 17 nt, Artificial Sequence
  Synthetic
ggccguguaccgggacc

SEQ ID NO: 1146 - RNA, 17 nt, Artificial Sequence
  Synthetic
cguguaccgggaccugg

SEQ ID NO: 1147 - RNA, 17 nt, Artificial Sequence
  Synthetic
ccugguggcgcacgucg

SEQ ID NO: 1148 - RNA, 17 nt, Artificial Sequence
  Synthetic
ggcgcacgucgaggccc

SEQ ID NO: 1149 - RNA, 17 nt, Artificial Sequence
  Synthetic
cgaggcccuggcccagc

SEQ ID NO: 1150 - RNA, 17 nt, Artificial Sequence
  Synthetic
gaugacuuuacccugac

SEQ ID NO: 1151 - RNA, 17 nt, Artificial Sequence
  Synthetic
cuuuacccugaccggcc

SEQ ID NO: 1152 - RNA, 17 nt, Artificial Sequence
  Synthetic
ccugaccggcccggagc

SEQ ID NO: 1153 - RNA, 17 nt, Artificial Sequence
  Synthetic
cugaccggcccggagcu

SEQ ID NO: 1154 - RNA, 17 nt, Artificial Sequence
  Synthetic
accggcccggagcuggg

SEQ ID NO: 1155 - RNA, 17 nt, Artificial Sequence
  Synthetic
ccggcccggagcugggc

SEQ ID NO: 1156 - RNA, 17 nt, Artificial Sequence
  Synthetic
cccggagcugggcgggc

SEQ ID NO: 1157 - RNA, 17 nt, Artificial Sequence
  Synthetic
ucaccuaaugcgagacc

SEQ ID NO: 1158 - RNA, 17 nt, Artificial Sequence
  Synthetic
ugcugccaccccucgug

SEQ ID NO: 1159 - RNA, 17 nt, Artificial Sequence
  Synthetic
gcugccaccccucgugu

SEQ ID NO: 1160 - RNA, 17 nt, Artificial Sequence
  Synthetic
acugugacgcccugaug

SEQ ID NO: 1161 - RNA, 17 nt, Artificial Sequence
  Synthetic
cgcccugaugcggcgcg

SEQ ID NO: 1162 - RNA, 17 nt, Artificial Sequence
  Synthetic
gaugcggcgcgcggccc

SEQ ID NO: 1163 - RNA, 17 nt, Artificial Sequence
  Synthetic
accgccaucgcgacugc

SEQ ID NO: 1164 - RNA, 17 nt, Artificial Sequence
  Synthetic
ccgccaucgcgacugcc

SEQ ID NO: 1165 - RNA, 17 nt, Artificial Sequence
  Synthetic
cgacugccggguuagcg

SEQ ID NO: 1166 - RNA, 17 nt, Artificial Sequence
  Synthetic
gacugccggguuagcgc

SEQ ID NO: 1167 - RNA, 17 nt, Artificial Sequence
  Synthetic
acugccggguuagcgcg

SEQ ID NO: 1168 - RNA, 17 nt, Artificial Sequence
  Synthetic
cugccggguuagcgcgg

SEQ ID NO: 1169 - RNA, 17 nt, Artificial Sequence
  Synthetic
ugccggguuagcgcggg

SEQ ID NO: 1170 - RNA, 17 nt, Artificial Sequence
  Synthetic
ccacgaccccguguacg

SEQ ID NO: 1171 - RNA, 17 nt, Artificial Sequence
  Synthetic
cgaccccguguacgcgg

SEQ ID NO: 1172 - RNA, 17 nt, Artificial Sequence
  Synthetic
cgcggcggcauguaacg

SEQ ID NO: 1173 - RNA, 17 nt, Artificial Sequence
  Synthetic
auguaacguggcgaccg

SEQ ID NO: 1174 - RNA, 17 nt, Artificial Sequence
  Synthetic
gacuucaaccgcaacga

SEQ ID NO: 1175 - RNA, 17 nt, Artificial Sequence
  Synthetic
gcugcugcacaacaccc

SEQ ID NO: 1176 - RNA, 17 nt, Artificial Sequence
  Synthetic
cacccaggcccgagccg

SEQ ID NO: 1177 - RNA, 17 nt, Artificial Sequence
  Synthetic
ccgagccgcggacgccg

SEQ ID NO: 1178 - RNA, 17 nt, Artificial Sequence
  Synthetic
cggacgccgcggaugac

SEQ ID NO: 1179 - RNA, 17 nt, Artificial Sequence
  Synthetic
cggaugaccggccgcac

SEQ ID NO: 1180 - RNA, 17 nt, Artificial Sequence
  Synthetic
ggaugaccggccgcacc

SEQ ID NO: 1181 - RNA, 17 nt, Artificial Sequence
  Synthetic
gaugaccggccgcaccg

SEQ ID NO: 1182 - RNA, 17 nt, Artificial Sequence
  Synthetic
augaccggccgcaccgg

SEQ ID NO: 1183 - RNA, 17 nt, Artificial Sequence
  Synthetic
ugaccggccgcaccggg

SEQ ID NO: 1184 - RNA, 17 nt, Artificial Sequence
  Synthetic
ccggccgcaccgggggg

SEQ ID NO: 1185 - RNA, 17 nt, Artificial Sequence
  Synthetic
cgcaccggggggcggac

SEQ ID NO: 1186 - RNA, 17 nt, Artificial Sequence
  Synthetic
gauuuacuacuacguga

SEQ ID NO: 1187 - RNA, 17 nt, Artificial Sequence
  Synthetic
uggugcccgccuucucg

SEQ ID NO: 1188 - RNA, 17 nt, Artificial Sequence
  Synthetic
ggugcccgccuucucgc

SEQ ID NO: 1189 - RNA, 17 nt, Artificial Sequence
  Synthetic
gugcccgccuucucgcg

SEQ ID NO: 1190 - RNA, 17 nt, Artificial Sequence
  Synthetic
gggccgcugcugcaccg

SEQ ID NO: 1191 - RNA, 17 nt, Artificial Sequence
  Synthetic
ggccgcugcugcaccgc

SEQ ID NO: 1192 - RNA, 17 nt, Artificial Sequence
  Synthetic
gccgcugcugcaccgcg

SEQ ID NO: 1193 - RNA, 17 nt, Artificial Sequence
  Synthetic
ccgcugcugcaccgcgg

SEQ ID NO: 1194 - RNA, 17 nt, Artificial Sequence
  Synthetic
cgccacccugcagaaca

SEQ ID NO: 1195 - RNA, 17 nt, Artificial Sequence
  Synthetic
cacccugcagaacaugg

SEQ ID NO: 1196 - RNA, 17 nt, Artificial Sequence
  Synthetic
gcagaacaugguggucc

SEQ ID NO: 1197 - RNA, 17 nt, Artificial Sequence
  Synthetic
gucccggagaucgcccc

SEQ ID NO: 1198 - RNA, 17 nt, Artificial Sequence
  Synthetic
ggagaucgcccccggcg

SEQ ID NO: 1199 - RNA, 17 nt, Artificial Sequence
  Synthetic
ccccagcgaccccguga

SEQ ID NO: 1200 - RNA, 17 nt, Artificial Sequence
  Synthetic
cgcgcacccccugcacc

SEQ ID NO: 1201 - RNA, 17 nt, Artificial Sequence
  Synthetic
ccugcacccggccaauc

SEQ ID NO: 1202 - RNA, 17 nt, Artificial Sequence
  Synthetic
gcacccggccaaucugg

SEQ ID NO: 1203 - RNA, 17 nt, Artificial Sequence
  Synthetic
caaucugguggccaaca

SEQ ID NO: 1204 - RNA, 17 nt, Artificial Sequence
  Synthetic
aacgccauguuucacaa

SEQ ID NO: 1205 - RNA, 17 nt, Artificial Sequence
  Synthetic
acgccauguuucacaac

SEQ ID NO: 1206 - RNA, 17 nt, Artificial Sequence
  Synthetic
guuucacaacgggcgcg

SEQ ID NO: 1207 - RNA, 17 nt, Artificial Sequence
  Synthetic
caacgggcgcgugguag

SEQ ID NO: 1208 - RNA, 17 nt, Artificial Sequence
  Synthetic
gggcgcgugguagugga

SEQ ID NO: 1209 - RNA, 17 nt, Artificial Sequence
  Synthetic
ggcgcgugguaguggac

SEQ ID NO: 1210 - RNA, 17 nt, Artificial Sequence
  Synthetic
cgccaugcucacgcugc

SEQ ID NO: 1211 - RNA, 17 nt, Artificial Sequence
  Synthetic
gcucacgcugcaggugc

SEQ ID NO: 1212 - RNA, 17 nt, Artificial Sequence
  Synthetic
ggugcuggcccacaaca

SEQ ID NO: 1213 - RNA, 17 nt, Artificial Sequence
  Synthetic
cauggccgaacgcacaa

SEQ ID NO: 1214 - RNA, 17 nt, Artificial Sequence
  Synthetic
aacggcgcugcucugcu

SEQ ID NO: 1215 - RNA, 17 nt, Artificial Sequence
  Synthetic
ggcgcugcucugcucgg

SEQ ID NO: 1216 - RNA, 17 nt, Artificial Sequence
  Synthetic
cucggcggcgcccgacg

SEQ ID NO: 1217 - RNA, 17 nt, Artificial Sequence
  Synthetic
ucggcggcgcccgacgc

SEQ ID NO: 1218 - RNA, 17 nt, Artificial Sequence
  Synthetic
aacaugcgcauauucga

SEQ ID NO: 1219 - RNA, 17 nt, Artificial Sequence
  Synthetic
acaugcgcauauucgac

SEQ ID NO: 1220 - RNA, 17 nt, Artificial Sequence
  Synthetic
caugcgcauauucgacg

SEQ ID NO: 1221 - RNA, 17 nt, Artificial Sequence
  Synthetic
gacggggcguugcacgc

SEQ ID NO: 1222 - RNA, 17 nt, Artificial Sequence
  Synthetic
cgccggaauccugcuga

SEQ ID NO: 1223 - RNA, 17 nt, Artificial Sequence
  Synthetic
gauggccccccagcauc

SEQ ID NO: 1224 - RNA, 17 nt, Artificial Sequence
  Synthetic
gaccauaccauccaaaa

SEQ ID NO: 1225 - RNA, 17 nt, Artificial Sequence
  Synthetic
guccacgcgcuguucgc

SEQ ID NO: 1226 - RNA, 17 nt, Artificial Sequence
  Synthetic
uccacgcgcuguucgcc

SEQ ID NO: 1227 - RNA, 17 nt, Artificial Sequence
  Synthetic
ccacgcgcuguucgccg

SEQ ID NO: 1228 - RNA, 17 nt, Artificial Sequence
  Synthetic
cgccggggccgaccacg

SEQ ID NO: 1229 - RNA, 17 nt, Artificial Sequence
  Synthetic
cgcgcccaauuuccccc

SEQ ID NO: 1230 - RNA, 17 nt, Artificial Sequence
  Synthetic
cccugcgcgaccugucg

SEQ ID NO: 1231 - RNA, 17 nt, Artificial Sequence
  Synthetic
gcgcgaccugucgcggc

SEQ ID NO: 1232 - RNA, 17 nt, Artificial Sequence
  Synthetic
gucgcggcagguccccc

SEQ ID NO: 1233 - RNA, 17 nt, Artificial Sequence
  Synthetic
ggucccccugguccccc

SEQ ID NO: 1234 - RNA, 17 nt, Artificial Sequence
  Synthetic
ccugguccccccggcuc

SEQ ID NO: 1235 - RNA, 17 nt, Artificial Sequence
  Synthetic
cugguccccccggcucu

SEQ ID NO: 1236 - RNA, 17 nt, Artificial Sequence
  Synthetic
ugguccccccggcucug

SEQ ID NO: 1237 - RNA, 17 nt, Artificial Sequence
  Synthetic
gguccccccggcucugg

SEQ ID NO: 1238 - RNA, 17 nt, Artificial Sequence
  Synthetic
gcacguccgcgagagcg

SEQ ID NO: 1239 - RNA, 17 nt, Artificial Sequence
  Synthetic
guccgcgagagcgcggc

SEQ ID NO: 1240 - RNA, 17 nt, Artificial Sequence
  Synthetic
uccgcgagagcgcggcc

SEQ ID NO: 1241 - RNA, 17 nt, Artificial Sequence
  Synthetic
ccgcgagagcgcggccg

SEQ ID NO: 1242 - RNA, 17 nt, Artificial Sequence
  Synthetic
gcugaccuacgcgcuca

SEQ ID NO: 1243 - RNA, 17 nt, Artificial Sequence
  Synthetic
gaccuacgcgcucaugg

SEQ ID NO: 1244 - RNA, 17 nt, Artificial Sequence
  Synthetic
accuacgcgcucauggc

SEQ ID NO: 1245 - RNA, 17 nt, Artificial Sequence
  Synthetic
ccuacgcgcucauggcg

SEQ ID NO: 1246 - RNA, 17 nt, Artificial Sequence
  Synthetic
cuucaagaucagucccg

SEQ ID NO: 1247 - RNA, 17 nt, Artificial Sequence
  Synthetic
gcaucaucagcucaaga

SEQ ID NO: 1248 - RNA, 17 nt, Artificial Sequence
  Synthetic
caucaucagcucaagac

SEQ ID NO: 1249 - RNA, 17 nt, Artificial Sequence
  Synthetic
aagacgggccuccaucc

SEQ ID NO: 1250 - RNA, 17 nt, Artificial Sequence
  Synthetic
agacgggccuccauccc

SEQ ID NO: 1251 - RNA, 17 nt, Artificial Sequence
  Synthetic
ggccuccaucccggguu

SEQ ID NO: 1252 - RNA, 17 nt, Artificial Sequence
  Synthetic
gccuccaucccggguuu

SEQ ID NO: 1253 - RNA, 17 nt, Artificial Sequence
  Synthetic
guucaccgucguccgac

SEQ ID NO: 1254 - RNA, 17 nt, Artificial Sequence
  Synthetic
ugagaacgugcuguucu

SEQ ID NO: 1255 - RNA, 17 nt, Artificial Sequence
  Synthetic
guucucggagcgcgcgu

SEQ ID NO: 1256 - RNA, 17 nt, Artificial Sequence
  Synthetic
cucggagcgcgcgucgg

SEQ ID NO: 1257 - RNA, 17 nt, Artificial Sequence
  Synthetic
gucggaggcguacuucc

SEQ ID NO: 1258 - RNA, 17 nt, Artificial Sequence
  Synthetic
ucggaggcguacuuccu

SEQ ID NO: 1259 - RNA, 17 nt, Artificial Sequence
  Synthetic
cuuccugggccagcucc

SEQ ID NO: 1260 - RNA, 17 nt, Artificial Sequence
  Synthetic
ccugggccagcuccagg

SEQ ID NO: 1261 - RNA, 17 nt, Artificial Sequence
  Synthetic
gccagcuccagguggcc

SEQ ID NO: 1262 - RNA, 17 nt, Artificial Sequence
  Synthetic
guggcccggcacgaaac

SEQ ID NO: 1263 - RNA, 17 nt, Artificial Sequence
  Synthetic
gcccggcacgaaacugg

SEQ ID NO: 1264 - RNA, 17 nt, Artificial Sequence
  Synthetic
cccggcacgaaacuggc

SEQ ID NO: 1265 - RNA, 17 nt, Artificial Sequence
  Synthetic
ccggcacgaaacuggcg

SEQ ID NO: 1266 - RNA, 17 nt, Artificial Sequence
  Synthetic
cggcacgaaacuggcgg

SEQ ID NO: 1267 - RNA, 17 nt, Artificial Sequence
  Synthetic
ggcacgaaacuggcggg

SEQ ID NO: 1268 - RNA, 17 nt, Artificial Sequence
  Synthetic
gcacgaaacuggcgggg

SEQ ID NO: 1269 - RNA, 17 nt, Artificial Sequence
  Synthetic
ccagccgcgcgcgaacg

SEQ ID NO: 1270 - RNA, 17 nt, Artificial Sequence
  Synthetic
gcgcgcgaacguggacc

SEQ ID NO: 1271 - RNA, 17 nt, Artificial Sequence
  Synthetic
cgcgcgaacguggaccu

SEQ ID NO: 1272 - RNA, 17 nt, Artificial Sequence
  Synthetic
gaacguggaccugggcg

SEQ ID NO: 1273 - RNA, 17 nt, Artificial Sequence
  Synthetic
aacguggaccugggcgu

SEQ ID NO: 1274 - RNA, 17 nt, Artificial Sequence
  Synthetic
gggcuacaccgccgucg

SEQ ID NO: 1275 - RNA, 17 nt, Artificial Sequence
  Synthetic
caccgccgucguggcca

SEQ ID NO: 1276 - RNA, 17 nt, Artificial Sequence
  Synthetic
caaccccgucaccgaca

SEQ ID NO: 1277 - RNA, 17 nt, Artificial Sequence
  Synthetic
aaccccgucaccgacau

SEQ ID NO: 1278 - RNA, 17 nt, Artificial Sequence
  Synthetic
uccccaaaacuuuuacc

SEQ ID NO: 1279 - RNA, 17 nt, Artificial Sequence
  Synthetic
ccccaaaacuuuuaccu

SEQ ID NO: 1280 - RNA, 17 nt, Artificial Sequence
  Synthetic
aacuuuuaccugggccg

SEQ ID NO: 1281 - RNA, 17 nt, Artificial Sequence
  Synthetic
acuuuuaccugggccgc

SEQ ID NO: 1282 - RNA, 17 nt, Artificial Sequence
  Synthetic
cuuuuaccugggccgcg

SEQ ID NO: 1283 - RNA, 17 nt, Artificial Sequence
  Synthetic
cggggcucccccucucc

SEQ ID NO: 1284 - RNA, 17 nt, Artificial Sequence
  Synthetic
cccucuccuggacaacg

SEQ ID NO: 1285 - RNA, 17 nt, Artificial Sequence
  Synthetic
cggcagccguguaccug

SEQ ID NO: 1286 - RNA, 17 nt, Artificial Sequence
  Synthetic
cguguaccugcggaacg

SEQ ID NO: 1287 - RNA, 17 nt, Artificial Sequence
  Synthetic
ccugcggaacgcggucg

SEQ ID NO: 1288 - RNA, 17 nt, Artificial Sequence
  Synthetic
gcggaacgcggucgugg

SEQ ID NO: 1289 - RNA, 17 nt, Artificial Sequence
  Synthetic
cggaacgcggucguggc

SEQ ID NO: 1290 - RNA, 17 nt, Artificial Sequence
  Synthetic
cguggcgggaaaccgcc

SEQ ID NO: 1291 - RNA, 17 nt, Artificial Sequence
  Synthetic
guggcgggaaaccgccu

SEQ ID NO: 1292 - RNA, 17 nt, Artificial Sequence
  Synthetic
uggcgggaaaccgccug

SEQ ID NO: 1293 - RNA, 17 nt, Artificial Sequence
  Synthetic
gggaaaccgccuggggc

SEQ ID NO: 1294 - RNA, 17 nt, Artificial Sequence
  Synthetic
cagcccguccccguguu

SEQ ID NO: 1295 - RNA, 17 nt, Artificial Sequence
  Synthetic
agcccguccccguguuc

SEQ ID NO: 1296 - RNA, 17 nt, Artificial Sequence
  Synthetic
cguguucgggugcgccc

SEQ ID NO: 1297 - RNA, 17 nt, Artificial Sequence
  Synthetic
ggugcgcccaggugccg

SEQ ID NO: 1298 - RNA, 17 nt, Artificial Sequence
  Synthetic
caggugccgcggcgcgc

SEQ ID NO: 1299 - RNA, 17 nt, Artificial Sequence
  Synthetic
aggugccgcggcgcgca

SEQ ID NO: 1300 - RNA, 17 nt, Artificial Sequence
  Synthetic
gccgcggcgcgcaggga

SEQ ID NO: 1301 - RNA, 17 nt, Artificial Sequence
  Synthetic
cgcgcagggauggacca

SEQ ID NO: 1302 - RNA, 17 nt, Artificial Sequence
  Synthetic
agggauggaccacggcc

SEQ ID NO: 1303 - RNA, 17 nt, Artificial Sequence
  Synthetic
acgucaacuacuuccgc

SEQ ID NO: 1304 - RNA, 17 nt, Artificial Sequence
  Synthetic
gccggcccugcaacccc

SEQ ID NO: 1305 - RNA, 17 nt, Artificial Sequence
  Synthetic
ccggcccugcaaccccc

SEQ ID NO: 1306 - RNA, 17 nt, Artificial Sequence
  Synthetic
cggcccugcaacccccg

SEQ ID NO: 1307 - RNA, 17 nt, Artificial Sequence
  Synthetic
ccccggggacgcgccgc

SEQ ID NO: 1308 - RNA, 17 nt, Artificial Sequence
  Synthetic
cccggggacgcgccgcc

SEQ ID NO: 1309 - RNA, 17 nt, Artificial Sequence
  Synthetic
ccggggacgcgccgccg

SEQ ID NO: 1310 - RNA, 17 nt, Artificial Sequence
  Synthetic
cggggacgcgccgccgg

SEQ ID NO: 1311 - RNA, 17 nt, Artificial Sequence
  Synthetic
cgccgggggcguuuacg

SEQ ID NO: 1312 - RNA, 17 nt, Artificial Sequence
  Synthetic
gccgggggcguuuacgc

SEQ ID NO: 1313 - RNA, 17 nt, Artificial Sequence
  Synthetic
ccgggggcguuuacgcg

SEQ ID NO: 1314 - RNA, 17 nt, Artificial Sequence
  Synthetic
cgggggcguuuacgcgg

SEQ ID NO: 1315 - RNA, 17 nt, Artificial Sequence
  Synthetic
cguuuacgcgggggaca

SEQ ID NO: 1316 - RNA, 17 nt, Artificial Sequence
  Synthetic
uuacgcgggggacaagg

SEQ ID NO: 1317 - RNA, 17 nt, Artificial Sequence
  Synthetic
uacgcgggggacaagga

SEQ ID NO: 1318 - RNA, 17 nt, Artificial Sequence
  Synthetic
acgcgggggacaaggag

SEQ ID NO: 1319 - RNA, 17 nt, Artificial Sequence
  Synthetic
cgcgggggacaaggagg

SEQ ID NO: 1320 - RNA, 17 nt, Artificial Sequence
  Synthetic
gcccucauguacgacca

SEQ ID NO: 1321 - RNA, 17 nt, Artificial Sequence
  Synthetic
gccagagcgacccgucc

SEQ ID NO: 1322 - RNA, 17 nt, Artificial Sequence
  Synthetic
ccagagcgacccguccc

SEQ ID NO: 1323 - RNA, 17 nt, Artificial Sequence
  Synthetic
cccgucccgggccuucg

SEQ ID NO: 1324 - RNA, 17 nt, Artificial Sequence
  Synthetic
ccgggccuucgcggcca

SEQ ID NO: 1325 - RNA, 17 nt, Artificial Sequence
  Synthetic
cggccacggccaacccg

SEQ ID NO: 1326 - RNA, 17 nt, Artificial Sequence
  Synthetic
ggccacggccaacccgu

SEQ ID NO: 1327 - RNA, 17 nt, Artificial Sequence
  Synthetic
ucgcagcgauuuucgua

SEQ ID NO: 1328 - RNA, 17 nt, Artificial Sequence
  Synthetic
cgcagcgauuuucguac

SEQ ID NO: 1329 - RNA, 17 nt, Artificial Sequence
  Synthetic
gcagcgauuuucguacg

SEQ ID NO: 1330 - RNA, 17 nt, Artificial Sequence
  Synthetic
ggggaccugcucuauaa

SEQ ID NO: 1331 - RNA, 17 nt, Artificial Sequence
  Synthetic
gggaccugcucuauaac

SEQ ID NO: 1332 - RNA, 17 nt, Artificial Sequence
  Synthetic
ggaccugcucuauaacg

SEQ ID NO: 1333 - RNA, 17 nt, Artificial Sequence
  Synthetic
ggggccuaccaccucaa

SEQ ID NO: 1334 - RNA, 17 nt, Artificial Sequence
  Synthetic
gggccuaccaccucaac

SEQ ID NO: 1335 - RNA, 17 nt, Artificial Sequence
  Synthetic
ggccuaccaccucaacg

SEQ ID NO: 1336 - RNA, 17 nt, Artificial Sequence
  Synthetic
ccucaacggggccucgc

SEQ ID NO: 1337 - RNA, 17 nt, Artificial Sequence
  Synthetic
cuuuaaguucuuuacgu

SEQ ID NO: 1338 - RNA, 17 nt, Artificial Sequence
  Synthetic
cgccaaacaucgcugcc

SEQ ID NO: 1339 - RNA, 17 nt, Artificial Sequence
  Synthetic
ccuggagcgccugaucg

SEQ ID NO: 1340 - RNA, 17 nt, Artificial Sequence
  Synthetic
gcgccugaucguggaga

SEQ ID NO: 1341 - RNA, 17 nt, Artificial Sequence
  Synthetic
cgccugaucguggagac

SEQ ID NO: 1342 - RNA, 17 nt, Artificial Sequence
  Synthetic
gaucguggagacggguu

SEQ ID NO: 1343 - RNA, 17 nt, Artificial Sequence
  Synthetic
cguggagacggguucgg

SEQ ID NO: 1344 - RNA, 17 nt, Artificial Sequence
  Synthetic
ggguucggcggugucca

SEQ ID NO: 1345 - RNA, 17 nt, Artificial Sequence
  Synthetic
acaguuuaagcgccccc

SEQ ID NO: 1346 - RNA, 17 nt, Artificial Sequence
  Synthetic
caguuuaagcgcccccc

SEQ ID NO: 1347 - RNA, 17 nt, Artificial Sequence
  Synthetic
aguuuaagcgccccccg

SEQ ID NO: 1348 - RNA, 17 nt, Artificial Sequence
  Synthetic
ggggugccgcgaacucg

SEQ ID NO: 1349 - RNA, 17 nt, Artificial Sequence
  Synthetic
gugccgcgaacucgugg

SEQ ID NO: 1350 - RNA, 17 nt, Artificial Sequence
  Synthetic
cucguggaggacccgug

SEQ ID NO: 1351 - RNA, 17 nt, Artificial Sequence
  Synthetic
cccguguggccuguuuc

SEQ ID NO: 1352 - RNA, 17 nt, Artificial Sequence
  Synthetic
guguggccuguuucagg

SEQ ID NO: 1353 - RNA, 17 nt, Artificial Sequence
  Synthetic
cuccgcagugcccgcaa

SEQ ID NO: 1354 - RNA, 17 nt, Artificial Sequence
  Synthetic
uccgcagugcccgcaac

SEQ ID NO: 1355 - RNA, 17 nt, Artificial Sequence
  Synthetic
ccgcagugcccgcaacg

SEQ ID NO: 1356 - RNA, 17 nt, Artificial Sequence
  Synthetic
acggggaagcccacgcg

SEQ ID NO: 1357 - RNA, 17 nt, Artificial Sequence
  Synthetic
cggggaagcccacgcgc

SEQ ID NO: 1358 - RNA, 17 nt, Artificial Sequence
  Synthetic
ugacgcauccccgcuca

SEQ ID NO: 1359 - RNA, 17 nt, Artificial Sequence
  Synthetic
gacgcauccccgcucaa

SEQ ID NO: 1360 - RNA, 17 nt, Artificial Sequence
  Synthetic
auccccgcucaagggac

SEQ ID NO: 1361 - RNA, 20 nt, Artificial Sequence
  Synthetic
caaacgccccgaggacggcc

SEQ ID NO: 1362 - RNA, 20 nt, Artificial Sequence
  Synthetic
gcgcucaaacgccccgagga

SEQ ID NO: 1363 - RNA, 20 nt, Artificial Sequence
  Synthetic
ugccgcgcucaaacgccccg

SEQ ID NO: 1364 - RNA, 20 nt, Artificial Sequence
  Synthetic
cagcacgugcagcaucuggu

SEQ ID NO: 1365 - RNA, 20 nt, Artificial Sequence
  Synthetic
ccagcagcacgugcagcauc

SEQ ID NO: 1366 - RNA, 20 nt, Artificial Sequence
  Synthetic
ggcaacaacaaagccagggg

SEQ ID NO: 1367 - RNA, 20 nt, Artificial Sequence
  Synthetic
aucggcaacaacaaagccag

SEQ ID NO: 1368 - RNA, 20 nt, Artificial Sequence
  Synthetic
caucggcaacaacaaagcca

SEQ ID NO: 1369 - RNA, 20 nt, Artificial Sequence
  Synthetic
gcaucggcaacaacaaagcc

SEQ ID NO: 1370 - RNA, 20 nt, Artificial Sequence
  Synthetic
uuguccagguaucguugcau

SEQ ID NO: 1371 - RNA, 20 nt, Artificial Sequence
  Synthetic
uggccaggcggccguugucc

SEQ ID NO: 1372 - RNA, 20 nt, Artificial Sequence
  Synthetic
gggccacccugguggccagg

SEQ ID NO: 1373 - RNA, 20 nt, Artificial Sequence
  Synthetic
cccgggccacccugguggcc

SEQ ID NO: 1374 - RNA, 20 nt, Artificial Sequence
  Synthetic
ggucgcccgggccacccugg

SEQ ID NO: 1375 - RNA, 20 nt, Artificial Sequence
  Synthetic
cagggucgcccgggccaccc

SEQ ID NO: 1376 - RNA, 20 nt, Artificial Sequence
  Synthetic
cucggcgaccagggucgccc

SEQ ID NO: 1377 - RNA, 20 nt, Artificial Sequence
  Synthetic
gcucggcgaccagggucgcc

SEQ ID NO: 1378 - RNA, 20 nt, Artificial Sequence
  Synthetic
ucgcuuuagcucggcgacca

SEQ ID NO: 1379 - RNA, 20 nt, Artificial Sequence
  Synthetic
uucgcuuuagcucggcgacc

SEQ ID NO: 1380 - RNA, 20 nt, Artificial Sequence
  Synthetic
gcagaagcuucgcuuuagcu

SEQ ID NO: 1381 - RNA, 20 nt, Artificial Sequence
  Synthetic
ggcgguggcccgccuugccc

SEQ ID NO: 1382 - RNA, 20 nt, Artificial Sequence
  Synthetic
ccucgacggccucccggcgg

SEQ ID NO: 1383 - RNA, 20 nt, Artificial Sequence
  Synthetic
aggccucgacggccucccgg

SEQ ID NO: 1384 - RNA, 20 nt, Artificial Sequence
  Synthetic
gccaggccucgacggccucc

SEQ ID NO: 1385 - RNA, 20 nt, Artificial Sequence
  Synthetic
guccacgagccaggccucga

SEQ ID NO: 1386 - RNA, 20 nt, Artificial Sequence
  Synthetic
cguggugagguccacgagcc

SEQ ID NO: 1387 - RNA, 20 nt, Artificial Sequence
  Synthetic
agggcugcguggccguggug

SEQ ID NO: 1388 - RNA, 20 nt, Artificial Sequence
  Synthetic
cacggagggcugcguggccg

SEQ ID NO: 1389 - RNA, 20 nt, Artificial Sequence
  Synthetic
cacggccacggagggcugcg

SEQ ID NO: 1390 - RNA, 20 nt, Artificial Sequence
  Synthetic
agacggggcacggccacgga

SEQ ID NO: 1391 - RNA, 20 nt, Artificial Sequence
  Synthetic
cagacggggcacggccacgg

SEQ ID NO: 1392 - RNA, 20 nt, Artificial Sequence
  Synthetic
cgucagacggggcacggcca

SEQ ID NO: 1393 - RNA, 20 nt, Artificial Sequence
  Synthetic
ggcaugcgucagacggggca

SEQ ID NO: 1394 - RNA, 20 nt, Artificial Sequence
  Synthetic
gugucggcaugcgucagacg

SEQ ID NO: 1395 - RNA, 20 nt, Artificial Sequence
  Synthetic
cgugucggcaugcgucagac

SEQ ID NO: 1396 - RNA, 20 nt, Artificial Sequence
  Synthetic
gcgugucggcaugcgucaga

SEQ ID NO: 1397 - RNA, 20 nt, Artificial Sequence
  Synthetic
gaccggccgcccgcgcgugu

SEQ ID NO: 1398 - RNA, 20 nt, Artificial Sequence
  Synthetic
gugacgagcaccccgucgac

SEQ ID NO: 1399 - RNA, 20 nt, Artificial Sequence
  Synthetic
gcgcuguuugaucggggcgg

SEQ ID NO: 1400 - RNA, 20 nt, Artificial Sequence
  Synthetic
gaggcgcuguuugaucgggg

SEQ ID NO: 1401 - RNA, 20 nt, Artificial Sequence
  Synthetic
caggaggcgcuguuugaucg

SEQ ID NO: 1402 - RNA, 20 nt, Artificial Sequence
  Synthetic
gcaggaggcgcuguuugauc

SEQ ID NO: 1403 - RNA, 20 nt, Artificial Sequence
  Synthetic
ugcaggaggcgcuguuugau

SEQ ID NO: 1404 - RNA, 20 nt, Artificial Sequence
  Synthetic
cuuucaggaaggacugcagg

SEQ ID NO: 1405 - RNA, 20 nt, Artificial Sequence
  Synthetic
ccacuuucaggaaggacugc

SEQ ID NO: 1406 - RNA, 20 nt, Artificial Sequence
  Synthetic
gguguccuccacuuucagga

SEQ ID NO: 1407 - RNA, 20 nt, Artificial Sequence
  Synthetic
cuucgguguccuccacuuuc

SEQ ID NO: 1408 - RNA, 20 nt, Artificial Sequence
  Synthetic
cgucaccggcacgucggcuu

SEQ ID NO: 1409 - RNA, 20 nt, Artificial Sequence
  Synthetic
gccguacgucaccggcacgu

SEQ ID NO: 1410 - RNA, 20 nt, Artificial Sequence
  Synthetic
accaucucgccguacgucac

SEQ ID NO: 1411 - RNA, 20 nt, Artificial Sequence
  Synthetic
ugaccagguuggccccguuc

SEQ ID NO: 1412 - RNA, 20 nt, Artificial Sequence
  Synthetic
cacgagcgccgugaccaggu

SEQ ID NO: 1413 - RNA, 20 nt, Artificial Sequence
  Synthetic
ccaucacgagcgccgugacc

SEQ ID NO: 1414 - RNA, 20 nt, Artificial Sequence
  Synthetic
cacgucguccagacuucgca

SEQ ID NO: 1415 - RNA, 20 nt, Artificial Sequence
  Synthetic
ccugcaucuccagcaggugg

SEQ ID NO: 1416 - RNA, 20 nt, Artificial Sequence
  Synthetic
ccuccugcaucuccagcagg

SEQ ID NO: 1417 - RNA, 20 nt, Artificial Sequence
  Synthetic
gcuccuccugcaucuccagc

SEQ ID NO: 1418 - RNA, 20 nt, Artificial Sequence
  Synthetic
cguccagcgucugccgguuc

SEQ ID NO: 1419 - RNA, 20 nt, Artificial Sequence
  Synthetic
cgagcucguccagcgucugc

SEQ ID NO: 1420 - RNA, 20 nt, Artificial Sequence
  Synthetic
gcgcacgcgcgucgucuggg

SEQ ID NO: 1421 - RNA, 20 nt, Artificial Sequence
  Synthetic
cgcgcacgcgcgucgucugg

SEQ ID NO: 1422 - RNA, 20 nt, Artificial Sequence
  Synthetic
gcgcgcacgcgcgucgucug

SEQ ID NO: 1423 - RNA, 20 nt, Artificial Sequence
  Synthetic
cgcgcgcacgcgcgucgucu

SEQ ID NO: 1424 - RNA, 20 nt, Artificial Sequence
  Synthetic
ccgcgcgcacgcgcgucguc

SEQ ID NO: 1425 - RNA, 20 nt, Artificial Sequence
  Synthetic
aaagaccagcuucucgccga

SEQ ID NO: 1426 - RNA, 20 nt, Artificial Sequence
  Synthetic
ggcguagaugcgcuucucca

SEQ ID NO: 1427 - RNA, 20 nt, Artificial Sequence
  Synthetic
cggcguagaugcgcuucucc

SEQ ID NO: 1428 - RNA, 20 nt, Artificial Sequence
  Synthetic
gggguagggaacguuggugg

SEQ ID NO: 1429 - RNA, 20 nt, Artificial Sequence
  Synthetic
caggggguagggaacguugg

SEQ ID NO: 1430 - RNA, 20 nt, Artificial Sequence
  Synthetic
caccaggggguagggaacgu

SEQ ID NO: 1431 - RNA, 20 nt, Artificial Sequence
  Synthetic
auggcgcccaccagggggua

SEQ ID NO: 1432 - RNA, 20 nt, Artificial Sequence
  Synthetic
cauggcgcccaccagggggu

SEQ ID NO: 1433 - RNA, 20 nt, Artificial Sequence
  Synthetic
gguccauggcgcccaccagg

SEQ ID NO: 1434 - RNA, 20 nt, Artificial Sequence
  Synthetic
agguccauggcgcccaccag

SEQ ID NO: 1435 - RNA, 20 nt, Artificial Sequence
  Synthetic
cagguccauggcgcccacca

SEQ ID NO: 1436 - RNA, 20 nt, Artificial Sequence
  Synthetic
ucagguccauggcgcccacc

SEQ ID NO: 1437 - RNA, 20 nt, Artificial Sequence
  Synthetic
caggacgaacgucaggucca

SEQ ID NO: 1438 - RNA, 20 nt, Artificial Sequence
  Synthetic
ccaggggcaggacgaacguc

SEQ ID NO: 1439 - RNA, 20 nt, Artificial Sequence
  Synthetic
gauugaacaggcccaggggc

SEQ ID NO: 1440 - RNA, 20 nt, Artificial Sequence
  Synthetic
accggauugaacaggcccag

SEQ ID NO: 1441 - RNA, 20 nt, Artificial Sequence
  Synthetic
gaccggauugaacaggccca

SEQ ID NO: 1442 - RNA, 20 nt, Artificial Sequence
  Synthetic
ugaccggauugaacaggccc

SEQ ID NO: 1443 - RNA, 20 nt, Artificial Sequence
  Synthetic
guuccaugaccggauugaac

SEQ ID NO: 1444 - RNA, 20 nt, Artificial Sequence
  Synthetic
gcggcaaaccguuccaugac

SEQ ID NO: 1445 - RNA, 20 nt, Artificial Sequence
  Synthetic
gacuagguccccggcgugcg

SEQ ID NO: 1446 - RNA, 20 nt, Artificial Sequence
  Synthetic
gggggcggggacuagguccc

SEQ ID NO: 1447 - RNA, 20 nt, Artificial Sequence
  Synthetic
gguggccgggggcggggacu

SEQ ID NO: 1448 - RNA, 20 nt, Artificial Sequence
  Synthetic
gauccggguggccgggggcg

SEQ ID NO: 1449 - RNA, 20 nt, Artificial Sequence
  Synthetic
ggauccggguggccgggggc

SEQ ID NO: 1450 - RNA, 20 nt, Artificial Sequence
  Synthetic
gggauccggguggccggggg

SEQ ID NO: 1451 - RNA, 20 nt, Artificial Sequence
  Synthetic
gcggggauccggguggccgg

SEQ ID NO: 1452 - RNA, 20 nt, Artificial Sequence
  Synthetic
cgcggggauccggguggccg

SEQ ID NO: 1453 - RNA, 20 nt, Artificial Sequence
  Synthetic
gcgcggggauccggguggcc

SEQ ID NO: 1454 - RNA, 20 nt, Artificial Sequence
  Synthetic
ggcgcggggauccggguggc

SEQ ID NO: 1455 - RNA, 20 nt, Artificial Sequence
  Synthetic
ggaaggcgcggggauccggg

SEQ ID NO: 1456 - RNA, 20 nt, Artificial Sequence
  Synthetic
gcgggaaggcgcggggaucc

SEQ ID NO: 1457 - RNA, 20 nt, Artificial Sequence
  Synthetic
ggcgggaaggcgcggggauc

SEQ ID NO: 1458 - RNA, 20 nt, Artificial Sequence
  Synthetic
uggcggggcgggaaggcgcg

SEQ ID NO: 1459 - RNA, 20 nt, Artificial Sequence
  Synthetic
cuggcggggcgggaaggcgc

SEQ ID NO: 1460 - RNA, 20 nt, Artificial Sequence
  Synthetic
gcuggcggggcgggaaggcg

SEQ ID NO: 1461 - RNA, 20 nt, Artificial Sequence
  Synthetic
aaacagcuggcggggcggga

SEQ ID NO: 1462 - RNA, 20 nt, Artificial Sequence
  Synthetic
aaaaaaacagcuggcggggc

SEQ ID NO: 1463 - RNA, 20 nt, Artificial Sequence
  Synthetic
caaaaaaacagcuggcgggg

SEQ ID NO: 1464 - RNA, 20 nt, Artificial Sequence
  Synthetic
ccccaaaaaaacagcuggcg

SEQ ID NO: 1465 - RNA, 20 nt, Artificial Sequence
  Synthetic
cccccaaaaaaacagcuggc

SEQ ID NO: 1466 - RNA, 20 nt, Artificial Sequence
  Synthetic
ucccccaaaaaaacagcugg

SEQ ID NO: 1467 - RNA, 20 nt, Artificial Sequence
  Synthetic
ccuucccccaaaaaaacagc

SEQ ID NO: 1468 - RNA, 20 nt, Artificial Sequence
  Synthetic
gagacaggcgcagcaccugg

SEQ ID NO: 1469 - RNA, 20 nt, Artificial Sequence
  Synthetic
ccagagacaggcgcagcacc

SEQ ID NO: 1470 - RNA, 20 nt, Artificial Sequence
  Synthetic
cgaucgcguguuccagagac

SEQ ID NO: 1471 - RNA, 20 nt, Artificial Sequence
  Synthetic
caucagcgaaggguggcaca

SEQ ID NO: 1472 - RNA, 20 nt, Artificial Sequence
  Synthetic
caacguucaucagcgaaggg

SEQ ID NO: 1473 - RNA, 20 nt, Artificial Sequence
  Synthetic
cgucaacguucaucagcgaa

SEQ ID NO: 1474 - RNA, 20 nt, Artificial Sequence
  Synthetic
gcgucaacguucaucagcga

SEQ ID NO: 1475 - RNA, 20 nt, Artificial Sequence
  Synthetic
cuucgacggggucgcgguua

SEQ ID NO: 1476 - RNA, 20 nt, Artificial Sequence
  Synthetic
uggcggcuucgacggggucg

SEQ ID NO: 1477 - RNA, 20 nt, Artificial Sequence
  Synthetic
acggauuggcggcuucgacg

SEQ ID NO: 1478 - RNA, 20 nt, Artificial Sequence
  Synthetic
uacggauuggcggcuucgac

SEQ ID NO: 1479 - RNA, 20 nt, Artificial Sequence
  Synthetic
guacggauuggcggcuucga

SEQ ID NO: 1480 - RNA, 20 nt, Artificial Sequence
  Synthetic
guacgccccguacggauugg

SEQ ID NO: 1481 - RNA, 20 nt, Artificial Sequence
  Synthetic
cacguacgccccguacggau

SEQ ID NO: 1482 - RNA, 20 nt, Artificial Sequence
  Synthetic
gccgccacguacgccccgua

SEQ ID NO: 1483 - RNA, 20 nt, Artificial Sequence
  Synthetic
gucugcggcggggccggccg

SEQ ID NO: 1484 - RNA, 20 nt, Artificial Sequence
  Synthetic
ugucugcggcggggccggcc

SEQ ID NO: 1485 - RNA, 20 nt, Artificial Sequence
  Synthetic
augucugcggcggggccggc

SEQ ID NO: 1486 - RNA, 20 nt, Artificial Sequence
  Synthetic
cugcaugucugcggcggggc

SEQ ID NO: 1487 - RNA, 20 nt, Artificial Sequence
  Synthetic
gcugcugcaugucugcggcg

SEQ ID NO: 1488 - RNA, 20 nt, Artificial Sequence
  Synthetic
agcugcugcaugucugcggc

SEQ ID NO: 1489 - RNA, 20 nt, Artificial Sequence
  Synthetic
cagcugcugcaugucugcgg

SEQ ID NO: 1490 - RNA, 20 nt, Artificial Sequence
  Synthetic
aaacagcugcugcaugucug

SEQ ID NO: 1491 - RNA, 20 nt, Artificial Sequence
  Synthetic
gugggccaggcgcugccccc

SEQ ID NO: 1492 - RNA, 20 nt, Artificial Sequence
  Synthetic
aucggacccgcccgugggcc

SEQ ID NO: 1493 - RNA, 20 nt, Artificial Sequence
  Synthetic
gacccaucggacccgcccgu

SEQ ID NO: 1494 - RNA, 20 nt, Artificial Sequence
  Synthetic
cgacccaucggacccgcccg

SEQ ID NO: 1495 - RNA, 20 nt, Artificial Sequence
  Synthetic
ucuggccuuccgcgacccau

SEQ ID NO: 1496 - RNA, 20 nt, Artificial Sequence
  Synthetic
uaaacugcuccggggucauc

SEQ ID NO: 1497 - RNA, 20 nt, Artificial Sequence
  Synthetic
gggcugcauaaacugcuccg

SEQ ID NO: 1498 - RNA, 20 nt, Artificial Sequence
  Synthetic
cgggcugcauaaacugcucc

SEQ ID NO: 1499 - RNA, 20 nt, Artificial Sequence
  Synthetic
ucgggcugcauaaacugcuc

SEQ ID NO: 1500 - RNA, 20 nt, Artificial Sequence
  Synthetic
agagccagguuggcguuguc

SEQ ID NO: 1501 - RNA, 20 nt, Artificial Sequence
  Synthetic
aagagccagguuggcguugu

SEQ ID NO: 1502 - RNA, 20 nt, Artificial Sequence
  Synthetic
gugcagcucaagagccaggu

SEQ ID NO: 1503 - RNA, 20 nt, Artificial Sequence
  Synthetic
cggggugcagcucaagagcc

SEQ ID NO: 1504 - RNA, 20 nt, Artificial Sequence
  Synthetic
ccacaaagaagucgaacgcg

SEQ ID NO: 1505 - RNA, 20 nt, Artificial Sequence
  Synthetic
cccacaaagaagucgaacgc

SEQ ID NO: 1506 - RNA, 20 nt, Artificial Sequence
  Synthetic
ccccacaaagaagucgaacg

SEQ ID NO: 1507 - RNA, 20 nt, Artificial Sequence
  Synthetic
cccccccggcagcuccacgu

SEQ ID NO: 1508 - RNA, 20 nt, Artificial Sequence
  Synthetic
gccgggggaacguccccccc

SEQ ID NO: 1509 - RNA, 20 nt, Artificial Sequence
  Synthetic
aucucccccgggccggccgg

SEQ ID NO: 1510 - RNA, 20 nt, Artificial Sequence
  Synthetic
gaucucccccgggccggccg

SEQ ID NO: 1511 - RNA, 20 nt, Artificial Sequence
  Synthetic
ggaucucccccgggccggcc

SEQ ID NO: 1512 - RNA, 20 nt, Artificial Sequence
  Synthetic
uggaucucccccgggccggc

SEQ ID NO: 1513 - RNA, 20 nt, Artificial Sequence
  Synthetic
ggccuggaucucccccgggc

SEQ ID NO: 1514 - RNA, 20 nt, Artificial Sequence
  Synthetic
agguggccuggaucuccccc

SEQ ID NO: 1515 - RNA, 20 nt, Artificial Sequence
  Synthetic
cagguggccuggaucucccc

SEQ ID NO: 1516 - RNA, 20 nt, Artificial Sequence
  Synthetic
ucaccacgcgccagguggcc

SEQ ID NO: 1517 - RNA, 20 nt, Artificial Sequence
  Synthetic
gccguucaccacgcgccagg

SEQ ID NO: 1518 - RNA, 20 nt, Artificial Sequence
  Synthetic
guugccguucaccacgcgcc

SEQ ID NO: 1519 - RNA, 20 nt, Artificial Sequence
  Synthetic
gccgccggacauagcgccag

SEQ ID NO: 1520 - RNA, 20 nt, Artificial Sequence
  Synthetic
cgccgccggacauagcgcca

SEQ ID NO: 1521 - RNA, 20 nt, Artificial Sequence
  Synthetic
acgccgccggacauagcgcc

SEQ ID NO: 1522 - RNA, 20 nt, Artificial Sequence
  Synthetic
cgggcgucccggaacgccgc

SEQ ID NO: 1523 - RNA, 20 nt, Artificial Sequence
  Synthetic
gcuccaggccccgggcgucc

SEQ ID NO: 1524 - RNA, 20 nt, Artificial Sequence
  Synthetic
cacccccagcuccaggcccc

SEQ ID NO: 1525 - RNA, 20 nt, Artificial Sequence
  Synthetic
ccacccccagcuccaggccc

SEQ ID NO: 1526 - RNA, 20 nt, Artificial Sequence
  Synthetic
ggcgucccacccccagcucc

SEQ ID NO: 1527 - RNA, 20 nt, Artificial Sequence
  Synthetic
ugguggcgggggccauggcg

SEQ ID NO: 1528 - RNA, 20 nt, Artificial Sequence
  Synthetic
ggcgaugguggcgggggcca

SEQ ID NO: 1529 - RNA, 20 nt, Artificial Sequence
  Synthetic
aacggcggcgaugguggcgg

SEQ ID NO: 1530 - RNA, 20 nt, Artificial Sequence
  Synthetic
gaacggcggcgaugguggcg

SEQ ID NO: 1531 - RNA, 20 nt, Artificial Sequence
  Synthetic
cgaacggcggcgaugguggc

SEQ ID NO: 1532 - RNA, 20 nt, Artificial Sequence
  Synthetic
gcgaacggcggcgauggugg

SEQ ID NO: 1533 - RNA, 20 nt, Artificial Sequence
  Synthetic
cccgcgaacggcggcgaugg

SEQ ID NO: 1534 - RNA, 20 nt, Artificial Sequence
  Synthetic
cgccccgcgaacggcggcga

SEQ ID NO: 1535 - RNA, 20 nt, Artificial Sequence
  Synthetic
gucgaacgccccgcgaacgg

SEQ ID NO: 1536 - RNA, 20 nt, Artificial Sequence
  Synthetic
gucgucgaacgccccgcgaa

SEQ ID NO: 1537 - RNA, 20 nt, Artificial Sequence
  Synthetic
aaaacaccgccggguaguug

SEQ ID NO: 1538 - RNA, 20 nt, Artificial Sequence
  Synthetic
gcagcagguaaaacaccgcc

SEQ ID NO: 1539 - RNA, 20 nt, Artificial Sequence
  Synthetic
ugcagcagguaaaacaccgc

SEQ ID NO: 1540 - RNA, 20 nt, Artificial Sequence
  Synthetic
cguguauggcggccugcagc

SEQ ID NO: 1541 - RNA, 20 nt, Artificial Sequence
  Synthetic
gugcucgcugccguguaugg

SEQ ID NO: 1542 - RNA, 20 nt, Artificial Sequence
  Synthetic
gacgugcucgcugccgugua

SEQ ID NO: 1543 - RNA, 20 nt, Artificial Sequence
  Synthetic
cuggaccacgagccgggcca

SEQ ID NO: 1544 - RNA, 20 nt, Artificial Sequence
  Synthetic
acuggaccacgagccgggcc

SEQ ID NO: 1545 - RNA, 20 nt, Artificial Sequence
  Synthetic
gaugcacuggaccacgagcc

SEQ ID NO: 1546 - RNA, 20 nt, Artificial Sequence
  Synthetic
ugaugcacuggaccacgagc

SEQ ID NO: 1547 - RNA, 20 nt, Artificial Sequence
  Synthetic
uccaguagcuggugaugcac

SEQ ID NO: 1548 - RNA, 20 nt, Artificial Sequence
  Synthetic
ccgcguguuguuccaguagc

SEQ ID NO: 1549 - RNA, 20 nt, Artificial Sequence
  Synthetic
gggaaggucucccccgaggu

SEQ ID NO: 1550 - RNA, 20 nt, Artificial Sequence
  Synthetic
ccucgggaaggucucccccg

SEQ ID NO: 1551 - RNA, 20 nt, Artificial Sequence
  Synthetic
cggccaugcacuccucggga

SEQ ID NO: 1552 - RNA, 20 nt, Artificial Sequence
  Synthetic
uacacggccaugcacuccuc

SEQ ID NO: 1553 - RNA, 20 nt, Artificial Sequence
  Synthetic
guacacggccaugcacuccu

SEQ ID NO: 1554 - RNA, 20 nt, Artificial Sequence
  Synthetic
cgccaccaggucccgguaca

SEQ ID NO: 1555 - RNA, 20 nt, Artificial Sequence
  Synthetic
cgacgugcgccaccaggucc

SEQ ID NO: 1556 - RNA, 20 nt, Artificial Sequence
  Synthetic
gggccucgacgugcgccacc

SEQ ID NO: 1557 - RNA, 20 nt, Artificial Sequence
  Synthetic
gucaucaaccagcugggcca

SEQ ID NO: 1558 - RNA, 20 nt, Artificial Sequence
  Synthetic
agucaucaaccagcugggcc

SEQ ID NO: 1559 - RNA, 20 nt, Artificial Sequence
  Synthetic
gguaaagucaucaaccagcu

SEQ ID NO: 1560 - RNA, 20 nt, Artificial Sequence
  Synthetic
ggguaaagucaucaaccagc

SEQ ID NO: 1561 - RNA, 20 nt, Artificial Sequence
  Synthetic
gcccagcuccgggccgguca

SEQ ID NO: 1562 - RNA, 20 nt, Artificial Sequence
  Synthetic
cgcccagcuccgggccgguc

SEQ ID NO: 1563 - RNA, 20 nt, Artificial Sequence
  Synthetic
cugcccgcccagcuccgggc

SEQ ID NO: 1564 - RNA, 20 nt, Artificial Sequence
  Synthetic
gcgccugcccgcccagcucc

SEQ ID NO: 1565 - RNA, 20 nt, Artificial Sequence
  Synthetic
ugcgccugcccgcccagcuc

SEQ ID NO: 1566 - RNA, 20 nt, Artificial Sequence
  Synthetic
ucgcauuaggugauucagcu

SEQ ID NO: 1567 - RNA, 20 nt, Artificial Sequence
  Synthetic
gcagcgccgggucucgcauu

SEQ ID NO: 1568 - RNA, 20 nt, Artificial Sequence
  Synthetic
cgagggguggcagcagcgcc

SEQ ID NO: 1569 - RNA, 20 nt, Artificial Sequence
  Synthetic
acgagggguggcagcagcgc

SEQ ID NO: 1570 - RNA, 20 nt, Artificial Sequence
  Synthetic
ucacagucccacacgagggg

SEQ ID NO: 1571 - RNA, 20 nt, Artificial Sequence
  Synthetic
gcgucacagucccacacgag

SEQ ID NO: 1572 - RNA, 20 nt, Artificial Sequence
  Synthetic
ggcgucacagucccacacga

SEQ ID NO: 1573 - RNA, 20 nt, Artificial Sequence
  Synthetic
gggcgucacagucccacacg

SEQ ID NO: 1574 - RNA, 20 nt, Artificial Sequence
  Synthetic
cagggccgcgcgccgcauca

SEQ ID NO: 1575 - RNA, 20 nt, Artificial Sequence
  Synthetic
ccagggccgcgcgccgcauc

SEQ ID NO: 1576 - RNA, 20 nt, Artificial Sequence
  Synthetic
gcagucgcgauggcggucca

SEQ ID NO: 1577 - RNA, 20 nt, Artificial Sequence
  Synthetic
ggcagucgcgauggcggucc

SEQ ID NO: 1578 - RNA, 20 nt, Artificial Sequence
  Synthetic
uaacccggcagucgcgaugg

SEQ ID NO: 1579 - RNA, 20 nt, Artificial Sequence
  Synthetic
cgcuaacccggcagucgcga

SEQ ID NO: 1580 - RNA, 20 nt, Artificial Sequence
  Synthetic
cguggccccccgcgcuaacc

SEQ ID NO: 1581 - RNA, 20 nt, Artificial Sequence
  Synthetic
ccgccgcguacacggggucg

SEQ ID NO: 1582 - RNA, 20 nt, Artificial Sequence
  Synthetic
uacaugccgccgcguacacg

SEQ ID NO: 1583 - RNA, 20 nt, Artificial Sequence
  Synthetic
uuacaugccgccgcguacac

SEQ ID NO: 1584 - RNA, 20 nt, Artificial Sequence
  Synthetic
guuacaugccgccgcguaca

SEQ ID NO: 1585 - RNA, 20 nt, Artificial Sequence
  Synthetic
gucguugcgguugaaguccg

SEQ ID NO: 1586 - RNA, 20 nt, Artificial Sequence
  Synthetic
gcagcagcuggccgucguug

SEQ ID NO: 1587 - RNA, 20 nt, Artificial Sequence
  Synthetic
ccuggguguugugcagcagc

SEQ ID NO: 1588 - RNA, 20 nt, Artificial Sequence
  Synthetic
ggcguccgcggcucgggccu

SEQ ID NO: 1589 - RNA, 20 nt, Artificial Sequence
  Synthetic
cggcguccgcggcucgggcc

SEQ ID NO: 1590 - RNA, 20 nt, Artificial Sequence
  Synthetic
auccgcggcguccgcggcuc

SEQ ID NO: 1591 - RNA, 20 nt, Artificial Sequence
  Synthetic
cauccgcggcguccgcggcu

SEQ ID NO: 1592 - RNA, 20 nt, Artificial Sequence
  Synthetic
ccggucauccgcggcguccg

SEQ ID NO: 1593 - RNA, 20 nt, Artificial Sequence
  Synthetic
ccggugcggccggucauccg

SEQ ID NO: 1594 - RNA, 20 nt, Artificial Sequence
  Synthetic
aguccgccccccggugcggc

SEQ ID NO: 1595 - RNA, 20 nt, Artificial Sequence
  Synthetic
guccaguccgccccccggug

SEQ ID NO: 1596 - RNA, 20 nt, Artificial Sequence
  Synthetic
gcacgguccaguccgccccc

SEQ ID NO: 1597 - RNA, 20 nt, Artificial Sequence
  Synthetic
guaguaaaucuuguggugca

SEQ ID NO: 1598 - RNA, 20 nt, Artificial Sequence
  Synthetic
ucacguaguaguaaaucuug

SEQ ID NO: 1599 - RNA, 20 nt, Artificial Sequence
  Synthetic
cagcggccccgcgagaaggc

SEQ ID NO: 1600 - RNA, 20 nt, Artificial Sequence
  Synthetic
gcagcggccccgcgagaagg

SEQ ID NO: 1601 - RNA, 20 nt, Artificial Sequence
  Synthetic
gcagcagcggccccgcgaga

SEQ ID NO: 1602 - RNA, 20 nt, Artificial Sequence
  Synthetic
gaacccccgcggugcagcag

SEQ ID NO: 1603 - RNA, 20 nt, Artificial Sequence
  Synthetic
gcggucgaagcgaacccccg

SEQ ID NO: 1604 - RNA, 20 nt, Artificial Sequence
  Synthetic
ucugcaggguggcguauacg

SEQ ID NO: 1605 - RNA, 20 nt, Artificial Sequence
  Synthetic
gaccaccauguucugcaggg

SEQ ID NO: 1606 - RNA, 20 nt, Artificial Sequence
  Synthetic
cgggaccaccauguucugca

SEQ ID NO: 1607 - RNA, 20 nt, Artificial Sequence
  Synthetic
ccgggaccaccauguucugc

SEQ ID NO: 1608 - RNA, 20 nt, Artificial Sequence
  Synthetic
ccucgccgggggcgaucucc

SEQ ID NO: 1609 - RNA, 20 nt, Artificial Sequence
  Synthetic
uccucgccgggggcgaucuc

SEQ ID NO: 1610 - RNA, 20 nt, Artificial Sequence
  Synthetic
gcuggggcacuccucgccgg

SEQ ID NO: 1611 - RNA, 20 nt, Artificial Sequence
  Synthetic
cgcuggggcacuccucgccg

SEQ ID NO: 1612 - RNA, 20 nt, Artificial Sequence
  Synthetic
ucgcuggggcacuccucgcc

SEQ ID NO: 1613 - RNA, 20 nt, Artificial Sequence
  Synthetic
gucgcuggggcacuccucgc

SEQ ID NO: 1614 - RNA, 20 nt, Artificial Sequence
  Synthetic
gguccgucacggggucgcug

SEQ ID NO: 1615 - RNA, 20 nt, Artificial Sequence
  Synthetic
ggguccgucacggggucgcu

SEQ ID NO: 1616 - RNA, 20 nt, Artificial Sequence
  Synthetic
gggguccgucacggggucgc

SEQ ID NO: 1617 - RNA, 20 nt, Artificial Sequence
  Synthetic
ggugcgcgggguccgucacg

SEQ ID NO: 1618 - RNA, 20 nt, Artificial Sequence
  Synthetic
gggugcgcgggguccgucac

SEQ ID NO: 1619 - RNA, 20 nt, Artificial Sequence
  Synthetic
ggggugcgcgggguccguca

SEQ ID NO: 1620 - RNA, 20 nt, Artificial Sequence
  Synthetic
ccgggugcagggggugcgcg

SEQ ID NO: 1621 - RNA, 20 nt, Artificial Sequence
  Synthetic
gccgggugcagggggugcgc

SEQ ID NO: 1622 - RNA, 20 nt, Artificial Sequence
  Synthetic
ggccgggugcagggggugcg

SEQ ID NO: 1623 - RNA, 20 nt, Artificial Sequence
  Synthetic
ccagauuggccgggugcagg

SEQ ID NO: 1624 - RNA, 20 nt, Artificial Sequence
  Synthetic
accagauuggccgggugcag

SEQ ID NO: 1625 - RNA, 20 nt, Artificial Sequence
  Synthetic
caccagauuggccgggugca

SEQ ID NO: 1626 - RNA, 20 nt, Artificial Sequence
  Synthetic
ccaccagauuggccgggugc

SEQ ID NO: 1627 - RNA, 20 nt, Artificial Sequence
  Synthetic
uguuggccaccagauuggcc

SEQ ID NO: 1628 - RNA, 20 nt, Artificial Sequence
  Synthetic
guguuggccaccagauuggc

SEQ ID NO: 1629 - RNA, 20 nt, Artificial Sequence
  Synthetic
gaccguguuggccaccagau

SEQ ID NO: 1630 - RNA, 20 nt, Artificial Sequence
  Synthetic
aaacauggcguugaccgugu

SEQ ID NO: 1631 - RNA, 20 nt, Artificial Sequence
  Synthetic
cacgcgcccguugugaaaca

SEQ ID NO: 1632 - RNA, 20 nt, Artificial Sequence
  Synthetic
accugcagcgugagcauggc

SEQ ID NO: 1633 - RNA, 20 nt, Artificial Sequence
  Synthetic
caccugcagcgugagcaugg

SEQ ID NO: 1634 - RNA, 20 nt, Artificial Sequence
  Synthetic
cagcaccugcagcgugagca

SEQ ID NO: 1635 - RNA, 20 nt, Artificial Sequence
  Synthetic
ugugcguucggccauguugu

SEQ ID NO: 1636 - RNA, 20 nt, Artificial Sequence
  Synthetic
uugugcguucggccauguug

SEQ ID NO: 1637 - RNA, 20 nt, Artificial Sequence
  Synthetic
gagcagcgccguugugcguu

SEQ ID NO: 1638 - RNA, 20 nt, Artificial Sequence
  Synthetic
gcgguguuggcgcccgcguc

SEQ ID NO: 1639 - RNA, 20 nt, Artificial Sequence
  Synthetic
cgcgguguuggcgcccgcgu

SEQ ID NO: 1640 - RNA, 20 nt, Artificial Sequence
  Synthetic
guuggugguggacgcggugu

SEQ ID NO: 1641 - RNA, 20 nt, Artificial Sequence
  Synthetic
gcgcauguuggugguggacg

SEQ ID NO: 1642 - RNA, 20 nt, Artificial Sequence
  Synthetic
gaauaugcgcauguuggugg

SEQ ID NO: 1643 - RNA, 20 nt, Artificial Sequence
  Synthetic
gucgaauaugcgcauguugg

SEQ ID NO: 1644 - RNA, 20 nt, Artificial Sequence
  Synthetic
cccgucgaauaugcgcaugu

SEQ ID NO: 1645 - RNA, 20 nt, Artificial Sequence
  Synthetic
gggggccaucagcaggauuc

SEQ ID NO: 1646 - RNA, 20 nt, Artificial Sequence
  Synthetic
gaugcuggggggccaucagc

SEQ ID NO: 1647 - RNA, 20 nt, Artificial Sequence
  Synthetic
gguaugguccagaugcuggg

SEQ ID NO: 1648 - RNA, 20 nt, Artificial Sequence
  Synthetic
ugguaugguccagaugcugg

SEQ ID NO: 1649 - RNA, 20 nt, Artificial Sequence
  Synthetic
augguaugguccagaugcug

SEQ ID NO: 1650 - RNA, 20 nt, Artificial Sequence
  Synthetic
gaugguaugguccagaugcu

SEQ ID NO: 1651 - RNA, 20 nt, Artificial Sequence
  Synthetic
ggaugguaugguccagaugc

SEQ ID NO: 1652 - RNA, 20 nt, Artificial Sequence
  Synthetic
agucgccauuuuggauggua

SEQ ID NO: 1653 - RNA, 20 nt, Artificial Sequence
  Synthetic
aaaauagucgccauuuugga

SEQ ID NO: 1654 - RNA, 20 nt, Artificial Sequence
  Synthetic
gguaaaaauagucgccauuu

SEQ ID NO: 1655 - RNA, 20 nt, Artificial Sequence
  Synthetic
acagcgcguggacggggagg

SEQ ID NO: 1656 - RNA, 20 nt, Artificial Sequence
  Synthetic
aacagcgcguggacggggag

SEQ ID NO: 1657 - RNA, 20 nt, Artificial Sequence
  Synthetic
gaacagcgcguggacgggga

SEQ ID NO: 1658 - RNA, 20 nt, Artificial Sequence
  Synthetic
cgaacagcgcguggacgggg

SEQ ID NO: 1659 - RNA, 20 nt, Artificial Sequence
  Synthetic
cggcgaacagcgcguggacg

SEQ ID NO: 1660 - RNA, 20 nt, Artificial Sequence
  Synthetic
ccggcgaacagcgcguggac

SEQ ID NO: 1661 - RNA, 20 nt, Artificial Sequence
  Synthetic
cccggcgaacagcgcgugga

SEQ ID NO: 1662 - RNA, 20 nt, Artificial Sequence
  Synthetic
cggccccggcgaacagcgcg

SEQ ID NO: 1663 - RNA, 20 nt, Artificial Sequence
  Synthetic
guucgccacguggucggccc

SEQ ID NO: 1664 - RNA, 20 nt, Artificial Sequence
  Synthetic
gggcgcguucgccacguggu

SEQ ID NO: 1665 - RNA, 20 nt, Artificial Sequence
  Synthetic
aauugggcgcguucgccacg

SEQ ID NO: 1666 - RNA, 20 nt, Artificial Sequence
  Synthetic
cgcagggccggggggaaauu

SEQ ID NO: 1667 - RNA, 20 nt, Artificial Sequence
  Synthetic
gcgcagggccggggggaaau

SEQ ID NO: 1668 - RNA, 20 nt, Artificial Sequence
  Synthetic
acaggucgcgcagggccggg

SEQ ID NO: 1669 - RNA, 20 nt, Artificial Sequence
  Synthetic
gacaggucgcgcagggccgg

SEQ ID NO: 1670 - RNA, 20 nt, Artificial Sequence
  Synthetic
cgacaggucgcgcagggccg

SEQ ID NO: 1671 - RNA, 20 nt, Artificial Sequence
  Synthetic
gcgacaggucgcgcagggcc

SEQ ID NO: 1672 - RNA, 20 nt, Artificial Sequence
  Synthetic
cgcgacaggucgcgcagggc

SEQ ID NO: 1673 - RNA, 20 nt, Artificial Sequence
  Synthetic
cugccgcgacaggucgcgca

SEQ ID NO: 1674 - RNA, 20 nt, Artificial Sequence
  Synthetic
ccugccgcgacaggucgcgc

SEQ ID NO: 1675 - RNA, 20 nt, Artificial Sequence
  Synthetic
ccagggggaccugccgcgac

SEQ ID NO: 1676 - RNA, 20 nt, Artificial Sequence
  Synthetic
ccagagccggggggaccagg

SEQ ID NO: 1677 - RNA, 20 nt, Artificial Sequence
  Synthetic
cccagagccggggggaccag

SEQ ID NO: 1678 - RNA, 20 nt, Artificial Sequence
  Synthetic
ccccagagccggggggacca

SEQ ID NO: 1679 - RNA, 20 nt, Artificial Sequence
  Synthetic
cccccagagccggggggacc

SEQ ID NO: 1680 - RNA, 20 nt, Artificial Sequence
  Synthetic
aguuggcccccagagccggg

SEQ ID NO: 1681 - RNA, 20 nt, Artificial Sequence
  Synthetic
uaguuggcccccagagccgg

SEQ ID NO: 1682 - RNA, 20 nt, Artificial Sequence
  Synthetic
guaguuggcccccagagccg

SEQ ID NO: 1683 - RNA, 20 nt, Artificial Sequence
  Synthetic
aguaguuggcccccagagcc

SEQ ID NO: 1684 - RNA, 20 nt, Artificial Sequence
  Synthetic
aaguaguuggcccccagagc

SEQ ID NO: 1685 - RNA, 20 nt, Artificial Sequence
  Synthetic
ucggaucgacgaaaaguagu

SEQ ID NO: 1686 - RNA, 20 nt, Artificial Sequence
  Synthetic
cgugcugcacgacgggcugu

SEQ ID NO: 1687 - RNA, 20 nt, Artificial Sequence
  Synthetic
ucgcggacgugcugcacgac

SEQ ID NO: 1688 - RNA, 20 nt, Artificial Sequence
  Synthetic
cucgcggacgugcugcacga

SEQ ID NO: 1689 - RNA, 20 nt, Artificial Sequence
  Synthetic
ucuccccggccgcgcucucg

SEQ ID NO: 1690 - RNA, 20 nt, Artificial Sequence
  Synthetic
guaggucagcgcguucuccc

SEQ ID NO: 1691 - RNA, 20 nt, Artificial Sequence
  Synthetic
guaccccgccaugagcgcgu

SEQ ID NO: 1692 - RNA, 20 nt, Artificial Sequence
  Synthetic
agcugaugaugcaaggccac

SEQ ID NO: 1693 - RNA, 20 nt, Artificial Sequence
  Synthetic
gagcugaugaugcaaggcca

SEQ ID NO: 1694 - RNA, 20 nt, Artificial Sequence
  Synthetic
cgucuugagcugaugaugca

SEQ ID NO: 1695 - RNA, 20 nt, Artificial Sequence
  Synthetic
ugaacccaaacccgggaugg

SEQ ID NO: 1696 - RNA, 20 nt, Artificial Sequence
  Synthetic
cggugaacccaaacccggga

SEQ ID NO: 1697 - RNA, 20 nt, Artificial Sequence
  Synthetic
acgacggugaacccaaaccc

SEQ ID NO: 1698 - RNA, 20 nt, Artificial Sequence
  Synthetic
gacgacggugaacccaaacc

SEQ ID NO: 1699 - RNA, 20 nt, Artificial Sequence
  Synthetic
aaagcgguccugucggacga

SEQ ID NO: 1700 - RNA, 20 nt, Artificial Sequence
  Synthetic
cagucacaaagcgguccugu

SEQ ID NO: 1701 - RNA, 20 nt, Artificial Sequence
  Synthetic
gcacguucucagucacaaag

SEQ ID NO: 1702 - RNA, 20 nt, Artificial Sequence
  Synthetic
gggccaccuggagcuggccc

SEQ ID NO: 1703 - RNA, 20 nt, Artificial Sequence
  Synthetic
cgugccgggccaccuggagc

SEQ ID NO: 1704 - RNA, 20 nt, Artificial Sequence
  Synthetic
caguuucgugccgggccacc

SEQ ID NO: 1705 - RNA, 20 nt, Artificial Sequence
  Synthetic
ccccccgccaguuucgugcc

SEQ ID NO: 1706 - RNA, 20 nt, Artificial Sequence
  Synthetic
cccccccgccaguuucgugc

SEQ ID NO: 1707 - RNA, 20 nt, Artificial Sequence
  Synthetic
guccacguucgcgcgcggcu

SEQ ID NO: 1708 - RNA, 20 nt, Artificial Sequence
  Synthetic
gguccacguucgcgcgcggc

SEQ ID NO: 1709 - RNA, 20 nt, Artificial Sequence
  Synthetic
cccagguccacguucgcgcg

SEQ ID NO: 1710 - RNA, 20 nt, Artificial Sequence
  Synthetic
cggcgguguagcccacgccc

SEQ ID NO: 1711 - RNA, 20 nt, Artificial Sequence
  Synthetic
gguugccguggccacgacgg

SEQ ID NO: 1712 - RNA, 20 nt, Artificial Sequence
  Synthetic
gacgguugccguggccacga

SEQ ID NO: 1713 - RNA, 20 nt, Artificial Sequence
  Synthetic
gggguugcggacgguugccg

SEQ ID NO: 1714 - RNA, 20 nt, Artificial Sequence
  Synthetic
gucggugacgggguugcgga

SEQ ID NO: 1715 - RNA, 20 nt, Artificial Sequence
  Synthetic
ccaugucggugacgggguug

SEQ ID NO: 1716 - RNA, 20 nt, Artificial Sequence
  Synthetic
gguugcccaugucggugacg

SEQ ID NO: 1717 - RNA, 20 nt, Artificial Sequence
  Synthetic
agguugcccaugucggugac

SEQ ID NO: 1718 - RNA, 20 nt, Artificial Sequence
  Synthetic
aagguugcccaugucgguga

SEQ ID NO: 1719 - RNA, 20 nt, Artificial Sequence
  Synthetic
uuggggaagguugcccaugu

SEQ ID NO: 1720 - RNA, 20 nt, Artificial Sequence
  Synthetic
ccagguaaaaguuuugggga

SEQ ID NO: 1721 - RNA, 20 nt, Artificial Sequence
  Synthetic
cggcccagguaaaaguuuug

SEQ ID NO: 1722 - RNA, 20 nt, Artificial Sequence
  Synthetic
gcggcccagguaaaaguuuu

SEQ ID NO: 1723 - RNA, 20 nt, Artificial Sequence
  Synthetic
cgcggcccagguaaaaguuu

SEQ ID NO: 1724 - RNA, 20 nt, Artificial Sequence
  Synthetic
gagggggagccccgcggccc

SEQ ID NO: 1725 - RNA, 20 nt, Artificial Sequence
  Synthetic
ccaggagagggggagccccg

SEQ ID NO: 1726 - RNA, 20 nt, Artificial Sequence
  Synthetic
gccgcguuguccaggagagg

SEQ ID NO: 1727 - RNA, 20 nt, Artificial Sequence
  Synthetic
ugccgcguuguccaggagag

SEQ ID NO: 1728 - RNA, 20 nt, Artificial Sequence
  Synthetic
cugccgcguuguccaggaga

SEQ ID NO: 1729 - RNA, 20 nt, Artificial Sequence
  Synthetic
gcugccgcguuguccaggag

SEQ ID NO: 1730 - RNA, 20 nt, Artificial Sequence
  Synthetic
acacggcugccgcguugucc

SEQ ID NO: 1731 - RNA, 20 nt, Artificial Sequence
  Synthetic
gaccgcguuccgcagguaca

SEQ ID NO: 1732 - RNA, 20 nt, Artificial Sequence
  Synthetic
ccgccacgaccgcguuccgc

SEQ ID NO: 1733 - RNA, 20 nt, Artificial Sequence
  Synthetic
cgggcugggccggccccagg

SEQ ID NO: 1734 - RNA, 20 nt, Artificial Sequence
  Synthetic
ggacgggcugggccggcccc

SEQ ID NO: 1735 - RNA, 20 nt, Artificial Sequence
  Synthetic
aacacggggacgggcugggc

SEQ ID NO: 1736 - RNA, 20 nt, Artificial Sequence
  Synthetic
cccgaacacggggacgggcu

SEQ ID NO: 1737 - RNA, 20 nt, Artificial Sequence
  Synthetic
acccgaacacggggacgggc

SEQ ID NO: 1738 - RNA, 20 nt, Artificial Sequence
  Synthetic
gcgcacccgaacacggggac

SEQ ID NO: 1739 - RNA, 20 nt, Artificial Sequence
  Synthetic
ggcgcacccgaacacgggga

SEQ ID NO: 1740 - RNA, 20 nt, Artificial Sequence
  Synthetic
ccugggcgcacccgaacacg

SEQ ID NO: 1741 - RNA, 20 nt, Artificial Sequence
  Synthetic
accugggcgcacccgaacac

SEQ ID NO: 1742 - RNA, 20 nt, Artificial Sequence
  Synthetic
caccugggcgcacccgaaca

SEQ ID NO: 1743 - RNA, 20 nt, Artificial Sequence
  Synthetic
cccugcgcgccgcggcaccu

SEQ ID NO: 1744 - RNA, 20 nt, Artificial Sequence
  Synthetic
ucccugcgcgccgcggcacc

SEQ ID NO: 1745 - RNA, 20 nt, Artificial Sequence
  Synthetic
ugguccaucccugcgcgccg

SEQ ID NO: 1746 - RNA, 20 nt, Artificial Sequence
  Synthetic
cacacacggcguccuggccg

SEQ ID NO: 1747 - RNA, 20 nt, Artificial Sequence
  Synthetic
uaaacucacacacggcgucc

SEQ ID NO: 1748 - RNA, 20 nt, Artificial Sequence
  Synthetic
gguggcgauaaacucacaca

SEQ ID NO: 1749 - RNA, 20 nt, Artificial Sequence
  Synthetic
gacgucggucgacacggggg

SEQ ID NO: 1750 - RNA, 20 nt, Artificial Sequence
  Synthetic
guugacgucggucgacacgg

SEQ ID NO: 1751 - RNA, 20 nt, Artificial Sequence
  Synthetic
aguugacgucggucgacacg

SEQ ID NO: 1752 - RNA, 20 nt, Artificial Sequence
  Synthetic
uaguugacgucggucgacac

SEQ ID NO: 1753 - RNA, 20 nt, Artificial Sequence
  Synthetic
guaguugacgucggucgaca

SEQ ID NO: 1754 - RNA, 20 nt, Artificial Sequence
  Synthetic
ccggcggaaguaguugacgu

SEQ ID NO: 1755 - RNA, 20 nt, Artificial Sequence
  Synthetic
cccggggguugcagggccgg

SEQ ID NO: 1756 - RNA, 20 nt, Artificial Sequence
  Synthetic
guccccggggguugcagggc

SEQ ID NO: 1757 - RNA, 20 nt, Artificial Sequence
  Synthetic
gcgcguccccggggguugca

SEQ ID NO: 1758 - RNA, 20 nt, Artificial Sequence
  Synthetic
ggcgcguccccggggguugc

SEQ ID NO: 1759 - RNA, 20 nt, Artificial Sequence
  Synthetic
ccccggcggcgcguccccgg

SEQ ID NO: 1760 - RNA, 20 nt, Artificial Sequence
  Synthetic
cccccggcggcgcguccccg

SEQ ID NO: 1761 - RNA, 20 nt, Artificial Sequence
  Synthetic
gcccccggcggcgcgucccc

SEQ ID NO: 1762 - RNA, 20 nt, Artificial Sequence
  Synthetic
cgcccccggcggcgcguccc

SEQ ID NO: 1763 - RNA, 20 nt, Artificial Sequence
  Synthetic
ccccgcguaaacgcccccgg

SEQ ID NO: 1764 - RNA, 20 nt, Artificial Sequence
  Synthetic
gucccccgcguaaacgcccc

SEQ ID NO: 1765 - RNA, 20 nt, Artificial Sequence
  Synthetic
gccguggucguacaugaggg

SEQ ID NO: 1766 - RNA, 20 nt, Artificial Sequence
  Synthetic
cuggccguggucguacauga

SEQ ID NO: 1767 - RNA, 20 nt, Artificial Sequence
  Synthetic
ucuggccguggucguacaug

SEQ ID NO: 1768 - RNA, 20 nt, Artificial Sequence
  Synthetic
gggacgggucgcucuggccg

SEQ ID NO: 1769 - RNA, 20 nt, Artificial Sequence
  Synthetic
aggcccgggacgggucgcuc

SEQ ID NO: 1770 - RNA, 20 nt, Artificial Sequence
  Synthetic
uggccgcgaaggcccgggac

SEQ ID NO: 1771 - RNA, 20 nt, Artificial Sequence
  Synthetic
guggccgcgaaggcccggga

SEQ ID NO: 1772 - RNA, 20 nt, Artificial Sequence
  Synthetic
ggccguggccgcgaaggccc

SEQ ID NO: 1773 - RNA, 20 nt, Artificial Sequence
  Synthetic
uggccguggccgcgaaggcc

SEQ ID NO: 1774 - RNA, 20 nt, Artificial Sequence
  Synthetic
cggguuggccguggccgcga

SEQ ID NO: 1775 - RNA, 20 nt, Artificial Sequence
  Synthetic
cgacgcccacggguuggccg

SEQ ID NO: 1776 - RNA, 20 nt, Artificial Sequence
  Synthetic
ucgcugcgacgcccacgggu

SEQ ID NO: 1777 - RNA, 20 nt, Artificial Sequence
  Synthetic
aaaaucgcugcgacgcccac

SEQ ID NO: 1778 - RNA, 20 nt, Artificial Sequence
  Synthetic
gaaaaucgcugcgacgccca

SEQ ID NO: 1779 - RNA, 20 nt, Artificial Sequence
  Synthetic
gguaggccccguuauagagc

SEQ ID NO: 1780 - RNA, 20 nt, Artificial Sequence
  Synthetic
cgaggccccguugagguggu

SEQ ID NO: 1781 - RNA, 20 nt, Artificial Sequence
  Synthetic
ccggcgaggccccguugagg

SEQ ID NO: 1782 - RNA, 20 nt, Artificial Sequence
  Synthetic
gcaccggcgaggccccguug

SEQ ID NO: 1783 - RNA, 20 nt, Artificial Sequence
  Synthetic
gcaggggcugagcaccggcg

SEQ ID NO: 1784 - RNA, 20 nt, Artificial Sequence
  Synthetic
uuaaagcaggggcugagcac

SEQ ID NO: 1785 - RNA, 20 nt, Artificial Sequence
  Synthetic
acguaaagaacuuaaagcag

SEQ ID NO: 1786 - RNA, 20 nt, Artificial Sequence
  Synthetic
gacguaaagaacuuaaagca

SEQ ID NO: 1787 - RNA, 20 nt, Artificial Sequence
  Synthetic
cgacguaaagaacuuaaagc

SEQ ID NO: 1788 - RNA, 20 nt, Artificial Sequence
  Synthetic
gcgauguuuggcggcgaugu

SEQ ID NO: 1789 - RNA, 20 nt, Artificial Sequence
  Synthetic
cuccaggcagcgauguuugg

SEQ ID NO: 1790 - RNA, 20 nt, Artificial Sequence
  Synthetic
gcgcuccaggcagcgauguu

SEQ ID NO: 1791 - RNA, 20 nt, Artificial Sequence
  Synthetic
ucuccacgaucaggcgcucc

SEQ ID NO: 1792 - RNA, 20 nt, Artificial Sequence
  Synthetic
ccgaacccgucuccacgauc

SEQ ID NO: 1793 - RNA, 20 nt, Artificial Sequence
  Synthetic
gucgcuggcggcgguggccg

SEQ ID NO: 1794 - RNA, 20 nt, Artificial Sequence
  Synthetic
cuguacgucgcuggcggcgg

SEQ ID NO: 1795 - RNA, 20 nt, Artificial Sequence
  Synthetic
aaacuguacgucgcuggcgg

SEQ ID NO: 1796 - RNA, 20 nt, Artificial Sequence
  Synthetic
cuuaaacuguacgucgcugg

SEQ ID NO: 1797 - RNA, 20 nt, Artificial Sequence
  Synthetic
gcgcuuaaacuguacgucgc

SEQ ID NO: 1798 - RNA, 20 nt, Artificial Sequence
  Synthetic
cgaguucgcggcaccccggg

SEQ ID NO: 1799 - RNA, 20 nt, Artificial Sequence
  Synthetic
acgaguucgcggcaccccgg

SEQ ID NO: 1800 - RNA, 20 nt, Artificial Sequence
  Synthetic
cacgaguucgcggcaccccg

SEQ ID NO: 1801 - RNA, 20 nt, Artificial Sequence
  Synthetic
ccacgaguucgcggcacccc

SEQ ID NO: 1802 - RNA, 20 nt, Artificial Sequence
  Synthetic
uccacgaguucgcggcaccc

SEQ ID NO: 1803 - RNA, 20 nt, Artificial Sequence
  Synthetic
acggguccuccacgaguucg

SEQ ID NO: 1804 - RNA, 20 nt, Artificial Sequence
  Synthetic
ccuccugaaacaggccacac

SEQ ID NO: 1805 - RNA, 20 nt, Artificial Sequence
  Synthetic
gccuccugaaacaggccaca

SEQ ID NO: 1806 - RNA, 20 nt, Artificial Sequence
  Synthetic
gcggguaggccuccugaaac

SEQ ID NO: 1807 - RNA, 20 nt, Artificial Sequence
  Synthetic
gcuggcgcaggugagcgggu

SEQ ID NO: 1808 - RNA, 20 nt, Artificial Sequence
  Synthetic
ggucgcuggcgcaggugagc

SEQ ID NO: 1809 - RNA, 20 nt, Artificial Sequence
  Synthetic
gggucgcuggcgcaggugag

SEQ ID NO: 1810 - RNA, 20 nt, Artificial Sequence
  Synthetic
gagggcggggucgcuggcgc

SEQ ID NO: 1811 - RNA, 20 nt, Artificial Sequence
  Synthetic
gcggaggagggcggggucgc

SEQ ID NO: 1812 - RNA, 20 nt, Artificial Sequence
  Synthetic
gggcacugcggaggagggcg

SEQ ID NO: 1813 - RNA, 20 nt, Artificial Sequence
  Synthetic
cgggcacugcggaggagggc

SEQ ID NO: 1814 - RNA, 20 nt, Artificial Sequence
  Synthetic
gcgggcacugcggaggaggg

SEQ ID NO: 1815 - RNA, 20 nt, Artificial Sequence
  Synthetic
guugcgggcacugcggagga

SEQ ID NO: 1816 - RNA, 20 nt, Artificial Sequence
  Synthetic
cguugcgggcacugcggagg

SEQ ID NO: 1817 - RNA, 20 nt, Artificial Sequence
  Synthetic
ccccguugcgggcacugcgg

SEQ ID NO: 1818 - RNA, 20 nt, Artificial Sequence
  Synthetic
cuuccccguugcgggcacug

SEQ ID NO: 1819 - RNA, 20 nt, Artificial Sequence
  Synthetic
cgcgugggcuuccccguugc

SEQ ID NO: 1820 - RNA, 20 nt, Artificial Sequence
  Synthetic
gcgcgugggcuuccccguug

SEQ ID NO: 1821 - RNA, 20 nt, Artificial Sequence
  Synthetic
gaagugggucucccgcgcgu

SEQ ID NO: 1822 - RNA, 20 nt, Artificial Sequence
  Synthetic
cgaagugggucucccgcgcg

SEQ ID NO: 1823 - RNA, 20 nt, Artificial Sequence
  Synthetic
gacgagauacugcgcgaagu

SEQ ID NO: 1824 - RNA, 20 nt, Artificial Sequence
  Synthetic
agacgagauacugcgcgaag

SEQ ID NO: 1825 - RNA, 20 nt, Artificial Sequence
  Synthetic
cagagccagucccuugagcg

SEQ ID NO: 1826 - RNA, 20 nt, Artificial Sequence
  Synthetic
acagagccagucccuugagc

SEQ ID NO: 1827 - RNA, 20 nt, Artificial Sequence
  Synthetic
uacagagccagucccuugag

SEQ ID NO: 1828 - RNA, 17 nt, Artificial Sequence
  Synthetic
acgccccgaggacggcc

SEQ ID NO: 1829 - RNA, 17 nt, Artificial Sequence
  Synthetic
cucaaacgccccgagga

SEQ ID NO: 1830 - RNA, 17 nt, Artificial Sequence
  Synthetic
cgcgcucaaacgccccg

SEQ ID NO: 1831 - RNA, 17 nt, Artificial Sequence
  Synthetic
cacgugcagcaucuggu

SEQ ID NO: 1832 - RNA, 17 nt, Artificial Sequence
  Synthetic
gcagcacgugcagcauc

SEQ ID NO: 1833 - RNA, 17 nt, Artificial Sequence
  Synthetic
aacaacaaagccagggg

SEQ ID NO: 1834 - RNA, 17 nt, Artificial Sequence
  Synthetic
ggcaacaacaaagccag

SEQ ID NO: 1835 - RNA, 17 nt, Artificial Sequence
  Synthetic
cggcaacaacaaagcca

SEQ ID NO: 1836 - RNA, 17 nt, Artificial Sequence
  Synthetic
ucggcaacaacaaagcc

SEQ ID NO: 1837 - RNA, 17 nt, Artificial Sequence
  Synthetic
uccagguaucguugcau

SEQ ID NO: 1838 - RNA, 17 nt, Artificial Sequence
  Synthetic
ccaggcggccguugucc

SEQ ID NO: 1839 - RNA, 17 nt, Artificial Sequence
  Synthetic
ccacccugguggccagg

SEQ ID NO: 1840 - RNA, 17 nt, Artificial Sequence
  Synthetic
gggccacccugguggcc

SEQ ID NO: 1841 - RNA, 17 nt, Artificial Sequence
  Synthetic
cgcccgggccacccugg

SEQ ID NO: 1842 - RNA, 17 nt, Artificial Sequence
  Synthetic
ggucgcccgggccaccc

SEQ ID NO: 1843 - RNA, 17 nt, Artificial Sequence
  Synthetic
ggcgaccagggucgccc

SEQ ID NO: 1844 - RNA, 17 nt, Artificial Sequence
  Synthetic
cggcgaccagggucgcc

SEQ ID NO: 1845 - RNA, 17 nt, Artificial Sequence
  Synthetic
cuuuagcucggcgacca

SEQ ID NO: 1846 - RNA, 17 nt, Artificial Sequence
  Synthetic
gcuuuagcucggcgacc

SEQ ID NO: 1847 - RNA, 17 nt, Artificial Sequence
  Synthetic
gaagcuucgcuuuagcu

SEQ ID NO: 1848 - RNA, 17 nt, Artificial Sequence
  Synthetic
gguggcccgccuugccc

SEQ ID NO: 1849 - RNA, 17 nt, Artificial Sequence
  Synthetic
cgacggccucccggcgg

SEQ ID NO: 1850 - RNA, 17 nt, Artificial Sequence
  Synthetic
ccucgacggccucccgg

SEQ ID NO: 1851 - RNA, 17 nt, Artificial Sequence
  Synthetic
aggccucgacggccucc

SEQ ID NO: 1852 - RNA, 17 nt, Artificial Sequence
  Synthetic
cacgagccaggccucga

SEQ ID NO: 1853 - RNA, 17 nt, Artificial Sequence
  Synthetic
ggugagguccacgagcc

SEQ ID NO: 1854 - RNA, 17 nt, Artificial Sequence
  Synthetic
gcugcguggccguggug

SEQ ID NO: 1855 - RNA, 17 nt, Artificial Sequence
  Synthetic
ggagggcugcguggccg

SEQ ID NO: 1856 - RNA, 17 nt, Artificial Sequence
  Synthetic
ggccacggagggcugcg

SEQ ID NO: 1857 - RNA, 17 nt, Artificial Sequence
  Synthetic
cggggcacggccacgga

SEQ ID NO: 1858 - RNA, 17 nt, Artificial Sequence
  Synthetic
acggggcacggccacgg

SEQ ID NO: 1859 - RNA, 17 nt, Artificial Sequence
  Synthetic
cagacggggcacggcca

SEQ ID NO: 1860 - RNA, 17 nt, Artificial Sequence
  Synthetic
augcgucagacggggca

SEQ ID NO: 1861 - RNA, 17 nt, Artificial Sequence
  Synthetic
ucggcaugcgucagacg

SEQ ID NO: 1862 - RNA, 17 nt, Artificial Sequence
  Synthetic
gucggcaugcgucagac

SEQ ID NO: 1863 - RNA, 17 nt, Artificial Sequence
  Synthetic
ugucggcaugcgucaga

SEQ ID NO: 1864 - RNA, 17 nt, Artificial Sequence
  Synthetic
cggccgcccgcgcgugu

SEQ ID NO: 1865 - RNA, 17 nt, Artificial Sequence
  Synthetic
acgagcaccccgucgac

SEQ ID NO: 1866 - RNA, 17 nt, Artificial Sequence
  Synthetic
cuguuugaucggggcgg

SEQ ID NO: 1867 - RNA, 17 nt, Artificial Sequence
  Synthetic
gcgcuguuugaucgggg

SEQ ID NO: 1868 - RNA, 17 nt, Artificial Sequence
  Synthetic
gaggcgcuguuugaucg

SEQ ID NO: 1869 - RNA, 17 nt, Artificial Sequence
  Synthetic
ggaggcgcuguuugauc

SEQ ID NO: 1870 - RNA, 17 nt, Artificial Sequence
  Synthetic
aggaggcgcuguuugau

SEQ ID NO: 1871 - RNA, 17 nt, Artificial Sequence
  Synthetic
ucaggaaggacugcagg

SEQ ID NO: 1872 - RNA, 17 nt, Artificial Sequence
  Synthetic
cuuucaggaaggacugc

SEQ ID NO: 1873 - RNA, 17 nt, Artificial Sequence
  Synthetic
guccuccacuuucagga

SEQ ID NO: 1874 - RNA, 17 nt, Artificial Sequence
  Synthetic
cgguguccuccacuuuc

SEQ ID NO: 1875 - RNA, 17 nt, Artificial Sequence
  Synthetic
caccggcacgucggcuu

SEQ ID NO: 1876 - RNA, 17 nt, Artificial Sequence
  Synthetic
guacgucaccggcacgu

SEQ ID NO: 1877 - RNA, 17 nt, Artificial Sequence
  Synthetic
aucucgccguacgucac

SEQ ID NO: 1878 - RNA, 17 nt, Artificial Sequence
  Synthetic
ccagguuggccccguuc

SEQ ID NO: 1879 - RNA, 17 nt, Artificial Sequence
  Synthetic
gagcgccgugaccaggu

SEQ ID NO: 1880 - RNA, 17 nt, Artificial Sequence
  Synthetic
ucacgagcgccgugacc

SEQ ID NO: 1881 - RNA, 17 nt, Artificial Sequence
  Synthetic
gucguccagacuucgca

SEQ ID NO: 1882 - RNA, 17 nt, Artificial Sequence
  Synthetic
gcaucuccagcaggugg

SEQ ID NO: 1883 - RNA, 17 nt, Artificial Sequence
  Synthetic
ccugcaucuccagcagg

SEQ ID NO: 1884 - RNA, 17 nt, Artificial Sequence
  Synthetic
ccuccugcaucuccagc

SEQ ID NO: 1885 - RNA, 17 nt, Artificial Sequence
  Synthetic
ccagcgucugccgguuc

SEQ ID NO: 1886 - RNA, 17 nt, Artificial Sequence
  Synthetic
gcucguccagcgucugc

SEQ ID NO: 1887 - RNA, 17 nt, Artificial Sequence
  Synthetic
cacgcgcgucgucuggg

SEQ ID NO: 1888 - RNA, 17 nt, Artificial Sequence
  Synthetic
gcacgcgcgucgucugg

SEQ ID NO: 1889 - RNA, 17 nt, Artificial Sequence
  Synthetic
cgcacgcgcgucgucug

SEQ ID NO: 1890 - RNA, 17 nt, Artificial Sequence
  Synthetic
gcgcacgcgcgucgucu

SEQ ID NO: 1891 - RNA, 17 nt, Artificial Sequence
  Synthetic
cgcgcacgcgcgucguc

SEQ ID NO: 1892 - RNA, 17 nt, Artificial Sequence
  Synthetic
gaccagcuucucgccga

SEQ ID NO: 1893 - RNA, 17 nt, Artificial Sequence
  Synthetic
guagaugcgcuucucca

SEQ ID NO: 1894 - RNA, 17 nt, Artificial Sequence
  Synthetic
cguagaugcgcuucucc

SEQ ID NO: 1895 - RNA, 17 nt, Artificial Sequence
  Synthetic
guagggaacguuggugg

SEQ ID NO: 1896 - RNA, 17 nt, Artificial Sequence
  Synthetic
gggguagggaacguugg

SEQ ID NO: 1897 - RNA, 17 nt, Artificial Sequence
  Synthetic
caggggguagggaacgu

SEQ ID NO: 1898 - RNA, 17 nt, Artificial Sequence
  Synthetic
gcgcccaccagggggua

SEQ ID NO: 1899 - RNA, 17 nt, Artificial Sequence
  Synthetic
ggcgcccaccagggggu

SEQ ID NO: 1900 - RNA, 17 nt, Artificial Sequence
  Synthetic
ccauggcgcccaccagg

SEQ ID NO: 1901 - RNA, 17 nt, Artificial Sequence
  Synthetic
uccauggcgcccaccag

SEQ ID NO: 1902 - RNA, 17 nt, Artificial Sequence
  Synthetic
guccauggcgcccacca

SEQ ID NO: 1903 - RNA, 17 nt, Artificial Sequence
  Synthetic
gguccauggcgcccacc

SEQ ID NO: 1904 - RNA, 17 nt, Artificial Sequence
  Synthetic
gacgaacgucaggucca

SEQ ID NO: 1905 - RNA, 17 nt, Artificial Sequence
  Synthetic
ggggcaggacgaacguc

SEQ ID NO: 1906 - RNA, 17 nt, Artificial Sequence
  Synthetic
ugaacaggcccaggggc

SEQ ID NO: 1907 - RNA, 17 nt, Artificial Sequence
  Synthetic
ggauugaacaggcccag

SEQ ID NO: 1908 - RNA, 17 nt, Artificial Sequence
  Synthetic
cggauugaacaggccca

SEQ ID NO: 1909 - RNA, 17 nt, Artificial Sequence
  Synthetic
ccggauugaacaggccc

SEQ ID NO: 1910 - RNA, 17 nt, Artificial Sequence
  Synthetic
ccaugaccggauugaac

SEQ ID NO: 1911 - RNA, 17 nt, Artificial Sequence
  Synthetic
gcaaaccguuccaugac

SEQ ID NO: 1912 - RNA, 17 nt, Artificial Sequence
  Synthetic
uagguccccggcgugcg

SEQ ID NO: 1913 - RNA, 17 nt, Artificial Sequence
  Synthetic
ggcggggacuagguccc

SEQ ID NO: 1914 - RNA, 17 nt, Artificial Sequence
  Synthetic
ggccgggggcggggacu

SEQ ID NO: 1915 - RNA, 17 nt, Artificial Sequence
  Synthetic
ccggguggccgggggcg

SEQ ID NO: 1916 - RNA, 17 nt, Artificial Sequence
  Synthetic
uccggguggccgggggc

SEQ ID NO: 1917 - RNA, 17 nt, Artificial Sequence
  Synthetic
auccggguggccggggg

SEQ ID NO: 1918 - RNA, 17 nt, Artificial Sequence
  Synthetic
gggauccggguggccgg

SEQ ID NO: 1919 - RNA, 17 nt, Artificial Sequence
  Synthetic
ggggauccggguggccg

SEQ ID NO: 1920 - RNA, 17 nt, Artificial Sequence
  Synthetic
cggggauccggguggcc

SEQ ID NO: 1921 - RNA, 17 nt, Artificial Sequence
  Synthetic
gcggggauccggguggc

SEQ ID NO: 1922 - RNA, 17 nt, Artificial Sequence
  Synthetic
aggcgcggggauccggg

SEQ ID NO: 1923 - RNA, 17 nt, Artificial Sequence
  Synthetic
ggaaggcgcggggaucc

SEQ ID NO: 1924 - RNA, 17 nt, Artificial Sequence
  Synthetic
gggaaggcgcggggauc

SEQ ID NO: 1925 - RNA, 17 nt, Artificial Sequence
  Synthetic
cggggcgggaaggcgcg

SEQ ID NO: 1926 - RNA, 17 nt, Artificial Sequence
  Synthetic
gcggggcgggaaggcgc

SEQ ID NO: 1927 - RNA, 17 nt, Artificial Sequence
  Synthetic
ggcggggcgggaaggcg

SEQ ID NO: 1928 - RNA, 17 nt, Artificial Sequence
  Synthetic
cagcuggcggggcggga

SEQ ID NO: 1929 - RNA, 17 nt, Artificial Sequence
  Synthetic
aaaacagcuggcggggc

SEQ ID NO: 1930 - RNA, 17 nt, Artificial Sequence
  Synthetic
aaaaacagcuggcgggg

SEQ ID NO: 1931 - RNA, 17 nt, Artificial Sequence
  Synthetic
caaaaaaacagcuggcg

SEQ ID NO: 1932 - RNA, 17 nt, Artificial Sequence
  Synthetic
ccaaaaaaacagcuggc

SEQ ID NO: 1933 - RNA, 17 nt, Artificial Sequence
  Synthetic
cccaaaaaaacagcugg

SEQ ID NO: 1934 - RNA, 17 nt, Artificial Sequence
  Synthetic
ucccccaaaaaaacagc

SEQ ID NO: 1935 - RNA, 17 nt, Artificial Sequence
  Synthetic
acaggcgcagcaccugg

SEQ ID NO: 1936 - RNA, 17 nt, Artificial Sequence
  Synthetic
gagacaggcgcagcacc

SEQ ID NO: 1937 - RNA, 17 nt, Artificial Sequence
  Synthetic
ucgcguguuccagagac

SEQ ID NO: 1938 - RNA, 17 nt, Artificial Sequence
  Synthetic
cagcgaaggguggcaca

SEQ ID NO: 1939 - RNA, 17 nt, Artificial Sequence
  Synthetic
cguucaucagcgaaggg

SEQ ID NO: 1940 - RNA, 17 nt, Artificial Sequence
  Synthetic
caacguucaucagcgaa

SEQ ID NO: 1941 - RNA, 17 nt, Artificial Sequence
  Synthetic
ucaacguucaucagcga

SEQ ID NO: 1942 - RNA, 17 nt, Artificial Sequence
  Synthetic
cgacggggucgcgguua

SEQ ID NO: 1943 - RNA, 17 nt, Artificial Sequence
  Synthetic
cggcuucgacggggucg

SEQ ID NO: 1944 - RNA, 17 nt, Artificial Sequence
  Synthetic
gauuggcggcuucgacg

SEQ ID NO: 1945 - RNA, 17 nt, Artificial Sequence
  Synthetic
ggauuggcggcuucgac

SEQ ID NO: 1946 - RNA, 17 nt, Artificial Sequence
  Synthetic
cggauuggcggcuucga

SEQ ID NO: 1947 - RNA, 17 nt, Artificial Sequence
  Synthetic
cgccccguacggauugg

SEQ ID NO: 1948 - RNA, 17 nt, Artificial Sequence
  Synthetic
guacgccccguacggau

SEQ ID NO: 1949 - RNA, 17 nt, Artificial Sequence
  Synthetic
gccacguacgccccgua

SEQ ID NO: 1950 - RNA, 17 nt, Artificial Sequence
  Synthetic
ugcggcggggccggccg

SEQ ID NO: 1951 - RNA, 17 nt, Artificial Sequence
  Synthetic
cugcggcggggccggcc

SEQ ID NO: 1952 - RNA, 17 nt, Artificial Sequence
  Synthetic
ucugcggcggggccggc

SEQ ID NO: 1953 - RNA, 17 nt, Artificial Sequence
  Synthetic
caugucugcggcggggc

SEQ ID NO: 1954 - RNA, 17 nt, Artificial Sequence
  Synthetic
gcugcaugucugcggcg

SEQ ID NO: 1955 - RNA, 17 nt, Artificial Sequence
  Synthetic
ugcugcaugucugcggc

SEQ ID NO: 1956 - RNA, 17 nt, Artificial Sequence
  Synthetic
cugcugcaugucugcgg

SEQ ID NO: 1957 - RNA, 17 nt, Artificial Sequence
  Synthetic
cagcugcugcaugucug

SEQ ID NO: 1958 - RNA, 17 nt, Artificial Sequence
  Synthetic
ggccaggcgcugccccc

SEQ ID NO: 1959 - RNA, 17 nt, Artificial Sequence
  Synthetic
ggacccgcccgugggcc

SEQ ID NO: 1960 - RNA, 17 nt, Artificial Sequence
  Synthetic
ccaucggacccgcccgu

SEQ ID NO: 1961 - RNA, 17 nt, Artificial Sequence
  Synthetic
cccaucggacccgcccg

SEQ ID NO: 1962 - RNA, 17 nt, Artificial Sequence
  Synthetic
ggccuuccgcgacccau

SEQ ID NO: 1963 - RNA, 17 nt, Artificial Sequence
  Synthetic
acugcuccggggucauc

SEQ ID NO: 1964 - RNA, 17 nt, Artificial Sequence
  Synthetic
cugcauaaacugcuccg

SEQ ID NO: 1965 - RNA, 17 nt, Artificial Sequence
  Synthetic
gcugcauaaacugcucc

SEQ ID NO: 1966 - RNA, 17 nt, Artificial Sequence
  Synthetic
ggcugcauaaacugcuc

SEQ ID NO: 1967 - RNA, 17 nt, Artificial Sequence
  Synthetic
gccagguuggcguuguc

SEQ ID NO: 1968 - RNA, 17 nt, Artificial Sequence
  Synthetic
agccagguuggcguugu

SEQ ID NO: 1969 - RNA, 17 nt, Artificial Sequence
  Synthetic
cagcucaagagccaggu

SEQ ID NO: 1970 - RNA, 17 nt, Artificial Sequence
  Synthetic
ggugcagcucaagagcc

SEQ ID NO: 1971 - RNA, 17 nt, Artificial Sequence
  Synthetic
caaagaagucgaacgcg

SEQ ID NO: 1972 - RNA, 17 nt, Artificial Sequence
  Synthetic
acaaagaagucgaacgc

SEQ ID NO: 1973 - RNA, 17 nt, Artificial Sequence
  Synthetic
cacaaagaagucgaacg

SEQ ID NO: 1974 - RNA, 17 nt, Artificial Sequence
  Synthetic
ccccggcagcuccacgu

SEQ ID NO: 1975 - RNA, 17 nt, Artificial Sequence
  Synthetic
gggggaacguccccccc

SEQ ID NO: 1976 - RNA, 17 nt, Artificial Sequence
  Synthetic
ucccccgggccggccgg

SEQ ID NO: 1977 - RNA, 17 nt, Artificial Sequence
  Synthetic
cucccccgggccggccg

SEQ ID NO: 1978 - RNA, 17 nt, Artificial Sequence
  Synthetic
ucucccccgggccggcc

SEQ ID NO: 1979 - RNA, 17 nt, Artificial Sequence
  Synthetic
aucucccccgggccggc

SEQ ID NO: 1980 - RNA, 17 nt, Artificial Sequence
  Synthetic
cuggaucucccccgggc

SEQ ID NO: 1981 - RNA, 17 nt, Artificial Sequence
  Synthetic
uggccuggaucuccccc

SEQ ID NO: 1982 - RNA, 17 nt, Artificial Sequence
  Synthetic
guggccuggaucucccc

SEQ ID NO: 1983 - RNA, 17 nt, Artificial Sequence
  Synthetic
ccacgcgccagguggcc

SEQ ID NO: 1984 - RNA, 17 nt, Artificial Sequence
  Synthetic
guucaccacgcgccagg

SEQ ID NO: 1985 - RNA, 17 nt, Artificial Sequence
  Synthetic
gccguucaccacgcgcc

SEQ ID NO: 1986 - RNA, 17 nt, Artificial Sequence
  Synthetic
gccggacauagcgccag

SEQ ID NO: 1987 - RNA, 17 nt, Artificial Sequence
  Synthetic
cgccggacauagcgcca

SEQ ID NO: 1988 - RNA, 17 nt, Artificial Sequence
  Synthetic
ccgccggacauagcgcc

SEQ ID NO: 1989 - RNA, 17 nt, Artificial Sequence
  Synthetic
gcgucccggaacgccgc

SEQ ID NO: 1990 - RNA, 17 nt, Artificial Sequence
  Synthetic
ccaggccccgggcgucc

SEQ ID NO: 1991 - RNA, 17 nt, Artificial Sequence
  Synthetic
ccccagcuccaggcccc

SEQ ID NO: 1992 - RNA, 17 nt, Artificial Sequence
  Synthetic
cccccagcuccaggccc

SEQ ID NO: 1993 - RNA, 17 nt, Artificial Sequence
  Synthetic
gucccacccccagcucc

SEQ ID NO: 1994 - RNA, 17 nt, Artificial Sequence
  Synthetic
uggcgggggccauggcg

SEQ ID NO: 1995 - RNA, 17 nt, Artificial Sequence
  Synthetic
gaugguggcgggggcca

SEQ ID NO: 1996 - RNA, 17 nt, Artificial Sequence
  Synthetic
ggcggcgaugguggcgg

SEQ ID NO: 1997 - RNA, 17 nt, Artificial Sequence
  Synthetic
cggcggcgaugguggcg

SEQ ID NO: 1998 - RNA, 17 nt, Artificial Sequence
  Synthetic
acggcggcgaugguggc

SEQ ID NO: 1999 - RNA, 17 nt, Artificial Sequence
  Synthetic
aacggcggcgauggugg

SEQ ID NO: 2000 - RNA, 17 nt, Artificial Sequence
  Synthetic
gcgaacggcggcgaugg

SEQ ID NO: 2001 - RNA, 17 nt, Artificial Sequence
  Synthetic
cccgcgaacggcggcga

SEQ ID NO: 2002 - RNA, 17 nt, Artificial Sequence
  Synthetic
gaacgccccgcgaacgg

SEQ ID NO: 2003 - RNA, 17 nt, Artificial Sequence
  Synthetic
gucgaacgccccgcgaa

SEQ ID NO: 2004 - RNA, 17 nt, Artificial Sequence
  Synthetic
acaccgccggguaguug

SEQ ID NO: 2005 - RNA, 17 nt, Artificial Sequence
  Synthetic
gcagguaaaacaccgcc

SEQ ID NO: 2006 - RNA, 17 nt, Artificial Sequence
  Synthetic
agcagguaaaacaccgc

SEQ ID NO: 2007 - RNA, 17 nt, Artificial Sequence
  Synthetic
guauggcggccugcagc

SEQ ID NO: 2008 - RNA, 17 nt, Artificial Sequence
  Synthetic
cucgcugccguguaugg

SEQ ID NO: 2009 - RNA, 17 nt, Artificial Sequence
  Synthetic
gugcucgcugccgugua

SEQ ID NO: 2010 - RNA, 17 nt, Artificial Sequence
  Synthetic
gaccacgagccgggcca

SEQ ID NO: 2011 - RNA, 17 nt, Artificial Sequence
  Synthetic
ggaccacgagccgggcc

SEQ ID NO: 2012 - RNA, 17 nt, Artificial Sequence
  Synthetic
gcacuggaccacgagcc

SEQ ID NO: 2013 - RNA, 17 nt, Artificial Sequence
  Synthetic
ugcacuggaccacgagc

SEQ ID NO: 2014 - RNA, 17 nt, Artificial Sequence
  Synthetic
aguagcuggugaugcac

SEQ ID NO: 2015 - RNA, 17 nt, Artificial Sequence
  Synthetic
cguguuguuccaguagc

SEQ ID NO: 2016 - RNA, 17 nt, Artificial Sequence
  Synthetic
aaggucucccccgaggu

SEQ ID NO: 2017 - RNA, 17 nt, Artificial Sequence
  Synthetic
cgggaaggucucccccg

SEQ ID NO: 2018 - RNA, 17 nt, Artificial Sequence
  Synthetic
ccaugcacuccucggga

SEQ ID NO: 2019 - RNA, 17 nt, Artificial Sequence
  Synthetic
acggccaugcacuccuc

SEQ ID NO: 2020 - RNA, 17 nt, Artificial Sequence
  Synthetic
cacggccaugcacuccu

SEQ ID NO: 2021 - RNA, 17 nt, Artificial Sequence
  Synthetic
caccaggucccgguaca

SEQ ID NO: 2022 - RNA, 17 nt, Artificial Sequence
  Synthetic
cgugcgccaccaggucc

SEQ ID NO: 2023 - RNA, 17 nt, Artificial Sequence
  Synthetic
ccucgacgugcgccacc

SEQ ID NO: 2024 - RNA, 17 nt, Artificial Sequence
  Synthetic
aucaaccagcugggcca

SEQ ID NO: 2025 - RNA, 17 nt, Artificial Sequence
  Synthetic
caucaaccagcugggcc

SEQ ID NO: 2026 - RNA, 17 nt, Artificial Sequence
  Synthetic
aaagucaucaaccagcu

SEQ ID NO: 2027 - RNA, 17 nt, Artificial Sequence
  Synthetic
uaaagucaucaaccagc

SEQ ID NO: 2028 - RNA, 17 nt, Artificial Sequence
  Synthetic
cagcuccgggccgguca

SEQ ID NO: 2029 - RNA, 17 nt, Artificial Sequence
  Synthetic
ccagcuccgggccgguc

SEQ ID NO: 2030 - RNA, 17 nt, Artificial Sequence
  Synthetic
cccgcccagcuccgggc

SEQ ID NO: 2031 - RNA, 17 nt, Artificial Sequence
  Synthetic
ccugcccgcccagcucc

SEQ ID NO: 2032 - RNA, 17 nt, Artificial Sequence
  Synthetic
gccugcccgcccagcuc

SEQ ID NO: 2033 - RNA, 17 nt, Artificial Sequence
  Synthetic
cauuaggugauucagcu

SEQ ID NO: 2034 - RNA, 17 nt, Artificial Sequence
  Synthetic
gcgccgggucucgcauu

SEQ ID NO: 2035 - RNA, 17 nt, Artificial Sequence
  Synthetic
gggguggcagcagcgcc

SEQ ID NO: 2036 - RNA, 17 nt, Artificial Sequence
  Synthetic
agggguggcagcagcgc

SEQ ID NO: 2037 - RNA, 17 nt, Artificial Sequence
  Synthetic
cagucccacacgagggg

SEQ ID NO: 2038 - RNA, 17 nt, Artificial Sequence
  Synthetic
ucacagucccacacgag

SEQ ID NO: 2039 - RNA, 17 nt, Artificial Sequence
  Synthetic
gucacagucccacacga

SEQ ID NO: 2040 - RNA, 17 nt, Artificial Sequence
  Synthetic
cgucacagucccacacg

SEQ ID NO: 2041 - RNA, 17 nt, Artificial Sequence
  Synthetic
ggccgcgcgccgcauca

SEQ ID NO: 2042 - RNA, 17 nt, Artificial Sequence
  Synthetic
gggccgcgcgccgcauc

SEQ ID NO: 2043 - RNA, 17 nt, Artificial Sequence
  Synthetic
gucgcgauggcggucca

SEQ ID NO: 2044 - RNA, 17 nt, Artificial Sequence
  Synthetic
agucgcgauggcggucc

SEQ ID NO: 2045 - RNA, 17 nt, Artificial Sequence
  Synthetic
cccggcagucgcgaugg

SEQ ID NO: 2046 - RNA, 17 nt, Artificial Sequence
  Synthetic
uaacccggcagucgcga

SEQ ID NO: 2047 - RNA, 17 nt, Artificial Sequence
  Synthetic
ggccccccgcgcuaacc

SEQ ID NO: 2048 - RNA, 17 nt, Artificial Sequence
  Synthetic
ccgcguacacggggucg

SEQ ID NO: 2049 - RNA, 17 nt, Artificial Sequence
  Synthetic
augccgccgcguacacg

SEQ ID NO: 2050 - RNA, 17 nt, Artificial Sequence
  Synthetic
caugccgccgcguacac

SEQ ID NO: 2051 - RNA, 17 nt, Artificial Sequence
  Synthetic
acaugccgccgcguaca

SEQ ID NO: 2052 - RNA, 17 nt, Artificial Sequence
  Synthetic
guugcgguugaaguccg

SEQ ID NO: 2053 - RNA, 17 nt, Artificial Sequence
  Synthetic
gcagcuggccgucguug

SEQ ID NO: 2054 - RNA, 17 nt, Artificial Sequence
  Synthetic
ggguguugugcagcagc

SEQ ID NO: 2055 - RNA, 17 nt, Artificial Sequence
  Synthetic
guccgcggcucgggccu

SEQ ID NO: 2056 - RNA, 17 nt, Artificial Sequence
  Synthetic
cguccgcggcucgggcc

SEQ ID NO: 2057 - RNA, 17 nt, Artificial Sequence
  Synthetic
cgcggcguccgcggcuc

SEQ ID NO: 2058 - RNA, 17 nt, Artificial Sequence
  Synthetic
ccgcggcguccgcggcu

SEQ ID NO: 2059 - RNA, 17 nt, Artificial Sequence
  Synthetic
gucauccgcggcguccg

SEQ ID NO: 2060 - RNA, 17 nt, Artificial Sequence
  Synthetic
gugcggccggucauccg

SEQ ID NO: 2061 - RNA, 17 nt, Artificial Sequence
  Synthetic
ccgccccccggugcggc

SEQ ID NO: 2062 - RNA, 17 nt, Artificial Sequence
  Synthetic
caguccgccccccggug

SEQ ID NO: 2063 - RNA, 17 nt, Artificial Sequence
  Synthetic
cgguccaguccgccccc

SEQ ID NO: 2064 - RNA, 17 nt, Artificial Sequence
  Synthetic
guaaaucuuguggugca

SEQ ID NO: 2065 - RNA, 17 nt, Artificial Sequence
  Synthetic
cguaguaguaaaucuug

SEQ ID NO: 2066 - RNA, 17 nt, Artificial Sequence
  Synthetic
cggccccgcgagaaggc

SEQ ID NO: 2067 - RNA, 17 nt, Artificial Sequence
  Synthetic
gcggccccgcgagaagg

SEQ ID NO: 2068 - RNA, 17 nt, Artificial Sequence
  Synthetic
gcagcggccccgcgaga

SEQ ID NO: 2069 - RNA, 17 nt, Artificial Sequence
  Synthetic
cccccgcggugcagcag

SEQ ID NO: 2070 - RNA, 17 nt, Artificial Sequence
  Synthetic
gucgaagcgaacccccg

SEQ ID NO: 2071 - RNA, 17 nt, Artificial Sequence
  Synthetic
gcaggguggcguauacg

SEQ ID NO: 2072 - RNA, 17 nt, Artificial Sequence
  Synthetic
caccauguucugcaggg

SEQ ID NO: 2073 - RNA, 17 nt, Artificial Sequence
  Synthetic
gaccaccauguucugca

SEQ ID NO: 2074 - RNA, 17 nt, Artificial Sequence
  Synthetic
ggaccaccauguucugc

SEQ ID NO: 2075 - RNA, 17 nt, Artificial Sequence
  Synthetic
cgccgggggcgaucucc

SEQ ID NO: 2076 - RNA, 17 nt, Artificial Sequence
  Synthetic
ucgccgggggcgaucuc

SEQ ID NO: 2077 - RNA, 17 nt, Artificial Sequence
  Synthetic
ggggcacuccucgccgg

SEQ ID NO: 2078 - RNA, 17 nt, Artificial Sequence
  Synthetic
uggggcacuccucgccg

SEQ ID NO: 2079 - RNA, 17 nt, Artificial Sequence
  Synthetic
cuggggcacuccucgcc

SEQ ID NO: 2080 - RNA, 17 nt, Artificial Sequence
  Synthetic
gcuggggcacuccucgc

SEQ ID NO: 2081 - RNA, 17 nt, Artificial Sequence
  Synthetic
ccgucacggggucgcug

SEQ ID NO: 2082 - RNA, 17 nt, Artificial Sequence
  Synthetic
uccgucacggggucgcu

SEQ ID NO: 2083 - RNA, 17 nt, Artificial Sequence
  Synthetic
guccgucacggggucgc

SEQ ID NO: 2084 - RNA, 17 nt, Artificial Sequence
  Synthetic
gcgcgggguccgucacg

SEQ ID NO: 2085 - RNA, 17 nt, Artificial Sequence
  Synthetic
ugcgcgggguccgucac

SEQ ID NO: 2086 - RNA, 17 nt, Artificial Sequence
  Synthetic
gugcgcgggguccguca

SEQ ID NO: 2087 - RNA, 17 nt, Artificial Sequence
  Synthetic
ggugcagggggugcgcg

SEQ ID NO: 2088 - RNA, 17 nt, Artificial Sequence
  Synthetic
gggugcagggggugcgc

SEQ ID NO: 2089 - RNA, 17 nt, Artificial Sequence
  Synthetic
cgggugcagggggugcg

SEQ ID NO: 2090 - RNA, 17 nt, Artificial Sequence
  Synthetic
gauuggccgggugcagg

SEQ ID NO: 2091 - RNA, 17 nt, Artificial Sequence
  Synthetic
agauuggccgggugcag

SEQ ID NO: 2092 - RNA, 17 nt, Artificial Sequence
  Synthetic
cagauuggccgggugca

SEQ ID NO: 2093 - RNA, 17 nt, Artificial Sequence
  Synthetic
ccagauuggccgggugc

SEQ ID NO: 2094 - RNA, 17 nt, Artificial Sequence
  Synthetic
uggccaccagauuggcc

SEQ ID NO: 2095 - RNA, 17 nt, Artificial Sequence
  Synthetic
uuggccaccagauuggc

SEQ ID NO: 2096 - RNA, 17 nt, Artificial Sequence
  Synthetic
cguguuggccaccagau

SEQ ID NO: 2097 - RNA, 17 nt, Artificial Sequence
  Synthetic
cauggcguugaccgugu

SEQ ID NO: 2098 - RNA, 17 nt, Artificial Sequence
  Synthetic
gcgcccguugugaaaca

SEQ ID NO: 2099 - RNA, 17 nt, Artificial Sequence
  Synthetic
ugcagcgugagcauggc

SEQ ID NO: 2100 - RNA, 17 nt, Artificial Sequence
  Synthetic
cugcagcgugagcaugg

SEQ ID NO: 2101 - RNA, 17 nt, Artificial Sequence
  Synthetic
caccugcagcgugagca

SEQ ID NO: 2102 - RNA, 17 nt, Artificial Sequence
  Synthetic
gcguucggccauguugu

SEQ ID NO: 2103 - RNA, 17 nt, Artificial Sequence
  Synthetic
ugcguucggccauguug

SEQ ID NO: 2104 - RNA, 17 nt, Artificial Sequence
  Synthetic
cagcgccguugugcguu

SEQ ID NO: 2105 - RNA, 17 nt, Artificial Sequence
  Synthetic
guguuggcgcccgcguc

SEQ ID NO: 2106 - RNA, 17 nt, Artificial Sequence
  Synthetic
gguguuggcgcccgcgu

SEQ ID NO: 2107 - RNA, 17 nt, Artificial Sequence
  Synthetic
ggugguggacgcggugu

SEQ ID NO: 2108 - RNA, 17 nt, Artificial Sequence
  Synthetic
cauguuggugguggacg

SEQ ID NO: 2109 - RNA, 17 nt, Artificial Sequence
  Synthetic
uaugcgcauguuggugg

SEQ ID NO: 2110 - RNA, 17 nt, Artificial Sequence
  Synthetic
gaauaugcgcauguugg

SEQ ID NO: 2111 - RNA, 17 nt, Artificial Sequence
  Synthetic
gucgaauaugcgcaugu

SEQ ID NO: 2112 - RNA, 17 nt, Artificial Sequence
  Synthetic
ggccaucagcaggauuc

SEQ ID NO: 2113 - RNA, 17 nt, Artificial Sequence
  Synthetic
gcuggggggccaucagc

SEQ ID NO: 2114 - RNA, 17 nt, Artificial Sequence
  Synthetic
augguccagaugcuggg

SEQ ID NO: 2115 - RNA, 17 nt, Artificial Sequence
  Synthetic
uaugguccagaugcugg

SEQ ID NO: 2116 - RNA, 17 nt, Artificial Sequence
  Synthetic
guaugguccagaugcug

SEQ ID NO: 2117 - RNA, 17 nt, Artificial Sequence
  Synthetic
gguaugguccagaugcu

SEQ ID NO: 2118 - RNA, 17 nt, Artificial Sequence
  Synthetic
ugguaugguccagaugc

SEQ ID NO: 2119 - RNA, 17 nt, Artificial Sequence
  Synthetic
cgccauuuuggauggua

SEQ ID NO: 2120 - RNA, 17 nt, Artificial Sequence
  Synthetic
auagucgccauuuugga

SEQ ID NO: 2121 - RNA, 17 nt, Artificial Sequence
  Synthetic
aaaaauagucgccauuu

SEQ ID NO: 2122 - RNA, 17 nt, Artificial Sequence
  Synthetic
gcgcguggacggggagg

SEQ ID NO: 2123 - RNA, 17 nt, Artificial Sequence
  Synthetic
agcgcguggacggggag

SEQ ID NO: 2124 - RNA, 17 nt, Artificial Sequence
  Synthetic
cagcgcguggacgggga

SEQ ID NO: 2125 - RNA, 17 nt, Artificial Sequence
  Synthetic
acagcgcguggacgggg

SEQ ID NO: 2126 - RNA, 17 nt, Artificial Sequence
  Synthetic
cgaacagcgcguggacg

SEQ ID NO: 2127 - RNA, 17 nt, Artificial Sequence
  Synthetic
gcgaacagcgcguggac

SEQ ID NO: 2128 - RNA, 17 nt, Artificial Sequence
  Synthetic
ggcgaacagcgcgugga

SEQ ID NO: 2129 - RNA, 17 nt, Artificial Sequence
  Synthetic
ccccggcgaacagcgcg

SEQ ID NO: 2130 - RNA, 17 nt, Artificial Sequence
  Synthetic
cgccacguggucggccc

SEQ ID NO: 2131 - RNA, 17 nt, Artificial Sequence
  Synthetic
cgcguucgccacguggu

SEQ ID NO: 2132 - RNA, 17 nt, Artificial Sequence
  Synthetic
ugggcgcguucgccacg

SEQ ID NO: 2133 - RNA, 17 nt, Artificial Sequence
  Synthetic
agggccggggggaaauu

SEQ ID NO: 2134 - RNA, 17 nt, Artificial Sequence
  Synthetic
cagggccggggggaaau

SEQ ID NO: 2135 - RNA, 17 nt, Artificial Sequence
  Synthetic
ggucgcgcagggccggg

SEQ ID NO: 2136 - RNA, 17 nt, Artificial Sequence
  Synthetic
aggucgcgcagggccgg

SEQ ID NO: 2137 - RNA, 17 nt, Artificial Sequence
  Synthetic
caggucgcgcagggccg

SEQ ID NO: 2138 - RNA, 17 nt, Artificial Sequence
  Synthetic
acaggucgcgcagggcc

SEQ ID NO: 2139 - RNA, 17 nt, Artificial Sequence
  Synthetic
gacaggucgcgcagggc

SEQ ID NO: 2140 - RNA, 17 nt, Artificial Sequence
  Synthetic
ccgcgacaggucgcgca

SEQ ID NO: 2141 - RNA, 17 nt, Artificial Sequence
  Synthetic
gccgcgacaggucgcgc

SEQ ID NO: 2142 - RNA, 17 nt, Artificial Sequence
  Synthetic
gggggaccugccgcgac

SEQ ID NO: 2143 - RNA, 17 nt, Artificial Sequence
  Synthetic
gagccggggggaccagg

SEQ ID NO: 2144 - RNA, 17 nt, Artificial Sequence
  Synthetic
agagccggggggaccag

SEQ ID NO: 2145 - RNA, 17 nt, Artificial Sequence
  Synthetic
cagagccggggggacca

SEQ ID NO: 2146 - RNA, 17 nt, Artificial Sequence
  Synthetic
ccagagccggggggacc

SEQ ID NO: 2147 - RNA, 17 nt, Artificial Sequence
  Synthetic
uggcccccagagccggg

SEQ ID NO: 2148 - RNA, 17 nt, Artificial Sequence
  Synthetic
uuggcccccagagccgg

SEQ ID NO: 2149 - RNA, 17 nt, Artificial Sequence
  Synthetic
guuggcccccagagccg

SEQ ID NO: 2150 - RNA, 17 nt, Artificial Sequence
  Synthetic
aguuggcccccagagcc

SEQ ID NO: 2151 - RNA, 17 nt, Artificial Sequence
  Synthetic
uaguuggcccccagagc

SEQ ID NO: 2152 - RNA, 17 nt, Artificial Sequence
  Synthetic
gaucgacgaaaaguagu

SEQ ID NO: 2153 - RNA, 17 nt, Artificial Sequence
  Synthetic
gcugcacgacgggcugu

SEQ ID NO: 2154 - RNA, 17 nt, Artificial Sequence
  Synthetic
cggacgugcugcacgac

SEQ ID NO: 2155 - RNA, 17 nt, Artificial Sequence
  Synthetic
gcggacgugcugcacga

SEQ ID NO: 2156 - RNA, 17 nt, Artificial Sequence
  Synthetic
ccccggccgcgcucucg

SEQ ID NO: 2157 - RNA, 17 nt, Artificial Sequence
  Synthetic
ggucagcgcguucuccc

SEQ ID NO: 2158 - RNA, 17 nt, Artificial Sequence
  Synthetic
ccccgccaugagcgcgu

SEQ ID NO: 2159 - RNA, 17 nt, Artificial Sequence
  Synthetic
ugaugaugcaaggccac

SEQ ID NO: 2160 - RNA, 17 nt, Artificial Sequence
  Synthetic
cugaugaugcaaggcca

SEQ ID NO: 2161 - RNA, 17 nt, Artificial Sequence
  Synthetic
cuugagcugaugaugca

SEQ ID NO: 2162 - RNA, 17 nt, Artificial Sequence
  Synthetic
acccaaacccgggaugg

SEQ ID NO: 2163 - RNA, 17 nt, Artificial Sequence
  Synthetic
ugaacccaaacccggga

SEQ ID NO: 2164 - RNA, 17 nt, Artificial Sequence
  Synthetic
acggugaacccaaaccc

SEQ ID NO: 2165 - RNA, 17 nt, Artificial Sequence
  Synthetic
gacggugaacccaaacc

SEQ ID NO: 2166 - RNA, 17 nt, Artificial Sequence
  Synthetic
gcgguccugucggacga

SEQ ID NO: 2167 - RNA, 17 nt, Artificial Sequence
  Synthetic
ucacaaagcgguccugu

SEQ ID NO: 2168 - RNA, 17 nt, Artificial Sequence
  Synthetic
cguucucagucacaaag

SEQ ID NO: 2169 - RNA, 17 nt, Artificial Sequence
  Synthetic
ccaccuggagcuggccc

SEQ ID NO: 2170 - RNA, 17 nt, Artificial Sequence
  Synthetic
gccgggccaccuggagc

SEQ ID NO: 2171 - RNA, 17 nt, Artificial Sequence
  Synthetic
uuucgugccgggccacc

SEQ ID NO: 2172 - RNA, 17 nt, Artificial Sequence
  Synthetic
cccgccaguuucgugcc

SEQ ID NO: 2173 - RNA, 17 nt, Artificial Sequence
  Synthetic
ccccgccaguuucgugc

SEQ ID NO: 2174 - RNA, 17 nt, Artificial Sequence
  Synthetic
cacguucgcgcgcggcu

SEQ ID NO: 2175 - RNA, 17 nt, Artificial Sequence
  Synthetic
ccacguucgcgcgcggc

SEQ ID NO: 2176 - RNA, 17 nt, Artificial Sequence
  Synthetic
agguccacguucgcgcg

SEQ ID NO: 2177 - RNA, 17 nt, Artificial Sequence
  Synthetic
cgguguagcccacgccc

SEQ ID NO: 2178 - RNA, 17 nt, Artificial Sequence
  Synthetic
ugccguggccacgacgg

SEQ ID NO: 2179 - RNA, 17 nt, Artificial Sequence
  Synthetic
gguugccguggccacga

SEQ ID NO: 2180 - RNA, 17 nt, Artificial Sequence
  Synthetic
guugcggacgguugccg

SEQ ID NO: 2181 - RNA, 17 nt, Artificial Sequence
  Synthetic
ggugacgggguugcgga

SEQ ID NO: 2182 - RNA, 17 nt, Artificial Sequence
  Synthetic
ugucggugacgggguug

SEQ ID NO: 2183 - RNA, 17 nt, Artificial Sequence
  Synthetic
ugcccaugucggugacg

SEQ ID NO: 2184 - RNA, 17 nt, Artificial Sequence
  Synthetic
uugcccaugucggugac

SEQ ID NO: 2185 - RNA, 17 nt, Artificial Sequence
  Synthetic
guugcccaugucgguga

SEQ ID NO: 2186 - RNA, 17 nt, Artificial Sequence
  Synthetic
gggaagguugcccaugu

SEQ ID NO: 2187 - RNA, 17 nt, Artificial Sequence
  Synthetic
gguaaaaguuuugggga

SEQ ID NO: 2188 - RNA, 17 nt, Artificial Sequence
  Synthetic
cccagguaaaaguuuug

SEQ ID NO: 2189 - RNA, 17 nt, Artificial Sequence
  Synthetic
gcccagguaaaaguuuu

SEQ ID NO: 2190 - RNA, 17 nt, Artificial Sequence
  Synthetic
ggcccagguaaaaguuu

SEQ ID NO: 2191 - RNA, 17 nt, Artificial Sequence
  Synthetic
ggggagccccgcggccc

SEQ ID NO: 2192 - RNA, 17 nt, Artificial Sequence
  Synthetic
ggagagggggagccccg

SEQ ID NO: 2193 - RNA, 17 nt, Artificial Sequence
  Synthetic
gcguuguccaggagagg

SEQ ID NO: 2194 - RNA, 17 nt, Artificial Sequence
  Synthetic
cgcguuguccaggagag

SEQ ID NO: 2195 - RNA, 17 nt, Artificial Sequence
  Synthetic
ccgcguuguccaggaga

SEQ ID NO: 2196 - RNA, 17 nt, Artificial Sequence
  Synthetic
gccgcguuguccaggag

SEQ ID NO: 2197 - RNA, 17 nt, Artificial Sequence
  Synthetic
cggcugccgcguugucc

SEQ ID NO: 2198 - RNA, 17 nt, Artificial Sequence
  Synthetic
cgcguuccgcagguaca

SEQ ID NO: 2199 - RNA, 17 nt, Artificial Sequence
  Synthetic
ccacgaccgcguuccgc

SEQ ID NO: 2200 - RNA, 17 nt, Artificial Sequence
  Synthetic
gcugggccggccccagg

SEQ ID NO: 2201 - RNA, 17 nt, Artificial Sequence
  Synthetic
cgggcugggccggcccc

SEQ ID NO: 2202 - RNA, 17 nt, Artificial Sequence
  Synthetic
acggggacgggcugggc

SEQ ID NO: 2203 - RNA, 17 nt, Artificial Sequence
  Synthetic
gaacacggggacgggcu

SEQ ID NO: 2204 - RNA, 17 nt, Artificial Sequence
  Synthetic
cgaacacggggacgggc

SEQ ID NO: 2205 - RNA, 17 nt, Artificial Sequence
  Synthetic
cacccgaacacggggac

SEQ ID NO: 2206 - RNA, 17 nt, Artificial Sequence
  Synthetic
gcacccgaacacgggga

SEQ ID NO: 2207 - RNA, 17 nt, Artificial Sequence
  Synthetic
gggcgcacccgaacacg

SEQ ID NO: 2208 - RNA, 17 nt, Artificial Sequence
  Synthetic
ugggcgcacccgaacac

SEQ ID NO: 2209 - RNA, 17 nt, Artificial Sequence
  Synthetic
cugggcgcacccgaaca

SEQ ID NO: 2210 - RNA, 17 nt, Artificial Sequence
  Synthetic
ugcgcgccgcggcaccu

SEQ ID NO: 2211 - RNA, 17 nt, Artificial Sequence
  Synthetic
cugcgcgccgcggcacc

SEQ ID NO: 2212 - RNA, 17 nt, Artificial Sequence
  Synthetic
uccaucccugcgcgccg

SEQ ID NO: 2213 - RNA, 17 nt, Artificial Sequence
  Synthetic
acacggcguccuggccg

SEQ ID NO: 2214 - RNA, 17 nt, Artificial Sequence
  Synthetic
acucacacacggcgucc

SEQ ID NO: 2215 - RNA, 17 nt, Artificial Sequence
  Synthetic
ggcgauaaacucacaca

SEQ ID NO: 2216 - RNA, 17 nt, Artificial Sequence
  Synthetic
gucggucgacacggggg

SEQ ID NO: 2217 - RNA, 17 nt, Artificial Sequence
  Synthetic
gacgucggucgacacgg

SEQ ID NO: 2218 - RNA, 17 nt, Artificial Sequence
  Synthetic
ugacgucggucgacacg

SEQ ID NO: 2219 - RNA, 17 nt, Artificial Sequence
  Synthetic
uugacgucggucgacac

SEQ ID NO: 2220 - RNA, 17 nt, Artificial Sequence
  Synthetic
guugacgucggucgaca

SEQ ID NO: 2221 - RNA, 17 nt, Artificial Sequence
  Synthetic
gcggaaguaguugacgu

SEQ ID NO: 2222 - RNA, 17 nt, Artificial Sequence
  Synthetic
ggggguugcagggccgg

SEQ ID NO: 2223 - RNA, 17 nt, Artificial Sequence
  Synthetic
cccggggguugcagggc

SEQ ID NO: 2224 - RNA, 17 nt, Artificial Sequence
  Synthetic
cguccccggggguugca

SEQ ID NO: 2225 - RNA, 17 nt, Artificial Sequence
  Synthetic
gcguccccggggguugc

SEQ ID NO: 2226 - RNA, 17 nt, Artificial Sequence
  Synthetic
cggcggcgcguccccgg

SEQ ID NO: 2227 - RNA, 17 nt, Artificial Sequence
  Synthetic
ccggcggcgcguccccg

SEQ ID NO: 2228 - RNA, 17 nt, Artificial Sequence
  Synthetic
cccggcggcgcgucccc

SEQ ID NO: 2229 - RNA, 17 nt, Artificial Sequence
  Synthetic
ccccggcggcgcguccc

SEQ ID NO: 2230 - RNA, 17 nt, Artificial Sequence
  Synthetic
cgcguaaacgcccccgg

SEQ ID NO: 2231 - RNA, 17 nt, Artificial Sequence
  Synthetic
ccccgcguaaacgcccc

SEQ ID NO: 2232 - RNA, 17 nt, Artificial Sequence
  Synthetic
guggucguacaugaggg

SEQ ID NO: 2233 - RNA, 17 nt, Artificial Sequence
  Synthetic
gccguggucguacauga

SEQ ID NO: 2234 - RNA, 17 nt, Artificial Sequence
  Synthetic
ggccguggucguacaug

SEQ ID NO: 2235 - RNA, 17 nt, Artificial Sequence
  Synthetic
acgggucgcucuggccg

SEQ ID NO: 2236 - RNA, 17 nt, Artificial Sequence
  Synthetic
cccgggacgggucgcuc

SEQ ID NO: 2237 - RNA, 17 nt, Artificial Sequence
  Synthetic
ccgcgaaggcccgggac

SEQ ID NO: 2238 - RNA, 17 nt, Artificial Sequence
  Synthetic
gccgcgaaggcccggga

SEQ ID NO: 2239 - RNA, 17 nt, Artificial Sequence
  Synthetic
cguggccgcgaaggccc

SEQ ID NO: 2240 - RNA, 17 nt, Artificial Sequence
  Synthetic
ccguggccgcgaaggcc

SEQ ID NO: 2241 - RNA, 17 nt, Artificial Sequence
  Synthetic
guuggccguggccgcga

SEQ ID NO: 2242 - RNA, 17 nt, Artificial Sequence
  Synthetic
cgcccacggguuggccg

SEQ ID NO: 2243 - RNA, 17 nt, Artificial Sequence
  Synthetic
cugcgacgcccacgggu

SEQ ID NO: 2244 - RNA, 17 nt, Artificial Sequence
  Synthetic
aucgcugcgacgcccac

SEQ ID NO: 2245 - RNA, 17 nt, Artificial Sequence
  Synthetic
aaucgcugcgacgccca

SEQ ID NO: 2246 - RNA, 17 nt, Artificial Sequence
  Synthetic
aggccccguuauagagc

SEQ ID NO: 2247 - RNA, 17 nt, Artificial Sequence
  Synthetic
ggccccguugagguggu

SEQ ID NO: 2248 - RNA, 17 nt, Artificial Sequence
  Synthetic
gcgaggccccguugagg

SEQ ID NO: 2249 - RNA, 17 nt, Artificial Sequence
  Synthetic
ccggcgaggccccguug

SEQ ID NO: 2250 - RNA, 17 nt, Artificial Sequence
  Synthetic
ggggcugagcaccggcg

SEQ ID NO: 2251 - RNA, 17 nt, Artificial Sequence
  Synthetic
aagcaggggcugagcac

SEQ ID NO: 2252 - RNA, 17 nt, Artificial Sequence
  Synthetic
uaaagaacuuaaagcag

SEQ ID NO: 2253 - RNA, 17 nt, Artificial Sequence
  Synthetic
guaaagaacuuaaagca

SEQ ID NO: 2254 - RNA, 17 nt, Artificial Sequence
  Synthetic
cguaaagaacuuaaagc

SEQ ID NO: 2255 - RNA, 17 nt, Artificial Sequence
  Synthetic
auguuuggcggcgaugu

SEQ ID NO: 2256 - RNA, 17 nt, Artificial Sequence
  Synthetic
caggcagcgauguuugg

SEQ ID NO: 2257 - RNA, 17 nt, Artificial Sequence
  Synthetic
cuccaggcagcgauguu

SEQ ID NO: 2258 - RNA, 17 nt, Artificial Sequence
  Synthetic
ccacgaucaggcgcucc

SEQ ID NO: 2259 - RNA, 17 nt, Artificial Sequence
  Synthetic
aacccgucuccacgauc

SEQ ID NO: 2260 - RNA, 17 nt, Artificial Sequence
  Synthetic
gcuggcggcgguggccg

SEQ ID NO: 2261 - RNA, 17 nt, Artificial Sequence
  Synthetic
uacgucgcuggcggcgg

SEQ ID NO: 2262 - RNA, 17 nt, Artificial Sequence
  Synthetic
cuguacgucgcuggcgg

SEQ ID NO: 2263 - RNA, 17 nt, Artificial Sequence
  Synthetic
aaacuguacgucgcugg

SEQ ID NO: 2264 - RNA, 17 nt, Artificial Sequence
  Synthetic
cuuaaacuguacgucgc

SEQ ID NO: 2265 - RNA, 17 nt, Artificial Sequence
  Synthetic
guucgcggcaccccggg

SEQ ID NO: 2266 - RNA, 17 nt, Artificial Sequence
  Synthetic
aguucgcggcaccccgg

SEQ ID NO: 2267 - RNA, 17 nt, Artificial Sequence
  Synthetic
gaguucgcggcaccccg

SEQ ID NO: 2268 - RNA, 17 nt, Artificial Sequence
  Synthetic
cgaguucgcggcacccc

SEQ ID NO: 2269 - RNA, 17 nt, Artificial Sequence
  Synthetic
acgaguucgcggcaccc

SEQ ID NO: 2270 - RNA, 17 nt, Artificial Sequence
  Synthetic
gguccuccacgaguucg

SEQ ID NO: 2271 - RNA, 17 nt, Artificial Sequence
  Synthetic
ccugaaacaggccacac

SEQ ID NO: 2272 - RNA, 17 nt, Artificial Sequence
  Synthetic
uccugaaacaggccaca

SEQ ID NO: 2273 - RNA, 17 nt, Artificial Sequence
  Synthetic
gguaggccuccugaaac

SEQ ID NO: 2274 - RNA, 17 nt, Artificial Sequence
  Synthetic
ggcgcaggugagcgggu

SEQ ID NO: 2275 - RNA, 17 nt, Artificial Sequence
  Synthetic
cgcuggcgcaggugagc

SEQ ID NO: 2276 - RNA, 17 nt, Artificial Sequence
  Synthetic
ucgcuggcgcaggugag

SEQ ID NO: 2277 - RNA, 17 nt, Artificial Sequence
  Synthetic
ggcggggucgcuggcgc

SEQ ID NO: 2278 - RNA, 17 nt, Artificial Sequence
  Synthetic
gaggagggcggggucgc

SEQ ID NO: 2279 - RNA, 17 nt, Artificial Sequence
  Synthetic
cacugcggaggagggcg

SEQ ID NO: 2280 - RNA, 17 nt, Artificial Sequence
  Synthetic
gcacugcggaggagggc

SEQ ID NO: 2281 - RNA, 17 nt, Artificial Sequence
  Synthetic
ggcacugcggaggaggg

SEQ ID NO: 2282 - RNA, 17 nt, Artificial Sequence
  Synthetic
gcgggcacugcggagga

SEQ ID NO: 2283 - RNA, 17 nt, Artificial Sequence
  Synthetic
ugcgggcacugcggagg

SEQ ID NO: 2284 - RNA, 17 nt, Artificial Sequence
  Synthetic
cguugcgggcacugcgg

SEQ ID NO: 2285 - RNA, 17 nt, Artificial Sequence
  Synthetic
ccccguugcgggcacug

SEQ ID NO: 2286 - RNA, 17 nt, Artificial Sequence
  Synthetic
gugggcuuccccguugc

SEQ ID NO: 2287 - RNA, 17 nt, Artificial Sequence
  Synthetic
cgugggcuuccccguug

SEQ ID NO: 2288 - RNA, 17 nt, Artificial Sequence
  Synthetic
gugggucucccgcgcgu

SEQ ID NO: 2289 - RNA, 17 nt, Artificial Sequence
  Synthetic
agugggucucccgcgcg

SEQ ID NO: 2290 - RNA, 17 nt, Artificial Sequence
  Synthetic
gagauacugcgcgaagu

SEQ ID NO: 2291 - RNA, 17 nt, Artificial Sequence
  Synthetic
cgagauacugcgcgaag

SEQ ID NO: 2292 - RNA, 17 nt, Artificial Sequence
  Synthetic
agccagucccuugagcg

SEQ ID NO: 2293 - RNA, 17 nt, Artificial Sequence
  Synthetic
gagccagucccuugagc

SEQ ID NO: 2294 - RNA, 17 nt, Artificial Sequence
  Synthetic
agagccagucccuugag

SEQ ID NO: 2295 - RNA, 20 nt, Artificial Sequence
  Synthetic
ccgcucccaaccgcgacccu

SEQ ID NO: 2296 - RNA, 20 nt, Artificial Sequence
  Synthetic
ugccgcggccauggugccga

SEQ ID NO: 2297 - RNA, 20 nt, Artificial Sequence
  Synthetic
cgggucccuccuuagcacga

SEQ ID NO: 2298 - RNA, 20 nt, Artificial Sequence
  Synthetic
ugcaaacagccuguacgacg

SEQ ID NO: 2299 - RNA, 20 nt, Artificial Sequence
  Synthetic
acgucgaguucgacgcccug

SEQ ID NO: 2300 - RNA, 20 nt, Artificial Sequence
  Synthetic
cccugucgcucgugcgcuuu

SEQ ID NO: 2301 - RNA, 20 nt, Artificial Sequence
  Synthetic
gcucgugcgcuuucuggagc

SEQ ID NO: 2302 - RNA, 20 nt, Artificial Sequence
  Synthetic
cgugcguguguaccaaguuu

SEQ ID NO: 2303 - RNA, 20 nt, Artificial Sequence
  Synthetic
aguuuccggagcuggccuac

SEQ ID NO: 2304 - RNA, 20 nt, Artificial Sequence
  Synthetic
uccggagcuggccuacauga

SEQ ID NO: 2305 - RNA, 20 nt, Artificial Sequence
  Synthetic
cggagcuggccuacaugaac

SEQ ID NO: 2306 - RNA, 20 nt, Artificial Sequence
  Synthetic
gaacgaggggcgcguacagu

SEQ ID NO: 2307 - RNA, 20 nt, Artificial Sequence
  Synthetic
ccgcgacggcccgcacccca

SEQ ID NO: 2308 - RNA, 20 nt, Artificial Sequence
  Synthetic
augaccaagauuaucgaccg

SEQ ID NO: 2309 - RNA, 20 nt, Artificial Sequence
  Synthetic
agauuaucgaccgccgggcc

SEQ ID NO: 2310 - RNA, 20 nt, Artificial Sequence
  Synthetic
cgccgccuucagccuggcca

SEQ ID NO: 2311 - RNA, 20 nt, Artificial Sequence
  Synthetic
ccgaggccaucgcccugcuc

SEQ ID NO: 2312 - RNA, 20 nt, Artificial Sequence
  Synthetic
cccugcucacgggggaggcc

SEQ ID NO: 2313 - RNA, 20 nt, Artificial Sequence
  Synthetic
gcucacgggggaggcccugg

SEQ ID NO: 2314 - RNA, 20 nt, Artificial Sequence
  Synthetic
cgggggaggcccuggacggg

SEQ ID NO: 2315 - RNA, 17 nt, Artificial Sequence
  Synthetic
cucccaaccgcgacccu

SEQ ID NO: 2316 - RNA, 17 nt, Artificial Sequence
  Synthetic
cgcggccauggugccga

SEQ ID NO: 2317 - RNA, 17 nt, Artificial Sequence
  Synthetic
gucccuccuuagcacga

SEQ ID NO: 2318 - RNA, 17 nt, Artificial Sequence
  Synthetic
aaacagccuguacgacg

SEQ ID NO: 2319 - RNA, 17 nt, Artificial Sequence
  Synthetic
ucgaguucgacgcccug

SEQ ID NO: 2320 - RNA, 17 nt, Artificial Sequence
  Synthetic
ugucgcucgugcgcuuu

SEQ ID NO: 2321 - RNA, 17 nt, Artificial Sequence
  Synthetic
cgugcgcuuucuggagc

SEQ ID NO: 2322 - RNA, 17 nt, Artificial Sequence
  Synthetic
gcguguguaccaaguuu

SEQ ID NO: 2323 - RNA, 17 nt, Artificial Sequence
  Synthetic
uuccggagcuggccuac

SEQ ID NO: 2324 - RNA, 17 nt, Artificial Sequence
  Synthetic
ggagcuggccuacauga

SEQ ID NO: 2325 - RNA, 17 nt, Artificial Sequence
  Synthetic
agcuggccuacaugaac

SEQ ID NO: 2326 - RNA, 17 nt, Artificial Sequence
  Synthetic
cgaggggcgcguacagu

SEQ ID NO: 2327 - RNA, 17 nt, Artificial Sequence
  Synthetic
cgacggcccgcacccca

SEQ ID NO: 2328 - RNA, 17 nt, Artificial Sequence
  Synthetic
accaagauuaucgaccg

SEQ ID NO: 2329 - RNA, 17 nt, Artificial Sequence
  Synthetic
uuaucgaccgccgggcc

SEQ ID NO: 2330 - RNA, 17 nt, Artificial Sequence
  Synthetic
cgccuucagccuggcca

SEQ ID NO: 2331 - RNA, 17 nt, Artificial Sequence
  Synthetic
aggccaucgcccugcuc

SEQ ID NO: 2332 - RNA, 17 nt, Artificial Sequence
  Synthetic
ugcucacgggggaggcc

SEQ ID NO: 2333 - RNA, 17 nt, Artificial Sequence
  Synthetic
cacgggggaggcccugg

SEQ ID NO: 2334 - RNA, 17 nt, Artificial Sequence
  Synthetic
gggaggcccuggacggg

SEQ ID NO: 2335 - RNA, 20 nt, Artificial Sequence
  Synthetic
gguaucccggagggucgcgg

SEQ ID NO: 2336 - RNA, 20 nt, Artificial Sequence
  Synthetic
cgcggcauaccgguaucccg

SEQ ID NO: 2337 - RNA, 20 nt, Artificial Sequence
  Synthetic
ggccgcggcauaccgguauc

SEQ ID NO: 2338 - RNA, 20 nt, Artificial Sequence
  Synthetic
gccaccucgaucgugcuaag

SEQ ID NO: 2339 - RNA, 20 nt, Artificial Sequence
  Synthetic
gacgccaccucgaucgugcu

SEQ ID NO: 2340 - RNA, 20 nt, Artificial Sequence
  Synthetic
cuguuugcaucggagcgcac

SEQ ID NO: 2341 - RNA, 20 nt, Artificial Sequence
  Synthetic
cgucguacaggcuguuugca

SEQ ID NO: 2342 - RNA, 20 nt, Artificial Sequence
  Synthetic
aauacgaccccagcagggcg

SEQ ID NO: 2343 - RNA, 20 nt, Artificial Sequence
  Synthetic
guguugcaauacgaccccag

SEQ ID NO: 2344 - RNA, 20 nt, Artificial Sequence
  Synthetic
uccagaaagcgcacgagcga

SEQ ID NO: 2345 - RNA, 20 nt, Artificial Sequence
  Synthetic
acccgagcuccagaaagcgc

SEQ ID NO: 2346 - RNA, 20 nt, Artificial Sequence
  Synthetic
gccaccgacaacccgagcuc

SEQ ID NO: 2347 - RNA, 20 nt, Artificial Sequence
  Synthetic
acacgcacgccaccgacaac

SEQ ID NO: 2348 - RNA, 20 nt, Artificial Sequence
  Synthetic
cucguucauguaggccagcu

SEQ ID NO: 2349 - RNA, 20 nt, Artificial Sequence
  Synthetic
caaucagcggcugguggacc

SEQ ID NO: 2350 - RNA, 20 nt, Artificial Sequence
  Synthetic
ucgcgggcaaucagcggcug

SEQ ID NO: 2351 - RNA, 20 nt, Artificial Sequence
  Synthetic
ucgauggggugcgggccguc

SEQ ID NO: 2352 - RNA, 20 nt, Artificial Sequence
  Synthetic
uguggguugcucgauggggu

SEQ ID NO: 2353 - RNA, 20 nt, Artificial Sequence
  Synthetic
aauuguguguggguugcucg

SEQ ID NO: 2354 - RNA, 20 nt, Artificial Sequence
  Synthetic
ucuuggucauguaauugugu

SEQ ID NO: 2355 - RNA, 20 nt, Artificial Sequence
  Synthetic
gccaggcugaaggcggcguu

SEQ ID NO: 2356 - RNA, 20 nt, Artificial Sequence
  Synthetic
cgauggccucgguggccagg

SEQ ID NO: 2357 - RNA, 20 nt, Artificial Sequence
  Synthetic
uccagggccucccccgugag

SEQ ID NO: 2358 - RNA, 20 nt, Artificial Sequence
  Synthetic
ucccguccagggccuccccc

SEQ ID NO: 2359 - RNA, 20 nt, Artificial Sequence
  Synthetic
gcgccgauacccgucccguc

SEQ ID NO: 2360 - RNA, 17 nt, Artificial Sequence
  Synthetic
aucccggagggucgcgg

SEQ ID NO: 2361 - RNA, 17 nt, Artificial Sequence
  Synthetic
ggcauaccgguaucccg

SEQ ID NO: 2362 - RNA, 17 nt, Artificial Sequence
  Synthetic
cgcggcauaccgguauc

SEQ ID NO: 2363 - RNA, 17 nt, Artificial Sequence
  Synthetic
accucgaucgugcuaag

SEQ ID NO: 2364 - RNA, 17 nt, Artificial Sequence
  Synthetic
gccaccucgaucgugcu

SEQ ID NO: 2365 - RNA, 17 nt, Artificial Sequence
  Synthetic
uuugcaucggagcgcac

SEQ ID NO: 2366 - RNA, 17 nt, Artificial Sequence
  Synthetic
cguacaggcuguuugca

SEQ ID NO: 2367 - RNA, 17 nt, Artificial Sequence
  Synthetic
acgaccccagcagggcg

SEQ ID NO: 2368 - RNA, 17 nt, Artificial Sequence
  Synthetic
uugcaauacgaccccag

SEQ ID NO: 2369 - RNA, 17 nt, Artificial Sequence
  Synthetic
agaaagcgcacgagcga

SEQ ID NO: 2370 - RNA, 17 nt, Artificial Sequence
  Synthetic
cgagcuccagaaagcgc

SEQ ID NO: 2371 - RNA, 17 nt, Artificial Sequence
  Synthetic
accgacaacccgagcuc

SEQ ID NO: 2372 - RNA, 17 nt, Artificial Sequence
  Synthetic
cgcacgccaccgacaac

SEQ ID NO: 2373 - RNA, 17 nt, Artificial Sequence
  Synthetic
guucauguaggccagcu

SEQ ID NO: 2374 - RNA, 17 nt, Artificial Sequence
  Synthetic
ucagcggcugguggacc

SEQ ID NO: 2375 - RNA, 17 nt, Artificial Sequence
  Synthetic
cgggcaaucagcggcug

SEQ ID NO: 2376 - RNA, 17 nt, Artificial Sequence
  Synthetic
auggggugcgggccguc

SEQ ID NO: 2377 - RNA, 17 nt, Artificial Sequence
  Synthetic
ggguugcucgauggggu

SEQ ID NO: 2378 - RNA, 17 nt, Artificial Sequence
  Synthetic
uguguguggguugcucg

SEQ ID NO: 2379 - RNA, 17 nt, Artificial Sequence
  Synthetic
uggucauguaauugugu

SEQ ID NO: 2380 - RNA, 17 nt, Artificial Sequence
  Synthetic
aggcugaaggcggcguu

SEQ ID NO: 2381 - RNA, 17 nt, Artificial Sequence
  Synthetic
uggccucgguggccagg

SEQ ID NO: 2382 - RNA, 17 nt, Artificial Sequence
  Synthetic
agggccucccccgugag

SEQ ID NO: 2383 - RNA, 17 nt, Artificial Sequence
  Synthetic
cguccagggccuccccc

SEQ ID NO: 2384 - RNA, 17 nt, Artificial Sequence
  Synthetic
ccgauacccgucccguc

SEQ ID NO: 2385 - RNA, 20 nt, Artificial Sequence
  Synthetic
ccaggccguccucggggcgu

SEQ ID NO: 2386 - RNA, 20 nt, Artificial Sequence
  Synthetic
accagaugcugcacgugcug

SEQ ID NO: 2387 - RNA, 20 nt, Artificial Sequence
  Synthetic
uguugccgaugcaacgauac

SEQ ID NO: 2388 - RNA, 20 nt, Artificial Sequence
  Synthetic
gacaacggccgccuggccac

SEQ ID NO: 2389 - RNA, 20 nt, Artificial Sequence
  Synthetic
cgccuggccaccaggguggc

SEQ ID NO: 2390 - RNA, 20 nt, Artificial Sequence
  Synthetic
ggcccgggcgacccuggucg

SEQ ID NO: 2391 - RNA, 20 nt, Artificial Sequence
  Synthetic
acccuggucgccgagcuaaa

SEQ ID NO: 2392 - RNA, 20 nt, Artificial Sequence
  Synthetic
cgagcuaaagcgaagcuucu

SEQ ID NO: 2393 - RNA, 20 nt, Artificial Sequence
  Synthetic
uaaagcgaagcuucugcgag

SEQ ID NO: 2394 - RNA, 20 nt, Artificial Sequence
  Synthetic
ucugcgagacgagcuuuuuc

SEQ ID NO: 2395 - RNA, 20 nt, Artificial Sequence
  Synthetic
cgagcuuuuuccugggcaag

SEQ ID NO: 2396 - RNA, 20 nt, Artificial Sequence
  Synthetic
cugggcaaggcgggccaccg

SEQ ID NO: 2397 - RNA, 20 nt, Artificial Sequence
  Synthetic
gggccaccgccgggaggccg

SEQ ID NO: 2398 - RNA, 20 nt, Artificial Sequence
  Synthetic
aggccgucgaggccuggcuc

SEQ ID NO: 2399 - RNA, 20 nt, Artificial Sequence
  Synthetic
ucugacgcaugccgacacgc

SEQ ID NO: 2400 - RNA, 20 nt, Artificial Sequence
  Synthetic
cacgcgcgggcggccggucg

SEQ ID NO: 2401 - RNA, 20 nt, Artificial Sequence
  Synthetic
agcgccuccugcaguccuuc

SEQ ID NO: 2402 - RNA, 20 nt, Artificial Sequence
  Synthetic
uccugcaguccuuccugaaa

SEQ ID NO: 2403 - RNA, 20 nt, Artificial Sequence
  Synthetic
ugcaguccuuccugaaagug

SEQ ID NO: 2404 - RNA, 20 nt, Artificial Sequence
  Synthetic
cuuccugaaaguggaggaca

SEQ ID NO: 2405 - RNA, 20 nt, Artificial Sequence
  Synthetic
cgacgugccggugacguacg

SEQ ID NO: 2406 - RNA, 20 nt, Artificial Sequence
  Synthetic
ugacguacggcgagaugguc

SEQ ID NO: 2407 - RNA, 20 nt, Artificial Sequence
  Synthetic
guacggcgagaugguccuga

SEQ ID NO: 2408 - RNA, 20 nt, Artificial Sequence
  Synthetic
accuggucacggcgcucgug

SEQ ID NO: 2409 - RNA, 20 nt, Artificial Sequence
  Synthetic
cucgugaugggcaaggccgu

SEQ ID NO: 2410 - RNA, 20 nt, Artificial Sequence
  Synthetic
ugggcaaggccgugcgaagu

SEQ ID NO: 2411 - RNA, 20 nt, Artificial Sequence
  Synthetic
ccgugcgaagucuggacgac

SEQ ID NO: 2412 - RNA, 20 nt, Artificial Sequence
  Synthetic
acgacgugggccgccaccug

SEQ ID NO: 2413 - RNA, 20 nt, Artificial Sequence
  Synthetic
gccgccaccugcuggagaug

SEQ ID NO: 2414 - RNA, 20 nt, Artificial Sequence
  Synthetic
gccaccugcuggagaugcag

SEQ ID NO: 2415 - RNA, 20 nt, Artificial Sequence
  Synthetic
ugcaggaggagcagcucgac

SEQ ID NO: 2416 - RNA, 20 nt, Artificial Sequence
  Synthetic
ucgaccugaaccggcagacg

SEQ ID NO: 2417 - RNA, 20 nt, Artificial Sequence
  Synthetic
ccugaaccggcagacgcugg

SEQ ID NO: 2418 - RNA, 20 nt, Artificial Sequence
  Synthetic
ccggcagacgcuggacgagc

SEQ ID NO: 2419 - RNA, 20 nt, Artificial Sequence
  Synthetic
ggcagacgcuggacgagcuc

SEQ ID NO: 2420 - RNA, 20 nt, Artificial Sequence
  Synthetic
cccagacgacgcgcgugcgc

SEQ ID NO: 2421 - RNA, 20 nt, Artificial Sequence
  Synthetic
cgcggaucugguguccaucg

SEQ ID NO: 2422 - RNA, 20 nt, Artificial Sequence
  Synthetic
cggaucugguguccaucggc

SEQ ID NO: 2423 - RNA, 20 nt, Artificial Sequence
  Synthetic
ucggcgagaagcuggucuuu

SEQ ID NO: 2424 - RNA, 20 nt, Artificial Sequence
  Synthetic
agcuggucuuucuggaggcc

SEQ ID NO: 2425 - RNA, 20 nt, Artificial Sequence
  Synthetic
uggucuuucuggaggcccug

SEQ ID NO: 2426 - RNA, 20 nt, Artificial Sequence
  Synthetic
ccaacguucccuacccccug

SEQ ID NO: 2427 - RNA, 20 nt, Artificial Sequence
  Synthetic
ccuacccccuggugggcgcc

SEQ ID NO: 2428 - RNA, 20 nt, Artificial Sequence
  Synthetic
accugacguucguccugccc

SEQ ID NO: 2429 - RNA, 20 nt, Artificial Sequence
  Synthetic
ugggccuguucaauccgguc

SEQ ID NO: 2430 - RNA, 20 nt, Artificial Sequence
  Synthetic
ggaacgguuugccgcgcacg

SEQ ID NO: 2431 - RNA, 20 nt, Artificial Sequence
  Synthetic
uaguccccgcccccggccac

SEQ ID NO: 2432 - RNA, 20 nt, Artificial Sequence
  Synthetic
ccgccccgccagcuguuuuu

SEQ ID NO: 2433 - RNA, 20 nt, Artificial Sequence
  Synthetic
gccagcuguuuuuuuggggg

SEQ ID NO: 2434 - RNA, 20 nt, Artificial Sequence
  Synthetic
gccaggugcugcgccugucu

SEQ ID NO: 2435 - RNA, 20 nt, Artificial Sequence
  Synthetic
ccugucucuggaacacgcga

SEQ ID NO: 2436 - RNA, 20 nt, Artificial Sequence
  Synthetic
ccgugugccacccuucgcug

SEQ ID NO: 2437 - RNA, 20 nt, Artificial Sequence
  Synthetic
gaugaacguugacgcggcgg

SEQ ID NO: 2438 - RNA, 20 nt, Artificial Sequence
  Synthetic
gggccuuaaccgcgaccccg

SEQ ID NO: 2439 - RNA, 20 nt, Artificial Sequence
  Synthetic
cgucgaagccgccaauccgu

SEQ ID NO: 2440 - RNA, 20 nt, Artificial Sequence
  Synthetic
cagacaugcagcagcuguuu

SEQ ID NO: 2441 - RNA, 20 nt, Artificial Sequence
  Synthetic
cagcagcuguuuuugaacgc

SEQ ID NO: 2442 - RNA, 20 nt, Artificial Sequence
  Synthetic
cugggggcagcgccuggccc

SEQ ID NO: 2443 - RNA, 20 nt, Artificial Sequence
  Synthetic
gggcagcgccuggcccacgg

SEQ ID NO: 2444 - RNA, 20 nt, Artificial Sequence
  Synthetic
cuggcccacgggcggguccg

SEQ ID NO: 2445 - RNA, 20 nt, Artificial Sequence
  Synthetic
acgggcggguccgauggguc

SEQ ID NO: 2446 - RNA, 20 nt, Artificial Sequence
  Synthetic
ucgcggaaggccagaugacc

SEQ ID NO: 2447 - RNA, 20 nt, Artificial Sequence
  Synthetic
cgacaacgccaaccuggcuc

SEQ ID NO: 2448 - RNA, 20 nt, Artificial Sequence
  Synthetic
accccgcguucgacuucuuu

SEQ ID NO: 2449 - RNA, 20 nt, Artificial Sequence
  Synthetic
ucuuuguggggguggccgac

SEQ ID NO: 2450 - RNA, 20 nt, Artificial Sequence
  Synthetic
ggguggccgacguggagcug

SEQ ID NO: 2451 - RNA, 20 nt, Artificial Sequence
  Synthetic
gggacguucccccggccggc

SEQ ID NO: 2452 - RNA, 20 nt, Artificial Sequence
  Synthetic
uccaggccaccuggcgcgug

SEQ ID NO: 2453 - RNA, 20 nt, Artificial Sequence
  Synthetic
gcgcuauguccggcggcguu

SEQ ID NO: 2454 - RNA, 20 nt, Artificial Sequence
  Synthetic
ccggcggcguuccgggacgc

SEQ ID NO: 2455 - RNA, 20 nt, Artificial Sequence
  Synthetic
cguuccgggacgcccggggc

SEQ ID NO: 2456 - RNA, 20 nt, Artificial Sequence
  Synthetic
gggacgcccggggccuggag

SEQ ID NO: 2457 - RNA, 20 nt, Artificial Sequence
  Synthetic
cccggggccuggagcugggg

SEQ ID NO: 2458 - RNA, 20 nt, Artificial Sequence
  Synthetic
cgccaccaucgccgccguuc

SEQ ID NO: 2459 - RNA, 20 nt, Artificial Sequence
  Synthetic
gcaggccgccauacacggca

SEQ ID NO: 2460 - RNA, 20 nt, Artificial Sequence
  Synthetic
guccagugcaucaccagcua

SEQ ID NO: 2461 - RNA, 20 nt, Artificial Sequence
  Synthetic
acacgcggugcgcggcguuc

SEQ ID NO: 2462 - RNA, 20 nt, Artificial Sequence
  Synthetic
cucguacgucgugaccuacc

SEQ ID NO: 2463 - RNA, 20 nt, Artificial Sequence
  Synthetic
cuaccucgggggagaccuuc

SEQ ID NO: 2464 - RNA, 20 nt, Artificial Sequence
  Synthetic
accucgggggagaccuuccc

SEQ ID NO: 2465 - RNA, 20 nt, Artificial Sequence
  Synthetic
gaggagugcauggccgugua

SEQ ID NO: 2466 - RNA, 20 nt, Artificial Sequence
  Synthetic
ccgggaccugguggcgcacg

SEQ ID NO: 2467 - RNA, 20 nt, Artificial Sequence
  Synthetic
augacuuuacccugaccggc

SEQ ID NO: 2468 - RNA, 20 nt, Artificial Sequence
  Synthetic
uuacccugaccggcccggag

SEQ ID NO: 2469 - RNA, 20 nt, Artificial Sequence
  Synthetic
ccugaccggcccggagcugg

SEQ ID NO: 2470 - RNA, 20 nt, Artificial Sequence
  Synthetic
gcugggcgggcaggcgcaag

SEQ ID NO: 2471 - RNA, 20 nt, Artificial Sequence
  Synthetic
gcgggcaggcgcaagccgag

SEQ ID NO: 2472 - RNA, 20 nt, Artificial Sequence
  Synthetic
gccgagcugaaucaccuaau

SEQ ID NO: 2473 - RNA, 20 nt, Artificial Sequence
  Synthetic
gcgcugcugccaccccucgu

SEQ ID NO: 2474 - RNA, 20 nt, Artificial Sequence
  Synthetic
cccugaugcggcgcgcggcc

SEQ ID NO: 2475 - RNA, 20 nt, Artificial Sequence
  Synthetic
cuggaccgccaucgcgacug

SEQ ID NO: 2476 - RNA, 20 nt, Artificial Sequence
  Synthetic
aucgcgacugccggguuagc

SEQ ID NO: 2477 - RNA, 20 nt, Artificial Sequence
  Synthetic
cggcauguaacguggcgacc

SEQ ID NO: 2478 - RNA, 20 nt, Artificial Sequence
  Synthetic
cugcugcacaacacccaggc

SEQ ID NO: 2479 - RNA, 20 nt, Artificial Sequence
  Synthetic
acaacacccaggcccgagcc

SEQ ID NO: 2480 - RNA, 20 nt, Artificial Sequence
  Synthetic
aggcccgagccgcggacgcc

SEQ ID NO: 2481 - RNA, 20 nt, Artificial Sequence
  Synthetic
gccgcggaugaccggccgca

SEQ ID NO: 2482 - RNA, 20 nt, Artificial Sequence
  Synthetic
augaccggccgcaccggggg

SEQ ID NO: 2483 - RNA, 20 nt, Artificial Sequence
  Synthetic
cggccgcaccggggggcgga

SEQ ID NO: 2484 - RNA, 20 nt, Artificial Sequence
  Synthetic
gugauggugcccgccuucuc

SEQ ID NO: 2485 - RNA, 20 nt, Artificial Sequence
  Synthetic
cgcggggccgcugcugcacc

SEQ ID NO: 2486 - RNA, 20 nt, Artificial Sequence
  Synthetic
accgcguauacgccacccug

SEQ ID NO: 2487 - RNA, 20 nt, Artificial Sequence
  Synthetic
cccugcagaacauggugguc

SEQ ID NO: 2488 - RNA, 20 nt, Artificial Sequence
  Synthetic
ggucccggagaucgcccccg

SEQ ID NO: 2489 - RNA, 20 nt, Artificial Sequence
  Synthetic
ucccggagaucgcccccggc

SEQ ID NO: 2490 - RNA, 20 nt, Artificial Sequence
  Synthetic
agugccccagcgaccccgug

SEQ ID NO: 2491 - RNA, 20 nt, Artificial Sequence
  Synthetic
ggucaacgccauguuucaca

SEQ ID NO: 2492 - RNA, 20 nt, Artificial Sequence
  Synthetic
uucacaacgggcgcguggua

SEQ ID NO: 2493 - RNA, 20 nt, Artificial Sequence
  Synthetic
caacgggcgcgugguagugg

SEQ ID NO: 2494 - RNA, 20 nt, Artificial Sequence
  Synthetic
ggugcuggcccacaacaugg

SEQ ID NO: 2495 - RNA, 20 nt, Artificial Sequence
  Synthetic
ucugcucggcggcgcccgac

SEQ ID NO: 2496 - RNA, 20 nt, Artificial Sequence
  Synthetic
caccaacaugcgcauauucg

SEQ ID NO: 2497 - RNA, 20 nt, Artificial Sequence
  Synthetic
auucgacggggcguugcacg

SEQ ID NO: 2498 - RNA, 20 nt, Artificial Sequence
  Synthetic
ugcugauggccccccagcau

SEQ ID NO: 2499 - RNA, 20 nt, Artificial Sequence
  Synthetic
ccccguccacgcgcuguucg

SEQ ID NO: 2500 - RNA, 20 nt, Artificial Sequence
  Synthetic
ucgccggggccgaccacgug

SEQ ID NO: 2501 - RNA, 20 nt, Artificial Sequence
  Synthetic
ucccccugguccccccggcu

SEQ ID NO: 2502 - RNA, 20 nt, Artificial Sequence
  Synthetic
gcccgucgugcagcacgucc

SEQ ID NO: 2503 - RNA, 20 nt, Artificial Sequence
  Synthetic
ccgucgugcagcacguccgc

SEQ ID NO: 2504 - RNA, 20 nt, Artificial Sequence
  Synthetic
gcacguccgcgagagcgcgg

SEQ ID NO: 2505 - RNA, 20 nt, Artificial Sequence
  Synthetic
uccgcgagagcgcggccggg

SEQ ID NO: 2506 - RNA, 20 nt, Artificial Sequence
  Synthetic
cgcugaccuacgcgcucaug

SEQ ID NO: 2507 - RNA, 20 nt, Artificial Sequence
  Synthetic
ccuugcaucaucagcucaag

SEQ ID NO: 2508 - RNA, 20 nt, Artificial Sequence
  Synthetic
gcucaagacgggccuccauc

SEQ ID NO: 2509 - RNA, 20 nt, Artificial Sequence
  Synthetic
gacgggccuccaucccgggu

SEQ ID NO: 2510 - RNA, 20 nt, Artificial Sequence
  Synthetic
uuggguucaccgucguccga

SEQ ID NO: 2511 - RNA, 20 nt, Artificial Sequence
  Synthetic
ccgacaggaccgcuuuguga

SEQ ID NO: 2512 - RNA, 20 nt, Artificial Sequence
  Synthetic
gacaggaccgcuuugugacu

SEQ ID NO: 2513 - RNA, 20 nt, Artificial Sequence
  Synthetic
ugacugagaacgugcuguuc

SEQ ID NO: 2514 - RNA, 20 nt, Artificial Sequence
  Synthetic
ugcuguucucggagcgcgcg

SEQ ID NO: 2515 - RNA, 20 nt, Artificial Sequence
  Synthetic
gcgcgucggaggcguacuuc

SEQ ID NO: 2516 - RNA, 20 nt, Artificial Sequence
  Synthetic
ccagcuccagguggcccggc

SEQ ID NO: 2517 - RNA, 20 nt, Artificial Sequence
  Synthetic
gguggcccggcacgaaacug

SEQ ID NO: 2518 - RNA, 20 nt, Artificial Sequence
  Synthetic
ucacgcucacccagccgcgc

SEQ ID NO: 2519 - RNA, 20 nt, Artificial Sequence
  Synthetic
ucacccagccgcgcgcgaac

SEQ ID NO: 2520 - RNA, 20 nt, Artificial Sequence
  Synthetic
agccgcgcgcgaacguggac

SEQ ID NO: 2521 - RNA, 20 nt, Artificial Sequence
  Synthetic
gcgcgaacguggaccugggc

SEQ ID NO: 2522 - RNA, 20 nt, Artificial Sequence
  Synthetic
uccgcaaccccgucaccgac

SEQ ID NO: 2523 - RNA, 20 nt, Artificial Sequence
  Synthetic
accuuccccaaaacuuuuac

SEQ ID NO: 2524 - RNA, 20 nt, Artificial Sequence
  Synthetic
ccaaaacuuuuaccugggcc

SEQ ID NO: 2525 - RNA, 20 nt, Artificial Sequence
  Synthetic
gccgcggggcucccccucuc

SEQ ID NO: 2526 - RNA, 20 nt, Artificial Sequence
  Synthetic
aacgcggcagccguguaccu

SEQ ID NO: 2527 - RNA, 20 nt, Artificial Sequence
  Synthetic
accugcggaacgcggucgug

SEQ ID NO: 2528 - RNA, 20 nt, Artificial Sequence
  Synthetic
cggucguggcgggaaaccgc

SEQ ID NO: 2529 - RNA, 20 nt, Artificial Sequence
  Synthetic
ggcccagcccguccccgugu

SEQ ID NO: 2530 - RNA, 20 nt, Artificial Sequence
  Synthetic
cgcccaggugccgcggcgcg

SEQ ID NO: 2531 - RNA, 20 nt, Artificial Sequence
  Synthetic
aggugccgcggcgcgcaggg

SEQ ID NO: 2532 - RNA, 20 nt, Artificial Sequence
  Synthetic
gcgcagggauggaccacggc

SEQ ID NO: 2533 - RNA, 20 nt, Artificial Sequence
  Synthetic
ccacggccaggacgccgugu

SEQ ID NO: 2534 - RNA, 20 nt, Artificial Sequence
  Synthetic
uuccgccggcccugcaaccc

SEQ ID NO: 2535 - RNA, 20 nt, Artificial Sequence
  Synthetic
caacccccggggacgcgccg

SEQ ID NO: 2536 - RNA, 20 nt, Artificial Sequence
  Synthetic
gcgccgccgggggcguuuac

SEQ ID NO: 2537 - RNA, 20 nt, Artificial Sequence
  Synthetic
ggggcguuuacgcgggggac

SEQ ID NO: 2538 - RNA, 20 nt, Artificial Sequence
  Synthetic
gcguuuacgcgggggacaag

SEQ ID NO: 2539 - RNA, 20 nt, Artificial Sequence
  Synthetic
cccucauguacgaccacggc

SEQ ID NO: 2540 - RNA, 20 nt, Artificial Sequence
  Synthetic
cacggccagagcgacccguc

SEQ ID NO: 2541 - RNA, 20 nt, Artificial Sequence
  Synthetic
uucgcggccacggccaaccc

SEQ ID NO: 2542 - RNA, 20 nt, Artificial Sequence
  Synthetic
ggcgucgcagcgauuuucgu

SEQ ID NO: 2543 - RNA, 20 nt, Artificial Sequence
  Synthetic
guacggggaccugcucuaua

SEQ ID NO: 2544 - RNA, 20 nt, Artificial Sequence
  Synthetic
uaacggggccuaccaccuca

SEQ ID NO: 2545 - RNA, 20 nt, Artificial Sequence
  Synthetic
ucgccgccaaacaucgcugc

SEQ ID NO: 2546 - RNA, 20 nt, Artificial Sequence
  Synthetic
gcugccuggagcgccugauc

SEQ ID NO: 2547 - RNA, 20 nt, Artificial Sequence
  Synthetic
uggagcgccugaucguggag

SEQ ID NO: 2548 - RNA, 20 nt, Artificial Sequence
  Synthetic
acguacaguuuaagcgcccc

SEQ ID NO: 2549 - RNA, 20 nt, Artificial Sequence
  Synthetic
uaagcgccccccggggugcc

SEQ ID NO: 2550 - RNA, 20 nt, Artificial Sequence
  Synthetic
ccccggggugccgcgaacuc

SEQ ID NO: 2551 - RNA, 20 nt, Artificial Sequence
  Synthetic
cggggugccgcgaacucgug

SEQ ID NO: 2552 - RNA, 20 nt, Artificial Sequence
  Synthetic
aggacccguguggccuguuu

SEQ ID NO: 2553 - RNA, 20 nt, Artificial Sequence
  Synthetic
ccuccuccgcagugcccgca

SEQ ID NO: 2554 - RNA, 20 nt, Artificial Sequence
  Synthetic
cgcaacggggaagcccacgc

SEQ ID NO: 2555 - RNA, 20 nt, Artificial Sequence
  Synthetic
ucuaugacgcauccccgcuc

SEQ ID NO: 2556 - RNA, 17 nt, Artificial Sequence
  Synthetic
ggccguccucggggcgu

SEQ ID NO: 2557 - RNA, 17 nt, Artificial Sequence
  Synthetic
agaugcugcacgugcug

SEQ ID NO: 2558 - RNA, 17 nt, Artificial Sequence
  Synthetic
ugccgaugcaacgauac

SEQ ID NO: 2559 - RNA, 17 nt, Artificial Sequence
  Synthetic
aacggccgccuggccac

SEQ ID NO: 2560 - RNA, 17 nt, Artificial Sequence
  Synthetic
cuggccaccaggguggc

SEQ ID NO: 2561 - RNA, 17 nt, Artificial Sequence
  Synthetic
ccgggcgacccuggucg

SEQ ID NO: 2562 - RNA, 17 nt, Artificial Sequence
  Synthetic
cuggucgccgagcuaaa

SEQ ID NO: 2563 - RNA, 17 nt, Artificial Sequence
  Synthetic
gcuaaagcgaagcuucu

SEQ ID NO: 2564 - RNA, 17 nt, Artificial Sequence
  Synthetic
agcgaagcuucugcgag

SEQ ID NO: 2565 - RNA, 17 nt, Artificial Sequence
  Synthetic
gcgagacgagcuuuuuc

SEQ ID NO: 2566 - RNA, 17 nt, Artificial Sequence
  Synthetic
gcuuuuuccugggcaag

SEQ ID NO: 2567 - RNA, 17 nt, Artificial Sequence
  Synthetic
ggcaaggcgggccaccg

SEQ ID NO: 2568 - RNA, 17 nt, Artificial Sequence
  Synthetic
ccaccgccgggaggccg

SEQ ID NO: 2569 - RNA, 17 nt, Artificial Sequence
  Synthetic
ccgucgaggccuggcuc

SEQ ID NO: 2570 - RNA, 17 nt, Artificial Sequence
  Synthetic
gacgcaugccgacacgc

SEQ ID NO: 2571 - RNA, 17 nt, Artificial Sequence
  Synthetic
gcgcgggcggccggucg

SEQ ID NO: 2572 - RNA, 17 nt, Artificial Sequence
  Synthetic
gccuccugcaguccuuc

SEQ ID NO: 2573 - RNA, 17 nt, Artificial Sequence
  Synthetic
ugcaguccuuccugaaa

SEQ ID NO: 2574 - RNA, 17 nt, Artificial Sequence
  Synthetic
aguccuuccugaaagug

SEQ ID NO: 2575 - RNA, 17 nt, Artificial Sequence
  Synthetic
ccugaaaguggaggaca

SEQ ID NO: 2576 - RNA, 17 nt, Artificial Sequence
  Synthetic
cgugccggugacguacg

SEQ ID NO: 2577 - RNA, 17 nt, Artificial Sequence
  Synthetic
cguacggcgagaugguc

SEQ ID NO: 2578 - RNA, 17 nt, Artificial Sequence
  Synthetic
cggcgagaugguccuga

SEQ ID NO: 2579 - RNA, 17 nt, Artificial Sequence
  Synthetic
uggucacggcgcucgug

SEQ ID NO: 2580 - RNA, 17 nt, Artificial Sequence
  Synthetic
gugaugggcaaggccgu

SEQ ID NO: 2581 - RNA, 17 nt, Artificial Sequence
  Synthetic
gcaaggccgugcgaagu

SEQ ID NO: 2582 - RNA, 17 nt, Artificial Sequence
  Synthetic
ugcgaagucuggacgac

SEQ ID NO: 2583 - RNA, 17 nt, Artificial Sequence
  Synthetic
acgugggccgccaccug

SEQ ID NO: 2584 - RNA, 17 nt, Artificial Sequence
  Synthetic
gccaccugcuggagaug

SEQ ID NO: 2585 - RNA, 17 nt, Artificial Sequence
  Synthetic
accugcuggagaugcag

SEQ ID NO: 2586 - RNA, 17 nt, Artificial Sequence
  Synthetic
aggaggagcagcucgac

SEQ ID NO: 2587 - RNA, 17 nt, Artificial Sequence
  Synthetic
accugaaccggcagacg

SEQ ID NO: 2588 - RNA, 17 nt, Artificial Sequence
  Synthetic
gaaccggcagacgcugg

SEQ ID NO: 2589 - RNA, 17 nt, Artificial Sequence
  Synthetic
gcagacgcuggacgagc

SEQ ID NO: 2590 - RNA, 17 nt, Artificial Sequence
  Synthetic
agacgcuggacgagcuc

SEQ ID NO: 2591 - RNA, 17 nt, Artificial Sequence
  Synthetic
agacgacgcgcgugcgc

SEQ ID NO: 2592 - RNA, 17 nt, Artificial Sequence
  Synthetic
ggaucugguguccaucg

SEQ ID NO: 2593 - RNA, 17 nt, Artificial Sequence
  Synthetic
aucugguguccaucggc

SEQ ID NO: 2594 - RNA, 17 nt, Artificial Sequence
  Synthetic
gcgagaagcuggucuuu

SEQ ID NO: 2595 - RNA, 17 nt, Artificial Sequence
  Synthetic
uggucuuucuggaggcc

SEQ ID NO: 2596 - RNA, 17 nt, Artificial Sequence
  Synthetic
ucuuucuggaggcccug

SEQ ID NO: 2597 - RNA, 17 nt, Artificial Sequence
  Synthetic
acguucccuacccccug

SEQ ID NO: 2598 - RNA, 17 nt, Artificial Sequence
  Synthetic
acccccuggugggcgcc

SEQ ID NO: 2599 - RNA, 17 nt, Artificial Sequence
  Synthetic
ugacguucguccugccc

SEQ ID NO: 2600 - RNA, 17 nt, Artificial Sequence
  Synthetic
gccuguucaauccgguc

SEQ ID NO: 2601 - RNA, 17 nt, Artificial Sequence
  Synthetic
acgguuugccgcgcacg

SEQ ID NO: 2602 - RNA, 17 nt, Artificial Sequence
  Synthetic
uccccgcccccggccac

SEQ ID NO: 2603 - RNA, 17 nt, Artificial Sequence
  Synthetic
ccccgccagcuguuuuu

SEQ ID NO: 2604 - RNA, 17 nt, Artificial Sequence
  Synthetic
agcuguuuuuuuggggg

SEQ ID NO: 2605 - RNA, 17 nt, Artificial Sequence
  Synthetic
aggugcugcgccugucu

SEQ ID NO: 2606 - RNA, 17 nt, Artificial Sequence
  Synthetic
gucucuggaacacgcga

SEQ ID NO: 2607 - RNA, 17 nt, Artificial Sequence
  Synthetic
ugugccacccuucgcug

SEQ ID NO: 2608 - RNA, 17 nt, Artificial Sequence
  Synthetic
gaacguugacgcggcgg

SEQ ID NO: 2609 - RNA, 17 nt, Artificial Sequence
  Synthetic
ccuuaaccgcgaccccg

SEQ ID NO: 2610 - RNA, 17 nt, Artificial Sequence
  Synthetic
cgaagccgccaauccgu

SEQ ID NO: 2611 - RNA, 17 nt, Artificial Sequence
  Synthetic
acaugcagcagcuguuu

SEQ ID NO: 2612 - RNA, 17 nt, Artificial Sequence
  Synthetic
cagcuguuuuugaacgc

SEQ ID NO: 2613 - RNA, 17 nt, Artificial Sequence
  Synthetic
ggggcagcgccuggccc

SEQ ID NO: 2614 - RNA, 17 nt, Artificial Sequence
  Synthetic
cagcgccuggcccacgg

SEQ ID NO: 2615 - RNA, 17 nt, Artificial Sequence
  Synthetic
gcccacgggcggguccg

SEQ ID NO: 2616 - RNA, 17 nt, Artificial Sequence
  Synthetic
ggcggguccgauggguc

SEQ ID NO: 2617 - RNA, 17 nt, Artificial Sequence
  Synthetic
cggaaggccagaugacc

SEQ ID NO: 2618 - RNA, 17 nt, Artificial Sequence
  Synthetic
caacgccaaccuggcuc

SEQ ID NO: 2619 - RNA, 17 nt, Artificial Sequence
  Synthetic
ccgcguucgacuucuuu

SEQ ID NO: 2620 - RNA, 17 nt, Artificial Sequence
  Synthetic
uuguggggguggccgac

SEQ ID NO: 2621 - RNA, 17 nt, Artificial Sequence
  Synthetic
uggccgacguggagcug

SEQ ID NO: 2622 - RNA, 17 nt, Artificial Sequence
  Synthetic
acguucccccggccggc

SEQ ID NO: 2623 - RNA, 17 nt, Artificial Sequence
  Synthetic
aggccaccuggcgcgug

SEQ ID NO: 2624 - RNA, 17 nt, Artificial Sequence
  Synthetic
cuauguccggcggcguu

SEQ ID NO: 2625 - RNA, 17 nt, Artificial Sequence
  Synthetic
gcggcguuccgggacgc

SEQ ID NO: 2626 - RNA, 17 nt, Artificial Sequence
  Synthetic
uccgggacgcccggggc

SEQ ID NO: 2627 - RNA, 17 nt, Artificial Sequence
  Synthetic
acgcccggggccuggag

SEQ ID NO: 2628 - RNA, 17 nt, Artificial Sequence
  Synthetic
ggggccuggagcugggg

SEQ ID NO: 2629 - RNA, 17 nt, Artificial Sequence
  Synthetic
caccaucgccgccguuc

SEQ ID NO: 2630 - RNA, 17 nt, Artificial Sequence
  Synthetic
ggccgccauacacggca

SEQ ID NO: 2631 - RNA, 17 nt, Artificial Sequence
  Synthetic
cagugcaucaccagcua

SEQ ID NO: 2632 - RNA, 17 nt, Artificial Sequence
  Synthetic
cgcggugcgcggcguuc

SEQ ID NO: 2633 - RNA, 17 nt, Artificial Sequence
  Synthetic
guacgucgugaccuacc

SEQ ID NO: 2634 - RNA, 17 nt, Artificial Sequence
  Synthetic
ccucgggggagaccuuc

SEQ ID NO: 2635 - RNA, 17 nt, Artificial Sequence
  Synthetic
ucgggggagaccuuccc

SEQ ID NO: 2636 - RNA, 17 nt, Artificial Sequence
  Synthetic
gagugcauggccgugua

SEQ ID NO: 2637 - RNA, 17 nt, Artificial Sequence
  Synthetic
ggaccugguggcgcacg

SEQ ID NO: 2638 - RNA, 17 nt, Artificial Sequence
  Synthetic
acuuuacccugaccggc

SEQ ID NO: 2639 - RNA, 17 nt, Artificial Sequence
  Synthetic
cccugaccggcccggag

SEQ ID NO: 2640 - RNA, 17 nt, Artificial Sequence
  Synthetic
gaccggcccggagcugg

SEQ ID NO: 2641 - RNA, 17 nt, Artificial Sequence
  Synthetic
gggcgggcaggcgcaag

SEQ ID NO: 2642 - RNA, 17 nt, Artificial Sequence
  Synthetic
ggcaggcgcaagccgag

SEQ ID NO: 2643 - RNA, 17 nt, Artificial Sequence
  Synthetic
gagcugaaucaccuaau

SEQ ID NO: 2644 - RNA, 17 nt, Artificial Sequence
  Synthetic
cugcugccaccccucgu

SEQ ID NO: 2645 - RNA, 17 nt, Artificial Sequence
  Synthetic
ugaugcggcgcgcggcc

SEQ ID NO: 2646 - RNA, 17 nt, Artificial Sequence
  Synthetic
gaccgccaucgcgacug

SEQ ID NO: 2647 - RNA, 17 nt, Artificial Sequence
  Synthetic
gcgacugccggguuagc

SEQ ID NO: 2648 - RNA, 17 nt, Artificial Sequence
  Synthetic
cauguaacguggcgacc

SEQ ID NO: 2649 - RNA, 17 nt, Artificial Sequence
  Synthetic
cugcacaacacccaggc

SEQ ID NO: 2650 - RNA, 17 nt, Artificial Sequence
  Synthetic
acacccaggcccgagcc

SEQ ID NO: 2651 - RNA, 17 nt, Artificial Sequence
  Synthetic
cccgagccgcggacgcc

SEQ ID NO: 2652 - RNA, 17 nt, Artificial Sequence
  Synthetic
gcggaugaccggccgca

SEQ ID NO: 2653 - RNA, 17 nt, Artificial Sequence
  Synthetic
accggccgcaccggggg

SEQ ID NO: 2654 - RNA, 17 nt, Artificial Sequence
  Synthetic
ccgcaccggggggcgga

SEQ ID NO: 2655 - RNA, 17 nt, Artificial Sequence
  Synthetic
auggugcccgccuucuc

SEQ ID NO: 2656 - RNA, 17 nt, Artificial Sequence
  Synthetic
ggggccgcugcugcacc

SEQ ID NO: 2657 - RNA, 17 nt, Artificial Sequence
  Synthetic
gcguauacgccacccug

SEQ ID NO: 2658 - RNA, 17 nt, Artificial Sequence
  Synthetic
ugcagaacauggugguc

SEQ ID NO: 2659 - RNA, 17 nt, Artificial Sequence
  Synthetic
cccggagaucgcccccg

SEQ ID NO: 2660 - RNA, 17 nt, Artificial Sequence
  Synthetic
cggagaucgcccccggc

SEQ ID NO: 2661 - RNA, 17 nt, Artificial Sequence
  Synthetic
gccccagcgaccccgug

SEQ ID NO: 2662 - RNA, 17 nt, Artificial Sequence
  Synthetic
caacgccauguuucaca

SEQ ID NO: 2663 - RNA, 17 nt, Artificial Sequence
  Synthetic
acaacgggcgcguggua

SEQ ID NO: 2664 - RNA, 17 nt, Artificial Sequence
  Synthetic
cgggcgcgugguagugg

SEQ ID NO: 2665 - RNA, 17 nt, Artificial Sequence
  Synthetic
gcuggcccacaacaugg

SEQ ID NO: 2666 - RNA, 17 nt, Artificial Sequence
  Synthetic
gcucggcggcgcccgac

SEQ ID NO: 2667 - RNA, 17 nt, Artificial Sequence
  Synthetic
caacaugcgcauauucg

SEQ ID NO: 2668 - RNA, 17 nt, Artificial Sequence
  Synthetic
cgacggggcguugcacg

SEQ ID NO: 2669 - RNA, 17 nt, Artificial Sequence
  Synthetic
ugauggccccccagcau

SEQ ID NO: 2670 - RNA, 17 nt, Artificial Sequence
  Synthetic
cguccacgcgcuguucg

SEQ ID NO: 2671 - RNA, 17 nt, Artificial Sequence
  Synthetic
ccggggccgaccacgug

SEQ ID NO: 2672 - RNA, 17 nt, Artificial Sequence
  Synthetic
cccugguccccccggcu

SEQ ID NO: 2673 - RNA, 17 nt, Artificial Sequence
  Synthetic
cgucgugcagcacgucc

SEQ ID NO: 2674 - RNA, 17 nt, Artificial Sequence
  Synthetic
ucgugcagcacguccgc

SEQ ID NO: 2675 - RNA, 17 nt, Artificial Sequence
  Synthetic
cguccgcgagagcgcgg

SEQ ID NO: 2676 - RNA, 17 nt, Artificial Sequence
  Synthetic
gcgagagcgcggccggg

SEQ ID NO: 2677 - RNA, 17 nt, Artificial Sequence
  Synthetic
ugaccuacgcgcucaug

SEQ ID NO: 2678 - RNA, 17 nt, Artificial Sequence
  Synthetic
ugcaucaucagcucaag

SEQ ID NO: 2679 - RNA, 17 nt, Artificial Sequence
  Synthetic
caagacgggccuccauc

SEQ ID NO: 2680 - RNA, 17 nt, Artificial Sequence
  Synthetic
gggccuccaucccgggu

SEQ ID NO: 2681 - RNA, 17 nt, Artificial Sequence
  Synthetic
gguucaccgucguccga

SEQ ID NO: 2682 - RNA, 17 nt, Artificial Sequence
  Synthetic
acaggaccgcuuuguga

SEQ ID NO: 2683 - RNA, 17 nt, Artificial Sequence
  Synthetic
aggaccgcuuugugacu

SEQ ID NO: 2684 - RNA, 17 nt, Artificial Sequence
  Synthetic
cugagaacgugcuguuc

SEQ ID NO: 2685 - RNA, 17 nt, Artificial Sequence
  Synthetic
uguucucggagcgcgcg

SEQ ID NO: 2686 - RNA, 17 nt, Artificial Sequence
  Synthetic
cgucggaggcguacuuc

SEQ ID NO: 2687 - RNA, 17 nt, Artificial Sequence
  Synthetic
gcuccagguggcccggc

SEQ ID NO: 2688 - RNA, 17 nt, Artificial Sequence
  Synthetic
ggcccggcacgaaacug

SEQ ID NO: 2689 - RNA, 17 nt, Artificial Sequence
  Synthetic
cgcucacccagccgcgc

SEQ ID NO: 2690 - RNA, 17 nt, Artificial Sequence
  Synthetic
cccagccgcgcgcgaac

SEQ ID NO: 2691 - RNA, 17 nt, Artificial Sequence
  Synthetic
cgcgcgcgaacguggac

SEQ ID NO: 2692 - RNA, 17 nt, Artificial Sequence
  Synthetic
cgaacguggaccugggc

SEQ ID NO: 2693 - RNA, 17 nt, Artificial Sequence
  Synthetic
gcaaccccgucaccgac

SEQ ID NO: 2694 - RNA, 17 nt, Artificial Sequence
  Synthetic
uuccccaaaacuuuuac

SEQ ID NO: 2695 - RNA, 17 nt, Artificial Sequence
  Synthetic
aaacuuuuaccugggcc

SEQ ID NO: 2696 - RNA, 17 nt, Artificial Sequence
  Synthetic
gcggggcucccccucuc

SEQ ID NO: 2697 - RNA, 17 nt, Artificial Sequence
  Synthetic
gcggcagccguguaccu

SEQ ID NO: 2698 - RNA, 17 nt, Artificial Sequence
  Synthetic
ugcggaacgcggucgug

SEQ ID NO: 2699 - RNA, 17 nt, Artificial Sequence
  Synthetic
ucguggcgggaaaccgc

SEQ ID NO: 2700 - RNA, 17 nt, Artificial Sequence
  Synthetic
ccagcccguccccgugu

SEQ ID NO: 2701 - RNA, 17 nt, Artificial Sequence
  Synthetic
ccaggugccgcggcgcg

SEQ ID NO: 2702 - RNA, 17 nt, Artificial Sequence
  Synthetic
ugccgcggcgcgcaggg

SEQ ID NO: 2703 - RNA, 17 nt, Artificial Sequence
  Synthetic
cagggauggaccacggc

SEQ ID NO: 2704 - RNA, 17 nt, Artificial Sequence
  Synthetic
cggccaggacgccgugu

SEQ ID NO: 2705 - RNA, 17 nt, Artificial Sequence
  Synthetic
cgccggcccugcaaccc

SEQ ID NO: 2706 - RNA, 17 nt, Artificial Sequence
  Synthetic
cccccggggacgcgccg

SEQ ID NO: 2707 - RNA, 17 nt, Artificial Sequence
  Synthetic
ccgccgggggcguuuac

SEQ ID NO: 2708 - RNA, 17 nt, Artificial Sequence
  Synthetic
gcguuuacgcgggggac

SEQ ID NO: 2709 - RNA, 17 nt, Artificial Sequence
  Synthetic
uuuacgcgggggacaag

SEQ ID NO: 2710 - RNA, 17 nt, Artificial Sequence
  Synthetic
ucauguacgaccacggc

SEQ ID NO: 2711 - RNA, 17 nt, Artificial Sequence
  Synthetic
ggccagagcgacccguc

SEQ ID NO: 2712 - RNA, 17 nt, Artificial Sequence
  Synthetic
gcggccacggccaaccc

SEQ ID NO: 2713 - RNA, 17 nt, Artificial Sequence
  Synthetic
gucgcagcgauuuucgu

SEQ ID NO: 2714 - RNA, 17 nt, Artificial Sequence
  Synthetic
cggggaccugcucuaua

SEQ ID NO: 2715 - RNA, 17 nt, Artificial Sequence
  Synthetic
cggggccuaccaccuca

SEQ ID NO: 2716 - RNA, 17 nt, Artificial Sequence
  Synthetic
ccgccaaacaucgcugc

SEQ ID NO: 2717 - RNA, 17 nt, Artificial Sequence
  Synthetic
gccuggagcgccugauc

SEQ ID NO: 2718 - RNA, 17 nt, Artificial Sequence
  Synthetic
agcgccugaucguggag

SEQ ID NO: 2719 - RNA, 17 nt, Artificial Sequence
  Synthetic
uacaguuuaagcgcccc

SEQ ID NO: 2720 - RNA, 17 nt, Artificial Sequence
  Synthetic
gcgccccccggggugcc

SEQ ID NO: 2721 - RNA, 17 nt, Artificial Sequence
  Synthetic
cggggugccgcgaacuc

SEQ ID NO: 2722 - RNA, 17 nt, Artificial Sequence
  Synthetic
ggugccgcgaacucgug

SEQ ID NO: 2723 - RNA, 17 nt, Artificial Sequence
  Synthetic
acccguguggccuguuu

SEQ ID NO: 2724 - RNA, 17 nt, Artificial Sequence
  Synthetic
ccuccgcagugcccgca

SEQ ID NO: 2725 - RNA, 17 nt, Artificial Sequence
  Synthetic
aacggggaagcccacgc

SEQ ID NO: 2726 - RNA, 17 nt, Artificial Sequence
  Synthetic
augacgcauccccgcuc

SEQ ID NO: 2727 - RNA, 20 nt, Artificial Sequence
  Synthetic
ucaaacgccccgaggacggc

SEQ ID NO: 2728 - RNA, 20 nt, Artificial Sequence
  Synthetic
gugccgcgcucaaacgcccc

SEQ ID NO: 2729 - RNA, 20 nt, Artificial Sequence
  Synthetic
ccgugccgcgcucaaacgcc

SEQ ID NO: 2730 - RNA, 20 nt, Artificial Sequence
  Synthetic
ugcaucggcaacaacaaagc

SEQ ID NO: 2731 - RNA, 20 nt, Artificial Sequence
  Synthetic
agcucggcgaccagggucgc

SEQ ID NO: 2732 - RNA, 20 nt, Artificial Sequence
  Synthetic
cuucgcuuuagcucggcgac

SEQ ID NO: 2733 - RNA, 20 nt, Artificial Sequence
  Synthetic
ccaggaaaaagcucgucucg

SEQ ID NO: 2734 - RNA, 20 nt, Artificial Sequence
  Synthetic
cggcgguggcccgccuugcc

SEQ ID NO: 2735 - RNA, 20 nt, Artificial Sequence
  Synthetic
gcguggccguggugaggucc

SEQ ID NO: 2736 - RNA, 20 nt, Artificial Sequence
  Synthetic
cggagggcugcguggccgug

SEQ ID NO: 2737 - RNA, 20 nt, Artificial Sequence
  Synthetic
ucagacggggcacggccacg

SEQ ID NO: 2738 - RNA, 20 nt, Artificial Sequence
  Synthetic
gcgucagacggggcacggcc

SEQ ID NO: 2739 - RNA, 20 nt, Artificial Sequence
  Synthetic
cgcgugucggcaugcgucag

SEQ ID NO: 2740 - RNA, 20 nt, Artificial Sequence
  Synthetic
guuugaucggggcgguggug

SEQ ID NO: 2741 - RNA, 20 nt, Artificial Sequence
  Synthetic
cugcaggaggcgcuguuuga

SEQ ID NO: 2742 - RNA, 20 nt, Artificial Sequence
  Synthetic
uccacuuucaggaaggacug

SEQ ID NO: 2743 - RNA, 20 nt, Artificial Sequence
  Synthetic
cgguguccuccacuuucagg

SEQ ID NO: 2744 - RNA, 20 nt, Artificial Sequence
  Synthetic
gcuucgguguccuccacuuu

SEQ ID NO: 2745 - RNA, 20 nt, Artificial Sequence
  Synthetic
gugaccagguuggccccguu

SEQ ID NO: 2746 - RNA, 20 nt, Artificial Sequence
  Synthetic
uucgcacggccuugcccauc

SEQ ID NO: 2747 - RNA, 20 nt, Artificial Sequence
  Synthetic
ccagcgucugccgguucagg

SEQ ID NO: 2748 - RNA, 20 nt, Artificial Sequence
  Synthetic
gcgucgucuggggggcgcuc

SEQ ID NO: 2749 - RNA, 20 nt, Artificial Sequence
  Synthetic
uccgcgcgcacgcgcgucgu

SEQ ID NO: 2750 - RNA, 20 nt, Artificial Sequence
  Synthetic
gaaagaccagcuucucgccg

SEQ ID NO: 2751 - RNA, 20 nt, Artificial Sequence
  Synthetic
augcgcuucuccagggccuc

SEQ ID NO: 2752 - RNA, 20 nt, Artificial Sequence
  Synthetic
gcggcguagaugcgcuucuc

SEQ ID NO: 2753 - RNA, 20 nt, Artificial Sequence
  Synthetic
ccauggcgcccaccaggggg

SEQ ID NO: 2754 - RNA, 20 nt, Artificial Sequence
  Synthetic
gucagguccauggcgcccac

SEQ ID NO: 2755 - RNA, 20 nt, Artificial Sequence
  Synthetic
ugaacaggcccaggggcagg

SEQ ID NO: 2756 - RNA, 20 nt, Artificial Sequence
  Synthetic
ggauugaacaggcccagggg

SEQ ID NO: 2757 - RNA, 20 nt, Artificial Sequence
  Synthetic
augaccggauugaacaggcc

SEQ ID NO: 2758 - RNA, 20 nt, Artificial Sequence
  Synthetic
caaaccguuccaugaccgga

SEQ ID NO: 2759 - RNA, 20 nt, Artificial Sequence
  Synthetic
cgcggcaaaccguuccauga

SEQ ID NO: 2760 - RNA, 20 nt, Artificial Sequence
  Synthetic
ggggauccggguggccgggg

SEQ ID NO: 2761 - RNA, 20 nt, Artificial Sequence
  Synthetic
aggcgcggggauccgggugg

SEQ ID NO: 2762 - RNA, 20 nt, Artificial Sequence
  Synthetic
gggcgggaaggcgcggggau

SEQ ID NO: 2763 - RNA, 20 nt, Artificial Sequence
  Synthetic
agcuggcggggcgggaaggc

SEQ ID NO: 2764 - RNA, 20 nt, Artificial Sequence
  Synthetic
ccaaaaaaacagcuggcggg

SEQ ID NO: 2765 - RNA, 20 nt, Artificial Sequence
  Synthetic
uucccccaaaaaaacagcug

SEQ ID NO: 2766 - RNA, 20 nt, Artificial Sequence
  Synthetic
acggucccgaucgcguguuc

SEQ ID NO: 2767 - RNA, 20 nt, Artificial Sequence
  Synthetic
cgcgucaacguucaucagcg

SEQ ID NO: 2768 - RNA, 20 nt, Artificial Sequence
  Synthetic
cgccgcgucaacguucauca

SEQ ID NO: 2769 - RNA, 20 nt, Artificial Sequence
  Synthetic
cguacggauuggcggcuucg

SEQ ID NO: 2770 - RNA, 20 nt, Artificial Sequence
  Synthetic
ggccgccacguacgccccgu

SEQ ID NO: 2771 - RNA, 20 nt, Artificial Sequence
  Synthetic
caugucugcggcggggccgg

SEQ ID NO: 2772 - RNA, 20 nt, Artificial Sequence
  Synthetic
acagcugcugcaugucugcg

SEQ ID NO: 2773 - RNA, 20 nt, Artificial Sequence
  Synthetic
gcgacccaucggacccgccc

SEQ ID NO: 2774 - RNA, 20 nt, Artificial Sequence
  Synthetic
aucuggccuuccgcgaccca

SEQ ID NO: 2775 - RNA, 20 nt, Artificial Sequence
  Synthetic
gucgggcugcauaaacugcu

SEQ ID NO: 2776 - RNA, 20 nt, Artificial Sequence
  Synthetic
caagagccagguuggcguug

SEQ ID NO: 2777 - RNA, 20 nt, Artificial Sequence
  Synthetic
ucgaacgcggggugcagcuc

SEQ ID NO: 2778 - RNA, 20 nt, Artificial Sequence
  Synthetic
cccccacaaagaagucgaac

SEQ ID NO: 2779 - RNA, 20 nt, Artificial Sequence
  Synthetic
cggccacccccacaaagaag

SEQ ID NO: 2780 - RNA, 20 nt, Artificial Sequence
  Synthetic
ccacgucggccacccccaca

SEQ ID NO: 2781 - RNA, 20 nt, Artificial Sequence
  Synthetic
cuggaucucccccgggccgg

SEQ ID NO: 2782 - RNA, 20 nt, Artificial Sequence
  Synthetic
ccagguggccuggaucuccc

SEQ ID NO: 2783 - RNA, 20 nt, Artificial Sequence
  Synthetic
uucaccacgcgccagguggc

SEQ ID NO: 2784 - RNA, 20 nt, Artificial Sequence
  Synthetic
aacgccgccggacauagcgc

SEQ ID NO: 2785 - RNA, 20 nt, Artificial Sequence
  Synthetic
ccgggcgucccggaacgccg

SEQ ID NO: 2786 - RNA, 20 nt, Artificial Sequence
  Synthetic
agcuccaggccccgggcguc

SEQ ID NO: 2787 - RNA, 20 nt, Artificial Sequence
  Synthetic
cccacccccagcuccaggcc

SEQ ID NO: 2788 - RNA, 20 nt, Artificial Sequence
  Synthetic
cgcgaacggcggcgauggug

SEQ ID NO: 2789 - RNA, 20 nt, Artificial Sequence
  Synthetic
uugcggucgucgaacgcccc

SEQ ID NO: 2790 - RNA, 20 nt, Artificial Sequence
  Synthetic
ccgccggguaguugcggucg

SEQ ID NO: 2791 - RNA, 20 nt, Artificial Sequence
  Synthetic
cugcagcagguaaaacaccg

SEQ ID NO: 2792 - RNA, 20 nt, Artificial Sequence
  Synthetic
ccacgagccgggccagggcg

SEQ ID NO: 2793 - RNA, 20 nt, Artificial Sequence
  Synthetic
cacuggaccacgagccgggc

SEQ ID NO: 2794 - RNA, 20 nt, Artificial Sequence
  Synthetic
gugaugcacuggaccacgag

SEQ ID NO: 2795 - RNA, 20 nt, Artificial Sequence
  Synthetic
agcuggugaugcacuggacc

SEQ ID NO: 2796 - RNA, 20 nt, Artificial Sequence
  Synthetic
uuccaguagcuggugaugca

SEQ ID NO: 2797 - RNA, 20 nt, Artificial Sequence
  Synthetic
agaccagcgaguagucguuc

SEQ ID NO: 2798 - RNA, 20 nt, Artificial Sequence
  Synthetic
ggucacgacguacgagacca

SEQ ID NO: 2799 - RNA, 20 nt, Artificial Sequence
  Synthetic
cccgagguaggucacgacgu

SEQ ID NO: 2800 - RNA, 20 nt, Artificial Sequence
  Synthetic
acuccucgggaaggucuccc

SEQ ID NO: 2801 - RNA, 20 nt, Artificial Sequence
  Synthetic
gguacacggccaugcacucc

SEQ ID NO: 2802 - RNA, 20 nt, Artificial Sequence
  Synthetic
aagucaucaaccagcugggc

SEQ ID NO: 2803 - RNA, 20 nt, Artificial Sequence
  Synthetic
aggguaaagucaucaaccag

SEQ ID NO: 2804 - RNA, 20 nt, Artificial Sequence
  Synthetic
ccgcccagcuccgggccggu

SEQ ID NO: 2805 - RNA, 20 nt, Artificial Sequence
  Synthetic
uugcgccugcccgcccagcu

SEQ ID NO: 2806 - RNA, 20 nt, Artificial Sequence
  Synthetic
cacgagggguggcagcagcg

SEQ ID NO: 2807 - RNA, 20 nt, Artificial Sequence
  Synthetic
agggcgucacagucccacac

SEQ ID NO: 2808 - RNA, 20 nt, Artificial Sequence
  Synthetic
ucagggcgucacagucccac

SEQ ID NO: 2809 - RNA, 20 nt, Artificial Sequence
  Synthetic
uccagggccgcgcgccgcau

SEQ ID NO: 2810 - RNA, 20 nt, Artificial Sequence
  Synthetic
cggcagucgcgauggcgguc

SEQ ID NO: 2811 - RNA, 20 nt, Artificial Sequence
  Synthetic
cguuacaugccgccgcguac

SEQ ID NO: 2812 - RNA, 20 nt, Artificial Sequence
  Synthetic
gcagcuggccgucguugcgg

SEQ ID NO: 2813 - RNA, 20 nt, Artificial Sequence
  Synthetic
gcggcguccgcggcucgggc

SEQ ID NO: 2814 - RNA, 20 nt, Artificial Sequence
  Synthetic
ucauccgcggcguccgcggc

SEQ ID NO: 2815 - RNA, 20 nt, Artificial Sequence
  Synthetic
agcagcggccccgcgagaag

SEQ ID NO: 2816 - RNA, 20 nt, Artificial Sequence
  Synthetic
cggugcagcagcggccccgc

SEQ ID NO: 2817 - RNA, 20 nt, Artificial Sequence
  Synthetic
cgcggugcagcagcggcccc

SEQ ID NO: 2818 - RNA, 20 nt, Artificial Sequence
  Synthetic
guggcguauacgcggucgaa

SEQ ID NO: 2819 - RNA, 20 nt, Artificial Sequence
  Synthetic
gcaggguggcguauacgcgg

SEQ ID NO: 2820 - RNA, 20 nt, Artificial Sequence
  Synthetic
uccgggaccaccauguucug

SEQ ID NO: 2821 - RNA, 20 nt, Artificial Sequence
  Synthetic
cuccucgccgggggcgaucu

SEQ ID NO: 2822 - RNA, 20 nt, Artificial Sequence
  Synthetic
ggucgcuggggcacuccucg

SEQ ID NO: 2823 - RNA, 20 nt, Artificial Sequence
  Synthetic
cgggguccgucacggggucg

SEQ ID NO: 2824 - RNA, 20 nt, Artificial Sequence
  Synthetic
gggggugcgcgggguccguc

SEQ ID NO: 2825 - RNA, 20 nt, Artificial Sequence
  Synthetic
uggccgggugcagggggugc

SEQ ID NO: 2826 - RNA, 20 nt, Artificial Sequence
  Synthetic
gccaccagauuggccgggug

SEQ ID NO: 2827 - RNA, 20 nt, Artificial Sequence
  Synthetic
cguguuggccaccagauugg

SEQ ID NO: 2828 - RNA, 20 nt, Artificial Sequence
  Synthetic
uccacuaccacgcgcccguu

SEQ ID NO: 2829 - RNA, 20 nt, Artificial Sequence
  Synthetic
gcaccugcagcgugagcaug

SEQ ID NO: 2830 - RNA, 20 nt, Artificial Sequence
  Synthetic
ugugggccagcaccugcagc

SEQ ID NO: 2831 - RNA, 20 nt, Artificial Sequence
  Synthetic
guugugcguucggccauguu

SEQ ID NO: 2832 - RNA, 20 nt, Artificial Sequence
  Synthetic
ccgcgucgggcgccgccgag

SEQ ID NO: 2833 - RNA, 20 nt, Artificial Sequence
  Synthetic
ggcgcccgcgucgggcgccg

SEQ ID NO: 2834 - RNA, 20 nt, Artificial Sequence
  Synthetic
acgcgguguuggcgcccgcg

SEQ ID NO: 2835 - RNA, 20 nt, Artificial Sequence
  Synthetic
cgaauaugcgcauguuggug

SEQ ID NO: 2836 - RNA, 20 nt, Artificial Sequence
  Synthetic
uuccggcgugcaacgccccg

SEQ ID NO: 2837 - RNA, 20 nt, Artificial Sequence
  Synthetic
agaugcuggggggccaucag

SEQ ID NO: 2838 - RNA, 20 nt, Artificial Sequence
  Synthetic
uggaugguaugguccagaug

SEQ ID NO: 2839 - RNA, 20 nt, Artificial Sequence
  Synthetic
ggguaaaaauagucgccauu

SEQ ID NO: 2840 - RNA, 20 nt, Artificial Sequence
  Synthetic
gcgaacagcgcguggacggg

SEQ ID NO: 2841 - RNA, 20 nt, Artificial Sequence
  Synthetic
ccccggcgaacagcgcgugg

SEQ ID NO: 2842 - RNA, 20 nt, Artificial Sequence
  Synthetic
ucggccccggcgaacagcgc

SEQ ID NO: 2843 - RNA, 20 nt, Artificial Sequence
  Synthetic
ucgccacguggucggccccg

SEQ ID NO: 2844 - RNA, 20 nt, Artificial Sequence
  Synthetic
cgcgcagggccggggggaaa

SEQ ID NO: 2845 - RNA, 20 nt, Artificial Sequence
  Synthetic
ccgcgacaggucgcgcaggg

SEQ ID NO: 2846 - RNA, 20 nt, Artificial Sequence
  Synthetic
accugccgcgacaggucgcg

SEQ ID NO: 2847 - RNA, 20 nt, Artificial Sequence
  Synthetic
gcccccagagccggggggac

SEQ ID NO: 2848 - RNA, 20 nt, Artificial Sequence
  Synthetic
aaaguaguuggcccccagag

SEQ ID NO: 2849 - RNA, 20 nt, Artificial Sequence
  Synthetic
gacgaaaaguaguuggcccc

SEQ ID NO: 2850 - RNA, 20 nt, Artificial Sequence
  Synthetic
cacgacgggcugucggaucg

SEQ ID NO: 2851 - RNA, 20 nt, Artificial Sequence
  Synthetic
acgugcugcacgacgggcug

SEQ ID NO: 2852 - RNA, 20 nt, Artificial Sequence
  Synthetic
ucucgcggacgugcugcacg

SEQ ID NO: 2853 - RNA, 20 nt, Artificial Sequence
  Synthetic
uucuccccggccgcgcucuc

SEQ ID NO: 2854 - RNA, 20 nt, Artificial Sequence
  Synthetic
ugaucuugaaguaccccgcc

SEQ ID NO: 2855 - RNA, 20 nt, Artificial Sequence
  Synthetic
gcaaggccacgggacugauc

SEQ ID NO: 2856 - RNA, 20 nt, Artificial Sequence
  Synthetic
ugagcugaugaugcaaggcc

SEQ ID NO: 2857 - RNA, 20 nt, Artificial Sequence
  Synthetic
acccgggauggaggcccguc

SEQ ID NO: 2858 - RNA, 20 nt, Artificial Sequence
  Synthetic
acggugaacccaaacccggg

SEQ ID NO: 2859 - RNA, 20 nt, Artificial Sequence
  Synthetic
ggacgacggugaacccaaac

SEQ ID NO: 2860 - RNA, 20 nt, Artificial Sequence
  Synthetic
agcgguccugucggacgacg

SEQ ID NO: 2861 - RNA, 20 nt, Artificial Sequence
  Synthetic
ucagucacaaagcgguccug

SEQ ID NO: 2862 - RNA, 20 nt, Artificial Sequence
  Synthetic
acgccuccgacgcgcgcucc

SEQ ID NO: 2863 - RNA, 20 nt, Artificial Sequence
  Synthetic
guacgccuccgacgcgcgcu

SEQ ID NO: 2864 - RNA, 20 nt, Artificial Sequence
  Synthetic
cgggccaccuggagcuggcc

SEQ ID NO: 2865 - RNA, 20 nt, Artificial Sequence
  Synthetic
ccaguuucgugccgggccac

SEQ ID NO: 2866 - RNA, 20 nt, Artificial Sequence
  Synthetic
acccccccgccaguuucgug

SEQ ID NO: 2867 - RNA, 20 nt, Artificial Sequence
  Synthetic
ucgcgcgcggcugggugagc

SEQ ID NO: 2868 - RNA, 20 nt, Artificial Sequence
  Synthetic
ccacguucgcgcgcggcugg

SEQ ID NO: 2869 - RNA, 20 nt, Artificial Sequence
  Synthetic
agguccacguucgcgcgcgg

SEQ ID NO: 2870 - RNA, 20 nt, Artificial Sequence
  Synthetic
cccaugucggugacgggguu

SEQ ID NO: 2871 - RNA, 20 nt, Artificial Sequence
  Synthetic
gaagguugcccaugucggug

SEQ ID NO: 2872 - RNA, 20 nt, Artificial Sequence
  Synthetic
ccgcggcccagguaaaaguu

SEQ ID NO: 2873 - RNA, 20 nt, Artificial Sequence
  Synthetic
ggcugccgcguuguccagga

SEQ ID NO: 2874 - RNA, 20 nt, Artificial Sequence
  Synthetic
acggcugccgcguuguccag

SEQ ID NO: 2875 - RNA, 20 nt, Artificial Sequence
  Synthetic
uacacggcugccgcguuguc

SEQ ID NO: 2876 - RNA, 20 nt, Artificial Sequence
  Synthetic
cacccgaacacggggacggg

SEQ ID NO: 2877 - RNA, 20 nt, Artificial Sequence
  Synthetic
gggcgcacccgaacacgggg

SEQ ID NO: 2878 - RNA, 20 nt, Artificial Sequence
  Synthetic
gcaccugggcgcacccgaac

SEQ ID NO: 2879 - RNA, 20 nt, Artificial Sequence
  Synthetic
gccgcggcaccugggcgcac

SEQ ID NO: 2880 - RNA, 20 nt, Artificial Sequence
  Synthetic
aucccugcgcgccgcggcac

SEQ ID NO: 2881 - RNA, 20 nt, Artificial Sequence
  Synthetic
aguaguugacgucggucgac

SEQ ID NO: 2882 - RNA, 20 nt, Artificial Sequence
  Synthetic
ccccggggguugcagggccg

SEQ ID NO: 2883 - RNA, 20 nt, Artificial Sequence
  Synthetic
cggcgcguccccggggguug

SEQ ID NO: 2884 - RNA, 20 nt, Artificial Sequence
  Synthetic
acgcccccggcggcgcgucc

SEQ ID NO: 2885 - RNA, 20 nt, Artificial Sequence
  Synthetic
cucuggccguggucguacau

SEQ ID NO: 2886 - RNA, 20 nt, Artificial Sequence
  Synthetic
cgcucuggccguggucguac

SEQ ID NO: 2887 - RNA, 20 nt, Artificial Sequence
  Synthetic
cguggccgcgaaggcccggg

SEQ ID NO: 2888 - RNA, 20 nt, Artificial Sequence
  Synthetic
uuggccguggccgcgaaggc

SEQ ID NO: 2889 - RNA, 20 nt, Artificial Sequence
  Synthetic
cccacggguuggccguggcc

SEQ ID NO: 2890 - RNA, 20 nt, Artificial Sequence
  Synthetic
cgaaaaucgcugcgacgccc

SEQ ID NO: 2891 - RNA, 20 nt, Artificial Sequence
  Synthetic
guuauagagcagguccccgu

SEQ ID NO: 2892 - RNA, 20 nt, Artificial Sequence
  Synthetic
ugaggugguaggccccguua

SEQ ID NO: 2893 - RNA, 20 nt, Artificial Sequence
  Synthetic
ugagcaccggcgaggccccg

SEQ ID NO: 2894 - RNA, 20 nt, Artificial Sequence
  Synthetic
aaagcaggggcugagcaccg

SEQ ID NO: 2895 - RNA, 20 nt, Artificial Sequence
  Synthetic
uaaagaacuuaaagcagggg

SEQ ID NO: 2896 - RNA, 20 nt, Artificial Sequence
  Synthetic
ccgacguaaagaacuuaaag

SEQ ID NO: 2897 - RNA, 20 nt, Artificial Sequence
  Synthetic
cggcgaugucggccgacgua

SEQ ID NO: 2898 - RNA, 20 nt, Artificial Sequence
  Synthetic
ggcgguggccguggacaccg

SEQ ID NO: 2899 - RNA, 20 nt, Artificial Sequence
  Synthetic
cgucgcuggcggcgguggcc

SEQ ID NO: 2900 - RNA, 20 nt, Artificial Sequence
  Synthetic
cuccacgaguucgcggcacc

SEQ ID NO: 2901 - RNA, 20 nt, Artificial Sequence
  Synthetic
acaggccacacggguccucc

SEQ ID NO: 2902 - RNA, 20 nt, Artificial Sequence
  Synthetic
ggccuccugaaacaggccac

SEQ ID NO: 2903 - RNA, 20 nt, Artificial Sequence
  Synthetic
caggugagcggguaggccuc

SEQ ID NO: 2904 - RNA, 20 nt, Artificial Sequence
  Synthetic
ggggucgcuggcgcagguga

SEQ ID NO: 2905 - RNA, 20 nt, Artificial Sequence
  Synthetic
gggcggggucgcuggcgcag

SEQ ID NO: 2906 - RNA, 20 nt, Artificial Sequence
  Synthetic
ugcgggcacugcggaggagg

SEQ ID NO: 2907 - RNA, 20 nt, Artificial Sequence
  Synthetic
ccguugcgggcacugcggag

SEQ ID NO: 2908 - RNA, 20 nt, Artificial Sequence
  Synthetic
uccccguugcgggcacugcg

SEQ ID NO: 2909 - RNA, 20 nt, Artificial Sequence
  Synthetic
gcuuccccguugcgggcacu

SEQ ID NO: 2910 - RNA, 20 nt, Artificial Sequence
  Synthetic
cgcgcgugggcuuccccguu

SEQ ID NO: 2911 - RNA, 20 nt, Artificial Sequence
  Synthetic
gcgaagugggucucccgcgc

SEQ ID NO: 2912 - RNA, 20 nt, Artificial Sequence
  Synthetic
uagacgagauacugcgcgaa

SEQ ID NO: 2913 - RNA, 20 nt, Artificial Sequence
  Synthetic
cgucauagacgagauacugc

SEQ ID NO: 2914 - RNA, 20 nt, Artificial Sequence
  Synthetic
ugagcggggaugcgucauag

SEQ ID NO: 2915 - RNA, 20 nt, Artificial Sequence
  Synthetic
uuacagagccagucccuuga

SEQ ID NO: 2916 - RNA, 17 nt, Artificial Sequence
  Synthetic
aacgccccgaggacggc

SEQ ID NO: 2917 - RNA, 17 nt, Artificial Sequence
  Synthetic
ccgcgcucaaacgcccc

SEQ ID NO: 2918 - RNA, 17 nt, Artificial Sequence
  Synthetic
ugccgcgcucaaacgcc

SEQ ID NO: 2919 - RNA, 17 nt, Artificial Sequence
  Synthetic
aucggcaacaacaaagc

SEQ ID NO: 2920 - RNA, 17 nt, Artificial Sequence
  Synthetic
ucggcgaccagggucgc

SEQ ID NO: 2921 - RNA, 17 nt, Artificial Sequence
  Synthetic
cgcuuuagcucggcgac

SEQ ID NO: 2922 - RNA, 17 nt, Artificial Sequence
  Synthetic
ggaaaaagcucgucucg

SEQ ID NO: 2923 - RNA, 17 nt, Artificial Sequence
  Synthetic
cgguggcccgccuugcc

SEQ ID NO: 2924 - RNA, 17 nt, Artificial Sequence
  Synthetic
uggccguggugaggucc

SEQ ID NO: 2925 - RNA, 17 nt, Artificial Sequence
  Synthetic
agggcugcguggccgug

SEQ ID NO: 2926 - RNA, 17 nt, Artificial Sequence
  Synthetic
gacggggcacggccacg

SEQ ID NO: 2927 - RNA, 17 nt, Artificial Sequence
  Synthetic
ucagacggggcacggcc

SEQ ID NO: 2928 - RNA, 17 nt, Artificial Sequence
  Synthetic
gugucggcaugcgucag

SEQ ID NO: 2929 - RNA, 17 nt, Artificial Sequence
  Synthetic
ugaucggggcgguggug

SEQ ID NO: 2930 - RNA, 17 nt, Artificial Sequence
  Synthetic
caggaggcgcuguuuga

SEQ ID NO: 2931 - RNA, 17 nt, Artificial Sequence
  Synthetic
acuuucaggaaggacug

SEQ ID NO: 2932 - RNA, 17 nt, Artificial Sequence
  Synthetic
uguccuccacuuucagg

SEQ ID NO: 2933 - RNA, 17 nt, Artificial Sequence
  Synthetic
ucgguguccuccacuuu

SEQ ID NO: 2934 - RNA, 17 nt, Artificial Sequence
  Synthetic
accagguuggccccguu

SEQ ID NO: 2935 - RNA, 17 nt, Artificial Sequence
  Synthetic
gcacggccuugcccauc

SEQ ID NO: 2936 - RNA, 17 nt, Artificial Sequence
  Synthetic
gcgucugccgguucagg

SEQ ID NO: 2937 - RNA, 17 nt, Artificial Sequence
  Synthetic
ucgucuggggggcgcuc

SEQ ID NO: 2938 - RNA, 17 nt, Artificial Sequence
  Synthetic
gcgcgcacgcgcgucgu

SEQ ID NO: 2939 - RNA, 17 nt, Artificial Sequence
  Synthetic
agaccagcuucucgccg

SEQ ID NO: 2940 - RNA, 17 nt, Artificial Sequence
  Synthetic
cgcuucuccagggccuc

SEQ ID NO: 2941 - RNA, 17 nt, Artificial Sequence
  Synthetic
gcguagaugcgcuucuc

SEQ ID NO: 2942 - RNA, 17 nt, Artificial Sequence
  Synthetic
uggcgcccaccaggggg

SEQ ID NO: 2943 - RNA, 17 nt, Artificial Sequence
  Synthetic
agguccauggcgcccac

SEQ ID NO: 2944 - RNA, 17 nt, Artificial Sequence
  Synthetic
acaggcccaggggcagg

SEQ ID NO: 2945 - RNA, 17 nt, Artificial Sequence
  Synthetic
uugaacaggcccagggg

SEQ ID NO: 2946 - RNA, 17 nt, Artificial Sequence
  Synthetic
accggauugaacaggcc

SEQ ID NO: 2947 - RNA, 17 nt, Artificial Sequence
  Synthetic
accguuccaugaccgga

SEQ ID NO: 2948 - RNA, 17 nt, Artificial Sequence
  Synthetic
ggcaaaccguuccauga

SEQ ID NO: 2949 - RNA, 17 nt, Artificial Sequence
  Synthetic
gauccggguggccgggg

SEQ ID NO: 2950 - RNA, 17 nt, Artificial Sequence
  Synthetic
cgcggggauccgggugg

SEQ ID NO: 2951 - RNA, 17 nt, Artificial Sequence
  Synthetic
cgggaaggcgcggggau

SEQ ID NO: 2952 - RNA, 17 nt, Artificial Sequence
  Synthetic
uggcggggcgggaaggc

SEQ ID NO: 2953 - RNA, 17 nt, Artificial Sequence
  Synthetic
aaaaaacagcuggcggg

SEQ ID NO: 2954 - RNA, 17 nt, Artificial Sequence
  Synthetic
ccccaaaaaaacagcug

SEQ ID NO: 2955 - RNA, 17 nt, Artificial Sequence
  Synthetic
gucccgaucgcguguuc

SEQ ID NO: 2956 - RNA, 17 nt, Artificial Sequence
  Synthetic
gucaacguucaucagcg

SEQ ID NO: 2957 - RNA, 17 nt, Artificial Sequence
  Synthetic
cgcgucaacguucauca

SEQ ID NO: 2958 - RNA, 17 nt, Artificial Sequence
  Synthetic
acggauuggcggcuucg

SEQ ID NO: 2959 - RNA, 17 nt, Artificial Sequence
  Synthetic
cgccacguacgccccgu

SEQ ID NO: 2960 - RNA, 17 nt, Artificial Sequence
  Synthetic
gucugcggcggggccgg

SEQ ID NO: 2961 - RNA, 17 nt, Artificial Sequence
  Synthetic
gcugcugcaugucugcg

SEQ ID NO: 2962 - RNA, 17 nt, Artificial Sequence
  Synthetic
acccaucggacccgccc

SEQ ID NO: 2963 - RNA, 17 nt, Artificial Sequence
  Synthetic
uggccuuccgcgaccca

SEQ ID NO: 2964 - RNA, 17 nt, Artificial Sequence
  Synthetic
gggcugcauaaacugcu

SEQ ID NO: 2965 - RNA, 17 nt, Artificial Sequence
  Synthetic
gagccagguuggcguug

SEQ ID NO: 2966 - RNA, 17 nt, Artificial Sequence
  Synthetic
aacgcggggugcagcuc

SEQ ID NO: 2967 - RNA, 17 nt, Artificial Sequence
  Synthetic
ccacaaagaagucgaac

SEQ ID NO: 2968 - RNA, 17 nt, Artificial Sequence
  Synthetic
ccacccccacaaagaag

SEQ ID NO: 2969 - RNA, 17 nt, Artificial Sequence
  Synthetic
cgucggccacccccaca

SEQ ID NO: 2970 - RNA, 17 nt, Artificial Sequence
  Synthetic
gaucucccccgggccgg

SEQ ID NO: 2971 - RNA, 17 nt, Artificial Sequence
  Synthetic
gguggccuggaucuccc

SEQ ID NO: 2972 - RNA, 17 nt, Artificial Sequence
  Synthetic
accacgcgccagguggc

SEQ ID NO: 2973 - RNA, 17 nt, Artificial Sequence
  Synthetic
gccgccggacauagcgc

SEQ ID NO: 2974 - RNA, 17 nt, Artificial Sequence
  Synthetic
ggcgucccggaacgccg

SEQ ID NO: 2975 - RNA, 17 nt, Artificial Sequence
  Synthetic
uccaggccccgggcguc

SEQ ID NO: 2976 - RNA, 17 nt, Artificial Sequence
  Synthetic
acccccagcuccaggcc

SEQ ID NO: 2977 - RNA, 17 nt, Artificial Sequence
  Synthetic
gaacggcggcgauggug

SEQ ID NO: 2978 - RNA, 17 nt, Artificial Sequence
  Synthetic
cggucgucgaacgcccc

SEQ ID NO: 2979 - RNA, 17 nt, Artificial Sequence
  Synthetic
ccggguaguugcggucg

SEQ ID NO: 2980 - RNA, 17 nt, Artificial Sequence
  Synthetic
cagcagguaaaacaccg

SEQ ID NO: 2981 - RNA, 17 nt, Artificial Sequence
  Synthetic
cgagccgggccagggcg

SEQ ID NO: 2982 - RNA, 17 nt, Artificial Sequence
  Synthetic
uggaccacgagccgggc

SEQ ID NO: 2983 - RNA, 17 nt, Artificial Sequence
  Synthetic
augcacuggaccacgag

SEQ ID NO: 2984 - RNA, 17 nt, Artificial Sequence
  Synthetic
uggugaugcacuggacc

SEQ ID NO: 2985 - RNA, 17 nt, Artificial Sequence
  Synthetic
caguagcuggugaugca

SEQ ID NO: 2986 - RNA, 17 nt, Artificial Sequence
  Synthetic
ccagcgaguagucguuc

SEQ ID NO: 2987 - RNA, 17 nt, Artificial Sequence
  Synthetic
cacgacguacgagacca

SEQ ID NO: 2988 - RNA, 17 nt, Artificial Sequence
  Synthetic
gagguaggucacgacgu

SEQ ID NO: 2989 - RNA, 17 nt, Artificial Sequence
  Synthetic
ccucgggaaggucuccc

SEQ ID NO: 2990 - RNA, 17 nt, Artificial Sequence
  Synthetic
acacggccaugcacucc

SEQ ID NO: 2991 - RNA, 17 nt, Artificial Sequence
  Synthetic
ucaucaaccagcugggc

SEQ ID NO: 2992 - RNA, 17 nt, Artificial Sequence
  Synthetic
guaaagucaucaaccag

SEQ ID NO: 2993 - RNA, 17 nt, Artificial Sequence
  Synthetic
cccagcuccgggccggu

SEQ ID NO: 2994 - RNA, 17 nt, Artificial Sequence
  Synthetic
cgccugcccgcccagcu

SEQ ID NO: 2995 - RNA, 17 nt, Artificial Sequence
  Synthetic
gagggguggcagcagcg

SEQ ID NO: 2996 - RNA, 17 nt, Artificial Sequence
  Synthetic
gcgucacagucccacac

SEQ ID NO: 2997 - RNA, 17 nt, Artificial Sequence
  Synthetic
gggcgucacagucccac

SEQ ID NO: 2998 - RNA, 17 nt, Artificial Sequence
  Synthetic
agggccgcgcgccgcau

SEQ ID NO: 2999 - RNA, 17 nt, Artificial Sequence
  Synthetic
cagucgcgauggcgguc

SEQ ID NO: 3000 - RNA, 17 nt, Artificial Sequence
  Synthetic
uacaugccgccgcguac

SEQ ID NO: 3001 - RNA, 17 nt, Artificial Sequence
  Synthetic
gcuggccgucguugcgg

SEQ ID NO: 3002 - RNA, 17 nt, Artificial Sequence
  Synthetic
gcguccgcggcucgggc

SEQ ID NO: 3003 - RNA, 17 nt, Artificial Sequence
  Synthetic
uccgcggcguccgcggc

SEQ ID NO: 3004 - RNA, 17 nt, Artificial Sequence
  Synthetic
agcggccccgcgagaag

SEQ ID NO: 3005 - RNA, 17 nt, Artificial Sequence
  Synthetic
ugcagcagcggccccgc

SEQ ID NO: 3006 - RNA, 17 nt, Artificial Sequence
  Synthetic
ggugcagcagcggcccc

SEQ ID NO: 3007 - RNA, 17 nt, Artificial Sequence
  Synthetic
gcguauacgcggucgaa

SEQ ID NO: 3008 - RNA, 17 nt, Artificial Sequence
  Synthetic
ggguggcguauacgcgg

SEQ ID NO: 3009 - RNA, 17 nt, Artificial Sequence
  Synthetic
gggaccaccauguucug

SEQ ID NO: 3010 - RNA, 17 nt, Artificial Sequence
  Synthetic
cucgccgggggcgaucu

SEQ ID NO: 3011 - RNA, 17 nt, Artificial Sequence
  Synthetic
cgcuggggcacuccucg

SEQ ID NO: 3012 - RNA, 17 nt, Artificial Sequence
  Synthetic
gguccgucacggggucg

SEQ ID NO: 3013 - RNA, 17 nt, Artificial Sequence
  Synthetic
ggugcgcgggguccguc

SEQ ID NO: 3014 - RNA, 17 nt, Artificial Sequence
  Synthetic
ccgggugcagggggugc

SEQ ID NO: 3015 - RNA, 17 nt, Artificial Sequence
  Synthetic
accagauuggccgggug

SEQ ID NO: 3016 - RNA, 17 nt, Artificial Sequence
  Synthetic
guuggccaccagauugg

SEQ ID NO: 3017 - RNA, 17 nt, Artificial Sequence
  Synthetic
acuaccacgcgcccguu

SEQ ID NO: 3018 - RNA, 17 nt, Artificial Sequence
  Synthetic
ccugcagcgugagcaug

SEQ ID NO: 3019 - RNA, 17 nt, Artificial Sequence
  Synthetic
gggccagcaccugcagc

SEQ ID NO: 3020 - RNA, 17 nt, Artificial Sequence
  Synthetic
gugcguucggccauguu

SEQ ID NO: 3021 - RNA, 17 nt, Artificial Sequence
  Synthetic
cgucgggcgccgccgag

SEQ ID NO: 3022 - RNA, 17 nt, Artificial Sequence
  Synthetic
gcccgcgucgggcgccg

SEQ ID NO: 3023 - RNA, 17 nt, Artificial Sequence
  Synthetic
cgguguuggcgcccgcg

SEQ ID NO: 3024 - RNA, 17 nt, Artificial Sequence
  Synthetic
auaugcgcauguuggug

SEQ ID NO: 3025 - RNA, 17 nt, Artificial Sequence
  Synthetic
cggcgugcaacgccccg

SEQ ID NO: 3026 - RNA, 17 nt, Artificial Sequence
  Synthetic
ugcuggggggccaucag

SEQ ID NO: 3027 - RNA, 17 nt, Artificial Sequence
  Synthetic
augguaugguccagaug

SEQ ID NO: 3028 - RNA, 17 nt, Artificial Sequence
  Synthetic
uaaaaauagucgccauu

SEQ ID NO: 3029 - RNA, 17 nt, Artificial Sequence
  Synthetic
aacagcgcguggacggg

SEQ ID NO: 3030 - RNA, 17 nt, Artificial Sequence
  Synthetic
cggcgaacagcgcgugg

SEQ ID NO: 3031 - RNA, 17 nt, Artificial Sequence
  Synthetic
gccccggcgaacagcgc

SEQ ID NO: 3032 - RNA, 17 nt, Artificial Sequence
  Synthetic
ccacguggucggccccg

SEQ ID NO: 3033 - RNA, 17 nt, Artificial Sequence
  Synthetic
gcagggccggggggaaa

SEQ ID NO: 3034 - RNA, 17 nt, Artificial Sequence
  Synthetic
cgacaggucgcgcaggg

SEQ ID NO: 3035 - RNA, 17 nt, Artificial Sequence
  Synthetic
ugccgcgacaggucgcg

SEQ ID NO: 3036 - RNA, 17 nt, Artificial Sequence
  Synthetic
cccagagccggggggac

SEQ ID NO: 3037 - RNA, 17 nt, Artificial Sequence
  Synthetic
guaguuggcccccagag

SEQ ID NO: 3038 - RNA, 17 nt, Artificial Sequence
  Synthetic
gaaaaguaguuggcccc

SEQ ID NO: 3039 - RNA, 17 nt, Artificial Sequence
  Synthetic
gacgggcugucggaucg

SEQ ID NO: 3040 - RNA, 17 nt, Artificial Sequence
  Synthetic
ugcugcacgacgggcug

SEQ ID NO: 3041 - RNA, 17 nt, Artificial Sequence
  Synthetic
cgcggacgugcugcacg

SEQ ID NO: 3042 - RNA, 17 nt, Artificial Sequence
  Synthetic
uccccggccgcgcucuc

SEQ ID NO: 3043 - RNA, 17 nt, Artificial Sequence
  Synthetic
ucuugaaguaccccgcc

SEQ ID NO: 3044 - RNA, 17 nt, Artificial Sequence
  Synthetic
aggccacgggacugauc

SEQ ID NO: 3045 - RNA, 17 nt, Artificial Sequence
  Synthetic
gcugaugaugcaaggcc

SEQ ID NO: 3046 - RNA, 17 nt, Artificial Sequence
  Synthetic
cgggauggaggcccguc

SEQ ID NO: 3047 - RNA, 17 nt, Artificial Sequence
  Synthetic
gugaacccaaacccggg

SEQ ID NO: 3048 - RNA, 17 nt, Artificial Sequence
  Synthetic
cgacggugaacccaaac

SEQ ID NO: 3049 - RNA, 17 nt, Artificial Sequence
  Synthetic
gguccugucggacgacg

SEQ ID NO: 3050 - RNA, 17 nt, Artificial Sequence
  Synthetic
gucacaaagcgguccug

SEQ ID NO: 3051 - RNA, 17 nt, Artificial Sequence
  Synthetic
ccuccgacgcgcgcucc

SEQ ID NO: 3052 - RNA, 17 nt, Artificial Sequence
  Synthetic
cgccuccgacgcgcgcu

SEQ ID NO: 3053 - RNA, 17 nt, Artificial Sequence
  Synthetic
gccaccuggagcuggcc

SEQ ID NO: 3054 - RNA, 17 nt, Artificial Sequence
  Synthetic
guuucgugccgggccac

SEQ ID NO: 3055 - RNA, 17 nt, Artificial Sequence
  Synthetic
cccccgccaguuucgug

SEQ ID NO: 3056 - RNA, 17 nt, Artificial Sequence
  Synthetic
cgcgcggcugggugagc

SEQ ID NO: 3057 - RNA, 17 nt, Artificial Sequence
  Synthetic
cguucgcgcgcggcugg

SEQ ID NO: 3058 - RNA, 17 nt, Artificial Sequence
  Synthetic
uccacguucgcgcgcgg

SEQ ID NO: 3059 - RNA, 17 nt, Artificial Sequence
  Synthetic
augucggugacgggguu

SEQ ID NO: 3060 - RNA, 17 nt, Artificial Sequence
  Synthetic
gguugcccaugucggug

SEQ ID NO: 3061 - RNA, 17 nt, Artificial Sequence
  Synthetic
cggcccagguaaaaguu

SEQ ID NO: 3062 - RNA, 17 nt, Artificial Sequence
  Synthetic
ugccgcguuguccagga

SEQ ID NO: 3063 - RNA, 17 nt, Artificial Sequence
  Synthetic
gcugccgcguuguccag

SEQ ID NO: 3064 - RNA, 17 nt, Artificial Sequence
  Synthetic
acggcugccgcguuguc

SEQ ID NO: 3065 - RNA, 17 nt, Artificial Sequence
  Synthetic
ccgaacacggggacggg

SEQ ID NO: 3066 - RNA, 17 nt, Artificial Sequence
  Synthetic
cgcacccgaacacgggg

SEQ ID NO: 3067 - RNA, 17 nt, Artificial Sequence
  Synthetic
ccugggcgcacccgaac

SEQ ID NO: 3068 - RNA, 17 nt, Artificial Sequence
  Synthetic
gcggcaccugggcgcac

SEQ ID NO: 3069 - RNA, 17 nt, Artificial Sequence
  Synthetic
ccugcgcgccgcggcac

SEQ ID NO: 3070 - RNA, 17 nt, Artificial Sequence
  Synthetic
aguugacgucggucgac

SEQ ID NO: 3071 - RNA, 17 nt, Artificial Sequence
  Synthetic
cggggguugcagggccg

SEQ ID NO: 3072 - RNA, 17 nt, Artificial Sequence
  Synthetic
cgcguccccggggguug

SEQ ID NO: 3073 - RNA, 17 nt, Artificial Sequence
  Synthetic
cccccggcggcgcgucc

SEQ ID NO: 3074 - RNA, 17 nt, Artificial Sequence
  Synthetic
uggccguggucguacau

SEQ ID NO: 3075 - RNA, 17 nt, Artificial Sequence
  Synthetic
ucuggccguggucguac

SEQ ID NO: 3076 - RNA, 17 nt, Artificial Sequence
  Synthetic
ggccgcgaaggcccggg

SEQ ID NO: 3077 - RNA, 17 nt, Artificial Sequence
  Synthetic
gccguggccgcgaaggc

SEQ ID NO: 3078 - RNA, 17 nt, Artificial Sequence
  Synthetic
acggguuggccguggcc

SEQ ID NO: 3079 - RNA, 17 nt, Artificial Sequence
  Synthetic
aaaucgcugcgacgccc

SEQ ID NO: 3080 - RNA, 17 nt, Artificial Sequence
  Synthetic
auagagcagguccccgu

SEQ ID NO: 3081 - RNA, 17 nt, Artificial Sequence
  Synthetic
ggugguaggccccguua

SEQ ID NO: 3082 - RNA, 17 nt, Artificial Sequence
  Synthetic
gcaccggcgaggccccg

SEQ ID NO: 3083 - RNA, 17 nt, Artificial Sequence
  Synthetic
gcaggggcugagcaccg

SEQ ID NO: 3084 - RNA, 17 nt, Artificial Sequence
  Synthetic
agaacuuaaagcagggg

SEQ ID NO: 3085 - RNA, 17 nt, Artificial Sequence
  Synthetic
acguaaagaacuuaaag

SEQ ID NO: 3086 - RNA, 17 nt, Artificial Sequence
  Synthetic
cgaugucggccgacgua

SEQ ID NO: 3087 - RNA, 17 nt, Artificial Sequence
  Synthetic
gguggccguggacaccg

SEQ ID NO: 3088 - RNA, 17 nt, Artificial Sequence
  Synthetic
cgcuggcggcgguggcc

SEQ ID NO: 3089 - RNA, 17 nt, Artificial Sequence
  Synthetic
cacgaguucgcggcacc

SEQ ID NO: 3090 - RNA, 17 nt, Artificial Sequence
  Synthetic
ggccacacggguccucc

SEQ ID NO: 3091 - RNA, 17 nt, Artificial Sequence
  Synthetic
cuccugaaacaggccac

SEQ ID NO: 3092 - RNA, 17 nt, Artificial Sequence
  Synthetic
gugagcggguaggccuc

SEQ ID NO: 3093 - RNA, 17 nt, Artificial Sequence
  Synthetic
gucgcuggcgcagguga

SEQ ID NO: 3094 - RNA, 17 nt, Artificial Sequence
  Synthetic
cggggucgcuggcgcag

SEQ ID NO: 3095 - RNA, 17 nt, Artificial Sequence
  Synthetic
gggcacugcggaggagg

SEQ ID NO: 3096 - RNA, 17 nt, Artificial Sequence
  Synthetic
uugcgggcacugcggag

SEQ ID NO: 3097 - RNA, 17 nt, Artificial Sequence
  Synthetic
ccguugcgggcacugcg

SEQ ID NO: 3098 - RNA, 17 nt, Artificial Sequence
  Synthetic
uccccguugcgggcacu

SEQ ID NO: 3099 - RNA, 17 nt, Artificial Sequence
  Synthetic
gcgugggcuuccccguu

SEQ ID NO: 3100 - RNA, 17 nt, Artificial Sequence
  Synthetic
aagugggucucccgcgc

SEQ ID NO: 3101 - RNA, 17 nt, Artificial Sequence
  Synthetic
acgagauacugcgcgaa

SEQ ID NO: 3102 - RNA, 17 nt, Artificial Sequence
  Synthetic
cauagacgagauacugc

SEQ ID NO: 3103 - RNA, 17 nt, Artificial Sequence
  Synthetic
gcggggaugcgucauag

SEQ ID NO: 3104 - RNA, 17 nt, Artificial Sequence
  Synthetic
cagagccagucccuuga

SEQ ID NO: 3105 - RNA, 20 nt, Artificial Sequence
  Synthetic
guggcgucgcaucgacgccu

SEQ ID NO: 3106 - RNA, 20 nt, Artificial Sequence
  Synthetic
acaguucgagguccaccagc

SEQ ID NO: 3107 - RNA, 20 nt, Artificial Sequence
  Synthetic
acccacacacaauuacauga

SEQ ID NO: 3108 - RNA, 17 nt, Artificial Sequence
  Synthetic
gcgucgcaucgacgccu

SEQ ID NO: 3109 - RNA, 17 nt, Artificial Sequence
  Synthetic
guucgagguccaccagc

SEQ ID NO: 3110 - RNA, 17 nt, Artificial Sequence
  Synthetic
cacacacaauuacauga

SEQ ID NO: 3111 - RNA, 20 nt, Artificial Sequence
  Synthetic
cggccaacccgugggcgucg

SEQ ID NO: 3112 - RNA, 20 nt, Artificial Sequence
  Synthetic
ggcggacuggaccgugcacc

SEQ ID NO: 3113 - RNA, 17 nt, Artificial Sequence
  Synthetic
ccaacccgugggcgucg

SEQ ID NO: 3114 - RNA, 17 nt, Artificial Sequence
  Synthetic
ggacuggaccgugcacc

SEQ ID NO: 3115 - RNA, 20 nt, Artificial Sequence
  Synthetic
gcgcggcaaaccguuccaug

SEQ ID NO: 3116 - RNA, 20 nt, Artificial Sequence
  Synthetic
gggccgccacguacgccccg

SEQ ID NO: 3117 - RNA, 20 nt, Artificial Sequence
  Synthetic
uggcguugaccguguuggcc

SEQ ID NO: 3118 - RNA, 20 nt, Artificial Sequence
  Synthetic
cagaugcuggggggccauca

SEQ ID NO: 3119 - RNA, 17 nt, Artificial Sequence
  Synthetic
cggcaaaccguuccaug

SEQ ID NO: 3120 - RNA, 17 nt, Artificial Sequence
  Synthetic
ccgccacguacgccccg

SEQ ID NO: 3121 - RNA, 17 nt, Artificial Sequence
  Synthetic
cguugaccguguuggcc

SEQ ID NO: 3122 - RNA, 17 nt, Artificial Sequence
  Synthetic
augcuggggggccauca

SEQ ID NO: 3123 - RNA, 20 nt, Artificial Sequence
  Synthetic
gucccccggaggaaagucgg

SEQ ID NO: 3124 - RNA, 20 nt, Artificial Sequence
  Synthetic
ccggaggaaagucggcggcc

SEQ ID NO: 3125 - RNA, 20 nt, Artificial Sequence
  Synthetic
uuugcgcccgccggcccucg

SEQ ID NO: 3126 - RNA, 20 nt, Artificial Sequence
  Synthetic
gggacgcaacagaagccgac

SEQ ID NO: 3127 - RNA, 20 nt, Artificial Sequence
  Synthetic
ggacgcaacagaagccgacc

SEQ ID NO: 3128 - RNA, 20 nt, Artificial Sequence
  Synthetic
aauuucgauucaucgccccg

SEQ ID NO: 3129 - RNA, 20 nt, Artificial Sequence
  Synthetic
auuucgauucaucgccccgc

SEQ ID NO: 3130 - RNA, 20 nt, Artificial Sequence
  Synthetic
auucaucgccccgcgggugc

SEQ ID NO: 3131 - RNA, 20 nt, Artificial Sequence
  Synthetic
gcccccccggagaagcgcgc

SEQ ID NO: 3132 - RNA, 20 nt, Artificial Sequence
  Synthetic
ccccccggagaagcgcgccg

SEQ ID NO: 3133 - RNA, 20 nt, Artificial Sequence
  Synthetic
aagcgcgccggggugcacga

SEQ ID NO: 3134 - RNA, 20 nt, Artificial Sequence
  Synthetic
ucaccucaagcgcgccccca

SEQ ID NO: 3135 - RNA, 20 nt, Artificial Sequence
  Synthetic
cgcgcccccaagguguacug

SEQ ID NO: 3136 - RNA, 20 nt, Artificial Sequence
  Synthetic
gcgcccccaagguguacugc

SEQ ID NO: 3137 - RNA, 20 nt, Artificial Sequence
  Synthetic
cgcccccaagguguacugcg

SEQ ID NO: 3138 - RNA, 20 nt, Artificial Sequence
  Synthetic
gcccccaagguguacugcgg

SEQ ID NO: 3139 - RNA, 20 nt, Artificial Sequence
  Synthetic
gagcgcgacguccuccgcgu

SEQ ID NO: 3140 - RNA, 20 nt, Artificial Sequence
  Synthetic
agcgcgacguccuccgcguc

SEQ ID NO: 3141 - RNA, 20 nt, Artificial Sequence
  Synthetic
cgacguccuccgcgucgggu

SEQ ID NO: 3142 - RNA, 20 nt, Artificial Sequence
  Synthetic
gacguccuccgcgucggguc

SEQ ID NO: 3143 - RNA, 20 nt, Artificial Sequence
  Synthetic
guccuccgcgucgggucggg

SEQ ID NO: 3144 - RNA, 20 nt, Artificial Sequence
  Synthetic
ggcguggaccacgccccggc

SEQ ID NO: 3145 - RNA, 20 nt, Artificial Sequence
  Synthetic
gcguggaccacgccccggcg

SEQ ID NO: 3146 - RNA, 20 nt, Artificial Sequence
  Synthetic
cuuucacguguacgacaucc

SEQ ID NO: 3147 - RNA, 20 nt, Artificial Sequence
  Synthetic
guacgacauccuggagaacg

SEQ ID NO: 3148 - RNA, 20 nt, Artificial Sequence
  Synthetic
gagaacguggagcacgcgua

SEQ ID NO: 3149 - RNA, 20 nt, Artificial Sequence
  Synthetic
acgcgugcuccacguucucc

SEQ ID NO: 3150 - RNA, 20 nt, Artificial Sequence
  Synthetic
gaugucguacacgugaaaga

SEQ ID NO: 3151 - RNA, 20 nt, Artificial Sequence
  Synthetic
cgugaaagacggugacggug

SEQ ID NO: 3152 - RNA, 20 nt, Artificial Sequence
  Synthetic
acggugggguugaaccccgc

SEQ ID NO: 3153 - RNA, 20 nt, Artificial Sequence
  Synthetic
ggugggguugaaccccgccg

SEQ ID NO: 3154 - RNA, 20 nt, Artificial Sequence
  Synthetic
gguugaaccccgccggggcg

SEQ ID NO: 3155 - RNA, 20 nt, Artificial Sequence
  Synthetic
agaagccgcccgacccgacg

SEQ ID NO: 3156 - RNA, 20 nt, Artificial Sequence
  Synthetic
agccgcccgacccgacgcgg

SEQ ID NO: 3157 - RNA, 20 nt, Artificial Sequence
  Synthetic
gucccccccgcaguacaccu

SEQ ID NO: 3158 - RNA, 20 nt, Artificial Sequence
  Synthetic
acaccuugggggcgcgcuug

SEQ ID NO: 3159 - RNA, 20 nt, Artificial Sequence
  Synthetic
gaggugaccgucgugcaccc

SEQ ID NO: 3160 - RNA, 20 nt, Artificial Sequence
  Synthetic
ccccggcgcgcuucuccggg

SEQ ID NO: 3161 - RNA, 20 nt, Artificial Sequence
  Synthetic
gcauccucguccagcacccg

SEQ ID NO: 3162 - RNA, 20 nt, Artificial Sequence
  Synthetic
auccucguccagcacccgcg

SEQ ID NO: 3163 - RNA, 20 nt, Artificial Sequence
  Synthetic
gcuauaguacguauggcgcu

SEQ ID NO: 3164 - RNA, 20 nt, Artificial Sequence
  Synthetic
uaguacguauggcgcugggu

SEQ ID NO: 3165 - RNA, 20 nt, Artificial Sequence
  Synthetic
cguauggcgcuggguuggcc

SEQ ID NO: 3166 - RNA, 20 nt, Artificial Sequence
  Synthetic
ggcuucuguugcgucccgac

SEQ ID NO: 3167 - RNA, 20 nt, Artificial Sequence
  Synthetic
gcuucuguugcgucccgacu

SEQ ID NO: 3168 - RNA, 20 nt, Artificial Sequence
  Synthetic
cuucuguugcgucccgacug

SEQ ID NO: 3169 - RNA, 20 nt, Artificial Sequence
  Synthetic
guugcgucccgacuggggcg

SEQ ID NO: 3170 - RNA, 20 nt, Artificial Sequence
  Synthetic
cgucccgacuggggcgaggu

SEQ ID NO: 3171 - RNA, 20 nt, Artificial Sequence
  Synthetic
guuuugccucaaacaaggcg

SEQ ID NO: 3172 - RNA, 20 nt, Artificial Sequence
  Synthetic
uuuugccucaaacaaggcgg

SEQ ID NO: 3173 - RNA, 20 nt, Artificial Sequence
  Synthetic
ucaaacaaggcggggguccc

SEQ ID NO: 3174 - RNA, 20 nt, Artificial Sequence
  Synthetic
gccggcgggcgcaaaaaacc

SEQ ID NO: 3175 - RNA, 20 nt, Artificial Sequence
  Synthetic
aaaaaacccggacgccgccc

SEQ ID NO: 3176 - RNA, 20 nt, Artificial Sequence
  Synthetic
uggccgccgacuuuccuccg

SEQ ID NO: 3177 - RNA, 20 nt, Artificial Sequence
  Synthetic
ggccgccgacuuuccuccgg

SEQ ID NO: 3178 - RNA, 17 nt, Artificial Sequence
  Synthetic
gucccccggaggaaagu

SEQ ID NO: 3179 - RNA, 17 nt, Artificial Sequence
  Synthetic
aaagucggcggccaggg

SEQ ID NO: 3180 - RNA, 17 nt, Artificial Sequence
  Synthetic
ggguuuuuugcgcccgc

SEQ ID NO: 3181 - RNA, 17 nt, Artificial Sequence
  Synthetic
acgcaacagaagccgac

SEQ ID NO: 3182 - RNA, 17 nt, Artificial Sequence
  Synthetic
cgcaacagaagccgacc

SEQ ID NO: 3183 - RNA, 17 nt, Artificial Sequence
  Synthetic
uucgauucaucgccccg

SEQ ID NO: 3184 - RNA, 17 nt, Artificial Sequence
  Synthetic
ucgauucaucgccccgc

SEQ ID NO: 3185 - RNA, 17 nt, Artificial Sequence
  Synthetic
caucgccccgcgggugc

SEQ ID NO: 3186 - RNA, 17 nt, Artificial Sequence
  Synthetic
ccccggagaagcgcgcc

SEQ ID NO: 3187 - RNA, 17 nt, Artificial Sequence
  Synthetic
cgcgccggggugcacga

SEQ ID NO: 3188 - RNA, 17 nt, Artificial Sequence
  Synthetic
ccucaagcgcgccccca

SEQ ID NO: 3189 - RNA, 17 nt, Artificial Sequence
  Synthetic
gcccccaagguguacug

SEQ ID NO: 3190 - RNA, 17 nt, Artificial Sequence
  Synthetic
ccccaagguguacugcg

SEQ ID NO: 3191 - RNA, 17 nt, Artificial Sequence
  Synthetic
gcgacguccuccgcguc

SEQ ID NO: 3192 - RNA, 17 nt, Artificial Sequence
  Synthetic
cguccuccgcgucgggu

SEQ ID NO: 3193 - RNA, 17 nt, Artificial Sequence
  Synthetic
guccuccgcgucggguc

SEQ ID NO: 3194 - RNA, 17 nt, Artificial Sequence
  Synthetic
cuccgcgucgggucggg

SEQ ID NO: 3195 - RNA, 17 nt, Artificial Sequence
  Synthetic
cggcgcucgcgccugug

SEQ ID NO: 3196 - RNA, 17 nt, Artificial Sequence
  Synthetic
cgcucgcgccugugggg

SEQ ID NO: 3197 - RNA, 17 nt, Artificial Sequence
  Synthetic
cguggaccacgccccgg

SEQ ID NO: 3198 - RNA, 17 nt, Artificial Sequence
  Synthetic
guggaccacgccccggc

SEQ ID NO: 3199 - RNA, 17 nt, Artificial Sequence
  Synthetic
uggaccacgccccggcg

SEQ ID NO: 3200 - RNA, 17 nt, Artificial Sequence
  Synthetic
ucacguguacgacaucc

SEQ ID NO: 3201 - RNA, 17 nt, Artificial Sequence
  Synthetic
cgacauccuggagaacg

SEQ ID NO: 3202 - RNA, 17 nt, Artificial Sequence
  Synthetic
aacguggagcacgcgua

SEQ ID NO: 3203 - RNA, 17 nt, Artificial Sequence
  Synthetic
gucguacacgugaaaga

SEQ ID NO: 3204 - RNA, 17 nt, Artificial Sequence
  Synthetic
ugaaagacggugacggu

SEQ ID NO: 3205 - RNA, 17 nt, Artificial Sequence
  Synthetic
gggguugaaccccgccg

SEQ ID NO: 3206 - RNA, 17 nt, Artificial Sequence
  Synthetic
cacaggcgcgagcgccg

SEQ ID NO: 3207 - RNA, 17 nt, Artificial Sequence
  Synthetic
agccgcccgacccgacg

SEQ ID NO: 3208 - RNA, 17 nt, Artificial Sequence
  Synthetic
cgcccgacccgacgcgg

SEQ ID NO: 3209 - RNA, 17 nt, Artificial Sequence
  Synthetic
ccccccgcaguacaccu

SEQ ID NO: 3210 - RNA, 17 nt, Artificial Sequence
  Synthetic
cccccgcaguacaccuu

SEQ ID NO: 3211 - RNA, 17 nt, Artificial Sequence
  Synthetic
ccccgcaguacaccuug

SEQ ID NO: 3212 - RNA, 17 nt, Artificial Sequence
  Synthetic
gugaccgucgugcaccc

SEQ ID NO: 3213 - RNA, 17 nt, Artificial Sequence
  Synthetic
cccggcgcgcuucuccg

SEQ ID NO: 3214 - RNA, 17 nt, Artificial Sequence
  Synthetic
ccggcgcgcuucuccgg

SEQ ID NO: 3215 - RNA, 17 nt, Artificial Sequence
  Synthetic
cggcgcgcuucuccggg

SEQ ID NO: 3216 - RNA, 17 nt, Artificial Sequence
  Synthetic
ggcgcgcuucuccgggg

SEQ ID NO: 3217 - RNA, 17 nt, Artificial Sequence
  Synthetic
cucguccagcacccgcg

SEQ ID NO: 3218 - RNA, 17 nt, Artificial Sequence
  Synthetic
auucgcuauaguacgua

SEQ ID NO: 3219 - RNA, 17 nt, Artificial Sequence
  Synthetic
uauaguacguauggcgc

SEQ ID NO: 3220 - RNA, 17 nt, Artificial Sequence
  Synthetic
auaguacguauggcgcu

SEQ ID NO: 3221 - RNA, 17 nt, Artificial Sequence
  Synthetic
uacguauggcgcugggu

SEQ ID NO: 3222 - RNA, 17 nt, Artificial Sequence
  Synthetic
uucuguugcgucccgac

SEQ ID NO: 3223 - RNA, 17 nt, Artificial Sequence
  Synthetic
ucuguugcgucccgacu

SEQ ID NO: 3224 - RNA, 17 nt, Artificial Sequence
  Synthetic
cuguugcgucccgacug

SEQ ID NO: 3225 - RNA, 17 nt, Artificial Sequence
  Synthetic
gcgucccgacuggggcg

SEQ ID NO: 3226 - RNA, 17 nt, Artificial Sequence
  Synthetic
cgacuggggcgagguag

SEQ ID NO: 3227 - RNA, 17 nt, Artificial Sequence
  Synthetic
ggcgggcgcaaaaaacc

SEQ ID NO: 3228 - RNA, 17 nt, Artificial Sequence
  Synthetic
ggccgccgacuuuccuc

SEQ ID NO: 3229 - RNA, 17 nt, Artificial Sequence
  Synthetic
gccgccgacuuuccucc

SEQ ID NO: 3230 - RNA, 17 nt, Artificial Sequence
  Synthetic
ccgccgacuuuccuccg

SEQ ID NO: 3231 - RNA, 17 nt, Artificial Sequence
  Synthetic
cgccgacuuuccuccgg

SEQ ID NO: 3232 - RNA, 20 nt, Artificial Sequence
  Synthetic
ggcggcggcccgcugucccc

SEQ ID NO: 3233 - RNA, 20 nt, Artificial Sequence
  Synthetic
ggcggcccgcugucccccgg

SEQ ID NO: 3234 - RNA, 20 nt, Artificial Sequence
  Synthetic
gcugucccccggaggaaagu

SEQ ID NO: 3235 - RNA, 20 nt, Artificial Sequence
  Synthetic
cggaggaaagucggcggcca

SEQ ID NO: 3236 - RNA, 20 nt, Artificial Sequence
  Synthetic
aggaaagucggcggccaggg

SEQ ID NO: 3237 - RNA, 20 nt, Artificial Sequence
  Synthetic
ucggcggccagggcggcguc

SEQ ID NO: 3238 - RNA, 20 nt, Artificial Sequence
  Synthetic
cggcggccagggcggcgucc

SEQ ID NO: 3239 - RNA, 20 nt, Artificial Sequence
  Synthetic
uccggguuuuuugcgcccgc

SEQ ID NO: 3240 - RNA, 20 nt, Artificial Sequence
  Synthetic
ccggcccucgcggagccagc

SEQ ID NO: 3241 - RNA, 20 nt, Artificial Sequence
  Synthetic
cggcccucgcggagccagcc

SEQ ID NO: 3242 - RNA, 20 nt, Artificial Sequence
  Synthetic
ggcccucgcggagccagccg

SEQ ID NO: 3243 - RNA, 20 nt, Artificial Sequence
  Synthetic
ggggacccccgccuuguuug

SEQ ID NO: 3244 - RNA, 20 nt, Artificial Sequence
  Synthetic
aaccccuaccucgccccagu

SEQ ID NO: 3245 - RNA, 20 nt, Artificial Sequence
  Synthetic
accccuaccucgccccaguc

SEQ ID NO: 3246 - RNA, 20 nt, Artificial Sequence
  Synthetic
cgccccgcgggugcuggacg

SEQ ID NO: 3247 - RNA, 20 nt, Artificial Sequence
  Synthetic
gcuggacgaggaugcccccc

SEQ ID NO: 3248 - RNA, 20 nt, Artificial Sequence
  Synthetic
cccccccggagaagcgcgcc

SEQ ID NO: 3249 - RNA, 20 nt, Artificial Sequence
  Synthetic
cccccaagguguacugcggg

SEQ ID NO: 3250 - RNA, 20 nt, Artificial Sequence
  Synthetic
ccccaagguguacugcgggg

SEQ ID NO: 3251 - RNA, 20 nt, Artificial Sequence
  Synthetic
gcgucgggucgggcggcuuc

SEQ ID NO: 3252 - RNA, 20 nt, Artificial Sequence
  Synthetic
ggucgggcggcuucuggccg

SEQ ID NO: 3253 - RNA, 20 nt, Artificial Sequence
  Synthetic
ggccgcggcgcucgcgccug

SEQ ID NO: 3254 - RNA, 20 nt, Artificial Sequence
  Synthetic
gccgcggcgcucgcgccugu

SEQ ID NO: 3255 - RNA, 20 nt, Artificial Sequence
  Synthetic
ccgcggcgcucgcgccugug

SEQ ID NO: 3256 - RNA, 20 nt, Artificial Sequence
  Synthetic
cggcgcucgcgccugugggg

SEQ ID NO: 3257 - RNA, 20 nt, Artificial Sequence
  Synthetic
cucgcgccuguggggcggcg

SEQ ID NO: 3258 - RNA, 20 nt, Artificial Sequence
  Synthetic
gggcggcguggaccacgccc

SEQ ID NO: 3259 - RNA, 20 nt, Artificial Sequence
  Synthetic
cggcguggaccacgccccgg

SEQ ID NO: 3260 - RNA, 20 nt, Artificial Sequence
  Synthetic
gcacgcguacggcaugcgcg

SEQ ID NO: 3261 - RNA, 20 nt, Artificial Sequence
  Synthetic
guacacgugaaagacgguga

SEQ ID NO: 3262 - RNA, 20 nt, Artificial Sequence
  Synthetic
cacgugaaagacggugacgg

SEQ ID NO: 3263 - RNA, 20 nt, Artificial Sequence
  Synthetic
acgugaaagacggugacggu

SEQ ID NO: 3264 - RNA, 20 nt, Artificial Sequence
  Synthetic
cggugggguugaaccccgcc

SEQ ID NO: 3265 - RNA, 20 nt, Artificial Sequence
  Synthetic
cgugguccacgccgccccac

SEQ ID NO: 3266 - RNA, 20 nt, Artificial Sequence
  Synthetic
ccccacaggcgcgagcgccg

SEQ ID NO: 3267 - RNA, 20 nt, Artificial Sequence
  Synthetic
ucccccccgcaguacaccuu

SEQ ID NO: 3268 - RNA, 20 nt, Artificial Sequence
  Synthetic
cccccccgcaguacaccuug

SEQ ID NO: 3269 - RNA, 20 nt, Artificial Sequence
  Synthetic
ccccccgcaguacaccuugg

SEQ ID NO: 3270 - RNA, 20 nt, Artificial Sequence
  Synthetic
ugcaccccggcgcgcuucuc

SEQ ID NO: 3271 - RNA, 20 nt, Artificial Sequence
  Synthetic
gcaccccggcgcgcuucucc

SEQ ID NO: 3272 - RNA, 20 nt, Artificial Sequence
  Synthetic
caccccggcgcgcuucuccg

SEQ ID NO: 3273 - RNA, 20 nt, Artificial Sequence
  Synthetic
accccggcgcgcuucuccgg

SEQ ID NO: 3274 - RNA, 20 nt, Artificial Sequence
  Synthetic
cccggcgcgcuucuccgggg

SEQ ID NO: 3275 - RNA, 20 nt, Artificial Sequence
  Synthetic
cauccucguccagcacccgc

SEQ ID NO: 3276 - RNA, 20 nt, Artificial Sequence
  Synthetic
cgcauucgcuauaguacgua

SEQ ID NO: 3277 - RNA, 20 nt, Artificial Sequence
  Synthetic
cgcuauaguacguauggcgc

SEQ ID NO: 3278 - RNA, 20 nt, Artificial Sequence
  Synthetic
uggcgcuggguuggcccggu

SEQ ID NO: 3279 - RNA, 20 nt, Artificial Sequence
  Synthetic
gucccgacuggggcgaggua

SEQ ID NO: 3280 - RNA, 20 nt, Artificial Sequence
  Synthetic
ucccgacuggggcgagguag

SEQ ID NO: 3281 - RNA, 20 nt, Artificial Sequence
  Synthetic
uaaaaguuuugccucaaaca

SEQ ID NO: 3282 - RNA, 20 nt, Artificial Sequence
  Synthetic
aaguuuugccucaaacaagg

SEQ ID NO: 3283 - RNA, 20 nt, Artificial Sequence
  Synthetic
aguuuugccucaaacaaggc

SEQ ID NO: 3284 - RNA, 20 nt, Artificial Sequence
  Synthetic
acaaggcggggguccccggc

SEQ ID NO: 3285 - RNA, 20 nt, Artificial Sequence
  Synthetic
gguccccggcuggcuccgcg

SEQ ID NO: 3286 - RNA, 20 nt, Artificial Sequence
  Synthetic
guccccggcuggcuccgcga

SEQ ID NO: 3287 - RNA, 20 nt, Artificial Sequence
  Synthetic
ccggcuggcuccgcgagggc

SEQ ID NO: 3288 - RNA, 20 nt, Artificial Sequence
  Synthetic
gcuggcuccgcgagggccgg

SEQ ID NO: 3289 - RNA, 20 nt, Artificial Sequence
  Synthetic
cuggcuccgcgagggccggc

SEQ ID NO: 3290 - RNA, 20 nt, Artificial Sequence
  Synthetic
ccuggccgccgacuuuccuc

SEQ ID NO: 3291 - RNA, 20 nt, Artificial Sequence
  Synthetic
cuggccgccgacuuuccucc

SEQ ID NO: 3292 - RNA, 20 nt, Artificial Sequence
  Synthetic
gacuuuccuccgggggacag

SEQ ID NO: 3293 - RNA, 20 nt, Artificial Sequence
  Synthetic
acuuuccuccgggggacagc

SEQ ID NO: 3294 - RNA, 20 nt, Artificial Sequence
  Synthetic
ggacagcgggccgccgccac

SEQ ID NO: 3295 - RNA, 17 nt, Artificial Sequence
  Synthetic
ggcggcccgcugucccc

SEQ ID NO: 3296 - RNA, 17 nt, Artificial Sequence
  Synthetic
ggcccgcugucccccgg

SEQ ID NO: 3297 - RNA, 17 nt, Artificial Sequence
  Synthetic
ccccggaggaaagucgg

SEQ ID NO: 3298 - RNA, 17 nt, Artificial Sequence
  Synthetic
gaggaaagucggcggcc

SEQ ID NO: 3299 - RNA, 17 nt, Artificial Sequence
  Synthetic
aggaaagucggcggcca

SEQ ID NO: 3300 - RNA, 17 nt, Artificial Sequence
  Synthetic
gcggccagggcggcguc

SEQ ID NO: 3301 - RNA, 17 nt, Artificial Sequence
  Synthetic
cggccagggcggcgucc

SEQ ID NO: 3302 - RNA, 17 nt, Artificial Sequence
  Synthetic
gcgcccgccggcccucg

SEQ ID NO: 3303 - RNA, 17 nt, Artificial Sequence
  Synthetic
gcccucgcggagccagc

SEQ ID NO: 3304 - RNA, 17 nt, Artificial Sequence
  Synthetic
cccucgcggagccagcc

SEQ ID NO: 3305 - RNA, 17 nt, Artificial Sequence
  Synthetic
ccucgcggagccagccg

SEQ ID NO: 3306 - RNA, 17 nt, Artificial Sequence
  Synthetic
gacccccgccuuguuug

SEQ ID NO: 3307 - RNA, 17 nt, Artificial Sequence
  Synthetic
cccuaccucgccccagu

SEQ ID NO: 3308 - RNA, 17 nt, Artificial Sequence
  Synthetic
ccuaccucgccccaguc

SEQ ID NO: 3309 - RNA, 17 nt, Artificial Sequence
  Synthetic
cccgcgggugcuggacg

SEQ ID NO: 3310 - RNA, 17 nt, Artificial Sequence
  Synthetic
ggacgaggaugcccccc

SEQ ID NO: 3311 - RNA, 17 nt, Artificial Sequence
  Synthetic
cccccggagaagcgcgc

SEQ ID NO: 3312 - RNA, 17 nt, Artificial Sequence
  Synthetic
cccggagaagcgcgccg

SEQ ID NO: 3313 - RNA, 17 nt, Artificial Sequence
  Synthetic
cccccaagguguacugc

SEQ ID NO: 3314 - RNA, 17 nt, Artificial Sequence
  Synthetic
cccaagguguacugcgg

SEQ ID NO: 3315 - RNA, 17 nt, Artificial Sequence
  Synthetic
ccaagguguacugcggg

SEQ ID NO: 3316 - RNA, 17 nt, Artificial Sequence
  Synthetic
caagguguacugcgggg

SEQ ID NO: 3317 - RNA, 17 nt, Artificial Sequence
  Synthetic
cgcgacguccuccgcgu

SEQ ID NO: 3318 - RNA, 17 nt, Artificial Sequence
  Synthetic
ucgggucgggcggcuuc

SEQ ID NO: 3319 - RNA, 17 nt, Artificial Sequence
  Synthetic
cgggcggcuucuggccg

SEQ ID NO: 3320 - RNA, 17 nt, Artificial Sequence
  Synthetic
cgcggcgcucgcgccug

SEQ ID NO: 3321 - RNA, 17 nt, Artificial Sequence
  Synthetic
gcggcgcucgcgccugu

SEQ ID NO: 3322 - RNA, 17 nt, Artificial Sequence
  Synthetic
gcgccuguggggcggcg

SEQ ID NO: 3323 - RNA, 17 nt, Artificial Sequence
  Synthetic
cggcguggaccacgccc

SEQ ID NO: 3324 - RNA, 17 nt, Artificial Sequence
  Synthetic
cgcguacggcaugcgcg

SEQ ID NO: 3325 - RNA, 17 nt, Artificial Sequence
  Synthetic
cgugcuccacguucucc

SEQ ID NO: 3326 - RNA, 17 nt, Artificial Sequence
  Synthetic
cacgugaaagacgguga

SEQ ID NO: 3327 - RNA, 17 nt, Artificial Sequence
  Synthetic
gugaaagacggugacgg

SEQ ID NO: 3328 - RNA, 17 nt, Artificial Sequence
  Synthetic
gaaagacggugacggug

SEQ ID NO: 3329 - RNA, 17 nt, Artificial Sequence
  Synthetic
gugggguugaaccccgc

SEQ ID NO: 3330 - RNA, 17 nt, Artificial Sequence
  Synthetic
ugggguugaaccccgcc

SEQ ID NO: 3331 - RNA, 17 nt, Artificial Sequence
  Synthetic
ugaaccccgccggggcg

SEQ ID NO: 3332 - RNA, 17 nt, Artificial Sequence
  Synthetic
gguccacgccgccccac

SEQ ID NO: 3333 - RNA, 17 nt, Artificial Sequence
  Synthetic
cccgcaguacaccuugg

SEQ ID NO: 3334 - RNA, 17 nt, Artificial Sequence
  Synthetic
ccuugggggcgcgcuug

SEQ ID NO: 3335 - RNA, 17 nt, Artificial Sequence
  Synthetic
accccggcgcgcuucuc

SEQ ID NO: 3336 - RNA, 17 nt, Artificial Sequence
  Synthetic
ccccggcgcgcuucucc

SEQ ID NO: 3337 - RNA, 17 nt, Artificial Sequence
  Synthetic
uccucguccagcacccg

SEQ ID NO: 3338 - RNA, 17 nt, Artificial Sequence
  Synthetic
ccucguccagcacccgc

SEQ ID NO: 3339 - RNA, 17 nt, Artificial Sequence
  Synthetic
auggcgcuggguuggcc

SEQ ID NO: 3340 - RNA, 17 nt, Artificial Sequence
  Synthetic
cgcuggguuggcccggu

SEQ ID NO: 3341 - RNA, 17 nt, Artificial Sequence
  Synthetic
cccgacuggggcgaggu

SEQ ID NO: 3342 - RNA, 17 nt, Artificial Sequence
  Synthetic
ccgacuggggcgaggua

SEQ ID NO: 3343 - RNA, 17 nt, Artificial Sequence
  Synthetic
aaguuuugccucaaaca

SEQ ID NO: 3344 - RNA, 17 nt, Artificial Sequence
  Synthetic
uuuugccucaaacaagg

SEQ ID NO: 3345 - RNA, 17 nt, Artificial Sequence
  Synthetic
uuugccucaaacaaggc

SEQ ID NO: 3346 - RNA, 17 nt, Artificial Sequence
  Synthetic
uugccucaaacaaggcg

SEQ ID NO: 3347 - RNA, 17 nt, Artificial Sequence
  Synthetic
ugccucaaacaaggcgg

SEQ ID NO: 3348 - RNA, 17 nt, Artificial Sequence
  Synthetic
aacaaggcggggguccc

SEQ ID NO: 3349 - RNA, 17 nt, Artificial Sequence
  Synthetic
aggcggggguccccggc

SEQ ID NO: 3350 - RNA, 17 nt, Artificial Sequence
  Synthetic
ccccggcuggcuccgcg

SEQ ID NO: 3351 - RNA, 17 nt, Artificial Sequence
  Synthetic
cccggcuggcuccgcga

SEQ ID NO: 3352 - RNA, 17 nt, Artificial Sequence
  Synthetic
gcuggcuccgcgagggc

SEQ ID NO: 3353 - RNA, 17 nt, Artificial Sequence
  Synthetic
ggcuccgcgagggccgg

SEQ ID NO: 3354 - RNA, 17 nt, Artificial Sequence
  Synthetic
gcuccgcgagggccggc

SEQ ID NO: 3355 - RNA, 17 nt, Artificial Sequence
  Synthetic
aaacccggacgccgccc

SEQ ID NO: 3356 - RNA, 17 nt, Artificial Sequence
  Synthetic
uuuccuccgggggacag

SEQ ID NO: 3357 - RNA, 17 nt, Artificial Sequence
  Synthetic
uuccuccgggggacagc

SEQ ID NO: 3358 - RNA, 17 nt, Artificial Sequence
  Synthetic
cagcgggccgccgccac

SEQ ID NO: 3359 - DNA, 20 bp, Artificial Sequence
  Synthetic
tatggacgccatcacaccga

SEQ ID NO: 3360 - DNA, 20 bp, Artificial Sequence
  Synthetic
atggacgccatcacaccgac

SEQ ID NO: 3361 - DNA, 20 bp, Artificial Sequence
  Synthetic
tggacgccatcacaccgacg

SEQ ID NO: 3362 - DNA, 20 bp, Artificial Sequence
  Synthetic
ggggaccgtcatcacgctcc

SEQ ID NO: 3363 - DNA, 20 bp, Artificial Sequence
  Synthetic
gggaccgtcatcacgctcct

SEQ ID NO: 3364 - DNA, 20 bp, Artificial Sequence
  Synthetic
cacgctcctgggcctgactc

SEQ ID NO: 3365 - DNA, 20 bp, Artificial Sequence
  Synthetic
ctcctgggcctgactccgga

SEQ ID NO: 3366 - DNA, 20 bp, Artificial Sequence
  Synthetic
gcctgactccggaaggccac

SEQ ID NO: 3367 - DNA, 20 bp, Artificial Sequence
  Synthetic
cctgactccggaaggccacc

SEQ ID NO: 3368 - DNA, 20 bp, Artificial Sequence
  Synthetic
gactccggaaggccaccggg

SEQ ID NO: 3369 - DNA, 20 bp, Artificial Sequence
  Synthetic
cgggtggccgttcacgttta

SEQ ID NO: 3370 - DNA, 20 bp, Artificial Sequence
  Synthetic
ccgttcacgtttacggcacg

SEQ ID NO: 3371 - DNA, 20 bp, Artificial Sequence
  Synthetic
gcagtacttttacatgaaca

SEQ ID NO: 3372 - DNA, 20 bp, Artificial Sequence
  Synthetic
gtacttttacatgaacaagg

SEQ ID NO: 3373 - DNA, 20 bp, Artificial Sequence
  Synthetic
cttttacatgaacaaggagg

SEQ ID NO: 3374 - DNA, 20 bp, Artificial Sequence
  Synthetic
tgaacaaggaggaggtcgac

SEQ ID NO: 3375 - DNA, 20 bp, Artificial Sequence
  Synthetic
acgagatctctgcgagcgca

SEQ ID NO: 3376 - DNA, 20 bp, Artificial Sequence
  Synthetic
tctctgcgagcgcatggccg

SEQ ID NO: 3377 - DNA, 20 bp, Artificial Sequence
  Synthetic
cgcggccctgcgcgagtccc

SEQ ID NO: 3378 - DNA, 20 bp, Artificial Sequence
  Synthetic
gcggccctgcgcgagtcccc

SEQ ID NO: 3379 - DNA, 20 bp, Artificial Sequence
  Synthetic
tccccgggcgcgtcgttccg

SEQ ID NO: 3380 - DNA, 20 bp, Artificial Sequence
  Synthetic
gtcgttccgcggcatctccg

SEQ ID NO: 3381 - DNA, 20 bp, Artificial Sequence
  Synthetic
catctccgcggaccacttcg

SEQ ID NO: 3382 - DNA, 20 bp, Artificial Sequence
  Synthetic
ctccgcggaccacttcgagg

SEQ ID NO: 3383 - DNA, 20 bp, Artificial Sequence
  Synthetic
cgcggaccacttcgaggcgg

SEQ ID NO: 3384 - DNA, 20 bp, Artificial Sequence
  Synthetic
ggaccacttcgaggcggagg

SEQ ID NO: 3385 - DNA, 20 bp, Artificial Sequence
  Synthetic
ccacttcgaggcggaggtgg

SEQ ID NO: 3386 - DNA, 20 bp, Artificial Sequence
  Synthetic
taccgcgtctacgtccgaag

SEQ ID NO: 3387 - DNA, 20 bp, Artificial Sequence
  Synthetic
accgcgtctacgtccgaagc

SEQ ID NO: 3388 - DNA, 20 bp, Artificial Sequence
  Synthetic
cctgtgcgacaacttctgcc

SEQ ID NO: 3389 - DNA, 20 bp, Artificial Sequence
  Synthetic
cccggccatcaagaagtacg

SEQ ID NO: 3390 - DNA, 20 bp, Artificial Sequence
  Synthetic
ccggccatcaagaagtacga

SEQ ID NO: 3391 - DNA, 20 bp, Artificial Sequence
  Synthetic
gccatcaagaagtacgaggg

SEQ ID NO: 3392 - DNA, 20 bp, Artificial Sequence
  Synthetic
ccatcaagaagtacgagggt

SEQ ID NO: 3393 - DNA, 20 bp, Artificial Sequence
  Synthetic
catcaagaagtacgagggtg

SEQ ID NO: 3394 - DNA, 20 bp, Artificial Sequence
  Synthetic
gtggggtcgacgccaccacc

SEQ ID NO: 3395 - DNA, 20 bp, Artificial Sequence
  Synthetic
cgccaccacccggttcatcc

SEQ ID NO: 3396 - DNA, 20 bp, Artificial Sequence
  Synthetic
cggttcatcctggacaaccc

SEQ ID NO: 3397 - DNA, 20 bp, Artificial Sequence
  Synthetic
ggttcatcctggacaacccc

SEQ ID NO: 3398 - DNA, 20 bp, Artificial Sequence
  Synthetic
aaccccgggttcgtcacctt

SEQ ID NO: 3399 - DNA, 20 bp, Artificial Sequence
  Synthetic
ccgggttcgtcaccttcggc

SEQ ID NO: 3400 - DNA, 20 bp, Artificial Sequence
  Synthetic
cggctggtaccgtctcaaac

SEQ ID NO: 3401 - DNA, 20 bp, Artificial Sequence
  Synthetic
ggctggtaccgtctcaaacc

SEQ ID NO: 3402 - DNA, 20 bp, Artificial Sequence
  Synthetic
ggtaccgtctcaaaccgggc

SEQ ID NO: 3403 - DNA, 20 bp, Artificial Sequence
  Synthetic
gaacaacacgctagcccagc

SEQ ID NO: 3404 - DNA, 20 bp, Artificial Sequence
  Synthetic
caacacgctagcccagccgg

SEQ ID NO: 3405 - RNA, 20 nt, Artificial Sequence
  Synthetic
agcccagccggcggccccga

SEQ ID NO: 3406 - DNA, 20 bp, Artificial Sequence
  Synthetic
ccggcggccccgatggcctt

SEQ ID NO: 3407 - DNA, 20 bp, Artificial Sequence
  Synthetic
cggcggccccgatggccttc

SEQ ID NO: 3408 - DNA, 20 bp, Artificial Sequence
  Synthetic
cgacgtcgagtttaactgta

SEQ ID NO: 3409 - DNA, 20 bp, Artificial Sequence
  Synthetic
cgtcgagtttaactgtacgg

SEQ ID NO: 3410 - DNA, 20 bp, Artificial Sequence
  Synthetic
taactgtacggcggacaacc

SEQ ID NO: 3411 - DNA, 20 bp, Artificial Sequence
  Synthetic
ggcggacaacctggccatcg

SEQ ID NO: 3412 - DNA, 20 bp, Artificial Sequence
  Synthetic
gcggacaacctggccatcga

SEQ ID NO: 3413 - DNA, 20 bp, Artificial Sequence
  Synthetic
cggacaacctggccatcgag

SEQ ID NO: 3414 - DNA, 20 bp, Artificial Sequence
  Synthetic
ggacaacctggccatcgagg

SEQ ID NO: 3415 - DNA, 20 bp, Artificial Sequence
  Synthetic
gacaacctggccatcgaggg

SEQ ID NO: 3416 - DNA, 20 bp, Artificial Sequence
  Synthetic
ggggggcatgagcgacctac

SEQ ID NO: 3417 - DNA, 20 bp, Artificial Sequence
  Synthetic
gtgcttcgatatcgaatgca

SEQ ID NO: 3418 - DNA, 20 bp, Artificial Sequence
  Synthetic
cttcgatatcgaatgcaagg

SEQ ID NO: 3419 - DNA, 20 bp, Artificial Sequence
  Synthetic
ttcgatatcgaatgcaaggc

SEQ ID NO: 3420 - DNA, 20 bp, Artificial Sequence
  Synthetic
tcgatatcgaatgcaaggcg

SEQ ID NO: 3421 - DNA, 20 bp, Artificial Sequence
  Synthetic
cgatatcgaatgcaaggcgg

SEQ ID NO: 3422 - DNA, 20 bp, Artificial Sequence
  Synthetic
gatatcgaatgcaaggcggg

SEQ ID NO: 3423 - DNA, 20 bp, Artificial Sequence
  Synthetic
atatcgaatgcaaggcgggg

SEQ ID NO: 3424 - DNA, 20 bp, Artificial Sequence
  Synthetic
tatcgaatgcaaggcggggg

SEQ ID NO: 3425 - DNA, 20 bp, Artificial Sequence
  Synthetic
cgaatgcaaggcgggggggg

SEQ ID NO: 3426 - RNA, 20 nt, Artificial Sequence
  Synthetic
ggcggggggggaggacgagc

SEQ ID NO: 3427 - DNA, 20 bp, Artificial Sequence
  Synthetic
ggaggacgagctggcctttc

SEQ ID NO: 3428 - DNA, 20 bp, Artificial Sequence
  Synthetic
ggacgagctggcctttccgg

SEQ ID NO: 3429 - DNA, 20 bp, Artificial Sequence
  Synthetic
gagctggcctttccggtggc

SEQ ID NO: 3430 - DNA, 20 bp, Artificial Sequence
  Synthetic
agctggcctttccggtggcc

SEQ ID NO: 3431 - DNA, 20 bp, Artificial Sequence
  Synthetic
ctttccggtggccgggcacc

SEQ ID NO: 3432 - DNA, 20 bp, Artificial Sequence
  Synthetic
tccggtggccgggcacccgg

SEQ ID NO: 3433 - RNA, 20 nt, Artificial Sequence
  Synthetic
ggccgggcacccggaggacc

SEQ ID NO: 3434 - DNA, 20 bp, Artificial Sequence
  Synthetic
cgacctgtccaccaccgccc

SEQ ID NO: 3435 - DNA, 20 bp, Artificial Sequence
  Synthetic
cacgtcctcctgttttcgct

SEQ ID NO: 3436 - DNA, 20 bp, Artificial Sequence
  Synthetic
cgaatcccacctgaacgagc

SEQ ID NO: 3437 - DNA, 20 bp, Artificial Sequence
  Synthetic
atcccacctgaacgagctgg

SEQ ID NO: 3438 - DNA, 20 bp, Artificial Sequence
  Synthetic
acctgaacgagctggcggcc

SEQ ID NO: 3439 - DNA, 20 bp, Artificial Sequence
  Synthetic
cctgaacgagctggcggcca

SEQ ID NO: 3440 - DNA, 20 bp, Artificial Sequence
  Synthetic
ctgaacgagctggcggccag

SEQ ID NO: 3441 - DNA, 20 bp, Artificial Sequence
  Synthetic
caggggcctgcccacgcccg

SEQ ID NO: 3442 - DNA, 20 bp, Artificial Sequence
  Synthetic
cctgcccacgcccgtggttc

SEQ ID NO: 3443 - DNA, 20 bp, Artificial Sequence
  Synthetic
cagcgaattcgagatgctgt

SEQ ID NO: 3444 - DNA, 20 bp, Artificial Sequence
  Synthetic
atgacccttgtgaaacagta

SEQ ID NO: 3445 - DNA, 20 bp, Artificial Sequence
  Synthetic
tacggccccgagttcgtgac

SEQ ID NO: 3446 - DNA, 20 bp, Artificial Sequence
  Synthetic
acggccccgagttcgtgacc

SEQ ID NO: 3447 - DNA, 20 bp, Artificial Sequence
  Synthetic
acaacatcatcaacttcgac

SEQ ID NO: 3448 - DNA, 20 bp, Artificial Sequence
  Synthetic
cttcgactggcccttcttgc

SEQ ID NO: 3449 - DNA, 20 bp, Artificial Sequence
  Synthetic
cttcttgctggccaagctga

SEQ ID NO: 3450 - DNA, 20 bp, Artificial Sequence
  Synthetic
caagctgacggacatttaca

SEQ ID NO: 3451 - DNA, 20 bp, Artificial Sequence
  Synthetic
ggacatttacaaggtccccc

SEQ ID NO: 3452 - DNA, 20 bp, Artificial Sequence
  Synthetic
atttacaaggtccccctgga

SEQ ID NO: 3453 - DNA, 20 bp, Artificial Sequence
  Synthetic
tttacaaggtccccctggac

SEQ ID NO: 3454 - DNA, 20 bp, Artificial Sequence
  Synthetic
aaggtccccctggacgggta

SEQ ID NO: 3455 - DNA, 20 bp, Artificial Sequence
  Synthetic
gacgggtacggccgcatgaa

SEQ ID NO: 3456 - DNA, 20 bp, Artificial Sequence
  Synthetic
ggtacggccgcatgaacggc

SEQ ID NO: 3457 - DNA, 20 bp, Artificial Sequence
  Synthetic
gtacggccgcatgaacggcc

SEQ ID NO: 3458 - DNA, 20 bp, Artificial Sequence
  Synthetic
tacggccgcatgaacggccg

SEQ ID NO: 3459 - DNA, 20 bp, Artificial Sequence
  Synthetic
gccggggcgtgtttcgcgtg

SEQ ID NO: 3460 - DNA, 20 bp, Artificial Sequence
  Synthetic
ccggggcgtgtttcgcgtgt

SEQ ID NO: 3461 - DNA, 20 bp, Artificial Sequence
  Synthetic
gtgtttcgcgtgtgggacat

SEQ ID NO: 3462 - DNA, 20 bp, Artificial Sequence
  Synthetic
ccagaagcgcagcaagataa

SEQ ID NO: 3463 - DNA, 20 bp, Artificial Sequence
  Synthetic
cgcagcaagataaaggtgaa

SEQ ID NO: 3464 - DNA, 20 bp, Artificial Sequence
  Synthetic
caagataaaggtgaacggca

SEQ ID NO: 3465 - DNA, 20 bp, Artificial Sequence
  Synthetic
atggtgaacatcgacatgta

SEQ ID NO: 3466 - DNA, 20 bp, Artificial Sequence
  Synthetic
tggtgaacatcgacatgtac

SEQ ID NO: 3467 - DNA, 20 bp, Artificial Sequence
  Synthetic
gagctacaagctcaacgccg

SEQ ID NO: 3468 - DNA, 20 bp, Artificial Sequence
  Synthetic
cgtggccgaagccgtcctga

SEQ ID NO: 3469 - DNA, 20 bp, Artificial Sequence
  Synthetic
cgtcctgaaggacaagaaga

SEQ ID NO: 3470 - DNA, 20 bp, Artificial Sequence
  Synthetic
atccccgcctactacgccgc

SEQ ID NO: 3471 - DNA, 20 bp, Artificial Sequence
  Synthetic
tccccgcctactacgccgcc

SEQ ID NO: 3472 - RNA, 20 nt, Artificial Sequence
  Synthetic
gccgccgggcccgcgcaacg

SEQ ID NO: 3473 - RNA, 20 nt, Artificial Sequence
  Synthetic
ccgccgggcccgcgcaacgc

SEQ ID NO: 3474 - RNA, 20 nt, Artificial Sequence
  Synthetic
cgccgggcccgcgcaacgcg

SEQ ID NO: 3475 - DNA, 20 bp, Artificial Sequence
  Synthetic
cccgcgcaacgcggggtgat

SEQ ID NO: 3476 - DNA, 20 bp, Artificial Sequence
  Synthetic
gatcggcgagtactgcatac

SEQ ID NO: 3477 - DNA, 20 bp, Artificial Sequence
  Synthetic
ctgcatacaggattccctgc

SEQ ID NO: 3478 - DNA, 20 bp, Artificial Sequence
  Synthetic
catacaggattccctgctgg

SEQ ID NO: 3479 - DNA, 20 bp, Artificial Sequence
  Synthetic
atacaggattccctgctggt

SEQ ID NO: 3480 - DNA, 20 bp, Artificial Sequence
  Synthetic
ttttaagtttttgccccatc

SEQ ID NO: 3481 - DNA, 20 bp, Artificial Sequence
  Synthetic
tttgccccatctggagctct

SEQ ID NO: 3482 - DNA, 20 bp, Artificial Sequence
  Synthetic
gctctcggccgtcgcgcgct

SEQ ID NO: 3483 - DNA, 20 bp, Artificial Sequence
  Synthetic
ctcggccgtcgcgcgcttgg

SEQ ID NO: 3484 - DNA, 20 bp, Artificial Sequence
  Synthetic
tcggccgtcgcgcgcttggc

SEQ ID NO: 3485 - DNA, 20 bp, Artificial Sequence
  Synthetic
atcacccgcaccatctacga

SEQ ID NO: 3486 - DNA, 20 bp, Artificial Sequence
  Synthetic
ctttacgtgcctgctgcgcc

SEQ ID NO: 3487 - DNA, 20 bp, Artificial Sequence
  Synthetic
gctgcgcctggccgaccaga

SEQ ID NO: 3488 - DNA, 20 bp, Artificial Sequence
  Synthetic
ctgcgcctggccgaccagaa

SEQ ID NO: 3489 - DNA, 20 bp, Artificial Sequence
  Synthetic
ccagaagggctttattctgc

SEQ ID NO: 3490 - DNA, 20 bp, Artificial Sequence
  Synthetic
ctttattctgccggacaccc

SEQ ID NO: 3491 - DNA, 20 bp, Artificial Sequence
  Synthetic
tttattctgccggacaccca

SEQ ID NO: 3492 - DNA, 20 bp, Artificial Sequence
  Synthetic
ttattctgccggacacccag

SEQ ID NO: 3493 - DNA, 20 bp, Artificial Sequence
  Synthetic
cggacacccaggggcgattt

SEQ ID NO: 3494 - DNA, 20 bp, Artificial Sequence
  Synthetic
ggacacccaggggcgattta

SEQ ID NO: 3495 - DNA, 20 bp, Artificial Sequence
  Synthetic
gacacccaggggcgatttag

SEQ ID NO: 3496 - DNA, 20 bp, Artificial Sequence
  Synthetic
caggggcgatttaggggcgc

SEQ ID NO: 3497 - DNA, 20 bp, Artificial Sequence
  Synthetic
aggggcgatttaggggcgcc

SEQ ID NO: 3498 - DNA, 20 bp, Artificial Sequence
  Synthetic
ggggcgatttaggggcgccg

SEQ ID NO: 3499 - DNA, 20 bp, Artificial Sequence
  Synthetic
gggcgatttaggggcgccgg

SEQ ID NO: 3500 - DNA, 20 bp, Artificial Sequence
  Synthetic
ggcgatttaggggcgccggg

SEQ ID NO: 3501 - DNA, 20 bp, Artificial Sequence
  Synthetic
gcgatttaggggcgccgggg

SEQ ID NO: 3502 - DNA, 20 bp, Artificial Sequence
  Synthetic
atttaggggcgccggggggg

SEQ ID NO: 3503 - DNA, 20 bp, Artificial Sequence
  Synthetic
gggggaggcgcccaagcgtc

SEQ ID NO: 3504 - DNA, 20 bp, Artificial Sequence
  Synthetic
ccaagcgtccggccgcagcc

SEQ ID NO: 3505 - DNA, 20 bp, Artificial Sequence
  Synthetic
caagcgtccggccgcagccc

SEQ ID NO: 3506 - DNA, 20 bp, Artificial Sequence
  Synthetic
gcgtccggccgcagcccggg

SEQ ID NO: 3507 - RNA, 20 nt, Artificial Sequence
  Synthetic
ggccgcagcccgggaggacg

SEQ ID NO: 3508 - RNA, 20 nt, Artificial Sequence
  Synthetic
cagcccgggaggacgaggag

SEQ ID NO: 3509 - RNA, 20 nt, Artificial Sequence
  Synthetic
ggaggacgaggagcggccag

SEQ ID NO: 3510 - RNA, 20 nt, Artificial Sequence
  Synthetic
ggacgaggagcggccagagg

SEQ ID NO: 3511 - RNA, 20 nt, Artificial Sequence
  Synthetic
cgaggagcggccagaggagg

SEQ ID NO: 3512 - RNA, 20 nt, Artificial Sequence
  Synthetic
gaggagcggccagaggagga

SEQ ID NO: 3513 - RNA, 20 nt, Artificial Sequence
  Synthetic
aggagcggccagaggaggag

SEQ ID NO: 3514 - RNA, 20 nt, Artificial Sequence
  Synthetic
ggagcggccagaggaggagg

SEQ ID NO: 3515 - RNA, 20 nt, Artificial Sequence
  Synthetic
gcggccagaggaggaggggg

SEQ ID NO: 3516 - RNA, 20 nt, Artificial Sequence
  Synthetic
agaggaggagggggaggacg

SEQ ID NO: 3517 - RNA, 20 nt, Artificial Sequence
  Synthetic
ggaggacgaggacgaacgcg

SEQ ID NO: 3518 - RNA, 20 nt, Artificial Sequence
  Synthetic
ggacgaggacgaacgcgagg

SEQ ID NO: 3519 - RNA, 20 nt, Artificial Sequence
  Synthetic
gacgaggacgaacgcgagga

SEQ ID NO: 3520 - RNA, 20 nt, Artificial Sequence
  Synthetic
gaggacgaacgcgaggaggg

SEQ ID NO: 3521 - RNA, 20 nt, Artificial Sequence
  Synthetic
aggacgaacgcgaggagggc

SEQ ID NO: 3522 - RNA, 20 nt, Artificial Sequence
  Synthetic
ggacgaacgcgaggagggcg

SEQ ID NO: 3523 - RNA, 20 nt, Artificial Sequence
  Synthetic
gacgaacgcgaggagggcgg

SEQ ID NO: 3524 - RNA, 20 nt, Artificial Sequence
  Synthetic
gcgaggagggcgggggcgag

SEQ ID NO: 3525 - RNA, 20 nt, Artificial Sequence
  Synthetic
cgaggagggcgggggcgagc

SEQ ID NO: 3526 - RNA, 20 nt, Artificial Sequence
  Synthetic
gggcgggggcgagcgggagc

SEQ ID NO: 3527 - RNA, 20 nt, Artificial Sequence
  Synthetic
cgggggcgagcgggagccgg

SEQ ID NO: 3528 - RNA, 20 nt, Artificial Sequence
  Synthetic
gggggcgagcgggagccgga

SEQ ID NO: 3529 - RNA, 20 nt, Artificial Sequence
  Synthetic
agcgggagccggagggcgcg

SEQ ID NO: 3530 - RNA, 20 nt, Artificial Sequence
  Synthetic
gcgggagccggagggcgcgc

SEQ ID NO: 3531 - RNA, 20 nt, Artificial Sequence
  Synthetic
gagggcgcgcgggagaccgc

SEQ ID NO: 3532 - RNA, 20 nt, Artificial Sequence
  Synthetic
gcgcgcgggagaccgccggc

SEQ ID NO: 3533 - RNA, 20 nt, Artificial Sequence
  Synthetic
ggagaccgccggcaggcacg

SEQ ID NO: 3534 - DNA, 20 bp, Artificial Sequence
  Synthetic
gagaccgccggcaggcacgt

SEQ ID NO: 3535 - DNA, 20 bp, Artificial Sequence
  Synthetic
agaccgccggcaggcacgtg

SEQ ID NO: 3536 - DNA, 20 bp, Artificial Sequence
  Synthetic
cggcaggcacgtggggtacc

SEQ ID NO: 3537 - DNA, 20 bp, Artificial Sequence
  Synthetic
ggcaggcacgtggggtacca

SEQ ID NO: 3538 - DNA, 20 bp, Artificial Sequence
  Synthetic
gcaggcacgtggggtaccag

SEQ ID NO: 3539 - DNA, 20 bp, Artificial Sequence
  Synthetic
caggcacgtggggtaccagg

SEQ ID NO: 3540 - DNA, 20 bp, Artificial Sequence
  Synthetic
acgtggggtaccagggggcc

SEQ ID NO: 3541 - DNA, 20 bp, Artificial Sequence
  Synthetic
cgtggggtaccagggggcca

SEQ ID NO: 3542 - DNA, 20 bp, Artificial Sequence
  Synthetic
agggtccttgaccccacttc

SEQ ID NO: 3543 - DNA, 20 bp, Artificial Sequence
  Synthetic
gggtccttgaccccacttcc

SEQ ID NO: 3544 - DNA, 20 bp, Artificial Sequence
  Synthetic
cgggtttcacgtgaaccccg

SEQ ID NO: 3545 - DNA, 20 bp, Artificial Sequence
  Synthetic
gtttcacgtgaaccccgtgg

SEQ ID NO: 3546 - DNA, 20 bp, Artificial Sequence
  Synthetic
cctgtaccccagcatcatcc

SEQ ID NO: 3547 - DNA, 20 bp, Artificial Sequence
  Synthetic
gcttcagcacgctctccctg

SEQ ID NO: 3548 - DNA, 20 bp, Artificial Sequence
  Synthetic
cttcagcacgctctccctga

SEQ ID NO: 3549 - DNA, 20 bp, Artificial Sequence
  Synthetic
ctccctgagggccgacgcag

SEQ ID NO: 3550 - DNA, 20 bp, Artificial Sequence
  Synthetic
ggccgacgcagtggcgcacc

SEQ ID NO: 3551 - DNA, 20 bp, Artificial Sequence
  Synthetic
cgacgcagtggcgcacctgg

SEQ ID NO: 3552 - DNA, 20 bp, Artificial Sequence
  Synthetic
cgcagtggcgcacctggagg

SEQ ID NO: 3553 - DNA, 20 bp, Artificial Sequence
  Synthetic
gcagtggcgcacctggaggc

SEQ ID NO: 3554 - DNA, 20 bp, Artificial Sequence
  Synthetic
ggcgcacctggaggcgggca

SEQ ID NO: 3555 - DNA, 20 bp, Artificial Sequence
  Synthetic
ggaggcgggcaaggactacc

SEQ ID NO: 3556 - DNA, 20 bp, Artificial Sequence
  Synthetic
caaggactacctggagatcg

SEQ ID NO: 3557 - DNA, 20 bp, Artificial Sequence
  Synthetic
ggactacctggagatcgagg

SEQ ID NO: 3558 - DNA, 20 bp, Artificial Sequence
  Synthetic
gactacctggagatcgaggt

SEQ ID NO: 3559 - DNA, 20 bp, Artificial Sequence
  Synthetic
actacctggagatcgaggtg

SEQ ID NO: 3560 - DNA, 20 bp, Artificial Sequence
  Synthetic
ctacctggagatcgaggtgg

SEQ ID NO: 3561 - DNA, 20 bp, Artificial Sequence
  Synthetic
tacctggagatcgaggtggg

SEQ ID NO: 3562 - DNA, 20 bp, Artificial Sequence
  Synthetic
acctggagatcgaggtgggg

SEQ ID NO: 3563 - DNA, 20 bp, Artificial Sequence
  Synthetic
agatcgaggtgggggggcga

SEQ ID NO: 3564 - DNA, 20 bp, Artificial Sequence
  Synthetic
gcgacggctgttcttcgtca

SEQ ID NO: 3565 - DNA, 20 bp, Artificial Sequence
  Synthetic
gcctcctcagcatcctcctg

SEQ ID NO: 3566 - DNA, 20 bp, Artificial Sequence
  Synthetic
cctcctcagcatcctcctgc

SEQ ID NO: 3567 - DNA, 20 bp, Artificial Sequence
  Synthetic
tcagcatcctcctgcgggac

SEQ ID NO: 3568 - DNA, 20 bp, Artificial Sequence
  Synthetic
tgcgaaagcagatccgctcg

SEQ ID NO: 3569 - DNA, 20 bp, Artificial Sequence
  Synthetic
gattccccagagcagccccg

SEQ ID NO: 3570 - DNA, 20 bp, Artificial Sequence
  Synthetic
tccccagagcagccccgagg

SEQ ID NO: 3571 - DNA, 20 bp, Artificial Sequence
  Synthetic
ccccgaggaggccgtgctcc

SEQ ID NO: 3572 - DNA, 20 bp, Artificial Sequence
  Synthetic
cgtgctcctggacaagcagc

SEQ ID NO: 3573 - DNA, 20 bp, Artificial Sequence
  Synthetic
caagcagcaggccgccatca

SEQ ID NO: 3574 - DNA, 20 bp, Artificial Sequence
  Synthetic
catcaaggtcgtgtgtaact

SEQ ID NO: 3575 - DNA, 20 bp, Artificial Sequence
  Synthetic
gtcgtgtgtaactcggtgta

SEQ ID NO: 3576 - DNA, 20 bp, Artificial Sequence
  Synthetic
tcgtgtgtaactcggtgtac

SEQ ID NO: 3577 - DNA, 20 bp, Artificial Sequence
  Synthetic
taactcggtgtacgggttca

SEQ ID NO: 3578 - DNA, 20 bp, Artificial Sequence
  Synthetic
aactcggtgtacgggttcac

SEQ ID NO: 3579 - DNA, 20 bp, Artificial Sequence
  Synthetic
gggttcacgggagtgcagca

SEQ ID NO: 3580 - DNA, 20 bp, Artificial Sequence
  Synthetic
gtgcctgcacgttgccgcga

SEQ ID NO: 3581 - DNA, 20 bp, Artificial Sequence
  Synthetic
gccgcgacggtgacgaccat

SEQ ID NO: 3582 - DNA, 20 bp, Artificial Sequence
  Synthetic
gcgagtacgtccacgcgcgc

SEQ ID NO: 3583 - DNA, 20 bp, Artificial Sequence
  Synthetic
cgagtacgtccacgcgcgct

SEQ ID NO: 3584 - DNA, 20 bp, Artificial Sequence
  Synthetic
gtacgtccacgcgcgctggg

SEQ ID NO: 3585 - DNA, 20 bp, Artificial Sequence
  Synthetic
ggcggccttcgaacagctcc

SEQ ID NO: 3586 - DNA, 20 bp, Artificial Sequence
  Synthetic
acagctcctggccgatttcc

SEQ ID NO: 3587 - DNA, 20 bp, Artificial Sequence
  Synthetic
gctcctggccgatttcccgg

SEQ ID NO: 3588 - DNA, 20 bp, Artificial Sequence
  Synthetic
cctggccgatttcccggagg

SEQ ID NO: 3589 - DNA, 20 bp, Artificial Sequence
  Synthetic
gcggccgacatgcgcgcccc

SEQ ID NO: 3590 - DNA, 20 bp, Artificial Sequence
  Synthetic
cggccgacatgcgcgccccc

SEQ ID NO: 3591 - DNA, 20 bp, Artificial Sequence
  Synthetic
tattccatgcgcatcatcta

SEQ ID NO: 3592 - DNA, 20 bp, Artificial Sequence
  Synthetic
attccatgcgcatcatctac

SEQ ID NO: 3593 - DNA, 20 bp, Artificial Sequence
  Synthetic
ttccatgcgcatcatctacg

SEQ ID NO: 3594 - DNA, 20 bp, Artificial Sequence
  Synthetic
gcgcatcatctacggggaca

SEQ ID NO: 3595 - DNA, 20 bp, Artificial Sequence
  Synthetic
tccatctttgtgctgtgccg

SEQ ID NO: 3596 - DNA, 20 bp, Artificial Sequence
  Synthetic
tgtgctgtgccgcggcctca

SEQ ID NO: 3597 - DNA, 20 bp, Artificial Sequence
  Synthetic
tgccgcggcctcacggccgc

SEQ ID NO: 3598 - DNA, 20 bp, Artificial Sequence
  Synthetic
gccgcggcctcacggccgcc

SEQ ID NO: 3599 - DNA, 20 bp, Artificial Sequence
  Synthetic
cctcacggccgccgggctga

SEQ ID NO: 3600 - DNA, 20 bp, Artificial Sequence
  Synthetic
ggccgccgggctgacggccg

SEQ ID NO: 3601 - DNA, 20 bp, Artificial Sequence
  Synthetic
gccgccgggctgacggccgt

SEQ ID NO: 3602 - DNA, 20 bp, Artificial Sequence
  Synthetic
gacggccgtgggcgacaaga

SEQ ID NO: 3603 - DNA, 20 bp, Artificial Sequence
  Synthetic
atcgccaagaaaaagtacat

SEQ ID NO: 3604 - DNA, 20 bp, Artificial Sequence
  Synthetic
aagtacatcggcgtcatcta

SEQ ID NO: 3605 - DNA, 20 bp, Artificial Sequence
  Synthetic
agtacatcggcgtcatctac

SEQ ID NO: 3606 - DNA, 20 bp, Artificial Sequence
  Synthetic
gtacatcggcgtcatctacg

SEQ ID NO: 3607 - DNA, 20 bp, Artificial Sequence
  Synthetic
tacatcggcgtcatctacgg

SEQ ID NO: 3608 - DNA, 20 bp, Artificial Sequence
  Synthetic
cgggggtaagatgctcatca

SEQ ID NO: 3609 - DNA, 20 bp, Artificial Sequence
  Synthetic
gggggtaagatgctcatcaa

SEQ ID NO: 3610 - DNA, 20 bp, Artificial Sequence
  Synthetic
taagatgctcatcaagggcg

SEQ ID NO: 3611 - DNA, 20 bp, Artificial Sequence
  Synthetic
gctcatcaagggcgtggatc

SEQ ID NO: 3612 - DNA, 20 bp, Artificial Sequence
  Synthetic
cgtttatcaaccgcacctcc

SEQ ID NO: 3613 - DNA, 20 bp, Artificial Sequence
  Synthetic
gtttatcaaccgcacctcca

SEQ ID NO: 3614 - DNA, 20 bp, Artificial Sequence
  Synthetic
caaccgcacctccagggccc

SEQ ID NO: 3615 - DNA, 20 bp, Artificial Sequence
  Synthetic
ttttacgacgataccgtctc

SEQ ID NO: 3616 - DNA, 20 bp, Artificial Sequence
  Synthetic
cgacgataccgtctccggag

SEQ ID NO: 3617 - DNA, 20 bp, Artificial Sequence
  Synthetic
cgcgttagccgagcgccccg

SEQ ID NO: 3618 - DNA, 20 bp, Artificial Sequence
  Synthetic
gttagccgagcgccccgcgg

SEQ ID NO: 3619 - RNA, 20 nt, Artificial Sequence
  Synthetic
ccgagcgccccgcggaggag

SEQ ID NO: 3620 - DNA, 20 bp, Artificial Sequence
  Synthetic
gcgccccgcggaggagtggc

SEQ ID NO: 3621 - DNA, 20 bp, Artificial Sequence
  Synthetic
gctggcgcgacccctgcccg

SEQ ID NO: 3622 - DNA, 20 bp, Artificial Sequence
  Synthetic
ctggcgcgacccctgcccga

SEQ ID NO: 3623 - DNA, 20 bp, Artificial Sequence
  Synthetic
acccctgcccgagggactgc

SEQ ID NO: 3624 - DNA, 20 bp, Artificial Sequence
  Synthetic
cccgagggactgcaggcgtt

SEQ ID NO: 3625 - DNA, 20 bp, Artificial Sequence
  Synthetic
ccgagggactgcaggcgttc

SEQ ID NO: 3626 - DNA, 20 bp, Artificial Sequence
  Synthetic
cgagggactgcaggcgttcg

SEQ ID NO: 3627 - DNA, 20 bp, Artificial Sequence
  Synthetic
ccgtcctcgtagacgcccat

SEQ ID NO: 3628 - DNA, 20 bp, Artificial Sequence
  Synthetic
ccatcggcgcatcaccgacc

SEQ ID NO: 3629 - DNA, 20 bp, Artificial Sequence
  Synthetic
ggcgcatcaccgacccggag

SEQ ID NO: 3630 - DNA, 20 bp, Artificial Sequence
  Synthetic
gcgcatcaccgacccggaga

SEQ ID NO: 3631 - DNA, 20 bp, Artificial Sequence
  Synthetic
cgacccggagagggacatcc

SEQ ID NO: 3632 - DNA, 20 bp, Artificial Sequence
  Synthetic
cgcgtacaccaacaagcgcc

SEQ ID NO: 3633 - DNA, 20 bp, Artificial Sequence
  Synthetic
caagcgcctggcccacctga

SEQ ID NO: 3634 - DNA, 20 bp, Artificial Sequence
  Synthetic
gacggtgtattacaagctca

SEQ ID NO: 3635 - DNA, 20 bp, Artificial Sequence
  Synthetic
gctcatggcccgccgcgcgc

SEQ ID NO: 3636 - DNA, 20 bp, Artificial Sequence
  Synthetic
cgcgcaggtcccgtccatca

SEQ ID NO: 3637 - DNA, 20 bp, Artificial Sequence
  Synthetic
aggtcccgtccatcaaggac

SEQ ID NO: 3638 - DNA, 20 bp, Artificial Sequence
  Synthetic
ccggatcccgtacgtgatcg

SEQ ID NO: 3639 - DNA, 20 bp, Artificial Sequence
  Synthetic
gatcgtggcccagacccgcg

SEQ ID NO: 3640 - DNA, 20 bp, Artificial Sequence
  Synthetic
ggcccagacccgcgaggtag

SEQ ID NO: 3641 - DNA, 20 bp, Artificial Sequence
  Synthetic
gacccgcgaggtagaggaga

SEQ ID NO: 3642 - DNA, 20 bp, Artificial Sequence
  Synthetic
aggtagaggagacggtcgcg

SEQ ID NO: 3643 - DNA, 20 bp, Artificial Sequence
  Synthetic
agaggagacggtcgcgcggc

SEQ ID NO: 3644 - DNA, 20 bp, Artificial Sequence
  Synthetic
gagctagacgccgccgcccc

SEQ ID NO: 3645 - DNA, 20 bp, Artificial Sequence
  Synthetic
agctagacgccgccgcccca

SEQ ID NO: 3646 - DNA, 20 bp, Artificial Sequence
  Synthetic
gctagacgccgccgccccag

SEQ ID NO: 3647 - RNA, 20 nt, Artificial Sequence
  Synthetic
ggacgagcccgccccccccg

SEQ ID NO: 3648 - DNA, 20 bp, Artificial Sequence
  Synthetic
ccccgcggccctgccctccc

SEQ ID NO: 3649 - DNA, 20 bp, Artificial Sequence
  Synthetic
cctccccggccaagcgcccc

SEQ ID NO: 3650 - DNA, 20 bp, Artificial Sequence
  Synthetic
ctccccggccaagcgccccc

SEQ ID NO: 3651 - DNA, 20 bp, Artificial Sequence
  Synthetic
gccgtcgcctgccgaccccc

SEQ ID NO: 3652 - DNA, 20 bp, Artificial Sequence
  Synthetic
ccgtcgcctgccgacccccc

SEQ ID NO: 3653 - DNA, 20 bp, Artificial Sequence
  Synthetic
tcgcctgccgaccccccggg

SEQ ID NO: 3654 - DNA, 20 bp, Artificial Sequence
  Synthetic
gtccaagccccgcaagctgc

SEQ ID NO: 3655 - DNA, 20 bp, Artificial Sequence
  Synthetic
caagctgctggtgtccgagc

SEQ ID NO: 3656 - DNA, 20 bp, Artificial Sequence
  Synthetic
gctggtgtccgagctggccg

SEQ ID NO: 3657 - DNA, 20 bp, Artificial Sequence
  Synthetic
cccgcatacgccattgccca

SEQ ID NO: 3658 - DNA, 20 bp, Artificial Sequence
  Synthetic
ccacggcgtcgccctgaaca

SEQ ID NO: 3659 - DNA, 20 bp, Artificial Sequence
  Synthetic
ctattacttctcccacctgt

SEQ ID NO: 3660 - DNA, 20 bp, Artificial Sequence
  Synthetic
tattacttctcccacctgtt

SEQ ID NO: 3661 - DNA, 20 bp, Artificial Sequence
  Synthetic
attacttctcccacctgttg

SEQ ID NO: 3662 - DNA, 20 bp, Artificial Sequence
  Synthetic
ttacttctcccacctgttgg

SEQ ID NO: 3663 - DNA, 20 bp, Artificial Sequence
  Synthetic
cttctcccacctgttggggg

SEQ ID NO: 3664 - DNA, 20 bp, Artificial Sequence
  Synthetic
ggcggcgtgcgtgacattca

SEQ ID NO: 3665 - DNA, 20 bp, Artificial Sequence
  Synthetic
gtgacattcaaggccctgtt

SEQ ID NO: 3666 - DNA, 20 bp, Artificial Sequence
  Synthetic
tgacattcaaggccctgttt

SEQ ID NO: 3667 - DNA, 20 bp, Artificial Sequence
  Synthetic
tcaccgagagtctgttaaaa

SEQ ID NO: 3668 - DNA, 20 bp, Artificial Sequence
  Synthetic
aaaggtttattcccgaagtg

SEQ ID NO: 3669 - DNA, 20 bp, Artificial Sequence
  Synthetic
tcccgaagtgtggcaccccc

SEQ ID NO: 3670 - DNA, 20 bp, Artificial Sequence
  Synthetic
gtggcaccccccggacgacg

SEQ ID NO: 3671 - DNA, 20 bp, Artificial Sequence
  Synthetic
ccccggacgacgtggccgcg

SEQ ID NO: 3672 - DNA, 20 bp, Artificial Sequence
  Synthetic
acgacgtggccgcgcggctc

SEQ ID NO: 3673 - DNA, 20 bp, Artificial Sequence
  Synthetic
gccgcgcggctccggaccgc

SEQ ID NO: 3674 - DNA, 20 bp, Artificial Sequence
  Synthetic
ccgcgcggctccggaccgca

SEQ ID NO: 3675 - DNA, 20 bp, Artificial Sequence
  Synthetic
cggctccggaccgcagggtt

SEQ ID NO: 3676 - DNA, 20 bp, Artificial Sequence
  Synthetic
ggctccggaccgcagggttc

SEQ ID NO: 3677 - DNA, 20 bp, Artificial Sequence
  Synthetic
gctccggaccgcagggttcg

SEQ ID NO: 3678 - DNA, 20 bp, Artificial Sequence
  Synthetic
ccggaccgcagggttcgggg

SEQ ID NO: 3679 - DNA, 20 bp, Artificial Sequence
  Synthetic
gaccgcagggttcggggcgg

SEQ ID NO: 3680 - DNA, 20 bp, Artificial Sequence
  Synthetic
accgcagggttcggggcggt

SEQ ID NO: 3681 - DNA, 20 bp, Artificial Sequence
  Synthetic
gggttcggggcggtgggtgc

SEQ ID NO: 3682 - DNA, 20 bp, Artificial Sequence
  Synthetic
ggcggtgggtgccggcgcta

SEQ ID NO: 3683 - DNA, 20 bp, Artificial Sequence
  Synthetic
ggtgggtgccggcgctacgg

SEQ ID NO: 3684 - DNA, 20 bp, Artificial Sequence
  Synthetic
gggtgccggcgctacggcgg

SEQ ID NO: 3685 - DNA, 17 bp, Artificial Sequence
  Synthetic
ggacgccatcacaccga

SEQ ID NO: 3686 - DNA, 17 bp, Artificial Sequence
  Synthetic
gacgccatcacaccgac

SEQ ID NO: 3687 - DNA, 17 bp, Artificial Sequence
  Synthetic
acgccatcacaccgacg

SEQ ID NO: 3688 - DNA, 17 bp, Artificial Sequence
  Synthetic
gaccgtcatcacgctcc

SEQ ID NO: 3689 - DNA, 17 bp, Artificial Sequence
  Synthetic
accgtcatcacgctcct

SEQ ID NO: 3690 - DNA, 17 bp, Artificial Sequence
  Synthetic
gctcctgggcctgactc

SEQ ID NO: 3691 - DNA, 17 bp, Artificial Sequence
  Synthetic
ctgggcctgactccgga

SEQ ID NO: 3692 - DNA, 17 bp, Artificial Sequence
  Synthetic
tgactccggaaggccac

SEQ ID NO: 3693 - DNA, 17 bp, Artificial Sequence
  Synthetic
gactccggaaggccacc

SEQ ID NO: 3694 - DNA, 17 bp, Artificial Sequence
  Synthetic
tccggaaggccaccggg

SEQ ID NO: 3695 - DNA, 17 bp, Artificial Sequence
  Synthetic
gtggccgttcacgttta

SEQ ID NO: 3696 - DNA, 17 bp, Artificial Sequence
  Synthetic
ttcacgtttacggcacg

SEQ ID NO: 3697 - DNA, 17 bp, Artificial Sequence
  Synthetic
gtacttttacatgaaca

SEQ ID NO: 3698 - DNA, 17 bp, Artificial Sequence
  Synthetic
cttttacatgaacaagg

SEQ ID NO: 3699 - DNA, 17 bp, Artificial Sequence
  Synthetic
ttacatgaacaaggagg

SEQ ID NO: 3700 - DNA, 17 bp, Artificial Sequence
  Synthetic
acaaggaggaggtcgac

SEQ ID NO: 3701 - DNA, 17 bp, Artificial Sequence
  Synthetic
agatctctgcgagcgca

SEQ ID NO: 3702 - DNA, 17 bp, Artificial Sequence
  Synthetic
ctgcgagcgcatggccg

SEQ ID NO: 3703 - DNA, 17 bp, Artificial Sequence
  Synthetic
ggccctgcgcgagtccc

SEQ ID NO: 3704 - DNA, 17 bp, Artificial Sequence
  Synthetic
gccctgcgcgagtcccc

SEQ ID NO: 3705 - DNA, 17 bp, Artificial Sequence
  Synthetic
ccgggcgcgtcgttccg

SEQ ID NO: 3706 - DNA, 17 bp, Artificial Sequence
  Synthetic
gttccgcggcatctccg

SEQ ID NO: 3707 - DNA, 17 bp, Artificial Sequence
  Synthetic
ctccgcggaccacttcg

SEQ ID NO: 3708 - DNA, 17 bp, Artificial Sequence
  Synthetic
cgcggaccacttcgagg

SEQ ID NO: 3709 - DNA, 17 bp, Artificial Sequence
  Synthetic
ggaccacttcgaggcgg

SEQ ID NO: 3710 - DNA, 17 bp, Artificial Sequence
  Synthetic
ccacttcgaggcggagg

SEQ ID NO: 3711 - DNA, 17 bp, Artificial Sequence
  Synthetic
cttcgaggcggaggtgg

SEQ ID NO: 3712 - DNA, 17 bp, Artificial Sequence
  Synthetic
cgcgtctacgtccgaag

SEQ ID NO: 3713 - DNA, 17 bp, Artificial Sequence
  Synthetic
gcgtctacgtccgaagc

SEQ ID NO: 3714 - DNA, 17 bp, Artificial Sequence
  Synthetic
gtgcgacaacttctgcc

SEQ ID NO: 3715 - DNA, 17 bp, Artificial Sequence
  Synthetic
ggccatcaagaagtacg

SEQ ID NO: 3716 - DNA, 17 bp, Artificial Sequence
  Synthetic
gccatcaagaagtacga

SEQ ID NO: 3717 - DNA, 17 bp, Artificial Sequence
  Synthetic
atcaagaagtacgaggg

SEQ ID NO: 3718 - DNA, 17 bp, Artificial Sequence
  Synthetic
tcaagaagtacgagggt

SEQ ID NO: 3719 - DNA, 17 bp, Artificial Sequence
  Synthetic
caagaagtacgagggtg

SEQ ID NO: 3720 - DNA, 17 bp, Artificial Sequence
  Synthetic
gggtcgacgccaccacc

SEQ ID NO: 3721 - DNA, 17 bp, Artificial Sequence
  Synthetic
caccacccggttcatcc

SEQ ID NO: 3722 - DNA, 17 bp, Artificial Sequence
  Synthetic
ttcatcctggacaaccc

SEQ ID NO: 3723 - DNA, 17 bp, Artificial Sequence
  Synthetic
tcatcctggacaacccc

SEQ ID NO: 3724 - DNA, 17 bp, Artificial Sequence
  Synthetic
cccgggttcgtcacctt

SEQ ID NO: 3725 - DNA, 17 bp, Artificial Sequence
  Synthetic
ggttcgtcaccttcggc

SEQ ID NO: 3726 - DNA, 17 bp, Artificial Sequence
  Synthetic
ctggtaccgtctcaaac

SEQ ID NO: 3727 - DNA, 17 bp, Artificial Sequence
  Synthetic
tggtaccgtctcaaacc

SEQ ID NO: 3728 - DNA, 17 bp, Artificial Sequence
  Synthetic
accgtctcaaaccgggc

SEQ ID NO: 3729 - DNA, 17 bp, Artificial Sequence
  Synthetic
caacacgctagcccagc

SEQ ID NO: 3730 - DNA, 17 bp, Artificial Sequence
  Synthetic
cacgctagcccagccgg

SEQ ID NO: 3731 - RNA, 17 nt, Artificial Sequence
  Synthetic
ccagccggcggccccga

SEQ ID NO: 3732 - DNA, 17 bp, Artificial Sequence
  Synthetic
gcggccccgatggcctt

SEQ ID NO: 3733 - DNA, 17 bp, Artificial Sequence
  Synthetic
cggccccgatggccttc

SEQ ID NO: 3734 - DNA, 17 bp, Artificial Sequence
  Synthetic
cgtcgagtttaactgta

SEQ ID NO: 3735 - DNA, 17 bp, Artificial Sequence
  Synthetic
cgagtttaactgtacgg

SEQ ID NO: 3736 - DNA, 17 bp, Artificial Sequence
  Synthetic
ctgtacggcggacaacc

SEQ ID NO: 3737 - DNA, 17 bp, Artificial Sequence
  Synthetic
ggacaacctggccatcg

SEQ ID NO: 3738 - DNA, 17 bp, Artificial Sequence
  Synthetic
gacaacctggccatcga

SEQ ID NO: 3739 - DNA, 17 bp, Artificial Sequence
  Synthetic
acaacctggccatcgag

SEQ ID NO: 3740 - DNA, 17 bp, Artificial Sequence
  Synthetic
caacctggccatcgagg

SEQ ID NO: 3741 - DNA, 17 bp, Artificial Sequence
  Synthetic
aacctggccatcgaggg

SEQ ID NO: 3742 - DNA, 17 bp, Artificial Sequence
  Synthetic
gggcatgagcgacctac

SEQ ID NO: 3743 - DNA, 17 bp, Artificial Sequence
  Synthetic
cttcgatatcgaatgca

SEQ ID NO: 3744 - DNA, 17 bp, Artificial Sequence
  Synthetic
cgatatcgaatgcaagg

SEQ ID NO: 3745 - DNA, 17 bp, Artificial Sequence
  Synthetic
gatatcgaatgcaaggc

SEQ ID NO: 3746 - DNA, 17 bp, Artificial Sequence
  Synthetic
atatcgaatgcaaggcg

SEQ ID NO: 3747 - DNA, 17 bp, Artificial Sequence
  Synthetic
tatcgaatgcaaggcgg

SEQ ID NO: 3748 - DNA, 17 bp, Artificial Sequence
  Synthetic
atcgaatgcaaggcggg

SEQ ID NO: 3749 - DNA, 17 bp, Artificial Sequence
  Synthetic
tcgaatgcaaggcgggg

SEQ ID NO: 3750 - DNA, 17 bp, Artificial Sequence
  Synthetic
cgaatgcaaggcggggg

SEQ ID NO: 3751 - DNA, 17 bp, Artificial Sequence
  Synthetic
atgcaaggcgggggggg

SEQ ID NO: 3752 - RNA, 17 nt, Artificial Sequence
  Synthetic
ggggggggaggacgagc

SEQ ID NO: 3753 - DNA, 17 bp, Artificial Sequence
  Synthetic
ggacgagctggcctttc

SEQ ID NO: 3754 - DNA, 17 bp, Artificial Sequence
  Synthetic
cgagctggcctttccgg

SEQ ID NO: 3755 - DNA, 17 bp, Artificial Sequence
  Synthetic
ctggcctttccggtggc

SEQ ID NO: 3756 - DNA, 17 bp, Artificial Sequence
  Synthetic
tggcctttccggtggcc

SEQ ID NO: 3757 - DNA, 17 bp, Artificial Sequence
  Synthetic
tccggtggccgggcacc

SEQ ID NO: 3758 - DNA, 17 bp, Artificial Sequence
  Synthetic
ggtggccgggcacccgg

SEQ ID NO: 3759 - RNA, 17 nt, Artificial Sequence
  Synthetic
cgggcacccggaggacc

SEQ ID NO: 3760 - DNA, 17 bp, Artificial Sequence
  Synthetic
cctgtccaccaccgccc

SEQ ID NO: 3761 - DNA, 17 bp, Artificial Sequence
  Synthetic
gtcctcctgttttcgct

SEQ ID NO: 3762 - DNA, 17 bp, Artificial Sequence
  Synthetic
atcccacctgaacgagc

SEQ ID NO: 3763 - DNA, 17 bp, Artificial Sequence
  Synthetic
ccacctgaacgagctgg

SEQ ID NO: 3764 - DNA, 17 bp, Artificial Sequence
  Synthetic
tgaacgagctggcggcc

SEQ ID NO: 3765 - DNA, 17 bp, Artificial Sequence
  Synthetic
gaacgagctggcggcca

SEQ ID NO: 3766 - DNA, 17 bp, Artificial Sequence
  Synthetic
aacgagctggcggccag

SEQ ID NO: 3767 - DNA, 17 bp, Artificial Sequence
  Synthetic
gggcctgcccacgcccg

SEQ ID NO: 3768 - DNA, 17 bp, Artificial Sequence
  Synthetic
gcccacgcccgtggttc

SEQ ID NO: 3769 - DNA, 17 bp, Artificial Sequence
  Synthetic
cgaattcgagatgctgt

SEQ ID NO: 3770 - DNA, 17 bp, Artificial Sequence
  Synthetic
acccttgtgaaacagta

SEQ ID NO: 3771 - DNA, 17 bp, Artificial Sequence
  Synthetic
ggccccgagttcgtgac

SEQ ID NO: 3772 - DNA, 17 bp, Artificial Sequence
  Synthetic
gccccgagttcgtgacc

SEQ ID NO: 3773 - DNA, 17 bp, Artificial Sequence
  Synthetic
acatcatcaacttcgac

SEQ ID NO: 3774 - DNA, 17 bp, Artificial Sequence
  Synthetic
cgactggcccttcttgc

SEQ ID NO: 3775 - DNA, 17 bp, Artificial Sequence
  Synthetic
cttgctggccaagctga

SEQ ID NO: 3776 - DNA, 17 bp, Artificial Sequence
  Synthetic
gctgacggacatttaca

SEQ ID NO: 3777 - DNA, 17 bp, Artificial Sequence
  Synthetic
catttacaaggtccccc

SEQ ID NO: 3778 - DNA, 17 bp, Artificial Sequence
  Synthetic
tacaaggtccccctgga

SEQ ID NO: 3779 - DNA, 17 bp, Artificial Sequence
  Synthetic
acaaggtccccctggac

SEQ ID NO: 3780 - DNA, 17 bp, Artificial Sequence
  Synthetic
gtccccctggacgggta

SEQ ID NO: 3781 - DNA, 17 bp, Artificial Sequence
  Synthetic
gggtacggccgcatgaa

SEQ ID NO: 3782 - DNA, 17 bp, Artificial Sequence
  Synthetic
acggccgcatgaacggc

SEQ ID NO: 3783 - DNA, 17 bp, Artificial Sequence
  Synthetic
cggccgcatgaacggcc

SEQ ID NO: 3784 - DNA, 17 bp, Artificial Sequence
  Synthetic
ggccgcatgaacggccg

SEQ ID NO: 3785 - DNA, 17 bp, Artificial Sequence
  Synthetic
ggggcgtgtttcgcgtg

SEQ ID NO: 3786 - DNA, 17 bp, Artificial Sequence
  Synthetic
gggcgtgtttcgcgtgt

SEQ ID NO: 3787 - DNA, 17 bp, Artificial Sequence
  Synthetic
tttcgcgtgtgggacat

SEQ ID NO: 3788 - DNA, 17 bp, Artificial Sequence
  Synthetic
gaagcgcagcaagataa

SEQ ID NO: 3789 - DNA, 17 bp, Artificial Sequence
  Synthetic
agcaagataaaggtgaa

SEQ ID NO: 3790 - DNA, 17 bp, Artificial Sequence
  Synthetic
gataaaggtgaacggca

SEQ ID NO: 3791 - DNA, 17 bp, Artificial Sequence
  Synthetic
gtgaacatcgacatgta

SEQ ID NO: 3792 - DNA, 17 bp, Artificial Sequence
  Synthetic
tgaacatcgacatgtac

SEQ ID NO: 3793 - DNA, 17 bp, Artificial Sequence
  Synthetic
ctacaagctcaacgccg

SEQ ID NO: 3794 - DNA, 17 bp, Artificial Sequence
  Synthetic
ggccgaagccgtcctga

SEQ ID NO: 3795 - DNA, 17 bp, Artificial Sequence
  Synthetic
cctgaaggacaagaaga

SEQ ID NO: 3796 - DNA, 17 bp, Artificial Sequence
  Synthetic
cccgcctactacgccgc

SEQ ID NO: 3797 - DNA, 17 bp, Artificial Sequence
  Synthetic
ccgcctactacgccgcc

SEQ ID NO: 3798 - RNA, 17 nt, Artificial Sequence
  Synthetic
gccgggcccgcgcaacg

SEQ ID NO: 3799 - RNA, 17 nt, Artificial Sequence
  Synthetic
ccgggcccgcgcaacgc

SEQ ID NO: 3800 - RNA, 17 nt, Artificial Sequence
  Synthetic
cgggcccgcgcaacgcg

SEQ ID NO: 3801 - DNA, 17 bp, Artificial Sequence
  Synthetic
gcgcaacgcggggtgat

SEQ ID NO: 3802 - DNA, 17 bp, Artificial Sequence
  Synthetic
cggcgagtactgcatac

SEQ ID NO: 3803 - DNA, 17 bp, Artificial Sequence
  Synthetic
catacaggattccctgc

SEQ ID NO: 3804 - DNA, 17 bp, Artificial Sequence
  Synthetic
acaggattccctgctgg

SEQ ID NO: 3805 - DNA, 17 bp, Artificial Sequence
  Synthetic
caggattccctgctggt

SEQ ID NO: 3806 - DNA, 17 bp, Artificial Sequence
  Synthetic
taagtttttgccccatc

SEQ ID NO: 3807 - DNA, 17 bp, Artificial Sequence
  Synthetic
gccccatctggagctct

SEQ ID NO: 3808 - DNA, 17 bp, Artificial Sequence
  Synthetic
ctcggccgtcgcgcgct

SEQ ID NO: 3809 - DNA, 17 bp, Artificial Sequence
  Synthetic
ggccgtcgcgcgcttgg

SEQ ID NO: 3810 - DNA, 17 bp, Artificial Sequence
  Synthetic
gccgtcgcgcgcttggc

SEQ ID NO: 3811 - DNA, 17 bp, Artificial Sequence
  Synthetic
acccgcaccatctacga

SEQ ID NO: 3812 - DNA, 17 bp, Artificial Sequence
  Synthetic
tacgtgcctgctgcgcc

SEQ ID NO: 3813 - DNA, 17 bp, Artificial Sequence
  Synthetic
gcgcctggccgaccaga

SEQ ID NO: 3814 - DNA, 17 bp, Artificial Sequence
  Synthetic
cgcctggccgaccagaa

SEQ ID NO: 3815 - DNA, 17 bp, Artificial Sequence
  Synthetic
gaagggctttattctgc

SEQ ID NO: 3816 - DNA, 17 bp, Artificial Sequence
  Synthetic
tattctgccggacaccc

SEQ ID NO: 3817 - DNA, 17 bp, Artificial Sequence
  Synthetic
attctgccggacaccca

SEQ ID NO: 3818 - DNA, 17 bp, Artificial Sequence
  Synthetic
ttctgccggacacccag

SEQ ID NO: 3819 - DNA, 17 bp, Artificial Sequence
  Synthetic
acacccaggggcgattt

SEQ ID NO: 3820 - DNA, 17 bp, Artificial Sequence
  Synthetic
cacccaggggcgattta

SEQ ID NO: 3821 - DNA, 17 bp, Artificial Sequence
  Synthetic
acccaggggcgatttag

SEQ ID NO: 3822 - DNA, 17 bp, Artificial Sequence
  Synthetic
gggcgatttaggggcgc

SEQ ID NO: 3823 - DNA, 17 bp, Artificial Sequence
  Synthetic
ggcgatttaggggcgcc

SEQ ID NO: 3824 - DNA, 17 bp, Artificial Sequence
  Synthetic
gcgatttaggggcgccg

SEQ ID NO: 3825 - DNA, 17 bp, Artificial Sequence
  Synthetic
cgatttaggggcgccgg

SEQ ID NO: 3826 - DNA, 17 bp, Artificial Sequence
  Synthetic
gatttaggggcgccggg

SEQ ID NO: 3827 - DNA, 17 bp, Artificial Sequence
  Synthetic
atttaggggcgccgggg

SEQ ID NO: 3828 - DNA, 17 bp, Artificial Sequence
  Synthetic
taggggcgccggggggg

SEQ ID NO: 3829 - DNA, 17 bp, Artificial Sequence
  Synthetic
ggaggcgcccaagcgtc

SEQ ID NO: 3830 - DNA, 17 bp, Artificial Sequence
  Synthetic
agcgtccggccgcagcc

SEQ ID NO: 3831 - DNA, 17 bp, Artificial Sequence
  Synthetic
gcgtccggccgcagccc

SEQ ID NO: 3832 - DNA, 17 bp, Artificial Sequence
  Synthetic
tccggccgcagcccggg

SEQ ID NO: 3833 - RNA, 17 nt, Artificial Sequence
  Synthetic
cgcagcccgggaggacg

SEQ ID NO: 3834 - RNA, 17 nt, Artificial Sequence
  Synthetic
cccgggaggacgaggag

SEQ ID NO: 3835 - RNA, 17 nt, Artificial Sequence
  Synthetic
ggacgaggagcggccag

SEQ ID NO: 3836 - RNA, 17 nt, Artificial Sequence
  Synthetic
cgaggagcggccagagg

SEQ ID NO: 3837 - RNA, 17 nt, Artificial Sequence
  Synthetic
ggagcggccagaggagg

SEQ ID NO: 3838 - RNA, 17 nt, Artificial Sequence
  Synthetic
gagcggccagaggagga

SEQ ID NO: 3839 - RNA, 17 nt, Artificial Sequence
  Synthetic
agcggccagaggaggag

SEQ ID NO: 3840 - RNA, 17 nt, Artificial Sequence
  Synthetic
gcggccagaggaggagg

SEQ ID NO: 3841 - RNA, 17 nt, Artificial Sequence
  Synthetic
gccagaggaggaggggg

SEQ ID NO: 3842 - RNA, 17 nt, Artificial Sequence
  Synthetic
ggaggagggggaggacg

SEQ ID NO: 3843 - RNA, 17 nt, Artificial Sequence
  Synthetic
ggacgaggacgaacgcg

SEQ ID NO: 3844 - RNA, 17 nt, Artificial Sequence
  Synthetic
cgaggacgaacgcgagg

SEQ ID NO: 3845 - RNA, 17 nt, Artificial Sequence
  Synthetic
gaggacgaacgcgagga

SEQ ID NO: 3846 - RNA, 17 nt, Artificial Sequence
  Synthetic
gacgaacgcgaggaggg

SEQ ID NO: 3847 - RNA, 17 nt, Artificial Sequence
  Synthetic
acgaacgcgaggagggc

SEQ ID NO: 3848 - RNA, 17 nt, Artificial Sequence
  Synthetic
cgaacgcgaggagggcg

SEQ ID NO: 3849 - RNA, 17 nt, Artificial Sequence
  Synthetic
gaacgcgaggagggcgg

SEQ ID NO: 3850 - RNA, 17 nt, Artificial Sequence
  Synthetic
aggagggcgggggcgag

SEQ ID NO: 3851 - RNA, 17 nt, Artificial Sequence
  Synthetic
ggagggcgggggcgagc

SEQ ID NO: 3852 - RNA, 17 nt, Artificial Sequence
  Synthetic
cgggggcgagcgggagc

SEQ ID NO: 3853 - RNA, 17 nt, Artificial Sequence
  Synthetic
gggcgagcgggagccgg

SEQ ID NO: 3854 - RNA, 17 nt, Artificial Sequence
  Synthetic
ggcgagcgggagccgga

SEQ ID NO: 3855 - RNA, 17 nt, Artificial Sequence
  Synthetic
gggagccggagggcgcg

SEQ ID NO: 3856 - RNA, 17 nt, Artificial Sequence
  Synthetic
ggagccggagggcgcgc

SEQ ID NO: 3857 - RNA, 17 nt, Artificial Sequence
  Synthetic
ggcgcgcgggagaccgc

SEQ ID NO: 3858 - RNA, 17 nt, Artificial Sequence
  Synthetic
cgcgggagaccgccggc

SEQ ID NO: 3859 - RNA, 17 nt, Artificial Sequence
  Synthetic
gaccgccggcaggcacg

SEQ ID NO: 3860 - DNA, 17 bp, Artificial Sequence
  Synthetic
accgccggcaggcacgt

SEQ ID NO: 3861 - DNA, 17 bp, Artificial Sequence
  Synthetic
ccgccggcaggcacgtg

SEQ ID NO: 3862 - DNA, 17 bp, Artificial Sequence
  Synthetic
caggcacgtggggtacc

SEQ ID NO: 3863 - DNA, 17 bp, Artificial Sequence
  Synthetic
aggcacgtggggtacca

SEQ ID NO: 3864 - DNA, 17 bp, Artificial Sequence
  Synthetic
ggcacgtggggtaccag

SEQ ID NO: 3865 - DNA, 17 bp, Artificial Sequence
  Synthetic
gcacgtggggtaccagg

SEQ ID NO: 3866 - DNA, 17 bp, Artificial Sequence
  Synthetic
tggggtaccagggggcc

SEQ ID NO: 3867 - DNA, 17 bp, Artificial Sequence
  Synthetic
ggggtaccagggggcca

SEQ ID NO: 3868 - DNA, 17 bp, Artificial Sequence
  Synthetic
gtccttgaccccacttc

SEQ ID NO: 3869 - DNA, 17 bp, Artificial Sequence
  Synthetic
tccttgaccccacttcc

SEQ ID NO: 3870 - DNA, 17 bp, Artificial Sequence
  Synthetic
gtttcacgtgaaccccg

SEQ ID NO: 3871 - DNA, 17 bp, Artificial Sequence
  Synthetic
tcacgtgaaccccgtgg

SEQ ID NO: 3872 - DNA, 17 bp, Artificial Sequence
  Synthetic
gtaccccagcatcatcc

SEQ ID NO: 3873 - DNA, 17 bp, Artificial Sequence
  Synthetic
tcagcacgctctccctg

SEQ ID NO: 3874 - DNA, 17 bp, Artificial Sequence
  Synthetic
cagcacgctctccctga

SEQ ID NO: 3875 - DNA, 17 bp, Artificial Sequence
  Synthetic
cctgagggccgacgcag

SEQ ID NO: 3876 - DNA, 17 bp, Artificial Sequence
  Synthetic
cgacgcagtggcgcacc

SEQ ID NO: 3877 - DNA, 17 bp, Artificial Sequence
  Synthetic
cgcagtggcgcacctgg

SEQ ID NO: 3878 - DNA, 17 bp, Artificial Sequence
  Synthetic
agtggcgcacctggagg

SEQ ID NO: 3879 - DNA, 17 bp, Artificial Sequence
  Synthetic
gtggcgcacctggaggc

SEQ ID NO: 3880 - DNA, 17 bp, Artificial Sequence
  Synthetic
gcacctggaggcgggca

SEQ ID NO: 3881 - DNA, 17 bp, Artificial Sequence
  Synthetic
ggcgggcaaggactacc

SEQ ID NO: 3882 - DNA, 17 bp, Artificial Sequence
  Synthetic
ggactacctggagatcg

SEQ ID NO: 3883 - DNA, 17 bp, Artificial Sequence
  Synthetic
ctacctggagatcgagg

SEQ ID NO: 3884 - DNA, 17 bp, Artificial Sequence
  Synthetic
tacctggagatcgaggt

SEQ ID NO: 3885 - DNA, 17 bp, Artificial Sequence
  Synthetic
acctggagatcgaggtg

SEQ ID NO: 3886 - DNA, 17 bp, Artificial Sequence
  Synthetic
cctggagatcgaggtgg

SEQ ID NO: 3887 - DNA, 17 bp, Artificial Sequence
  Synthetic
ctggagatcgaggtggg

SEQ ID NO: 3888 - DNA, 17 bp, Artificial Sequence
  Synthetic
tggagatcgaggtgggg

SEQ ID NO: 3889 - DNA, 17 bp, Artificial Sequence
  Synthetic
tcgaggtgggggggcga

SEQ ID NO: 3890 - DNA, 17 bp, Artificial Sequence
  Synthetic
acggctgttcttcgtca

SEQ ID NO: 3891 - DNA, 17 bp, Artificial Sequence
  Synthetic
tcctcagcatcctcctg

SEQ ID NO: 3892 - DNA, 17 bp, Artificial Sequence
  Synthetic
cctcagcatcctcctgc

SEQ ID NO: 3893 - DNA, 17 bp, Artificial Sequence
  Synthetic
gcatcctcctgcgggac

SEQ ID NO: 3894 - DNA, 17 bp, Artificial Sequence
  Synthetic
gaaagcagatccgctcg

SEQ ID NO: 3895 - DNA, 17 bp, Artificial Sequence
  Synthetic
tccccagagcagccccg

SEQ ID NO: 3896 - RNA, 17 nt, Artificial Sequence
  Synthetic
ccagagcagccccgagg

SEQ ID NO: 3897 - DNA, 17 bp, Artificial Sequence
  Synthetic
cgaggaggccgtgctcc

SEQ ID NO: 3898 - DNA, 17 bp, Artificial Sequence
  Synthetic
gctcctggacaagcagc

SEQ ID NO: 3899 - DNA, 17 bp, Artificial Sequence
  Synthetic
gcagcaggccgccatca

SEQ ID NO: 3900 - DNA, 17 bp, Artificial Sequence
  Synthetic
caaggtcgtgtgtaact

SEQ ID NO: 3901 - DNA, 17 bp, Artificial Sequence
  Synthetic
gtgtgtaactcggtgta

SEQ ID NO: 3902 - DNA, 17 bp, Artificial Sequence
  Synthetic
tgtgtaactcggtgtac

SEQ ID NO: 3903 - DNA, 17 bp, Artificial Sequence
  Synthetic
ctcggtgtacgggttca

SEQ ID NO: 3904 - DNA, 17 bp, Artificial Sequence
  Synthetic
tcggtgtacgggttcac

SEQ ID NO: 3905 - DNA, 17 bp, Artificial Sequence
  Synthetic
ttcacgggagtgcagca

SEQ ID NO: 3906 - DNA, 17 bp, Artificial Sequence
  Synthetic
cctgcacgttgccgcga

SEQ ID NO: 3907 - DNA, 17 bp, Artificial Sequence
  Synthetic
gcgacggtgacgaccat

SEQ ID NO: 3908 - DNA, 17 bp, Artificial Sequence
  Synthetic
agtacgtccacgcgcgc

SEQ ID NO: 3909 - DNA, 17 bp, Artificial Sequence
  Synthetic
gtacgtccacgcgcgct

SEQ ID NO: 3910 - DNA, 17 bp, Artificial Sequence
  Synthetic
cgtccacgcgcgctggg

SEQ ID NO: 3911 - DNA, 17 bp, Artificial Sequence
  Synthetic
ggccttcgaacagctcc

SEQ ID NO: 3912 - DNA, 17 bp, Artificial Sequence
  Synthetic
gctcctggccgatttcc

SEQ ID NO: 3913 - DNA, 17 bp, Artificial Sequence
  Synthetic
cctggccgatttcccgg

SEQ ID NO: 3914 - DNA, 17 bp, Artificial Sequence
  Synthetic
ggccgatttcccggagg

SEQ ID NO: 3915 - DNA, 17 bp, Artificial Sequence
  Synthetic
gccgacatgcgcgcccc

SEQ ID NO: 3916 - DNA, 17 bp, Artificial Sequence
  Synthetic
ccgacatgcgcgccccc

SEQ ID NO: 3917 - DNA, 17 bp, Artificial Sequence
  Synthetic
tccatgcgcatcatcta

SEQ ID NO: 3918 - DNA, 17 bp, Artificial Sequence
  Synthetic
ccatgcgcatcatctac

SEQ ID NO: 3919 - DNA, 17 bp, Artificial Sequence
  Synthetic
catgcgcatcatctacg

SEQ ID NO: 3920 - DNA, 17 bp, Artificial Sequence
  Synthetic
catcatctacggggaca

SEQ ID NO: 3921 - DNA, 17 bp, Artificial Sequence
  Synthetic
atctttgtgctgtgccg

SEQ ID NO: 3922 - DNA, 17 bp, Artificial Sequence
  Synthetic
gctgtgccgcggcctca

SEQ ID NO: 3923 - DNA, 17 bp, Artificial Sequence
  Synthetic
cgcggcctcacggccgc

SEQ ID NO: 3924 - DNA, 17 bp, Artificial Sequence
  Synthetic
gcggcctcacggccgcc

SEQ ID NO: 3925 - DNA, 17 bp, Artificial Sequence
  Synthetic
cacggccgccgggctga

SEQ ID NO: 3926 - DNA, 17 bp, Artificial Sequence
  Synthetic
cgccgggctgacggccg

SEQ ID NO: 3927 - DNA, 17 bp, Artificial Sequence
  Synthetic
gccgggctgacggccgt

SEQ ID NO: 3928 - DNA, 17 bp, Artificial Sequence
  Synthetic
ggccgtgggcgacaaga

SEQ ID NO: 3929 - DNA, 17 bp, Artificial Sequence
  Synthetic
gccaagaaaaagtacat

SEQ ID NO: 3930 - DNA, 17 bp, Artificial Sequence
  Synthetic
tacatcggcgtcatcta

SEQ ID NO: 3931 - DNA, 17 bp, Artificial Sequence
  Synthetic
acatcggcgtcatctac

SEQ ID NO: 3932 - DNA, 17 bp, Artificial Sequence
  Synthetic
catcggcgtcatctacg

SEQ ID NO: 3933 - DNA, 17 bp, Artificial Sequence
  Synthetic
atcggcgtcatctacgg

SEQ ID NO: 3934 - DNA, 17 bp, Artificial Sequence
  Synthetic
gggtaagatgctcatca

SEQ ID NO: 3935 - DNA, 17 bp, Artificial Sequence
  Synthetic
ggtaagatgctcatcaa

SEQ ID NO: 3936 - DNA, 17 bp, Artificial Sequence
  Synthetic
gatgctcatcaagggcg

SEQ ID NO: 3937 - DNA, 17 bp, Artificial Sequence
  Synthetic
catcaagggcgtggatc

SEQ ID NO: 3938 - DNA, 17 bp, Artificial Sequence
  Synthetic
ttatcaaccgcacctcc

SEQ ID NO: 3939 - DNA, 17 bp, Artificial Sequence
  Synthetic
tatcaaccgcacctcca

SEQ ID NO: 3940 - DNA, 17 bp, Artificial Sequence
  Synthetic
ccgcacctccagggccc

SEQ ID NO: 3941 - DNA, 17 bp, Artificial Sequence
  Synthetic
tacgacgataccgtctc

SEQ ID NO: 3942 - DNA, 17 bp, Artificial Sequence
  Synthetic
cgataccgtctccggag

SEQ ID NO: 3943 - DNA, 17 bp, Artificial Sequence
  Synthetic
gttagccgagcgccccg

SEQ ID NO: 3944 - RNA, 17 nt, Artificial Sequence
  Synthetic
agccgagcgccccgcgg

SEQ ID NO: 3945 - RNA, 17 nt, Artificial Sequence
  Synthetic
agcgccccgcggaggag

SEQ ID NO: 3946 - DNA, 17 bp, Artificial Sequence
  Synthetic
ccccgcggaggagtggc

SEQ ID NO: 3947 - DNA, 17 bp, Artificial Sequence
  Synthetic
ggcgcgacccctgcccg

SEQ ID NO: 3948 - DNA, 17 bp, Artificial Sequence
  Synthetic
gcgcgacccctgcccga

SEQ ID NO: 3949 - DNA, 17 bp, Artificial Sequence
  Synthetic
cctgcccgagggactgc

SEQ ID NO: 3950 - DNA, 17 bp, Artificial Sequence
  Synthetic
gagggactgcaggcgtt

SEQ ID NO: 3951 - DNA, 17 bp, Artificial Sequence
  Synthetic
agggactgcaggcgttc

SEQ ID NO: 3952 - DNA, 17 bp, Artificial Sequence
  Synthetic
gggactgcaggcgttcg

SEQ ID NO: 3953 - DNA, 17 bp, Artificial Sequence
  Synthetic
tcctcgtagacgcccat

SEQ ID NO: 3954 - DNA, 17 bp, Artificial Sequence
  Synthetic
tcggcgcatcaccgacc

SEQ ID NO: 3955 - DNA, 17 bp, Artificial Sequence
  Synthetic
gcatcaccgacccggag

SEQ ID NO: 3956 - DNA, 17 bp, Artificial Sequence
  Synthetic
catcaccgacccggaga

SEQ ID NO: 3957 - DNA, 17 bp, Artificial Sequence
  Synthetic
cccggagagggacatcc

SEQ ID NO: 3958 - DNA, 17 bp, Artificial Sequence
  Synthetic
gtacaccaacaagcgcc

SEQ ID NO: 3959 - DNA, 17 bp, Artificial Sequence
  Synthetic
gcgcctggcccacctga

SEQ ID NO: 3960 - DNA, 17 bp, Artificial Sequence
  Synthetic
ggtgtattacaagctca

SEQ ID NO: 3961 - DNA, 17 bp, Artificial Sequence
  Synthetic
catggcccgccgcgcgc

SEQ ID NO: 3962 - DNA, 17 bp, Artificial Sequence
  Synthetic
gcaggtcccgtccatca

SEQ ID NO: 3963 - DNA, 17 bp, Artificial Sequence
  Synthetic
tcccgtccatcaaggac

SEQ ID NO: 3964 - DNA, 17 bp, Artificial Sequence
  Synthetic
gatcccgtacgtgatcg

SEQ ID NO: 3965 - DNA, 17 bp, Artificial Sequence
  Synthetic
cgtggcccagacccgcg

SEQ ID NO: 3966 - DNA, 17 bp, Artificial Sequence
  Synthetic
ccagacccgcgaggtag

SEQ ID NO: 3967 - DNA, 17 bp, Artificial Sequence
  Synthetic
ccgcgaggtagaggaga

SEQ ID NO: 3968 - DNA, 17 bp, Artificial Sequence
  Synthetic
tagaggagacggtcgcg

SEQ ID NO: 3969 - DNA, 17 bp, Artificial Sequence
  Synthetic
ggagacggtcgcgcggc

SEQ ID NO: 3970 - DNA, 17 bp, Artificial Sequence
  Synthetic
ctagacgccgccgcccc

SEQ ID NO: 3971 - DNA, 17 bp, Artificial Sequence
  Synthetic
tagacgccgccgcccca

SEQ ID NO: 3972 - RNA, 17 nt, Artificial Sequence
  Synthetic
agacgccgccgccccag

SEQ ID NO: 3973 - RNA, 17 nt, Artificial Sequence
  Synthetic
cgagcccgccccccccg

SEQ ID NO: 3974 - DNA, 17 bp, Artificial Sequence
  Synthetic
cgcggccctgccctccc

SEQ ID NO: 3975 - RNA, 17 nt, Artificial Sequence
  Synthetic
ccccggccaagcgcccc

SEQ ID NO: 3976 - RNA, 17 nt, Artificial Sequence
  Synthetic
cccggccaagcgccccc

SEQ ID NO: 3977 - DNA, 17 bp, Artificial Sequence
  Synthetic
gtcgcctgccgaccccc

SEQ ID NO: 3978 - DNA, 17 bp, Artificial Sequence
  Synthetic
tcgcctgccgacccccc

SEQ ID NO: 3979 - DNA, 17 bp, Artificial Sequence
  Synthetic
cctgccgaccccccggg

SEQ ID NO: 3980 - DNA, 17 bp, Artificial Sequence
  Synthetic
caagccccgcaagctgc

SEQ ID NO: 3981 - DNA, 17 bp, Artificial Sequence
  Synthetic
gctgctggtgtccgagc

SEQ ID NO: 3982 - DNA, 17 bp, Artificial Sequence
  Synthetic
ggtgtccgagctggccg

SEQ ID NO: 3983 - DNA, 17 bp, Artificial Sequence
  Synthetic
gcatacgccattgccca

SEQ ID NO: 3984 - DNA, 17 bp, Artificial Sequence
  Synthetic
cggcgtcgccctgaaca

SEQ ID NO: 3985 - DNA, 17 bp, Artificial Sequence
  Synthetic
ttacttctcccacctgt

SEQ ID NO: 3986 - DNA, 17 bp, Artificial Sequence
  Synthetic
tacttctcccacctgtt

SEQ ID NO: 3987 - DNA, 17 bp, Artificial Sequence
  Synthetic
acttctcccacctgttg

SEQ ID NO: 3988 - DNA, 17 bp, Artificial Sequence
  Synthetic
cttctcccacctgttgg

SEQ ID NO: 3989 - DNA, 17 bp, Artificial Sequence
  Synthetic
ctcccacctgttggggg

SEQ ID NO: 3990 - DNA, 17 bp, Artificial Sequence
  Synthetic
ggcgtgcgtgacattca

SEQ ID NO: 3991 - DNA, 17 bp, Artificial Sequence
  Synthetic
acattcaaggccctgtt

SEQ ID NO: 3992 - DNA, 17 bp, Artificial Sequence
  Synthetic
cattcaaggccctgttt

SEQ ID NO: 3993 - DNA, 17 bp, Artificial Sequence
  Synthetic
ccgagagtctgttaaaa

SEQ ID NO: 3994 - DNA, 17 bp, Artificial Sequence
  Synthetic
ggtttattcccgaagtg

SEQ ID NO: 3995 - DNA, 17 bp, Artificial Sequence
  Synthetic
cgaagtgtggcaccccc

SEQ ID NO: 3996 - RNA, 17 nt, Artificial Sequence
  Synthetic
gcaccccccggacgacg

SEQ ID NO: 3997 - DNA, 17 bp, Artificial Sequence
  Synthetic
cggacgacgtggccgcg

SEQ ID NO: 3998 - DNA, 17 bp, Artificial Sequence
  Synthetic
acgtggccgcgcggctc

SEQ ID NO: 3999 - DNA, 17 bp, Artificial Sequence
  Synthetic
gcgcggctccggaccgc

SEQ ID NO: 4000 - DNA, 17 bp, Artificial Sequence
  Synthetic
cgcggctccggaccgca

SEQ ID NO: 4001 - DNA, 17 bp, Artificial Sequence
  Synthetic
ctccggaccgcagggtt

SEQ ID NO: 4002 - DNA, 17 bp, Artificial Sequence
  Synthetic
tccggaccgcagggttc

SEQ ID NO: 4003 - DNA, 17 bp, Artificial Sequence
  Synthetic
ccggaccgcagggttcg

SEQ ID NO: 4004 - DNA, 17 bp, Artificial Sequence
  Synthetic
gaccgcagggttcgggg

SEQ ID NO: 4005 - DNA, 17 bp, Artificial Sequence
  Synthetic
cgcagggttcggggcgg

SEQ ID NO: 4006 - DNA, 17 bp, Artificial Sequence
  Synthetic
gcagggttcggggcggt

SEQ ID NO: 4007 - DNA, 17 bp, Artificial Sequence
  Synthetic
ttcggggcggtgggtgc

SEQ ID NO: 4008 - DNA, 17 bp, Artificial Sequence
  Synthetic
ggtgggtgccggcgcta

SEQ ID NO: 4009 - DNA, 17 bp, Artificial Sequence
  Synthetic
gggtgccggcgctacgg

SEQ ID NO: 4010 - DNA, 17 bp, Artificial Sequence
  Synthetic
tgccggcgctacggcgg

SEQ ID NO: 4011 - DNA, 20 bp, Artificial Sequence
  Synthetic
agtttcctccgccgtagcgc

SEQ ID NO: 4012 - DNA, 20 bp, Artificial Sequence
  Synthetic
acccaccgccccgaaccctg

SEQ ID NO: 4013 - DNA, 20 bp, Artificial Sequence
  Synthetic
ccgccccgaaccctgcggtc

SEQ ID NO: 4014 - DNA, 20 bp, Artificial Sequence
  Synthetic
ccctgcggtccggagccgcg

SEQ ID NO: 4015 - DNA, 20 bp, Artificial Sequence
  Synthetic
agccgcgcggccacgtcgtc

SEQ ID NO: 4016 - DNA, 20 bp, Artificial Sequence
  Synthetic
gccgcgcggccacgtcgtcc

SEQ ID NO: 4017 - DNA, 20 bp, Artificial Sequence
  Synthetic
ccgcgcggccacgtcgtccg

SEQ ID NO: 4018 - DNA, 20 bp, Artificial Sequence
  Synthetic
cgcgcggccacgtcgtccgg

SEQ ID NO: 4019 - DNA, 20 bp, Artificial Sequence
  Synthetic
gcgcggccacgtcgtccggg

SEQ ID NO: 4020 - DNA, 20 bp, Artificial Sequence
  Synthetic
gtccggggggtgccacactt

SEQ ID NO: 4021 - DNA, 20 bp, Artificial Sequence
  Synthetic
tccggggggtgccacacttc

SEQ ID NO: 4022 - DNA, 20 bp, Artificial Sequence
  Synthetic
aaacctttttaacagactct

SEQ ID NO: 4023 - DNA, 20 bp, Artificial Sequence
  Synthetic
taacagactctcggtgatct

SEQ ID NO: 4024 - DNA, 20 bp, Artificial Sequence
  Synthetic
tcttggcgttattcccaaac

SEQ ID NO: 4025 - DNA, 20 bp, Artificial Sequence
  Synthetic
cttggcgttattcccaaaca

SEQ ID NO: 4026 - DNA, 20 bp, Artificial Sequence
  Synthetic
tcacgcacgccgcccccaac

SEQ ID NO: 4027 - RNA, 20 nt, Artificial Sequence
  Synthetic
cgcacgccgcccccaacagg

SEQ ID NO: 4028 - DNA, 20 bp, Artificial Sequence
  Synthetic
gcacgccgcccccaacaggt

SEQ ID NO: 4029 - DNA, 20 bp, Artificial Sequence
  Synthetic
agaagtaatagtccgtgttc

SEQ ID NO: 4030 - DNA, 20 bp, Artificial Sequence
  Synthetic
gaagtaatagtccgtgttca

SEQ ID NO: 4031 - DNA, 20 bp, Artificial Sequence
  Synthetic
ccgtgttcagggcgacgccg

SEQ ID NO: 4032 - DNA, 20 bp, Artificial Sequence
  Synthetic
cgtgttcagggcgacgccgt

SEQ ID NO: 4033 - DNA, 20 bp, Artificial Sequence
  Synthetic
cagggcgacgccgtgggcaa

SEQ ID NO: 4034 - DNA, 20 bp, Artificial Sequence
  Synthetic
gccgtgggcaatggcgtatg

SEQ ID NO: 4035 - DNA, 20 bp, Artificial Sequence
  Synthetic
ccgtgggcaatggcgtatgc

SEQ ID NO: 4036 - DNA, 20 bp, Artificial Sequence
  Synthetic
aatggcgtatgcgggatcct

SEQ ID NO: 4037 - DNA, 20 bp, Artificial Sequence
  Synthetic
tgcgggatcctcggccagct

SEQ ID NO: 4038 - DNA, 20 bp, Artificial Sequence
  Synthetic
gctcggacaccagcagcttg

SEQ ID NO: 4039 - DNA, 20 bp, Artificial Sequence
  Synthetic
ctcggacaccagcagcttgc

SEQ ID NO: 4040 - DNA, 20 bp, Artificial Sequence
  Synthetic
tcggacaccagcagcttgcg

SEQ ID NO: 4041 - DNA, 20 bp, Artificial Sequence
  Synthetic
caccagcagcttgcggggct

SEQ ID NO: 4042 - DNA, 20 bp, Artificial Sequence
  Synthetic
cggggcttggacgcgcctcc

SEQ ID NO: 4043 - DNA, 20 bp, Artificial Sequence
  Synthetic
ggggcttggacgcgcctccc

SEQ ID NO: 4044 - DNA, 20 bp, Artificial Sequence
  Synthetic
gggcttggacgcgcctcccg

SEQ ID NO: 4045 - DNA, 20 bp, Artificial Sequence
  Synthetic
ggcttggacgcgcctcccgg

SEQ ID NO: 4046 - DNA, 20 bp, Artificial Sequence
  Synthetic
gcttggacgcgcctcccggg

SEQ ID NO: 4047 - DNA, 20 bp, Artificial Sequence
  Synthetic
ggacgcgcctcccggggggt

SEQ ID NO: 4048 - DNA, 20 bp, Artificial Sequence
  Synthetic
gcgcctcccggggggtcggc

SEQ ID NO: 4049 - DNA, 20 bp, Artificial Sequence
  Synthetic
cccggggggtcggcaggcga

SEQ ID NO: 4050 - DNA, 20 bp, Artificial Sequence
  Synthetic
cggcaggcgacggcgtctcc

SEQ ID NO: 4051 - DNA, 20 bp, Artificial Sequence
  Synthetic
ggcaggcgacggcgtctccc

SEQ ID NO: 4052 - DNA, 20 bp, Artificial Sequence
  Synthetic
gcaggcgacggcgtctcccg

SEQ ID NO: 4053 - DNA, 20 bp, Artificial Sequence
  Synthetic
caggcgacggcgtctcccgg

SEQ ID NO: 4054 - DNA, 20 bp, Artificial Sequence
  Synthetic
cggcgtctcccgggggcgct

SEQ ID NO: 4055 - DNA, 20 bp, Artificial Sequence
  Synthetic
gtctcccgggggcgcttggc

SEQ ID NO: 4056 - DNA, 20 bp, Artificial Sequence
  Synthetic
tctcccgggggcgcttggcc

SEQ ID NO: 4057 - DNA, 20 bp, Artificial Sequence
  Synthetic
ctcccgggggcgcttggccg

SEQ ID NO: 4058 - DNA, 20 bp, Artificial Sequence
  Synthetic
ccgggggcgcttggccgggg

SEQ ID NO: 4059 - DNA, 20 bp, Artificial Sequence
  Synthetic
cgggggcgcttggccgggga

SEQ ID NO: 4060 - DNA, 20 bp, Artificial Sequence
  Synthetic
ggcgcttggccggggagggc

SEQ ID NO: 4061 - DNA, 20 bp, Artificial Sequence
  Synthetic
gcgcttggccggggagggca

SEQ ID NO: 4062 - RNA, 20 nt, Artificial Sequence
  Synthetic
ggccggggagggcagggccg

SEQ ID NO: 4063 - RNA, 20 nt, Artificial Sequence
  Synthetic
gccggggagggcagggccgc

SEQ ID NO: 4064 - RNA, 20 nt, Artificial Sequence
  Synthetic
ccggggagggcagggccgcg

SEQ ID NO: 4065 - RNA, 20 nt, Artificial Sequence
  Synthetic
cggggagggcagggccgcgg

SEQ ID NO: 4066 - RNA, 20 nt, Artificial Sequence
  Synthetic
ggggagggcagggccgcggg

SEQ ID NO: 4067 - RNA, 20 nt, Artificial Sequence
  Synthetic
gggagggcagggccgcgggg

SEQ ID NO: 4068 - RNA, 20 nt, Artificial Sequence
  Synthetic
ggagggcagggccgcggggg

SEQ ID NO: 4069 - RNA, 20 nt, Artificial Sequence
  Synthetic
gggcagggccgcgggggggg

SEQ ID NO: 4070 - RNA, 20 nt, Artificial Sequence
  Synthetic
ggcagggccgcggggggggc

SEQ ID NO: 4071 - DNA, 20 bp, Artificial Sequence
  Synthetic
gggggggcgggctcgtcccc

SEQ ID NO: 4072 - DNA, 20 bp, Artificial Sequence
  Synthetic
ggggggcgggctcgtcccct

SEQ ID NO: 4073 - DNA, 20 bp, Artificial Sequence
  Synthetic
gggggcgggctcgtcccctg

SEQ ID NO: 4074 - DNA, 20 bp, Artificial Sequence
  Synthetic
ggcgggctcgtcccctgggg

SEQ ID NO: 4075 - DNA, 20 bp, Artificial Sequence
  Synthetic
gggctcgtcccctggggcgg

SEQ ID NO: 4076 - DNA, 20 bp, Artificial Sequence
  Synthetic
gggcggcggcgtctagctcg

SEQ ID NO: 4077 - DNA, 20 bp, Artificial Sequence
  Synthetic
cggcggcgtctagctcgcgg

SEQ ID NO: 4078 - DNA, 20 bp, Artificial Sequence
  Synthetic
ggcggcgtctagctcgcgga

SEQ ID NO: 4079 - DNA, 20 bp, Artificial Sequence
  Synthetic
ggcgtctagctcgcggaggg

SEQ ID NO: 4080 - DNA, 20 bp, Artificial Sequence
  Synthetic
cgaccgtctcctctacctcg

SEQ ID NO: 4081 - DNA, 20 bp, Artificial Sequence
  Synthetic
gaccgtctcctctacctcgc

SEQ ID NO: 4082 - DNA, 20 bp, Artificial Sequence
  Synthetic
tctcctctacctcgcgggtc

SEQ ID NO: 4083 - DNA, 20 bp, Artificial Sequence
  Synthetic
ctcctctacctcgcgggtct

SEQ ID NO: 4084 - DNA, 20 bp, Artificial Sequence
  Synthetic
gtctgggccacgatcacgta

SEQ ID NO: 4085 - DNA, 20 bp, Artificial Sequence
  Synthetic
tctgggccacgatcacgtac

SEQ ID NO: 4086 - DNA, 20 bp, Artificial Sequence
  Synthetic
ccacgatcacgtacgggatc

SEQ ID NO: 4087 - DNA, 20 bp, Artificial Sequence
  Synthetic
gtacgggatccggtccttga

SEQ ID NO: 4088 - DNA, 20 bp, Artificial Sequence
  Synthetic
gggatccggtccttgatgga

SEQ ID NO: 4089 - DNA, 20 bp, Artificial Sequence
  Synthetic
ggatccggtccttgatggac

SEQ ID NO: 4090 - DNA, 20 bp, Artificial Sequence
  Synthetic
tgatggacgggacctgcgcg

SEQ ID NO: 4091 - DNA, 20 bp, Artificial Sequence
  Synthetic
tggacgggacctgcgcgcgg

SEQ ID NO: 4092 - DNA, 20 bp, Artificial Sequence
  Synthetic
ggacgggacctgcgcgcggc

SEQ ID NO: 4093 - DNA, 20 bp, Artificial Sequence
  Synthetic
tgagcttgtaatacaccgtc

SEQ ID NO: 4094 - DNA, 20 bp, Artificial Sequence
  Synthetic
gcttgtaatacaccgtcagg

SEQ ID NO: 4095 - DNA, 20 bp, Artificial Sequence
  Synthetic
cttgtaatacaccgtcaggt

SEQ ID NO: 4096 - DNA, 20 bp, Artificial Sequence
  Synthetic
aatacaccgtcaggtgggcc

SEQ ID NO: 4097 - DNA, 20 bp, Artificial Sequence
  Synthetic
caggtgggccaggcgcttgt

SEQ ID NO: 4098 - DNA, 20 bp, Artificial Sequence
  Synthetic
cgcttgttggtgtacgcgcg

SEQ ID NO: 4099 - DNA, 20 bp, Artificial Sequence
  Synthetic
gcttgttggtgtacgcgcgc

SEQ ID NO: 4100 - DNA, 20 bp, Artificial Sequence
  Synthetic
gcgcgggtgtctgctcagtt

SEQ ID NO: 4101 - DNA, 20 bp, Artificial Sequence
  Synthetic
cgggtgtctgctcagttcgg

SEQ ID NO: 4102 - DNA, 20 bp, Artificial Sequence
  Synthetic
gtctgctcagttcggcggtg

SEQ ID NO: 4103 - DNA, 20 bp, Artificial Sequence
  Synthetic
cggcggtgaggacaaagtcc

SEQ ID NO: 4104 - DNA, 20 bp, Artificial Sequence
  Synthetic
aagtcctggatgtccctctc

SEQ ID NO: 4105 - DNA, 20 bp, Artificial Sequence
  Synthetic
agtcctggatgtccctctcc

SEQ ID NO: 4106 - DNA, 20 bp, Artificial Sequence
  Synthetic
ctggatgtccctctccgggt

SEQ ID NO: 4107 - DNA, 20 bp, Artificial Sequence
  Synthetic
ccgggtcggtgatgcgccga

SEQ ID NO: 4108 - DNA, 20 bp, Artificial Sequence
  Synthetic
cgggtcggtgatgcgccgat

SEQ ID NO: 4109 - DNA, 20 bp, Artificial Sequence
  Synthetic
tgcgccgatgggcgtctacg

SEQ ID NO: 4110 - DNA, 20 bp, Artificial Sequence
  Synthetic
ccgatgggcgtctacgagga

SEQ ID NO: 4111 - DNA, 20 bp, Artificial Sequence
  Synthetic
cccgaacgcctgcagtccct

SEQ ID NO: 4112 - DNA, 20 bp, Artificial Sequence
  Synthetic
ccgaacgcctgcagtccctc

SEQ ID NO: 4113 - DNA, 20 bp, Artificial Sequence
  Synthetic
acgcctgcagtccctcgggc

SEQ ID NO: 4114 - DNA, 20 bp, Artificial Sequence
  Synthetic
cgcctgcagtccctcgggca

SEQ ID NO: 4115 - DNA, 20 bp, Artificial Sequence
  Synthetic
gcctgcagtccctcgggcag

SEQ ID NO: 4116 - DNA, 20 bp, Artificial Sequence
  Synthetic
tcgcgccagccactcctccg

SEQ ID NO: 4117 - DNA, 20 bp, Artificial Sequence
  Synthetic
cgcgccagccactcctccgc

SEQ ID NO: 4118 - DNA, 20 bp, Artificial Sequence
  Synthetic
gcgccagccactcctccgcg

SEQ ID NO: 4119 - DNA, 20 bp, Artificial Sequence
  Synthetic
ccactcctccgcggggcgct

SEQ ID NO: 4120 - DNA, 20 bp, Artificial Sequence
  Synthetic
cgcggggcgctcggctaacg

SEQ ID NO: 4121 - DNA, 20 bp, Artificial Sequence
  Synthetic
ggggcgctcggctaacgcgg

SEQ ID NO: 4122 - DNA, 20 bp, Artificial Sequence
  Synthetic
ggctaacgcggcggccgctc

SEQ ID NO: 4123 - DNA, 20 bp, Artificial Sequence
  Synthetic
cgcggcggccgctccggaga

SEQ ID NO: 4124 - DNA, 20 bp, Artificial Sequence
  Synthetic
cggtatcgtcgtaaaacagc

SEQ ID NO: 4125 - DNA, 20 bp, Artificial Sequence
  Synthetic
cgtaaaacagcaggtcgacc

SEQ ID NO: 4126 - DNA, 20 bp, Artificial Sequence
  Synthetic
gtaaaacagcaggtcgacca

SEQ ID NO: 4127 - DNA, 20 bp, Artificial Sequence
  Synthetic
cagcaggtcgaccagggccc

SEQ ID NO: 4128 - DNA, 20 bp, Artificial Sequence
  Synthetic
caggtcgaccagggccctgg

SEQ ID NO: 4129 - DNA, 20 bp, Artificial Sequence
  Synthetic
cgaccagggccctggaggtg

SEQ ID NO: 4130 - DNA, 20 bp, Artificial Sequence
  Synthetic
gacgccgatgtactttttct

SEQ ID NO: 4131 - DNA, 20 bp, Artificial Sequence
  Synthetic
cttggcgatcagcagcagct

SEQ ID NO: 4132 - DNA, 20 bp, Artificial Sequence
  Synthetic
cttttcgcactcgagtttga

SEQ ID NO: 4133 - DNA, 20 bp, Artificial Sequence
  Synthetic
ttttcgcactcgagtttgat

SEQ ID NO: 4134 - DNA, 20 bp, Artificial Sequence
  Synthetic
tttcgcactcgagtttgatg

SEQ ID NO: 4135 - DNA, 20 bp, Artificial Sequence
  Synthetic
ttcgcactcgagtttgatgg

SEQ ID NO: 4136 - DNA, 20 bp, Artificial Sequence
  Synthetic
tcgcactcgagtttgatggg

SEQ ID NO: 4137 - DNA, 20 bp, Artificial Sequence
  Synthetic
gaaacagcgcgcgcgagatg

SEQ ID NO: 4138 - DNA, 20 bp, Artificial Sequence
  Synthetic
gctcgccatcttgtcgccca

SEQ ID NO: 4139 - DNA, 20 bp, Artificial Sequence
  Synthetic
gtcgcccacggccgtcagcc

SEQ ID NO: 4140 - DNA, 20 bp, Artificial Sequence
  Synthetic
gcccacggccgtcagcccgg

SEQ ID NO: 4141 - DNA, 20 bp, Artificial Sequence
  Synthetic
ccgtcagcccggcggccgtg

SEQ ID NO: 4142 - DNA, 20 bp, Artificial Sequence
  Synthetic
gcccggcggccgtgaggccg

SEQ ID NO: 4143 - RNA, 20 nt, Artificial Sequence
  Synthetic
gccgcggcacagcacaaaga

SEQ ID NO: 4144 - DNA, 20 bp, Artificial Sequence
  Synthetic
gtccccgtagatgatgcgca

SEQ ID NO: 4145 - DNA, 20 bp, Artificial Sequence
  Synthetic
gtagatgatgcgcatggaat

SEQ ID NO: 4146 - DNA, 20 bp, Artificial Sequence
  Synthetic
tagatgatgcgcatggaata

SEQ ID NO: 4147 - DNA, 20 bp, Artificial Sequence
  Synthetic
gatgcgcatggaatagggcc

SEQ ID NO: 4148 - DNA, 20 bp, Artificial Sequence
  Synthetic
atgcgcatggaatagggccc

SEQ ID NO: 4149 - DNA, 20 bp, Artificial Sequence
  Synthetic
tgcgcatggaatagggcccg

SEQ ID NO: 4150 - DNA, 20 bp, Artificial Sequence
  Synthetic
gcgcatggaatagggcccgg

SEQ ID NO: 4151 - DNA, 20 bp, Artificial Sequence
  Synthetic
gggcccgggggcgcgcatgt

SEQ ID NO: 4152 - DNA, 20 bp, Artificial Sequence
  Synthetic
gcgcgcatgtcggccgcctc

SEQ ID NO: 4153 - DNA, 20 bp, Artificial Sequence
  Synthetic
cgcgcatgtcggccgcctcc

SEQ ID NO: 4154 - DNA, 20 bp, Artificial Sequence
  Synthetic
gtcggccgcctccgggaaat

SEQ ID NO: 4155 - DNA, 20 bp, Artificial Sequence
  Synthetic
ccgcctccgggaaatcggcc

SEQ ID NO: 4156 - DNA, 20 bp, Artificial Sequence
  Synthetic
atcggccaggagctgttcga

SEQ ID NO: 4157 - RNA, 20 nt, Artificial Sequence
  Synthetic
cgaaggccgcccagcgcgcg

SEQ ID NO: 4158 - DNA, 20 bp, Artificial Sequence
  Synthetic
agcgcgcgtggacgtactcg

SEQ ID NO: 4159 - DNA, 20 bp, Artificial Sequence
  Synthetic
gcgcgcgtggacgtactcgc

SEQ ID NO: 4160 - DNA, 20 bp, Artificial Sequence
  Synthetic
gggtcgcgagcagcatctcg

SEQ ID NO: 4161 - DNA, 20 bp, Artificial Sequence
  Synthetic
gagcagcatctcgcggccga

SEQ ID NO: 4162 - DNA, 20 bp, Artificial Sequence
  Synthetic
gccgatggtcgtcaccgtcg

SEQ ID NO: 4163 - DNA, 20 bp, Artificial Sequence
  Synthetic
tcaccgtcgcggcaacgtgc

SEQ ID NO: 4164 - DNA, 20 bp, Artificial Sequence
  Synthetic
gtcgcggcaacgtgcaggca

SEQ ID NO: 4165 - DNA, 20 bp, Artificial Sequence
  Synthetic
cggcaacgtgcaggcacggc

SEQ ID NO: 4166 - DNA, 20 bp, Artificial Sequence
  Synthetic
cgagttacacacgaccttga

SEQ ID NO: 4167 - DNA, 20 bp, Artificial Sequence
  Synthetic
gttacacacgaccttgatgg

SEQ ID NO: 4168 - DNA, 20 bp, Artificial Sequence
  Synthetic
tggcggcctgctgcttgtcc

SEQ ID NO: 4169 - DNA, 20 bp, Artificial Sequence
  Synthetic
ctgctgcttgtccaggagca

SEQ ID NO: 4170 - DNA, 20 bp, Artificial Sequence
  Synthetic
gtccaggagcacggcctcct

SEQ ID NO: 4171 - DNA, 20 bp, Artificial Sequence
  Synthetic
tccaggagcacggcctcctc

SEQ ID NO: 4172 - DNA, 20 bp, Artificial Sequence
  Synthetic
ccaggagcacggcctcctcg

SEQ ID NO: 4173 - DNA, 20 bp, Artificial Sequence
  Synthetic
cggcctcctcggggctgctc

SEQ ID NO: 4174 - DNA, 20 bp, Artificial Sequence
  Synthetic
ggcctcctcggggctgctct

SEQ ID NO: 4175 - DNA, 20 bp, Artificial Sequence
  Synthetic
gcctcctcggggctgctctg

SEQ ID NO: 4176 - DNA, 20 bp, Artificial Sequence
  Synthetic
tgctctggggaatccgcgag

SEQ ID NO: 4177 - DNA, 20 bp, Artificial Sequence
  Synthetic
cgagcggatctgctttcgca

SEQ ID NO: 4178 - DNA, 20 bp, Artificial Sequence
  Synthetic
gcatggcgagccagtcccgc

SEQ ID NO: 4179 - DNA, 20 bp, Artificial Sequence
  Synthetic
tggcgagccagtcccgcagg

SEQ ID NO: 4180 - DNA, 20 bp, Artificial Sequence
  Synthetic
agtcccgcaggaggatgctg

SEQ ID NO: 4181 - DNA, 20 bp, Artificial Sequence
  Synthetic
cccgcaggaggatgctgagg

SEQ ID NO: 4182 - DNA, 20 bp, Artificial Sequence
  Synthetic
gcccccccacctcgatctcc

SEQ ID NO: 4183 - DNA, 20 bp, Artificial Sequence
  Synthetic
ggtagtccttgcccgcctcc

SEQ ID NO: 4184 - DNA, 20 bp, Artificial Sequence
  Synthetic
ctccaggtgcgccactgcgt

SEQ ID NO: 4185 - DNA, 20 bp, Artificial Sequence
  Synthetic
gcgccactgcgtcggccctc

SEQ ID NO: 4186 - DNA, 20 bp, Artificial Sequence
  Synthetic
cgccactgcgtcggccctca

SEQ ID NO: 4187 - DNA, 20 bp, Artificial Sequence
  Synthetic
gggagagcgtgctgaagcac

SEQ ID NO: 4188 - DNA, 20 bp, Artificial Sequence
  Synthetic
gcgtgctgaagcacaggttg

SEQ ID NO: 4189 - DNA, 20 bp, Artificial Sequence
  Synthetic
cgtgctgaagcacaggttgt

SEQ ID NO: 4190 - DNA, 20 bp, Artificial Sequence
  Synthetic
tgaagcacaggttgtgggcc

SEQ ID NO: 4191 - DNA, 20 bp, Artificial Sequence
  Synthetic
gttgtgggcctggatgatgc

SEQ ID NO: 4192 - DNA, 20 bp, Artificial Sequence
  Synthetic
ttgtgggcctggatgatgct

SEQ ID NO: 4193 - DNA, 20 bp, Artificial Sequence
  Synthetic
tgtgggcctggatgatgctg

SEQ ID NO: 4194 - DNA, 20 bp, Artificial Sequence
  Synthetic
cctggatgatgctggggtac

SEQ ID NO: 4195 - DNA, 20 bp, Artificial Sequence
  Synthetic
gatgatgctggggtacaggc

SEQ ID NO: 4196 - DNA, 20 bp, Artificial Sequence
  Synthetic
ggcaaagtcgaacaccacca

SEQ ID NO: 4197 - DNA, 20 bp, Artificial Sequence
  Synthetic
gcaaagtcgaacaccaccac

SEQ ID NO: 4198 - DNA, 20 bp, Artificial Sequence
  Synthetic
caaagtcgaacaccaccacg

SEQ ID NO: 4199 - DNA, 20 bp, Artificial Sequence
  Synthetic
cacggggttcacgtgaaacc

SEQ ID NO: 4200 - DNA, 20 bp, Artificial Sequence
  Synthetic
gttcacgtgaaacccggaag

SEQ ID NO: 4201 - DNA, 20 bp, Artificial Sequence
  Synthetic
ttcacgtgaaacccggaagt

SEQ ID NO: 4202 - DNA, 20 bp, Artificial Sequence
  Synthetic
tcacgtgaaacccggaagtg

SEQ ID NO: 4203 - DNA, 20 bp, Artificial Sequence
  Synthetic
gaaacccggaagtggggtca

SEQ ID NO: 4204 - DNA, 20 bp, Artificial Sequence
  Synthetic
ggaagtggggtcaaggaccc

SEQ ID NO: 4205 - DNA, 20 bp, Artificial Sequence
  Synthetic
ggtcaaggaccctggccccc

SEQ ID NO: 4206 - DNA, 20 bp, Artificial Sequence
  Synthetic
ctggtaccccacgtgcctgc

SEQ ID NO: 4207 - DNA, 20 bp, Artificial Sequence
  Synthetic
gtaccccacgtgcctgccgg

SEQ ID NO: 4208 - DNA, 20 bp, Artificial Sequence
  Synthetic
gcggtctcccgcgcgccctc

SEQ ID NO: 4209 - DNA, 20 bp, Artificial Sequence
  Synthetic
tcgtcctccccctcctcctc

SEQ ID NO: 4210 - DNA, 20 bp, Artificial Sequence
  Synthetic
ctggccgctcctcgtcctcc

SEQ ID NO: 4211 - DNA, 20 bp, Artificial Sequence
  Synthetic
tggccgctcctcgtcctccc

SEQ ID NO: 4212 - DNA, 20 bp, Artificial Sequence
  Synthetic
ctcctcgtcctcccgggctg

SEQ ID NO: 4213 - DNA, 20 bp, Artificial Sequence
  Synthetic
tcgtcctcccgggctgcggc

SEQ ID NO: 4214 - DNA, 20 bp, Artificial Sequence
  Synthetic
ccgggctgcggccggacgct

SEQ ID NO: 4215 - DNA, 20 bp, Artificial Sequence
  Synthetic
cgggctgcggccggacgctt

SEQ ID NO: 4216 - DNA, 20 bp, Artificial Sequence
  Synthetic
acgcttgggcgcctcccccc

SEQ ID NO: 4217 - DNA, 20 bp, Artificial Sequence
  Synthetic
cggcgcccctaaatcgcccc

SEQ ID NO: 4218 - DNA, 20 bp, Artificial Sequence
  Synthetic
ggcgcccctaaatcgcccct

SEQ ID NO: 4219 - DNA, 20 bp, Artificial Sequence
  Synthetic
ctaaatcgcccctgggtgtc

SEQ ID NO: 4220 - DNA, 20 bp, Artificial Sequence
  Synthetic
ccggcagaataaagcccttc

SEQ ID NO: 4221 - DNA, 20 bp, Artificial Sequence
  Synthetic
cagaataaagcccttctggt

SEQ ID NO: 4222 - DNA, 20 bp, Artificial Sequence
  Synthetic
taaagcccttctggtcggcc

SEQ ID NO: 4223 - DNA, 20 bp, Artificial Sequence
  Synthetic
tctggtcggccaggcgcagc

SEQ ID NO: 4224 - DNA, 20 bp, Artificial Sequence
  Synthetic
gcagcaggcacgtaaagacg

SEQ ID NO: 4225 - DNA, 20 bp, Artificial Sequence
  Synthetic
acgtaaagacgcggatctgc

SEQ ID NO: 4226 - DNA, 20 bp, Artificial Sequence
  Synthetic
gatctgctggccgtcgtaga

SEQ ID NO: 4227 - DNA, 20 bp, Artificial Sequence
  Synthetic
gctggccgtcgtagatggtg

SEQ ID NO: 4228 - DNA, 20 bp, Artificial Sequence
  Synthetic
ctggccgtcgtagatggtgc

SEQ ID NO: 4229 - DNA, 20 bp, Artificial Sequence
  Synthetic
aatacccgccaagcgcgcga

SEQ ID NO: 4230 - DNA, 20 bp, Artificial Sequence
  Synthetic
cgacggccgagagctccaga

SEQ ID NO: 4231 - DNA, 20 bp, Artificial Sequence
  Synthetic
gacggccgagagctccagat

SEQ ID NO: 4232 - DNA, 20 bp, Artificial Sequence
  Synthetic
acggccgagagctccagatg

SEQ ID NO: 4233 - DNA, 20 bp, Artificial Sequence
  Synthetic
gcaaaaacttaaaaaacagc

SEQ ID NO: 4234 - DNA, 20 bp, Artificial Sequence
  Synthetic
aaaacagctggcccaccagc

SEQ ID NO: 4235 - DNA, 20 bp, Artificial Sequence
  Synthetic
aaacagctggcccaccagca

SEQ ID NO: 4236 - DNA, 20 bp, Artificial Sequence
  Synthetic
gccgatcaccccgcgttgcg

SEQ ID NO: 4237 - DNA, 20 bp, Artificial Sequence
  Synthetic
ccgatcaccccgcgttgcgc

SEQ ID NO: 4238 - DNA, 20 bp, Artificial Sequence
  Synthetic
caccccgcgttgcgcgggcc

SEQ ID NO: 4239 - DNA, 20 bp, Artificial Sequence
  Synthetic
cccgcgttgcgcgggcccgg

SEQ ID NO: 4240 - DNA, 20 bp, Artificial Sequence
  Synthetic
cgcgggcccggcggcgtagt

SEQ ID NO: 4241 - DNA, 20 bp, Artificial Sequence
  Synthetic
gggcccggcggcgtagtagg

SEQ ID NO: 4242 - DNA, 20 bp, Artificial Sequence
  Synthetic
ggcccggcggcgtagtaggc

SEQ ID NO: 4243 - DNA, 20 bp, Artificial Sequence
  Synthetic
gcccggcggcgtagtaggcg

SEQ ID NO: 4244 - DNA, 20 bp, Artificial Sequence
  Synthetic
cggggatgtcgcgatagctc

SEQ ID NO: 4245 - DNA, 20 bp, Artificial Sequence
  Synthetic
ggtccttcttcttgtccttc

SEQ ID NO: 4246 - DNA, 20 bp, Artificial Sequence
  Synthetic
cttcttcttgtccttcagga

SEQ ID NO: 4247 - DNA, 20 bp, Artificial Sequence
  Synthetic
cttgtccttcaggacggctt

SEQ ID NO: 4248 - DNA, 20 bp, Artificial Sequence
  Synthetic
cttcaggacggcttcggcca

SEQ ID NO: 4249 - DNA, 20 bp, Artificial Sequence
  Synthetic
gctcgagagcttgatcttgt

SEQ ID NO: 4250 - DNA, 20 bp, Artificial Sequence
  Synthetic
cctttatcttgctgcgcttc

SEQ ID NO: 4251 - DNA, 20 bp, Artificial Sequence
  Synthetic
tcttgctgcgcttctggaag

SEQ ID NO: 4252 - DNA, 20 bp, Artificial Sequence
  Synthetic
tgcgcttctggaagtggctc

SEQ ID NO: 4253 - RNA, 20 nt, Artificial Sequence
  Synthetic
cccacacgcgaaacacgccc

SEQ ID NO: 4254 - DNA, 20 bp, Artificial Sequence
  Synthetic
acacgccccggccgttcatg

SEQ ID NO: 4255 - DNA, 20 bp, Artificial Sequence
  Synthetic
tcatgcggccgtacccgtcc

SEQ ID NO: 4256 - DNA, 20 bp, Artificial Sequence
  Synthetic
catgcggccgtacccgtcca

SEQ ID NO: 4257 - DNA, 20 bp, Artificial Sequence
  Synthetic
atgcggccgtacccgtccag

SEQ ID NO: 4258 - DNA, 20 bp, Artificial Sequence
  Synthetic
tgcggccgtacccgtccagg

SEQ ID NO: 4259 - DNA, 20 bp, Artificial Sequence
  Synthetic
cttgtaaatgtccgtcagct

SEQ ID NO: 4260 - DNA, 20 bp, Artificial Sequence
  Synthetic
cgtcagcttggccagcaaga

SEQ ID NO: 4261 - DNA, 20 bp, Artificial Sequence
  Synthetic
gtcagcttggccagcaagaa

SEQ ID NO: 4262 - DNA, 20 bp, Artificial Sequence
  Synthetic
gaagttgatgatgttgtacc

SEQ ID NO: 4263 - DNA, 20 bp, Artificial Sequence
  Synthetic
gttgtacccggtcacgaact

SEQ ID NO: 4264 - DNA, 20 bp, Artificial Sequence
  Synthetic
ttgtacccggtcacgaactc

SEQ ID NO: 4265 - DNA, 20 bp, Artificial Sequence
  Synthetic
tgtacccggtcacgaactcg

SEQ ID NO: 4266 - DNA, 20 bp, Artificial Sequence
  Synthetic
cggggccgtactgtttcaca

SEQ ID NO: 4267 - DNA, 20 bp, Artificial Sequence
  Synthetic
ggggccgtactgtttcacaa

SEQ ID NO: 4268 - DNA, 20 bp, Artificial Sequence
  Synthetic
ctgtttcacaagggtcatga

SEQ ID NO: 4269 - DNA, 20 bp, Artificial Sequence
  Synthetic
gctgtcgaattccagaacca

SEQ ID NO: 4270 - DNA, 20 bp, Artificial Sequence
  Synthetic
ctgtcgaattccagaaccac

SEQ ID NO: 4271 - DNA, 20 bp, Artificial Sequence
  Synthetic
gaattccagaaccacgggcg

SEQ ID NO: 4272 - DNA, 20 bp, Artificial Sequence
  Synthetic
aattccagaaccacgggcgt

SEQ ID NO: 4273 - DNA, 20 bp, Artificial Sequence
  Synthetic
ccagaaccacgggcgtgggc

SEQ ID NO: 4274 - DNA, 20 bp, Artificial Sequence
  Synthetic
cacgggcgtgggcaggcccc

SEQ ID NO: 4275 - DNA, 20 bp, Artificial Sequence
  Synthetic
ccctggccgccagctcgttc

SEQ ID NO: 4276 - DNA, 20 bp, Artificial Sequence
  Synthetic
tggccgccagctcgttcagg

SEQ ID NO: 4277 - DNA, 20 bp, Artificial Sequence
  Synthetic
ggccgccagctcgttcaggt

SEQ ID NO: 4278 - DNA, 20 bp, Artificial Sequence
  Synthetic
cagctcgttcaggtgggatt

SEQ ID NO: 4279 - DNA, 20 bp, Artificial Sequence
  Synthetic
agctcgttcaggtgggattc

SEQ ID NO: 4280 - DNA, 20 bp, Artificial Sequence
  Synthetic
gctcgttcaggtgggattcg

SEQ ID NO: 4281 - DNA, 20 bp, Artificial Sequence
  Synthetic
cgttcaggtgggattcgggg

SEQ ID NO: 4282 - DNA, 20 bp, Artificial Sequence
  Synthetic
gtgggattcggggaggtcgc

SEQ ID NO: 4283 - RNA, 20 nt, Artificial Sequence
  Synthetic
cgcaggaaccgagcgaaaac

SEQ ID NO: 4284 - RNA, 20 nt, Artificial Sequence
  Synthetic
aggaaccgagcgaaaacagg

SEQ ID NO: 4285 - DNA, 20 bp, Artificial Sequence
  Synthetic
aaaacaggaggacgtgctcc

SEQ ID NO: 4286 - DNA, 20 bp, Artificial Sequence
  Synthetic
aaacaggaggacgtgctcca

SEQ ID NO: 4287 - DNA, 20 bp, Artificial Sequence
  Synthetic
caggaggacgtgctccaggg

SEQ ID NO: 4288 - DNA, 20 bp, Artificial Sequence
  Synthetic
gaggacgtgctccagggcgg

SEQ ID NO: 4289 - DNA, 20 bp, Artificial Sequence
  Synthetic
gacgtgctccagggcggtgg

SEQ ID NO: 4290 - DNA, 20 bp, Artificial Sequence
  Synthetic
gctccagggcggtggtggac

SEQ ID NO: 4291 - DNA, 20 bp, Artificial Sequence
  Synthetic
ggacaggtcgtagagcagac

SEQ ID NO: 4292 - DNA, 20 bp, Artificial Sequence
  Synthetic
cgtagagcagacaggatatc

SEQ ID NO: 4293 - DNA, 20 bp, Artificial Sequence
  Synthetic
gacaggatatctggatgacc

SEQ ID NO: 4294 - DNA, 20 bp, Artificial Sequence
  Synthetic
atctggatgaccaggtcctc

SEQ ID NO: 4295 - DNA, 20 bp, Artificial Sequence
  Synthetic
tctggatgaccaggtcctcc

SEQ ID NO: 4296 - DNA, 20 bp, Artificial Sequence
  Synthetic
gaccaggtcctccgggtgcc

SEQ ID NO: 4297 - DNA, 20 bp, Artificial Sequence
  Synthetic
tcctccgggtgcccggccac

SEQ ID NO: 4298 - DNA, 20 bp, Artificial Sequence
  Synthetic
cgggtgcccggccaccggaa

SEQ ID NO: 4299 - DNA, 20 bp, Artificial Sequence
  Synthetic
aagcacatgagcttgtatgc

SEQ ID NO: 4300 - DNA, 20 bp, Artificial Sequence
  Synthetic
acatgagcttgtatgccggt

SEQ ID NO: 4301 - DNA, 20 bp, Artificial Sequence
  Synthetic
gtcgctcatgcccccctcga

SEQ ID NO: 4302 - DNA, 20 bp, Artificial Sequence
  Synthetic
tcatgcccccctcgatggcc

SEQ ID NO: 4303 - DNA, 20 bp, Artificial Sequence
  Synthetic
acagttaaactcgacgtcgc

SEQ ID NO: 4304 - DNA, 20 bp, Artificial Sequence
  Synthetic
gacgtcgctggatgtcccga

SEQ ID NO: 4305 - DNA, 20 bp, Artificial Sequence
  Synthetic
ctggatgtcccgaaggccat

SEQ ID NO: 4306 - DNA, 20 bp, Artificial Sequence
  Synthetic
tggatgtcccgaaggccatc

SEQ ID NO: 4307 - DNA, 20 bp, Artificial Sequence
  Synthetic
ggatgtcccgaaggccatcg

SEQ ID NO: 4308 - DNA, 20 bp, Artificial Sequence
  Synthetic
ccgaaggccatcggggccgc

SEQ ID NO: 4309 - DNA, 20 bp, Artificial Sequence
  Synthetic
aggccatcggggccgccggc

SEQ ID NO: 4310 - DNA, 20 bp, Artificial Sequence
  Synthetic
ggccatcggggccgccggct

SEQ ID NO: 4311 - DNA, 20 bp, Artificial Sequence
  Synthetic
gctgggctagcgtgttgttc

SEQ ID NO: 4312 - DNA, 20 bp, Artificial Sequence
  Synthetic
gctagcgtgttgttccggcc

SEQ ID NO: 4313 - DNA, 20 bp, Artificial Sequence
  Synthetic
tgttccggcccggtttgaga

SEQ ID NO: 4314 - DNA, 20 bp, Artificial Sequence
  Synthetic
tttgagacggtaccagccga

SEQ ID NO: 4315 - DNA, 20 bp, Artificial Sequence
  Synthetic
ccagccgaaggtgacgaacc

SEQ ID NO: 4316 - DNA, 20 bp, Artificial Sequence
  Synthetic
cagccgaaggtgacgaaccc

SEQ ID NO: 4317 - DNA, 20 bp, Artificial Sequence
  Synthetic
agccgaaggtgacgaacccg

SEQ ID NO: 4318 - DNA, 20 bp, Artificial Sequence
  Synthetic
tgacgaacccggggttgtcc

SEQ ID NO: 4319 - DNA, 20 bp, Artificial Sequence
  Synthetic
cggggttgtccaggatgaac

SEQ ID NO: 4320 - DNA, 20 bp, Artificial Sequence
  Synthetic
ggggttgtccaggatgaacc

SEQ ID NO: 4321 - DNA, 20 bp, Artificial Sequence
  Synthetic
gttgtccaggatgaaccggg

SEQ ID NO: 4322 - DNA, 20 bp, Artificial Sequence
  Synthetic
gtccaggatgaaccgggtgg

SEQ ID NO: 4323 - DNA, 20 bp, Artificial Sequence
  Synthetic
cccaccctcgtacttcttga

SEQ ID NO: 4324 - DNA, 20 bp, Artificial Sequence
  Synthetic
ccctcgtacttcttgatggc

SEQ ID NO: 4325 - DNA, 20 bp, Artificial Sequence
  Synthetic
cctcgtacttcttgatggcc

SEQ ID NO: 4326 - DNA, 20 bp, Artificial Sequence
  Synthetic
ccgggcagaagttgtcgcac

SEQ ID NO: 4327 - DNA, 20 bp, Artificial Sequence
  Synthetic
acgacagcacacgcccgctt

SEQ ID NO: 4328 - DNA, 20 bp, Artificial Sequence
  Synthetic
gcccgcttcggacgtagacg

SEQ ID NO: 4329 - DNA, 20 bp, Artificial Sequence
  Synthetic
gtagacgcggtaaaacagag

SEQ ID NO: 4330 - DNA, 20 bp, Artificial Sequence
  Synthetic
tagacgcggtaaaacagagc

SEQ ID NO: 4331 - DNA, 20 bp, Artificial Sequence
  Synthetic
agacgcggtaaaacagagcg

SEQ ID NO: 4332 - DNA, 20 bp, Artificial Sequence
  Synthetic
cgtctcgtagtagtacacgt

SEQ ID NO: 4333 - DNA, 20 bp, Artificial Sequence
  Synthetic
ccaccacctccgcctcgaag

SEQ ID NO: 4334 - DNA, 20 bp, Artificial Sequence
  Synthetic
ctccgcctcgaagtggtccg

SEQ ID NO: 4335 - DNA, 20 bp, Artificial Sequence
  Synthetic
agtggtccgcggagatgccg

SEQ ID NO: 4336 - DNA, 20 bp, Artificial Sequence
  Synthetic
atgccgcggaacgacgcgcc

SEQ ID NO: 4337 - DNA, 20 bp, Artificial Sequence
  Synthetic
tgccgcggaacgacgcgccc

SEQ ID NO: 4338 - RNA, 20 nt, Artificial Sequence
  Synthetic
gccgcggaacgacgcgcccg

SEQ ID NO: 4339 - DNA, 20 bp, Artificial Sequence
  Synthetic
acgcgcccggggactcgcgc

SEQ ID NO: 4340 - DNA, 20 bp, Artificial Sequence
  Synthetic
cgcgcccggggactcgcgca

SEQ ID NO: 4341 - DNA, 20 bp, Artificial Sequence
  Synthetic
cggggactcgcgcagggccg

SEQ ID NO: 4342 - DNA, 20 bp, Artificial Sequence
  Synthetic
atgcgctcgcagagatctcg

SEQ ID NO: 4343 - DNA, 20 bp, Artificial Sequence
  Synthetic
tgcgctcgcagagatctcgt

SEQ ID NO: 4344 - DNA, 20 bp, Artificial Sequence
  Synthetic
gcgctcgcagagatctcgtg

SEQ ID NO: 4345 - DNA, 20 bp, Artificial Sequence
  Synthetic
cgcagagatctcgtggggcg

SEQ ID NO: 4346 - DNA, 20 bp, Artificial Sequence
  Synthetic
ctcgtggggcgcggcattgt

SEQ ID NO: 4347 - DNA, 20 bp, Artificial Sequence
  Synthetic
ccgcgtgccgtaaacgtgaa

SEQ ID NO: 4348 - DNA, 20 bp, Artificial Sequence
  Synthetic
cgtaaacgtgaacggccacc

SEQ ID NO: 4349 - DNA, 20 bp, Artificial Sequence
  Synthetic
aaacgtgaacggccacccgg

SEQ ID NO: 4350 - DNA, 20 bp, Artificial Sequence
  Synthetic
acggccacccggtggccttc

SEQ ID NO: 4351 - DNA, 20 bp, Artificial Sequence
  Synthetic
cccggtggccttccggagtc

SEQ ID NO: 4352 - DNA, 20 bp, Artificial Sequence
  Synthetic
ggccttccggagtcaggccc

SEQ ID NO: 4353 - DNA, 20 bp, Artificial Sequence
  Synthetic
caggcccaggagcgtgatga

SEQ ID NO: 4354 - DNA, 20 bp, Artificial Sequence
  Synthetic
agcgtgatgacggtccccgt

SEQ ID NO: 4355 - DNA, 20 bp, Artificial Sequence
  Synthetic
gacggtccccgtcggtgtga

SEQ ID NO: 4356 - DNA, 20 bp, Artificial Sequence
  Synthetic
tggcgtccataaaccgcgcg

SEQ ID NO: 4357 - DNA, 20 bp, Artificial Sequence
  Synthetic
ggcgtccataaaccgcgcgt

SEQ ID NO: 4358 - DNA, 20 bp, Artificial Sequence
  Synthetic
gcgtccataaaccgcgcgtg

SEQ ID NO: 4359 - DNA, 20 bp, Artificial Sequence
  Synthetic
cgtccataaaccgcgcgtgg

SEQ ID NO: 4360 - DNA, 17 bp, Artificial Sequence
  Synthetic
ttcctccgccgtagcgc

SEQ ID NO: 4361 - DNA, 17 bp, Artificial Sequence
  Synthetic
caccgccccgaaccctg

SEQ ID NO: 4362 - DNA, 17 bp, Artificial Sequence
  Synthetic
ccccgaaccctgcggtc

SEQ ID NO: 4363 - DNA, 17 bp, Artificial Sequence
  Synthetic
tgcggtccggagccgcg

SEQ ID NO: 4364 - DNA, 17 bp, Artificial Sequence
  Synthetic
cgcgcggccacgtcgtc

SEQ ID NO: 4365 - DNA, 17 bp, Artificial Sequence
  Synthetic
gcgcggccacgtcgtcc

SEQ ID NO: 4366 - DNA, 17 bp, Artificial Sequence
  Synthetic
cgcggccacgtcgtccg

SEQ ID NO: 4367 - DNA, 17 bp, Artificial Sequence
  Synthetic
gcggccacgtcgtccgg

SEQ ID NO: 4368 - DNA, 17 bp, Artificial Sequence
  Synthetic
cggccacgtcgtccggg

SEQ ID NO: 4369 - DNA, 17 bp, Artificial Sequence
  Synthetic
cggggggtgccacactt

SEQ ID NO: 4370 - DNA, 17 bp, Artificial Sequence
  Synthetic
ggggggtgccacacttc

SEQ ID NO: 4371 - DNA, 17 bp, Artificial Sequence
  Synthetic
cctttttaacagactct

SEQ ID NO: 4372 - DNA, 17 bp, Artificial Sequence
  Synthetic
cagactctcggtgatct

SEQ ID NO: 4373 - DNA, 17 bp, Artificial Sequence
  Synthetic
tggcgttattcccaaac

SEQ ID NO: 4374 - DNA, 17 bp, Artificial Sequence
  Synthetic
ggcgttattcccaaaca

SEQ ID NO: 4375 - RNA, 17 nt, Artificial Sequence
  Synthetic
cgcacgccgcccccaac

SEQ ID NO: 4376 - RNA, 17 nt, Artificial Sequence
  Synthetic
acgccgcccccaacagg

SEQ ID NO: 4377 - DNA, 17 bp, Artificial Sequence
  Synthetic
cgccgcccccaacaggt

SEQ ID NO: 4378 - DNA, 17 bp, Artificial Sequence
  Synthetic
agtaatagtccgtgttc

SEQ ID NO: 4379 - DNA, 17 bp, Artificial Sequence
  Synthetic
gtaatagtccgtgttca

SEQ ID NO: 4380 - DNA, 17 bp, Artificial Sequence
  Synthetic
tgttcagggcgacgccg

SEQ ID NO: 4381 - DNA, 17 bp, Artificial Sequence
  Synthetic
gttcagggcgacgccgt

SEQ ID NO: 4382 - DNA, 17 bp, Artificial Sequence
  Synthetic
ggcgacgccgtgggcaa

SEQ ID NO: 4383 - DNA, 17 bp, Artificial Sequence
  Synthetic
gtgggcaatggcgtatg

SEQ ID NO: 4384 - DNA, 17 bp, Artificial Sequence
  Synthetic
tgggcaatggcgtatgc

SEQ ID NO: 4385 - DNA, 17 bp, Artificial Sequence
  Synthetic
ggcgtatgcgggatcct

SEQ ID NO: 4386 - DNA, 17 bp, Artificial Sequence
  Synthetic
gggatcctcggccagct

SEQ ID NO: 4387 - DNA, 17 bp, Artificial Sequence
  Synthetic
cggacaccagcagcttg

SEQ ID NO: 4388 - DNA, 17 bp, Artificial Sequence
  Synthetic
ggacaccagcagcttgc

SEQ ID NO: 4389 - DNA, 17 bp, Artificial Sequence
  Synthetic
gacaccagcagcttgcg

SEQ ID NO: 4390 - DNA, 17 bp, Artificial Sequence
  Synthetic
cagcagcttgcggggct

SEQ ID NO: 4391 - DNA, 17 bp, Artificial Sequence
  Synthetic
ggcttggacgcgcctcc

SEQ ID NO: 4392 - DNA, 17 bp, Artificial Sequence
  Synthetic
gcttggacgcgcctccc

SEQ ID NO: 4393 - DNA, 17 bp, Artificial Sequence
  Synthetic
cttggacgcgcctcccg

SEQ ID NO: 4394 - DNA, 17 bp, Artificial Sequence
  Synthetic
ttggacgcgcctcccgg

SEQ ID NO: 4395 - DNA, 17 bp, Artificial Sequence
  Synthetic
tggacgcgcctcccggg

SEQ ID NO: 4396 - DNA, 17 bp, Artificial Sequence
  Synthetic
cgcgcctcccggggggt

SEQ ID NO: 4397 - DNA, 17 bp, Artificial Sequence
  Synthetic
cctcccggggggtcggc

SEQ ID NO: 4398 - DNA, 17 bp, Artificial Sequence
  Synthetic
ggggggtcggcaggcga

SEQ ID NO: 4399 - DNA, 17 bp, Artificial Sequence
  Synthetic
caggcgacggcgtctcc

SEQ ID NO: 4400 - DNA, 17 bp, Artificial Sequence
  Synthetic
aggcgacggcgtctccc

SEQ ID NO: 4401 - DNA, 17 bp, Artificial Sequence
  Synthetic
ggcgacggcgtctcccg

SEQ ID NO: 4402 - DNA, 17 bp, Artificial Sequence
  Synthetic
gcgacggcgtctcccgg

SEQ ID NO: 4403 - DNA, 17 bp, Artificial Sequence
  Synthetic
cgtctcccgggggcgct

SEQ ID NO: 4404 - DNA, 17 bp, Artificial Sequence
  Synthetic
tcccgggggcgcttggc

SEQ ID NO: 4405 - DNA, 17 bp, Artificial Sequence
  Synthetic
cccgggggcgcttggcc

SEQ ID NO: 4406 - DNA, 17 bp, Artificial Sequence
  Synthetic
ccgggggcgcttggccg

SEQ ID NO: 4407 - DNA, 17 bp, Artificial Sequence
  Synthetic
ggggcgcttggccgggg

SEQ ID NO: 4408 - DNA, 17 bp, Artificial Sequence
  Synthetic
gggcgcttggccgggga

SEQ ID NO: 4409 - DNA, 17 bp, Artificial Sequence
  Synthetic
gcttggccggggagggc

SEQ ID NO: 4410 - DNA, 17 bp, Artificial Sequence
  Synthetic
cttggccggggagggca

SEQ ID NO: 4411 - RNA, 17 nt, Artificial Sequence
  Synthetic
cggggagggcagggccg

SEQ ID NO: 4412 - RNA, 17 nt, Artificial Sequence
  Synthetic
ggggagggcagggccgc

SEQ ID NO: 4413 - RNA, 17 nt, Artificial Sequence
  Synthetic
gggagggcagggccgcg

SEQ ID NO: 4414 - RNA, 17 nt, Artificial Sequence
  Synthetic
ggagggcagggccgcgg

SEQ ID NO: 4415 - RNA, 17 nt, Artificial Sequence
  Synthetic
gagggcagggccgcggg

SEQ ID NO: 4416 - RNA, 17 nt, Artificial Sequence
  Synthetic
agggcagggccgcgggg

SEQ ID NO: 4417 - RNA, 17 nt, Artificial Sequence
  Synthetic
gggcagggccgcggggg

SEQ ID NO: 4418 - RNA, 17 nt, Artificial Sequence
  Synthetic
cagggccgcgggggggg

SEQ ID NO: 4419 - RNA, 17 nt, Artificial Sequence
  Synthetic
agggccgcggggggggc

SEQ ID NO: 4420 - DNA, 17 bp, Artificial Sequence
  Synthetic
ggggcgggctcgtcccc

SEQ ID NO: 4421 - DNA, 17 bp, Artificial Sequence
  Synthetic
gggcgggctcgtcccct

SEQ ID NO: 4422 - DNA, 17 bp, Artificial Sequence
  Synthetic
ggcgggctcgtcccctg

SEQ ID NO: 4423 - DNA, 17 bp, Artificial Sequence
  Synthetic
gggctcgtcccctgggg

SEQ ID NO: 4424 - DNA, 17 bp, Artificial Sequence
  Synthetic
ctcgtcccctggggcgg

SEQ ID NO: 4425 - DNA, 17 bp, Artificial Sequence
  Synthetic
cggcggcgtctagctcg

SEQ ID NO: 4426 - DNA, 17 bp, Artificial Sequence
  Synthetic
cggcgtctagctcgcgg

SEQ ID NO: 4427 - DNA, 17 bp, Artificial Sequence
  Synthetic
ggcgtctagctcgcgga

SEQ ID NO: 4428 - DNA, 17 bp, Artificial Sequence
  Synthetic
gtctagctcgcggaggg

SEQ ID NO: 4429 - DNA, 17 bp, Artificial Sequence
  Synthetic
ccgtctcctctacctcg

SEQ ID NO: 4430 - DNA, 17 bp, Artificial Sequence
  Synthetic
cgtctcctctacctcgc

SEQ ID NO: 4431 - DNA, 17 bp, Artificial Sequence
  Synthetic
cctctacctcgcgggtc

SEQ ID NO: 4432 - DNA, 17 bp, Artificial Sequence
  Synthetic
ctctacctcgcgggtct

SEQ ID NO: 4433 - DNA, 17 bp, Artificial Sequence
  Synthetic
tgggccacgatcacgta

SEQ ID NO: 4434 - DNA, 17 bp, Artificial Sequence
  Synthetic
gggccacgatcacgtac

SEQ ID NO: 4435 - DNA, 17 bp, Artificial Sequence
  Synthetic
cgatcacgtacgggatc

SEQ ID NO: 4436 - DNA, 17 bp, Artificial Sequence
  Synthetic
cgggatccggtccttga

SEQ ID NO: 4437 - DNA, 17 bp, Artificial Sequence
  Synthetic
atccggtccttgatgga

SEQ ID NO: 4438 - DNA, 17 bp, Artificial Sequence
  Synthetic
tccggtccttgatggac

SEQ ID NO: 4439 - DNA, 17 bp, Artificial Sequence
  Synthetic
tggacgggacctgcgcg

SEQ ID NO: 4440 - DNA, 17 bp, Artificial Sequence
  Synthetic
acgggacctgcgcgcgg

SEQ ID NO: 4441 - DNA, 17 bp, Artificial Sequence
  Synthetic
cgggacctgcgcgcggc

SEQ ID NO: 4442 - DNA, 17 bp, Artificial Sequence
  Synthetic
gcttgtaatacaccgtc

SEQ ID NO: 4443 - DNA, 17 bp, Artificial Sequence
  Synthetic
tgtaatacaccgtcagg

SEQ ID NO: 4444 - DNA, 17 bp, Artificial Sequence
  Synthetic
gtaatacaccgtcaggt

SEQ ID NO: 4445 - DNA, 17 bp, Artificial Sequence
  Synthetic
acaccgtcaggtgggcc

SEQ ID NO: 4446 - DNA, 17 bp, Artificial Sequence
  Synthetic
gtgggccaggcgcttgt

SEQ ID NO: 4447 - DNA, 17 bp, Artificial Sequence
  Synthetic
ttgttggtgtacgcgcg

SEQ ID NO: 4448 - DNA, 17 bp, Artificial Sequence
  Synthetic
tgttggtgtacgcgcgc

SEQ ID NO: 4449 - DNA, 17 bp, Artificial Sequence
  Synthetic
cgggtgtctgctcagtt

SEQ ID NO: 4450 - DNA, 17 bp, Artificial Sequence
  Synthetic
gtgtctgctcagttcgg

SEQ ID NO: 4451 - DNA, 17 bp, Artificial Sequence
  Synthetic
tgctcagttcggcggtg

SEQ ID NO: 4452 - DNA, 17 bp, Artificial Sequence
  Synthetic
cggtgaggacaaagtcc

SEQ ID NO: 4453 - DNA, 17 bp, Artificial Sequence
  Synthetic
tcctggatgtccctctc

SEQ ID NO: 4454 - DNA, 17 bp, Artificial Sequence
  Synthetic
cctggatgtccctctcc

SEQ ID NO: 4455 - DNA, 17 bp, Artificial Sequence
  Synthetic
gatgtccctctccgggt

SEQ ID NO: 4456 - DNA, 17 bp, Artificial Sequence
  Synthetic
ggtcggtgatgcgccga

SEQ ID NO: 4457 - DNA, 17 bp, Artificial Sequence
  Synthetic
gtcggtgatgcgccgat

SEQ ID NO: 4458 - DNA, 17 bp, Artificial Sequence
  Synthetic
gccgatgggcgtctacg

SEQ ID NO: 4459 - DNA, 17 bp, Artificial Sequence
  Synthetic
atgggcgtctacgagga

SEQ ID NO: 4460 - DNA, 17 bp, Artificial Sequence
  Synthetic
gaacgcctgcagtccct

SEQ ID NO: 4461 - DNA, 17 bp, Artificial Sequence
  Synthetic
aacgcctgcagtccctc

SEQ ID NO: 4462 - DNA, 17 bp, Artificial Sequence
  Synthetic
cctgcagtccctcgggc

SEQ ID NO: 4463 - DNA, 17 bp, Artificial Sequence
  Synthetic
ctgcagtccctcgggca

SEQ ID NO: 4464 - DNA, 17 bp, Artificial Sequence
  Synthetic
tgcagtccctcgggcag

SEQ ID NO: 4465 - DNA, 17 bp, Artificial Sequence
  Synthetic
cgccagccactcctccg

SEQ ID NO: 4466 - DNA, 17 bp, Artificial Sequence
  Synthetic
gccagccactcctccgc

SEQ ID NO: 4467 - DNA, 17 bp, Artificial Sequence
  Synthetic
ccagccactcctccgcg

SEQ ID NO: 4468 - DNA, 17 bp, Artificial Sequence
  Synthetic
ctcctccgcggggcgct

SEQ ID NO: 4469 - DNA, 17 bp, Artificial Sequence
  Synthetic
ggggcgctcggctaacg

SEQ ID NO: 4470 - DNA, 17 bp, Artificial Sequence
  Synthetic
gcgctcggctaacgcgg

SEQ ID NO: 4471 - DNA, 17 bp, Artificial Sequence
  Synthetic
taacgcggcggccgctc

SEQ ID NO: 4472 - DNA, 17 bp, Artificial Sequence
  Synthetic
ggcggccgctccggaga

SEQ ID NO: 4473 - DNA, 17 bp, Artificial Sequence
  Synthetic
tatcgtcgtaaaacagc

SEQ ID NO: 4474 - DNA, 17 bp, Artificial Sequence
  Synthetic
aaaacagcaggtcgacc

SEQ ID NO: 4475 - DNA, 17 bp, Artificial Sequence
  Synthetic
aaacagcaggtcgacca

SEQ ID NO: 4476 - DNA, 17 bp, Artificial Sequence
  Synthetic
caggtcgaccagggccc

SEQ ID NO: 4477 - DNA, 17 bp, Artificial Sequence
  Synthetic
gtcgaccagggccctgg

SEQ ID NO: 4478 - DNA, 17 bp, Artificial Sequence
  Synthetic
ccagggccctggaggtg

SEQ ID NO: 4479 - DNA, 17 bp, Artificial Sequence
  Synthetic
gccgatgtactttttct

SEQ ID NO: 4480 - DNA, 17 bp, Artificial Sequence
  Synthetic
ggcgatcagcagcagct

SEQ ID NO: 4481 - DNA, 17 bp, Artificial Sequence
  Synthetic
ttcgcactcgagtttga

SEQ ID NO: 4482 - DNA, 17 bp, Artificial Sequence
  Synthetic
tcgcactcgagtttgat

SEQ ID NO: 4483 - DNA, 17 bp, Artificial Sequence
  Synthetic
cgcactcgagtttgatg

SEQ ID NO: 4484 - DNA, 17 bp, Artificial Sequence
  Synthetic
gcactcgagtttgatgg

SEQ ID NO: 4485 - DNA, 17 bp, Artificial Sequence
  Synthetic
cactcgagtttgatggg

SEQ ID NO: 4486 - DNA, 17 bp, Artificial Sequence
  Synthetic
acagcgcgcgcgagatg

SEQ ID NO: 4487 - DNA, 17 bp, Artificial Sequence
  Synthetic
cgccatcttgtcgccca

SEQ ID NO: 4488 - DNA, 17 bp, Artificial Sequence
  Synthetic
gcccacggccgtcagcc

SEQ ID NO: 4489 - DNA, 17 bp, Artificial Sequence
  Synthetic
cacggccgtcagcccgg

SEQ ID NO: 4490 - DNA, 17 bp, Artificial Sequence
  Synthetic
tcagcccggcggccgtg

SEQ ID NO: 4491 - DNA, 17 bp, Artificial Sequence
  Synthetic
cggcggccgtgaggccg

SEQ ID NO: 4492 - RNA, 17 nt, Artificial Sequence
  Synthetic
gcggcacagcacaaaga

SEQ ID NO: 4493 - DNA, 17 bp, Artificial Sequence
  Synthetic
cccgtagatgatgcgca

SEQ ID NO: 4494 - DNA, 17 bp, Artificial Sequence
  Synthetic
gatgatgcgcatggaat

SEQ ID NO: 4495 - DNA, 17 bp, Artificial Sequence
  Synthetic
atgatgcgcatggaata

SEQ ID NO: 4496 - DNA, 17 bp, Artificial Sequence
  Synthetic
gcgcatggaatagggcc

SEQ ID NO: 4497 - DNA, 17 bp, Artificial Sequence
  Synthetic
cgcatggaatagggccc

SEQ ID NO: 4498 - DNA, 17 bp, Artificial Sequence
  Synthetic
gcatggaatagggcccg

SEQ ID NO: 4499 - DNA, 17 bp, Artificial Sequence
  Synthetic
catggaatagggcccgg

SEQ ID NO: 4500 - DNA, 17 bp, Artificial Sequence
  Synthetic
cccgggggcgcgcatgt

SEQ ID NO: 4501 - DNA, 17 bp, Artificial Sequence
  Synthetic
cgcatgtcggccgcctc

SEQ ID NO: 4502 - DNA, 17 bp, Artificial Sequence
  Synthetic
gcatgtcggccgcctcc

SEQ ID NO: 4503 - DNA, 17 bp, Artificial Sequence
  Synthetic
ggccgcctccgggaaat

SEQ ID NO: 4504 - DNA, 17 bp, Artificial Sequence
  Synthetic
cctccgggaaatcggcc

SEQ ID NO: 4505 - DNA, 17 bp, Artificial Sequence
  Synthetic
ggccaggagctgttcga

SEQ ID NO: 4506 - RNA, 17 nt, Artificial Sequence
  Synthetic
aggccgcccagcgcgcg

SEQ ID NO: 4507 - DNA, 17 bp, Artificial Sequence
  Synthetic
gcgcgtggacgtactcg

SEQ ID NO: 4508 - DNA, 17 bp, Artificial Sequence
  Synthetic
cgcgtggacgtactcgc

SEQ ID NO: 4509 - DNA, 17 bp, Artificial Sequence
  Synthetic
tcgcgagcagcatctcg

SEQ ID NO: 4510 - DNA, 17 bp, Artificial Sequence
  Synthetic
cagcatctcgcggccga

SEQ ID NO: 4511 - DNA, 17 bp, Artificial Sequence
  Synthetic
gatggtcgtcaccgtcg

SEQ ID NO: 4512 - DNA, 17 bp, Artificial Sequence
  Synthetic
ccgtcgcggcaacgtgc

SEQ ID NO: 4513 - DNA, 17 bp, Artificial Sequence
  Synthetic
gcggcaacgtgcaggca

SEQ ID NO: 4514 - DNA, 17 bp, Artificial Sequence
  Synthetic
caacgtgcaggcacggc

SEQ ID NO: 4515 - DNA, 17 bp, Artificial Sequence
  Synthetic
gttacacacgaccttga

SEQ ID NO: 4516 - DNA, 17 bp, Artificial Sequence
  Synthetic
acacacgaccttgatgg

SEQ ID NO: 4517 - DNA, 17 bp, Artificial Sequence
  Synthetic
cggcctgctgcttgtcc

SEQ ID NO: 4518 - DNA, 17 bp, Artificial Sequence
  Synthetic
ctgcttgtccaggagca

SEQ ID NO: 4519 - DNA, 17 bp, Artificial Sequence
  Synthetic
caggagcacggcctcct

SEQ ID NO: 4520 - DNA, 17 bp, Artificial Sequence
  Synthetic
aggagcacggcctcctc

SEQ ID NO: 4521 - DNA, 17 bp, Artificial Sequence
  Synthetic
ggagcacggcctcctcg

SEQ ID NO: 4522 - DNA, 17 bp, Artificial Sequence
  Synthetic
cctcctcggggctgctc

SEQ ID NO: 4523 - DNA, 17 bp, Artificial Sequence
  Synthetic
ctcctcggggctgctct

SEQ ID NO: 4524 - DNA, 17 bp, Artificial Sequence
  Synthetic
tcctcggggctgctctg

SEQ ID NO: 4525 - DNA, 17 bp, Artificial Sequence
  Synthetic
tctggggaatccgcgag

SEQ ID NO: 4526 - DNA, 17 bp, Artificial Sequence
  Synthetic
gcggatctgctttcgca

SEQ ID NO: 4527 - DNA, 17 bp, Artificial Sequence
  Synthetic
tggcgagccagtcccgc

SEQ ID NO: 4528 - DNA, 17 bp, Artificial Sequence
  Synthetic
cgagccagtcccgcagg

SEQ ID NO: 4529 - DNA, 17 bp, Artificial Sequence
  Synthetic
cccgcaggaggatgctg

SEQ ID NO: 4530 - DNA, 17 bp, Artificial Sequence
  Synthetic
gcaggaggatgctgagg

SEQ ID NO: 4531 - DNA, 17 bp, Artificial Sequence
  Synthetic
cccccacctcgatctcc

SEQ ID NO: 4532 - DNA, 17 bp, Artificial Sequence
  Synthetic
agtccttgcccgcctcc

SEQ ID NO: 4533 - DNA, 17 bp, Artificial Sequence
  Synthetic
caggtgcgccactgcgt

SEQ ID NO: 4534 - DNA, 17 bp, Artificial Sequence
  Synthetic
ccactgcgtcggccctc

SEQ ID NO: 4535 - DNA, 17 bp, Artificial Sequence
  Synthetic
cactgcgtcggccctca

SEQ ID NO: 4536 - DNA, 17 bp, Artificial Sequence
  Synthetic
agagcgtgctgaagcac

SEQ ID NO: 4537 - DNA, 17 bp, Artificial Sequence
  Synthetic
tgctgaagcacaggttg

SEQ ID NO: 4538 - DNA, 17 bp, Artificial Sequence
  Synthetic
gctgaagcacaggttgt

SEQ ID NO: 4539 - DNA, 17 bp, Artificial Sequence
  Synthetic
agcacaggttgtgggcc

SEQ ID NO: 4540 - DNA, 17 bp, Artificial Sequence
  Synthetic
gtgggcctggatgatgc

SEQ ID NO: 4541 - DNA, 17 bp, Artificial Sequence
  Synthetic
tgggcctggatgatgct

SEQ ID NO: 4542 - DNA, 17 bp, Artificial Sequence
  Synthetic
gggcctggatgatgctg

SEQ ID NO: 4543 - DNA, 17 bp, Artificial Sequence
  Synthetic
ggatgatgctggggtac

SEQ ID NO: 4544 - DNA, 17 bp, Artificial Sequence
  Synthetic
gatgctggggtacaggc

SEQ ID NO: 4545 - DNA, 17 bp, Artificial Sequence
  Synthetic
aaagtcgaacaccacca

SEQ ID NO: 4546 - DNA, 17 bp, Artificial Sequence
  Synthetic
aagtcgaacaccaccac

SEQ ID NO: 4547 - DNA, 17 bp, Artificial Sequence
  Synthetic
agtcgaacaccaccacg

SEQ ID NO: 4548 - DNA, 17 bp, Artificial Sequence
  Synthetic
ggggttcacgtgaaacc

SEQ ID NO: 4549 - DNA, 17 bp, Artificial Sequence
  Synthetic
cacgtgaaacccggaag

SEQ ID NO: 4550 - DNA, 17 bp, Artificial Sequence
  Synthetic
acgtgaaacccggaagt

SEQ ID NO: 4551 - DNA, 17 bp, Artificial Sequence
  Synthetic
cgtgaaacccggaagtg

SEQ ID NO: 4552 - DNA, 17 bp, Artificial Sequence
  Synthetic
acccggaagtggggtca

SEQ ID NO: 4553 - DNA, 17 bp, Artificial Sequence
  Synthetic
agtggggtcaaggaccc

SEQ ID NO: 4554 - DNA, 17 bp, Artificial Sequence
  Synthetic
caaggaccctggccccc

SEQ ID NO: 4555 - DNA, 17 bp, Artificial Sequence
  Synthetic
gtaccccacgtgcctgc

SEQ ID NO: 4556 - DNA, 17 bp, Artificial Sequence
  Synthetic
ccccacgtgcctgccgg

SEQ ID NO: 4557 - DNA, 17 bp, Artificial Sequence
  Synthetic
gtctcccgcgcgccctc

SEQ ID NO: 4558 - DNA, 17 bp, Artificial Sequence
  Synthetic
tcctccccctcctcctc

SEQ ID NO: 4559 - DNA, 17 bp, Artificial Sequence
  Synthetic
gccgctcctcgtcctcc

SEQ ID NO: 4560 - DNA, 17 bp, Artificial Sequence
  Synthetic
ccgctcctcgtcctccc

SEQ ID NO: 4561 - DNA, 17 bp, Artificial Sequence
  Synthetic
ctcgtcctcccgggctg

SEQ ID NO: 4562 - DNA, 17 bp, Artificial Sequence
  Synthetic
tcctcccgggctgcggc

SEQ ID NO: 4563 - DNA, 17 bp, Artificial Sequence
  Synthetic
ggctgcggccggacgct

SEQ ID NO: 4564 - DNA, 17 bp, Artificial Sequence
  Synthetic
gctgcggccggacgctt

SEQ ID NO: 4565 - DNA, 17 bp, Artificial Sequence
  Synthetic
cttgggcgcctcccccc

SEQ ID NO: 4566 - DNA, 17 bp, Artificial Sequence
  Synthetic
cgcccctaaatcgcccc

SEQ ID NO: 4567 - DNA, 17 bp, Artificial Sequence
  Synthetic
gcccctaaatcgcccct

SEQ ID NO: 4568 - DNA, 17 bp, Artificial Sequence
  Synthetic
aatcgcccctgggtgtc

SEQ ID NO: 4569 - DNA, 17 bp, Artificial Sequence
  Synthetic
gcagaataaagcccttc

SEQ ID NO: 4570 - DNA, 17 bp, Artificial Sequence
  Synthetic
aataaagcccttctggt

SEQ ID NO: 4571 - DNA, 17 bp, Artificial Sequence
  Synthetic
agcccttctggtcggcc

SEQ ID NO: 4572 - DNA, 17 bp, Artificial Sequence
  Synthetic
ggtcggccaggcgcagc

SEQ ID NO: 4573 - DNA, 17 bp, Artificial Sequence
  Synthetic
gcaggcacgtaaagacg

SEQ ID NO: 4574 - DNA, 17 bp, Artificial Sequence
  Synthetic
taaagacgcggatctgc

SEQ ID NO: 4575 - DNA, 17 bp, Artificial Sequence
  Synthetic
ctgctggccgtcgtaga

SEQ ID NO: 4576 - DNA, 17 bp, Artificial Sequence
  Synthetic
ggccgtcgtagatggtg

SEQ ID NO: 4577 - DNA, 17 bp, Artificial Sequence
  Synthetic
gccgtcgtagatggtgc

SEQ ID NO: 4578 - RNA, 17 nt, Artificial Sequence
  Synthetic
acccgccaagcgcgcga

SEQ ID NO: 4579 - DNA, 17 bp, Artificial Sequence
  Synthetic
cggccgagagctccaga

SEQ ID NO: 4580 - DNA, 17 bp, Artificial Sequence
  Synthetic
ggccgagagctccagat

SEQ ID NO: 4581 - DNA, 17 bp, Artificial Sequence
  Synthetic
gccgagagctccagatg

SEQ ID NO: 4582 - DNA, 17 bp, Artificial Sequence
  Synthetic
aaaacttaaaaaacagc

SEQ ID NO: 4583 - DNA, 17 bp, Artificial Sequence
  Synthetic
acagctggcccaccagc

SEQ ID NO: 4584 - DNA, 17 bp, Artificial Sequence
  Synthetic
cagctggcccaccagca

SEQ ID NO: 4585 - DNA, 17 bp, Artificial Sequence
  Synthetic
gatcaccccgcgttgcg

SEQ ID NO: 4586 - DNA, 17 bp, Artificial Sequence
  Synthetic
atcaccccgcgttgcgc

SEQ ID NO: 4587 - DNA, 17 bp, Artificial Sequence
  Synthetic
cccgcgttgcgcgggcc

SEQ ID NO: 4588 - DNA, 17 bp, Artificial Sequence
  Synthetic
gcgttgcgcgggcccgg

SEQ ID NO: 4589 - DNA, 17 bp, Artificial Sequence
  Synthetic
gggcccggcggcgtagt

SEQ ID NO: 4590 - DNA, 17 bp, Artificial Sequence
  Synthetic
cccggcggcgtagtagg

SEQ ID NO: 4591 - DNA, 17 bp, Artificial Sequence
  Synthetic
ccggcggcgtagtaggc

SEQ ID NO: 4592 - DNA, 17 bp, Artificial Sequence
  Synthetic
cggcggcgtagtaggcg

SEQ ID NO: 4593 - DNA, 17 bp, Artificial Sequence
  Synthetic
ggatgtcgcgatagctc

SEQ ID NO: 4594 - DNA, 17 bp, Artificial Sequence
  Synthetic
ccttcttcttgtccttc

SEQ ID NO: 4595 - DNA, 17 bp, Artificial Sequence
  Synthetic
cttcttgtccttcagga

SEQ ID NO: 4596 - DNA, 17 bp, Artificial Sequence
  Synthetic
gtccttcaggacggctt

SEQ ID NO: 4597 - DNA, 17 bp, Artificial Sequence
  Synthetic
caggacggcttcggcca

SEQ ID NO: 4598 - DNA, 17 bp, Artificial Sequence
  Synthetic
cgagagcttgatcttgt

SEQ ID NO: 4599 - DNA, 17 bp, Artificial Sequence
  Synthetic
ttatcttgctgcgcttc

SEQ ID NO: 4600 - DNA, 17 bp, Artificial Sequence
  Synthetic
tgctgcgcttctggaag

SEQ ID NO: 4601 - DNA, 17 bp, Artificial Sequence
  Synthetic
gcttctggaagtggctc

SEQ ID NO: 4602 - RNA, 17 nt, Artificial Sequence
  Synthetic
acacgcgaaacacgccc

SEQ ID NO: 4603 - DNA, 17 bp, Artificial Sequence
  Synthetic
cgccccggccgttcatg

SEQ ID NO: 4604 - DNA, 17 bp, Artificial Sequence
  Synthetic
tgcggccgtacccgtcc

SEQ ID NO: 4605 - DNA, 17 bp, Artificial Sequence
  Synthetic
gcggccgtacccgtcca

SEQ ID NO: 4606 - DNA, 17 bp, Artificial Sequence
  Synthetic
cggccgtacccgtccag

SEQ ID NO: 4607 - DNA, 17 bp, Artificial Sequence
  Synthetic
ggccgtacccgtccagg

SEQ ID NO: 4608 - DNA, 17 bp, Artificial Sequence
  Synthetic
gtaaatgtccgtcagct

SEQ ID NO: 4609 - DNA, 17 bp, Artificial Sequence
  Synthetic
cagcttggccagcaaga

SEQ ID NO: 4610 - DNA, 17 bp, Artificial Sequence
  Synthetic
agcttggccagcaagaa

SEQ ID NO: 4611 - DNA, 17 bp, Artificial Sequence
  Synthetic
gttgatgatgttgtacc

SEQ ID NO: 4612 - DNA, 17 bp, Artificial Sequence
  Synthetic
gtacccggtcacgaact

SEQ ID NO: 4613 - DNA, 17 bp, Artificial Sequence
  Synthetic
tacccggtcacgaactc

SEQ ID NO: 4614 - DNA, 17 bp, Artificial Sequence
  Synthetic
acccggtcacgaactcg

SEQ ID NO: 4615 - DNA, 17 bp, Artificial Sequence
  Synthetic
ggccgtactgtttcaca

SEQ ID NO: 4616 - DNA, 17 bp, Artificial Sequence
  Synthetic
gccgtactgtttcacaa

SEQ ID NO: 4617 - DNA, 17 bp, Artificial Sequence
  Synthetic
tttcacaagggtcatga

SEQ ID NO: 4618 - DNA, 17 bp, Artificial Sequence
  Synthetic
gtcgaattccagaacca

SEQ ID NO: 4619 - DNA, 17 bp, Artificial Sequence
  Synthetic
tcgaattccagaaccac

SEQ ID NO: 4620 - DNA, 17 bp, Artificial Sequence
  Synthetic
ttccagaaccacgggcg

SEQ ID NO: 4621 - DNA, 17 bp, Artificial Sequence
  Synthetic
tccagaaccacgggcgt

SEQ ID NO: 4622 - DNA, 17 bp, Artificial Sequence
  Synthetic
gaaccacgggcgtgggc

SEQ ID NO: 4623 - DNA, 17 bp, Artificial Sequence
  Synthetic
gggcgtgggcaggcccc

SEQ ID NO: 4624 - DNA, 17 bp, Artificial Sequence
  Synthetic
tggccgccagctcgttc

SEQ ID NO: 4625 - DNA, 17 bp, Artificial Sequence
  Synthetic
ccgccagctcgttcagg

SEQ ID NO: 4626 - DNA, 17 bp, Artificial Sequence
  Synthetic
cgccagctcgttcaggt

SEQ ID NO: 4627 - DNA, 17 bp, Artificial Sequence
  Synthetic
ctcgttcaggtgggatt

SEQ ID NO: 4628 - DNA, 17 bp, Artificial Sequence
  Synthetic
tcgttcaggtgggattc

SEQ ID NO: 4629 - DNA, 17 bp, Artificial Sequence
  Synthetic
cgttcaggtgggattcg

SEQ ID NO: 4630 - DNA, 17 bp, Artificial Sequence
  Synthetic
tcaggtgggattcgggg

SEQ ID NO: 4631 - DNA, 17 bp, Artificial Sequence
  Synthetic
ggattcggggaggtcgc

SEQ ID NO: 4632 - RNA, 17 nt, Artificial Sequence
  Synthetic
aggaaccgagcgaaaac

SEQ ID NO: 4633 - RNA, 17 nt, Artificial Sequence
  Synthetic
aaccgagcgaaaacagg

SEQ ID NO: 4634 - DNA, 17 bp, Artificial Sequence
  Synthetic
acaggaggacgtgctcc

SEQ ID NO: 4635 - DNA, 17 bp, Artificial Sequence
  Synthetic
caggaggacgtgctcca

SEQ ID NO: 4636 - DNA, 17 bp, Artificial Sequence
  Synthetic
gaggacgtgctccaggg

SEQ ID NO: 4637 - DNA, 17 bp, Artificial Sequence
  Synthetic
gacgtgctccagggcgg

SEQ ID NO: 4638 - DNA, 17 bp, Artificial Sequence
  Synthetic
gtgctccagggcggtgg

SEQ ID NO: 4639 - DNA, 17 bp, Artificial Sequence
  Synthetic
ccagggcggtggtggac

SEQ ID NO: 4640 - DNA, 17 bp, Artificial Sequence
  Synthetic
caggtcgtagagcagac

SEQ ID NO: 4641 - DNA, 17 bp, Artificial Sequence
  Synthetic
agagcagacaggatatc

SEQ ID NO: 4642 - DNA, 17 bp, Artificial Sequence
  Synthetic
aggatatctggatgacc

SEQ ID NO: 4643 - DNA, 17 bp, Artificial Sequence
  Synthetic
tggatgaccaggtcctc

SEQ ID NO: 4644 - DNA, 17 bp, Artificial Sequence
  Synthetic
ggatgaccaggtcctcc

SEQ ID NO: 4645 - DNA, 17 bp, Artificial Sequence
  Synthetic
caggtcctccgggtgcc

SEQ ID NO: 4646 - DNA, 17 bp, Artificial Sequence
  Synthetic
tccgggtgcccggccac

SEQ ID NO: 4647 - DNA, 17 bp, Artificial Sequence
  Synthetic
gtgcccggccaccggaa

SEQ ID NO: 4648 - DNA, 17 bp, Artificial Sequence
  Synthetic
cacatgagcttgtatgc

SEQ ID NO: 4649 - DNA, 17 bp, Artificial Sequence
  Synthetic
tgagcttgtatgccggt

SEQ ID NO: 4650 - DNA, 17 bp, Artificial Sequence
  Synthetic
gctcatgcccccctcga

SEQ ID NO: 4651 - DNA, 17 bp, Artificial Sequence
  Synthetic
tgcccccctcgatggcc

SEQ ID NO: 4652 - DNA, 17 bp, Artificial Sequence
  Synthetic
gttaaactcgacgtcgc

SEQ ID NO: 4653 - DNA, 17 bp, Artificial Sequence
  Synthetic
gtcgctggatgtcccga

SEQ ID NO: 4654 - DNA, 17 bp, Artificial Sequence
  Synthetic
gatgtcccgaaggccat

SEQ ID NO: 4655 - DNA, 17 bp, Artificial Sequence
  Synthetic
atgtcccgaaggccatc

SEQ ID NO: 4656 - DNA, 17 bp, Artificial Sequence
  Synthetic
tgtcccgaaggccatcg

SEQ ID NO: 4657 - DNA, 17 bp, Artificial Sequence
  Synthetic
aaggccatcggggccgc

SEQ ID NO: 4658 - DNA, 17 bp, Artificial Sequence
  Synthetic
ccatcggggccgccggc

SEQ ID NO: 4659 - DNA, 17 bp, Artificial Sequence
  Synthetic
catcggggccgccggct

SEQ ID NO: 4660 - DNA, 17 bp, Artificial Sequence
  Synthetic
gggctagcgtgttgttc

SEQ ID NO: 4661 - DNA, 17 bp, Artificial Sequence
  Synthetic
agcgtgttgttccggcc

SEQ ID NO: 4662 - DNA, 17 bp, Artificial Sequence
  Synthetic
tccggcccggtttgaga

SEQ ID NO: 4663 - DNA, 17 bp, Artificial Sequence
  Synthetic
gagacggtaccagccga

SEQ ID NO: 4664 - DNA, 17 bp, Artificial Sequence
  Synthetic
gccgaaggtgacgaacc

SEQ ID NO: 4665 - DNA, 17 bp, Artificial Sequence
  Synthetic
ccgaaggtgacgaaccc

SEQ ID NO: 4666 - DNA, 17 bp, Artificial Sequence
  Synthetic
cgaaggtgacgaacccg

SEQ ID NO: 4667 - DNA, 17 bp, Artificial Sequence
  Synthetic
cgaacccggggttgtcc

SEQ ID NO: 4668 - DNA, 17 bp, Artificial Sequence
  Synthetic
ggttgtccaggatgaac

SEQ ID NO: 4669 - DNA, 17 bp, Artificial Sequence
  Synthetic
gttgtccaggatgaacc

SEQ ID NO: 4670 - DNA, 17 bp, Artificial Sequence
  Synthetic
gtccaggatgaaccggg

SEQ ID NO: 4671 - DNA, 17 bp, Artificial Sequence
  Synthetic
caggatgaaccgggtgg

SEQ ID NO: 4672 - DNA, 17 bp, Artificial Sequence
  Synthetic
accctcgtacttcttga

SEQ ID NO: 4673 - DNA, 17 bp, Artificial Sequence
  Synthetic
tcgtacttcttgatggc

SEQ ID NO: 4674 - DNA, 17 bp, Artificial Sequence
  Synthetic
cgtacttcttgatggcc

SEQ ID NO: 4675 - DNA, 17 bp, Artificial Sequence
  Synthetic
ggcagaagttgtcgcac

SEQ ID NO: 4676 - DNA, 17 bp, Artificial Sequence
  Synthetic
acagcacacgcccgctt

SEQ ID NO: 4677 - DNA, 17 bp, Artificial Sequence
  Synthetic
cgcttcggacgtagacg

SEQ ID NO: 4678 - DNA, 17 bp, Artificial Sequence
  Synthetic
gacgcggtaaaacagag

SEQ ID NO: 4679 - DNA, 17 bp, Artificial Sequence
  Synthetic
acgcggtaaaacagagc

SEQ ID NO: 4680 - DNA, 17 bp, Artificial Sequence
  Synthetic
cgcggtaaaacagagcg

SEQ ID NO: 4681 - DNA, 17 bp, Artificial Sequence
  Synthetic
ctcgtagtagtacacgt

SEQ ID NO: 4682 - DNA, 17 bp, Artificial Sequence
  Synthetic
ccacctccgcctcgaag

SEQ ID NO: 4683 - DNA, 17 bp, Artificial Sequence
  Synthetic
cgcctcgaagtggtccg

SEQ ID NO: 4684 - DNA, 17 bp, Artificial Sequence
  Synthetic
ggtccgcggagatgccg

SEQ ID NO: 4685 - RNA, 17 nt, Artificial Sequence
  Synthetic
ccgcggaacgacgcgcc

SEQ ID NO: 4686 - RNA, 17 nt, Artificial Sequence
  Synthetic
cgcggaacgacgcgccc

SEQ ID NO: 4687 - RNA, 17 nt, Artificial Sequence
  Synthetic
gcggaacgacgcgcccg

SEQ ID NO: 4688 - DNA, 17 bp, Artificial Sequence
  Synthetic
cgcccggggactcgcgc

SEQ ID NO: 4689 - DNA, 17 bp, Artificial Sequence
  Synthetic
gcccggggactcgcgca

SEQ ID NO: 4690 - DNA, 17 bp, Artificial Sequence
  Synthetic
ggactcgcgcagggccg

SEQ ID NO: 4691 - DNA, 17 bp, Artificial Sequence
  Synthetic
cgctcgcagagatctcg

SEQ ID NO: 4692 - DNA, 17 bp, Artificial Sequence
  Synthetic
gctcgcagagatctcgt

SEQ ID NO: 4693 - DNA, 17 bp, Artificial Sequence
  Synthetic
ctcgcagagatctcgtg

SEQ ID NO: 4694 - DNA, 17 bp, Artificial Sequence
  Synthetic
agagatctcgtggggcg

SEQ ID NO: 4695 - DNA, 17 bp, Artificial Sequence
  Synthetic
gtggggcgcggcattgt

SEQ ID NO: 4696 - DNA, 17 bp, Artificial Sequence
  Synthetic
cgtgccgtaaacgtgaa

SEQ ID NO: 4697 - DNA, 17 bp, Artificial Sequence
  Synthetic
aaacgtgaacggccacc

SEQ ID NO: 4698 - DNA, 17 bp, Artificial Sequence
  Synthetic
cgtgaacggccacccgg

SEQ ID NO: 4699 - DNA, 17 bp, Artificial Sequence
  Synthetic
gccacccggtggccttc

SEQ ID NO: 4700 - DNA, 17 bp, Artificial Sequence
  Synthetic
ggtggccttccggagtc

SEQ ID NO: 4701 - DNA, 17 bp, Artificial Sequence
  Synthetic
cttccggagtcaggccc

SEQ ID NO: 4702 - DNA, 17 bp, Artificial Sequence
  Synthetic
gcccaggagcgtgatga

SEQ ID NO: 4703 - DNA, 17 bp, Artificial Sequence
  Synthetic
gtgatgacggtccccgt

SEQ ID NO: 4704 - DNA, 17 bp, Artificial Sequence
  Synthetic
ggtccccgtcggtgtga

SEQ ID NO: 4705 - DNA, 17 bp, Artificial Sequence
  Synthetic
cgtccataaaccgcgcg

SEQ ID NO: 4706 - DNA, 17 bp, Artificial Sequence
  Synthetic
gtccataaaccgcgcgt

SEQ ID NO: 4707 - DNA, 17 bp, Artificial Sequence
  Synthetic
tccataaaccgcgcgtg

SEQ ID NO: 4708 - DNA, 17 bp, Artificial Sequence
  Synthetic
ccataaaccgcgcgtgg

SEQ ID NO: 4709 - RNA, 20 nt, Artificial Sequence
  Synthetic
uggcggcggcccgcuguccc

SEQ ID NO: 4710 - RNA, 20 nt, Artificial Sequence
  Synthetic
cggcggcccgcugucccccg

SEQ ID NO: 4711 - RNA, 20 nt, Artificial Sequence
  Synthetic
cccggaggaaagucggcggc

SEQ ID NO: 4712 - RNA, 20 nt, Artificial Sequence
  Synthetic
gucggcggccagggcggcgu

SEQ ID NO: 4713 - RNA, 20 nt, Artificial Sequence
  Synthetic
uuuugcgcccgccggcccuc

SEQ ID NO: 4714 - RNA, 20 nt, Artificial Sequence
  Synthetic
gccggcccucgcggagccag

SEQ ID NO: 4715 - RNA, 20 nt, Artificial Sequence
  Synthetic
gccggggacccccgccuugu

SEQ ID NO: 4716 - RNA, 20 nt, Artificial Sequence
  Synthetic
caaccccuaccucgccccag

SEQ ID NO: 4717 - RNA, 20 nt, Artificial Sequence
  Synthetic
ucgccccagucgggacgcaa

SEQ ID NO: 4718 - RNA, 20 nt, Artificial Sequence
  Synthetic
cgggacgcaacagaagccga

SEQ ID NO: 4719 - RNA, 20 nt, Artificial Sequence
  Synthetic
ccagcgccauacguacuaua

SEQ ID NO: 4720 - RNA, 20 nt, Artificial Sequence
  Synthetic
uacguacuauagcgaaugcg

SEQ ID NO: 4721 - RNA, 20 nt, Artificial Sequence
  Synthetic
gaauuucgauucaucgcccc

SEQ ID NO: 4722 - RNA, 20 nt, Artificial Sequence
  Synthetic
gauucaucgccccgcgggug

SEQ ID NO: 4723 - RNA, 20 nt, Artificial Sequence
  Synthetic
caucgccccgcgggugcugg

SEQ ID NO: 4724 - RNA, 20 nt, Artificial Sequence
  Synthetic
ucgccccgcgggugcuggac

SEQ ID NO: 4725 - RNA, 20 nt, Artificial Sequence
  Synthetic
ugcuggacgaggaugccccc

SEQ ID NO: 4726 - RNA, 20 nt, Artificial Sequence
  Synthetic
uggacgaggaugcccccccg

SEQ ID NO: 4727 - RNA, 20 nt, Artificial Sequence
  Synthetic
ugcccccccggagaagcgcg

SEQ ID NO: 4728 - RNA, 20 nt, Artificial Sequence
  Synthetic
gcgcgcccccaagguguacu

SEQ ID NO: 4729 - RNA, 20 nt, Artificial Sequence
  Synthetic
caagguguacugcggggggg

SEQ ID NO: 4730 - RNA, 20 nt, Artificial Sequence
  Synthetic
cgagcgcgacguccuccgcg

SEQ ID NO: 4731 - RNA, 20 nt, Artificial Sequence
  Synthetic
gcgacguccuccgcgucggg

SEQ ID NO: 4732 - RNA, 20 nt, Artificial Sequence
  Synthetic
uggccgcggcgcucgcgccu

SEQ ID NO: 4733 - RNA, 20 nt, Artificial Sequence
  Synthetic
gcucgcgccuguggggcggc

SEQ ID NO: 4734 - RNA, 20 nt, Artificial Sequence
  Synthetic
gcggcguggaccacgccccg

SEQ ID NO: 4735 - RNA, 20 nt, Artificial Sequence
  Synthetic
ucuuucacguguacgacauc

SEQ ID NO: 4736 - RNA, 20 nt, Artificial Sequence
  Synthetic
uucacguguacgacauccug

SEQ ID NO: 4737 - RNA, 20 nt, Artificial Sequence
  Synthetic
uguacgacauccuggagaac

SEQ ID NO: 4738 - RNA, 17 nt, Artificial Sequence
  Synthetic
cggcggcccgcuguccc

SEQ ID NO: 4739 - RNA, 17 nt, Artificial Sequence
  Synthetic
cggcccgcugucccccg

SEQ ID NO: 4740 - RNA, 17 nt, Artificial Sequence
  Synthetic
ggaggaaagucggcggc

SEQ ID NO: 4741 - RNA, 17 nt, Artificial Sequence
  Synthetic
ggcggccagggcggcgu

SEQ ID NO: 4742 - RNA, 17 nt, Artificial Sequence
  Synthetic
ugcgcccgccggcccuc

SEQ ID NO: 4743 - RNA, 17 nt, Artificial Sequence
  Synthetic
ggcccucgcggagccag

SEQ ID NO: 4744 - RNA, 17 nt, Artificial Sequence
  Synthetic
ggggacccccgccuugu

SEQ ID NO: 4745 - RNA, 17 nt, Artificial Sequence
  Synthetic
ccccuaccucgccccag

SEQ ID NO: 4746 - RNA, 17 nt, Artificial Sequence
  Synthetic
ccccagucgggacgcaa

SEQ ID NO: 4747 - RNA, 17 nt, Artificial Sequence
  Synthetic
gacgcaacagaagccga

SEQ ID NO: 4748 - RNA, 17 nt, Artificial Sequence
  Synthetic
gcgccauacguacuaua

SEQ ID NO: 4749 - RNA, 17 nt, Artificial Sequence
  Synthetic
guacuauagcgaaugcg

SEQ ID NO: 4750 - RNA, 17 nt, Artificial Sequence
  Synthetic
uuucgauucaucgcccc

SEQ ID NO: 4751 - RNA, 17 nt, Artificial Sequence
  Synthetic
ucaucgccccgcgggug

SEQ ID NO: 4752 - RNA, 17 nt, Artificial Sequence
  Synthetic
cgccccgcgggugcugg

SEQ ID NO: 4753 - RNA, 17 nt, Artificial Sequence
  Synthetic
ccccgcgggugcuggac

SEQ ID NO: 4754 - RNA, 17 nt, Artificial Sequence
  Synthetic
uggacgaggaugccccc

SEQ ID NO: 4755 - RNA, 17 nt, Artificial Sequence
  Synthetic
acgaggaugcccccccg

SEQ ID NO: 4756 - RNA, 17 nt, Artificial Sequence
  Synthetic
ccccccggagaagcgcg

SEQ ID NO: 4757 - RNA, 17 nt, Artificial Sequence
  Synthetic
cgcccccaagguguacu

SEQ ID NO: 4758 - RNA, 17 nt, Artificial Sequence
  Synthetic
gguguacugcggggggg

SEQ ID NO: 4759 - RNA, 17 nt, Artificial Sequence
  Synthetic
gcgcgacguccuccgcg

SEQ ID NO: 4760 - RNA, 17 nt, Artificial Sequence
  Synthetic
acguccuccgcgucggg

SEQ ID NO: 4761 - RNA, 17 nt, Artificial Sequence
  Synthetic
ccgcggcgcucgcgccu

SEQ ID NO: 4762 - RNA, 17 nt, Artificial Sequence
  Synthetic
cgcgccuguggggcggc

SEQ ID NO: 4763 - RNA, 17 nt, Artificial Sequence
  Synthetic
gcguggaccacgccccg

SEQ ID NO: 4764 - RNA, 17 nt, Artificial Sequence
  Synthetic
uucacguguacgacauc

SEQ ID NO: 4765 - RNA, 17 nt, Artificial Sequence
  Synthetic
acguguacgacauccug

SEQ ID NO: 4766 - RNA, 17 nt, Artificial Sequence
  Synthetic
acgacauccuggagaac

SEQ ID NO: 4767 - RNA, 20 nt, Artificial Sequence
  Synthetic
uacgcgugcuccacguucuc

SEQ ID NO: 4768 - RNA, 20 nt, Artificial Sequence
  Synthetic
uucuccaggaugucguacac

SEQ ID NO: 4769 - RNA, 20 nt, Artificial Sequence
  Synthetic
acacgugaaagacggugacg

SEQ ID NO: 4770 - RNA, 20 nt, Artificial Sequence
  Synthetic
gaaagacggugacggugggg

SEQ ID NO: 4771 - RNA, 20 nt, Artificial Sequence
  Synthetic
gacggugggguugaaccccg

SEQ ID NO: 4772 - RNA, 20 nt, Artificial Sequence
  Synthetic
guccacgccgccccacaggc

SEQ ID NO: 4773 - RNA, 20 nt, Artificial Sequence
  Synthetic
acaggcgcgagcgccgcggc

SEQ ID NO: 4774 - RNA, 20 nt, Artificial Sequence
  Synthetic
cagaagccgcccgacccgac

SEQ ID NO: 4775 - RNA, 20 nt, Artificial Sequence
  Synthetic
aagccgcccgacccgacgcg

SEQ ID NO: 4776 - RNA, 20 nt, Artificial Sequence
  Synthetic
cgucccccccgcaguacacc

SEQ ID NO: 4777 - RNA, 20 nt, Artificial Sequence
  Synthetic
aguacaccuugggggcgcgc

SEQ ID NO: 4778 - RNA, 20 nt, Artificial Sequence
  Synthetic
gugcaccccggcgcgcuucu

SEQ ID NO: 4779 - RNA, 20 nt, Artificial Sequence
  Synthetic
ggcauccucguccagcaccc

SEQ ID NO: 4780 - RNA, 20 nt, Artificial Sequence
  Synthetic
cguccagcacccgcggggcg

SEQ ID NO: 4781 - RNA, 20 nt, Artificial Sequence
  Synthetic
agcacccgcggggcgaugaa

SEQ ID NO: 4782 - RNA, 20 nt, Artificial Sequence
  Synthetic
ucgcuauaguacguauggcg

SEQ ID NO: 4783 - RNA, 20 nt, Artificial Sequence
  Synthetic
cggcuucuguugcgucccga

SEQ ID NO: 4784 - RNA, 20 nt, Artificial Sequence
  Synthetic
ucuguugcgucccgacuggg

SEQ ID NO: 4785 - RNA, 20 nt, Artificial Sequence
  Synthetic
gcgucccgacuggggcgagg

SEQ ID NO: 4786 - RNA, 20 nt, Artificial Sequence
  Synthetic
aaaguuuugccucaaacaag

SEQ ID NO: 4787 - RNA, 20 nt, Artificial Sequence
  Synthetic
ggggguccccggcuggcucc

SEQ ID NO: 4788 - RNA, 20 nt, Artificial Sequence
  Synthetic
ggguccccggcuggcuccgc

SEQ ID NO: 4789 - RNA, 20 nt, Artificial Sequence
  Synthetic
ggcuggcuccgcgagggccg

SEQ ID NO: 4790 - RNA, 20 nt, Artificial Sequence
  Synthetic
ggccggcgggcgcaaaaaac

SEQ ID NO: 4791 - RNA, 20 nt, Artificial Sequence
  Synthetic
cccuggccgccgacuuuccu

SEQ ID NO: 4792 - RNA, 20 nt, Artificial Sequence
  Synthetic
cgacuuuccuccgggggaca

SEQ ID NO: 4793 - RNA, 20 nt, Artificial Sequence
  Synthetic
gggacagcgggccgccgcca

SEQ ID NO: 4794 - RNA, 17 nt, Artificial Sequence
  Synthetic
gcgugcuccacguucuc

SEQ ID NO: 4795 - RNA, 17 nt, Artificial Sequence
  Synthetic
uccaggaugucguacac

SEQ ID NO: 4796 - RNA, 17 nt, Artificial Sequence
  Synthetic
cgugaaagacggugacg

SEQ ID NO: 4797 - RNA, 17 nt, Artificial Sequence
  Synthetic
agacggugacggugggg

SEQ ID NO: 4798 - RNA, 17 nt, Artificial Sequence
  Synthetic
ggugggguugaaccccg

SEQ ID NO: 4799 - RNA, 17 nt, Artificial Sequence
  Synthetic
cacgccgccccacaggc

SEQ ID NO: 4800 - RNA, 17 nt, Artificial Sequence
  Synthetic
ggcgcgagcgccgcggc

SEQ ID NO: 4801 - RNA, 17 nt, Artificial Sequence
  Synthetic
aagccgcccgacccgac

SEQ ID NO: 4802 - RNA, 17 nt, Artificial Sequence
  Synthetic
ccgcccgacccgacgcg

SEQ ID NO: 4803 - RNA, 17 nt, Artificial Sequence
  Synthetic
cccccccgcaguacacc

SEQ ID NO: 4804 - RNA, 17 nt, Artificial Sequence
  Synthetic
acaccuugggggcgcgc

SEQ ID NO: 4805 - RNA, 17 nt, Artificial Sequence
  Synthetic
caccccggcgcgcuucu

SEQ ID NO: 4806 - RNA, 17 nt, Artificial Sequence
  Synthetic
auccucguccagcaccc

SEQ ID NO: 4807 - RNA, 17 nt, Artificial Sequence
  Synthetic
ccagcacccgcggggcg

SEQ ID NO: 4808 - RNA, 17 nt, Artificial Sequence
  Synthetic
acccgcggggcgaugaa

SEQ ID NO: 4809 - RNA, 17 nt, Artificial Sequence
  Synthetic
cuauaguacguauggcg

SEQ ID NO: 4810 - RNA, 17 nt, Artificial Sequence
  Synthetic
cuucuguugcgucccga

SEQ ID NO: 4811 - RNA, 17 nt, Artificial Sequence
  Synthetic
guugcgucccgacuggg

SEQ ID NO: 4812 - RNA, 17 nt, Artificial Sequence
  Synthetic
ucccgacuggggcgagg

SEQ ID NO: 4813 - RNA, 17 nt, Artificial Sequence
  Synthetic
guuuugccucaaacaag

SEQ ID NO: 4814 - RNA, 17 nt, Artificial Sequence
  Synthetic
gguccccggcuggcucc

SEQ ID NO: 4815 - RNA, 17 nt, Artificial Sequence
  Synthetic
uccccggcuggcuccgc

SEQ ID NO: 4816 - RNA, 17 nt, Artificial Sequence
  Synthetic
uggcuccgcgagggccg

SEQ ID NO: 4817 - RNA, 17 nt, Artificial Sequence
  Synthetic
cggcgggcgcaaaaaac

SEQ ID NO: 4818 - RNA, 17 nt, Artificial Sequence
  Synthetic
uggccgccgacuuuccu

SEQ ID NO: 4819 - RNA, 17 nt, Artificial Sequence
  Synthetic
cuuuccuccgggggaca

SEQ ID NO: 4820 - RNA, 17 nt, Artificial Sequence
  Synthetic
acagcgggccgccgcca

SEQ ID NO: 4821 - RNA, 20 nt, Artificial Sequence
  Synthetic
uuauggacgccaucacaccg

SEQ ID NO: 4822 - RNA, 20 nt, Artificial Sequence
  Synthetic
uauggacgccaucacaccga

SEQ ID NO: 4823 - RNA, 20 nt, Artificial Sequence
  Synthetic
auggacgccaucacaccgac

SEQ ID NO: 4824 - RNA, 20 nt, Artificial Sequence
  Synthetic
cggggaccgucaucacgcuc

SEQ ID NO: 4825 - RNA, 20 nt, Artificial Sequence
  Synthetic
ucacgcuccugggccugacu

SEQ ID NO: 4826 - RNA, 20 nt, Artificial Sequence
  Synthetic
cacgcuccugggccugacuc

SEQ ID NO: 4827 - RNA, 20 nt, Artificial Sequence
  Synthetic
ggccugacuccggaaggcca

SEQ ID NO: 4828 - RNA, 20 nt, Artificial Sequence
  Synthetic
gcacgcggcaguacuuuuac

SEQ ID NO: 4829 - RNA, 20 nt, Artificial Sequence
  Synthetic
ggcaguacuuuuacaugaac

SEQ ID NO: 4830 - RNA, 20 nt, Artificial Sequence
  Synthetic
gcaguacuuuuacaugaaca

SEQ ID NO: 4831 - RNA, 20 nt, Artificial Sequence
  Synthetic
aguacuuuuacaugaacaag

SEQ ID NO: 4832 - RNA, 20 nt, Artificial Sequence
  Synthetic
guacuuuuacaugaacaagg

SEQ ID NO: 4833 - RNA, 20 nt, Artificial Sequence
  Synthetic
caccuacaaugccgcgcccc

SEQ ID NO: 4834 - RNA, 20 nt, Artificial Sequence
  Synthetic
ccgcgccccacgagaucucu

SEQ ID NO: 4835 - RNA, 20 nt, Artificial Sequence
  Synthetic
gcgcauggccgcggcccugc

SEQ ID NO: 4836 - RNA, 20 nt, Artificial Sequence
  Synthetic
ccgcggcccugcgcgagucc

SEQ ID NO: 4837 - RNA, 20 nt, Artificial Sequence
  Synthetic
cgucguuccgcggcaucucc

SEQ ID NO: 4838 - RNA, 20 nt, Artificial Sequence
  Synthetic
cggcaucuccgcggaccacu

SEQ ID NO: 4839 - RNA, 20 nt, Artificial Sequence
  Synthetic
ucuccgcggaccacuucgag

SEQ ID NO: 4840 - RNA, 20 nt, Artificial Sequence
  Synthetic
cuccgcggaccacuucgagg

SEQ ID NO: 4841 - RNA, 20 nt, Artificial Sequence
  Synthetic
accacuucgaggcggaggug

SEQ ID NO: 4842 - RNA, 20 nt, Artificial Sequence
  Synthetic
ccacuucgaggcggaggugg

SEQ ID NO: 4843 - RNA, 20 nt, Artificial Sequence
  Synthetic
gcgcaccgacguguacuacu

SEQ ID NO: 4844 - RNA, 20 nt, Artificial Sequence
  Synthetic
cuguuuuaccgcgucuacgu

SEQ ID NO: 4845 - RNA, 20 nt, Artificial Sequence
  Synthetic
uuaccgcgucuacguccgaa

SEQ ID NO: 4846 - RNA, 20 nt, Artificial Sequence
  Synthetic
acaacuucugcccggccauc

SEQ ID NO: 4847 - RNA, 20 nt, Artificial Sequence
  Synthetic
cugcccggccaucaagaagu

SEQ ID NO: 4848 - RNA, 20 nt, Artificial Sequence
  Synthetic
gcccggccaucaagaaguac

SEQ ID NO: 4849 - RNA, 20 nt, Artificial Sequence
  Synthetic
ggccaucaagaaguacgagg

SEQ ID NO: 4850 - RNA, 20 nt, Artificial Sequence
  Synthetic
gccaucaagaaguacgaggg

SEQ ID NO: 4851 - RNA, 20 nt, Artificial Sequence
  Synthetic
acgccaccacccgguucauc

SEQ ID NO: 4852 - RNA, 20 nt, Artificial Sequence
  Synthetic
ccgguucauccuggacaacc

SEQ ID NO: 4853 - RNA, 20 nt, Artificial Sequence
  Synthetic
ucggcugguaccgucucaaa

SEQ ID NO: 4854 - RNA, 20 nt, Artificial Sequence
  Synthetic
ugguaccgucucaaaccggg

SEQ ID NO: 4855 - RNA, 20 nt, Artificial Sequence
  Synthetic
gguaccgucucaaaccgggc

SEQ ID NO: 4856 - RNA, 20 nt, Artificial Sequence
  Synthetic
gccggcggccccgauggccu

SEQ ID NO: 4857 - RNA, 20 nt, Artificial Sequence
  Synthetic
ccggcggccccgauggccuu

SEQ ID NO: 4858 - RNA, 20 nt, Artificial Sequence
  Synthetic
cuucgggacauccagcgacg

SEQ ID NO: 4859 - RNA, 20 nt, Artificial Sequence
  Synthetic
acgucgaguuuaacuguacg

SEQ ID NO: 4860 - RNA, 20 nt, Artificial Sequence
  Synthetic
uacggcggacaaccuggcca

SEQ ID NO: 4861 - RNA, 20 nt, Artificial Sequence
  Synthetic
cggcggacaaccuggccauc

SEQ ID NO: 4862 - RNA, 20 nt, Artificial Sequence
  Synthetic
ggcggacaaccuggccaucg

SEQ ID NO: 4863 - RNA, 20 nt, Artificial Sequence
  Synthetic
gcggacaaccuggccaucga

SEQ ID NO: 4864 - RNA, 20 nt, Artificial Sequence
  Synthetic
cggacaaccuggccaucgag

SEQ ID NO: 4865 - RNA, 20 nt, Artificial Sequence
  Synthetic
accuggccaucgaggggggc

SEQ ID NO: 4866 - RNA, 20 nt, Artificial Sequence
  Synthetic
caagcucaugugcuucgaua

SEQ ID NO: 4867 - RNA, 20 nt, Artificial Sequence
  Synthetic
gcuucgauaucgaaugcaag

SEQ ID NO: 4868 - RNA, 20 nt, Artificial Sequence
  Synthetic
cuucgauaucgaaugcaagg

SEQ ID NO: 4869 - RNA, 20 nt, Artificial Sequence
  Synthetic
uucgauaucgaaugcaaggc

SEQ ID NO: 4870 - RNA, 20 nt, Artificial Sequence
  Synthetic
ucgauaucgaaugcaaggcg

SEQ ID NO: 4871 - RNA, 20 nt, Artificial Sequence
  Synthetic
cgauaucgaaugcaaggcgg

SEQ ID NO: 4872 - RNA, 20 nt, Artificial Sequence
  Synthetic
gauaucgaaugcaaggcggg

SEQ ID NO: 4873 - RNA, 20 nt, Artificial Sequence
  Synthetic
auaucgaaugcaaggcgggg

SEQ ID NO: 4874 - RNA, 20 nt, Artificial Sequence
  Synthetic
uaucgaaugcaaggcggggg

SEQ ID NO: 4875 - RNA, 20 nt, Artificial Sequence
  Synthetic
ucgaaugcaaggcggggggg

SEQ ID NO: 4876 - RNA, 20 nt, Artificial Sequence
  Synthetic
augcaaggcggggggggagg

SEQ ID NO: 4877 - RNA, 20 nt, Artificial Sequence
  Synthetic
cgagcuggccuuuccggugg

SEQ ID NO: 4878 - RNA, 20 nt, Artificial Sequence
  Synthetic
ccuuuccgguggccgggcac

SEQ ID NO: 4879 - RNA, 20 nt, Artificial Sequence
  Synthetic
cuuuccgguggccgggcacc

SEQ ID NO: 4880 - RNA, 20 nt, Artificial Sequence
  Synthetic
uuccgguggccgggcacccg

SEQ ID NO: 4881 - RNA, 20 nt, Artificial Sequence
  Synthetic
acgaccuguccaccaccgcc

SEQ ID NO: 4882 - RNA, 20 nt, Artificial Sequence
  Synthetic
cgaccuguccaccaccgccc

SEQ ID NO: 4883 - RNA, 20 nt, Artificial Sequence
  Synthetic
gcucgguuccugcgaccucc

SEQ ID NO: 4884 - RNA, 20 nt, Artificial Sequence
  Synthetic
gcgaccuccccgaaucccac

SEQ ID NO: 4885 - RNA, 20 nt, Artificial Sequence
  Synthetic
ccuccccgaaucccaccuga

SEQ ID NO: 4886 - RNA, 20 nt, Artificial Sequence
  Synthetic
caccugaacgagcuggcggc

SEQ ID NO: 4887 - RNA, 20 nt, Artificial Sequence
  Synthetic
accugaacgagcuggcggcc

SEQ ID NO: 4888 - RNA, 20 nt, Artificial Sequence
  Synthetic
gccugcccacgcccgugguu

SEQ ID NO: 4889 - RNA, 20 nt, Artificial Sequence
  Synthetic
ccugcccacgcccgugguuc

SEQ ID NO: 4890 - RNA, 20 nt, Artificial Sequence
  Synthetic
cgugguucuggaauucgaca

SEQ ID NO: 4891 - RNA, 20 nt, Artificial Sequence
  Synthetic
ucuggaauucgacagcgaau

SEQ ID NO: 4892 - RNA, 20 nt, Artificial Sequence
  Synthetic
uguuggccuucaugacccuu

SEQ ID NO: 4893 - RNA, 20 nt, Artificial Sequence
  Synthetic
ccuugugaaacaguacggcc

SEQ ID NO: 4894 - RNA, 20 nt, Artificial Sequence
  Synthetic
guacggccccgaguucguga

SEQ ID NO: 4895 - RNA, 20 nt, Artificial Sequence
  Synthetic
ccuucuugcuggccaagcug

SEQ ID NO: 4896 - RNA, 20 nt, Artificial Sequence
  Synthetic
cggacauuuacaaggucccc

SEQ ID NO: 4897 - RNA, 20 nt, Artificial Sequence
  Synthetic
cauuuacaaggucccccugg

SEQ ID NO: 4898 - RNA, 20 nt, Artificial Sequence
  Synthetic
cccuggacggguacggccgc

SEQ ID NO: 4899 - RNA, 20 nt, Artificial Sequence
  Synthetic
ggguacggccgcaugaacgg

SEQ ID NO: 4900 - RNA, 20 nt, Artificial Sequence
  Synthetic
gguacggccgcaugaacggc

SEQ ID NO: 4901 - RNA, 20 nt, Artificial Sequence
  Synthetic
ggccggggcguguuucgcgu

SEQ ID NO: 4902 - RNA, 20 nt, Artificial Sequence
  Synthetic
gccggggcguguuucgcgug

SEQ ID NO: 4903 - RNA, 20 nt, Artificial Sequence
  Synthetic
uucgcgugugggacauaggc

SEQ ID NO: 4904 - RNA, 20 nt, Artificial Sequence
  Synthetic
acauaggccagagccacuuc

SEQ ID NO: 4905 - RNA, 20 nt, Artificial Sequence
  Synthetic
agaagcgcagcaagauaaag

SEQ ID NO: 4906 - RNA, 20 nt, Artificial Sequence
  Synthetic
agauaaaggugaacggcaug

SEQ ID NO: 4907 - RNA, 20 nt, Artificial Sequence
  Synthetic
cauggugaacaucgacaugu

SEQ ID NO: 4908 - RNA, 20 nt, Artificial Sequence
  Synthetic
auggugaacaucgacaugua

SEQ ID NO: 4909 - RNA, 20 nt, Artificial Sequence
  Synthetic
uaaccgacaagaucaagcuc

SEQ ID NO: 4910 - RNA, 20 nt, Artificial Sequence
  Synthetic
cuacaagcucaacgccgugg

SEQ ID NO: 4911 - RNA, 20 nt, Artificial Sequence
  Synthetic
acgccguggccgaagccguc

SEQ ID NO: 4912 - RNA, 20 nt, Artificial Sequence
  Synthetic
ccguggccgaagccguccug

SEQ ID NO: 4913 - RNA, 20 nt, Artificial Sequence
  Synthetic
ccgaagccguccugaaggac

SEQ ID NO: 4914 - RNA, 20 nt, Artificial Sequence
  Synthetic
aagccguccugaaggacaag

SEQ ID NO: 4915 - RNA, 20 nt, Artificial Sequence
  Synthetic
ccguccugaaggacaagaag

SEQ ID NO: 4916 - RNA, 20 nt, Artificial Sequence
  Synthetic
ugaaggacaagaagaaggac

(The sequence listing continues in the following parts.)
